United States Patent Application Publication US 2015/0232836 A1 - sequence listing, part 15

SEQ ID NO: 492211 - DNA, 15 bp, Homo sapiens
tggcccagagcaagc

SEQ ID NO: 492212 - DNA, 15 bp, Homo sapiens
gtggcccagagcaag

SEQ ID NO: 492213 - DNA, 15 bp, Homo sapiens
ggtggcccagagcaa

SEQ ID NO: 492214 - DNA, 15 bp, Homo sapiens
aggtggcccagagca

SEQ ID NO: 492215 - DNA, 15 bp, Homo sapiens
caggtggcccagagc

SEQ ID NO: 492216 - DNA, 15 bp, Homo sapiens
ccaggtggcccagag

SEQ ID NO: 492217 - DNA, 15 bp, Homo sapiens
gccaggtggcccaga

SEQ ID NO: 492218 - DNA, 15 bp, Homo sapiens
agccaggtggcccag

SEQ ID NO: 492219 - DNA, 15 bp, Homo sapiens
cagccaggtggccca

SEQ ID NO: 492220 - DNA, 15 bp, Homo sapiens
ccagccaggtggccc

SEQ ID NO: 492221 - DNA, 15 bp, Homo sapiens
cccagccaggtggcc

SEQ ID NO: 492222 - DNA, 15 bp, Homo sapiens
tcccagccaggtggc

SEQ ID NO: 492223 - DNA, 15 bp, Homo sapiens
ctcccagccaggtgg

SEQ ID NO: 492224 - DNA, 15 bp, Homo sapiens
cctcccagccaggtg

SEQ ID NO: 492225 - DNA, 15 bp, Homo sapiens
acctcccagccaggt

SEQ ID NO: 492226 - DNA, 15 bp, Homo sapiens
cacctcccagccagg

SEQ ID NO: 492227 - DNA, 15 bp, Homo sapiens
ccacctcccagccag

SEQ ID NO: 492228 - DNA, 15 bp, Homo sapiens
accacctcccagcca

SEQ ID NO: 492229 - DNA, 15 bp, Homo sapiens
caccacctcccagcc

SEQ ID NO: 492230 - DNA, 15 bp, Homo sapiens
ccaccacctcccagc

SEQ ID NO: 492231 - DNA, 15 bp, Homo sapiens
tccaccacctcccag

SEQ ID NO: 492232 - DNA, 15 bp, Homo sapiens
ctccaccacctccca

SEQ ID NO: 492233 - DNA, 15 bp, Homo sapiens
actccaccacctccc

SEQ ID NO: 492234 - DNA, 15 bp, Homo sapiens
gactccaccacctcc

SEQ ID NO: 492235 - DNA, 15 bp, Homo sapiens
ggactccaccacctc

SEQ ID NO: 492236 - DNA, 15 bp, Homo sapiens
cggactccaccacct

SEQ ID NO: 492237 - DNA, 15 bp, Homo sapiens
ccggactccaccacc

SEQ ID NO: 492238 - DNA, 15 bp, Homo sapiens
tccggactccaccac

SEQ ID NO: 492239 - DNA, 15 bp, Homo sapiens
atccggactccacca

SEQ ID NO: 492240 - DNA, 15 bp, Homo sapiens
aatccggactccacc

SEQ ID NO: 492241 - DNA, 15 bp, Homo sapiens
caatccggactccac

SEQ ID NO: 492242 - DNA, 15 bp, Homo sapiens
ccaatccggactcca

SEQ ID NO: 492243 - DNA, 15 bp, Homo sapiens
tccaatccggactcc

SEQ ID NO: 492244 - DNA, 15 bp, Homo sapiens
ttccaatccggactc

SEQ ID NO: 492245 - DNA, 15 bp, Homo sapiens
gttccaatccggact

SEQ ID NO: 492246 - DNA, 15 bp, Homo sapiens
ggttccaatccggac

SEQ ID NO: 492247 - DNA, 15 bp, Homo sapiens
aggttccaatccgga

SEQ ID NO: 492248 - DNA, 15 bp, Homo sapiens
caggttccaatccgg

SEQ ID NO: 492249 - DNA, 15 bp, Homo sapiens
ccaggttccaatccg

SEQ ID NO: 492250 - DNA, 15 bp, Homo sapiens
cccaggttccaatcc

SEQ ID NO: 492251 - DNA, 15 bp, Homo sapiens
tcccaggttccaatc

SEQ ID NO: 492252 - DNA, 15 bp, Homo sapiens
agatcccaggttcca

SEQ ID NO: 492253 - DNA, 15 bp, Homo sapiens
aagatcccaggttcc

SEQ ID NO: 492254 - DNA, 15 bp, Homo sapiens
gaagatcccaggttc

SEQ ID NO: 492255 - DNA, 15 bp, Homo sapiens
tgaagatcccaggtt

SEQ ID NO: 492256 - DNA, 15 bp, Homo sapiens
ctgaagatcccaggt

SEQ ID NO: 492257 - DNA, 15 bp, Homo sapiens
actgaagatcccagg

SEQ ID NO: 492258 - DNA, 15 bp, Homo sapiens
cactgaagatcccag

SEQ ID NO: 492259 - DNA, 15 bp, Homo sapiens
ccactgaagatccca

SEQ ID NO: 492260 - DNA, 15 bp, Homo sapiens
accactgaagatccc

SEQ ID NO: 492261 - DNA, 15 bp, Homo sapiens
gaccactgaagatcc

SEQ ID NO: 492262 - DNA, 15 bp, Homo sapiens
ggaccactgaagatc

SEQ ID NO: 492263 - DNA, 15 bp, Homo sapiens
gggaccactgaagat

SEQ ID NO: 492264 - DNA, 15 bp, Homo sapiens
tgggaccactgaaga

SEQ ID NO: 492265 - DNA, 15 bp, Homo sapiens
gtgggaccactgaag

SEQ ID NO: 492266 - DNA, 15 bp, Homo sapiens
agtgggaccactgaa

SEQ ID NO: 492267 - DNA, 15 bp, Homo sapiens
cagtgggaccactga

SEQ ID NO: 492268 - DNA, 15 bp, Homo sapiens
ccagtgggaccactg

SEQ ID NO: 492269 - DNA, 15 bp, Homo sapiens
tccagtgggaccact

SEQ ID NO: 492270 - DNA, 15 bp, Homo sapiens
ttccagtgggaccac

SEQ ID NO: 492271 - DNA, 15 bp, Homo sapiens
cttccagtgggacca

SEQ ID NO: 492272 - DNA, 15 bp, Homo sapiens
ccttccagtgggacc

SEQ ID NO: 492273 - DNA, 15 bp, Homo sapiens
accttccagtgggac

SEQ ID NO: 492274 - DNA, 15 bp, Homo sapiens
caccttccagtggga

SEQ ID NO: 492275 - DNA, 15 bp, Homo sapiens
ccaccttccagtggg

SEQ ID NO: 492276 - DNA, 15 bp, Homo sapiens
accaccttccagtgg

SEQ ID NO: 492277 - DNA, 15 bp, Homo sapiens
taccaccttccagtg

SEQ ID NO: 492278 - DNA, 15 bp, Homo sapiens
gtaccaccttccagt

SEQ ID NO: 492279 - DNA, 15 bp, Homo sapiens
ggtaccaccttccag

SEQ ID NO: 492280 - DNA, 15 bp, Homo sapiens
aggtaccaccttcca

SEQ ID NO: 492281 - DNA, 15 bp, Homo sapiens
gaggtaccaccttcc

SEQ ID NO: 492282 - DNA, 15 bp, Homo sapiens
ggaggtaccaccttc

SEQ ID NO: 492283 - DNA, 15 bp, Homo sapiens
gggaggtaccacctt

SEQ ID NO: 492284 - DNA, 15 bp, Homo sapiens
tgggaggtaccacct

SEQ ID NO: 492285 - DNA, 15 bp, Homo sapiens
ctgggaggtaccacc

SEQ ID NO: 492286 - DNA, 15 bp, Homo sapiens
tctgggaggtaccac

SEQ ID NO: 492287 - DNA, 15 bp, Homo sapiens
gtctgggaggtacca

SEQ ID NO: 492288 - DNA, 15 bp, Homo sapiens
tgtctgggaggtacc

SEQ ID NO: 492289 - DNA, 15 bp, Homo sapiens
atgtctgggaggtac

SEQ ID NO: 492290 - DNA, 15 bp, Homo sapiens
gatgtctgggaggta

SEQ ID NO: 492291 - DNA, 15 bp, Homo sapiens
ggatgtctgggaggt

SEQ ID NO: 492292 - DNA, 15 bp, Homo sapiens
tggatgtctgggagg

SEQ ID NO: 492293 - DNA, 15 bp, Homo sapiens
ctggatgtctgggag

SEQ ID NO: 492294 - DNA, 15 bp, Homo sapiens
gctggatgtctggga

SEQ ID NO: 492295 - DNA, 15 bp, Homo sapiens
ggctggatgtctggg

SEQ ID NO: 492296 - DNA, 15 bp, Homo sapiens
gggctggatgtctgg

SEQ ID NO: 492297 - DNA, 15 bp, Homo sapiens
agggctggatgtctg

SEQ ID NO: 492298 - DNA, 15 bp, Homo sapiens
cagggctggatgtct

SEQ ID NO: 492299 - DNA, 15 bp, Homo sapiens
ccagggctggatgtc

SEQ ID NO: 492300 - DNA, 15 bp, Homo sapiens
gccagggctggatgt

SEQ ID NO: 492301 - DNA, 15 bp, Homo sapiens
agccagggctggatg

SEQ ID NO: 492302 - DNA, 15 bp, Homo sapiens
tagccagggctggat

SEQ ID NO: 492303 - DNA, 15 bp, Homo sapiens
atagccagggctgga

SEQ ID NO: 492304 - DNA, 15 bp, Homo sapiens
gatagccagggctgg

SEQ ID NO: 492305 - DNA, 15 bp, Homo sapiens
ggatagccagggctg

SEQ ID NO: 492306 - DNA, 15 bp, Homo sapiens
tggatagccagggct

SEQ ID NO: 492307 - DNA, 15 bp, Homo sapiens
gtggatagccagggc

SEQ ID NO: 492308 - DNA, 15 bp, Homo sapiens
tgtggatagccaggg

SEQ ID NO: 492309 - DNA, 15 bp, Homo sapiens
ctgtggatagccagg

SEQ ID NO: 492310 - DNA, 15 bp, Homo sapiens
actgtggatagccag

SEQ ID NO: 492311 - DNA, 15 bp, Homo sapiens
cactgtggatagcca

SEQ ID NO: 492312 - DNA, 15 bp, Homo sapiens
tcactgtggatagcc

SEQ ID NO: 492313 - DNA, 15 bp, Homo sapiens
ctcactgtggatagc

SEQ ID NO: 492314 - DNA, 15 bp, Homo sapiens
cctcactgtggatag

SEQ ID NO: 492315 - DNA, 15 bp, Homo sapiens
tcctcactgtggata

SEQ ID NO: 492316 - DNA, 15 bp, Homo sapiens
ttcctcactgtggat

SEQ ID NO: 492317 - DNA, 15 bp, Homo sapiens
cttcctcactgtgga

SEQ ID NO: 492318 - DNA, 15 bp, Homo sapiens
ccttcctcactgtgg

SEQ ID NO: 492319 - DNA, 15 bp, Homo sapiens
cccttcctcactgtg

SEQ ID NO: 492320 - DNA, 15 bp, Homo sapiens
tcccttcctcactgt

SEQ ID NO: 492321 - DNA, 15 bp, Homo sapiens
ttcccttcctcactg

SEQ ID NO: 492322 - DNA, 15 bp, Homo sapiens
attcccttcctcact

SEQ ID NO: 492323 - DNA, 15 bp, Homo sapiens
aattcccttcctcac

SEQ ID NO: 492324 - DNA, 15 bp, Homo sapiens
taattcccttcctca

SEQ ID NO: 492325 - DNA, 15 bp, Homo sapiens
ttaattcccttcctc

SEQ ID NO: 492326 - DNA, 15 bp, Homo sapiens
attaattcccttcct

SEQ ID NO: 492327 - DNA, 15 bp, Homo sapiens
aattaattcccttcc

SEQ ID NO: 492328 - DNA, 15 bp, Homo sapiens
taattaattcccttc

SEQ ID NO: 492329 - DNA, 15 bp, Homo sapiens
ataattaattccctt

SEQ ID NO: 492330 - DNA, 15 bp, Homo sapiens
gataattaattccct

SEQ ID NO: 492331 - DNA, 15 bp, Homo sapiens
agataattaattccc

SEQ ID NO: 492332 - DNA, 15 bp, Homo sapiens
tagataattaattcc

SEQ ID NO: 492333 - DNA, 15 bp, Homo sapiens
gtagataattaattc

SEQ ID NO: 492334 - DNA, 15 bp, Homo sapiens
ggtagataattaatt

SEQ ID NO: 492335 - DNA, 15 bp, Homo sapiens
aggtagataattaat

SEQ ID NO: 492336 - DNA, 15 bp, Homo sapiens
aaggtagataattaa

SEQ ID NO: 492337 - DNA, 15 bp, Homo sapiens
caaggtagataatta

SEQ ID NO: 492338 - DNA, 15 bp, Homo sapiens
acaaggtagataatt

SEQ ID NO: 492339 - DNA, 15 bp, Homo sapiens
aacaaggtagataat

SEQ ID NO: 492340 - DNA, 15 bp, Homo sapiens
gaacaaggtagataa

SEQ ID NO: 492341 - DNA, 15 bp, Homo sapiens
ggaacaaggtagata

SEQ ID NO: 492342 - DNA, 15 bp, Homo sapiens
gggaacaaggtagat

SEQ ID NO: 492343 - DNA, 15 bp, Homo sapiens
tgggaacaaggtaga

SEQ ID NO: 492344 - DNA, 15 bp, Homo sapiens
gtgggaacaaggtag

SEQ ID NO: 492345 - DNA, 15 bp, Homo sapiens
ggtgggaacaaggta

SEQ ID NO: 492346 - DNA, 15 bp, Homo sapiens
tggtgggaacaaggt

SEQ ID NO: 492347 - DNA, 15 bp, Homo sapiens
ctggtgggaacaagg

SEQ ID NO: 492348 - DNA, 15 bp, Homo sapiens
tctggtgggaacaag

SEQ ID NO: 492349 - DNA, 15 bp, Homo sapiens
gtctggtgggaacaa

SEQ ID NO: 492350 - DNA, 15 bp, Homo sapiens
agtctggtgggaaca

SEQ ID NO: 492351 - DNA, 15 bp, Homo sapiens
gagtctggtgggaac

SEQ ID NO: 492352 - DNA, 15 bp, Homo sapiens
tgagtctggtgggaa

SEQ ID NO: 492353 - DNA, 15 bp, Homo sapiens
ttgagtctggtggga

SEQ ID NO: 492354 - DNA, 15 bp, Homo sapiens
cttgagtctggtggg

SEQ ID NO: 492355 - DNA, 15 bp, Homo sapiens
tcttgagtctggtgg

SEQ ID NO: 492356 - DNA, 15 bp, Homo sapiens
ttcttgagtctggtg

SEQ ID NO: 492357 - DNA, 15 bp, Homo sapiens
gttcttgagtctggt

SEQ ID NO: 492358 - DNA, 15 bp, Homo sapiens
tgttcttgagtctgg

SEQ ID NO: 492359 - DNA, 15 bp, Homo sapiens
ttgttcttgagtctg

SEQ ID NO: 492360 - DNA, 15 bp, Homo sapiens
gttgttcttgagtct

SEQ ID NO: 492361 - DNA, 15 bp, Homo sapiens
ggttgttcttgagtc

SEQ ID NO: 492362 - DNA, 15 bp, Homo sapiens
tggttgttcttgagt

SEQ ID NO: 492363 - DNA, 15 bp, Homo sapiens
gtggttgttcttgag

SEQ ID NO: 492364 - DNA, 15 bp, Homo sapiens
ggtggttgttcttga

SEQ ID NO: 492365 - DNA, 15 bp, Homo sapiens
gggtggttgttcttg

SEQ ID NO: 492366 - DNA, 15 bp, Homo sapiens
ggggtggttgttctt

SEQ ID NO: 492367 - DNA, 15 bp, Homo sapiens
tggggtggttgttct

SEQ ID NO: 492368 - DNA, 15 bp, Homo sapiens
atggggtggttgttc

SEQ ID NO: 492369 - DNA, 15 bp, Homo sapiens
aatggggtggttgtt

SEQ ID NO: 492370 - DNA, 15 bp, Homo sapiens
gaatggggtggttgt

SEQ ID NO: 492371 - DNA, 15 bp, Homo sapiens
tgaatggggtggttg

SEQ ID NO: 492372 - DNA, 15 bp, Homo sapiens
atgaatggggtggtt

SEQ ID NO: 492373 - DNA, 15 bp, Homo sapiens
tatgaatggggtggt

SEQ ID NO: 492374 - DNA, 15 bp, Homo sapiens
ctatgaatggggtgg

SEQ ID NO: 492375 - DNA, 15 bp, Homo sapiens
gctatgaatggggtg

SEQ ID NO: 492376 - DNA, 15 bp, Homo sapiens
agctatgaatggggt

SEQ ID NO: 492377 - DNA, 15 bp, Homo sapiens
tagctatgaatgggg

SEQ ID NO: 492378 - DNA, 15 bp, Homo sapiens
gtagctatgaatggg

SEQ ID NO: 492379 - DNA, 15 bp, Homo sapiens
ggtagctatgaatgg

SEQ ID NO: 492380 - DNA, 15 bp, Homo sapiens
gggtagctatgaatg

SEQ ID NO: 492381 - DNA, 15 bp, Homo sapiens
agggtagctatgaat

SEQ ID NO: 492382 - DNA, 15 bp, Homo sapiens
cagggtagctatgaa

SEQ ID NO: 492383 - DNA, 15 bp, Homo sapiens
acagggtagctatga

SEQ ID NO: 492384 - DNA, 15 bp, Homo sapiens
tacagggtagctatg

SEQ ID NO: 492385 - DNA, 15 bp, Homo sapiens
atacagggtagctat

SEQ ID NO: 492386 - DNA, 15 bp, Homo sapiens
gatacagggtagcta

SEQ ID NO: 492387 - DNA, 15 bp, Homo sapiens
tgatacagggtagct

SEQ ID NO: 492388 - DNA, 15 bp, Homo sapiens
ttgatacagggtagc

SEQ ID NO: 492389 - DNA, 15 bp, Homo sapiens
cttgatacagggtag

SEQ ID NO: 492390 - DNA, 15 bp, Homo sapiens
gcttgatacagggta

SEQ ID NO: 492391 - DNA, 15 bp, Homo sapiens
ggcttgatacagggt

SEQ ID NO: 492392 - DNA, 15 bp, Homo sapiens
gggcttgatacaggg

SEQ ID NO: 492393 - DNA, 15 bp, Homo sapiens
agggcttgatacagg

SEQ ID NO: 492394 - DNA, 15 bp, Homo sapiens
aagggcttgatacag

SEQ ID NO: 492395 - DNA, 15 bp, Homo sapiens
gaagggcttgataca

SEQ ID NO: 492396 - DNA, 15 bp, Homo sapiens
ggaagggcttgatac

SEQ ID NO: 492397 - DNA, 15 bp, Homo sapiens
tggaagggcttgata

SEQ ID NO: 492398 - DNA, 15 bp, Homo sapiens
ttggaagggcttgat

SEQ ID NO: 492399 - DNA, 15 bp, Homo sapiens
cttggaagggcttga

SEQ ID NO: 492400 - DNA, 15 bp, Homo sapiens
gcttggaagggcttg

SEQ ID NO: 492401 - DNA, 15 bp, Homo sapiens
ggcttggaagggctt

SEQ ID NO: 492402 - DNA, 15 bp, Homo sapiens
gggcttggaagggct

SEQ ID NO: 492403 - DNA, 15 bp, Homo sapiens
ggggcttggaagggc

SEQ ID NO: 492404 - DNA, 15 bp, Homo sapiens
aggggcttggaaggg

SEQ ID NO: 492405 - DNA, 15 bp, Homo sapiens
gaggggcttggaagg

SEQ ID NO: 492406 - DNA, 15 bp, Homo sapiens
ggaggggcttggaag

SEQ ID NO: 492407 - DNA, 15 bp, Homo sapiens
gggaggggcttggaa

SEQ ID NO: 492408 - DNA, 15 bp, Homo sapiens
agggaggggcttgga

SEQ ID NO: 492409 - DNA, 15 bp, Homo sapiens
cagggaggggcttgg

SEQ ID NO: 492410 - DNA, 15 bp, Homo sapiens
acagggaggggcttg

SEQ ID NO: 492411 - DNA, 15 bp, Homo sapiens
cacagggaggggctt

SEQ ID NO: 492412 - DNA, 15 bp, Homo sapiens
ccacagggaggggct

SEQ ID NO: 492413 - DNA, 15 bp, Homo sapiens
tccacagggaggggc

SEQ ID NO: 492414 - DNA, 15 bp, Homo sapiens
ttccacagggagggg

SEQ ID NO: 492415 - DNA, 15 bp, Homo sapiens
tttccacagggaggg

SEQ ID NO: 492416 - DNA, 15 bp, Homo sapiens
atttccacagggagg

SEQ ID NO: 492417 - DNA, 15 bp, Homo sapiens
catttccacagggag

SEQ ID NO: 492418 - DNA, 15 bp, Homo sapiens
gcatttccacaggga

SEQ ID NO: 492419 - DNA, 15 bp, Homo sapiens
agcatttccacaggg

SEQ ID NO: 492420 - DNA, 15 bp, Homo sapiens
aagcatttccacagg

SEQ ID NO: 492421 - DNA, 15 bp, Homo sapiens
gaagcatttccacag

SEQ ID NO: 492422 - DNA, 15 bp, Homo sapiens
tgaagcatttccaca

SEQ ID NO: 492423 - DNA, 15 bp, Homo sapiens
gtgaagcatttccac

SEQ ID NO: 492424 - DNA, 15 bp, Homo sapiens
ggtgaagcatttcca

SEQ ID NO: 492425 - DNA, 15 bp, Homo sapiens
gggtgaagcatttcc

SEQ ID NO: 492426 - DNA, 15 bp, Homo sapiens
tgggtgaagcatttc

SEQ ID NO: 492427 - DNA, 15 bp, Homo sapiens
gtgggtgaagcattt

SEQ ID NO: 492428 - DNA, 15 bp, Homo sapiens
tgtgggtgaagcatt

SEQ ID NO: 492429 - DNA, 15 bp, Homo sapiens
gtgtgggtgaagcat

SEQ ID NO: 492430 - DNA, 15 bp, Homo sapiens
agtgtgggtgaagca

SEQ ID NO: 492431 - DNA, 15 bp, Homo sapiens
cagtgtgggtgaagc

SEQ ID NO: 492432 - DNA, 15 bp, Homo sapiens
acagtgtgggtgaag

SEQ ID NO: 492433 - DNA, 15 bp, Homo sapiens
gacagtgtgggtgaa

SEQ ID NO: 492434 - DNA, 15 bp, Homo sapiens
agacagtgtgggtga

SEQ ID NO: 492435 - DNA, 15 bp, Homo sapiens
gagacagtgtgggtg

SEQ ID NO: 492436 - DNA, 15 bp, Homo sapiens
tgagacagtgtgggt

SEQ ID NO: 492437 - DNA, 15 bp, Homo sapiens
ctgagacagtgtggg

SEQ ID NO: 492438 - DNA, 15 bp, Homo sapiens
actgagacagtgtgg

SEQ ID NO: 492439 - DNA, 15 bp, Homo sapiens
aactgagacagtgtg

SEQ ID NO: 492440 - DNA, 15 bp, Homo sapiens
aaactgagacagtgt

SEQ ID NO: 492441 - DNA, 15 bp, Homo sapiens
taaactgagacagtg

SEQ ID NO: 492442 - DNA, 15 bp, Homo sapiens
ttaaactgagacagt

SEQ ID NO: 492443 - DNA, 15 bp, Homo sapiens
attaaactgagacag

SEQ ID NO: 492444 - DNA, 15 bp, Homo sapiens
cattaaactgagaca

SEQ ID NO: 492445 - DNA, 15 bp, Homo sapiens
gcattaaactgagac

SEQ ID NO: 492446 - DNA, 15 bp, Homo sapiens
agcattaaactgaga

SEQ ID NO: 492447 - DNA, 15 bp, Homo sapiens
gagcattaaactgag

SEQ ID NO: 492448 - DNA, 15 bp, Homo sapiens
tgagcattaaactga

SEQ ID NO: 492449 - DNA, 15 bp, Homo sapiens
atgagcattaaactg

SEQ ID NO: 492450 - DNA, 15 bp, Homo sapiens
gatgagcattaaact

SEQ ID NO: 492451 - DNA, 15 bp, Homo sapiens
ggatgagcattaaac

SEQ ID NO: 492452 - DNA, 15 bp, Homo sapiens
gggatgagcattaaa

SEQ ID NO: 492453 - DNA, 15 bp, Homo sapiens
tgggatgagcattaa

SEQ ID NO: 492454 - DNA, 15 bp, Homo sapiens
atgggatgagcatta

SEQ ID NO: 492455 - DNA, 15 bp, Homo sapiens
aatgggatgagcatt

SEQ ID NO: 492456 - DNA, 15 bp, Homo sapiens
gaatgggatgagcat

SEQ ID NO: 492457 - DNA, 15 bp, Homo sapiens
agaatgggatgagca

SEQ ID NO: 492458 - DNA, 15 bp, Homo sapiens
gagaatgggatgagc

SEQ ID NO: 492459 - DNA, 15 bp, Homo sapiens
tgagaatgggatgag

SEQ ID NO: 492460 - DNA, 15 bp, Homo sapiens
atgagaatgggatga

SEQ ID NO: 492461 - DNA, 15 bp, Homo sapiens
catgagaatgggatg

SEQ ID NO: 492462 - DNA, 15 bp, Homo sapiens
tcatgagaatgggat

SEQ ID NO: 492463 - DNA, 15 bp, Homo sapiens
ctcatgagaatggga

SEQ ID NO: 492464 - DNA, 15 bp, Homo sapiens
cctcatgagaatggg

SEQ ID NO: 492465 - DNA, 15 bp, Homo sapiens
gcctcatgagaatgg

SEQ ID NO: 492466 - DNA, 15 bp, Homo sapiens
tgcctcatgagaatg

SEQ ID NO: 492467 - DNA, 15 bp, Homo sapiens
ttgcctcatgagaat

SEQ ID NO: 492468 - DNA, 15 bp, Homo sapiens
cttgcctcatgagaa

SEQ ID NO: 492469 - DNA, 15 bp, Homo sapiens
gcttgcctcatgaga

SEQ ID NO: 492470 - DNA, 15 bp, Homo sapiens
tgcttgcctcatgag

SEQ ID NO: 492471 - DNA, 15 bp, Homo sapiens
atgcttgcctcatga

SEQ ID NO: 492472 - DNA, 15 bp, Homo sapiens
aatgcttgcctcatg

SEQ ID NO: 492473 - DNA, 15 bp, Homo sapiens
gaatgcttgcctcat

SEQ ID NO: 492474 - DNA, 15 bp, Homo sapiens
agaatgcttgcctca

SEQ ID NO: 492475 - DNA, 15 bp, Homo sapiens
aagaatgcttgcctc

SEQ ID NO: 492476 - DNA, 15 bp, Homo sapiens
caagaatgcttgcct

SEQ ID NO: 492477 - DNA, 15 bp, Homo sapiens
gcaagaatgcttgcc

SEQ ID NO: 492478 - DNA, 15 bp, Homo sapiens
ggcaagaatgcttgc

SEQ ID NO: 492479 - DNA, 15 bp, Homo sapiens
aggcaagaatgcttg

SEQ ID NO: 492480 - DNA, 15 bp, Homo sapiens
gaggcaagaatgctt

SEQ ID NO: 492481 - DNA, 15 bp, Homo sapiens
ggaggcaagaatgct

SEQ ID NO: 492482 - DNA, 15 bp, Homo sapiens
cggaggcaagaatgc

SEQ ID NO: 492483 - DNA, 15 bp, Homo sapiens
acggaggcaagaatg

SEQ ID NO: 492484 - DNA, 15 bp, Homo sapiens
aacggaggcaagaat

SEQ ID NO: 492485 - DNA, 15 bp, Homo sapiens
aaacggaggcaagaa

SEQ ID NO: 492486 - DNA, 15 bp, Homo sapiens
aaaacggaggcaaga

SEQ ID NO: 492487 - DNA, 15 bp, Homo sapiens
taaaacggaggcaag

SEQ ID NO: 492488 - DNA, 15 bp, Homo sapiens
gtaaaacggaggcaa

SEQ ID NO: 492489 - DNA, 15 bp, Homo sapiens
tgtaaaacggaggca

SEQ ID NO: 492490 - DNA, 15 bp, Homo sapiens
gtgtaaaacggaggc

SEQ ID NO: 492491 - DNA, 15 bp, Homo sapiens
tgtgtaaaacggagg

SEQ ID NO: 492492 - DNA, 15 bp, Homo sapiens
atgtgtaaaacggag

SEQ ID NO: 492493 - DNA, 15 bp, Homo sapiens
tatgtgtaaaacgga

SEQ ID NO: 492494 - DNA, 15 bp, Homo sapiens
ttatgtgtaaaacgg

SEQ ID NO: 492495 - DNA, 15 bp, Homo sapiens
cttatgtgtaaaacg

SEQ ID NO: 492496 - DNA, 15 bp, Homo sapiens
ccttatgtgtaaaac

SEQ ID NO: 492497 - DNA, 15 bp, Homo sapiens
tccttatgtgtaaaa

SEQ ID NO: 492498 - DNA, 15 bp, Homo sapiens
ttccttatgtgtaaa

SEQ ID NO: 492499 - DNA, 15 bp, Homo sapiens
tttccttatgtgtaa

SEQ ID NO: 492500 - DNA, 15 bp, Homo sapiens
gtttccttatgtgta

SEQ ID NO: 492501 - DNA, 15 bp, Homo sapiens
agtttccttatgtgt

SEQ ID NO: 492502 - DNA, 15 bp, Homo sapiens
aagtttccttatgtg

SEQ ID NO: 492503 - DNA, 15 bp, Homo sapiens
caagtttccttatgt

SEQ ID NO: 492504 - DNA, 15 bp, Homo sapiens
tcaagtttccttatg

SEQ ID NO: 492505 - DNA, 15 bp, Homo sapiens
ctcaagtttccttat

SEQ ID NO: 492506 - DNA, 15 bp, Homo sapiens
gctcaagtttcctta

SEQ ID NO: 492507 - DNA, 15 bp, Homo sapiens
tgctcaagtttcctt

SEQ ID NO: 492508 - DNA, 15 bp, Homo sapiens
atgctcaagtttcct

SEQ ID NO: 492509 - DNA, 15 bp, Homo sapiens
gatgctcaagtttcc

SEQ ID NO: 492510 - DNA, 15 bp, Homo sapiens
tgatgctcaagtttc

SEQ ID NO: 492511 - DNA, 15 bp, Homo sapiens
ctgatgctcaagttt

SEQ ID NO: 492512 - DNA, 15 bp, Homo sapiens
tctgatgctcaagtt

SEQ ID NO: 492513 - DNA, 15 bp, Homo sapiens
ctctgatgctcaagt

SEQ ID NO: 492514 - DNA, 15 bp, Homo sapiens
tctctgatgctcaag

SEQ ID NO: 492515 - DNA, 15 bp, Homo sapiens
ctctctgatgctcaa

SEQ ID NO: 492516 - DNA, 15 bp, Homo sapiens
cctctctgatgctca

SEQ ID NO: 492517 - DNA, 15 bp, Homo sapiens
gcctctctgatgctc

SEQ ID NO: 492518 - DNA, 15 bp, Homo sapiens
agcctctctgatgct

SEQ ID NO: 492519 - DNA, 15 bp, Homo sapiens
gagcctctctgatgc

SEQ ID NO: 492520 - DNA, 15 bp, Homo sapiens
tgagcctctctgatg

SEQ ID NO: 492521 - DNA, 15 bp, Homo sapiens
ttgagcctctctgat

SEQ ID NO: 492522 - DNA, 15 bp, Homo sapiens
attgagcctctctga

SEQ ID NO: 492523 - DNA, 15 bp, Homo sapiens
gattgagcctctctg

SEQ ID NO: 492524 - DNA, 15 bp, Homo sapiens
tgattgagcctctct

SEQ ID NO: 492525 - DNA, 15 bp, Homo sapiens
atgattgagcctctc

SEQ ID NO: 492526 - DNA, 15 bp, Homo sapiens
aatgattgagcctct

SEQ ID NO: 492527 - DNA, 15 bp, Homo sapiens
aaatgattgagcctc

SEQ ID NO: 492528 - DNA, 15 bp, Homo sapiens
aaaatgattgagcct

SEQ ID NO: 492529 - DNA, 15 bp, Homo sapiens
gaaaatgattgagcc

SEQ ID NO: 492530 - DNA, 15 bp, Homo sapiens
ggaaaatgattgagc

SEQ ID NO: 492531 - DNA, 15 bp, Homo sapiens
gggaaaatgattgag

SEQ ID NO: 492532 - DNA, 15 bp, Homo sapiens
tgggaaaatgattga

SEQ ID NO: 492533 - DNA, 15 bp, Homo sapiens
ttgggaaaatgattg

SEQ ID NO: 492534 - DNA, 15 bp, Homo sapiens
cttgggaaaatgatt

SEQ ID NO: 492535 - DNA, 15 bp, Homo sapiens
tcttgggaaaatgat

SEQ ID NO: 492536 - DNA, 15 bp, Homo sapiens
atcttgggaaaatga

SEQ ID NO: 492537 - DNA, 15 bp, Homo sapiens
gatcttgggaaaatg

SEQ ID NO: 492538 - DNA, 15 bp, Homo sapiens
tgatcttgggaaaat

SEQ ID NO: 492539 - DNA, 15 bp, Homo sapiens
gtgatcttgggaaaa

SEQ ID NO: 492540 - DNA, 15 bp, Homo sapiens
tgtgatcttgggaaa

SEQ ID NO: 492541 - DNA, 15 bp, Homo sapiens
gtgtgatcttgggaa

SEQ ID NO: 492542 - DNA, 15 bp, Homo sapiens
tgtgtgatcttggga

SEQ ID NO: 492543 - DNA, 15 bp, Homo sapiens
ctgtgtgatcttggg

SEQ ID NO: 492544 - DNA, 15 bp, Homo sapiens
actgtgtgatcttgg

SEQ ID NO: 492545 - DNA, 15 bp, Homo sapiens
aactgtgtgatcttg

SEQ ID NO: 492546 - DNA, 15 bp, Homo sapiens
taactgtgtgatctt

SEQ ID NO: 492547 - DNA, 15 bp, Homo sapiens
ctaactgtgtgatct

SEQ ID NO: 492548 - DNA, 15 bp, Homo sapiens
actaactgtgtgatc

SEQ ID NO: 492549 - DNA, 15 bp, Homo sapiens
tactaactgtgtgat

SEQ ID NO: 492550 - DNA, 15 bp, Homo sapiens
gtactaactgtgtga

SEQ ID NO: 492551 - DNA, 15 bp, Homo sapiens
agtactaactgtgtg

SEQ ID NO: 492552 - DNA, 15 bp, Homo sapiens
tagtactaactgtgt

SEQ ID NO: 492553 - DNA, 15 bp, Homo sapiens
ctagtactaactgtg

SEQ ID NO: 492554 - DNA, 15 bp, Homo sapiens
tctagtactaactgt

SEQ ID NO: 492555 - DNA, 15 bp, Homo sapiens
ctctagtactaactg

SEQ ID NO: 492556 - DNA, 15 bp, Homo sapiens
actctagtactaact

SEQ ID NO: 492557 - DNA, 15 bp, Homo sapiens
cactctagtactaac

SEQ ID NO: 492558 - DNA, 15 bp, Homo sapiens
tcactctagtactaa

SEQ ID NO: 492559 - DNA, 15 bp, Homo sapiens
ctcactctagtacta

SEQ ID NO: 492560 - DNA, 15 bp, Homo sapiens
cctcactctagtact

SEQ ID NO: 492561 - DNA, 15 bp, Homo sapiens
tcctcactctagtac

SEQ ID NO: 492562 - DNA, 15 bp, Homo sapiens
gtcctcactctagta

SEQ ID NO: 492563 - DNA, 15 bp, Homo sapiens
agtcctcactctagt

SEQ ID NO: 492564 - DNA, 15 bp, Homo sapiens
aagtcctcactctag

SEQ ID NO: 492565 - DNA, 15 bp, Homo sapiens
caagtcctcactcta

SEQ ID NO: 492566 - DNA, 15 bp, Homo sapiens
tcaagtcctcactct

SEQ ID NO: 492567 - DNA, 15 bp, Homo sapiens
gtcaagtcctcactc

SEQ ID NO: 492568 - DNA, 15 bp, Homo sapiens
ggtcaagtcctcact

SEQ ID NO: 492569 - DNA, 15 bp, Homo sapiens
gggtcaagtcctcac

SEQ ID NO: 492570 - DNA, 15 bp, Homo sapiens
agggtcaagtcctca

SEQ ID NO: 492571 - DNA, 15 bp, Homo sapiens
cagggtcaagtcctc

SEQ ID NO: 492572 - DNA, 15 bp, Homo sapiens
gcagggtcaagtcct

SEQ ID NO: 492573 - DNA, 15 bp, Homo sapiens
agcagggtcaagtcc

SEQ ID NO: 492574 - DNA, 15 bp, Homo sapiens
tagcagggtcaagtc

SEQ ID NO: 492575 - DNA, 15 bp, Homo sapiens
atagcagggtcaagt

SEQ ID NO: 492576 - DNA, 15 bp, Homo sapiens
catagcagggtcaag

SEQ ID NO: 492577 - DNA, 15 bp, Homo sapiens
acatagcagggtcaa

SEQ ID NO: 492578 - DNA, 15 bp, Homo sapiens
gacatagcagggtca

SEQ ID NO: 492579 - DNA, 15 bp, Homo sapiens
agacatagcagggtc

SEQ ID NO: 492580 - DNA, 15 bp, Homo sapiens
tagacatagcagggt

SEQ ID NO: 492581 - DNA, 15 bp, Homo sapiens
ctagacatagcaggg

SEQ ID NO: 492582 - DNA, 15 bp, Homo sapiens
gctagacatagcagg

SEQ ID NO: 492583 - DNA, 15 bp, Homo sapiens
agctagacatagcag

SEQ ID NO: 492584 - DNA, 15 bp, Homo sapiens
aagctagacatagca

SEQ ID NO: 492585 - DNA, 15 bp, Homo sapiens
gaagctagacatagc

SEQ ID NO: 492586 - DNA, 15 bp, Homo sapiens
tgaagctagacatag

SEQ ID NO: 492587 - DNA, 15 bp, Homo sapiens
ttgaagctagacata

SEQ ID NO: 492588 - DNA, 15 bp, Homo sapiens
tttgaagctagacat

SEQ ID NO: 492589 - DNA, 15 bp, Homo sapiens
ttttgaagctagaca

SEQ ID NO: 492590 - DNA, 15 bp, Homo sapiens
attttgaagctagac

SEQ ID NO: 492591 - DNA, 15 bp, Homo sapiens
cattttgaagctaga

SEQ ID NO: 492592 - DNA, 15 bp, Homo sapiens
gcattttgaagctag

SEQ ID NO: 492593 - DNA, 15 bp, Homo sapiens
agcattttgaagcta

SEQ ID NO: 492594 - DNA, 15 bp, Homo sapiens
gagcattttgaagct

SEQ ID NO: 492595 - DNA, 15 bp, Homo sapiens
agagcattttgaagc

SEQ ID NO: 492596 - DNA, 15 bp, Homo sapiens
cagagcattttgaag

SEQ ID NO: 492597 - DNA, 15 bp, Homo sapiens
acagagcattttgaa

SEQ ID NO: 492598 - DNA, 15 bp, Homo sapiens
aacagagcattttga

SEQ ID NO: 492599 - DNA, 15 bp, Homo sapiens
aaacagagcattttg

SEQ ID NO: 492600 - DNA, 15 bp, Homo sapiens
aaaacagagcatttt

SEQ ID NO: 492601 - DNA, 15 bp, Homo sapiens
gaaaacagagcattt

SEQ ID NO: 492602 - DNA, 15 bp, Homo sapiens
ggaaaacagagcatt

SEQ ID NO: 492603 - DNA, 15 bp, Homo sapiens
aggaaaacagagcat

SEQ ID NO: 492604 - DNA, 15 bp, Homo sapiens
caggaaaacagagca

SEQ ID NO: 492605 - DNA, 15 bp, Homo sapiens
ccaggaaaacagagc

SEQ ID NO: 492606 - DNA, 15 bp, Homo sapiens
gccaggaaaacagag

SEQ ID NO: 492607 - DNA, 15 bp, Homo sapiens
agccaggaaaacaga

SEQ ID NO: 492608 - DNA, 15 bp, Homo sapiens
cagccaggaaaacag

SEQ ID NO: 492609 - DNA, 15 bp, Homo sapiens
tcagccaggaaaaca

SEQ ID NO: 492610 - DNA, 15 bp, Homo sapiens
atcagccaggaaaac

SEQ ID NO: 492611 - DNA, 15 bp, Homo sapiens
gatcagccaggaaaa

SEQ ID NO: 492612 - DNA, 15 bp, Homo sapiens
agatcagccaggaaa

SEQ ID NO: 492613 - DNA, 15 bp, Homo sapiens
gagatcagccaggaa

SEQ ID NO: 492614 - DNA, 15 bp, Homo sapiens
tgagatcagccagga

SEQ ID NO: 492615 - DNA, 15 bp, Homo sapiens
gtgagatcagccagg

SEQ ID NO: 492616 - DNA, 15 bp, Homo sapiens
agtgagatcagccag

SEQ ID NO: 492617 - DNA, 15 bp, Homo sapiens
gagtgagatcagcca

SEQ ID NO: 492618 - DNA, 15 bp, Homo sapiens
ggagtgagatcagcc

SEQ ID NO: 492619 - DNA, 15 bp, Homo sapiens
aggagtgagatcagc

SEQ ID NO: 492620 - DNA, 15 bp, Homo sapiens
gaggagtgagatcag

SEQ ID NO: 492621 - DNA, 15 bp, Homo sapiens
ggaggagtgagatca

SEQ ID NO: 492622 - DNA, 15 bp, Homo sapiens
aggaggagtgagatc

SEQ ID NO: 492623 - DNA, 15 bp, Homo sapiens
caggaggagtgagat

SEQ ID NO: 492624 - DNA, 15 bp, Homo sapiens
ccaggaggagtgaga

SEQ ID NO: 492625 - DNA, 15 bp, Homo sapiens
tccaggaggagtgag

SEQ ID NO: 492626 - DNA, 15 bp, Homo sapiens
gtccaggaggagtga

SEQ ID NO: 492627 - DNA, 15 bp, Homo sapiens
agtccaggaggagtg

SEQ ID NO: 492628 - DNA, 15 bp, Homo sapiens
aagtccaggaggagt

SEQ ID NO: 492629 - DNA, 15 bp, Homo sapiens
caagtccaggaggag

SEQ ID NO: 492630 - DNA, 15 bp, Homo sapiens
ccaagtccaggagga

SEQ ID NO: 492631 - DNA, 15 bp, Homo sapiens
cccaagtccaggagg

SEQ ID NO: 492632 - DNA, 15 bp, Homo sapiens
gcccaagtccaggag

SEQ ID NO: 492633 - DNA, 15 bp, Homo sapiens
ggcccaagtccagga

SEQ ID NO: 492634 - DNA, 15 bp, Homo sapiens
aggcccaagtccagg

SEQ ID NO: 492635 - DNA, 15 bp, Homo sapiens
taggcccaagtccag

SEQ ID NO: 492636 - DNA, 15 bp, Homo sapiens
ttaggcccaagtcca

SEQ ID NO: 492637 - DNA, 15 bp, Homo sapiens
gttaggcccaagtcc

SEQ ID NO: 492638 - DNA, 15 bp, Homo sapiens
ggttaggcccaagtc

SEQ ID NO: 492639 - DNA, 15 bp, Homo sapiens
tggttaggcccaagt

SEQ ID NO: 492640 - DNA, 15 bp, Homo sapiens
ctggttaggcccaag

SEQ ID NO: 492641 - DNA, 15 bp, Homo sapiens
tctggttaggcccaa

SEQ ID NO: 492642 - DNA, 15 bp, Homo sapiens
ctctggttaggccca

SEQ ID NO: 492643 - DNA, 15 bp, Homo sapiens
gctctggttaggccc

SEQ ID NO: 492644 - DNA, 15 bp, Homo sapiens
agctctggttaggcc

SEQ ID NO: 492645 - DNA, 15 bp, Homo sapiens
gagctctggttaggc

SEQ ID NO: 492646 - DNA, 15 bp, Homo sapiens
agagctctggttagg

SEQ ID NO: 492647 - DNA, 15 bp, Homo sapiens
cagagctctggttag

SEQ ID NO: 492648 - DNA, 15 bp, Homo sapiens
ccagagctctggtta

SEQ ID NO: 492649 - DNA, 15 bp, Homo sapiens
tccagagctctggtt

SEQ ID NO: 492650 - DNA, 15 bp, Homo sapiens
atccagagctctggt

SEQ ID NO: 492651 - DNA, 15 bp, Homo sapiens
gatccagagctctgg

SEQ ID NO: 492652 - DNA, 15 bp, Homo sapiens
ggatccagagctctg

SEQ ID NO: 492653 - DNA, 15 bp, Homo sapiens
aggatccagagctct

SEQ ID NO: 492654 - DNA, 15 bp, Homo sapiens
aaggatccagagctc

SEQ ID NO: 492655 - DNA, 15 bp, Homo sapiens
aaaggatccagagct

SEQ ID NO: 492656 - DNA, 15 bp, Homo sapiens
caaaggatccagagc

SEQ ID NO: 492657 - DNA, 15 bp, Homo sapiens
gcaaaggatccagag

SEQ ID NO: 492658 - DNA, 15 bp, Homo sapiens
ggcaaaggatccaga

SEQ ID NO: 492659 - DNA, 15 bp, Homo sapiens
gggcaaaggatccag

SEQ ID NO: 492660 - DNA, 15 bp, Homo sapiens
cgggcaaaggatcca

SEQ ID NO: 492661 - DNA, 15 bp, Homo sapiens
gcgggcaaaggatcc

SEQ ID NO: 492662 - DNA, 15 bp, Homo sapiens
ggcgggcaaaggatc

SEQ ID NO: 492663 - DNA, 15 bp, Homo sapiens
tggcgggcaaaggat

SEQ ID NO: 492664 - DNA, 15 bp, Homo sapiens
ctggcgggcaaagga

SEQ ID NO: 492665 - DNA, 15 bp, Homo sapiens
gctggcgggcaaagg

SEQ ID NO: 492666 - DNA, 15 bp, Homo sapiens
ggctggcgggcaaag

SEQ ID NO: 492667 - DNA, 15 bp, Homo sapiens
gggctggcgggcaaa

SEQ ID NO: 492668 - DNA, 15 bp, Homo sapiens
agggctggcgggcaa

SEQ ID NO: 492669 - DNA, 15 bp, Homo sapiens
gagggctggcgggca

SEQ ID NO: 492670 - DNA, 15 bp, Homo sapiens
ggagggctggcgggc

SEQ ID NO: 492671 - DNA, 15 bp, Homo sapiens
tggagggctggcggg

SEQ ID NO: 492672 - DNA, 15 bp, Homo sapiens
ctggagggctggcgg

SEQ ID NO: 492673 - DNA, 15 bp, Homo sapiens
cctggagggctggcg

SEQ ID NO: 492674 - DNA, 15 bp, Homo sapiens
tcctggagggctggc

SEQ ID NO: 492675 - DNA, 15 bp, Homo sapiens
ctcctggagggctgg

SEQ ID NO: 492676 - DNA, 15 bp, Homo sapiens
actcctggagggctg

SEQ ID NO: 492677 - DNA, 15 bp, Homo sapiens
gactcctggagggct

SEQ ID NO: 492678 - DNA, 15 bp, Homo sapiens
ggactcctggagggc

SEQ ID NO: 492679 - DNA, 15 bp, Homo sapiens
tggactcctggaggg

SEQ ID NO: 492680 - DNA, 15 bp, Homo sapiens
ctggactcctggagg

SEQ ID NO: 492681 - DNA, 15 bp, Homo sapiens
gctggactcctggag

SEQ ID NO: 492682 - DNA, 15 bp, Homo sapiens
ggctggactcctgga

SEQ ID NO: 492683 - DNA, 15 bp, Homo sapiens
aggctggactcctgg

SEQ ID NO: 492684 - DNA, 15 bp, Homo sapiens
caggctggactcctg

SEQ ID NO: 492685 - DNA, 15 bp, Homo sapiens
ccaggctggactcct

SEQ ID NO: 492686 - DNA, 15 bp, Homo sapiens
cccaggctggactcc

SEQ ID NO: 492687 - DNA, 15 bp, Homo sapiens
ccccaggctggactc

SEQ ID NO: 492688 - DNA, 15 bp, Homo sapiens
gccccaggctggact

SEQ ID NO: 492689 - DNA, 15 bp, Homo sapiens
ggccccaggctggac

SEQ ID NO: 492690 - DNA, 15 bp, Homo sapiens
tggccccaggctgga

SEQ ID NO: 492691 - DNA, 15 bp, Homo sapiens
ttggccccaggctgg

SEQ ID NO: 492692 - DNA, 15 bp, Homo sapiens
cttggccccaggctg

SEQ ID NO: 492693 - DNA, 15 bp, Homo sapiens
acttggccccaggct

SEQ ID NO: 492694 - DNA, 15 bp, Homo sapiens
gacttggccccaggc

SEQ ID NO: 492695 - DNA, 15 bp, Homo sapiens
ggacttggccccagg

SEQ ID NO: 492696 - DNA, 15 bp, Homo sapiens
gggacttggccccag

SEQ ID NO: 492697 - DNA, 15 bp, Homo sapiens
ggggacttggcccca

SEQ ID NO: 492698 - DNA, 15 bp, Homo sapiens
tggggacttggcccc

SEQ ID NO: 492699 - DNA, 15 bp, Homo sapiens
ctggggacttggccc

SEQ ID NO: 492700 - DNA, 15 bp, Homo sapiens
actggggacttggcc

SEQ ID NO: 492701 - DNA, 15 bp, Homo sapiens
aactggggacttggc

SEQ ID NO: 492702 - DNA, 15 bp, Homo sapiens
gaactggggacttgg

SEQ ID NO: 492703 - DNA, 15 bp, Homo sapiens
agaactggggacttg

SEQ ID NO: 492704 - DNA, 15 bp, Homo sapiens
aagaactggggactt

SEQ ID NO: 492705 - DNA, 15 bp, Homo sapiens
gaagaactggggact

SEQ ID NO: 492706 - DNA, 15 bp, Homo sapiens
ggaagaactggggac

SEQ ID NO: 492707 - DNA, 15 bp, Homo sapiens
gggaagaactgggga

SEQ ID NO: 492708 - DNA, 15 bp, Homo sapiens
ggggaagaactgggg

SEQ ID NO: 492709 - DNA, 15 bp, Homo sapiens
aggggaagaactggg

SEQ ID NO: 492710 - DNA, 15 bp, Homo sapiens
caggggaagaactgg

SEQ ID NO: 492711 - DNA, 15 bp, Homo sapiens
gcaggggaagaactg

SEQ ID NO: 492712 - DNA, 15 bp, Homo sapiens
cgcaggggaagaact

SEQ ID NO: 492713 - DNA, 15 bp, Homo sapiens
ccgcaggggaagaac

SEQ ID NO: 492714 - DNA, 15 bp, Homo sapiens
tccgcaggggaagaa

SEQ ID NO: 492715 - DNA, 15 bp, Homo sapiens
gtccgcaggggaaga

SEQ ID NO: 492716 - DNA, 15 bp, Homo sapiens
ggtccgcaggggaag

SEQ ID NO: 492717 - DNA, 15 bp, Homo sapiens
gggtccgcaggggaa

SEQ ID NO: 492718 - DNA, 15 bp, Homo sapiens
ggggtccgcagggga

SEQ ID NO: 492719 - DNA, 15 bp, Homo sapiens
tggggtccgcagggg

SEQ ID NO: 492720 - DNA, 15 bp, Homo sapiens
atggggtccgcaggg

SEQ ID NO: 492721 - DNA, 15 bp, Homo sapiens
catggggtccgcagg

SEQ ID NO: 492722 - DNA, 15 bp, Homo sapiens
tcatggggtccgcag

SEQ ID NO: 492723 - DNA, 15 bp, Homo sapiens
ctcatggggtccgca

SEQ ID NO: 492724 - DNA, 15 bp, Homo sapiens
tctcatggggtccgc

SEQ ID NO: 492725 - DNA, 15 bp, Homo sapiens
ttctcatggggtccg

SEQ ID NO: 492726 - DNA, 15 bp, Homo sapiens
gttctcatggggtcc

SEQ ID NO: 492727 - DNA, 15 bp, Homo sapiens
tgttctcatggggtc

SEQ ID NO: 492728 - DNA, 15 bp, Homo sapiens
gtgttctcatggggt

SEQ ID NO: 492729 - DNA, 15 bp, Homo sapiens
ggtgttctcatgggg

SEQ ID NO: 492730 - DNA, 15 bp, Homo sapiens
tggtgttctcatggg

SEQ ID NO: 492731 - DNA, 15 bp, Homo sapiens
gtggtgttctcatgg

SEQ ID NO: 492732 - DNA, 15 bp, Homo sapiens
ggtggtgttctcatg

SEQ ID NO: 492733 - DNA, 15 bp, Homo sapiens
aggtggtgttctcat

SEQ ID NO: 492734 - DNA, 15 bp, Homo sapiens
taggtggtgttctca

SEQ ID NO: 492735 - DNA, 15 bp, Homo sapiens
gtaggtggtgttctc

SEQ ID NO: 492736 - DNA, 15 bp, Homo sapiens
agtaggtggtgttct

SEQ ID NO: 492737 - DNA, 15 bp, Homo sapiens
aagtaggtggtgttc

SEQ ID NO: 492738 - DNA, 15 bp, Homo sapiens
gaagtaggtggtgtt

SEQ ID NO: 492739 - DNA, 15 bp, Homo sapiens
agaagtaggtggtgt

SEQ ID NO: 492740 - DNA, 15 bp, Homo sapiens
cagaagtaggtggtg

SEQ ID NO: 492741 - DNA, 15 bp, Homo sapiens
acagaagtaggtggt

SEQ ID NO: 492742 - DNA, 15 bp, Homo sapiens
cacagaagtaggtgg

SEQ ID NO: 492743 - DNA, 15 bp, Homo sapiens
ccacagaagtaggtg

SEQ ID NO: 492744 - DNA, 15 bp, Homo sapiens
cccacagaagtaggt

SEQ ID NO: 492745 - DNA, 15 bp, Homo sapiens
acccacagaagtagg

SEQ ID NO: 492746 - DNA, 15 bp, Homo sapiens
tacccacagaagtag

SEQ ID NO: 492747 - DNA, 15 bp, Homo sapiens
gtacccacagaagta

SEQ ID NO: 492748 - DNA, 15 bp, Homo sapiens
tgtacccacagaagt

SEQ ID NO: 492749 - DNA, 15 bp, Homo sapiens
atgtacccacagaag

SEQ ID NO: 492750 - DNA, 15 bp, Homo sapiens
catgtacccacagaa

SEQ ID NO: 492751 - DNA, 15 bp, Homo sapiens
acatgtacccacaga

SEQ ID NO: 492752 - DNA, 15 bp, Homo sapiens
aacatgtacccacag

SEQ ID NO: 492753 - DNA, 15 bp, Homo sapiens
taacatgtacccaca

SEQ ID NO: 492754 - DNA, 15 bp, Homo sapiens
ataacatgtacccac

SEQ ID NO: 492755 - DNA, 15 bp, Homo sapiens
tataacatgtaccca

SEQ ID NO: 492756 - DNA, 15 bp, Homo sapiens
ctataacatgtaccc

SEQ ID NO: 492757 - DNA, 15 bp, Homo sapiens
cctataacatgtacc

SEQ ID NO: 492758 - DNA, 15 bp, Homo sapiens
ccctataacatgtac

SEQ ID NO: 492759 - DNA, 15 bp, Homo sapiens
tccctataacatgta

SEQ ID NO: 492760 - DNA, 15 bp, Homo sapiens
ctccctataacatgt

SEQ ID NO: 492761 - DNA, 15 bp, Homo sapiens
gctccctataacatg

SEQ ID NO: 492762 - DNA, 15 bp, Homo sapiens
ggctccctataacat

SEQ ID NO: 492763 - DNA, 15 bp, Homo sapiens
aggctccctataaca

SEQ ID NO: 492764 - DNA, 15 bp, Homo sapiens
caggctccctataac

SEQ ID NO: 492765 - DNA, 15 bp, Homo sapiens
ccaggctccctataa

SEQ ID NO: 492766 - DNA, 15 bp, Homo sapiens
cccaggctccctata

SEQ ID NO: 492767 - DNA, 15 bp, Homo sapiens
ccccaggctccctat

SEQ ID NO: 492768 - DNA, 15 bp, Homo sapiens
cccccaggctcccta

SEQ ID NO: 492769 - DNA, 15 bp, Homo sapiens
gcccccaggctccct

SEQ ID NO: 492770 - DNA, 15 bp, Homo sapiens
tgcccccaggctccc

SEQ ID NO: 492771 - DNA, 15 bp, Homo sapiens
gtgcccccaggctcc

SEQ ID NO: 492772 - DNA, 15 bp, Homo sapiens
tgtgcccccaggctc

SEQ ID NO: 492773 - DNA, 15 bp, Homo sapiens
gtgtgcccccaggct

SEQ ID NO: 492774 - DNA, 15 bp, Homo sapiens
tgtgtgcccccaggc

SEQ ID NO: 492775 - DNA, 15 bp, Homo sapiens
ctgtgtgcccccagg

SEQ ID NO: 492776 - DNA, 15 bp, Homo sapiens
gctgtgtgcccccag

SEQ ID NO: 492777 - DNA, 15 bp, Homo sapiens
agctgtgtgccccca

SEQ ID NO: 492778 - DNA, 15 bp, Homo sapiens
cagctgtgtgccccc

SEQ ID NO: 492779 - DNA, 15 bp, Homo sapiens
ccagctgtgtgcccc

SEQ ID NO: 492780 - DNA, 15 bp, Homo sapiens
cccagctgtgtgccc

SEQ ID NO: 492781 - DNA, 15 bp, Homo sapiens
ccccagctgtgtgcc

SEQ ID NO: 492782 - DNA, 15 bp, Homo sapiens
tccccagctgtgtgc

SEQ ID NO: 492783 - DNA, 15 bp, Homo sapiens
ctccccagctgtgtg

SEQ ID NO: 492784 - DNA, 15 bp, Homo sapiens
cctccccagctgtgt

SEQ ID NO: 492785 - DNA, 15 bp, Homo sapiens
ccctccccagctgtg

SEQ ID NO: 492786 - DNA, 15 bp, Homo sapiens
cccctccccagctgt

SEQ ID NO: 492787 - DNA, 15 bp, Homo sapiens
ccccctccccagctg

SEQ ID NO: 492788 - DNA, 15 bp, Homo sapiens
gccccctccccagct

SEQ ID NO: 492789 - DNA, 15 bp, Homo sapiens
ggccccctccccagc

SEQ ID NO: 492790 - DNA, 15 bp, Homo sapiens
aggccccctccccag

SEQ ID NO: 492791 - DNA, 15 bp, Homo sapiens
caggccccctcccca

SEQ ID NO: 492792 - DNA, 15 bp, Homo sapiens
ccaggccccctcccc

SEQ ID NO: 492793 - DNA, 15 bp, Homo sapiens
accaggccccctccc

SEQ ID NO: 492794 - DNA, 15 bp, Homo sapiens
gaccaggccccctcc

SEQ ID NO: 492795 - DNA, 15 bp, Homo sapiens
ggaccaggccccctc

SEQ ID NO: 492796 - DNA, 15 bp, Homo sapiens
tggaccaggccccct

SEQ ID NO: 492797 - DNA, 15 bp, Homo sapiens
atggaccaggccccc

SEQ ID NO: 492798 - DNA, 15 bp, Homo sapiens
catggaccaggcccc

SEQ ID NO: 492799 - DNA, 15 bp, Homo sapiens
acatggaccaggccc

SEQ ID NO: 492800 - DNA, 15 bp, Homo sapiens
tacatggaccaggcc

SEQ ID NO: 492801 - DNA, 15 bp, Homo sapiens
gtacatggaccaggc

SEQ ID NO: 492802 - DNA, 15 bp, Homo sapiens
cgtacatggaccagg

SEQ ID NO: 492803 - DNA, 15 bp, Homo sapiens
acgtacatggaccag

SEQ ID NO: 492804 - DNA, 15 bp, Homo sapiens
cacgtacatggacca

SEQ ID NO: 492805 - DNA, 15 bp, Homo sapiens
ccacgtacatggacc

SEQ ID NO: 492806 - DNA, 15 bp, Homo sapiens
gccacgtacatggac

SEQ ID NO: 492807 - DNA, 15 bp, Homo sapiens
cgccacgtacatgga

SEQ ID NO: 492808 - DNA, 15 bp, Homo sapiens
gcgccacgtacatgg

SEQ ID NO: 492809 - DNA, 15 bp, Homo sapiens
agcgccacgtacatg

SEQ ID NO: 492810 - DNA, 15 bp, Homo sapiens
cagcgccacgtacat

SEQ ID NO: 492811 - DNA, 15 bp, Homo sapiens
gcagcgccacgtaca

SEQ ID NO: 492812 - DNA, 15 bp, Homo sapiens
agcagcgccacgtac

SEQ ID NO: 492813 - DNA, 15 bp, Homo sapiens
cagcagcgccacgta

SEQ ID NO: 492814 - DNA, 15 bp, Homo sapiens
gcagcagcgccacgt

SEQ ID NO: 492815 - DNA, 15 bp, Homo sapiens
ggcagcagcgccacg

SEQ ID NO: 492816 - DNA, 15 bp, Homo sapiens
gggcagcagcgccac

SEQ ID NO: 492817 - DNA, 15 bp, Homo sapiens
ggggcagcagcgcca

SEQ ID NO: 492818 - DNA, 15 bp, Homo sapiens
gggggcagcagcgcc

SEQ ID NO: 492819 - DNA, 15 bp, Homo sapiens
tgggggcagcagcgc

SEQ ID NO: 492820 - DNA, 15 bp, Homo sapiens
ctgggggcagcagcg

SEQ ID NO: 492821 - DNA, 15 bp, Homo sapiens
gctgggggcagcagc

SEQ ID NO: 492822 - DNA, 15 bp, Homo sapiens
tgctgggggcagcag

SEQ ID NO: 492823 - DNA, 15 bp, Homo sapiens
atgctgggggcagca

SEQ ID NO: 492824 - DNA, 15 bp, Homo sapiens
gatgctgggggcagc

SEQ ID NO: 492825 - DNA, 15 bp, Homo sapiens
agatgctgggggcag

SEQ ID NO: 492826 - DNA, 15 bp, Homo sapiens
cagatgctgggggca

SEQ ID NO: 492827 - DNA, 15 bp, Homo sapiens
gcagatgctgggggc

SEQ ID NO: 492828 - DNA, 15 bp, Homo sapiens
tgcagatgctggggg

SEQ ID NO: 492829 - DNA, 15 bp, Homo sapiens
ctgcagatgctgggg

SEQ ID NO: 492830 - DNA, 15 bp, Homo sapiens
tctgcagatgctggg

SEQ ID NO: 492831 - DNA, 15 bp, Homo sapiens
atctgcagatgctgg

SEQ ID NO: 492832 - DNA, 15 bp, Homo sapiens
catctgcagatgctg

SEQ ID NO: 492833 - DNA, 15 bp, Homo sapiens
gcatctgcagatgct

SEQ ID NO: 492834 - DNA, 15 bp, Homo sapiens
tgcatctgcagatgc

SEQ ID NO: 492835 - DNA, 15 bp, Homo sapiens
atgcatctgcagatg

SEQ ID NO: 492836 - DNA, 15 bp, Homo sapiens
aatgcatctgcagat

SEQ ID NO: 492837 - DNA, 15 bp, Homo sapiens
gaatgcatctgcaga

SEQ ID NO: 492838 - DNA, 15 bp, Homo sapiens
tgaatgcatctgcag

SEQ ID NO: 492839 - DNA, 15 bp, Homo sapiens
gtgaatgcatctgca

SEQ ID NO: 492840 - DNA, 15 bp, Homo sapiens
tgtgaatgcatctgc

SEQ ID NO: 492841 - DNA, 15 bp, Homo sapiens
ttgtgaatgcatctg

SEQ ID NO: 492842 - DNA, 15 bp, Homo sapiens
tttgtgaatgcatct

SEQ ID NO: 492843 - DNA, 15 bp, Homo sapiens
gtttgtgaatgcatc

SEQ ID NO: 492844 - DNA, 15 bp, Homo sapiens
ggtttgtgaatgcat

SEQ ID NO: 492845 - DNA, 15 bp, Homo sapiens
aggtttgtgaatgca

SEQ ID NO: 492846 - DNA, 15 bp, Homo sapiens
caggtttgtgaatgc

SEQ ID NO: 492847 - DNA, 15 bp, Homo sapiens
gcaggtttgtgaatg

SEQ ID NO: 492848 - DNA, 15 bp, Homo sapiens
tgcaggtttgtgaat

SEQ ID NO: 492849 - DNA, 15 bp, Homo sapiens
ctgcaggtttgtgaa

SEQ ID NO: 492850 - DNA, 15 bp, Homo sapiens
tctgcaggtttgtga

SEQ ID NO: 492851 - DNA, 15 bp, Homo sapiens
ttctgcaggtttgtg

SEQ ID NO: 492852 - DNA, 15 bp, Homo sapiens
cttctgcaggtttgt

SEQ ID NO: 492853 - DNA, 15 bp, Homo sapiens
ccttctgcaggtttg

SEQ ID NO: 492854 - DNA, 15 bp, Homo sapiens
tccttctgcaggttt

SEQ ID NO: 492855 - DNA, 15 bp, Homo sapiens
ttccttctgcaggtt

SEQ ID NO: 492856 - DNA, 15 bp, Homo sapiens
cttccttctgcaggt

SEQ ID NO: 492857 - DNA, 15 bp, Homo sapiens
tcttccttctgcagg

SEQ ID NO: 492858 - DNA, 15 bp, Homo sapiens
ctcttccttctgcag

SEQ ID NO: 492859 - DNA, 15 bp, Homo sapiens
tctcttccttctgca

SEQ ID NO: 492860 - DNA, 15 bp, Homo sapiens
ttctcttccttctgc

SEQ ID NO: 492861 - DNA, 15 bp, Homo sapiens
gttctcttccttctg

SEQ ID NO: 492862 - DNA, 15 bp, Homo sapiens
tgttctcttccttct

SEQ ID NO: 492863 - DNA, 15 bp, Homo sapiens
ctgttctcttccttc

SEQ ID NO: 492864 - DNA, 15 bp, Homo sapiens
tctgttctcttcctt

SEQ ID NO: 492865 - DNA, 15 bp, Homo sapiens
ctctgttctcttcct

SEQ ID NO: 492866 - DNA, 15 bp, Homo sapiens
gctctgttctcttcc

SEQ ID NO: 492867 - DNA, 15 bp, Homo sapiens
agctctgttctcttc

SEQ ID NO: 492868 - DNA, 15 bp, Homo sapiens
aagctctgttctctt

SEQ ID NO: 492869 - DNA, 15 bp, Homo sapiens
gaagctctgttctct

SEQ ID NO: 492870 - DNA, 15 bp, Homo sapiens
tgaagctctgttctc

SEQ ID NO: 492871 - DNA, 15 bp, Homo sapiens
ctgaagctctgttct

SEQ ID NO: 492872 - DNA, 15 bp, Homo sapiens
gctgaagctctgttc

SEQ ID NO: 492873 - DNA, 15 bp, Homo sapiens
ggctgaagctctgtt

SEQ ID NO: 492874 - DNA, 15 bp, Homo sapiens
tggctgaagctctgt

SEQ ID NO: 492875 - DNA, 15 bp, Homo sapiens
gtggctgaagctctg

SEQ ID NO: 492876 - DNA, 15 bp, Homo sapiens
ggtggctgaagctct

SEQ ID NO: 492877 - DNA, 15 bp, Homo sapiens
tggtggctgaagctc

SEQ ID NO: 492878 - DNA, 15 bp, Homo sapiens
ctggtggctgaagct

SEQ ID NO: 492879 - DNA, 15 bp, Homo sapiens
cctggtggctgaagc

SEQ ID NO: 492880 - DNA, 15 bp, Homo sapiens
ccctggtggctgaag

SEQ ID NO: 492881 - DNA, 15 bp, Homo sapiens
tccctggtggctgaa

SEQ ID NO: 492882 - DNA, 15 bp, Homo sapiens
ctccctggtggctga

SEQ ID NO: 492883 - DNA, 15 bp, Homo sapiens
cctccctggtggctg

SEQ ID NO: 492884 - DNA, 15 bp, Homo sapiens
gcctccctggtggct

SEQ ID NO: 492885 - DNA, 15 bp, Homo sapiens
ggcctccctggtggc

SEQ ID NO: 492886 - DNA, 15 bp, Homo sapiens
cggcctccctggtgg

SEQ ID NO: 492887 - DNA, 15 bp, Homo sapiens
ccggcctccctggtg

SEQ ID NO: 492888 - DNA, 15 bp, Homo sapiens
cccggcctccctggt

SEQ ID NO: 492889 - DNA, 15 bp, Homo sapiens
ccccggcctccctgg

SEQ ID NO: 492890 - DNA, 15 bp, Homo sapiens
gccccggcctccctg

SEQ ID NO: 492891 - DNA, 15 bp, Homo sapiens
tgccccggcctccct

SEQ ID NO: 492892 - DNA, 15 bp, Homo sapiens
ctgccccggcctccc

SEQ ID NO: 492893 - DNA, 15 bp, Homo sapiens
gctgccccggcctcc

SEQ ID NO: 492894 - DNA, 15 bp, Homo sapiens
agctgccccggcctc

SEQ ID NO: 492895 - DNA, 15 bp, Homo sapiens
cagctgccccggcct

SEQ ID NO: 492896 - DNA, 15 bp, Homo sapiens
tcagctgccccggcc

SEQ ID NO: 492897 - DNA, 15 bp, Homo sapiens
gtcagctgccccggc

SEQ ID NO: 492898 - DNA, 15 bp, Homo sapiens
agtcagctgccccgg

SEQ ID NO: 492899 - DNA, 15 bp, Homo sapiens
aagtcagctgccccg

SEQ ID NO: 492900 - DNA, 15 bp, Homo sapiens
caagtcagctgcccc

SEQ ID NO: 492901 - DNA, 15 bp, Homo sapiens
ccaagtcagctgccc

SEQ ID NO: 492902 - DNA, 15 bp, Homo sapiens
cccaagtcagctgcc

SEQ ID NO: 492903 - DNA, 15 bp, Homo sapiens
ccccaagtcagctgc

SEQ ID NO: 492904 - DNA, 15 bp, Homo sapiens
tccccaagtcagctg

SEQ ID NO: 492905 - DNA, 15 bp, Homo sapiens
ctccccaagtcagct

SEQ ID NO: 492906 - DNA, 15 bp, Homo sapiens
cctccccaagtcagc

SEQ ID NO: 492907 - DNA, 15 bp, Homo sapiens
ccctccccaagtcag

SEQ ID NO: 492908 - DNA, 15 bp, Homo sapiens
cccctccccaagtca

SEQ ID NO: 492909 - DNA, 15 bp, Homo sapiens
tcccctccccaagtc

SEQ ID NO: 492910 - DNA, 15 bp, Homo sapiens
gtcccctccccaagt

SEQ ID NO: 492911 - DNA, 15 bp, Homo sapiens
ggtcccctccccaag

SEQ ID NO: 492912 - DNA, 15 bp, Homo sapiens
cggtcccctccccaa

SEQ ID NO: 492913 - DNA, 15 bp, Homo sapiens
tcggtcccctcccca

SEQ ID NO: 492914 - DNA, 15 bp, Homo sapiens
ctcggtcccctcccc

SEQ ID NO: 492915 - DNA, 15 bp, Homo sapiens
cctcggtcccctccc

SEQ ID NO: 492916 - DNA, 15 bp, Homo sapiens
ccctcggtcccctcc

SEQ ID NO: 492917 - DNA, 15 bp, Homo sapiens
cccctcggtcccctc

SEQ ID NO: 492918 - DNA, 15 bp, Homo sapiens
gcccctcggtcccct

SEQ ID NO: 492919 - DNA, 15 bp, Homo sapiens
tgcccctcggtcccc

SEQ ID NO: 492920 - DNA, 15 bp, Homo sapiens
atgcccctcggtccc

SEQ ID NO: 492921 - DNA, 15 bp, Homo sapiens
catgcccctcggtcc

SEQ ID NO: 492922 - DNA, 15 bp, Homo sapiens
acatgcccctcggtc

SEQ ID NO: 492923 - DNA, 15 bp, Homo sapiens
aacatgcccctcggt

SEQ ID NO: 492924 - DNA, 15 bp, Homo sapiens
aaacatgcccctcgg

SEQ ID NO: 492925 - DNA, 15 bp, Homo sapiens
caaacatgcccctcg

SEQ ID NO: 492926 - DNA, 15 bp, Homo sapiens
acaaacatgcccctc

SEQ ID NO: 492927 - DNA, 15 bp, Homo sapiens
gacaaacatgcccct

SEQ ID NO: 492928 - DNA, 15 bp, Homo sapiens
agacaaacatgcccc

SEQ ID NO: 492929 - DNA, 15 bp, Homo sapiens
aagacaaacatgccc

SEQ ID NO: 492930 - DNA, 15 bp, Homo sapiens
aaagacaaacatgcc

SEQ ID NO: 492931 - DNA, 15 bp, Homo sapiens
gaaagacaaacatgc

SEQ ID NO: 492932 - DNA, 15 bp, Homo sapiens
agaaagacaaacatg

SEQ ID NO: 492933 - DNA, 15 bp, Homo sapiens
gagaaagacaaacat

SEQ ID NO: 492934 - DNA, 15 bp, Homo sapiens
cgagaaagacaaaca

SEQ ID NO: 492935 - DNA, 15 bp, Homo sapiens
ccgagaaagacaaac

SEQ ID NO: 492936 - DNA, 15 bp, Homo sapiens
cccgagaaagacaaa

SEQ ID NO: 492937 - DNA, 15 bp, Homo sapiens
ccccgagaaagacaa

SEQ ID NO: 492938 - DNA, 15 bp, Homo sapiens
accccgagaaagaca

SEQ ID NO: 492939 - DNA, 15 bp, Homo sapiens
caccccgagaaagac

SEQ ID NO: 492940 - DNA, 15 bp, Homo sapiens
acaccccgagaaaga

SEQ ID NO: 492941 - DNA, 15 bp, Homo sapiens
tacaccccgagaaag

SEQ ID NO: 492942 - DNA, 15 bp, Homo sapiens
ctacaccccgagaaa

SEQ ID NO: 492943 - DNA, 15 bp, Homo sapiens
tctacaccccgagaa

SEQ ID NO: 492944 - DNA, 15 bp, Homo sapiens
gtctacaccccgaga

SEQ ID NO: 492945 - DNA, 15 bp, Homo sapiens
cgtctacaccccgag

SEQ ID NO: 492946 - DNA, 15 bp, Homo sapiens
ccgtctacaccccga

SEQ ID NO: 492947 - DNA, 15 bp, Homo sapiens
tccgtctacaccccg

SEQ ID NO: 492948 - DNA, 15 bp, Homo sapiens
gtccgtctacacccc

SEQ ID NO: 492949 - DNA, 15 bp, Homo sapiens
tgtccgtctacaccc

SEQ ID NO: 492950 - DNA, 15 bp, Homo sapiens
ttgtccgtctacacc

SEQ ID NO: 492951 - DNA, 15 bp, Homo sapiens
tttgtccgtctacac

SEQ ID NO: 492952 - DNA, 15 bp, Homo sapiens
ctttgtccgtctaca

SEQ ID NO: 492953 - DNA, 15 bp, Homo sapiens
actttgtccgtctac

SEQ ID NO: 492954 - DNA, 15 bp, Homo sapiens
cactttgtccgtcta

SEQ ID NO: 492955 - DNA, 15 bp, Homo sapiens
gcactttgtccgtct

SEQ ID NO: 492956 - DNA, 15 bp, Homo sapiens
ggcactttgtccgtc

SEQ ID NO: 492957 - DNA, 15 bp, Homo sapiens
gggcactttgtccgt

SEQ ID NO: 492958 - DNA, 15 bp, Homo sapiens
ggggcactttgtccg

SEQ ID NO: 492959 - DNA, 15 bp, Homo sapiens
tggggcactttgtcc

SEQ ID NO: 492960 - DNA, 15 bp, Homo sapiens
gtggggcactttgtc

SEQ ID NO: 492961 - DNA, 15 bp, Homo sapiens
agtggggcactttgt

SEQ ID NO: 492962 - DNA, 15 bp, Homo sapiens
gagtggggcactttg

SEQ ID NO: 492963 - DNA, 15 bp, Homo sapiens
cgagtggggcacttt

SEQ ID NO: 492964 - DNA, 15 bp, Homo sapiens
ccgagtggggcactt

SEQ ID NO: 492965 - DNA, 15 bp, Homo sapiens
gccgagtggggcact

SEQ ID NO: 492966 - DNA, 15 bp, Homo sapiens
ggccgagtggggcac

SEQ ID NO: 492967 - DNA, 15 bp, Homo sapiens
gggccgagtggggca

SEQ ID NO: 492968 - DNA, 15 bp, Homo sapiens
agggccgagtggggc

SEQ ID NO: 492969 - DNA, 15 bp, Homo sapiens
cagggccgagtgggg

SEQ ID NO: 492970 - DNA, 15 bp, Homo sapiens
ccagggccgagtggg

SEQ ID NO: 492971 - DNA, 15 bp, Homo sapiens
cccagggccgagtgg

SEQ ID NO: 492972 - DNA, 15 bp, Homo sapiens
ccccagggccgagtg

SEQ ID NO: 492973 - DNA, 15 bp, Homo sapiens
gccccagggccgagt

SEQ ID NO: 492974 - DNA, 15 bp, Homo sapiens
agccccagggccgag

SEQ ID NO: 492975 - DNA, 15 bp, Homo sapiens
gagccccagggccga

SEQ ID NO: 492976 - DNA, 15 bp, Homo sapiens
ggagccccagggccg

SEQ ID NO: 492977 - DNA, 15 bp, Homo sapiens
tggagccccagggcc

SEQ ID NO: 492978 - DNA, 15 bp, Homo sapiens
ctggagccccagggc

SEQ ID NO: 492979 - DNA, 15 bp, Homo sapiens
gctggagccccaggg

SEQ ID NO: 492980 - DNA, 15 bp, Homo sapiens
agctggagccccagg

SEQ ID NO: 492981 - DNA, 15 bp, Homo sapiens
tagctggagccccag

SEQ ID NO: 492982 - DNA, 15 bp, Homo sapiens
gtagctggagcccca

SEQ ID NO: 492983 - DNA, 15 bp, Homo sapiens
tgtagctggagcccc

SEQ ID NO: 492984 - DNA, 15 bp, Homo sapiens
ctgtagctggagccc

SEQ ID NO: 492985 - DNA, 15 bp, Homo sapiens
cctgtagctggagcc

SEQ ID NO: 492986 - DNA, 15 bp, Homo sapiens
tcctgtagctggagc

SEQ ID NO: 492987 - DNA, 15 bp, Homo sapiens
ctcctgtagctggag

SEQ ID NO: 492988 - DNA, 15 bp, Homo sapiens
tctcctgtagctgga

SEQ ID NO: 492989 - DNA, 15 bp, Homo sapiens
ctctcctgtagctgg

SEQ ID NO: 492990 - DNA, 15 bp, Homo sapiens
cctctcctgtagctg

SEQ ID NO: 492991 - DNA, 15 bp, Homo sapiens
ccctctcctgtagct

SEQ ID NO: 492992 - DNA, 15 bp, Homo sapiens
cccctctcctgtagc

SEQ ID NO: 492993 - DNA, 15 bp, Homo sapiens
tcccctctcctgtag

SEQ ID NO: 492994 - DNA, 15 bp, Homo sapiens
gtcccctctcctgta

SEQ ID NO: 492995 - DNA, 15 bp, Homo sapiens
agtcccctctcctgt

SEQ ID NO: 492996 - DNA, 15 bp, Homo sapiens
gagtcccctctcctg

SEQ ID NO: 492997 - DNA, 15 bp, Homo sapiens
ggagtcccctctcct

SEQ ID NO: 492998 - DNA, 15 bp, Homo sapiens
gggagtcccctctcc

SEQ ID NO: 492999 - DNA, 15 bp, Homo sapiens
agggagtcccctctc

SEQ ID NO: 493000 - DNA, 15 bp, Homo sapiens
gagggagtcccctct

SEQ ID NO: 493001 - DNA, 15 bp, Homo sapiens
ggagggagtcccctc

SEQ ID NO: 493002 - DNA, 15 bp, Homo sapiens
gggagggagtcccct

SEQ ID NO: 493003 - DNA, 15 bp, Homo sapiens
ggggagggagtcccc

SEQ ID NO: 493004 - DNA, 15 bp, Homo sapiens
tggggagggagtccc

SEQ ID NO: 493005 - DNA, 15 bp, Homo sapiens
ctggggagggagtcc

SEQ ID NO: 493006 - DNA, 15 bp, Homo sapiens
cctggggagggagtc

SEQ ID NO: 493007 - DNA, 15 bp, Homo sapiens
ccctggggagggagt

SEQ ID NO: 493008 - DNA, 15 bp, Homo sapiens
gccctggggagggag

SEQ ID NO: 493009 - DNA, 15 bp, Homo sapiens
agccctggggaggga

SEQ ID NO: 493010 - DNA, 15 bp, Homo sapiens
cagccctggggaggg

SEQ ID NO: 493011 - DNA, 15 bp, Homo sapiens
tcagccctggggagg

SEQ ID NO: 493012 - DNA, 15 bp, Homo sapiens
ctcagccctggggag

SEQ ID NO: 493013 - DNA, 15 bp, Homo sapiens
tctcagccctgggga

SEQ ID NO: 493014 - DNA, 15 bp, Homo sapiens
gtctcagccctgggg

SEQ ID NO: 493015 - DNA, 15 bp, Homo sapiens
tgtctcagccctggg

SEQ ID NO: 493016 - DNA, 15 bp, Homo sapiens
ctgtctcagccctgg

SEQ ID NO: 493017 - DNA, 15 bp, Homo sapiens
cctgtctcagccctg

SEQ ID NO: 493018 - DNA, 15 bp, Homo sapiens
acctgtctcagccct

SEQ ID NO: 493019 - DNA, 15 bp, Homo sapiens
aacctgtctcagccc

SEQ ID NO: 493020 - DNA, 15 bp, Homo sapiens
gaacctgtctcagcc

SEQ ID NO: 493021 - DNA, 15 bp, Homo sapiens
ggaacctgtctcagc

SEQ ID NO: 493022 - DNA, 15 bp, Homo sapiens
gggaacctgtctcag

SEQ ID NO: 493023 - DNA, 15 bp, Homo sapiens
agggaacctgtctca

SEQ ID NO: 493024 - DNA, 15 bp, Homo sapiens
cagggaacctgtctc

SEQ ID NO: 493025 - DNA, 15 bp, Homo sapiens
ccagggaacctgtct

SEQ ID NO: 493026 - DNA, 15 bp, Homo sapiens
cccagggaacctgtc

SEQ ID NO: 493027 - DNA, 15 bp, Homo sapiens
ccccagggaacctgt

SEQ ID NO: 493028 - DNA, 15 bp, Homo sapiens
cccccagggaacctg

SEQ ID NO: 493029 - DNA, 15 bp, Homo sapiens
tcccccagggaacct

SEQ ID NO: 493030 - DNA, 15 bp, Homo sapiens
ctcccccagggaacc

SEQ ID NO: 493031 - DNA, 15 bp, Homo sapiens
gctcccccagggaac

SEQ ID NO: 493032 - DNA, 15 bp, Homo sapiens
cgctcccccagggaa

SEQ ID NO: 493033 - DNA, 15 bp, Homo sapiens
ccgctcccccaggga

SEQ ID NO: 493034 - DNA, 15 bp, Homo sapiens
tccgctcccccaggg

SEQ ID NO: 493035 - DNA, 15 bp, Homo sapiens
ttccgctcccccagg

SEQ ID NO: 493036 - DNA, 15 bp, Homo sapiens
tttccgctcccccag

SEQ ID NO: 493037 - DNA, 15 bp, Homo sapiens
ctttccgctccccca

SEQ ID NO: 493038 - DNA, 15 bp, Homo sapiens
gctttccgctccccc

SEQ ID NO: 493039 - DNA, 15 bp, Homo sapiens
agctttccgctcccc

SEQ ID NO: 493040 - DNA, 15 bp, Homo sapiens
cagctttccgctccc

SEQ ID NO: 493041 - DNA, 15 bp, Homo sapiens
ccagctttccgctcc

SEQ ID NO: 493042 - DNA, 15 bp, Homo sapiens
cccagctttccgctc

SEQ ID NO: 493043 - DNA, 15 bp, Homo sapiens
gcccagctttccgct

SEQ ID NO: 493044 - DNA, 15 bp, Homo sapiens
ggcccagctttccgc

SEQ ID NO: 493045 - DNA, 15 bp, Homo sapiens
gggcccagctttccg

SEQ ID NO: 493046 - DNA, 15 bp, Homo sapiens
tgggcccagctttcc

SEQ ID NO: 493047 - DNA, 15 bp, Homo sapiens
ctgggcccagctttc

SEQ ID NO: 493048 - DNA, 15 bp, Homo sapiens
cctgggcccagcttt

SEQ ID NO: 493049 - DNA, 15 bp, Homo sapiens
tcctgggcccagctt

SEQ ID NO: 493050 - DNA, 15 bp, Homo sapiens
atcctgggcccagct

SEQ ID NO: 493051 - DNA, 15 bp, Homo sapiens
gatcctgggcccagc

SEQ ID NO: 493052 - DNA, 15 bp, Homo sapiens
tgatcctgggcccag

SEQ ID NO: 493053 - DNA, 15 bp, Homo sapiens
ctgatcctgggccca

SEQ ID NO: 493054 - DNA, 15 bp, Homo sapiens
cctgatcctgggccc

SEQ ID NO: 493055 - DNA, 15 bp, Homo sapiens
tcctgatcctgggcc

SEQ ID NO: 493056 - DNA, 15 bp, Homo sapiens
atcctgatcctgggc

SEQ ID NO: 493057 - DNA, 15 bp, Homo sapiens
catcctgatcctggg

SEQ ID NO: 493058 - DNA, 15 bp, Homo sapiens
ccatcctgatcctgg

SEQ ID NO: 493059 - DNA, 15 bp, Homo sapiens
cccatcctgatcctg

SEQ ID NO: 493060 - DNA, 15 bp, Homo sapiens
tcccatcctgatcct

SEQ ID NO: 493061 - DNA, 15 bp, Homo sapiens
ctcccatcctgatcc

SEQ ID NO: 493062 - DNA, 15 bp, Homo sapiens
cctcccatcctgatc

SEQ ID NO: 493063 - DNA, 15 bp, Homo sapiens
gcctcccatcctgat

SEQ ID NO: 493064 - DNA, 15 bp, Homo sapiens
tgcctcccatcctga

SEQ ID NO: 493065 - DNA, 15 bp, Homo sapiens
ctgcctcccatcctg

SEQ ID NO: 493066 - DNA, 15 bp, Homo sapiens
cctgcctcccatcct

SEQ ID NO: 493067 - DNA, 15 bp, Homo sapiens
ccctgcctcccatcc

SEQ ID NO: 493068 - DNA, 15 bp, Homo sapiens
accctgcctcccatc

SEQ ID NO: 493069 - DNA, 15 bp, Homo sapiens
gaccctgcctcccat

SEQ ID NO: 493070 - DNA, 15 bp, Homo sapiens
agaccctgcctccca

SEQ ID NO: 493071 - DNA, 15 bp, Homo sapiens
cagaccctgcctccc

SEQ ID NO: 493072 - DNA, 15 bp, Homo sapiens
ccagaccctgcctcc

SEQ ID NO: 493073 - DNA, 15 bp, Homo sapiens
cccagaccctgcctc

SEQ ID NO: 493074 - DNA, 15 bp, Homo sapiens
ccccagaccctgcct

SEQ ID NO: 493075 - DNA, 15 bp, Homo sapiens
cccccagaccctgcc

SEQ ID NO: 493076 - DNA, 15 bp, Homo sapiens
tcccccagaccctgc

SEQ ID NO: 493077 - DNA, 15 bp, Homo sapiens
ctcccccagaccctg

SEQ ID NO: 493078 - DNA, 15 bp, Homo sapiens
cctcccccagaccct

SEQ ID NO: 493079 - DNA, 15 bp, Homo sapiens
tcctcccccagaccc

SEQ ID NO: 493080 - DNA, 15 bp, Homo sapiens
ctcctcccccagacc

SEQ ID NO: 493081 - DNA, 15 bp, Homo sapiens
cctcctcccccagac

SEQ ID NO: 493082 - DNA, 15 bp, Homo sapiens
tcctcctcccccaga

SEQ ID NO: 493083 - DNA, 15 bp, Homo sapiens
ttcctcctcccccag

SEQ ID NO: 493084 - DNA, 15 bp, Homo sapiens
tttcctcctccccca

SEQ ID NO: 493085 - DNA, 15 bp, Homo sapiens
ctttcctcctccccc

SEQ ID NO: 493086 - DNA, 15 bp, Homo sapiens
tctttcctcctcccc

SEQ ID NO: 493087 - DNA, 15 bp, Homo sapiens
ctctttcctcctccc

SEQ ID NO: 493088 - DNA, 15 bp, Homo sapiens
cctctttcctcctcc

SEQ ID NO: 493089 - DNA, 15 bp, Homo sapiens
gcctctttcctcctc

SEQ ID NO: 493090 - DNA, 15 bp, Homo sapiens
tgcctctttcctcct

SEQ ID NO: 493091 - DNA, 15 bp, Homo sapiens
ctgcctctttcctcc

SEQ ID NO: 493092 - DNA, 15 bp, Homo sapiens
tctgcctctttcctc

SEQ ID NO: 493093 - DNA, 15 bp, Homo sapiens
ttctgcctctttcct

SEQ ID NO: 493094 - DNA, 15 bp, Homo sapiens
cttctgcctctttcc

SEQ ID NO: 493095 - DNA, 15 bp, Homo sapiens
ccttctgcctctttc

SEQ ID NO: 493096 - DNA, 15 bp, Homo sapiens
tccttctgcctcttt

SEQ ID NO: 493097 - DNA, 15 bp, Homo sapiens
ctccttctgcctctt

SEQ ID NO: 493098 - DNA, 15 bp, Homo sapiens
tctccttctgcctct

SEQ ID NO: 493099 - DNA, 15 bp, Homo sapiens
ctctccttctgcctc

SEQ ID NO: 493100 - DNA, 15 bp, Homo sapiens
gctctccttctgcct

SEQ ID NO: 493101 - DNA, 15 bp, Homo sapiens
ggctctccttctgcc

SEQ ID NO: 493102 - DNA, 15 bp, Homo sapiens
tggctctccttctgc

SEQ ID NO: 493103 - DNA, 15 bp, Homo sapiens
gtggctctccttctg

SEQ ID NO: 493104 - DNA, 15 bp, Homo sapiens
tgtggctctccttct

SEQ ID NO: 493105 - DNA, 15 bp, Homo sapiens
ctgtggctctccttc

SEQ ID NO: 493106 - DNA, 15 bp, Homo sapiens
gctgtggctctcctt

SEQ ID NO: 493107 - DNA, 15 bp, Homo sapiens
ggctgtggctctcct

SEQ ID NO: 493108 - DNA, 15 bp, Homo sapiens
tggctgtggctctcc

SEQ ID NO: 493109 - DNA, 15 bp, Homo sapiens
gtggctgtggctctc

SEQ ID NO: 493110 - DNA, 15 bp, Homo sapiens
ggtggctgtggctct

SEQ ID NO: 493111 - DNA, 15 bp, Homo sapiens
aggtggctgtggctc

SEQ ID NO: 493112 - DNA, 15 bp, Homo sapiens
caggtggctgtggct

SEQ ID NO: 493113 - DNA, 15 bp, Homo sapiens
ccaggtggctgtggc

SEQ ID NO: 493114 - DNA, 15 bp, Homo sapiens
tccaggtggctgtgg

SEQ ID NO: 493115 - DNA, 15 bp, Homo sapiens
gtccaggtggctgtg

SEQ ID NO: 493116 - DNA, 15 bp, Homo sapiens
tgtccaggtggctgt

SEQ ID NO: 493117 - DNA, 15 bp, Homo sapiens
gtgtccaggtggctg

SEQ ID NO: 493118 - DNA, 15 bp, Homo sapiens
agtgtccaggtggct

SEQ ID NO: 493119 - DNA, 15 bp, Homo sapiens
aagtgtccaggtggc

SEQ ID NO: 493120 - DNA, 15 bp, Homo sapiens
taagtgtccaggtgg

SEQ ID NO: 493121 - DNA, 15 bp, Homo sapiens
gtaagtgtccaggtg

SEQ ID NO: 493122 - DNA, 15 bp, Homo sapiens
agtaagtgtccaggt

SEQ ID NO: 493123 - DNA, 15 bp, Homo sapiens
gagtaagtgtccagg

SEQ ID NO: 493124 - DNA, 15 bp, Homo sapiens
tgagtaagtgtccag

SEQ ID NO: 493125 - DNA, 15 bp, Homo sapiens
ctgagtaagtgtcca

SEQ ID NO: 493126 - DNA, 15 bp, Homo sapiens
cctgagtaagtgtcc

SEQ ID NO: 493127 - DNA, 15 bp, Homo sapiens
ccctgagtaagtgtc

SEQ ID NO: 493128 - DNA, 15 bp, Homo sapiens
tccctgagtaagtgt

SEQ ID NO: 493129 - DNA, 15 bp, Homo sapiens
gtccctgagtaagtg

SEQ ID NO: 493130 - DNA, 15 bp, Homo sapiens
ggtccctgagtaagt

SEQ ID NO: 493131 - DNA, 15 bp, Homo sapiens
tggtccctgagtaag

SEQ ID NO: 493132 - DNA, 15 bp, Homo sapiens
gtggtccctgagtaa

SEQ ID NO: 493133 - DNA, 15 bp, Homo sapiens
agtggtccctgagta

SEQ ID NO: 493134 - DNA, 15 bp, Homo sapiens
aagtggtccctgagt

SEQ ID NO: 493135 - DNA, 15 bp, Homo sapiens
caagtggtccctgag

SEQ ID NO: 493136 - DNA, 15 bp, Homo sapiens
gcaagtggtccctga

SEQ ID NO: 493137 - DNA, 15 bp, Homo sapiens
agcaagtggtccctg

SEQ ID NO: 493138 - DNA, 15 bp, Homo sapiens
aagcaagtggtccct

SEQ ID NO: 493139 - DNA, 15 bp, Homo sapiens
caagcaagtggtccc

SEQ ID NO: 493140 - DNA, 15 bp, Homo sapiens
tcaagcaagtggtcc

SEQ ID NO: 493141 - DNA, 15 bp, Homo sapiens
atcaagcaagtggtc

SEQ ID NO: 493142 - DNA, 15 bp, Homo sapiens
gatcaagcaagtggt

SEQ ID NO: 493143 - DNA, 15 bp, Homo sapiens
agatcaagcaagtgg

SEQ ID NO: 493144 - DNA, 15 bp, Homo sapiens
cagatcaagcaagtg

SEQ ID NO: 493145 - DNA, 15 bp, Homo sapiens
acagatcaagcaagt

SEQ ID NO: 493146 - DNA, 15 bp, Homo sapiens
cacagatcaagcaag

SEQ ID NO: 493147 - DNA, 15 bp, Homo sapiens
ccacagatcaagcaa

SEQ ID NO: 493148 - DNA, 15 bp, Homo sapiens
accacagatcaagca

SEQ ID NO: 493149 - DNA, 15 bp, Homo sapiens
aaccacagatcaagc

SEQ ID NO: 493150 - DNA, 15 bp, Homo sapiens
aaaccacagatcaag

SEQ ID NO: 493151 - DNA, 15 bp, Homo sapiens
gaaaccacagatcaa

SEQ ID NO: 493152 - DNA, 15 bp, Homo sapiens
tgaaaccacagatca

SEQ ID NO: 493153 - DNA, 15 bp, Homo sapiens
gtgaaaccacagatc

SEQ ID NO: 493154 - DNA, 15 bp, Homo sapiens
tgtgaaaccacagat

SEQ ID NO: 493155 - DNA, 15 bp, Homo sapiens
atgtgaaaccacaga

SEQ ID NO: 493156 - DNA, 15 bp, Homo sapiens
tatgtgaaaccacag

SEQ ID NO: 493157 - DNA, 15 bp, Homo sapiens
atatgtgaaaccaca

SEQ ID NO: 493158 - DNA, 15 bp, Homo sapiens
gatatgtgaaaccac

SEQ ID NO: 493159 - DNA, 15 bp, Homo sapiens
ggatatgtgaaacca

SEQ ID NO: 493160 - DNA, 15 bp, Homo sapiens
tggatatgtgaaacc

SEQ ID NO: 493161 - DNA, 15 bp, Homo sapiens
atggatatgtgaaac

SEQ ID NO: 493162 - DNA, 15 bp, Homo sapiens
gatggatatgtgaaa

SEQ ID NO: 493163 - DNA, 15 bp, Homo sapiens
tgatggatatgtgaa

SEQ ID NO: 493164 - DNA, 15 bp, Homo sapiens
ttgatggatatgtga

SEQ ID NO: 493165 - DNA, 15 bp, Homo sapiens
gttgatggatatgtg

SEQ ID NO: 493166 - DNA, 15 bp, Homo sapiens
tgttgatggatatgt

SEQ ID NO: 493167 - DNA, 15 bp, Homo sapiens
ctgttgatggatatg

SEQ ID NO: 493168 - DNA, 15 bp, Homo sapiens
gctgttgatggatat

SEQ ID NO: 493169 - DNA, 15 bp, Homo sapiens
agctgttgatggata

SEQ ID NO: 493170 - DNA, 15 bp, Homo sapiens
aagctgttgatggat

SEQ ID NO: 493171 - DNA, 15 bp, Homo sapiens
aaagctgttgatgga

SEQ ID NO: 493172 - DNA, 15 bp, Homo sapiens
taaagctgttgatgg

SEQ ID NO: 493173 - DNA, 15 bp, Homo sapiens
ctaaagctgttgatg

SEQ ID NO: 493174 - DNA, 15 bp, Homo sapiens
gctaaagctgttgat

SEQ ID NO: 493175 - DNA, 15 bp, Homo sapiens
agctaaagctgttga

SEQ ID NO: 493176 - DNA, 15 bp, Homo sapiens
cagctaaagctgttg

SEQ ID NO: 493177 - DNA, 15 bp, Homo sapiens
acagctaaagctgtt

SEQ ID NO: 493178 - DNA, 15 bp, Homo sapiens
gacagctaaagctgt

SEQ ID NO: 493179 - DNA, 15 bp, Homo sapiens
tgacagctaaagctg

SEQ ID NO: 493180 - DNA, 15 bp, Homo sapiens
ttgacagctaaagct

SEQ ID NO: 493181 - DNA, 15 bp, Homo sapiens
cttgacagctaaagc

SEQ ID NO: 493182 - DNA, 15 bp, Homo sapiens
ccttgacagctaaag

SEQ ID NO: 493183 - DNA, 15 bp, Homo sapiens
cccttgacagctaaa

SEQ ID NO: 493184 - DNA, 15 bp, Homo sapiens
tcccttgacagctaa

SEQ ID NO: 493185 - DNA, 15 bp, Homo sapiens
ttcccttgacagcta

SEQ ID NO: 493186 - DNA, 15 bp, Homo sapiens
cttcccttgacagct

SEQ ID NO: 493187 - DNA, 15 bp, Homo sapiens
tcttcccttgacagc

SEQ ID NO: 493188 - DNA, 15 bp, Homo sapiens
ttcttcccttgacag

SEQ ID NO: 493189 - DNA, 15 bp, Homo sapiens
gttcttcccttgaca

SEQ ID NO: 493190 - DNA, 15 bp, Homo sapiens
tgttcttcccttgac

SEQ ID NO: 493191 - DNA, 15 bp, Homo sapiens
ctgttcttcccttga

SEQ ID NO: 493192 - DNA, 15 bp, Homo sapiens
actgttcttcccttg

SEQ ID NO: 493193 - DNA, 15 bp, Homo sapiens
cactgttcttccctt

SEQ ID NO: 493194 - DNA, 15 bp, Homo sapiens
ccactgttcttccct

SEQ ID NO: 493195 - DNA, 15 bp, Homo sapiens
accactgttcttccc

SEQ ID NO: 493196 - DNA, 15 bp, Homo sapiens
caccactgttcttcc

SEQ ID NO: 493197 - DNA, 15 bp, Homo sapiens
tcaccactgttcttc

SEQ ID NO: 493198 - DNA, 15 bp, Homo sapiens
ctcaccactgttctt

SEQ ID NO: 493199 - DNA, 15 bp, Homo sapiens
tctcaccactgttct

SEQ ID NO: 493200 - DNA, 15 bp, Homo sapiens
ttctcaccactgttc

SEQ ID NO: 493201 - DNA, 15 bp, Homo sapiens
gttctcaccactgtt

SEQ ID NO: 493202 - DNA, 15 bp, Homo sapiens
ggttctcaccactgt

SEQ ID NO: 493203 - DNA, 15 bp, Homo sapiens
tggttctcaccactg

SEQ ID NO: 493204 - DNA, 15 bp, Homo sapiens
ttggttctcaccact

SEQ ID NO: 493205 - DNA, 15 bp, Homo sapiens
tttggttctcaccac

SEQ ID NO: 493206 - DNA, 15 bp, Homo sapiens
ctttggttctcacca

SEQ ID NO: 493207 - DNA, 15 bp, Homo sapiens
actttggttctcacc

SEQ ID NO: 493208 - DNA, 15 bp, Homo sapiens
gactttggttctcac

SEQ ID NO: 493209 - DNA, 15 bp, Homo sapiens
agactttggttctca

SEQ ID NO: 493210 - DNA, 15 bp, Homo sapiens
gagactttggttctc

SEQ ID NO: 493211 - DNA, 15 bp, Homo sapiens
agagactttggttct

SEQ ID NO: 493212 - DNA, 15 bp, Homo sapiens
cagagactttggttc

SEQ ID NO: 493213 - DNA, 15 bp, Homo sapiens
ccagagactttggtt

SEQ ID NO: 493214 - DNA, 15 bp, Homo sapiens
cccagagactttggt

SEQ ID NO: 493215 - DNA, 15 bp, Homo sapiens
tcccagagactttgg

SEQ ID NO: 493216 - DNA, 15 bp, Homo sapiens
ttcccagagactttg

SEQ ID NO: 493217 - DNA, 15 bp, Homo sapiens
gttcccagagacttt

SEQ ID NO: 493218 - DNA, 15 bp, Homo sapiens
agttcccagagactt

SEQ ID NO: 493219 - DNA, 15 bp, Homo sapiens
gagttcccagagact

SEQ ID NO: 493220 - DNA, 15 bp, Homo sapiens
ggagttcccagagac

SEQ ID NO: 493221 - DNA, 15 bp, Homo sapiens
gggagttcccagaga

SEQ ID NO: 493222 - DNA, 15 bp, Homo sapiens
tgggagttcccagag

SEQ ID NO: 493223 - DNA, 15 bp, Homo sapiens
ttgggagttcccaga

SEQ ID NO: 493224 - DNA, 15 bp, Homo sapiens
cttgggagttcccag

SEQ ID NO: 493225 - DNA, 15 bp, Homo sapiens
acttgggagttccca

SEQ ID NO: 493226 - DNA, 15 bp, Homo sapiens
cacttgggagttccc

SEQ ID NO: 493227 - DNA, 15 bp, Homo sapiens
ccacttgggagttcc

SEQ ID NO: 493228 - DNA, 15 bp, Homo sapiens
cccacttgggagttc

SEQ ID NO: 493229 - DNA, 15 bp, Homo sapiens
ccccacttgggagtt

SEQ ID NO: 493230 - DNA, 15 bp, Homo sapiens
accccacttgggagt

SEQ ID NO: 493231 - DNA, 15 bp, Homo sapiens
caccccacttgggag

SEQ ID NO: 493232 - DNA, 15 bp, Homo sapiens
ccaccccacttggga

SEQ ID NO: 493233 - DNA, 15 bp, Homo sapiens
tccaccccacttggg

SEQ ID NO: 493234 - DNA, 15 bp, Homo sapiens
ttccaccccacttgg

SEQ ID NO: 493235 - DNA, 15 bp, Homo sapiens
cttccaccccacttg

SEQ ID NO: 493236 - DNA, 15 bp, Homo sapiens
gcttccaccccactt

SEQ ID NO: 493237 - DNA, 15 bp, Homo sapiens
ggcttccaccccact

SEQ ID NO: 493238 - DNA, 15 bp, Homo sapiens
gggcttccaccccac

SEQ ID NO: 493239 - DNA, 15 bp, Homo sapiens
tgggcttccacccca

SEQ ID NO: 493240 - DNA, 15 bp, Homo sapiens
gtgggcttccacccc

SEQ ID NO: 493241 - DNA, 15 bp, Homo sapiens
cgtgggcttccaccc

SEQ ID NO: 493242 - DNA, 15 bp, Homo sapiens
gcgtgggcttccacc

SEQ ID NO: 493243 - DNA, 15 bp, Homo sapiens
ggcgtgggcttccac

SEQ ID NO: 493244 - DNA, 15 bp, Homo sapiens
gggcgtgggcttcca

SEQ ID NO: 493245 - DNA, 15 bp, Homo sapiens
ggggcgtgggcttcc

SEQ ID NO: 493246 - DNA, 15 bp, Homo sapiens
tggggcgtgggcttc

SEQ ID NO: 493247 - DNA, 15 bp, Homo sapiens
atggggcgtgggctt

SEQ ID NO: 493248 - DNA, 15 bp, Homo sapiens
catggggcgtgggct

SEQ ID NO: 493249 - DNA, 15 bp, Homo sapiens
acatggggcgtgggc

SEQ ID NO: 493250 - DNA, 15 bp, Homo sapiens
tacatggggcgtggg

SEQ ID NO: 493251 - DNA, 15 bp, Homo sapiens
ctacatggggcgtgg

SEQ ID NO: 493252 - DNA, 15 bp, Homo sapiens
actacatggggcgtg

SEQ ID NO: 493253 - DNA, 15 bp, Homo sapiens
gactacatggggcgt

SEQ ID NO: 493254 - DNA, 15 bp, Homo sapiens
agactacatggggcg

SEQ ID NO: 493255 - DNA, 15 bp, Homo sapiens
gagactacatggggc

SEQ ID NO: 493256 - DNA, 15 bp, Homo sapiens
ggagactacatgggg

SEQ ID NO: 493257 - DNA, 15 bp, Homo sapiens
gggagactacatggg

SEQ ID NO: 493258 - DNA, 15 bp, Homo sapiens
agggagactacatgg

SEQ ID NO: 493259 - DNA, 15 bp, Homo sapiens
gagggagactacatg

SEQ ID NO: 493260 - DNA, 15 bp, Homo sapiens
ggagggagactacat

SEQ ID NO: 493261 - DNA, 15 bp, Homo sapiens
aggagggagactaca

SEQ ID NO: 493262 - DNA, 15 bp, Homo sapiens
caggagggagactac

SEQ ID NO: 493263 - DNA, 15 bp, Homo sapiens
gcaggagggagacta

SEQ ID NO: 493264 - DNA, 15 bp, Homo sapiens
agcaggagggagact

SEQ ID NO: 493265 - DNA, 15 bp, Homo sapiens
gagcaggagggagac

SEQ ID NO: 493266 - DNA, 15 bp, Homo sapiens
tgagcaggagggaga

SEQ ID NO: 493267 - DNA, 15 bp, Homo sapiens
gtgagcaggagggag

SEQ ID NO: 493268 - DNA, 15 bp, Homo sapiens
tgtgagcaggaggga

SEQ ID NO: 493269 - DNA, 15 bp, Homo sapiens
atgtgagcaggaggg

SEQ ID NO: 493270 - DNA, 15 bp, Homo sapiens
gatgtgagcaggagg

SEQ ID NO: 493271 - DNA, 15 bp, Homo sapiens
tgatgtgagcaggag

SEQ ID NO: 493272 - DNA, 15 bp, Homo sapiens
gtgatgtgagcagga

SEQ ID NO: 493273 - DNA, 15 bp, Homo sapiens
ggtgatgtgagcagg

SEQ ID NO: 493274 - DNA, 15 bp, Homo sapiens
aggtgatgtgagcag

SEQ ID NO: 493275 - DNA, 15 bp, Homo sapiens
aaggtgatgtgagca

SEQ ID NO: 493276 - DNA, 15 bp, Homo sapiens
caaggtgatgtgagc

SEQ ID NO: 493277 - DNA, 15 bp, Homo sapiens
acaaggtgatgtgag

SEQ ID NO: 493278 - DNA, 15 bp, Homo sapiens
cacaaggtgatgtga

SEQ ID NO: 493279 - DNA, 15 bp, Homo sapiens
acacaaggtgatgtg

SEQ ID NO: 493280 - DNA, 15 bp, Homo sapiens
aacacaaggtgatgt

SEQ ID NO: 493281 - DNA, 15 bp, Homo sapiens
gaacacaaggtgatg

SEQ ID NO: 493282 - DNA, 15 bp, Homo sapiens
agaacacaaggtgat

SEQ ID NO: 493283 - DNA, 15 bp, Homo sapiens
gagaacacaaggtga

SEQ ID NO: 493284 - DNA, 15 bp, Homo sapiens
tgagaacacaaggtg

SEQ ID NO: 493285 - DNA, 15 bp, Homo sapiens
ctgagaacacaaggt

SEQ ID NO: 493286 - DNA, 15 bp, Homo sapiens
gctgagaacacaagg

SEQ ID NO: 493287 - DNA, 15 bp, Homo sapiens
agctgagaacacaag

SEQ ID NO: 493288 - DNA, 15 bp, Homo sapiens
cagctgagaacacaa

SEQ ID NO: 493289 - DNA, 15 bp, Homo sapiens
ccagctgagaacaca

SEQ ID NO: 493290 - DNA, 15 bp, Homo sapiens
cccagctgagaacac

SEQ ID NO: 493291 - DNA, 15 bp, Homo sapiens
tcccagctgagaaca

SEQ ID NO: 493292 - DNA, 15 bp, Homo sapiens
atcccagctgagaac

SEQ ID NO: 493293 - DNA, 15 bp, Homo sapiens
catcccagctgagaa

SEQ ID NO: 493294 - DNA, 15 bp, Homo sapiens
tcatcccagctgaga

SEQ ID NO: 493295 - DNA, 15 bp, Homo sapiens
ctcatcccagctgag

SEQ ID NO: 493296 - DNA, 15 bp, Homo sapiens
tctcatcccagctga

SEQ ID NO: 493297 - DNA, 15 bp, Homo sapiens
atctcatcccagctg

SEQ ID NO: 493298 - DNA, 15 bp, Homo sapiens
aatctcatcccagct

SEQ ID NO: 493299 - DNA, 15 bp, Homo sapiens
aaatctcatcccagc

SEQ ID NO: 493300 - DNA, 15 bp, Homo sapiens
gaaatctcatcccag

SEQ ID NO: 493301 - DNA, 15 bp, Homo sapiens
ggaaatctcatccca

SEQ ID NO: 493302 - DNA, 15 bp, Homo sapiens
gggaaatctcatccc

SEQ ID NO: 493303 - DNA, 15 bp, Homo sapiens
tgggaaatctcatcc

SEQ ID NO: 493304 - DNA, 15 bp, Homo sapiens
ttgggaaatctcatc

SEQ ID NO: 493305 - DNA, 15 bp, Homo sapiens
cttgggaaatctcat

SEQ ID NO: 493306 - DNA, 15 bp, Homo sapiens
ccttgggaaatctca

SEQ ID NO: 493307 - DNA, 15 bp, Homo sapiens
tccttgggaaatctc

SEQ ID NO: 493308 - DNA, 15 bp, Homo sapiens
gtccttgggaaatct

SEQ ID NO: 493309 - DNA, 15 bp, Homo sapiens
ggtccttgggaaatc

SEQ ID NO: 493310 - DNA, 15 bp, Homo sapiens
gggtccttgggaaat

SEQ ID NO: 493311 - DNA, 15 bp, Homo sapiens
ggggtccttgggaaa

SEQ ID NO: 493312 - DNA, 15 bp, Homo sapiens
gggggtccttgggaa

SEQ ID NO: 493313 - DNA, 15 bp, Homo sapiens
tgggggtccttggga

SEQ ID NO: 493314 - DNA, 15 bp, Homo sapiens
ttgggggtccttggg

SEQ ID NO: 493315 - DNA, 15 bp, Homo sapiens
attgggggtccttgg

SEQ ID NO: 493316 - DNA, 15 bp, Homo sapiens
tattgggggtccttg

SEQ ID NO: 493317 - DNA, 15 bp, Homo sapiens
ttattgggggtcctt

SEQ ID NO: 493318 - DNA, 15 bp, Homo sapiens
tttattgggggtcct

SEQ ID NO: 493319 - DNA, 15 bp, Homo sapiens
gtttattgggggtcc

SEQ ID NO: 493320 - DNA, 15 bp, Homo sapiens
tgtttattgggggtc

SEQ ID NO: 493321 - DNA, 15 bp, Homo sapiens
gtgtttattgggggt

SEQ ID NO: 493322 - DNA, 15 bp, Homo sapiens
ggtgtttattggggg

SEQ ID NO: 493323 - DNA, 15 bp, Homo sapiens
tggtgtttattgggg

SEQ ID NO: 493324 - DNA, 15 bp, Homo sapiens
ctggtgtttattggg

SEQ ID NO: 493325 - DNA, 15 bp, Homo sapiens
gctggtgtttattgg

SEQ ID NO: 493326 - DNA, 15 bp, Homo sapiens
agctggtgtttattg

SEQ ID NO: 493327 - DNA, 15 bp, Homo sapiens
cagctggtgtttatt

SEQ ID NO: 493328 - DNA, 15 bp, Homo sapiens
tcagctggtgtttat

SEQ ID NO: 493329 - DNA, 15 bp, Homo sapiens
atcagctggtgttta

SEQ ID NO: 493330 - DNA, 15 bp, Homo sapiens
catcagctggtgttt

SEQ ID NO: 493331 - DNA, 15 bp, Homo sapiens
tcatcagctggtgtt

SEQ ID NO: 493332 - DNA, 15 bp, Homo sapiens
ttcatcagctggtgt

SEQ ID NO: 493333 - DNA, 15 bp, Homo sapiens
attcatcagctggtg

SEQ ID NO: 493334 - DNA, 15 bp, Homo sapiens
gattcatcagctggt

SEQ ID NO: 493335 - DNA, 15 bp, Homo sapiens
ggattcatcagctgg

SEQ ID NO: 493336 - DNA, 15 bp, Homo sapiens
aggattcatcagctg

SEQ ID NO: 493337 - DNA, 15 bp, Homo sapiens
caggattcatcagct

SEQ ID NO: 493338 - DNA, 15 bp, Homo sapiens
gcaggattcatcagc

SEQ ID NO: 493339 - DNA, 15 bp, Homo sapiens
ggcaggattcatcag

SEQ ID NO: 493340 - DNA, 15 bp, Homo sapiens
aggcaggattcatca

SEQ ID NO: 493341 - DNA, 15 bp, Homo sapiens
caggcaggattcatc

SEQ ID NO: 493342 - DNA, 15 bp, Homo sapiens
tcaggcaggattcat

SEQ ID NO: 493343 - DNA, 15 bp, Homo sapiens
ctcaggcaggattca

SEQ ID NO: 493344 - DNA, 15 bp, Homo sapiens
cctcaggcaggattc

SEQ ID NO: 493345 - DNA, 15 bp, Homo sapiens
ccctcaggcaggatt

SEQ ID NO: 493346 - DNA, 15 bp, Homo sapiens
accctcaggcaggat

SEQ ID NO: 493347 - DNA, 15 bp, Homo sapiens
gaccctcaggcagga

SEQ ID NO: 493348 - DNA, 15 bp, Homo sapiens
tgaccctcaggcagg

SEQ ID NO: 493349 - DNA, 15 bp, Homo sapiens
gtgaccctcaggcag

SEQ ID NO: 493350 - DNA, 15 bp, Homo sapiens
agtgaccctcaggca

SEQ ID NO: 493351 - DNA, 15 bp, Homo sapiens
cagtgaccctcaggc

SEQ ID NO: 493352 - DNA, 15 bp, Homo sapiens
tcagtgaccctcagg

SEQ ID NO: 493353 - DNA, 15 bp, Homo sapiens
ctcagtgaccctcag

SEQ ID NO: 493354 - DNA, 15 bp, Homo sapiens
tctcagtgaccctca

SEQ ID NO: 493355 - DNA, 15 bp, Homo sapiens
gtctcagtgaccctc

SEQ ID NO: 493356 - DNA, 15 bp, Homo sapiens
ggtctcagtgaccct

SEQ ID NO: 493357 - DNA, 15 bp, Homo sapiens
gggtctcagtgaccc

SEQ ID NO: 493358 - DNA, 15 bp, Homo sapiens
ggggtctcagtgacc

SEQ ID NO: 493359 - DNA, 15 bp, Homo sapiens
aggggtctcagtgac

SEQ ID NO: 493360 - DNA, 15 bp, Homo sapiens
caggggtctcagtga

SEQ ID NO: 493361 - DNA, 15 bp, Homo sapiens
ccaggggtctcagtg

SEQ ID NO: 493362 - DNA, 15 bp, Homo sapiens
gccaggggtctcagt

SEQ ID NO: 493363 - DNA, 15 bp, Homo sapiens
agccaggggtctcag

SEQ ID NO: 493364 - DNA, 15 bp, Homo sapiens
aagccaggggtctca

SEQ ID NO: 493365 - DNA, 15 bp, Homo sapiens
caagccaggggtctc

SEQ ID NO: 493366 - DNA, 15 bp, Homo sapiens
tcaagccaggggtct

SEQ ID NO: 493367 - DNA, 15 bp, Homo sapiens
ttcaagccaggggtc

SEQ ID NO: 493368 - DNA, 15 bp, Homo sapiens
attcaagccaggggt

SEQ ID NO: 493369 - DNA, 15 bp, Homo sapiens
gattcaagccagggg

SEQ ID NO: 493370 - DNA, 15 bp, Homo sapiens
ggattcaagccaggg

SEQ ID NO: 493371 - DNA, 15 bp, Homo sapiens
gggattcaagccagg

SEQ ID NO: 493372 - DNA, 15 bp, Homo sapiens
tgggattcaagccag

SEQ ID NO: 493373 - DNA, 15 bp, Homo sapiens
atgggattcaagcca

SEQ ID NO: 493374 - DNA, 15 bp, Homo sapiens
aatgggattcaagcc

SEQ ID NO: 493375 - DNA, 15 bp, Homo sapiens
gaatgggattcaagc

SEQ ID NO: 493376 - DNA, 15 bp, Homo sapiens
ggaatgggattcaag

SEQ ID NO: 493377 - DNA, 15 bp, Homo sapiens
aggaatgggattcaa

SEQ ID NO: 493378 - DNA, 15 bp, Homo sapiens
aaggaatgggattca

SEQ ID NO: 493379 - DNA, 15 bp, Homo sapiens
gaaggaatgggattc

SEQ ID NO: 493380 - DNA, 15 bp, Homo sapiens
agaaggaatgggatt

SEQ ID NO: 493381 - DNA, 15 bp, Homo sapiens
cagaaggaatgggat

SEQ ID NO: 493382 - DNA, 15 bp, Homo sapiens
ccagaaggaatggga

SEQ ID NO: 493383 - DNA, 15 bp, Homo sapiens
accagaaggaatggg

SEQ ID NO: 493384 - DNA, 15 bp, Homo sapiens
aaccagaaggaatgg

SEQ ID NO: 493385 - DNA, 15 bp, Homo sapiens
gaaccagaaggaatg

SEQ ID NO: 493386 - DNA, 15 bp, Homo sapiens
agaaccagaaggaat

SEQ ID NO: 493387 - DNA, 15 bp, Homo sapiens
aagaaccagaaggaa

SEQ ID NO: 493388 - DNA, 15 bp, Homo sapiens
aaagaaccagaagga

SEQ ID NO: 493389 - DNA, 15 bp, Homo sapiens
aaaagaaccagaagg

SEQ ID NO: 493390 - DNA, 15 bp, Homo sapiens
aaaaagaaccagaag

SEQ ID NO: 493391 - DNA, 15 bp, Homo sapiens
gaaaaagaaccagaa

SEQ ID NO: 493392 - DNA, 15 bp, Homo sapiens
agaaaaagaaccaga

SEQ ID NO: 493393 - DNA, 15 bp, Homo sapiens
cagaaaaagaaccag

SEQ ID NO: 493394 - DNA, 15 bp, Homo sapiens
ccagaaaaagaacca

SEQ ID NO: 493395 - DNA, 15 bp, Homo sapiens
gccagaaaaagaacc

SEQ ID NO: 493396 - DNA, 15 bp, Homo sapiens
ggccagaaaaagaac

SEQ ID NO: 493397 - DNA, 15 bp, Homo sapiens
tggccagaaaaagaa

SEQ ID NO: 493398 - DNA, 15 bp, Homo sapiens
atggccagaaaaaga

SEQ ID NO: 493399 - DNA, 15 bp, Homo sapiens
gatggccagaaaaag

SEQ ID NO: 493400 - DNA, 15 bp, Homo sapiens
agatggccagaaaaa

SEQ ID NO: 493401 - DNA, 15 bp, Homo sapiens
cagatggccagaaaa

SEQ ID NO: 493402 - DNA, 15 bp, Homo sapiens
tcagatggccagaaa

SEQ ID NO: 493403 - DNA, 15 bp, Homo sapiens
atcagatggccagaa

SEQ ID NO: 493404 - DNA, 15 bp, Homo sapiens
aatcagatggccaga

SEQ ID NO: 493405 - DNA, 15 bp, Homo sapiens
aaatcagatggccag

SEQ ID NO: 493406 - DNA, 15 bp, Homo sapiens
gaaatcagatggcca

SEQ ID NO: 493407 - DNA, 15 bp, Homo sapiens
ggaaatcagatggcc

SEQ ID NO: 493408 - DNA, 15 bp, Homo sapiens
gggaaatcagatggc

SEQ ID NO: 493409 - DNA, 15 bp, Homo sapiens
agggaaatcagatgg

SEQ ID NO: 493410 - DNA, 15 bp, Homo sapiens
gagggaaatcagatg

SEQ ID NO: 493411 - DNA, 15 bp, Homo sapiens
agagggaaatcagat

SEQ ID NO: 493412 - DNA, 15 bp, Homo sapiens
gagagggaaatcaga

SEQ ID NO: 493413 - DNA, 15 bp, Homo sapiens
ggagagggaaatcag

SEQ ID NO: 493414 - DNA, 15 bp, Homo sapiens
gggagagggaaatca

SEQ ID NO: 493415 - DNA, 15 bp, Homo sapiens
agggagagggaaatc

SEQ ID NO: 493416 - DNA, 15 bp, Homo sapiens
cagggagagggaaat

SEQ ID NO: 493417 - DNA, 15 bp, Homo sapiens
gcagggagagggaaa

SEQ ID NO: 493418 - DNA, 15 bp, Homo sapiens
agcagggagagggaa

SEQ ID NO: 493419 - DNA, 15 bp, Homo sapiens
gagcagggagaggga

SEQ ID NO: 493420 - DNA, 15 bp, Homo sapiens
ggagcagggagaggg

SEQ ID NO: 493421 - DNA, 15 bp, Homo sapiens
gggagcagggagagg

SEQ ID NO: 493422 - DNA, 15 bp, Homo sapiens
tgggagcagggagag

SEQ ID NO: 493423 - DNA, 15 bp, Homo sapiens
gtgggagcagggaga

SEQ ID NO: 493424 - DNA, 15 bp, Homo sapiens
ggtgggagcagggag

SEQ ID NO: 493425 - DNA, 15 bp, Homo sapiens
gggtgggagcaggga

SEQ ID NO: 493426 - DNA, 15 bp, Homo sapiens
ggggtgggagcaggg

SEQ ID NO: 493427 - DNA, 15 bp, Homo sapiens
aggggtgggagcagg

SEQ ID NO: 493428 - DNA, 15 bp, Homo sapiens
caggggtgggagcag

SEQ ID NO: 493429 - DNA, 15 bp, Homo sapiens
acaggggtgggagca

SEQ ID NO: 493430 - DNA, 15 bp, Homo sapiens
gacaggggtgggagc

SEQ ID NO: 493431 - DNA, 15 bp, Homo sapiens
tgacaggggtgggag

SEQ ID NO: 493432 - DNA, 15 bp, Homo sapiens
ttgacaggggtggga

SEQ ID NO: 493433 - DNA, 15 bp, Homo sapiens
tttgacaggggtggg

SEQ ID NO: 493434 - DNA, 15 bp, Homo sapiens
ctttgacaggggtgg

SEQ ID NO: 493435 - DNA, 15 bp, Homo sapiens
tctttgacaggggtg

SEQ ID NO: 493436 - DNA, 15 bp, Homo sapiens
ttctttgacaggggt

SEQ ID NO: 493437 - DNA, 15 bp, Homo sapiens
attctttgacagggg

SEQ ID NO: 493438 - DNA, 15 bp, Homo sapiens
cattctttgacaggg

SEQ ID NO: 493439 - DNA, 15 bp, Homo sapiens
tcattctttgacagg

SEQ ID NO: 493440 - DNA, 15 bp, Homo sapiens
ctcattctttgacag

SEQ ID NO: 493441 - DNA, 15 bp, Homo sapiens
tctcattctttgaca

SEQ ID NO: 493442 - DNA, 15 bp, Homo sapiens
ttctcattctttgac

SEQ ID NO: 493443 - DNA, 15 bp, Homo sapiens
attctcattctttga

SEQ ID NO: 493444 - DNA, 15 bp, Homo sapiens
gattctcattctttg

SEQ ID NO: 493445 - DNA, 15 bp, Homo sapiens
tgattctcattcttt

SEQ ID NO: 493446 - DNA, 15 bp, Homo sapiens
ttgattctcattctt

SEQ ID NO: 493447 - DNA, 15 bp, Homo sapiens
gttgattctcattct

SEQ ID NO: 493448 - DNA, 15 bp, Homo sapiens
tgttgattctcattc

SEQ ID NO: 493449 - DNA, 15 bp, Homo sapiens
ttgttgattctcatt

SEQ ID NO: 493450 - DNA, 15 bp, Homo sapiens
cttgttgattctcat

SEQ ID NO: 493451 - DNA, 15 bp, Homo sapiens
gcttgttgattctca

SEQ ID NO: 493452 - DNA, 15 bp, Homo sapiens
tgcttgttgattctc

SEQ ID NO: 493453 - DNA, 15 bp, Homo sapiens
ttgcttgttgattct

SEQ ID NO: 493454 - DNA, 15 bp, Homo sapiens
tttgcttgttgattc

SEQ ID NO: 493455 - DNA, 15 bp, Homo sapiens
gtttgcttgttgatt

SEQ ID NO: 493456 - DNA, 15 bp, Homo sapiens
ggtttgcttgttgat

SEQ ID NO: 493457 - DNA, 15 bp, Homo sapiens
gggtttgcttgttga

SEQ ID NO: 493458 - DNA, 15 bp, Homo sapiens
tgggtttgcttgttg

SEQ ID NO: 493459 - DNA, 15 bp, Homo sapiens
ttgggtttgcttgtt

SEQ ID NO: 493460 - DNA, 15 bp, Homo sapiens
gttgggtttgcttgt

SEQ ID NO: 493461 - DNA, 15 bp, Homo sapiens
ggttgggtttgcttg

SEQ ID NO: 493462 - DNA, 15 bp, Homo sapiens
tggttgggtttgctt

SEQ ID NO: 493463 - DNA, 15 bp, Homo sapiens
ttggttgggtttgct

SEQ ID NO: 493464 - DNA, 15 bp, Homo sapiens
attggttgggtttgc

SEQ ID NO: 493465 - DNA, 15 bp, Homo sapiens
cattggttgggtttg

SEQ ID NO: 493466 - DNA, 15 bp, Homo sapiens
ccattggttgggttt

SEQ ID NO: 493467 - DNA, 15 bp, Homo sapiens
tccattggttgggtt

SEQ ID NO: 493468 - DNA, 15 bp, Homo sapiens
atccattggttgggt

SEQ ID NO: 493469 - DNA, 15 bp, Homo sapiens
aatccattggttggg

SEQ ID NO: 493470 - DNA, 15 bp, Homo sapiens
aaatccattggttgg

SEQ ID NO: 493471 - DNA, 15 bp, Homo sapiens
caaatccattggttg

SEQ ID NO: 493472 - DNA, 15 bp, Homo sapiens
ccaaatccattggtt

SEQ ID NO: 493473 - DNA, 15 bp, Homo sapiens
cccaaatccattggt

SEQ ID NO: 493474 - DNA, 15 bp, Homo sapiens
ccccaaatccattgg

SEQ ID NO: 493475 - DNA, 15 bp, Homo sapiens
gccccaaatccattg

SEQ ID NO: 493476 - DNA, 15 bp, Homo sapiens
tgccccaaatccatt

SEQ ID NO: 493477 - DNA, 15 bp, Homo sapiens
ctgccccaaatccat

SEQ ID NO: 493478 - DNA, 15 bp, Homo sapiens
gctgccccaaatcca

SEQ ID NO: 493479 - DNA, 15 bp, Homo sapiens
agctgccccaaatcc

SEQ ID NO: 493480 - DNA, 15 bp, Homo sapiens
cagctgccccaaatc

SEQ ID NO: 493481 - DNA, 15 bp, Homo sapiens
ccagctgccccaaat

SEQ ID NO: 493482 - DNA, 15 bp, Homo sapiens
tccagctgccccaaa

SEQ ID NO: 493483 - DNA, 15 bp, Homo sapiens
ttccagctgccccaa

SEQ ID NO: 493484 - DNA, 15 bp, Homo sapiens
cttccagctgcccca

SEQ ID NO: 493485 - DNA, 15 bp, Homo sapiens
tcttccagctgcccc

SEQ ID NO: 493486 - DNA, 15 bp, Homo sapiens
ttcttccagctgccc

SEQ ID NO: 493487 - DNA, 15 bp, Homo sapiens
cttcttccagctgcc

SEQ ID NO: 493488 - DNA, 15 bp, Homo sapiens
tcttcttccagctgc

SEQ ID NO: 493489 - DNA, 15 bp, Homo sapiens
ctcttcttccagctg

SEQ ID NO: 493490 - DNA, 15 bp, Homo sapiens
tctcttcttccagct

SEQ ID NO: 493491 - DNA, 15 bp, Homo sapiens
ctctcttcttccagc

SEQ ID NO: 493492 - DNA, 15 bp, Homo sapiens
tctctcttcttccag

SEQ ID NO: 493493 - DNA, 15 bp, Homo sapiens
gtctctcttcttcca

SEQ ID NO: 493494 - DNA, 15 bp, Homo sapiens
agtctctcttcttcc

SEQ ID NO: 493495 - DNA, 15 bp, Homo sapiens
aagtctctcttcttc

SEQ ID NO: 493496 - DNA, 15 bp, Homo sapiens
gaagtctctcttctt

SEQ ID NO: 493497 - DNA, 15 bp, Homo sapiens
agaagtctctcttct

SEQ ID NO: 493498 - DNA, 15 bp, Homo sapiens
gagaagtctctcttc

SEQ ID NO: 493499 - DNA, 15 bp, Homo sapiens
ggagaagtctctctt

SEQ ID NO: 493500 - DNA, 15 bp, Homo sapiens
gggagaagtctctct

SEQ ID NO: 493501 - DNA, 15 bp, Homo sapiens
agggagaagtctctc

SEQ ID NO: 493502 - DNA, 15 bp, Homo sapiens
aagggagaagtctct

SEQ ID NO: 493503 - DNA, 15 bp, Homo sapiens
aaagggagaagtctc

SEQ ID NO: 493504 - DNA, 15 bp, Homo sapiens
aaaagggagaagtct

SEQ ID NO: 493505 - DNA, 15 bp, Homo sapiens
caaaagggagaagtc

SEQ ID NO: 493506 - DNA, 15 bp, Homo sapiens
gcaaaagggagaagt

SEQ ID NO: 493507 - DNA, 15 bp, Homo sapiens
agcaaaagggagaag

SEQ ID NO: 493508 - DNA, 15 bp, Homo sapiens
cagcaaaagggagaa

SEQ ID NO: 493509 - DNA, 15 bp, Homo sapiens
gcagcaaaagggaga

SEQ ID NO: 493510 - DNA, 15 bp, Homo sapiens
ggcagcaaaagggag

SEQ ID NO: 493511 - DNA, 15 bp, Homo sapiens
aggcagcaaaaggga

SEQ ID NO: 493512 - DNA, 15 bp, Homo sapiens
caggcagcaaaaggg

SEQ ID NO: 493513 - DNA, 15 bp, Homo sapiens
gcaggcagcaaaagg

SEQ ID NO: 493514 - DNA, 15 bp, Homo sapiens
tgcaggcagcaaaag

SEQ ID NO: 493515 - DNA, 15 bp, Homo sapiens
gtgcaggcagcaaaa

SEQ ID NO: 493516 - DNA, 15 bp, Homo sapiens
agtgcaggcagcaaa

SEQ ID NO: 493517 - DNA, 15 bp, Homo sapiens
gagtgcaggcagcaa

SEQ ID NO: 493518 - DNA, 15 bp, Homo sapiens
ggagtgcaggcagca

SEQ ID NO: 493519 - DNA, 15 bp, Homo sapiens
tggagtgcaggcagc

SEQ ID NO: 493520 - DNA, 15 bp, Homo sapiens
gtggagtgcaggcag

SEQ ID NO: 493521 - DNA, 15 bp, Homo sapiens
agtggagtgcaggca

SEQ ID NO: 493522 - DNA, 15 bp, Homo sapiens
gagtggagtgcaggc

SEQ ID NO: 493523 - DNA, 15 bp, Homo sapiens
cgagtggagtgcagg

SEQ ID NO: 493524 - DNA, 15 bp, Homo sapiens
ccgagtggagtgcag

SEQ ID NO: 493525 - DNA, 15 bp, Homo sapiens
cccgagtggagtgca

SEQ ID NO: 493526 - DNA, 15 bp, Homo sapiens
ccccgagtggagtgc

SEQ ID NO: 493527 - DNA, 15 bp, Homo sapiens
cccccgagtggagtg

SEQ ID NO: 493528 - DNA, 15 bp, Homo sapiens
tcccccgagtggagt

SEQ ID NO: 493529 - DNA, 15 bp, Homo sapiens
ttcccccgagtggag

SEQ ID NO: 493530 - DNA, 15 bp, Homo sapiens
cttcccccgagtgga

SEQ ID NO: 493531 - DNA, 15 bp, Homo sapiens
ccttcccccgagtgg

SEQ ID NO: 493532 - DNA, 15 bp, Homo sapiens
accttcccccgagtg

SEQ ID NO: 493533 - DNA, 15 bp, Homo sapiens
aaccttcccccgagt

SEQ ID NO: 493534 - DNA, 15 bp, Homo sapiens
aaaccttcccccgag

SEQ ID NO: 493535 - DNA, 15 bp, Homo sapiens
caaaccttcccccga

SEQ ID NO: 493536 - DNA, 15 bp, Homo sapiens
acaaaccttcccccg

SEQ ID NO: 493537 - DNA, 15 bp, Homo sapiens
cacaaaccttccccc

SEQ ID NO: 493538 - DNA, 15 bp, Homo sapiens
tcacaaaccttcccc

SEQ ID NO: 493539 - DNA, 15 bp, Homo sapiens
ctcacaaaccttccc

SEQ ID NO: 493540 - DNA, 15 bp, Homo sapiens
gctcacaaaccttcc

SEQ ID NO: 493541 - DNA, 15 bp, Homo sapiens
tgctcacaaaccttc

SEQ ID NO: 493542 - DNA, 15 bp, Homo sapiens
ctgctcacaaacctt

SEQ ID NO: 493543 - DNA, 15 bp, Homo sapiens
cctgctcacaaacct

SEQ ID NO: 493544 - DNA, 15 bp, Homo sapiens
ccctgctcacaaacc

SEQ ID NO: 493545 - DNA, 15 bp, Homo sapiens
accctgctcacaaac

SEQ ID NO: 493546 - DNA, 15 bp, Homo sapiens
caccctgctcacaaa

SEQ ID NO: 493547 - DNA, 15 bp, Homo sapiens
acaccctgctcacaa

SEQ ID NO: 493548 - DNA, 15 bp, Homo sapiens
cacaccctgctcaca

SEQ ID NO: 493549 - DNA, 15 bp, Homo sapiens
ccacaccctgctcac

SEQ ID NO: 493550 - DNA, 15 bp, Homo sapiens
tccacaccctgctca

SEQ ID NO: 493551 - DNA, 15 bp, Homo sapiens
ctccacaccctgctc

SEQ ID NO: 493552 - DNA, 15 bp, Homo sapiens
tctccacaccctgct

SEQ ID NO: 493553 - DNA, 15 bp, Homo sapiens
ctctccacaccctgc

SEQ ID NO: 493554 - DNA, 15 bp, Homo sapiens
gctctccacaccctg

SEQ ID NO: 493555 - DNA, 15 bp, Homo sapiens
tgctctccacaccct

SEQ ID NO: 493556 - DNA, 15 bp, Homo sapiens
ctgctctccacaccc

SEQ ID NO: 493557 - DNA, 15 bp, Homo sapiens
gctgctctccacacc

SEQ ID NO: 493558 - DNA, 15 bp, Homo sapiens
agctgctctccacac

SEQ ID NO: 493559 - DNA, 15 bp, Homo sapiens
cagctgctctccaca

SEQ ID NO: 493560 - DNA, 15 bp, Homo sapiens
ccagctgctctccac

SEQ ID NO: 493561 - DNA, 15 bp, Homo sapiens
accagctgctctcca

SEQ ID NO: 493562 - DNA, 15 bp, Homo sapiens
caccagctgctctcc

SEQ ID NO: 493563 - DNA, 15 bp, Homo sapiens
tcaccagctgctctc

SEQ ID NO: 493564 - DNA, 15 bp, Homo sapiens
ctcaccagctgctct

SEQ ID NO: 493565 - DNA, 15 bp, Homo sapiens
cctcaccagctgctc

SEQ ID NO: 493566 - DNA, 15 bp, Homo sapiens
acctcaccagctgct

SEQ ID NO: 493567 - DNA, 15 bp, Homo sapiens
cacctcaccagctgc

SEQ ID NO: 493568 - DNA, 15 bp, Homo sapiens
ccacctcaccagctg

SEQ ID NO: 493569 - DNA, 15 bp, Homo sapiens
cccacctcaccagct

SEQ ID NO: 493570 - DNA, 15 bp, Homo sapiens
ccccacctcaccagc

SEQ ID NO: 493571 - DNA, 15 bp, Homo sapiens
tccccacctcaccag

SEQ ID NO: 493572 - DNA, 15 bp, Homo sapiens
ctccccacctcacca

SEQ ID NO: 493573 - DNA, 15 bp, Homo sapiens
gctccccacctcacc

SEQ ID NO: 493574 - DNA, 15 bp, Homo sapiens
cgctccccacctcac

SEQ ID NO: 493575 - DNA, 15 bp, Homo sapiens
ccgctccccacctca

SEQ ID NO: 493576 - DNA, 15 bp, Homo sapiens
tccgctccccacctc

SEQ ID NO: 493577 - DNA, 15 bp, Homo sapiens
ctccgctccccacct

SEQ ID NO: 493578 - DNA, 15 bp, Homo sapiens
gctccgctccccacc

SEQ ID NO: 493579 - DNA, 15 bp, Homo sapiens
tgctccgctccccac

SEQ ID NO: 493580 - DNA, 15 bp, Homo sapiens
gtgctccgctcccca

SEQ ID NO: 493581 - DNA, 15 bp, Homo sapiens
agtgctccgctcccc

SEQ ID NO: 493582 - DNA, 15 bp, Homo sapiens
tagtgctccgctccc

SEQ ID NO: 493583 - DNA, 15 bp, Homo sapiens
atagtgctccgctcc

SEQ ID NO: 493584 - DNA, 15 bp, Homo sapiens
gatagtgctccgctc

SEQ ID NO: 493585 - DNA, 15 bp, Homo sapiens
agatagtgctccgct

SEQ ID NO: 493586 - DNA, 15 bp, Homo sapiens
cagatagtgctccgc

SEQ ID NO: 493587 - DNA, 15 bp, Homo sapiens
acagatagtgctccg

SEQ ID NO: 493588 - DNA, 15 bp, Homo sapiens
cacagatagtgctcc

SEQ ID NO: 493589 - DNA, 15 bp, Homo sapiens
ccacagatagtgctc

SEQ ID NO: 493590 - DNA, 15 bp, Homo sapiens
cccacagatagtgct

SEQ ID NO: 493591 - DNA, 15 bp, Homo sapiens
gcccacagatagtgc

SEQ ID NO: 493592 - DNA, 15 bp, Homo sapiens
agcccacagatagtg

SEQ ID NO: 493593 - DNA, 15 bp, Homo sapiens
gagcccacagatagt

SEQ ID NO: 493594 - DNA, 15 bp, Homo sapiens
cgagcccacagatag

SEQ ID NO: 493595 - DNA, 15 bp, Homo sapiens
tcgagcccacagata

SEQ ID NO: 493596 - DNA, 15 bp, Homo sapiens
ttcgagcccacagat

SEQ ID NO: 493597 - DNA, 15 bp, Homo sapiens
attcgagcccacaga

SEQ ID NO: 493598 - DNA, 15 bp, Homo sapiens
cattcgagcccacag

SEQ ID NO: 493599 - DNA, 15 bp, Homo sapiens
tcattcgagcccaca

SEQ ID NO: 493600 - DNA, 15 bp, Homo sapiens
atcattcgagcccac

SEQ ID NO: 493601 - DNA, 15 bp, Homo sapiens
gatcattcgagccca

SEQ ID NO: 493602 - DNA, 15 bp, Homo sapiens
ggatcattcgagccc

SEQ ID NO: 493603 - DNA, 15 bp, Homo sapiens
gggatcattcgagcc

SEQ ID NO: 493604 - DNA, 15 bp, Homo sapiens
cgggatcattcgagc

SEQ ID NO: 493605 - DNA, 15 bp, Homo sapiens
ccgggatcattcgag

SEQ ID NO: 493606 - DNA, 15 bp, Homo sapiens
gccgggatcattcga

SEQ ID NO: 493607 - DNA, 15 bp, Homo sapiens
ggccgggatcattcg

SEQ ID NO: 493608 - DNA, 15 bp, Homo sapiens
tggccgggatcattc

SEQ ID NO: 493609 - DNA, 15 bp, Homo sapiens
gtggccgggatcatt

SEQ ID NO: 493610 - DNA, 15 bp, Homo sapiens
agtggccgggatcat

SEQ ID NO: 493611 - DNA, 15 bp, Homo sapiens
gagtggccgggatca

SEQ ID NO: 493612 - DNA, 15 bp, Homo sapiens
ggagtggccgggatc

SEQ ID NO: 493613 - DNA, 15 bp, Homo sapiens
gggagtggccgggat

SEQ ID NO: 493614 - DNA, 15 bp, Homo sapiens
agggagtggccggga

SEQ ID NO: 493615 - DNA, 15 bp, Homo sapiens
tagggagtggccggg

SEQ ID NO: 493616 - DNA, 15 bp, Homo sapiens
gtagggagtggccgg

SEQ ID NO: 493617 - DNA, 15 bp, Homo sapiens
tgtagggagtggccg

SEQ ID NO: 493618 - DNA, 15 bp, Homo sapiens
ctgtagggagtggcc

SEQ ID NO: 493619 - DNA, 15 bp, Homo sapiens
actgtagggagtggc

SEQ ID NO: 493620 - DNA, 15 bp, Homo sapiens
cactgtagggagtgg

SEQ ID NO: 493621 - DNA, 15 bp, Homo sapiens
gcactgtagggagtg

SEQ ID NO: 493622 - DNA, 15 bp, Homo sapiens
agcactgtagggagt

SEQ ID NO: 493623 - DNA, 15 bp, Homo sapiens
cagcactgtagggag

SEQ ID NO: 493624 - DNA, 15 bp, Homo sapiens
gcagcactgtaggga

SEQ ID NO: 493625 - DNA, 15 bp, Homo sapiens
ggcagcactgtaggg

SEQ ID NO: 493626 - DNA, 15 bp, Homo sapiens
tggcagcactgtagg

SEQ ID NO: 493627 - DNA, 15 bp, Homo sapiens
gtggcagcactgtag

SEQ ID NO: 493628 - DNA, 15 bp, Homo sapiens
ggtggcagcactgta

SEQ ID NO: 493629 - DNA, 15 bp, Homo sapiens
gggtggcagcactgt

SEQ ID NO: 493630 - DNA, 15 bp, Homo sapiens
ggggtggcagcactg

SEQ ID NO: 493631 - DNA, 15 bp, Homo sapiens
aggggtggcagcact

SEQ ID NO: 493632 - DNA, 15 bp, Homo sapiens
aaggggtggcagcac

SEQ ID NO: 493633 - DNA, 15 bp, Homo sapiens
gaaggggtggcagca

SEQ ID NO: 493634 - DNA, 15 bp, Homo sapiens
ggaaggggtggcagc

SEQ ID NO: 493635 - DNA, 15 bp, Homo sapiens
aggaaggggtggcag

SEQ ID NO: 493636 - DNA, 15 bp, Homo sapiens
gaggaaggggtggca

SEQ ID NO: 493637 - DNA, 15 bp, Homo sapiens
ggaggaaggggtggc

SEQ ID NO: 493638 - DNA, 15 bp, Homo sapiens
cggaggaaggggtgg

SEQ ID NO: 493639 - DNA, 15 bp, Homo sapiens
tcggaggaaggggtg

SEQ ID NO: 493640 - DNA, 15 bp, Homo sapiens
ctcggaggaaggggt

SEQ ID NO: 493641 - DNA, 15 bp, Homo sapiens
cctcggaggaagggg

SEQ ID NO: 493642 - DNA, 15 bp, Homo sapiens
ccctcggaggaaggg

SEQ ID NO: 493643 - DNA, 15 bp, Homo sapiens
accctcggaggaagg

SEQ ID NO: 493644 - DNA, 15 bp, Homo sapiens
caccctcggaggaag

SEQ ID NO: 493645 - DNA, 15 bp, Homo sapiens
gcaccctcggaggaa

SEQ ID NO: 493646 - DNA, 15 bp, Homo sapiens
tgcaccctcggagga

SEQ ID NO: 493647 - DNA, 15 bp, Homo sapiens
ctgcaccctcggagg

SEQ ID NO: 493648 - DNA, 15 bp, Homo sapiens
tctgcaccctcggag

SEQ ID NO: 493649 - DNA, 15 bp, Homo sapiens
ttctgcaccctcgga

SEQ ID NO: 493650 - DNA, 15 bp, Homo sapiens
cttctgcaccctcgg

SEQ ID NO: 493651 - DNA, 15 bp, Homo sapiens
acttctgcaccctcg

SEQ ID NO: 493652 - DNA, 15 bp, Homo sapiens
cacttctgcaccctc

SEQ ID NO: 493653 - DNA, 15 bp, Homo sapiens
tcacttctgcaccct

SEQ ID NO: 493654 - DNA, 15 bp, Homo sapiens
ctcacttctgcaccc

SEQ ID NO: 493655 - DNA, 15 bp, Homo sapiens
tctcacttctgcacc

SEQ ID NO: 493656 - DNA, 15 bp, Homo sapiens
ttctcacttctgcac

SEQ ID NO: 493657 - DNA, 15 bp, Homo sapiens
attctcacttctgca

SEQ ID NO: 493658 - DNA, 15 bp, Homo sapiens
gattctcacttctgc

SEQ ID NO: 493659 - DNA, 15 bp, Homo sapiens
ggattctcacttctg

SEQ ID NO: 493660 - DNA, 15 bp, Homo sapiens
tggattctcacttct

SEQ ID NO: 493661 - DNA, 15 bp, Homo sapiens
atggattctcacttc

SEQ ID NO: 493662 - DNA, 15 bp, Homo sapiens
catggattctcactt

SEQ ID NO: 493663 - DNA, 15 bp, Homo sapiens
gcatggattctcact

SEQ ID NO: 493664 - DNA, 15 bp, Homo sapiens
tgcatggattctcac

SEQ ID NO: 493665 - DNA, 15 bp, Homo sapiens
ctgcatggattctca

SEQ ID NO: 493666 - DNA, 15 bp, Homo sapiens
gctgcatggattctc

SEQ ID NO: 493667 - DNA, 15 bp, Homo sapiens
agctgcatggattct

SEQ ID NO: 493668 - DNA, 15 bp, Homo sapiens
aagctgcatggattc

SEQ ID NO: 493669 - DNA, 15 bp, Homo sapiens
aaagctgcatggatt

SEQ ID NO: 493670 - DNA, 15 bp, Homo sapiens
gaaagctgcatggat

SEQ ID NO: 493671 - DNA, 15 bp, Homo sapiens
tgaaagctgcatgga

SEQ ID NO: 493672 - DNA, 15 bp, Homo sapiens
gtgaaagctgcatgg

SEQ ID NO: 493673 - DNA, 15 bp, Homo sapiens
agtgaaagctgcatg

SEQ ID NO: 493674 - DNA, 15 bp, Homo sapiens
aagtgaaagctgcat

SEQ ID NO: 493675 - DNA, 15 bp, Homo sapiens
aaagtgaaagctgca

SEQ ID NO: 493676 - DNA, 15 bp, Homo sapiens
caaagtgaaagctgc

SEQ ID NO: 493677 - DNA, 15 bp, Homo sapiens
gcaaagtgaaagctg

SEQ ID NO: 493678 - DNA, 15 bp, Homo sapiens
tgcaaagtgaaagct

SEQ ID NO: 493679 - DNA, 15 bp, Homo sapiens
ctgcaaagtgaaagc

SEQ ID NO: 493680 - DNA, 15 bp, Homo sapiens
tctgcaaagtgaaag

SEQ ID NO: 493681 - DNA, 15 bp, Homo sapiens
ctctgcaaagtgaaa

SEQ ID NO: 493682 - DNA, 15 bp, Homo sapiens
tctctgcaaagtgaa

SEQ ID NO: 493683 - DNA, 15 bp, Homo sapiens
ttctctgcaaagtga

SEQ ID NO: 493684 - DNA, 15 bp, Homo sapiens
cttctctgcaaagtg

SEQ ID NO: 493685 - DNA, 15 bp, Homo sapiens
tcttctctgcaaagt

SEQ ID NO: 493686 - DNA, 15 bp, Homo sapiens
ctcttctctgcaaag

SEQ ID NO: 493687 - DNA, 15 bp, Homo sapiens
tctcttctctgcaaa

SEQ ID NO: 493688 - DNA, 15 bp, Homo sapiens
ctctcttctctgcaa

SEQ ID NO: 493689 - DNA, 15 bp, Homo sapiens
gctctcttctctgca

SEQ ID NO: 493690 - DNA, 15 bp, Homo sapiens
agctctcttctctgc

SEQ ID NO: 493691 - DNA, 15 bp, Homo sapiens
cagctctcttctctg

SEQ ID NO: 493692 - DNA, 15 bp, Homo sapiens
ccagctctcttctct

SEQ ID NO: 493693 - DNA, 15 bp, Homo sapiens
cccagctctcttctc

SEQ ID NO: 493694 - DNA, 15 bp, Homo sapiens
tcccagctctcttct

SEQ ID NO: 493695 - DNA, 15 bp, Homo sapiens
gtcccagctctcttc

SEQ ID NO: 493696 - DNA, 15 bp, Homo sapiens
cgtcccagctctctt

SEQ ID NO: 493697 - DNA, 15 bp, Homo sapiens
ccgtcccagctctct

SEQ ID NO: 493698 - DNA, 15 bp, Homo sapiens
cccgtcccagctctc

SEQ ID NO: 493699 - DNA, 15 bp, Homo sapiens
acccgtcccagctct

SEQ ID NO: 493700 - DNA, 15 bp, Homo sapiens
aacccgtcccagctc

SEQ ID NO: 493701 - DNA, 15 bp, Homo sapiens
aaacccgtcccagct

SEQ ID NO: 493702 - DNA, 15 bp, Homo sapiens
gaaacccgtcccagc

SEQ ID NO: 493703 - DNA, 15 bp, Homo sapiens
agaaacccgtcccag

SEQ ID NO: 493704 - DNA, 15 bp, Homo sapiens
gagaaacccgtccca

SEQ ID NO: 493705 - DNA, 15 bp, Homo sapiens
cgagaaacccgtccc

SEQ ID NO: 493706 - DNA, 15 bp, Homo sapiens
acgagaaacccgtcc

SEQ ID NO: 493707 - DNA, 15 bp, Homo sapiens
aacgagaaacccgtc

SEQ ID NO: 493708 - DNA, 15 bp, Homo sapiens
gaacgagaaacccgt

SEQ ID NO: 493709 - DNA, 15 bp, Homo sapiens
ggaacgagaaacccg

SEQ ID NO: 493710 - DNA, 15 bp, Homo sapiens
gggaacgagaaaccc

SEQ ID NO: 493711 - DNA, 15 bp, Homo sapiens
agggaacgagaaacc

SEQ ID NO: 493712 - DNA, 15 bp, Homo sapiens
gagggaacgagaaac

SEQ ID NO: 493713 - DNA, 15 bp, Homo sapiens
agagggaacgagaaa

SEQ ID NO: 493714 - DNA, 15 bp, Homo sapiens
gagagggaacgagaa

SEQ ID NO: 493715 - DNA, 15 bp, Homo sapiens
ggagagggaacgaga

SEQ ID NO: 493716 - DNA, 15 bp, Homo sapiens
aggagagggaacgag

SEQ ID NO: 493717 - DNA, 15 bp, Homo sapiens
gaggagagggaacga

SEQ ID NO: 493718 - DNA, 15 bp, Homo sapiens
tgaggagagggaacg

SEQ ID NO: 493719 - DNA, 15 bp, Homo sapiens
atgaggagagggaac

SEQ ID NO: 493720 - DNA, 15 bp, Homo sapiens
aatgaggagagggaa

SEQ ID NO: 493721 - DNA, 15 bp, Homo sapiens
aaatgaggagaggga

SEQ ID NO: 493722 - DNA, 15 bp, Homo sapiens
caaatgaggagaggg

SEQ ID NO: 493723 - DNA, 15 bp, Homo sapiens
acaaatgaggagagg

SEQ ID NO: 493724 - DNA, 15 bp, Homo sapiens
cacaaatgaggagag

SEQ ID NO: 493725 - DNA, 15 bp, Homo sapiens
tcacaaatgaggaga

SEQ ID NO: 493726 - DNA, 15 bp, Homo sapiens
ctcacaaatgaggag

SEQ ID NO: 493727 - DNA, 15 bp, Homo sapiens
gctcacaaatgagga

SEQ ID NO: 493728 - DNA, 15 bp, Homo sapiens
ggctcacaaatgagg

SEQ ID NO: 493729 - DNA, 15 bp, Homo sapiens
gggctcacaaatgag

SEQ ID NO: 493730 - DNA, 15 bp, Homo sapiens
agggctcacaaatga

SEQ ID NO: 493731 - DNA, 15 bp, Homo sapiens
cagggctcacaaatg

SEQ ID NO: 493732 - DNA, 15 bp, Homo sapiens
tcagggctcacaaat

SEQ ID NO: 493733 - DNA, 15 bp, Homo sapiens
ttcagggctcacaaa

SEQ ID NO: 493734 - DNA, 15 bp, Homo sapiens
tttcagggctcacaa

SEQ ID NO: 493735 - DNA, 15 bp, Homo sapiens
atttcagggctcaca

SEQ ID NO: 493736 - DNA, 15 bp, Homo sapiens
gatttcagggctcac

SEQ ID NO: 493737 - DNA, 15 bp, Homo sapiens
ggatttcagggctca

SEQ ID NO: 493738 - DNA, 15 bp, Homo sapiens
aggatttcagggctc

SEQ ID NO: 493739 - DNA, 15 bp, Homo sapiens
gaggatttcagggct

SEQ ID NO: 493740 - DNA, 15 bp, Homo sapiens
agaggatttcagggc

SEQ ID NO: 493741 - DNA, 15 bp, Homo sapiens
gagaggatttcaggg

SEQ ID NO: 493742 - DNA, 15 bp, Homo sapiens
ggagaggatttcagg

SEQ ID NO: 493743 - DNA, 15 bp, Homo sapiens
tggagaggatttcag

SEQ ID NO: 493744 - DNA, 15 bp, Homo sapiens
gtggagaggatttca

SEQ ID NO: 493745 - DNA, 15 bp, Homo sapiens
ggtggagaggatttc

SEQ ID NO: 493746 - DNA, 15 bp, Homo sapiens
tggtggagaggattt

SEQ ID NO: 493747 - DNA, 15 bp, Homo sapiens
gtggtggagaggatt

SEQ ID NO: 493748 - DNA, 15 bp, Homo sapiens
ggtggtggagaggat

SEQ ID NO: 493749 - DNA, 15 bp, Homo sapiens
gggtggtggagagga

SEQ ID NO: 493750 - DNA, 15 bp, Homo sapiens
ggggtggtggagagg

SEQ ID NO: 493751 - DNA, 15 bp, Homo sapiens
tggggtggtggagag

SEQ ID NO: 493752 - DNA, 15 bp, Homo sapiens
atggggtggtggaga

SEQ ID NO: 493753 - DNA, 15 bp, Homo sapiens
catggggtggtggag

SEQ ID NO: 493754 - DNA, 15 bp, Homo sapiens
ccatggggtggtgga

SEQ ID NO: 493755 - DNA, 15 bp, Homo sapiens
cccatggggtggtgg

SEQ ID NO: 493756 - DNA, 15 bp, Homo sapiens
gcccatggggtggtg

SEQ ID NO: 493757 - DNA, 15 bp, Homo sapiens
ggcccatggggtggt

SEQ ID NO: 493758 - DNA, 15 bp, Homo sapiens
tggcccatggggtgg

SEQ ID NO: 493759 - DNA, 15 bp, Homo sapiens
ttggcccatggggtg

SEQ ID NO: 493760 - DNA, 15 bp, Homo sapiens
tttggcccatggggt

SEQ ID NO: 493761 - DNA, 15 bp, Homo sapiens
ttttggcccatgggg

SEQ ID NO: 493762 - DNA, 15 bp, Homo sapiens
gttttggcccatggg

SEQ ID NO: 493763 - DNA, 15 bp, Homo sapiens
ggttttggcccatgg

SEQ ID NO: 493764 - DNA, 15 bp, Homo sapiens
gggttttggcccatg

SEQ ID NO: 493765 - DNA, 15 bp, Homo sapiens
tgggttttggcccat

SEQ ID NO: 493766 - DNA, 15 bp, Homo sapiens
gtgggttttggccca

SEQ ID NO: 493767 - DNA, 15 bp, Homo sapiens
tgtgggttttggccc

SEQ ID NO: 493768 - DNA, 15 bp, Homo sapiens
ctgtgggttttggcc

SEQ ID NO: 493769 - DNA, 15 bp, Homo sapiens
cctgtgggttttggc

SEQ ID NO: 493770 - DNA, 15 bp, Homo sapiens
ccctgtgggttttgg

SEQ ID NO: 493771 - DNA, 15 bp, Homo sapiens
cccctgtgggttttg

SEQ ID NO: 493772 - DNA, 15 bp, Homo sapiens
tcccctgtgggtttt

SEQ ID NO: 493773 - DNA, 15 bp, Homo sapiens
gtcccctgtgggttt

SEQ ID NO: 493774 - DNA, 15 bp, Homo sapiens
tgtcccctgtgggtt

SEQ ID NO: 493775 - DNA, 15 bp, Homo sapiens
atgtcccctgtgggt

SEQ ID NO: 493776 - DNA, 15 bp, Homo sapiens
catgtcccctgtggg

SEQ ID NO: 493777 - DNA, 15 bp, Homo sapiens
ccatgtcccctgtgg

SEQ ID NO: 493778 - DNA, 15 bp, Homo sapiens
gccatgtcccctgtg

SEQ ID NO: 493779 - DNA, 15 bp, Homo sapiens
ggccatgtcccctgt

SEQ ID NO: 493780 - DNA, 15 bp, Homo sapiens
gggccatgtcccctg

SEQ ID NO: 493781 - DNA, 15 bp, Homo sapiens
ggggccatgtcccct

SEQ ID NO: 493782 - DNA, 15 bp, Homo sapiens
aggggccatgtcccc

SEQ ID NO: 493783 - DNA, 15 bp, Homo sapiens
taggggccatgtccc

SEQ ID NO: 493784 - DNA, 15 bp, Homo sapiens
ctaggggccatgtcc

SEQ ID NO: 493785 - DNA, 15 bp, Homo sapiens
cctaggggccatgtc

SEQ ID NO: 493786 - DNA, 15 bp, Homo sapiens
gcctaggggccatgt

SEQ ID NO: 493787 - DNA, 15 bp, Homo sapiens
agcctaggggccatg

SEQ ID NO: 493788 - DNA, 15 bp, Homo sapiens
gagcctaggggccat

SEQ ID NO: 493789 - DNA, 15 bp, Homo sapiens
ggagcctaggggcca

SEQ ID NO: 493790 - DNA, 15 bp, Homo sapiens
aggagcctaggggcc

SEQ ID NO: 493791 - DNA, 15 bp, Homo sapiens
gaggagcctaggggc

SEQ ID NO: 493792 - DNA, 15 bp, Homo sapiens
ggaggagcctagggg

SEQ ID NO: 493793 - DNA, 15 bp, Homo sapiens
aggaggagcctaggg

SEQ ID NO: 493794 - DNA, 15 bp, Homo sapiens
caggaggagcctagg

SEQ ID NO: 493795 - DNA, 15 bp, Homo sapiens
ccaggaggagcctag

SEQ ID NO: 493796 - DNA, 15 bp, Homo sapiens
cccaggaggagccta

SEQ ID NO: 493797 - DNA, 15 bp, Homo sapiens
ccccaggaggagcct

SEQ ID NO: 493798 - DNA, 15 bp, Homo sapiens
tccccaggaggagcc

SEQ ID NO: 493799 - DNA, 15 bp, Homo sapiens
ttccccaggaggagc

SEQ ID NO: 493800 - DNA, 15 bp, Homo sapiens
cttccccaggaggag

SEQ ID NO: 493801 - DNA, 15 bp, Homo sapiens
acttccccaggagga

SEQ ID NO: 493802 - DNA, 15 bp, Homo sapiens
gacttccccaggagg

SEQ ID NO: 493803 - DNA, 15 bp, Homo sapiens
ggacttccccaggag

SEQ ID NO: 493804 - DNA, 15 bp, Homo sapiens
gggacttccccagga

SEQ ID NO: 493805 - DNA, 15 bp, Homo sapiens
ggggacttccccagg

SEQ ID NO: 493806 - DNA, 15 bp, Homo sapiens
tggggacttccccag

SEQ ID NO: 493807 - DNA, 15 bp, Homo sapiens
gtggggacttcccca

SEQ ID NO: 493808 - DNA, 15 bp, Homo sapiens
cgtggggacttcccc

SEQ ID NO: 493809 - DNA, 15 bp, Homo sapiens
ccgtggggacttccc

SEQ ID NO: 493810 - DNA, 15 bp, Homo sapiens
gccgtggggacttcc

SEQ ID NO: 493811 - DNA, 15 bp, Homo sapiens
cgccgtggggacttc

SEQ ID NO: 493812 - DNA, 15 bp, Homo sapiens
gcgccgtggggactt

SEQ ID NO: 493813 - DNA, 15 bp, Homo sapiens
tgcgccgtggggact

SEQ ID NO: 493814 - DNA, 15 bp, Homo sapiens
ctgcgccgtggggac

SEQ ID NO: 493815 - DNA, 15 bp, Homo sapiens
gctgcgccgtgggga

SEQ ID NO: 493816 - DNA, 15 bp, Homo sapiens
ggctgcgccgtgggg

SEQ ID NO: 493817 - DNA, 15 bp, Homo sapiens
gggctgcgccgtggg

SEQ ID NO: 493818 - DNA, 15 bp, Homo sapiens
tgggctgcgccgtgg

SEQ ID NO: 493819 - DNA, 15 bp, Homo sapiens
ttgggctgcgccgtg

SEQ ID NO: 493820 - DNA, 15 bp, Homo sapiens
cttgggctgcgccgt

SEQ ID NO: 493821 - DNA, 15 bp, Homo sapiens
ccttgggctgcgccg

SEQ ID NO: 493822 - DNA, 15 bp, Homo sapiens
gccttgggctgcgcc

SEQ ID NO: 493823 - DNA, 15 bp, Homo sapiens
agccttgggctgcgc

SEQ ID NO: 493824 - DNA, 15 bp, Homo sapiens
aagccttgggctgcg

SEQ ID NO: 493825 - DNA, 15 bp, Homo sapiens
aaagccttgggctgc

SEQ ID NO: 493826 - DNA, 15 bp, Homo sapiens
caaagccttgggctg

SEQ ID NO: 493827 - DNA, 15 bp, Homo sapiens
acaaagccttgggct

SEQ ID NO: 493828 - DNA, 15 bp, Homo sapiens
gacaaagccttgggc

SEQ ID NO: 493829 - DNA, 15 bp, Homo sapiens
agacaaagccttggg

SEQ ID NO: 493830 - DNA, 15 bp, Homo sapiens
tagacaaagccttgg

SEQ ID NO: 493831 - DNA, 15 bp, Homo sapiens
atagacaaagccttg

SEQ ID NO: 493832 - DNA, 15 bp, Homo sapiens
catagacaaagcctt

SEQ ID NO: 493833 - DNA, 15 bp, Homo sapiens
ccatagacaaagcct

SEQ ID NO: 493834 - DNA, 15 bp, Homo sapiens
cccatagacaaagcc

SEQ ID NO: 493835 - DNA, 15 bp, Homo sapiens
gcccatagacaaagc

SEQ ID NO: 493836 - DNA, 15 bp, Homo sapiens
agcccatagacaaag

SEQ ID NO: 493837 - DNA, 15 bp, Homo sapiens
cagcccatagacaaa

SEQ ID NO: 493838 - DNA, 15 bp, Homo sapiens
ccagcccatagacaa

SEQ ID NO: 493839 - DNA, 15 bp, Homo sapiens
cccagcccatagaca

SEQ ID NO: 493840 - DNA, 15 bp, Homo sapiens
ccccagcccatagac

SEQ ID NO: 493841 - DNA, 15 bp, Homo sapiens
tccccagcccataga

SEQ ID NO: 493842 - DNA, 15 bp, Homo sapiens
ttccccagcccatag

SEQ ID NO: 493843 - DNA, 15 bp, Homo sapiens
cttccccagcccata

SEQ ID NO: 493844 - DNA, 15 bp, Homo sapiens
tcttccccagcccat

SEQ ID NO: 493845 - DNA, 15 bp, Homo sapiens
ctcttccccagccca

SEQ ID NO: 493846 - DNA, 15 bp, Homo sapiens
gctcttccccagccc

SEQ ID NO: 493847 - DNA, 15 bp, Homo sapiens
ggctcttccccagcc

SEQ ID NO: 493848 - DNA, 15 bp, Homo sapiens
gggctcttccccagc

SEQ ID NO: 493849 - DNA, 15 bp, Homo sapiens
cgggctcttccccag

SEQ ID NO: 493850 - DNA, 15 bp, Homo sapiens
ccgggctcttcccca

SEQ ID NO: 493851 - DNA, 15 bp, Homo sapiens
cccgggctcttcccc

SEQ ID NO: 493852 - DNA, 15 bp, Homo sapiens
ccccgggctcttccc

SEQ ID NO: 493853 - DNA, 15 bp, Homo sapiens
cccccgggctcttcc

SEQ ID NO: 493854 - DNA, 15 bp, Homo sapiens
tcccccgggctcttc

SEQ ID NO: 493855 - DNA, 15 bp, Homo sapiens
ctcccccgggctctt

SEQ ID NO: 493856 - DNA, 15 bp, Homo sapiens
actcccccgggctct

SEQ ID NO: 493857 - DNA, 15 bp, Homo sapiens
gactcccccgggctc

SEQ ID NO: 493858 - DNA, 15 bp, Homo sapiens
tgactcccccgggct

SEQ ID NO: 493859 - DNA, 15 bp, Homo sapiens
ctgactcccccgggc

SEQ ID NO: 493860 - DNA, 15 bp, Homo sapiens
gctgactcccccggg

SEQ ID NO: 493861 - DNA, 15 bp, Homo sapiens
ggctgactcccccgg

SEQ ID NO: 493862 - DNA, 15 bp, Homo sapiens
cggctgactcccccg

SEQ ID NO: 493863 - DNA, 15 bp, Homo sapiens
ccggctgactccccc

SEQ ID NO: 493864 - DNA, 15 bp, Homo sapiens
gccggctgactcccc

SEQ ID NO: 493865 - DNA, 15 bp, Homo sapiens
tgccggctgactccc

SEQ ID NO: 493866 - DNA, 15 bp, Homo sapiens
ctgccggctgactcc

SEQ ID NO: 493867 - DNA, 15 bp, Homo sapiens
cctgccggctgactc

SEQ ID NO: 493868 - DNA, 15 bp, Homo sapiens
ccctgccggctgact

SEQ ID NO: 493869 - DNA, 15 bp, Homo sapiens
accctgccggctgac

SEQ ID NO: 493870 - DNA, 15 bp, Homo sapiens
gaccctgccggctga

SEQ ID NO: 493871 - DNA, 15 bp, Homo sapiens
ggaccctgccggctg

SEQ ID NO: 493872 - DNA, 15 bp, Homo sapiens
aggaccctgccggct

SEQ ID NO: 493873 - DNA, 15 bp, Homo sapiens
caggaccctgccggc

SEQ ID NO: 493874 - DNA, 15 bp, Homo sapiens
ccaggaccctgccgg

SEQ ID NO: 493875 - DNA, 15 bp, Homo sapiens
cccaggaccctgccg

SEQ ID NO: 493876 - DNA, 15 bp, Homo sapiens
ccccaggaccctgcc

SEQ ID NO: 493877 - DNA, 15 bp, Homo sapiens
gccccaggaccctgc

SEQ ID NO: 493878 - DNA, 15 bp, Homo sapiens
tgccccaggaccctg

SEQ ID NO: 493879 - DNA, 15 bp, Homo sapiens
ctgccccaggaccct

SEQ ID NO: 493880 - DNA, 15 bp, Homo sapiens
actgccccaggaccc

SEQ ID NO: 493881 - DNA, 15 bp, Homo sapiens
tactgccccaggacc

SEQ ID NO: 493882 - DNA, 15 bp, Homo sapiens
gtactgccccaggac

SEQ ID NO: 493883 - DNA, 15 bp, Homo sapiens
ggtactgccccagga

SEQ ID NO: 493884 - DNA, 15 bp, Homo sapiens
gggtactgccccagg

SEQ ID NO: 493885 - DNA, 15 bp, Homo sapiens
tgggtactgccccag

SEQ ID NO: 493886 - DNA, 15 bp, Homo sapiens
gtgggtactgcccca

SEQ ID NO: 493887 - DNA, 15 bp, Homo sapiens
ggtgggtactgcccc

SEQ ID NO: 493888 - DNA, 15 bp, Homo sapiens
gggtgggtactgccc

SEQ ID NO: 493889 - DNA, 15 bp, Homo sapiens
tgggtgggtactgcc

SEQ ID NO: 493890 - DNA, 15 bp, Homo sapiens
ctgggtgggtactgc

SEQ ID NO: 493891 - DNA, 15 bp, Homo sapiens
gctgggtgggtactg

SEQ ID NO: 493892 - DNA, 15 bp, Homo sapiens
tgctgggtgggtact

SEQ ID NO: 493893 - DNA, 15 bp, Homo sapiens
gtgctgggtgggtac

SEQ ID NO: 493894 - DNA, 15 bp, Homo sapiens
tgtgctgggtgggta

SEQ ID NO: 493895 - DNA, 15 bp, Homo sapiens
ctgtgctgggtgggt

SEQ ID NO: 493896 - DNA, 15 bp, Homo sapiens
cctgtgctgggtggg

SEQ ID NO: 493897 - DNA, 15 bp, Homo sapiens
tcctgtgctgggtgg

SEQ ID NO: 493898 - DNA, 15 bp, Homo sapiens
ctcctgtgctgggtg

SEQ ID NO: 493899 - DNA, 15 bp, Homo sapiens
actcctgtgctgggt

SEQ ID NO: 493900 - DNA, 15 bp, Homo sapiens
cactcctgtgctggg

SEQ ID NO: 493901 - DNA, 15 bp, Homo sapiens
acactcctgtgctgg

SEQ ID NO: 493902 - DNA, 15 bp, Homo sapiens
tacactcctgtgctg

SEQ ID NO: 493903 - DNA, 15 bp, Homo sapiens
ctacactcctgtgct

SEQ ID NO: 493904 - DNA, 15 bp, Homo sapiens
actacactcctgtgc

SEQ ID NO: 493905 - DNA, 15 bp, Homo sapiens
tactacactcctgtg

SEQ ID NO: 493906 - DNA, 15 bp, Homo sapiens
gtactacactcctgt

SEQ ID NO: 493907 - DNA, 15 bp, Homo sapiens
agtactacactcctg

SEQ ID NO: 493908 - DNA, 15 bp, Homo sapiens
aagtactacactcct

SEQ ID NO: 493909 - DNA, 15 bp, Homo sapiens
caagtactacactcc

SEQ ID NO: 493910 - DNA, 15 bp, Homo sapiens
ccaagtactacactc

SEQ ID NO: 493911 - DNA, 15 bp, Homo sapiens
tccaagtactacact

SEQ ID NO: 493912 - DNA, 15 bp, Homo sapiens
ctccaagtactacac

SEQ ID NO: 493913 - DNA, 15 bp, Homo sapiens
tctccaagtactaca

SEQ ID NO: 493914 - DNA, 15 bp, Homo sapiens
ttctccaagtactac

SEQ ID NO: 493915 - DNA, 15 bp, Homo sapiens
cttctccaagtacta

SEQ ID NO: 493916 - DNA, 15 bp, Homo sapiens
tcttctccaagtact

SEQ ID NO: 493917 - DNA, 15 bp, Homo sapiens
gtcttctccaagtac

SEQ ID NO: 493918 - DNA, 15 bp, Homo sapiens
ggtcttctccaagta

SEQ ID NO: 493919 - DNA, 15 bp, Homo sapiens
aggtcttctccaagt

SEQ ID NO: 493920 - DNA, 15 bp, Homo sapiens
gaggtcttctccaag

SEQ ID NO: 493921 - DNA, 15 bp, Homo sapiens
tgaggtcttctccaa

SEQ ID NO: 493922 - DNA, 15 bp, Homo sapiens
atgaggtcttctcca

SEQ ID NO: 493923 - DNA, 15 bp, Homo sapiens
gatgaggtcttctcc

SEQ ID NO: 493924 - DNA, 15 bp, Homo sapiens
ggatgaggtcttctc

SEQ ID NO: 493925 - DNA, 15 bp, Homo sapiens
aggatgaggtcttct

SEQ ID NO: 493926 - DNA, 15 bp, Homo sapiens
aaggatgaggtcttc

SEQ ID NO: 493927 - DNA, 15 bp, Homo sapiens
caaggatgaggtctt

SEQ ID NO: 493928 - DNA, 15 bp, Homo sapiens
ccaaggatgaggtct

SEQ ID NO: 493929 - DNA, 15 bp, Homo sapiens
cccaaggatgaggtc

SEQ ID NO: 493930 - DNA, 15 bp, Homo sapiens
ccccaaggatgaggt

SEQ ID NO: 493931 - DNA, 15 bp, Homo sapiens
gccccaaggatgagg

SEQ ID NO: 493932 - DNA, 15 bp, Homo sapiens
cgccccaaggatgag

SEQ ID NO: 493933 - DNA, 15 bp, Homo sapiens
ccgccccaaggatga

SEQ ID NO: 493934 - DNA, 15 bp, Homo sapiens
accgccccaaggatg

SEQ ID NO: 493935 - DNA, 15 bp, Homo sapiens
gaccgccccaaggat

SEQ ID NO: 493936 - DNA, 15 bp, Homo sapiens
tgaccgccccaagga

SEQ ID NO: 493937 - DNA, 15 bp, Homo sapiens
ctgaccgccccaagg

SEQ ID NO: 493938 - DNA, 15 bp, Homo sapiens
cctgaccgccccaag

SEQ ID NO: 493939 - DNA, 15 bp, Homo sapiens
tcctgaccgccccaa

SEQ ID NO: 493940 - DNA, 15 bp, Homo sapiens
ttcctgaccgcccca

SEQ ID NO: 493941 - DNA, 15 bp, Homo sapiens
tttcctgaccgcccc

SEQ ID NO: 493942 - DNA, 15 bp, Homo sapiens
gtttcctgaccgccc

SEQ ID NO: 493943 - DNA, 15 bp, Homo sapiens
tgtttcctgaccgcc

SEQ ID NO: 493944 - DNA, 15 bp, Homo sapiens
gtgtttcctgaccgc

SEQ ID NO: 493945 - DNA, 15 bp, Homo sapiens
tgtgtttcctgaccg

SEQ ID NO: 493946 - DNA, 15 bp, Homo sapiens
atgtgtttcctgacc

SEQ ID NO: 493947 - DNA, 15 bp, Homo sapiens
tatgtgtttcctgac

SEQ ID NO: 493948 - DNA, 15 bp, Homo sapiens
ctatgtgtttcctga

SEQ ID NO: 493949 - DNA, 15 bp, Homo sapiens
tctatgtgtttcctg

SEQ ID NO: 493950 - DNA, 15 bp, Homo sapiens
atctatgtgtttcct

SEQ ID NO: 493951 - DNA, 15 bp, Homo sapiens
catctatgtgtttcc

SEQ ID NO: 493952 - DNA, 15 bp, Homo sapiens
tcatctatgtgtttc

SEQ ID NO: 493953 - DNA, 15 bp, Homo sapiens
ctcatctatgtgttt

SEQ ID NO: 493954 - DNA, 15 bp, Homo sapiens
tctcatctatgtgtt

SEQ ID NO: 493955 - DNA, 15 bp, Homo sapiens
atctcatctatgtgt

SEQ ID NO: 493956 - DNA, 15 bp, Homo sapiens
tatctcatctatgtg

SEQ ID NO: 493957 - DNA, 15 bp, Homo sapiens
ctatctcatctatgt

SEQ ID NO: 493958 - DNA, 15 bp, Homo sapiens
gctatctcatctatg

SEQ ID NO: 493959 - DNA, 15 bp, Homo sapiens
agctatctcatctat

SEQ ID NO: 493960 - DNA, 15 bp, Homo sapiens
gagctatctcatcta

SEQ ID NO: 493961 - DNA, 15 bp, Homo sapiens
tgagctatctcatct

SEQ ID NO: 493962 - DNA, 15 bp, Homo sapiens
ctgagctatctcatc

SEQ ID NO: 493963 - DNA, 15 bp, Homo sapiens
cctgagctatctcat

SEQ ID NO: 493964 - DNA, 15 bp, Homo sapiens
acctgagctatctca

SEQ ID NO: 493965 - DNA, 15 bp, Homo sapiens
gacctgagctatctc

SEQ ID NO: 493966 - DNA, 15 bp, Homo sapiens
ggacctgagctatct

SEQ ID NO: 493967 - DNA, 15 bp, Homo sapiens
gggacctgagctatc

SEQ ID NO: 493968 - DNA, 15 bp, Homo sapiens
ggggacctgagctat

SEQ ID NO: 493969 - DNA, 15 bp, Homo sapiens
gggggacctgagcta

SEQ ID NO: 493970 - DNA, 15 bp, Homo sapiens
tgggggacctgagct

SEQ ID NO: 493971 - DNA, 15 bp, Homo sapiens
ctgggggacctgagc

SEQ ID NO: 493972 - DNA, 15 bp, Homo sapiens
gctgggggacctgag

SEQ ID NO: 493973 - DNA, 15 bp, Homo sapiens
ggctgggggacctga

SEQ ID NO: 493974 - DNA, 15 bp, Homo sapiens
cggctgggggacctg

SEQ ID NO: 493975 - DNA, 15 bp, Homo sapiens
ccggctgggggacct

SEQ ID NO: 493976 - DNA, 15 bp, Homo sapiens
accggctgggggacc

SEQ ID NO: 493977 - DNA, 15 bp, Homo sapiens
gaccggctgggggac

SEQ ID NO: 493978 - DNA, 15 bp, Homo sapiens
tgaccggctggggga

SEQ ID NO: 493979 - DNA, 15 bp, Homo sapiens
ctgaccggctggggg

SEQ ID NO: 493980 - DNA, 15 bp, Homo sapiens
gctgaccggctgggg

SEQ ID NO: 493981 - DNA, 15 bp, Homo sapiens
ggctgaccggctggg

SEQ ID NO: 493982 - DNA, 15 bp, Homo sapiens
tggctgaccggctgg

SEQ ID NO: 493983 - DNA, 15 bp, Homo sapiens
ctggctgaccggctg

SEQ ID NO: 493984 - DNA, 15 bp, Homo sapiens
cctggctgaccggct

SEQ ID NO: 493985 - DNA, 15 bp, Homo sapiens
ccctggctgaccggc

SEQ ID NO: 493986 - DNA, 15 bp, Homo sapiens
tccctggctgaccgg

SEQ ID NO: 493987 - DNA, 15 bp, Homo sapiens
gtccctggctgaccg

SEQ ID NO: 493988 - DNA, 15 bp, Homo sapiens
ggtccctggctgacc

SEQ ID NO: 493989 - DNA, 15 bp, Homo sapiens
aggtccctggctgac

SEQ ID NO: 493990 - DNA, 15 bp, Homo sapiens
caggtccctggctga

SEQ ID NO: 493991 - DNA, 15 bp, Homo sapiens
tcaggtccctggctg

SEQ ID NO: 493992 - DNA, 15 bp, Homo sapiens
atcaggtccctggct

SEQ ID NO: 493993 - DNA, 15 bp, Homo sapiens
catcaggtccctggc

SEQ ID NO: 493994 - DNA, 15 bp, Homo sapiens
ccatcaggtccctgg

SEQ ID NO: 493995 - DNA, 15 bp, Homo sapiens
tccatcaggtccctg

SEQ ID NO: 493996 - DNA, 15 bp, Homo sapiens
ctccatcaggtccct

SEQ ID NO: 493997 - DNA, 15 bp, Homo sapiens
tctccatcaggtccc

SEQ ID NO: 493998 - DNA, 15 bp, Homo sapiens
ttctccatcaggtcc

SEQ ID NO: 493999 - DNA, 15 bp, Homo sapiens
tttctccatcaggtc

SEQ ID NO: 494000 - DNA, 15 bp, Homo sapiens
atttctccatcaggt

SEQ ID NO: 494001 - DNA, 15 bp, Homo sapiens
gatttctccatcagg

SEQ ID NO: 494002 - DNA, 15 bp, Homo sapiens
ggatttctccatcag

SEQ ID NO: 494003 - DNA, 15 bp, Homo sapiens
gggatttctccatca

SEQ ID NO: 494004 - DNA, 15 bp, Homo sapiens
cgggatttctccatc

SEQ ID NO: 494005 - DNA, 15 bp, Homo sapiens
gcgggatttctccat

SEQ ID NO: 494006 - DNA, 15 bp, Homo sapiens
cgcgggatttctcca

SEQ ID NO: 494007 - DNA, 15 bp, Homo sapiens
acgcgggatttctcc

SEQ ID NO: 494008 - DNA, 15 bp, Homo sapiens
cacgcgggatttctc

SEQ ID NO: 494009 - DNA, 15 bp, Homo sapiens
ccacgcgggatttct

SEQ ID NO: 494010 - DNA, 15 bp, Homo sapiens
accacgcgggatttc

SEQ ID NO: 494011 - DNA, 15 bp, Homo sapiens
caccacgcgggattt

SEQ ID NO: 494012 - DNA, 15 bp, Homo sapiens
tcaccacgcgggatt

SEQ ID NO: 494013 - DNA, 15 bp, Homo sapiens
ttcaccacgcgggat

SEQ ID NO: 494014 - DNA, 15 bp, Homo sapiens
attcaccacgcggga

SEQ ID NO: 494015 - DNA, 15 bp, Homo sapiens
cattcaccacgcggg

SEQ ID NO: 494016 - DNA, 15 bp, Homo sapiens
ccattcaccacgcgg

SEQ ID NO: 494017 - DNA, 15 bp, Homo sapiens
accattcaccacgcg

SEQ ID NO: 494018 - DNA, 15 bp, Homo sapiens
aaccattcaccacgc

SEQ ID NO: 494019 - DNA, 15 bp, Homo sapiens
aaaccattcaccacg

SEQ ID NO: 494020 - DNA, 15 bp, Homo sapiens
gaaaccattcaccac

SEQ ID NO: 494021 - DNA, 15 bp, Homo sapiens
tgaaaccattcacca

SEQ ID NO: 494022 - DNA, 15 bp, Homo sapiens
ctgaaaccattcacc

SEQ ID NO: 494023 - DNA, 15 bp, Homo sapiens
cctgaaaccattcac

SEQ ID NO: 494024 - DNA, 15 bp, Homo sapiens
acctgaaaccattca

SEQ ID NO: 494025 - DNA, 15 bp, Homo sapiens
aacctgaaaccattc

SEQ ID NO: 494026 - DNA, 15 bp, Homo sapiens
gaacctgaaaccatt

SEQ ID NO: 494027 - DNA, 15 bp, Homo sapiens
ggaacctgaaaccat

SEQ ID NO: 494028 - DNA, 15 bp, Homo sapiens
tggaacctgaaacca

SEQ ID NO: 494029 - DNA, 15 bp, Homo sapiens
gtggaacctgaaacc

SEQ ID NO: 494030 - DNA, 15 bp, Homo sapiens
tgtggaacctgaaac

SEQ ID NO: 494031 - DNA, 15 bp, Homo sapiens
ctgtggaacctgaaa

SEQ ID NO: 494032 - DNA, 15 bp, Homo sapiens
cctgtggaacctgaa

SEQ ID NO: 494033 - DNA, 15 bp, Homo sapiens
acctgtggaacctga

SEQ ID NO: 494034 - DNA, 15 bp, Homo sapiens
aacctgtggaacctg

SEQ ID NO: 494035 - DNA, 15 bp, Homo sapiens
caacctgtggaacct

SEQ ID NO: 494036 - DNA, 15 bp, Homo sapiens
gcaacctgtggaacc

SEQ ID NO: 494037 - DNA, 15 bp, Homo sapiens
cgcaacctgtggaac

SEQ ID NO: 494038 - DNA, 15 bp, Homo sapiens
acgcaacctgtggaa

SEQ ID NO: 494039 - DNA, 15 bp, Homo sapiens
aacgcaacctgtgga

SEQ ID NO: 494040 - DNA, 15 bp, Homo sapiens
gaacgcaacctgtgg

SEQ ID NO: 494041 - DNA, 15 bp, Homo sapiens
ggaacgcaacctgtg

SEQ ID NO: 494042 - DNA, 15 bp, Homo sapiens
cggaacgcaacctgt

SEQ ID NO: 494043 - DNA, 15 bp, Homo sapiens
gcggaacgcaacctg

SEQ ID NO: 494044 - DNA, 15 bp, Homo sapiens
agcggaacgcaacct

SEQ ID NO: 494045 - DNA, 15 bp, Homo sapiens
cagcggaacgcaacc

SEQ ID NO: 494046 - DNA, 15 bp, Homo sapiens
acagcggaacgcaac

SEQ ID NO: 494047 - DNA, 15 bp, Homo sapiens
cacagcggaacgcaa

SEQ ID NO: 494048 - DNA, 15 bp, Homo sapiens
tcacagcggaacgca

SEQ ID NO: 494049 - DNA, 15 bp, Homo sapiens
ttcacagcggaacgc

SEQ ID NO: 494050 - DNA, 15 bp, Homo sapiens
tttcacagcggaacg

SEQ ID NO: 494051 - DNA, 15 bp, Homo sapiens
ttttcacagcggaac

SEQ ID NO: 494052 - DNA, 15 bp, Homo sapiens
cttttcacagcggaa

SEQ ID NO: 494053 - DNA, 15 bp, Homo sapiens
tcttttcacagcgga

SEQ ID NO: 494054 - DNA, 15 bp, Homo sapiens
ttcttttcacagcgg

SEQ ID NO: 494055 - DNA, 15 bp, Homo sapiens
gttcttttcacagcg

SEQ ID NO: 494056 - DNA, 15 bp, Homo sapiens
tgttcttttcacagc

SEQ ID NO: 494057 - DNA, 15 bp, Homo sapiens
ctgttcttttcacag

SEQ ID NO: 494058 - DNA, 15 bp, Homo sapiens
gctgttcttttcaca

SEQ ID NO: 494059 - DNA, 15 bp, Homo sapiens
ggctgttcttttcac

SEQ ID NO: 494060 - DNA, 15 bp, Homo sapiens
aggctgttcttttca

SEQ ID NO: 494061 - DNA, 15 bp, Homo sapiens
gaggctgttcttttc

SEQ ID NO: 494062 - DNA, 15 bp, Homo sapiens
tgaggctgttctttt

SEQ ID NO: 494063 - DNA, 15 bp, Homo sapiens
atgaggctgttcttt

SEQ ID NO: 494064 - DNA, 15 bp, Homo sapiens
aatgaggctgttctt

SEQ ID NO: 494065 - DNA, 15 bp, Homo sapiens
gaatgaggctgttct

SEQ ID NO: 494066 - DNA, 15 bp, Homo sapiens
ggaatgaggctgttc

SEQ ID NO: 494067 - DNA, 15 bp, Homo sapiens
gggaatgaggctgtt

SEQ ID NO: 494068 - DNA, 15 bp, Homo sapiens
tgggaatgaggctgt

SEQ ID NO: 494069 - DNA, 15 bp, Homo sapiens
atgggaatgaggctg

SEQ ID NO: 494070 - DNA, 15 bp, Homo sapiens
tatgggaatgaggct

SEQ ID NO: 494071 - DNA, 15 bp, Homo sapiens
ttatgggaatgaggc

SEQ ID NO: 494072 - DNA, 15 bp, Homo sapiens
attatgggaatgagg

SEQ ID NO: 494073 - DNA, 15 bp, Homo sapiens
gattatgggaatgag

SEQ ID NO: 494074 - DNA, 15 bp, Homo sapiens
ggattatgggaatga

SEQ ID NO: 494075 - DNA, 15 bp, Homo sapiens
tggattatgggaatg

SEQ ID NO: 494076 - DNA, 15 bp, Homo sapiens
gtggattatgggaat

SEQ ID NO: 494077 - DNA, 15 bp, Homo sapiens
ggtggattatgggaa

SEQ ID NO: 494078 - DNA, 15 bp, Homo sapiens
tggtggattatggga

SEQ ID NO: 494079 - DNA, 15 bp, Homo sapiens
ctggtggattatggg

SEQ ID NO: 494080 - DNA, 15 bp, Homo sapiens
gctggtggattatgg

SEQ ID NO: 494081 - DNA, 15 bp, Homo sapiens
tgctggtggattatg

SEQ ID NO: 494082 - DNA, 15 bp, Homo sapiens
ctgctggtggattat

SEQ ID NO: 494083 - DNA, 15 bp, Homo sapiens
gctgctggtggatta

SEQ ID NO: 494084 - DNA, 15 bp, Homo sapiens
tgctgctggtggatt

SEQ ID NO: 494085 - DNA, 15 bp, Homo sapiens
ctgctgctggtggat

SEQ ID NO: 494086 - DNA, 15 bp, Homo sapiens
cctgctgctggtgga

SEQ ID NO: 494087 - DNA, 15 bp, Homo sapiens
tcctgctgctggtgg

SEQ ID NO: 494088 - DNA, 15 bp, Homo sapiens
ctcctgctgctggtg

SEQ ID NO: 494089 - DNA, 15 bp, Homo sapiens
cctcctgctgctggt

SEQ ID NO: 494090 - DNA, 15 bp, Homo sapiens
tcctcctgctgctgg

SEQ ID NO: 494091 - DNA, 15 bp, Homo sapiens
gtcctcctgctgctg

SEQ ID NO: 494092 - DNA, 15 bp, Homo sapiens
ggtcctcctgctgct

SEQ ID NO: 494093 - DNA, 15 bp, Homo sapiens
tggtcctcctgctgc

SEQ ID NO: 494094 - DNA, 15 bp, Homo sapiens
ttggtcctcctgctg

SEQ ID NO: 494095 - DNA, 15 bp, Homo sapiens
cttggtcctcctgct

SEQ ID NO: 494096 - DNA, 15 bp, Homo sapiens
ccttggtcctcctgc

SEQ ID NO: 494097 - DNA, 15 bp, Homo sapiens
accttggtcctcctg

SEQ ID NO: 494098 - DNA, 15 bp, Homo sapiens
aaccttggtcctcct

SEQ ID NO: 494099 - DNA, 15 bp, Homo sapiens
caaccttggtcctcc

SEQ ID NO: 494100 - DNA, 15 bp, Homo sapiens
acaaccttggtcctc

SEQ ID NO: 494101 - DNA, 15 bp, Homo sapiens
cacaaccttggtcct

SEQ ID NO: 494102 - DNA, 15 bp, Homo sapiens
ccacaaccttggtcc

SEQ ID NO: 494103 - DNA, 15 bp, Homo sapiens
cccacaaccttggtc

SEQ ID NO: 494104 - DNA, 15 bp, Homo sapiens
ccccacaaccttggt

SEQ ID NO: 494105 - DNA, 15 bp, Homo sapiens
gccccacaaccttgg

SEQ ID NO: 494106 - DNA, 15 bp, Homo sapiens
agccccacaaccttg

SEQ ID NO: 494107 - DNA, 15 bp, Homo sapiens
aagccccacaacctt

SEQ ID NO: 494108 - DNA, 15 bp, Homo sapiens
aaagccccacaacct

SEQ ID NO: 494109 - DNA, 15 bp, Homo sapiens
taaagccccacaacc

SEQ ID NO: 494110 - DNA, 15 bp, Homo sapiens
ctaaagccccacaac

SEQ ID NO: 494111 - DNA, 15 bp, Homo sapiens
cctaaagccccacaa

SEQ ID NO: 494112 - DNA, 15 bp, Homo sapiens
ccctaaagccccaca

SEQ ID NO: 494113 - DNA, 15 bp, Homo sapiens
gccctaaagccccac

SEQ ID NO: 494114 - DNA, 15 bp, Homo sapiens
tgccctaaagcccca

SEQ ID NO: 494115 - DNA, 15 bp, Homo sapiens
ctgccctaaagcccc

SEQ ID NO: 494116 - DNA, 15 bp, Homo sapiens
cctgccctaaagccc

SEQ ID NO: 494117 - DNA, 15 bp, Homo sapiens
gcctgccctaaagcc

SEQ ID NO: 494118 - DNA, 15 bp, Homo sapiens
agcctgccctaaagc

SEQ ID NO: 494119 - DNA, 15 bp, Homo sapiens
aagcctgccctaaag

SEQ ID NO: 494120 - DNA, 15 bp, Homo sapiens
caagcctgccctaaa

SEQ ID NO: 494121 - DNA, 15 bp, Homo sapiens
gcaagcctgccctaa

SEQ ID NO: 494122 - DNA, 15 bp, Homo sapiens
tgcaagcctgcccta

SEQ ID NO: 494123 - DNA, 15 bp, Homo sapiens
ttgcaagcctgccct

SEQ ID NO: 494124 - DNA, 15 bp, Homo sapiens
cttgcaagcctgccc

SEQ ID NO: 494125 - DNA, 15 bp, Homo sapiens
tcttgcaagcctgcc

SEQ ID NO: 494126 - DNA, 15 bp, Homo sapiens
ctcttgcaagcctgc

SEQ ID NO: 494127 - DNA, 15 bp, Homo sapiens
tctcttgcaagcctg

SEQ ID NO: 494128 - DNA, 15 bp, Homo sapiens
ttctcttgcaagcct

SEQ ID NO: 494129 - DNA, 15 bp, Homo sapiens
tttctcttgcaagcc

SEQ ID NO: 494130 - DNA, 15 bp, Homo sapiens
atttctcttgcaagc

SEQ ID NO: 494131 - DNA, 15 bp, Homo sapiens
gatttctcttgcaag

SEQ ID NO: 494132 - DNA, 15 bp, Homo sapiens
agatttctcttgcaa

SEQ ID NO: 494133 - DNA, 15 bp, Homo sapiens
cagatttctcttgca

SEQ ID NO: 494134 - DNA, 15 bp, Homo sapiens
ccagatttctcttgc

SEQ ID NO: 494135 - DNA, 15 bp, Homo sapiens
cccagatttctcttg

SEQ ID NO: 494136 - DNA, 15 bp, Homo sapiens
gcccagatttctctt

SEQ ID NO: 494137 - DNA, 15 bp, Homo sapiens
agcccagatttctct

SEQ ID NO: 494138 - DNA, 15 bp, Homo sapiens
aagcccagatttctc

SEQ ID NO: 494139 - DNA, 15 bp, Homo sapiens
aaagcccagatttct

SEQ ID NO: 494140 - DNA, 15 bp, Homo sapiens
aaaagcccagatttc

SEQ ID NO: 494141 - DNA, 15 bp, Homo sapiens
taaaagcccagattt

SEQ ID NO: 494142 - DNA, 15 bp, Homo sapiens
ataaaagcccagatt

SEQ ID NO: 494143 - DNA, 15 bp, Homo sapiens
tataaaagcccagat

SEQ ID NO: 494144 - DNA, 15 bp, Homo sapiens
atataaaagcccaga

SEQ ID NO: 494145 - DNA, 15 bp, Homo sapiens
tatataaaagcccag

SEQ ID NO: 494146 - DNA, 15 bp, Homo sapiens
ctatataaaagccca

SEQ ID NO: 494147 - DNA, 15 bp, Homo sapiens
actatataaaagccc

SEQ ID NO: 494148 - DNA, 15 bp, Homo sapiens
tactatataaaagcc

SEQ ID NO: 494149 - DNA, 15 bp, Homo sapiens
ctactatataaaagc

SEQ ID NO: 494150 - DNA, 15 bp, Homo sapiens
gctactatataaaag

SEQ ID NO: 494151 - DNA, 15 bp, Homo sapiens
agctactatataaaa

SEQ ID NO: 494152 - DNA, 15 bp, Homo sapiens
aagctactatataaa

SEQ ID NO: 494153 - DNA, 15 bp, Homo sapiens
caagctactatataa

SEQ ID NO: 494154 - DNA, 15 bp, Homo sapiens
gcaagctactatata

SEQ ID NO: 494155 - DNA, 15 bp, Homo sapiens
cgcaagctactatat

SEQ ID NO: 494156 - DNA, 15 bp, Homo sapiens
gcgcaagctactata

SEQ ID NO: 494157 - DNA, 15 bp, Homo sapiens
agcgcaagctactat

SEQ ID NO: 494158 - DNA, 15 bp, Homo sapiens
cagcgcaagctacta

SEQ ID NO: 494159 - DNA, 15 bp, Homo sapiens
gcagcgcaagctact

SEQ ID NO: 494160 - DNA, 15 bp, Homo sapiens
tgcagcgcaagctac

SEQ ID NO: 494161 - DNA, 15 bp, Homo sapiens
ctgcagcgcaagcta

SEQ ID NO: 494162 - DNA, 15 bp, Homo sapiens
gctgcagcgcaagct

SEQ ID NO: 494163 - DNA, 15 bp, Homo sapiens
ggctgcagcgcaagc

SEQ ID NO: 494164 - DNA, 15 bp, Homo sapiens
gggctgcagcgcaag

SEQ ID NO: 494165 - DNA, 15 bp, Homo sapiens
ggggctgcagcgcaa

SEQ ID NO: 494166 - DNA, 15 bp, Homo sapiens
tggggctgcagcgca

SEQ ID NO: 494167 - DNA, 15 bp, Homo sapiens
ctggggctgcagcgc

SEQ ID NO: 494168 - DNA, 15 bp, Homo sapiens
gctggggctgcagcg

SEQ ID NO: 494169 - DNA, 15 bp, Homo sapiens
ggctggggctgcagc

SEQ ID NO: 494170 - DNA, 15 bp, Homo sapiens
aggctggggctgcag

SEQ ID NO: 494171 - DNA, 15 bp, Homo sapiens
caggctggggctgca

SEQ ID NO: 494172 - DNA, 15 bp, Homo sapiens
acaggctggggctgc

SEQ ID NO: 494173 - DNA, 15 bp, Homo sapiens
tacaggctggggctg

SEQ ID NO: 494174 - DNA, 15 bp, Homo sapiens
ctacaggctggggct

SEQ ID NO: 494175 - DNA, 15 bp, Homo sapiens
cctacaggctggggc

SEQ ID NO: 494176 - DNA, 15 bp, Homo sapiens
ccctacaggctgggg

SEQ ID NO: 494177 - DNA, 15 bp, Homo sapiens
tccctacaggctggg

SEQ ID NO: 494178 - DNA, 15 bp, Homo sapiens
ttccctacaggctgg

SEQ ID NO: 494179 - DNA, 15 bp, Homo sapiens
cttccctacaggctg

SEQ ID NO: 494180 - DNA, 15 bp, Homo sapiens
tcttccctacaggct

SEQ ID NO: 494181 - DNA, 15 bp, Homo sapiens
ttcttccctacaggc

SEQ ID NO: 494182 - DNA, 15 bp, Homo sapiens
tttcttccctacagg

SEQ ID NO: 494183 - DNA, 15 bp, Homo sapiens
ctttcttccctacag

SEQ ID NO: 494184 - DNA, 15 bp, Homo sapiens
gctttcttccctaca

SEQ ID NO: 494185 - DNA, 15 bp, Homo sapiens
ggctttcttccctac

SEQ ID NO: 494186 - DNA, 15 bp, Homo sapiens
cggctttcttcccta

SEQ ID NO: 494187 - DNA, 15 bp, Homo sapiens
tcggctttcttccct

SEQ ID NO: 494188 - DNA, 15 bp, Homo sapiens
atcggctttcttccc

SEQ ID NO: 494189 - DNA, 15 bp, Homo sapiens
catcggctttcttcc

SEQ ID NO: 494190 - DNA, 15 bp, Homo sapiens
gcatcggctttcttc

SEQ ID NO: 494191 - DNA, 15 bp, Homo sapiens
cgcatcggctttctt

SEQ ID NO: 494192 - DNA, 15 bp, Homo sapiens
ccgcatcggctttct

SEQ ID NO: 494193 - DNA, 15 bp, Homo sapiens
cccgcatcggctttc

SEQ ID NO: 494194 - DNA, 15 bp, Homo sapiens
tcccgcatcggcttt

SEQ ID NO: 494195 - DNA, 15 bp, Homo sapiens
atcccgcatcggctt

SEQ ID NO: 494196 - DNA, 15 bp, Homo sapiens
catcccgcatcggct

SEQ ID NO: 494197 - DNA, 15 bp, Homo sapiens
acatcccgcatcggc

SEQ ID NO: 494198 - DNA, 15 bp, Homo sapiens
aacatcccgcatcgg

SEQ ID NO: 494199 - DNA, 15 bp, Homo sapiens
gaacatcccgcatcg

SEQ ID NO: 494200 - DNA, 15 bp, Homo sapiens
agaacatcccgcatc

SEQ ID NO: 494201 - DNA, 15 bp, Homo sapiens
tagaacatcccgcat

SEQ ID NO: 494202 - DNA, 15 bp, Homo sapiens
gtagaacatcccgca

SEQ ID NO: 494203 - DNA, 15 bp, Homo sapiens
agtagaacatcccgc

SEQ ID NO: 494204 - DNA, 15 bp, Homo sapiens
gagtagaacatcccg

SEQ ID NO: 494205 - DNA, 15 bp, Homo sapiens
tgagtagaacatccc

SEQ ID NO: 494206 - DNA, 15 bp, Homo sapiens
ctgagtagaacatcc

SEQ ID NO: 494207 - DNA, 15 bp, Homo sapiens
gctgagtagaacatc

SEQ ID NO: 494208 - DNA, 15 bp, Homo sapiens
tgctgagtagaacat

SEQ ID NO: 494209 - DNA, 15 bp, Homo sapiens
ttgctgagtagaaca

SEQ ID NO: 494210 - DNA, 15 bp, Homo sapiens
tttgctgagtagaac

SEQ ID NO: 494211 - DNA, 15 bp, Homo sapiens
gtttgctgagtagaa

SEQ ID NO: 494212 - DNA, 15 bp, Homo sapiens
ggtttgctgagtaga

SEQ ID NO: 494213 - DNA, 15 bp, Homo sapiens
tggtttgctgagtag

SEQ ID NO: 494214 - DNA, 15 bp, Homo sapiens
ctggtttgctgagta

SEQ ID NO: 494215 - DNA, 15 bp, Homo sapiens
tctggtttgctgagt

SEQ ID NO: 494216 - DNA, 15 bp, Homo sapiens
atctggtttgctgag

SEQ ID NO: 494217 - DNA, 15 bp, Homo sapiens
catctggtttgctga

SEQ ID NO: 494218 - DNA, 15 bp, Homo sapiens
tcatctggtttgctg

SEQ ID NO: 494219 - DNA, 15 bp, Homo sapiens
ctcatctggtttgct

SEQ ID NO: 494220 - DNA, 15 bp, Homo sapiens
gctcatctggtttgc

SEQ ID NO: 494221 - DNA, 15 bp, Homo sapiens
tgctcatctggtttg

SEQ ID NO: 494222 - DNA, 15 bp, Homo sapiens
ctgctcatctggttt

SEQ ID NO: 494223 - DNA, 15 bp, Homo sapiens
tctgctcatctggtt

SEQ ID NO: 494224 - DNA, 15 bp, Homo sapiens
atctgctcatctggt

SEQ ID NO: 494225 - DNA, 15 bp, Homo sapiens
tatctgctcatctgg

SEQ ID NO: 494226 - DNA, 15 bp, Homo sapiens
gtatctgctcatctg

SEQ ID NO: 494227 - DNA, 15 bp, Homo sapiens
ggtatctgctcatct

SEQ ID NO: 494228 - DNA, 15 bp, Homo sapiens
tggtatctgctcatc

SEQ ID NO: 494229 - DNA, 15 bp, Homo sapiens
ttggtatctgctcat

SEQ ID NO: 494230 - DNA, 15 bp, Homo sapiens
gttggtatctgctca

SEQ ID NO: 494231 - DNA, 15 bp, Homo sapiens
tgttggtatctgctc

SEQ ID NO: 494232 - DNA, 15 bp, Homo sapiens
ttgttggtatctgct

SEQ ID NO: 494233 - DNA, 15 bp, Homo sapiens
cttgttggtatctgc

SEQ ID NO: 494234 - DNA, 15 bp, Homo sapiens
ccttgttggtatctg

SEQ ID NO: 494235 - DNA, 15 bp, Homo sapiens
gccttgttggtatct

SEQ ID NO: 494236 - DNA, 15 bp, Homo sapiens
agccttgttggtatc

SEQ ID NO: 494237 - DNA, 15 bp, Homo sapiens
cagccttgttggtat

SEQ ID NO: 494238 - DNA, 15 bp, Homo sapiens
ccagccttgttggta

SEQ ID NO: 494239 - DNA, 15 bp, Homo sapiens
cccagccttgttggt

SEQ ID NO: 494240 - DNA, 15 bp, Homo sapiens
acccagccttgttgg

SEQ ID NO: 494241 - DNA, 15 bp, Homo sapiens
gacccagccttgttg

SEQ ID NO: 494242 - DNA, 15 bp, Homo sapiens
cgacccagccttgtt

SEQ ID NO: 494243 - DNA, 15 bp, Homo sapiens
acgacccagccttgt

SEQ ID NO: 494244 - DNA, 15 bp, Homo sapiens
cacgacccagccttg

SEQ ID NO: 494245 - DNA, 15 bp, Homo sapiens
ccacgacccagcctt

SEQ ID NO: 494246 - DNA, 15 bp, Homo sapiens
gccacgacccagcct

SEQ ID NO: 494247 - DNA, 15 bp, Homo sapiens
tgccacgacccagcc

SEQ ID NO: 494248 - DNA, 15 bp, Homo sapiens
ctgccacgacccagc

SEQ ID NO: 494249 - DNA, 15 bp, Homo sapiens
tctgccacgacccag

SEQ ID NO: 494250 - DNA, 15 bp, Homo sapiens
ctctgccacgaccca

SEQ ID NO: 494251 - DNA, 15 bp, Homo sapiens
tctctgccacgaccc

SEQ ID NO: 494252 - DNA, 15 bp, Homo sapiens
ctctctgccacgacc

SEQ ID NO: 494253 - DNA, 15 bp, Homo sapiens
cctctctgccacgac

SEQ ID NO: 494254 - DNA, 15 bp, Homo sapiens
ccctctctgccacga

SEQ ID NO: 494255 - DNA, 15 bp, Homo sapiens
cccctctctgccacg

SEQ ID NO: 494256 - DNA, 15 bp, Homo sapiens
tcccctctctgccac

SEQ ID NO: 494257 - DNA, 15 bp, Homo sapiens
ctcccctctctgcca

SEQ ID NO: 494258 - DNA, 15 bp, Homo sapiens
tctcccctctctgcc

SEQ ID NO: 494259 - DNA, 15 bp, Homo sapiens
ctctcccctctctgc

SEQ ID NO: 494260 - DNA, 15 bp, Homo sapiens
gctctcccctctctg

SEQ ID NO: 494261 - DNA, 15 bp, Homo sapiens
cgctctcccctctct

SEQ ID NO: 494262 - DNA, 15 bp, Homo sapiens
acgctctcccctctc

SEQ ID NO: 494263 - DNA, 15 bp, Homo sapiens
cacgctctcccctct

SEQ ID NO: 494264 - DNA, 15 bp, Homo sapiens
tcacgctctcccctc

SEQ ID NO: 494265 - DNA, 15 bp, Homo sapiens
ttcacgctctcccct

SEQ ID NO: 494266 - DNA, 15 bp, Homo sapiens
tttcacgctctcccc

SEQ ID NO: 494267 - DNA, 15 bp, Homo sapiens
gtttcacgctctccc

SEQ ID NO: 494268 - DNA, 15 bp, Homo sapiens
agtttcacgctctcc

SEQ ID NO: 494269 - DNA, 15 bp, Homo sapiens
cagtttcacgctctc

SEQ ID NO: 494270 - DNA, 15 bp, Homo sapiens
gcagtttcacgctct

SEQ ID NO: 494271 - DNA, 15 bp, Homo sapiens
tgcagtttcacgctc

SEQ ID NO: 494272 - DNA, 15 bp, Homo sapiens
ctgcagtttcacgct

SEQ ID NO: 494273 - DNA, 15 bp, Homo sapiens
cctgcagtttcacgc

SEQ ID NO: 494274 - DNA, 15 bp, Homo sapiens
tcctgcagtttcacg

SEQ ID NO: 494275 - DNA, 15 bp, Homo sapiens
ctcctgcagtttcac

SEQ ID NO: 494276 - DNA, 15 bp, Homo sapiens
cctcctgcagtttca

SEQ ID NO: 494277 - DNA, 15 bp, Homo sapiens
tcctcctgcagtttc

SEQ ID NO: 494278 - DNA, 15 bp, Homo sapiens
gtcctcctgcagttt

SEQ ID NO: 494279 - DNA, 15 bp, Homo sapiens
agtcctcctgcagtt

SEQ ID NO: 494280 - DNA, 15 bp, Homo sapiens
gagtcctcctgcagt

SEQ ID NO: 494281 - DNA, 15 bp, Homo sapiens
cgagtcctcctgcag

SEQ ID NO: 494282 - DNA, 15 bp, Homo sapiens
gcgagtcctcctgca

SEQ ID NO: 494283 - DNA, 15 bp, Homo sapiens
ggcgagtcctcctgc

SEQ ID NO: 494284 - DNA, 15 bp, Homo sapiens
gggcgagtcctcctg

SEQ ID NO: 494285 - DNA, 15 bp, Homo sapiens
tgggcgagtcctcct

SEQ ID NO: 494286 - DNA, 15 bp, Homo sapiens
ctgggcgagtcctcc

SEQ ID NO: 494287 - DNA, 15 bp, Homo sapiens
gctgggcgagtcctc

SEQ ID NO: 494288 - DNA, 15 bp, Homo sapiens
ggctgggcgagtcct

SEQ ID NO: 494289 - DNA, 15 bp, Homo sapiens
cggctgggcgagtcc

SEQ ID NO: 494290 - DNA, 15 bp, Homo sapiens
acggctgggcgagtc

SEQ ID NO: 494291 - DNA, 15 bp, Homo sapiens
gacggctgggcgagt

SEQ ID NO: 494292 - DNA, 15 bp, Homo sapiens
ggacggctgggcgag

SEQ ID NO: 494293 - DNA, 15 bp, Homo sapiens
aggacggctgggcga

SEQ ID NO: 494294 - DNA, 15 bp, Homo sapiens
caggacggctgggcg

SEQ ID NO: 494295 - DNA, 15 bp, Homo sapiens
ccaggacggctgggc

SEQ ID NO: 494296 - DNA, 15 bp, Homo sapiens
tccaggacggctggg

SEQ ID NO: 494297 - DNA, 15 bp, Homo sapiens
ctccaggacggctgg

SEQ ID NO: 494298 - DNA, 15 bp, Homo sapiens
actccaggacggctg

SEQ ID NO: 494299 - DNA, 15 bp, Homo sapiens
gactccaggacggct

SEQ ID NO: 494300 - DNA, 15 bp, Homo sapiens
agactccaggacggc

SEQ ID NO: 494301 - DNA, 15 bp, Homo sapiens
tagactccaggacgg

SEQ ID NO: 494302 - DNA, 15 bp, Homo sapiens
atagactccaggacg

SEQ ID NO: 494303 - DNA, 15 bp, Homo sapiens
catagactccaggac

SEQ ID NO: 494304 - DNA, 15 bp, Homo sapiens
ccatagactccagga

SEQ ID NO: 494305 - DNA, 15 bp, Homo sapiens
cccatagactccagg

SEQ ID NO: 494306 - DNA, 15 bp, Homo sapiens
ccccatagactccag

SEQ ID NO: 494307 - DNA, 15 bp, Homo sapiens
gccccatagactcca

SEQ ID NO: 494308 - DNA, 15 bp, Homo sapiens
agccccatagactcc

SEQ ID NO: 494309 - DNA, 15 bp, Homo sapiens
cagccccatagactc

SEQ ID NO: 494310 - DNA, 15 bp, Homo sapiens
ccagccccatagact

SEQ ID NO: 494311 - DNA, 15 bp, Homo sapiens
cccagccccatagac

SEQ ID NO: 494312 - DNA, 15 bp, Homo sapiens
ccccagccccataga

SEQ ID NO: 494313 - DNA, 15 bp, Homo sapiens
tccccagccccatag

SEQ ID NO: 494314 - DNA, 15 bp, Homo sapiens
gtccccagccccata

SEQ ID NO: 494315 - DNA, 15 bp, Homo sapiens
agtccccagccccat

SEQ ID NO: 494316 - DNA, 15 bp, Homo sapiens
aagtccccagcccca

SEQ ID NO: 494317 - DNA, 15 bp, Homo sapiens
gaagtccccagcccc

SEQ ID NO: 494318 - DNA, 15 bp, Homo sapiens
tgaagtccccagccc

SEQ ID NO: 494319 - DNA, 15 bp, Homo sapiens
ctgaagtccccagcc

SEQ ID NO: 494320 - DNA, 15 bp, Homo sapiens
cctgaagtccccagc

SEQ ID NO: 494321 - DNA, 15 bp, Homo sapiens
acctgaagtccccag

SEQ ID NO: 494322 - DNA, 15 bp, Homo sapiens
aacctgaagtcccca

SEQ ID NO: 494323 - DNA, 15 bp, Homo sapiens
gaacctgaagtcccc

SEQ ID NO: 494324 - DNA, 15 bp, Homo sapiens
agaacctgaagtccc

SEQ ID NO: 494325 - DNA, 15 bp, Homo sapiens
gagaacctgaagtcc

SEQ ID NO: 494326 - DNA, 15 bp, Homo sapiens
ggagaacctgaagtc

SEQ ID NO: 494327 - DNA, 15 bp, Homo sapiens
tggagaacctgaagt

SEQ ID NO: 494328 - DNA, 15 bp, Homo sapiens
ttggagaacctgaag

SEQ ID NO: 494329 - DNA, 15 bp, Homo sapiens
tttggagaacctgaa

SEQ ID NO: 494330 - DNA, 15 bp, Homo sapiens
ttttggagaacctga

SEQ ID NO: 494331 - DNA, 15 bp, Homo sapiens
attttggagaacctg

SEQ ID NO: 494332 - DNA, 15 bp, Homo sapiens
cattttggagaacct

SEQ ID NO: 494333 - DNA, 15 bp, Homo sapiens
ccattttggagaacc

SEQ ID NO: 494334 - DNA, 15 bp, Homo sapiens
tccattttggagaac

SEQ ID NO: 494335 - DNA, 15 bp, Homo sapiens
ttccattttggagaa

SEQ ID NO: 494336 - DNA, 15 bp, Homo sapiens
tttccattttggaga

SEQ ID NO: 494337 - DNA, 15 bp, Homo sapiens
ttttccattttggag

SEQ ID NO: 494338 - DNA, 15 bp, Homo sapiens
gttttccattttgga

SEQ ID NO: 494339 - DNA, 15 bp, Homo sapiens
tgttttccattttgg

SEQ ID NO: 494340 - DNA, 15 bp, Homo sapiens
ttgttttccattttg

SEQ ID NO: 494341 - DNA, 15 bp, Homo sapiens
attgttttccatttt

SEQ ID NO: 494342 - DNA, 15 bp, Homo sapiens
tattgttttccattt

SEQ ID NO: 494343 - DNA, 15 bp, Homo sapiens
ctattgttttccatt

SEQ ID NO: 494344 - DNA, 15 bp, Homo sapiens
tctattgttttccat

SEQ ID NO: 494345 - DNA, 15 bp, Homo sapiens
ttctattgttttcca

SEQ ID NO: 494346 - DNA, 15 bp, Homo sapiens
tttctattgttttcc

SEQ ID NO: 494347 - DNA, 15 bp, Homo sapiens
ctttctattgttttc

SEQ ID NO: 494348 - DNA, 15 bp, Homo sapiens
tctttctattgtttt

SEQ ID NO: 494349 - DNA, 15 bp, Homo sapiens
ctctttctattgttt

SEQ ID NO: 494350 - DNA, 15 bp, Homo sapiens
tctctttctattgtt

SEQ ID NO: 494351 - DNA, 15 bp, Homo sapiens
ttctctttctattgt

SEQ ID NO: 494352 - DNA, 15 bp, Homo sapiens
attctctttctattg

SEQ ID NO: 494353 - DNA, 15 bp, Homo sapiens
tattctctttctatt

SEQ ID NO: 494354 - DNA, 15 bp, Homo sapiens
gtattctctttctat

SEQ ID NO: 494355 - DNA, 15 bp, Homo sapiens
tgtattctctttcta

SEQ ID NO: 494356 - DNA, 15 bp, Homo sapiens
atgtattctctttct

SEQ ID NO: 494357 - DNA, 15 bp, Homo sapiens
aatgtattctctttc

SEQ ID NO: 494358 - DNA, 15 bp, Homo sapiens
aaatgtattctcttt

SEQ ID NO: 494359 - DNA, 15 bp, Homo sapiens
gaaatgtattctctt

SEQ ID NO: 494360 - DNA, 15 bp, Homo sapiens
ggaaatgtattctct

SEQ ID NO: 494361 - DNA, 15 bp, Homo sapiens
tggaaatgtattctc

SEQ ID NO: 494362 - DNA, 15 bp, Homo sapiens
ttggaaatgtattct

SEQ ID NO: 494363 - DNA, 15 bp, Homo sapiens
cttggaaatgtattc

SEQ ID NO: 494364 - DNA, 15 bp, Homo sapiens
gcttggaaatgtatt

SEQ ID NO: 494365 - DNA, 15 bp, Homo sapiens
ggcttggaaatgtat

SEQ ID NO: 494366 - DNA, 15 bp, Homo sapiens
tggcttggaaatgta

SEQ ID NO: 494367 - DNA, 15 bp, Homo sapiens
gtggcttggaaatgt

SEQ ID NO: 494368 - DNA, 15 bp, Homo sapiens
tgtggcttggaaatg

SEQ ID NO: 494369 - DNA, 15 bp, Homo sapiens
ctgtggcttggaaat

SEQ ID NO: 494370 - DNA, 15 bp, Homo sapiens
gctgtggcttggaaa

SEQ ID NO: 494371 - DNA, 15 bp, Homo sapiens
ggctgtggcttggaa

SEQ ID NO: 494372 - DNA, 15 bp, Homo sapiens
gggctgtggcttgga

SEQ ID NO: 494373 - DNA, 15 bp, Homo sapiens
agggctgtggcttgg

SEQ ID NO: 494374 - DNA, 15 bp, Homo sapiens
gagggctgtggcttg

SEQ ID NO: 494375 - DNA, 15 bp, Homo sapiens
agagggctgtggctt

SEQ ID NO: 494376 - DNA, 15 bp, Homo sapiens
gagagggctgtggct

SEQ ID NO: 494377 - DNA, 15 bp, Homo sapiens
tgagagggctgtggc

SEQ ID NO: 494378 - DNA, 15 bp, Homo sapiens
atgagagggctgtgg

SEQ ID NO: 494379 - DNA, 15 bp, Homo sapiens
tatgagagggctgtg

SEQ ID NO: 494380 - DNA, 15 bp, Homo sapiens
gtatgagagggctgt

SEQ ID NO: 494381 - DNA, 15 bp, Homo sapiens
agtatgagagggctg

SEQ ID NO: 494382 - DNA, 15 bp, Homo sapiens
tagtatgagagggct

SEQ ID NO: 494383 - DNA, 15 bp, Homo sapiens
ttagtatgagagggc

SEQ ID NO: 494384 - DNA, 15 bp, Homo sapiens
cttagtatgagaggg

SEQ ID NO: 494385 - DNA, 15 bp, Homo sapiens
gcttagtatgagagg

SEQ ID NO: 494386 - DNA, 15 bp, Homo sapiens
agcttagtatgagag

SEQ ID NO: 494387 - DNA, 15 bp, Homo sapiens
aagcttagtatgaga

SEQ ID NO: 494388 - DNA, 15 bp, Homo sapiens
gaagcttagtatgag

SEQ ID NO: 494389 - DNA, 15 bp, Homo sapiens
ggaagcttagtatga

SEQ ID NO: 494390 - DNA, 15 bp, Homo sapiens
gggaagcttagtatg

SEQ ID NO: 494391 - DNA, 15 bp, Homo sapiens
cgggaagcttagtat

SEQ ID NO: 494392 - DNA, 15 bp, Homo sapiens
gcgggaagcttagta

SEQ ID NO: 494393 - DNA, 15 bp, Homo sapiens
agcgggaagcttagt

SEQ ID NO: 494394 - DNA, 15 bp, Homo sapiens
cagcgggaagcttag

SEQ ID NO: 494395 - DNA, 15 bp, Homo sapiens
ccagcgggaagctta

SEQ ID NO: 494396 - DNA, 15 bp, Homo sapiens
cccagcgggaagctt

SEQ ID NO: 494397 - DNA, 15 bp, Homo sapiens
acccagcgggaagct

SEQ ID NO: 494398 - DNA, 15 bp, Homo sapiens
tacccagcgggaagc

SEQ ID NO: 494399 - DNA, 15 bp, Homo sapiens
gtacccagcgggaag

SEQ ID NO: 494400 - DNA, 15 bp, Homo sapiens
ggtacccagcgggaa

SEQ ID NO: 494401 - DNA, 15 bp, Homo sapiens
aggtacccagcggga

SEQ ID NO: 494402 - DNA, 15 bp, Homo sapiens
aaggtacccagcggg

SEQ ID NO: 494403 - DNA, 15 bp, Homo sapiens
gaaggtacccagcgg

SEQ ID NO: 494404 - DNA, 15 bp, Homo sapiens
agaaggtacccagcg

SEQ ID NO: 494405 - DNA, 15 bp, Homo sapiens
tagaaggtacccagc

SEQ ID NO: 494406 - DNA, 15 bp, Homo sapiens
ttagaaggtacccag

SEQ ID NO: 494407 - DNA, 15 bp, Homo sapiens
cttagaaggtaccca

SEQ ID NO: 494408 - DNA, 15 bp, Homo sapiens
ccttagaaggtaccc

SEQ ID NO: 494409 - DNA, 15 bp, Homo sapiens
tccttagaaggtacc

SEQ ID NO: 494410 - DNA, 15 bp, Homo sapiens
gtccttagaaggtac

SEQ ID NO: 494411 - DNA, 15 bp, Homo sapiens
tgtccttagaaggta

SEQ ID NO: 494412 - DNA, 15 bp, Homo sapiens
gtgtccttagaaggt

SEQ ID NO: 494413 - DNA, 15 bp, Homo sapiens
tgtgtccttagaagg

SEQ ID NO: 494414 - DNA, 15 bp, Homo sapiens
ctgtgtccttagaag

SEQ ID NO: 494415 - DNA, 15 bp, Homo sapiens
cctgtgtccttagaa

SEQ ID NO: 494416 - DNA, 15 bp, Homo sapiens
gcctgtgtccttaga

SEQ ID NO: 494417 - DNA, 15 bp, Homo sapiens
ggcctgtgtccttag

SEQ ID NO: 494418 - DNA, 15 bp, Homo sapiens
gggcctgtgtcctta

SEQ ID NO: 494419 - DNA, 15 bp, Homo sapiens
cgggcctgtgtcctt

SEQ ID NO: 494420 - DNA, 15 bp, Homo sapiens
tcgggcctgtgtcct

SEQ ID NO: 494421 - DNA, 15 bp, Homo sapiens
atcgggcctgtgtcc

SEQ ID NO: 494422 - DNA, 15 bp, Homo sapiens
catcgggcctgtgtc

SEQ ID NO: 494423 - DNA, 15 bp, Homo sapiens
ccatcgggcctgtgt

SEQ ID NO: 494424 - DNA, 15 bp, Homo sapiens
tccatcgggcctgtg

SEQ ID NO: 494425 - DNA, 15 bp, Homo sapiens
ctccatcgggcctgt

SEQ ID NO: 494426 - DNA, 15 bp, Homo sapiens
cctccatcgggcctg

SEQ ID NO: 494427 - DNA, 15 bp, Homo sapiens
ccctccatcgggcct

SEQ ID NO: 494428 - DNA, 15 bp, Homo sapiens
accctccatcgggcc

SEQ ID NO: 494429 - DNA, 15 bp, Homo sapiens
caccctccatcgggc

SEQ ID NO: 494430 - DNA, 15 bp, Homo sapiens
ccaccctccatcggg

SEQ ID NO: 494431 - DNA, 15 bp, Homo sapiens
cccaccctccatcgg

SEQ ID NO: 494432 - DNA, 15 bp, Homo sapiens
ccccaccctccatcg

SEQ ID NO: 494433 - DNA, 15 bp, Homo sapiens
accccaccctccatc

SEQ ID NO: 494434 - DNA, 15 bp, Homo sapiens
caccccaccctccat

SEQ ID NO: 494435 - DNA, 15 bp, Homo sapiens
ccaccccaccctcca

SEQ ID NO: 494436 - DNA, 15 bp, Homo sapiens
gccaccccaccctcc

SEQ ID NO: 494437 - DNA, 15 bp, Homo sapiens
cgccaccccaccctc

SEQ ID NO: 494438 - DNA, 15 bp, Homo sapiens
ccgccaccccaccct

SEQ ID NO: 494439 - DNA, 15 bp, Homo sapiens
cccgccaccccaccc

SEQ ID NO: 494440 - DNA, 15 bp, Homo sapiens
ccccgccaccccacc

SEQ ID NO: 494441 - DNA, 15 bp, Homo sapiens
gccccgccaccccac

SEQ ID NO: 494442 - DNA, 15 bp, Homo sapiens
tgccccgccacccca

SEQ ID NO: 494443 - DNA, 15 bp, Homo sapiens
ttgccccgccacccc

SEQ ID NO: 494444 - DNA, 15 bp, Homo sapiens
cttgccccgccaccc

SEQ ID NO: 494445 - DNA, 15 bp, Homo sapiens
ccttgccccgccacc

SEQ ID NO: 494446 - DNA, 15 bp, Homo sapiens
cccttgccccgccac

SEQ ID NO: 494447 - DNA, 15 bp, Homo sapiens
tcccttgccccgcca

SEQ ID NO: 494448 - DNA, 15 bp, Homo sapiens
ttcccttgccccgcc

SEQ ID NO: 494449 - DNA, 15 bp, Homo sapiens
gttcccttgccccgc

SEQ ID NO: 494450 - DNA, 15 bp, Homo sapiens
tgttcccttgccccg

SEQ ID NO: 494451 - DNA, 15 bp, Homo sapiens
ttgttcccttgcccc

SEQ ID NO: 494452 - DNA, 15 bp, Homo sapiens
cttgttcccttgccc

SEQ ID NO: 494453 - DNA, 15 bp, Homo sapiens
tcttgttcccttgcc

SEQ ID NO: 494454 - DNA, 15 bp, Homo sapiens
ctcttgttcccttgc

SEQ ID NO: 494455 - DNA, 15 bp, Homo sapiens
tctcttgttcccttg

SEQ ID NO: 494456 - DNA, 15 bp, Homo sapiens
gtctcttgttccctt

SEQ ID NO: 494457 - DNA, 15 bp, Homo sapiens
ggtctcttgttccct

SEQ ID NO: 494458 - DNA, 15 bp, Homo sapiens
cggtctcttgttccc

SEQ ID NO: 494459 - DNA, 15 bp, Homo sapiens
ccggtctcttgttcc

SEQ ID NO: 494460 - DNA, 15 bp, Homo sapiens
cccggtctcttgttc

SEQ ID NO: 494461 - DNA, 15 bp, Homo sapiens
gcccggtctcttgtt

SEQ ID NO: 494462 - DNA, 15 bp, Homo sapiens
ggcccggtctcttgt

SEQ ID NO: 494463 - DNA, 15 bp, Homo sapiens
aggcccggtctcttg

SEQ ID NO: 494464 - DNA, 15 bp, Homo sapiens
aaggcccggtctctt

SEQ ID NO: 494465 - DNA, 15 bp, Homo sapiens
caaggcccggtctct

SEQ ID NO: 494466 - DNA, 15 bp, Homo sapiens
ccaaggcccggtctc

SEQ ID NO: 494467 - DNA, 15 bp, Homo sapiens
cccaaggcccggtct

SEQ ID NO: 494468 - DNA, 15 bp, Homo sapiens
ccccaaggcccggtc

SEQ ID NO: 494469 - DNA, 15 bp, Homo sapiens
gccccaaggcccggt

SEQ ID NO: 494470 - DNA, 15 bp, Homo sapiens
agccccaaggcccgg

SEQ ID NO: 494471 - DNA, 15 bp, Homo sapiens
cagccccaaggcccg

SEQ ID NO: 494472 - DNA, 15 bp, Homo sapiens
ccagccccaaggccc

SEQ ID NO: 494473 - DNA, 15 bp, Homo sapiens
tccagccccaaggcc

SEQ ID NO: 494474 - DNA, 15 bp, Homo sapiens
ctccagccccaaggc

SEQ ID NO: 494475 - DNA, 15 bp, Homo sapiens
actccagccccaagg

SEQ ID NO: 494476 - DNA, 15 bp, Homo sapiens
cactccagccccaag

SEQ ID NO: 494477 - DNA, 15 bp, Homo sapiens
acactccagccccaa

SEQ ID NO: 494478 - DNA, 15 bp, Homo sapiens
cacactccagcccca

SEQ ID NO: 494479 - DNA, 15 bp, Homo sapiens
ccacactccagcccc

SEQ ID NO: 494480 - DNA, 15 bp, Homo sapiens
cccacactccagccc

SEQ ID NO: 494481 - DNA, 15 bp, Homo sapiens
gcccacactccagcc

SEQ ID NO: 494482 - DNA, 15 bp, Homo sapiens
tgcccacactccagc

SEQ ID NO: 494483 - DNA, 15 bp, Homo sapiens
ttgcccacactccag

SEQ ID NO: 494484 - DNA, 15 bp, Homo sapiens
tttgcccacactcca

SEQ ID NO: 494485 - DNA, 15 bp, Homo sapiens
ttttgcccacactcc

SEQ ID NO: 494486 - DNA, 15 bp, Homo sapiens
gttttgcccacactc

SEQ ID NO: 494487 - DNA, 15 bp, Homo sapiens
cgttttgcccacact

SEQ ID NO: 494488 - DNA, 15 bp, Homo sapiens
ccgttttgcccacac

SEQ ID NO: 494489 - DNA, 15 bp, Homo sapiens
cccgttttgcccaca

SEQ ID NO: 494490 - DNA, 15 bp, Homo sapiens
gcccgttttgcccac

SEQ ID NO: 494491 - DNA, 15 bp, Homo sapiens
tgcccgttttgccca

SEQ ID NO: 494492 - DNA, 15 bp, Homo sapiens
gtgcccgttttgccc

SEQ ID NO: 494493 - DNA, 15 bp, Homo sapiens
agtgcccgttttgcc

SEQ ID NO: 494494 - DNA, 15 bp, Homo sapiens
gagtgcccgttttgc

SEQ ID NO: 494495 - DNA, 15 bp, Homo sapiens
tgagtgcccgttttg

SEQ ID NO: 494496 - DNA, 15 bp, Homo sapiens
gtgagtgcccgtttt

SEQ ID NO: 494497 - DNA, 15 bp, Homo sapiens
cgtgagtgcccgttt

SEQ ID NO: 494498 - DNA, 15 bp, Homo sapiens
ccgtgagtgcccgtt

SEQ ID NO: 494499 - DNA, 15 bp, Homo sapiens
cccgtgagtgcccgt

SEQ ID NO: 494500 - DNA, 15 bp, Homo sapiens
tcccgtgagtgcccg

SEQ ID NO: 494501 - DNA, 15 bp, Homo sapiens
ctcccgtgagtgccc

SEQ ID NO: 494502 - DNA, 15 bp, Homo sapiens
actcccgtgagtgcc

SEQ ID NO: 494503 - DNA, 15 bp, Homo sapiens
gactcccgtgagtgc

SEQ ID NO: 494504 - DNA, 15 bp, Homo sapiens
tgactcccgtgagtg

SEQ ID NO: 494505 - DNA, 15 bp, Homo sapiens
ttgactcccgtgagt

SEQ ID NO: 494506 - DNA, 15 bp, Homo sapiens
tttgactcccgtgag

SEQ ID NO: 494507 - DNA, 15 bp, Homo sapiens
gtttgactcccgtga

SEQ ID NO: 494508 - DNA, 15 bp, Homo sapiens
agtttgactcccgtg

SEQ ID NO: 494509 - DNA, 15 bp, Homo sapiens
aagtttgactcccgt

SEQ ID NO: 494510 - DNA, 15 bp, Homo sapiens
gaagtttgactcccg

SEQ ID NO: 494511 - DNA, 15 bp, Homo sapiens
ggaagtttgactccc

SEQ ID NO: 494512 - DNA, 15 bp, Homo sapiens
tggaagtttgactcc

SEQ ID NO: 494513 - DNA, 15 bp, Homo sapiens
ctggaagtttgactc

SEQ ID NO: 494514 - DNA, 15 bp, Homo sapiens
cctggaagtttgact

SEQ ID NO: 494515 - DNA, 15 bp, Homo sapiens
gcctggaagtttgac

SEQ ID NO: 494516 - DNA, 15 bp, Homo sapiens
cgcctggaagtttga

SEQ ID NO: 494517 - DNA, 15 bp, Homo sapiens
tcgcctggaagtttg

SEQ ID NO: 494518 - DNA, 15 bp, Homo sapiens
atcgcctggaagttt

SEQ ID NO: 494519 - DNA, 15 bp, Homo sapiens
catcgcctggaagtt

SEQ ID NO: 494520 - DNA, 15 bp, Homo sapiens
ccatcgcctggaagt

SEQ ID NO: 494521 - DNA, 15 bp, Homo sapiens
accatcgcctggaag

SEQ ID NO: 494522 - DNA, 15 bp, Homo sapiens
caccatcgcctggaa

SEQ ID NO: 494523 - DNA, 15 bp, Homo sapiens
tcaccatcgcctgga

SEQ ID NO: 494524 - DNA, 15 bp, Homo sapiens
atcaccatcgcctgg

SEQ ID NO: 494525 - DNA, 15 bp, Homo sapiens
catcaccatcgcctg

SEQ ID NO: 494526 - DNA, 15 bp, Homo sapiens
gcatcaccatcgcct

SEQ ID NO: 494527 - DNA, 15 bp, Homo sapiens
ggcatcaccatcgcc

SEQ ID NO: 494528 - DNA, 15 bp, Homo sapiens
gggcatcaccatcgc

SEQ ID NO: 494529 - DNA, 15 bp, Homo sapiens
ggggcatcaccatcg

SEQ ID NO: 494530 - DNA, 15 bp, Homo sapiens
gggggcatcaccatc

SEQ ID NO: 494531 - DNA, 15 bp, Homo sapiens
cgggggcatcaccat

SEQ ID NO: 494532 - DNA, 15 bp, Homo sapiens
tcgggggcatcacca

SEQ ID NO: 494533 - DNA, 15 bp, Homo sapiens
atcgggggcatcacc

SEQ ID NO: 494534 - DNA, 15 bp, Homo sapiens
aatcgggggcatcac

SEQ ID NO: 494535 - DNA, 15 bp, Homo sapiens
aaatcgggggcatca

SEQ ID NO: 494536 - DNA, 15 bp, Homo sapiens
gaaatcgggggcatc

SEQ ID NO: 494537 - DNA, 15 bp, Homo sapiens
agaaatcgggggcat

SEQ ID NO: 494538 - DNA, 15 bp, Homo sapiens
cagaaatcgggggca

SEQ ID NO: 494539 - DNA, 15 bp, Homo sapiens
tcagaaatcgggggc

SEQ ID NO: 494540 - DNA, 15 bp, Homo sapiens
ctcagaaatcggggg

SEQ ID NO: 494541 - DNA, 15 bp, Homo sapiens
actcagaaatcgggg

SEQ ID NO: 494542 - DNA, 15 bp, Homo sapiens
gactcagaaatcggg

SEQ ID NO: 494543 - DNA, 15 bp, Homo sapiens
tgactcagaaatcgg

SEQ ID NO: 494544 - DNA, 15 bp, Homo sapiens
gtgactcagaaatcg

SEQ ID NO: 494545 - DNA, 15 bp, Homo sapiens
agtgactcagaaatc

SEQ ID NO: 494546 - DNA, 15 bp, Homo sapiens
tagtgactcagaaat

SEQ ID NO: 494547 - DNA, 15 bp, Homo sapiens
ttagtgactcagaaa

SEQ ID NO: 494548 - DNA, 15 bp, Homo sapiens
tttagtgactcagaa

SEQ ID NO: 494549 - DNA, 15 bp, Homo sapiens
ctttagtgactcaga

SEQ ID NO: 494550 - DNA, 15 bp, Homo sapiens
gctttagtgactcag

SEQ ID NO: 494551 - DNA, 15 bp, Homo sapiens
cgctttagtgactca

SEQ ID NO: 494552 - DNA, 15 bp, Homo sapiens
gcgctttagtgactc

SEQ ID NO: 494553 - DNA, 15 bp, Homo sapiens
tgcgctttagtgact

SEQ ID NO: 494554 - DNA, 15 bp, Homo sapiens
ttgcgctttagtgac

SEQ ID NO: 494555 - DNA, 15 bp, Homo sapiens
gttgcgctttagtga

SEQ ID NO: 494556 - DNA, 15 bp, Homo sapiens
tgttgcgctttagtg

SEQ ID NO: 494557 - DNA, 15 bp, Homo sapiens
ttgttgcgctttagt

SEQ ID NO: 494558 - DNA, 15 bp, Homo sapiens
cttgttgcgctttag

SEQ ID NO: 494559 - DNA, 15 bp, Homo sapiens
tcttgttgcgcttta

SEQ ID NO: 494560 - DNA, 15 bp, Homo sapiens
ttcttgttgcgcttt

SEQ ID NO: 494561 - DNA, 15 bp, Homo sapiens
cttcttgttgcgctt

SEQ ID NO: 494562 - DNA, 15 bp, Homo sapiens
ccttcttgttgcgct

SEQ ID NO: 494563 - DNA, 15 bp, Homo sapiens
accttcttgttgcgc

SEQ ID NO: 494564 - DNA, 15 bp, Homo sapiens
gaccttcttgttgcg

SEQ ID NO: 494565 - DNA, 15 bp, Homo sapiens
ggaccttcttgttgc

SEQ ID NO: 494566 - DNA, 15 bp, Homo sapiens
gggaccttcttgttg

SEQ ID NO: 494567 - DNA, 15 bp, Homo sapiens
cgggaccttcttgtt

SEQ ID NO: 494568 - DNA, 15 bp, Homo sapiens
acgggaccttcttgt

SEQ ID NO: 494569 - DNA, 15 bp, Homo sapiens
gacgggaccttcttg

SEQ ID NO: 494570 - DNA, 15 bp, Homo sapiens
cgacgggaccttctt

SEQ ID NO: 494571 - DNA, 15 bp, Homo sapiens
ccgacgggaccttct

SEQ ID NO: 494572 - DNA, 15 bp, Homo sapiens
cccgacgggaccttc

SEQ ID NO: 494573 - DNA, 15 bp, Homo sapiens
gcccgacgggacctt

SEQ ID NO: 494574 - DNA, 15 bp, Homo sapiens
agcccgacgggacct

SEQ ID NO: 494575 - DNA, 15 bp, Homo sapiens
aagcccgacgggacc

SEQ ID NO: 494576 - DNA, 15 bp, Homo sapiens
caagcccgacgggac

SEQ ID NO: 494577 - DNA, 15 bp, Homo sapiens
acaagcccgacggga

SEQ ID NO: 494578 - DNA, 15 bp, Homo sapiens
aacaagcccgacggg

SEQ ID NO: 494579 - DNA, 15 bp, Homo sapiens
caacaagcccgacgg

SEQ ID NO: 494580 - DNA, 15 bp, Homo sapiens
tcaacaagcccgacg

SEQ ID NO: 494581 - DNA, 15 bp, Homo sapiens
atcaacaagcccgac

SEQ ID NO: 494582 - DNA, 15 bp, Homo sapiens
catcaacaagcccga

SEQ ID NO: 494583 - DNA, 15 bp, Homo sapiens
tcatcaacaagcccg

SEQ ID NO: 494584 - DNA, 15 bp, Homo sapiens
ctcatcaacaagccc

SEQ ID NO: 494585 - DNA, 15 bp, Homo sapiens
gctcatcaacaagcc

SEQ ID NO: 494586 - DNA, 15 bp, Homo sapiens
tgctcatcaacaagc

SEQ ID NO: 494587 - DNA, 15 bp, Homo sapiens
ctgctcatcaacaag

SEQ ID NO: 494588 - DNA, 15 bp, Homo sapiens
cctgctcatcaacaa

SEQ ID NO: 494589 - DNA, 15 bp, Homo sapiens
acctgctcatcaaca

SEQ ID NO: 494590 - DNA, 15 bp, Homo sapiens
gacctgctcatcaac

SEQ ID NO: 494591 - DNA, 15 bp, Homo sapiens
cgacctgctcatcaa

SEQ ID NO: 494592 - DNA, 15 bp, Homo sapiens
acgacctgctcatca

SEQ ID NO: 494593 - DNA, 15 bp, Homo sapiens
cacgacctgctcatc

SEQ ID NO: 494594 - DNA, 15 bp, Homo sapiens
ccacgacctgctcat

SEQ ID NO: 494595 - DNA, 15 bp, Homo sapiens
cccacgacctgctca

SEQ ID NO: 494596 - DNA, 15 bp, Homo sapiens
gcccacgacctgctc

SEQ ID NO: 494597 - DNA, 15 bp, Homo sapiens
ggcccacgacctgct

SEQ ID NO: 494598 - DNA, 15 bp, Homo sapiens
aggcccacgacctgc

SEQ ID NO: 494599 - DNA, 15 bp, Homo sapiens
caggcccacgacctg

SEQ ID NO: 494600 - DNA, 15 bp, Homo sapiens
acaggcccacgacct

SEQ ID NO: 494601 - DNA, 15 bp, Homo sapiens
aacaggcccacgacc

SEQ ID NO: 494602 - DNA, 15 bp, Homo sapiens
caacaggcccacgac

SEQ ID NO: 494603 - DNA, 15 bp, Homo sapiens
gcaacaggcccacga

SEQ ID NO: 494604 - DNA, 15 bp, Homo sapiens
agcaacaggcccacg

SEQ ID NO: 494605 - DNA, 15 bp, Homo sapiens
aagcaacaggcccac

SEQ ID NO: 494606 - DNA, 15 bp, Homo sapiens
taagcaacaggccca

SEQ ID NO: 494607 - DNA, 15 bp, Homo sapiens
ataagcaacaggccc

SEQ ID NO: 494608 - DNA, 15 bp, Homo sapiens
aataagcaacaggcc

SEQ ID NO: 494609 - DNA, 15 bp, Homo sapiens
gaataagcaacaggc

SEQ ID NO: 494610 - DNA, 15 bp, Homo sapiens
tgaataagcaacagg

SEQ ID NO: 494611 - DNA, 15 bp, Homo sapiens
gtgaataagcaacag

SEQ ID NO: 494612 - DNA, 15 bp, Homo sapiens
tgtgaataagcaaca

SEQ ID NO: 494613 - DNA, 15 bp, Homo sapiens
ttgtgaataagcaac

SEQ ID NO: 494614 - DNA, 15 bp, Homo sapiens
tttgtgaataagcaa

SEQ ID NO: 494615 - DNA, 15 bp, Homo sapiens
ttttgtgaataagca

SEQ ID NO: 494616 - DNA, 15 bp, Homo sapiens
gttttgtgaataagc

SEQ ID NO: 494617 - DNA, 15 bp, Homo sapiens
ggttttgtgaataag

SEQ ID NO: 494618 - DNA, 15 bp, Homo sapiens
aggttttgtgaataa

SEQ ID NO: 494619 - DNA, 15 bp, Homo sapiens
taggttttgtgaata

SEQ ID NO: 494620 - DNA, 15 bp, Homo sapiens
ctaggttttgtgaat

SEQ ID NO: 494621 - DNA, 15 bp, Homo sapiens
cctaggttttgtgaa

SEQ ID NO: 494622 - DNA, 15 bp, Homo sapiens
tcctaggttttgtga

SEQ ID NO: 494623 - DNA, 15 bp, Homo sapiens
atcctaggttttgtg

SEQ ID NO: 494624 - DNA, 15 bp, Homo sapiens
catcctaggttttgt

SEQ ID NO: 494625 - DNA, 15 bp, Homo sapiens
ccatcctaggttttg

SEQ ID NO: 494626 - DNA, 15 bp, Homo sapiens
gccatcctaggtttt

SEQ ID NO: 494627 - DNA, 15 bp, Homo sapiens
ggccatcctaggttt

SEQ ID NO: 494628 - DNA, 15 bp, Homo sapiens
gggccatcctaggtt

SEQ ID NO: 494629 - DNA, 15 bp, Homo sapiens
agggccatcctaggt

SEQ ID NO: 494630 - DNA, 15 bp, Homo sapiens
cagggccatcctagg

SEQ ID NO: 494631 - DNA, 15 bp, Homo sapiens
ccagggccatcctag

SEQ ID NO: 494632 - DNA, 15 bp, Homo sapiens
cccagggccatccta

SEQ ID NO: 494633 - DNA, 15 bp, Homo sapiens
acccagggccatcct

SEQ ID NO: 494634 - DNA, 15 bp, Homo sapiens
cacccagggccatcc

SEQ ID NO: 494635 - DNA, 15 bp, Homo sapiens
gcacccagggccatc

SEQ ID NO: 494636 - DNA, 15 bp, Homo sapiens
tgcacccagggccat

SEQ ID NO: 494637 - DNA, 15 bp, Homo sapiens
gtgcacccagggcca

SEQ ID NO: 494638 - DNA, 15 bp, Homo sapiens
cgtgcacccagggcc

SEQ ID NO: 494639 - DNA, 15 bp, Homo sapiens
ccgtgcacccagggc

SEQ ID NO: 494640 - DNA, 15 bp, Homo sapiens
tccgtgcacccaggg

SEQ ID NO: 494641 - DNA, 15 bp, Homo sapiens
ctccgtgcacccagg

SEQ ID NO: 494642 - DNA, 15 bp, Homo sapiens
gctccgtgcacccag

SEQ ID NO: 494643 - DNA, 15 bp, Homo sapiens
tgctccgtgcaccca

SEQ ID NO: 494644 - DNA, 15 bp, Homo sapiens
atgctccgtgcaccc

SEQ ID NO: 494645 - DNA, 15 bp, Homo sapiens
aatgctccgtgcacc

SEQ ID NO: 494646 - DNA, 15 bp, Homo sapiens
caatgctccgtgcac

SEQ ID NO: 494647 - DNA, 15 bp, Homo sapiens
tcaatgctccgtgca

SEQ ID NO: 494648 - DNA, 15 bp, Homo sapiens
ctcaatgctccgtgc

SEQ ID NO: 494649 - DNA, 15 bp, Homo sapiens
gctcaatgctccgtg

SEQ ID NO: 494650 - DNA, 15 bp, Homo sapiens
cgctcaatgctccgt

SEQ ID NO: 494651 - DNA, 15 bp, Homo sapiens
acgctcaatgctccg

SEQ ID NO: 494652 - DNA, 15 bp, Homo sapiens
gacgctcaatgctcc

SEQ ID NO: 494653 - DNA, 15 bp, Homo sapiens
tgacgctcaatgctc

SEQ ID NO: 494654 - DNA, 15 bp, Homo sapiens
gtgacgctcaatgct

SEQ ID NO: 494655 - DNA, 15 bp, Homo sapiens
ggtgacgctcaatgc

SEQ ID NO: 494656 - DNA, 15 bp, Homo sapiens
tggtgacgctcaatg

SEQ ID NO: 494657 - DNA, 15 bp, Homo sapiens
gtggtgacgctcaat

SEQ ID NO: 494658 - DNA, 15 bp, Homo sapiens
agtggtgacgctcaa

SEQ ID NO: 494659 - DNA, 15 bp, Homo sapiens
cagtggtgacgctca

SEQ ID NO: 494660 - DNA, 15 bp, Homo sapiens
ccagtggtgacgctc

SEQ ID NO: 494661 - DNA, 15 bp, Homo sapiens
cccagtggtgacgct

SEQ ID NO: 494662 - DNA, 15 bp, Homo sapiens
gcccagtggtgacgc

SEQ ID NO: 494663 - DNA, 15 bp, Homo sapiens
ggcccagtggtgacg

SEQ ID NO: 494664 - DNA, 15 bp, Homo sapiens
tggcccagtggtgac

SEQ ID NO: 494665 - DNA, 15 bp, Homo sapiens
gtggcccagtggtga

SEQ ID NO: 494666 - DNA, 15 bp, Homo sapiens
tgtggcccagtggtg

SEQ ID NO: 494667 - DNA, 15 bp, Homo sapiens
ctgtggcccagtggt

SEQ ID NO: 494668 - DNA, 15 bp, Homo sapiens
gctgtggcccagtgg

SEQ ID NO: 494669 - DNA, 15 bp, Homo sapiens
ggctgtggcccagtg

SEQ ID NO: 494670 - DNA, 15 bp, Homo sapiens
tggctgtggcccagt

SEQ ID NO: 494671 - DNA, 15 bp, Homo sapiens
gtggctgtggcccag

SEQ ID NO: 494672 - DNA, 15 bp, Homo sapiens
tgtggctgtggccca

SEQ ID NO: 494673 - DNA, 15 bp, Homo sapiens
ctgtggctgtggccc

SEQ ID NO: 494674 - DNA, 15 bp, Homo sapiens
actgtggctgtggcc

SEQ ID NO: 494675 - DNA, 15 bp, Homo sapiens
gactgtggctgtggc

SEQ ID NO: 494676 - DNA, 15 bp, Homo sapiens
agactgtggctgtgg

SEQ ID NO: 494677 - DNA, 15 bp, Homo sapiens
gagactgtggctgtg

SEQ ID NO: 494678 - DNA, 15 bp, Homo sapiens
agagactgtggctgt

SEQ ID NO: 494679 - DNA, 15 bp, Homo sapiens
gagagactgtggctg

SEQ ID NO: 494680 - DNA, 15 bp, Homo sapiens
agagagactgtggct

SEQ ID NO: 494681 - DNA, 15 bp, Homo sapiens
cagagagactgtggc

SEQ ID NO: 494682 - DNA, 15 bp, Homo sapiens
gcagagagactgtgg

SEQ ID NO: 494683 - DNA, 15 bp, Homo sapiens
cgcagagagactgtg

SEQ ID NO: 494684 - DNA, 15 bp, Homo sapiens
gcgcagagagactgt

SEQ ID NO: 494685 - DNA, 15 bp, Homo sapiens
ggcgcagagagactg

SEQ ID NO: 494686 - DNA, 15 bp, Homo sapiens
gggcgcagagagact

SEQ ID NO: 494687 - DNA, 15 bp, Homo sapiens
tgggcgcagagagac

SEQ ID NO: 494688 - DNA, 15 bp, Homo sapiens
gtgggcgcagagaga

SEQ ID NO: 494689 - DNA, 15 bp, Homo sapiens
tgtgggcgcagagag

SEQ ID NO: 494690 - DNA, 15 bp, Homo sapiens
ctgtgggcgcagaga

SEQ ID NO: 494691 - DNA, 15 bp, Homo sapiens
gctgtgggcgcagag

SEQ ID NO: 494692 - DNA, 15 bp, Homo sapiens
agctgtgggcgcaga

SEQ ID NO: 494693 - DNA, 15 bp, Homo sapiens
cagctgtgggcgcag

SEQ ID NO: 494694 - DNA, 15 bp, Homo sapiens
ccagctgtgggcgca

SEQ ID NO: 494695 - DNA, 15 bp, Homo sapiens
gccagctgtgggcgc

SEQ ID NO: 494696 - DNA, 15 bp, Homo sapiens
ggccagctgtgggcg

SEQ ID NO: 494697 - DNA, 15 bp, Homo sapiens
gggccagctgtgggc

SEQ ID NO: 494698 - DNA, 15 bp, Homo sapiens
ggggccagctgtggg

SEQ ID NO: 494699 - DNA, 15 bp, Homo sapiens
aggggccagctgtgg

SEQ ID NO: 494700 - DNA, 15 bp, Homo sapiens
caggggccagctgtg

SEQ ID NO: 494701 - DNA, 15 bp, Homo sapiens
tcaggggccagctgt

SEQ ID NO: 494702 - DNA, 15 bp, Homo sapiens
gtcaggggccagctg

SEQ ID NO: 494703 - DNA, 15 bp, Homo sapiens
ggtcaggggccagct

SEQ ID NO: 494704 - DNA, 15 bp, Homo sapiens
gggtcaggggccagc

SEQ ID NO: 494705 - DNA, 15 bp, Homo sapiens
agggtcaggggccag

SEQ ID NO: 494706 - DNA, 15 bp, Homo sapiens
cagggtcaggggcca

SEQ ID NO: 494707 - DNA, 15 bp, Homo sapiens
gcagggtcaggggcc

SEQ ID NO: 494708 - DNA, 15 bp, Homo sapiens
tgcagggtcaggggc

SEQ ID NO: 494709 - DNA, 15 bp, Homo sapiens
ctgcagggtcagggg

SEQ ID NO: 494710 - DNA, 15 bp, Homo sapiens
gctgcagggtcaggg

SEQ ID NO: 494711 - DNA, 15 bp, Homo sapiens
ggctgcagggtcagg

SEQ ID NO: 494712 - DNA, 15 bp, Homo sapiens
gggctgcagggtcag

SEQ ID NO: 494713 - DNA, 15 bp, Homo sapiens
ggggctgcagggtca

SEQ ID NO: 494714 - DNA, 15 bp, Homo sapiens
gggggctgcagggtc

SEQ ID NO: 494715 - DNA, 15 bp, Homo sapiens
cgggggctgcagggt

SEQ ID NO: 494716 - DNA, 15 bp, Homo sapiens
acgggggctgcaggg

SEQ ID NO: 494717 - DNA, 15 bp, Homo sapiens
aacgggggctgcagg

SEQ ID NO: 494718 - DNA, 15 bp, Homo sapiens
gaacgggggctgcag

SEQ ID NO: 494719 - DNA, 15 bp, Homo sapiens
ggaacgggggctgca

SEQ ID NO: 494720 - DNA, 15 bp, Homo sapiens
aggaacgggggctgc

SEQ ID NO: 494721 - DNA, 15 bp, Homo sapiens
aaggaacgggggctg

SEQ ID NO: 494722 - DNA, 15 bp, Homo sapiens
taaggaacgggggct

SEQ ID NO: 494723 - DNA, 15 bp, Homo sapiens
gtaaggaacgggggc

SEQ ID NO: 494724 - DNA, 15 bp, Homo sapiens
ggtaaggaacggggg

SEQ ID NO: 494725 - DNA, 15 bp, Homo sapiens
gggtaaggaacgggg

SEQ ID NO: 494726 - DNA, 15 bp, Homo sapiens
tgggtaaggaacggg

SEQ ID NO: 494727 - DNA, 15 bp, Homo sapiens
atgggtaaggaacgg

SEQ ID NO: 494728 - DNA, 15 bp, Homo sapiens
gatgggtaaggaacg

SEQ ID NO: 494729 - DNA, 15 bp, Homo sapiens
tgatgggtaaggaac

SEQ ID NO: 494730 - DNA, 15 bp, Homo sapiens
atgatgggtaaggaa

SEQ ID NO: 494731 - DNA, 15 bp, Homo sapiens
aatgatgggtaagga

SEQ ID NO: 494732 - DNA, 15 bp, Homo sapiens
gaatgatgggtaagg

SEQ ID NO: 494733 - DNA, 15 bp, Homo sapiens
ggaatgatgggtaag

SEQ ID NO: 494734 - DNA, 15 bp, Homo sapiens
tggaatgatgggtaa

SEQ ID NO: 494735 - DNA, 15 bp, Homo sapiens
ctggaatgatgggta

SEQ ID NO: 494736 - DNA, 15 bp, Homo sapiens
actggaatgatgggt

SEQ ID NO: 494737 - DNA, 15 bp, Homo sapiens
cactggaatgatggg

SEQ ID NO: 494738 - DNA, 15 bp, Homo sapiens
ccactggaatgatgg

SEQ ID NO: 494739 - DNA, 15 bp, Homo sapiens
cccactggaatgatg

SEQ ID NO: 494740 - DNA, 15 bp, Homo sapiens
ccccactggaatgat

SEQ ID NO: 494741 - DNA, 15 bp, Homo sapiens
gccccactggaatga

SEQ ID NO: 494742 - DNA, 15 bp, Homo sapiens
agccccactggaatg

SEQ ID NO: 494743 - DNA, 15 bp, Homo sapiens
aagccccactggaat

SEQ ID NO: 494744 - DNA, 15 bp, Homo sapiens
caagccccactggaa

SEQ ID NO: 494745 - DNA, 15 bp, Homo sapiens
acaagccccactgga

SEQ ID NO: 494746 - DNA, 15 bp, Homo sapiens
cacaagccccactgg

SEQ ID NO: 494747 - DNA, 15 bp, Homo sapiens
ccacaagccccactg

SEQ ID NO: 494748 - DNA, 15 bp, Homo sapiens
accacaagccccact

SEQ ID NO: 494749 - DNA, 15 bp, Homo sapiens
caccacaagccccac

SEQ ID NO: 494750 - DNA, 15 bp, Homo sapiens
gcaccacaagcccca

SEQ ID NO: 494751 - DNA, 15 bp, Homo sapiens
agcaccacaagcccc

SEQ ID NO: 494752 - DNA, 15 bp, Homo sapiens
aagcaccacaagccc

SEQ ID NO: 494753 - DNA, 15 bp, Homo sapiens
gaagcaccacaagcc

SEQ ID NO: 494754 - DNA, 15 bp, Homo sapiens
agaagcaccacaagc

SEQ ID NO: 494755 - DNA, 15 bp, Homo sapiens
aagaagcaccacaag

SEQ ID NO: 494756 - DNA, 15 bp, Homo sapiens
gaagaagcaccacaa

SEQ ID NO: 494757 - DNA, 15 bp, Homo sapiens
tgaagaagcaccaca

SEQ ID NO: 494758 - DNA, 15 bp, Homo sapiens
ttgaagaagcaccac

SEQ ID NO: 494759 - DNA, 15 bp, Homo sapiens
gttgaagaagcacca

SEQ ID NO: 494760 - DNA, 15 bp, Homo sapiens
tgttgaagaagcacc

SEQ ID NO: 494761 - DNA, 15 bp, Homo sapiens
gtgttgaagaagcac

SEQ ID NO: 494762 - DNA, 15 bp, Homo sapiens
ggtgttgaagaagca

SEQ ID NO: 494763 - DNA, 15 bp, Homo sapiens
aggtgttgaagaagc

SEQ ID NO: 494764 - DNA, 15 bp, Homo sapiens
gaggtgttgaagaag

SEQ ID NO: 494765 - DNA, 15 bp, Homo sapiens
ggaggtgttgaagaa

SEQ ID NO: 494766 - DNA, 15 bp, Homo sapiens
tggaggtgttgaaga

SEQ ID NO: 494767 - DNA, 15 bp, Homo sapiens
atggaggtgttgaag

SEQ ID NO: 494768 - DNA, 15 bp, Homo sapiens
gatggaggtgttgaa

SEQ ID NO: 494769 - DNA, 15 bp, Homo sapiens
tgatggaggtgttga

SEQ ID NO: 494770 - DNA, 15 bp, Homo sapiens
gtgatggaggtgttg

SEQ ID NO: 494771 - DNA, 15 bp, Homo sapiens
ggtgatggaggtgtt

SEQ ID NO: 494772 - DNA, 15 bp, Homo sapiens
gggtgatggaggtgt

SEQ ID NO: 494773 - DNA, 15 bp, Homo sapiens
ggggtgatggaggtg

SEQ ID NO: 494774 - DNA, 15 bp, Homo sapiens
cggggtgatggaggt

SEQ ID NO: 494775 - DNA, 15 bp, Homo sapiens
acggggtgatggagg

SEQ ID NO: 494776 - DNA, 15 bp, Homo sapiens
gacggggtgatggag

SEQ ID NO: 494777 - DNA, 15 bp, Homo sapiens
tgacggggtgatgga

SEQ ID NO: 494778 - DNA, 15 bp, Homo sapiens
ttgacggggtgatgg

SEQ ID NO: 494779 - DNA, 15 bp, Homo sapiens
tttgacggggtgatg

SEQ ID NO: 494780 - DNA, 15 bp, Homo sapiens
gtttgacggggtgat

SEQ ID NO: 494781 - DNA, 15 bp, Homo sapiens
ggtttgacggggtga

SEQ ID NO: 494782 - DNA, 15 bp, Homo sapiens
tggtttgacggggtg

SEQ ID NO: 494783 - DNA, 15 bp, Homo sapiens
gtggtttgacggggt

SEQ ID NO: 494784 - DNA, 15 bp, Homo sapiens
agtggtttgacgggg

SEQ ID NO: 494785 - DNA, 15 bp, Homo sapiens
cagtggtttgacggg

SEQ ID NO: 494786 - DNA, 15 bp, Homo sapiens
gcagtggtttgacgg

SEQ ID NO: 494787 - DNA, 15 bp, Homo sapiens
ggcagtggtttgacg

SEQ ID NO: 494788 - DNA, 15 bp, Homo sapiens
tggcagtggtttgac

SEQ ID NO: 494789 - DNA, 15 bp, Homo sapiens
ctggcagtggtttga

SEQ ID NO: 494790 - DNA, 15 bp, Homo sapiens
tctggcagtggtttg

SEQ ID NO: 494791 - DNA, 15 bp, Homo sapiens
ttctggcagtggttt

SEQ ID NO: 494792 - DNA, 15 bp, Homo sapiens
cttctggcagtggtt

SEQ ID NO: 494793 - DNA, 15 bp, Homo sapiens
ccttctggcagtggt

SEQ ID NO: 494794 - DNA, 15 bp, Homo sapiens
accttctggcagtgg

SEQ ID NO: 494795 - DNA, 15 bp, Homo sapiens
caccttctggcagtg

SEQ ID NO: 494796 - DNA, 15 bp, Homo sapiens
acaccttctggcagt

SEQ ID NO: 494797 - DNA, 15 bp, Homo sapiens
tacaccttctggcag

SEQ ID NO: 494798 - DNA, 15 bp, Homo sapiens
ctacaccttctggca

SEQ ID NO: 494799 - DNA, 15 bp, Homo sapiens
actacaccttctggc

SEQ ID NO: 494800 - DNA, 15 bp, Homo sapiens
aactacaccttctgg

SEQ ID NO: 494801 - DNA, 15 bp, Homo sapiens
gaactacaccttctg

SEQ ID NO: 494802 - DNA, 15 bp, Homo sapiens
ggaactacaccttct

SEQ ID NO: 494803 - DNA, 15 bp, Homo sapiens
tggaactacaccttc

SEQ ID NO: 494804 - DNA, 15 bp, Homo sapiens
ctggaactacacctt

SEQ ID NO: 494805 - DNA, 15 bp, Homo sapiens
gctggaactacacct

SEQ ID NO: 494806 - DNA, 15 bp, Homo sapiens
ggctggaactacacc

SEQ ID NO: 494807 - DNA, 15 bp, Homo sapiens
gggctggaactacac

SEQ ID NO: 494808 - DNA, 15 bp, Homo sapiens
cgggctggaactaca

SEQ ID NO: 494809 - DNA, 15 bp, Homo sapiens
ccgggctggaactac

SEQ ID NO: 494810 - DNA, 15 bp, Homo sapiens
gccgggctggaacta

SEQ ID NO: 494811 - DNA, 15 bp, Homo sapiens
tgccgggctggaact

SEQ ID NO: 494812 - DNA, 15 bp, Homo sapiens
ttgccgggctggaac

SEQ ID NO: 494813 - DNA, 15 bp, Homo sapiens
cttgccgggctggaa

SEQ ID NO: 494814 - DNA, 15 bp, Homo sapiens
acttgccgggctgga

SEQ ID NO: 494815 - DNA, 15 bp, Homo sapiens
aacttgccgggctgg

SEQ ID NO: 494816 - DNA, 15 bp, Homo sapiens
gaacttgccgggctg

SEQ ID NO: 494817 - DNA, 15 bp, Homo sapiens
agaacttgccgggct

SEQ ID NO: 494818 - DNA, 15 bp, Homo sapiens
gagaacttgccgggc

SEQ ID NO: 494819 - DNA, 15 bp, Homo sapiens
ggagaacttgccggg

SEQ ID NO: 494820 - DNA, 15 bp, Homo sapiens
aggagaacttgccgg

SEQ ID NO: 494821 - DNA, 15 bp, Homo sapiens
caggagaacttgccg

SEQ ID NO: 494822 - DNA, 15 bp, Homo sapiens
tcaggagaacttgcc

SEQ ID NO: 494823 - DNA, 15 bp, Homo sapiens
ctcaggagaacttgc

SEQ ID NO: 494824 - DNA, 15 bp, Homo sapiens
cctcaggagaacttg

SEQ ID NO: 494825 - DNA, 15 bp, Homo sapiens
ccctcaggagaactt

SEQ ID NO: 494826 - DNA, 15 bp, Homo sapiens
gccctcaggagaact

SEQ ID NO: 494827 - DNA, 15 bp, Homo sapiens
ggccctcaggagaac

SEQ ID NO: 494828 - DNA, 15 bp, Homo sapiens
gggccctcaggagaa

SEQ ID NO: 494829 - DNA, 15 bp, Homo sapiens
tgggccctcaggaga

SEQ ID NO: 494830 - DNA, 15 bp, Homo sapiens
ctgggccctcaggag

SEQ ID NO: 494831 - DNA, 15 bp, Homo sapiens
cctgggccctcagga

SEQ ID NO: 494832 - DNA, 15 bp, Homo sapiens
tcctgggccctcagg

SEQ ID NO: 494833 - DNA, 15 bp, Homo sapiens
ttcctgggccctcag

SEQ ID NO: 494834 - DNA, 15 bp, Homo sapiens
gttcctgggccctca

SEQ ID NO: 494835 - DNA, 15 bp, Homo sapiens
ggttcctgggccctc

SEQ ID NO: 494836 - DNA, 15 bp, Homo sapiens
gggttcctgggccct

SEQ ID NO: 494837 - DNA, 15 bp, Homo sapiens
ggggttcctgggccc

SEQ ID NO: 494838 - DNA, 15 bp, Homo sapiens
gggggttcctgggcc

SEQ ID NO: 494839 - DNA, 15 bp, Homo sapiens
cgggggttcctgggc

SEQ ID NO: 494840 - DNA, 15 bp, Homo sapiens
tcgggggttcctggg

SEQ ID NO: 494841 - DNA, 15 bp, Homo sapiens
ctcgggggttcctgg

SEQ ID NO: 494842 - DNA, 15 bp, Homo sapiens
actcgggggttcctg

SEQ ID NO: 494843 - DNA, 15 bp, Homo sapiens
gactcgggggttcct

SEQ ID NO: 494844 - DNA, 15 bp, Homo sapiens
tgactcgggggttcc

SEQ ID NO: 494845 - DNA, 15 bp, Homo sapiens
ctgactcgggggttc

SEQ ID NO: 494846 - DNA, 15 bp, Homo sapiens
cctgactcgggggtt

SEQ ID NO: 494847 - DNA, 15 bp, Homo sapiens
ccctgactcgggggt

SEQ ID NO: 494848 - DNA, 15 bp, Homo sapiens
gccctgactcggggg

SEQ ID NO: 494849 - DNA, 15 bp, Homo sapiens
agccctgactcgggg

SEQ ID NO: 494850 - DNA, 15 bp, Homo sapiens
cagccctgactcggg

SEQ ID NO: 494851 - DNA, 15 bp, Homo sapiens
ccagccctgactcgg

SEQ ID NO: 494852 - DNA, 15 bp, Homo sapiens
accagccctgactcg

SEQ ID NO: 494853 - DNA, 15 bp, Homo sapiens
caccagccctgactc

SEQ ID NO: 494854 - DNA, 15 bp, Homo sapiens
gcaccagccctgact

SEQ ID NO: 494855 - DNA, 15 bp, Homo sapiens
ggcaccagccctgac

SEQ ID NO: 494856 - DNA, 15 bp, Homo sapiens
gggcaccagccctga

SEQ ID NO: 494857 - DNA, 15 bp, Homo sapiens
ggggcaccagccctg

SEQ ID NO: 494858 - DNA, 15 bp, Homo sapiens
tggggcaccagccct

SEQ ID NO: 494859 - DNA, 15 bp, Homo sapiens
ctggggcaccagccc

SEQ ID NO: 494860 - DNA, 15 bp, Homo sapiens
cctggggcaccagcc

SEQ ID NO: 494861 - DNA, 15 bp, Homo sapiens
acctggggcaccagc

SEQ ID NO: 494862 - DNA, 15 bp, Homo sapiens
gacctggggcaccag

SEQ ID NO: 494863 - DNA, 15 bp, Homo sapiens
tgacctggggcacca

SEQ ID NO: 494864 - DNA, 15 bp, Homo sapiens
gtgacctggggcacc

SEQ ID NO: 494865 - DNA, 15 bp, Homo sapiens
tgtgacctggggcac

SEQ ID NO: 494866 - DNA, 15 bp, Homo sapiens
ctgtgacctggggca

SEQ ID NO: 494867 - DNA, 15 bp, Homo sapiens
cctgtgacctggggc

SEQ ID NO: 494868 - DNA, 15 bp, Homo sapiens
acctgtgacctgggg

SEQ ID NO: 494869 - DNA, 15 bp, Homo sapiens
cacctgtgacctggg

SEQ ID NO: 494870 - DNA, 15 bp, Homo sapiens
ccacctgtgacctgg

SEQ ID NO: 494871 - DNA, 15 bp, Homo sapiens
gccacctgtgacctg

SEQ ID NO: 494872 - DNA, 15 bp, Homo sapiens
ggccacctgtgacct

SEQ ID NO: 494873 - DNA, 15 bp, Homo sapiens
gggccacctgtgacc

SEQ ID NO: 494874 - DNA, 15 bp, Homo sapiens
tgggccacctgtgac

SEQ ID NO: 494875 - DNA, 15 bp, Homo sapiens
ctgggccacctgtga

SEQ ID NO: 494876 - DNA, 15 bp, Homo sapiens
cctgggccacctgtg

SEQ ID NO: 494877 - DNA, 15 bp, Homo sapiens
tcctgggccacctgt

SEQ ID NO: 494878 - DNA, 15 bp, Homo sapiens
ttcctgggccacctg

SEQ ID NO: 494879 - DNA, 15 bp, Homo sapiens
tttcctgggccacct

SEQ ID NO: 494880 - DNA, 15 bp, Homo sapiens
ctttcctgggccacc

SEQ ID NO: 494881 - DNA, 15 bp, Homo sapiens
actttcctgggccac

SEQ ID NO: 494882 - DNA, 15 bp, Homo sapiens
gactttcctgggcca

SEQ ID NO: 494883 - DNA, 15 bp, Homo sapiens
tgactttcctgggcc

SEQ ID NO: 494884 - DNA, 15 bp, Homo sapiens
ctgactttcctgggc

SEQ ID NO: 494885 - DNA, 15 bp, Homo sapiens
cctgactttcctggg

SEQ ID NO: 494886 - DNA, 15 bp, Homo sapiens
ccctgactttcctgg

SEQ ID NO: 494887 - DNA, 15 bp, Homo sapiens
gccctgactttcctg

SEQ ID NO: 494888 - DNA, 15 bp, Homo sapiens
ggccctgactttcct

SEQ ID NO: 494889 - DNA, 15 bp, Homo sapiens
gggccctgactttcc

SEQ ID NO: 494890 - DNA, 15 bp, Homo sapiens
agggccctgactttc

SEQ ID NO: 494891 - DNA, 15 bp, Homo sapiens
gagggccctgacttt

SEQ ID NO: 494892 - DNA, 15 bp, Homo sapiens
ggagggccctgactt

SEQ ID NO: 494893 - DNA, 15 bp, Homo sapiens
aggagggccctgact

SEQ ID NO: 494894 - DNA, 15 bp, Homo sapiens
caggagggccctgac

SEQ ID NO: 494895 - DNA, 15 bp, Homo sapiens
gcaggagggccctga

SEQ ID NO: 494896 - DNA, 15 bp, Homo sapiens
ggcaggagggccctg

SEQ ID NO: 494897 - DNA, 15 bp, Homo sapiens
gggcaggagggccct

SEQ ID NO: 494898 - DNA, 15 bp, Homo sapiens
ggggcaggagggccc

SEQ ID NO: 494899 - DNA, 15 bp, Homo sapiens
gggggcaggagggcc

SEQ ID NO: 494900 - DNA, 15 bp, Homo sapiens
tgggggcaggagggc

SEQ ID NO: 494901 - DNA, 15 bp, Homo sapiens
gtgggggcaggaggg

SEQ ID NO: 494902 - DNA, 15 bp, Homo sapiens
ggtgggggcaggagg

SEQ ID NO: 494903 - DNA, 15 bp, Homo sapiens
gggtgggggcaggag

SEQ ID NO: 494904 - DNA, 15 bp, Homo sapiens
tgggtgggggcagga

SEQ ID NO: 494905 - DNA, 15 bp, Homo sapiens
ctgggtgggggcagg

SEQ ID NO: 494906 - DNA, 15 bp, Homo sapiens
actgggtgggggcag

SEQ ID NO: 494907 - DNA, 15 bp, Homo sapiens
gactgggtgggggca

SEQ ID NO: 494908 - DNA, 15 bp, Homo sapiens
agactgggtgggggc

SEQ ID NO: 494909 - DNA, 15 bp, Homo sapiens
aagactgggtggggg

SEQ ID NO: 494910 - DNA, 15 bp, Homo sapiens
gaagactgggtgggg

SEQ ID NO: 494911 - DNA, 15 bp, Homo sapiens
agaagactgggtggg

SEQ ID NO: 494912 - DNA, 15 bp, Homo sapiens
gagaagactgggtgg

SEQ ID NO: 494913 - DNA, 15 bp, Homo sapiens
ggagaagactgggtg

SEQ ID NO: 494914 - DNA, 15 bp, Homo sapiens
gggagaagactgggt

SEQ ID NO: 494915 - DNA, 15 bp, Homo sapiens
tgggagaagactggg

SEQ ID NO: 494916 - DNA, 15 bp, Homo sapiens
ctgggagaagactgg

SEQ ID NO: 494917 - DNA, 15 bp, Homo sapiens
actgggagaagactg

SEQ ID NO: 494918 - DNA, 15 bp, Homo sapiens
aactgggagaagact

SEQ ID NO: 494919 - DNA, 15 bp, Homo sapiens
gaactgggagaagac

SEQ ID NO: 494920 - DNA, 15 bp, Homo sapiens
agaactgggagaaga

SEQ ID NO: 494921 - DNA, 15 bp, Homo sapiens
aagaactgggagaag

SEQ ID NO: 494922 - DNA, 15 bp, Homo sapiens
gaagaactgggagaa

SEQ ID NO: 494923 - DNA, 15 bp, Homo sapiens
tgaagaactgggaga

SEQ ID NO: 494924 - DNA, 15 bp, Homo sapiens
gtgaagaactgggag

SEQ ID NO: 494925 - DNA, 15 bp, Homo sapiens
ggtgaagaactggga

SEQ ID NO: 494926 - DNA, 15 bp, Homo sapiens
gggtgaagaactggg

SEQ ID NO: 494927 - DNA, 15 bp, Homo sapiens
ggggtgaagaactgg

SEQ ID NO: 494928 - DNA, 15 bp, Homo sapiens
aggggtgaagaactg

SEQ ID NO: 494929 - DNA, 15 bp, Homo sapiens
caggggtgaagaact

SEQ ID NO: 494930 - DNA, 15 bp, Homo sapiens
gcaggggtgaagaac

SEQ ID NO: 494931 - DNA, 15 bp, Homo sapiens
agcaggggtgaagaa

SEQ ID NO: 494932 - DNA, 15 bp, Homo sapiens
aagcaggggtgaaga

SEQ ID NO: 494933 - DNA, 15 bp, Homo sapiens
caagcaggggtgaag

SEQ ID NO: 494934 - DNA, 15 bp, Homo sapiens
gcaagcaggggtgaa

SEQ ID NO: 494935 - DNA, 15 bp, Homo sapiens
ggcaagcaggggtga

SEQ ID NO: 494936 - DNA, 15 bp, Homo sapiens
tggcaagcaggggtg

SEQ ID NO: 494937 - DNA, 15 bp, Homo sapiens
gtggcaagcaggggt

SEQ ID NO: 494938 - DNA, 15 bp, Homo sapiens
ggtggcaagcagggg

SEQ ID NO: 494939 - DNA, 15 bp, Homo sapiens
tggtggcaagcaggg

SEQ ID NO: 494940 - DNA, 15 bp, Homo sapiens
gtggtggcaagcagg

SEQ ID NO: 494941 - DNA, 15 bp, Homo sapiens
tgtggtggcaagcag

SEQ ID NO: 494942 - DNA, 15 bp, Homo sapiens
gtgtggtggcaagca

SEQ ID NO: 494943 - DNA, 15 bp, Homo sapiens
agtgtggtggcaagc

SEQ ID NO: 494944 - DNA, 15 bp, Homo sapiens
gagtgtggtggcaag

SEQ ID NO: 494945 - DNA, 15 bp, Homo sapiens
ggagtgtggtggcaa

SEQ ID NO: 494946 - DNA, 15 bp, Homo sapiens
tggagtgtggtggca

SEQ ID NO: 494947 - DNA, 15 bp, Homo sapiens
ctggagtgtggtggc

SEQ ID NO: 494948 - DNA, 15 bp, Homo sapiens
gctggagtgtggtgg

SEQ ID NO: 494949 - DNA, 15 bp, Homo sapiens
tgctggagtgtggtg

SEQ ID NO: 494950 - DNA, 15 bp, Homo sapiens
ctgctggagtgtggt

SEQ ID NO: 494951 - DNA, 15 bp, Homo sapiens
tctgctggagtgtgg

SEQ ID NO: 494952 - DNA, 15 bp, Homo sapiens
gtctgctggagtgtg

SEQ ID NO: 494953 - DNA, 15 bp, Homo sapiens
ggtctgctggagtgt

SEQ ID NO: 494954 - DNA, 15 bp, Homo sapiens
tggtctgctggagtg

SEQ ID NO: 494955 - DNA, 15 bp, Homo sapiens
atggtctgctggagt

SEQ ID NO: 494956 - DNA, 15 bp, Homo sapiens
tatggtctgctggag

SEQ ID NO: 494957 - DNA, 15 bp, Homo sapiens
ttatggtctgctgga

SEQ ID NO: 494958 - DNA, 15 bp, Homo sapiens
tttatggtctgctgg

SEQ ID NO: 494959 - DNA, 15 bp, Homo sapiens
ctttatggtctgctg

SEQ ID NO: 494960 - DNA, 15 bp, Homo sapiens
actttatggtctgct

SEQ ID NO: 494961 - DNA, 15 bp, Homo sapiens
cactttatggtctgc

SEQ ID NO: 494962 - DNA, 15 bp, Homo sapiens
tcactttatggtctg

SEQ ID NO: 494963 - DNA, 15 bp, Homo sapiens
gtcactttatggtct

SEQ ID NO: 494964 - DNA, 15 bp, Homo sapiens
tgtcactttatggtc

SEQ ID NO: 494965 - DNA, 15 bp, Homo sapiens
gtgtcactttatggt

SEQ ID NO: 494966 - DNA, 15 bp, Homo sapiens
tgtgtcactttatgg

SEQ ID NO: 494967 - DNA, 15 bp, Homo sapiens
ctgtgtcactttatg

SEQ ID NO: 494968 - DNA, 15 bp, Homo sapiens
gctgtgtcactttat

SEQ ID NO: 494969 - DNA, 15 bp, Homo sapiens
ggctgtgtcacttta

SEQ ID NO: 494970 - DNA, 15 bp, Homo sapiens
gggctgtgtcacttt

SEQ ID NO: 494971 - DNA, 15 bp, Homo sapiens
ggggctgtgtcactt

SEQ ID NO: 494972 - DNA, 15 bp, Homo sapiens
gggggctgtgtcact

SEQ ID NO: 494973 - DNA, 15 bp, Homo sapiens
tgggggctgtgtcac

SEQ ID NO: 494974 - DNA, 15 bp, Homo sapiens
ttgggggctgtgtca

SEQ ID NO: 494975 - DNA, 15 bp, Homo sapiens
gttgggggctgtgtc

SEQ ID NO: 494976 - DNA, 15 bp, Homo sapiens
agttgggggctgtgt

SEQ ID NO: 494977 - DNA, 15 bp, Homo sapiens
aagttgggggctgtg

SEQ ID NO: 494978 - DNA, 15 bp, Homo sapiens
caagttgggggctgt

SEQ ID NO: 494979 - DNA, 15 bp, Homo sapiens
acaagttgggggctg

SEQ ID NO: 494980 - DNA, 15 bp, Homo sapiens
tacaagttgggggct

SEQ ID NO: 494981 - DNA, 15 bp, Homo sapiens
gtacaagttgggggc

SEQ ID NO: 494982 - DNA, 15 bp, Homo sapiens
ggtacaagttggggg

SEQ ID NO: 494983 - DNA, 15 bp, Homo sapiens
gggtacaagttgggg

SEQ ID NO: 494984 - DNA, 15 bp, Homo sapiens
agggtacaagttggg

SEQ ID NO: 494985 - DNA, 15 bp, Homo sapiens
tagggtacaagttgg

SEQ ID NO: 494986 - DNA, 15 bp, Homo sapiens
ctagggtacaagttg

SEQ ID NO: 494987 - DNA, 15 bp, Homo sapiens
cctagggtacaagtt

SEQ ID NO: 494988 - DNA, 15 bp, Homo sapiens
tcctagggtacaagt

SEQ ID NO: 494989 - DNA, 15 bp, Homo sapiens
ttcctagggtacaag

SEQ ID NO: 494990 - DNA, 15 bp, Homo sapiens
tttcctagggtacaa

SEQ ID NO: 494991 - DNA, 15 bp, Homo sapiens
ttttcctagggtaca

SEQ ID NO: 494992 - DNA, 15 bp, Homo sapiens
gttttcctagggtac

SEQ ID NO: 494993 - DNA, 15 bp, Homo sapiens
tgttttcctagggta

SEQ ID NO: 494994 - DNA, 15 bp, Homo sapiens
ctgttttcctagggt

SEQ ID NO: 494995 - DNA, 15 bp, Homo sapiens
tctgttttcctaggg

SEQ ID NO: 494996 - DNA, 15 bp, Homo sapiens
ctctgttttcctagg

SEQ ID NO: 494997 - DNA, 15 bp, Homo sapiens
tctctgttttcctag

SEQ ID NO: 494998 - DNA, 15 bp, Homo sapiens
ctctctgttttccta

SEQ ID NO: 494999 - DNA, 15 bp, Homo sapiens
cctctctgttttcct

SEQ ID NO: 495000 - DNA, 15 bp, Homo sapiens
tcctctctgttttcc

SEQ ID NO: 495001 - DNA, 15 bp, Homo sapiens
ttcctctctgttttc

SEQ ID NO: 495002 - DNA, 15 bp, Homo sapiens
tttcctctctgtttt

SEQ ID NO: 495003 - DNA, 15 bp, Homo sapiens
gtttcctctctgttt

SEQ ID NO: 495004 - DNA, 15 bp, Homo sapiens
agtttcctctctgtt

SEQ ID NO: 495005 - DNA, 15 bp, Homo sapiens
gagtttcctctctgt

SEQ ID NO: 495006 - DNA, 15 bp, Homo sapiens
tgagtttcctctctg

SEQ ID NO: 495007 - DNA, 15 bp, Homo sapiens
gtgagtttcctctct

SEQ ID NO: 495008 - DNA, 15 bp, Homo sapiens
agtgagtttcctctc

SEQ ID NO: 495009 - DNA, 15 bp, Homo sapiens
aagtgagtttcctct

SEQ ID NO: 495010 - DNA, 15 bp, Homo sapiens
gaagtgagtttcctc

SEQ ID NO: 495011 - DNA, 15 bp, Homo sapiens
agaagtgagtttcct

SEQ ID NO: 495012 - DNA, 15 bp, Homo sapiens
tagaagtgagtttcc

SEQ ID NO: 495013 - DNA, 15 bp, Homo sapiens
ttagaagtgagtttc

SEQ ID NO: 495014 - DNA, 15 bp, Homo sapiens
cttagaagtgagttt

SEQ ID NO: 495015 - DNA, 15 bp, Homo sapiens
tcttagaagtgagtt

SEQ ID NO: 495016 - DNA, 15 bp, Homo sapiens
gtcttagaagtgagt

SEQ ID NO: 495017 - DNA, 15 bp, Homo sapiens
tgtcttagaagtgag

SEQ ID NO: 495018 - DNA, 15 bp, Homo sapiens
gtgtcttagaagtga

SEQ ID NO: 495019 - DNA, 15 bp, Homo sapiens
tgtgtcttagaagtg

SEQ ID NO: 495020 - DNA, 15 bp, Homo sapiens
ctgtgtcttagaagt

SEQ ID NO: 495021 - DNA, 15 bp, Homo sapiens
cctgtgtcttagaag

SEQ ID NO: 495022 - DNA, 15 bp, Homo sapiens
ccctgtgtcttagaa

SEQ ID NO: 495023 - DNA, 15 bp, Homo sapiens
cccctgtgtcttaga

SEQ ID NO: 495024 - DNA, 15 bp, Homo sapiens
acccctgtgtcttag

SEQ ID NO: 495025 - DNA, 15 bp, Homo sapiens
gacccctgtgtctta

SEQ ID NO: 495026 - DNA, 15 bp, Homo sapiens
ggacccctgtgtctt

SEQ ID NO: 495027 - DNA, 15 bp, Homo sapiens
tggacccctgtgtct

SEQ ID NO: 495028 - DNA, 15 bp, Homo sapiens
ttggacccctgtgtc

SEQ ID NO: 495029 - DNA, 15 bp, Homo sapiens
cttggacccctgtgt

SEQ ID NO: 495030 - DNA, 15 bp, Homo sapiens
tcttggacccctgtg

SEQ ID NO: 495031 - DNA, 15 bp, Homo sapiens
gtcttggacccctgt

SEQ ID NO: 495032 - DNA, 15 bp, Homo sapiens
ggtcttggacccctg

SEQ ID NO: 495033 - DNA, 15 bp, Homo sapiens
tggtcttggacccct

SEQ ID NO: 495034 - DNA, 15 bp, Homo sapiens
ctggtcttggacccc

SEQ ID NO: 495035 - DNA, 15 bp, Homo sapiens
gctggtcttggaccc

SEQ ID NO: 495036 - DNA, 15 bp, Homo sapiens
ggctggtcttggacc

SEQ ID NO: 495037 - DNA, 15 bp, Homo sapiens
gggctggtcttggac

SEQ ID NO: 495038 - DNA, 15 bp, Homo sapiens
tgggctggtcttgga

SEQ ID NO: 495039 - DNA, 15 bp, Homo sapiens
ttgggctggtcttgg

SEQ ID NO: 495040 - DNA, 15 bp, Homo sapiens
cttgggctggtcttg

SEQ ID NO: 495041 - DNA, 15 bp, Homo sapiens
ccttgggctggtctt

SEQ ID NO: 495042 - DNA, 15 bp, Homo sapiens
cccttgggctggtct

SEQ ID NO: 495043 - DNA, 15 bp, Homo sapiens
acccttgggctggtc

SEQ ID NO: 495044 - DNA, 15 bp, Homo sapiens
cacccttgggctggt

SEQ ID NO: 495045 - DNA, 15 bp, Homo sapiens
ccacccttgggctgg

SEQ ID NO: 495046 - DNA, 15 bp, Homo sapiens
cccacccttgggctg

SEQ ID NO: 495047 - DNA, 15 bp, Homo sapiens
tcccacccttgggct

SEQ ID NO: 495048 - DNA, 15 bp, Homo sapiens
ctcccacccttgggc

SEQ ID NO: 495049 - DNA, 15 bp, Homo sapiens
actcccacccttggg

SEQ ID NO: 495050 - DNA, 15 bp, Homo sapiens
tactcccacccttgg

SEQ ID NO: 495051 - DNA, 15 bp, Homo sapiens
ttactcccacccttg

SEQ ID NO: 495052 - DNA, 15 bp, Homo sapiens
cttactcccaccctt

SEQ ID NO: 495053 - DNA, 15 bp, Homo sapiens
tcttactcccaccct

SEQ ID NO: 495054 - DNA, 15 bp, Homo sapiens
ctcttactcccaccc

SEQ ID NO: 495055 - DNA, 15 bp, Homo sapiens
cctcttactcccacc

SEQ ID NO: 495056 - DNA, 15 bp, Homo sapiens
acctcttactcccac

SEQ ID NO: 495057 - DNA, 15 bp, Homo sapiens
cacctcttactccca

SEQ ID NO: 495058 - DNA, 15 bp, Homo sapiens
acacctcttactccc

SEQ ID NO: 495059 - DNA, 15 bp, Homo sapiens
tacacctcttactcc

SEQ ID NO: 495060 - DNA, 15 bp, Homo sapiens
ttacacctcttactc

SEQ ID NO: 495061 - DNA, 15 bp, Homo sapiens
tttacacctcttact

SEQ ID NO: 495062 - DNA, 15 bp, Homo sapiens
ctttacacctcttac

SEQ ID NO: 495063 - DNA, 15 bp, Homo sapiens
tctttacacctctta

SEQ ID NO: 495064 - DNA, 15 bp, Homo sapiens
ttctttacacctctt

SEQ ID NO: 495065 - DNA, 15 bp, Homo sapiens
attctttacacctct

SEQ ID NO: 495066 - DNA, 15 bp, Homo sapiens
tattctttacacctc

SEQ ID NO: 495067 - DNA, 15 bp, Homo sapiens
ttattctttacacct

SEQ ID NO: 495068 - DNA, 15 bp, Homo sapiens
attattctttacacc

SEQ ID NO: 495069 - DNA, 15 bp, Homo sapiens
gattattctttacac

SEQ ID NO: 495070 - DNA, 15 bp, Homo sapiens
agattattctttaca

SEQ ID NO: 495071 - DNA, 15 bp, Homo sapiens
tagattattctttac

SEQ ID NO: 495072 - DNA, 15 bp, Homo sapiens
ctagattattcttta

SEQ ID NO: 495073 - DNA, 15 bp, Homo sapiens
cctagattattcttt

SEQ ID NO: 495074 - DNA, 15 bp, Homo sapiens
gcctagattattctt

SEQ ID NO: 495075 - DNA, 15 bp, Homo sapiens
agcctagattattct

SEQ ID NO: 495076 - DNA, 15 bp, Homo sapiens
cagcctagattattc

SEQ ID NO: 495077 - DNA, 15 bp, Homo sapiens
ccagcctagattatt

SEQ ID NO: 495078 - DNA, 15 bp, Homo sapiens
tccagcctagattat

SEQ ID NO: 495079 - DNA, 15 bp, Homo sapiens
atccagcctagatta

SEQ ID NO: 495080 - DNA, 15 bp, Homo sapiens
catccagcctagatt

SEQ ID NO: 495081 - DNA, 15 bp, Homo sapiens
ccatccagcctagat

SEQ ID NO: 495082 - DNA, 15 bp, Homo sapiens
cccatccagcctaga

SEQ ID NO: 495083 - DNA, 15 bp, Homo sapiens
ccccatccagcctag

SEQ ID NO: 495084 - DNA, 15 bp, Homo sapiens
gccccatccagccta

SEQ ID NO: 495085 - DNA, 15 bp, Homo sapiens
ggccccatccagcct

SEQ ID NO: 495086 - DNA, 15 bp, Homo sapiens
aggccccatccagcc

SEQ ID NO: 495087 - DNA, 15 bp, Homo sapiens
gaggccccatccagc

SEQ ID NO: 495088 - DNA, 15 bp, Homo sapiens
ggaggccccatccag

SEQ ID NO: 495089 - DNA, 15 bp, Homo sapiens
tggaggccccatcca

SEQ ID NO: 495090 - DNA, 15 bp, Homo sapiens
ttggaggccccatcc

SEQ ID NO: 495091 - DNA, 15 bp, Homo sapiens
tttggaggccccatc

SEQ ID NO: 495092 - DNA, 15 bp, Homo sapiens
ctttggaggccccat

SEQ ID NO: 495093 - DNA, 15 bp, Homo sapiens
actttggaggcccca

SEQ ID NO: 495094 - DNA, 15 bp, Homo sapiens
gactttggaggcccc

SEQ ID NO: 495095 - DNA, 15 bp, Homo sapiens
tgactttggaggccc

SEQ ID NO: 495096 - DNA, 15 bp, Homo sapiens
atgactttggaggcc

SEQ ID NO: 495097 - DNA, 15 bp, Homo sapiens
aatgactttggaggc

SEQ ID NO: 495098 - DNA, 15 bp, Homo sapiens
gaatgactttggagg

SEQ ID NO: 495099 - DNA, 15 bp, Homo sapiens
ggaatgactttggag

SEQ ID NO: 495100 - DNA, 15 bp, Homo sapiens
aggaatgactttgga

SEQ ID NO: 495101 - DNA, 15 bp, Homo sapiens
gaggaatgactttgg

SEQ ID NO: 495102 - DNA, 15 bp, Homo sapiens
ggaggaatgactttg

SEQ ID NO: 495103 - DNA, 15 bp, Homo sapiens
tggaggaatgacttt

SEQ ID NO: 495104 - DNA, 15 bp, Homo sapiens
ttggaggaatgactt

SEQ ID NO: 495105 - DNA, 15 bp, Homo sapiens
tttggaggaatgact

SEQ ID NO: 495106 - DNA, 15 bp, Homo sapiens
ctttggaggaatgac

SEQ ID NO: 495107 - DNA, 15 bp, Homo sapiens
actttggaggaatga

SEQ ID NO: 495108 - DNA, 15 bp, Homo sapiens
gactttggaggaatg

SEQ ID NO: 495109 - DNA, 15 bp, Homo sapiens
tgactttggaggaat

SEQ ID NO: 495110 - DNA, 15 bp, Homo sapiens
atgactttggaggaa

SEQ ID NO: 495111 - DNA, 15 bp, Homo sapiens
gatgactttggagga

SEQ ID NO: 495112 - DNA, 15 bp, Homo sapiens
ggatgactttggagg

SEQ ID NO: 495113 - DNA, 15 bp, Homo sapiens
gggatgactttggag

SEQ ID NO: 495114 - DNA, 15 bp, Homo sapiens
ggggatgactttgga

SEQ ID NO: 495115 - DNA, 15 bp, Homo sapiens
aggggatgactttgg

SEQ ID NO: 495116 - DNA, 15 bp, Homo sapiens
gaggggatgactttg

SEQ ID NO: 495117 - DNA, 15 bp, Homo sapiens
tgaggggatgacttt

SEQ ID NO: 495118 - DNA, 15 bp, Homo sapiens
atgaggggatgactt

SEQ ID NO: 495119 - DNA, 15 bp, Homo sapiens
aatgaggggatgact

SEQ ID NO: 495120 - DNA, 15 bp, Homo sapiens
aaatgaggggatgac

SEQ ID NO: 495121 - DNA, 15 bp, Homo sapiens
aaaatgaggggatga

SEQ ID NO: 495122 - DNA, 15 bp, Homo sapiens
taaaatgaggggatg

SEQ ID NO: 495123 - DNA, 15 bp, Homo sapiens
gtaaaatgaggggat

SEQ ID NO: 495124 - DNA, 15 bp, Homo sapiens
tgtaaaatgagggga

SEQ ID NO: 495125 - DNA, 15 bp, Homo sapiens
ctgtaaaatgagggg

SEQ ID NO: 495126 - DNA, 15 bp, Homo sapiens
cctgtaaaatgaggg

SEQ ID NO: 495127 - DNA, 15 bp, Homo sapiens
acctgtaaaatgagg

SEQ ID NO: 495128 - DNA, 15 bp, Homo sapiens
cacctgtaaaatgag

SEQ ID NO: 495129 - DNA, 15 bp, Homo sapiens
ccacctgtaaaatga

SEQ ID NO: 495130 - DNA, 15 bp, Homo sapiens
cccacctgtaaaatg

SEQ ID NO: 495131 - DNA, 15 bp, Homo sapiens
ccccacctgtaaaat

SEQ ID NO: 495132 - DNA, 15 bp, Homo sapiens
tccccacctgtaaaa

SEQ ID NO: 495133 - DNA, 15 bp, Homo sapiens
ttccccacctgtaaa

SEQ ID NO: 495134 - DNA, 15 bp, Homo sapiens
tttccccacctgtaa

SEQ ID NO: 495135 - DNA, 15 bp, Homo sapiens
gtttccccacctgta

SEQ ID NO: 495136 - DNA, 15 bp, Homo sapiens
agtttccccacctgt

SEQ ID NO: 495137 - DNA, 15 bp, Homo sapiens
cagtttccccacctg

SEQ ID NO: 495138 - DNA, 15 bp, Homo sapiens
tcagtttccccacct

SEQ ID NO: 495139 - DNA, 15 bp, Homo sapiens
ctcagtttccccacc

SEQ ID NO: 495140 - DNA, 15 bp, Homo sapiens
cctcagtttccccac

SEQ ID NO: 495141 - DNA, 15 bp, Homo sapiens
gcctcagtttcccca

SEQ ID NO: 495142 - DNA, 15 bp, Homo sapiens
tgcctcagtttcccc

SEQ ID NO: 495143 - DNA, 15 bp, Homo sapiens
gtgcctcagtttccc

SEQ ID NO: 495144 - DNA, 15 bp, Homo sapiens
tgtgcctcagtttcc

SEQ ID NO: 495145 - DNA, 15 bp, Homo sapiens
ctgtgcctcagtttc

SEQ ID NO: 495146 - DNA, 15 bp, Homo sapiens
tctgtgcctcagttt

SEQ ID NO: 495147 - DNA, 15 bp, Homo sapiens
ctctgtgcctcagtt

SEQ ID NO: 495148 - DNA, 15 bp, Homo sapiens
tctctgtgcctcagt

SEQ ID NO: 495149 - DNA, 15 bp, Homo sapiens
ttctctgtgcctcag

SEQ ID NO: 495150 - DNA, 15 bp, Homo sapiens
attctctgtgcctca

SEQ ID NO: 495151 - DNA, 15 bp, Homo sapiens
cattctctgtgcctc

SEQ ID NO: 495152 - DNA, 15 bp, Homo sapiens
ccattctctgtgcct

SEQ ID NO: 495153 - DNA, 15 bp, Homo sapiens
tccattctctgtgcc

SEQ ID NO: 495154 - DNA, 15 bp, Homo sapiens
atccattctctgtgc

SEQ ID NO: 495155 - DNA, 15 bp, Homo sapiens
catccattctctgtg

SEQ ID NO: 495156 - DNA, 15 bp, Homo sapiens
ccatccattctctgt

SEQ ID NO: 495157 - DNA, 15 bp, Homo sapiens
cccatccattctctg

SEQ ID NO: 495158 - DNA, 15 bp, Homo sapiens
acccatccattctct

SEQ ID NO: 495159 - DNA, 15 bp, Homo sapiens
gacccatccattctc

SEQ ID NO: 495160 - DNA, 15 bp, Homo sapiens
agacccatccattct

SEQ ID NO: 495161 - DNA, 15 bp, Homo sapiens
aagacccatccattc

SEQ ID NO: 495162 - DNA, 15 bp, Homo sapiens
gaagacccatccatt

SEQ ID NO: 495163 - DNA, 15 bp, Homo sapiens
tgaagacccatccat

SEQ ID NO: 495164 - DNA, 15 bp, Homo sapiens
ttgaagacccatcca

SEQ ID NO: 495165 - DNA, 15 bp, Homo sapiens
tttgaagacccatcc

SEQ ID NO: 495166 - DNA, 15 bp, Homo sapiens
ttttgaagacccatc

SEQ ID NO: 495167 - DNA, 15 bp, Homo sapiens
tttttgaagacccat

SEQ ID NO: 495168 - DNA, 15 bp, Homo sapiens
atttttgaagaccca

SEQ ID NO: 495169 - DNA, 15 bp, Homo sapiens
aatttttgaagaccc

SEQ ID NO: 495170 - DNA, 15 bp, Homo sapiens
taatttttgaagacc

SEQ ID NO: 495171 - DNA, 15 bp, Homo sapiens
ctaatttttgaagac

SEQ ID NO: 495172 - DNA, 15 bp, Homo sapiens
gctaatttttgaaga

SEQ ID NO: 495173 - DNA, 15 bp, Homo sapiens
tgctaatttttgaag

SEQ ID NO: 495174 - DNA, 15 bp, Homo sapiens
ttgctaatttttgaa

SEQ ID NO: 495175 - DNA, 15 bp, Homo sapiens
cttgctaatttttga

SEQ ID NO: 495176 - DNA, 15 bp, Homo sapiens
ccttgctaatttttg

SEQ ID NO: 495177 - DNA, 15 bp, Homo sapiens
tccttgctaattttt

SEQ ID NO: 495178 - DNA, 15 bp, Homo sapiens
ctccttgctaatttt

SEQ ID NO: 495179 - DNA, 15 bp, Homo sapiens
tctccttgctaattt

SEQ ID NO: 495180 - DNA, 15 bp, Homo sapiens
ctctccttgctaatt

SEQ ID NO: 495181 - DNA, 15 bp, Homo sapiens
tctctccttgctaat

SEQ ID NO: 495182 - DNA, 15 bp, Homo sapiens
ctctctccttgctaa

SEQ ID NO: 495183 - DNA, 15 bp, Homo sapiens
cctctctccttgcta

SEQ ID NO: 495184 - DNA, 15 bp, Homo sapiens
gcctctctccttgct

SEQ ID NO: 495185 - DNA, 15 bp, Homo sapiens
tgcctctctccttgc

SEQ ID NO: 495186 - DNA, 15 bp, Homo sapiens
ctgcctctctccttg

SEQ ID NO: 495187 - DNA, 15 bp, Homo sapiens
tctgcctctctcctt

SEQ ID NO: 495188 - DNA, 15 bp, Homo sapiens
ttctgcctctctcct

SEQ ID NO: 495189 - DNA, 15 bp, Homo sapiens
cttctgcctctctcc

SEQ ID NO: 495190 - DNA, 15 bp, Homo sapiens
ccttctgcctctctc

SEQ ID NO: 495191 - DNA, 15 bp, Homo sapiens
tccttctgcctctct

SEQ ID NO: 495192 - DNA, 15 bp, Homo sapiens
ctccttctgcctctc

SEQ ID NO: 495193 - DNA, 15 bp, Homo sapiens
ctggctctccttctg

SEQ ID NO: 495194 - DNA, 15 bp, Homo sapiens
tctggctctccttct

SEQ ID NO: 495195 - DNA, 15 bp, Homo sapiens
ctctggctctccttc

SEQ ID NO: 495196 - DNA, 15 bp, Homo sapiens
gctctggctctcctt

SEQ ID NO: 495197 - DNA, 15 bp, Homo sapiens
ggctctggctctcct

SEQ ID NO: 495198 - DNA, 15 bp, Homo sapiens
tggctctggctctcc

SEQ ID NO: 495199 - DNA, 15 bp, Homo sapiens
gtggctctggctctc

SEQ ID NO: 495200 - DNA, 15 bp, Homo sapiens
tgtggctctggctct

SEQ ID NO: 495201 - DNA, 15 bp, Homo sapiens
ctgtggctctggctc

SEQ ID NO: 495202 - DNA, 15 bp, Homo sapiens
cctgtggctctggct

SEQ ID NO: 495203 - DNA, 15 bp, Homo sapiens
gcctgtggctctggc

SEQ ID NO: 495204 - DNA, 15 bp, Homo sapiens
cgcctgtggctctgg

SEQ ID NO: 495205 - DNA, 15 bp, Homo sapiens
acgcctgtggctctg

SEQ ID NO: 495206 - DNA, 15 bp, Homo sapiens
cacgcctgtggctct

SEQ ID NO: 495207 - DNA, 15 bp, Homo sapiens
ccacgcctgtggctc

SEQ ID NO: 495208 - DNA, 15 bp, Homo sapiens
accacgcctgtggct

SEQ ID NO: 495209 - DNA, 15 bp, Homo sapiens
caccacgcctgtggc

SEQ ID NO: 495210 - DNA, 15 bp, Homo sapiens
ccaccacgcctgtgg

SEQ ID NO: 495211 - DNA, 15 bp, Homo sapiens
gccaccacgcctgtg

SEQ ID NO: 495212 - DNA, 15 bp, Homo sapiens
agccaccacgcctgt

SEQ ID NO: 495213 - DNA, 15 bp, Homo sapiens
gagccaccacgcctg

SEQ ID NO: 495214 - DNA, 15 bp, Homo sapiens
tgagccaccacgcct

SEQ ID NO: 495215 - DNA, 15 bp, Homo sapiens
gtgagccaccacgcc

SEQ ID NO: 495216 - DNA, 15 bp, Homo sapiens
cgtgagccaccacgc

SEQ ID NO: 495217 - DNA, 15 bp, Homo sapiens
gcgtgagccaccacg

SEQ ID NO: 495218 - DNA, 15 bp, Homo sapiens
cgcccacctcggcct

SEQ ID NO: 495219 - DNA, 15 bp, Homo sapiens
ccgcccacctcggcc

SEQ ID NO: 495220 - DNA, 15 bp, Homo sapiens
tccgcccacctcggc

SEQ ID NO: 495221 - DNA, 15 bp, Homo sapiens
atccgcccacctcgg

SEQ ID NO: 495222 - DNA, 15 bp, Homo sapiens
gatccgcccacctcg

SEQ ID NO: 495223 - DNA, 15 bp, Homo sapiens
ggtgatccgcccacc

SEQ ID NO: 495224 - DNA, 15 bp, Homo sapiens
aggtgatccgcccac

SEQ ID NO: 495225 - DNA, 15 bp, Homo sapiens
caggtgatccgccca

SEQ ID NO: 495226 - DNA, 15 bp, Homo sapiens
tcaggtgatccgccc

SEQ ID NO: 495227 - DNA, 15 bp, Homo sapiens
tcaggctggtctcga

SEQ ID NO: 495228 - DNA, 15 bp, Homo sapiens
gtcaggctggtctcg

SEQ ID NO: 495229 - DNA, 15 bp, Homo sapiens
tggggtttcaccatg

SEQ ID NO: 495230 - DNA, 15 bp, Homo sapiens
atggggtttcaccat

SEQ ID NO: 495231 - DNA, 15 bp, Homo sapiens
gatggggtttcacca

SEQ ID NO: 495232 - DNA, 15 bp, Homo sapiens
gggctaatttttgta

SEQ ID NO: 495233 - DNA, 15 bp, Homo sapiens
tgggctaatttttgt

SEQ ID NO: 495234 - DNA, 15 bp, Homo sapiens
ctgggctaatttttg

SEQ ID NO: 495235 - DNA, 15 bp, Homo sapiens
tgctgggctaatttt

SEQ ID NO: 495236 - DNA, 15 bp, Homo sapiens
atgctgggctaattt

SEQ ID NO: 495237 - DNA, 15 bp, Homo sapiens
catgctgggctaatt

SEQ ID NO: 495238 - DNA, 15 bp, Homo sapiens
ccatgctgggctaat

SEQ ID NO: 495239 - DNA, 15 bp, Homo sapiens
accatgctgggctaa

SEQ ID NO: 495240 - DNA, 15 bp, Homo sapiens
caccatgctgggcta

SEQ ID NO: 495241 - DNA, 15 bp, Homo sapiens
ccaccatgctgggct

SEQ ID NO: 495242 - DNA, 15 bp, Homo sapiens
gccaccatgctgggc

SEQ ID NO: 495243 - DNA, 15 bp, Homo sapiens
tgccaccatgctggg

SEQ ID NO: 495244 - DNA, 15 bp, Homo sapiens
ctgccaccatgctgg

SEQ ID NO: 495245 - DNA, 15 bp, Homo sapiens
cctgccaccatgctg

SEQ ID NO: 495246 - DNA, 15 bp, Homo sapiens
gcctgccaccatgct

SEQ ID NO: 495247 - DNA, 15 bp, Homo sapiens
tgcctgccaccatgc

SEQ ID NO: 495248 - DNA, 15 bp, Homo sapiens
gtgcctgccaccatg

SEQ ID NO: 495249 - DNA, 15 bp, Homo sapiens
ggtgcctgccaccat

SEQ ID NO: 495250 - DNA, 15 bp, Homo sapiens
aggtgcctgccacca

SEQ ID NO: 495251 - DNA, 15 bp, Homo sapiens
taggtgcctgccacc

SEQ ID NO: 495252 - DNA, 15 bp, Homo sapiens
ataggtgcctgccac

SEQ ID NO: 495253 - DNA, 15 bp, Homo sapiens
tataggtgcctgcca

SEQ ID NO: 495254 - DNA, 15 bp, Homo sapiens
ttataggtgcctgcc

SEQ ID NO: 495255 - DNA, 15 bp, Homo sapiens
attataggtgcctgc

SEQ ID NO: 495256 - DNA, 15 bp, Homo sapiens
aattataggtgcctg

SEQ ID NO: 495257 - DNA, 15 bp, Homo sapiens
gaattataggtgcct

SEQ ID NO: 495258 - DNA, 15 bp, Homo sapiens
ggaattataggtgcc

SEQ ID NO: 495259 - DNA, 15 bp, Homo sapiens
tggaattataggtgc

SEQ ID NO: 495260 - DNA, 15 bp, Homo sapiens
ctggaattataggtg

SEQ ID NO: 495261 - DNA, 15 bp, Homo sapiens
gctggaattataggt

SEQ ID NO: 495262 - DNA, 15 bp, Homo sapiens
agctggaattatagg

SEQ ID NO: 495263 - DNA, 15 bp, Homo sapiens
tagctggaattatag

SEQ ID NO: 495264 - DNA, 15 bp, Homo sapiens
gtagctggaattata

SEQ ID NO: 495265 - DNA, 15 bp, Homo sapiens
agtagctggaattat

SEQ ID NO: 495266 - DNA, 15 bp, Homo sapiens
gagtagctggaatta

SEQ ID NO: 495267 - DNA, 15 bp, Homo sapiens
tgagtagctggaatt

SEQ ID NO: 495268 - DNA, 15 bp, Homo sapiens
ctgagtagctggaat

SEQ ID NO: 495269 - DNA, 15 bp, Homo sapiens
cctgagtagctggaa

SEQ ID NO: 495270 - DNA, 15 bp, Homo sapiens
gtgcctcagcctcct

SEQ ID NO: 495271 - DNA, 15 bp, Homo sapiens
cgtgcctcagcctcc

SEQ ID NO: 495272 - DNA, 15 bp, Homo sapiens
tcgtgcctcagcctc

SEQ ID NO: 495273 - DNA, 15 bp, Homo sapiens
ctcgtgcctcagcct

SEQ ID NO: 495274 - DNA, 15 bp, Homo sapiens
tctcgtgcctcagcc

SEQ ID NO: 495275 - DNA, 15 bp, Homo sapiens
ttctcgtgcctcagc

SEQ ID NO: 495276 - DNA, 15 bp, Homo sapiens
attctcgtgcctcag

SEQ ID NO: 495277 - DNA, 15 bp, Homo sapiens
gattctcgtgcctca

SEQ ID NO: 495278 - DNA, 15 bp, Homo sapiens
tgattctcgtgcctc

SEQ ID NO: 495279 - DNA, 15 bp, Homo sapiens
gtgattctcgtgcct

SEQ ID NO: 495280 - DNA, 15 bp, Homo sapiens
agtgattctcgtgcc

SEQ ID NO: 495281 - DNA, 15 bp, Homo sapiens
aagtgattctcgtgc

SEQ ID NO: 495282 - DNA, 15 bp, Homo sapiens
caagtgattctcgtg

SEQ ID NO: 495283 - DNA, 15 bp, Homo sapiens
tcaagtgattctcgt

SEQ ID NO: 495284 - DNA, 15 bp, Homo sapiens
ttcaagtgattctcg

SEQ ID NO: 495285 - DNA, 15 bp, Homo sapiens
tgcctcccgggttca

SEQ ID NO: 495286 - DNA, 15 bp, Homo sapiens
ctgcctcccgggttc

SEQ ID NO: 495287 - DNA, 15 bp, Homo sapiens
tctgcctcccgggtt

SEQ ID NO: 495288 - DNA, 15 bp, Homo sapiens
ctctgcctcccgggt

SEQ ID NO: 495289 - DNA, 15 bp, Homo sapiens
cctctgcctcccggg

SEQ ID NO: 495290 - DNA, 15 bp, Homo sapiens
acctctgcctcccgg

SEQ ID NO: 495291 - DNA, 15 bp, Homo sapiens
taacctctgcctccc

SEQ ID NO: 495292 - DNA, 15 bp, Homo sapiens
gtaacctctgcctcc

SEQ ID NO: 495293 - DNA, 15 bp, Homo sapiens
tgtaacctctgcctc

SEQ ID NO: 495294 - DNA, 15 bp, Homo sapiens
ctgtaacctctgcct

SEQ ID NO: 495295 - DNA, 15 bp, Homo sapiens
actgtaacctctgcc

SEQ ID NO: 495296 - DNA, 15 bp, Homo sapiens
tactgtaacctctgc

SEQ ID NO: 495297 - DNA, 15 bp, Homo sapiens
ttactgtaacctctg

SEQ ID NO: 495298 - DNA, 15 bp, Homo sapiens
cttactgtaacctct

SEQ ID NO: 495299 - DNA, 15 bp, Homo sapiens
gcttactgtaacctc

SEQ ID NO: 495300 - DNA, 15 bp, Homo sapiens
agcttactgtaacct

SEQ ID NO: 495301 - DNA, 15 bp, Homo sapiens
cagcttactgtaacc

SEQ ID NO: 495302 - DNA, 15 bp, Homo sapiens
tcagcttactgtaac

SEQ ID NO: 495303 - DNA, 15 bp, Homo sapiens
ttcagcttactgtaa

SEQ ID NO: 495304 - DNA, 15 bp, Homo sapiens
tttcagcttactgta

SEQ ID NO: 495305 - DNA, 15 bp, Homo sapiens
atttcagcttactgt

SEQ ID NO: 495306 - DNA, 15 bp, Homo sapiens
gatttcagcttactg

SEQ ID NO: 495307 - DNA, 15 bp, Homo sapiens
tgatttcagcttact

SEQ ID NO: 495308 - DNA, 15 bp, Homo sapiens
gtgatttcagcttac

SEQ ID NO: 495309 - DNA, 15 bp, Homo sapiens
cgtgatttcagctta

SEQ ID NO: 495310 - DNA, 15 bp, Homo sapiens
gcgtgatttcagctt

SEQ ID NO: 495311 - DNA, 15 bp, Homo sapiens
ggcgtgatttcagct

SEQ ID NO: 495312 - DNA, 15 bp, Homo sapiens
tggcgtgatttcagc

SEQ ID NO: 495313 - DNA, 15 bp, Homo sapiens
gtggcgtgatttcag

SEQ ID NO: 495314 - DNA, 15 bp, Homo sapiens
agtggcgtgatttca

SEQ ID NO: 495315 - DNA, 15 bp, Homo sapiens
cagtggcgtgatttc

SEQ ID NO: 495316 - DNA, 15 bp, Homo sapiens
gcagtggcgtgattt

SEQ ID NO: 495317 - DNA, 15 bp, Homo sapiens
tgcagtggcgtgatt

SEQ ID NO: 495318 - DNA, 15 bp, Homo sapiens
ttctgtcacccaggc

SEQ ID NO: 495319 - DNA, 15 bp, Homo sapiens
attctgtcacccagg

SEQ ID NO: 495320 - DNA, 15 bp, Homo sapiens
cattctgtcacccag

SEQ ID NO: 495321 - DNA, 15 bp, Homo sapiens
tcattctgtcaccca

SEQ ID NO: 495322 - DNA, 15 bp, Homo sapiens
ctcattctgtcaccc

SEQ ID NO: 495323 - DNA, 15 bp, Homo sapiens
tctcattctgtcacc

SEQ ID NO: 495324 - DNA, 15 bp, Homo sapiens
atctcattctgtcac

SEQ ID NO: 495325 - DNA, 15 bp, Homo sapiens
aatctcattctgtca

SEQ ID NO: 495326 - DNA, 15 bp, Homo sapiens
gaatctcattctgtc

SEQ ID NO: 495327 - DNA, 15 bp, Homo sapiens
agaatctcattctgt

SEQ ID NO: 495328 - DNA, 15 bp, Homo sapiens
cagaatctcattctg

SEQ ID NO: 495329 - DNA, 15 bp, Homo sapiens
acagaatctcattct

SEQ ID NO: 495330 - DNA, 15 bp, Homo sapiens
gacagaatctcattc

SEQ ID NO: 495331 - DNA, 15 bp, Homo sapiens
agacagaatctcatt

SEQ ID NO: 495332 - DNA, 15 bp, Homo sapiens
gagacagaatctcat

SEQ ID NO: 495333 - DNA, 15 bp, Homo sapiens
agagacagaatctca

SEQ ID NO: 495334 - DNA, 15 bp, Homo sapiens
tagagacagaatctc

SEQ ID NO: 495335 - DNA, 15 bp, Homo sapiens
ttagagacagaatct

SEQ ID NO: 495336 - DNA, 15 bp, Homo sapiens
tttagagacagaatc

SEQ ID NO: 495337 - DNA, 15 bp, Homo sapiens
ttttagagacagaat

SEQ ID NO: 495338 - DNA, 15 bp, Homo sapiens
tttttagagacagaa

SEQ ID NO: 495339 - DNA, 15 bp, Homo sapiens
ttttttagagacaga

SEQ ID NO: 495340 - DNA, 15 bp, Homo sapiens
tttttttagagacag

SEQ ID NO: 495341 - DNA, 15 bp, Homo sapiens
ttttttttagagaca

SEQ ID NO: 495342 - DNA, 15 bp, Homo sapiens
tttttttttagagac

SEQ ID NO: 495343 - DNA, 15 bp, Homo sapiens
ttttttttttagaga

SEQ ID NO: 495344 - DNA, 15 bp, Homo sapiens
tttttttttttagag

SEQ ID NO: 495345 - DNA, 15 bp, Homo sapiens
ttttttttttttaga

SEQ ID NO: 495346 - DNA, 15 bp, Homo sapiens
cttttttttttttag

SEQ ID NO: 495347 - DNA, 15 bp, Homo sapiens
tctttttttttttta

SEQ ID NO: 495348 - DNA, 15 bp, Homo sapiens
ctaattttctttttt

SEQ ID NO: 495349 - DNA, 15 bp, Homo sapiens
gctaattttcttttt

SEQ ID NO: 495350 - DNA, 15 bp, Homo sapiens
tgctaattttctttt

SEQ ID NO: 495351 - DNA, 15 bp, Homo sapiens
ttgctaattttcttt

SEQ ID NO: 495352 - DNA, 15 bp, Homo sapiens
tttgctaattttctt

SEQ ID NO: 495353 - DNA, 15 bp, Homo sapiens
gtttgctaattttct

SEQ ID NO: 495354 - DNA, 15 bp, Homo sapiens
tgtttgctaattttc

SEQ ID NO: 495355 - DNA, 15 bp, Homo sapiens
gtgtttgctaatttt

SEQ ID NO: 495356 - DNA, 15 bp, Homo sapiens
tgtgtttgctaattt

SEQ ID NO: 495357 - DNA, 15 bp, Homo sapiens
atgtgtttgctaatt

SEQ ID NO: 495358 - DNA, 15 bp, Homo sapiens
gatgtgtttgctaat

SEQ ID NO: 495359 - DNA, 15 bp, Homo sapiens
agatgtgtttgctaa

SEQ ID NO: 495360 - DNA, 15 bp, Homo sapiens
tagatgtgtttgcta

SEQ ID NO: 495361 - DNA, 15 bp, Homo sapiens
ctagatgtgtttgct

SEQ ID NO: 495362 - DNA, 15 bp, Homo sapiens
cctagatgtgtttgc

SEQ ID NO: 495363 - DNA, 15 bp, Homo sapiens
gcctagatgtgtttg

SEQ ID NO: 495364 - DNA, 15 bp, Homo sapiens
ggcctagatgtgttt

SEQ ID NO: 495365 - DNA, 15 bp, Homo sapiens
gggcctagatgtgtt

SEQ ID NO: 495366 - DNA, 15 bp, Homo sapiens
tgggcctagatgtgt

SEQ ID NO: 495367 - DNA, 15 bp, Homo sapiens
ctgggcctagatgtg

SEQ ID NO: 495368 - DNA, 15 bp, Homo sapiens
tctgggcctagatgt

SEQ ID NO: 495369 - DNA, 15 bp, Homo sapiens
ttctgggcctagatg

SEQ ID NO: 495370 - DNA, 15 bp, Homo sapiens
gttctgggcctagat

SEQ ID NO: 495371 - DNA, 15 bp, Homo sapiens
ggttctgggcctaga

SEQ ID NO: 495372 - DNA, 15 bp, Homo sapiens
gggttctgggcctag

SEQ ID NO: 495373 - DNA, 15 bp, Homo sapiens
tgggttctgggccta

SEQ ID NO: 495374 - DNA, 15 bp, Homo sapiens
ttgggttctgggcct

SEQ ID NO: 495375 - DNA, 15 bp, Homo sapiens
cttgggttctgggcc

SEQ ID NO: 495376 - DNA, 15 bp, Homo sapiens
ccttgggttctgggc

SEQ ID NO: 495377 - DNA, 15 bp, Homo sapiens
tccttgggttctggg

SEQ ID NO: 495378 - DNA, 15 bp, Homo sapiens
atccttgggttctgg

SEQ ID NO: 495379 - DNA, 15 bp, Homo sapiens
gatccttgggttctg

SEQ ID NO: 495380 - DNA, 15 bp, Homo sapiens
ggatccttgggttct

SEQ ID NO: 495381 - DNA, 15 bp, Homo sapiens
aggatccttgggttc

SEQ ID NO: 495382 - DNA, 15 bp, Homo sapiens
caggatccttgggtt

SEQ ID NO: 495383 - DNA, 15 bp, Homo sapiens
tcaggatccttgggt

SEQ ID NO: 495384 - DNA, 15 bp, Homo sapiens
gtcaggatccttggg

SEQ ID NO: 495385 - DNA, 15 bp, Homo sapiens
agtcaggatccttgg

SEQ ID NO: 495386 - DNA, 15 bp, Homo sapiens
gagtcaggatccttg

SEQ ID NO: 495387 - DNA, 15 bp, Homo sapiens
ggagtcaggatcctt

SEQ ID NO: 495388 - DNA, 15 bp, Homo sapiens
gggagtcaggatcct

SEQ ID NO: 495389 - DNA, 15 bp, Homo sapiens
tgggagtcaggatcc

SEQ ID NO: 495390 - DNA, 15 bp, Homo sapiens
ctgggagtcaggatc

SEQ ID NO: 495391 - DNA, 15 bp, Homo sapiens
gctgggagtcaggat

SEQ ID NO: 495392 - DNA, 15 bp, Homo sapiens
ggctgggagtcagga

SEQ ID NO: 495393 - DNA, 15 bp, Homo sapiens
gggctgggagtcagg

SEQ ID NO: 495394 - DNA, 15 bp, Homo sapiens
agggctgggagtcag

SEQ ID NO: 495395 - DNA, 15 bp, Homo sapiens
cagggctgggagtca

SEQ ID NO: 495396 - DNA, 15 bp, Homo sapiens
ccagggctgggagtc

SEQ ID NO: 495397 - DNA, 15 bp, Homo sapiens
cccagggctgggagt

SEQ ID NO: 495398 - DNA, 15 bp, Homo sapiens
gcccagggctgggag

SEQ ID NO: 495399 - DNA, 15 bp, Homo sapiens
ggcccagggctggga

SEQ ID NO: 495400 - DNA, 15 bp, Homo sapiens
gggcccagggctggg

SEQ ID NO: 495401 - DNA, 15 bp, Homo sapiens
agggcccagggctgg

SEQ ID NO: 495402 - DNA, 15 bp, Homo sapiens
gagggcccagggctg

SEQ ID NO: 495403 - DNA, 15 bp, Homo sapiens
ggagggcccagggct

SEQ ID NO: 495404 - DNA, 15 bp, Homo sapiens
cggagggcccagggc

SEQ ID NO: 495405 - DNA, 15 bp, Homo sapiens
acggagggcccaggg

SEQ ID NO: 495406 - DNA, 15 bp, Homo sapiens
gacggagggcccagg

SEQ ID NO: 495407 - DNA, 15 bp, Homo sapiens
tgacggagggcccag

SEQ ID NO: 495408 - DNA, 15 bp, Homo sapiens
atgacggagggccca

SEQ ID NO: 495409 - DNA, 15 bp, Homo sapiens
gatgacggagggccc

SEQ ID NO: 495410 - DNA, 15 bp, Homo sapiens
agatgacggagggcc

SEQ ID NO: 495411 - DNA, 15 bp, Homo sapiens
gagatgacggagggc

SEQ ID NO: 495412 - DNA, 15 bp, Homo sapiens
cgagatgacggaggg

SEQ ID NO: 495413 - DNA, 15 bp, Homo sapiens
gcgagatgacggagg

SEQ ID NO: 495414 - DNA, 15 bp, Homo sapiens
agcgagatgacggag

SEQ ID NO: 495415 - DNA, 15 bp, Homo sapiens
gagcgagatgacgga

SEQ ID NO: 495416 - DNA, 15 bp, Homo sapiens
agagcgagatgacgg

SEQ ID NO: 495417 - DNA, 15 bp, Homo sapiens
aagagcgagatgacg

SEQ ID NO: 495418 - DNA, 15 bp, Homo sapiens
caagagcgagatgac

SEQ ID NO: 495419 - DNA, 15 bp, Homo sapiens
ccaagagcgagatga

SEQ ID NO: 495420 - DNA, 15 bp, Homo sapiens
gccaagagcgagatg

SEQ ID NO: 495421 - DNA, 15 bp, Homo sapiens
agccaagagcgagat

SEQ ID NO: 495422 - DNA, 15 bp, Homo sapiens
aagccaagagcgaga

SEQ ID NO: 495423 - DNA, 15 bp, Homo sapiens
gaagccaagagcgag

SEQ ID NO: 495424 - DNA, 15 bp, Homo sapiens
tgaagccaagagcga

SEQ ID NO: 495425 - DNA, 15 bp, Homo sapiens
gtgaagccaagagcg

SEQ ID NO: 495426 - DNA, 15 bp, Homo sapiens
tgtgaagccaagagc

SEQ ID NO: 495427 - DNA, 15 bp, Homo sapiens
ttgtgaagccaagag

SEQ ID NO: 495428 - DNA, 15 bp, Homo sapiens
gttgtgaagccaaga

SEQ ID NO: 495429 - DNA, 15 bp, Homo sapiens
agttgtgaagccaag

SEQ ID NO: 495430 - DNA, 15 bp, Homo sapiens
tagttgtgaagccaa

SEQ ID NO: 495431 - DNA, 15 bp, Homo sapiens
ttagttgtgaagcca

SEQ ID NO: 495432 - DNA, 15 bp, Homo sapiens
cttagttgtgaagcc

SEQ ID NO: 495433 - DNA, 15 bp, Homo sapiens
gcttagttgtgaagc

SEQ ID NO: 495434 - DNA, 15 bp, Homo sapiens
tgcttagttgtgaag

SEQ ID NO: 495435 - DNA, 15 bp, Homo sapiens
gtgcttagttgtgaa

SEQ ID NO: 495436 - DNA, 15 bp, Homo sapiens
tgtgcttagttgtga

SEQ ID NO: 495437 - DNA, 15 bp, Homo sapiens
ttgtgcttagttgtg

SEQ ID NO: 495438 - DNA, 15 bp, Homo sapiens
gttgtgcttagttgt

SEQ ID NO: 495439 - DNA, 15 bp, Homo sapiens
agttgtgcttagttg

SEQ ID NO: 495440 - DNA, 15 bp, Homo sapiens
gagttgtgcttagtt

SEQ ID NO: 495441 - DNA, 15 bp, Homo sapiens
ggagttgtgcttagt

SEQ ID NO: 495442 - DNA, 15 bp, Homo sapiens
aggagttgtgcttag

SEQ ID NO: 495443 - DNA, 15 bp, Homo sapiens
taggagttgtgctta

SEQ ID NO: 495444 - DNA, 15 bp, Homo sapiens
ataggagttgtgctt

SEQ ID NO: 495445 - DNA, 15 bp, Homo sapiens
tataggagttgtgct

SEQ ID NO: 495446 - DNA, 15 bp, Homo sapiens
ctataggagttgtgc

SEQ ID NO: 495447 - DNA, 15 bp, Homo sapiens
gctataggagttgtg

SEQ ID NO: 495448 - DNA, 15 bp, Homo sapiens
ggctataggagttgt

SEQ ID NO: 495449 - DNA, 15 bp, Homo sapiens
gggctataggagttg

SEQ ID NO: 495450 - DNA, 15 bp, Homo sapiens
ggggctataggagtt

SEQ ID NO: 495451 - DNA, 15 bp, Homo sapiens
aggggctataggagt

SEQ ID NO: 495452 - DNA, 15 bp, Homo sapiens
caggggctataggag

SEQ ID NO: 495453 - DNA, 15 bp, Homo sapiens
gcaggggctatagga

SEQ ID NO: 495454 - DNA, 15 bp, Homo sapiens
ggcaggggctatagg

SEQ ID NO: 495455 - DNA, 15 bp, Homo sapiens
aggcaggggctatag

SEQ ID NO: 495456 - DNA, 15 bp, Homo sapiens
caggcaggggctata

SEQ ID NO: 495457 - DNA, 15 bp, Homo sapiens
gcaggcaggggctat

SEQ ID NO: 495458 - DNA, 15 bp, Homo sapiens
tgcaggcaggggcta

SEQ ID NO: 495459 - DNA, 15 bp, Homo sapiens
atgcaggcaggggct

SEQ ID NO: 495460 - DNA, 15 bp, Homo sapiens
aatgcaggcaggggc

SEQ ID NO: 495461 - DNA, 15 bp, Homo sapiens
aaatgcaggcagggg

SEQ ID NO: 495462 - DNA, 15 bp, Homo sapiens
gaaatgcaggcaggg

SEQ ID NO: 495463 - DNA, 15 bp, Homo sapiens
agaaatgcaggcagg

SEQ ID NO: 495464 - DNA, 15 bp, Homo sapiens
aagaaatgcaggcag

SEQ ID NO: 495465 - DNA, 15 bp, Homo sapiens
caagaaatgcaggca

SEQ ID NO: 495466 - DNA, 15 bp, Homo sapiens
tcaagaaatgcaggc

SEQ ID NO: 495467 - DNA, 15 bp, Homo sapiens
ctcaagaaatgcagg

SEQ ID NO: 495468 - DNA, 15 bp, Homo sapiens
cctcaagaaatgcag

SEQ ID NO: 495469 - DNA, 15 bp, Homo sapiens
gcctcaagaaatgca

SEQ ID NO: 495470 - DNA, 15 bp, Homo sapiens
agcctcaagaaatgc

SEQ ID NO: 495471 - DNA, 15 bp, Homo sapiens
tagcctcaagaaatg

SEQ ID NO: 495472 - DNA, 15 bp, Homo sapiens
ctagcctcaagaaat

SEQ ID NO: 495473 - DNA, 15 bp, Homo sapiens
cctagcctcaagaaa

SEQ ID NO: 495474 - DNA, 15 bp, Homo sapiens
ccctagcctcaagaa

SEQ ID NO: 495475 - DNA, 15 bp, Homo sapiens
cccctagcctcaaga

SEQ ID NO: 495476 - DNA, 15 bp, Homo sapiens
gcccctagcctcaag

SEQ ID NO: 495477 - DNA, 15 bp, Homo sapiens
ggcccctagcctcaa

SEQ ID NO: 495478 - DNA, 15 bp, Homo sapiens
gggcccctagcctca

SEQ ID NO: 495479 - DNA, 15 bp, Homo sapiens
ggggcccctagcctc

SEQ ID NO: 495480 - DNA, 15 bp, Homo sapiens
gggggcccctagcct

SEQ ID NO: 495481 - DNA, 15 bp, Homo sapiens
tgggggcccctagcc

SEQ ID NO: 495482 - DNA, 15 bp, Homo sapiens
atgggggcccctagc

SEQ ID NO: 495483 - DNA, 15 bp, Homo sapiens
gatgggggcccctag

SEQ ID NO: 495484 - DNA, 15 bp, Homo sapiens
agatgggggccccta

SEQ ID NO: 495485 - DNA, 15 bp, Homo sapiens
gagatgggggcccct

SEQ ID NO: 495486 - DNA, 15 bp, Homo sapiens
agagatgggggcccc

SEQ ID NO: 495487 - DNA, 15 bp, Homo sapiens
gagagatgggggccc

SEQ ID NO: 495488 - DNA, 15 bp, Homo sapiens
ggagagatgggggcc

SEQ ID NO: 495489 - DNA, 15 bp, Homo sapiens
aggagagatgggggc

SEQ ID NO: 495490 - DNA, 15 bp, Homo sapiens
caggagagatggggg

SEQ ID NO: 495491 - DNA, 15 bp, Homo sapiens
ccaggagagatgggg

SEQ ID NO: 495492 - DNA, 15 bp, Homo sapiens
accaggagagatggg

SEQ ID NO: 495493 - DNA, 15 bp, Homo sapiens
aaccaggagagatgg

SEQ ID NO: 495494 - DNA, 15 bp, Homo sapiens
caaccaggagagatg

SEQ ID NO: 495495 - DNA, 15 bp, Homo sapiens
acaaccaggagagat

SEQ ID NO: 495496 - DNA, 15 bp, Homo sapiens
tacaaccaggagaga

SEQ ID NO: 495497 - DNA, 15 bp, Homo sapiens
ctacaaccaggagag

SEQ ID NO: 495498 - DNA, 15 bp, Homo sapiens
cctacaaccaggaga

SEQ ID NO: 495499 - DNA, 15 bp, Homo sapiens
tcctacaaccaggag

SEQ ID NO: 495500 - DNA, 15 bp, Homo sapiens
ctcctacaaccagga

SEQ ID NO: 495501 - DNA, 15 bp, Homo sapiens
tctcctacaaccagg

SEQ ID NO: 495502 - DNA, 15 bp, Homo sapiens
ctctcctacaaccag

SEQ ID NO: 495503 - DNA, 15 bp, Homo sapiens
tctctcctacaacca

SEQ ID NO: 495504 - DNA, 15 bp, Homo sapiens
ctctctcctacaacc

SEQ ID NO: 495505 - DNA, 15 bp, Homo sapiens
actctctcctacaac

SEQ ID NO: 495506 - DNA, 15 bp, Homo sapiens
cactctctcctacaa

SEQ ID NO: 495507 - DNA, 15 bp, Homo sapiens
ccactctctcctaca

SEQ ID NO: 495508 - DNA, 15 bp, Homo sapiens
accactctctcctac

SEQ ID NO: 495509 - DNA, 15 bp, Homo sapiens
aaccactctctccta

SEQ ID NO: 495510 - DNA, 15 bp, Homo sapiens
caaccactctctcct

SEQ ID NO: 495511 - DNA, 15 bp, Homo sapiens
ccaaccactctctcc

SEQ ID NO: 495512 - DNA, 15 bp, Homo sapiens
cccaaccactctctc

SEQ ID NO: 495513 - DNA, 15 bp, Homo sapiens
ccccaaccactctct

SEQ ID NO: 495514 - DNA, 15 bp, Homo sapiens
cccccaaccactctc

SEQ ID NO: 495515 - DNA, 15 bp, Homo sapiens
acccccaaccactct

SEQ ID NO: 495516 - DNA, 15 bp, Homo sapiens
cacccccaaccactc

SEQ ID NO: 495517 - DNA, 15 bp, Homo sapiens
ccacccccaaccact

SEQ ID NO: 495518 - DNA, 15 bp, Homo sapiens
tccacccccaaccac

SEQ ID NO: 495519 - DNA, 15 bp, Homo sapiens
ctccacccccaacca

SEQ ID NO: 495520 - DNA, 15 bp, Homo sapiens
tctccacccccaacc

SEQ ID NO: 495521 - DNA, 15 bp, Homo sapiens
ctctccacccccaac

SEQ ID NO: 495522 - DNA, 15 bp, Homo sapiens
actctccacccccaa

SEQ ID NO: 495523 - DNA, 15 bp, Homo sapiens
cactctccaccccca

SEQ ID NO: 495524 - DNA, 15 bp, Homo sapiens
ccactctccaccccc

SEQ ID NO: 495525 - DNA, 15 bp, Homo sapiens
cccactctccacccc

SEQ ID NO: 495526 - DNA, 15 bp, Homo sapiens
ccccactctccaccc

SEQ ID NO: 495527 - DNA, 15 bp, Homo sapiens
accccactctccacc

SEQ ID NO: 495528 - DNA, 15 bp, Homo sapiens
caccccactctccac

SEQ ID NO: 495529 - DNA, 15 bp, Homo sapiens
gcaccccactctcca

SEQ ID NO: 495530 - DNA, 15 bp, Homo sapiens
agcaccccactctcc

SEQ ID NO: 495531 - DNA, 15 bp, Homo sapiens
tagcaccccactctc

SEQ ID NO: 495532 - DNA, 15 bp, Homo sapiens
ctagcaccccactct

SEQ ID NO: 495533 - DNA, 15 bp, Homo sapiens
gctagcaccccactc

SEQ ID NO: 495534 - DNA, 15 bp, Homo sapiens
ggctagcaccccact

SEQ ID NO: 495535 - DNA, 15 bp, Homo sapiens
gggctagcaccccac

SEQ ID NO: 495536 - DNA, 15 bp, Homo sapiens
ggggctagcacccca

SEQ ID NO: 495537 - DNA, 15 bp, Homo sapiens
tggggctagcacccc

SEQ ID NO: 495538 - DNA, 15 bp, Homo sapiens
ctggggctagcaccc

SEQ ID NO: 495539 - DNA, 15 bp, Homo sapiens
cctggggctagcacc

SEQ ID NO: 495540 - DNA, 15 bp, Homo sapiens
gcctggggctagcac

SEQ ID NO: 495541 - DNA, 15 bp, Homo sapiens
tgcctggggctagca

SEQ ID NO: 495542 - DNA, 15 bp, Homo sapiens
ctgcctggggctagc

SEQ ID NO: 495543 - DNA, 15 bp, Homo sapiens
actgcctggggctag

SEQ ID NO: 495544 - DNA, 15 bp, Homo sapiens
tactgcctggggcta

SEQ ID NO: 495545 - DNA, 15 bp, Homo sapiens
ttactgcctggggct

SEQ ID NO: 495546 - DNA, 15 bp, Homo sapiens
gttactgcctggggc

SEQ ID NO: 495547 - DNA, 15 bp, Homo sapiens
ggttactgcctgggg

SEQ ID NO: 495548 - DNA, 15 bp, Homo sapiens
aggttactgcctggg

SEQ ID NO: 495549 - DNA, 15 bp, Homo sapiens
caggttactgcctgg

SEQ ID NO: 495550 - DNA, 15 bp, Homo sapiens
acaggttactgcctg

SEQ ID NO: 495551 - DNA, 15 bp, Homo sapiens
gacaggttactgcct

SEQ ID NO: 495552 - DNA, 15 bp, Homo sapiens
agacaggttactgcc

SEQ ID NO: 495553 - DNA, 15 bp, Homo sapiens
cagacaggttactgc

SEQ ID NO: 495554 - DNA, 15 bp, Homo sapiens
acagacaggttactg

SEQ ID NO: 495555 - DNA, 15 bp, Homo sapiens
cacagacaggttact

SEQ ID NO: 495556 - DNA, 15 bp, Homo sapiens
tcacagacaggttac

SEQ ID NO: 495557 - DNA, 15 bp, Homo sapiens
ctcacagacaggtta

SEQ ID NO: 495558 - DNA, 15 bp, Homo sapiens
cctcacagacaggtt

SEQ ID NO: 495559 - DNA, 15 bp, Homo sapiens
acctcacagacaggt

SEQ ID NO: 495560 - DNA, 15 bp, Homo sapiens
cacctcacagacagg

SEQ ID NO: 495561 - DNA, 15 bp, Homo sapiens
ccacctcacagacag

SEQ ID NO: 495562 - DNA, 15 bp, Homo sapiens
tccacctcacagaca

SEQ ID NO: 495563 - DNA, 15 bp, Homo sapiens
ctccacctcacagac

SEQ ID NO: 495564 - DNA, 15 bp, Homo sapiens
cctccacctcacaga

SEQ ID NO: 495565 - DNA, 15 bp, Homo sapiens
tcctccacctcacag

SEQ ID NO: 495566 - DNA, 15 bp, Homo sapiens
ctcctccacctcaca

SEQ ID NO: 495567 - DNA, 15 bp, Homo sapiens
gctcctccacctcac

SEQ ID NO: 495568 - DNA, 15 bp, Homo sapiens
tgctcctccacctca

SEQ ID NO: 495569 - DNA, 15 bp, Homo sapiens
ttgctcctccacctc

SEQ ID NO: 495570 - DNA, 15 bp, Homo sapiens
gttgctcctccacct

SEQ ID NO: 495571 - DNA, 15 bp, Homo sapiens
tgttgctcctccacc

SEQ ID NO: 495572 - DNA, 15 bp, Homo sapiens
ctgttgctcctccac

SEQ ID NO: 495573 - DNA, 15 bp, Homo sapiens
tctgttgctcctcca

SEQ ID NO: 495574 - DNA, 15 bp, Homo sapiens
gtctgttgctcctcc

SEQ ID NO: 495575 - DNA, 15 bp, Homo sapiens
ggtctgttgctcctc

SEQ ID NO: 495576 - DNA, 15 bp, Homo sapiens
gggtctgttgctcct

SEQ ID NO: 495577 - DNA, 15 bp, Homo sapiens
ggggtctgttgctcc

SEQ ID NO: 495578 - DNA, 15 bp, Homo sapiens
cggggtctgttgctc

SEQ ID NO: 495579 - DNA, 15 bp, Homo sapiens
ccggggtctgttgct

SEQ ID NO: 495580 - DNA, 15 bp, Homo sapiens
accggggtctgttgc

SEQ ID NO: 495581 - DNA, 15 bp, Homo sapiens
caccggggtctgttg

SEQ ID NO: 495582 - DNA, 15 bp, Homo sapiens
ccaccggggtctgtt

SEQ ID NO: 495583 - DNA, 15 bp, Homo sapiens
cccaccggggtctgt

SEQ ID NO: 495584 - DNA, 15 bp, Homo sapiens
aaggccgaagtgcag

SEQ ID NO: 495585 - DNA, 15 bp, Homo sapiens
caaggccgaagtgca

SEQ ID NO: 495586 - DNA, 15 bp, Homo sapiens
tcaaggccgaagtgc

SEQ ID NO: 495587 - DNA, 15 bp, Homo sapiens
ttcaaggccgaagtg

SEQ ID NO: 495588 - DNA, 15 bp, Homo sapiens
attcaaggccgaagt

SEQ ID NO: 495589 - DNA, 15 bp, Homo sapiens
aattcaaggccgaag

SEQ ID NO: 495590 - DNA, 15 bp, Homo sapiens
aaattcaaggccgaa

SEQ ID NO: 495591 - DNA, 15 bp, Homo sapiens
gaaattcaaggccga

SEQ ID NO: 495592 - DNA, 15 bp, Homo sapiens
tgaaattcaaggccg

SEQ ID NO: 495593 - DNA, 15 bp, Homo sapiens
atgaaattcaaggcc

SEQ ID NO: 495594 - DNA, 15 bp, Homo sapiens
catgaaattcaaggc

SEQ ID NO: 495595 - DNA, 15 bp, Homo sapiens
acatgaaattcaagg

SEQ ID NO: 495596 - DNA, 15 bp, Homo sapiens
aacatgaaattcaag

SEQ ID NO: 495597 - DNA, 15 bp, Homo sapiens
caacatgaaattcaa

SEQ ID NO: 495598 - DNA, 15 bp, Homo sapiens
tcaacatgaaattca

SEQ ID NO: 495599 - DNA, 15 bp, Homo sapiens
ctcaacatgaaattc

SEQ ID NO: 495600 - DNA, 15 bp, Homo sapiens
gctcaacatgaaatt

SEQ ID NO: 495601 - DNA, 15 bp, Homo sapiens
cgctcaacatgaaat

SEQ ID NO: 495602 - DNA, 15 bp, Homo sapiens
gcgctcaacatgaaa

SEQ ID NO: 495603 - DNA, 15 bp, Homo sapiens
ggcgctcaacatgaa

SEQ ID NO: 495604 - DNA, 15 bp, Homo sapiens
aggcgctcaacatga

SEQ ID NO: 495605 - DNA, 15 bp, Homo sapiens
gaggcgctcaacatg

SEQ ID NO: 495606 - DNA, 15 bp, Homo sapiens
tgaggcgctcaacat

SEQ ID NO: 495607 - DNA, 15 bp, Homo sapiens
gtgaggcgctcaaca

SEQ ID NO: 495608 - DNA, 15 bp, Homo sapiens
tgtgaggcgctcaac

SEQ ID NO: 495609 - DNA, 15 bp, Homo sapiens
gtgtgaggcgctcaa

SEQ ID NO: 495610 - DNA, 15 bp, Homo sapiens
tgtgtgaggcgctca

SEQ ID NO: 495611 - DNA, 15 bp, Homo sapiens
ctgtgtgaggcgctc

SEQ ID NO: 495612 - DNA, 15 bp, Homo sapiens
gctgtgtgaggcgct

SEQ ID NO: 495613 - DNA, 15 bp, Homo sapiens
agctgtgtgaggcgc

SEQ ID NO: 495614 - DNA, 15 bp, Homo sapiens
cagctgtgtgaggcg

SEQ ID NO: 495615 - DNA, 15 bp, Homo sapiens
gcagctgtgtgaggc

SEQ ID NO: 495616 - DNA, 15 bp, Homo sapiens
cgcagctgtgtgagg

SEQ ID NO: 495617 - DNA, 15 bp, Homo sapiens
ccgcagctgtgtgag

SEQ ID NO: 495618 - DNA, 15 bp, Homo sapiens
gccgcagctgtgtga

SEQ ID NO: 495619 - DNA, 15 bp, Homo sapiens
ggccgcagctgtgtg

SEQ ID NO: 495620 - DNA, 15 bp, Homo sapiens
tggccgcagctgtgt

SEQ ID NO: 495621 - DNA, 15 bp, Homo sapiens
gtggccgcagctgtg

SEQ ID NO: 495622 - DNA, 15 bp, Homo sapiens
tgtggccgcagctgt

SEQ ID NO: 495623 - DNA, 15 bp, Homo sapiens
ctgtggccgcagctg

SEQ ID NO: 495624 - DNA, 15 bp, Homo sapiens
gctgtggccgcagct

SEQ ID NO: 495625 - DNA, 15 bp, Homo sapiens
tgctgtggccgcagc

SEQ ID NO: 495626 - DNA, 15 bp, Homo sapiens
gtgctgtggccgcag

SEQ ID NO: 495627 - DNA, 15 bp, Homo sapiens
agtgctgtggccgca

SEQ ID NO: 495628 - DNA, 15 bp, Homo sapiens
aagtgctgtggccgc

SEQ ID NO: 495629 - DNA, 15 bp, Homo sapiens
aaagtgctgtggccg

SEQ ID NO: 495630 - DNA, 15 bp, Homo sapiens
caaagtgctgtggcc

SEQ ID NO: 495631 - DNA, 15 bp, Homo sapiens
acaaagtgctgtggc

SEQ ID NO: 495632 - DNA, 15 bp, Homo sapiens
gacaaagtgctgtgg

SEQ ID NO: 495633 - DNA, 15 bp, Homo sapiens
tgacaaagtgctgtg

SEQ ID NO: 495634 - DNA, 15 bp, Homo sapiens
ctgacaaagtgctgt

SEQ ID NO: 495635 - DNA, 15 bp, Homo sapiens
cctgacaaagtgctg

SEQ ID NO: 495636 - DNA, 15 bp, Homo sapiens
gcctgacaaagtgct

SEQ ID NO: 495637 - DNA, 15 bp, Homo sapiens
tgcctgacaaagtgc

SEQ ID NO: 495638 - DNA, 15 bp, Homo sapiens
gtgcctgacaaagtg

SEQ ID NO: 495639 - DNA, 15 bp, Homo sapiens
cgtgcctgacaaagt

SEQ ID NO: 495640 - DNA, 15 bp, Homo sapiens
ccgtgcctgacaaag

SEQ ID NO: 495641 - DNA, 15 bp, Homo sapiens
gccgtgcctgacaaa

SEQ ID NO: 495642 - DNA, 15 bp, Homo sapiens
tgccgtgcctgacaa

SEQ ID NO: 495643 - DNA, 15 bp, Homo sapiens
ttgccgtgcctgaca

SEQ ID NO: 495644 - DNA, 15 bp, Homo sapiens
tttgccgtgcctgac

SEQ ID NO: 495645 - DNA, 15 bp, Homo sapiens
atttgccgtgcctga

SEQ ID NO: 495646 - DNA, 15 bp, Homo sapiens
catttgccgtgcctg

SEQ ID NO: 495647 - DNA, 15 bp, Homo sapiens
ccatttgccgtgcct

SEQ ID NO: 495648 - DNA, 15 bp, Homo sapiens
gccatttgccgtgcc

SEQ ID NO: 495649 - DNA, 15 bp, Homo sapiens
tgccatttgccgtgc

SEQ ID NO: 495650 - DNA, 15 bp, Homo sapiens
gtgccatttgccgtg

SEQ ID NO: 495651 - DNA, 15 bp, Homo sapiens
ggtgccatttgccgt

SEQ ID NO: 495652 - DNA, 15 bp, Homo sapiens
gggtgccatttgccg

SEQ ID NO: 495653 - DNA, 15 bp, Homo sapiens
agggtgccatttgcc

SEQ ID NO: 495654 - DNA, 15 bp, Homo sapiens
cagggtgccatttgc

SEQ ID NO: 495655 - DNA, 15 bp, Homo sapiens
gcagggtgccatttg

SEQ ID NO: 495656 - DNA, 15 bp, Homo sapiens
ggcagggtgccattt

SEQ ID NO: 495657 - DNA, 15 bp, Homo sapiens
gggcagggtgccatt

SEQ ID NO: 495658 - DNA, 15 bp, Homo sapiens
agggcagggtgccat

SEQ ID NO: 495659 - DNA, 15 bp, Homo sapiens
cagggcagggtgcca

SEQ ID NO: 495660 - DNA, 15 bp, Homo sapiens
tcagggcagggtgcc

SEQ ID NO: 495661 - DNA, 15 bp, Homo sapiens
ctcagggcagggtgc

SEQ ID NO: 495662 - DNA, 15 bp, Homo sapiens
tctcagggcagggtg

SEQ ID NO: 495663 - DNA, 15 bp, Homo sapiens
ctctcagggcagggt

SEQ ID NO: 495664 - DNA, 15 bp, Homo sapiens
cctctcagggcaggg

SEQ ID NO: 495665 - DNA, 15 bp, Homo sapiens
ccctctcagggcagg

SEQ ID NO: 495666 - DNA, 15 bp, Homo sapiens
tccctctcagggcag

SEQ ID NO: 495667 - DNA, 15 bp, Homo sapiens
ctccctctcagggca

SEQ ID NO: 495668 - DNA, 15 bp, Homo sapiens
tctccctctcagggc

SEQ ID NO: 495669 - DNA, 15 bp, Homo sapiens
gtctccctctcaggg

SEQ ID NO: 495670 - DNA, 15 bp, Homo sapiens
tgtctccctctcagg

SEQ ID NO: 495671 - DNA, 15 bp, Homo sapiens
ttgtctccctctcag

SEQ ID NO: 495672 - DNA, 15 bp, Homo sapiens
cttgtctccctctca

SEQ ID NO: 495673 - DNA, 15 bp, Homo sapiens
tcttgtctccctctc

SEQ ID NO: 495674 - DNA, 15 bp, Homo sapiens
ctcttgtctccctct

SEQ ID NO: 495675 - DNA, 15 bp, Homo sapiens
tctcttgtctccctc

SEQ ID NO: 495676 - DNA, 15 bp, Homo sapiens
ctctcttgtctccct

SEQ ID NO: 495677 - DNA, 15 bp, Homo sapiens
cctctcttgtctccc

SEQ ID NO: 495678 - DNA, 15 bp, Homo sapiens
ccctctcttgtctcc

SEQ ID NO: 495679 - DNA, 15 bp, Homo sapiens
cccctctcttgtctc

SEQ ID NO: 495680 - DNA, 15 bp, Homo sapiens
tcccctctcttgtct

SEQ ID NO: 495681 - DNA, 15 bp, Homo sapiens
ttcccctctcttgtc

SEQ ID NO: 495682 - DNA, 15 bp, Homo sapiens
tttcccctctcttgt

SEQ ID NO: 495683 - DNA, 15 bp, Homo sapiens
ttttcccctctcttg

SEQ ID NO: 495684 - DNA, 15 bp, Homo sapiens
cttttcccctctctt

SEQ ID NO: 495685 - DNA, 15 bp, Homo sapiens
ccttttcccctctct

SEQ ID NO: 495686 - DNA, 15 bp, Homo sapiens
accttttcccctctc

SEQ ID NO: 495687 - DNA, 15 bp, Homo sapiens
taccttttcccctct

SEQ ID NO: 495688 - DNA, 15 bp, Homo sapiens
ctaccttttcccctc

SEQ ID NO: 495689 - DNA, 15 bp, Homo sapiens
tctaccttttcccct

SEQ ID NO: 495690 - DNA, 15 bp, Homo sapiens
atctaccttttcccc

SEQ ID NO: 495691 - DNA, 15 bp, Homo sapiens
aatctaccttttccc

SEQ ID NO: 495692 - DNA, 15 bp, Homo sapiens
caatctaccttttcc

SEQ ID NO: 495693 - DNA, 15 bp, Homo sapiens
tcaatctaccttttc

SEQ ID NO: 495694 - DNA, 15 bp, Homo sapiens
ctcaatctacctttt

SEQ ID NO: 495695 - DNA, 15 bp, Homo sapiens
cctcaatctaccttt

SEQ ID NO: 495696 - DNA, 15 bp, Homo sapiens
ccctcaatctacctt

SEQ ID NO: 495697 - DNA, 15 bp, Homo sapiens
tccctcaatctacct

SEQ ID NO: 495698 - DNA, 15 bp, Homo sapiens
ctccctcaatctacc

SEQ ID NO: 495699 - DNA, 15 bp, Homo sapiens
actccctcaatctac

SEQ ID NO: 495700 - DNA, 15 bp, Homo sapiens
aactccctcaatcta

SEQ ID NO: 495701 - DNA, 15 bp, Homo sapiens
caactccctcaatct

SEQ ID NO: 495702 - DNA, 15 bp, Homo sapiens
ccaactccctcaatc

SEQ ID NO: 495703 - DNA, 15 bp, Homo sapiens
tccaactccctcaat

SEQ ID NO: 495704 - DNA, 15 bp, Homo sapiens
ttccaactccctcaa

SEQ ID NO: 495705 - DNA, 15 bp, Homo sapiens
tttccaactccctca

SEQ ID NO: 495706 - DNA, 15 bp, Homo sapiens
atttccaactccctc

SEQ ID NO: 495707 - DNA, 15 bp, Homo sapiens
tatttccaactccct

SEQ ID NO: 495708 - DNA, 15 bp, Homo sapiens
atatttccaactccc

SEQ ID NO: 495709 - DNA, 15 bp, Homo sapiens
aatatttccaactcc

SEQ ID NO: 495710 - DNA, 15 bp, Homo sapiens
gaatatttccaactc

SEQ ID NO: 495711 - DNA, 15 bp, Homo sapiens
tgaatatttccaact

SEQ ID NO: 495712 - DNA, 15 bp, Homo sapiens
gtgaatatttccaac

SEQ ID NO: 495713 - DNA, 15 bp, Homo sapiens
tgtgaatatttccaa

SEQ ID NO: 495714 - DNA, 15 bp, Homo sapiens
gtgtgaatatttcca

SEQ ID NO: 495715 - DNA, 15 bp, Homo sapiens
tgtgtgaatatttcc

SEQ ID NO: 495716 - DNA, 15 bp, Homo sapiens
gtgtgtgaatatttc

SEQ ID NO: 495717 - DNA, 15 bp, Homo sapiens
tgtgtgtgaatattt

SEQ ID NO: 495718 - DNA, 15 bp, Homo sapiens
gtgtgtgtgaatatt

SEQ ID NO: 495719 - DNA, 15 bp, Homo sapiens
tgtgtgtgtgaatat

SEQ ID NO: 495720 - DNA, 15 bp, Homo sapiens
gtgtgtgtgtgaata

SEQ ID NO: 495721 - DNA, 15 bp, Homo sapiens
tgtgtgtgtgtgaat

SEQ ID NO: 495722 - DNA, 15 bp, Homo sapiens
ttgtgtgtgtgtgaa

SEQ ID NO: 495723 - DNA, 15 bp, Homo sapiens
cttgtgtgtgtgtga

SEQ ID NO: 495724 - DNA, 15 bp, Homo sapiens
tcttgtgtgtgtgtg

SEQ ID NO: 495725 - DNA, 15 bp, Homo sapiens
atcttgtgtgtgtgt

SEQ ID NO: 495726 - DNA, 15 bp, Homo sapiens
tatcttgtgtgtgtg

SEQ ID NO: 495727 - DNA, 15 bp, Homo sapiens
gtatcttgtgtgtgt

SEQ ID NO: 495728 - DNA, 15 bp, Homo sapiens
tgtatcttgtgtgtg

SEQ ID NO: 495729 - DNA, 15 bp, Homo sapiens
gtgtatcttgtgtgt

SEQ ID NO: 495730 - DNA, 15 bp, Homo sapiens
tgtgtatcttgtgtg

SEQ ID NO: 495731 - DNA, 15 bp, Homo sapiens
ctgtgtatcttgtgt

SEQ ID NO: 495732 - DNA, 15 bp, Homo sapiens
tctgtgtatcttgtg

SEQ ID NO: 495733 - DNA, 15 bp, Homo sapiens
gtctgtgtatcttgt

SEQ ID NO: 495734 - DNA, 15 bp, Homo sapiens
tgtctgtgtatcttg

SEQ ID NO: 495735 - DNA, 15 bp, Homo sapiens
gtgtctgtgtatctt

SEQ ID NO: 495736 - DNA, 15 bp, Homo sapiens
ggtgtctgtgtatct

SEQ ID NO: 495737 - DNA, 15 bp, Homo sapiens
aggtgtctgtgtatc

SEQ ID NO: 495738 - DNA, 15 bp, Homo sapiens
taggtgtctgtgtat

SEQ ID NO: 495739 - DNA, 15 bp, Homo sapiens
ctaggtgtctgtgta

SEQ ID NO: 495740 - DNA, 15 bp, Homo sapiens
tctaggtgtctgtgt

SEQ ID NO: 495741 - DNA, 15 bp, Homo sapiens
ctctaggtgtctgtg

SEQ ID NO: 495742 - DNA, 15 bp, Homo sapiens
tctctaggtgtctgt

SEQ ID NO: 495743 - DNA, 15 bp, Homo sapiens
gtctctaggtgtctg

SEQ ID NO: 495744 - DNA, 15 bp, Homo sapiens
tgtctctaggtgtct

SEQ ID NO: 495745 - DNA, 15 bp, Homo sapiens
ctgtctctaggtgtc

SEQ ID NO: 495746 - DNA, 15 bp, Homo sapiens
tctgtctctaggtgt

SEQ ID NO: 495747 - DNA, 15 bp, Homo sapiens
ctctgtctctaggtg

SEQ ID NO: 495748 - DNA, 15 bp, Homo sapiens
cctctgtctctaggt

SEQ ID NO: 495749 - DNA, 15 bp, Homo sapiens
tcctctgtctctagg

SEQ ID NO: 495750 - DNA, 15 bp, Homo sapiens
ctcctctgtctctag

SEQ ID NO: 495751 - DNA, 15 bp, Homo sapiens
tctcctctgtctcta

SEQ ID NO: 495752 - DNA, 15 bp, Homo sapiens
gtctcctctgtctct

SEQ ID NO: 495753 - DNA, 15 bp, Homo sapiens
agtctcctctgtctc

SEQ ID NO: 495754 - DNA, 15 bp, Homo sapiens
cagtctcctctgtct

SEQ ID NO: 495755 - DNA, 15 bp, Homo sapiens
tcagtctcctctgtc

SEQ ID NO: 495756 - DNA, 15 bp, Homo sapiens
ctcagtctcctctgt

SEQ ID NO: 495757 - DNA, 15 bp, Homo sapiens
tctcagtctcctctg

SEQ ID NO: 495758 - DNA, 15 bp, Homo sapiens
gtctcagtctcctct

SEQ ID NO: 495759 - DNA, 15 bp, Homo sapiens
tgtctcagtctcctc

SEQ ID NO: 495760 - DNA, 15 bp, Homo sapiens
ctgtctcagtctcct

SEQ ID NO: 495761 - DNA, 15 bp, Homo sapiens
tctgtctcagtctcc

SEQ ID NO: 495762 - DNA, 15 bp, Homo sapiens
atctgtctcagtctc

SEQ ID NO: 495763 - DNA, 15 bp, Homo sapiens
gatctgtctcagtct

SEQ ID NO: 495764 - DNA, 15 bp, Homo sapiens
ggatctgtctcagtc

SEQ ID NO: 495765 - DNA, 15 bp, Homo sapiens
tggatctgtctcagt

SEQ ID NO: 495766 - DNA, 15 bp, Homo sapiens
ctggatctgtctcag

SEQ ID NO: 495767 - DNA, 15 bp, Homo sapiens
tctggatctgtctca

SEQ ID NO: 495768 - DNA, 15 bp, Homo sapiens
ttctggatctgtctc

SEQ ID NO: 495769 - DNA, 15 bp, Homo sapiens
tttctggatctgtct

SEQ ID NO: 495770 - DNA, 15 bp, Homo sapiens
ctttctggatctgtc

SEQ ID NO: 495771 - DNA, 15 bp, Homo sapiens
cctttctggatctgt

SEQ ID NO: 495772 - DNA, 15 bp, Homo sapiens
acctttctggatctg

SEQ ID NO: 495773 - DNA, 15 bp, Homo sapiens
cacctttctggatct

SEQ ID NO: 495774 - DNA, 15 bp, Homo sapiens
tcacctttctggatc

SEQ ID NO: 495775 - DNA, 15 bp, Homo sapiens
gtcacctttctggat

SEQ ID NO: 495776 - DNA, 15 bp, Homo sapiens
tgtcacctttctgga

SEQ ID NO: 495777 - DNA, 15 bp, Homo sapiens
gtgtcacctttctgg

SEQ ID NO: 495778 - DNA, 15 bp, Homo sapiens
tgtgtcacctttctg

SEQ ID NO: 495779 - DNA, 15 bp, Homo sapiens
ttgtgtcacctttct

SEQ ID NO: 495780 - DNA, 15 bp, Homo sapiens
tttgtgtcacctttc

SEQ ID NO: 495781 - DNA, 15 bp, Homo sapiens
atttgtgtcaccttt

SEQ ID NO: 495782 - DNA, 15 bp, Homo sapiens
catttgtgtcacctt

SEQ ID NO: 495783 - DNA, 15 bp, Homo sapiens
gcatttgtgtcacct

SEQ ID NO: 495784 - DNA, 15 bp, Homo sapiens
tgcatttgtgtcacc

SEQ ID NO: 495785 - DNA, 15 bp, Homo sapiens
ttgcatttgtgtcac

SEQ ID NO: 495786 - DNA, 15 bp, Homo sapiens
cttgcatttgtgtca

SEQ ID NO: 495787 - DNA, 15 bp, Homo sapiens
ccttgcatttgtgtc

SEQ ID NO: 495788 - DNA, 15 bp, Homo sapiens
cccttgcatttgtgt

SEQ ID NO: 495789 - DNA, 15 bp, Homo sapiens
gcccttgcatttgtg

SEQ ID NO: 495790 - DNA, 15 bp, Homo sapiens
tgcccttgcatttgt

SEQ ID NO: 495791 - DNA, 15 bp, Homo sapiens
ctgcccttgcatttg

SEQ ID NO: 495792 - DNA, 15 bp, Homo sapiens
cctgcccttgcattt

SEQ ID NO: 495793 - DNA, 15 bp, Homo sapiens
tcctgcccttgcatt

SEQ ID NO: 495794 - DNA, 15 bp, Homo sapiens
ttcctgcccttgcat

SEQ ID NO: 495795 - DNA, 15 bp, Homo sapiens
tttcctgcccttgca

SEQ ID NO: 495796 - DNA, 15 bp, Homo sapiens
atttcctgcccttgc

SEQ ID NO: 495797 - DNA, 15 bp, Homo sapiens
catttcctgcccttg

SEQ ID NO: 495798 - DNA, 15 bp, Homo sapiens
gcatttcctgccctt

SEQ ID NO: 495799 - DNA, 15 bp, Homo sapiens
cgcatttcctgccct

SEQ ID NO: 495800 - DNA, 15 bp, Homo sapiens
ccgcatttcctgccc

SEQ ID NO: 495801 - DNA, 15 bp, Homo sapiens
gccgcatttcctgcc

SEQ ID NO: 495802 - DNA, 15 bp, Homo sapiens
cgccgcatttcctgc

SEQ ID NO: 495803 - DNA, 15 bp, Homo sapiens
ccgccgcatttcctg

SEQ ID NO: 495804 - DNA, 15 bp, Homo sapiens
gccgccgcatttcct

SEQ ID NO: 495805 - DNA, 15 bp, Homo sapiens
agccgccgcatttcc

SEQ ID NO: 495806 - DNA, 15 bp, Homo sapiens
aagccgccgcatttc

SEQ ID NO: 495807 - DNA, 15 bp, Homo sapiens
aaagccgccgcattt

SEQ ID NO: 495808 - DNA, 15 bp, Homo sapiens
aaaagccgccgcatt

SEQ ID NO: 495809 - DNA, 15 bp, Homo sapiens
taaaagccgccgcat

SEQ ID NO: 495810 - DNA, 15 bp, Homo sapiens
ataaaagccgccgca

SEQ ID NO: 495811 - DNA, 15 bp, Homo sapiens
tataaaagccgccgc

SEQ ID NO: 495812 - DNA, 15 bp, Homo sapiens
atataaaagccgccg

SEQ ID NO: 495813 - DNA, 15 bp, Homo sapiens
tatataaaagccgcc

SEQ ID NO: 495814 - DNA, 15 bp, Homo sapiens
gtatataaaagccgc

SEQ ID NO: 495815 - DNA, 15 bp, Homo sapiens
agtatataaaagccg

SEQ ID NO: 495816 - DNA, 15 bp, Homo sapiens
tagtatataaaagcc

SEQ ID NO: 495817 - DNA, 15 bp, Homo sapiens
ctagtatataaaagc

SEQ ID NO: 495818 - DNA, 15 bp, Homo sapiens
gctagtatataaaag

SEQ ID NO: 495819 - DNA, 15 bp, Homo sapiens
agctagtatataaaa

SEQ ID NO: 495820 - DNA, 15 bp, Homo sapiens
aagctagtatataaa

SEQ ID NO: 495821 - DNA, 15 bp, Homo sapiens
caagctagtatataa

SEQ ID NO: 495822 - DNA, 15 bp, Homo sapiens
gcaagctagtatata

SEQ ID NO: 495823 - DNA, 15 bp, Homo sapiens
tgcaagctagtatat

SEQ ID NO: 495824 - DNA, 15 bp, Homo sapiens
gtgcaagctagtata

SEQ ID NO: 495825 - DNA, 15 bp, Homo sapiens
agtgcaagctagtat

SEQ ID NO: 495826 - DNA, 15 bp, Homo sapiens
aagtgcaagctagta

SEQ ID NO: 495827 - DNA, 15 bp, Homo sapiens
aaagtgcaagctagt

SEQ ID NO: 495828 - DNA, 15 bp, Homo sapiens
aaaagtgcaagctag

SEQ ID NO: 495829 - DNA, 15 bp, Homo sapiens
aaaaagtgcaagcta

SEQ ID NO: 495830 - DNA, 15 bp, Homo sapiens
aaaaaagtgcaagct

SEQ ID NO: 495831 - DNA, 15 bp, Homo sapiens
aaaaaaagtgcaagc

SEQ ID NO: 495832 - DNA, 15 bp, Homo sapiens
gaaaaaaagtgcaag

SEQ ID NO: 495833 - DNA, 15 bp, Homo sapiens
ggaaaaaaagtgcaa

SEQ ID NO: 495834 - DNA, 15 bp, Homo sapiens
gggaaaaaaagtgca

SEQ ID NO: 495835 - DNA, 15 bp, Homo sapiens
tgggaaaaaaagtgc

SEQ ID NO: 495836 - DNA, 15 bp, Homo sapiens
ctgggaaaaaaagtg

SEQ ID NO: 495837 - DNA, 15 bp, Homo sapiens
gctgggaaaaaaagt

SEQ ID NO: 495838 - DNA, 15 bp, Homo sapiens
ggctgggaaaaaaag

SEQ ID NO: 495839 - DNA, 15 bp, Homo sapiens
aggctgggaaaaaaa

SEQ ID NO: 495840 - DNA, 15 bp, Homo sapiens
caggctgggaaaaaa

SEQ ID NO: 495841 - DNA, 15 bp, Homo sapiens
gcaggctgggaaaaa

SEQ ID NO: 495842 - DNA, 15 bp, Homo sapiens
tgcaggctgggaaaa

SEQ ID NO: 495843 - DNA, 15 bp, Homo sapiens
ctgcaggctgggaaa

SEQ ID NO: 495844 - DNA, 15 bp, Homo sapiens
cctgcaggctgggaa

SEQ ID NO: 495845 - DNA, 15 bp, Homo sapiens
ccctgcaggctggga

SEQ ID NO: 495846 - DNA, 15 bp, Homo sapiens
tccctgcaggctggg

SEQ ID NO: 495847 - DNA, 15 bp, Homo sapiens
ttccctgcaggctgg

SEQ ID NO: 495848 - DNA, 15 bp, Homo sapiens
cttccctgcaggctg

SEQ ID NO: 495849 - DNA, 15 bp, Homo sapiens
tcttccctgcaggct

SEQ ID NO: 495850 - DNA, 15 bp, Homo sapiens
ttcttccctgcaggc

SEQ ID NO: 495851 - DNA, 15 bp, Homo sapiens
tttcttccctgcagg

SEQ ID NO: 495852 - DNA, 15 bp, Homo sapiens
ttttcttccctgcag

SEQ ID NO: 495853 - DNA, 15 bp, Homo sapiens
gttttcttccctgca

SEQ ID NO: 495854 - DNA, 15 bp, Homo sapiens
ggttttcttccctgc

SEQ ID NO: 495855 - DNA, 15 bp, Homo sapiens
cggttttcttccctg

SEQ ID NO: 495856 - DNA, 15 bp, Homo sapiens
tcggttttcttccct

SEQ ID NO: 495857 - DNA, 15 bp, Homo sapiens
atcggttttcttccc

SEQ ID NO: 495858 - DNA, 15 bp, Homo sapiens
catcggttttcttcc

SEQ ID NO: 495859 - DNA, 15 bp, Homo sapiens
gcatcggttttcttc

SEQ ID NO: 495860 - DNA, 15 bp, Homo sapiens
tgcatcggttttctt

SEQ ID NO: 495861 - DNA, 15 bp, Homo sapiens
ctgcatcggttttct

SEQ ID NO: 495862 - DNA, 15 bp, Homo sapiens
cctgcatcggttttc

SEQ ID NO: 495863 - DNA, 15 bp, Homo sapiens
ccctgcatcggtttt

SEQ ID NO: 495864 - DNA, 15 bp, Homo sapiens
cccctgcatcggttt

SEQ ID NO: 495865 - DNA, 15 bp, Homo sapiens
ccccctgcatcggtt

SEQ ID NO: 495866 - DNA, 15 bp, Homo sapiens
accccctgcatcggt

SEQ ID NO: 495867 - DNA, 15 bp, Homo sapiens
caccccctgcatcgg

SEQ ID NO: 495868 - DNA, 15 bp, Homo sapiens
ccaccccctgcatcg

SEQ ID NO: 495869 - DNA, 15 bp, Homo sapiens
cccaccccctgcatc

SEQ ID NO: 495870 - DNA, 15 bp, Homo sapiens
ccccaccccctgcat

SEQ ID NO: 495871 - DNA, 15 bp, Homo sapiens
cccccaccccctgca

SEQ ID NO: 495872 - DNA, 15 bp, Homo sapiens
gcccccaccccctgc

SEQ ID NO: 495873 - DNA, 15 bp, Homo sapiens
tgcccccaccccctg

SEQ ID NO: 495874 - DNA, 15 bp, Homo sapiens
atgcccccaccccct

SEQ ID NO: 495875 - DNA, 15 bp, Homo sapiens
catgcccccaccccc

SEQ ID NO: 495876 - DNA, 15 bp, Homo sapiens
gcatgcccccacccc

SEQ ID NO: 495877 - DNA, 15 bp, Homo sapiens
tgcatgcccccaccc

SEQ ID NO: 495878 - DNA, 15 bp, Homo sapiens
ctgcatgcccccacc

SEQ ID NO: 495879 - DNA, 15 bp, Homo sapiens
cctgcatgcccccac

SEQ ID NO: 495880 - DNA, 15 bp, Homo sapiens
ccctgcatgccccca

SEQ ID NO: 495881 - DNA, 15 bp, Homo sapiens
tccctgcatgccccc

SEQ ID NO: 495882 - DNA, 15 bp, Homo sapiens
gtccctgcatgcccc

SEQ ID NO: 495883 - DNA, 15 bp, Homo sapiens
tgtccctgcatgccc

SEQ ID NO: 495884 - DNA, 15 bp, Homo sapiens
ctgtccctgcatgcc

SEQ ID NO: 495885 - DNA, 15 bp, Homo sapiens
tctgtccctgcatgc

SEQ ID NO: 495886 - DNA, 15 bp, Homo sapiens
ctctgtccctgcatg

SEQ ID NO: 495887 - DNA, 15 bp, Homo sapiens
tctctgtccctgcat

SEQ ID NO: 495888 - DNA, 15 bp, Homo sapiens
atctctgtccctgca

SEQ ID NO: 495889 - DNA, 15 bp, Homo sapiens
catctctgtccctgc

SEQ ID NO: 495890 - DNA, 15 bp, Homo sapiens
gcatctctgtccctg

SEQ ID NO: 495891 - DNA, 15 bp, Homo sapiens
tgcatctctgtccct

SEQ ID NO: 495892 - DNA, 15 bp, Homo sapiens
ctgcatctctgtccc

SEQ ID NO: 495893 - DNA, 15 bp, Homo sapiens
tctgcatctctgtcc

SEQ ID NO: 495894 - DNA, 15 bp, Homo sapiens
gtctgcatctctgtc

SEQ ID NO: 495895 - DNA, 15 bp, Homo sapiens
ggtctgcatctctgt

SEQ ID NO: 495896 - DNA, 15 bp, Homo sapiens
tggtctgcatctctg

SEQ ID NO: 495897 - DNA, 15 bp, Homo sapiens
ctggtctgcatctct

SEQ ID NO: 495898 - DNA, 15 bp, Homo sapiens
cctggtctgcatctc

SEQ ID NO: 495899 - DNA, 15 bp, Homo sapiens
tcctggtctgcatct

SEQ ID NO: 495900 - DNA, 15 bp, Homo sapiens
ttcctggtctgcatc

SEQ ID NO: 495901 - DNA, 15 bp, Homo sapiens
tttcctggtctgcat

SEQ ID NO: 495902 - DNA, 15 bp, Homo sapiens
gtttcctggtctgca

SEQ ID NO: 495903 - DNA, 15 bp, Homo sapiens
tgtttcctggtctgc

SEQ ID NO: 495904 - DNA, 15 bp, Homo sapiens
ctgtttcctggtctg

SEQ ID NO: 495905 - DNA, 15 bp, Homo sapiens
tctgtttcctggtct

SEQ ID NO: 495906 - DNA, 15 bp, Homo sapiens
ttctgtttcctggtc

SEQ ID NO: 495907 - DNA, 15 bp, Homo sapiens
tttctgtttcctggt

SEQ ID NO: 495908 - DNA, 15 bp, Homo sapiens
ttttctgtttcctgg

SEQ ID NO: 495909 - DNA, 15 bp, Homo sapiens
gttttctgtttcctg

SEQ ID NO: 495910 - DNA, 15 bp, Homo sapiens
tgttttctgtttcct

SEQ ID NO: 495911 - DNA, 15 bp, Homo sapiens
ctgttttctgtttcc

SEQ ID NO: 495912 - DNA, 15 bp, Homo sapiens
tctgttttctgtttc

SEQ ID NO: 495913 - DNA, 15 bp, Homo sapiens
ctctgttttctgttt

SEQ ID NO: 495914 - DNA, 15 bp, Homo sapiens
tctctgttttctgtt

SEQ ID NO: 495915 - DNA, 15 bp, Homo sapiens
ctctctgttttctgt

SEQ ID NO: 495916 - DNA, 15 bp, Homo sapiens
gctctctgttttctg

SEQ ID NO: 495917 - DNA, 15 bp, Homo sapiens
tgctctctgttttct

SEQ ID NO: 495918 - DNA, 15 bp, Homo sapiens
ttgctctctgttttc

SEQ ID NO: 495919 - DNA, 15 bp, Homo sapiens
cttgctctctgtttt

SEQ ID NO: 495920 - DNA, 15 bp, Homo sapiens
ccttgctctctgttt

SEQ ID NO: 495921 - DNA, 15 bp, Homo sapiens
tccttgctctctgtt

SEQ ID NO: 495922 - DNA, 15 bp, Homo sapiens
gtccttgctctctgt

SEQ ID NO: 495923 - DNA, 15 bp, Homo sapiens
ggtccttgctctctg

SEQ ID NO: 495924 - DNA, 15 bp, Homo sapiens
gggtccttgctctct

SEQ ID NO: 495925 - DNA, 15 bp, Homo sapiens
tgggtccttgctctc

SEQ ID NO: 495926 - DNA, 15 bp, Homo sapiens
ttgggtccttgctct

SEQ ID NO: 495927 - DNA, 15 bp, Homo sapiens
cttgggtccttgctc

SEQ ID NO: 495928 - DNA, 15 bp, Homo sapiens
gcttgggtccttgct

SEQ ID NO: 495929 - DNA, 15 bp, Homo sapiens
ggcttgggtccttgc

SEQ ID NO: 495930 - DNA, 15 bp, Homo sapiens
tggcttgggtccttg

SEQ ID NO: 495931 - DNA, 15 bp, Homo sapiens
atggcttgggtcctt

SEQ ID NO: 495932 - DNA, 15 bp, Homo sapiens
gatggcttgggtcct

SEQ ID NO: 495933 - DNA, 15 bp, Homo sapiens
agatggcttgggtcc

SEQ ID NO: 495934 - DNA, 15 bp, Homo sapiens
cagatggcttgggtc

SEQ ID NO: 495935 - DNA, 15 bp, Homo sapiens
gcagatggcttgggt

SEQ ID NO: 495936 - DNA, 15 bp, Homo sapiens
ggcagatggcttggg

SEQ ID NO: 495937 - DNA, 15 bp, Homo sapiens
tggcagatggcttgg

SEQ ID NO: 495938 - DNA, 15 bp, Homo sapiens
ttggcagatggcttg

SEQ ID NO: 495939 - DNA, 15 bp, Homo sapiens
tttggcagatggctt

SEQ ID NO: 495940 - DNA, 15 bp, Homo sapiens
ctttggcagatggct

SEQ ID NO: 495941 - DNA, 15 bp, Homo sapiens
cctttggcagatggc

SEQ ID NO: 495942 - DNA, 15 bp, Homo sapiens
tcctttggcagatgg

SEQ ID NO: 495943 - DNA, 15 bp, Homo sapiens
ctcctttggcagatg

SEQ ID NO: 495944 - DNA, 15 bp, Homo sapiens
cctcctttggcagat

SEQ ID NO: 495945 - DNA, 15 bp, Homo sapiens
tcctcctttggcaga

SEQ ID NO: 495946 - DNA, 15 bp, Homo sapiens
atcctcctttggcag

SEQ ID NO: 495947 - DNA, 15 bp, Homo sapiens
gatcctcctttggca

SEQ ID NO: 495948 - DNA, 15 bp, Homo sapiens
ggatcctcctttggc

SEQ ID NO: 495949 - DNA, 15 bp, Homo sapiens
gggatcctcctttgg

SEQ ID NO: 495950 - DNA, 15 bp, Homo sapiens
tgggatcctcctttg

SEQ ID NO: 495951 - DNA, 15 bp, Homo sapiens
ctgggatcctccttt

SEQ ID NO: 495952 - DNA, 15 bp, Homo sapiens
tctgggatcctcctt

SEQ ID NO: 495953 - DNA, 15 bp, Homo sapiens
gtctgggatcctcct

SEQ ID NO: 495954 - DNA, 15 bp, Homo sapiens
ggtctgggatcctcc

SEQ ID NO: 495955 - DNA, 15 bp, Homo sapiens
tggtctgggatcctc

SEQ ID NO: 495956 - DNA, 15 bp, Homo sapiens
ctggtctgggatcct

SEQ ID NO: 495957 - DNA, 15 bp, Homo sapiens
cctggtctgggatcc

SEQ ID NO: 495958 - DNA, 15 bp, Homo sapiens
tcctggtctgggatc

SEQ ID NO: 495959 - DNA, 15 bp, Homo sapiens
atcctggtctgggat

SEQ ID NO: 495960 - DNA, 15 bp, Homo sapiens
gatcctggtctggga

SEQ ID NO: 495961 - DNA, 15 bp, Homo sapiens
ggatcctggtctggg

SEQ ID NO: 495962 - DNA, 15 bp, Homo sapiens
tggatcctggtctgg

SEQ ID NO: 495963 - DNA, 15 bp, Homo sapiens
ttggatcctggtctg

SEQ ID NO: 495964 - DNA, 15 bp, Homo sapiens
tttggatcctggtct

SEQ ID NO: 495965 - DNA, 15 bp, Homo sapiens
ctttggatcctggtc

SEQ ID NO: 495966 - DNA, 15 bp, Homo sapiens
tctttggatcctggt

SEQ ID NO: 495967 - DNA, 15 bp, Homo sapiens
gtctttggatcctgg

SEQ ID NO: 495968 - DNA, 15 bp, Homo sapiens
ggtctttggatcctg

SEQ ID NO: 495969 - DNA, 15 bp, Homo sapiens
tggtctttggatcct

SEQ ID NO: 495970 - DNA, 15 bp, Homo sapiens
ttggtctttggatcc

SEQ ID NO: 495971 - DNA, 15 bp, Homo sapiens
cttggtctttggatc

SEQ ID NO: 495972 - DNA, 15 bp, Homo sapiens
gcttggtctttggat

SEQ ID NO: 495973 - DNA, 15 bp, Homo sapiens
agcttggtctttgga

SEQ ID NO: 495974 - DNA, 15 bp, Homo sapiens
gagcttggtctttgg

SEQ ID NO: 495975 - DNA, 15 bp, Homo sapiens
tgagcttggtctttg

SEQ ID NO: 495976 - DNA, 15 bp, Homo sapiens
gtgagcttggtcttt

SEQ ID NO: 495977 - DNA, 15 bp, Homo sapiens
tgtgagcttggtctt

SEQ ID NO: 495978 - DNA, 15 bp, Homo sapiens
ctgtgagcttggtct

SEQ ID NO: 495979 - DNA, 15 bp, Homo sapiens
actgtgagcttggtc

SEQ ID NO: 495980 - DNA, 15 bp, Homo sapiens
gactgtgagcttggt

SEQ ID NO: 495981 - DNA, 15 bp, Homo sapiens
ggactgtgagcttgg

SEQ ID NO: 495982 - DNA, 15 bp, Homo sapiens
aggactgtgagcttg

SEQ ID NO: 495983 - DNA, 15 bp, Homo sapiens
gaggactgtgagctt

SEQ ID NO: 495984 - DNA, 15 bp, Homo sapiens
tgaggactgtgagct

SEQ ID NO: 495985 - DNA, 15 bp, Homo sapiens
gtgaggactgtgagc

SEQ ID NO: 495986 - DNA, 15 bp, Homo sapiens
tgtgaggactgtgag

SEQ ID NO: 495987 - DNA, 15 bp, Homo sapiens
ctgtgaggactgtga

SEQ ID NO: 495988 - DNA, 15 bp, Homo sapiens
tctgtgaggactgtg

SEQ ID NO: 495989 - DNA, 15 bp, Homo sapiens
gtctgtgaggactgt

SEQ ID NO: 495990 - DNA, 15 bp, Homo sapiens
ggtctgtgaggactg

SEQ ID NO: 495991 - DNA, 15 bp, Homo sapiens
gggtctgtgaggact

SEQ ID NO: 495992 - DNA, 15 bp, Homo sapiens
ggggtctgtgaggac

SEQ ID NO: 495993 - DNA, 15 bp, Homo sapiens
tggggtctgtgagga

SEQ ID NO: 495994 - DNA, 15 bp, Homo sapiens
ctggggtctgtgagg

SEQ ID NO: 495995 - DNA, 15 bp, Homo sapiens
actggggtctgtgag

SEQ ID NO: 495996 - DNA, 15 bp, Homo sapiens
gactggggtctgtga

SEQ ID NO: 495997 - DNA, 15 bp, Homo sapiens
ggactggggtctgtg

SEQ ID NO: 495998 - DNA, 15 bp, Homo sapiens
tggactggggtctgt

SEQ ID NO: 495999 - DNA, 15 bp, Homo sapiens
ctggactggggtctg

SEQ ID NO: 496000 - DNA, 15 bp, Homo sapiens
cctggactggggtct

SEQ ID NO: 496001 - DNA, 15 bp, Homo sapiens
tcctggactggggtc

SEQ ID NO: 496002 - DNA, 15 bp, Homo sapiens
ttcctggactggggt

SEQ ID NO: 496003 - DNA, 15 bp, Homo sapiens
gttcctggactgggg

SEQ ID NO: 496004 - DNA, 15 bp, Homo sapiens
ggttcctggactggg

SEQ ID NO: 496005 - DNA, 15 bp, Homo sapiens
aggttcctggactgg

SEQ ID NO: 496006 - DNA, 15 bp, Homo sapiens
caggttcctggactg

SEQ ID NO: 496007 - DNA, 15 bp, Homo sapiens
ccaggttcctggact

SEQ ID NO: 496008 - DNA, 15 bp, Homo sapiens
tccaggttcctggac

SEQ ID NO: 496009 - DNA, 15 bp, Homo sapiens
ttccaggttcctgga

SEQ ID NO: 496010 - DNA, 15 bp, Homo sapiens
gttccaggttcctgg

SEQ ID NO: 496011 - DNA, 15 bp, Homo sapiens
ggttccaggttcctg

SEQ ID NO: 496012 - DNA, 15 bp, Homo sapiens
gggttccaggttcct

SEQ ID NO: 496013 - DNA, 15 bp, Homo sapiens
tgggttccaggttcc

SEQ ID NO: 496014 - DNA, 15 bp, Homo sapiens
ctgggttccaggttc

SEQ ID NO: 496015 - DNA, 15 bp, Homo sapiens
tctgggttccaggtt

SEQ ID NO: 496016 - DNA, 15 bp, Homo sapiens
ctctgggttccaggt

SEQ ID NO: 496017 - DNA, 15 bp, Homo sapiens
actctgggttccagg

SEQ ID NO: 496018 - DNA, 15 bp, Homo sapiens
cactctgggttccag

SEQ ID NO: 496019 - DNA, 15 bp, Homo sapiens
gcactctgggttcca

SEQ ID NO: 496020 - DNA, 15 bp, Homo sapiens
ggcactctgggttcc

SEQ ID NO: 496021 - DNA, 15 bp, Homo sapiens
tggcactctgggttc

SEQ ID NO: 496022 - DNA, 15 bp, Homo sapiens
ttggcactctgggtt

SEQ ID NO: 496023 - DNA, 15 bp, Homo sapiens
cttggcactctgggt

SEQ ID NO: 496024 - DNA, 15 bp, Homo sapiens
ccttggcactctggg

SEQ ID NO: 496025 - DNA, 15 bp, Homo sapiens
gccttggcactctgg

SEQ ID NO: 496026 - DNA, 15 bp, Homo sapiens
ggccttggcactctg

SEQ ID NO: 496027 - DNA, 15 bp, Homo sapiens
tggccttggcactct

SEQ ID NO: 496028 - DNA, 15 bp, Homo sapiens
atggccttggcactc

SEQ ID NO: 496029 - DNA, 15 bp, Homo sapiens
catggccttggcact

SEQ ID NO: 496030 - DNA, 15 bp, Homo sapiens
ccatggccttggcac

SEQ ID NO: 496031 - DNA, 15 bp, Homo sapiens
accatggccttggca

SEQ ID NO: 496032 - DNA, 15 bp, Homo sapiens
caccatggccttggc

SEQ ID NO: 496033 - DNA, 15 bp, Homo sapiens
ccaccatggccttgg

SEQ ID NO: 496034 - DNA, 15 bp, Homo sapiens
tccaccatggccttg

SEQ ID NO: 496035 - DNA, 15 bp, Homo sapiens
ttccaccatggcctt

SEQ ID NO: 496036 - DNA, 15 bp, Homo sapiens
cttccaccatggcct

SEQ ID NO: 496037 - DNA, 15 bp, Homo sapiens
ccttccaccatggcc

SEQ ID NO: 496038 - DNA, 15 bp, Homo sapiens
gccttccaccatggc

SEQ ID NO: 496039 - DNA, 15 bp, Homo sapiens
tgccttccaccatgg

SEQ ID NO: 496040 - DNA, 15 bp, Homo sapiens
ctgccttccaccatg

SEQ ID NO: 496041 - DNA, 15 bp, Homo sapiens
cctgccttccaccat

SEQ ID NO: 496042 - DNA, 15 bp, Homo sapiens
gcctgccttccacca

SEQ ID NO: 496043 - DNA, 15 bp, Homo sapiens
cgcctgccttccacc

SEQ ID NO: 496044 - DNA, 15 bp, Homo sapiens
gcgcctgccttccac

SEQ ID NO: 496045 - DNA, 15 bp, Homo sapiens
ggcgcctgccttcca

SEQ ID NO: 496046 - DNA, 15 bp, Homo sapiens
gggcgcctgccttcc

SEQ ID NO: 496047 - DNA, 15 bp, Homo sapiens
tgggcgcctgccttc

SEQ ID NO: 496048 - DNA, 15 bp, Homo sapiens
ctgggcgcctgcctt

SEQ ID NO: 496049 - DNA, 15 bp, Homo sapiens
gctgggcgcctgcct

SEQ ID NO: 496050 - DNA, 15 bp, Homo sapiens
tgctgggcgcctgcc

SEQ ID NO: 496051 - DNA, 15 bp, Homo sapiens
gtgctgggcgcctgc

SEQ ID NO: 496052 - DNA, 15 bp, Homo sapiens
ggtgctgggcgcctg

SEQ ID NO: 496053 - DNA, 15 bp, Homo sapiens
gggtgctgggcgcct

SEQ ID NO: 496054 - DNA, 15 bp, Homo sapiens
ggggtgctgggcgcc

SEQ ID NO: 496055 - DNA, 15 bp, Homo sapiens
tggggtgctgggcgc

SEQ ID NO: 496056 - DNA, 15 bp, Homo sapiens
ctggggtgctgggcg

SEQ ID NO: 496057 - DNA, 15 bp, Homo sapiens
gctggggtgctgggc

SEQ ID NO: 496058 - DNA, 15 bp, Homo sapiens
ggctggggtgctggg

SEQ ID NO: 496059 - DNA, 15 bp, Homo sapiens
gggctggggtgctgg

SEQ ID NO: 496060 - DNA, 15 bp, Homo sapiens
agggctggggtgctg

SEQ ID NO: 496061 - DNA, 15 bp, Homo sapiens
aagggctggggtgct

SEQ ID NO: 496062 - DNA, 15 bp, Homo sapiens
gaagggctggggtgc

SEQ ID NO: 496063 - DNA, 15 bp, Homo sapiens
agaagggctggggtg

SEQ ID NO: 496064 - DNA, 15 bp, Homo sapiens
cagaagggctggggt

SEQ ID NO: 496065 - DNA, 15 bp, Homo sapiens
ccagaagggctgggg

SEQ ID NO: 496066 - DNA, 15 bp, Homo sapiens
gccagaagggctggg

SEQ ID NO: 496067 - DNA, 15 bp, Homo sapiens
ggccagaagggctgg

SEQ ID NO: 496068 - DNA, 15 bp, Homo sapiens
aggccagaagggctg

SEQ ID NO: 496069 - DNA, 15 bp, Homo sapiens
gaggccagaagggct

SEQ ID NO: 496070 - DNA, 15 bp, Homo sapiens
tgaggccagaagggc

SEQ ID NO: 496071 - DNA, 15 bp, Homo sapiens
gtgaggccagaaggg

SEQ ID NO: 496072 - DNA, 15 bp, Homo sapiens
ggtgaggccagaagg

SEQ ID NO: 496073 - DNA, 15 bp, Homo sapiens
aggtgaggccagaag

SEQ ID NO: 496074 - DNA, 15 bp, Homo sapiens
gaggtgaggccagaa

SEQ ID NO: 496075 - DNA, 15 bp, Homo sapiens
tgaggtgaggccaga

SEQ ID NO: 496076 - DNA, 15 bp, Homo sapiens
gtgaggtgaggccag

SEQ ID NO: 496077 - DNA, 15 bp, Homo sapiens
ggtgaggtgaggcca

SEQ ID NO: 496078 - DNA, 15 bp, Homo sapiens
aggtgaggtgaggcc

SEQ ID NO: 496079 - DNA, 15 bp, Homo sapiens
gaggtgaggtgaggc

SEQ ID NO: 496080 - DNA, 15 bp, Homo sapiens
agaggtgaggtgagg

SEQ ID NO: 496081 - DNA, 15 bp, Homo sapiens
cagaggtgaggtgag

SEQ ID NO: 496082 - DNA, 15 bp, Homo sapiens
ccagaggtgaggtga

SEQ ID NO: 496083 - DNA, 15 bp, Homo sapiens
cccagaggtgaggtg

SEQ ID NO: 496084 - DNA, 15 bp, Homo sapiens
gcccagaggtgaggt

SEQ ID NO: 496085 - DNA, 15 bp, Homo sapiens
agcccagaggtgagg

SEQ ID NO: 496086 - DNA, 15 bp, Homo sapiens
cagcccagaggtgag

SEQ ID NO: 496087 - DNA, 15 bp, Homo sapiens
ccagcccagaggtga

SEQ ID NO: 496088 - DNA, 15 bp, Homo sapiens
gccagcccagaggtg

SEQ ID NO: 496089 - DNA, 15 bp, Homo sapiens
ggccagcccagaggt

SEQ ID NO: 496090 - DNA, 15 bp, Homo sapiens
gggccagcccagagg

SEQ ID NO: 496091 - DNA, 15 bp, Homo sapiens
agggccagcccagag

SEQ ID NO: 496092 - DNA, 15 bp, Homo sapiens
cagggccagcccaga

SEQ ID NO: 496093 - DNA, 15 bp, Homo sapiens
ccagggccagcccag

SEQ ID NO: 496094 - DNA, 15 bp, Homo sapiens
cccagggccagccca

SEQ ID NO: 496095 - DNA, 15 bp, Homo sapiens
ccccagggccagccc

SEQ ID NO: 496096 - DNA, 15 bp, Homo sapiens
accccagggccagcc

SEQ ID NO: 496097 - DNA, 15 bp, Homo sapiens
caccccagggccagc

SEQ ID NO: 496098 - DNA, 15 bp, Homo sapiens
tcaccccagggccag

SEQ ID NO: 496099 - DNA, 15 bp, Homo sapiens
ctcaccccagggcca

SEQ ID NO: 496100 - DNA, 15 bp, Homo sapiens
cctcaccccagggcc

SEQ ID NO: 496101 - DNA, 15 bp, Homo sapiens
tcctcaccccagggc

SEQ ID NO: 496102 - DNA, 15 bp, Homo sapiens
ttcctcaccccaggg

SEQ ID NO: 496103 - DNA, 15 bp, Homo sapiens
cttcctcaccccagg

SEQ ID NO: 496104 - DNA, 15 bp, Homo sapiens
ccttcctcaccccag

SEQ ID NO: 496105 - DNA, 15 bp, Homo sapiens
tccttcctcacccca

SEQ ID NO: 496106 - DNA, 15 bp, Homo sapiens
gtccttcctcacccc

SEQ ID NO: 496107 - DNA, 15 bp, Homo sapiens
ggtccttcctcaccc

SEQ ID NO: 496108 - DNA, 15 bp, Homo sapiens
tggtccttcctcacc

SEQ ID NO: 496109 - DNA, 15 bp, Homo sapiens
gtggtccttcctcac

SEQ ID NO: 496110 - DNA, 15 bp, Homo sapiens
agtggtccttcctca

SEQ ID NO: 496111 - DNA, 15 bp, Homo sapiens
gagtggtccttcctc

SEQ ID NO: 496112 - DNA, 15 bp, Homo sapiens
tgagtggtccttcct

SEQ ID NO: 496113 - DNA, 15 bp, Homo sapiens
ctgagtggtccttcc

SEQ ID NO: 496114 - DNA, 15 bp, Homo sapiens
gctgagtggtccttc

SEQ ID NO: 496115 - DNA, 15 bp, Homo sapiens
tgctgagtggtcctt

SEQ ID NO: 496116 - DNA, 15 bp, Homo sapiens
ctgctgagtggtcct

SEQ ID NO: 496117 - DNA, 15 bp, Homo sapiens
cctgctgagtggtcc

SEQ ID NO: 496118 - DNA, 15 bp, Homo sapiens
ccctgctgagtggtc

SEQ ID NO: 496119 - DNA, 15 bp, Homo sapiens
cccctgctgagtggt

SEQ ID NO: 496120 - DNA, 15 bp, Homo sapiens
gcccctgctgagtgg

SEQ ID NO: 496121 - DNA, 15 bp, Homo sapiens
ggcccctgctgagtg

SEQ ID NO: 496122 - DNA, 15 bp, Homo sapiens
gggcccctgctgagt

SEQ ID NO: 496123 - DNA, 15 bp, Homo sapiens
tgggcccctgctgag

SEQ ID NO: 496124 - DNA, 15 bp, Homo sapiens
ttgggcccctgctga

SEQ ID NO: 496125 - DNA, 15 bp, Homo sapiens
cttgggcccctgctg

SEQ ID NO: 496126 - DNA, 15 bp, Homo sapiens
ccttgggcccctgct

SEQ ID NO: 496127 - DNA, 15 bp, Homo sapiens
cccttgggcccctgc

SEQ ID NO: 496128 - DNA, 15 bp, Homo sapiens
ccccttgggcccctg

SEQ ID NO: 496129 - DNA, 15 bp, Homo sapiens
accccttgggcccct

SEQ ID NO: 496130 - DNA, 15 bp, Homo sapiens
caccccttgggcccc

SEQ ID NO: 496131 - DNA, 15 bp, Homo sapiens
ccaccccttgggccc

SEQ ID NO: 496132 - DNA, 15 bp, Homo sapiens
cccaccccttgggcc

SEQ ID NO: 496133 - DNA, 15 bp, Homo sapiens
ccccaccccttgggc

SEQ ID NO: 496134 - DNA, 15 bp, Homo sapiens
gccccaccccttggg

SEQ ID NO: 496135 - DNA, 15 bp, Homo sapiens
agccccaccccttgg

SEQ ID NO: 496136 - DNA, 15 bp, Homo sapiens
cagccccaccccttg

SEQ ID NO: 496137 - DNA, 15 bp, Homo sapiens
tcagccccacccctt

SEQ ID NO: 496138 - DNA, 15 bp, Homo sapiens
gtcagccccacccct

SEQ ID NO: 496139 - DNA, 15 bp, Homo sapiens
ggtcagccccacccc

SEQ ID NO: 496140 - DNA, 15 bp, Homo sapiens
gggtcagccccaccc

SEQ ID NO: 496141 - DNA, 15 bp, Homo sapiens
ggggtcagccccacc

SEQ ID NO: 496142 - DNA, 15 bp, Homo sapiens
tggggtcagccccac

SEQ ID NO: 496143 - DNA, 15 bp, Homo sapiens
ctggggtcagcccca

SEQ ID NO: 496144 - DNA, 15 bp, Homo sapiens
cctggggtcagcccc

SEQ ID NO: 496145 - DNA, 15 bp, Homo sapiens
acctggggtcagccc

SEQ ID NO: 496146 - DNA, 15 bp, Homo sapiens
cacctggggtcagcc

SEQ ID NO: 496147 - DNA, 15 bp, Homo sapiens
tcacctggggtcagc

SEQ ID NO: 496148 - DNA, 15 bp, Homo sapiens
ctcacctggggtcag

SEQ ID NO: 496149 - DNA, 15 bp, Homo sapiens
actcacctggggtca

SEQ ID NO: 496150 - DNA, 15 bp, Homo sapiens
gactcacctggggtc

SEQ ID NO: 496151 - DNA, 15 bp, Homo sapiens
ggactcacctggggt

SEQ ID NO: 496152 - DNA, 15 bp, Homo sapiens
aggactcacctgggg

SEQ ID NO: 496153 - DNA, 15 bp, Homo sapiens
taggactcacctggg

SEQ ID NO: 496154 - DNA, 15 bp, Homo sapiens
ctaggactcacctgg

SEQ ID NO: 496155 - DNA, 15 bp, Homo sapiens
cctaggactcacctg

SEQ ID NO: 496156 - DNA, 15 bp, Homo sapiens
ccctaggactcacct

SEQ ID NO: 496157 - DNA, 15 bp, Homo sapiens
gccctaggactcacc

SEQ ID NO: 496158 - DNA, 15 bp, Homo sapiens
ggccctaggactcac

SEQ ID NO: 496159 - DNA, 15 bp, Homo sapiens
aggccctaggactca

SEQ ID NO: 496160 - DNA, 15 bp, Homo sapiens
caggccctaggactc

SEQ ID NO: 496161 - DNA, 15 bp, Homo sapiens
ccaggccctaggact

SEQ ID NO: 496162 - DNA, 15 bp, Homo sapiens
cccaggccctaggac

SEQ ID NO: 496163 - DNA, 15 bp, Homo sapiens
ccccaggccctagga

SEQ ID NO: 496164 - DNA, 15 bp, Homo sapiens
cccccaggccctagg

SEQ ID NO: 496165 - DNA, 15 bp, Homo sapiens
acccccaggccctag

SEQ ID NO: 496166 - DNA, 15 bp, Homo sapiens
cacccccaggcccta

SEQ ID NO: 496167 - DNA, 15 bp, Homo sapiens
gcacccccaggccct

SEQ ID NO: 496168 - DNA, 15 bp, Homo sapiens
agcacccccaggccc

SEQ ID NO: 496169 - DNA, 15 bp, Homo sapiens
cagcacccccaggcc

SEQ ID NO: 496170 - DNA, 15 bp, Homo sapiens
ccagcacccccaggc

SEQ ID NO: 496171 - DNA, 15 bp, Homo sapiens
cccagcacccccagg

SEQ ID NO: 496172 - DNA, 15 bp, Homo sapiens
ccccagcacccccag

SEQ ID NO: 496173 - DNA, 15 bp, Homo sapiens
accccagcaccccca

SEQ ID NO: 496174 - DNA, 15 bp, Homo sapiens
taccccagcaccccc

SEQ ID NO: 496175 - DNA, 15 bp, Homo sapiens
ctaccccagcacccc

SEQ ID NO: 496176 - DNA, 15 bp, Homo sapiens
cctaccccagcaccc

SEQ ID NO: 496177 - DNA, 15 bp, Homo sapiens
ccctaccccagcacc

SEQ ID NO: 496178 - DNA, 15 bp, Homo sapiens
gccctaccccagcac

SEQ ID NO: 496179 - DNA, 15 bp, Homo sapiens
agccctaccccagca

SEQ ID NO: 496180 - DNA, 15 bp, Homo sapiens
gagccctaccccagc

SEQ ID NO: 496181 - DNA, 15 bp, Homo sapiens
ggagccctaccccag

SEQ ID NO: 496182 - DNA, 15 bp, Homo sapiens
gggagccctacccca

SEQ ID NO: 496183 - DNA, 15 bp, Homo sapiens
tgggagccctacccc

SEQ ID NO: 496184 - DNA, 15 bp, Homo sapiens
gtgggagccctaccc

SEQ ID NO: 496185 - DNA, 15 bp, Homo sapiens
cgtgggagccctacc

SEQ ID NO: 496186 - DNA, 15 bp, Homo sapiens
ccgtgggagccctac

SEQ ID NO: 496187 - DNA, 15 bp, Homo sapiens
cccgtgggagcccta

SEQ ID NO: 496188 - DNA, 15 bp, Homo sapiens
ccccgtgggagccct

SEQ ID NO: 496189 - DNA, 15 bp, Homo sapiens
tccccgtgggagccc

SEQ ID NO: 496190 - DNA, 15 bp, Homo sapiens
gtccccgtgggagcc

SEQ ID NO: 496191 - DNA, 15 bp, Homo sapiens
agtccccgtgggagc

SEQ ID NO: 496192 - DNA, 15 bp, Homo sapiens
gagtccccgtgggag

SEQ ID NO: 496193 - DNA, 15 bp, Homo sapiens
tgagtccccgtggga

SEQ ID NO: 496194 - DNA, 15 bp, Homo sapiens
gtgagtccccgtggg

SEQ ID NO: 496195 - DNA, 15 bp, Homo sapiens
ggtgagtccccgtgg

SEQ ID NO: 496196 - DNA, 15 bp, Homo sapiens
cggtgagtccccgtg

SEQ ID NO: 496197 - DNA, 15 bp, Homo sapiens
ccggtgagtccccgt

SEQ ID NO: 496198 - DNA, 15 bp, Homo sapiens
gccggtgagtccccg

SEQ ID NO: 496199 - DNA, 15 bp, Homo sapiens
agccggtgagtcccc

SEQ ID NO: 496200 - DNA, 15 bp, Homo sapiens
gagccggtgagtccc

SEQ ID NO: 496201 - DNA, 15 bp, Homo sapiens
tgagccggtgagtcc

SEQ ID NO: 496202 - DNA, 15 bp, Homo sapiens
ctgagccggtgagtc

SEQ ID NO: 496203 - DNA, 15 bp, Homo sapiens
gctgagccggtgagt

SEQ ID NO: 496204 - DNA, 15 bp, Homo sapiens
tgctgagccggtgag

SEQ ID NO: 496205 - DNA, 15 bp, Homo sapiens
ttgctgagccggtga

SEQ ID NO: 496206 - DNA, 15 bp, Homo sapiens
tttgctgagccggtg

SEQ ID NO: 496207 - DNA, 15 bp, Homo sapiens
ctttgctgagccggt

SEQ ID NO: 496208 - DNA, 15 bp, Homo sapiens
cctttgctgagccgg

SEQ ID NO: 496209 - DNA, 15 bp, Homo sapiens
gcctttgctgagccg

SEQ ID NO: 496210 - DNA, 15 bp, Homo sapiens
tgcctttgctgagcc

SEQ ID NO: 496211 - DNA, 15 bp, Homo sapiens
atgcctttgctgagc

SEQ ID NO: 496212 - DNA, 15 bp, Homo sapiens
aatgcctttgctgag

SEQ ID NO: 496213 - DNA, 15 bp, Homo sapiens
caatgcctttgctga

SEQ ID NO: 496214 - DNA, 15 bp, Homo sapiens
acaatgcctttgctg

SEQ ID NO: 496215 - DNA, 15 bp, Homo sapiens
gacaatgcctttgct

SEQ ID NO: 496216 - DNA, 15 bp, Homo sapiens
ggacaatgcctttgc

SEQ ID NO: 496217 - DNA, 15 bp, Homo sapiens
gggacaatgcctttg

SEQ ID NO: 496218 - DNA, 15 bp, Homo sapiens
tgggacaatgccttt

SEQ ID NO: 496219 - DNA, 15 bp, Homo sapiens
gtgggacaatgcctt

SEQ ID NO: 496220 - DNA, 15 bp, Homo sapiens
tgtgggacaatgcct

SEQ ID NO: 496221 - DNA, 15 bp, Homo sapiens
ctgtgggacaatgcc

SEQ ID NO: 496222 - DNA, 15 bp, Homo sapiens
gctgtgggacaatgc

SEQ ID NO: 496223 - DNA, 15 bp, Homo sapiens
tgctgtgggacaatg

SEQ ID NO: 496224 - DNA, 15 bp, Homo sapiens
gtgctgtgggacaat

SEQ ID NO: 496225 - DNA, 15 bp, Homo sapiens
tgtgctgtgggacaa

SEQ ID NO: 496226 - DNA, 15 bp, Homo sapiens
ctgtgctgtgggaca

SEQ ID NO: 496227 - DNA, 15 bp, Homo sapiens
actgtgctgtgggac

SEQ ID NO: 496228 - DNA, 15 bp, Homo sapiens
tactgtgctgtggga

SEQ ID NO: 496229 - DNA, 15 bp, Homo sapiens
ctactgtgctgtggg

SEQ ID NO: 496230 - DNA, 15 bp, Homo sapiens
gctactgtgctgtgg

SEQ ID NO: 496231 - DNA, 15 bp, Homo sapiens
ggctactgtgctgtg

SEQ ID NO: 496232 - DNA, 15 bp, Homo sapiens
cggctactgtgctgt

SEQ ID NO: 496233 - DNA, 15 bp, Homo sapiens
acggctactgtgctg

SEQ ID NO: 496234 - DNA, 15 bp, Homo sapiens
cacggctactgtgct

SEQ ID NO: 496235 - DNA, 15 bp, Homo sapiens
ccacggctactgtgc

SEQ ID NO: 496236 - DNA, 15 bp, Homo sapiens
gccacggctactgtg

SEQ ID NO: 496237 - DNA, 15 bp, Homo sapiens
tgccacggctactgt

SEQ ID NO: 496238 - DNA, 15 bp, Homo sapiens
atgccacggctactg

SEQ ID NO: 496239 - DNA, 15 bp, Homo sapiens
aatgccacggctact

SEQ ID NO: 496240 - DNA, 15 bp, Homo sapiens
caatgccacggctac

SEQ ID NO: 496241 - DNA, 15 bp, Homo sapiens
acaatgccacggcta

SEQ ID NO: 496242 - DNA, 15 bp, Homo sapiens
cacaatgccacggct

SEQ ID NO: 496243 - DNA, 15 bp, Homo sapiens
ccacaatgccacggc

SEQ ID NO: 496244 - DNA, 15 bp, Homo sapiens
accacaatgccacgg

SEQ ID NO: 496245 - DNA, 15 bp, Homo sapiens
gaccacaatgccacg

SEQ ID NO: 496246 - DNA, 15 bp, Homo sapiens
ggaccacaatgccac

SEQ ID NO: 496247 - DNA, 15 bp, Homo sapiens
aggaccacaatgcca

SEQ ID NO: 496248 - DNA, 15 bp, Homo sapiens
caggaccacaatgcc

SEQ ID NO: 496249 - DNA, 15 bp, Homo sapiens
ccaggaccacaatgc

SEQ ID NO: 496250 - DNA, 15 bp, Homo sapiens
gccaggaccacaatg

SEQ ID NO: 496251 - DNA, 15 bp, Homo sapiens
agccaggaccacaat

SEQ ID NO: 496252 - DNA, 15 bp, Homo sapiens
cagccaggaccacaa

SEQ ID NO: 496253 - DNA, 15 bp, Homo sapiens
gcagccaggaccaca

SEQ ID NO: 496254 - DNA, 15 bp, Homo sapiens
ggcagccaggaccac

SEQ ID NO: 496255 - DNA, 15 bp, Homo sapiens
cggcagccaggacca

SEQ ID NO: 496256 - DNA, 15 bp, Homo sapiens
acggcagccaggacc

SEQ ID NO: 496257 - DNA, 15 bp, Homo sapiens
cacggcagccaggac

SEQ ID NO: 496258 - DNA, 15 bp, Homo sapiens
ccacggcagccagga

SEQ ID NO: 496259 - DNA, 15 bp, Homo sapiens
tccacggcagccagg

SEQ ID NO: 496260 - DNA, 15 bp, Homo sapiens
gtccacggcagccag

SEQ ID NO: 496261 - DNA, 15 bp, Homo sapiens
cgtccacggcagcca

SEQ ID NO: 496262 - DNA, 15 bp, Homo sapiens
tcgtccacggcagcc

SEQ ID NO: 496263 - DNA, 15 bp, Homo sapiens
atcgtccacggcagc

SEQ ID NO: 496264 - DNA, 15 bp, Homo sapiens
catcgtccacggcag

SEQ ID NO: 496265 - DNA, 15 bp, Homo sapiens
tcatcgtccacggca

SEQ ID NO: 496266 - DNA, 15 bp, Homo sapiens
gtcatcgtccacggc

SEQ ID NO: 496267 - DNA, 15 bp, Homo sapiens
tgtcatcgtccacgg

SEQ ID NO: 496268 - DNA, 15 bp, Homo sapiens
ttgtcatcgtccacg

SEQ ID NO: 496269 - DNA, 15 bp, Homo sapiens
gttgtcatcgtccac

SEQ ID NO: 496270 - DNA, 15 bp, Homo sapiens
ggttgtcatcgtcca

SEQ ID NO: 496271 - DNA, 15 bp, Homo sapiens
tggttgtcatcgtcc

SEQ ID NO: 496272 - DNA, 15 bp, Homo sapiens
gtggttgtcatcgtc

SEQ ID NO: 496273 - DNA, 15 bp, Homo sapiens
tgtggttgtcatcgt

SEQ ID NO: 496274 - DNA, 15 bp, Homo sapiens
ctgtggttgtcatcg

SEQ ID NO: 496275 - DNA, 15 bp, Homo sapiens
cctgtggttgtcatc

SEQ ID NO: 496276 - DNA, 15 bp, Homo sapiens
acctgtggttgtcat

SEQ ID NO: 496277 - DNA, 15 bp, Homo sapiens
tacctgtggttgtca

SEQ ID NO: 496278 - DNA, 15 bp, Homo sapiens
ctacctgtggttgtc

SEQ ID NO: 496279 - DNA, 15 bp, Homo sapiens
cctacctgtggttgt

SEQ ID NO: 496280 - DNA, 15 bp, Homo sapiens
ccctacctgtggttg

SEQ ID NO: 496281 - DNA, 15 bp, Homo sapiens
tccctacctgtggtt

SEQ ID NO: 496282 - DNA, 15 bp, Homo sapiens
gtccctacctgtggt

SEQ ID NO: 496283 - DNA, 15 bp, Homo sapiens
tgtccctacctgtgg

SEQ ID NO: 496284 - DNA, 15 bp, Homo sapiens
ctgtccctacctgtg

SEQ ID NO: 496285 - DNA, 15 bp, Homo sapiens
tctgtccctacctgt

SEQ ID NO: 496286 - DNA, 15 bp, Homo sapiens
ctctgtccctacctg

SEQ ID NO: 496287 - DNA, 15 bp, Homo sapiens
actctgtccctacct

SEQ ID NO: 496288 - DNA, 15 bp, Homo sapiens
gactctgtccctacc

SEQ ID NO: 496289 - DNA, 15 bp, Homo sapiens
agactctgtccctac

SEQ ID NO: 496290 - DNA, 15 bp, Homo sapiens
tagactctgtcccta

SEQ ID NO: 496291 - DNA, 15 bp, Homo sapiens
gtagactctgtccct

SEQ ID NO: 496292 - DNA, 15 bp, Homo sapiens
tgtagactctgtccc

SEQ ID NO: 496293 - DNA, 15 bp, Homo sapiens
ctgtagactctgtcc

SEQ ID NO: 496294 - DNA, 15 bp, Homo sapiens
cctgtagactctgtc

SEQ ID NO: 496295 - DNA, 15 bp, Homo sapiens
tcctgtagactctgt

SEQ ID NO: 496296 - DNA, 15 bp, Homo sapiens
ctcctgtagactctg

SEQ ID NO: 496297 - DNA, 15 bp, Homo sapiens
actcctgtagactct

SEQ ID NO: 496298 - DNA, 15 bp, Homo sapiens
gactcctgtagactc

SEQ ID NO: 496299 - DNA, 15 bp, Homo sapiens
tgactcctgtagact

SEQ ID NO: 496300 - DNA, 15 bp, Homo sapiens
ttgactcctgtagac

SEQ ID NO: 496301 - DNA, 15 bp, Homo sapiens
tttgactcctgtaga

SEQ ID NO: 496302 - DNA, 15 bp, Homo sapiens
ctttgactcctgtag

SEQ ID NO: 496303 - DNA, 15 bp, Homo sapiens
cctttgactcctgta

SEQ ID NO: 496304 - DNA, 15 bp, Homo sapiens
tcctttgactcctgt

SEQ ID NO: 496305 - DNA, 15 bp, Homo sapiens
ttcctttgactcctg

SEQ ID NO: 496306 - DNA, 15 bp, Homo sapiens
gttcctttgactcct

SEQ ID NO: 496307 - DNA, 15 bp, Homo sapiens
ggttcctttgactcc

SEQ ID NO: 496308 - DNA, 15 bp, Homo sapiens
gggttcctttgactc

SEQ ID NO: 496309 - DNA, 15 bp, Homo sapiens
tgggttcctttgact

SEQ ID NO: 496310 - DNA, 15 bp, Homo sapiens
ttgggttcctttgac

SEQ ID NO: 496311 - DNA, 15 bp, Homo sapiens
cttgggttcctttga

SEQ ID NO: 496312 - DNA, 15 bp, Homo sapiens
acttgggttcctttg

SEQ ID NO: 496313 - DNA, 15 bp, Homo sapiens
aacttgggttccttt

SEQ ID NO: 496314 - DNA, 15 bp, Homo sapiens
caacttgggttcctt

SEQ ID NO: 496315 - DNA, 15 bp, Homo sapiens
tcaacttgggttcct

SEQ ID NO: 496316 - DNA, 15 bp, Homo sapiens
atcaacttgggttcc

SEQ ID NO: 496317 - DNA, 15 bp, Homo sapiens
catcaacttgggttc

SEQ ID NO: 496318 - DNA, 15 bp, Homo sapiens
ccatcaacttgggtt

SEQ ID NO: 496319 - DNA, 15 bp, Homo sapiens
cccatcaacttgggt

SEQ ID NO: 496320 - DNA, 15 bp, Homo sapiens
ccccatcaacttggg

SEQ ID NO: 496321 - DNA, 15 bp, Homo sapiens
gccccatcaacttgg

SEQ ID NO: 496322 - DNA, 15 bp, Homo sapiens
cgccccatcaacttg

SEQ ID NO: 496323 - DNA, 15 bp, Homo sapiens
acgccccatcaactt

SEQ ID NO: 496324 - DNA, 15 bp, Homo sapiens
cacgccccatcaact

SEQ ID NO: 496325 - DNA, 15 bp, Homo sapiens
tcacgccccatcaac

SEQ ID NO: 496326 - DNA, 15 bp, Homo sapiens
gtcacgccccatcaa

SEQ ID NO: 496327 - DNA, 15 bp, Homo sapiens
ggtcacgccccatca

SEQ ID NO: 496328 - DNA, 15 bp, Homo sapiens
tggtcacgccccatc

SEQ ID NO: 496329 - DNA, 15 bp, Homo sapiens
gtggtcacgccccat

SEQ ID NO: 496330 - DNA, 15 bp, Homo sapiens
ggtggtcacgcccca

SEQ ID NO: 496331 - DNA, 15 bp, Homo sapiens
tggtggtcacgcccc

SEQ ID NO: 496332 - DNA, 15 bp, Homo sapiens
gtggtggtcacgccc

SEQ ID NO: 496333 - DNA, 15 bp, Homo sapiens
cgtggtggtcacgcc

SEQ ID NO: 496334 - DNA, 15 bp, Homo sapiens
acgtggtggtcacgc

SEQ ID NO: 496335 - DNA, 15 bp, Homo sapiens
cacgtggtggtcacg

SEQ ID NO: 496336 - DNA, 15 bp, Homo sapiens
gcacgtggtggtcac

SEQ ID NO: 496337 - DNA, 15 bp, Homo sapiens
ggcacgtggtggtca

SEQ ID NO: 496338 - DNA, 15 bp, Homo sapiens
gggcacgtggtggtc

SEQ ID NO: 496339 - DNA, 15 bp, Homo sapiens
agggcacgtggtggt

SEQ ID NO: 496340 - DNA, 15 bp, Homo sapiens
gagggcacgtggtgg

SEQ ID NO: 496341 - DNA, 15 bp, Homo sapiens
agagggcacgtggtg

SEQ ID NO: 496342 - DNA, 15 bp, Homo sapiens
cagagggcacgtggt

SEQ ID NO: 496343 - DNA, 15 bp, Homo sapiens
gcagagggcacgtgg

SEQ ID NO: 496344 - DNA, 15 bp, Homo sapiens
agcagagggcacgtg

SEQ ID NO: 496345 - DNA, 15 bp, Homo sapiens
aagcagagggcacgt

SEQ ID NO: 496346 - DNA, 15 bp, Homo sapiens
taagcagagggcacg

SEQ ID NO: 496347 - DNA, 15 bp, Homo sapiens
ctaagcagagggcac

SEQ ID NO: 496348 - DNA, 15 bp, Homo sapiens
cctaagcagagggca

SEQ ID NO: 496349 - DNA, 15 bp, Homo sapiens
gcctaagcagagggc

SEQ ID NO: 496350 - DNA, 15 bp, Homo sapiens
tgcctaagcagaggg

SEQ ID NO: 496351 - DNA, 15 bp, Homo sapiens
ttgcctaagcagagg

SEQ ID NO: 496352 - DNA, 15 bp, Homo sapiens
gttgcctaagcagag

SEQ ID NO: 496353 - DNA, 15 bp, Homo sapiens
tgttgcctaagcaga

SEQ ID NO: 496354 - DNA, 15 bp, Homo sapiens
atgttgcctaagcag

SEQ ID NO: 496355 - DNA, 15 bp, Homo sapiens
catgttgcctaagca

SEQ ID NO: 496356 - DNA, 15 bp, Homo sapiens
gcatgttgcctaagc

SEQ ID NO: 496357 - DNA, 15 bp, Homo sapiens
ggcatgttgcctaag

SEQ ID NO: 496358 - DNA, 15 bp, Homo sapiens
gggcatgttgcctaa

SEQ ID NO: 496359 - DNA, 15 bp, Homo sapiens
tgggcatgttgccta

SEQ ID NO: 496360 - DNA, 15 bp, Homo sapiens
ttgggcatgttgcct

SEQ ID NO: 496361 - DNA, 15 bp, Homo sapiens
attgggcatgttgcc

SEQ ID NO: 496362 - DNA, 15 bp, Homo sapiens
gattgggcatgttgc

SEQ ID NO: 496363 - DNA, 15 bp, Homo sapiens
agattgggcatgttg

SEQ ID NO: 496364 - DNA, 15 bp, Homo sapiens
cagattgggcatgtt

SEQ ID NO: 496365 - DNA, 15 bp, Homo sapiens
gcagattgggcatgt

SEQ ID NO: 496366 - DNA, 15 bp, Homo sapiens
agcagattgggcatg

SEQ ID NO: 496367 - DNA, 15 bp, Homo sapiens
aagcagattgggcat

SEQ ID NO: 496368 - DNA, 15 bp, Homo sapiens
aaagcagattgggca

SEQ ID NO: 496369 - DNA, 15 bp, Homo sapiens
taaagcagattgggc

SEQ ID NO: 496370 - DNA, 15 bp, Homo sapiens
ataaagcagattggg

SEQ ID NO: 496371 - DNA, 15 bp, Homo sapiens
aataaagcagattgg

SEQ ID NO: 496372 - DNA, 15 bp, Homo sapiens
aaataaagcagattg

SEQ ID NO: 496373 - DNA, 15 bp, Homo sapiens
aaaataaagcagatt

SEQ ID NO: 496374 - DNA, 15 bp, Homo sapiens
aaaaataaagcagat

SEQ ID NO: 496375 - DNA, 15 bp, Homo sapiens
aaaaaataaagcaga

SEQ ID NO: 496376 - DNA, 15 bp, Homo sapiens
aaaaaaataaagcag

SEQ ID NO: 496377 - DNA, 15 bp, Homo sapiens
aaaaaaaataaagca

SEQ ID NO: 496378 - DNA, 15 bp, Homo sapiens
aaaaaaaaataaagc

SEQ ID NO: 496379 - DNA, 15 bp, Homo sapiens
taaaaaaaaataaag

SEQ ID NO: 496380 - DNA, 15 bp, Homo sapiens
ataaaaaaaaataaa

SEQ ID NO: 496381 - DNA, 15 bp, Homo sapiens
cataaaaaaaaataa

SEQ ID NO: 496382 - DNA, 15 bp, Homo sapiens
acataaaaaaaaata

SEQ ID NO: 496383 - DNA, 15 bp, Homo sapiens
tacataaaaaaaaat

SEQ ID NO: 496384 - DNA, 15 bp, Homo sapiens
atacataaaaaaaaa

SEQ ID NO: 496385 - DNA, 15 bp, Homo sapiens
aatacataaaaaaaa

SEQ ID NO: 496386 - DNA, 15 bp, Homo sapiens
aaatacataaaaaaa

SEQ ID NO: 496387 - DNA, 15 bp, Homo sapiens
aaaatacataaaaaa

SEQ ID NO: 496388 - DNA, 15 bp, Homo sapiens
aaaaatacataaaaa

SEQ ID NO: 496389 - DNA, 15 bp, Homo sapiens
aaaaaatacataaaa

SEQ ID NO: 496390 - DNA, 15 bp, Homo sapiens
aaaaaaatacataaa

SEQ ID NO: 496391 - DNA, 15 bp, Homo sapiens
aaaaaaaatacataa

SEQ ID NO: 496392 - DNA, 15 bp, Homo sapiens
aaaaaaaaatacata

SEQ ID NO: 496393 - DNA, 15 bp, Homo sapiens
aaaaaaaaaatacat

SEQ ID NO: 496394 - DNA, 15 bp, Homo sapiens
aaaaaaaaaaataca

SEQ ID NO: 496395 - DNA, 15 bp, Homo sapiens
caaaaaaaaaaatac

SEQ ID NO: 496396 - DNA, 15 bp, Homo sapiens
tcaaaaaaaaaaata

SEQ ID NO: 496397 - DNA, 15 bp, Homo sapiens
atcaaaaaaaaaaat

SEQ ID NO: 496398 - DNA, 15 bp, Homo sapiens
ccatatcaaaaaaaa

SEQ ID NO: 496399 - DNA, 15 bp, Homo sapiens
tccatatcaaaaaaa

SEQ ID NO: 496400 - DNA, 15 bp, Homo sapiens
ctccatatcaaaaaa

SEQ ID NO: 496401 - DNA, 15 bp, Homo sapiens
actccatatcaaaaa

SEQ ID NO: 496402 - DNA, 15 bp, Homo sapiens
aactccatatcaaaa

SEQ ID NO: 496403 - DNA, 15 bp, Homo sapiens
aaactccatatcaaa

SEQ ID NO: 496404 - DNA, 15 bp, Homo sapiens
gaaactccatatcaa

SEQ ID NO: 496405 - DNA, 15 bp, Homo sapiens
tgaaactccatatca

SEQ ID NO: 496406 - DNA, 15 bp, Homo sapiens
gtgaaactccatatc

SEQ ID NO: 496407 - DNA, 15 bp, Homo sapiens
agtgaaactccatat

SEQ ID NO: 496408 - DNA, 15 bp, Homo sapiens
gagtgaaactccata

SEQ ID NO: 496409 - DNA, 15 bp, Homo sapiens
caagagtgaaactcc

SEQ ID NO: 496410 - DNA, 15 bp, Homo sapiens
acaagagtgaaactc

SEQ ID NO: 496411 - DNA, 15 bp, Homo sapiens
tgggcaacaagagtg

SEQ ID NO: 496412 - DNA, 15 bp, Homo sapiens
ctgggcaacaagagt

SEQ ID NO: 496413 - DNA, 15 bp, Homo sapiens
accattgcactccag

SEQ ID NO: 496414 - DNA, 15 bp, Homo sapiens
caccattgcactcca

SEQ ID NO: 496415 - DNA, 15 bp, Homo sapiens
gcaccattgcactcc

SEQ ID NO: 496416 - DNA, 15 bp, Homo sapiens
tgcaccattgcactc

SEQ ID NO: 496417 - DNA, 15 bp, Homo sapiens
ttgcaccattgcact

SEQ ID NO: 496418 - DNA, 15 bp, Homo sapiens
attgcaccattgcac

SEQ ID NO: 496419 - DNA, 15 bp, Homo sapiens
gagattgcaccattg

SEQ ID NO: 496420 - DNA, 15 bp, Homo sapiens
cgagattgcaccatt

SEQ ID NO: 496421 - DNA, 15 bp, Homo sapiens
ccgagattgcaccat

SEQ ID NO: 496422 - DNA, 15 bp, Homo sapiens
gccgagattgcacca

SEQ ID NO: 496423 - DNA, 15 bp, Homo sapiens
agccgagattgcacc

SEQ ID NO: 496424 - DNA, 15 bp, Homo sapiens
gagccgagattgcac

SEQ ID NO: 496425 - DNA, 15 bp, Homo sapiens
tgagccgagattgca

SEQ ID NO: 496426 - DNA, 15 bp, Homo sapiens
ggtgagccgagattg

SEQ ID NO: 496427 - DNA, 15 bp, Homo sapiens
tggtgagccgagatt

SEQ ID NO: 496428 - DNA, 15 bp, Homo sapiens
agaggttgtggtgag

SEQ ID NO: 496429 - DNA, 15 bp, Homo sapiens
cagaggttgtggtga

SEQ ID NO: 496430 - DNA, 15 bp, Homo sapiens
gcagaggttgtggtg

SEQ ID NO: 496431 - DNA, 15 bp, Homo sapiens
ggcagaggttgtggt

SEQ ID NO: 496432 - DNA, 15 bp, Homo sapiens
aggcagaggttgtgg

SEQ ID NO: 496433 - DNA, 15 bp, Homo sapiens
gaggcagaggttgtg

SEQ ID NO: 496434 - DNA, 15 bp, Homo sapiens
ggaggcagaggttgt

SEQ ID NO: 496435 - DNA, 15 bp, Homo sapiens
cgcttgaacccggga

SEQ ID NO: 496436 - DNA, 15 bp, Homo sapiens
tcgcttgaacccggg

SEQ ID NO: 496437 - DNA, 15 bp, Homo sapiens
atcgcttgaacccgg

SEQ ID NO: 496438 - DNA, 15 bp, Homo sapiens
aatcgcttgaacccg

SEQ ID NO: 496439 - DNA, 15 bp, Homo sapiens
agctgaggcaggaga

SEQ ID NO: 496440 - DNA, 15 bp, Homo sapiens
aagctgaggcaggag

SEQ ID NO: 496441 - DNA, 15 bp, Homo sapiens
gaagctgaggcagga

SEQ ID NO: 496442 - DNA, 15 bp, Homo sapiens
cttgggaagctgagg

SEQ ID NO: 496443 - DNA, 15 bp, Homo sapiens
acacatgcctgtaat

SEQ ID NO: 496444 - DNA, 15 bp, Homo sapiens
gacacatgcctgtaa

SEQ ID NO: 496445 - DNA, 15 bp, Homo sapiens
tgacacatgcctgta

SEQ ID NO: 496446 - DNA, 15 bp, Homo sapiens
gtgacacatgcctgt

SEQ ID NO: 496447 - DNA, 15 bp, Homo sapiens
ggtgacacatgcctg

SEQ ID NO: 496448 - DNA, 15 bp, Homo sapiens
tggtgacacatgcct

SEQ ID NO: 496449 - DNA, 15 bp, Homo sapiens
gtggtgacacatgcc

SEQ ID NO: 496450 - DNA, 15 bp, Homo sapiens
tgtggtgacacatgc

SEQ ID NO: 496451 - DNA, 15 bp, Homo sapiens
gtgtggtgacacatg

SEQ ID NO: 496452 - DNA, 15 bp, Homo sapiens
ggtgtggtgacacat

SEQ ID NO: 496453 - DNA, 15 bp, Homo sapiens
aggtgtggtgacaca

SEQ ID NO: 496454 - DNA, 15 bp, Homo sapiens
caggtgtggtgacac

SEQ ID NO: 496455 - DNA, 15 bp, Homo sapiens
ccaggtgtggtgaca

SEQ ID NO: 496456 - DNA, 15 bp, Homo sapiens
gccaggtgtggtgac

SEQ ID NO: 496457 - DNA, 15 bp, Homo sapiens
agccaggtgtggtga

SEQ ID NO: 496458 - DNA, 15 bp, Homo sapiens
caaaattagccaggt

SEQ ID NO: 496459 - DNA, 15 bp, Homo sapiens
tacaaaattagccag

SEQ ID NO: 496460 - DNA, 15 bp, Homo sapiens
atacaaaattagcca

SEQ ID NO: 496461 - DNA, 15 bp, Homo sapiens
aatacaaaattagcc

SEQ ID NO: 496462 - DNA, 15 bp, Homo sapiens
gagaaaccccgtctc

SEQ ID NO: 496463 - DNA, 15 bp, Homo sapiens
ggagaaaccccgtct

SEQ ID NO: 496464 - DNA, 15 bp, Homo sapiens
tggagaaaccccgtc

SEQ ID NO: 496465 - DNA, 15 bp, Homo sapiens
atggagaaaccccgt

SEQ ID NO: 496466 - DNA, 15 bp, Homo sapiens
catggagaaaccccg

SEQ ID NO: 496467 - DNA, 15 bp, Homo sapiens
acctgaccaacatgg

SEQ ID NO: 496468 - DNA, 15 bp, Homo sapiens
aacctgaccaacatg

SEQ ID NO: 496469 - DNA, 15 bp, Homo sapiens
caacctgaccaacat

SEQ ID NO: 496470 - DNA, 15 bp, Homo sapiens
tcaacctgaccaaca

SEQ ID NO: 496471 - DNA, 15 bp, Homo sapiens
atcaacctgaccaac

SEQ ID NO: 496472 - DNA, 15 bp, Homo sapiens
gatcaacctgaccaa

SEQ ID NO: 496473 - DNA, 15 bp, Homo sapiens
agatcaacctgacca

SEQ ID NO: 496474 - DNA, 15 bp, Homo sapiens
gagatcaacctgacc

SEQ ID NO: 496475 - DNA, 15 bp, Homo sapiens
cgagatcaacctgac

SEQ ID NO: 496476 - DNA, 15 bp, Homo sapiens
tcgagatcaacctga

SEQ ID NO: 496477 - DNA, 15 bp, Homo sapiens
ttcgagatcaacctg

SEQ ID NO: 496478 - DNA, 15 bp, Homo sapiens
gttcgagatcaacct

SEQ ID NO: 496479 - DNA, 15 bp, Homo sapiens
ggttcgagatcaacc

SEQ ID NO: 496480 - DNA, 15 bp, Homo sapiens
gggttcgagatcaac

SEQ ID NO: 496481 - DNA, 15 bp, Homo sapiens
ggggttcgagatcaa

SEQ ID NO: 496482 - DNA, 15 bp, Homo sapiens
aggggttcgagatca

SEQ ID NO: 496483 - DNA, 15 bp, Homo sapiens
caggggttcgagatc

SEQ ID NO: 496484 - DNA, 15 bp, Homo sapiens
tcaggggttcgagat

SEQ ID NO: 496485 - DNA, 15 bp, Homo sapiens
ctgaggtcaggggtt

SEQ ID NO: 496486 - DNA, 15 bp, Homo sapiens
cctgaggtcaggggt

SEQ ID NO: 496487 - DNA, 15 bp, Homo sapiens
acctgaggtcagggg

SEQ ID NO: 496488 - DNA, 15 bp, Homo sapiens
cacctgaggtcaggg

SEQ ID NO: 496489 - DNA, 15 bp, Homo sapiens
agggtggatcacctg

SEQ ID NO: 496490 - DNA, 15 bp, Homo sapiens
gagggtggatcacct

SEQ ID NO: 496491 - DNA, 15 bp, Homo sapiens
ggagggtggatcacc

SEQ ID NO: 496492 - DNA, 15 bp, Homo sapiens
aggagggtggatcac

SEQ ID NO: 496493 - DNA, 15 bp, Homo sapiens
aaggagggtggatca

SEQ ID NO: 496494 - DNA, 15 bp, Homo sapiens
caaggagggtggatc

SEQ ID NO: 496495 - DNA, 15 bp, Homo sapiens
ccaaggagggtggat

SEQ ID NO: 496496 - DNA, 15 bp, Homo sapiens
gccaaggagggtgga

SEQ ID NO: 496497 - DNA, 15 bp, Homo sapiens
ggccaaggagggtgg

SEQ ID NO: 496498 - DNA, 15 bp, Homo sapiens
aggccaaggagggtg

SEQ ID NO: 496499 - DNA, 15 bp, Homo sapiens
gaggccaaggagggt

SEQ ID NO: 496500 - DNA, 15 bp, Homo sapiens
ggaggccaaggaggg

SEQ ID NO: 496501 - DNA, 15 bp, Homo sapiens
gggaggccaaggagg

SEQ ID NO: 496502 - DNA, 15 bp, Homo sapiens
tgggaggccaaggag

SEQ ID NO: 496503 - DNA, 15 bp, Homo sapiens
ttgggaggccaagga

SEQ ID NO: 496504 - DNA, 15 bp, Homo sapiens
ttgcctgtaatccca

SEQ ID NO: 496505 - DNA, 15 bp, Homo sapiens
cttgcctgtaatccc

SEQ ID NO: 496506 - DNA, 15 bp, Homo sapiens
tcttgcctgtaatcc

SEQ ID NO: 496507 - DNA, 15 bp, Homo sapiens
gtcttgcctgtaatc

SEQ ID NO: 496508 - DNA, 15 bp, Homo sapiens
ggtcttgcctgtaat

SEQ ID NO: 496509 - DNA, 15 bp, Homo sapiens
gggtcttgcctgtaa

SEQ ID NO: 496510 - DNA, 15 bp, Homo sapiens
tgggtcttgcctgta

SEQ ID NO: 496511 - DNA, 15 bp, Homo sapiens
gtgggtcttgcctgt

SEQ ID NO: 496512 - DNA, 15 bp, Homo sapiens
ggtgggtcttgcctg

SEQ ID NO: 496513 - DNA, 15 bp, Homo sapiens
tggtgggtcttgcct

SEQ ID NO: 496514 - DNA, 15 bp, Homo sapiens
gtggtgggtcttgcc

SEQ ID NO: 496515 - DNA, 15 bp, Homo sapiens
ggtggtgggtcttgc

SEQ ID NO: 496516 - DNA, 15 bp, Homo sapiens
gggtggtgggtcttg

SEQ ID NO: 496517 - DNA, 15 bp, Homo sapiens
tgggtggtgggtctt

SEQ ID NO: 496518 - DNA, 15 bp, Homo sapiens
atgggtggtgggtct

SEQ ID NO: 496519 - DNA, 15 bp, Homo sapiens
catgggtggtgggtc

SEQ ID NO: 496520 - DNA, 15 bp, Homo sapiens
ccatgggtggtgggt

SEQ ID NO: 496521 - DNA, 15 bp, Homo sapiens
gccatgggtggtggg

SEQ ID NO: 496522 - DNA, 15 bp, Homo sapiens
ggccatgggtggtgg

SEQ ID NO: 496523 - DNA, 15 bp, Homo sapiens
cggccatgggtggtg

SEQ ID NO: 496524 - DNA, 15 bp, Homo sapiens
gcggccatgggtggt

SEQ ID NO: 496525 - DNA, 15 bp, Homo sapiens
tgcggccatgggtgg

SEQ ID NO: 496526 - DNA, 15 bp, Homo sapiens
ttgcggccatgggtg

SEQ ID NO: 496527 - DNA, 15 bp, Homo sapiens
attgcggccatgggt

SEQ ID NO: 496528 - DNA, 15 bp, Homo sapiens
gattgcggccatggg

SEQ ID NO: 496529 - DNA, 15 bp, Homo sapiens
agattgcggccatgg

SEQ ID NO: 496530 - DNA, 15 bp, Homo sapiens
cagattgcggccatg

SEQ ID NO: 496531 - DNA, 15 bp, Homo sapiens
gcagattgcggccat

SEQ ID NO: 496532 - DNA, 15 bp, Homo sapiens
agcagattgcggcca

SEQ ID NO: 496533 - DNA, 15 bp, Homo sapiens
aagcagattgcggcc

SEQ ID NO: 496534 - DNA, 15 bp, Homo sapiens
aaagcagattgcggc

SEQ ID NO: 496535 - DNA, 15 bp, Homo sapiens
taaagcagattgcgg

SEQ ID NO: 496536 - DNA, 15 bp, Homo sapiens
ataaagcagattgcg

SEQ ID NO: 496537 - DNA, 15 bp, Homo sapiens
aataaagcagattgc

SEQ ID NO: 496538 - DNA, 15 bp, Homo sapiens
gaaaataaagcagat

SEQ ID NO: 496539 - DNA, 15 bp, Homo sapiens
agaaaataaagcaga

SEQ ID NO: 496540 - DNA, 15 bp, Homo sapiens
aagaaaataaagcag

SEQ ID NO: 496541 - DNA, 15 bp, Homo sapiens
gaagaaaataaagca

SEQ ID NO: 496542 - DNA, 15 bp, Homo sapiens
cgaagaaaataaagc

SEQ ID NO: 496543 - DNA, 15 bp, Homo sapiens
tcgaagaaaataaag

SEQ ID NO: 496544 - DNA, 15 bp, Homo sapiens
ctcgaagaaaataaa

SEQ ID NO: 496545 - DNA, 15 bp, Homo sapiens
tctcgaagaaaataa

SEQ ID NO: 496546 - DNA, 15 bp, Homo sapiens
gtctcgaagaaaata

SEQ ID NO: 496547 - DNA, 15 bp, Homo sapiens
tgtctcgaagaaaat

SEQ ID NO: 496548 - DNA, 15 bp, Homo sapiens
ctgtctcgaagaaaa

SEQ ID NO: 496549 - DNA, 15 bp, Homo sapiens
cctgtctcgaagaaa

SEQ ID NO: 496550 - DNA, 15 bp, Homo sapiens
ccctgtctcgaagaa

SEQ ID NO: 496551 - DNA, 15 bp, Homo sapiens
accctgtctcgaaga

SEQ ID NO: 496552 - DNA, 15 bp, Homo sapiens
gaccctgtctcgaag

SEQ ID NO: 496553 - DNA, 15 bp, Homo sapiens
agaccctgtctcgaa

SEQ ID NO: 496554 - DNA, 15 bp, Homo sapiens
gagaccctgtctcga

SEQ ID NO: 496555 - DNA, 15 bp, Homo sapiens
cgagaccctgtctcg

SEQ ID NO: 496556 - DNA, 15 bp, Homo sapiens
gagcgagaccctgtc

SEQ ID NO: 496557 - DNA, 15 bp, Homo sapiens
cgagcgagaccctgt

SEQ ID NO: 496558 - DNA, 15 bp, Homo sapiens
ccgagcgagaccctg

SEQ ID NO: 496559 - DNA, 15 bp, Homo sapiens
accgagcgagaccct

SEQ ID NO: 496560 - DNA, 15 bp, Homo sapiens
gaccgagcgagaccc

SEQ ID NO: 496561 - DNA, 15 bp, Homo sapiens
cgaccgagcgagacc

SEQ ID NO: 496562 - DNA, 15 bp, Homo sapiens
gcgaccgagcgagac

SEQ ID NO: 496563 - DNA, 15 bp, Homo sapiens
ggcgaccgagcgaga

SEQ ID NO: 496564 - DNA, 15 bp, Homo sapiens
gggcgaccgagcgag

SEQ ID NO: 496565 - DNA, 15 bp, Homo sapiens
tgggcgaccgagcga

SEQ ID NO: 496566 - DNA, 15 bp, Homo sapiens
ctgggcgaccgagcg

SEQ ID NO: 496567 - DNA, 15 bp, Homo sapiens
tctgggcgaccgagc

SEQ ID NO: 496568 - DNA, 15 bp, Homo sapiens
gtctgggcgaccgag

SEQ ID NO: 496569 - DNA, 15 bp, Homo sapiens
agtctgggcgaccga

SEQ ID NO: 496570 - DNA, 15 bp, Homo sapiens
cagtctgggcgaccg

SEQ ID NO: 496571 - DNA, 15 bp, Homo sapiens
ccagtctgggcgacc

SEQ ID NO: 496572 - DNA, 15 bp, Homo sapiens
tccagtctgggcgac

SEQ ID NO: 496573 - DNA, 15 bp, Homo sapiens
ctccagtctgggcga

SEQ ID NO: 496574 - DNA, 15 bp, Homo sapiens
cctccagtctgggcg

SEQ ID NO: 496575 - DNA, 15 bp, Homo sapiens
ccctccagtctgggc

SEQ ID NO: 496576 - DNA, 15 bp, Homo sapiens
gccctccagtctggg

SEQ ID NO: 496577 - DNA, 15 bp, Homo sapiens
tgccctccagtctgg

SEQ ID NO: 496578 - DNA, 15 bp, Homo sapiens
ctgccctccagtctg

SEQ ID NO: 496579 - DNA, 15 bp, Homo sapiens
actgccctccagtct

SEQ ID NO: 496580 - DNA, 15 bp, Homo sapiens
cactgccctccagtc

SEQ ID NO: 496581 - DNA, 15 bp, Homo sapiens
ccactgccctccagt

SEQ ID NO: 496582 - DNA, 15 bp, Homo sapiens
accactgccctccag

SEQ ID NO: 496583 - DNA, 15 bp, Homo sapiens
caccactgccctcca

SEQ ID NO: 496584 - DNA, 15 bp, Homo sapiens
gcaccactgccctcc

SEQ ID NO: 496585 - DNA, 15 bp, Homo sapiens
tgcaccactgccctc

SEQ ID NO: 496586 - DNA, 15 bp, Homo sapiens
ttgcaccactgccct

SEQ ID NO: 496587 - DNA, 15 bp, Homo sapiens
attgcaccactgccc

SEQ ID NO: 496588 - DNA, 15 bp, Homo sapiens
gattgcaccactgcc

SEQ ID NO: 496589 - DNA, 15 bp, Homo sapiens
tgattgcaccactgc

SEQ ID NO: 496590 - DNA, 15 bp, Homo sapiens
ggtcaaggctgcagt

SEQ ID NO: 496591 - DNA, 15 bp, Homo sapiens
aggtcaaggctgcag

SEQ ID NO: 496592 - DNA, 15 bp, Homo sapiens
gaggtcaaggctgca

SEQ ID NO: 496593 - DNA, 15 bp, Homo sapiens
ggaggtcaaggctgc

SEQ ID NO: 496594 - DNA, 15 bp, Homo sapiens
ttgagcccaggaggt

SEQ ID NO: 496595 - DNA, 15 bp, Homo sapiens
ctggaggctgaggca

SEQ ID NO: 496596 - DNA, 15 bp, Homo sapiens
tctggaggctgaggc

SEQ ID NO: 496597 - DNA, 15 bp, Homo sapiens
ttctggaggctgagg

SEQ ID NO: 496598 - DNA, 15 bp, Homo sapiens
attctggaggctgag

SEQ ID NO: 496599 - DNA, 15 bp, Homo sapiens
tattctggaggctga

SEQ ID NO: 496600 - DNA, 15 bp, Homo sapiens
ctattctggaggctg

SEQ ID NO: 496601 - DNA, 15 bp, Homo sapiens
gctattctggaggct

SEQ ID NO: 496602 - DNA, 15 bp, Homo sapiens
agctattctggaggc

SEQ ID NO: 496603 - DNA, 15 bp, Homo sapiens
cagctattctggagg

SEQ ID NO: 496604 - DNA, 15 bp, Homo sapiens
ccagctattctggag

SEQ ID NO: 496605 - DNA, 15 bp, Homo sapiens
cccagctattctgga

SEQ ID NO: 496606 - DNA, 15 bp, Homo sapiens
tcccagctattctgg

SEQ ID NO: 496607 - DNA, 15 bp, Homo sapiens
gcacctgtagtccca

SEQ ID NO: 496608 - DNA, 15 bp, Homo sapiens
tgcacctgtagtccc

SEQ ID NO: 496609 - DNA, 15 bp, Homo sapiens
ctgcacctgtagtcc

SEQ ID NO: 496610 - DNA, 15 bp, Homo sapiens
cctgcacctgtagtc

SEQ ID NO: 496611 - DNA, 15 bp, Homo sapiens
gcctgcacctgtagt

SEQ ID NO: 496612 - DNA, 15 bp, Homo sapiens
ggcctgcacctgtag

SEQ ID NO: 496613 - DNA, 15 bp, Homo sapiens
tggcctgcacctgta

SEQ ID NO: 496614 - DNA, 15 bp, Homo sapiens
gtggcctgcacctgt

SEQ ID NO: 496615 - DNA, 15 bp, Homo sapiens
ggtggcctgcacctg

SEQ ID NO: 496616 - DNA, 15 bp, Homo sapiens
tggtggcctgcacct

SEQ ID NO: 496617 - DNA, 15 bp, Homo sapiens
atggtggcctgcacc

SEQ ID NO: 496618 - DNA, 15 bp, Homo sapiens
catggtggcctgcac

SEQ ID NO: 496619 - DNA, 15 bp, Homo sapiens
gcatggtggcctgca

SEQ ID NO: 496620 - DNA, 15 bp, Homo sapiens
ggcatggtggcctgc

SEQ ID NO: 496621 - DNA, 15 bp, Homo sapiens
gggcatggtggcctg

SEQ ID NO: 496622 - DNA, 15 bp, Homo sapiens
tgggcatggtggcct

SEQ ID NO: 496623 - DNA, 15 bp, Homo sapiens
ttgggcatggtggcc

SEQ ID NO: 496624 - DNA, 15 bp, Homo sapiens
gttgggcatggtggc

SEQ ID NO: 496625 - DNA, 15 bp, Homo sapiens
agttgggcatggtgg

SEQ ID NO: 496626 - DNA, 15 bp, Homo sapiens
aagttgggcatggtg

SEQ ID NO: 496627 - DNA, 15 bp, Homo sapiens
aaagttgggcatggt

SEQ ID NO: 496628 - DNA, 15 bp, Homo sapiens
aaaagttgggcatgg

SEQ ID NO: 496629 - DNA, 15 bp, Homo sapiens
aaaaagttgggcatg

SEQ ID NO: 496630 - DNA, 15 bp, Homo sapiens
aaaaaagttgggcat

SEQ ID NO: 496631 - DNA, 15 bp, Homo sapiens
gaaaaaagttgggca

SEQ ID NO: 496632 - DNA, 15 bp, Homo sapiens
agaaaaaagttgggc

SEQ ID NO: 496633 - DNA, 15 bp, Homo sapiens
aagaaaaaagttggg

SEQ ID NO: 496634 - DNA, 15 bp, Homo sapiens
aaagaaaaaagttgg

SEQ ID NO: 496635 - DNA, 15 bp, Homo sapiens
aaaagaaaaaagttg

SEQ ID NO: 496636 - DNA, 15 bp, Homo sapiens
aaaaagaaaaaagtt

SEQ ID NO: 496637 - DNA, 15 bp, Homo sapiens
aaaaaagaaaaaagt

SEQ ID NO: 496638 - DNA, 15 bp, Homo sapiens
caaaaaaaagaaaaa

SEQ ID NO: 496639 - DNA, 15 bp, Homo sapiens
acaaaaaaaagaaaa

SEQ ID NO: 496640 - DNA, 15 bp, Homo sapiens
tacaaaaaaaagaaa

SEQ ID NO: 496641 - DNA, 15 bp, Homo sapiens
ctacaaaaaaaagaa

SEQ ID NO: 496642 - DNA, 15 bp, Homo sapiens
tctacaaaaaaaaga

SEQ ID NO: 496643 - DNA, 15 bp, Homo sapiens
atctacaaaaaaaag

SEQ ID NO: 496644 - DNA, 15 bp, Homo sapiens
tatctacaaaaaaaa

SEQ ID NO: 496645 - DNA, 15 bp, Homo sapiens
gtatctacaaaaaaa

SEQ ID NO: 496646 - DNA, 15 bp, Homo sapiens
cgtatctacaaaaaa

SEQ ID NO: 496647 - DNA, 15 bp, Homo sapiens
ccgtatctacaaaaa

SEQ ID NO: 496648 - DNA, 15 bp, Homo sapiens
cccgtatctacaaaa

SEQ ID NO: 496649 - DNA, 15 bp, Homo sapiens
acccgtatctacaaa

SEQ ID NO: 496650 - DNA, 15 bp, Homo sapiens
aacccgtatctacaa

SEQ ID NO: 496651 - DNA, 15 bp, Homo sapiens
gaacccgtatctaca

SEQ ID NO: 496652 - DNA, 15 bp, Homo sapiens
agaacccgtatctac

SEQ ID NO: 496653 - DNA, 15 bp, Homo sapiens
gagaacccgtatcta

SEQ ID NO: 496654 - DNA, 15 bp, Homo sapiens
tgagaacccgtatct

SEQ ID NO: 496655 - DNA, 15 bp, Homo sapiens
gtgagaacccgtatc

SEQ ID NO: 496656 - DNA, 15 bp, Homo sapiens
agtgagaacccgtat

SEQ ID NO: 496657 - DNA, 15 bp, Homo sapiens
tagtgagaacccgta

SEQ ID NO: 496658 - DNA, 15 bp, Homo sapiens
atagtgagaacccgt

SEQ ID NO: 496659 - DNA, 15 bp, Homo sapiens
catagtgagaacccg

SEQ ID NO: 496660 - DNA, 15 bp, Homo sapiens
gcatagtgagaaccc

SEQ ID NO: 496661 - DNA, 15 bp, Homo sapiens
agcatagtgagaacc

SEQ ID NO: 496662 - DNA, 15 bp, Homo sapiens
cagcatagtgagaac

SEQ ID NO: 496663 - DNA, 15 bp, Homo sapiens
gcagcatagtgagaa

SEQ ID NO: 496664 - DNA, 15 bp, Homo sapiens
ggcagcatagtgaga

SEQ ID NO: 496665 - DNA, 15 bp, Homo sapiens
gggcagcatagtgag

SEQ ID NO: 496666 - DNA, 15 bp, Homo sapiens
tgggcagcatagtga

SEQ ID NO: 496667 - DNA, 15 bp, Homo sapiens
ctgggcagcatagtg

SEQ ID NO: 496668 - DNA, 15 bp, Homo sapiens
cctgggcagcatagt

SEQ ID NO: 496669 - DNA, 15 bp, Homo sapiens
gcctgggcagcatag

SEQ ID NO: 496670 - DNA, 15 bp, Homo sapiens
agcctgggcagcata

SEQ ID NO: 496671 - DNA, 15 bp, Homo sapiens
tagcctgggcagcat

SEQ ID NO: 496672 - DNA, 15 bp, Homo sapiens
ctagcctgggcagca

SEQ ID NO: 496673 - DNA, 15 bp, Homo sapiens
actagcctgggcagc

SEQ ID NO: 496674 - DNA, 15 bp, Homo sapiens
gactagcctgggcag

SEQ ID NO: 496675 - DNA, 15 bp, Homo sapiens
agactagcctgggca

SEQ ID NO: 496676 - DNA, 15 bp, Homo sapiens
aagactagcctgggc

SEQ ID NO: 496677 - DNA, 15 bp, Homo sapiens
caagactagcctggg

SEQ ID NO: 496678 - DNA, 15 bp, Homo sapiens
tcaagactagcctgg

SEQ ID NO: 496679 - DNA, 15 bp, Homo sapiens
ttcaagactagcctg

SEQ ID NO: 496680 - DNA, 15 bp, Homo sapiens
gttcaagactagcct

SEQ ID NO: 496681 - DNA, 15 bp, Homo sapiens
agttcaagactagcc

SEQ ID NO: 496682 - DNA, 15 bp, Homo sapiens
gagttcaagactagc

SEQ ID NO: 496683 - DNA, 15 bp, Homo sapiens
ggagttcaagactag

SEQ ID NO: 496684 - DNA, 15 bp, Homo sapiens
aggagttcaagacta

SEQ ID NO: 496685 - DNA, 15 bp, Homo sapiens
caggagttcaagact

SEQ ID NO: 496686 - DNA, 15 bp, Homo sapiens
tccaggagttcaaga

SEQ ID NO: 496687 - DNA, 15 bp, Homo sapiens
gtccaggagttcaag

SEQ ID NO: 496688 - DNA, 15 bp, Homo sapiens
agtccaggagttcaa

SEQ ID NO: 496689 - DNA, 15 bp, Homo sapiens
gagtccaggagttca

SEQ ID NO: 496690 - DNA, 15 bp, Homo sapiens
tgagtccaggagttc

SEQ ID NO: 496691 - DNA, 15 bp, Homo sapiens
ttgagtccaggagtt

SEQ ID NO: 496692 - DNA, 15 bp, Homo sapiens
cttgagtccaggagt

SEQ ID NO: 496693 - DNA, 15 bp, Homo sapiens
gcttgagtccaggag

SEQ ID NO: 496694 - DNA, 15 bp, Homo sapiens
tgcttgagtccagga

SEQ ID NO: 496695 - DNA, 15 bp, Homo sapiens
ctgcttgagtccagg

SEQ ID NO: 496696 - DNA, 15 bp, Homo sapiens
actgcttgagtccag

SEQ ID NO: 496697 - DNA, 15 bp, Homo sapiens
gactgcttgagtcca

SEQ ID NO: 496698 - DNA, 15 bp, Homo sapiens
ggactgcttgagtcc

SEQ ID NO: 496699 - DNA, 15 bp, Homo sapiens
aggactgcttgagtc

SEQ ID NO: 496700 - DNA, 15 bp, Homo sapiens
gaggactgcttgagt

SEQ ID NO: 496701 - DNA, 15 bp, Homo sapiens
agggaggactgcttg

SEQ ID NO: 496702 - DNA, 15 bp, Homo sapiens
gagggaggactgctt

SEQ ID NO: 496703 - DNA, 15 bp, Homo sapiens
agagggaggactgct

SEQ ID NO: 496704 - DNA, 15 bp, Homo sapiens
aagagggaggactgc

SEQ ID NO: 496705 - DNA, 15 bp, Homo sapiens
gaagagggaggactg

SEQ ID NO: 496706 - DNA, 15 bp, Homo sapiens
agaagagggaggact

SEQ ID NO: 496707 - DNA, 15 bp, Homo sapiens
cagaagagggaggac

SEQ ID NO: 496708 - DNA, 15 bp, Homo sapiens
gcagaagagggagga

SEQ ID NO: 496709 - DNA, 15 bp, Homo sapiens
ggcagaagagggagg

SEQ ID NO: 496710 - DNA, 15 bp, Homo sapiens
aggcagaagagggag

SEQ ID NO: 496711 - DNA, 15 bp, Homo sapiens
gaggcagaagaggga

SEQ ID NO: 496712 - DNA, 15 bp, Homo sapiens
ggaggcagaagaggg

SEQ ID NO: 496713 - DNA, 15 bp, Homo sapiens
gggaggcagaagagg

SEQ ID NO: 496714 - DNA, 15 bp, Homo sapiens
tgggaggcagaagag

SEQ ID NO: 496715 - DNA, 15 bp, Homo sapiens
ttgggaggcagaaga

SEQ ID NO: 496716 - DNA, 15 bp, Homo sapiens
tttgggaggcagaag

SEQ ID NO: 496717 - DNA, 15 bp, Homo sapiens
ttttgggaggcagaa

SEQ ID NO: 496718 - DNA, 15 bp, Homo sapiens
attttgggaggcaga

SEQ ID NO: 496719 - DNA, 15 bp, Homo sapiens
cattttgggaggcag

SEQ ID NO: 496720 - DNA, 15 bp, Homo sapiens
gcattttgggaggca

SEQ ID NO: 496721 - DNA, 15 bp, Homo sapiens
tccagcattttggga

SEQ ID NO: 496722 - DNA, 15 bp, Homo sapiens
ttccagcattttggg

SEQ ID NO: 496723 - DNA, 15 bp, Homo sapiens
attccagcattttgg

SEQ ID NO: 496724 - DNA, 15 bp, Homo sapiens
aattccagcattttg

SEQ ID NO: 496725 - DNA, 15 bp, Homo sapiens
taattccagcatttt

SEQ ID NO: 496726 - DNA, 15 bp, Homo sapiens
gtaattccagcattt

SEQ ID NO: 496727 - DNA, 15 bp, Homo sapiens
tgtaattccagcatt

SEQ ID NO: 496728 - DNA, 15 bp, Homo sapiens
ctgtaattccagcat

SEQ ID NO: 496729 - DNA, 15 bp, Homo sapiens
tcacctgtaattcca

SEQ ID NO: 496730 - DNA, 15 bp, Homo sapiens
ctcacctgtaattcc

SEQ ID NO: 496731 - DNA, 15 bp, Homo sapiens
tctcacctgtaattc

SEQ ID NO: 496732 - DNA, 15 bp, Homo sapiens
ctctcacctgtaatt

SEQ ID NO: 496733 - DNA, 15 bp, Homo sapiens
gctctcacctgtaat

SEQ ID NO: 496734 - DNA, 15 bp, Homo sapiens
ggctctcacctgtaa

SEQ ID NO: 496735 - DNA, 15 bp, Homo sapiens
tggctctcacctgta

SEQ ID NO: 496736 - DNA, 15 bp, Homo sapiens
gtggctctcacctgt

SEQ ID NO: 496737 - DNA, 15 bp, Homo sapiens
ggtggctctcacctg

SEQ ID NO: 496738 - DNA, 15 bp, Homo sapiens
tggtggctctcacct

SEQ ID NO: 496739 - DNA, 15 bp, Homo sapiens
gtggtggctctcacc

SEQ ID NO: 496740 - DNA, 15 bp, Homo sapiens
tgtggtggctctcac

SEQ ID NO: 496741 - DNA, 15 bp, Homo sapiens
gtgtggtggctctca

SEQ ID NO: 496742 - DNA, 15 bp, Homo sapiens
ggtgtggtggctctc

SEQ ID NO: 496743 - DNA, 15 bp, Homo sapiens
aggtgtggtggctct

SEQ ID NO: 496744 - DNA, 15 bp, Homo sapiens
accaggtgtggtggc

SEQ ID NO: 496745 - DNA, 15 bp, Homo sapiens
gaccaggtgtggtgg

SEQ ID NO: 496746 - DNA, 15 bp, Homo sapiens
ggaccaggtgtggtg

SEQ ID NO: 496747 - DNA, 15 bp, Homo sapiens
gggaccaggtgtggt

SEQ ID NO: 496748 - DNA, 15 bp, Homo sapiens
tgggaccaggtgtgg

SEQ ID NO: 496749 - DNA, 15 bp, Homo sapiens
ttgggaccaggtgtg

SEQ ID NO: 496750 - DNA, 15 bp, Homo sapiens
gttgggaccaggtgt

SEQ ID NO: 496751 - DNA, 15 bp, Homo sapiens
ggttgggaccaggtg

SEQ ID NO: 496752 - DNA, 15 bp, Homo sapiens
gggttgggaccaggt

SEQ ID NO: 496753 - DNA, 15 bp, Homo sapiens
tgggttgggaccagg

SEQ ID NO: 496754 - DNA, 15 bp, Homo sapiens
gtgggttgggaccag

SEQ ID NO: 496755 - DNA, 15 bp, Homo sapiens
agtgggttgggacca

SEQ ID NO: 496756 - DNA, 15 bp, Homo sapiens
aagtgggttgggacc

SEQ ID NO: 496757 - DNA, 15 bp, Homo sapiens
aaagtgggttgggac

SEQ ID NO: 496758 - DNA, 15 bp, Homo sapiens
gaaagtgggttggga

SEQ ID NO: 496759 - DNA, 15 bp, Homo sapiens
ggaaagtgggttggg

SEQ ID NO: 496760 - DNA, 15 bp, Homo sapiens
aggaaagtgggttgg

SEQ ID NO: 496761 - DNA, 15 bp, Homo sapiens
gaggaaagtgggttg

SEQ ID NO: 496762 - DNA, 15 bp, Homo sapiens
tgaggaaagtgggtt

SEQ ID NO: 496763 - DNA, 15 bp, Homo sapiens
gtgaggaaagtgggt

SEQ ID NO: 496764 - DNA, 15 bp, Homo sapiens
ggtgaggaaagtggg

SEQ ID NO: 496765 - DNA, 15 bp, Homo sapiens
gggtgaggaaagtgg

SEQ ID NO: 496766 - DNA, 15 bp, Homo sapiens
tgggtgaggaaagtg

SEQ ID NO: 496767 - DNA, 15 bp, Homo sapiens
gtgggtgaggaaagt

SEQ ID NO: 496768 - DNA, 15 bp, Homo sapiens
tgtgggtgaggaaag

SEQ ID NO: 496769 - DNA, 15 bp, Homo sapiens
ctgtgggtgaggaaa

SEQ ID NO: 496770 - DNA, 15 bp, Homo sapiens
actgtgggtgaggaa

SEQ ID NO: 496771 - DNA, 15 bp, Homo sapiens
aactgtgggtgagga

SEQ ID NO: 496772 - DNA, 15 bp, Homo sapiens
gaactgtgggtgagg

SEQ ID NO: 496773 - DNA, 15 bp, Homo sapiens
ggaactgtgggtgag

SEQ ID NO: 496774 - DNA, 15 bp, Homo sapiens
tggaactgtgggtga

SEQ ID NO: 496775 - DNA, 15 bp, Homo sapiens
ttggaactgtgggtg

SEQ ID NO: 496776 - DNA, 15 bp, Homo sapiens
tttggaactgtgggt

SEQ ID NO: 496777 - DNA, 15 bp, Homo sapiens
gtttggaactgtggg

SEQ ID NO: 496778 - DNA, 15 bp, Homo sapiens
tgtttggaactgtgg

SEQ ID NO: 496779 - DNA, 15 bp, Homo sapiens
gtgtttggaactgtg

SEQ ID NO: 496780 - DNA, 15 bp, Homo sapiens
tgtgtttggaactgt

SEQ ID NO: 496781 - DNA, 15 bp, Homo sapiens
ttgtgtttggaactg

SEQ ID NO: 496782 - DNA, 15 bp, Homo sapiens
cttgtgtttggaact

SEQ ID NO: 496783 - DNA, 15 bp, Homo sapiens
gcttgtgtttggaac

SEQ ID NO: 496784 - DNA, 15 bp, Homo sapiens
ggcttgtgtttggaa

SEQ ID NO: 496785 - DNA, 15 bp, Homo sapiens
gggcttgtgtttgga

SEQ ID NO: 496786 - DNA, 15 bp, Homo sapiens
ggggcttgtgtttgg

SEQ ID NO: 496787 - DNA, 15 bp, Homo sapiens
aggggcttgtgtttg

SEQ ID NO: 496788 - DNA, 15 bp, Homo sapiens
gaggggcttgtgttt

SEQ ID NO: 496789 - DNA, 15 bp, Homo sapiens
ggaggggcttgtgtt

SEQ ID NO: 496790 - DNA, 15 bp, Homo sapiens
gggaggggcttgtgt

SEQ ID NO: 496791 - DNA, 15 bp, Homo sapiens
tgggaggggcttgtg

SEQ ID NO: 496792 - DNA, 15 bp, Homo sapiens
ctgggaggggcttgt

SEQ ID NO: 496793 - DNA, 15 bp, Homo sapiens
gctgggaggggcttg

SEQ ID NO: 496794 - DNA, 15 bp, Homo sapiens
tgctgggaggggctt

SEQ ID NO: 496795 - DNA, 15 bp, Homo sapiens
ttgctgggaggggct

SEQ ID NO: 496796 - DNA, 15 bp, Homo sapiens
tttgctgggaggggc

SEQ ID NO: 496797 - DNA, 15 bp, Homo sapiens
ttttgctgggagggg

SEQ ID NO: 496798 - DNA, 15 bp, Homo sapiens
attttgctgggaggg

SEQ ID NO: 496799 - DNA, 15 bp, Homo sapiens
cattttgctgggagg

SEQ ID NO: 496800 - DNA, 15 bp, Homo sapiens
acattttgctgggag

SEQ ID NO: 496801 - DNA, 15 bp, Homo sapiens
tacattttgctggga

SEQ ID NO: 496802 - DNA, 15 bp, Homo sapiens
ctacattttgctggg

SEQ ID NO: 496803 - DNA, 15 bp, Homo sapiens
cctacattttgctgg

SEQ ID NO: 496804 - DNA, 15 bp, Homo sapiens
gcctacattttgctg

SEQ ID NO: 496805 - DNA, 15 bp, Homo sapiens
tgcctacattttgct

SEQ ID NO: 496806 - DNA, 15 bp, Homo sapiens
gtgcctacattttgc

SEQ ID NO: 496807 - DNA, 15 bp, Homo sapiens
tgtgcctacattttg

SEQ ID NO: 496808 - DNA, 15 bp, Homo sapiens
ttgtgcctacatttt

SEQ ID NO: 496809 - DNA, 15 bp, Homo sapiens
cttgtgcctacattt

SEQ ID NO: 496810 - DNA, 15 bp, Homo sapiens
gcttgtgcctacatt

SEQ ID NO: 496811 - DNA, 15 bp, Homo sapiens
tgcttgtgcctacat

SEQ ID NO: 496812 - DNA, 15 bp, Homo sapiens
ttgcttgtgcctaca

SEQ ID NO: 496813 - DNA, 15 bp, Homo sapiens
tttgcttgtgcctac

SEQ ID NO: 496814 - DNA, 15 bp, Homo sapiens
gtttgcttgtgccta

SEQ ID NO: 496815 - DNA, 15 bp, Homo sapiens
tgtttgcttgtgcct

SEQ ID NO: 496816 - DNA, 15 bp, Homo sapiens
ttgtttgcttgtgcc

SEQ ID NO: 496817 - DNA, 15 bp, Homo sapiens
tttgtttgcttgtgc

SEQ ID NO: 496818 - DNA, 15 bp, Homo sapiens
gtttgtttgcttgtg

SEQ ID NO: 496819 - DNA, 15 bp, Homo sapiens
tgtttgtttgcttgt

SEQ ID NO: 496820 - DNA, 15 bp, Homo sapiens
ttgtttgtttgcttg

SEQ ID NO: 496821 - DNA, 15 bp, Homo sapiens
tttgtttgtttgctt

SEQ ID NO: 496822 - DNA, 15 bp, Homo sapiens
ttttgtttgtttgct

SEQ ID NO: 496823 - DNA, 15 bp, Homo sapiens
tttttgtttgtttgc

SEQ ID NO: 496824 - DNA, 15 bp, Homo sapiens
agtttttgtttgttt

SEQ ID NO: 496825 - DNA, 15 bp, Homo sapiens
tagtttttgtttgtt

SEQ ID NO: 496826 - DNA, 15 bp, Homo sapiens
gtagtttttgtttgt

SEQ ID NO: 496827 - DNA, 15 bp, Homo sapiens
tgtagtttttgtttg

SEQ ID NO: 496828 - DNA, 15 bp, Homo sapiens
ttgtagtttttgttt

SEQ ID NO: 496829 - DNA, 15 bp, Homo sapiens
gttgtagtttttgtt

SEQ ID NO: 496830 - DNA, 15 bp, Homo sapiens
ggttgtagtttttgt

SEQ ID NO: 496831 - DNA, 15 bp, Homo sapiens
cggttgtagtttttg

SEQ ID NO: 496832 - DNA, 15 bp, Homo sapiens
tcggttgtagttttt

SEQ ID NO: 496833 - DNA, 15 bp, Homo sapiens
gtcggttgtagtttt

SEQ ID NO: 496834 - DNA, 15 bp, Homo sapiens
agtcggttgtagttt

SEQ ID NO: 496835 - DNA, 15 bp, Homo sapiens
aagtcggttgtagtt

SEQ ID NO: 496836 - DNA, 15 bp, Homo sapiens
gaagtcggttgtagt

SEQ ID NO: 496837 - DNA, 15 bp, Homo sapiens
agaagtcggttgtag

SEQ ID NO: 496838 - DNA, 15 bp, Homo sapiens
aagaagtcggttgta

SEQ ID NO: 496839 - DNA, 15 bp, Homo sapiens
gaagaagtcggttgt

SEQ ID NO: 496840 - DNA, 15 bp, Homo sapiens
agaagaagtcggttg

SEQ ID NO: 496841 - DNA, 15 bp, Homo sapiens
aagaagaagtcggtt

SEQ ID NO: 496842 - DNA, 15 bp, Homo sapiens
taagaagaagtcggt

SEQ ID NO: 496843 - DNA, 15 bp, Homo sapiens
ctaagaagaagtcgg

SEQ ID NO: 496844 - DNA, 15 bp, Homo sapiens
gctaagaagaagtcg

SEQ ID NO: 496845 - DNA, 15 bp, Homo sapiens
ggctaagaagaagtc

SEQ ID NO: 496846 - DNA, 15 bp, Homo sapiens
gggctaagaagaagt

SEQ ID NO: 496847 - DNA, 15 bp, Homo sapiens
tgggctaagaagaag

SEQ ID NO: 496848 - DNA, 15 bp, Homo sapiens
atgggctaagaagaa

SEQ ID NO: 496849 - DNA, 15 bp, Homo sapiens
aatgggctaagaaga

SEQ ID NO: 496850 - DNA, 15 bp, Homo sapiens
caatgggctaagaag

SEQ ID NO: 496851 - DNA, 15 bp, Homo sapiens
gcaatgggctaagaa

SEQ ID NO: 496852 - DNA, 15 bp, Homo sapiens
ggcaatgggctaaga

SEQ ID NO: 496853 - DNA, 15 bp, Homo sapiens
aggcaatgggctaag

SEQ ID NO: 496854 - DNA, 15 bp, Homo sapiens
taggcaatgggctaa

SEQ ID NO: 496855 - DNA, 15 bp, Homo sapiens
ttaggcaatgggcta

SEQ ID NO: 496856 - DNA, 15 bp, Homo sapiens
tttaggcaatgggct

SEQ ID NO: 496857 - DNA, 15 bp, Homo sapiens
atttaggcaatgggc

SEQ ID NO: 496858 - DNA, 15 bp, Homo sapiens
aatttaggcaatggg

SEQ ID NO: 496859 - DNA, 15 bp, Homo sapiens
caatttaggcaatgg

SEQ ID NO: 496860 - DNA, 15 bp, Homo sapiens
acaatttaggcaatg

SEQ ID NO: 496861 - DNA, 15 bp, Homo sapiens
gacaatttaggcaat

SEQ ID NO: 496862 - DNA, 15 bp, Homo sapiens
agacaatttaggcaa

SEQ ID NO: 496863 - DNA, 15 bp, Homo sapiens
cagacaatttaggca

SEQ ID NO: 496864 - DNA, 15 bp, Homo sapiens
ccagacaatttaggc

SEQ ID NO: 496865 - DNA, 15 bp, Homo sapiens
cccagacaatttagg

SEQ ID NO: 496866 - DNA, 15 bp, Homo sapiens
acccagacaatttag

SEQ ID NO: 496867 - DNA, 15 bp, Homo sapiens
aacccagacaattta

SEQ ID NO: 496868 - DNA, 15 bp, Homo sapiens
taacccagacaattt

SEQ ID NO: 496869 - DNA, 15 bp, Homo sapiens
ctaacccagacaatt

SEQ ID NO: 496870 - DNA, 15 bp, Homo sapiens
actaacccagacaat

SEQ ID NO: 496871 - DNA, 15 bp, Homo sapiens
gactaacccagacaa

SEQ ID NO: 496872 - DNA, 15 bp, Homo sapiens
ggactaacccagaca

SEQ ID NO: 496873 - DNA, 15 bp, Homo sapiens
gggactaacccagac

SEQ ID NO: 496874 - DNA, 15 bp, Homo sapiens
tgggactaacccaga

SEQ ID NO: 496875 - DNA, 15 bp, Homo sapiens
ctgggactaacccag

SEQ ID NO: 496876 - DNA, 15 bp, Homo sapiens
tctgggactaaccca

SEQ ID NO: 496877 - DNA, 15 bp, Homo sapiens
atctgggactaaccc

SEQ ID NO: 496878 - DNA, 15 bp, Homo sapiens
aatctgggactaacc

SEQ ID NO: 496879 - DNA, 15 bp, Homo sapiens
taatctgggactaac

SEQ ID NO: 496880 - DNA, 15 bp, Homo sapiens
ataatctgggactaa

SEQ ID NO: 496881 - DNA, 15 bp, Homo sapiens
tataatctgggacta

SEQ ID NO: 496882 - DNA, 15 bp, Homo sapiens
ttataatctgggact

SEQ ID NO: 496883 - DNA, 15 bp, Homo sapiens
gttataatctgggac

SEQ ID NO: 496884 - DNA, 15 bp, Homo sapiens
ggttataatctggga

SEQ ID NO: 496885 - DNA, 15 bp, Homo sapiens
aggttataatctggg

SEQ ID NO: 496886 - DNA, 15 bp, Homo sapiens
taggttataatctgg

SEQ ID NO: 496887 - DNA, 15 bp, Homo sapiens
ataggttataatctg

SEQ ID NO: 496888 - DNA, 15 bp, Homo sapiens
gataggttataatct

SEQ ID NO: 496889 - DNA, 15 bp, Homo sapiens
tgataggttataatc

SEQ ID NO: 496890 - DNA, 15 bp, Homo sapiens
ttgataggttataat

SEQ ID NO: 496891 - DNA, 15 bp, Homo sapiens
tttgataggttataa

SEQ ID NO: 496892 - DNA, 15 bp, Homo sapiens
gtttgataggttata

SEQ ID NO: 496893 - DNA, 15 bp, Homo sapiens
tgtttgataggttat

SEQ ID NO: 496894 - DNA, 15 bp, Homo sapiens
ctgtttgataggtta

SEQ ID NO: 496895 - DNA, 15 bp, Homo sapiens
cctgtttgataggtt

SEQ ID NO: 496896 - DNA, 15 bp, Homo sapiens
ccctgtttgataggt

SEQ ID NO: 496897 - DNA, 15 bp, Homo sapiens
tccctgtttgatagg

SEQ ID NO: 496898 - DNA, 15 bp, Homo sapiens
gtccctgtttgatag

SEQ ID NO: 496899 - DNA, 15 bp, Homo sapiens
ggtccctgtttgata

SEQ ID NO: 496900 - DNA, 15 bp, Homo sapiens
gggtccctgtttgat

SEQ ID NO: 496901 - DNA, 15 bp, Homo sapiens
tgggtccctgtttga

SEQ ID NO: 496902 - DNA, 15 bp, Homo sapiens
gtgggtccctgtttg

SEQ ID NO: 496903 - DNA, 15 bp, Homo sapiens
tgtgggtccctgttt

SEQ ID NO: 496904 - DNA, 15 bp, Homo sapiens
ctgtgggtccctgtt

SEQ ID NO: 496905 - DNA, 15 bp, Homo sapiens
tctgtgggtccctgt

SEQ ID NO: 496906 - DNA, 15 bp, Homo sapiens
ctctgtgggtccctg

SEQ ID NO: 496907 - DNA, 15 bp, Homo sapiens
actctgtgggtccct

SEQ ID NO: 496908 - DNA, 15 bp, Homo sapiens
gactctgtgggtccc

SEQ ID NO: 496909 - DNA, 15 bp, Homo sapiens
tgactctgtgggtcc

SEQ ID NO: 496910 - DNA, 15 bp, Homo sapiens
ttgactctgtgggtc

SEQ ID NO: 496911 - DNA, 15 bp, Homo sapiens
tttgactctgtgggt

SEQ ID NO: 496912 - DNA, 15 bp, Homo sapiens
ctttgactctgtggg

SEQ ID NO: 496913 - DNA, 15 bp, Homo sapiens
gctttgactctgtgg

SEQ ID NO: 496914 - DNA, 15 bp, Homo sapiens
tgctttgactctgtg

SEQ ID NO: 496915 - DNA, 15 bp, Homo sapiens
ctgctttgactctgt

SEQ ID NO: 496916 - DNA, 15 bp, Homo sapiens
cctgctttgactctg

SEQ ID NO: 496917 - DNA, 15 bp, Homo sapiens
gcctgctttgactct

SEQ ID NO: 496918 - DNA, 15 bp, Homo sapiens
agcctgctttgactc

SEQ ID NO: 496919 - DNA, 15 bp, Homo sapiens
cagcctgctttgact

SEQ ID NO: 496920 - DNA, 15 bp, Homo sapiens
acagcctgctttgac

SEQ ID NO: 496921 - DNA, 15 bp, Homo sapiens
gacagcctgctttga

SEQ ID NO: 496922 - DNA, 15 bp, Homo sapiens
ggacagcctgctttg

SEQ ID NO: 496923 - DNA, 15 bp, Homo sapiens
cggacagcctgcttt

SEQ ID NO: 496924 - DNA, 15 bp, Homo sapiens
tcggacagcctgctt

SEQ ID NO: 496925 - DNA, 15 bp, Homo sapiens
atcggacagcctgct

SEQ ID NO: 496926 - DNA, 15 bp, Homo sapiens
catcggacagcctgc

SEQ ID NO: 496927 - DNA, 15 bp, Homo sapiens
ccatcggacagcctg

SEQ ID NO: 496928 - DNA, 15 bp, Homo sapiens
gccatcggacagcct

SEQ ID NO: 496929 - DNA, 15 bp, Homo sapiens
tgccatcggacagcc

SEQ ID NO: 496930 - DNA, 15 bp, Homo sapiens
atgccatcggacagc

SEQ ID NO: 496931 - DNA, 15 bp, Homo sapiens
aatgccatcggacag

SEQ ID NO: 496932 - DNA, 15 bp, Homo sapiens
caatgccatcggaca

SEQ ID NO: 496933 - DNA, 15 bp, Homo sapiens
gcaatgccatcggac

SEQ ID NO: 496934 - DNA, 15 bp, Homo sapiens
agcaatgccatcgga

SEQ ID NO: 496935 - DNA, 15 bp, Homo sapiens
cagcaatgccatcgg

SEQ ID NO: 496936 - DNA, 15 bp, Homo sapiens
gcagcaatgccatcg

SEQ ID NO: 496937 - DNA, 15 bp, Homo sapiens
ggcagcaatgccatc

SEQ ID NO: 496938 - DNA, 15 bp, Homo sapiens
tggcagcaatgccat

SEQ ID NO: 496939 - DNA, 15 bp, Homo sapiens
ctggcagcaatgcca

SEQ ID NO: 496940 - DNA, 15 bp, Homo sapiens
cctggcagcaatgcc

SEQ ID NO: 496941 - DNA, 15 bp, Homo sapiens
tcctggcagcaatgc

SEQ ID NO: 496942 - DNA, 15 bp, Homo sapiens
ctcctggcagcaatg

SEQ ID NO: 496943 - DNA, 15 bp, Homo sapiens
actcctggcagcaat

SEQ ID NO: 496944 - DNA, 15 bp, Homo sapiens
gactcctggcagcaa

SEQ ID NO: 496945 - DNA, 15 bp, Homo sapiens
ggactcctggcagca

SEQ ID NO: 496946 - DNA, 15 bp, Homo sapiens
aggactcctggcagc

SEQ ID NO: 496947 - DNA, 15 bp, Homo sapiens
caggactcctggcag

SEQ ID NO: 496948 - DNA, 15 bp, Homo sapiens
tcaggactcctggca

SEQ ID NO: 496949 - DNA, 15 bp, Homo sapiens
ctcaggactcctggc

SEQ ID NO: 496950 - DNA, 15 bp, Homo sapiens
cctcaggactcctgg

SEQ ID NO: 496951 - DNA, 15 bp, Homo sapiens
gcctcaggactcctg

SEQ ID NO: 496952 - DNA, 15 bp, Homo sapiens
tgcctcaggactcct

SEQ ID NO: 496953 - DNA, 15 bp, Homo sapiens
ctgcctcaggactcc

SEQ ID NO: 496954 - DNA, 15 bp, Homo sapiens
cctgcctcaggactc

SEQ ID NO: 496955 - DNA, 15 bp, Homo sapiens
gcctgcctcaggact

SEQ ID NO: 496956 - DNA, 15 bp, Homo sapiens
ggcctgcctcaggac

SEQ ID NO: 496957 - DNA, 15 bp, Homo sapiens
gggcctgcctcagga

SEQ ID NO: 496958 - DNA, 15 bp, Homo sapiens
ggggcctgcctcagg

SEQ ID NO: 496959 - DNA, 15 bp, Homo sapiens
aggggcctgcctcag

SEQ ID NO: 496960 - DNA, 15 bp, Homo sapiens
gaggggcctgcctca

SEQ ID NO: 496961 - DNA, 15 bp, Homo sapiens
ggaggggcctgcctc

SEQ ID NO: 496962 - DNA, 15 bp, Homo sapiens
tggaggggcctgcct

SEQ ID NO: 496963 - DNA, 15 bp, Homo sapiens
gtggaggggcctgcc

SEQ ID NO: 496964 - DNA, 15 bp, Homo sapiens
ggtggaggggcctgc

SEQ ID NO: 496965 - DNA, 15 bp, Homo sapiens
aggtggaggggcctg

SEQ ID NO: 496966 - DNA, 15 bp, Homo sapiens
gaggtggaggggcct

SEQ ID NO: 496967 - DNA, 15 bp, Homo sapiens
agaggtggaggggcc

SEQ ID NO: 496968 - DNA, 15 bp, Homo sapiens
aagaggtggaggggc

SEQ ID NO: 496969 - DNA, 15 bp, Homo sapiens
caagaggtggagggg

SEQ ID NO: 496970 - DNA, 15 bp, Homo sapiens
ccaagaggtggaggg

SEQ ID NO: 496971 - DNA, 15 bp, Homo sapiens
cccaagaggtggagg

SEQ ID NO: 496972 - DNA, 15 bp, Homo sapiens
acccaagaggtggag

SEQ ID NO: 496973 - DNA, 15 bp, Homo sapiens
cacccaagaggtgga

SEQ ID NO: 496974 - DNA, 15 bp, Homo sapiens
tcacccaagaggtgg

SEQ ID NO: 496975 - DNA, 15 bp, Homo sapiens
gtcacccaagaggtg

SEQ ID NO: 496976 - DNA, 15 bp, Homo sapiens
ggtcacccaagaggt

SEQ ID NO: 496977 - DNA, 15 bp, Homo sapiens
aggtcacccaagagg

SEQ ID NO: 496978 - DNA, 15 bp, Homo sapiens
caggtcacccaagag

SEQ ID NO: 496979 - DNA, 15 bp, Homo sapiens
ccaggtcacccaaga

SEQ ID NO: 496980 - DNA, 15 bp, Homo sapiens
tccaggtcacccaag

SEQ ID NO: 496981 - DNA, 15 bp, Homo sapiens
ctccaggtcacccaa

SEQ ID NO: 496982 - DNA, 15 bp, Homo sapiens
gctccaggtcaccca

SEQ ID NO: 496983 - DNA, 15 bp, Homo sapiens
tgctccaggtcaccc

SEQ ID NO: 496984 - DNA, 15 bp, Homo sapiens
ctgctccaggtcacc

SEQ ID NO: 496985 - DNA, 15 bp, Homo sapiens
actgctccaggtcac

SEQ ID NO: 496986 - DNA, 15 bp, Homo sapiens
cactgctccaggtca

SEQ ID NO: 496987 - DNA, 15 bp, Homo sapiens
ccactgctccaggtc

SEQ ID NO: 496988 - DNA, 15 bp, Homo sapiens
cccactgctccaggt

SEQ ID NO: 496989 - DNA, 15 bp, Homo sapiens
ccccactgctccagg

SEQ ID NO: 496990 - DNA, 15 bp, Homo sapiens
cccccactgctccag

SEQ ID NO: 496991 - DNA, 15 bp, Homo sapiens
gcccccactgctcca

SEQ ID NO: 496992 - DNA, 15 bp, Homo sapiens
tgcccccactgctcc

SEQ ID NO: 496993 - DNA, 15 bp, Homo sapiens
ctgcccccactgctc

SEQ ID NO: 496994 - DNA, 15 bp, Homo sapiens
cctgcccccactgct

SEQ ID NO: 496995 - DNA, 15 bp, Homo sapiens
tcctgcccccactgc

SEQ ID NO: 496996 - DNA, 15 bp, Homo sapiens
ctcctgcccccactg

SEQ ID NO: 496997 - DNA, 15 bp, Homo sapiens
cctcctgcccccact

SEQ ID NO: 496998 - DNA, 15 bp, Homo sapiens
ccctcctgcccccac

SEQ ID NO: 496999 - DNA, 15 bp, Homo sapiens
gccctcctgccccca

SEQ ID NO: 497000 - DNA, 15 bp, Homo sapiens
agccctcctgccccc

SEQ ID NO: 497001 - DNA, 15 bp, Homo sapiens
cagccctcctgcccc

SEQ ID NO: 497002 - DNA, 15 bp, Homo sapiens
ccagccctcctgccc

SEQ ID NO: 497003 - DNA, 15 bp, Homo sapiens
cccagccctcctgcc

SEQ ID NO: 497004 - DNA, 15 bp, Homo sapiens
ccccagccctcctgc

SEQ ID NO: 497005 - DNA, 15 bp, Homo sapiens
cccccagccctcctg

SEQ ID NO: 497006 - DNA, 15 bp, Homo sapiens
acccccagccctcct

SEQ ID NO: 497007 - DNA, 15 bp, Homo sapiens
gacccccagccctcc

SEQ ID NO: 497008 - DNA, 15 bp, Homo sapiens
agacccccagccctc

SEQ ID NO: 497009 - DNA, 15 bp, Homo sapiens
gagacccccagccct

SEQ ID NO: 497010 - DNA, 15 bp, Homo sapiens
tgagacccccagccc

SEQ ID NO: 497011 - DNA, 15 bp, Homo sapiens
gtgagacccccagcc

SEQ ID NO: 497012 - DNA, 15 bp, Homo sapiens
ggtgagacccccagc

SEQ ID NO: 497013 - DNA, 15 bp, Homo sapiens
aggtgagacccccag

SEQ ID NO: 497014 - DNA, 15 bp, Homo sapiens
aaggtgagaccccca

SEQ ID NO: 497015 - DNA, 15 bp, Homo sapiens
gaaggtgagaccccc

SEQ ID NO: 497016 - DNA, 15 bp, Homo sapiens
tgaaggtgagacccc

SEQ ID NO: 497017 - DNA, 15 bp, Homo sapiens
gtgaaggtgagaccc

SEQ ID NO: 497018 - DNA, 15 bp, Homo sapiens
ggtgaaggtgagacc

SEQ ID NO: 497019 - DNA, 15 bp, Homo sapiens
aggtgaaggtgagac

SEQ ID NO: 497020 - DNA, 15 bp, Homo sapiens
caggtgaaggtgaga

SEQ ID NO: 497021 - DNA, 15 bp, Homo sapiens
ccaggtgaaggtgag

SEQ ID NO: 497022 - DNA, 15 bp, Homo sapiens
tccaggtgaaggtga

SEQ ID NO: 497023 - DNA, 15 bp, Homo sapiens
ttccaggtgaaggtg

SEQ ID NO: 497024 - DNA, 15 bp, Homo sapiens
gttccaggtgaaggt

SEQ ID NO: 497025 - DNA, 15 bp, Homo sapiens
tgttccaggtgaagg

SEQ ID NO: 497026 - DNA, 15 bp, Homo sapiens
gtgttccaggtgaag

SEQ ID NO: 497027 - DNA, 15 bp, Homo sapiens
tgtgttccaggtgaa

SEQ ID NO: 497028 - DNA, 15 bp, Homo sapiens
ttgtgttccaggtga

SEQ ID NO: 497029 - DNA, 15 bp, Homo sapiens
cttgtgttccaggtg

SEQ ID NO: 497030 - DNA, 15 bp, Homo sapiens
gcttgtgttccaggt

SEQ ID NO: 497031 - DNA, 15 bp, Homo sapiens
agcttgtgttccagg

SEQ ID NO: 497032 - DNA, 15 bp, Homo sapiens
gagcttgtgttccag

SEQ ID NO: 497033 - DNA, 15 bp, Homo sapiens
tgagcttgtgttcca

SEQ ID NO: 497034 - DNA, 15 bp, Homo sapiens
atgagcttgtgttcc

SEQ ID NO: 497035 - DNA, 15 bp, Homo sapiens
aatgagcttgtgttc

SEQ ID NO: 497036 - DNA, 15 bp, Homo sapiens
caatgagcttgtgtt

SEQ ID NO: 497037 - DNA, 15 bp, Homo sapiens
gcaatgagcttgtgt

SEQ ID NO: 497038 - DNA, 15 bp, Homo sapiens
agcaatgagcttgtg

SEQ ID NO: 497039 - DNA, 15 bp, Homo sapiens
cagcaatgagcttgt

SEQ ID NO: 497040 - DNA, 15 bp, Homo sapiens
gcagcaatgagcttg

SEQ ID NO: 497041 - DNA, 15 bp, Homo sapiens
ggcagcaatgagctt

SEQ ID NO: 497042 - DNA, 15 bp, Homo sapiens
tggcagcaatgagct

SEQ ID NO: 497043 - DNA, 15 bp, Homo sapiens
ttggcagcaatgagc

SEQ ID NO: 497044 - DNA, 15 bp, Homo sapiens
gttggcagcaatgag

SEQ ID NO: 497045 - DNA, 15 bp, Homo sapiens
tgttggcagcaatga

SEQ ID NO: 497046 - DNA, 15 bp, Homo sapiens
gtgttggcagcaatg

SEQ ID NO: 497047 - DNA, 15 bp, Homo sapiens
agtgttggcagcaat

SEQ ID NO: 497048 - DNA, 15 bp, Homo sapiens
cagtgttggcagcaa

SEQ ID NO: 497049 - DNA, 15 bp, Homo sapiens
tcagtgttggcagca

SEQ ID NO: 497050 - DNA, 15 bp, Homo sapiens
ttcagtgttggcagc

SEQ ID NO: 497051 - DNA, 15 bp, Homo sapiens
gttcagtgttggcag

SEQ ID NO: 497052 - DNA, 15 bp, Homo sapiens
agttcagtgttggca

SEQ ID NO: 497053 - DNA, 15 bp, Homo sapiens
cagttcagtgttggc

SEQ ID NO: 497054 - DNA, 15 bp, Homo sapiens
tcagttcagtgttgg

SEQ ID NO: 497055 - DNA, 15 bp, Homo sapiens
ctcagttcagtgttg

SEQ ID NO: 497056 - DNA, 15 bp, Homo sapiens
tctcagttcagtgtt

SEQ ID NO: 497057 - DNA, 15 bp, Homo sapiens
gtctcagttcagtgt

SEQ ID NO: 497058 - DNA, 15 bp, Homo sapiens
agtctcagttcagtg

SEQ ID NO: 497059 - DNA, 15 bp, Homo sapiens
gagtctcagttcagt

SEQ ID NO: 497060 - DNA, 15 bp, Homo sapiens
tgagtctcagttcag

SEQ ID NO: 497061 - DNA, 15 bp, Homo sapiens
ttgagtctcagttca

SEQ ID NO: 497062 - DNA, 15 bp, Homo sapiens
tttgagtctcagttc

SEQ ID NO: 497063 - DNA, 15 bp, Homo sapiens
gtttgagtctcagtt

SEQ ID NO: 497064 - DNA, 15 bp, Homo sapiens
tgtttgagtctcagt

SEQ ID NO: 497065 - DNA, 15 bp, Homo sapiens
ctgtttgagtctcag

SEQ ID NO: 497066 - DNA, 15 bp, Homo sapiens
cctgtttgagtctca

SEQ ID NO: 497067 - DNA, 15 bp, Homo sapiens
tcctgtttgagtctc

SEQ ID NO: 497068 - DNA, 15 bp, Homo sapiens
gtcctgtttgagtct

SEQ ID NO: 497069 - DNA, 15 bp, Homo sapiens
agtcctgtttgagtc

SEQ ID NO: 497070 - DNA, 15 bp, Homo sapiens
cagtcctgtttgagt

SEQ ID NO: 497071 - DNA, 15 bp, Homo sapiens
acagtcctgtttgag

SEQ ID NO: 497072 - DNA, 15 bp, Homo sapiens
cacagtcctgtttga

SEQ ID NO: 497073 - DNA, 15 bp, Homo sapiens
tcacagtcctgtttg

SEQ ID NO: 497074 - DNA, 15 bp, Homo sapiens
ttcacagtcctgttt

SEQ ID NO: 497075 - DNA, 15 bp, Homo sapiens
gttcacagtcctgtt

SEQ ID NO: 497076 - DNA, 15 bp, Homo sapiens
agttcacagtcctgt

SEQ ID NO: 497077 - DNA, 15 bp, Homo sapiens
aagttcacagtcctg

SEQ ID NO: 497078 - DNA, 15 bp, Homo sapiens
gaagttcacagtcct

SEQ ID NO: 497079 - DNA, 15 bp, Homo sapiens
agaagttcacagtcc

SEQ ID NO: 497080 - DNA, 15 bp, Homo sapiens
gagaagttcacagtc

SEQ ID NO: 497081 - DNA, 15 bp, Homo sapiens
ggagaagttcacagt

SEQ ID NO: 497082 - DNA, 15 bp, Homo sapiens
aggagaagttcacag

SEQ ID NO: 497083 - DNA, 15 bp, Homo sapiens
gaggagaagttcaca

SEQ ID NO: 497084 - DNA, 15 bp, Homo sapiens
agaggagaagttcac

SEQ ID NO: 497085 - DNA, 15 bp, Homo sapiens
cagaggagaagttca

SEQ ID NO: 497086 - DNA, 15 bp, Homo sapiens
acagaggagaagttc

SEQ ID NO: 497087 - DNA, 15 bp, Homo sapiens
gacagaggagaagtt

SEQ ID NO: 497088 - DNA, 15 bp, Homo sapiens
tgacagaggagaagt

SEQ ID NO: 497089 - DNA, 15 bp, Homo sapiens
gtgacagaggagaag

SEQ ID NO: 497090 - DNA, 15 bp, Homo sapiens
cgtgacagaggagaa

SEQ ID NO: 497091 - DNA, 15 bp, Homo sapiens
ccgtgacagaggaga

SEQ ID NO: 497092 - DNA, 15 bp, Homo sapiens
tccgtgacagaggag

SEQ ID NO: 497093 - DNA, 15 bp, Homo sapiens
gtccgtgacagagga

SEQ ID NO: 497094 - DNA, 15 bp, Homo sapiens
agtccgtgacagagg

SEQ ID NO: 497095 - DNA, 15 bp, Homo sapiens
gagtccgtgacagag

SEQ ID NO: 497096 - DNA, 15 bp, Homo sapiens
agagtccgtgacaga

SEQ ID NO: 497097 - DNA, 15 bp, Homo sapiens
cagagtccgtgacag

SEQ ID NO: 497098 - DNA, 15 bp, Homo sapiens
gcagagtccgtgaca

SEQ ID NO: 497099 - DNA, 15 bp, Homo sapiens
tgcagagtccgtgac

SEQ ID NO: 497100 - DNA, 15 bp, Homo sapiens
gtgcagagtccgtga

SEQ ID NO: 497101 - DNA, 15 bp, Homo sapiens
ggtgcagagtccgtg

SEQ ID NO: 497102 - DNA, 15 bp, Homo sapiens
gggtgcagagtccgt

SEQ ID NO: 497103 - DNA, 15 bp, Homo sapiens
ggggtgcagagtccg

SEQ ID NO: 497104 - DNA, 15 bp, Homo sapiens
cggggtgcagagtcc

SEQ ID NO: 497105 - DNA, 15 bp, Homo sapiens
gcggggtgcagagtc

SEQ ID NO: 497106 - DNA, 15 bp, Homo sapiens
ggcggggtgcagagt

SEQ ID NO: 497107 - DNA, 15 bp, Homo sapiens
cggcggggtgcagag

SEQ ID NO: 497108 - DNA, 15 bp, Homo sapiens
ccggcggggtgcaga

SEQ ID NO: 497109 - DNA, 15 bp, Homo sapiens
accggcggggtgcag

SEQ ID NO: 497110 - DNA, 15 bp, Homo sapiens
gaccggcggggtgca

SEQ ID NO: 497111 - DNA, 15 bp, Homo sapiens
tgaccggcggggtgc

SEQ ID NO: 497112 - DNA, 15 bp, Homo sapiens
ctgaccggcggggtg

SEQ ID NO: 497113 - DNA, 15 bp, Homo sapiens
gctgaccggcggggt

SEQ ID NO: 497114 - DNA, 15 bp, Homo sapiens
tgctgaccggcgggg

SEQ ID NO: 497115 - DNA, 15 bp, Homo sapiens
gtgctgaccggcggg

SEQ ID NO: 497116 - DNA, 15 bp, Homo sapiens
cgtgctgaccggcgg

SEQ ID NO: 497117 - DNA, 15 bp, Homo sapiens
gcgtgctgaccggcg

SEQ ID NO: 497118 - DNA, 15 bp, Homo sapiens
agcgtgctgaccggc

SEQ ID NO: 497119 - DNA, 15 bp, Homo sapiens
aagcgtgctgaccgg

SEQ ID NO: 497120 - DNA, 15 bp, Homo sapiens
caagcgtgctgaccg

SEQ ID NO: 497121 - DNA, 15 bp, Homo sapiens
tcaagcgtgctgacc

SEQ ID NO: 497122 - DNA, 15 bp, Homo sapiens
atcaagcgtgctgac

SEQ ID NO: 497123 - DNA, 15 bp, Homo sapiens
gatcaagcgtgctga

SEQ ID NO: 497124 - DNA, 15 bp, Homo sapiens
ggatcaagcgtgctg

SEQ ID NO: 497125 - DNA, 15 bp, Homo sapiens
aggatcaagcgtgct

SEQ ID NO: 497126 - DNA, 15 bp, Homo sapiens
gaggatcaagcgtgc

SEQ ID NO: 497127 - DNA, 15 bp, Homo sapiens
agaggatcaagcgtg

SEQ ID NO: 497128 - DNA, 15 bp, Homo sapiens
aagaggatcaagcgt

SEQ ID NO: 497129 - DNA, 15 bp, Homo sapiens
gaagaggatcaagcg

SEQ ID NO: 497130 - DNA, 15 bp, Homo sapiens
tgaagaggatcaagc

SEQ ID NO: 497131 - DNA, 15 bp, Homo sapiens
ctgaagaggatcaag

SEQ ID NO: 497132 - DNA, 15 bp, Homo sapiens
actgaagaggatcaa

SEQ ID NO: 497133 - DNA, 15 bp, Homo sapiens
cactgaagaggatca

SEQ ID NO: 497134 - DNA, 15 bp, Homo sapiens
tcactgaagaggatc

SEQ ID NO: 497135 - DNA, 15 bp, Homo sapiens
gtcactgaagaggat

SEQ ID NO: 497136 - DNA, 15 bp, Homo sapiens
agtcactgaagagga

SEQ ID NO: 497137 - DNA, 15 bp, Homo sapiens
cagtcactgaagagg

SEQ ID NO: 497138 - DNA, 15 bp, Homo sapiens
gcagtcactgaagag

SEQ ID NO: 497139 - DNA, 15 bp, Homo sapiens
tgcagtcactgaaga

SEQ ID NO: 497140 - DNA, 15 bp, Homo sapiens
ctgcagtcactgaag

SEQ ID NO: 497141 - DNA, 15 bp, Homo sapiens
cctgcagtcactgaa

SEQ ID NO: 497142 - DNA, 15 bp, Homo sapiens
ccctgcagtcactga

SEQ ID NO: 497143 - DNA, 15 bp, Homo sapiens
accctgcagtcactg

SEQ ID NO: 497144 - DNA, 15 bp, Homo sapiens
caccctgcagtcact

SEQ ID NO: 497145 - DNA, 15 bp, Homo sapiens
ccaccctgcagtcac

SEQ ID NO: 497146 - DNA, 15 bp, Homo sapiens
cccaccctgcagtca

SEQ ID NO: 497147 - DNA, 15 bp, Homo sapiens
tcccaccctgcagtc

SEQ ID NO: 497148 - DNA, 15 bp, Homo sapiens
ctcccaccctgcagt

SEQ ID NO: 497149 - DNA, 15 bp, Homo sapiens
cctcccaccctgcag

SEQ ID NO: 497150 - DNA, 15 bp, Homo sapiens
acctcccaccctgca

SEQ ID NO: 497151 - DNA, 15 bp, Homo sapiens
cacctcccaccctgc

SEQ ID NO: 497152 - DNA, 15 bp, Homo sapiens
tcacctcccaccctg

SEQ ID NO: 497153 - DNA, 15 bp, Homo sapiens
gtcacctcccaccct

SEQ ID NO: 497154 - DNA, 15 bp, Homo sapiens
tgtcacctcccaccc

SEQ ID NO: 497155 - DNA, 15 bp, Homo sapiens
ctgtcacctcccacc

SEQ ID NO: 497156 - DNA, 15 bp, Homo sapiens
cctgtcacctcccac

SEQ ID NO: 497157 - DNA, 15 bp, Homo sapiens
ccctgtcacctccca

SEQ ID NO: 497158 - DNA, 15 bp, Homo sapiens
cccctgtcacctccc

SEQ ID NO: 497159 - DNA, 15 bp, Homo sapiens
tcccctgtcacctcc

SEQ ID NO: 497160 - DNA, 15 bp, Homo sapiens
ttcccctgtcacctc

SEQ ID NO: 497161 - DNA, 15 bp, Homo sapiens
gttcccctgtcacct

SEQ ID NO: 497162 - DNA, 15 bp, Homo sapiens
tgttcccctgtcacc

SEQ ID NO: 497163 - DNA, 15 bp, Homo sapiens
ctgttcccctgtcac

SEQ ID NO: 497164 - DNA, 15 bp, Homo sapiens
cctgttcccctgtca

SEQ ID NO: 497165 - DNA, 15 bp, Homo sapiens
ccctgttcccctgtc

SEQ ID NO: 497166 - DNA, 15 bp, Homo sapiens
tccctgttcccctgt

SEQ ID NO: 497167 - DNA, 15 bp, Homo sapiens
ctccctgttcccctg

SEQ ID NO: 497168 - DNA, 15 bp, Homo sapiens
tctccctgttcccct

SEQ ID NO: 497169 - DNA, 15 bp, Homo sapiens
atctccctgttcccc

SEQ ID NO: 497170 - DNA, 15 bp, Homo sapiens
catctccctgttccc

SEQ ID NO: 497171 - DNA, 15 bp, Homo sapiens
ccatctccctgttcc

SEQ ID NO: 497172 - DNA, 15 bp, Homo sapiens
gccatctccctgttc

SEQ ID NO: 497173 - DNA, 15 bp, Homo sapiens
cgccatctccctgtt

SEQ ID NO: 497174 - DNA, 15 bp, Homo sapiens
ccgccatctccctgt

SEQ ID NO: 497175 - DNA, 15 bp, Homo sapiens
gccgccatctccctg

SEQ ID NO: 497176 - DNA, 15 bp, Homo sapiens
agccgccatctccct

SEQ ID NO: 497177 - DNA, 15 bp, Homo sapiens
cagccgccatctccc

SEQ ID NO: 497178 - DNA, 15 bp, Homo sapiens
gcagccgccatctcc

SEQ ID NO: 497179 - DNA, 15 bp, Homo sapiens
agcagccgccatctc

SEQ ID NO: 497180 - DNA, 15 bp, Homo sapiens
aagcagccgccatct

SEQ ID NO: 497181 - DNA, 15 bp, Homo sapiens
taagcagccgccatc

SEQ ID NO: 497182 - DNA, 15 bp, Homo sapiens
gtaagcagccgccat

SEQ ID NO: 497183 - DNA, 15 bp, Homo sapiens
tgtaagcagccgcca

SEQ ID NO: 497184 - DNA, 15 bp, Homo sapiens
ttgtaagcagccgcc

SEQ ID NO: 497185 - DNA, 15 bp, Homo sapiens
cttgtaagcagccgc

SEQ ID NO: 497186 - DNA, 15 bp, Homo sapiens
ccttgtaagcagccg

SEQ ID NO: 497187 - DNA, 15 bp, Homo sapiens
tccttgtaagcagcc

SEQ ID NO: 497188 - DNA, 15 bp, Homo sapiens
gtccttgtaagcagc

SEQ ID NO: 497189 - DNA, 15 bp, Homo sapiens
agtccttgtaagcag

SEQ ID NO: 497190 - DNA, 15 bp, Homo sapiens
gagtccttgtaagca

SEQ ID NO: 497191 - DNA, 15 bp, Homo sapiens
tgagtccttgtaagc

SEQ ID NO: 497192 - DNA, 15 bp, Homo sapiens
ctgagtccttgtaag

SEQ ID NO: 497193 - DNA, 15 bp, Homo sapiens
gctgagtccttgtaa

SEQ ID NO: 497194 - DNA, 15 bp, Homo sapiens
agctgagtccttgta

SEQ ID NO: 497195 - DNA, 15 bp, Homo sapiens
gagctgagtccttgt

SEQ ID NO: 497196 - DNA, 15 bp, Homo sapiens
agagctgagtccttg

SEQ ID NO: 497197 - DNA, 15 bp, Homo sapiens
cagagctgagtcctt

SEQ ID NO: 497198 - DNA, 15 bp, Homo sapiens
ccagagctgagtcct

SEQ ID NO: 497199 - DNA, 15 bp, Homo sapiens
cccagagctgagtcc

SEQ ID NO: 497200 - DNA, 15 bp, Homo sapiens
gcccagagctgagtc

SEQ ID NO: 497201 - DNA, 15 bp, Homo sapiens
tgcccagagctgagt

SEQ ID NO: 497202 - DNA, 15 bp, Homo sapiens
ctgcccagagctgag

SEQ ID NO: 497203 - DNA, 15 bp, Homo sapiens
tctgcccagagctga

SEQ ID NO: 497204 - DNA, 15 bp, Homo sapiens
gtctgcccagagctg

SEQ ID NO: 497205 - DNA, 15 bp, Homo sapiens
ggtctgcccagagct

SEQ ID NO: 497206 - DNA, 15 bp, Homo sapiens
aggtctgcccagagc

SEQ ID NO: 497207 - DNA, 15 bp, Homo sapiens
caggtctgcccagag

SEQ ID NO: 497208 - DNA, 15 bp, Homo sapiens
gcaggtctgcccaga

SEQ ID NO: 497209 - DNA, 15 bp, Homo sapiens
ggcaggtctgcccag

SEQ ID NO: 497210 - DNA, 15 bp, Homo sapiens
gggcaggtctgccca

SEQ ID NO: 497211 - DNA, 15 bp, Homo sapiens
agggcaggtctgccc

SEQ ID NO: 497212 - DNA, 15 bp, Homo sapiens
gagggcaggtctgcc

SEQ ID NO: 497213 - DNA, 15 bp, Homo sapiens
ggagggcaggtctgc

SEQ ID NO: 497214 - DNA, 15 bp, Homo sapiens
cggagggcaggtctg

SEQ ID NO: 497215 - DNA, 15 bp, Homo sapiens
tcggagggcaggtct

SEQ ID NO: 497216 - DNA, 15 bp, Homo sapiens
ctcggagggcaggtc

SEQ ID NO: 497217 - DNA, 15 bp, Homo sapiens
cctcggagggcaggt

SEQ ID NO: 497218 - DNA, 15 bp, Homo sapiens
ccctcggagggcagg

SEQ ID NO: 497219 - DNA, 15 bp, Homo sapiens
accctcggagggcag

SEQ ID NO: 497220 - DNA, 15 bp, Homo sapiens
caccctcggagggca

SEQ ID NO: 497221 - DNA, 15 bp, Homo sapiens
ccaccctcggagggc

SEQ ID NO: 497222 - DNA, 15 bp, Homo sapiens
cccaccctcggaggg

SEQ ID NO: 497223 - DNA, 15 bp, Homo sapiens
gcccaccctcggagg

SEQ ID NO: 497224 - DNA, 15 bp, Homo sapiens
ggcccaccctcggag

SEQ ID NO: 497225 - DNA, 15 bp, Homo sapiens
gggcccaccctcgga

SEQ ID NO: 497226 - DNA, 15 bp, Homo sapiens
ggggcccaccctcgg

SEQ ID NO: 497227 - DNA, 15 bp, Homo sapiens
cggggcccaccctcg

SEQ ID NO: 497228 - DNA, 15 bp, Homo sapiens
acggggcccaccctc

SEQ ID NO: 497229 - DNA, 15 bp, Homo sapiens
gacggggcccaccct

SEQ ID NO: 497230 - DNA, 15 bp, Homo sapiens
ggacggggcccaccc

SEQ ID NO: 497231 - DNA, 15 bp, Homo sapiens
aggacggggcccacc

SEQ ID NO: 497232 - DNA, 15 bp, Homo sapiens
gaggacggggcccac

SEQ ID NO: 497233 - DNA, 15 bp, Homo sapiens
tgaggacggggccca

SEQ ID NO: 497234 - DNA, 15 bp, Homo sapiens
gtgaggacggggccc

SEQ ID NO: 497235 - DNA, 15 bp, Homo sapiens
ggtgaggacggggcc

SEQ ID NO: 497236 - DNA, 15 bp, Homo sapiens
tggtgaggacggggc

SEQ ID NO: 497237 - DNA, 15 bp, Homo sapiens
atggtgaggacgggg

SEQ ID NO: 497238 - DNA, 15 bp, Homo sapiens
catggtgaggacggg

SEQ ID NO: 497239 - DNA, 15 bp, Homo sapiens
acatggtgaggacgg

SEQ ID NO: 497240 - DNA, 15 bp, Homo sapiens
aacatggtgaggacg

SEQ ID NO: 497241 - DNA, 15 bp, Homo sapiens
gaacatggtgaggac

SEQ ID NO: 497242 - DNA, 15 bp, Homo sapiens
ggaacatggtgagga

SEQ ID NO: 497243 - DNA, 15 bp, Homo sapiens
aggaacatggtgagg

SEQ ID NO: 497244 - DNA, 15 bp, Homo sapiens
caggaacatggtgag

SEQ ID NO: 497245 - DNA, 15 bp, Homo sapiens
tcaggaacatggtga

SEQ ID NO: 497246 - DNA, 15 bp, Homo sapiens
ttcaggaacatggtg

SEQ ID NO: 497247 - DNA, 15 bp, Homo sapiens
cttcaggaacatggt

SEQ ID NO: 497248 - DNA, 15 bp, Homo sapiens
acttcaggaacatgg

SEQ ID NO: 497249 - DNA, 15 bp, Homo sapiens
cacttcaggaacatg

SEQ ID NO: 497250 - DNA, 15 bp, Homo sapiens
ccacttcaggaacat

SEQ ID NO: 497251 - DNA, 15 bp, Homo sapiens
cccacttcaggaaca

SEQ ID NO: 497252 - DNA, 15 bp, Homo sapiens
gcccacttcaggaac

SEQ ID NO: 497253 - DNA, 15 bp, Homo sapiens
tgcccacttcaggaa

SEQ ID NO: 497254 - DNA, 15 bp, Homo sapiens
gtgcccacttcagga

SEQ ID NO: 497255 - DNA, 15 bp, Homo sapiens
agtgcccacttcagg

SEQ ID NO: 497256 - DNA, 15 bp, Homo sapiens
cagtgcccacttcag

SEQ ID NO: 497257 - DNA, 15 bp, Homo sapiens
tcagtgcccacttca

SEQ ID NO: 497258 - DNA, 15 bp, Homo sapiens
ctcagtgcccacttc

SEQ ID NO: 497259 - DNA, 15 bp, Homo sapiens
cctcagtgcccactt

SEQ ID NO: 497260 - DNA, 15 bp, Homo sapiens
ccctcagtgcccact

SEQ ID NO: 497261 - DNA, 15 bp, Homo sapiens
accctcagtgcccac

SEQ ID NO: 497262 - DNA, 15 bp, Homo sapiens
caccctcagtgccca

SEQ ID NO: 497263 - DNA, 15 bp, Homo sapiens
gcaccctcagtgccc

SEQ ID NO: 497264 - DNA, 15 bp, Homo sapiens
ggcaccctcagtgcc

SEQ ID NO: 497265 - DNA, 15 bp, Homo sapiens
gggcaccctcagtgc

SEQ ID NO: 497266 - DNA, 15 bp, Homo sapiens
cgggcaccctcagtg

SEQ ID NO: 497267 - DNA, 15 bp, Homo sapiens
acgggcaccctcagt

SEQ ID NO: 497268 - DNA, 15 bp, Homo sapiens
cacgggcaccctcag

SEQ ID NO: 497269 - DNA, 15 bp, Homo sapiens
ccacgggcaccctca

SEQ ID NO: 497270 - DNA, 15 bp, Homo sapiens
gccacgggcaccctc

SEQ ID NO: 497271 - DNA, 15 bp, Homo sapiens
agccacgggcaccct

SEQ ID NO: 497272 - DNA, 15 bp, Homo sapiens
aagccacgggcaccc

SEQ ID NO: 497273 - DNA, 15 bp, Homo sapiens
caagccacgggcacc

SEQ ID NO: 497274 - DNA, 15 bp, Homo sapiens
ccaagccacgggcac

SEQ ID NO: 497275 - DNA, 15 bp, Homo sapiens
accaagccacgggca

SEQ ID NO: 497276 - DNA, 15 bp, Homo sapiens
caccaagccacgggc

SEQ ID NO: 497277 - DNA, 15 bp, Homo sapiens
ccaccaagccacggg

SEQ ID NO: 497278 - DNA, 15 bp, Homo sapiens
accaccaagccacgg

SEQ ID NO: 497279 - DNA, 15 bp, Homo sapiens
taccaccaagccacg

SEQ ID NO: 497280 - DNA, 15 bp, Homo sapiens
gtaccaccaagccac

SEQ ID NO: 497281 - DNA, 15 bp, Homo sapiens
agtaccaccaagcca

SEQ ID NO: 497282 - DNA, 15 bp, Homo sapiens
gagtaccaccaagcc

SEQ ID NO: 497283 - DNA, 15 bp, Homo sapiens
ggagtaccaccaagc

SEQ ID NO: 497284 - DNA, 15 bp, Homo sapiens
tggagtaccaccaag

SEQ ID NO: 497285 - DNA, 15 bp, Homo sapiens
atggagtaccaccaa

SEQ ID NO: 497286 - DNA, 15 bp, Homo sapiens
gatggagtaccacca

SEQ ID NO: 497287 - DNA, 15 bp, Homo sapiens
tgatggagtaccacc

SEQ ID NO: 497288 - DNA, 15 bp, Homo sapiens
gtgatggagtaccac

SEQ ID NO: 497289 - DNA, 15 bp, Homo sapiens
cgtgatggagtacca

SEQ ID NO: 497290 - DNA, 15 bp, Homo sapiens
gcgtgatggagtacc

SEQ ID NO: 497291 - DNA, 15 bp, Homo sapiens
tgcgtgatggagtac

SEQ ID NO: 497292 - DNA, 15 bp, Homo sapiens
ctgcgtgatggagta

SEQ ID NO: 497293 - DNA, 15 bp, Homo sapiens
gctgcgtgatggagt

SEQ ID NO: 497294 - DNA, 15 bp, Homo sapiens
tgctgcgtgatggag

SEQ ID NO: 497295 - DNA, 15 bp, Homo sapiens
ctgctgcgtgatgga

SEQ ID NO: 497296 - DNA, 15 bp, Homo sapiens
actgctgcgtgatgg

SEQ ID NO: 497297 - DNA, 15 bp, Homo sapiens
aactgctgcgtgatg

SEQ ID NO: 497298 - DNA, 15 bp, Homo sapiens
caactgctgcgtgat

SEQ ID NO: 497299 - DNA, 15 bp, Homo sapiens
acaactgctgcgtga

SEQ ID NO: 497300 - DNA, 15 bp, Homo sapiens
aacaactgctgcgtg

SEQ ID NO: 497301 - DNA, 15 bp, Homo sapiens
gaacaactgctgcgt

SEQ ID NO: 497302 - DNA, 15 bp, Homo sapiens
tgaacaactgctgcg

SEQ ID NO: 497303 - DNA, 15 bp, Homo sapiens
ctgaacaactgctgc

SEQ ID NO: 497304 - DNA, 15 bp, Homo sapiens
cctgaacaactgctg

SEQ ID NO: 497305 - DNA, 15 bp, Homo sapiens
tcctgaacaactgct

SEQ ID NO: 497306 - DNA, 15 bp, Homo sapiens
atcctgaacaactgc

SEQ ID NO: 497307 - DNA, 15 bp, Homo sapiens
gatcctgaacaactg

SEQ ID NO: 497308 - DNA, 15 bp, Homo sapiens
agatcctgaacaact

SEQ ID NO: 497309 - DNA, 15 bp, Homo sapiens
gagatcctgaacaac

SEQ ID NO: 497310 - DNA, 15 bp, Homo sapiens
tgagatcctgaacaa

SEQ ID NO: 497311 - DNA, 15 bp, Homo sapiens
gtgagatcctgaaca

SEQ ID NO: 497312 - DNA, 15 bp, Homo sapiens
ggtgagatcctgaac

SEQ ID NO: 497313 - DNA, 15 bp, Homo sapiens
tggtgagatcctgaa

SEQ ID NO: 497314 - DNA, 15 bp, Homo sapiens
gtggtgagatcctga

SEQ ID NO: 497315 - DNA, 15 bp, Homo sapiens
agtggtgagatcctg

SEQ ID NO: 497316 - DNA, 15 bp, Homo sapiens
cagtggtgagatcct

SEQ ID NO: 497317 - DNA, 15 bp, Homo sapiens
gcagtggtgagatcc

SEQ ID NO: 497318 - DNA, 15 bp, Homo sapiens
tgcagtggtgagatc

SEQ ID NO: 497319 - DNA, 15 bp, Homo sapiens
gtgcagtggtgagat

SEQ ID NO: 497320 - DNA, 15 bp, Homo sapiens
agtgcagtggtgaga

SEQ ID NO: 497321 - DNA, 15 bp, Homo sapiens
gagtgcagtggtgag

SEQ ID NO: 497322 - DNA, 15 bp, Homo sapiens
cgagtgcagtggtga

SEQ ID NO: 497323 - DNA, 15 bp, Homo sapiens
gcgagtgcagtggtg

SEQ ID NO: 497324 - DNA, 15 bp, Homo sapiens
agcgagtgcagtggt

SEQ ID NO: 497325 - DNA, 15 bp, Homo sapiens
cagcgagtgcagtgg

SEQ ID NO: 497326 - DNA, 15 bp, Homo sapiens
gcagcgagtgcagtg

SEQ ID NO: 497327 - DNA, 15 bp, Homo sapiens
tgcagcgagtgcagt

SEQ ID NO: 497328 - DNA, 15 bp, Homo sapiens
ttgcagcgagtgcag

SEQ ID NO: 497329 - DNA, 15 bp, Homo sapiens
tttgcagcgagtgca

SEQ ID NO: 497330 - DNA, 15 bp, Homo sapiens
ctttgcagcgagtgc

SEQ ID NO: 497331 - DNA, 15 bp, Homo sapiens
cctttgcagcgagtg

SEQ ID NO: 497332 - DNA, 15 bp, Homo sapiens
tcctttgcagcgagt

SEQ ID NO: 497333 - DNA, 15 bp, Homo sapiens
ctcctttgcagcgag

SEQ ID NO: 497334 - DNA, 15 bp, Homo sapiens
tctcctttgcagcga

SEQ ID NO: 497335 - DNA, 15 bp, Homo sapiens
ctctcctttgcagcg

SEQ ID NO: 497336 - DNA, 15 bp, Homo sapiens
cctctcctttgcagc

SEQ ID NO: 497337 - DNA, 15 bp, Homo sapiens
ccctctcctttgcag

SEQ ID NO: 497338 - DNA, 15 bp, Homo sapiens
cccctctcctttgca

SEQ ID NO: 497339 - DNA, 15 bp, Homo sapiens
ccccctctcctttgc

SEQ ID NO: 497340 - DNA, 15 bp, Homo sapiens
cccccctctcctttg

SEQ ID NO: 497341 - DNA, 15 bp, Homo sapiens
acccccctctccttt

SEQ ID NO: 497342 - DNA, 15 bp, Homo sapiens
gacccccctctcctt

SEQ ID NO: 497343 - DNA, 15 bp, Homo sapiens
ggacccccctctcct

SEQ ID NO: 497344 - DNA, 15 bp, Homo sapiens
gggacccccctctcc

SEQ ID NO: 497345 - DNA, 15 bp, Homo sapiens
tgggacccccctctc

SEQ ID NO: 497346 - DNA, 15 bp, Homo sapiens
ctgggacccccctct

SEQ ID NO: 497347 - DNA, 15 bp, Homo sapiens
gctgggacccccctc

SEQ ID NO: 497348 - DNA, 15 bp, Homo sapiens
agctgggacccccct

SEQ ID NO: 497349 - DNA, 15 bp, Homo sapiens
gagctgggacccccc

SEQ ID NO: 497350 - DNA, 15 bp, Homo sapiens
ggagctgggaccccc

SEQ ID NO: 497351 - DNA, 15 bp, Homo sapiens
tggagctgggacccc

SEQ ID NO: 497352 - DNA, 15 bp, Homo sapiens
gtggagctgggaccc

SEQ ID NO: 497353 - DNA, 15 bp, Homo sapiens
tgtggagctgggacc

SEQ ID NO: 497354 - DNA, 15 bp, Homo sapiens
atgtggagctgggac

SEQ ID NO: 497355 - DNA, 15 bp, Homo sapiens
catgtggagctggga

SEQ ID NO: 497356 - DNA, 15 bp, Homo sapiens
ccatgtggagctggg

SEQ ID NO: 497357 - DNA, 15 bp, Homo sapiens
cccatgtggagctgg

SEQ ID NO: 497358 - DNA, 15 bp, Homo sapiens
gcccatgtggagctg

SEQ ID NO: 497359 - DNA, 15 bp, Homo sapiens
ggcccatgtggagct

SEQ ID NO: 497360 - DNA, 15 bp, Homo sapiens
gggcccatgtggagc

SEQ ID NO: 497361 - DNA, 15 bp, Homo sapiens
ggggcccatgtggag

SEQ ID NO: 497362 - DNA, 15 bp, Homo sapiens
tggggcccatgtgga

SEQ ID NO: 497363 - DNA, 15 bp, Homo sapiens
ctggggcccatgtgg

SEQ ID NO: 497364 - DNA, 15 bp, Homo sapiens
cctggggcccatgtg

SEQ ID NO: 497365 - DNA, 15 bp, Homo sapiens
gcctggggcccatgt

SEQ ID NO: 497366 - DNA, 15 bp, Homo sapiens
ggcctggggcccatg

SEQ ID NO: 497367 - DNA, 15 bp, Homo sapiens
tggcctggggcccat

SEQ ID NO: 497368 - DNA, 15 bp, Homo sapiens
ctggcctggggccca

SEQ ID NO: 497369 - DNA, 15 bp, Homo sapiens
cctggcctggggccc

SEQ ID NO: 497370 - DNA, 15 bp, Homo sapiens
tcctggcctggggcc

SEQ ID NO: 497371 - DNA, 15 bp, Homo sapiens
ctcctggcctggggc

SEQ ID NO: 497372 - DNA, 15 bp, Homo sapiens
gctcctggcctgggg

SEQ ID NO: 497373 - DNA, 15 bp, Homo sapiens
tgctcctggcctggg

SEQ ID NO: 497374 - DNA, 15 bp, Homo sapiens
atgctcctggcctgg

SEQ ID NO: 497375 - DNA, 15 bp, Homo sapiens
catgctcctggcctg

SEQ ID NO: 497376 - DNA, 15 bp, Homo sapiens
ccatgctcctggcct

SEQ ID NO: 497377 - DNA, 15 bp, Homo sapiens
accatgctcctggcc

SEQ ID NO: 497378 - DNA, 15 bp, Homo sapiens
gaccatgctcctggc

SEQ ID NO: 497379 - DNA, 15 bp, Homo sapiens
ggaccatgctcctgg

SEQ ID NO: 497380 - DNA, 15 bp, Homo sapiens
aggaccatgctcctg

SEQ ID NO: 497381 - DNA, 15 bp, Homo sapiens
caggaccatgctcct

SEQ ID NO: 497382 - DNA, 15 bp, Homo sapiens
acaggaccatgctcc

SEQ ID NO: 497383 - DNA, 15 bp, Homo sapiens
gacaggaccatgctc

SEQ ID NO: 497384 - DNA, 15 bp, Homo sapiens
ggacaggaccatgct

SEQ ID NO: 497385 - DNA, 15 bp, Homo sapiens
tggacaggaccatgc

SEQ ID NO: 497386 - DNA, 15 bp, Homo sapiens
gtggacaggaccatg

SEQ ID NO: 497387 - DNA, 15 bp, Homo sapiens
tgtggacaggaccat

SEQ ID NO: 497388 - DNA, 15 bp, Homo sapiens
gtgtggacaggacca

SEQ ID NO: 497389 - DNA, 15 bp, Homo sapiens
ggtgtggacaggacc

SEQ ID NO: 497390 - DNA, 15 bp, Homo sapiens
aggtgtggacaggac

SEQ ID NO: 497391 - DNA, 15 bp, Homo sapiens
gaggtgtggacagga

SEQ ID NO: 497392 - DNA, 15 bp, Homo sapiens
cgaggtgtggacagg

SEQ ID NO: 497393 - DNA, 15 bp, Homo sapiens
ccgaggtgtggacag

SEQ ID NO: 497394 - DNA, 15 bp, Homo sapiens
cccgaggtgtggaca

SEQ ID NO: 497395 - DNA, 15 bp, Homo sapiens
gcccgaggtgtggac

SEQ ID NO: 497396 - DNA, 15 bp, Homo sapiens
agcccgaggtgtgga

SEQ ID NO: 497397 - DNA, 15 bp, Homo sapiens
cagcccgaggtgtgg

SEQ ID NO: 497398 - DNA, 15 bp, Homo sapiens
ccagcccgaggtgtg

SEQ ID NO: 497399 - DNA, 15 bp, Homo sapiens
cccagcccgaggtgt

SEQ ID NO: 497400 - DNA, 15 bp, Homo sapiens
ccccagcccgaggtg

SEQ ID NO: 497401 - DNA, 15 bp, Homo sapiens
accccagcccgaggt

SEQ ID NO: 497402 - DNA, 15 bp, Homo sapiens
gaccccagcccgagg

SEQ ID NO: 497403 - DNA, 15 bp, Homo sapiens
agaccccagcccgag

SEQ ID NO: 497404 - DNA, 15 bp, Homo sapiens
aagaccccagcccga

SEQ ID NO: 497405 - DNA, 15 bp, Homo sapiens
gaagaccccagcccg

SEQ ID NO: 497406 - DNA, 15 bp, Homo sapiens
cgaagaccccagccc

SEQ ID NO: 497407 - DNA, 15 bp, Homo sapiens
gcgaagaccccagcc

SEQ ID NO: 497408 - DNA, 15 bp, Homo sapiens
agcgaagaccccagc

SEQ ID NO: 497409 - DNA, 15 bp, Homo sapiens
gagcgaagaccccag

SEQ ID NO: 497410 - DNA, 15 bp, Homo sapiens
tgagcgaagacccca

SEQ ID NO: 497411 - DNA, 15 bp, Homo sapiens
ctgagcgaagacccc

SEQ ID NO: 497412 - DNA, 15 bp, Homo sapiens
cctgagcgaagaccc

SEQ ID NO: 497413 - DNA, 15 bp, Homo sapiens
acctgagcgaagacc

SEQ ID NO: 497414 - DNA, 15 bp, Homo sapiens
gacctgagcgaagac

SEQ ID NO: 497415 - DNA, 15 bp, Homo sapiens
tgacctgagcgaaga

SEQ ID NO: 497416 - DNA, 15 bp, Homo sapiens
ctgacctgagcgaag

SEQ ID NO: 497417 - DNA, 15 bp, Homo sapiens
gctgacctgagcgaa

SEQ ID NO: 497418 - DNA, 15 bp, Homo sapiens
ggctgacctgagcga

SEQ ID NO: 497419 - DNA, 15 bp, Homo sapiens
gggctgacctgagcg

SEQ ID NO: 497420 - DNA, 15 bp, Homo sapiens
agggctgacctgagc

SEQ ID NO: 497421 - DNA, 15 bp, Homo sapiens
cagggctgacctgag

SEQ ID NO: 497422 - DNA, 15 bp, Homo sapiens
gcagggctgacctga

SEQ ID NO: 497423 - DNA, 15 bp, Homo sapiens
ggcagggctgacctg

SEQ ID NO: 497424 - DNA, 15 bp, Homo sapiens
tggcagggctgacct

SEQ ID NO: 497425 - DNA, 15 bp, Homo sapiens
ctggcagggctgacc

SEQ ID NO: 497426 - DNA, 15 bp, Homo sapiens
gctggcagggctgac

SEQ ID NO: 497427 - DNA, 15 bp, Homo sapiens
tgctggcagggctga

SEQ ID NO: 497428 - DNA, 15 bp, Homo sapiens
ctgctggcagggctg

SEQ ID NO: 497429 - DNA, 15 bp, Homo sapiens
gctgctggcagggct

SEQ ID NO: 497430 - DNA, 15 bp, Homo sapiens
ggctgctggcagggc

SEQ ID NO: 497431 - DNA, 15 bp, Homo sapiens
gggctgctggcaggg

SEQ ID NO: 497432 - DNA, 15 bp, Homo sapiens
ggggctgctggcagg

SEQ ID NO: 497433 - DNA, 15 bp, Homo sapiens
aggggctgctggcag

SEQ ID NO: 497434 - DNA, 15 bp, Homo sapiens
caggggctgctggca

SEQ ID NO: 497435 - DNA, 15 bp, Homo sapiens
gcaggggctgctggc

SEQ ID NO: 497436 - DNA, 15 bp, Homo sapiens
ggcaggggctgctgg

SEQ ID NO: 497437 - DNA, 15 bp, Homo sapiens
gggcaggggctgctg

SEQ ID NO: 497438 - DNA, 15 bp, Homo sapiens
ggggcaggggctgct

SEQ ID NO: 497439 - DNA, 15 bp, Homo sapiens
cggggcaggggctgc

SEQ ID NO: 497440 - DNA, 15 bp, Homo sapiens
acggggcaggggctg

SEQ ID NO: 497441 - DNA, 15 bp, Homo sapiens
tacggggcaggggct

SEQ ID NO: 497442 - DNA, 15 bp, Homo sapiens
atacggggcaggggc

SEQ ID NO: 497443 - DNA, 15 bp, Homo sapiens
cgccgaggctggcga

SEQ ID NO: 497444 - DNA, 15 bp, Homo sapiens
gccgaggctggcgag

SEQ ID NO: 497445 - DNA, 15 bp, Homo sapiens
ccgaggctggcgagg

SEQ ID NO: 497446 - DNA, 15 bp, Homo sapiens
cgaggctggcgaggt

SEQ ID NO: 497447 - DNA, 15 bp, Homo sapiens
gaggctggcgaggtg

SEQ ID NO: 497448 - DNA, 15 bp, Homo sapiens
aggctggcgaggtgc

SEQ ID NO: 497449 - DNA, 15 bp, Homo sapiens
ggctggcgaggtgcg

SEQ ID NO: 497450 - DNA, 15 bp, Homo sapiens
gctggcgaggtgcgc

SEQ ID NO: 497451 - DNA, 15 bp, Homo sapiens
ctggcgaggtgcgcg

SEQ ID NO: 497452 - DNA, 15 bp, Homo sapiens
tggcgaggtgcgcgg

SEQ ID NO: 497453 - DNA, 15 bp, Homo sapiens
ggcgaggtgcgcggc

SEQ ID NO: 497454 - DNA, 15 bp, Homo sapiens
gcgaggtgcgcggct

SEQ ID NO: 497455 - DNA, 15 bp, Homo sapiens
cgaggtgcgcggctg

SEQ ID NO: 497456 - DNA, 15 bp, Homo sapiens
gaggtgcgcggctgg

SEQ ID NO: 497457 - DNA, 15 bp, Homo sapiens
aggtgcgcggctggc

SEQ ID NO: 497458 - DNA, 15 bp, Homo sapiens
ggtgcgcggctggct

SEQ ID NO: 497459 - DNA, 15 bp, Homo sapiens
gtgcgcggctggctg

SEQ ID NO: 497460 - DNA, 15 bp, Homo sapiens
tgcgcggctggctgc

SEQ ID NO: 497461 - DNA, 15 bp, Homo sapiens
gcgcggctggctgct

SEQ ID NO: 497462 - DNA, 15 bp, Homo sapiens
cgcggctggctgcta

SEQ ID NO: 497463 - DNA, 15 bp, Homo sapiens
gcggctggctgctag

SEQ ID NO: 497464 - DNA, 15 bp, Homo sapiens
cggctggctgctagg

SEQ ID NO: 497465 - DNA, 15 bp, Homo sapiens
ggctggctgctagga

SEQ ID NO: 497466 - DNA, 15 bp, Homo sapiens
gctggctgctaggaa

SEQ ID NO: 497467 - DNA, 15 bp, Homo sapiens
ctggctgctaggaaa

SEQ ID NO: 497468 - DNA, 15 bp, Homo sapiens
tggctgctaggaaag

SEQ ID NO: 497469 - DNA, 15 bp, Homo sapiens
ggctgctaggaaaga

SEQ ID NO: 497470 - DNA, 15 bp, Homo sapiens
gctgctaggaaagag

SEQ ID NO: 497471 - DNA, 15 bp, Homo sapiens
ctgctaggaaagaga

SEQ ID NO: 497472 - DNA, 15 bp, Homo sapiens
tgctaggaaagagat

SEQ ID NO: 497473 - DNA, 15 bp, Homo sapiens
gctaggaaagagatc

SEQ ID NO: 497474 - DNA, 15 bp, Homo sapiens
ctaggaaagagatcc

SEQ ID NO: 497475 - DNA, 15 bp, Homo sapiens
taggaaagagatcca

SEQ ID NO: 497476 - DNA, 15 bp, Homo sapiens
aggaaagagatccag

SEQ ID NO: 497477 - DNA, 15 bp, Homo sapiens
ggaaagagatccaga

SEQ ID NO: 497478 - DNA, 15 bp, Homo sapiens
gaaagagatccagac

SEQ ID NO: 497479 - DNA, 15 bp, Homo sapiens
aaagagatccagacg

SEQ ID NO: 497480 - DNA, 15 bp, Homo sapiens
aagagatccagacgg

SEQ ID NO: 497481 - DNA, 15 bp, Homo sapiens
agagatccagacggt

SEQ ID NO: 497482 - DNA, 15 bp, Homo sapiens
gagatccagacggtc

SEQ ID NO: 497483 - DNA, 15 bp, Homo sapiens
agatccagacggtcg

SEQ ID NO: 497484 - DNA, 15 bp, Homo sapiens
gatccagacggtcgc

SEQ ID NO: 497485 - DNA, 15 bp, Homo sapiens
atccagacggtcgcc

SEQ ID NO: 497486 - DNA, 15 bp, Homo sapiens
tccagacggtcgcct

SEQ ID NO: 497487 - DNA, 15 bp, Homo sapiens
ccagacggtcgcctg

SEQ ID NO: 497488 - DNA, 15 bp, Homo sapiens
cagacggtcgcctgg

SEQ ID NO: 497489 - DNA, 15 bp, Homo sapiens
agacggtcgcctggt

SEQ ID NO: 497490 - DNA, 15 bp, Homo sapiens
gacggtcgcctggtg

SEQ ID NO: 497491 - DNA, 15 bp, Homo sapiens
acggtcgcctggtgc

SEQ ID NO: 497492 - DNA, 15 bp, Homo sapiens
cggtcgcctggtgcg

SEQ ID NO: 497493 - DNA, 15 bp, Homo sapiens
ggtcgcctggtgcgc

SEQ ID NO: 497494 - DNA, 15 bp, Homo sapiens
gtcgcctggtgcgct

SEQ ID NO: 497495 - DNA, 15 bp, Homo sapiens
tcgcctggtgcgctg

SEQ ID NO: 497496 - DNA, 15 bp, Homo sapiens
cgcctggtgcgctgg

SEQ ID NO: 497497 - DNA, 15 bp, Homo sapiens
gcctggtgcgctgga

SEQ ID NO: 497498 - DNA, 15 bp, Homo sapiens
cctggtgcgctggat

SEQ ID NO: 497499 - DNA, 15 bp, Homo sapiens
ctggtgcgctggatc

SEQ ID NO: 497500 - DNA, 15 bp, Homo sapiens
tggtgcgctggatcc

SEQ ID NO: 497501 - DNA, 15 bp, Homo sapiens
ggtgcgctggatccc

SEQ ID NO: 497502 - DNA, 15 bp, Homo sapiens
gtgcgctggatccct

SEQ ID NO: 497503 - DNA, 15 bp, Homo sapiens
tgcgctggatccctg

SEQ ID NO: 497504 - DNA, 15 bp, Homo sapiens
gcgctggatccctgt

SEQ ID NO: 497505 - DNA, 15 bp, Homo sapiens
cgctggatccctgtg

SEQ ID NO: 497506 - DNA, 15 bp, Homo sapiens
gctggatccctgtgc

SEQ ID NO: 497507 - DNA, 15 bp, Homo sapiens
ctggatccctgtgcc

SEQ ID NO: 497508 - DNA, 15 bp, Homo sapiens
tggatccctgtgccc

SEQ ID NO: 497509 - DNA, 15 bp, Homo sapiens
ggatccctgtgccct

SEQ ID NO: 497510 - DNA, 15 bp, Homo sapiens
gatccctgtgccctt

SEQ ID NO: 497511 - DNA, 15 bp, Homo sapiens
atccctgtgcccttt

SEQ ID NO: 497512 - DNA, 15 bp, Homo sapiens
tccctgtgccctttc

SEQ ID NO: 497513 - DNA, 15 bp, Homo sapiens
ccctgtgccctttcc

SEQ ID NO: 497514 - DNA, 15 bp, Homo sapiens
cctgtgccctttccc

SEQ ID NO: 497515 - DNA, 15 bp, Homo sapiens
ctgtgccctttccct

SEQ ID NO: 497516 - DNA, 15 bp, Homo sapiens
tgtgccctttccctg

SEQ ID NO: 497517 - DNA, 15 bp, Homo sapiens
gtgccctttccctga

SEQ ID NO: 497518 - DNA, 15 bp, Homo sapiens
tgccctttccctgaa

SEQ ID NO: 497519 - DNA, 15 bp, Homo sapiens
gccctttccctgaaa

SEQ ID NO: 497520 - DNA, 15 bp, Homo sapiens
ccctttccctgaaac

SEQ ID NO: 497521 - DNA, 15 bp, Homo sapiens
cctttccctgaaacc

SEQ ID NO: 497522 - DNA, 15 bp, Homo sapiens
ctttccctgaaaccc

SEQ ID NO: 497523 - DNA, 15 bp, Homo sapiens
tttccctgaaaccca

SEQ ID NO: 497524 - DNA, 15 bp, Homo sapiens
ttccctgaaacccag

SEQ ID NO: 497525 - DNA, 15 bp, Homo sapiens
tccctgaaacccagc

SEQ ID NO: 497526 - DNA, 15 bp, Homo sapiens
ccctgaaacccagcc

SEQ ID NO: 497527 - DNA, 15 bp, Homo sapiens
cctgaaacccagcct

SEQ ID NO: 497528 - DNA, 15 bp, Homo sapiens
ctgaaacccagcctg

SEQ ID NO: 497529 - DNA, 15 bp, Homo sapiens
tgaaacccagcctgg

SEQ ID NO: 497530 - DNA, 15 bp, Homo sapiens
gaaacccagcctggc

SEQ ID NO: 497531 - DNA, 15 bp, Homo sapiens
aaacccagcctggcc

SEQ ID NO: 497532 - DNA, 15 bp, Homo sapiens
aacccagcctggcct

SEQ ID NO: 497533 - DNA, 15 bp, Homo sapiens
acccagcctggcctg

SEQ ID NO: 497534 - DNA, 15 bp, Homo sapiens
cccagcctggcctga

SEQ ID NO: 497535 - DNA, 15 bp, Homo sapiens
ccagcctggcctgac

SEQ ID NO: 497536 - DNA, 15 bp, Homo sapiens
cagcctggcctgact

SEQ ID NO: 497537 - DNA, 15 bp, Homo sapiens
agcctggcctgactg

SEQ ID NO: 497538 - DNA, 15 bp, Homo sapiens
gcctggcctgactgc

SEQ ID NO: 497539 - DNA, 15 bp, Homo sapiens
cctggcctgactgca

SEQ ID NO: 497540 - DNA, 15 bp, Homo sapiens
ctggcctgactgcaa

SEQ ID NO: 497541 - DNA, 15 bp, Homo sapiens
tggcctgactgcaac

SEQ ID NO: 497542 - DNA, 15 bp, Homo sapiens
ggcctgactgcaacc

SEQ ID NO: 497543 - DNA, 15 bp, Homo sapiens
gcctgactgcaacct

SEQ ID NO: 497544 - DNA, 15 bp, Homo sapiens
cctgactgcaacctc

SEQ ID NO: 497545 - DNA, 15 bp, Homo sapiens
ctgactgcaacctct

SEQ ID NO: 497546 - DNA, 15 bp, Homo sapiens
tgactgcaacctctc

SEQ ID NO: 497547 - DNA, 15 bp, Homo sapiens
gactgcaacctctcc

SEQ ID NO: 497548 - DNA, 15 bp, Homo sapiens
actgcaacctctccc

SEQ ID NO: 497549 - DNA, 15 bp, Homo sapiens
ctgcaacctctccca

SEQ ID NO: 497550 - DNA, 15 bp, Homo sapiens
tgcaacctctcccaa

SEQ ID NO: 497551 - DNA, 15 bp, Homo sapiens
gcaacctctcccaac

SEQ ID NO: 497552 - DNA, 15 bp, Homo sapiens
caacctctcccaact

SEQ ID NO: 497553 - DNA, 15 bp, Homo sapiens
aacctctcccaactt

SEQ ID NO: 497554 - DNA, 15 bp, Homo sapiens
acctctcccaacttc

SEQ ID NO: 497555 - DNA, 15 bp, Homo sapiens
cctctcccaacttca

SEQ ID NO: 497556 - DNA, 15 bp, Homo sapiens
ctctcccaacttcag

SEQ ID NO: 497557 - DNA, 15 bp, Homo sapiens
tctcccaacttcagt

SEQ ID NO: 497558 - DNA, 15 bp, Homo sapiens
ctcccaacttcagtg

SEQ ID NO: 497559 - DNA, 15 bp, Homo sapiens
tcccaacttcagtgc

SEQ ID NO: 497560 - DNA, 15 bp, Homo sapiens
cccaacttcagtgcc

SEQ ID NO: 497561 - DNA, 15 bp, Homo sapiens
ccaacttcagtgccg

SEQ ID NO: 497562 - DNA, 15 bp, Homo sapiens
caacttcagtgccgg

SEQ ID NO: 497563 - DNA, 15 bp, Homo sapiens
aacttcagtgccgga

SEQ ID NO: 497564 - DNA, 15 bp, Homo sapiens
acttcagtgccggat

SEQ ID NO: 497565 - DNA, 15 bp, Homo sapiens
cttcagtgccggatc

SEQ ID NO: 497566 - DNA, 15 bp, Homo sapiens
ttcagtgccggatcc

SEQ ID NO: 497567 - DNA, 15 bp, Homo sapiens
tcagtgccggatccc

SEQ ID NO: 497568 - DNA, 15 bp, Homo sapiens
cagtgccggatcccc

SEQ ID NO: 497569 - DNA, 15 bp, Homo sapiens
agtgccggatcccct

SEQ ID NO: 497570 - DNA, 15 bp, Homo sapiens
gtgccggatccccta

SEQ ID NO: 497571 - DNA, 15 bp, Homo sapiens
tgccggatcccctag

SEQ ID NO: 497572 - DNA, 15 bp, Homo sapiens
gccggatcccctaga

SEQ ID NO: 497573 - DNA, 15 bp, Homo sapiens
ccggatcccctagac

SEQ ID NO: 497574 - DNA, 15 bp, Homo sapiens
cggatcccctagaca

SEQ ID NO: 497575 - DNA, 15 bp, Homo sapiens
ggatcccctagacaa

SEQ ID NO: 497576 - DNA, 15 bp, Homo sapiens
gatcccctagacaat

SEQ ID NO: 497577 - DNA, 15 bp, Homo sapiens
atcccctagacaatc

SEQ ID NO: 497578 - DNA, 15 bp, Homo sapiens
tcccctagacaatca

SEQ ID NO: 497579 - DNA, 15 bp, Homo sapiens
cccctagacaatcag

SEQ ID NO: 497580 - DNA, 15 bp, Homo sapiens
ccctagacaatcagg

SEQ ID NO: 497581 - DNA, 15 bp, Homo sapiens
cctagacaatcaggg

SEQ ID NO: 497582 - DNA, 15 bp, Homo sapiens
ctagacaatcagggt

SEQ ID NO: 497583 - DNA, 15 bp, Homo sapiens
tagacaatcagggtg

SEQ ID NO: 497584 - DNA, 15 bp, Homo sapiens
agacaatcagggtgg

SEQ ID NO: 497585 - DNA, 15 bp, Homo sapiens
gacaatcagggtggg

SEQ ID NO: 497586 - DNA, 15 bp, Homo sapiens
acaatcagggtgggc

SEQ ID NO: 497587 - DNA, 15 bp, Homo sapiens
caatcagggtgggct

SEQ ID NO: 497588 - DNA, 15 bp, Homo sapiens
aatcagggtgggctc

SEQ ID NO: 497589 - DNA, 15 bp, Homo sapiens
atcagggtgggctcc

SEQ ID NO: 497590 - DNA, 15 bp, Homo sapiens
tcagggtgggctccc

SEQ ID NO: 497591 - DNA, 15 bp, Homo sapiens
cagggtgggctcccc

SEQ ID NO: 497592 - DNA, 15 bp, Homo sapiens
agggtgggctccccg

SEQ ID NO: 497593 - DNA, 15 bp, Homo sapiens
gggtgggctccccgc

SEQ ID NO: 497594 - DNA, 15 bp, Homo sapiens
ggtgggctccccgct

SEQ ID NO: 497595 - DNA, 15 bp, Homo sapiens
gtgggctccccgctg

SEQ ID NO: 497596 - DNA, 15 bp, Homo sapiens
tgggctccccgctgc

SEQ ID NO: 497597 - DNA, 15 bp, Homo sapiens
gggctccccgctgcg

SEQ ID NO: 497598 - DNA, 15 bp, Homo sapiens
ggctccccgctgcga

SEQ ID NO: 497599 - DNA, 15 bp, Homo sapiens
gctccccgctgcgag

SEQ ID NO: 497600 - DNA, 15 bp, Homo sapiens
ctccccgctgcgagc

SEQ ID NO: 497601 - DNA, 15 bp, Homo sapiens
tccccgctgcgagcg

SEQ ID NO: 497602 - DNA, 15 bp, Homo sapiens
ccccgctgcgagcgc

SEQ ID NO: 497603 - DNA, 15 bp, Homo sapiens
cccgctgcgagcgcg

SEQ ID NO: 497604 - DNA, 15 bp, Homo sapiens
ccgctgcgagcgcgc

SEQ ID NO: 497605 - DNA, 15 bp, Homo sapiens
cgctgcgagcgcgcc

SEQ ID NO: 497606 - DNA, 15 bp, Homo sapiens
gctgcgagcgcgccc

SEQ ID NO: 497607 - DNA, 15 bp, Homo sapiens
ctgcgagcgcgcccc

SEQ ID NO: 497608 - DNA, 15 bp, Homo sapiens
tgcgagcgcgcccca

SEQ ID NO: 497609 - DNA, 15 bp, Homo sapiens
gcgagcgcgccccac

SEQ ID NO: 497610 - DNA, 15 bp, Homo sapiens
cgagcgcgccccaca

SEQ ID NO: 497611 - DNA, 15 bp, Homo sapiens
gagcgcgccccacag

SEQ ID NO: 497612 - DNA, 15 bp, Homo sapiens
agcgcgccccacagc

SEQ ID NO: 497613 - DNA, 15 bp, Homo sapiens
gcgcgccccacagcc

SEQ ID NO: 497614 - DNA, 15 bp, Homo sapiens
cgcgccccacagccg

SEQ ID NO: 497615 - DNA, 15 bp, Homo sapiens
gcgccccacagccgg

SEQ ID NO: 497616 - DNA, 15 bp, Homo sapiens
cgccccacagccggg

SEQ ID NO: 497617 - DNA, 15 bp, Homo sapiens
gccccacagccgggt

SEQ ID NO: 497618 - DNA, 15 bp, Homo sapiens
ccccacagccgggtg

SEQ ID NO: 497619 - DNA, 15 bp, Homo sapiens
cccacagccgggtgc

SEQ ID NO: 497620 - DNA, 15 bp, Homo sapiens
ccacagccgggtgcc

SEQ ID NO: 497621 - DNA, 15 bp, Homo sapiens
cacagccgggtgccg

SEQ ID NO: 497622 - DNA, 15 bp, Homo sapiens
acagccgggtgccgc

SEQ ID NO: 497623 - DNA, 15 bp, Homo sapiens
cagccgggtgccgcc

SEQ ID NO: 497624 - DNA, 15 bp, Homo sapiens
agccgggtgccgcca

SEQ ID NO: 497625 - DNA, 15 bp, Homo sapiens
gccgggtgccgccaa

SEQ ID NO: 497626 - DNA, 15 bp, Homo sapiens
ccgggtgccgccaaa

SEQ ID NO: 497627 - DNA, 15 bp, Homo sapiens
cgggtgccgccaaag

SEQ ID NO: 497628 - DNA, 15 bp, Homo sapiens
gggtgccgccaaagg

SEQ ID NO: 497629 - DNA, 15 bp, Homo sapiens
ggtgccgccaaaggt

SEQ ID NO: 497630 - DNA, 15 bp, Homo sapiens
gtgccgccaaaggtc

SEQ ID NO: 497631 - DNA, 15 bp, Homo sapiens
tgccgccaaaggtct

SEQ ID NO: 497632 - DNA, 15 bp, Homo sapiens
gccgccaaaggtctc

SEQ ID NO: 497633 - DNA, 15 bp, Homo sapiens
ccgccaaaggtctcc

SEQ ID NO: 497634 - DNA, 15 bp, Homo sapiens
cgccaaaggtctcct

SEQ ID NO: 497635 - DNA, 15 bp, Homo sapiens
gccaaaggtctcctg

SEQ ID NO: 497636 - DNA, 15 bp, Homo sapiens
ccaaaggtctcctgc

SEQ ID NO: 497637 - DNA, 15 bp, Homo sapiens
caaaggtctcctgct

SEQ ID NO: 497638 - DNA, 15 bp, Homo sapiens
aaaggtctcctgctg

SEQ ID NO: 497639 - DNA, 15 bp, Homo sapiens
aaggtctcctgctgt

SEQ ID NO: 497640 - DNA, 15 bp, Homo sapiens
aggtctcctgctgtt

SEQ ID NO: 497641 - DNA, 15 bp, Homo sapiens
ggtctcctgctgtta

SEQ ID NO: 497642 - DNA, 15 bp, Homo sapiens
gtctcctgctgttag

SEQ ID NO: 497643 - DNA, 15 bp, Homo sapiens
tctcctgctgttagc

SEQ ID NO: 497644 - DNA, 15 bp, Homo sapiens
ctcctgctgttagcg

SEQ ID NO: 497645 - DNA, 15 bp, Homo sapiens
tcctgctgttagcgg

SEQ ID NO: 497646 - DNA, 15 bp, Homo sapiens
cctgctgttagcggt

SEQ ID NO: 497647 - DNA, 15 bp, Homo sapiens
ctgctgttagcggtg

SEQ ID NO: 497648 - DNA, 15 bp, Homo sapiens
tgctgttagcggtga

SEQ ID NO: 497649 - DNA, 15 bp, Homo sapiens
gctgttagcggtgac

SEQ ID NO: 497650 - DNA, 15 bp, Homo sapiens
ctgttagcggtgact

SEQ ID NO: 497651 - DNA, 15 bp, Homo sapiens
tgttagcggtgactc

SEQ ID NO: 497652 - DNA, 15 bp, Homo sapiens
gttagcggtgactca

SEQ ID NO: 497653 - DNA, 15 bp, Homo sapiens
ttagcggtgactcac

SEQ ID NO: 497654 - DNA, 15 bp, Homo sapiens
tagcggtgactcaca

SEQ ID NO: 497655 - DNA, 15 bp, Homo sapiens
agcggtgactcacat

SEQ ID NO: 497656 - DNA, 15 bp, Homo sapiens
gcggtgactcacatt

SEQ ID NO: 497657 - DNA, 15 bp, Homo sapiens
cggtgactcacattc

SEQ ID NO: 497658 - DNA, 15 bp, Homo sapiens
ggtgactcacattcc

SEQ ID NO: 497659 - DNA, 15 bp, Homo sapiens
gtgactcacattccc

SEQ ID NO: 497660 - DNA, 15 bp, Homo sapiens
tgactcacattccca

SEQ ID NO: 497661 - DNA, 15 bp, Homo sapiens
gactcacattcccag

SEQ ID NO: 497662 - DNA, 15 bp, Homo sapiens
actcacattcccagt

SEQ ID NO: 497663 - DNA, 15 bp, Homo sapiens
ctcacattcccagtg

SEQ ID NO: 497664 - DNA, 15 bp, Homo sapiens
tcacattcccagtga

SEQ ID NO: 497665 - DNA, 15 bp, Homo sapiens
cacattcccagtgat

SEQ ID NO: 497666 - DNA, 15 bp, Homo sapiens
acattcccagtgatt

SEQ ID NO: 497667 - DNA, 15 bp, Homo sapiens
cattcccagtgattt

SEQ ID NO: 497668 - DNA, 15 bp, Homo sapiens
attcccagtgattta

SEQ ID NO: 497669 - DNA, 15 bp, Homo sapiens
ttcccagtgatttag

SEQ ID NO: 497670 - DNA, 15 bp, Homo sapiens
tcccagtgatttaga

SEQ ID NO: 497671 - DNA, 15 bp, Homo sapiens
cccagtgatttagaa

SEQ ID NO: 497672 - DNA, 15 bp, Homo sapiens
ccagtgatttagaaa

SEQ ID NO: 497673 - DNA, 15 bp, Homo sapiens
cagtgatttagaaaa

SEQ ID NO: 497674 - DNA, 15 bp, Homo sapiens
agtgatttagaaaaa

SEQ ID NO: 497675 - DNA, 15 bp, Homo sapiens
gtgatttagaaaaac

SEQ ID NO: 497676 - DNA, 15 bp, Homo sapiens
tgatttagaaaaact

SEQ ID NO: 497677 - DNA, 15 bp, Homo sapiens
gatttagaaaaactg

SEQ ID NO: 497678 - DNA, 15 bp, Homo sapiens
atttagaaaaactgt

SEQ ID NO: 497679 - DNA, 15 bp, Homo sapiens
tttagaaaaactgtg

SEQ ID NO: 497680 - DNA, 15 bp, Homo sapiens
ttagaaaaactgtgg

SEQ ID NO: 497681 - DNA, 15 bp, Homo sapiens
tagaaaaactgtggt

SEQ ID NO: 497682 - DNA, 15 bp, Homo sapiens
agaaaaactgtggtg

SEQ ID NO: 497683 - DNA, 15 bp, Homo sapiens
gaaaaactgtggtgc

SEQ ID NO: 497684 - DNA, 15 bp, Homo sapiens
aaaaactgtggtgcc

SEQ ID NO: 497685 - DNA, 15 bp, Homo sapiens
aaaactgtggtgccg

SEQ ID NO: 497686 - DNA, 15 bp, Homo sapiens
aaactgtggtgccga

SEQ ID NO: 497687 - DNA, 15 bp, Homo sapiens
aactgtggtgccgag

SEQ ID NO: 497688 - DNA, 15 bp, Homo sapiens
actgtggtgccgagt

SEQ ID NO: 497689 - DNA, 15 bp, Homo sapiens
ctgtggtgccgagtg

SEQ ID NO: 497690 - DNA, 15 bp, Homo sapiens
tgtggtgccgagtga

SEQ ID NO: 497691 - DNA, 15 bp, Homo sapiens
gtggtgccgagtgaa

SEQ ID NO: 497692 - DNA, 15 bp, Homo sapiens
tggtgccgagtgaaa

SEQ ID NO: 497693 - DNA, 15 bp, Homo sapiens
ggtgccgagtgaaag

SEQ ID NO: 497694 - DNA, 15 bp, Homo sapiens
gtgccgagtgaaaga

SEQ ID NO: 497695 - DNA, 15 bp, Homo sapiens
tgccgagtgaaagaa

SEQ ID NO: 497696 - DNA, 15 bp, Homo sapiens
gccgagtgaaagaaa

SEQ ID NO: 497697 - DNA, 15 bp, Homo sapiens
ccgagtgaaagaaaa

SEQ ID NO: 497698 - DNA, 15 bp, Homo sapiens
cgagtgaaagaaaaa

SEQ ID NO: 497699 - DNA, 15 bp, Homo sapiens
gagtgaaagaaaaaa

SEQ ID NO: 497700 - DNA, 15 bp, Homo sapiens
agtgaaagaaaaaaa

SEQ ID NO: 497701 - DNA, 15 bp, Homo sapiens
gtgaaagaaaaaaaa

SEQ ID NO: 497702 - DNA, 15 bp, Homo sapiens
tgaaagaaaaaaaaa

SEQ ID NO: 497703 - DNA, 15 bp, Homo sapiens
gaaagaaaaaaaaaa

SEQ ID NO: 497704 - DNA, 15 bp, Homo sapiens
aaagaaaaaaaaaaa

SEQ ID NO: 497705 - DNA, 15 bp, Homo sapiens
aagaaaaaaaaaaaa

SEQ ID NO: 497706 - DNA, 15 bp, Homo sapiens
agaaaaaaaaaaaag

SEQ ID NO: 497707 - DNA, 15 bp, Homo sapiens
gaaaaaaaaaaaagc

SEQ ID NO: 497708 - DNA, 15 bp, Homo sapiens
aaaaaaaaaaaagca

SEQ ID NO: 497709 - DNA, 15 bp, Homo sapiens
aaaaaaaaaaagcaa

SEQ ID NO: 497710 - DNA, 15 bp, Homo sapiens
aaaaaaaaaagcaaa

SEQ ID NO: 497711 - DNA, 15 bp, Homo sapiens
aaaaaaaaagcaaac

SEQ ID NO: 497712 - DNA, 15 bp, Homo sapiens
aaaaaaaagcaaaca

SEQ ID NO: 497713 - DNA, 15 bp, Homo sapiens
aaaaaaagcaaacac

SEQ ID NO: 497714 - DNA, 15 bp, Homo sapiens
aaaaaagcaaacacc

SEQ ID NO: 497715 - DNA, 15 bp, Homo sapiens
aaaaagcaaacaccc

SEQ ID NO: 497716 - DNA, 15 bp, Homo sapiens
aaaagcaaacaccct

SEQ ID NO: 497717 - DNA, 15 bp, Homo sapiens
aaagcaaacaccctt

SEQ ID NO: 497718 - DNA, 15 bp, Homo sapiens
aagcaaacaccctta

SEQ ID NO: 497719 - DNA, 15 bp, Homo sapiens
agcaaacacccttag

SEQ ID NO: 497720 - DNA, 15 bp, Homo sapiens
gcaaacacccttaga

SEQ ID NO: 497721 - DNA, 15 bp, Homo sapiens
caaacacccttagac

SEQ ID NO: 497722 - DNA, 15 bp, Homo sapiens
aaacacccttagaca

SEQ ID NO: 497723 - DNA, 15 bp, Homo sapiens
aacacccttagacaa

SEQ ID NO: 497724 - DNA, 15 bp, Homo sapiens
acacccttagacaaa

SEQ ID NO: 497725 - DNA, 15 bp, Homo sapiens
cacccttagacaaaa

SEQ ID NO: 497726 - DNA, 15 bp, Homo sapiens
acccttagacaaaag

SEQ ID NO: 497727 - DNA, 15 bp, Homo sapiens
cccttagacaaaaga

SEQ ID NO: 497728 - DNA, 15 bp, Homo sapiens
ccttagacaaaagaa

SEQ ID NO: 497729 - DNA, 15 bp, Homo sapiens
cttagacaaaagaaa

SEQ ID NO: 497730 - DNA, 15 bp, Homo sapiens
ttagacaaaagaaaa

SEQ ID NO: 497731 - DNA, 15 bp, Homo sapiens
tagacaaaagaaaaa

SEQ ID NO: 497732 - DNA, 15 bp, Homo sapiens
agacaaaagaaaaaa

SEQ ID NO: 497733 - DNA, 15 bp, Homo sapiens
gacaaaagaaaaaag

SEQ ID NO: 497734 - DNA, 15 bp, Homo sapiens
acaaaagaaaaaagc

SEQ ID NO: 497735 - DNA, 15 bp, Homo sapiens
caaaagaaaaaagct

SEQ ID NO: 497736 - DNA, 15 bp, Homo sapiens
aaaagaaaaaagctc

SEQ ID NO: 497737 - DNA, 15 bp, Homo sapiens
aaagaaaaaagctcc

SEQ ID NO: 497738 - DNA, 15 bp, Homo sapiens
aagaaaaaagctcca

SEQ ID NO: 497739 - DNA, 15 bp, Homo sapiens
agaaaaaagctccac

SEQ ID NO: 497740 - DNA, 15 bp, Homo sapiens
gaaaaaagctccact

SEQ ID NO: 497741 - DNA, 15 bp, Homo sapiens
aaaaaagctccactc

SEQ ID NO: 497742 - DNA, 15 bp, Homo sapiens
aaaaagctccactct

SEQ ID NO: 497743 - DNA, 15 bp, Homo sapiens
aaaagctccactctt

SEQ ID NO: 497744 - DNA, 15 bp, Homo sapiens
aaagctccactcttt

SEQ ID NO: 497745 - DNA, 15 bp, Homo sapiens
aagctccactctttc

SEQ ID NO: 497746 - DNA, 15 bp, Homo sapiens
agctccactctttcc

SEQ ID NO: 497747 - DNA, 15 bp, Homo sapiens
gctccactctttccg

SEQ ID NO: 497748 - DNA, 15 bp, Homo sapiens
ctccactctttccgc

SEQ ID NO: 497749 - DNA, 15 bp, Homo sapiens
tccactctttccgcg

SEQ ID NO: 497750 - DNA, 15 bp, Homo sapiens
ccactctttccgcga

SEQ ID NO: 497751 - DNA, 15 bp, Homo sapiens
cactctttccgcgag

SEQ ID NO: 497752 - DNA, 15 bp, Homo sapiens
actctttccgcgagc

SEQ ID NO: 497753 - DNA, 15 bp, Homo sapiens
ctctttccgcgagcg

SEQ ID NO: 497754 - DNA, 15 bp, Homo sapiens
tctttccgcgagcgg

SEQ ID NO: 497755 - DNA, 15 bp, Homo sapiens
ctttccgcgagcggg

SEQ ID NO: 497756 - DNA, 15 bp, Homo sapiens
tttccgcgagcggga

SEQ ID NO: 497757 - DNA, 15 bp, Homo sapiens
ttccgcgagcgggaa

SEQ ID NO: 497758 - DNA, 15 bp, Homo sapiens
tccgcgagcgggaaa

SEQ ID NO: 497759 - DNA, 15 bp, Homo sapiens
ccgcgagcgggaaaa

SEQ ID NO: 497760 - DNA, 15 bp, Homo sapiens
cgcgagcgggaaaaa

SEQ ID NO: 497761 - DNA, 15 bp, Homo sapiens
gcgagcgggaaaaaa

SEQ ID NO: 497762 - DNA, 15 bp, Homo sapiens
cgagcgggaaaaaag

SEQ ID NO: 497763 - DNA, 15 bp, Homo sapiens
gagcgggaaaaaagg

SEQ ID NO: 497764 - DNA, 15 bp, Homo sapiens
agcgggaaaaaaggt

SEQ ID NO: 497765 - DNA, 15 bp, Homo sapiens
gcgggaaaaaaggtt

SEQ ID NO: 497766 - DNA, 15 bp, Homo sapiens
cgggaaaaaaggttt

SEQ ID NO: 497767 - DNA, 15 bp, Homo sapiens
gggaaaaaaggtttg

SEQ ID NO: 497768 - DNA, 15 bp, Homo sapiens
ggaaaaaaggtttgg

SEQ ID NO: 497769 - DNA, 15 bp, Homo sapiens
gaaaaaaggtttggt

SEQ ID NO: 497770 - DNA, 15 bp, Homo sapiens
aaaaaaggtttggtt

SEQ ID NO: 497771 - DNA, 15 bp, Homo sapiens
aaaaaggtttggttc

SEQ ID NO: 497772 - DNA, 15 bp, Homo sapiens
aaaaggtttggttca

SEQ ID NO: 497773 - DNA, 15 bp, Homo sapiens
aaaggtttggttcag

SEQ ID NO: 497774 - DNA, 15 bp, Homo sapiens
aaggtttggttcagc

SEQ ID NO: 497775 - DNA, 15 bp, Homo sapiens
aggtttggttcagca

SEQ ID NO: 497776 - DNA, 15 bp, Homo sapiens
ggtttggttcagcaa

SEQ ID NO: 497777 - DNA, 15 bp, Homo sapiens
gtttggttcagcaag

SEQ ID NO: 497778 - DNA, 15 bp, Homo sapiens
tttggttcagcaagt

SEQ ID NO: 497779 - DNA, 15 bp, Homo sapiens
ttggttcagcaagtg

SEQ ID NO: 497780 - DNA, 15 bp, Homo sapiens
tggttcagcaagtga

SEQ ID NO: 497781 - DNA, 15 bp, Homo sapiens
ggttcagcaagtgat

SEQ ID NO: 497782 - DNA, 15 bp, Homo sapiens
gttcagcaagtgatg

SEQ ID NO: 497783 - DNA, 15 bp, Homo sapiens
ttcagcaagtgatgc

SEQ ID NO: 497784 - DNA, 15 bp, Homo sapiens
tcagcaagtgatgct

SEQ ID NO: 497785 - DNA, 15 bp, Homo sapiens
cagcaagtgatgcta

SEQ ID NO: 497786 - DNA, 15 bp, Homo sapiens
agcaagtgatgctat

SEQ ID NO: 497787 - DNA, 15 bp, Homo sapiens
gcaagtgatgctatt

SEQ ID NO: 497788 - DNA, 15 bp, Homo sapiens
caagtgatgctattt

SEQ ID NO: 497789 - DNA, 15 bp, Homo sapiens
aagtgatgctatttc

SEQ ID NO: 497790 - DNA, 15 bp, Homo sapiens
agtgatgctatttca

SEQ ID NO: 497791 - DNA, 15 bp, Homo sapiens
gtgatgctatttcag

SEQ ID NO: 497792 - DNA, 15 bp, Homo sapiens
tgatgctatttcagt

SEQ ID NO: 497793 - DNA, 15 bp, Homo sapiens
gatgctatttcagtg

SEQ ID NO: 497794 - DNA, 15 bp, Homo sapiens
atgctatttcagtga

SEQ ID NO: 497795 - DNA, 15 bp, Homo sapiens
tgctatttcagtgaa

SEQ ID NO: 497796 - DNA, 15 bp, Homo sapiens
gctatttcagtgaat

SEQ ID NO: 497797 - DNA, 15 bp, Homo sapiens
ctatttcagtgaatc

SEQ ID NO: 497798 - DNA, 15 bp, Homo sapiens
tatttcagtgaatca

SEQ ID NO: 497799 - DNA, 15 bp, Homo sapiens
atttcagtgaatcag

SEQ ID NO: 497800 - DNA, 15 bp, Homo sapiens
tttcagtgaatcaga

SEQ ID NO: 497801 - DNA, 15 bp, Homo sapiens
ttcagtgaatcagac

SEQ ID NO: 497802 - DNA, 15 bp, Homo sapiens
tcagtgaatcagacg

SEQ ID NO: 497803 - DNA, 15 bp, Homo sapiens
cagtgaatcagacgc

SEQ ID NO: 497804 - DNA, 15 bp, Homo sapiens
agtgaatcagacgct

SEQ ID NO: 497805 - DNA, 15 bp, Homo sapiens
gtgaatcagacgctc

SEQ ID NO: 497806 - DNA, 15 bp, Homo sapiens
tgaatcagacgctct

SEQ ID NO: 497807 - DNA, 15 bp, Homo sapiens
gaatcagacgctctg

SEQ ID NO: 497808 - DNA, 15 bp, Homo sapiens
aatcagacgctctgg

SEQ ID NO: 497809 - DNA, 15 bp, Homo sapiens
atcagacgctctggg

SEQ ID NO: 497810 - DNA, 15 bp, Homo sapiens
tcagacgctctgggg

SEQ ID NO: 497811 - DNA, 15 bp, Homo sapiens
cagacgctctggggc

SEQ ID NO: 497812 - DNA, 15 bp, Homo sapiens
agacgctctggggct

SEQ ID NO: 497813 - DNA, 15 bp, Homo sapiens
gacgctctggggctc

SEQ ID NO: 497814 - DNA, 15 bp, Homo sapiens
acgctctggggctct

SEQ ID NO: 497815 - DNA, 15 bp, Homo sapiens
cgctctggggctctg

SEQ ID NO: 497816 - DNA, 15 bp, Homo sapiens
gctctggggctctgc

SEQ ID NO: 497817 - DNA, 15 bp, Homo sapiens
ctctggggctctgca

SEQ ID NO: 497818 - DNA, 15 bp, Homo sapiens
tctggggctctgcaa

SEQ ID NO: 497819 - DNA, 15 bp, Homo sapiens
ctggggctctgcaag

SEQ ID NO: 497820 - DNA, 15 bp, Homo sapiens
tggggctctgcaagg

SEQ ID NO: 497821 - DNA, 15 bp, Homo sapiens
ggggctctgcaagga

SEQ ID NO: 497822 - DNA, 15 bp, Homo sapiens
gggctctgcaaggaa

SEQ ID NO: 497823 - DNA, 15 bp, Homo sapiens
ggctctgcaaggaaa

SEQ ID NO: 497824 - DNA, 15 bp, Homo sapiens
gctctgcaaggaaac

SEQ ID NO: 497825 - DNA, 15 bp, Homo sapiens
ctctgcaaggaaacg

SEQ ID NO: 497826 - DNA, 15 bp, Homo sapiens
tctgcaaggaaacgc

SEQ ID NO: 497827 - DNA, 15 bp, Homo sapiens
ctgcaaggaaacgca

SEQ ID NO: 497828 - DNA, 15 bp, Homo sapiens
tgcaaggaaacgcac

SEQ ID NO: 497829 - DNA, 15 bp, Homo sapiens
gcaaggaaacgcacg

SEQ ID NO: 497830 - DNA, 15 bp, Homo sapiens
caaggaaacgcacgg

SEQ ID NO: 497831 - DNA, 15 bp, Homo sapiens
aaggaaacgcacgga

SEQ ID NO: 497832 - DNA, 15 bp, Homo sapiens
aggaaacgcacggac

SEQ ID NO: 497833 - DNA, 15 bp, Homo sapiens
ggaaacgcacggact

SEQ ID NO: 497834 - DNA, 15 bp, Homo sapiens
gaaacgcacggactg

SEQ ID NO: 497835 - DNA, 15 bp, Homo sapiens
aaacgcacggactgg

SEQ ID NO: 497836 - DNA, 15 bp, Homo sapiens
aacgcacggactggg

SEQ ID NO: 497837 - DNA, 15 bp, Homo sapiens
acgcacggactggga

SEQ ID NO: 497838 - DNA, 15 bp, Homo sapiens
cgcacggactgggag

SEQ ID NO: 497839 - DNA, 15 bp, Homo sapiens
gcacggactgggaga

SEQ ID NO: 497840 - DNA, 15 bp, Homo sapiens
cacggactgggagaa

SEQ ID NO: 497841 - DNA, 15 bp, Homo sapiens
acggactgggagaag

SEQ ID NO: 497842 - DNA, 15 bp, Homo sapiens
cggactgggagaagg

SEQ ID NO: 497843 - DNA, 15 bp, Homo sapiens
ggactgggagaagga

SEQ ID NO: 497844 - DNA, 15 bp, Homo sapiens
gactgggagaaggaa

SEQ ID NO: 497845 - DNA, 15 bp, Homo sapiens
actgggagaaggaag

SEQ ID NO: 497846 - DNA, 15 bp, Homo sapiens
ctgggagaaggaagt

SEQ ID NO: 497847 - DNA, 15 bp, Homo sapiens
tgggagaaggaagtg

SEQ ID NO: 497848 - DNA, 15 bp, Homo sapiens
gggagaaggaagtgg

SEQ ID NO: 497849 - DNA, 15 bp, Homo sapiens
ggagaaggaagtggg

SEQ ID NO: 497850 - DNA, 15 bp, Homo sapiens
gagaaggaagtggga

SEQ ID NO: 497851 - DNA, 15 bp, Homo sapiens
agaaggaagtgggag

SEQ ID NO: 497852 - DNA, 15 bp, Homo sapiens
gaaggaagtgggagc

SEQ ID NO: 497853 - DNA, 15 bp, Homo sapiens
aaggaagtgggagcc

SEQ ID NO: 497854 - DNA, 15 bp, Homo sapiens
aggaagtgggagcct

SEQ ID NO: 497855 - DNA, 15 bp, Homo sapiens
ggaagtgggagccta

SEQ ID NO: 497856 - DNA, 15 bp, Homo sapiens
gaagtgggagcctag

SEQ ID NO: 497857 - DNA, 15 bp, Homo sapiens
aagtgggagcctaga

SEQ ID NO: 497858 - DNA, 15 bp, Homo sapiens
agtgggagcctagag

SEQ ID NO: 497859 - DNA, 15 bp, Homo sapiens
gtgggagcctagagt

SEQ ID NO: 497860 - DNA, 15 bp, Homo sapiens
tgggagcctagagtt

SEQ ID NO: 497861 - DNA, 15 bp, Homo sapiens
gggagcctagagttt

SEQ ID NO: 497862 - DNA, 15 bp, Homo sapiens
ggagcctagagtttt

SEQ ID NO: 497863 - DNA, 15 bp, Homo sapiens
gagcctagagttttg

SEQ ID NO: 497864 - DNA, 15 bp, Homo sapiens
agcctagagttttgc

SEQ ID NO: 497865 - DNA, 15 bp, Homo sapiens
gcctagagttttgct

SEQ ID NO: 497866 - DNA, 15 bp, Homo sapiens
cctagagttttgctc

SEQ ID NO: 497867 - DNA, 15 bp, Homo sapiens
ctagagttttgctct

SEQ ID NO: 497868 - DNA, 15 bp, Homo sapiens
tagagttttgctctc

SEQ ID NO: 497869 - DNA, 15 bp, Homo sapiens
agagttttgctctcg

SEQ ID NO: 497870 - DNA, 15 bp, Homo sapiens
gagttttgctctcgg

SEQ ID NO: 497871 - DNA, 15 bp, Homo sapiens
agttttgctctcggc

SEQ ID NO: 497872 - DNA, 15 bp, Homo sapiens
gttttgctctcggca

SEQ ID NO: 497873 - DNA, 15 bp, Homo sapiens
ttttgctctcggcaa

SEQ ID NO: 497874 - DNA, 15 bp, Homo sapiens
tttgctctcggcaaa

SEQ ID NO: 497875 - DNA, 15 bp, Homo sapiens
ttgctctcggcaaaa

SEQ ID NO: 497876 - DNA, 15 bp, Homo sapiens
tgctctcggcaaaac

SEQ ID NO: 497877 - DNA, 15 bp, Homo sapiens
gctctcggcaaaaca

SEQ ID NO: 497878 - DNA, 15 bp, Homo sapiens
ctctcggcaaaacaa

SEQ ID NO: 497879 - DNA, 15 bp, Homo sapiens
tctcggcaaaacaag

SEQ ID NO: 497880 - DNA, 15 bp, Homo sapiens
ctcggcaaaacaaga

SEQ ID NO: 497881 - DNA, 15 bp, Homo sapiens
tcggcaaaacaagaa

SEQ ID NO: 497882 - DNA, 15 bp, Homo sapiens
cggcaaaacaagaac

SEQ ID NO: 497883 - DNA, 15 bp, Homo sapiens
ggcaaaacaagaact

SEQ ID NO: 497884 - DNA, 15 bp, Homo sapiens
gcaaaacaagaactc

SEQ ID NO: 497885 - DNA, 15 bp, Homo sapiens
caaaacaagaactcg

SEQ ID NO: 497886 - DNA, 15 bp, Homo sapiens
aaaacaagaactcgg

SEQ ID NO: 497887 - DNA, 15 bp, Homo sapiens
aaacaagaactcggc

SEQ ID NO: 497888 - DNA, 15 bp, Homo sapiens
aacaagaactcggct

SEQ ID NO: 497889 - DNA, 15 bp, Homo sapiens
acaagaactcggctt

SEQ ID NO: 497890 - DNA, 15 bp, Homo sapiens
caagaactcggcttg

SEQ ID NO: 497891 - DNA, 15 bp, Homo sapiens
aagaactcggcttgt

SEQ ID NO: 497892 - DNA, 15 bp, Homo sapiens
agaactcggcttgtc

SEQ ID NO: 497893 - DNA, 15 bp, Homo sapiens
gaactcggcttgtcc

SEQ ID NO: 497894 - DNA, 15 bp, Homo sapiens
aactcggcttgtcct

SEQ ID NO: 497895 - DNA, 15 bp, Homo sapiens
actcggcttgtcctc

SEQ ID NO: 497896 - DNA, 15 bp, Homo sapiens
ctcggcttgtcctcc

SEQ ID NO: 497897 - DNA, 15 bp, Homo sapiens
tcggcttgtcctccc

SEQ ID NO: 497898 - DNA, 15 bp, Homo sapiens
cggcttgtcctccca

SEQ ID NO: 497899 - DNA, 15 bp, Homo sapiens
ggcttgtcctcccag

SEQ ID NO: 497900 - DNA, 15 bp, Homo sapiens
gcttgtcctcccagg

SEQ ID NO: 497901 - DNA, 15 bp, Homo sapiens
cttgtcctcccaggc

SEQ ID NO: 497902 - DNA, 15 bp, Homo sapiens
ttgtcctcccaggcc

SEQ ID NO: 497903 - DNA, 15 bp, Homo sapiens
tgtcctcccaggccg

SEQ ID NO: 497904 - DNA, 15 bp, Homo sapiens
gtcctcccaggccgg

SEQ ID NO: 497905 - DNA, 15 bp, Homo sapiens
tcctcccaggccggc

SEQ ID NO: 497906 - DNA, 15 bp, Homo sapiens
cctcccaggccggcg

SEQ ID NO: 497907 - DNA, 15 bp, Homo sapiens
ctcccaggccggcgg

SEQ ID NO: 497908 - DNA, 15 bp, Homo sapiens
tcccaggccggcggt

SEQ ID NO: 497909 - DNA, 15 bp, Homo sapiens
cccaggccggcggtt

SEQ ID NO: 497910 - DNA, 15 bp, Homo sapiens
ccaggccggcggttt

SEQ ID NO: 497911 - DNA, 15 bp, Homo sapiens
caggccggcggtttc

SEQ ID NO: 497912 - DNA, 15 bp, Homo sapiens
aggccggcggtttcc

SEQ ID NO: 497913 - DNA, 15 bp, Homo sapiens
ggccggcggtttccg

SEQ ID NO: 497914 - DNA, 15 bp, Homo sapiens
gccggcggtttccgt

SEQ ID NO: 497915 - DNA, 15 bp, Homo sapiens
ccggcggtttccgta

SEQ ID NO: 497916 - DNA, 15 bp, Homo sapiens
cggcggtttccgtac

SEQ ID NO: 497917 - DNA, 15 bp, Homo sapiens
ggcggtttccgtacg

SEQ ID NO: 497918 - DNA, 15 bp, Homo sapiens
gcggtttccgtacgg

SEQ ID NO: 497919 - DNA, 15 bp, Homo sapiens
cggtttccgtacggc

SEQ ID NO: 497920 - DNA, 15 bp, Homo sapiens
ggtttccgtacggca

SEQ ID NO: 497921 - DNA, 15 bp, Homo sapiens
gtttccgtacggcaa

SEQ ID NO: 497922 - DNA, 15 bp, Homo sapiens
tttccgtacggcaag

SEQ ID NO: 497923 - DNA, 15 bp, Homo sapiens
ttccgtacggcaaga

SEQ ID NO: 497924 - DNA, 15 bp, Homo sapiens
tccgtacggcaagac

SEQ ID NO: 497925 - DNA, 15 bp, Homo sapiens
ccgtacggcaagaca

SEQ ID NO: 497926 - DNA, 15 bp, Homo sapiens
cgtacggcaagacaa

SEQ ID NO: 497927 - DNA, 15 bp, Homo sapiens
gtacggcaagacaag

SEQ ID NO: 497928 - DNA, 15 bp, Homo sapiens
tacggcaagacaagg

SEQ ID NO: 497929 - DNA, 15 bp, Homo sapiens
acggcaagacaaggc

SEQ ID NO: 497930 - DNA, 15 bp, Homo sapiens
cggcaagacaaggcg

SEQ ID NO: 497931 - DNA, 15 bp, Homo sapiens
ggcaagacaaggcgc

SEQ ID NO: 497932 - DNA, 15 bp, Homo sapiens
gcaagacaaggcgcg

SEQ ID NO: 497933 - DNA, 15 bp, Homo sapiens
caagacaaggcgcgg

SEQ ID NO: 497934 - DNA, 15 bp, Homo sapiens
aagacaaggcgcgga

SEQ ID NO: 497935 - DNA, 15 bp, Homo sapiens
agacaaggcgcggaa

SEQ ID NO: 497936 - DNA, 15 bp, Homo sapiens
gacaaggcgcggaaa

SEQ ID NO: 497937 - DNA, 15 bp, Homo sapiens
acaaggcgcggaaaa

SEQ ID NO: 497938 - DNA, 15 bp, Homo sapiens
caaggcgcggaaaac

SEQ ID NO: 497939 - DNA, 15 bp, Homo sapiens
aaggcgcggaaaaca

SEQ ID NO: 497940 - DNA, 15 bp, Homo sapiens
aggcgcggaaaacat

SEQ ID NO: 497941 - DNA, 15 bp, Homo sapiens
ggcgcggaaaacatt

SEQ ID NO: 497942 - DNA, 15 bp, Homo sapiens
gcgcggaaaacattt

SEQ ID NO: 497943 - DNA, 15 bp, Homo sapiens
cgcggaaaacatttt

SEQ ID NO: 497944 - DNA, 15 bp, Homo sapiens
gcggaaaacattttt

SEQ ID NO: 497945 - DNA, 15 bp, Homo sapiens
cggaaaacattttta

SEQ ID NO: 497946 - DNA, 15 bp, Homo sapiens
ggaaaacatttttac

SEQ ID NO: 497947 - DNA, 15 bp, Homo sapiens
gaaaacatttttacc

SEQ ID NO: 497948 - DNA, 15 bp, Homo sapiens
aaaacatttttacca

SEQ ID NO: 497949 - DNA, 15 bp, Homo sapiens
aaacatttttaccat

SEQ ID NO: 497950 - DNA, 15 bp, Homo sapiens
aacatttttaccatc

SEQ ID NO: 497951 - DNA, 15 bp, Homo sapiens
acatttttaccatct

SEQ ID NO: 497952 - DNA, 15 bp, Homo sapiens
catttttaccatctg

SEQ ID NO: 497953 - DNA, 15 bp, Homo sapiens
atttttaccatctga

SEQ ID NO: 497954 - DNA, 15 bp, Homo sapiens
tttttaccatctgac

SEQ ID NO: 497955 - DNA, 15 bp, Homo sapiens
ttttaccatctgacg

SEQ ID NO: 497956 - DNA, 15 bp, Homo sapiens
tttaccatctgacgc

SEQ ID NO: 497957 - DNA, 15 bp, Homo sapiens
ttaccatctgacgct

SEQ ID NO: 497958 - DNA, 15 bp, Homo sapiens
taccatctgacgctg

SEQ ID NO: 497959 - DNA, 15 bp, Homo sapiens
accatctgacgctgt

SEQ ID NO: 497960 - DNA, 15 bp, Homo sapiens
ccatctgacgctgta

SEQ ID NO: 497961 - DNA, 15 bp, Homo sapiens
catctgacgctgtag

SEQ ID NO: 497962 - DNA, 15 bp, Homo sapiens
atctgacgctgtagt

SEQ ID NO: 497963 - DNA, 15 bp, Homo sapiens
tctgacgctgtagtc

SEQ ID NO: 497964 - DNA, 15 bp, Homo sapiens
ctgacgctgtagtct

SEQ ID NO: 497965 - DNA, 15 bp, Homo sapiens
tgacgctgtagtctg

SEQ ID NO: 497966 - DNA, 15 bp, Homo sapiens
gacgctgtagtctgt

SEQ ID NO: 497967 - DNA, 15 bp, Homo sapiens
acgctgtagtctgtc

SEQ ID NO: 497968 - DNA, 15 bp, Homo sapiens
cgctgtagtctgtcc

SEQ ID NO: 497969 - DNA, 15 bp, Homo sapiens
gctgtagtctgtcct

SEQ ID NO: 497970 - DNA, 15 bp, Homo sapiens
ctgtagtctgtcctt

SEQ ID NO: 497971 - DNA, 15 bp, Homo sapiens
tgtagtctgtccttt

SEQ ID NO: 497972 - DNA, 15 bp, Homo sapiens
gtagtctgtccttta

SEQ ID NO: 497973 - DNA, 15 bp, Homo sapiens
tagtctgtcctttag

SEQ ID NO: 497974 - DNA, 15 bp, Homo sapiens
agtctgtcctttaga

SEQ ID NO: 497975 - DNA, 15 bp, Homo sapiens
gtctgtcctttagaa

SEQ ID NO: 497976 - DNA, 15 bp, Homo sapiens
tggaggccgccattc

SEQ ID NO: 497977 - DNA, 15 bp, Homo sapiens
ggaggccgccattca

SEQ ID NO: 497978 - DNA, 15 bp, Homo sapiens
gaggccgccattcac

SEQ ID NO: 497979 - DNA, 15 bp, Homo sapiens
aggccgccattcacc

SEQ ID NO: 497980 - DNA, 15 bp, Homo sapiens
ggccgccattcacct

SEQ ID NO: 497981 - DNA, 15 bp, Homo sapiens
gccgccattcacctc

SEQ ID NO: 497982 - DNA, 15 bp, Homo sapiens
ccgccattcacctcg

SEQ ID NO: 497983 - DNA, 15 bp, Homo sapiens
cgccattcacctcgt

SEQ ID NO: 497984 - DNA, 15 bp, Homo sapiens
gccattcacctcgtt

SEQ ID NO: 497985 - DNA, 15 bp, Homo sapiens
ccattcacctcgttt

SEQ ID NO: 497986 - DNA, 15 bp, Homo sapiens
cattcacctcgtttt

SEQ ID NO: 497987 - DNA, 15 bp, Homo sapiens
attcacctcgttttt

SEQ ID NO: 497988 - DNA, 15 bp, Homo sapiens
ttcacctcgtttttt

SEQ ID NO: 497989 - DNA, 15 bp, Homo sapiens
tcacctcgttttttt

SEQ ID NO: 497990 - DNA, 15 bp, Homo sapiens
cacctcgtttttttt

SEQ ID NO: 497991 - DNA, 15 bp, Homo sapiens
acctcgttttttttt

SEQ ID NO: 497992 - DNA, 15 bp, Homo sapiens
cctcgtttttttttt

SEQ ID NO: 497993 - DNA, 15 bp, Homo sapiens
ctcgttttttttttt

SEQ ID NO: 497994 - DNA, 15 bp, Homo sapiens
tcgtttttttttttc

SEQ ID NO: 497995 - DNA, 15 bp, Homo sapiens
cgtttttttttttcc

SEQ ID NO: 497996 - DNA, 15 bp, Homo sapiens
gtttttttttttcct

SEQ ID NO: 497997 - DNA, 15 bp, Homo sapiens
tttttttttttccta

SEQ ID NO: 497998 - DNA, 15 bp, Homo sapiens
ttttttttttcctaa

SEQ ID NO: 497999 - DNA, 15 bp, Homo sapiens
tttttttttcctaaa

SEQ ID NO: 498000 - DNA, 15 bp, Homo sapiens
ttttttttcctaaaa

SEQ ID NO: 498001 - DNA, 15 bp, Homo sapiens
tttttttcctaaaag

SEQ ID NO: 498002 - DNA, 15 bp, Homo sapiens
ttttttcctaaaagg

SEQ ID NO: 498003 - DNA, 15 bp, Homo sapiens
tttttcctaaaagga

SEQ ID NO: 498004 - DNA, 15 bp, Homo sapiens
ttttcctaaaaggat

SEQ ID NO: 498005 - DNA, 15 bp, Homo sapiens
tttcctaaaaggatt

SEQ ID NO: 498006 - DNA, 15 bp, Homo sapiens
ttcctaaaaggattt

SEQ ID NO: 498007 - DNA, 15 bp, Homo sapiens
tcctaaaaggatttt

SEQ ID NO: 498008 - DNA, 15 bp, Homo sapiens
cctaaaaggattttt

SEQ ID NO: 498009 - DNA, 15 bp, Homo sapiens
ctaaaaggatttttt

SEQ ID NO: 498010 - DNA, 15 bp, Homo sapiens
taaaaggattttttt

SEQ ID NO: 498011 - DNA, 15 bp, Homo sapiens
aaaaggatttttttt

SEQ ID NO: 498012 - DNA, 15 bp, Homo sapiens
aaaggattttttttt

SEQ ID NO: 498013 - DNA, 15 bp, Homo sapiens
aaggatttttttttc

SEQ ID NO: 498014 - DNA, 15 bp, Homo sapiens
aggatttttttttct

SEQ ID NO: 498015 - DNA, 15 bp, Homo sapiens
ggatttttttttctg

SEQ ID NO: 498016 - DNA, 15 bp, Homo sapiens
gatttttttttctga

SEQ ID NO: 498017 - DNA, 15 bp, Homo sapiens
atttttttttctgag

SEQ ID NO: 498018 - DNA, 15 bp, Homo sapiens
tttttttttctgagt

SEQ ID NO: 498019 - DNA, 15 bp, Homo sapiens
ttttttttctgagtg

SEQ ID NO: 498020 - DNA, 15 bp, Homo sapiens
tttttttctgagtgc

SEQ ID NO: 498021 - DNA, 15 bp, Homo sapiens
ttttttctgagtgct

SEQ ID NO: 498022 - DNA, 15 bp, Homo sapiens
tttttctgagtgctt

SEQ ID NO: 498023 - DNA, 15 bp, Homo sapiens
ttttctgagtgcttt

SEQ ID NO: 498024 - DNA, 15 bp, Homo sapiens
tttctgagtgctttt

SEQ ID NO: 498025 - DNA, 15 bp, Homo sapiens
ttctgagtgcttttt

SEQ ID NO: 498026 - DNA, 15 bp, Homo sapiens
tctgagtgctttttt

SEQ ID NO: 498027 - DNA, 15 bp, Homo sapiens
ctgagtgcttttttc

SEQ ID NO: 498028 - DNA, 15 bp, Homo sapiens
tgagtgcttttttca

SEQ ID NO: 498029 - DNA, 15 bp, Homo sapiens
gagtgcttttttcat

SEQ ID NO: 498030 - DNA, 15 bp, Homo sapiens
agtgcttttttcatt

SEQ ID NO: 498031 - DNA, 15 bp, Homo sapiens
gtgcttttttcattt

SEQ ID NO: 498032 - DNA, 15 bp, Homo sapiens
tgcttttttcatttc

SEQ ID NO: 498033 - DNA, 15 bp, Homo sapiens
gcttttttcatttcc

SEQ ID NO: 498034 - DNA, 15 bp, Homo sapiens
cttttttcatttccc

SEQ ID NO: 498035 - DNA, 15 bp, Homo sapiens
ttttttcatttccct

SEQ ID NO: 498036 - DNA, 15 bp, Homo sapiens
tttttcatttcccta

SEQ ID NO: 498037 - DNA, 15 bp, Homo sapiens
ttttcatttccctat

SEQ ID NO: 498038 - DNA, 15 bp, Homo sapiens
tttcatttccctatt

SEQ ID NO: 498039 - DNA, 15 bp, Homo sapiens
ttcatttccctattt

SEQ ID NO: 498040 - DNA, 15 bp, Homo sapiens
tcatttccctatttt

SEQ ID NO: 498041 - DNA, 15 bp, Homo sapiens
catttccctatttta

SEQ ID NO: 498042 - DNA, 15 bp, Homo sapiens
atttccctattttac

SEQ ID NO: 498043 - DNA, 15 bp, Homo sapiens
tttccctattttacc

SEQ ID NO: 498044 - DNA, 15 bp, Homo sapiens
ttccctattttacct

SEQ ID NO: 498045 - DNA, 15 bp, Homo sapiens
tccctattttacctg

SEQ ID NO: 498046 - DNA, 15 bp, Homo sapiens
ccctattttacctgc

SEQ ID NO: 498047 - DNA, 15 bp, Homo sapiens
cctattttacctgct

SEQ ID NO: 498048 - DNA, 15 bp, Homo sapiens
ctattttacctgctt

SEQ ID NO: 498049 - DNA, 15 bp, Homo sapiens
tattttacctgcttt

SEQ ID NO: 498050 - DNA, 15 bp, Homo sapiens
attttacctgctttg

SEQ ID NO: 498051 - DNA, 15 bp, Homo sapiens
ttttacctgctttgc

SEQ ID NO: 498052 - DNA, 15 bp, Homo sapiens
tttacctgctttgca

SEQ ID NO: 498053 - DNA, 15 bp, Homo sapiens
ttacctgctttgcac

SEQ ID NO: 498054 - DNA, 15 bp, Homo sapiens
tacctgctttgcaca

SEQ ID NO: 498055 - DNA, 15 bp, Homo sapiens
acctgctttgcacat

SEQ ID NO: 498056 - DNA, 15 bp, Homo sapiens
cctgctttgcacatg

SEQ ID NO: 498057 - DNA, 15 bp, Homo sapiens
ctgctttgcacatgc

SEQ ID NO: 498058 - DNA, 15 bp, Homo sapiens
tgctttgcacatgcc

SEQ ID NO: 498059 - DNA, 15 bp, Homo sapiens
gctttgcacatgcct

SEQ ID NO: 498060 - DNA, 15 bp, Homo sapiens
ctttgcacatgcctc

SEQ ID NO: 498061 - DNA, 15 bp, Homo sapiens
tttgcacatgcctcc

SEQ ID NO: 498062 - DNA, 15 bp, Homo sapiens
ttgcacatgcctccc

SEQ ID NO: 498063 - DNA, 15 bp, Homo sapiens
tgcacatgcctcccg

SEQ ID NO: 498064 - DNA, 15 bp, Homo sapiens
gcacatgcctcccgc

SEQ ID NO: 498065 - DNA, 15 bp, Homo sapiens
cacatgcctcccgcc

SEQ ID NO: 498066 - DNA, 15 bp, Homo sapiens
acatgcctcccgccc

SEQ ID NO: 498067 - DNA, 15 bp, Homo sapiens
catgcctcccgccct

SEQ ID NO: 498068 - DNA, 15 bp, Homo sapiens
atgcctcccgccctc

SEQ ID NO: 498069 - DNA, 15 bp, Homo sapiens
tgcctcccgccctca

SEQ ID NO: 498070 - DNA, 15 bp, Homo sapiens
gcctcccgccctcac

SEQ ID NO: 498071 - DNA, 15 bp, Homo sapiens
cctcccgccctcacc

SEQ ID NO: 498072 - DNA, 15 bp, Homo sapiens
ctcccgccctcaccc

SEQ ID NO: 498073 - DNA, 15 bp, Homo sapiens
tcccgccctcacccg

SEQ ID NO: 498074 - DNA, 15 bp, Homo sapiens
cccgccctcacccgg

SEQ ID NO: 498075 - DNA, 15 bp, Homo sapiens
ccgccctcacccggg

SEQ ID NO: 498076 - DNA, 15 bp, Homo sapiens
cgccctcacccggga

SEQ ID NO: 498077 - DNA, 15 bp, Homo sapiens
gccctcacccgggag

SEQ ID NO: 498078 - DNA, 15 bp, Homo sapiens
ccctcacccgggagg

SEQ ID NO: 498079 - DNA, 15 bp, Homo sapiens
cctcacccgggaggc

SEQ ID NO: 498080 - DNA, 15 bp, Homo sapiens
ctcacccgggaggcg

SEQ ID NO: 498081 - DNA, 15 bp, Homo sapiens
tcacccgggaggcgg

SEQ ID NO: 498082 - DNA, 15 bp, Homo sapiens
cacccgggaggcggc

SEQ ID NO: 498083 - DNA, 15 bp, Homo sapiens
acccgggaggcggcg

SEQ ID NO: 498084 - DNA, 15 bp, Homo sapiens
cccgggaggcggcga

SEQ ID NO: 498085 - DNA, 15 bp, Homo sapiens
ccgggaggcggcgaa

SEQ ID NO: 498086 - DNA, 15 bp, Homo sapiens
cgggaggcggcgaag

SEQ ID NO: 498087 - DNA, 15 bp, Homo sapiens
gggaggcggcgaaga

SEQ ID NO: 498088 - DNA, 15 bp, Homo sapiens
ggaggcggcgaagac

SEQ ID NO: 498089 - DNA, 15 bp, Homo sapiens
gaggcggcgaagacg

SEQ ID NO: 498090 - DNA, 15 bp, Homo sapiens
aggcggcgaagacgc

SEQ ID NO: 498091 - DNA, 15 bp, Homo sapiens
ggcggcgaagacgcc

SEQ ID NO: 498092 - DNA, 15 bp, Homo sapiens
gcggcgaagacgccc

SEQ ID NO: 498093 - DNA, 15 bp, Homo sapiens
cggcgaagacgccca

SEQ ID NO: 498094 - DNA, 15 bp, Homo sapiens
ggcgaagacgcccac

SEQ ID NO: 498095 - DNA, 15 bp, Homo sapiens
gcgaagacgcccact

SEQ ID NO: 498096 - DNA, 15 bp, Homo sapiens
cgaagacgcccactg

SEQ ID NO: 498097 - DNA, 15 bp, Homo sapiens
gaagacgcccactgg

SEQ ID NO: 498098 - DNA, 15 bp, Homo sapiens
aagacgcccactggg

SEQ ID NO: 498099 - DNA, 15 bp, Homo sapiens
agacgcccactggga

SEQ ID NO: 498100 - DNA, 15 bp, Homo sapiens
gacgcccactgggac

SEQ ID NO: 498101 - DNA, 15 bp, Homo sapiens
acgcccactgggacc

SEQ ID NO: 498102 - DNA, 15 bp, Homo sapiens
cgcccactgggaccg

SEQ ID NO: 498103 - DNA, 15 bp, Homo sapiens
gcccactgggaccgc

SEQ ID NO: 498104 - DNA, 15 bp, Homo sapiens
cccactgggaccgcg

SEQ ID NO: 498105 - DNA, 15 bp, Homo sapiens
ccactgggaccgcgc

SEQ ID NO: 498106 - DNA, 15 bp, Homo sapiens
cactgggaccgcgcc

SEQ ID NO: 498107 - DNA, 15 bp, Homo sapiens
actgggaccgcgcct

SEQ ID NO: 498108 - DNA, 15 bp, Homo sapiens
ctgggaccgcgcctg

SEQ ID NO: 498109 - DNA, 15 bp, Homo sapiens
tgggaccgcgcctgg

SEQ ID NO: 498110 - DNA, 15 bp, Homo sapiens
gggaccgcgcctggc

SEQ ID NO: 498111 - DNA, 15 bp, Homo sapiens
ggaccgcgcctggcc

SEQ ID NO: 498112 - DNA, 15 bp, Homo sapiens
gaccgcgcctggccg

SEQ ID NO: 498113 - DNA, 15 bp, Homo sapiens
accgcgcctggccgt

SEQ ID NO: 498114 - DNA, 15 bp, Homo sapiens
ccgcgcctggccgtt

SEQ ID NO: 498115 - DNA, 15 bp, Homo sapiens
cgcgcctggccgttt

SEQ ID NO: 498116 - DNA, 15 bp, Homo sapiens
gcgcctggccgtttt

SEQ ID NO: 498117 - DNA, 15 bp, Homo sapiens
cgcctggccgttttc

SEQ ID NO: 498118 - DNA, 15 bp, Homo sapiens
gcctggccgttttct

SEQ ID NO: 498119 - DNA, 15 bp, Homo sapiens
cctggccgttttctg

SEQ ID NO: 498120 - DNA, 15 bp, Homo sapiens
ctggccgttttctgg

SEQ ID NO: 498121 - DNA, 15 bp, Homo sapiens
tggccgttttctggg

SEQ ID NO: 498122 - DNA, 15 bp, Homo sapiens
ggccgttttctgggc

SEQ ID NO: 498123 - DNA, 15 bp, Homo sapiens
gccgttttctgggcg

SEQ ID NO: 498124 - DNA, 15 bp, Homo sapiens
ccgttttctgggcgc

SEQ ID NO: 498125 - DNA, 15 bp, Homo sapiens
cgttttctgggcgcg

SEQ ID NO: 498126 - DNA, 15 bp, Homo sapiens
gttttctgggcgcgt

SEQ ID NO: 498127 - DNA, 15 bp, Homo sapiens
ttttctgggcgcgtc

SEQ ID NO: 498128 - DNA, 15 bp, Homo sapiens
tttctgggcgcgtcc

SEQ ID NO: 498129 - DNA, 15 bp, Homo sapiens
ttctgggcgcgtcct

SEQ ID NO: 498130 - DNA, 15 bp, Homo sapiens
tctgggcgcgtcctg

SEQ ID NO: 498131 - DNA, 15 bp, Homo sapiens
ctgggcgcgtcctgc

SEQ ID NO: 498132 - DNA, 15 bp, Homo sapiens
tgggcgcgtcctgcc

SEQ ID NO: 498133 - DNA, 15 bp, Homo sapiens
gggcgcgtcctgccc

SEQ ID NO: 498134 - DNA, 15 bp, Homo sapiens
ggcgcgtcctgcccc

SEQ ID NO: 498135 - DNA, 15 bp, Homo sapiens
gcgcgtcctgccccc

SEQ ID NO: 498136 - DNA, 15 bp, Homo sapiens
cgcgtcctgccccca

SEQ ID NO: 498137 - DNA, 15 bp, Homo sapiens
gcgtcctgcccccac

SEQ ID NO: 498138 - DNA, 15 bp, Homo sapiens
cgtcctgcccccacg

SEQ ID NO: 498139 - DNA, 15 bp, Homo sapiens
gtcctgcccccacgg

SEQ ID NO: 498140 - DNA, 15 bp, Homo sapiens
tcctgcccccacggc

SEQ ID NO: 498141 - DNA, 15 bp, Homo sapiens
cctgcccccacggcc

SEQ ID NO: 498142 - DNA, 15 bp, Homo sapiens
ctgcccccacggcct

SEQ ID NO: 498143 - DNA, 15 bp, Homo sapiens
tgcccccacggcctc

SEQ ID NO: 498144 - DNA, 15 bp, Homo sapiens
gcccccacggcctct

SEQ ID NO: 498145 - DNA, 15 bp, Homo sapiens
cccccacggcctctg

SEQ ID NO: 498146 - DNA, 15 bp, Homo sapiens
ccccacggcctctgt

SEQ ID NO: 498147 - DNA, 15 bp, Homo sapiens
cccacggcctctgtc

SEQ ID NO: 498148 - DNA, 15 bp, Homo sapiens
ccacggcctctgtct

SEQ ID NO: 498149 - DNA, 15 bp, Homo sapiens
cacggcctctgtctc

SEQ ID NO: 498150 - DNA, 15 bp, Homo sapiens
acggcctctgtctct

SEQ ID NO: 498151 - DNA, 15 bp, Homo sapiens
cggcctctgtctctt

SEQ ID NO: 498152 - DNA, 15 bp, Homo sapiens
ggcctctgtctctta

SEQ ID NO: 498153 - DNA, 15 bp, Homo sapiens
gcctctgtctcttag

SEQ ID NO: 498154 - DNA, 15 bp, Homo sapiens
cctctgtctcttagg

SEQ ID NO: 498155 - DNA, 15 bp, Homo sapiens
ctctgtctcttaggg

SEQ ID NO: 498156 - DNA, 15 bp, Homo sapiens
tctgtctcttagggc

SEQ ID NO: 498157 - DNA, 15 bp, Homo sapiens
ctgtctcttagggcg

SEQ ID NO: 498158 - DNA, 15 bp, Homo sapiens
tgtctcttagggcga

SEQ ID NO: 498159 - DNA, 15 bp, Homo sapiens
gtctcttagggcgac

SEQ ID NO: 498160 - DNA, 15 bp, Homo sapiens
tctcttagggcgact

SEQ ID NO: 498161 - DNA, 15 bp, Homo sapiens
ctcttagggcgactg

SEQ ID NO: 498162 - DNA, 15 bp, Homo sapiens
tcttagggcgactgg

SEQ ID NO: 498163 - DNA, 15 bp, Homo sapiens
cttagggcgactggg

SEQ ID NO: 498164 - DNA, 15 bp, Homo sapiens
ttagggcgactgggc

SEQ ID NO: 498165 - DNA, 15 bp, Homo sapiens
tagggcgactgggcg

SEQ ID NO: 498166 - DNA, 15 bp, Homo sapiens
agggcgactgggcgc

SEQ ID NO: 498167 - DNA, 15 bp, Homo sapiens
gggcgactgggcgcg

SEQ ID NO: 498168 - DNA, 15 bp, Homo sapiens
ggcgactgggcgcgg

SEQ ID NO: 498169 - DNA, 15 bp, Homo sapiens
gcgactgggcgcgga

SEQ ID NO: 498170 - DNA, 15 bp, Homo sapiens
cgactgggcgcggaa

SEQ ID NO: 498171 - DNA, 15 bp, Homo sapiens
gactgggcgcggaag

SEQ ID NO: 498172 - DNA, 15 bp, Homo sapiens
actgggcgcggaaga

SEQ ID NO: 498173 - DNA, 15 bp, Homo sapiens
ctgggcgcggaagaa

SEQ ID NO: 498174 - DNA, 15 bp, Homo sapiens
tgggcgcggaagaaa

SEQ ID NO: 498175 - DNA, 15 bp, Homo sapiens
gggcgcggaagaaaa

SEQ ID NO: 498176 - DNA, 15 bp, Homo sapiens
ggcgcggaagaaaag

SEQ ID NO: 498177 - DNA, 15 bp, Homo sapiens
gcgcggaagaaaagc

SEQ ID NO: 498178 - DNA, 15 bp, Homo sapiens
cgcggaagaaaagct

SEQ ID NO: 498179 - DNA, 15 bp, Homo sapiens
gcggaagaaaagctg

SEQ ID NO: 498180 - DNA, 15 bp, Homo sapiens
cggaagaaaagctgg

SEQ ID NO: 498181 - DNA, 15 bp, Homo sapiens
ggaagaaaagctgga

SEQ ID NO: 498182 - DNA, 15 bp, Homo sapiens
gaagaaaagctggag

SEQ ID NO: 498183 - DNA, 15 bp, Homo sapiens
aagaaaagctggaga

SEQ ID NO: 498184 - DNA, 15 bp, Homo sapiens
agaaaagctggagag

SEQ ID NO: 498185 - DNA, 15 bp, Homo sapiens
gaaaagctggagagc

SEQ ID NO: 498186 - DNA, 15 bp, Homo sapiens
aaaagctggagagcc

SEQ ID NO: 498187 - DNA, 15 bp, Homo sapiens
aaagctggagagccc

SEQ ID NO: 498188 - DNA, 15 bp, Homo sapiens
aagctggagagcccc

SEQ ID NO: 498189 - DNA, 15 bp, Homo sapiens
agctggagagcccct

SEQ ID NO: 498190 - DNA, 15 bp, Homo sapiens
gctggagagcccctg

SEQ ID NO: 498191 - DNA, 15 bp, Homo sapiens
ctggagagcccctgc

SEQ ID NO: 498192 - DNA, 15 bp, Homo sapiens
tggagagcccctgcg

SEQ ID NO: 498193 - DNA, 15 bp, Homo sapiens
ggagagcccctgcgg

SEQ ID NO: 498194 - DNA, 15 bp, Homo sapiens
gagagcccctgcggg

SEQ ID NO: 498195 - DNA, 15 bp, Homo sapiens
agagcccctgcgggg

SEQ ID NO: 498196 - DNA, 15 bp, Homo sapiens
gagcccctgcggggt

SEQ ID NO: 498197 - DNA, 15 bp, Homo sapiens
agcccctgcggggtg

SEQ ID NO: 498198 - DNA, 15 bp, Homo sapiens
gcccctgcggggtgg

SEQ ID NO: 498199 - DNA, 15 bp, Homo sapiens
cccctgcggggtggc

SEQ ID NO: 498200 - DNA, 15 bp, Homo sapiens
ccctgcggggtggca

SEQ ID NO: 498201 - DNA, 15 bp, Homo sapiens
cctgcggggtggcag

SEQ ID NO: 498202 - DNA, 15 bp, Homo sapiens
ctgcggggtggcagg

SEQ ID NO: 498203 - DNA, 15 bp, Homo sapiens
tgcggggtggcagga

SEQ ID NO: 498204 - DNA, 15 bp, Homo sapiens
gcggggtggcaggag

SEQ ID NO: 498205 - DNA, 15 bp, Homo sapiens
cggggtggcaggagg

SEQ ID NO: 498206 - DNA, 15 bp, Homo sapiens
ggggtggcaggagga

SEQ ID NO: 498207 - DNA, 15 bp, Homo sapiens
gggtggcaggaggag

SEQ ID NO: 498208 - DNA, 15 bp, Homo sapiens
ggtggcaggaggagg

SEQ ID NO: 498209 - DNA, 15 bp, Homo sapiens
gtggcaggaggaggg

SEQ ID NO: 498210 - DNA, 15 bp, Homo sapiens
tggcaggaggagggt

SEQ ID NO: 498211 - DNA, 15 bp, Homo sapiens
ggcaggaggagggtg

SEQ ID NO: 498212 - DNA, 15 bp, Homo sapiens
gcaggaggagggtgc

SEQ ID NO: 498213 - DNA, 15 bp, Homo sapiens
caggaggagggtgcc

SEQ ID NO: 498214 - DNA, 15 bp, Homo sapiens
aggaggagggtgcct

SEQ ID NO: 498215 - DNA, 15 bp, Homo sapiens
ggaggagggtgcctg

SEQ ID NO: 498216 - DNA, 15 bp, Homo sapiens
gaggagggtgcctga

SEQ ID NO: 498217 - DNA, 15 bp, Homo sapiens
aggagggtgcctgag

SEQ ID NO: 498218 - DNA, 15 bp, Homo sapiens
ggagggtgcctgagt

SEQ ID NO: 498219 - DNA, 15 bp, Homo sapiens
gagggtgcctgagtc

SEQ ID NO: 498220 - DNA, 15 bp, Homo sapiens
agggtgcctgagtcc

SEQ ID NO: 498221 - DNA, 15 bp, Homo sapiens
gggtgcctgagtccc

SEQ ID NO: 498222 - DNA, 15 bp, Homo sapiens
ggtgcctgagtcccg

SEQ ID NO: 498223 - DNA, 15 bp, Homo sapiens
gtgcctgagtcccgc

SEQ ID NO: 498224 - DNA, 15 bp, Homo sapiens
tgcctgagtcccgcg

SEQ ID NO: 498225 - DNA, 15 bp, Homo sapiens
gcctgagtcccgcga

SEQ ID NO: 498226 - DNA, 15 bp, Homo sapiens
cctgagtcccgcgag

SEQ ID NO: 498227 - DNA, 15 bp, Homo sapiens
ctgagtcccgcgaga

SEQ ID NO: 498228 - DNA, 15 bp, Homo sapiens
tgagtcccgcgagag

SEQ ID NO: 498229 - DNA, 15 bp, Homo sapiens
gagtcccgcgagagg

SEQ ID NO: 498230 - DNA, 15 bp, Homo sapiens
agtcccgcgagaggc

SEQ ID NO: 498231 - DNA, 15 bp, Homo sapiens
gtcccgcgagaggcc

SEQ ID NO: 498232 - DNA, 15 bp, Homo sapiens
tcccgcgagaggccc

SEQ ID NO: 498233 - DNA, 15 bp, Homo sapiens
cccgcgagaggcccg

SEQ ID NO: 498234 - DNA, 15 bp, Homo sapiens
ccgcgagaggcccgg

SEQ ID NO: 498235 - DNA, 15 bp, Homo sapiens
cgcgagaggcccggg

SEQ ID NO: 498236 - DNA, 15 bp, Homo sapiens
gcgagaggcccgggc

SEQ ID NO: 498237 - DNA, 15 bp, Homo sapiens
cgagaggcccgggcg

SEQ ID NO: 498238 - DNA, 15 bp, Homo sapiens
gagaggcccgggcga

SEQ ID NO: 498239 - DNA, 15 bp, Homo sapiens
agaggcccgggcgag

SEQ ID NO: 498240 - DNA, 15 bp, Homo sapiens
gaggcccgggcgagg

SEQ ID NO: 498241 - DNA, 15 bp, Homo sapiens
aggcccgggcgagga

SEQ ID NO: 498242 - DNA, 15 bp, Homo sapiens
ggcccgggcgaggaa

SEQ ID NO: 498243 - DNA, 15 bp, Homo sapiens
gcccgggcgaggaag

SEQ ID NO: 498244 - DNA, 15 bp, Homo sapiens
cccgggcgaggaaga

SEQ ID NO: 498245 - DNA, 15 bp, Homo sapiens
ccgggcgaggaagat

SEQ ID NO: 498246 - DNA, 15 bp, Homo sapiens
cgggcgaggaagatg

SEQ ID NO: 498247 - DNA, 15 bp, Homo sapiens
gggcgaggaagatgc

SEQ ID NO: 498248 - DNA, 15 bp, Homo sapiens
ggcgaggaagatgcg

SEQ ID NO: 498249 - DNA, 15 bp, Homo sapiens
gcgaggaagatgcgc

SEQ ID NO: 498250 - DNA, 15 bp, Homo sapiens
cgaggaagatgcgca

SEQ ID NO: 498251 - DNA, 15 bp, Homo sapiens
gaggaagatgcgcag

SEQ ID NO: 498252 - DNA, 15 bp, Homo sapiens
aggaagatgcgcagc

SEQ ID NO: 498253 - DNA, 15 bp, Homo sapiens
ggaagatgcgcagcc

SEQ ID NO: 498254 - DNA, 15 bp, Homo sapiens
gaagatgcgcagcct

SEQ ID NO: 498255 - DNA, 15 bp, Homo sapiens
aagatgcgcagcctg

SEQ ID NO: 498256 - DNA, 15 bp, Homo sapiens
agatgcgcagcctgc

SEQ ID NO: 498257 - DNA, 15 bp, Homo sapiens
gatgcgcagcctgct

SEQ ID NO: 498258 - DNA, 15 bp, Homo sapiens
atgcgcagcctgctg

SEQ ID NO: 498259 - DNA, 15 bp, Homo sapiens
tgcgcagcctgctga

SEQ ID NO: 498260 - DNA, 15 bp, Homo sapiens
gcgcagcctgctgat

SEQ ID NO: 498261 - DNA, 15 bp, Homo sapiens
cgcagcctgctgatc

SEQ ID NO: 498262 - DNA, 15 bp, Homo sapiens
gcagcctgctgatcc

SEQ ID NO: 498263 - DNA, 15 bp, Homo sapiens
cagcctgctgatccg

SEQ ID NO: 498264 - DNA, 15 bp, Homo sapiens
agcctgctgatccgc

SEQ ID NO: 498265 - DNA, 15 bp, Homo sapiens
gcctgctgatccgcg

SEQ ID NO: 498266 - DNA, 15 bp, Homo sapiens
cctgctgatccgcgt

SEQ ID NO: 498267 - DNA, 15 bp, Homo sapiens
ctgctgatccgcgtc

SEQ ID NO: 498268 - DNA, 15 bp, Homo sapiens
tgctgatccgcgtcc

SEQ ID NO: 498269 - DNA, 15 bp, Homo sapiens
gctgatccgcgtccc

SEQ ID NO: 498270 - DNA, 15 bp, Homo sapiens
ctgatccgcgtcccg

SEQ ID NO: 498271 - DNA, 15 bp, Homo sapiens
tgatccgcgtcccgc

SEQ ID NO: 498272 - DNA, 15 bp, Homo sapiens
gatccgcgtcccgcc

SEQ ID NO: 498273 - DNA, 15 bp, Homo sapiens
atccgcgtcccgccc

SEQ ID NO: 498274 - DNA, 15 bp, Homo sapiens
tccgcgtcccgcccg

SEQ ID NO: 498275 - DNA, 15 bp, Homo sapiens
ccgcgtcccgcccgg

SEQ ID NO: 498276 - DNA, 15 bp, Homo sapiens
cgcgtcccgcccggc

SEQ ID NO: 498277 - DNA, 15 bp, Homo sapiens
gcgtcccgcccggcg

SEQ ID NO: 498278 - DNA, 15 bp, Homo sapiens
cgtcccgcccggcgc

SEQ ID NO: 498279 - DNA, 15 bp, Homo sapiens
gtcccgcccggcgcc

SEQ ID NO: 498280 - DNA, 15 bp, Homo sapiens
tcccgcccggcgcca

SEQ ID NO: 498281 - DNA, 15 bp, Homo sapiens
cccgcccggcgccag

SEQ ID NO: 498282 - DNA, 15 bp, Homo sapiens
ccgcccggcgccagg

SEQ ID NO: 498283 - DNA, 15 bp, Homo sapiens
cgcccggcgccaggg

SEQ ID NO: 498284 - DNA, 15 bp, Homo sapiens
gcccggcgccaggga

SEQ ID NO: 498285 - DNA, 15 bp, Homo sapiens
cccggcgccagggac

SEQ ID NO: 498286 - DNA, 15 bp, Homo sapiens
ccggcgccagggacc

SEQ ID NO: 498287 - DNA, 15 bp, Homo sapiens
cggcgccagggaccc

SEQ ID NO: 498288 - DNA, 15 bp, Homo sapiens
ggcgccagggaccct

SEQ ID NO: 498289 - DNA, 15 bp, Homo sapiens
gcgccagggaccctc

SEQ ID NO: 498290 - DNA, 15 bp, Homo sapiens
cgccagggaccctca

SEQ ID NO: 498291 - DNA, 15 bp, Homo sapiens
gccagggaccctcag

SEQ ID NO: 498292 - DNA, 15 bp, Homo sapiens
ccagggaccctcaga

SEQ ID NO: 498293 - DNA, 15 bp, Homo sapiens
cagggaccctcagag

SEQ ID NO: 498294 - DNA, 15 bp, Homo sapiens
agggaccctcagagg

SEQ ID NO: 498295 - DNA, 15 bp, Homo sapiens
gggaccctcagaggg

SEQ ID NO: 498296 - DNA, 15 bp, Homo sapiens
ggaccctcagaggga

SEQ ID NO: 498297 - DNA, 15 bp, Homo sapiens
gaccctcagagggag

SEQ ID NO: 498298 - DNA, 15 bp, Homo sapiens
accctcagagggagg

SEQ ID NO: 498299 - DNA, 15 bp, Homo sapiens
ccctcagagggagga

SEQ ID NO: 498300 - DNA, 15 bp, Homo sapiens
cctcagagggaggag

SEQ ID NO: 498301 - DNA, 15 bp, Homo sapiens
ctcagagggaggaga

SEQ ID NO: 498302 - DNA, 15 bp, Homo sapiens
tcagagggaggagag

SEQ ID NO: 498303 - DNA, 15 bp, Homo sapiens
cagagggaggagagc

SEQ ID NO: 498304 - DNA, 15 bp, Homo sapiens
agagggaggagagct

SEQ ID NO: 498305 - DNA, 15 bp, Homo sapiens
gagggaggagagctc

SEQ ID NO: 498306 - DNA, 15 bp, Homo sapiens
agggaggagagctca

SEQ ID NO: 498307 - DNA, 15 bp, Homo sapiens
gggaggagagctcaa

SEQ ID NO: 498308 - DNA, 15 bp, Homo sapiens
ggaggagagctcaaa

SEQ ID NO: 498309 - DNA, 15 bp, Homo sapiens
gaggagagctcaaag

SEQ ID NO: 498310 - DNA, 15 bp, Homo sapiens
aggagagctcaaaga

SEQ ID NO: 498311 - DNA, 15 bp, Homo sapiens
ggagagctcaaagac

SEQ ID NO: 498312 - DNA, 15 bp, Homo sapiens
gagagctcaaagacc

SEQ ID NO: 498313 - DNA, 15 bp, Homo sapiens
agagctcaaagacct

SEQ ID NO: 498314 - DNA, 15 bp, Homo sapiens
gagctcaaagacctc

SEQ ID NO: 498315 - DNA, 15 bp, Homo sapiens
agctcaaagacctcg

SEQ ID NO: 498316 - DNA, 15 bp, Homo sapiens
gctcaaagacctcgc

SEQ ID NO: 498317 - DNA, 15 bp, Homo sapiens
ctcaaagacctcgcc

SEQ ID NO: 498318 - DNA, 15 bp, Homo sapiens
tcaaagacctcgccc

SEQ ID NO: 498319 - DNA, 15 bp, Homo sapiens
caaagacctcgcccc

SEQ ID NO: 498320 - DNA, 15 bp, Homo sapiens
aaagacctcgccccg

SEQ ID NO: 498321 - DNA, 15 bp, Homo sapiens
aagacctcgccccgc

SEQ ID NO: 498322 - DNA, 15 bp, Homo sapiens
agacctcgccccgcg

SEQ ID NO: 498323 - DNA, 15 bp, Homo sapiens
gacctcgccccgcgc

SEQ ID NO: 498324 - DNA, 15 bp, Homo sapiens
acctcgccccgcgcc

SEQ ID NO: 498325 - DNA, 15 bp, Homo sapiens
cctcgccccgcgcct

SEQ ID NO: 498326 - DNA, 15 bp, Homo sapiens
ctcgccccgcgcctt

SEQ ID NO: 498327 - DNA, 15 bp, Homo sapiens
tcgccccgcgccttc

SEQ ID NO: 498328 - DNA, 15 bp, Homo sapiens
cgccccgcgccttcg

SEQ ID NO: 498329 - DNA, 15 bp, Homo sapiens
gccccgcgccttcgc

SEQ ID NO: 498330 - DNA, 15 bp, Homo sapiens
ccccgcgccttcgcg

SEQ ID NO: 498331 - DNA, 15 bp, Homo sapiens
cccgcgccttcgcga

SEQ ID NO: 498332 - DNA, 15 bp, Homo sapiens
ccgcgccttcgcgag

SEQ ID NO: 498333 - DNA, 15 bp, Homo sapiens
cgcgccttcgcgagg

SEQ ID NO: 498334 - DNA, 15 bp, Homo sapiens
gcgccttcgcgagga

SEQ ID NO: 498335 - DNA, 15 bp, Homo sapiens
cgccttcgcgaggac

SEQ ID NO: 498336 - DNA, 15 bp, Homo sapiens
gccttcgcgaggacc

SEQ ID NO: 498337 - DNA, 15 bp, Homo sapiens
ccttcgcgaggacca

SEQ ID NO: 498338 - DNA, 15 bp, Homo sapiens
cttcgcgaggaccaa

SEQ ID NO: 498339 - DNA, 15 bp, Homo sapiens
ttcgcgaggaccaac

SEQ ID NO: 498340 - DNA, 15 bp, Homo sapiens
tcgcgaggaccaacc

SEQ ID NO: 498341 - DNA, 15 bp, Homo sapiens
cgcgaggaccaaccc

SEQ ID NO: 498342 - DNA, 15 bp, Homo sapiens
gcgaggaccaaccca

SEQ ID NO: 498343 - DNA, 15 bp, Homo sapiens
cgaggaccaacccag

SEQ ID NO: 498344 - DNA, 15 bp, Homo sapiens
gaggaccaacccagt

SEQ ID NO: 498345 - DNA, 15 bp, Homo sapiens
aggaccaacccagtc

SEQ ID NO: 498346 - DNA, 15 bp, Homo sapiens
ggaccaacccagtcc

SEQ ID NO: 498347 - DNA, 15 bp, Homo sapiens
gaccaacccagtccc

SEQ ID NO: 498348 - DNA, 15 bp, Homo sapiens
accaacccagtcccc

SEQ ID NO: 498349 - DNA, 15 bp, Homo sapiens
ccaacccagtccccg

SEQ ID NO: 498350 - DNA, 15 bp, Homo sapiens
caacccagtccccgc

SEQ ID NO: 498351 - DNA, 15 bp, Homo sapiens
aacccagtccccgcg

SEQ ID NO: 498352 - DNA, 15 bp, Homo sapiens
acccagtccccgcgc

SEQ ID NO: 498353 - DNA, 15 bp, Homo sapiens
cccagtccccgcgcc

SEQ ID NO: 498354 - DNA, 15 bp, Homo sapiens
ccagtccccgcgcct

SEQ ID NO: 498355 - DNA, 15 bp, Homo sapiens
cagtccccgcgcctg

SEQ ID NO: 498356 - DNA, 15 bp, Homo sapiens
agtccccgcgcctgc

SEQ ID NO: 498357 - DNA, 15 bp, Homo sapiens
gtccccgcgcctgcc

SEQ ID NO: 498358 - DNA, 15 bp, Homo sapiens
tccccgcgcctgccc

SEQ ID NO: 498359 - DNA, 15 bp, Homo sapiens
ccccgcgcctgcccc

SEQ ID NO: 498360 - DNA, 15 bp, Homo sapiens
cccgcgcctgcccca

SEQ ID NO: 498361 - DNA, 15 bp, Homo sapiens
ccgcgcctgccccag

SEQ ID NO: 498362 - DNA, 15 bp, Homo sapiens
cgcgcctgccccaga

SEQ ID NO: 498363 - DNA, 15 bp, Homo sapiens
gcgcctgccccagag

SEQ ID NO: 498364 - DNA, 15 bp, Homo sapiens
cgcctgccccagagc

SEQ ID NO: 498365 - DNA, 15 bp, Homo sapiens
gcctgccccagagcg

SEQ ID NO: 498366 - DNA, 15 bp, Homo sapiens
cctgccccagagcgg

SEQ ID NO: 498367 - DNA, 15 bp, Homo sapiens
ctgccccagagcggc

SEQ ID NO: 498368 - DNA, 15 bp, Homo sapiens
tgccccagagcggct

SEQ ID NO: 498369 - DNA, 15 bp, Homo sapiens
gccccagagcggctt

SEQ ID NO: 498370 - DNA, 15 bp, Homo sapiens
ccccagagcggctta

SEQ ID NO: 498371 - DNA, 15 bp, Homo sapiens
cccagagcggcttag

SEQ ID NO: 498372 - DNA, 15 bp, Homo sapiens
ccagagcggcttaga

SEQ ID NO: 498373 - DNA, 15 bp, Homo sapiens
cagagcggcttagaa

SEQ ID NO: 498374 - DNA, 15 bp, Homo sapiens
agagcggcttagaaa

SEQ ID NO: 498375 - DNA, 15 bp, Homo sapiens
gagcggcttagaaac

SEQ ID NO: 498376 - DNA, 15 bp, Homo sapiens
agcggcttagaaact

SEQ ID NO: 498377 - DNA, 15 bp, Homo sapiens
gcggcttagaaactc

SEQ ID NO: 498378 - DNA, 15 bp, Homo sapiens
cggcttagaaactca

SEQ ID NO: 498379 - DNA, 15 bp, Homo sapiens
ggcttagaaactcag

SEQ ID NO: 498380 - DNA, 15 bp, Homo sapiens
gcttagaaactcagg

SEQ ID NO: 498381 - DNA, 15 bp, Homo sapiens
cttagaaactcaggg

SEQ ID NO: 498382 - DNA, 15 bp, Homo sapiens
ttagaaactcagggc

SEQ ID NO: 498383 - DNA, 15 bp, Homo sapiens
tagaaactcagggca

SEQ ID NO: 498384 - DNA, 15 bp, Homo sapiens
agaaactcagggcac

SEQ ID NO: 498385 - DNA, 15 bp, Homo sapiens
gaaactcagggcaca

SEQ ID NO: 498386 - DNA, 15 bp, Homo sapiens
aaactcagggcacag

SEQ ID NO: 498387 - DNA, 15 bp, Homo sapiens
aactcagggcacagt

SEQ ID NO: 498388 - DNA, 15 bp, Homo sapiens
actcagggcacagtg

SEQ ID NO: 498389 - DNA, 15 bp, Homo sapiens
ctcagggcacagtga

SEQ ID NO: 498390 - DNA, 15 bp, Homo sapiens
tcagggcacagtgag

SEQ ID NO: 498391 - DNA, 15 bp, Homo sapiens
cagggcacagtgaga

SEQ ID NO: 498392 - DNA, 15 bp, Homo sapiens
agggcacagtgagag

SEQ ID NO: 498393 - DNA, 15 bp, Homo sapiens
gggcacagtgagagc

SEQ ID NO: 498394 - DNA, 15 bp, Homo sapiens
ggcacagtgagagcg

SEQ ID NO: 498395 - DNA, 15 bp, Homo sapiens
gcacagtgagagcgc

SEQ ID NO: 498396 - DNA, 15 bp, Homo sapiens
cacagtgagagcgca

SEQ ID NO: 498397 - DNA, 15 bp, Homo sapiens
acagtgagagcgcag

SEQ ID NO: 498398 - DNA, 15 bp, Homo sapiens
cagtgagagcgcagg

SEQ ID NO: 498399 - DNA, 15 bp, Homo sapiens
agtgagagcgcaggg

SEQ ID NO: 498400 - DNA, 15 bp, Homo sapiens
gtgagagcgcagggc

SEQ ID NO: 498401 - DNA, 15 bp, Homo sapiens
tgagagcgcagggcg

SEQ ID NO: 498402 - DNA, 15 bp, Homo sapiens
gagagcgcagggcgc

SEQ ID NO: 498403 - DNA, 15 bp, Homo sapiens
agagcgcagggcgcc

SEQ ID NO: 498404 - DNA, 15 bp, Homo sapiens
gagcgcagggcgcct

SEQ ID NO: 498405 - DNA, 15 bp, Homo sapiens
agcgcagggcgcctc

SEQ ID NO: 498406 - DNA, 15 bp, Homo sapiens
gcgcagggcgcctcc

SEQ ID NO: 498407 - DNA, 15 bp, Homo sapiens
cgcagggcgcctccc

SEQ ID NO: 498408 - DNA, 15 bp, Homo sapiens
gcagggcgcctcccg

SEQ ID NO: 498409 - DNA, 15 bp, Homo sapiens
cagggcgcctcccga

SEQ ID NO: 498410 - DNA, 15 bp, Homo sapiens
agggcgcctcccgag

SEQ ID NO: 498411 - DNA, 15 bp, Homo sapiens
gggcgcctcccgagg

SEQ ID NO: 498412 - DNA, 15 bp, Homo sapiens
ggcgcctcccgaggc

SEQ ID NO: 498413 - DNA, 15 bp, Homo sapiens
gcgcctcccgaggct

SEQ ID NO: 498414 - DNA, 15 bp, Homo sapiens
cgcctcccgaggctt

SEQ ID NO: 498415 - DNA, 15 bp, Homo sapiens
gcctcccgaggcttc

SEQ ID NO: 498416 - DNA, 15 bp, Homo sapiens
cctcccgaggcttca

SEQ ID NO: 498417 - DNA, 15 bp, Homo sapiens
ctcccgaggcttcac

SEQ ID NO: 498418 - DNA, 15 bp, Homo sapiens
tcccgaggcttcaca

SEQ ID NO: 498419 - DNA, 15 bp, Homo sapiens
cccgaggcttcacac

SEQ ID NO: 498420 - DNA, 15 bp, Homo sapiens
ccgaggcttcacacc

SEQ ID NO: 498421 - DNA, 15 bp, Homo sapiens
cgaggcttcacaccg

SEQ ID NO: 498422 - DNA, 15 bp, Homo sapiens
gaggcttcacaccgc

SEQ ID NO: 498423 - DNA, 15 bp, Homo sapiens
aggcttcacaccgcc

SEQ ID NO: 498424 - DNA, 15 bp, Homo sapiens
ggcttcacaccgccg

SEQ ID NO: 498425 - DNA, 15 bp, Homo sapiens
gcttcacaccgccgg

SEQ ID NO: 498426 - DNA, 15 bp, Homo sapiens
cttcacaccgccggc

SEQ ID NO: 498427 - DNA, 15 bp, Homo sapiens
ttcacaccgccggcc

SEQ ID NO: 498428 - DNA, 15 bp, Homo sapiens
tcacaccgccggccg

SEQ ID NO: 498429 - DNA, 15 bp, Homo sapiens
cacaccgccggccgg

SEQ ID NO: 498430 - DNA, 15 bp, Homo sapiens
acaccgccggccggg

SEQ ID NO: 498431 - DNA, 15 bp, Homo sapiens
caccgccggccgggc

SEQ ID NO: 498432 - DNA, 15 bp, Homo sapiens
accgccggccgggcc

SEQ ID NO: 498433 - DNA, 15 bp, Homo sapiens
ccgccggccgggcca

SEQ ID NO: 498434 - DNA, 15 bp, Homo sapiens
cgccggccgggccag

SEQ ID NO: 498435 - DNA, 15 bp, Homo sapiens
gccggccgggccagc

SEQ ID NO: 498436 - DNA, 15 bp, Homo sapiens
ccggccgggccagcg

SEQ ID NO: 498437 - DNA, 15 bp, Homo sapiens
cggccgggccagcgg

SEQ ID NO: 498438 - DNA, 15 bp, Homo sapiens
ggccgggccagcgga

SEQ ID NO: 498439 - DNA, 15 bp, Homo sapiens
gccgggccagcggag

SEQ ID NO: 498440 - DNA, 15 bp, Homo sapiens
ccgggccagcggagg

SEQ ID NO: 498441 - DNA, 15 bp, Homo sapiens
cgggccagcggaggc

SEQ ID NO: 498442 - DNA, 15 bp, Homo sapiens
gggccagcggaggct

SEQ ID NO: 498443 - DNA, 15 bp, Homo sapiens
ggccagcggaggctg

SEQ ID NO: 498444 - DNA, 15 bp, Homo sapiens
gccagcggaggctgt

SEQ ID NO: 498445 - DNA, 15 bp, Homo sapiens
ccagcggaggctgtg

SEQ ID NO: 498446 - DNA, 15 bp, Homo sapiens
cagcggaggctgtga

SEQ ID NO: 498447 - DNA, 15 bp, Homo sapiens
agcggaggctgtgac

SEQ ID NO: 498448 - DNA, 15 bp, Homo sapiens
gcggaggctgtgacc

SEQ ID NO: 498449 - DNA, 15 bp, Homo sapiens
cggaggctgtgaccg

SEQ ID NO: 498450 - DNA, 15 bp, Homo sapiens
ggaggctgtgaccgg

SEQ ID NO: 498451 - DNA, 15 bp, Homo sapiens
gaggctgtgaccgga

SEQ ID NO: 498452 - DNA, 15 bp, Homo sapiens
aggctgtgaccggag

SEQ ID NO: 498453 - DNA, 15 bp, Homo sapiens
ggctgtgaccggagc

SEQ ID NO: 498454 - DNA, 15 bp, Homo sapiens
gctgtgaccggagcg

SEQ ID NO: 498455 - DNA, 15 bp, Homo sapiens
ctgtgaccggagcgc

SEQ ID NO: 498456 - DNA, 15 bp, Homo sapiens
tgtgaccggagcgcc

SEQ ID NO: 498457 - DNA, 15 bp, Homo sapiens
gtgaccggagcgccc

SEQ ID NO: 498458 - DNA, 15 bp, Homo sapiens
tgaccggagcgcccc

SEQ ID NO: 498459 - DNA, 15 bp, Homo sapiens
gaccggagcgccccc

SEQ ID NO: 498460 - DNA, 15 bp, Homo sapiens
accggagcgccccct

SEQ ID NO: 498461 - DNA, 15 bp, Homo sapiens
ccggagcgccccctc

SEQ ID NO: 498462 - DNA, 15 bp, Homo sapiens
cggagcgccccctct

SEQ ID NO: 498463 - DNA, 15 bp, Homo sapiens
ggagcgccccctctg

SEQ ID NO: 498464 - DNA, 15 bp, Homo sapiens
gagcgccccctctgt

SEQ ID NO: 498465 - DNA, 15 bp, Homo sapiens
agcgccccctctgtg

SEQ ID NO: 498466 - DNA, 15 bp, Homo sapiens
gcgccccctctgtgc

SEQ ID NO: 498467 - DNA, 15 bp, Homo sapiens
cgccccctctgtgcc

SEQ ID NO: 498468 - DNA, 15 bp, Homo sapiens
gccccctctgtgccg

SEQ ID NO: 498469 - DNA, 15 bp, Homo sapiens
ccccctctgtgccgc

SEQ ID NO: 498470 - DNA, 15 bp, Homo sapiens
cccctctgtgccgcg

SEQ ID NO: 498471 - DNA, 15 bp, Homo sapiens
ccctctgtgccgcgc

SEQ ID NO: 498472 - DNA, 15 bp, Homo sapiens
cctctgtgccgcgca

SEQ ID NO: 498473 - DNA, 15 bp, Homo sapiens
ctctgtgccgcgcac

SEQ ID NO: 498474 - DNA, 15 bp, Homo sapiens
tctgtgccgcgcacg

SEQ ID NO: 498475 - DNA, 15 bp, Homo sapiens
ctgtgccgcgcacgc

SEQ ID NO: 498476 - DNA, 15 bp, Homo sapiens
tgtgccgcgcacgcc

SEQ ID NO: 498477 - DNA, 15 bp, Homo sapiens
gtgccgcgcacgccg

SEQ ID NO: 498478 - DNA, 15 bp, Homo sapiens
tgccgcgcacgccgc

SEQ ID NO: 498479 - DNA, 15 bp, Homo sapiens
gccgcgcacgccgcg

SEQ ID NO: 498480 - DNA, 15 bp, Homo sapiens
ccgcgcacgccgcgg

SEQ ID NO: 498481 - DNA, 15 bp, Homo sapiens
cgcgcacgccgcggc

SEQ ID NO: 498482 - DNA, 15 bp, Homo sapiens
gcgcacgccgcggcc

SEQ ID NO: 498483 - DNA, 15 bp, Homo sapiens
cgcacgccgcggccg

SEQ ID NO: 498484 - DNA, 15 bp, Homo sapiens
gcacgccgcggccgc

SEQ ID NO: 498485 - DNA, 15 bp, Homo sapiens
cacgccgcggccgcc

SEQ ID NO: 498486 - DNA, 15 bp, Homo sapiens
acgccgcggccgccg

SEQ ID NO: 498487 - DNA, 15 bp, Homo sapiens
cgccgcggccgccgc

SEQ ID NO: 498488 - DNA, 15 bp, Homo sapiens
gccgcggccgccgcc

SEQ ID NO: 498489 - DNA, 15 bp, Homo sapiens
ccgcggccgccgccg

SEQ ID NO: 498490 - DNA, 15 bp, Homo sapiens
cgcggccgccgccgg

SEQ ID NO: 498491 - DNA, 15 bp, Homo sapiens
gcggccgccgccggg

SEQ ID NO: 498492 - DNA, 15 bp, Homo sapiens
cggccgccgccgggt

SEQ ID NO: 498493 - DNA, 15 bp, Homo sapiens
ggccgccgccgggtt

SEQ ID NO: 498494 - DNA, 15 bp, Homo sapiens
gccgccgccgggttg

SEQ ID NO: 498495 - DNA, 15 bp, Homo sapiens
ccgccgccgggttgg

SEQ ID NO: 498496 - DNA, 15 bp, Homo sapiens
cgccgccgggttggg

SEQ ID NO: 498497 - DNA, 15 bp, Homo sapiens
gccgccgggttgggg

SEQ ID NO: 498498 - DNA, 15 bp, Homo sapiens
ccgccgggttggggt

SEQ ID NO: 498499 - DNA, 15 bp, Homo sapiens
cgccgggttggggta

SEQ ID NO: 498500 - DNA, 15 bp, Homo sapiens
gccgggttggggtag

SEQ ID NO: 498501 - DNA, 15 bp, Homo sapiens
ccgggttggggtagg

SEQ ID NO: 498502 - DNA, 15 bp, Homo sapiens
cgggttggggtaggt

SEQ ID NO: 498503 - DNA, 15 bp, Homo sapiens
gggttggggtaggtg

SEQ ID NO: 498504 - DNA, 15 bp, Homo sapiens
ggttggggtaggtga

SEQ ID NO: 498505 - DNA, 15 bp, Homo sapiens
gttggggtaggtgag

SEQ ID NO: 498506 - DNA, 15 bp, Homo sapiens
ttggggtaggtgagc

SEQ ID NO: 498507 - DNA, 15 bp, Homo sapiens
tggggtaggtgagcg

SEQ ID NO: 498508 - DNA, 15 bp, Homo sapiens
ggggtaggtgagcgg

SEQ ID NO: 498509 - DNA, 15 bp, Homo sapiens
gggtaggtgagcggg

SEQ ID NO: 498510 - DNA, 15 bp, Homo sapiens
ggtaggtgagcggga

SEQ ID NO: 498511 - DNA, 15 bp, Homo sapiens
gtaggtgagcgggag

SEQ ID NO: 498512 - DNA, 15 bp, Homo sapiens
taggtgagcgggagg

SEQ ID NO: 498513 - DNA, 15 bp, Homo sapiens
aggtgagcgggaggc

SEQ ID NO: 498514 - DNA, 15 bp, Homo sapiens
ggtgagcgggaggct

SEQ ID NO: 498515 - DNA, 15 bp, Homo sapiens
gtgagcgggaggcta

SEQ ID NO: 498516 - DNA, 15 bp, Homo sapiens
tgagcgggaggctag

SEQ ID NO: 498517 - DNA, 15 bp, Homo sapiens
gagcgggaggctagg

SEQ ID NO: 498518 - DNA, 15 bp, Homo sapiens
agcgggaggctaggg

SEQ ID NO: 498519 - DNA, 15 bp, Homo sapiens
gcgggaggctagggt

SEQ ID NO: 498520 - DNA, 15 bp, Homo sapiens
cgggaggctagggta

SEQ ID NO: 498521 - DNA, 15 bp, Homo sapiens
gggaggctagggtac

SEQ ID NO: 498522 - DNA, 15 bp, Homo sapiens
ggaggctagggtaca

SEQ ID NO: 498523 - DNA, 15 bp, Homo sapiens
gaggctagggtacac

SEQ ID NO: 498524 - DNA, 15 bp, Homo sapiens
aggctagggtacact

SEQ ID NO: 498525 - DNA, 15 bp, Homo sapiens
ggctagggtacactt

SEQ ID NO: 498526 - DNA, 15 bp, Homo sapiens
gctagggtacacttc

SEQ ID NO: 498527 - DNA, 15 bp, Homo sapiens
ctagggtacacttcg

SEQ ID NO: 498528 - DNA, 15 bp, Homo sapiens
tagggtacacttcgg

SEQ ID NO: 498529 - DNA, 15 bp, Homo sapiens
agggtacacttcggg

SEQ ID NO: 498530 - DNA, 15 bp, Homo sapiens
gggtacacttcgggg

SEQ ID NO: 498531 - DNA, 15 bp, Homo sapiens
ggtacacttcggggt

SEQ ID NO: 498532 - DNA, 15 bp, Homo sapiens
gtacacttcggggtg

SEQ ID NO: 498533 - DNA, 15 bp, Homo sapiens
tacacttcggggtgg

SEQ ID NO: 498534 - DNA, 15 bp, Homo sapiens
acacttcggggtggg

SEQ ID NO: 498535 - DNA, 15 bp, Homo sapiens
cacttcggggtgggg

SEQ ID NO: 498536 - DNA, 15 bp, Homo sapiens
acttcggggtggggg

SEQ ID NO: 498537 - DNA, 15 bp, Homo sapiens
cttcggggtggggga

SEQ ID NO: 498538 - DNA, 15 bp, Homo sapiens
ttcggggtgggggat

SEQ ID NO: 498539 - DNA, 15 bp, Homo sapiens
tcggggtgggggatg

SEQ ID NO: 498540 - DNA, 15 bp, Homo sapiens
cggggtgggggatgg

SEQ ID NO: 498541 - DNA, 15 bp, Homo sapiens
ggggtgggggatggg

SEQ ID NO: 498542 - DNA, 15 bp, Homo sapiens
gggtgggggatgggc

SEQ ID NO: 498543 - DNA, 15 bp, Homo sapiens
ggtgggggatgggcg

SEQ ID NO: 498544 - DNA, 15 bp, Homo sapiens
gtgggggatgggcgc

SEQ ID NO: 498545 - DNA, 15 bp, Homo sapiens
tgggggatgggcgcg

SEQ ID NO: 498546 - DNA, 15 bp, Homo sapiens
gggggatgggcgcgc

SEQ ID NO: 498547 - DNA, 15 bp, Homo sapiens
ggggatgggcgcgca

SEQ ID NO: 498548 - DNA, 15 bp, Homo sapiens
gggatgggcgcgcac

SEQ ID NO: 498549 - DNA, 15 bp, Homo sapiens
ggatgggcgcgcaca

SEQ ID NO: 498550 - DNA, 15 bp, Homo sapiens
gatgggcgcgcacat

SEQ ID NO: 498551 - DNA, 15 bp, Homo sapiens
atgggcgcgcacatg

SEQ ID NO: 498552 - DNA, 15 bp, Homo sapiens
tgggcgcgcacatgg

SEQ ID NO: 498553 - DNA, 15 bp, Homo sapiens
gggcgcgcacatggc

SEQ ID NO: 498554 - DNA, 15 bp, Homo sapiens
ggcgcgcacatggcc

SEQ ID NO: 498555 - DNA, 15 bp, Homo sapiens
gcgcgcacatggccg

SEQ ID NO: 498556 - DNA, 15 bp, Homo sapiens
cgcgcacatggccgc

SEQ ID NO: 498557 - DNA, 15 bp, Homo sapiens
gcgcacatggccgcc

SEQ ID NO: 498558 - DNA, 15 bp, Homo sapiens
cgcacatggccgcca

SEQ ID NO: 498559 - DNA, 15 bp, Homo sapiens
gcacatggccgccag

SEQ ID NO: 498560 - DNA, 15 bp, Homo sapiens
cacatggccgccagc

SEQ ID NO: 498561 - DNA, 15 bp, Homo sapiens
acatggccgccagca

SEQ ID NO: 498562 - DNA, 15 bp, Homo sapiens
catggccgccagcag

SEQ ID NO: 498563 - DNA, 15 bp, Homo sapiens
atggccgccagcagg

SEQ ID NO: 498564 - DNA, 15 bp, Homo sapiens
tggccgccagcaggc

SEQ ID NO: 498565 - DNA, 15 bp, Homo sapiens
ggccgccagcaggca

SEQ ID NO: 498566 - DNA, 15 bp, Homo sapiens
gccgccagcaggcag

SEQ ID NO: 498567 - DNA, 15 bp, Homo sapiens
ccgccagcaggcaga

SEQ ID NO: 498568 - DNA, 15 bp, Homo sapiens
cgccagcaggcagag

SEQ ID NO: 498569 - DNA, 15 bp, Homo sapiens
gccagcaggcagagt

SEQ ID NO: 498570 - DNA, 15 bp, Homo sapiens
ccagcaggcagagtt

SEQ ID NO: 498571 - DNA, 15 bp, Homo sapiens
cagcaggcagagtta

SEQ ID NO: 498572 - DNA, 15 bp, Homo sapiens
agcaggcagagttac

SEQ ID NO: 498573 - DNA, 15 bp, Homo sapiens
gcaggcagagttact

SEQ ID NO: 498574 - DNA, 15 bp, Homo sapiens
caggcagagttactc

SEQ ID NO: 498575 - DNA, 15 bp, Homo sapiens
aggcagagttactcc

SEQ ID NO: 498576 - DNA, 15 bp, Homo sapiens
ggcagagttactccg

SEQ ID NO: 498577 - DNA, 15 bp, Homo sapiens
gcagagttactccgg

SEQ ID NO: 498578 - DNA, 15 bp, Homo sapiens
cagagttactccggt

SEQ ID NO: 498579 - DNA, 15 bp, Homo sapiens
agagttactccggta

SEQ ID NO: 498580 - DNA, 15 bp, Homo sapiens
gagttactccggtaa

SEQ ID NO: 498581 - DNA, 15 bp, Homo sapiens
agttactccggtaaa

SEQ ID NO: 498582 - DNA, 15 bp, Homo sapiens
gttactccggtaaac

SEQ ID NO: 498583 - DNA, 15 bp, Homo sapiens
ttactccggtaaaca

SEQ ID NO: 498584 - DNA, 15 bp, Homo sapiens
tactccggtaaacac

SEQ ID NO: 498585 - DNA, 15 bp, Homo sapiens
actccggtaaacacg

SEQ ID NO: 498586 - DNA, 15 bp, Homo sapiens
ctccggtaaacacgc

SEQ ID NO: 498587 - DNA, 15 bp, Homo sapiens
tccggtaaacacgcc

SEQ ID NO: 498588 - DNA, 15 bp, Homo sapiens
ccggtaaacacgcca

SEQ ID NO: 498589 - DNA, 15 bp, Homo sapiens
cggtaaacacgccag

SEQ ID NO: 498590 - DNA, 15 bp, Homo sapiens
ggtaaacacgccagg

SEQ ID NO: 498591 - DNA, 15 bp, Homo sapiens
gtaaacacgccaggg

SEQ ID NO: 498592 - DNA, 15 bp, Homo sapiens
taaacacgccaggga

SEQ ID NO: 498593 - DNA, 15 bp, Homo sapiens
aaacacgccagggac

SEQ ID NO: 498594 - DNA, 15 bp, Homo sapiens
aacacgccagggacg

SEQ ID NO: 498595 - DNA, 15 bp, Homo sapiens
acacgccagggacgg

SEQ ID NO: 498596 - DNA, 15 bp, Homo sapiens
cacgccagggacggc

SEQ ID NO: 498597 - DNA, 15 bp, Homo sapiens
acgccagggacggcg

SEQ ID NO: 498598 - DNA, 15 bp, Homo sapiens
cgccagggacggcgg

SEQ ID NO: 498599 - DNA, 15 bp, Homo sapiens
gccagggacggcggc

SEQ ID NO: 498600 - DNA, 15 bp, Homo sapiens
ccagggacggcggcg

SEQ ID NO: 498601 - DNA, 15 bp, Homo sapiens
cagggacggcggcgc

SEQ ID NO: 498602 - DNA, 15 bp, Homo sapiens
agggacggcggcgcg

SEQ ID NO: 498603 - DNA, 15 bp, Homo sapiens
gggacggcggcgcgc

SEQ ID NO: 498604 - DNA, 15 bp, Homo sapiens
ggacggcggcgcgcg

SEQ ID NO: 498605 - DNA, 15 bp, Homo sapiens
gacggcggcgcgcgc

SEQ ID NO: 498606 - DNA, 15 bp, Homo sapiens
acggcggcgcgcgcg

SEQ ID NO: 498607 - DNA, 15 bp, Homo sapiens
cggcggcgcgcgcgg

SEQ ID NO: 498608 - DNA, 15 bp, Homo sapiens
ggcggcgcgcgcggg

SEQ ID NO: 498609 - DNA, 15 bp, Homo sapiens
gcggcgcgcgcggga

SEQ ID NO: 498610 - DNA, 15 bp, Homo sapiens
cggcgcgcgcgggag

SEQ ID NO: 498611 - DNA, 15 bp, Homo sapiens
ggcgcgcgcgggagg

SEQ ID NO: 498612 - DNA, 15 bp, Homo sapiens
gcgcgcgcgggaggc

SEQ ID NO: 498613 - DNA, 15 bp, Homo sapiens
cgcgcgcgggaggca

SEQ ID NO: 498614 - DNA, 15 bp, Homo sapiens
gcgcgcgggaggcaa

SEQ ID NO: 498615 - DNA, 15 bp, Homo sapiens
cgcgcgggaggcaac

SEQ ID NO: 498616 - DNA, 15 bp, Homo sapiens
gcgcgggaggcaacc

SEQ ID NO: 498617 - DNA, 15 bp, Homo sapiens
cgcgggaggcaaccc

SEQ ID NO: 498618 - DNA, 15 bp, Homo sapiens
gcgggaggcaaccca

SEQ ID NO: 498619 - DNA, 15 bp, Homo sapiens
cgggaggcaacccag

SEQ ID NO: 498620 - DNA, 15 bp, Homo sapiens
gggaggcaacccagc

SEQ ID NO: 498621 - DNA, 15 bp, Homo sapiens
ggaggcaacccagcg

SEQ ID NO: 498622 - DNA, 15 bp, Homo sapiens
gaggcaacccagcgg

SEQ ID NO: 498623 - DNA, 15 bp, Homo sapiens
aggcaacccagcggg

SEQ ID NO: 498624 - DNA, 15 bp, Homo sapiens
ggcaacccagcgggg

SEQ ID NO: 498625 - DNA, 15 bp, Homo sapiens
gcaacccagcggggc

SEQ ID NO: 498626 - DNA, 15 bp, Homo sapiens
caacccagcggggca

SEQ ID NO: 498627 - DNA, 15 bp, Homo sapiens
aacccagcggggcaa

SEQ ID NO: 498628 - DNA, 15 bp, Homo sapiens
acccagcggggcaac

SEQ ID NO: 498629 - DNA, 15 bp, Homo sapiens
cccagcggggcaacc

SEQ ID NO: 498630 - DNA, 15 bp, Homo sapiens
ccagcggggcaaccc

SEQ ID NO: 498631 - DNA, 15 bp, Homo sapiens
cagcggggcaacccc

SEQ ID NO: 498632 - DNA, 15 bp, Homo sapiens
agcggggcaaccccc

SEQ ID NO: 498633 - DNA, 15 bp, Homo sapiens
gcggggcaacccccg

SEQ ID NO: 498634 - DNA, 15 bp, Homo sapiens
cggggcaacccccgc

SEQ ID NO: 498635 - DNA, 15 bp, Homo sapiens
ggggcaacccccgcc

SEQ ID NO: 498636 - DNA, 15 bp, Homo sapiens
gggcaacccccgcct

SEQ ID NO: 498637 - DNA, 15 bp, Homo sapiens
ggcaacccccgcctt

SEQ ID NO: 498638 - DNA, 15 bp, Homo sapiens
gcaacccccgccttt

SEQ ID NO: 498639 - DNA, 15 bp, Homo sapiens
caacccccgccttta

SEQ ID NO: 498640 - DNA, 15 bp, Homo sapiens
aacccccgcctttac

SEQ ID NO: 498641 - DNA, 15 bp, Homo sapiens
acccccgcctttacc

SEQ ID NO: 498642 - DNA, 15 bp, Homo sapiens
cccccgcctttacct

SEQ ID NO: 498643 - DNA, 15 bp, Homo sapiens
ccccgcctttacctg

SEQ ID NO: 498644 - DNA, 15 bp, Homo sapiens
cccgcctttacctgt

SEQ ID NO: 498645 - DNA, 15 bp, Homo sapiens
ccgcctttacctgtc

SEQ ID NO: 498646 - DNA, 15 bp, Homo sapiens
cgcctttacctgtcc

SEQ ID NO: 498647 - DNA, 15 bp, Homo sapiens
gcctttacctgtccg

SEQ ID NO: 498648 - DNA, 15 bp, Homo sapiens
cctttacctgtccga

SEQ ID NO: 498649 - DNA, 15 bp, Homo sapiens
ctttacctgtccgag

SEQ ID NO: 498650 - DNA, 15 bp, Homo sapiens
tttacctgtccgagc

SEQ ID NO: 498651 - DNA, 15 bp, Homo sapiens
ttacctgtccgagcc

SEQ ID NO: 498652 - DNA, 15 bp, Homo sapiens
tacctgtccgagcct

SEQ ID NO: 498653 - DNA, 15 bp, Homo sapiens
acctgtccgagcctg

SEQ ID NO: 498654 - DNA, 15 bp, Homo sapiens
cctgtccgagcctgc

SEQ ID NO: 498655 - DNA, 15 bp, Homo sapiens
ctgtccgagcctgca

SEQ ID NO: 498656 - DNA, 15 bp, Homo sapiens
tgtccgagcctgcac

SEQ ID NO: 498657 - DNA, 15 bp, Homo sapiens
gtccgagcctgcacg

SEQ ID NO: 498658 - DNA, 15 bp, Homo sapiens
tccgagcctgcacgc

SEQ ID NO: 498659 - DNA, 15 bp, Homo sapiens
ccgagcctgcacgcg

SEQ ID NO: 498660 - DNA, 15 bp, Homo sapiens
cgagcctgcacgcgc

SEQ ID NO: 498661 - DNA, 15 bp, Homo sapiens
gagcctgcacgcgcc

SEQ ID NO: 498662 - DNA, 15 bp, Homo sapiens
agcctgcacgcgccg

SEQ ID NO: 498663 - DNA, 15 bp, Homo sapiens
gcctgcacgcgccgg

SEQ ID NO: 498664 - DNA, 15 bp, Homo sapiens
cctgcacgcgccggc

SEQ ID NO: 498665 - DNA, 15 bp, Homo sapiens
ctgcacgcgccggcg

SEQ ID NO: 498666 - DNA, 15 bp, Homo sapiens
tgcacgcgccggcgg

SEQ ID NO: 498667 - DNA, 15 bp, Homo sapiens
gcacgcgccggcggc

SEQ ID NO: 498668 - DNA, 15 bp, Homo sapiens
cacgcgccggcggcc

SEQ ID NO: 498669 - DNA, 15 bp, Homo sapiens
acgcgccggcggccg

SEQ ID NO: 498670 - DNA, 15 bp, Homo sapiens
cgcgccggcggccgc

SEQ ID NO: 498671 - DNA, 15 bp, Homo sapiens
gcgccggcggccgcg

SEQ ID NO: 498672 - DNA, 15 bp, Homo sapiens
cgccggcggccgcgg

SEQ ID NO: 498673 - DNA, 15 bp, Homo sapiens
gccggcggccgcggc

SEQ ID NO: 498674 - DNA, 15 bp, Homo sapiens
ccggcggccgcggcg

SEQ ID NO: 498675 - DNA, 15 bp, Homo sapiens
cggcggccgcggcgc

SEQ ID NO: 498676 - DNA, 15 bp, Homo sapiens
ggcggccgcggcgcc

SEQ ID NO: 498677 - DNA, 15 bp, Homo sapiens
gcggccgcggcgccg

SEQ ID NO: 498678 - DNA, 15 bp, Homo sapiens
cggccgcggcgccga

SEQ ID NO: 498679 - DNA, 15 bp, Homo sapiens
ggccgcggcgccgag

SEQ ID NO: 498680 - DNA, 15 bp, Homo sapiens
gccgcggcgccgagg

SEQ ID NO: 498681 - DNA, 15 bp, Homo sapiens
ccgcggcgccgaggg

SEQ ID NO: 498682 - DNA, 15 bp, Homo sapiens
cgcggcgccgagggg

SEQ ID NO: 498683 - DNA, 15 bp, Homo sapiens
gcggcgccgaggggg

SEQ ID NO: 498684 - DNA, 15 bp, Homo sapiens
cggcgccgagggggg

SEQ ID NO: 498685 - DNA, 15 bp, Homo sapiens
ggcgccgaggggggc

SEQ ID NO: 498686 - DNA, 15 bp, Homo sapiens
gcgccgaggggggcg

SEQ ID NO: 498687 - DNA, 15 bp, Homo sapiens
cgccgaggggggcgg

SEQ ID NO: 498688 - DNA, 15 bp, Homo sapiens
gccgaggggggcgga

SEQ ID NO: 498689 - DNA, 15 bp, Homo sapiens
ccgaggggggcggag

SEQ ID NO: 498690 - DNA, 15 bp, Homo sapiens
cgaggggggcggagc

SEQ ID NO: 498691 - DNA, 15 bp, Homo sapiens
gaggggggcggagct

SEQ ID NO: 498692 - DNA, 15 bp, Homo sapiens
aggggggcggagctt

SEQ ID NO: 498693 - DNA, 15 bp, Homo sapiens
ggggggcggagcttg

SEQ ID NO: 498694 - DNA, 15 bp, Homo sapiens
gggggcggagcttgc

SEQ ID NO: 498695 - DNA, 15 bp, Homo sapiens
ggggcggagcttgcc

SEQ ID NO: 498696 - DNA, 15 bp, Homo sapiens
gggcggagcttgcca

SEQ ID NO: 498697 - DNA, 15 bp, Homo sapiens
ggcggagcttgccag

SEQ ID NO: 498698 - DNA, 15 bp, Homo sapiens
gcggagcttgccagc

SEQ ID NO: 498699 - DNA, 15 bp, Homo sapiens
cggagcttgccagcc

SEQ ID NO: 498700 - DNA, 15 bp, Homo sapiens
ggagcttgccagccc

SEQ ID NO: 498701 - DNA, 15 bp, Homo sapiens
gagcttgccagcccg

SEQ ID NO: 498702 - DNA, 15 bp, Homo sapiens
agcttgccagcccgc

SEQ ID NO: 498703 - DNA, 15 bp, Homo sapiens
gcttgccagcccgcg

SEQ ID NO: 498704 - DNA, 15 bp, Homo sapiens
cttgccagcccgcgc

SEQ ID NO: 498705 - DNA, 15 bp, Homo sapiens
ttgccagcccgcgcg

SEQ ID NO: 498706 - DNA, 15 bp, Homo sapiens
tgccagcccgcgcgc

SEQ ID NO: 498707 - DNA, 15 bp, Homo sapiens
gccagcccgcgcgcc

SEQ ID NO: 498708 - DNA, 15 bp, Homo sapiens
ccagcccgcgcgccg

SEQ ID NO: 498709 - DNA, 15 bp, Homo sapiens
cagcccgcgcgccgg

SEQ ID NO: 498710 - DNA, 15 bp, Homo sapiens
agcccgcgcgccggg

SEQ ID NO: 498711 - DNA, 15 bp, Homo sapiens
gcccgcgcgccgggg

SEQ ID NO: 498712 - DNA, 15 bp, Homo sapiens
cccgcgcgccggggc

SEQ ID NO: 498713 - DNA, 15 bp, Homo sapiens
ccgcgcgccggggcg

SEQ ID NO: 498714 - DNA, 15 bp, Homo sapiens
cgcgcgccggggcgg

SEQ ID NO: 498715 - DNA, 15 bp, Homo sapiens
gcgcgccggggcggg

SEQ ID NO: 498716 - DNA, 15 bp, Homo sapiens
cgcgccggggcggga

SEQ ID NO: 498717 - DNA, 15 bp, Homo sapiens
gcgccggggcgggac

SEQ ID NO: 498718 - DNA, 15 bp, Homo sapiens
cgccggggcgggacc

SEQ ID NO: 498719 - DNA, 15 bp, Homo sapiens
gccggggcgggacct

SEQ ID NO: 498720 - DNA, 15 bp, Homo sapiens
ccggggcgggaccta

SEQ ID NO: 498721 - DNA, 15 bp, Homo sapiens
cggggcgggacctag

SEQ ID NO: 498722 - DNA, 15 bp, Homo sapiens
ggggcgggacctagc

SEQ ID NO: 498723 - DNA, 15 bp, Homo sapiens
gggcgggacctagcg

SEQ ID NO: 498724 - DNA, 15 bp, Homo sapiens
ggcgggacctagcgg

SEQ ID NO: 498725 - DNA, 15 bp, Homo sapiens
gcgggacctagcggg

SEQ ID NO: 498726 - DNA, 15 bp, Homo sapiens
cgggacctagcgggg

SEQ ID NO: 498727 - DNA, 15 bp, Homo sapiens
gggacctagcggggg

SEQ ID NO: 498728 - DNA, 15 bp, Homo sapiens
ggacctagcgggggc

SEQ ID NO: 498729 - DNA, 15 bp, Homo sapiens
gacctagcgggggcg

SEQ ID NO: 498730 - DNA, 15 bp, Homo sapiens
acctagcgggggcgg

SEQ ID NO: 498731 - DNA, 15 bp, Homo sapiens
cctagcgggggcggg

SEQ ID NO: 498732 - DNA, 15 bp, Homo sapiens
ctagcgggggcgggg

SEQ ID NO: 498733 - DNA, 15 bp, Homo sapiens
tagcgggggcggggt

SEQ ID NO: 498734 - DNA, 15 bp, Homo sapiens
agcgggggcggggtc

SEQ ID NO: 498735 - DNA, 15 bp, Homo sapiens
gcgggggcggggtcc

SEQ ID NO: 498736 - DNA, 15 bp, Homo sapiens
cgggggcggggtccg

SEQ ID NO: 498737 - DNA, 15 bp, Homo sapiens
gggggcggggtccgc

SEQ ID NO: 498738 - DNA, 15 bp, Homo sapiens
ggggcggggtccgca

SEQ ID NO: 498739 - DNA, 15 bp, Homo sapiens
gggcggggtccgcag

SEQ ID NO: 498740 - DNA, 15 bp, Homo sapiens
ggcggggtccgcagt

SEQ ID NO: 498741 - DNA, 15 bp, Homo sapiens
gcggggtccgcagtg

SEQ ID NO: 498742 - DNA, 15 bp, Homo sapiens
cggggtccgcagtga

SEQ ID NO: 498743 - DNA, 15 bp, Homo sapiens
ggggtccgcagtgat

SEQ ID NO: 498744 - DNA, 15 bp, Homo sapiens
gggtccgcagtgatt

SEQ ID NO: 498745 - DNA, 15 bp, Homo sapiens
ggtccgcagtgattg

SEQ ID NO: 498746 - DNA, 15 bp, Homo sapiens
gtccgcagtgattgg

SEQ ID NO: 498747 - DNA, 15 bp, Homo sapiens
tccgcagtgattggg

SEQ ID NO: 498748 - DNA, 15 bp, Homo sapiens
ccgcagtgattgggc

SEQ ID NO: 498749 - DNA, 15 bp, Homo sapiens
cgcagtgattgggcg

SEQ ID NO: 498750 - DNA, 15 bp, Homo sapiens
gcagtgattgggcgt

SEQ ID NO: 498751 - DNA, 15 bp, Homo sapiens
cagtgattgggcgta

SEQ ID NO: 498752 - DNA, 15 bp, Homo sapiens
agtgattgggcgtag

SEQ ID NO: 498753 - DNA, 15 bp, Homo sapiens
gtgattgggcgtagg

SEQ ID NO: 498754 - DNA, 15 bp, Homo sapiens
tgattgggcgtagga

SEQ ID NO: 498755 - DNA, 15 bp, Homo sapiens
gattgggcgtaggag

SEQ ID NO: 498756 - DNA, 15 bp, Homo sapiens
attgggcgtaggagc

SEQ ID NO: 498757 - DNA, 15 bp, Homo sapiens
ttgggcgtaggagcg

SEQ ID NO: 498758 - DNA, 15 bp, Homo sapiens
tgggcgtaggagcgg

SEQ ID NO: 498759 - DNA, 15 bp, Homo sapiens
gggcgtaggagcggg

SEQ ID NO: 498760 - DNA, 15 bp, Homo sapiens
ggcgtaggagcgggg

SEQ ID NO: 498761 - DNA, 15 bp, Homo sapiens
gcgtaggagcggggc

SEQ ID NO: 498762 - DNA, 15 bp, Homo sapiens
cgtaggagcggggcc

SEQ ID NO: 498763 - DNA, 15 bp, Homo sapiens
gtaggagcggggccg

SEQ ID NO: 498764 - DNA, 15 bp, Homo sapiens
taggagcggggccgc

SEQ ID NO: 498765 - DNA, 15 bp, Homo sapiens
aggagcggggccgcc

SEQ ID NO: 498766 - DNA, 15 bp, Homo sapiens
ggagcggggccgcca

SEQ ID NO: 498767 - DNA, 15 bp, Homo sapiens
gagcggggccgccag

SEQ ID NO: 498768 - DNA, 15 bp, Homo sapiens
agcggggccgccagc

SEQ ID NO: 498769 - DNA, 15 bp, Homo sapiens
gcggggccgccagcc

SEQ ID NO: 498770 - DNA, 15 bp, Homo sapiens
cggggccgccagcca

SEQ ID NO: 498771 - DNA, 15 bp, Homo sapiens
ggggccgccagccag

SEQ ID NO: 498772 - DNA, 15 bp, Homo sapiens
gggccgccagccaga

SEQ ID NO: 498773 - DNA, 15 bp, Homo sapiens
ggccgccagccagag

SEQ ID NO: 498774 - DNA, 15 bp, Homo sapiens
gccgccagccagagc

SEQ ID NO: 498775 - DNA, 15 bp, Homo sapiens
ccgccagccagagct

SEQ ID NO: 498776 - DNA, 15 bp, Homo sapiens
cgccagccagagctg

SEQ ID NO: 498777 - DNA, 15 bp, Homo sapiens
gccagccagagctgg

SEQ ID NO: 498778 - DNA, 15 bp, Homo sapiens
ccagccagagctggg

SEQ ID NO: 498779 - DNA, 15 bp, Homo sapiens
cagccagagctgggc

SEQ ID NO: 498780 - DNA, 15 bp, Homo sapiens
agccagagctgggct

SEQ ID NO: 498781 - DNA, 15 bp, Homo sapiens
gccagagctgggctg

SEQ ID NO: 498782 - DNA, 15 bp, Homo sapiens
ccagagctgggctgc

SEQ ID NO: 498783 - DNA, 15 bp, Homo sapiens
cagagctgggctgca

SEQ ID NO: 498784 - DNA, 15 bp, Homo sapiens
agagctgggctgcag

SEQ ID NO: 498785 - DNA, 15 bp, Homo sapiens
gagctgggctgcagg

SEQ ID NO: 498786 - DNA, 15 bp, Homo sapiens
agctgggctgcaggg

SEQ ID NO: 498787 - DNA, 15 bp, Homo sapiens
gctgggctgcagggc

SEQ ID NO: 498788 - DNA, 15 bp, Homo sapiens
ctgggctgcagggcc

SEQ ID NO: 498789 - DNA, 15 bp, Homo sapiens
tgggctgcagggccg

SEQ ID NO: 498790 - DNA, 15 bp, Homo sapiens
gggctgcagggccgc

SEQ ID NO: 498791 - DNA, 15 bp, Homo sapiens
ggctgcagggccgcg

SEQ ID NO: 498792 - DNA, 15 bp, Homo sapiens
gctgcagggccgcgc

SEQ ID NO: 498793 - DNA, 15 bp, Homo sapiens
ctgcagggccgcgca

SEQ ID NO: 498794 - DNA, 15 bp, Homo sapiens
tgcagggccgcgcag

SEQ ID NO: 498795 - DNA, 15 bp, Homo sapiens
gcagggccgcgcagg

SEQ ID NO: 498796 - DNA, 15 bp, Homo sapiens
cagggccgcgcaggt

SEQ ID NO: 498797 - DNA, 15 bp, Homo sapiens
agggccgcgcaggtt

SEQ ID NO: 498798 - DNA, 15 bp, Homo sapiens
gggccgcgcaggttt

SEQ ID NO: 498799 - DNA, 15 bp, Homo sapiens
ggccgcgcaggtttc

SEQ ID NO: 498800 - DNA, 15 bp, Homo sapiens
gccgcgcaggtttca

SEQ ID NO: 498801 - DNA, 15 bp, Homo sapiens
ccgcgcaggtttcac

SEQ ID NO: 498802 - DNA, 15 bp, Homo sapiens
cgcgcaggtttcact

SEQ ID NO: 498803 - DNA, 15 bp, Homo sapiens
gcgcaggtttcactt

SEQ ID NO: 498804 - DNA, 15 bp, Homo sapiens
cgcaggtttcacttc

SEQ ID NO: 498805 - DNA, 15 bp, Homo sapiens
gcaggtttcacttcg

SEQ ID NO: 498806 - DNA, 15 bp, Homo sapiens
caggtttcacttcgc

SEQ ID NO: 498807 - DNA, 15 bp, Homo sapiens
aggtttcacttcgct

SEQ ID NO: 498808 - DNA, 15 bp, Homo sapiens
ggtttcacttcgctc

SEQ ID NO: 498809 - DNA, 15 bp, Homo sapiens
gtttcacttcgctcc

SEQ ID NO: 498810 - DNA, 15 bp, Homo sapiens
tttcacttcgctccg

SEQ ID NO: 498811 - DNA, 15 bp, Homo sapiens
ttcacttcgctccgc

SEQ ID NO: 498812 - DNA, 15 bp, Homo sapiens
tcacttcgctccgcg

SEQ ID NO: 498813 - DNA, 15 bp, Homo sapiens
cacttcgctccgcgc

SEQ ID NO: 498814 - DNA, 15 bp, Homo sapiens
acttcgctccgcgca

SEQ ID NO: 498815 - DNA, 15 bp, Homo sapiens
cttcgctccgcgcag

SEQ ID NO: 498816 - DNA, 15 bp, Homo sapiens
ttcgctccgcgcagc

SEQ ID NO: 498817 - DNA, 15 bp, Homo sapiens
tcgctccgcgcagcc

SEQ ID NO: 498818 - DNA, 15 bp, Homo sapiens
cgctccgcgcagccg

SEQ ID NO: 498819 - DNA, 15 bp, Homo sapiens
gctccgcgcagccgc

SEQ ID NO: 498820 - DNA, 15 bp, Homo sapiens
ctccgcgcagccgcc

SEQ ID NO: 498821 - DNA, 15 bp, Homo sapiens
tccgcgcagccgcct

SEQ ID NO: 498822 - DNA, 15 bp, Homo sapiens
ccgcgcagccgcctg

SEQ ID NO: 498823 - DNA, 15 bp, Homo sapiens
cgcgcagccgcctgg

SEQ ID NO: 498824 - DNA, 15 bp, Homo sapiens
gcgcagccgcctggt

SEQ ID NO: 498825 - DNA, 15 bp, Homo sapiens
cgcagccgcctggtc

SEQ ID NO: 498826 - DNA, 15 bp, Homo sapiens
gcagccgcctggtct

SEQ ID NO: 498827 - DNA, 15 bp, Homo sapiens
cagccgcctggtctg

SEQ ID NO: 498828 - DNA, 15 bp, Homo sapiens
agccgcctggtctgc

SEQ ID NO: 498829 - DNA, 15 bp, Homo sapiens
gccgcctggtctgca

SEQ ID NO: 498830 - DNA, 15 bp, Homo sapiens
ccgcctggtctgcag

SEQ ID NO: 498831 - DNA, 15 bp, Homo sapiens
cgcctggtctgcagt

SEQ ID NO: 498832 - DNA, 15 bp, Homo sapiens
gcctggtctgcagtt

SEQ ID NO: 498833 - DNA, 15 bp, Homo sapiens
cctggtctgcagttt

SEQ ID NO: 498834 - DNA, 15 bp, Homo sapiens
ctggtctgcagtttg

SEQ ID NO: 498835 - DNA, 15 bp, Homo sapiens
tggtctgcagtttgt

SEQ ID NO: 498836 - DNA, 15 bp, Homo sapiens
ggtctgcagtttgtt

SEQ ID NO: 498837 - DNA, 15 bp, Homo sapiens
gtctgcagtttgttg

SEQ ID NO: 498838 - DNA, 15 bp, Homo sapiens
tctgcagtttgttgg

SEQ ID NO: 498839 - DNA, 15 bp, Homo sapiens
ctgcagtttgttgga

SEQ ID NO: 498840 - DNA, 15 bp, Homo sapiens
tgcagtttgttggag

SEQ ID NO: 498841 - DNA, 15 bp, Homo sapiens
gcagtttgttggagc

SEQ ID NO: 498842 - DNA, 15 bp, Homo sapiens
cagtttgttggagct

SEQ ID NO: 498843 - DNA, 15 bp, Homo sapiens
agtttgttggagctc

SEQ ID NO: 498844 - DNA, 15 bp, Homo sapiens
gtttgttggagctct

SEQ ID NO: 498845 - DNA, 15 bp, Homo sapiens
tttgttggagctctg

SEQ ID NO: 498846 - DNA, 15 bp, Homo sapiens
ttgttggagctctgc

SEQ ID NO: 498847 - DNA, 15 bp, Homo sapiens
tgttggagctctgcg

SEQ ID NO: 498848 - DNA, 15 bp, Homo sapiens
gttggagctctgcgt

SEQ ID NO: 498849 - DNA, 15 bp, Homo sapiens
ttggagctctgcgtc

SEQ ID NO: 498850 - DNA, 15 bp, Homo sapiens
tggagctctgcgtcc

SEQ ID NO: 498851 - DNA, 15 bp, Homo sapiens
ggagctctgcgtcca

SEQ ID NO: 498852 - DNA, 15 bp, Homo sapiens
gagctctgcgtccag

SEQ ID NO: 498853 - DNA, 15 bp, Homo sapiens
agctctgcgtccagc

SEQ ID NO: 498854 - DNA, 15 bp, Homo sapiens
gctctgcgtccagcg

SEQ ID NO: 498855 - DNA, 15 bp, Homo sapiens
ctctgcgtccagcgc

SEQ ID NO: 498856 - DNA, 15 bp, Homo sapiens
tctgcgtccagcgcc

SEQ ID NO: 498857 - DNA, 15 bp, Homo sapiens
ctgcgtccagcgccg

SEQ ID NO: 498858 - DNA, 15 bp, Homo sapiens
tgcgtccagcgccgc

SEQ ID NO: 498859 - DNA, 15 bp, Homo sapiens
gcgtccagcgccgct

SEQ ID NO: 498860 - DNA, 15 bp, Homo sapiens
cgtccagcgccgctg

SEQ ID NO: 498861 - DNA, 15 bp, Homo sapiens
gtccagcgccgctgc

SEQ ID NO: 498862 - DNA, 15 bp, Homo sapiens
tccagcgccgctgcc

SEQ ID NO: 498863 - DNA, 15 bp, Homo sapiens
ccagcgccgctgccg

SEQ ID NO: 498864 - DNA, 15 bp, Homo sapiens
cagcgccgctgccgc

SEQ ID NO: 498865 - DNA, 15 bp, Homo sapiens
agcgccgctgccgct

SEQ ID NO: 498866 - DNA, 15 bp, Homo sapiens
gcgccgctgccgctg

SEQ ID NO: 498867 - DNA, 15 bp, Homo sapiens
cgccgctgccgctgc

SEQ ID NO: 498868 - DNA, 15 bp, Homo sapiens
gccgctgccgctgcc

SEQ ID NO: 498869 - DNA, 15 bp, Homo sapiens
ccgctgccgctgccg

SEQ ID NO: 498870 - DNA, 15 bp, Homo sapiens
cgctgccgctgccgc

SEQ ID NO: 498871 - DNA, 15 bp, Homo sapiens
gctgccgctgccgcc

SEQ ID NO: 498872 - DNA, 15 bp, Homo sapiens
ctgccgctgccgccg

SEQ ID NO: 498873 - DNA, 15 bp, Homo sapiens
tgccgctgccgccgc

SEQ ID NO: 498874 - DNA, 15 bp, Homo sapiens
gccgctgccgccgcc

SEQ ID NO: 498875 - DNA, 15 bp, Homo sapiens
ccgctgccgccgccg

SEQ ID NO: 498876 - DNA, 15 bp, Homo sapiens
cgctgccgccgccgc

SEQ ID NO: 498877 - DNA, 15 bp, Homo sapiens
gctgccgccgccgcc

SEQ ID NO: 498878 - DNA, 15 bp, Homo sapiens
ctgccgccgccgccg

SEQ ID NO: 498879 - DNA, 15 bp, Homo sapiens
tgccgccgccgccgc

SEQ ID NO: 498880 - DNA, 15 bp, Homo sapiens
gccgccgccgccgcc

SEQ ID NO: 498881 - DNA, 15 bp, Homo sapiens
ccgccgccgccgccg

SEQ ID NO: 498882 - DNA, 15 bp, Homo sapiens
cgccgccgccgccgc

SEQ ID NO: 498883 - DNA, 15 bp, Homo sapiens
ccgccgccgccgcca

SEQ ID NO: 498884 - DNA, 15 bp, Homo sapiens
cgccgccgccgccac

SEQ ID NO: 498885 - DNA, 15 bp, Homo sapiens
gccgccgccgccact

SEQ ID NO: 498886 - DNA, 15 bp, Homo sapiens
ccgccgccgccacta

SEQ ID NO: 498887 - DNA, 15 bp, Homo sapiens
cgccgccgccactac

SEQ ID NO: 498888 - DNA, 15 bp, Homo sapiens
gccgccgccactacc

SEQ ID NO: 498889 - DNA, 15 bp, Homo sapiens
ccgccgccactacca

SEQ ID NO: 498890 - DNA, 15 bp, Homo sapiens
cgccgccactaccac

SEQ ID NO: 498891 - DNA, 15 bp, Homo sapiens
gccgccactaccacc

SEQ ID NO: 498892 - DNA, 15 bp, Homo sapiens
ccgccactaccacca

SEQ ID NO: 498893 - DNA, 15 bp, Homo sapiens
cgccactaccaccac

SEQ ID NO: 498894 - DNA, 15 bp, Homo sapiens
gccactaccaccact

SEQ ID NO: 498895 - DNA, 15 bp, Homo sapiens
ccactaccaccactt

SEQ ID NO: 498896 - DNA, 15 bp, Homo sapiens
cactaccaccacttg

SEQ ID NO: 498897 - DNA, 15 bp, Homo sapiens
actaccaccacttga

SEQ ID NO: 498898 - DNA, 15 bp, Homo sapiens
ctaccaccacttgat

SEQ ID NO: 498899 - DNA, 15 bp, Homo sapiens
taccaccacttgatt

SEQ ID NO: 498900 - DNA, 15 bp, Homo sapiens
accaccacttgattc

SEQ ID NO: 498901 - DNA, 15 bp, Homo sapiens
ccaccacttgattct

SEQ ID NO: 498902 - DNA, 15 bp, Homo sapiens
caccacttgattctt

SEQ ID NO: 498903 - DNA, 15 bp, Homo sapiens
accacttgattcttg

SEQ ID NO: 498904 - DNA, 15 bp, Homo sapiens
ccacttgattcttgc

SEQ ID NO: 498905 - DNA, 15 bp, Homo sapiens
cacttgattcttgca

SEQ ID NO: 498906 - DNA, 15 bp, Homo sapiens
acttgattcttgcag

SEQ ID NO: 498907 - DNA, 15 bp, Homo sapiens
cttgattcttgcagc

SEQ ID NO: 498908 - DNA, 15 bp, Homo sapiens
ttgattcttgcagcc

SEQ ID NO: 498909 - DNA, 15 bp, Homo sapiens
tgattcttgcagcca

SEQ ID NO: 498910 - DNA, 15 bp, Homo sapiens
gattcttgcagccac

SEQ ID NO: 498911 - DNA, 15 bp, Homo sapiens
attcttgcagccacc

SEQ ID NO: 498912 - DNA, 15 bp, Homo sapiens
ttcttgcagccaccc

SEQ ID NO: 498913 - DNA, 15 bp, Homo sapiens
tcttgcagccaccct

SEQ ID NO: 498914 - DNA, 15 bp, Homo sapiens
cttgcagccaccctg

SEQ ID NO: 498915 - DNA, 15 bp, Homo sapiens
ttgcagccaccctgc

SEQ ID NO: 498916 - DNA, 15 bp, Homo sapiens
tgcagccaccctgcg

SEQ ID NO: 498917 - DNA, 15 bp, Homo sapiens
gcagccaccctgcga

SEQ ID NO: 498918 - DNA, 15 bp, Homo sapiens
cagccaccctgcgaa

SEQ ID NO: 498919 - DNA, 15 bp, Homo sapiens
agccaccctgcgaac

SEQ ID NO: 498920 - DNA, 15 bp, Homo sapiens
gccaccctgcgaacc

SEQ ID NO: 498921 - DNA, 15 bp, Homo sapiens
ccaccctgcgaaccc

SEQ ID NO: 498922 - DNA, 15 bp, Homo sapiens
caccctgcgaaccct

SEQ ID NO: 498923 - DNA, 15 bp, Homo sapiens
accctgcgaaccctg

SEQ ID NO: 498924 - DNA, 15 bp, Homo sapiens
ccctgcgaaccctgc

SEQ ID NO: 498925 - DNA, 15 bp, Homo sapiens
cctgcgaaccctgcc

SEQ ID NO: 498926 - DNA, 15 bp, Homo sapiens
ctgcgaaccctgcca

SEQ ID NO: 498927 - DNA, 15 bp, Homo sapiens
tgcgaaccctgccac

SEQ ID NO: 498928 - DNA, 15 bp, Homo sapiens
gcgaaccctgccaca

SEQ ID NO: 498929 - DNA, 15 bp, Homo sapiens
cgaaccctgccacac

SEQ ID NO: 498930 - DNA, 15 bp, Homo sapiens
gaaccctgccacact

SEQ ID NO: 498931 - DNA, 15 bp, Homo sapiens
aaccctgccacactg

SEQ ID NO: 498932 - DNA, 15 bp, Homo sapiens
accctgccacactgc

SEQ ID NO: 498933 - DNA, 15 bp, Homo sapiens
ccctgccacactgcg

SEQ ID NO: 498934 - DNA, 15 bp, Homo sapiens
cctgccacactgcga

SEQ ID NO: 498935 - DNA, 15 bp, Homo sapiens
ctgccacactgcgat

SEQ ID NO: 498936 - DNA, 15 bp, Homo sapiens
tgccacactgcgatc

SEQ ID NO: 498937 - DNA, 15 bp, Homo sapiens
gccacactgcgatcg

SEQ ID NO: 498938 - DNA, 15 bp, Homo sapiens
ccacactgcgatcgc

SEQ ID NO: 498939 - DNA, 15 bp, Homo sapiens
cacactgcgatcgca

SEQ ID NO: 498940 - DNA, 15 bp, Homo sapiens
acactgcgatcgcat

SEQ ID NO: 498941 - DNA, 15 bp, Homo sapiens
cactgcgatcgcatc

SEQ ID NO: 498942 - DNA, 15 bp, Homo sapiens
actgcgatcgcatca

SEQ ID NO: 498943 - DNA, 15 bp, Homo sapiens
ctgcgatcgcatcat

SEQ ID NO: 498944 - DNA, 15 bp, Homo sapiens
tgcgatcgcatcatc

SEQ ID NO: 498945 - DNA, 15 bp, Homo sapiens
gcgatcgcatcatcg

SEQ ID NO: 498946 - DNA, 15 bp, Homo sapiens
cgatcgcatcatcgc

SEQ ID NO: 498947 - DNA, 15 bp, Homo sapiens
gatcgcatcatcgcg

SEQ ID NO: 498948 - DNA, 15 bp, Homo sapiens
atcgcatcatcgcgg

SEQ ID NO: 498949 - DNA, 15 bp, Homo sapiens
tcgcatcatcgcggt

SEQ ID NO: 498950 - DNA, 15 bp, Homo sapiens
cgcatcatcgcggta

SEQ ID NO: 498951 - DNA, 15 bp, Homo sapiens
gcatcatcgcggtat

SEQ ID NO: 498952 - DNA, 15 bp, Homo sapiens
catcatcgcggtatt

SEQ ID NO: 498953 - DNA, 15 bp, Homo sapiens
atcatcgcggtattc

SEQ ID NO: 498954 - DNA, 15 bp, Homo sapiens
tcatcgcggtattcg

SEQ ID NO: 498955 - DNA, 15 bp, Homo sapiens
catcgcggtattcgg

SEQ ID NO: 498956 - DNA, 15 bp, Homo sapiens
atcgcggtattcggt

SEQ ID NO: 498957 - DNA, 15 bp, Homo sapiens
tcgcggtattcggtt

SEQ ID NO: 498958 - DNA, 15 bp, Homo sapiens
cgcggtattcggttc

SEQ ID NO: 498959 - DNA, 15 bp, Homo sapiens
gcggtattcggttcg

SEQ ID NO: 498960 - DNA, 15 bp, Homo sapiens
cggtattcggttcgc

SEQ ID NO: 498961 - DNA, 15 bp, Homo sapiens
ggtattcggttcgct

SEQ ID NO: 498962 - DNA, 15 bp, Homo sapiens
gtattcggttcgctg

SEQ ID NO: 498963 - DNA, 15 bp, Homo sapiens
tattcggttcgctgc

SEQ ID NO: 498964 - DNA, 15 bp, Homo sapiens
attcggttcgctgcg

SEQ ID NO: 498965 - DNA, 15 bp, Homo sapiens
ttcggttcgctgcgt

SEQ ID NO: 498966 - DNA, 15 bp, Homo sapiens
tcggttcgctgcgtt

SEQ ID NO: 498967 - DNA, 15 bp, Homo sapiens
cggttcgctgcgttc

SEQ ID NO: 498968 - DNA, 15 bp, Homo sapiens
ggttcgctgcgttcc

SEQ ID NO: 498969 - DNA, 15 bp, Homo sapiens
gttcgctgcgttccc

SEQ ID NO: 498970 - DNA, 15 bp, Homo sapiens
ttcgctgcgttcccg

SEQ ID NO: 498971 - DNA, 15 bp, Homo sapiens
tcgctgcgttcccgc

SEQ ID NO: 498972 - DNA, 15 bp, Homo sapiens
cgctgcgttcccgcc

SEQ ID NO: 498973 - DNA, 15 bp, Homo sapiens
gctgcgttcccgccg

SEQ ID NO: 498974 - DNA, 15 bp, Homo sapiens
ctgcgttcccgccgc

SEQ ID NO: 498975 - DNA, 15 bp, Homo sapiens
tgcgttcccgccgcc

SEQ ID NO: 498976 - DNA, 15 bp, Homo sapiens
gcgttcccgccgcca

SEQ ID NO: 498977 - DNA, 15 bp, Homo sapiens
cgttcccgccgccac

SEQ ID NO: 498978 - DNA, 15 bp, Homo sapiens
gttcccgccgccacc

SEQ ID NO: 498979 - DNA, 15 bp, Homo sapiens
ttcccgccgccaccg

SEQ ID NO: 498980 - DNA, 15 bp, Homo sapiens
tcccgccgccaccgc

SEQ ID NO: 498981 - DNA, 15 bp, Homo sapiens
cccgccgccaccgcc

SEQ ID NO: 498982 - DNA, 15 bp, Homo sapiens
ccgccgccaccgcct

SEQ ID NO: 498983 - DNA, 15 bp, Homo sapiens
cgccgccaccgcctc

SEQ ID NO: 498984 - DNA, 15 bp, Homo sapiens
gccgccaccgcctcg

SEQ ID NO: 498985 - DNA, 15 bp, Homo sapiens
ccgccaccgcctcgg

SEQ ID NO: 498986 - DNA, 15 bp, Homo sapiens
cgccaccgcctcggc

SEQ ID NO: 498987 - DNA, 15 bp, Homo sapiens
gccaccgcctcggcg

SEQ ID NO: 498988 - DNA, 15 bp, Homo sapiens
ccaccgcctcggcgc

SEQ ID NO: 498989 - DNA, 15 bp, Homo sapiens
caccgcctcggcgcc

SEQ ID NO: 498990 - DNA, 15 bp, Homo sapiens
accgcctcggcgccc

SEQ ID NO: 498991 - DNA, 15 bp, Homo sapiens
ccgcctcggcgccct

SEQ ID NO: 498992 - DNA, 15 bp, Homo sapiens
cgcctcggcgccctt

SEQ ID NO: 498993 - DNA, 15 bp, Homo sapiens
gcctcggcgcccttt

SEQ ID NO: 498994 - DNA, 15 bp, Homo sapiens
cctcggcgccctttc

SEQ ID NO: 498995 - DNA, 15 bp, Homo sapiens
ctcggcgccctttct

SEQ ID NO: 498996 - DNA, 15 bp, Homo sapiens
tcggcgccctttctt

SEQ ID NO: 498997 - DNA, 15 bp, Homo sapiens
cggcgccctttcttg

SEQ ID NO: 498998 - DNA, 15 bp, Homo sapiens
ggcgccctttcttgg

SEQ ID NO: 498999 - DNA, 15 bp, Homo sapiens
gcgccctttcttggc

SEQ ID NO: 499000 - DNA, 15 bp, Homo sapiens
cgccctttcttggcc

SEQ ID NO: 499001 - DNA, 15 bp, Homo sapiens
gccctttcttggccc

SEQ ID NO: 499002 - DNA, 15 bp, Homo sapiens
ccctttcttggccct

SEQ ID NO: 499003 - DNA, 15 bp, Homo sapiens
cctttcttggccctt

SEQ ID NO: 499004 - DNA, 15 bp, Homo sapiens
ctttcttggcccttg

SEQ ID NO: 499005 - DNA, 15 bp, Homo sapiens
tttcttggcccttgt

SEQ ID NO: 499006 - DNA, 15 bp, Homo sapiens
ttcttggcccttgtt

SEQ ID NO: 499007 - DNA, 15 bp, Homo sapiens
tcttggcccttgttc

SEQ ID NO: 499008 - DNA, 15 bp, Homo sapiens
cttggcccttgttcc

SEQ ID NO: 499009 - DNA, 15 bp, Homo sapiens
ttggcccttgttccc

SEQ ID NO: 499010 - DNA, 15 bp, Homo sapiens
tggcccttgttcccc

SEQ ID NO: 499011 - DNA, 15 bp, Homo sapiens
ggcccttgttccccc

SEQ ID NO: 499012 - DNA, 15 bp, Homo sapiens
gcccttgttccccca

SEQ ID NO: 499013 - DNA, 15 bp, Homo sapiens
cccttgttcccccaa

SEQ ID NO: 499014 - DNA, 15 bp, Homo sapiens
ccttgttcccccaaa

SEQ ID NO: 499015 - DNA, 15 bp, Homo sapiens
cttgttcccccaaat

SEQ ID NO: 499016 - DNA, 15 bp, Homo sapiens
ttgttcccccaaatg

SEQ ID NO: 499017 - DNA, 15 bp, Homo sapiens
tgttcccccaaatgt

SEQ ID NO: 499018 - DNA, 15 bp, Homo sapiens
gttcccccaaatgtc

SEQ ID NO: 499019 - DNA, 15 bp, Homo sapiens
ttcccccaaatgtct

SEQ ID NO: 499020 - DNA, 15 bp, Homo sapiens
tcccccaaatgtctg

SEQ ID NO: 499021 - DNA, 15 bp, Homo sapiens
cccccaaatgtctga

SEQ ID NO: 499022 - DNA, 15 bp, Homo sapiens
ccccaaatgtctgac

SEQ ID NO: 499023 - DNA, 15 bp, Homo sapiens
cccaaatgtctgact

SEQ ID NO: 499024 - DNA, 15 bp, Homo sapiens
ccaaatgtctgactc

SEQ ID NO: 499025 - DNA, 15 bp, Homo sapiens
caaatgtctgactct

SEQ ID NO: 499026 - DNA, 15 bp, Homo sapiens
aaatgtctgactctg

SEQ ID NO: 499027 - DNA, 15 bp, Homo sapiens
aatgtctgactctga

SEQ ID NO: 499028 - DNA, 15 bp, Homo sapiens
atgtctgactctgac

SEQ ID NO: 499029 - DNA, 15 bp, Homo sapiens
tgtctgactctgact

SEQ ID NO: 499030 - DNA, 15 bp, Homo sapiens
gtctgactctgactc

SEQ ID NO: 499031 - DNA, 15 bp, Homo sapiens
tctgactctgactct

SEQ ID NO: 499032 - DNA, 15 bp, Homo sapiens
ctgactctgactctc

SEQ ID NO: 499033 - DNA, 15 bp, Homo sapiens
tgactctgactctcg

SEQ ID NO: 499034 - DNA, 15 bp, Homo sapiens
gactctgactctcgg

SEQ ID NO: 499035 - DNA, 15 bp, Homo sapiens
actctgactctcgga

SEQ ID NO: 499036 - DNA, 15 bp, Homo sapiens
ctctgactctcggac

SEQ ID NO: 499037 - DNA, 15 bp, Homo sapiens
tctgactctcggact

SEQ ID NO: 499038 - DNA, 15 bp, Homo sapiens
ctgactctcggactg

SEQ ID NO: 499039 - DNA, 15 bp, Homo sapiens
tgactctcggactga

SEQ ID NO: 499040 - DNA, 15 bp, Homo sapiens
gactctcggactgag

SEQ ID NO: 499041 - DNA, 15 bp, Homo sapiens
actctcggactgaga

SEQ ID NO: 499042 - DNA, 15 bp, Homo sapiens
ctctcggactgagaa

SEQ ID NO: 499043 - DNA, 15 bp, Homo sapiens
tctcggactgagaaa

SEQ ID NO: 499044 - DNA, 15 bp, Homo sapiens
ctcggactgagaaac

SEQ ID NO: 499045 - DNA, 15 bp, Homo sapiens
tcggactgagaaacg

SEQ ID NO: 499046 - DNA, 15 bp, Homo sapiens
cggactgagaaacgc

SEQ ID NO: 499047 - DNA, 15 bp, Homo sapiens
ggactgagaaacgca

SEQ ID NO: 499048 - DNA, 15 bp, Homo sapiens
gactgagaaacgcaa

SEQ ID NO: 499049 - DNA, 15 bp, Homo sapiens
actgagaaacgcaag

SEQ ID NO: 499050 - DNA, 15 bp, Homo sapiens
ctgagaaacgcaagg

SEQ ID NO: 499051 - DNA, 15 bp, Homo sapiens
tgagaaacgcaaggt

SEQ ID NO: 499052 - DNA, 15 bp, Homo sapiens
gagaaacgcaaggta

SEQ ID NO: 499053 - DNA, 15 bp, Homo sapiens
agaaacgcaaggtaa

SEQ ID NO: 499054 - DNA, 15 bp, Homo sapiens
gaaacgcaaggtaaa

SEQ ID NO: 499055 - DNA, 15 bp, Homo sapiens
aaacgcaaggtaaat

SEQ ID NO: 499056 - DNA, 15 bp, Homo sapiens
aacgcaaggtaaata

SEQ ID NO: 499057 - DNA, 15 bp, Homo sapiens
acgcaaggtaaatac

SEQ ID NO: 499058 - DNA, 15 bp, Homo sapiens
cgcaaggtaaatacc

SEQ ID NO: 499059 - DNA, 15 bp, Homo sapiens
gcaaggtaaatacct

SEQ ID NO: 499060 - DNA, 15 bp, Homo sapiens
caaggtaaatacctc

SEQ ID NO: 499061 - DNA, 15 bp, Homo sapiens
aaggtaaatacctcc

SEQ ID NO: 499062 - DNA, 15 bp, Homo sapiens
aggtaaatacctcca

SEQ ID NO: 499063 - DNA, 15 bp, Homo sapiens
ggtaaatacctccaa

SEQ ID NO: 499064 - DNA, 15 bp, Homo sapiens
gtaaatacctccaaa

SEQ ID NO: 499065 - DNA, 15 bp, Homo sapiens
taaatacctccaaat

SEQ ID NO: 499066 - DNA, 15 bp, Homo sapiens
aaatacctccaaatc

SEQ ID NO: 499067 - DNA, 15 bp, Homo sapiens
aatacctccaaatcc

SEQ ID NO: 499068 - DNA, 15 bp, Homo sapiens
atacctccaaatccc

SEQ ID NO: 499069 - DNA, 15 bp, Homo sapiens
tacctccaaatcccg

SEQ ID NO: 499070 - DNA, 15 bp, Homo sapiens
acctccaaatcccgg

SEQ ID NO: 499071 - DNA, 15 bp, Homo sapiens
cctccaaatcccggg

SEQ ID NO: 499072 - DNA, 15 bp, Homo sapiens
ctccaaatcccgggg

SEQ ID NO: 499073 - DNA, 15 bp, Homo sapiens
tccaaatcccggggc

SEQ ID NO: 499074 - DNA, 15 bp, Homo sapiens
ccaaatcccggggcg

SEQ ID NO: 499075 - DNA, 15 bp, Homo sapiens
caaatcccggggcgc

SEQ ID NO: 499076 - DNA, 15 bp, Homo sapiens
aaatcccggggcgcg

SEQ ID NO: 499077 - DNA, 15 bp, Homo sapiens
aatcccggggcgcgg

SEQ ID NO: 499078 - DNA, 15 bp, Homo sapiens
atcccggggcgcggg

SEQ ID NO: 499079 - DNA, 15 bp, Homo sapiens
tcccggggcgcgggc

SEQ ID NO: 499080 - DNA, 15 bp, Homo sapiens
cccggggcgcgggcc

SEQ ID NO: 499081 - DNA, 15 bp, Homo sapiens
ccggggcgcgggcct

SEQ ID NO: 499082 - DNA, 15 bp, Homo sapiens
cggggcgcgggcctg

SEQ ID NO: 499083 - DNA, 15 bp, Homo sapiens
ggggcgcgggcctgg

SEQ ID NO: 499084 - DNA, 15 bp, Homo sapiens
gggcgcgggcctggc

SEQ ID NO: 499085 - DNA, 15 bp, Homo sapiens
ggcgcgggcctggca

SEQ ID NO: 499086 - DNA, 15 bp, Homo sapiens
gcgcgggcctggcac

SEQ ID NO: 499087 - DNA, 15 bp, Homo sapiens
cgcgggcctggcacc

SEQ ID NO: 499088 - DNA, 15 bp, Homo sapiens
gcgggcctggcaccg

SEQ ID NO: 499089 - DNA, 15 bp, Homo sapiens
cgggcctggcaccga

SEQ ID NO: 499090 - DNA, 15 bp, Homo sapiens
gggcctggcaccgaa

SEQ ID NO: 499091 - DNA, 15 bp, Homo sapiens
ggcctggcaccgaag

SEQ ID NO: 499092 - DNA, 15 bp, Homo sapiens
gcctggcaccgaagg

SEQ ID NO: 499093 - DNA, 15 bp, Homo sapiens
cctggcaccgaagga

SEQ ID NO: 499094 - DNA, 15 bp, Homo sapiens
ctggcaccgaaggaa

SEQ ID NO: 499095 - DNA, 15 bp, Homo sapiens
tggcaccgaaggaag

SEQ ID NO: 499096 - DNA, 15 bp, Homo sapiens
ggcaccgaaggaaga

SEQ ID NO: 499097 - DNA, 15 bp, Homo sapiens
gcaccgaaggaagac

SEQ ID NO: 499098 - DNA, 15 bp, Homo sapiens
caccgaaggaagact

SEQ ID NO: 499099 - DNA, 15 bp, Homo sapiens
accgaaggaagacta

SEQ ID NO: 499100 - DNA, 15 bp, Homo sapiens
ccgaaggaagactag

SEQ ID NO: 499101 - DNA, 15 bp, Homo sapiens
cgaaggaagactagc

SEQ ID NO: 499102 - DNA, 15 bp, Homo sapiens
gaaggaagactagcg

SEQ ID NO: 499103 - DNA, 15 bp, Homo sapiens
aaggaagactagcgc

SEQ ID NO: 499104 - DNA, 15 bp, Homo sapiens
aggaagactagcgct

SEQ ID NO: 499105 - DNA, 15 bp, Homo sapiens
ggaagactagcgctg

SEQ ID NO: 499106 - DNA, 15 bp, Homo sapiens
gaagactagcgctgg

SEQ ID NO: 499107 - DNA, 15 bp, Homo sapiens
aagactagcgctgga

SEQ ID NO: 499108 - DNA, 15 bp, Homo sapiens
agactagcgctggag

SEQ ID NO: 499109 - DNA, 15 bp, Homo sapiens
gactagcgctggagc

SEQ ID NO: 499110 - DNA, 15 bp, Homo sapiens
actagcgctggagcc

SEQ ID NO: 499111 - DNA, 15 bp, Homo sapiens
ctagcgctggagccc

SEQ ID NO: 499112 - DNA, 15 bp, Homo sapiens
tagcgctggagcccg

SEQ ID NO: 499113 - DNA, 15 bp, Homo sapiens
agcgctggagcccga

SEQ ID NO: 499114 - DNA, 15 bp, Homo sapiens
gcgctggagcccgaa

SEQ ID NO: 499115 - DNA, 15 bp, Homo sapiens
cgctggagcccgaac

SEQ ID NO: 499116 - DNA, 15 bp, Homo sapiens
gctggagcccgaacg

SEQ ID NO: 499117 - DNA, 15 bp, Homo sapiens
ctggagcccgaacgg

SEQ ID NO: 499118 - DNA, 15 bp, Homo sapiens
tggagcccgaacggc

SEQ ID NO: 499119 - DNA, 15 bp, Homo sapiens
ggagcccgaacggca

SEQ ID NO: 499120 - DNA, 15 bp, Homo sapiens
gagcccgaacggcac

SEQ ID NO: 499121 - DNA, 15 bp, Homo sapiens
agcccgaacggcacc

SEQ ID NO: 499122 - DNA, 15 bp, Homo sapiens
gcccgaacggcacca

SEQ ID NO: 499123 - DNA, 15 bp, Homo sapiens
cccgaacggcaccac

SEQ ID NO: 499124 - DNA, 15 bp, Homo sapiens
ccgaacggcaccacc

SEQ ID NO: 499125 - DNA, 15 bp, Homo sapiens
cgaacggcaccacct

SEQ ID NO: 499126 - DNA, 15 bp, Homo sapiens
gaacggcaccaccta

SEQ ID NO: 499127 - DNA, 15 bp, Homo sapiens
aacggcaccacctac

SEQ ID NO: 499128 - DNA, 15 bp, Homo sapiens
acggcaccacctact

SEQ ID NO: 499129 - DNA, 15 bp, Homo sapiens
cggcaccacctactg

SEQ ID NO: 499130 - DNA, 15 bp, Homo sapiens
ggcaccacctactgc

SEQ ID NO: 499131 - DNA, 15 bp, Homo sapiens
gcaccacctactgcc

SEQ ID NO: 499132 - DNA, 15 bp, Homo sapiens
caccacctactgccc

SEQ ID NO: 499133 - DNA, 15 bp, Homo sapiens
accacctactgcccg

SEQ ID NO: 499134 - DNA, 15 bp, Homo sapiens
ccacctactgcccgc

SEQ ID NO: 499135 - DNA, 15 bp, Homo sapiens
cacctactgcccgct

SEQ ID NO: 499136 - DNA, 15 bp, Homo sapiens
acctactgcccgctt

SEQ ID NO: 499137 - DNA, 15 bp, Homo sapiens
cctactgcccgcttc

SEQ ID NO: 499138 - DNA, 15 bp, Homo sapiens
ctactgcccgcttcc

SEQ ID NO: 499139 - DNA, 15 bp, Homo sapiens
tactgcccgcttccc

SEQ ID NO: 499140 - DNA, 15 bp, Homo sapiens
actgcccgcttcccg

SEQ ID NO: 499141 - DNA, 15 bp, Homo sapiens
ctgcccgcttcccgt

SEQ ID NO: 499142 - DNA, 15 bp, Homo sapiens
tgcccgcttcccgtg

SEQ ID NO: 499143 - DNA, 15 bp, Homo sapiens
gcccgcttcccgtgc

SEQ ID NO: 499144 - DNA, 15 bp, Homo sapiens
cccgcttcccgtgca

SEQ ID NO: 499145 - DNA, 15 bp, Homo sapiens
ccgcttcccgtgcac

SEQ ID NO: 499146 - DNA, 15 bp, Homo sapiens
cgcttcccgtgcacg

SEQ ID NO: 499147 - DNA, 15 bp, Homo sapiens
gcttcccgtgcacgt

SEQ ID NO: 499148 - DNA, 15 bp, Homo sapiens
cttcccgtgcacgtg

SEQ ID NO: 499149 - DNA, 15 bp, Homo sapiens
ttcccgtgcacgtgc

SEQ ID NO: 499150 - DNA, 15 bp, Homo sapiens
tcccgtgcacgtgcg

SEQ ID NO: 499151 - DNA, 15 bp, Homo sapiens
cccgtgcacgtgcga

SEQ ID NO: 499152 - DNA, 15 bp, Homo sapiens
ccgtgcacgtgcgag

SEQ ID NO: 499153 - DNA, 15 bp, Homo sapiens
cgtgcacgtgcgagc

SEQ ID NO: 499154 - DNA, 15 bp, Homo sapiens
gtgcacgtgcgagcg

SEQ ID NO: 499155 - DNA, 15 bp, Homo sapiens
tgcacgtgcgagcgg

SEQ ID NO: 499156 - DNA, 15 bp, Homo sapiens
gcacgtgcgagcgga

SEQ ID NO: 499157 - DNA, 15 bp, Homo sapiens
cacgtgcgagcggag

SEQ ID NO: 499158 - DNA, 15 bp, Homo sapiens
acgtgcgagcggaga

SEQ ID NO: 499159 - DNA, 15 bp, Homo sapiens
cgtgcgagcggagac

SEQ ID NO: 499160 - DNA, 15 bp, Homo sapiens
gtgcgagcggagacg

SEQ ID NO: 499161 - DNA, 15 bp, Homo sapiens
tgcgagcggagacgc

SEQ ID NO: 499162 - DNA, 15 bp, Homo sapiens
gcgagcggagacgct

SEQ ID NO: 499163 - DNA, 15 bp, Homo sapiens
cgagcggagacgctt

SEQ ID NO: 499164 - DNA, 15 bp, Homo sapiens
gagcggagacgcttg

SEQ ID NO: 499165 - DNA, 15 bp, Homo sapiens
agcggagacgcttgc

SEQ ID NO: 499166 - DNA, 15 bp, Homo sapiens
gcggagacgcttgca

SEQ ID NO: 499167 - DNA, 15 bp, Homo sapiens
cggagacgcttgcat

SEQ ID NO: 499168 - DNA, 15 bp, Homo sapiens
ggagacgcttgcatc

SEQ ID NO: 499169 - DNA, 15 bp, Homo sapiens
gagacgcttgcatcg

SEQ ID NO: 499170 - DNA, 15 bp, Homo sapiens
agacgcttgcatcgg

SEQ ID NO: 499171 - DNA, 15 bp, Homo sapiens
gacgcttgcatcggc

SEQ ID NO: 499172 - DNA, 15 bp, Homo sapiens
acgcttgcatcggcg

SEQ ID NO: 499173 - DNA, 15 bp, Homo sapiens
cgcttgcatcggcgc

SEQ ID NO: 499174 - DNA, 15 bp, Homo sapiens
gcttgcatcggcgcc

SEQ ID NO: 499175 - DNA, 15 bp, Homo sapiens
cttgcatcggcgccg

SEQ ID NO: 499176 - DNA, 15 bp, Homo sapiens
ttgcatcggcgccgc

SEQ ID NO: 499177 - DNA, 15 bp, Homo sapiens
tgcatcggcgccgct

SEQ ID NO: 499178 - DNA, 15 bp, Homo sapiens
gcatcggcgccgctt

SEQ ID NO: 499179 - DNA, 15 bp, Homo sapiens
catcggcgccgcttg

SEQ ID NO: 499180 - DNA, 15 bp, Homo sapiens
atcggcgccgcttgt

SEQ ID NO: 499181 - DNA, 15 bp, Homo sapiens
tcggcgccgcttgtc

SEQ ID NO: 499182 - DNA, 15 bp, Homo sapiens
cggcgccgcttgtcg

SEQ ID NO: 499183 - DNA, 15 bp, Homo sapiens
ggcgccgcttgtcgc

SEQ ID NO: 499184 - DNA, 15 bp, Homo sapiens
gcgccgcttgtcgcc

SEQ ID NO: 499185 - DNA, 15 bp, Homo sapiens
cgccgcttgtcgccg

SEQ ID NO: 499186 - DNA, 15 bp, Homo sapiens
gccgcttgtcgccgg

SEQ ID NO: 499187 - DNA, 15 bp, Homo sapiens
ccgcttgtcgccggc

SEQ ID NO: 499188 - DNA, 15 bp, Homo sapiens
cgcttgtcgccggcg

SEQ ID NO: 499189 - DNA, 15 bp, Homo sapiens
gcttgtcgccggcgg

SEQ ID NO: 499190 - DNA, 15 bp, Homo sapiens
cttgtcgccggcggg

SEQ ID NO: 499191 - DNA, 15 bp, Homo sapiens
ttgtcgccggcggga

SEQ ID NO: 499192 - DNA, 15 bp, Homo sapiens
tgtcgccggcgggag

SEQ ID NO: 499193 - DNA, 15 bp, Homo sapiens
gtcgccggcgggagg

SEQ ID NO: 499194 - DNA, 15 bp, Homo sapiens
tcgccggcgggaggt

SEQ ID NO: 499195 - DNA, 15 bp, Homo sapiens
cgccggcgggaggtg

SEQ ID NO: 499196 - DNA, 15 bp, Homo sapiens
gccggcgggaggtgg

SEQ ID NO: 499197 - DNA, 15 bp, Homo sapiens
ccggcgggaggtggg

SEQ ID NO: 499198 - DNA, 15 bp, Homo sapiens
cggcgggaggtgggg

SEQ ID NO: 499199 - DNA, 15 bp, Homo sapiens
ggcgggaggtgggga

SEQ ID NO: 499200 - DNA, 15 bp, Homo sapiens
gcgggaggtggggat

SEQ ID NO: 499201 - DNA, 15 bp, Homo sapiens
cgggaggtggggatc

SEQ ID NO: 499202 - DNA, 15 bp, Homo sapiens
gggaggtggggatcc

SEQ ID NO: 499203 - DNA, 15 bp, Homo sapiens
ggaggtggggatccg

SEQ ID NO: 499204 - DNA, 15 bp, Homo sapiens
gaggtggggatccgt

SEQ ID NO: 499205 - DNA, 15 bp, Homo sapiens
aggtggggatccgtg

SEQ ID NO: 499206 - DNA, 15 bp, Homo sapiens
ggtggggatccgtgt

SEQ ID NO: 499207 - DNA, 15 bp, Homo sapiens
gtggggatccgtgtg

SEQ ID NO: 499208 - DNA, 15 bp, Homo sapiens
tggggatccgtgtgg

SEQ ID NO: 499209 - DNA, 15 bp, Homo sapiens
ggggatccgtgtgga

SEQ ID NO: 499210 - DNA, 15 bp, Homo sapiens
gggatccgtgtggat

SEQ ID NO: 499211 - DNA, 15 bp, Homo sapiens
ggatccgtgtggatc

SEQ ID NO: 499212 - DNA, 15 bp, Homo sapiens
gatccgtgtggatcg

SEQ ID NO: 499213 - DNA, 15 bp, Homo sapiens
atccgtgtggatcgg

SEQ ID NO: 499214 - DNA, 15 bp, Homo sapiens
tccgtgtggatcggg

SEQ ID NO: 499215 - DNA, 15 bp, Homo sapiens
ccgtgtggatcgggt

SEQ ID NO: 499216 - DNA, 15 bp, Homo sapiens
cgtgtggatcgggtt

SEQ ID NO: 499217 - DNA, 15 bp, Homo sapiens
gtgtggatcgggttc

SEQ ID NO: 499218 - DNA, 15 bp, Homo sapiens
tgtggatcgggttcc

SEQ ID NO: 499219 - DNA, 15 bp, Homo sapiens
gtggatcgggttccc

SEQ ID NO: 499220 - DNA, 15 bp, Homo sapiens
tggatcgggttccct

SEQ ID NO: 499221 - DNA, 15 bp, Homo sapiens
ggatcgggttccctc

SEQ ID NO: 499222 - DNA, 15 bp, Homo sapiens
gatcgggttccctct

SEQ ID NO: 499223 - DNA, 15 bp, Homo sapiens
atcgggttccctctc

SEQ ID NO: 499224 - DNA, 15 bp, Homo sapiens
tcgggttccctctcg

SEQ ID NO: 499225 - DNA, 15 bp, Homo sapiens
cgggttccctctcgg

SEQ ID NO: 499226 - DNA, 15 bp, Homo sapiens
gggttccctctcggg

SEQ ID NO: 499227 - DNA, 15 bp, Homo sapiens
ggttccctctcgggc

SEQ ID NO: 499228 - DNA, 15 bp, Homo sapiens
gttccctctcgggca

SEQ ID NO: 499229 - DNA, 15 bp, Homo sapiens
ttccctctcgggcag

SEQ ID NO: 499230 - DNA, 15 bp, Homo sapiens
tccctctcgggcagg

SEQ ID NO: 499231 - DNA, 15 bp, Homo sapiens
ccctctcgggcaggt

SEQ ID NO: 499232 - DNA, 15 bp, Homo sapiens
cctctcgggcaggtt

SEQ ID NO: 499233 - DNA, 15 bp, Homo sapiens
ctctcgggcaggttc

SEQ ID NO: 499234 - DNA, 15 bp, Homo sapiens
tctcgggcaggttct

SEQ ID NO: 499235 - DNA, 15 bp, Homo sapiens
ctcgggcaggttctc

SEQ ID NO: 499236 - DNA, 15 bp, Homo sapiens
tcgggcaggttctct

SEQ ID NO: 499237 - DNA, 15 bp, Homo sapiens
cgggcaggttctctt

SEQ ID NO: 499238 - DNA, 15 bp, Homo sapiens
gggcaggttctcttt

SEQ ID NO: 499239 - DNA, 15 bp, Homo sapiens
ggcaggttctcttta

SEQ ID NO: 499240 - DNA, 15 bp, Homo sapiens
gcaggttctctttaa

SEQ ID NO: 499241 - DNA, 15 bp, Homo sapiens
caggttctctttaaa

SEQ ID NO: 499242 - DNA, 15 bp, Homo sapiens
aggttctctttaaag

SEQ ID NO: 499243 - DNA, 15 bp, Homo sapiens
ggttctctttaaaga

SEQ ID NO: 499244 - DNA, 15 bp, Homo sapiens
gttctctttaaagaa

SEQ ID NO: 499245 - DNA, 15 bp, Homo sapiens
ttctctttaaagaaa

SEQ ID NO: 499246 - DNA, 15 bp, Homo sapiens
tctctttaaagaaaa

SEQ ID NO: 499247 - DNA, 15 bp, Homo sapiens
ctctttaaagaaaag

SEQ ID NO: 499248 - DNA, 15 bp, Homo sapiens
tctttaaagaaaagt

SEQ ID NO: 499249 - DNA, 15 bp, Homo sapiens
ctttaaagaaaagtc

SEQ ID NO: 499250 - DNA, 15 bp, Homo sapiens
tttaaagaaaagtcg

SEQ ID NO: 499251 - DNA, 15 bp, Homo sapiens
ttaaagaaaagtcgt

SEQ ID NO: 499252 - DNA, 15 bp, Homo sapiens
taaagaaaagtcgtt

SEQ ID NO: 499253 - DNA, 15 bp, Homo sapiens
aaagaaaagtcgttc

SEQ ID NO: 499254 - DNA, 15 bp, Homo sapiens
aagaaaagtcgttca

SEQ ID NO: 499255 - DNA, 15 bp, Homo sapiens
agaaaagtcgttcac

SEQ ID NO: 499256 - DNA, 15 bp, Homo sapiens
gaaaagtcgttcacg

SEQ ID NO: 499257 - DNA, 15 bp, Homo sapiens
aaaagtcgttcacgc

SEQ ID NO: 499258 - DNA, 15 bp, Homo sapiens
aaagtcgttcacgcg

SEQ ID NO: 499259 - DNA, 15 bp, Homo sapiens
aagtcgttcacgcgg

SEQ ID NO: 499260 - DNA, 15 bp, Homo sapiens
agtcgttcacgcgga

SEQ ID NO: 499261 - DNA, 15 bp, Homo sapiens
gtcgttcacgcggaa

SEQ ID NO: 499262 - DNA, 15 bp, Homo sapiens
tcgttcacgcggaac

SEQ ID NO: 499263 - DNA, 15 bp, Homo sapiens
cgttcacgcggaacc

SEQ ID NO: 499264 - DNA, 15 bp, Homo sapiens
gttcacgcggaacct

SEQ ID NO: 499265 - DNA, 15 bp, Homo sapiens
ttcacgcggaacctg

SEQ ID NO: 499266 - DNA, 15 bp, Homo sapiens
tcacgcggaacctgc

SEQ ID NO: 499267 - DNA, 15 bp, Homo sapiens
cacgcggaacctgca

SEQ ID NO: 499268 - DNA, 15 bp, Homo sapiens
acgcggaacctgcag

SEQ ID NO: 499269 - DNA, 15 bp, Homo sapiens
cgcggaacctgcagg

SEQ ID NO: 499270 - DNA, 15 bp, Homo sapiens
gcggaacctgcaggc

SEQ ID NO: 499271 - DNA, 15 bp, Homo sapiens
cggaacctgcaggct

SEQ ID NO: 499272 - DNA, 15 bp, Homo sapiens
ggaacctgcaggctc

SEQ ID NO: 499273 - DNA, 15 bp, Homo sapiens
gaacctgcaggctct

SEQ ID NO: 499274 - DNA, 15 bp, Homo sapiens
aacctgcaggctctt

SEQ ID NO: 499275 - DNA, 15 bp, Homo sapiens
acctgcaggctcttg

SEQ ID NO: 499276 - DNA, 15 bp, Homo sapiens
cctgcaggctcttgg

SEQ ID NO: 499277 - DNA, 15 bp, Homo sapiens
ctgcaggctcttggc

SEQ ID NO: 499278 - DNA, 15 bp, Homo sapiens
tgcaggctcttggcc

SEQ ID NO: 499279 - DNA, 15 bp, Homo sapiens
gcaggctcttggccg

SEQ ID NO: 499280 - DNA, 15 bp, Homo sapiens
caggctcttggccga

SEQ ID NO: 499281 - DNA, 15 bp, Homo sapiens
aggctcttggccgaa

SEQ ID NO: 499282 - DNA, 15 bp, Homo sapiens
ggctcttggccgaag

SEQ ID NO: 499283 - DNA, 15 bp, Homo sapiens
gctcttggccgaagt

SEQ ID NO: 499284 - DNA, 15 bp, Homo sapiens
ctcttggccgaagtg

SEQ ID NO: 499285 - DNA, 15 bp, Homo sapiens
tcttggccgaagtgc

SEQ ID NO: 499286 - DNA, 15 bp, Homo sapiens
cttggccgaagtgcg

SEQ ID NO: 499287 - DNA, 15 bp, Homo sapiens
ttggccgaagtgcgg

SEQ ID NO: 499288 - DNA, 15 bp, Homo sapiens
tggccgaagtgcggc

SEQ ID NO: 499289 - DNA, 15 bp, Homo sapiens
ggccgaagtgcggct

SEQ ID NO: 499290 - DNA, 15 bp, Homo sapiens
gccgaagtgcggctt

SEQ ID NO: 499291 - DNA, 15 bp, Homo sapiens
ccgaagtgcggcttg

SEQ ID NO: 499292 - DNA, 15 bp, Homo sapiens
cgaagtgcggcttgg

SEQ ID NO: 499293 - DNA, 15 bp, Homo sapiens
gaagtgcggcttggg

SEQ ID NO: 499294 - DNA, 15 bp, Homo sapiens
aagtgcggcttggga

SEQ ID NO: 499295 - DNA, 15 bp, Homo sapiens
agtgcggcttgggac

SEQ ID NO: 499296 - DNA, 15 bp, Homo sapiens
gtgcggcttgggacg

SEQ ID NO: 499297 - DNA, 15 bp, Homo sapiens
tgcggcttgggacgg

SEQ ID NO: 499298 - DNA, 15 bp, Homo sapiens
gcggcttgggacggg

SEQ ID NO: 499299 - DNA, 15 bp, Homo sapiens
cggcttgggacggga

SEQ ID NO: 499300 - DNA, 15 bp, Homo sapiens
ggcttgggacgggat

SEQ ID NO: 499301 - DNA, 15 bp, Homo sapiens
gcttgggacgggatg

SEQ ID NO: 499302 - DNA, 15 bp, Homo sapiens
cttgggacgggatgc

SEQ ID NO: 499303 - DNA, 15 bp, Homo sapiens
ttgggacgggatgct

SEQ ID NO: 499304 - DNA, 15 bp, Homo sapiens
tgggacgggatgctg

SEQ ID NO: 499305 - DNA, 15 bp, Homo sapiens
gggacgggatgctgc

SEQ ID NO: 499306 - DNA, 15 bp, Homo sapiens
ggacgggatgctgcg

SEQ ID NO: 499307 - DNA, 15 bp, Homo sapiens
gacgggatgctgcgc

SEQ ID NO: 499308 - DNA, 15 bp, Homo sapiens
acgggatgctgcgcg

SEQ ID NO: 499309 - DNA, 15 bp, Homo sapiens
cgggatgctgcgcgc

SEQ ID NO: 499310 - DNA, 15 bp, Homo sapiens
gggatgctgcgcgcg

SEQ ID NO: 499311 - DNA, 15 bp, Homo sapiens
ggatgctgcgcgcgg

SEQ ID NO: 499312 - DNA, 15 bp, Homo sapiens
gatgctgcgcgcggg

SEQ ID NO: 499313 - DNA, 15 bp, Homo sapiens
atgctgcgcgcgggc

SEQ ID NO: 499314 - DNA, 15 bp, Homo sapiens
tgctgcgcgcgggcc

SEQ ID NO: 499315 - DNA, 15 bp, Homo sapiens
gctgcgcgcgggcct

SEQ ID NO: 499316 - DNA, 15 bp, Homo sapiens
ctgcgcgcgggcctg

SEQ ID NO: 499317 - DNA, 15 bp, Homo sapiens
tgcgcgcgggcctgg

SEQ ID NO: 499318 - DNA, 15 bp, Homo sapiens
gcgcgcgggcctggt

SEQ ID NO: 499319 - DNA, 15 bp, Homo sapiens
cgcgcgggcctggtg

SEQ ID NO: 499320 - DNA, 15 bp, Homo sapiens
gcgcgggcctggtga

SEQ ID NO: 499321 - DNA, 15 bp, Homo sapiens
cgcgggcctggtgaa

SEQ ID NO: 499322 - DNA, 15 bp, Homo sapiens
gcgggcctggtgaag

SEQ ID NO: 499323 - DNA, 15 bp, Homo sapiens
cgggcctggtgaagg

SEQ ID NO: 499324 - DNA, 15 bp, Homo sapiens
gggcctggtgaaggg

SEQ ID NO: 499325 - DNA, 15 bp, Homo sapiens
ggcctggtgaagggt

SEQ ID NO: 499326 - DNA, 15 bp, Homo sapiens
gcctggtgaagggtc

SEQ ID NO: 499327 - DNA, 15 bp, Homo sapiens
cctggtgaagggtcg

SEQ ID NO: 499328 - DNA, 15 bp, Homo sapiens
ctggtgaagggtcgt

SEQ ID NO: 499329 - DNA, 15 bp, Homo sapiens
tggtgaagggtcgta

SEQ ID NO: 499330 - DNA, 15 bp, Homo sapiens
ggtgaagggtcgtag

SEQ ID NO: 499331 - DNA, 15 bp, Homo sapiens
gtgaagggtcgtagg

SEQ ID NO: 499332 - DNA, 15 bp, Homo sapiens
tgaagggtcgtaggt

SEQ ID NO: 499333 - DNA, 15 bp, Homo sapiens
gaagggtcgtaggtc

SEQ ID NO: 499334 - DNA, 15 bp, Homo sapiens
aagggtcgtaggtcc

SEQ ID NO: 499335 - DNA, 15 bp, Homo sapiens
agggtcgtaggtccg

SEQ ID NO: 499336 - DNA, 15 bp, Homo sapiens
gggtcgtaggtccgg

SEQ ID NO: 499337 - DNA, 15 bp, Homo sapiens
ggtcgtaggtccggg

SEQ ID NO: 499338 - DNA, 15 bp, Homo sapiens
gtcgtaggtccgggc

SEQ ID NO: 499339 - DNA, 15 bp, Homo sapiens
tcgtaggtccgggca

SEQ ID NO: 499340 - DNA, 15 bp, Homo sapiens
cgtaggtccgggcag

SEQ ID NO: 499341 - DNA, 15 bp, Homo sapiens
gtaggtccgggcagg

SEQ ID NO: 499342 - DNA, 15 bp, Homo sapiens
taggtccgggcagga

SEQ ID NO: 499343 - DNA, 15 bp, Homo sapiens
aggtccgggcaggag

SEQ ID NO: 499344 - DNA, 15 bp, Homo sapiens
ggtccgggcaggagg

SEQ ID NO: 499345 - DNA, 15 bp, Homo sapiens
gtccgggcaggagga

SEQ ID NO: 499346 - DNA, 15 bp, Homo sapiens
tccgggcaggaggag

SEQ ID NO: 499347 - DNA, 15 bp, Homo sapiens
ccgggcaggaggaga

SEQ ID NO: 499348 - DNA, 15 bp, Homo sapiens
cgggcaggaggagag

SEQ ID NO: 499349 - DNA, 15 bp, Homo sapiens
gggcaggaggagagg

SEQ ID NO: 499350 - DNA, 15 bp, Homo sapiens
ggcaggaggagaggc

SEQ ID NO: 499351 - DNA, 15 bp, Homo sapiens
gcaggaggagaggca

SEQ ID NO: 499352 - DNA, 15 bp, Homo sapiens
caggaggagaggcag

SEQ ID NO: 499353 - DNA, 15 bp, Homo sapiens
aggaggagaggcagc

SEQ ID NO: 499354 - DNA, 15 bp, Homo sapiens
ggaggagaggcagcg

SEQ ID NO: 499355 - DNA, 15 bp, Homo sapiens
gaggagaggcagcgc

SEQ ID NO: 499356 - DNA, 15 bp, Homo sapiens
aggagaggcagcgcg

SEQ ID NO: 499357 - DNA, 15 bp, Homo sapiens
ggagaggcagcgcgt

SEQ ID NO: 499358 - DNA, 15 bp, Homo sapiens
gagaggcagcgcgtg

SEQ ID NO: 499359 - DNA, 15 bp, Homo sapiens
agaggcagcgcgtgc

SEQ ID NO: 499360 - DNA, 15 bp, Homo sapiens
gaggcagcgcgtgcc

SEQ ID NO: 499361 - DNA, 15 bp, Homo sapiens
aggcagcgcgtgcct

SEQ ID NO: 499362 - DNA, 15 bp, Homo sapiens
ggcagcgcgtgcctt

SEQ ID NO: 499363 - DNA, 15 bp, Homo sapiens
gcagcgcgtgccttt

SEQ ID NO: 499364 - DNA, 15 bp, Homo sapiens
cagcgcgtgcctttc

SEQ ID NO: 499365 - DNA, 15 bp, Homo sapiens
agcgcgtgcctttcg

SEQ ID NO: 499366 - DNA, 15 bp, Homo sapiens
gcgcgtgcctttcgg

SEQ ID NO: 499367 - DNA, 15 bp, Homo sapiens
cgcgtgcctttcggc

SEQ ID NO: 499368 - DNA, 15 bp, Homo sapiens
gcgtgcctttcggcg

SEQ ID NO: 499369 - DNA, 15 bp, Homo sapiens
cgtgcctttcggcgc

SEQ ID NO: 499370 - DNA, 15 bp, Homo sapiens
gtgcctttcggcgcc

SEQ ID NO: 499371 - DNA, 15 bp, Homo sapiens
tgcctttcggcgccg

SEQ ID NO: 499372 - DNA, 15 bp, Homo sapiens
gcctttcggcgccgg

SEQ ID NO: 499373 - DNA, 15 bp, Homo sapiens
cctttcggcgccggc

SEQ ID NO: 499374 - DNA, 15 bp, Homo sapiens
ctttcggcgccggcc

SEQ ID NO: 499375 - DNA, 15 bp, Homo sapiens
tttcggcgccggccc

SEQ ID NO: 499376 - DNA, 15 bp, Homo sapiens
ttcggcgccggcccg

SEQ ID NO: 499377 - DNA, 15 bp, Homo sapiens
tcggcgccggcccgg

SEQ ID NO: 499378 - DNA, 15 bp, Homo sapiens
cggcgccggcccggg

SEQ ID NO: 499379 - DNA, 15 bp, Homo sapiens
ggcgccggcccggga

SEQ ID NO: 499380 - DNA, 15 bp, Homo sapiens
gcgccggcccgggag

SEQ ID NO: 499381 - DNA, 15 bp, Homo sapiens
cgccggcccgggagc

SEQ ID NO: 499382 - DNA, 15 bp, Homo sapiens
gccggcccgggagct

SEQ ID NO: 499383 - DNA, 15 bp, Homo sapiens
ccggcccgggagctg

SEQ ID NO: 499384 - DNA, 15 bp, Homo sapiens
cggcccgggagctga

SEQ ID NO: 499385 - DNA, 15 bp, Homo sapiens
ggcccgggagctgag

SEQ ID NO: 499386 - DNA, 15 bp, Homo sapiens
gcccgggagctgagg

SEQ ID NO: 499387 - DNA, 15 bp, Homo sapiens
cccgggagctgagga

SEQ ID NO: 499388 - DNA, 15 bp, Homo sapiens
ccgggagctgaggac

SEQ ID NO: 499389 - DNA, 15 bp, Homo sapiens
cgggagctgaggacc

SEQ ID NO: 499390 - DNA, 15 bp, Homo sapiens
gggagctgaggacct

SEQ ID NO: 499391 - DNA, 15 bp, Homo sapiens
ggagctgaggacctg

SEQ ID NO: 499392 - DNA, 15 bp, Homo sapiens
gagctgaggacctgc

SEQ ID NO: 499393 - DNA, 15 bp, Homo sapiens
agctgaggacctgct

SEQ ID NO: 499394 - DNA, 15 bp, Homo sapiens
gctgaggacctgctc

SEQ ID NO: 499395 - DNA, 15 bp, Homo sapiens
ctgaggacctgctcg

SEQ ID NO: 499396 - DNA, 15 bp, Homo sapiens
tgaggacctgctcgt

SEQ ID NO: 499397 - DNA, 15 bp, Homo sapiens
gaggacctgctcgta

SEQ ID NO: 499398 - DNA, 15 bp, Homo sapiens
aggacctgctcgtag

SEQ ID NO: 499399 - DNA, 15 bp, Homo sapiens
ggacctgctcgtagt

SEQ ID NO: 499400 - DNA, 15 bp, Homo sapiens
gacctgctcgtagta

SEQ ID NO: 499401 - DNA, 15 bp, Homo sapiens
acctgctcgtagtat

SEQ ID NO: 499402 - DNA, 15 bp, Homo sapiens
cctgctcgtagtatc

SEQ ID NO: 499403 - DNA, 15 bp, Homo sapiens
ctgctcgtagtatcg

SEQ ID NO: 499404 - DNA, 15 bp, Homo sapiens
tgctcgtagtatcgg

SEQ ID NO: 499405 - DNA, 15 bp, Homo sapiens
gctcgtagtatcggg

SEQ ID NO: 499406 - DNA, 15 bp, Homo sapiens
ctcgtagtatcgggc

SEQ ID NO: 499407 - DNA, 15 bp, Homo sapiens
tcgtagtatcgggct

SEQ ID NO: 499408 - DNA, 15 bp, Homo sapiens
cgtagtatcgggctg

SEQ ID NO: 499409 - DNA, 15 bp, Homo sapiens
gtagtatcgggctgt

SEQ ID NO: 499410 - DNA, 15 bp, Homo sapiens
tagtatcgggctgtg

SEQ ID NO: 499411 - DNA, 15 bp, Homo sapiens
agtatcgggctgtgc

SEQ ID NO: 499412 - DNA, 15 bp, Homo sapiens
gtatcgggctgtgcg

SEQ ID NO: 499413 - DNA, 15 bp, Homo sapiens
tatcgggctgtgcgc

SEQ ID NO: 499414 - DNA, 15 bp, Homo sapiens
atcgggctgtgcgcc

SEQ ID NO: 499415 - DNA, 15 bp, Homo sapiens
tcgggctgtgcgccc

SEQ ID NO: 499416 - DNA, 15 bp, Homo sapiens
cgggctgtgcgccca

SEQ ID NO: 499417 - DNA, 15 bp, Homo sapiens
gggctgtgcgcccag

SEQ ID NO: 499418 - DNA, 15 bp, Homo sapiens
ggctgtgcgcccagc

SEQ ID NO: 499419 - DNA, 15 bp, Homo sapiens
gctgtgcgcccagct

SEQ ID NO: 499420 - DNA, 15 bp, Homo sapiens
ctgtgcgcccagctg

SEQ ID NO: 499421 - DNA, 15 bp, Homo sapiens
tgtgcgcccagctgg

SEQ ID NO: 499422 - DNA, 15 bp, Homo sapiens
gtgcgcccagctgga

SEQ ID NO: 499423 - DNA, 15 bp, Homo sapiens
tgcgcccagctggaa

SEQ ID NO: 499424 - DNA, 15 bp, Homo sapiens
gcgcccagctggaaa

SEQ ID NO: 499425 - DNA, 15 bp, Homo sapiens
cgcccagctggaaag

SEQ ID NO: 499426 - DNA, 15 bp, Homo sapiens
gcccagctggaaagt

SEQ ID NO: 499427 - DNA, 15 bp, Homo sapiens
cccagctggaaagtc

SEQ ID NO: 499428 - DNA, 15 bp, Homo sapiens
ccagctggaaagtct

SEQ ID NO: 499429 - DNA, 15 bp, Homo sapiens
cagctggaaagtctc

SEQ ID NO: 499430 - DNA, 15 bp, Homo sapiens
agctggaaagtctcg

SEQ ID NO: 499431 - DNA, 15 bp, Homo sapiens
gctggaaagtctcgc

SEQ ID NO: 499432 - DNA, 15 bp, Homo sapiens
ctggaaagtctcgcc

SEQ ID NO: 499433 - DNA, 15 bp, Homo sapiens
tggaaagtctcgccg

SEQ ID NO: 499434 - DNA, 15 bp, Homo sapiens
ggaaagtctcgccgc

SEQ ID NO: 499435 - DNA, 15 bp, Homo sapiens
gaaagtctcgccgcc

SEQ ID NO: 499436 - DNA, 15 bp, Homo sapiens
aaagtctcgccgccg

SEQ ID NO: 499437 - DNA, 15 bp, Homo sapiens
aagtctcgccgccgg

SEQ ID NO: 499438 - DNA, 15 bp, Homo sapiens
agtctcgccgccggc

SEQ ID NO: 499439 - DNA, 15 bp, Homo sapiens
gtctcgccgccggct

SEQ ID NO: 499440 - DNA, 15 bp, Homo sapiens
tctcgccgccggctc

SEQ ID NO: 499441 - DNA, 15 bp, Homo sapiens
ctcgccgccggctcc

SEQ ID NO: 499442 - DNA, 15 bp, Homo sapiens
tcgccgccggctccg

SEQ ID NO: 499443 - DNA, 15 bp, Homo sapiens
cgccgccggctccgg

SEQ ID NO: 499444 - DNA, 15 bp, Homo sapiens
gccgccggctccggc

SEQ ID NO: 499445 - DNA, 15 bp, Homo sapiens
ccgccggctccggcg

SEQ ID NO: 499446 - DNA, 15 bp, Homo sapiens
cgccggctccggcgc

SEQ ID NO: 499447 - DNA, 15 bp, Homo sapiens
gccggctccggcgcc

SEQ ID NO: 499448 - DNA, 15 bp, Homo sapiens
ccggctccggcgccc

SEQ ID NO: 499449 - DNA, 15 bp, Homo sapiens
cggctccggcgccct

SEQ ID NO: 499450 - DNA, 15 bp, Homo sapiens
ggctccggcgccctc

SEQ ID NO: 499451 - DNA, 15 bp, Homo sapiens
gctccggcgccctca

SEQ ID NO: 499452 - DNA, 15 bp, Homo sapiens
ctccggcgccctcag

SEQ ID NO: 499453 - DNA, 15 bp, Homo sapiens
tccggcgccctcaga

SEQ ID NO: 499454 - DNA, 15 bp, Homo sapiens
ccggcgccctcagag

SEQ ID NO: 499455 - DNA, 15 bp, Homo sapiens
cggcgccctcagagt

SEQ ID NO: 499456 - DNA, 15 bp, Homo sapiens
ggcgccctcagagta

SEQ ID NO: 499457 - DNA, 15 bp, Homo sapiens
gcgccctcagagtag

SEQ ID NO: 499458 - DNA, 15 bp, Homo sapiens
cgccctcagagtagc

SEQ ID NO: 499459 - DNA, 15 bp, Homo sapiens
gccctcagagtagcg

SEQ ID NO: 499460 - DNA, 15 bp, Homo sapiens
ccctcagagtagcgg

SEQ ID NO: 499461 - DNA, 15 bp, Homo sapiens
cctcagagtagcggc

SEQ ID NO: 499462 - DNA, 15 bp, Homo sapiens
ctcagagtagcggcc

SEQ ID NO: 499463 - DNA, 15 bp, Homo sapiens
tcagagtagcggccg

SEQ ID NO: 499464 - DNA, 15 bp, Homo sapiens
cagagtagcggccgc

SEQ ID NO: 499465 - DNA, 15 bp, Homo sapiens
agagtagcggccgcg

SEQ ID NO: 499466 - DNA, 15 bp, Homo sapiens
gagtagcggccgcgc

SEQ ID NO: 499467 - DNA, 15 bp, Homo sapiens
agtagcggccgcgca

SEQ ID NO: 499468 - DNA, 15 bp, Homo sapiens
gtagcggccgcgcag

SEQ ID NO: 499469 - DNA, 15 bp, Homo sapiens
tagcggccgcgcagt

SEQ ID NO: 499470 - DNA, 15 bp, Homo sapiens
agcggccgcgcagtg

SEQ ID NO: 499471 - DNA, 15 bp, Homo sapiens
gcggccgcgcagtgt

SEQ ID NO: 499472 - DNA, 15 bp, Homo sapiens
cggccgcgcagtgtg

SEQ ID NO: 499473 - DNA, 15 bp, Homo sapiens
ggccgcgcagtgtga

SEQ ID NO: 499474 - DNA, 15 bp, Homo sapiens
gccgcgcagtgtgag

SEQ ID NO: 499475 - DNA, 15 bp, Homo sapiens
ccgcgcagtgtgagg

SEQ ID NO: 499476 - DNA, 15 bp, Homo sapiens
cgcgcagtgtgaggg

SEQ ID NO: 499477 - DNA, 15 bp, Homo sapiens
gcgcagtgtgagggt

SEQ ID NO: 499478 - DNA, 15 bp, Homo sapiens
cgcagtgtgagggtg

SEQ ID NO: 499479 - DNA, 15 bp, Homo sapiens
gcagtgtgagggtgt

SEQ ID NO: 499480 - DNA, 15 bp, Homo sapiens
cagtgtgagggtgtt

SEQ ID NO: 499481 - DNA, 15 bp, Homo sapiens
agtgtgagggtgttt

SEQ ID NO: 499482 - DNA, 15 bp, Homo sapiens
gtgtgagggtgtttc

SEQ ID NO: 499483 - DNA, 15 bp, Homo sapiens
tgtgagggtgtttcg

SEQ ID NO: 499484 - DNA, 15 bp, Homo sapiens
gtgagggtgtttcgt

SEQ ID NO: 499485 - DNA, 15 bp, Homo sapiens
tgagggtgtttcgtg

SEQ ID NO: 499486 - DNA, 15 bp, Homo sapiens
gagggtgtttcgtgt

SEQ ID NO: 499487 - DNA, 15 bp, Homo sapiens
agggtgtttcgtgtc

SEQ ID NO: 499488 - DNA, 15 bp, Homo sapiens
gggtgtttcgtgtct

SEQ ID NO: 499489 - DNA, 15 bp, Homo sapiens
ggtgtttcgtgtctt

SEQ ID NO: 499490 - DNA, 15 bp, Homo sapiens
gtgtttcgtgtcttg

SEQ ID NO: 499491 - DNA, 15 bp, Homo sapiens
tgtttcgtgtcttgg

SEQ ID NO: 499492 - DNA, 15 bp, Homo sapiens
gtttcgtgtcttggt

SEQ ID NO: 499493 - DNA, 15 bp, Homo sapiens
tttcgtgtcttggtt

SEQ ID NO: 499494 - DNA, 15 bp, Homo sapiens
ttcgtgtcttggttt

SEQ ID NO: 499495 - DNA, 15 bp, Homo sapiens
tcgtgtcttggtttt

SEQ ID NO: 499496 - DNA, 15 bp, Homo sapiens
cgtgtcttggttttt

SEQ ID NO: 499497 - DNA, 15 bp, Homo sapiens
gtgtcttggtttttt

SEQ ID NO: 499498 - DNA, 15 bp, Homo sapiens
tgtcttggttttttg

SEQ ID NO: 499499 - DNA, 15 bp, Homo sapiens
gtcttggttttttgg

SEQ ID NO: 499500 - DNA, 15 bp, Homo sapiens
tcttggttttttggg

SEQ ID NO: 499501 - DNA, 15 bp, Homo sapiens
cttggttttttgggg

SEQ ID NO: 499502 - DNA, 15 bp, Homo sapiens
ttggttttttggggc

SEQ ID NO: 499503 - DNA, 15 bp, Homo sapiens
tggttttttggggcg

SEQ ID NO: 499504 - DNA, 15 bp, Homo sapiens
ggttttttggggcgc

SEQ ID NO: 499505 - DNA, 15 bp, Homo sapiens
gttttttggggcgcg

SEQ ID NO: 499506 - DNA, 15 bp, Homo sapiens
ttttttggggcgcgt

SEQ ID NO: 499507 - DNA, 15 bp, Homo sapiens
tttttggggcgcgtg

SEQ ID NO: 499508 - DNA, 15 bp, Homo sapiens
ttttggggcgcgtgg

SEQ ID NO: 499509 - DNA, 15 bp, Homo sapiens
tttggggcgcgtggg

SEQ ID NO: 499510 - DNA, 15 bp, Homo sapiens
ttggggcgcgtgggc

SEQ ID NO: 499511 - DNA, 15 bp, Homo sapiens
tggggcgcgtgggcc

SEQ ID NO: 499512 - DNA, 15 bp, Homo sapiens
ggggcgcgtgggcct

SEQ ID NO: 499513 - DNA, 15 bp, Homo sapiens
gggcgcgtgggcctg

SEQ ID NO: 499514 - DNA, 15 bp, Homo sapiens
ggcgcgtgggcctgt

SEQ ID NO: 499515 - DNA, 15 bp, Homo sapiens
gcgcgtgggcctgtt

SEQ ID NO: 499516 - DNA, 15 bp, Homo sapiens
cgcgtgggcctgttg

SEQ ID NO: 499517 - DNA, 15 bp, Homo sapiens
gcgtgggcctgttgc

SEQ ID NO: 499518 - DNA, 15 bp, Homo sapiens
cgtgggcctgttgcg

SEQ ID NO: 499519 - DNA, 15 bp, Homo sapiens
gtgggcctgttgcgg

SEQ ID NO: 499520 - DNA, 15 bp, Homo sapiens
tgggcctgttgcgga

SEQ ID NO: 499521 - DNA, 15 bp, Homo sapiens
gggcctgttgcggag

SEQ ID NO: 499522 - DNA, 15 bp, Homo sapiens
ggcctgttgcggagg

SEQ ID NO: 499523 - DNA, 15 bp, Homo sapiens
gcctgttgcggagga

SEQ ID NO: 499524 - DNA, 15 bp, Homo sapiens
cctgttgcggaggat

SEQ ID NO: 499525 - DNA, 15 bp, Homo sapiens
ctgttgcggaggatt

SEQ ID NO: 499526 - DNA, 15 bp, Homo sapiens
tgttgcggaggattt

SEQ ID NO: 499527 - DNA, 15 bp, Homo sapiens
gttgcggaggatttg

SEQ ID NO: 499528 - DNA, 15 bp, Homo sapiens
ttgcggaggatttgc

SEQ ID NO: 499529 - DNA, 15 bp, Homo sapiens
tgcggaggatttgcg

SEQ ID NO: 499530 - DNA, 15 bp, Homo sapiens
gcggaggatttgcgg

SEQ ID NO: 499531 - DNA, 15 bp, Homo sapiens
cggaggatttgcgga

SEQ ID NO: 499532 - DNA, 15 bp, Homo sapiens
ggaggatttgcggaa

SEQ ID NO: 499533 - DNA, 15 bp, Homo sapiens
gaggatttgcggaac

SEQ ID NO: 499534 - DNA, 15 bp, Homo sapiens
aggatttgcggaact

SEQ ID NO: 499535 - DNA, 15 bp, Homo sapiens
ggatttgcggaactg

SEQ ID NO: 499536 - DNA, 15 bp, Homo sapiens
gatttgcggaactgc

SEQ ID NO: 499537 - DNA, 15 bp, Homo sapiens
atttgcggaactgcg

SEQ ID NO: 499538 - DNA, 15 bp, Homo sapiens
tttgcggaactgcgg

SEQ ID NO: 499539 - DNA, 15 bp, Homo sapiens
ttgcggaactgcggt

SEQ ID NO: 499540 - DNA, 15 bp, Homo sapiens
tgcggaactgcggtg

SEQ ID NO: 499541 - DNA, 15 bp, Homo sapiens
gcggaactgcggtgg

SEQ ID NO: 499542 - DNA, 15 bp, Homo sapiens
cggaactgcggtggt

SEQ ID NO: 499543 - DNA, 15 bp, Homo sapiens
ggaactgcggtggtg

SEQ ID NO: 499544 - DNA, 15 bp, Homo sapiens
gaactgcggtggtga

SEQ ID NO: 499545 - DNA, 15 bp, Homo sapiens
aactgcggtggtgat

SEQ ID NO: 499546 - DNA, 15 bp, Homo sapiens
actgcggtggtgatt

SEQ ID NO: 499547 - DNA, 15 bp, Homo sapiens
ctgcggtggtgattt

SEQ ID NO: 499548 - DNA, 15 bp, Homo sapiens
tgcggtggtgattta

SEQ ID NO: 499549 - DNA, 15 bp, Homo sapiens
gcggtggtgatttaa

SEQ ID NO: 499550 - DNA, 15 bp, Homo sapiens
cggtggtgatttaac

SEQ ID NO: 499551 - DNA, 15 bp, Homo sapiens
ggtggtgatttaact

SEQ ID NO: 499552 - DNA, 15 bp, Homo sapiens
gtggtgatttaactg

SEQ ID NO: 499553 - DNA, 15 bp, Homo sapiens
tggtgatttaactga

SEQ ID NO: 499554 - DNA, 15 bp, Homo sapiens
ggtgatttaactgac

SEQ ID NO: 499555 - DNA, 15 bp, Homo sapiens
gtgatttaactgacg

SEQ ID NO: 499556 - DNA, 15 bp, Homo sapiens
tgatttaactgacga

SEQ ID NO: 499557 - DNA, 15 bp, Homo sapiens
gatttaactgacgag

SEQ ID NO: 499558 - DNA, 15 bp, Homo sapiens
atttaactgacgaga

SEQ ID NO: 499559 - DNA, 15 bp, Homo sapiens
tttaactgacgagac

SEQ ID NO: 499560 - DNA, 15 bp, Homo sapiens
ttaactgacgagaca

SEQ ID NO: 499561 - DNA, 15 bp, Homo sapiens
taactgacgagacac

SEQ ID NO: 499562 - DNA, 15 bp, Homo sapiens
aactgacgagacacg

SEQ ID NO: 499563 - DNA, 15 bp, Homo sapiens
actgacgagacacgg

SEQ ID NO: 499564 - DNA, 15 bp, Homo sapiens
ctgacgagacacggc

SEQ ID NO: 499565 - DNA, 15 bp, Homo sapiens
tgacgagacacggct

SEQ ID NO: 499566 - DNA, 15 bp, Homo sapiens
gacgagacacggctt

SEQ ID NO: 499567 - DNA, 15 bp, Homo sapiens
acgagacacggcttt

SEQ ID NO: 499568 - DNA, 15 bp, Homo sapiens
cgagacacggctttt

SEQ ID NO: 499569 - DNA, 15 bp, Homo sapiens
gagacacggcttttc

SEQ ID NO: 499570 - DNA, 15 bp, Homo sapiens
agacacggcttttcc

SEQ ID NO: 499571 - DNA, 15 bp, Homo sapiens
gacacggcttttcct

SEQ ID NO: 499572 - DNA, 15 bp, Homo sapiens
acacggcttttcctt

SEQ ID NO: 499573 - DNA, 15 bp, Homo sapiens
cacggcttttccttt

SEQ ID NO: 499574 - DNA, 15 bp, Homo sapiens
acggcttttcctttt

SEQ ID NO: 499575 - DNA, 15 bp, Homo sapiens
cggcttttcctttta

SEQ ID NO: 499576 - DNA, 15 bp, Homo sapiens
ggcttttccttttac

SEQ ID NO: 499577 - DNA, 15 bp, Homo sapiens
gcttttccttttact

SEQ ID NO: 499578 - DNA, 15 bp, Homo sapiens
cttttccttttactc

SEQ ID NO: 499579 - DNA, 15 bp, Homo sapiens
ttttccttttactca

SEQ ID NO: 499580 - DNA, 15 bp, Homo sapiens
tttccttttactcat

SEQ ID NO: 499581 - DNA, 15 bp, Homo sapiens
ttccttttactcatt

SEQ ID NO: 499582 - DNA, 15 bp, Homo sapiens
tccttttactcattc

SEQ ID NO: 499583 - DNA, 15 bp, Homo sapiens
ccttttactcattca

SEQ ID NO: 499584 - DNA, 15 bp, Homo sapiens
cttttactcattcag

SEQ ID NO: 499585 - DNA, 15 bp, Homo sapiens
ttttactcattcagg

SEQ ID NO: 499586 - DNA, 15 bp, Homo sapiens
tttactcattcaggc

SEQ ID NO: 499587 - DNA, 15 bp, Homo sapiens
ttactcattcaggcc

SEQ ID NO: 499588 - DNA, 15 bp, Homo sapiens
tactcattcaggcca

SEQ ID NO: 499589 - DNA, 15 bp, Homo sapiens
actcattcaggccaa

SEQ ID NO: 499590 - DNA, 15 bp, Homo sapiens
ctcattcaggccaag

SEQ ID NO: 499591 - DNA, 15 bp, Homo sapiens
tcattcaggccaagg

SEQ ID NO: 499592 - DNA, 15 bp, Homo sapiens
cattcaggccaaggt

SEQ ID NO: 499593 - DNA, 15 bp, Homo sapiens
attcaggccaaggtt

SEQ ID NO: 499594 - DNA, 15 bp, Homo sapiens
ttcaggccaaggttt

SEQ ID NO: 499595 - DNA, 15 bp, Homo sapiens
tcaggccaaggtttc

SEQ ID NO: 499596 - DNA, 15 bp, Homo sapiens
caggccaaggtttcg

SEQ ID NO: 499597 - DNA, 15 bp, Homo sapiens
aggccaaggtttcgg

SEQ ID NO: 499598 - DNA, 15 bp, Homo sapiens
ggccaaggtttcggg

SEQ ID NO: 499599 - DNA, 15 bp, Homo sapiens
gccaaggtttcgggg

SEQ ID NO: 499600 - DNA, 15 bp, Homo sapiens
ccaaggtttcggggc

SEQ ID NO: 499601 - DNA, 15 bp, Homo sapiens
caaggtttcggggcc

SEQ ID NO: 499602 - DNA, 15 bp, Homo sapiens
aaggtttcggggcca

SEQ ID NO: 499603 - DNA, 15 bp, Homo sapiens
aggtttcggggccac

SEQ ID NO: 499604 - DNA, 15 bp, Homo sapiens
ggtttcggggccact

SEQ ID NO: 499605 - DNA, 15 bp, Homo sapiens
gtttcggggccactg

SEQ ID NO: 499606 - DNA, 15 bp, Homo sapiens
tttcggggccactgc

SEQ ID NO: 499607 - DNA, 15 bp, Homo sapiens
ttcggggccactgct

SEQ ID NO: 499608 - DNA, 15 bp, Homo sapiens
tcggggccactgctg

SEQ ID NO: 499609 - DNA, 15 bp, Homo sapiens
cggggccactgctgc

SEQ ID NO: 499610 - DNA, 15 bp, Homo sapiens
ggggccactgctgcg

SEQ ID NO: 499611 - DNA, 15 bp, Homo sapiens
gggccactgctgcgt

SEQ ID NO: 499612 - DNA, 15 bp, Homo sapiens
ggccactgctgcgtt

SEQ ID NO: 499613 - DNA, 15 bp, Homo sapiens
gccactgctgcgttc

SEQ ID NO: 499614 - DNA, 15 bp, Homo sapiens
ccactgctgcgttcg

SEQ ID NO: 499615 - DNA, 15 bp, Homo sapiens
cactgctgcgttcgc

SEQ ID NO: 499616 - DNA, 15 bp, Homo sapiens
actgctgcgttcgct

SEQ ID NO: 499617 - DNA, 15 bp, Homo sapiens
ctgctgcgttcgctt

SEQ ID NO: 499618 - DNA, 15 bp, Homo sapiens
tgctgcgttcgcttt

SEQ ID NO: 499619 - DNA, 15 bp, Homo sapiens
gctgcgttcgctttc

SEQ ID NO: 499620 - DNA, 15 bp, Homo sapiens
ctgcgttcgctttct

SEQ ID NO: 499621 - DNA, 15 bp, Homo sapiens
tgcgttcgctttctc

SEQ ID NO: 499622 - DNA, 15 bp, Homo sapiens
gcgttcgctttctca

SEQ ID NO: 499623 - DNA, 15 bp, Homo sapiens
cgttcgctttctcaa

SEQ ID NO: 499624 - DNA, 15 bp, Homo sapiens
gttcgctttctcaag

SEQ ID NO: 499625 - DNA, 15 bp, Homo sapiens
ttcgctttctcaagc

SEQ ID NO: 499626 - DNA, 15 bp, Homo sapiens
tcgctttctcaagcg

SEQ ID NO: 499627 - DNA, 15 bp, Homo sapiens
cgctttctcaagcgt

SEQ ID NO: 499628 - DNA, 15 bp, Homo sapiens
gctttctcaagcgta

SEQ ID NO: 499629 - DNA, 15 bp, Homo sapiens
ctttctcaagcgtac

SEQ ID NO: 499630 - DNA, 15 bp, Homo sapiens
tttctcaagcgtacc

SEQ ID NO: 499631 - DNA, 15 bp, Homo sapiens
ttctcaagcgtacct

SEQ ID NO: 499632 - DNA, 15 bp, Homo sapiens
tctcaagcgtacctg

SEQ ID NO: 499633 - DNA, 15 bp, Homo sapiens
ctcaagcgtacctgg

SEQ ID NO: 499634 - DNA, 15 bp, Homo sapiens
tcaagcgtacctggg

SEQ ID NO: 499635 - DNA, 15 bp, Homo sapiens
caagcgtacctgggg

SEQ ID NO: 499636 - DNA, 15 bp, Homo sapiens
aagcgtacctggggc

SEQ ID NO: 499637 - DNA, 15 bp, Homo sapiens
agcgtacctggggcc

SEQ ID NO: 499638 - DNA, 15 bp, Homo sapiens
gcgtacctggggccc

SEQ ID NO: 499639 - DNA, 15 bp, Homo sapiens
cgtacctggggcccc

SEQ ID NO: 499640 - DNA, 15 bp, Homo sapiens
gtacctggggcccct

SEQ ID NO: 499641 - DNA, 15 bp, Homo sapiens
tacctggggcccctg

SEQ ID NO: 499642 - DNA, 15 bp, Homo sapiens
acctggggcccctgc

SEQ ID NO: 499643 - DNA, 15 bp, Homo sapiens
cctggggcccctgct

SEQ ID NO: 499644 - DNA, 15 bp, Homo sapiens
ctggggcccctgctt

SEQ ID NO: 499645 - DNA, 15 bp, Homo sapiens
tggggcccctgcttg

SEQ ID NO: 499646 - DNA, 15 bp, Homo sapiens
ggggcccctgcttgc

SEQ ID NO: 499647 - DNA, 15 bp, Homo sapiens
gggcccctgcttgct

SEQ ID NO: 499648 - DNA, 15 bp, Homo sapiens
ggcccctgcttgctc

SEQ ID NO: 499649 - DNA, 15 bp, Homo sapiens
gcccctgcttgctct

SEQ ID NO: 499650 - DNA, 15 bp, Homo sapiens
cccctgcttgctctg

SEQ ID NO: 499651 - DNA, 15 bp, Homo sapiens
ccctgcttgctctgc

SEQ ID NO: 499652 - DNA, 15 bp, Homo sapiens
cctgcttgctctgca

SEQ ID NO: 499653 - DNA, 15 bp, Homo sapiens
ctgcttgctctgcag

SEQ ID NO: 499654 - DNA, 15 bp, Homo sapiens
tgcttgctctgcagg

SEQ ID NO: 499655 - DNA, 15 bp, Homo sapiens
gcttgctctgcagga

SEQ ID NO: 499656 - DNA, 15 bp, Homo sapiens
cttgctctgcaggag

SEQ ID NO: 499657 - DNA, 15 bp, Homo sapiens
ttgctctgcaggagt

SEQ ID NO: 499658 - DNA, 15 bp, Homo sapiens
tgctctgcaggagtc

SEQ ID NO: 499659 - DNA, 15 bp, Homo sapiens
gctctgcaggagtcc

SEQ ID NO: 499660 - DNA, 15 bp, Homo sapiens
ctctgcaggagtcct

SEQ ID NO: 499661 - DNA, 15 bp, Homo sapiens
tctgcaggagtcctg

SEQ ID NO: 499662 - DNA, 15 bp, Homo sapiens
ctgcaggagtcctgc

SEQ ID NO: 499663 - DNA, 15 bp, Homo sapiens
tgcaggagtcctgcg

SEQ ID NO: 499664 - DNA, 15 bp, Homo sapiens
gcaggagtcctgcgg

SEQ ID NO: 499665 - DNA, 15 bp, Homo sapiens
caggagtcctgcggc

SEQ ID NO: 499666 - DNA, 15 bp, Homo sapiens
aggagtcctgcggcc

SEQ ID NO: 499667 - DNA, 15 bp, Homo sapiens
ggagtcctgcggcct

SEQ ID NO: 499668 - DNA, 15 bp, Homo sapiens
gagtcctgcggcctg

SEQ ID NO: 499669 - DNA, 15 bp, Homo sapiens
agtcctgcggcctgt

SEQ ID NO: 499670 - DNA, 15 bp, Homo sapiens
gtcctgcggcctgtg

SEQ ID NO: 499671 - DNA, 15 bp, Homo sapiens
tcctgcggcctgtgc

SEQ ID NO: 499672 - DNA, 15 bp, Homo sapiens
cctgcggcctgtgcc

SEQ ID NO: 499673 - DNA, 15 bp, Homo sapiens
ctgcggcctgtgcca

SEQ ID NO: 499674 - DNA, 15 bp, Homo sapiens
tgcggcctgtgccat

SEQ ID NO: 499675 - DNA, 15 bp, Homo sapiens
gcggcctgtgccatc

SEQ ID NO: 499676 - DNA, 15 bp, Homo sapiens
cggcctgtgccatcc

SEQ ID NO: 499677 - DNA, 15 bp, Homo sapiens
ggcctgtgccatccg

SEQ ID NO: 499678 - DNA, 15 bp, Homo sapiens
gcctgtgccatccgc

SEQ ID NO: 499679 - DNA, 15 bp, Homo sapiens
cctgtgccatccgca

SEQ ID NO: 499680 - DNA, 15 bp, Homo sapiens
ctgtgccatccgcac

SEQ ID NO: 499681 - DNA, 15 bp, Homo sapiens
tgtgccatccgcacg

SEQ ID NO: 499682 - DNA, 15 bp, Homo sapiens
gtgccatccgcacga

SEQ ID NO: 499683 - DNA, 15 bp, Homo sapiens
tgccatccgcacgat

SEQ ID NO: 499684 - DNA, 15 bp, Homo sapiens
gccatccgcacgatt

SEQ ID NO: 499685 - DNA, 15 bp, Homo sapiens
ccatccgcacgattc

SEQ ID NO: 499686 - DNA, 15 bp, Homo sapiens
catccgcacgattcc

SEQ ID NO: 499687 - DNA, 15 bp, Homo sapiens
atccgcacgattccc

SEQ ID NO: 499688 - DNA, 15 bp, Homo sapiens
tccgcacgattccct

SEQ ID NO: 499689 - DNA, 15 bp, Homo sapiens
ccgcacgattccctg

SEQ ID NO: 499690 - DNA, 15 bp, Homo sapiens
cgcacgattccctgg

SEQ ID NO: 499691 - DNA, 15 bp, Homo sapiens
gcacgattccctggc

SEQ ID NO: 499692 - DNA, 15 bp, Homo sapiens
cacgattccctggca

SEQ ID NO: 499693 - DNA, 15 bp, Homo sapiens
acgattccctggcag

SEQ ID NO: 499694 - DNA, 15 bp, Homo sapiens
cgattccctggcagc

SEQ ID NO: 499695 - DNA, 15 bp, Homo sapiens
gattccctggcagcg

SEQ ID NO: 499696 - DNA, 15 bp, Homo sapiens
attccctggcagcga

SEQ ID NO: 499697 - DNA, 15 bp, Homo sapiens
ttccctggcagcgag

SEQ ID NO: 499698 - DNA, 15 bp, Homo sapiens
tccctggcagcgaga

SEQ ID NO: 499699 - DNA, 15 bp, Homo sapiens
ccctggcagcgagaa

SEQ ID NO: 499700 - DNA, 15 bp, Homo sapiens
cctggcagcgagaaa

SEQ ID NO: 499701 - DNA, 15 bp, Homo sapiens
ctggcagcgagaaat

SEQ ID NO: 499702 - DNA, 15 bp, Homo sapiens
tggcagcgagaaatc

SEQ ID NO: 499703 - DNA, 15 bp, Homo sapiens
ggcagcgagaaatct

SEQ ID NO: 499704 - DNA, 15 bp, Homo sapiens
gcagcgagaaatcta

SEQ ID NO: 499705 - DNA, 15 bp, Homo sapiens
cagcgagaaatctag

SEQ ID NO: 499706 - DNA, 15 bp, Homo sapiens
agcgagaaatctagg

SEQ ID NO: 499707 - DNA, 15 bp, Homo sapiens
gcgagaaatctaggt

SEQ ID NO: 499708 - DNA, 15 bp, Homo sapiens
cgagaaatctaggtc

SEQ ID NO: 499709 - DNA, 15 bp, Homo sapiens
gagaaatctaggtcc

SEQ ID NO: 499710 - DNA, 15 bp, Homo sapiens
agaaatctaggtcct

SEQ ID NO: 499711 - DNA, 15 bp, Homo sapiens
gaaatctaggtcctc

SEQ ID NO: 499712 - DNA, 15 bp, Homo sapiens
aaatctaggtcctcc

SEQ ID NO: 499713 - DNA, 15 bp, Homo sapiens
aatctaggtcctccc

SEQ ID NO: 499714 - DNA, 15 bp, Homo sapiens
atctaggtcctcccc

SEQ ID NO: 499715 - DNA, 15 bp, Homo sapiens
tctaggtcctcccct

SEQ ID NO: 499716 - DNA, 15 bp, Homo sapiens
ctaggtcctcccctg

SEQ ID NO: 499717 - DNA, 15 bp, Homo sapiens
taggtcctcccctga

SEQ ID NO: 499718 - DNA, 15 bp, Homo sapiens
aggtcctcccctgac

SEQ ID NO: 499719 - DNA, 15 bp, Homo sapiens
ggtcctcccctgacc

SEQ ID NO: 499720 - DNA, 15 bp, Homo sapiens
gtcctcccctgacca

SEQ ID NO: 499721 - DNA, 15 bp, Homo sapiens
tcctcccctgaccac

SEQ ID NO: 499722 - DNA, 15 bp, Homo sapiens
cctcccctgaccacc

SEQ ID NO: 499723 - DNA, 15 bp, Homo sapiens
ctcccctgaccacct

SEQ ID NO: 499724 - DNA, 15 bp, Homo sapiens
tcccctgaccacctg

SEQ ID NO: 499725 - DNA, 15 bp, Homo sapiens
cccctgaccacctgg

SEQ ID NO: 499726 - DNA, 15 bp, Homo sapiens
ccctgaccacctgga

SEQ ID NO: 499727 - DNA, 15 bp, Homo sapiens
cctgaccacctggac

SEQ ID NO: 499728 - DNA, 15 bp, Homo sapiens
ctgaccacctggacc

SEQ ID NO: 499729 - DNA, 15 bp, Homo sapiens
tgaccacctggaccg

SEQ ID NO: 499730 - DNA, 15 bp, Homo sapiens
gaccacctggaccgc

SEQ ID NO: 499731 - DNA, 15 bp, Homo sapiens
accacctggaccgcg

SEQ ID NO: 499732 - DNA, 15 bp, Homo sapiens
ccacctggaccgcgc

SEQ ID NO: 499733 - DNA, 15 bp, Homo sapiens
cacctggaccgcgca

SEQ ID NO: 499734 - DNA, 15 bp, Homo sapiens
acctggaccgcgcag

SEQ ID NO: 499735 - DNA, 15 bp, Homo sapiens
cctggaccgcgcagg

SEQ ID NO: 499736 - DNA, 15 bp, Homo sapiens
ctggaccgcgcaggg

SEQ ID NO: 499737 - DNA, 15 bp, Homo sapiens
tggaccgcgcagggg

SEQ ID NO: 499738 - DNA, 15 bp, Homo sapiens
ggaccgcgcagggga

SEQ ID NO: 499739 - DNA, 15 bp, Homo sapiens
gaccgcgcaggggac

SEQ ID NO: 499740 - DNA, 15 bp, Homo sapiens
accgcgcaggggact

SEQ ID NO: 499741 - DNA, 15 bp, Homo sapiens
ccgcgcaggggacta

SEQ ID NO: 499742 - DNA, 15 bp, Homo sapiens
cgcgcaggggactag

SEQ ID NO: 499743 - DNA, 15 bp, Homo sapiens
gcgcaggggactagt

SEQ ID NO: 499744 - DNA, 15 bp, Homo sapiens
cgcaggggactagtc

SEQ ID NO: 499745 - DNA, 15 bp, Homo sapiens
gcaggggactagtcg

SEQ ID NO: 499746 - DNA, 15 bp, Homo sapiens
caggggactagtcgc

SEQ ID NO: 499747 - DNA, 15 bp, Homo sapiens
aggggactagtcgcg

SEQ ID NO: 499748 - DNA, 15 bp, Homo sapiens
ggggactagtcgcgg

SEQ ID NO: 499749 - DNA, 15 bp, Homo sapiens
gggactagtcgcggc

SEQ ID NO: 499750 - DNA, 15 bp, Homo sapiens
ggactagtcgcggcc

SEQ ID NO: 499751 - DNA, 15 bp, Homo sapiens
gactagtcgcggccg

SEQ ID NO: 499752 - DNA, 15 bp, Homo sapiens
actagtcgcggccgg

SEQ ID NO: 499753 - DNA, 15 bp, Homo sapiens
ctagtcgcggccggc

SEQ ID NO: 499754 - DNA, 15 bp, Homo sapiens
tagtcgcggccggca

SEQ ID NO: 499755 - DNA, 15 bp, Homo sapiens
agtcgcggccggcag

SEQ ID NO: 499756 - DNA, 15 bp, Homo sapiens
gtcgcggccggcaga

SEQ ID NO: 499757 - DNA, 15 bp, Homo sapiens
tcgcggccggcagaa

SEQ ID NO: 499758 - DNA, 15 bp, Homo sapiens
cgcggccggcagaac

SEQ ID NO: 499759 - DNA, 15 bp, Homo sapiens
gcggccggcagaacc

SEQ ID NO: 499760 - DNA, 15 bp, Homo sapiens
cggccggcagaacct

SEQ ID NO: 499761 - DNA, 15 bp, Homo sapiens
ggccggcagaacctg

SEQ ID NO: 499762 - DNA, 15 bp, Homo sapiens
gccggcagaacctgc

SEQ ID NO: 499763 - DNA, 15 bp, Homo sapiens
ccggcagaacctgct

SEQ ID NO: 499764 - DNA, 15 bp, Homo sapiens
cggcagaacctgctc

SEQ ID NO: 499765 - DNA, 15 bp, Homo sapiens
ggcagaacctgctcg

SEQ ID NO: 499766 - DNA, 15 bp, Homo sapiens
gcagaacctgctcgg

SEQ ID NO: 499767 - DNA, 15 bp, Homo sapiens
cagaacctgctcggt

SEQ ID NO: 499768 - DNA, 15 bp, Homo sapiens
agaacctgctcggtc

SEQ ID NO: 499769 - DNA, 15 bp, Homo sapiens
gaacctgctcggtcc

SEQ ID NO: 499770 - DNA, 15 bp, Homo sapiens
aacctgctcggtccc

SEQ ID NO: 499771 - DNA, 15 bp, Homo sapiens
acctgctcggtccct

SEQ ID NO: 499772 - DNA, 15 bp, Homo sapiens
cctgctcggtccctg

SEQ ID NO: 499773 - DNA, 15 bp, Homo sapiens
ctgctcggtccctgg

SEQ ID NO: 499774 - DNA, 15 bp, Homo sapiens
tgctcggtccctggg

SEQ ID NO: 499775 - DNA, 15 bp, Homo sapiens
gctcggtccctgggc

SEQ ID NO: 499776 - DNA, 15 bp, Homo sapiens
ctcggtccctgggcc

SEQ ID NO: 499777 - DNA, 15 bp, Homo sapiens
tcggtccctgggccg

SEQ ID NO: 499778 - DNA, 15 bp, Homo sapiens
cggtccctgggccgg

SEQ ID NO: 499779 - DNA, 15 bp, Homo sapiens
ggtccctgggccggg

SEQ ID NO: 499780 - DNA, 15 bp, Homo sapiens
gtccctgggccgggc

SEQ ID NO: 499781 - DNA, 15 bp, Homo sapiens
tccctgggccgggct

SEQ ID NO: 499782 - DNA, 15 bp, Homo sapiens
ccctgggccgggcta

SEQ ID NO: 499783 - DNA, 15 bp, Homo sapiens
cctgggccgggctat

SEQ ID NO: 499784 - DNA, 15 bp, Homo sapiens
ctgggccgggctatc

SEQ ID NO: 499785 - DNA, 15 bp, Homo sapiens
tgggccgggctatct

SEQ ID NO: 499786 - DNA, 15 bp, Homo sapiens
gggccgggctatctt

SEQ ID NO: 499787 - DNA, 15 bp, Homo sapiens
ggccgggctatctta

SEQ ID NO: 499788 - DNA, 15 bp, Homo sapiens
gccgggctatcttag

SEQ ID NO: 499789 - DNA, 15 bp, Homo sapiens
ccgggctatcttagc

SEQ ID NO: 499790 - DNA, 15 bp, Homo sapiens
cgggctatcttagcg

SEQ ID NO: 499791 - DNA, 15 bp, Homo sapiens
gggctatcttagcgg

SEQ ID NO: 499792 - DNA, 15 bp, Homo sapiens
ggctatcttagcggc

SEQ ID NO: 499793 - DNA, 15 bp, Homo sapiens
gctatcttagcggct

SEQ ID NO: 499794 - DNA, 15 bp, Homo sapiens
ctatcttagcggctc

SEQ ID NO: 499795 - DNA, 15 bp, Homo sapiens
tatcttagcggctca

SEQ ID NO: 499796 - DNA, 15 bp, Homo sapiens
atcttagcggctcac

SEQ ID NO: 499797 - DNA, 15 bp, Homo sapiens
tcttagcggctcacg

SEQ ID NO: 499798 - DNA, 15 bp, Homo sapiens
cttagcggctcacgc

SEQ ID NO: 499799 - DNA, 15 bp, Homo sapiens
ttagcggctcacgca

SEQ ID NO: 499800 - DNA, 15 bp, Homo sapiens
tagcggctcacgcat

SEQ ID NO: 499801 - DNA, 15 bp, Homo sapiens
agcggctcacgcatg

SEQ ID NO: 499802 - DNA, 15 bp, Homo sapiens
gcggctcacgcatgc

SEQ ID NO: 499803 - DNA, 15 bp, Homo sapiens
cggctcacgcatgcc

SEQ ID NO: 499804 - DNA, 15 bp, Homo sapiens
ggctcacgcatgccc

SEQ ID NO: 499805 - DNA, 15 bp, Homo sapiens
gctcacgcatgcccg

SEQ ID NO: 499806 - DNA, 15 bp, Homo sapiens
ctcacgcatgcccga

SEQ ID NO: 499807 - DNA, 15 bp, Homo sapiens
tcacgcatgcccgag

SEQ ID NO: 499808 - DNA, 15 bp, Homo sapiens
cacgcatgcccgagc

SEQ ID NO: 499809 - DNA, 15 bp, Homo sapiens
acgcatgcccgagca

SEQ ID NO: 499810 - DNA, 15 bp, Homo sapiens
cgcatgcccgagcac

SEQ ID NO: 499811 - DNA, 15 bp, Homo sapiens
gcatgcccgagcaca

SEQ ID NO: 499812 - DNA, 15 bp, Homo sapiens
catgcccgagcacac

SEQ ID NO: 499813 - DNA, 15 bp, Homo sapiens
atgcccgagcacacc

SEQ ID NO: 499814 - DNA, 15 bp, Homo sapiens
tgcccgagcacaccc

SEQ ID NO: 499815 - DNA, 15 bp, Homo sapiens
gcccgagcacacccg

SEQ ID NO: 499816 - DNA, 15 bp, Homo sapiens
cccgagcacacccga

SEQ ID NO: 499817 - DNA, 15 bp, Homo sapiens
ccgagcacacccgac

SEQ ID NO: 499818 - DNA, 15 bp, Homo sapiens
cgagcacacccgacc

SEQ ID NO: 499819 - DNA, 15 bp, Homo sapiens
gagcacacccgaccc

SEQ ID NO: 499820 - DNA, 15 bp, Homo sapiens
agcacacccgacccg

SEQ ID NO: 499821 - DNA, 15 bp, Homo sapiens
gcacacccgacccgg

SEQ ID NO: 499822 - DNA, 15 bp, Homo sapiens
cacacccgacccggt

SEQ ID NO: 499823 - DNA, 15 bp, Homo sapiens
acacccgacccggtt

SEQ ID NO: 499824 - DNA, 15 bp, Homo sapiens
cacccgacccggttc

SEQ ID NO: 499825 - DNA, 15 bp, Homo sapiens
acccgacccggttcg

SEQ ID NO: 499826 - DNA, 15 bp, Homo sapiens
cccgacccggttcgc

SEQ ID NO: 499827 - DNA, 15 bp, Homo sapiens
ccgacccggttcgcg

SEQ ID NO: 499828 - DNA, 15 bp, Homo sapiens
cgacccggttcgcgg

SEQ ID NO: 499829 - DNA, 15 bp, Homo sapiens
gacccggttcgcggt

SEQ ID NO: 499830 - DNA, 15 bp, Homo sapiens
acccggttcgcggtg

SEQ ID NO: 499831 - DNA, 15 bp, Homo sapiens
cccggttcgcggtgc

SEQ ID NO: 499832 - DNA, 15 bp, Homo sapiens
ccggttcgcggtgca

SEQ ID NO: 499833 - DNA, 15 bp, Homo sapiens
cggttcgcggtgcag

SEQ ID NO: 499834 - DNA, 15 bp, Homo sapiens
ggttcgcggtgcagg

SEQ ID NO: 499835 - DNA, 15 bp, Homo sapiens
gttcgcggtgcaggc

SEQ ID NO: 499836 - DNA, 15 bp, Homo sapiens
ttcgcggtgcaggct

SEQ ID NO: 499837 - DNA, 15 bp, Homo sapiens
tcgcggtgcaggctg

SEQ ID NO: 499838 - DNA, 15 bp, Homo sapiens
cgcggtgcaggctgg

SEQ ID NO: 499839 - DNA, 15 bp, Homo sapiens
gcggtgcaggctggc

SEQ ID NO: 499840 - DNA, 15 bp, Homo sapiens
cggtgcaggctggcg

SEQ ID NO: 499841 - DNA, 15 bp, Homo sapiens
ggtgcaggctggcgg

SEQ ID NO: 499842 - DNA, 15 bp, Homo sapiens
gtgcaggctggcggc

SEQ ID NO: 499843 - DNA, 15 bp, Homo sapiens
tgcaggctggcggcg

SEQ ID NO: 499844 - DNA, 15 bp, Homo sapiens
gcaggctggcggcgc

SEQ ID NO: 499845 - DNA, 15 bp, Homo sapiens
caggctggcggcgcc

SEQ ID NO: 499846 - DNA, 15 bp, Homo sapiens
aggctggcggcgccg

SEQ ID NO: 499847 - DNA, 15 bp, Homo sapiens
ggctggcggcgccgt

SEQ ID NO: 499848 - DNA, 15 bp, Homo sapiens
gctggcggcgccgtg

SEQ ID NO: 499849 - DNA, 15 bp, Homo sapiens
ctggcggcgccgtgc

SEQ ID NO: 499850 - DNA, 15 bp, Homo sapiens
tggcggcgccgtgcc

SEQ ID NO: 499851 - DNA, 15 bp, Homo sapiens
ggcggcgccgtgccc

SEQ ID NO: 499852 - DNA, 15 bp, Homo sapiens
gcggcgccgtgccct

SEQ ID NO: 499853 - DNA, 15 bp, Homo sapiens
cggcgccgtgccctc

SEQ ID NO: 499854 - DNA, 15 bp, Homo sapiens
ggcgccgtgccctct

SEQ ID NO: 499855 - DNA, 15 bp, Homo sapiens
gcgccgtgccctctg

SEQ ID NO: 499856 - DNA, 15 bp, Homo sapiens
cgccgtgccctctgg

SEQ ID NO: 499857 - DNA, 15 bp, Homo sapiens
gccgtgccctctggg

SEQ ID NO: 499858 - DNA, 15 bp, Homo sapiens
ccgtgccctctggga

SEQ ID NO: 499859 - DNA, 15 bp, Homo sapiens
cgtgccctctgggac

SEQ ID NO: 499860 - DNA, 15 bp, Homo sapiens
gtgccctctgggacc

SEQ ID NO: 499861 - DNA, 15 bp, Homo sapiens
tgccctctgggacct

SEQ ID NO: 499862 - DNA, 15 bp, Homo sapiens
gccctctgggacctg

SEQ ID NO: 499863 - DNA, 15 bp, Homo sapiens
ccctctgggacctgt

SEQ ID NO: 499864 - DNA, 15 bp, Homo sapiens
cctctgggacctgtt

SEQ ID NO: 499865 - DNA, 15 bp, Homo sapiens
ctctgggacctgttg

SEQ ID NO: 499866 - DNA, 15 bp, Homo sapiens
tctgggacctgttgc

SEQ ID NO: 499867 - DNA, 15 bp, Homo sapiens
ctgggacctgttgcc

SEQ ID NO: 499868 - DNA, 15 bp, Homo sapiens
tgggacctgttgccc

SEQ ID NO: 499869 - DNA, 15 bp, Homo sapiens
gggacctgttgcccc

SEQ ID NO: 499870 - DNA, 15 bp, Homo sapiens
ggacctgttgcccca

SEQ ID NO: 499871 - DNA, 15 bp, Homo sapiens
gacctgttgccccag

SEQ ID NO: 499872 - DNA, 15 bp, Homo sapiens
acctgttgccccagg

SEQ ID NO: 499873 - DNA, 15 bp, Homo sapiens
cctgttgccccaggg

SEQ ID NO: 499874 - DNA, 15 bp, Homo sapiens
ctgttgccccagggt

SEQ ID NO: 499875 - DNA, 15 bp, Homo sapiens
tgttgccccagggtt

SEQ ID NO: 499876 - DNA, 15 bp, Homo sapiens
gttgccccagggttg

SEQ ID NO: 499877 - DNA, 15 bp, Homo sapiens
ttgccccagggttgg

SEQ ID NO: 499878 - DNA, 15 bp, Homo sapiens
tgccccagggttggc

SEQ ID NO: 499879 - DNA, 15 bp, Homo sapiens
gccccagggttggcg

SEQ ID NO: 499880 - DNA, 15 bp, Homo sapiens
ccccagggttggcgc

SEQ ID NO: 499881 - DNA, 15 bp, Homo sapiens
cccagggttggcgct

SEQ ID NO: 499882 - DNA, 15 bp, Homo sapiens
ccagggttggcgctg

SEQ ID NO: 499883 - DNA, 15 bp, Homo sapiens
cagggttggcgctgc

SEQ ID NO: 499884 - DNA, 15 bp, Homo sapiens
agggttggcgctgct

SEQ ID NO: 499885 - DNA, 15 bp, Homo sapiens
gggttggcgctgctg

SEQ ID NO: 499886 - DNA, 15 bp, Homo sapiens
ggttggcgctgctgg

SEQ ID NO: 499887 - DNA, 15 bp, Homo sapiens
gttggcgctgctggt

SEQ ID NO: 499888 - DNA, 15 bp, Homo sapiens
ttggcgctgctggtg

SEQ ID NO: 499889 - DNA, 15 bp, Homo sapiens
tggcgctgctggtgg

SEQ ID NO: 499890 - DNA, 15 bp, Homo sapiens
ggcgctgctggtgga

SEQ ID NO: 499891 - DNA, 15 bp, Homo sapiens
gcgctgctggtggag

SEQ ID NO: 499892 - DNA, 15 bp, Homo sapiens
cgctgctggtggagg

SEQ ID NO: 499893 - DNA, 15 bp, Homo sapiens
gctgctggtggaggg

SEQ ID NO: 499894 - DNA, 15 bp, Homo sapiens
ctgctggtggagggc

SEQ ID NO: 499895 - DNA, 15 bp, Homo sapiens
tgctggtggagggcc

SEQ ID NO: 499896 - DNA, 15 bp, Homo sapiens
gctggtggagggccc

SEQ ID NO: 499897 - DNA, 15 bp, Homo sapiens
ctggtggagggcccg

SEQ ID NO: 499898 - DNA, 15 bp, Homo sapiens
tggtggagggcccga

SEQ ID NO: 499899 - DNA, 15 bp, Homo sapiens
ggtggagggcccgac

SEQ ID NO: 499900 - DNA, 15 bp, Homo sapiens
gtggagggcccgacg

SEQ ID NO: 499901 - DNA, 15 bp, Homo sapiens
tggagggcccgacgg

SEQ ID NO: 499902 - DNA, 15 bp, Homo sapiens
ggagggcccgacgga

SEQ ID NO: 499903 - DNA, 15 bp, Homo sapiens
gagggcccgacggac

SEQ ID NO: 499904 - DNA, 15 bp, Homo sapiens
agggcccgacggacg

SEQ ID NO: 499905 - DNA, 15 bp, Homo sapiens
gggcccgacggacgc

SEQ ID NO: 499906 - DNA, 15 bp, Homo sapiens
ggcccgacggacgcc

SEQ ID NO: 499907 - DNA, 15 bp, Homo sapiens
gcccgacggacgcca

SEQ ID NO: 499908 - DNA, 15 bp, Homo sapiens
cccgacggacgccag

SEQ ID NO: 499909 - DNA, 15 bp, Homo sapiens
ccgacggacgccagg

SEQ ID NO: 499910 - DNA, 15 bp, Homo sapiens
cgacggacgccaggg

SEQ ID NO: 499911 - DNA, 15 bp, Homo sapiens
gacggacgccagggc

SEQ ID NO: 499912 - DNA, 15 bp, Homo sapiens
acggacgccagggcg

SEQ ID NO: 499913 - DNA, 15 bp, Homo sapiens
cggacgccagggcgg

SEQ ID NO: 499914 - DNA, 15 bp, Homo sapiens
ggacgccagggcgga

SEQ ID NO: 499915 - DNA, 15 bp, Homo sapiens
gacgccagggcggag

SEQ ID NO: 499916 - DNA, 15 bp, Homo sapiens
acgccagggcggagg

SEQ ID NO: 499917 - DNA, 15 bp, Homo sapiens
cgccagggcggaggg

SEQ ID NO: 499918 - DNA, 15 bp, Homo sapiens
gccagggcggagggt

SEQ ID NO: 499919 - DNA, 15 bp, Homo sapiens
ccagggcggagggtg

SEQ ID NO: 499920 - DNA, 15 bp, Homo sapiens
cagggcggagggtgt

SEQ ID NO: 499921 - DNA, 15 bp, Homo sapiens
agggcggagggtgtg

SEQ ID NO: 499922 - DNA, 15 bp, Homo sapiens
gggcggagggtgtga

SEQ ID NO: 499923 - DNA, 15 bp, Homo sapiens
ggcggagggtgtgaa

SEQ ID NO: 499924 - DNA, 15 bp, Homo sapiens
gcggagggtgtgaat

SEQ ID NO: 499925 - DNA, 15 bp, Homo sapiens
cggagggtgtgaatt

SEQ ID NO: 499926 - DNA, 15 bp, Homo sapiens
ggagggtgtgaattt

SEQ ID NO: 499927 - DNA, 15 bp, Homo sapiens
gagggtgtgaattta

SEQ ID NO: 499928 - DNA, 15 bp, Homo sapiens
agggtgtgaatttac

SEQ ID NO: 499929 - DNA, 15 bp, Homo sapiens
gggtgtgaatttact

SEQ ID NO: 499930 - DNA, 15 bp, Homo sapiens
ggtgtgaatttactc

SEQ ID NO: 499931 - DNA, 15 bp, Homo sapiens
gtgtgaatttactcg

SEQ ID NO: 499932 - DNA, 15 bp, Homo sapiens
tgtgaatttactcga

SEQ ID NO: 499933 - DNA, 15 bp, Homo sapiens
gtgaatttactcgat

SEQ ID NO: 499934 - DNA, 15 bp, Homo sapiens
tgaatttactcgatg

SEQ ID NO: 499935 - DNA, 15 bp, Homo sapiens
gaatttactcgatgg

SEQ ID NO: 499936 - DNA, 15 bp, Homo sapiens
aatttactcgatggt

SEQ ID NO: 499937 - DNA, 15 bp, Homo sapiens
atttactcgatggtc

SEQ ID NO: 499938 - DNA, 15 bp, Homo sapiens
tttactcgatggtcg

SEQ ID NO: 499939 - DNA, 15 bp, Homo sapiens
ttactcgatggtcgc

SEQ ID NO: 499940 - DNA, 15 bp, Homo sapiens
tactcgatggtcgcg

SEQ ID NO: 499941 - DNA, 15 bp, Homo sapiens
actcgatggtcgcgg

SEQ ID NO: 499942 - DNA, 15 bp, Homo sapiens
ctcgatggtcgcgga

SEQ ID NO: 499943 - DNA, 15 bp, Homo sapiens
tcgatggtcgcggac

SEQ ID NO: 499944 - DNA, 15 bp, Homo sapiens
cgatggtcgcggacg

SEQ ID NO: 499945 - DNA, 15 bp, Homo sapiens
gatggtcgcggacgt

SEQ ID NO: 499946 - DNA, 15 bp, Homo sapiens
atggtcgcggacgtg

SEQ ID NO: 499947 - DNA, 15 bp, Homo sapiens
tggtcgcggacgtgc

SEQ ID NO: 499948 - DNA, 15 bp, Homo sapiens
ggtcgcggacgtgcg

SEQ ID NO: 499949 - DNA, 15 bp, Homo sapiens
gtcgcggacgtgcgc

SEQ ID NO: 499950 - DNA, 15 bp, Homo sapiens
tcgcggacgtgcgcg

SEQ ID NO: 499951 - DNA, 15 bp, Homo sapiens
cgcggacgtgcgcgt

SEQ ID NO: 499952 - DNA, 15 bp, Homo sapiens
gcggacgtgcgcgtc

SEQ ID NO: 499953 - DNA, 15 bp, Homo sapiens
cggacgtgcgcgtcc

SEQ ID NO: 499954 - DNA, 15 bp, Homo sapiens
ggacgtgcgcgtccg

SEQ ID NO: 499955 - DNA, 15 bp, Homo sapiens
gacgtgcgcgtccgc

SEQ ID NO: 499956 - DNA, 15 bp, Homo sapiens
acgtgcgcgtccgcg

SEQ ID NO: 499957 - DNA, 15 bp, Homo sapiens
cgtgcgcgtccgcgg

SEQ ID NO: 499958 - DNA, 15 bp, Homo sapiens
gtgcgcgtccgcggc

SEQ ID NO: 499959 - DNA, 15 bp, Homo sapiens
tgcgcgtccgcggcc

SEQ ID NO: 499960 - DNA, 15 bp, Homo sapiens
gcgcgtccgcggcca

SEQ ID NO: 499961 - DNA, 15 bp, Homo sapiens
cgcgtccgcggccag

SEQ ID NO: 499962 - DNA, 15 bp, Homo sapiens
gcgtccgcggccagg

SEQ ID NO: 499963 - DNA, 15 bp, Homo sapiens
cgtccgcggccaggg

SEQ ID NO: 499964 - DNA, 15 bp, Homo sapiens
gtccgcggccagggg

SEQ ID NO: 499965 - DNA, 15 bp, Homo sapiens
tccgcggccaggggt

SEQ ID NO: 499966 - DNA, 15 bp, Homo sapiens
ccgcggccaggggtg

SEQ ID NO: 499967 - DNA, 15 bp, Homo sapiens
cgcggccaggggtgg

SEQ ID NO: 499968 - DNA, 15 bp, Homo sapiens
gcggccaggggtggc

SEQ ID NO: 499969 - DNA, 15 bp, Homo sapiens
cggccaggggtggct

SEQ ID NO: 499970 - DNA, 15 bp, Homo sapiens
ggccaggggtggctc

SEQ ID NO: 499971 - DNA, 15 bp, Homo sapiens
gccaggggtggctct

SEQ ID NO: 499972 - DNA, 15 bp, Homo sapiens
ccaggggtggctctt

SEQ ID NO: 499973 - DNA, 15 bp, Homo sapiens
caggggtggctcttc

SEQ ID NO: 499974 - DNA, 15 bp, Homo sapiens
aggggtggctcttcg

SEQ ID NO: 499975 - DNA, 15 bp, Homo sapiens
ggggtggctcttcgg

SEQ ID NO: 499976 - DNA, 15 bp, Homo sapiens
gggtggctcttcggc

SEQ ID NO: 499977 - DNA, 15 bp, Homo sapiens
ggtggctcttcggct

SEQ ID NO: 499978 - DNA, 15 bp, Homo sapiens
gtggctcttcggctt

SEQ ID NO: 499979 - DNA, 15 bp, Homo sapiens
tggctcttcggcttt

SEQ ID NO: 499980 - DNA, 15 bp, Homo sapiens
ggctcttcggctttg

SEQ ID NO: 499981 - DNA, 15 bp, Homo sapiens
gctcttcggctttga

SEQ ID NO: 499982 - DNA, 15 bp, Homo sapiens
ctcttcggctttgac

SEQ ID NO: 499983 - DNA, 15 bp, Homo sapiens
tcttcggctttgact

SEQ ID NO: 499984 - DNA, 15 bp, Homo sapiens
cttcggctttgactc

SEQ ID NO: 499985 - DNA, 15 bp, Homo sapiens
ttcggctttgactcg

SEQ ID NO: 499986 - DNA, 15 bp, Homo sapiens
tcggctttgactcgt

SEQ ID NO: 499987 - DNA, 15 bp, Homo sapiens
cggctttgactcgtg

SEQ ID NO: 499988 - DNA, 15 bp, Homo sapiens
ggctttgactcgtgt

SEQ ID NO: 499989 - DNA, 15 bp, Homo sapiens
gctttgactcgtgtc

SEQ ID NO: 499990 - DNA, 15 bp, Homo sapiens
ctttgactcgtgtct

SEQ ID NO: 499991 - DNA, 15 bp, Homo sapiens
tttgactcgtgtctg

SEQ ID NO: 499992 - DNA, 15 bp, Homo sapiens
ttgactcgtgtctgc

SEQ ID NO: 499993 - DNA, 15 bp, Homo sapiens
tgactcgtgtctgcg

SEQ ID NO: 499994 - DNA, 15 bp, Homo sapiens
gactcgtgtctgcgg

SEQ ID NO: 499995 - DNA, 15 bp, Homo sapiens
actcgtgtctgcggc

SEQ ID NO: 499996 - DNA, 15 bp, Homo sapiens
ctcgtgtctgcggcg

SEQ ID NO: 499997 - DNA, 15 bp, Homo sapiens
tcgtgtctgcggcgc

SEQ ID NO: 499998 - DNA, 15 bp, Homo sapiens
cgtgtctgcggcgca

SEQ ID NO: 499999 - DNA, 15 bp, Homo sapiens
gtgtctgcggcgcac

SEQ ID NO: 500000 - DNA, 15 bp, Homo sapiens
tgtctgcggcgcacc

SEQ ID NO: 500001 - DNA, 15 bp, Homo sapiens
gtctgcggcgcacca

SEQ ID NO: 500002 - DNA, 15 bp, Homo sapiens
tctgcggcgcaccag

SEQ ID NO: 500003 - DNA, 15 bp, Homo sapiens
ctgcggcgcaccagg

SEQ ID NO: 500004 - DNA, 15 bp, Homo sapiens
tgcggcgcaccagga

SEQ ID NO: 500005 - DNA, 15 bp, Homo sapiens
gcggcgcaccaggag

SEQ ID NO: 500006 - DNA, 15 bp, Homo sapiens
cggcgcaccaggaga

SEQ ID NO: 500007 - DNA, 15 bp, Homo sapiens
ggcgcaccaggagag

SEQ ID NO: 500008 - DNA, 15 bp, Homo sapiens
gcgcaccaggagaga

SEQ ID NO: 500009 - DNA, 15 bp, Homo sapiens
cgcaccaggagagag

SEQ ID NO: 500010 - DNA, 15 bp, Homo sapiens
gcaccaggagagaga

SEQ ID NO: 500011 - DNA, 15 bp, Homo sapiens
caccaggagagagag

SEQ ID NO: 500012 - DNA, 15 bp, Homo sapiens
accaggagagagagg

SEQ ID NO: 500013 - DNA, 15 bp, Homo sapiens
ccaggagagagagga

SEQ ID NO: 500014 - DNA, 15 bp, Homo sapiens
caggagagagaggaa

SEQ ID NO: 500015 - DNA, 15 bp, Homo sapiens
aggagagagaggaag

SEQ ID NO: 500016 - DNA, 15 bp, Homo sapiens
ggagagagaggaagt

SEQ ID NO: 500017 - DNA, 15 bp, Homo sapiens
gagagagaggaagtt

SEQ ID NO: 500018 - DNA, 15 bp, Homo sapiens
agagagaggaagttg

SEQ ID NO: 500019 - DNA, 15 bp, Homo sapiens
gagagaggaagttgt

SEQ ID NO: 500020 - DNA, 15 bp, Homo sapiens
agagaggaagttgtt

SEQ ID NO: 500021 - DNA, 15 bp, Homo sapiens
gagaggaagttgttg

SEQ ID NO: 500022 - DNA, 15 bp, Homo sapiens
agaggaagttgttgg

SEQ ID NO: 500023 - DNA, 15 bp, Homo sapiens
gaggaagttgttgga

SEQ ID NO: 500024 - DNA, 15 bp, Homo sapiens
aggaagttgttggag

SEQ ID NO: 500025 - DNA, 15 bp, Homo sapiens
ggaagttgttggagg

SEQ ID NO: 500026 - DNA, 15 bp, Homo sapiens
gaagttgttggagga

SEQ ID NO: 500027 - DNA, 15 bp, Homo sapiens
aagttgttggaggag

SEQ ID NO: 500028 - DNA, 15 bp, Homo sapiens
agttgttggaggaga

SEQ ID NO: 500029 - DNA, 15 bp, Homo sapiens
gttgttggaggagaa

SEQ ID NO: 500030 - DNA, 15 bp, Homo sapiens
ttgttggaggagaat

SEQ ID NO: 500031 - DNA, 15 bp, Homo sapiens
tgttggaggagaata

SEQ ID NO: 500032 - DNA, 15 bp, Homo sapiens
gttggaggagaatag

SEQ ID NO: 500033 - DNA, 15 bp, Homo sapiens
ttggaggagaatagt

SEQ ID NO: 500034 - DNA, 15 bp, Homo sapiens
tggaggagaatagtt

SEQ ID NO: 500035 - DNA, 15 bp, Homo sapiens
ggaggagaatagttg

SEQ ID NO: 500036 - DNA, 15 bp, Homo sapiens
gaggagaatagttgc

SEQ ID NO: 500037 - DNA, 15 bp, Homo sapiens
aggagaatagttgcc

SEQ ID NO: 500038 - DNA, 15 bp, Homo sapiens
ggagaatagttgcca

SEQ ID NO: 500039 - DNA, 15 bp, Homo sapiens
gagaatagttgccac

SEQ ID NO: 500040 - DNA, 15 bp, Homo sapiens
agaatagttgccaca

SEQ ID NO: 500041 - DNA, 15 bp, Homo sapiens
gaatagttgccacag

SEQ ID NO: 500042 - DNA, 15 bp, Homo sapiens
aatagttgccacagc

SEQ ID NO: 500043 - DNA, 15 bp, Homo sapiens
atagttgccacagcc

SEQ ID NO: 500044 - DNA, 15 bp, Homo sapiens
tagttgccacagcca

SEQ ID NO: 500045 - DNA, 15 bp, Homo sapiens
agttgccacagccag

SEQ ID NO: 500046 - DNA, 15 bp, Homo sapiens
gttgccacagccagg

SEQ ID NO: 500047 - DNA, 15 bp, Homo sapiens
ttgccacagccaggg

SEQ ID NO: 500048 - DNA, 15 bp, Homo sapiens
tgccacagccagggc

SEQ ID NO: 500049 - DNA, 15 bp, Homo sapiens
gccacagccagggcg

SEQ ID NO: 500050 - DNA, 15 bp, Homo sapiens
ccacagccagggcgg

SEQ ID NO: 500051 - DNA, 15 bp, Homo sapiens
cacagccagggcggt

SEQ ID NO: 500052 - DNA, 15 bp, Homo sapiens
acagccagggcggtg

SEQ ID NO: 500053 - DNA, 15 bp, Homo sapiens
cagccagggcggtga

SEQ ID NO: 500054 - DNA, 15 bp, Homo sapiens
agccagggcggtgac

SEQ ID NO: 500055 - DNA, 15 bp, Homo sapiens
gccagggcggtgacg

SEQ ID NO: 500056 - DNA, 15 bp, Homo sapiens
ccagggcggtgacgg

SEQ ID NO: 500057 - DNA, 15 bp, Homo sapiens
cagggcggtgacggc

SEQ ID NO: 500058 - DNA, 15 bp, Homo sapiens
agggcggtgacggcc

SEQ ID NO: 500059 - DNA, 15 bp, Homo sapiens
gggcggtgacggccg

SEQ ID NO: 500060 - DNA, 15 bp, Homo sapiens
ggcggtgacggccgt

SEQ ID NO: 500061 - DNA, 15 bp, Homo sapiens
gcggtgacggccgtt

SEQ ID NO: 500062 - DNA, 15 bp, Homo sapiens
cggtgacggccgtta

SEQ ID NO: 500063 - DNA, 15 bp, Homo sapiens
ggtgacggccgttag

SEQ ID NO: 500064 - DNA, 15 bp, Homo sapiens
gtgacggccgttagg

SEQ ID NO: 500065 - DNA, 15 bp, Homo sapiens
tgacggccgttaggg

SEQ ID NO: 500066 - DNA, 15 bp, Homo sapiens
gacggccgttagggt

SEQ ID NO: 500067 - DNA, 15 bp, Homo sapiens
acggccgttagggtc

SEQ ID NO: 500068 - DNA, 15 bp, Homo sapiens
cggccgttagggtct

SEQ ID NO: 500069 - DNA, 15 bp, Homo sapiens
ggccgttagggtctg

SEQ ID NO: 500070 - DNA, 15 bp, Homo sapiens
gccgttagggtctgc

SEQ ID NO: 500071 - DNA, 15 bp, Homo sapiens
ccgttagggtctgcc

SEQ ID NO: 500072 - DNA, 15 bp, Homo sapiens
cgttagggtctgccc

SEQ ID NO: 500073 - DNA, 15 bp, Homo sapiens
gttagggtctgcccc

SEQ ID NO: 500074 - DNA, 15 bp, Homo sapiens
ttagggtctgccccc

SEQ ID NO: 500075 - DNA, 15 bp, Homo sapiens
tagggtctgcccccg

SEQ ID NO: 500076 - DNA, 15 bp, Homo sapiens
agggtctgcccccga

SEQ ID NO: 500077 - DNA, 15 bp, Homo sapiens
gggtctgcccccgac

SEQ ID NO: 500078 - DNA, 15 bp, Homo sapiens
ggtctgcccccgacg

SEQ ID NO: 500079 - DNA, 15 bp, Homo sapiens
gtctgcccccgacgg

SEQ ID NO: 500080 - DNA, 15 bp, Homo sapiens
tctgcccccgacggg

SEQ ID NO: 500081 - DNA, 15 bp, Homo sapiens
ctgcccccgacgggc

SEQ ID NO: 500082 - DNA, 15 bp, Homo sapiens
tgcccccgacgggcc

SEQ ID NO: 500083 - DNA, 15 bp, Homo sapiens
gcccccgacgggcca

SEQ ID NO: 500084 - DNA, 15 bp, Homo sapiens
cccccgacgggccaa

SEQ ID NO: 500085 - DNA, 15 bp, Homo sapiens
ccccgacgggccaaa

SEQ ID NO: 500086 - DNA, 15 bp, Homo sapiens
cccgacgggccaaaa

SEQ ID NO: 500087 - DNA, 15 bp, Homo sapiens
ccgacgggccaaaac

SEQ ID NO: 500088 - DNA, 15 bp, Homo sapiens
cgacgggccaaaaca

SEQ ID NO: 500089 - DNA, 15 bp, Homo sapiens
gacgggccaaaacaa

SEQ ID NO: 500090 - DNA, 15 bp, Homo sapiens
acgggccaaaacaag

SEQ ID NO: 500091 - DNA, 15 bp, Homo sapiens
cgggccaaaacaagg

SEQ ID NO: 500092 - DNA, 15 bp, Homo sapiens
gggccaaaacaagga

SEQ ID NO: 500093 - DNA, 15 bp, Homo sapiens
ggccaaaacaaggac

SEQ ID NO: 500094 - DNA, 15 bp, Homo sapiens
gccaaaacaaggaca

SEQ ID NO: 500095 - DNA, 15 bp, Homo sapiens
ccaaaacaaggacaa

SEQ ID NO: 500096 - DNA, 15 bp, Homo sapiens
caaaacaaggacaag

SEQ ID NO: 500097 - DNA, 15 bp, Homo sapiens
aaaacaaggacaagt

SEQ ID NO: 500098 - DNA, 15 bp, Homo sapiens
aaacaaggacaagtg

SEQ ID NO: 500099 - DNA, 15 bp, Homo sapiens
aacaaggacaagtgg

SEQ ID NO: 500100 - DNA, 15 bp, Homo sapiens
acaaggacaagtggc

SEQ ID NO: 500101 - DNA, 15 bp, Homo sapiens
caaggacaagtggcg

SEQ ID NO: 500102 - DNA, 15 bp, Homo sapiens
aaggacaagtggcga

SEQ ID NO: 500103 - DNA, 15 bp, Homo sapiens
aggacaagtggcgag

SEQ ID NO: 500104 - DNA, 15 bp, Homo sapiens
ggacaagtggcgagg

SEQ ID NO: 500105 - DNA, 15 bp, Homo sapiens
gacaagtggcgagga

SEQ ID NO: 500106 - DNA, 15 bp, Homo sapiens
acaagtggcgaggac

SEQ ID NO: 500107 - DNA, 15 bp, Homo sapiens
caagtggcgaggact

SEQ ID NO: 500108 - DNA, 15 bp, Homo sapiens
aagtggcgaggactg

SEQ ID NO: 500109 - DNA, 15 bp, Homo sapiens
agtggcgaggactgg

SEQ ID NO: 500110 - DNA, 15 bp, Homo sapiens
gtggcgaggactggg

SEQ ID NO: 500111 - DNA, 15 bp, Homo sapiens
tggcgaggactgggc

SEQ ID NO: 500112 - DNA, 15 bp, Homo sapiens
ggcgaggactgggcc

SEQ ID NO: 500113 - DNA, 15 bp, Homo sapiens
gcgaggactgggcct

SEQ ID NO: 500114 - DNA, 15 bp, Homo sapiens
cgaggactgggcctg

SEQ ID NO: 500115 - DNA, 15 bp, Homo sapiens
gaggactgggcctgg

SEQ ID NO: 500116 - DNA, 15 bp, Homo sapiens
aggactgggcctggg

SEQ ID NO: 500117 - DNA, 15 bp, Homo sapiens
ggactgggcctgggg

SEQ ID NO: 500118 - DNA, 15 bp, Homo sapiens
gactgggcctgggga

SEQ ID NO: 500119 - DNA, 15 bp, Homo sapiens
actgggcctggggat

SEQ ID NO: 500120 - DNA, 15 bp, Homo sapiens
ctgggcctggggatg

SEQ ID NO: 500121 - DNA, 15 bp, Homo sapiens
tgggcctggggatgg

SEQ ID NO: 500122 - DNA, 15 bp, Homo sapiens
gggcctggggatggc

SEQ ID NO: 500123 - DNA, 15 bp, Homo sapiens
ggcctggggatggcc

SEQ ID NO: 500124 - DNA, 15 bp, Homo sapiens
gcctggggatggccc

SEQ ID NO: 500125 - DNA, 15 bp, Homo sapiens
cctggggatggccct

SEQ ID NO: 500126 - DNA, 15 bp, Homo sapiens
ctggggatggccctg

SEQ ID NO: 500127 - DNA, 15 bp, Homo sapiens
tggggatggccctgc

SEQ ID NO: 500128 - DNA, 15 bp, Homo sapiens
ggggatggccctgcg

SEQ ID NO: 500129 - DNA, 15 bp, Homo sapiens
gggatggccctgcgg

SEQ ID NO: 500130 - DNA, 15 bp, Homo sapiens
ggatggccctgcggg

SEQ ID NO: 500131 - DNA, 15 bp, Homo sapiens
gatggccctgcgggt

SEQ ID NO: 500132 - DNA, 15 bp, Homo sapiens
atggccctgcgggtc

SEQ ID NO: 500133 - DNA, 15 bp, Homo sapiens
tggccctgcgggtcc

SEQ ID NO: 500134 - DNA, 15 bp, Homo sapiens
ggccctgcgggtccg

SEQ ID NO: 500135 - DNA, 15 bp, Homo sapiens
gccctgcgggtccgg

SEQ ID NO: 500136 - DNA, 15 bp, Homo sapiens
ccctgcgggtccggg

SEQ ID NO: 500137 - DNA, 15 bp, Homo sapiens
cctgcgggtccgggc

SEQ ID NO: 500138 - DNA, 15 bp, Homo sapiens
ctgcgggtccgggcg

SEQ ID NO: 500139 - DNA, 15 bp, Homo sapiens
tgcgggtccgggcgc

SEQ ID NO: 500140 - DNA, 15 bp, Homo sapiens
gcgggtccgggcgcg

SEQ ID NO: 500141 - DNA, 15 bp, Homo sapiens
cgggtccgggcgcgg

SEQ ID NO: 500142 - DNA, 15 bp, Homo sapiens
gggtccgggcgcggc

SEQ ID NO: 500143 - DNA, 15 bp, Homo sapiens
ggtccgggcgcggcg

SEQ ID NO: 500144 - DNA, 15 bp, Homo sapiens
gtccgggcgcggcgc

SEQ ID NO: 500145 - DNA, 15 bp, Homo sapiens
tccgggcgcggcgca

SEQ ID NO: 500146 - DNA, 15 bp, Homo sapiens
ccgggcgcggcgcaa

SEQ ID NO: 500147 - DNA, 15 bp, Homo sapiens
cgggcgcggcgcaag

SEQ ID NO: 500148 - DNA, 15 bp, Homo sapiens
gggcgcggcgcaagt

SEQ ID NO: 500149 - DNA, 15 bp, Homo sapiens
ggcgcggcgcaagtc

SEQ ID NO: 500150 - DNA, 15 bp, Homo sapiens
gcgcggcgcaagtcc

SEQ ID NO: 500151 - DNA, 15 bp, Homo sapiens
cgcggcgcaagtcct

SEQ ID NO: 500152 - DNA, 15 bp, Homo sapiens
gcggcgcaagtcctg

SEQ ID NO: 500153 - DNA, 15 bp, Homo sapiens
cggcgcaagtcctgc

SEQ ID NO: 500154 - DNA, 15 bp, Homo sapiens
ggcgcaagtcctgct

SEQ ID NO: 500155 - DNA, 15 bp, Homo sapiens
gcgcaagtcctgctt

SEQ ID NO: 500156 - DNA, 15 bp, Homo sapiens
cgcaagtcctgcttt

SEQ ID NO: 500157 - DNA, 15 bp, Homo sapiens
gcaagtcctgctttg

SEQ ID NO: 500158 - DNA, 15 bp, Homo sapiens
caagtcctgctttgt

SEQ ID NO: 500159 - DNA, 15 bp, Homo sapiens
aagtcctgctttgtc

SEQ ID NO: 500160 - DNA, 15 bp, Homo sapiens
agtcctgctttgtct

SEQ ID NO: 500161 - DNA, 15 bp, Homo sapiens
gtcctgctttgtctc

SEQ ID NO: 500162 - DNA, 15 bp, Homo sapiens
tcctgctttgtctcc

SEQ ID NO: 500163 - DNA, 15 bp, Homo sapiens
cctgctttgtctcca

SEQ ID NO: 500164 - DNA, 15 bp, Homo sapiens
ctgctttgtctccag

SEQ ID NO: 500165 - DNA, 15 bp, Homo sapiens
tgctttgtctccagg

SEQ ID NO: 500166 - DNA, 15 bp, Homo sapiens
gctttgtctccaggt

SEQ ID NO: 500167 - DNA, 15 bp, Homo sapiens
ctttgtctccaggtg

SEQ ID NO: 500168 - DNA, 15 bp, Homo sapiens
tttgtctccaggtga

SEQ ID NO: 500169 - DNA, 15 bp, Homo sapiens
ttgtctccaggtgac

SEQ ID NO: 500170 - DNA, 15 bp, Homo sapiens
tgtctccaggtgact

SEQ ID NO: 500171 - DNA, 15 bp, Homo sapiens
gtctccaggtgactg

SEQ ID NO: 500172 - DNA, 15 bp, Homo sapiens
tctccaggtgactgg

SEQ ID NO: 500173 - DNA, 15 bp, Homo sapiens
ctccaggtgactggc

SEQ ID NO: 500174 - DNA, 15 bp, Homo sapiens
tccaggtgactggct

SEQ ID NO: 500175 - DNA, 15 bp, Homo sapiens
ccaggtgactggctg

SEQ ID NO: 500176 - DNA, 15 bp, Homo sapiens
caggtgactggctgt

SEQ ID NO: 500177 - DNA, 15 bp, Homo sapiens
aggtgactggctgtc

SEQ ID NO: 500178 - DNA, 15 bp, Homo sapiens
ggtgactggctgtcc

SEQ ID NO: 500179 - DNA, 15 bp, Homo sapiens
gtgactggctgtcca

SEQ ID NO: 500180 - DNA, 15 bp, Homo sapiens
tgactggctgtccag

SEQ ID NO: 500181 - DNA, 15 bp, Homo sapiens
gactggctgtccagg

SEQ ID NO: 500182 - DNA, 15 bp, Homo sapiens
actggctgtccagga

SEQ ID NO: 500183 - DNA, 15 bp, Homo sapiens
ctggctgtccaggac

SEQ ID NO: 500184 - DNA, 15 bp, Homo sapiens
tggctgtccaggacg

SEQ ID NO: 500185 - DNA, 15 bp, Homo sapiens
ggctgtccaggacgg

SEQ ID NO: 500186 - DNA, 15 bp, Homo sapiens
gctgtccaggacggc

SEQ ID NO: 500187 - DNA, 15 bp, Homo sapiens
ctgtccaggacggcg

SEQ ID NO: 500188 - DNA, 15 bp, Homo sapiens
tgtccaggacggcgg

SEQ ID NO: 500189 - DNA, 15 bp, Homo sapiens
gtccaggacggcggg

SEQ ID NO: 500190 - DNA, 15 bp, Homo sapiens
tccaggacggcggga

SEQ ID NO: 500191 - DNA, 15 bp, Homo sapiens
ccaggacggcgggag

SEQ ID NO: 500192 - DNA, 15 bp, Homo sapiens
caggacggcgggagc

SEQ ID NO: 500193 - DNA, 15 bp, Homo sapiens
aggacggcgggagct

SEQ ID NO: 500194 - DNA, 15 bp, Homo sapiens
ggacggcgggagctg

SEQ ID NO: 500195 - DNA, 15 bp, Homo sapiens
gacggcgggagctgc

SEQ ID NO: 500196 - DNA, 15 bp, Homo sapiens
acggcgggagctgct

SEQ ID NO: 500197 - DNA, 15 bp, Homo sapiens
cggcgggagctgcta

SEQ ID NO: 500198 - DNA, 15 bp, Homo sapiens
ggcgggagctgctaa

SEQ ID NO: 500199 - DNA, 15 bp, Homo sapiens
gcgggagctgctaag

SEQ ID NO: 500200 - DNA, 15 bp, Homo sapiens
cgggagctgctaagg

SEQ ID NO: 500201 - DNA, 15 bp, Homo sapiens
gggagctgctaaggc

SEQ ID NO: 500202 - DNA, 15 bp, Homo sapiens
ggagctgctaaggct

SEQ ID NO: 500203 - DNA, 15 bp, Homo sapiens
gagctgctaaggctt

SEQ ID NO: 500204 - DNA, 15 bp, Homo sapiens
agctgctaaggcttg

SEQ ID NO: 500205 - DNA, 15 bp, Homo sapiens
gctgctaaggcttgt

SEQ ID NO: 500206 - DNA, 15 bp, Homo sapiens
ctgctaaggcttgtg

SEQ ID NO: 500207 - DNA, 15 bp, Homo sapiens
tgctaaggcttgtgt

SEQ ID NO: 500208 - DNA, 15 bp, Homo sapiens
gctaaggcttgtgtc

SEQ ID NO: 500209 - DNA, 15 bp, Homo sapiens
ctaaggcttgtgtcc

SEQ ID NO: 500210 - DNA, 15 bp, Homo sapiens
taaggcttgtgtccg

SEQ ID NO: 500211 - DNA, 15 bp, Homo sapiens
aaggcttgtgtccgg

SEQ ID NO: 500212 - DNA, 15 bp, Homo sapiens
aggcttgtgtccgga

SEQ ID NO: 500213 - DNA, 15 bp, Homo sapiens
ggcttgtgtccggaa

SEQ ID NO: 500214 - DNA, 15 bp, Homo sapiens
gcttgtgtccggaag

SEQ ID NO: 500215 - DNA, 15 bp, Homo sapiens
cttgtgtccggaagg

SEQ ID NO: 500216 - DNA, 15 bp, Homo sapiens
ttgtgtccggaagga

SEQ ID NO: 500217 - DNA, 15 bp, Homo sapiens
tgtgtccggaaggag

SEQ ID NO: 500218 - DNA, 15 bp, Homo sapiens
gtgtccggaaggagc

SEQ ID NO: 500219 - DNA, 15 bp, Homo sapiens
tgtccggaaggagca

SEQ ID NO: 500220 - DNA, 15 bp, Homo sapiens
gtccggaaggagcac

SEQ ID NO: 500221 - DNA, 15 bp, Homo sapiens
tccggaaggagcaca

SEQ ID NO: 500222 - DNA, 15 bp, Homo sapiens
ccggaaggagcacag

SEQ ID NO: 500223 - DNA, 15 bp, Homo sapiens
cggaaggagcacagg

SEQ ID NO: 500224 - DNA, 15 bp, Homo sapiens
ggaaggagcacaggg

SEQ ID NO: 500225 - DNA, 15 bp, Homo sapiens
gaaggagcacaggga

SEQ ID NO: 500226 - DNA, 15 bp, Homo sapiens
aaggagcacagggat

SEQ ID NO: 500227 - DNA, 15 bp, Homo sapiens
aggagcacagggatg

SEQ ID NO: 500228 - DNA, 15 bp, Homo sapiens
ggagcacagggatgg

SEQ ID NO: 500229 - DNA, 15 bp, Homo sapiens
gagcacagggatggg

SEQ ID NO: 500230 - DNA, 15 bp, Homo sapiens
agcacagggatgggc

SEQ ID NO: 500231 - DNA, 15 bp, Homo sapiens
gcacagggatgggca

SEQ ID NO: 500232 - DNA, 15 bp, Homo sapiens
cacagggatgggcag

SEQ ID NO: 500233 - DNA, 15 bp, Homo sapiens
acagggatgggcagg

SEQ ID NO: 500234 - DNA, 15 bp, Homo sapiens
cagggatgggcaggg

SEQ ID NO: 500235 - DNA, 15 bp, Homo sapiens
agggatgggcagggt

SEQ ID NO: 500236 - DNA, 15 bp, Homo sapiens
gggatgggcagggtg

SEQ ID NO: 500237 - DNA, 15 bp, Homo sapiens
ggatgggcagggtgg

SEQ ID NO: 500238 - DNA, 15 bp, Homo sapiens
gatgggcagggtggc

SEQ ID NO: 500239 - DNA, 15 bp, Homo sapiens
atgggcagggtggcc

SEQ ID NO: 500240 - DNA, 15 bp, Homo sapiens
tgggcagggtggccg

SEQ ID NO: 500241 - DNA, 15 bp, Homo sapiens
gggcagggtggccgg

SEQ ID NO: 500242 - DNA, 15 bp, Homo sapiens
ggcagggtggccggg

SEQ ID NO: 500243 - DNA, 15 bp, Homo sapiens
gcagggtggccgggc

SEQ ID NO: 500244 - DNA, 15 bp, Homo sapiens
cagggtggccgggcc

SEQ ID NO: 500245 - DNA, 15 bp, Homo sapiens
agggtggccgggcca

SEQ ID NO: 500246 - DNA, 15 bp, Homo sapiens
gggtggccgggccag

SEQ ID NO: 500247 - DNA, 15 bp, Homo sapiens
ggtggccgggccagc

SEQ ID NO: 500248 - DNA, 15 bp, Homo sapiens
gtggccgggccagcc

SEQ ID NO: 500249 - DNA, 15 bp, Homo sapiens
tggccgggccagccg

SEQ ID NO: 500250 - DNA, 15 bp, Homo sapiens
ggccgggccagccgg

SEQ ID NO: 500251 - DNA, 15 bp, Homo sapiens
gccgggccagccggc

SEQ ID NO: 500252 - DNA, 15 bp, Homo sapiens
ccgggccagccggcc

SEQ ID NO: 500253 - DNA, 15 bp, Homo sapiens
cgggccagccggccc

SEQ ID NO: 500254 - DNA, 15 bp, Homo sapiens
gggccagccggccct

SEQ ID NO: 500255 - DNA, 15 bp, Homo sapiens
ggccagccggccctc

SEQ ID NO: 500256 - DNA, 15 bp, Homo sapiens
gccagccggccctca

SEQ ID NO: 500257 - DNA, 15 bp, Homo sapiens
ccagccggccctcaa

SEQ ID NO: 500258 - DNA, 15 bp, Homo sapiens
cagccggccctcaaa

SEQ ID NO: 500259 - DNA, 15 bp, Homo sapiens
agccggccctcaaat

SEQ ID NO: 500260 - DNA, 15 bp, Homo sapiens
gccggccctcaaatc

SEQ ID NO: 500261 - DNA, 15 bp, Homo sapiens
ccggccctcaaatcc

SEQ ID NO: 500262 - DNA, 15 bp, Homo sapiens
cggccctcaaatcct

SEQ ID NO: 500263 - DNA, 15 bp, Homo sapiens
ggccctcaaatcctc

SEQ ID NO: 500264 - DNA, 15 bp, Homo sapiens
gccctcaaatcctcc

SEQ ID NO: 500265 - DNA, 15 bp, Homo sapiens
ccctcaaatcctccg

SEQ ID NO: 500266 - DNA, 15 bp, Homo sapiens
cctcaaatcctccga

SEQ ID NO: 500267 - DNA, 15 bp, Homo sapiens
ctcaaatcctccgac

SEQ ID NO: 500268 - DNA, 15 bp, Homo sapiens
tcaaatcctccgacg

SEQ ID NO: 500269 - DNA, 15 bp, Homo sapiens
caaatcctccgacga

SEQ ID NO: 500270 - DNA, 15 bp, Homo sapiens
aaatcctccgacgaa

SEQ ID NO: 500271 - DNA, 15 bp, Homo sapiens
aatcctccgacgaag

SEQ ID NO: 500272 - DNA, 15 bp, Homo sapiens
atcctccgacgaagc

SEQ ID NO: 500273 - DNA, 15 bp, Homo sapiens
tcctccgacgaagcg

SEQ ID NO: 500274 - DNA, 15 bp, Homo sapiens
cctccgacgaagcgg

SEQ ID NO: 500275 - DNA, 15 bp, Homo sapiens
ctccgacgaagcggc

SEQ ID NO: 500276 - DNA, 15 bp, Homo sapiens
tccgacgaagcggca

SEQ ID NO: 500277 - DNA, 15 bp, Homo sapiens
ccgacgaagcggcag

SEQ ID NO: 500278 - DNA, 15 bp, Homo sapiens
cgacgaagcggcagc

SEQ ID NO: 500279 - DNA, 15 bp, Homo sapiens
gacgaagcggcagcc

SEQ ID NO: 500280 - DNA, 15 bp, Homo sapiens
acgaagcggcagccg

SEQ ID NO: 500281 - DNA, 15 bp, Homo sapiens
cgaagcggcagccgc

SEQ ID NO: 500282 - DNA, 15 bp, Homo sapiens
gaagcggcagccgcc

SEQ ID NO: 500283 - DNA, 15 bp, Homo sapiens
aagcggcagccgcca

SEQ ID NO: 500284 - DNA, 15 bp, Homo sapiens
agcggcagccgccac

SEQ ID NO: 500285 - DNA, 15 bp, Homo sapiens
gcggcagccgccacg

SEQ ID NO: 500286 - DNA, 15 bp, Homo sapiens
cggcagccgccacga

SEQ ID NO: 500287 - DNA, 15 bp, Homo sapiens
ggcagccgccacgac

SEQ ID NO: 500288 - DNA, 15 bp, Homo sapiens
gcagccgccacgacc

SEQ ID NO: 500289 - DNA, 15 bp, Homo sapiens
cagccgccacgacca

SEQ ID NO: 500290 - DNA, 15 bp, Homo sapiens
agccgccacgaccac

SEQ ID NO: 500291 - DNA, 15 bp, Homo sapiens
gccgccacgaccacg

SEQ ID NO: 500292 - DNA, 15 bp, Homo sapiens
ccgccacgaccacgg

SEQ ID NO: 500293 - DNA, 15 bp, Homo sapiens
cgccacgaccacggc

SEQ ID NO: 500294 - DNA, 15 bp, Homo sapiens
gccacgaccacggcc

SEQ ID NO: 500295 - DNA, 15 bp, Homo sapiens
ccacgaccacggcca

SEQ ID NO: 500296 - DNA, 15 bp, Homo sapiens
cacgaccacggccag

SEQ ID NO: 500297 - DNA, 15 bp, Homo sapiens
acgaccacggccaga

SEQ ID NO: 500298 - DNA, 15 bp, Homo sapiens
cgaccacggccagag

SEQ ID NO: 500299 - DNA, 15 bp, Homo sapiens
gaccacggccagagc

SEQ ID NO: 500300 - DNA, 15 bp, Homo sapiens
accacggccagagca

SEQ ID NO: 500301 - DNA, 15 bp, Homo sapiens
ccacggccagagcag

SEQ ID NO: 500302 - DNA, 15 bp, Homo sapiens
cacggccagagcagc

SEQ ID NO: 500303 - DNA, 15 bp, Homo sapiens
acggccagagcagcg

SEQ ID NO: 500304 - DNA, 15 bp, Homo sapiens
cggccagagcagcgc

SEQ ID NO: 500305 - DNA, 15 bp, Homo sapiens
ggccagagcagcgct

SEQ ID NO: 500306 - DNA, 15 bp, Homo sapiens
gccagagcagcgctc

SEQ ID NO: 500307 - DNA, 15 bp, Homo sapiens
ccagagcagcgctcg

SEQ ID NO: 500308 - DNA, 15 bp, Homo sapiens
cagagcagcgctcgg

SEQ ID NO: 500309 - DNA, 15 bp, Homo sapiens
agagcagcgctcgga

SEQ ID NO: 500310 - DNA, 15 bp, Homo sapiens
gagcagcgctcggag

SEQ ID NO: 500311 - DNA, 15 bp, Homo sapiens
agcagcgctcggagg

SEQ ID NO: 500312 - DNA, 15 bp, Homo sapiens
gcagcgctcggaggc

SEQ ID NO: 500313 - DNA, 15 bp, Homo sapiens
cagcgctcggaggcg

SEQ ID NO: 500314 - DNA, 15 bp, Homo sapiens
agcgctcggaggcga

SEQ ID NO: 500315 - DNA, 15 bp, Homo sapiens
gcgctcggaggcgag

SEQ ID NO: 500316 - DNA, 15 bp, Homo sapiens
cgctcggaggcgagt

SEQ ID NO: 500317 - DNA, 15 bp, Homo sapiens
gctcggaggcgagtt

SEQ ID NO: 500318 - DNA, 15 bp, Homo sapiens
ctcggaggcgagttt

SEQ ID NO: 500319 - DNA, 15 bp, Homo sapiens
tcggaggcgagtttg

SEQ ID NO: 500320 - DNA, 15 bp, Homo sapiens
cggaggcgagtttgt

SEQ ID NO: 500321 - DNA, 15 bp, Homo sapiens
ggaggcgagtttgtc

SEQ ID NO: 500322 - DNA, 15 bp, Homo sapiens
gaggcgagtttgtca

SEQ ID NO: 500323 - DNA, 15 bp, Homo sapiens
aggcgagtttgtcaa

SEQ ID NO: 500324 - DNA, 15 bp, Homo sapiens
ggcgagtttgtcaac

SEQ ID NO: 500325 - DNA, 15 bp, Homo sapiens
gcgagtttgtcaaca

SEQ ID NO: 500326 - DNA, 15 bp, Homo sapiens
cgagtttgtcaacaa

SEQ ID NO: 500327 - DNA, 15 bp, Homo sapiens
gagtttgtcaacaat

SEQ ID NO: 500328 - DNA, 15 bp, Homo sapiens
agtttgtcaacaatc

SEQ ID NO: 500329 - DNA, 15 bp, Homo sapiens
gtttgtcaacaatcg

SEQ ID NO: 500330 - DNA, 15 bp, Homo sapiens
tttgtcaacaatcgc

SEQ ID NO: 500331 - DNA, 15 bp, Homo sapiens
ttgtcaacaatcgcc

SEQ ID NO: 500332 - DNA, 15 bp, Homo sapiens
tgtcaacaatcgcct

SEQ ID NO: 500333 - DNA, 15 bp, Homo sapiens
gtcaacaatcgcctc

SEQ ID NO: 500334 - DNA, 15 bp, Homo sapiens
tcaacaatcgcctcg

SEQ ID NO: 500335 - DNA, 15 bp, Homo sapiens
caacaatcgcctcgc

SEQ ID NO: 500336 - DNA, 15 bp, Homo sapiens
aacaatcgcctcgcc

SEQ ID NO: 500337 - DNA, 15 bp, Homo sapiens
acaatcgcctcgcct

SEQ ID NO: 500338 - DNA, 15 bp, Homo sapiens
caatcgcctcgcctt

SEQ ID NO: 500339 - DNA, 15 bp, Homo sapiens
aatcgcctcgccttt

SEQ ID NO: 500340 - DNA, 15 bp, Homo sapiens
atcgcctcgcctttg

SEQ ID NO: 500341 - DNA, 15 bp, Homo sapiens
tcgcctcgcctttgg

SEQ ID NO: 500342 - DNA, 15 bp, Homo sapiens
cgcctcgcctttggc

SEQ ID NO: 500343 - DNA, 15 bp, Homo sapiens
gcctcgcctttggcg

SEQ ID NO: 500344 - DNA, 15 bp, Homo sapiens
cctcgcctttggcgg

SEQ ID NO: 500345 - DNA, 15 bp, Homo sapiens
ctcgcctttggcggc

SEQ ID NO: 500346 - DNA, 15 bp, Homo sapiens
tcgcctttggcggcc

SEQ ID NO: 500347 - DNA, 15 bp, Homo sapiens
cgcctttggcggcct

SEQ ID NO: 500348 - DNA, 15 bp, Homo sapiens
gcctttggcggcctg

SEQ ID NO: 500349 - DNA, 15 bp, Homo sapiens
cctttggcggcctga

SEQ ID NO: 500350 - DNA, 15 bp, Homo sapiens
ctttggcggcctgac

SEQ ID NO: 500351 - DNA, 15 bp, Homo sapiens
tttggcggcctgacc

SEQ ID NO: 500352 - DNA, 15 bp, Homo sapiens
ttggcggcctgaccc

SEQ ID NO: 500353 - DNA, 15 bp, Homo sapiens
tggcggcctgacccg

SEQ ID NO: 500354 - DNA, 15 bp, Homo sapiens
ggcggcctgacccgt

SEQ ID NO: 500355 - DNA, 15 bp, Homo sapiens
gcggcctgacccgta

SEQ ID NO: 500356 - DNA, 15 bp, Homo sapiens
cggcctgacccgtag

SEQ ID NO: 500357 - DNA, 15 bp, Homo sapiens
ggcctgacccgtagg

SEQ ID NO: 500358 - DNA, 15 bp, Homo sapiens
gcctgacccgtaggc

SEQ ID NO: 500359 - DNA, 15 bp, Homo sapiens
cctgacccgtaggcg

SEQ ID NO: 500360 - DNA, 15 bp, Homo sapiens
ctgacccgtaggcgc

SEQ ID NO: 500361 - DNA, 15 bp, Homo sapiens
tgacccgtaggcgcc

SEQ ID NO: 500362 - DNA, 15 bp, Homo sapiens
gacccgtaggcgccg

SEQ ID NO: 500363 - DNA, 15 bp, Homo sapiens
acccgtaggcgccgc

SEQ ID NO: 500364 - DNA, 15 bp, Homo sapiens
cccgtaggcgccgcc

SEQ ID NO: 500365 - DNA, 15 bp, Homo sapiens
ccgtaggcgccgccc

SEQ ID NO: 500366 - DNA, 15 bp, Homo sapiens
cgtaggcgccgcccc

SEQ ID NO: 500367 - DNA, 15 bp, Homo sapiens
gtaggcgccgccccc

SEQ ID NO: 500368 - DNA, 15 bp, Homo sapiens
taggcgccgccccca

SEQ ID NO: 500369 - DNA, 15 bp, Homo sapiens
aggcgccgcccccac

SEQ ID NO: 500370 - DNA, 15 bp, Homo sapiens
ggcgccgcccccacc

SEQ ID NO: 500371 - DNA, 15 bp, Homo sapiens
gcgccgcccccaccg

SEQ ID NO: 500372 - DNA, 15 bp, Homo sapiens
cgccgcccccaccgc

SEQ ID NO: 500373 - DNA, 15 bp, Homo sapiens
gccgcccccaccgcg

SEQ ID NO: 500374 - DNA, 15 bp, Homo sapiens
ccgcccccaccgcgg

SEQ ID NO: 500375 - DNA, 15 bp, Homo sapiens
cgcccccaccgcggc

SEQ ID NO: 500376 - DNA, 15 bp, Homo sapiens
gcccccaccgcggct

SEQ ID NO: 500377 - DNA, 15 bp, Homo sapiens
cccccaccgcggctg

SEQ ID NO: 500378 - DNA, 15 bp, Homo sapiens
ccccaccgcggctgc

SEQ ID NO: 500379 - DNA, 15 bp, Homo sapiens
cccaccgcggctgcc

SEQ ID NO: 500380 - DNA, 15 bp, Homo sapiens
ccaccgcggctgccg

SEQ ID NO: 500381 - DNA, 15 bp, Homo sapiens
caccgcggctgccga

SEQ ID NO: 500382 - DNA, 15 bp, Homo sapiens
accgcggctgccgat

SEQ ID NO: 500383 - DNA, 15 bp, Homo sapiens
ccgcggctgccgatt

SEQ ID NO: 500384 - DNA, 15 bp, Homo sapiens
cgcggctgccgattg

SEQ ID NO: 500385 - DNA, 15 bp, Homo sapiens
gcggctgccgattgg

SEQ ID NO: 500386 - DNA, 15 bp, Homo sapiens
cggctgccgattggc

SEQ ID NO: 500387 - DNA, 15 bp, Homo sapiens
ggctgccgattggct

SEQ ID NO: 500388 - DNA, 15 bp, Homo sapiens
gctgccgattggctg

SEQ ID NO: 500389 - DNA, 15 bp, Homo sapiens
ctgccgattggctgc

SEQ ID NO: 500390 - DNA, 15 bp, Homo sapiens
tgccgattggctgcg

SEQ ID NO: 500391 - DNA, 15 bp, Homo sapiens
gccgattggctgcgg

SEQ ID NO: 500392 - DNA, 15 bp, Homo sapiens
ccgattggctgcggc

SEQ ID NO: 500393 - DNA, 15 bp, Homo sapiens
cgattggctgcggcg

SEQ ID NO: 500394 - DNA, 15 bp, Homo sapiens
gattggctgcggcgc

SEQ ID NO: 500395 - DNA, 15 bp, Homo sapiens
attggctgcggcgcg

SEQ ID NO: 500396 - DNA, 15 bp, Homo sapiens
ttggctgcggcgcgg

SEQ ID NO: 500397 - DNA, 15 bp, Homo sapiens
tggctgcggcgcgga

SEQ ID NO: 500398 - DNA, 15 bp, Homo sapiens
ggctgcggcgcggag

SEQ ID NO: 500399 - DNA, 15 bp, Homo sapiens
gctgcggcgcggagc

SEQ ID NO: 500400 - DNA, 15 bp, Homo sapiens
ctgcggcgcggagcg

SEQ ID NO: 500401 - DNA, 15 bp, Homo sapiens
tgcggcgcggagcga

SEQ ID NO: 500402 - DNA, 15 bp, Homo sapiens
gcggcgcggagcgac

SEQ ID NO: 500403 - DNA, 15 bp, Homo sapiens
cggcgcggagcgacc

SEQ ID NO: 500404 - DNA, 15 bp, Homo sapiens
ggcgcggagcgaccg

SEQ ID NO: 500405 - DNA, 15 bp, Homo sapiens
gcgcggagcgaccgc

SEQ ID NO: 500406 - DNA, 15 bp, Homo sapiens
cgcggagcgaccgcg

SEQ ID NO: 500407 - DNA, 15 bp, Homo sapiens
gcggagcgaccgcgc

SEQ ID NO: 500408 - DNA, 15 bp, Homo sapiens
cggagcgaccgcgcg

SEQ ID NO: 500409 - DNA, 15 bp, Homo sapiens
ggagcgaccgcgcgc

SEQ ID NO: 500410 - DNA, 15 bp, Homo sapiens
gagcgaccgcgcgcg

SEQ ID NO: 500411 - DNA, 15 bp, Homo sapiens
agcgaccgcgcgcgg

SEQ ID NO: 500412 - DNA, 15 bp, Homo sapiens
gcgaccgcgcgcgga

SEQ ID NO: 500413 - DNA, 15 bp, Homo sapiens
cgaccgcgcgcggac

SEQ ID NO: 500414 - DNA, 15 bp, Homo sapiens
gaccgcgcgcggacc

SEQ ID NO: 500415 - DNA, 15 bp, Homo sapiens
accgcgcgcggacca

SEQ ID NO: 500416 - DNA, 15 bp, Homo sapiens
ccgcgcgcggaccaa

SEQ ID NO: 500417 - DNA, 15 bp, Homo sapiens
cgcgcgcggaccaat

SEQ ID NO: 500418 - DNA, 15 bp, Homo sapiens
gcgcgcggaccaatt

SEQ ID NO: 500419 - DNA, 15 bp, Homo sapiens
cgcgcggaccaattg

SEQ ID NO: 500420 - DNA, 15 bp, Homo sapiens
gcgcggaccaattgg

SEQ ID NO: 500421 - DNA, 15 bp, Homo sapiens
cgcggaccaattggg

SEQ ID NO: 500422 - DNA, 15 bp, Homo sapiens
gcggaccaattggga

SEQ ID NO: 500423 - DNA, 15 bp, Homo sapiens
cggaccaattgggaa

SEQ ID NO: 500424 - DNA, 15 bp, Homo sapiens
ggaccaattgggaac

SEQ ID NO: 500425 - DNA, 15 bp, Homo sapiens
gaccaattgggaacg

SEQ ID NO: 500426 - DNA, 15 bp, Homo sapiens
accaattgggaacgc

SEQ ID NO: 500427 - DNA, 15 bp, Homo sapiens
ccaattgggaacgcg

SEQ ID NO: 500428 - DNA, 15 bp, Homo sapiens
caattgggaacgcgg

SEQ ID NO: 500429 - DNA, 15 bp, Homo sapiens
aattgggaacgcggg

SEQ ID NO: 500430 - DNA, 15 bp, Homo sapiens
attgggaacgcgggc

SEQ ID NO: 500431 - DNA, 15 bp, Homo sapiens
ttgggaacgcgggca

SEQ ID NO: 500432 - DNA, 15 bp, Homo sapiens
tgggaacgcgggcac

SEQ ID NO: 500433 - DNA, 15 bp, Homo sapiens
gggaacgcgggcacc

SEQ ID NO: 500434 - DNA, 15 bp, Homo sapiens
ggaacgcgggcaccc

SEQ ID NO: 500435 - DNA, 15 bp, Homo sapiens
gaacgcgggcacccg

SEQ ID NO: 500436 - DNA, 15 bp, Homo sapiens
aacgcgggcacccgg

SEQ ID NO: 500437 - DNA, 15 bp, Homo sapiens
acgcgggcacccggc

SEQ ID NO: 500438 - DNA, 15 bp, Homo sapiens
cgcgggcacccggcg

SEQ ID NO: 500439 - DNA, 15 bp, Homo sapiens
gcgggcacccggcgc

SEQ ID NO: 500440 - DNA, 15 bp, Homo sapiens
cgggcacccggcgcc

SEQ ID NO: 500441 - DNA, 15 bp, Homo sapiens
gggcacccggcgcca

SEQ ID NO: 500442 - DNA, 15 bp, Homo sapiens
ggcacccggcgccag

SEQ ID NO: 500443 - DNA, 15 bp, Homo sapiens
gcacccggcgccagc

SEQ ID NO: 500444 - DNA, 15 bp, Homo sapiens
cacccggcgccagcg

SEQ ID NO: 500445 - DNA, 15 bp, Homo sapiens
acccggcgccagcgg

SEQ ID NO: 500446 - DNA, 15 bp, Homo sapiens
cccggcgccagcggc

SEQ ID NO: 500447 - DNA, 15 bp, Homo sapiens
ccggcgccagcggcg

SEQ ID NO: 500448 - DNA, 15 bp, Homo sapiens
cggcgccagcggcgc

SEQ ID NO: 500449 - DNA, 15 bp, Homo sapiens
ggcgccagcggcgcg

SEQ ID NO: 500450 - DNA, 15 bp, Homo sapiens
gcgccagcggcgcgg

SEQ ID NO: 500451 - DNA, 15 bp, Homo sapiens
cgccagcggcgcggg

SEQ ID NO: 500452 - DNA, 15 bp, Homo sapiens
gccagcggcgcgggg

SEQ ID NO: 500453 - DNA, 15 bp, Homo sapiens
ccagcggcgcgggga

SEQ ID NO: 500454 - DNA, 15 bp, Homo sapiens
cagcggcgcggggag

SEQ ID NO: 500455 - DNA, 15 bp, Homo sapiens
agcggcgcggggagg

SEQ ID NO: 500456 - DNA, 15 bp, Homo sapiens
gcggcgcggggaggt

SEQ ID NO: 500457 - DNA, 15 bp, Homo sapiens
cggcgcggggaggtc

SEQ ID NO: 500458 - DNA, 15 bp, Homo sapiens
ggcgcggggaggtcg

SEQ ID NO: 500459 - DNA, 15 bp, Homo sapiens
gcgcggggaggtcgg

SEQ ID NO: 500460 - DNA, 15 bp, Homo sapiens
cgcggggaggtcggc

SEQ ID NO: 500461 - DNA, 15 bp, Homo sapiens
gcggggaggtcggcg

SEQ ID NO: 500462 - DNA, 15 bp, Homo sapiens
cggggaggtcggcgg

SEQ ID NO: 500463 - DNA, 15 bp, Homo sapiens
ggggaggtcggcggt

SEQ ID NO: 500464 - DNA, 15 bp, Homo sapiens
gggaggtcggcggtg

SEQ ID NO: 500465 - DNA, 15 bp, Homo sapiens
ggaggtcggcggtgc

SEQ ID NO: 500466 - DNA, 15 bp, Homo sapiens
gaggtcggcggtgcc

SEQ ID NO: 500467 - DNA, 15 bp, Homo sapiens
aggtcggcggtgccg

SEQ ID NO: 500468 - DNA, 15 bp, Homo sapiens
ggtcggcggtgccgg

SEQ ID NO: 500469 - DNA, 15 bp, Homo sapiens
gtcggcggtgccggc

SEQ ID NO: 500470 - DNA, 15 bp, Homo sapiens
tcggcggtgccggcg

SEQ ID NO: 500471 - DNA, 15 bp, Homo sapiens
cggcggtgccggcgg

SEQ ID NO: 500472 - DNA, 15 bp, Homo sapiens
ggcggtgccggcggc

SEQ ID NO: 500473 - DNA, 15 bp, Homo sapiens
gcggtgccggcggcg

SEQ ID NO: 500474 - DNA, 15 bp, Homo sapiens
cggtgccggcggcgg

SEQ ID NO: 500475 - DNA, 15 bp, Homo sapiens
ggtgccggcggcggc

SEQ ID NO: 500476 - DNA, 15 bp, Homo sapiens
gtgccggcggcggcg

SEQ ID NO: 500477 - DNA, 15 bp, Homo sapiens
tgccggcggcggcgg

SEQ ID NO: 500478 - DNA, 15 bp, Homo sapiens
gccggcggcggcggg

SEQ ID NO: 500479 - DNA, 15 bp, Homo sapiens
ccggcggcggcgggc

SEQ ID NO: 500480 - DNA, 15 bp, Homo sapiens
cggcggcggcgggcg

SEQ ID NO: 500481 - DNA, 15 bp, Homo sapiens
ggcggcggcgggcgc

SEQ ID NO: 500482 - DNA, 15 bp, Homo sapiens
gcggcggcgggcgca

SEQ ID NO: 500483 - DNA, 15 bp, Homo sapiens
cggcggcgggcgcag

SEQ ID NO: 500484 - DNA, 15 bp, Homo sapiens
ggcggcgggcgcaga

SEQ ID NO: 500485 - DNA, 15 bp, Homo sapiens
gcggcgggcgcagag

SEQ ID NO: 500486 - DNA, 15 bp, Homo sapiens
cggcgggcgcagagc

SEQ ID NO: 500487 - DNA, 15 bp, Homo sapiens
ggcgggcgcagagcg

SEQ ID NO: 500488 - DNA, 15 bp, Homo sapiens
gcgggcgcagagcgc

SEQ ID NO: 500489 - DNA, 15 bp, Homo sapiens
cgggcgcagagcgcg

SEQ ID NO: 500490 - DNA, 15 bp, Homo sapiens
gggcgcagagcgcga

SEQ ID NO: 500491 - DNA, 15 bp, Homo sapiens
ggcgcagagcgcgag

SEQ ID NO: 500492 - DNA, 15 bp, Homo sapiens
gcgcagagcgcgagg

SEQ ID NO: 500493 - DNA, 15 bp, Homo sapiens
cgcagagcgcgaggg

SEQ ID NO: 500494 - DNA, 15 bp, Homo sapiens
gcagagcgcgagggg

SEQ ID NO: 500495 - DNA, 15 bp, Homo sapiens
cagagcgcgagggga

SEQ ID NO: 500496 - DNA, 15 bp, Homo sapiens
agagcgcgaggggag

SEQ ID NO: 500497 - DNA, 15 bp, Homo sapiens
gagcgcgaggggagg

SEQ ID NO: 500498 - DNA, 15 bp, Homo sapiens
agcgcgaggggagga

SEQ ID NO: 500499 - DNA, 15 bp, Homo sapiens
gcgcgaggggaggag

SEQ ID NO: 500500 - DNA, 15 bp, Homo sapiens
cgcgaggggaggagc

SEQ ID NO: 500501 - DNA, 15 bp, Homo sapiens
gcgaggggaggagcg

SEQ ID NO: 500502 - DNA, 15 bp, Homo sapiens
cgaggggaggagcgg

SEQ ID NO: 500503 - DNA, 15 bp, Homo sapiens
gaggggaggagcggg

SEQ ID NO: 500504 - DNA, 15 bp, Homo sapiens
aggggaggagcggga

SEQ ID NO: 500505 - DNA, 15 bp, Homo sapiens
ggggaggagcgggag

SEQ ID NO: 500506 - DNA, 15 bp, Homo sapiens
gggaggagcgggagg

SEQ ID NO: 500507 - DNA, 15 bp, Homo sapiens
ggaggagcgggagga

SEQ ID NO: 500508 - DNA, 15 bp, Homo sapiens
gaggagcgggaggag

SEQ ID NO: 500509 - DNA, 15 bp, Homo sapiens
aggagcgggaggagg

SEQ ID NO: 500510 - DNA, 15 bp, Homo sapiens
ggagcgggaggaggc

SEQ ID NO: 500511 - DNA, 15 bp, Homo sapiens
gagcgggaggaggcg

SEQ ID NO: 500512 - DNA, 15 bp, Homo sapiens
agcgggaggaggcgg

SEQ ID NO: 500513 - DNA, 15 bp, Homo sapiens
gcgggaggaggcgga

SEQ ID NO: 500514 - DNA, 15 bp, Homo sapiens
cgggaggaggcggag

SEQ ID NO: 500515 - DNA, 15 bp, Homo sapiens
gggaggaggcggagg

SEQ ID NO: 500516 - DNA, 15 bp, Homo sapiens
ggaggaggcggagga

SEQ ID NO: 500517 - DNA, 15 bp, Homo sapiens
gaggaggcggaggat

SEQ ID NO: 500518 - DNA, 15 bp, Homo sapiens
aggaggcggaggatg

SEQ ID NO: 500519 - DNA, 15 bp, Homo sapiens
ggaggcggaggatgt

SEQ ID NO: 500520 - DNA, 15 bp, Homo sapiens
gaggcggaggatgtt

SEQ ID NO: 500521 - DNA, 15 bp, Homo sapiens
aggcggaggatgttc

SEQ ID NO: 500522 - DNA, 15 bp, Homo sapiens
ggcggaggatgttcc

SEQ ID NO: 500523 - DNA, 15 bp, Homo sapiens
gcggaggatgttccc

SEQ ID NO: 500524 - DNA, 15 bp, Homo sapiens
cggaggatgttcccg

SEQ ID NO: 500525 - DNA, 15 bp, Homo sapiens
ggaggatgttcccgg

SEQ ID NO: 500526 - DNA, 15 bp, Homo sapiens
gaggatgttcccggc

SEQ ID NO: 500527 - DNA, 15 bp, Homo sapiens
aggatgttcccggcg

SEQ ID NO: 500528 - DNA, 15 bp, Homo sapiens
ggatgttcccggcgg

SEQ ID NO: 500529 - DNA, 15 bp, Homo sapiens
gatgttcccggcggc

SEQ ID NO: 500530 - DNA, 15 bp, Homo sapiens
atgttcccggcggct

SEQ ID NO: 500531 - DNA, 15 bp, Homo sapiens
tgttcccggcggctg

SEQ ID NO: 500532 - DNA, 15 bp, Homo sapiens
gttcccggcggctgc

SEQ ID NO: 500533 - DNA, 15 bp, Homo sapiens
ttcccggcggctgcg

SEQ ID NO: 500534 - DNA, 15 bp, Homo sapiens
tcccggcggctgcgg

SEQ ID NO: 500535 - DNA, 15 bp, Homo sapiens
cccggcggctgcggc

SEQ ID NO: 500536 - DNA, 15 bp, Homo sapiens
ccggcggctgcggcc

SEQ ID NO: 500537 - DNA, 15 bp, Homo sapiens
cggcggctgcggccg

SEQ ID NO: 500538 - DNA, 15 bp, Homo sapiens
ggcggctgcggccgg

SEQ ID NO: 500539 - DNA, 15 bp, Homo sapiens
gcggctgcggccggg

SEQ ID NO: 500540 - DNA, 15 bp, Homo sapiens
cggctgcggccgggg

SEQ ID NO: 500541 - DNA, 15 bp, Homo sapiens
ggctgcggccggggc

SEQ ID NO: 500542 - DNA, 15 bp, Homo sapiens
gctgcggccggggca

SEQ ID NO: 500543 - DNA, 15 bp, Homo sapiens
ctgcggccggggcag

SEQ ID NO: 500544 - DNA, 15 bp, Homo sapiens
tgcggccggggcagc

SEQ ID NO: 500545 - DNA, 15 bp, Homo sapiens
gcggccggggcagcg

SEQ ID NO: 500546 - DNA, 15 bp, Homo sapiens
cggccggggcagcgc

SEQ ID NO: 500547 - DNA, 15 bp, Homo sapiens
ggccggggcagcgcg

SEQ ID NO: 500548 - DNA, 15 bp, Homo sapiens
gccggggcagcgcgg

SEQ ID NO: 500549 - DNA, 15 bp, Homo sapiens
ccggggcagcgcggg

SEQ ID NO: 500550 - DNA, 15 bp, Homo sapiens
cggggcagcgcgggc

SEQ ID NO: 500551 - DNA, 15 bp, Homo sapiens
ggggcagcgcgggcc

SEQ ID NO: 500552 - DNA, 15 bp, Homo sapiens
gggcagcgcgggcca

SEQ ID NO: 500553 - DNA, 15 bp, Homo sapiens
ggcagcgcgggccag

SEQ ID NO: 500554 - DNA, 15 bp, Homo sapiens
gcagcgcgggccaga

SEQ ID NO: 500555 - DNA, 15 bp, Homo sapiens
cagcgcgggccagag

SEQ ID NO: 500556 - DNA, 15 bp, Homo sapiens
agcgcgggccagagg

SEQ ID NO: 500557 - DNA, 15 bp, Homo sapiens
gcgcgggccagaggc

SEQ ID NO: 500558 - DNA, 15 bp, Homo sapiens
cgcgggccagaggcg

SEQ ID NO: 500559 - DNA, 15 bp, Homo sapiens
gcgggccagaggcgc

SEQ ID NO: 500560 - DNA, 15 bp, Homo sapiens
cgggccagaggcgcg

SEQ ID NO: 500561 - DNA, 15 bp, Homo sapiens
gggccagaggcgcgg

SEQ ID NO: 500562 - DNA, 15 bp, Homo sapiens
ggccagaggcgcggc

SEQ ID NO: 500563 - DNA, 15 bp, Homo sapiens
gccagaggcgcggcg

SEQ ID NO: 500564 - DNA, 15 bp, Homo sapiens
ccagaggcgcggcgt

SEQ ID NO: 500565 - DNA, 15 bp, Homo sapiens
cagaggcgcggcgtg

SEQ ID NO: 500566 - DNA, 15 bp, Homo sapiens
agaggcgcggcgtgc

SEQ ID NO: 500567 - DNA, 15 bp, Homo sapiens
gaggcgcggcgtgcg

SEQ ID NO: 500568 - DNA, 15 bp, Homo sapiens
aggcgcggcgtgcgg

SEQ ID NO: 500569 - DNA, 15 bp, Homo sapiens
ggcgcggcgtgcgga

SEQ ID NO: 500570 - DNA, 15 bp, Homo sapiens
gcgcggcgtgcggag

SEQ ID NO: 500571 - DNA, 15 bp, Homo sapiens
cgcggcgtgcggagc

SEQ ID NO: 500572 - DNA, 15 bp, Homo sapiens
gcggcgtgcggagcc

SEQ ID NO: 500573 - DNA, 15 bp, Homo sapiens
cggcgtgcggagccc

SEQ ID NO: 500574 - DNA, 15 bp, Homo sapiens
ggcgtgcggagccct

SEQ ID NO: 500575 - DNA, 15 bp, Homo sapiens
gcgtgcggagccctc

SEQ ID NO: 500576 - DNA, 15 bp, Homo sapiens
cgtgcggagccctcg

SEQ ID NO: 500577 - DNA, 15 bp, Homo sapiens
gtgcggagccctcgg

SEQ ID NO: 500578 - DNA, 15 bp, Homo sapiens
tgcggagccctcggc

SEQ ID NO: 500579 - DNA, 15 bp, Homo sapiens
gcggagccctcggct

SEQ ID NO: 500580 - DNA, 15 bp, Homo sapiens
cggagccctcggctg

SEQ ID NO: 500581 - DNA, 15 bp, Homo sapiens
ggagccctcggctgc

SEQ ID NO: 500582 - DNA, 15 bp, Homo sapiens
gagccctcggctgcc

SEQ ID NO: 500583 - DNA, 15 bp, Homo sapiens
agccctcggctgccc

SEQ ID NO: 500584 - DNA, 15 bp, Homo sapiens
gccctcggctgcccg

SEQ ID NO: 500585 - DNA, 15 bp, Homo sapiens
ccctcggctgcccgg

SEQ ID NO: 500586 - DNA, 15 bp, Homo sapiens
cctcggctgcccggc

SEQ ID NO: 500587 - DNA, 15 bp, Homo sapiens
ctcggctgcccggcg

SEQ ID NO: 500588 - DNA, 15 bp, Homo sapiens
tcggctgcccggcgg

SEQ ID NO: 500589 - DNA, 15 bp, Homo sapiens
cggctgcccggcgga

SEQ ID NO: 500590 - DNA, 15 bp, Homo sapiens
ggctgcccggcggag

SEQ ID NO: 500591 - DNA, 15 bp, Homo sapiens
gctgcccggcggagc

SEQ ID NO: 500592 - DNA, 15 bp, Homo sapiens
ctgcccggcggagcg

SEQ ID NO: 500593 - DNA, 15 bp, Homo sapiens
tgcccggcggagcgc

SEQ ID NO: 500594 - DNA, 15 bp, Homo sapiens
gcccggcggagcgcg

SEQ ID NO: 500595 - DNA, 15 bp, Homo sapiens
cccggcggagcgcgg

SEQ ID NO: 500596 - DNA, 15 bp, Homo sapiens
ccggcggagcgcggc

SEQ ID NO: 500597 - DNA, 15 bp, Homo sapiens
cggcggagcgcggcg

SEQ ID NO: 500598 - DNA, 15 bp, Homo sapiens
ggcggagcgcggcgg

SEQ ID NO: 500599 - DNA, 15 bp, Homo sapiens
gcggagcgcggcggc

SEQ ID NO: 500600 - DNA, 15 bp, Homo sapiens
cggagcgcggcggcg

SEQ ID NO: 500601 - DNA, 15 bp, Homo sapiens
ggagcgcggcggcgg

SEQ ID NO: 500602 - DNA, 15 bp, Homo sapiens
gagcgcggcggcggg

SEQ ID NO: 500603 - DNA, 15 bp, Homo sapiens
agcgcggcggcgggc

SEQ ID NO: 500604 - DNA, 15 bp, Homo sapiens
gcgcggcggcgggct

SEQ ID NO: 500605 - DNA, 15 bp, Homo sapiens
cgcggcggcgggctg

SEQ ID NO: 500606 - DNA, 15 bp, Homo sapiens
gcggcggcgggctgg

SEQ ID NO: 500607 - DNA, 15 bp, Homo sapiens
cggcggcgggctggc

SEQ ID NO: 500608 - DNA, 15 bp, Homo sapiens
ggcggcgggctggcg

SEQ ID NO: 500609 - DNA, 15 bp, Homo sapiens
gcggcgggctggcgg

SEQ ID NO: 500610 - DNA, 15 bp, Homo sapiens
cggcgggctggcggg

SEQ ID NO: 500611 - DNA, 15 bp, Homo sapiens
ggcgggctggcggga

SEQ ID NO: 500612 - DNA, 15 bp, Homo sapiens
gcgggctggcgggaa

SEQ ID NO: 500613 - DNA, 15 bp, Homo sapiens
cgggctggcgggaag

SEQ ID NO: 500614 - DNA, 15 bp, Homo sapiens
gggctggcgggaagg

SEQ ID NO: 500615 - DNA, 15 bp, Homo sapiens
ggctggcgggaaggc

SEQ ID NO: 500616 - DNA, 15 bp, Homo sapiens
gctggcgggaaggcg

SEQ ID NO: 500617 - DNA, 15 bp, Homo sapiens
ctggcgggaaggcgc

SEQ ID NO: 500618 - DNA, 15 bp, Homo sapiens
tggcgggaaggcgcg

SEQ ID NO: 500619 - DNA, 15 bp, Homo sapiens
ggcgggaaggcgcgg

SEQ ID NO: 500620 - DNA, 15 bp, Homo sapiens
gcgggaaggcgcggg

SEQ ID NO: 500621 - DNA, 15 bp, Homo sapiens
cgggaaggcgcgggc

SEQ ID NO: 500622 - DNA, 15 bp, Homo sapiens
gggaaggcgcgggct

SEQ ID NO: 500623 - DNA, 15 bp, Homo sapiens
ggaaggcgcgggctt

SEQ ID NO: 500624 - DNA, 15 bp, Homo sapiens
gaaggcgcgggcttt

SEQ ID NO: 500625 - DNA, 15 bp, Homo sapiens
aaggcgcgggctttg

SEQ ID NO: 500626 - DNA, 15 bp, Homo sapiens
aggcgcgggctttgc

SEQ ID NO: 500627 - DNA, 15 bp, Homo sapiens
ggcgcgggctttgcg

SEQ ID NO: 500628 - DNA, 15 bp, Homo sapiens
gcgcgggctttgcgc

SEQ ID NO: 500629 - DNA, 15 bp, Homo sapiens
cgcgggctttgcgct

SEQ ID NO: 500630 - DNA, 15 bp, Homo sapiens
gcgggctttgcgctg

SEQ ID NO: 500631 - DNA, 15 bp, Homo sapiens
cgggctttgcgctgc

SEQ ID NO: 500632 - DNA, 15 bp, Homo sapiens
gggctttgcgctgcg

SEQ ID NO: 500633 - DNA, 15 bp, Homo sapiens
ggctttgcgctgcgc

SEQ ID NO: 500634 - DNA, 15 bp, Homo sapiens
gctttgcgctgcgcc

SEQ ID NO: 500635 - DNA, 15 bp, Homo sapiens
ctttgcgctgcgccg

SEQ ID NO: 500636 - DNA, 15 bp, Homo sapiens
tttgcgctgcgccgg

SEQ ID NO: 500637 - DNA, 15 bp, Homo sapiens
ttgcgctgcgccggg

SEQ ID NO: 500638 - DNA, 15 bp, Homo sapiens
tgcgctgcgccgggg

SEQ ID NO: 500639 - DNA, 15 bp, Homo sapiens
gcgctgcgccgggga

SEQ ID NO: 500640 - DNA, 15 bp, Homo sapiens
cgctgcgccggggac

SEQ ID NO: 500641 - DNA, 15 bp, Homo sapiens
gctgcgccggggact

SEQ ID NO: 500642 - DNA, 15 bp, Homo sapiens
ctgcgccggggactc

SEQ ID NO: 500643 - DNA, 15 bp, Homo sapiens
tgcgccggggactct

SEQ ID NO: 500644 - DNA, 15 bp, Homo sapiens
gcgccggggactctg

SEQ ID NO: 500645 - DNA, 15 bp, Homo sapiens
cgccggggactctga

SEQ ID NO: 500646 - DNA, 15 bp, Homo sapiens
gccggggactctgaa

SEQ ID NO: 500647 - DNA, 15 bp, Homo sapiens
ccggggactctgaac

SEQ ID NO: 500648 - DNA, 15 bp, Homo sapiens
cggggactctgaacc

SEQ ID NO: 500649 - DNA, 15 bp, Homo sapiens
ggggactctgaaccc

SEQ ID NO: 500650 - DNA, 15 bp, Homo sapiens
gggactctgaacccg

SEQ ID NO: 500651 - DNA, 15 bp, Homo sapiens
ggactctgaacccga

SEQ ID NO: 500652 - DNA, 15 bp, Homo sapiens
gactctgaacccgag

SEQ ID NO: 500653 - DNA, 15 bp, Homo sapiens
actctgaacccgagt

SEQ ID NO: 500654 - DNA, 15 bp, Homo sapiens
ctctgaacccgagtc

SEQ ID NO: 500655 - DNA, 15 bp, Homo sapiens
tctgaacccgagtcc

SEQ ID NO: 500656 - DNA, 15 bp, Homo sapiens
ctgaacccgagtccc

SEQ ID NO: 500657 - DNA, 15 bp, Homo sapiens
tgaacccgagtcccg

SEQ ID NO: 500658 - DNA, 15 bp, Homo sapiens
gaacccgagtcccgg

SEQ ID NO: 500659 - DNA, 15 bp, Homo sapiens
aacccgagtcccggg

SEQ ID NO: 500660 - DNA, 15 bp, Homo sapiens
acccgagtcccgggc

SEQ ID NO: 500661 - DNA, 15 bp, Homo sapiens
cccgagtcccgggct

SEQ ID NO: 500662 - DNA, 15 bp, Homo sapiens
ccgagtcccgggctt

SEQ ID NO: 500663 - DNA, 15 bp, Homo sapiens
cgagtcccgggcttt

SEQ ID NO: 500664 - DNA, 15 bp, Homo sapiens
gagtcccgggctttg

SEQ ID NO: 500665 - DNA, 15 bp, Homo sapiens
agtcccgggctttgt

SEQ ID NO: 500666 - DNA, 15 bp, Homo sapiens
gtcccgggctttgtc

SEQ ID NO: 500667 - DNA, 15 bp, Homo sapiens
tcccgggctttgtct

SEQ ID NO: 500668 - DNA, 15 bp, Homo sapiens
cccgggctttgtctc

SEQ ID NO: 500669 - DNA, 15 bp, Homo sapiens
ccgggctttgtctcc

SEQ ID NO: 500670 - DNA, 15 bp, Homo sapiens
cgggctttgtctcct

SEQ ID NO: 500671 - DNA, 15 bp, Homo sapiens
gggctttgtctcctg

SEQ ID NO: 500672 - DNA, 15 bp, Homo sapiens
ggctttgtctcctgc

SEQ ID NO: 500673 - DNA, 15 bp, Homo sapiens
gctttgtctcctgcg

SEQ ID NO: 500674 - DNA, 15 bp, Homo sapiens
ctttgtctcctgcgc

SEQ ID NO: 500675 - DNA, 15 bp, Homo sapiens
tttgtctcctgcgct

SEQ ID NO: 500676 - DNA, 15 bp, Homo sapiens
ttgtctcctgcgctg

SEQ ID NO: 500677 - DNA, 15 bp, Homo sapiens
tgtctcctgcgctgc

SEQ ID NO: 500678 - DNA, 15 bp, Homo sapiens
gtctcctgcgctgct

SEQ ID NO: 500679 - DNA, 15 bp, Homo sapiens
tctcctgcgctgctt

SEQ ID NO: 500680 - DNA, 15 bp, Homo sapiens
ctcctgcgctgcttt

SEQ ID NO: 500681 - DNA, 15 bp, Homo sapiens
tcctgcgctgctttc

SEQ ID NO: 500682 - DNA, 15 bp, Homo sapiens
cctgcgctgctttcg

SEQ ID NO: 500683 - DNA, 15 bp, Homo sapiens
ctgcgctgctttcgt

SEQ ID NO: 500684 - DNA, 15 bp, Homo sapiens
tgcgctgctttcgtg

SEQ ID NO: 500685 - DNA, 15 bp, Homo sapiens
gcgctgctttcgtgg

SEQ ID NO: 500686 - DNA, 15 bp, Homo sapiens
cgctgctttcgtggt

SEQ ID NO: 500687 - DNA, 15 bp, Homo sapiens
gctgctttcgtggtg

SEQ ID NO: 500688 - DNA, 15 bp, Homo sapiens
ctgctttcgtggtga

SEQ ID NO: 500689 - DNA, 15 bp, Homo sapiens
tgctttcgtggtgac

SEQ ID NO: 500690 - DNA, 15 bp, Homo sapiens
gctttcgtggtgacg

SEQ ID NO: 500691 - DNA, 15 bp, Homo sapiens
ctttcgtggtgacgg

SEQ ID NO: 500692 - DNA, 15 bp, Homo sapiens
tttcgtggtgacggt

SEQ ID NO: 500693 - DNA, 15 bp, Homo sapiens
ttcgtggtgacggtc

SEQ ID NO: 500694 - DNA, 15 bp, Homo sapiens
tcgtggtgacggtca

SEQ ID NO: 500695 - DNA, 15 bp, Homo sapiens
cgtggtgacggtcag

SEQ ID NO: 500696 - DNA, 15 bp, Homo sapiens
gtggtgacggtcagg

SEQ ID NO: 500697 - DNA, 15 bp, Homo sapiens
tggtgacggtcaggg

SEQ ID NO: 500698 - DNA, 15 bp, Homo sapiens
ggtgacggtcagggg

SEQ ID NO: 500699 - DNA, 15 bp, Homo sapiens
gtgacggtcaggggg

SEQ ID NO: 500700 - DNA, 15 bp, Homo sapiens
tgacggtcagggggc

SEQ ID NO: 500701 - DNA, 15 bp, Homo sapiens
gacggtcagggggcg

SEQ ID NO: 500702 - DNA, 15 bp, Homo sapiens
acggtcagggggcgc

SEQ ID NO: 500703 - DNA, 15 bp, Homo sapiens
cggtcagggggcgcc

SEQ ID NO: 500704 - DNA, 15 bp, Homo sapiens
ggtcagggggcgccc

SEQ ID NO: 500705 - DNA, 15 bp, Homo sapiens
gtcagggggcgcccg

SEQ ID NO: 500706 - DNA, 15 bp, Homo sapiens
tcagggggcgcccgg

SEQ ID NO: 500707 - DNA, 15 bp, Homo sapiens
cagggggcgcccggt

SEQ ID NO: 500708 - DNA, 15 bp, Homo sapiens
agggggcgcccggtc

SEQ ID NO: 500709 - DNA, 15 bp, Homo sapiens
gggggcgcccggtcg

SEQ ID NO: 500710 - DNA, 15 bp, Homo sapiens
ggggcgcccggtcgg

SEQ ID NO: 500711 - DNA, 15 bp, Homo sapiens
gggcgcccggtcggc

SEQ ID NO: 500712 - DNA, 15 bp, Homo sapiens
ggcgcccggtcggcg

SEQ ID NO: 500713 - DNA, 15 bp, Homo sapiens
gcgcccggtcggcga

SEQ ID NO: 500714 - DNA, 15 bp, Homo sapiens
cgcccggtcggcgaa

SEQ ID NO: 500715 - DNA, 15 bp, Homo sapiens
gcccggtcggcgaag

SEQ ID NO: 500716 - DNA, 15 bp, Homo sapiens
cccggtcggcgaagg

SEQ ID NO: 500717 - DNA, 15 bp, Homo sapiens
ccggtcggcgaaggg

SEQ ID NO: 500718 - DNA, 15 bp, Homo sapiens
cggtcggcgaagggc

SEQ ID NO: 500719 - DNA, 15 bp, Homo sapiens
ggtcggcgaagggcg

SEQ ID NO: 500720 - DNA, 15 bp, Homo sapiens
gtcggcgaagggcgc

SEQ ID NO: 500721 - DNA, 15 bp, Homo sapiens
tcggcgaagggcgcg

SEQ ID NO: 500722 - DNA, 15 bp, Homo sapiens
cggcgaagggcgcgg

SEQ ID NO: 500723 - DNA, 15 bp, Homo sapiens
ggcgaagggcgcggg

SEQ ID NO: 500724 - DNA, 15 bp, Homo sapiens
gcgaagggcgcgggc

SEQ ID NO: 500725 - DNA, 15 bp, Homo sapiens
cgaagggcgcgggcc

SEQ ID NO: 500726 - DNA, 15 bp, Homo sapiens
gaagggcgcgggccg

SEQ ID NO: 500727 - DNA, 15 bp, Homo sapiens
aagggcgcgggccgg

SEQ ID NO: 500728 - DNA, 15 bp, Homo sapiens
agggcgcgggccgga

SEQ ID NO: 500729 - DNA, 15 bp, Homo sapiens
gggcgcgggccggac

SEQ ID NO: 500730 - DNA, 15 bp, Homo sapiens
ggcgcgggccggacg

SEQ ID NO: 500731 - DNA, 15 bp, Homo sapiens
gcgcgggccggacgc

SEQ ID NO: 500732 - DNA, 15 bp, Homo sapiens
cgcgggccggacgcc

SEQ ID NO: 500733 - DNA, 15 bp, Homo sapiens
gcgggccggacgccg

SEQ ID NO: 500734 - DNA, 15 bp, Homo sapiens
cgggccggacgccgc

SEQ ID NO: 500735 - DNA, 15 bp, Homo sapiens
gggccggacgccgcg

SEQ ID NO: 500736 - DNA, 15 bp, Homo sapiens
ggccggacgccgcgg

SEQ ID NO: 500737 - DNA, 15 bp, Homo sapiens
gccggacgccgcggg

SEQ ID NO: 500738 - DNA, 15 bp, Homo sapiens
ccggacgccgcgggg

SEQ ID NO: 500739 - DNA, 15 bp, Homo sapiens
cggacgccgcggggc

SEQ ID NO: 500740 - DNA, 15 bp, Homo sapiens
ggacgccgcggggct

SEQ ID NO: 500741 - DNA, 15 bp, Homo sapiens
gacgccgcggggctt

SEQ ID NO: 500742 - DNA, 15 bp, Homo sapiens
acgccgcggggcttg

SEQ ID NO: 500743 - DNA, 15 bp, Homo sapiens
cgccgcggggcttgg

SEQ ID NO: 500744 - DNA, 15 bp, Homo sapiens
gccgcggggcttggt

SEQ ID NO: 500745 - DNA, 15 bp, Homo sapiens
ccgcggggcttggtc

SEQ ID NO: 500746 - DNA, 15 bp, Homo sapiens
cgcggggcttggtcc

SEQ ID NO: 500747 - DNA, 15 bp, Homo sapiens
gcggggcttggtccc

SEQ ID NO: 500748 - DNA, 15 bp, Homo sapiens
cggggcttggtccct

SEQ ID NO: 500749 - DNA, 15 bp, Homo sapiens
ggggcttggtccctg

SEQ ID NO: 500750 - DNA, 15 bp, Homo sapiens
gggcttggtccctgg

SEQ ID NO: 500751 - DNA, 15 bp, Homo sapiens
ggcttggtccctggc

SEQ ID NO: 500752 - DNA, 15 bp, Homo sapiens
gcttggtccctggcc

SEQ ID NO: 500753 - DNA, 15 bp, Homo sapiens
cttggtccctggccc

SEQ ID NO: 500754 - DNA, 15 bp, Homo sapiens
ttggtccctggcccg

SEQ ID NO: 500755 - DNA, 15 bp, Homo sapiens
tggtccctggcccgg

SEQ ID NO: 500756 - DNA, 15 bp, Homo sapiens
ggtccctggcccgga

SEQ ID NO: 500757 - DNA, 15 bp, Homo sapiens
gtccctggcccggac

SEQ ID NO: 500758 - DNA, 15 bp, Homo sapiens
tccctggcccggacg

SEQ ID NO: 500759 - DNA, 15 bp, Homo sapiens
ccctggcccggacgc

SEQ ID NO: 500760 - DNA, 15 bp, Homo sapiens
cctggcccggacgct

SEQ ID NO: 500761 - DNA, 15 bp, Homo sapiens
ctggcccggacgctg

SEQ ID NO: 500762 - DNA, 15 bp, Homo sapiens
tggcccggacgctgc

SEQ ID NO: 500763 - DNA, 15 bp, Homo sapiens
ggcccggacgctgcg

SEQ ID NO: 500764 - DNA, 15 bp, Homo sapiens
gcccggacgctgcgc

SEQ ID NO: 500765 - DNA, 15 bp, Homo sapiens
cccggacgctgcgct

SEQ ID NO: 500766 - DNA, 15 bp, Homo sapiens
ccggacgctgcgctc

SEQ ID NO: 500767 - DNA, 15 bp, Homo sapiens
cggacgctgcgctct

SEQ ID NO: 500768 - DNA, 15 bp, Homo sapiens
ggacgctgcgctctg

SEQ ID NO: 500769 - DNA, 15 bp, Homo sapiens
gacgctgcgctctga

SEQ ID NO: 500770 - DNA, 15 bp, Homo sapiens
acgctgcgctctgaa

SEQ ID NO: 500771 - DNA, 15 bp, Homo sapiens
cgctgcgctctgaag

SEQ ID NO: 500772 - DNA, 15 bp, Homo sapiens
gctgcgctctgaagg

SEQ ID NO: 500773 - DNA, 15 bp, Homo sapiens
ctgcgctctgaaggg

SEQ ID NO: 500774 - DNA, 15 bp, Homo sapiens
tgcgctctgaaggga

SEQ ID NO: 500775 - DNA, 15 bp, Homo sapiens
gcgctctgaagggaa

SEQ ID NO: 500776 - DNA, 15 bp, Homo sapiens
cgctctgaagggaag

SEQ ID NO: 500777 - DNA, 15 bp, Homo sapiens
gctctgaagggaagg

SEQ ID NO: 500778 - DNA, 15 bp, Homo sapiens
ctctgaagggaaggc

SEQ ID NO: 500779 - DNA, 15 bp, Homo sapiens
tctgaagggaaggcg

SEQ ID NO: 500780 - DNA, 15 bp, Homo sapiens
ctgaagggaaggcgc

SEQ ID NO: 500781 - DNA, 15 bp, Homo sapiens
tgaagggaaggcgcg

SEQ ID NO: 500782 - DNA, 15 bp, Homo sapiens
gaagggaaggcgcgg

SEQ ID NO: 500783 - DNA, 15 bp, Homo sapiens
aagggaaggcgcgga

SEQ ID NO: 500784 - DNA, 15 bp, Homo sapiens
agggaaggcgcggac

SEQ ID NO: 500785 - DNA, 15 bp, Homo sapiens
gggaaggcgcggacg

SEQ ID NO: 500786 - DNA, 15 bp, Homo sapiens
ggaaggcgcggacgt

SEQ ID NO: 500787 - DNA, 15 bp, Homo sapiens
gaaggcgcggacgtg

SEQ ID NO: 500788 - DNA, 15 bp, Homo sapiens
aaggcgcggacgtga

SEQ ID NO: 500789 - DNA, 15 bp, Homo sapiens
aggcgcggacgtgag

SEQ ID NO: 500790 - DNA, 15 bp, Homo sapiens
ggcgcggacgtgagt

SEQ ID NO: 500791 - DNA, 15 bp, Homo sapiens
gcgcggacgtgagtt

SEQ ID NO: 500792 - DNA, 15 bp, Homo sapiens
cgcggacgtgagttt

SEQ ID NO: 500793 - DNA, 15 bp, Homo sapiens
gcggacgtgagtttc

SEQ ID NO: 500794 - DNA, 15 bp, Homo sapiens
cggacgtgagtttcg

SEQ ID NO: 500795 - DNA, 15 bp, Homo sapiens
ggacgtgagtttcgg

SEQ ID NO: 500796 - DNA, 15 bp, Homo sapiens
gacgtgagtttcggt

SEQ ID NO: 500797 - DNA, 15 bp, Homo sapiens
acgtgagtttcggtg

SEQ ID NO: 500798 - DNA, 15 bp, Homo sapiens
cgtgagtttcggtgt

SEQ ID NO: 500799 - DNA, 15 bp, Homo sapiens
gtgagtttcggtgtg

SEQ ID NO: 500800 - DNA, 15 bp, Homo sapiens
tgagtttcggtgtga

SEQ ID NO: 500801 - DNA, 15 bp, Homo sapiens
gagtttcggtgtgat

SEQ ID NO: 500802 - DNA, 15 bp, Homo sapiens
agtttcggtgtgatt

SEQ ID NO: 500803 - DNA, 15 bp, Homo sapiens
gtttcggtgtgattg

SEQ ID NO: 500804 - DNA, 15 bp, Homo sapiens
tttcggtgtgattgc

SEQ ID NO: 500805 - DNA, 15 bp, Homo sapiens
ttcggtgtgattgcc

SEQ ID NO: 500806 - DNA, 15 bp, Homo sapiens
tcggtgtgattgcct

SEQ ID NO: 500807 - DNA, 15 bp, Homo sapiens
cggtgtgattgcctt

SEQ ID NO: 500808 - DNA, 15 bp, Homo sapiens
ggtgtgattgccttc

SEQ ID NO: 500809 - DNA, 15 bp, Homo sapiens
gtgtgattgccttct

SEQ ID NO: 500810 - DNA, 15 bp, Homo sapiens
tgtgattgccttctg

SEQ ID NO: 500811 - DNA, 15 bp, Homo sapiens
gtgattgccttctga

SEQ ID NO: 500812 - DNA, 15 bp, Homo sapiens
tgattgccttctgag

SEQ ID NO: 500813 - DNA, 15 bp, Homo sapiens
gattgccttctgagg

SEQ ID NO: 500814 - DNA, 15 bp, Homo sapiens
attgccttctgaggg

SEQ ID NO: 500815 - DNA, 15 bp, Homo sapiens
ttgccttctgagggg

SEQ ID NO: 500816 - DNA, 15 bp, Homo sapiens
tgccttctgagggga

SEQ ID NO: 500817 - DNA, 15 bp, Homo sapiens
gccttctgaggggag

SEQ ID NO: 500818 - DNA, 15 bp, Homo sapiens
ccttctgaggggagg

SEQ ID NO: 500819 - DNA, 15 bp, Homo sapiens
cttctgaggggaggg

SEQ ID NO: 500820 - DNA, 15 bp, Homo sapiens
ttctgaggggagggt

SEQ ID NO: 500821 - DNA, 15 bp, Homo sapiens
tctgaggggagggtc

SEQ ID NO: 500822 - DNA, 15 bp, Homo sapiens
ctgaggggagggtct

SEQ ID NO: 500823 - DNA, 15 bp, Homo sapiens
tgaggggagggtctg

SEQ ID NO: 500824 - DNA, 15 bp, Homo sapiens
gaggggagggtctgt

SEQ ID NO: 500825 - DNA, 15 bp, Homo sapiens
aggggagggtctgtg

SEQ ID NO: 500826 - DNA, 15 bp, Homo sapiens
ggggagggtctgtgg

SEQ ID NO: 500827 - DNA, 15 bp, Homo sapiens
gggagggtctgtggg

SEQ ID NO: 500828 - DNA, 15 bp, Homo sapiens
ggagggtctgtggga

SEQ ID NO: 500829 - DNA, 15 bp, Homo sapiens
gagggtctgtgggat

SEQ ID NO: 500830 - DNA, 15 bp, Homo sapiens
agggtctgtgggatg

SEQ ID NO: 500831 - DNA, 15 bp, Homo sapiens
gggtctgtgggatga

SEQ ID NO: 500832 - DNA, 15 bp, Homo sapiens
ggtctgtgggatgaa

SEQ ID NO: 500833 - DNA, 15 bp, Homo sapiens
gtctgtgggatgaag

SEQ ID NO: 500834 - DNA, 15 bp, Homo sapiens
tctgtgggatgaagg

SEQ ID NO: 500835 - DNA, 15 bp, Homo sapiens
ctgtgggatgaaggc

SEQ ID NO: 500836 - DNA, 15 bp, Homo sapiens
tgtgggatgaaggcg

SEQ ID NO: 500837 - DNA, 15 bp, Homo sapiens
gtgggatgaaggcgg

SEQ ID NO: 500838 - DNA, 15 bp, Homo sapiens
tgggatgaaggcggc

SEQ ID NO: 500839 - DNA, 15 bp, Homo sapiens
gggatgaaggcggcg

SEQ ID NO: 500840 - DNA, 15 bp, Homo sapiens
ggatgaaggcggcgc

SEQ ID NO: 500841 - DNA, 15 bp, Homo sapiens
gatgaaggcggcgcg

SEQ ID NO: 500842 - DNA, 15 bp, Homo sapiens
atgaaggcggcgcgg

SEQ ID NO: 500843 - DNA, 15 bp, Homo sapiens
tgaaggcggcgcggc

SEQ ID NO: 500844 - DNA, 15 bp, Homo sapiens
gaaggcggcgcggcg

SEQ ID NO: 500845 - DNA, 15 bp, Homo sapiens
aaggcggcgcggcgc

SEQ ID NO: 500846 - DNA, 15 bp, Homo sapiens
aggcggcgcggcgcg

SEQ ID NO: 500847 - DNA, 15 bp, Homo sapiens
ggcggcgcggcgcgc

SEQ ID NO: 500848 - DNA, 15 bp, Homo sapiens
gcggcgcggcgcgca

SEQ ID NO: 500849 - DNA, 15 bp, Homo sapiens
cggcgcggcgcgcac

SEQ ID NO: 500850 - DNA, 15 bp, Homo sapiens
ggcgcggcgcgcacc

SEQ ID NO: 500851 - DNA, 15 bp, Homo sapiens
gcgcggcgcgcaccg

SEQ ID NO: 500852 - DNA, 15 bp, Homo sapiens
cgcggcgcgcaccgg

SEQ ID NO: 500853 - DNA, 15 bp, Homo sapiens
gcggcgcgcaccggt

SEQ ID NO: 500854 - DNA, 15 bp, Homo sapiens
cggcgcgcaccggtg

SEQ ID NO: 500855 - DNA, 15 bp, Homo sapiens
ggcgcgcaccggtgt

SEQ ID NO: 500856 - DNA, 15 bp, Homo sapiens
gcgcgcaccggtgtc

SEQ ID NO: 500857 - DNA, 15 bp, Homo sapiens
cgcgcaccggtgtcg

SEQ ID NO: 500858 - DNA, 15 bp, Homo sapiens
gcgcaccggtgtcgc

SEQ ID NO: 500859 - DNA, 15 bp, Homo sapiens
cgcaccggtgtcgcc

SEQ ID NO: 500860 - DNA, 15 bp, Homo sapiens
gcaccggtgtcgcct

SEQ ID NO: 500861 - DNA, 15 bp, Homo sapiens
caccggtgtcgccta

SEQ ID NO: 500862 - DNA, 15 bp, Homo sapiens
accggtgtcgcctag

SEQ ID NO: 500863 - DNA, 15 bp, Homo sapiens
ccggtgtcgcctagc

SEQ ID NO: 500864 - DNA, 15 bp, Homo sapiens
cggtgtcgcctagcc

SEQ ID NO: 500865 - DNA, 15 bp, Homo sapiens
ggtgtcgcctagcct

SEQ ID NO: 500866 - DNA, 15 bp, Homo sapiens
gtgtcgcctagcctg

SEQ ID NO: 500867 - DNA, 15 bp, Homo sapiens
tgtcgcctagcctgc

SEQ ID NO: 500868 - DNA, 15 bp, Homo sapiens
gtcgcctagcctgcg

SEQ ID NO: 500869 - DNA, 15 bp, Homo sapiens
tcgcctagcctgcgg

SEQ ID NO: 500870 - DNA, 15 bp, Homo sapiens
cgcctagcctgcgga

SEQ ID NO: 500871 - DNA, 15 bp, Homo sapiens
gcctagcctgcggac

SEQ ID NO: 500872 - DNA, 15 bp, Homo sapiens
cctagcctgcggacc

SEQ ID NO: 500873 - DNA, 15 bp, Homo sapiens
ctagcctgcggacct

SEQ ID NO: 500874 - DNA, 15 bp, Homo sapiens
tagcctgcggaccta

SEQ ID NO: 500875 - DNA, 15 bp, Homo sapiens
agcctgcggacctag

SEQ ID NO: 500876 - DNA, 15 bp, Homo sapiens
gcctgcggacctagt

SEQ ID NO: 500877 - DNA, 15 bp, Homo sapiens
cctgcggacctagtt

SEQ ID NO: 500878 - DNA, 15 bp, Homo sapiens
ctgcggacctagttg

SEQ ID NO: 500879 - DNA, 15 bp, Homo sapiens
tgcggacctagttgt

SEQ ID NO: 500880 - DNA, 15 bp, Homo sapiens
gcggacctagttgta

SEQ ID NO: 500881 - DNA, 15 bp, Homo sapiens
cggacctagttgtag

SEQ ID NO: 500882 - DNA, 15 bp, Homo sapiens
ggacctagttgtaga

SEQ ID NO: 500883 - DNA, 15 bp, Homo sapiens
gacctagttgtagac

SEQ ID NO: 500884 - DNA, 15 bp, Homo sapiens
acctagttgtagacc

SEQ ID NO: 500885 - DNA, 15 bp, Homo sapiens
cctagttgtagacct

SEQ ID NO: 500886 - DNA, 15 bp, Homo sapiens
ctagttgtagacctt

SEQ ID NO: 500887 - DNA, 15 bp, Homo sapiens
tagttgtagaccttg

SEQ ID NO: 500888 - DNA, 15 bp, Homo sapiens
agttgtagaccttgc

SEQ ID NO: 500889 - DNA, 15 bp, Homo sapiens
gttgtagaccttgca

SEQ ID NO: 500890 - DNA, 15 bp, Homo sapiens
ttgtagaccttgcag

SEQ ID NO: 500891 - DNA, 15 bp, Homo sapiens
tgtagaccttgcagg

SEQ ID NO: 500892 - DNA, 15 bp, Homo sapiens
gtagaccttgcaggc

SEQ ID NO: 500893 - DNA, 15 bp, Homo sapiens
tagaccttgcaggcg

SEQ ID NO: 500894 - DNA, 15 bp, Homo sapiens
agaccttgcaggcgt

SEQ ID NO: 500895 - DNA, 15 bp, Homo sapiens
gaccttgcaggcgtt

SEQ ID NO: 500896 - DNA, 15 bp, Homo sapiens
accttgcaggcgttc

SEQ ID NO: 500897 - DNA, 15 bp, Homo sapiens
ccttgcaggcgttcg

SEQ ID NO: 500898 - DNA, 15 bp, Homo sapiens
cttgcaggcgttcgc

SEQ ID NO: 500899 - DNA, 15 bp, Homo sapiens
ttgcaggcgttcgct

SEQ ID NO: 500900 - DNA, 15 bp, Homo sapiens
tgcaggcgttcgctt

SEQ ID NO: 500901 - DNA, 15 bp, Homo sapiens
gcaggcgttcgcttc

SEQ ID NO: 500902 - DNA, 15 bp, Homo sapiens
caggcgttcgcttcg

SEQ ID NO: 500903 - DNA, 15 bp, Homo sapiens
aggcgttcgcttcgt

SEQ ID NO: 500904 - DNA, 15 bp, Homo sapiens
ggcgttcgcttcgtc

SEQ ID NO: 500905 - DNA, 15 bp, Homo sapiens
gcgttcgcttcgtcg

SEQ ID NO: 500906 - DNA, 15 bp, Homo sapiens
cgttcgcttcgtcgc

SEQ ID NO: 500907 - DNA, 15 bp, Homo sapiens
gttcgcttcgtcgcc

SEQ ID NO: 500908 - DNA, 15 bp, Homo sapiens
ttcgcttcgtcgccc

SEQ ID NO: 500909 - DNA, 15 bp, Homo sapiens
tcgcttcgtcgccct

SEQ ID NO: 500910 - DNA, 15 bp, Homo sapiens
cgcttcgtcgccctc

SEQ ID NO: 500911 - DNA, 15 bp, Homo sapiens
gcttcgtcgccctcc

SEQ ID NO: 500912 - DNA, 15 bp, Homo sapiens
cttcgtcgccctccg

SEQ ID NO: 500913 - DNA, 15 bp, Homo sapiens
ttcgtcgccctccgc

SEQ ID NO: 500914 - DNA, 15 bp, Homo sapiens
tcgtcgccctccgcc

SEQ ID NO: 500915 - DNA, 15 bp, Homo sapiens
cgtcgccctccgccg

SEQ ID NO: 500916 - DNA, 15 bp, Homo sapiens
gtcgccctccgccgc

SEQ ID NO: 500917 - DNA, 15 bp, Homo sapiens
tcgccctccgccgcc

SEQ ID NO: 500918 - DNA, 15 bp, Homo sapiens
cgccctccgccgccc

SEQ ID NO: 500919 - DNA, 15 bp, Homo sapiens
gccctccgccgcccc

SEQ ID NO: 500920 - DNA, 15 bp, Homo sapiens
ccctccgccgccccc

SEQ ID NO: 500921 - DNA, 15 bp, Homo sapiens
cctccgccgccccct

SEQ ID NO: 500922 - DNA, 15 bp, Homo sapiens
ctccgccgccccctc

SEQ ID NO: 500923 - DNA, 15 bp, Homo sapiens
tccgccgccccctcc

SEQ ID NO: 500924 - DNA, 15 bp, Homo sapiens
ccgccgccccctccc

SEQ ID NO: 500925 - DNA, 15 bp, Homo sapiens
cgccgccccctcccc

SEQ ID NO: 500926 - DNA, 15 bp, Homo sapiens
gccgccccctcccca

SEQ ID NO: 500927 - DNA, 15 bp, Homo sapiens
ccgccccctccccat

SEQ ID NO: 500928 - DNA, 15 bp, Homo sapiens
cgccccctccccatt

SEQ ID NO: 500929 - DNA, 15 bp, Homo sapiens
gccccctccccattt

SEQ ID NO: 500930 - DNA, 15 bp, Homo sapiens
ccccctccccattta

SEQ ID NO: 500931 - DNA, 15 bp, Homo sapiens
cccctccccatttag

SEQ ID NO: 500932 - DNA, 15 bp, Homo sapiens
ccctccccatttaga

SEQ ID NO: 500933 - DNA, 15 bp, Homo sapiens
cctccccatttagag

SEQ ID NO: 500934 - DNA, 15 bp, Homo sapiens
ctccccatttagaga

SEQ ID NO: 500935 - DNA, 15 bp, Homo sapiens
tccccatttagagat

SEQ ID NO: 500936 - DNA, 15 bp, Homo sapiens
ccccatttagagatg

SEQ ID NO: 500937 - DNA, 15 bp, Homo sapiens
cccatttagagatgt

SEQ ID NO: 500938 - DNA, 15 bp, Homo sapiens
ccatttagagatgtg

SEQ ID NO: 500939 - DNA, 15 bp, Homo sapiens
catttagagatgtgc

SEQ ID NO: 500940 - DNA, 15 bp, Homo sapiens
atttagagatgtgca

SEQ ID NO: 500941 - DNA, 15 bp, Homo sapiens
tttagagatgtgcac

SEQ ID NO: 500942 - DNA, 15 bp, Homo sapiens
ttagagatgtgcacc

SEQ ID NO: 500943 - DNA, 15 bp, Homo sapiens
tagagatgtgcacct

SEQ ID NO: 500944 - DNA, 15 bp, Homo sapiens
agagatgtgcacctc

SEQ ID NO: 500945 - DNA, 15 bp, Homo sapiens
gagatgtgcacctca

SEQ ID NO: 500946 - DNA, 15 bp, Homo sapiens
agatgtgcacctcac

SEQ ID NO: 500947 - DNA, 15 bp, Homo sapiens
gatgtgcacctcacg

SEQ ID NO: 500948 - DNA, 15 bp, Homo sapiens
atgtgcacctcacgg

SEQ ID NO: 500949 - DNA, 15 bp, Homo sapiens
tgtgcacctcacggt

SEQ ID NO: 500950 - DNA, 15 bp, Homo sapiens
gtgcacctcacggtg

SEQ ID NO: 500951 - DNA, 15 bp, Homo sapiens
tgcacctcacggtgt

SEQ ID NO: 500952 - DNA, 15 bp, Homo sapiens
gcacctcacggtgtg

SEQ ID NO: 500953 - DNA, 15 bp, Homo sapiens
cacctcacggtgtgc

SEQ ID NO: 500954 - DNA, 15 bp, Homo sapiens
acctcacggtgtgca

SEQ ID NO: 500955 - DNA, 15 bp, Homo sapiens
cctcacggtgtgcac

SEQ ID NO: 500956 - DNA, 15 bp, Homo sapiens
ctcacggtgtgcacc

SEQ ID NO: 500957 - DNA, 15 bp, Homo sapiens
tcacggtgtgcacct

SEQ ID NO: 500958 - DNA, 15 bp, Homo sapiens
cacggtgtgcacctc

SEQ ID NO: 500959 - DNA, 15 bp, Homo sapiens
acggtgtgcacctca

SEQ ID NO: 500960 - DNA, 15 bp, Homo sapiens
cggtgtgcacctcag

SEQ ID NO: 500961 - DNA, 15 bp, Homo sapiens
ggtgtgcacctcaga

SEQ ID NO: 500962 - DNA, 15 bp, Homo sapiens
gtgtgcacctcagag

SEQ ID NO: 500963 - DNA, 15 bp, Homo sapiens
tgtgcacctcagaga

SEQ ID NO: 500964 - DNA, 15 bp, Homo sapiens
gtgcacctcagagaa

SEQ ID NO: 500965 - DNA, 15 bp, Homo sapiens
tgcacctcagagaag

SEQ ID NO: 500966 - DNA, 15 bp, Homo sapiens
gcacctcagagaagt

SEQ ID NO: 500967 - DNA, 15 bp, Homo sapiens
cacctcagagaagtt

SEQ ID NO: 500968 - DNA, 15 bp, Homo sapiens
acctcagagaagttc

SEQ ID NO: 500969 - DNA, 15 bp, Homo sapiens
cctcagagaagttct

SEQ ID NO: 500970 - DNA, 15 bp, Homo sapiens
ctcagagaagttctg

SEQ ID NO: 500971 - DNA, 15 bp, Homo sapiens
tcagagaagttctgt

SEQ ID NO: 500972 - DNA, 15 bp, Homo sapiens
cagagaagttctgtc

SEQ ID NO: 500973 - DNA, 15 bp, Homo sapiens
agagaagttctgtct

SEQ ID NO: 500974 - DNA, 15 bp, Homo sapiens
gagaagttctgtctg

SEQ ID NO: 500975 - DNA, 15 bp, Homo sapiens
agaagttctgtctga

SEQ ID NO: 500976 - DNA, 15 bp, Homo sapiens
gaagttctgtctgat

SEQ ID NO: 500977 - DNA, 15 bp, Homo sapiens
aagttctgtctgatt

SEQ ID NO: 500978 - DNA, 15 bp, Homo sapiens
agttctgtctgattc

SEQ ID NO: 500979 - DNA, 15 bp, Homo sapiens
gttctgtctgattcg

SEQ ID NO: 500980 - DNA, 15 bp, Homo sapiens
ttctgtctgattcgg

SEQ ID NO: 500981 - DNA, 15 bp, Homo sapiens
tctgtctgattcggt

SEQ ID NO: 500982 - DNA, 15 bp, Homo sapiens
ctgtctgattcggtg

SEQ ID NO: 500983 - DNA, 15 bp, Homo sapiens
tgtctgattcggtgc

SEQ ID NO: 500984 - DNA, 15 bp, Homo sapiens
gtctgattcggtgcg

SEQ ID NO: 500985 - DNA, 15 bp, Homo sapiens
tctgattcggtgcgg

SEQ ID NO: 500986 - DNA, 15 bp, Homo sapiens
ctgattcggtgcggc

SEQ ID NO: 500987 - DNA, 15 bp, Homo sapiens
tgattcggtgcggcg

SEQ ID NO: 500988 - DNA, 15 bp, Homo sapiens
gattcggtgcggcgt

SEQ ID NO: 500989 - DNA, 15 bp, Homo sapiens
attcggtgcggcgtg

SEQ ID NO: 500990 - DNA, 15 bp, Homo sapiens
ttcggtgcggcgtgc

SEQ ID NO: 500991 - DNA, 15 bp, Homo sapiens
tcggtgcggcgtgcg

SEQ ID NO: 500992 - DNA, 15 bp, Homo sapiens
cggtgcggcgtgcgg

SEQ ID NO: 500993 - DNA, 15 bp, Homo sapiens
ggtgcggcgtgcggt

SEQ ID NO: 500994 - DNA, 15 bp, Homo sapiens
gtgcggcgtgcggta

SEQ ID NO: 500995 - DNA, 15 bp, Homo sapiens
tgcggcgtgcggtac

SEQ ID NO: 500996 - DNA, 15 bp, Homo sapiens
gcggcgtgcggtacg

SEQ ID NO: 500997 - DNA, 15 bp, Homo sapiens
cggcgtgcggtacgg

SEQ ID NO: 500998 - DNA, 15 bp, Homo sapiens
ggcgtgcggtacggg

SEQ ID NO: 500999 - DNA, 15 bp, Homo sapiens
gcgtgcggtacggga

SEQ ID NO: 501000 - DNA, 15 bp, Homo sapiens
cgtgcggtacgggag

SEQ ID NO: 501001 - DNA, 15 bp, Homo sapiens
gtgcggtacgggagc

SEQ ID NO: 501002 - DNA, 15 bp, Homo sapiens
tgcggtacgggagcg

SEQ ID NO: 501003 - DNA, 15 bp, Homo sapiens
gcggtacgggagcgg

SEQ ID NO: 501004 - DNA, 15 bp, Homo sapiens
cggtacgggagcggg

SEQ ID NO: 501005 - DNA, 15 bp, Homo sapiens
ggtacgggagcggga

SEQ ID NO: 501006 - DNA, 15 bp, Homo sapiens
gtacgggagcgggag

SEQ ID NO: 501007 - DNA, 15 bp, Homo sapiens
tacgggagcgggagg

SEQ ID NO: 501008 - DNA, 15 bp, Homo sapiens
acgggagcgggaggg

SEQ ID NO: 501009 - DNA, 15 bp, Homo sapiens
cgggagcgggaggga

SEQ ID NO: 501010 - DNA, 15 bp, Homo sapiens
gggagcgggagggag

SEQ ID NO: 501011 - DNA, 15 bp, Homo sapiens
ggagcgggagggagg

SEQ ID NO: 501012 - DNA, 15 bp, Homo sapiens
gagcgggagggaggg

SEQ ID NO: 501013 - DNA, 15 bp, Homo sapiens
agcgggagggaggga

SEQ ID NO: 501014 - DNA, 15 bp, Homo sapiens
gcgggagggagggag

SEQ ID NO: 501015 - DNA, 15 bp, Homo sapiens
cgggagggagggagc

SEQ ID NO: 501016 - DNA, 15 bp, Homo sapiens
gggagggagggagca

SEQ ID NO: 501017 - DNA, 15 bp, Homo sapiens
ggagggagggagcac

SEQ ID NO: 501018 - DNA, 15 bp, Homo sapiens
gagggagggagcacg

SEQ ID NO: 501019 - DNA, 15 bp, Homo sapiens
agggagggagcacgg

SEQ ID NO: 501020 - DNA, 15 bp, Homo sapiens
gggagggagcacggg

SEQ ID NO: 501021 - DNA, 15 bp, Homo sapiens
ggagggagcacgggc

SEQ ID NO: 501022 - DNA, 15 bp, Homo sapiens
gagggagcacgggcg

SEQ ID NO: 501023 - DNA, 15 bp, Homo sapiens
agggagcacgggcgg

SEQ ID NO: 501024 - DNA, 15 bp, Homo sapiens
gggagcacgggcgga

SEQ ID NO: 501025 - DNA, 15 bp, Homo sapiens
ggagcacgggcggag

SEQ ID NO: 501026 - DNA, 15 bp, Homo sapiens
gagcacgggcggaga

SEQ ID NO: 501027 - DNA, 15 bp, Homo sapiens
agcacgggcggagag

SEQ ID NO: 501028 - DNA, 15 bp, Homo sapiens
gcacgggcggagaga

SEQ ID NO: 501029 - DNA, 15 bp, Homo sapiens
cacgggcggagagag

SEQ ID NO: 501030 - DNA, 15 bp, Homo sapiens
acgggcggagagagc

SEQ ID NO: 501031 - DNA, 15 bp, Homo sapiens
cgggcggagagagcg

SEQ ID NO: 501032 - DNA, 15 bp, Homo sapiens
gggcggagagagcgc

SEQ ID NO: 501033 - DNA, 15 bp, Homo sapiens
ggcggagagagcgcc

SEQ ID NO: 501034 - DNA, 15 bp, Homo sapiens
gcggagagagcgcca

SEQ ID NO: 501035 - DNA, 15 bp, Homo sapiens
cggagagagcgccag

SEQ ID NO: 501036 - DNA, 15 bp, Homo sapiens
ggagagagcgccaga

SEQ ID NO: 501037 - DNA, 15 bp, Homo sapiens
gagagagcgccagag

SEQ ID NO: 501038 - DNA, 15 bp, Homo sapiens
agagagcgccagagc

SEQ ID NO: 501039 - DNA, 15 bp, Homo sapiens
gagagcgccagagcc

SEQ ID NO: 501040 - DNA, 15 bp, Homo sapiens
agagcgccagagccg

SEQ ID NO: 501041 - DNA, 15 bp, Homo sapiens
gagcgccagagccgg

SEQ ID NO: 501042 - DNA, 15 bp, Homo sapiens
agcgccagagccggg

SEQ ID NO: 501043 - DNA, 15 bp, Homo sapiens
gcgccagagccgggc

SEQ ID NO: 501044 - DNA, 15 bp, Homo sapiens
cgccagagccgggcc

SEQ ID NO: 501045 - DNA, 15 bp, Homo sapiens
gccagagccgggccg

SEQ ID NO: 501046 - DNA, 15 bp, Homo sapiens
ccagagccgggccga

SEQ ID NO: 501047 - DNA, 15 bp, Homo sapiens
cagagccgggccgag

SEQ ID NO: 501048 - DNA, 15 bp, Homo sapiens
agagccgggccgagc

SEQ ID NO: 501049 - DNA, 15 bp, Homo sapiens
gagccgggccgagcc

SEQ ID NO: 501050 - DNA, 15 bp, Homo sapiens
agccgggccgagccg

SEQ ID NO: 501051 - DNA, 15 bp, Homo sapiens
gccgggccgagccgc

SEQ ID NO: 501052 - DNA, 15 bp, Homo sapiens
ccgggccgagccgcg

SEQ ID NO: 501053 - DNA, 15 bp, Homo sapiens
cgggccgagccgcgc

SEQ ID NO: 501054 - DNA, 15 bp, Homo sapiens
gggccgagccgcgct

SEQ ID NO: 501055 - DNA, 15 bp, Homo sapiens
ggccgagccgcgctg

SEQ ID NO: 501056 - DNA, 15 bp, Homo sapiens
gccgagccgcgctgg

SEQ ID NO: 501057 - DNA, 15 bp, Homo sapiens
ccgagccgcgctgga

SEQ ID NO: 501058 - DNA, 15 bp, Homo sapiens
cgagccgcgctggag

SEQ ID NO: 501059 - DNA, 15 bp, Homo sapiens
gagccgcgctggagt

SEQ ID NO: 501060 - DNA, 15 bp, Homo sapiens
agccgcgctggagtt

SEQ ID NO: 501061 - DNA, 15 bp, Homo sapiens
gccgcgctggagtta

SEQ ID NO: 501062 - DNA, 15 bp, Homo sapiens
ccgcgctggagttac

SEQ ID NO: 501063 - DNA, 15 bp, Homo sapiens
cgcgctggagttaca

SEQ ID NO: 501064 - DNA, 15 bp, Homo sapiens
gcgctggagttacaa

SEQ ID NO: 501065 - DNA, 15 bp, Homo sapiens
cgctggagttacaaa

SEQ ID NO: 501066 - DNA, 15 bp, Homo sapiens
gctggagttacaaac

SEQ ID NO: 501067 - DNA, 15 bp, Homo sapiens
ctggagttacaaact

SEQ ID NO: 501068 - DNA, 15 bp, Homo sapiens
tggagttacaaactc

SEQ ID NO: 501069 - DNA, 15 bp, Homo sapiens
ggagttacaaactct

SEQ ID NO: 501070 - DNA, 15 bp, Homo sapiens
gagttacaaactcta

SEQ ID NO: 501071 - DNA, 15 bp, Homo sapiens
agttacaaactctat

SEQ ID NO: 501072 - DNA, 15 bp, Homo sapiens
gttacaaactctatt

SEQ ID NO: 501073 - DNA, 15 bp, Homo sapiens
ttacaaactctattg

SEQ ID NO: 501074 - DNA, 15 bp, Homo sapiens
tacaaactctattgt

SEQ ID NO: 501075 - DNA, 15 bp, Homo sapiens
acaaactctattgtg

SEQ ID NO: 501076 - DNA, 15 bp, Homo sapiens
caaactctattgtga

SEQ ID NO: 501077 - DNA, 15 bp, Homo sapiens
aaactctattgtgac

SEQ ID NO: 501078 - DNA, 15 bp, Homo sapiens
aactctattgtgacg

SEQ ID NO: 501079 - DNA, 15 bp, Homo sapiens
actctattgtgacgc

SEQ ID NO: 501080 - DNA, 15 bp, Homo sapiens
ctctattgtgacgca

SEQ ID NO: 501081 - DNA, 15 bp, Homo sapiens
tctattgtgacgcac

SEQ ID NO: 501082 - DNA, 15 bp, Homo sapiens
ctattgtgacgcact

SEQ ID NO: 501083 - DNA, 15 bp, Homo sapiens
tattgtgacgcactt

SEQ ID NO: 501084 - DNA, 15 bp, Homo sapiens
attgtgacgcactta

SEQ ID NO: 501085 - DNA, 15 bp, Homo sapiens
ttgtgacgcacttac

SEQ ID NO: 501086 - DNA, 15 bp, Homo sapiens
tgtgacgcacttact

SEQ ID NO: 501087 - DNA, 15 bp, Homo sapiens
gtgacgcacttacta

SEQ ID NO: 501088 - DNA, 15 bp, Homo sapiens
tgacgcacttactac

SEQ ID NO: 501089 - DNA, 15 bp, Homo sapiens
gacgcacttactacg

SEQ ID NO: 501090 - DNA, 15 bp, Homo sapiens
acgcacttactacga

SEQ ID NO: 501091 - DNA, 15 bp, Homo sapiens
cgcacttactacgac

SEQ ID NO: 501092 - DNA, 15 bp, Homo sapiens
gcacttactacgact

SEQ ID NO: 501093 - DNA, 15 bp, Homo sapiens
cacttactacgactg

SEQ ID NO: 501094 - DNA, 15 bp, Homo sapiens
acttactacgactga

SEQ ID NO: 501095 - DNA, 15 bp, Homo sapiens
cttactacgactgac

SEQ ID NO: 501096 - DNA, 15 bp, Homo sapiens
ttactacgactgacg

SEQ ID NO: 501097 - DNA, 15 bp, Homo sapiens
tactacgactgacgg

SEQ ID NO: 501098 - DNA, 15 bp, Homo sapiens
actacgactgacggc

SEQ ID NO: 501099 - DNA, 15 bp, Homo sapiens
ctacgactgacggcc

SEQ ID NO: 501100 - DNA, 15 bp, Homo sapiens
tacgactgacggccg

SEQ ID NO: 501101 - DNA, 15 bp, Homo sapiens
acgactgacggccgc

SEQ ID NO: 501102 - DNA, 15 bp, Homo sapiens
cgactgacggccgct

SEQ ID NO: 501103 - DNA, 15 bp, Homo sapiens
gactgacggccgctg

SEQ ID NO: 501104 - DNA, 15 bp, Homo sapiens
actgacggccgctgc

SEQ ID NO: 501105 - DNA, 15 bp, Homo sapiens
ctgacggccgctgcc

SEQ ID NO: 501106 - DNA, 15 bp, Homo sapiens
tgacggccgctgcca

SEQ ID NO: 501107 - DNA, 15 bp, Homo sapiens
gacggccgctgccag

SEQ ID NO: 501108 - DNA, 15 bp, Homo sapiens
acggccgctgccaga

SEQ ID NO: 501109 - DNA, 15 bp, Homo sapiens
cggccgctgccagac

SEQ ID NO: 501110 - DNA, 15 bp, Homo sapiens
ggccgctgccagacc

SEQ ID NO: 501111 - DNA, 15 bp, Homo sapiens
gccgctgccagacct

SEQ ID NO: 501112 - DNA, 15 bp, Homo sapiens
ccgctgccagacctt

SEQ ID NO: 501113 - DNA, 15 bp, Homo sapiens
cgctgccagaccttc

SEQ ID NO: 501114 - DNA, 15 bp, Homo sapiens
gctgccagaccttcc

SEQ ID NO: 501115 - DNA, 15 bp, Homo sapiens
ctgccagaccttccc

SEQ ID NO: 501116 - DNA, 15 bp, Homo sapiens
tgccagaccttcccc

SEQ ID NO: 501117 - DNA, 15 bp, Homo sapiens
gccagaccttcccca

SEQ ID NO: 501118 - DNA, 15 bp, Homo sapiens
ccagaccttccccag

SEQ ID NO: 501119 - DNA, 15 bp, Homo sapiens
cagaccttccccaga

SEQ ID NO: 501120 - DNA, 15 bp, Homo sapiens
agaccttccccagac

SEQ ID NO: 501121 - DNA, 15 bp, Homo sapiens
gaccttccccagact

SEQ ID NO: 501122 - DNA, 15 bp, Homo sapiens
accttccccagactt

SEQ ID NO: 501123 - DNA, 15 bp, Homo sapiens
ccttccccagacttg

SEQ ID NO: 501124 - DNA, 15 bp, Homo sapiens
cttccccagacttgc

SEQ ID NO: 501125 - DNA, 15 bp, Homo sapiens
ttccccagacttgct

SEQ ID NO: 501126 - DNA, 15 bp, Homo sapiens
tccccagacttgctg

SEQ ID NO: 501127 - DNA, 15 bp, Homo sapiens
ccccagacttgctgc

SEQ ID NO: 501128 - DNA, 15 bp, Homo sapiens
cccagacttgctgcc

SEQ ID NO: 501129 - DNA, 15 bp, Homo sapiens
ccagacttgctgccc

SEQ ID NO: 501130 - DNA, 15 bp, Homo sapiens
cagacttgctgccct

SEQ ID NO: 501131 - DNA, 15 bp, Homo sapiens
agacttgctgccctc

SEQ ID NO: 501132 - DNA, 15 bp, Homo sapiens
gacttgctgccctca

SEQ ID NO: 501133 - DNA, 15 bp, Homo sapiens
acttgctgccctcag

SEQ ID NO: 501134 - DNA, 15 bp, Homo sapiens
cttgctgccctcagc

SEQ ID NO: 501135 - DNA, 15 bp, Homo sapiens
ttgctgccctcagca

SEQ ID NO: 501136 - DNA, 15 bp, Homo sapiens
tgctgccctcagcat

SEQ ID NO: 501137 - DNA, 15 bp, Homo sapiens
gctgccctcagcatt

SEQ ID NO: 501138 - DNA, 15 bp, Homo sapiens
ctgccctcagcattt

SEQ ID NO: 501139 - DNA, 15 bp, Homo sapiens
tgccctcagcatttt

SEQ ID NO: 501140 - DNA, 15 bp, Homo sapiens
gccctcagcattttc

SEQ ID NO: 501141 - DNA, 15 bp, Homo sapiens
ccctcagcattttcg

SEQ ID NO: 501142 - DNA, 15 bp, Homo sapiens
cctcagcattttcgg

SEQ ID NO: 501143 - DNA, 15 bp, Homo sapiens
ctcagcattttcggc

SEQ ID NO: 501144 - DNA, 15 bp, Homo sapiens
tcagcattttcggca

SEQ ID NO: 501145 - DNA, 15 bp, Homo sapiens
cagcattttcggcaa

SEQ ID NO: 501146 - DNA, 15 bp, Homo sapiens
agcattttcggcaaa

SEQ ID NO: 501147 - DNA, 15 bp, Homo sapiens
gcattttcggcaaac

SEQ ID NO: 501148 - DNA, 15 bp, Homo sapiens
cattttcggcaaaca

SEQ ID NO: 501149 - DNA, 15 bp, Homo sapiens
attttcggcaaacaa

SEQ ID NO: 501150 - DNA, 15 bp, Homo sapiens
ttttcggcaaacaat

SEQ ID NO: 501151 - DNA, 15 bp, Homo sapiens
tttcggcaaacaatg

SEQ ID NO: 501152 - DNA, 15 bp, Homo sapiens
ttcggcaaacaatgg

SEQ ID NO: 501153 - DNA, 15 bp, Homo sapiens
tcggcaaacaatggg

SEQ ID NO: 501154 - DNA, 15 bp, Homo sapiens
cggcaaacaatgggg

SEQ ID NO: 501155 - DNA, 15 bp, Homo sapiens
ggcaaacaatggggc

SEQ ID NO: 501156 - DNA, 15 bp, Homo sapiens
gcaaacaatggggcc

SEQ ID NO: 501157 - DNA, 15 bp, Homo sapiens
caaacaatggggccg

SEQ ID NO: 501158 - DNA, 15 bp, Homo sapiens
aaacaatggggccgg

SEQ ID NO: 501159 - DNA, 15 bp, Homo sapiens
aacaatggggccgga

SEQ ID NO: 501160 - DNA, 15 bp, Homo sapiens
acaatggggccggag

SEQ ID NO: 501161 - DNA, 15 bp, Homo sapiens
caatggggccggagc

SEQ ID NO: 501162 - DNA, 15 bp, Homo sapiens
aatggggccggagca

SEQ ID NO: 501163 - DNA, 15 bp, Homo sapiens
atggggccggagcag

SEQ ID NO: 501164 - DNA, 15 bp, Homo sapiens
tggggccggagcagg

SEQ ID NO: 501165 - DNA, 15 bp, Homo sapiens
ggggccggagcaggg

SEQ ID NO: 501166 - DNA, 15 bp, Homo sapiens
gggccggagcaggga

SEQ ID NO: 501167 - DNA, 15 bp, Homo sapiens
ggccggagcagggaa

SEQ ID NO: 501168 - DNA, 15 bp, Homo sapiens
gccggagcagggaac

SEQ ID NO: 501169 - DNA, 15 bp, Homo sapiens
ccggagcagggaacg

SEQ ID NO: 501170 - DNA, 15 bp, Homo sapiens
cggagcagggaacgc

SEQ ID NO: 501171 - DNA, 15 bp, Homo sapiens
ggagcagggaacgcg

SEQ ID NO: 501172 - DNA, 15 bp, Homo sapiens
gagcagggaacgcgg

SEQ ID NO: 501173 - DNA, 15 bp, Homo sapiens
agcagggaacgcggc

SEQ ID NO: 501174 - DNA, 15 bp, Homo sapiens
gcagggaacgcggcc

SEQ ID NO: 501175 - DNA, 15 bp, Homo sapiens
cagggaacgcggcca

SEQ ID NO: 501176 - DNA, 15 bp, Homo sapiens
agggaacgcggccag

SEQ ID NO: 501177 - DNA, 15 bp, Homo sapiens
gggaacgcggccagc

SEQ ID NO: 501178 - DNA, 15 bp, Homo sapiens
ggaacgcggccagcc

SEQ ID NO: 501179 - DNA, 15 bp, Homo sapiens
gaacgcggccagccg

SEQ ID NO: 501180 - DNA, 15 bp, Homo sapiens
aacgcggccagccgc

SEQ ID NO: 501181 - DNA, 15 bp, Homo sapiens
acgcggccagccgcc

SEQ ID NO: 501182 - DNA, 15 bp, Homo sapiens
cgcggccagccgcct

SEQ ID NO: 501183 - DNA, 15 bp, Homo sapiens
gcggccagccgcctg

SEQ ID NO: 501184 - DNA, 15 bp, Homo sapiens
cggccagccgcctgc

SEQ ID NO: 501185 - DNA, 15 bp, Homo sapiens
ggccagccgcctgca

SEQ ID NO: 501186 - DNA, 15 bp, Homo sapiens
gccagccgcctgcaa

SEQ ID NO: 501187 - DNA, 15 bp, Homo sapiens
ccagccgcctgcaat

SEQ ID NO: 501188 - DNA, 15 bp, Homo sapiens
cagccgcctgcaatc

SEQ ID NO: 501189 - DNA, 15 bp, Homo sapiens
agccgcctgcaatcg

SEQ ID NO: 501190 - DNA, 15 bp, Homo sapiens
gccgcctgcaatcgc

SEQ ID NO: 501191 - DNA, 15 bp, Homo sapiens
ccgcctgcaatcgct

SEQ ID NO: 501192 - DNA, 15 bp, Homo sapiens
cgcctgcaatcgctg

SEQ ID NO: 501193 - DNA, 15 bp, Homo sapiens
gcctgcaatcgctgc

SEQ ID NO: 501194 - DNA, 15 bp, Homo sapiens
cctgcaatcgctgca

SEQ ID NO: 501195 - DNA, 15 bp, Homo sapiens
ctgcaatcgctgcat

SEQ ID NO: 501196 - DNA, 15 bp, Homo sapiens
tgcaatcgctgcatc

SEQ ID NO: 501197 - DNA, 15 bp, Homo sapiens
gcaatcgctgcatct

SEQ ID NO: 501198 - DNA, 15 bp, Homo sapiens
caatcgctgcatctg

SEQ ID NO: 501199 - DNA, 15 bp, Homo sapiens
aatcgctgcatctgc

SEQ ID NO: 501200 - DNA, 15 bp, Homo sapiens
atcgctgcatctgcg

SEQ ID NO: 501201 - DNA, 15 bp, Homo sapiens
tcgctgcatctgcgc

SEQ ID NO: 501202 - DNA, 15 bp, Homo sapiens
cgctgcatctgcgcc

SEQ ID NO: 501203 - DNA, 15 bp, Homo sapiens
gctgcatctgcgccc

SEQ ID NO: 501204 - DNA, 15 bp, Homo sapiens
ctgcatctgcgcccg

SEQ ID NO: 501205 - DNA, 15 bp, Homo sapiens
tgcatctgcgcccgc

SEQ ID NO: 501206 - DNA, 15 bp, Homo sapiens
gcatctgcgcccgct

SEQ ID NO: 501207 - DNA, 15 bp, Homo sapiens
catctgcgcccgctc

SEQ ID NO: 501208 - DNA, 15 bp, Homo sapiens
atctgcgcccgctcc

SEQ ID NO: 501209 - DNA, 15 bp, Homo sapiens
tctgcgcccgctcct

SEQ ID NO: 501210 - DNA, 15 bp, Homo sapiens
ctgcgcccgctcctg

SEQ ID NO: 501211 - DNA, 15 bp, Homo sapiens
tgcgcccgctcctgt

SEQ ID NO: 501212 - DNA, 15 bp, Homo sapiens
gcgcccgctcctgtg

SEQ ID NO: 501213 - DNA, 15 bp, Homo sapiens
cgcccgctcctgtgc

SEQ ID NO: 501214 - DNA, 15 bp, Homo sapiens
gcccgctcctgtgct

SEQ ID NO: 501215 - DNA, 15 bp, Homo sapiens
cccgctcctgtgctc

SEQ ID NO: 501216 - DNA, 15 bp, Homo sapiens
ccgctcctgtgctcc

SEQ ID NO: 501217 - DNA, 15 bp, Homo sapiens
cgctcctgtgctccg

SEQ ID NO: 501218 - DNA, 15 bp, Homo sapiens
gctcctgtgctccgg

SEQ ID NO: 501219 - DNA, 15 bp, Homo sapiens
ctcctgtgctccggc

SEQ ID NO: 501220 - DNA, 15 bp, Homo sapiens
tcctgtgctccggcg

SEQ ID NO: 501221 - DNA, 15 bp, Homo sapiens
cctgtgctccggcgt

SEQ ID NO: 501222 - DNA, 15 bp, Homo sapiens
ctgtgctccggcgtc

SEQ ID NO: 501223 - DNA, 15 bp, Homo sapiens
tgtgctccggcgtcc

SEQ ID NO: 501224 - DNA, 15 bp, Homo sapiens
gtgctccggcgtcct

SEQ ID NO: 501225 - DNA, 15 bp, Homo sapiens
tgctccggcgtccta

SEQ ID NO: 501226 - DNA, 15 bp, Homo sapiens
gctccggcgtcctac

SEQ ID NO: 501227 - DNA, 15 bp, Homo sapiens
ctccggcgtcctacc

SEQ ID NO: 501228 - DNA, 15 bp, Homo sapiens
tccggcgtcctacct

SEQ ID NO: 501229 - DNA, 15 bp, Homo sapiens
ccggcgtcctaccta

SEQ ID NO: 501230 - DNA, 15 bp, Homo sapiens
cggcgtcctacctaa

SEQ ID NO: 501231 - DNA, 15 bp, Homo sapiens
ggcgtcctacctaac

SEQ ID NO: 501232 - DNA, 15 bp, Homo sapiens
gcgtcctacctaacc

SEQ ID NO: 501233 - DNA, 15 bp, Homo sapiens
cgtcctacctaaccc

SEQ ID NO: 501234 - DNA, 15 bp, Homo sapiens
gtcctacctaacccc

SEQ ID NO: 501235 - DNA, 15 bp, Homo sapiens
tcctacctaaccccg

SEQ ID NO: 501236 - DNA, 15 bp, Homo sapiens
cctacctaaccccgg

SEQ ID NO: 501237 - DNA, 15 bp, Homo sapiens
ctacctaaccccggg

SEQ ID NO: 501238 - DNA, 15 bp, Homo sapiens
tacctaaccccggga

SEQ ID NO: 501239 - DNA, 15 bp, Homo sapiens
acctaaccccgggaa

SEQ ID NO: 501240 - DNA, 15 bp, Homo sapiens
cctaaccccgggaag

SEQ ID NO: 501241 - DNA, 15 bp, Homo sapiens
ctaaccccgggaagt

SEQ ID NO: 501242 - DNA, 15 bp, Homo sapiens
taaccccgggaagtc

SEQ ID NO: 501243 - DNA, 15 bp, Homo sapiens
aaccccgggaagtca

SEQ ID NO: 501244 - DNA, 15 bp, Homo sapiens
accccgggaagtcag

SEQ ID NO: 501245 - DNA, 15 bp, Homo sapiens
ccccgggaagtcaga

SEQ ID NO: 501246 - DNA, 15 bp, Homo sapiens
cccgggaagtcagag

SEQ ID NO: 501247 - DNA, 15 bp, Homo sapiens
ccgggaagtcagagc

SEQ ID NO: 501248 - DNA, 15 bp, Homo sapiens
cgggaagtcagagcc

SEQ ID NO: 501249 - DNA, 15 bp, Homo sapiens
gggaagtcagagccg

SEQ ID NO: 501250 - DNA, 15 bp, Homo sapiens
ggaagtcagagccgc

SEQ ID NO: 501251 - DNA, 15 bp, Homo sapiens
gaagtcagagccgct

SEQ ID NO: 501252 - DNA, 15 bp, Homo sapiens
aagtcagagccgctg

SEQ ID NO: 501253 - DNA, 15 bp, Homo sapiens
agtcagagccgctgg

SEQ ID NO: 501254 - DNA, 15 bp, Homo sapiens
gtcagagccgctggg

SEQ ID NO: 501255 - DNA, 15 bp, Homo sapiens
tcagagccgctggga

SEQ ID NO: 501256 - DNA, 15 bp, Homo sapiens
cagagccgctgggag

SEQ ID NO: 501257 - DNA, 15 bp, Homo sapiens
agagccgctgggagt

SEQ ID NO: 501258 - DNA, 15 bp, Homo sapiens
gagccgctgggagtt

SEQ ID NO: 501259 - DNA, 15 bp, Homo sapiens
agccgctgggagttt

SEQ ID NO: 501260 - DNA, 15 bp, Homo sapiens
gccgctgggagtttc

SEQ ID NO: 501261 - DNA, 15 bp, Homo sapiens
ccgctgggagtttct

SEQ ID NO: 501262 - DNA, 15 bp, Homo sapiens
cgctgggagtttctg

SEQ ID NO: 501263 - DNA, 15 bp, Homo sapiens
gctgggagtttctga

SEQ ID NO: 501264 - DNA, 15 bp, Homo sapiens
ctgggagtttctgac

SEQ ID NO: 501265 - DNA, 15 bp, Homo sapiens
tgggagtttctgact

SEQ ID NO: 501266 - DNA, 15 bp, Homo sapiens
gggagtttctgactt

SEQ ID NO: 501267 - DNA, 15 bp, Homo sapiens
ggagtttctgactta

SEQ ID NO: 501268 - DNA, 15 bp, Homo sapiens
gagtttctgacttac

SEQ ID NO: 501269 - DNA, 15 bp, Homo sapiens
agtttctgacttact

SEQ ID NO: 501270 - DNA, 15 bp, Homo sapiens
gtttctgacttactc

SEQ ID NO: 501271 - DNA, 15 bp, Homo sapiens
tttctgacttactcg

SEQ ID NO: 501272 - DNA, 15 bp, Homo sapiens
ttctgacttactcga

SEQ ID NO: 501273 - DNA, 15 bp, Homo sapiens
tctgacttactcgaa

SEQ ID NO: 501274 - DNA, 15 bp, Homo sapiens
ctgacttactcgaag

SEQ ID NO: 501275 - DNA, 15 bp, Homo sapiens
tgacttactcgaaga

SEQ ID NO: 501276 - DNA, 15 bp, Homo sapiens
gacttactcgaagaa

SEQ ID NO: 501277 - DNA, 15 bp, Homo sapiens
acttactcgaagaag

SEQ ID NO: 501278 - DNA, 15 bp, Homo sapiens
cttactcgaagaagt

SEQ ID NO: 501279 - DNA, 15 bp, Homo sapiens
ttactcgaagaagtc

SEQ ID NO: 501280 - DNA, 15 bp, Homo sapiens
tactcgaagaagtct

SEQ ID NO: 501281 - DNA, 15 bp, Homo sapiens
actcgaagaagtctg

SEQ ID NO: 501282 - DNA, 15 bp, Homo sapiens
ctcgaagaagtctgt

SEQ ID NO: 501283 - DNA, 15 bp, Homo sapiens
tcgaagaagtctgtc

SEQ ID NO: 501284 - DNA, 15 bp, Homo sapiens
cgaagaagtctgtcc

SEQ ID NO: 501285 - DNA, 15 bp, Homo sapiens
gaagaagtctgtcct

SEQ ID NO: 501286 - DNA, 15 bp, Homo sapiens
aagaagtctgtcctg

SEQ ID NO: 501287 - DNA, 15 bp, Homo sapiens
agaagtctgtcctgg

SEQ ID NO: 501288 - DNA, 15 bp, Homo sapiens
gaagtctgtcctggg

SEQ ID NO: 501289 - DNA, 15 bp, Homo sapiens
aagtctgtcctgggc

SEQ ID NO: 501290 - DNA, 15 bp, Homo sapiens
agtctgtcctgggca

SEQ ID NO: 501291 - DNA, 15 bp, Homo sapiens
gtctgtcctgggcaa

SEQ ID NO: 501292 - DNA, 15 bp, Homo sapiens
tctgtcctgggcaaa

SEQ ID NO: 501293 - DNA, 15 bp, Homo sapiens
ctgtcctgggcaaag

SEQ ID NO: 501294 - DNA, 15 bp, Homo sapiens
tgtcctgggcaaaga

SEQ ID NO: 501295 - DNA, 15 bp, Homo sapiens
gtcctgggcaaagag

SEQ ID NO: 501296 - DNA, 15 bp, Homo sapiens
tcctgggcaaagagc

SEQ ID NO: 501297 - DNA, 15 bp, Homo sapiens
cctgggcaaagagca

SEQ ID NO: 501298 - DNA, 15 bp, Homo sapiens
ctgggcaaagagcac

SEQ ID NO: 501299 - DNA, 15 bp, Homo sapiens
tgggcaaagagcaca

SEQ ID NO: 501300 - DNA, 15 bp, Homo sapiens
gggcaaagagcacac

SEQ ID NO: 501301 - DNA, 15 bp, Homo sapiens
ggcaaagagcacaca

SEQ ID NO: 501302 - DNA, 15 bp, Homo sapiens
gcaaagagcacacac

SEQ ID NO: 501303 - DNA, 15 bp, Homo sapiens
caaagagcacacacg

SEQ ID NO: 501304 - DNA, 15 bp, Homo sapiens
aaagagcacacacga

SEQ ID NO: 501305 - DNA, 15 bp, Homo sapiens
aagagcacacacgaa

SEQ ID NO: 501306 - DNA, 15 bp, Homo sapiens
agagcacacacgaat

SEQ ID NO: 501307 - DNA, 15 bp, Homo sapiens
gagcacacacgaata

SEQ ID NO: 501308 - DNA, 15 bp, Homo sapiens
agcacacacgaatag

SEQ ID NO: 501309 - DNA, 15 bp, Homo sapiens
gcacacacgaataga

SEQ ID NO: 501310 - DNA, 15 bp, Homo sapiens
cacacacgaatagac

SEQ ID NO: 501311 - DNA, 15 bp, Homo sapiens
acacacgaatagact

SEQ ID NO: 501312 - DNA, 15 bp, Homo sapiens
cacacgaatagactt

SEQ ID NO: 501313 - DNA, 15 bp, Homo sapiens
acacgaatagacttc

SEQ ID NO: 501314 - DNA, 15 bp, Homo sapiens
cacgaatagacttca

SEQ ID NO: 501315 - DNA, 15 bp, Homo sapiens
acgaatagacttcag

SEQ ID NO: 501316 - DNA, 15 bp, Homo sapiens
cgaatagacttcaga

SEQ ID NO: 501317 - DNA, 15 bp, Homo sapiens
gaatagacttcagat

SEQ ID NO: 501318 - DNA, 15 bp, Homo sapiens
aatagacttcagatt

SEQ ID NO: 501319 - DNA, 15 bp, Homo sapiens
atagacttcagatta

SEQ ID NO: 501320 - DNA, 15 bp, Homo sapiens
tagacttcagattag

SEQ ID NO: 501321 - DNA, 15 bp, Homo sapiens
agacttcagattagc

SEQ ID NO: 501322 - DNA, 15 bp, Homo sapiens
gacttcagattagct

SEQ ID NO: 501323 - DNA, 15 bp, Homo sapiens
acttcagattagctg

SEQ ID NO: 501324 - DNA, 15 bp, Homo sapiens
cttcagattagctgc

SEQ ID NO: 501325 - DNA, 15 bp, Homo sapiens
ttcagattagctgct

SEQ ID NO: 501326 - DNA, 15 bp, Homo sapiens
tcagattagctgctt

SEQ ID NO: 501327 - DNA, 15 bp, Homo sapiens
cagattagctgcttc

SEQ ID NO: 501328 - DNA, 15 bp, Homo sapiens
agattagctgcttct

SEQ ID NO: 501329 - DNA, 15 bp, Homo sapiens
gattagctgcttctc

SEQ ID NO: 501330 - DNA, 15 bp, Homo sapiens
attagctgcttctct

SEQ ID NO: 501331 - DNA, 15 bp, Homo sapiens
ttagctgcttctctg

SEQ ID NO: 501332 - DNA, 15 bp, Homo sapiens
tagctgcttctctgg

SEQ ID NO: 501333 - DNA, 15 bp, Homo sapiens
agctgcttctctgga

SEQ ID NO: 501334 - DNA, 15 bp, Homo sapiens
gctgcttctctggaa

SEQ ID NO: 501335 - DNA, 15 bp, Homo sapiens
ctgcttctctggaaa

SEQ ID NO: 501336 - DNA, 15 bp, Homo sapiens
tgcttctctggaaac

SEQ ID NO: 501337 - DNA, 15 bp, Homo sapiens
gcttctctggaaacg

SEQ ID NO: 501338 - DNA, 15 bp, Homo sapiens
cttctctggaaacgc

SEQ ID NO: 501339 - DNA, 15 bp, Homo sapiens
ttctctggaaacgca

SEQ ID NO: 501340 - DNA, 15 bp, Homo sapiens
tctctggaaacgcat

SEQ ID NO: 501341 - DNA, 15 bp, Homo sapiens
ctctggaaacgcatg

SEQ ID NO: 501342 - DNA, 15 bp, Homo sapiens
tctggaaacgcatgt

SEQ ID NO: 501343 - DNA, 15 bp, Homo sapiens
ctggaaacgcatgtg

SEQ ID NO: 501344 - DNA, 15 bp, Homo sapiens
tggaaacgcatgtgt

SEQ ID NO: 501345 - DNA, 15 bp, Homo sapiens
ggaaacgcatgtgtg

SEQ ID NO: 501346 - DNA, 15 bp, Homo sapiens
gaaacgcatgtgtgt

SEQ ID NO: 501347 - DNA, 15 bp, Homo sapiens
aaacgcatgtgtgtg

SEQ ID NO: 501348 - DNA, 15 bp, Homo sapiens
aacgcatgtgtgtgt

SEQ ID NO: 501349 - DNA, 15 bp, Homo sapiens
acgcatgtgtgtgtg

SEQ ID NO: 501350 - DNA, 15 bp, Homo sapiens
cgcatgtgtgtgtgc

SEQ ID NO: 501351 - DNA, 15 bp, Homo sapiens
gcatgtgtgtgtgca

SEQ ID NO: 501352 - DNA, 15 bp, Homo sapiens
catgtgtgtgtgcac

SEQ ID NO: 501353 - DNA, 15 bp, Homo sapiens
atgtgtgtgtgcacc

SEQ ID NO: 501354 - DNA, 15 bp, Homo sapiens
tgtgtgtgtgcacca

SEQ ID NO: 501355 - DNA, 15 bp, Homo sapiens
gtgtgtgtgcaccag

SEQ ID NO: 501356 - DNA, 15 bp, Homo sapiens
tgtgtgtgcaccagt

SEQ ID NO: 501357 - DNA, 15 bp, Homo sapiens
gtgtgtgcaccagtt

SEQ ID NO: 501358 - DNA, 15 bp, Homo sapiens
tgtgtgcaccagttc

SEQ ID NO: 501359 - DNA, 15 bp, Homo sapiens
gtgtgcaccagttcc

SEQ ID NO: 501360 - DNA, 15 bp, Homo sapiens
tgtgcaccagttccg

SEQ ID NO: 501361 - DNA, 15 bp, Homo sapiens
gtgcaccagttccgc

SEQ ID NO: 501362 - DNA, 15 bp, Homo sapiens
tgcaccagttccgca

SEQ ID NO: 501363 - DNA, 15 bp, Homo sapiens
gcaccagttccgcaa

SEQ ID NO: 501364 - DNA, 15 bp, Homo sapiens
caccagttccgcaag

SEQ ID NO: 501365 - DNA, 15 bp, Homo sapiens
accagttccgcaagc

SEQ ID NO: 501366 - DNA, 15 bp, Homo sapiens
ccagttccgcaagct

SEQ ID NO: 501367 - DNA, 15 bp, Homo sapiens
cagttccgcaagctg

SEQ ID NO: 501368 - DNA, 15 bp, Homo sapiens
agttccgcaagctgt

SEQ ID NO: 501369 - DNA, 15 bp, Homo sapiens
gttccgcaagctgtt

SEQ ID NO: 501370 - DNA, 15 bp, Homo sapiens
ttccgcaagctgttg

SEQ ID NO: 501371 - DNA, 15 bp, Homo sapiens
tccgcaagctgttga

SEQ ID NO: 501372 - DNA, 15 bp, Homo sapiens
ccgcaagctgttgac

SEQ ID NO: 501373 - DNA, 15 bp, Homo sapiens
cgcaagctgttgaca

SEQ ID NO: 501374 - DNA, 15 bp, Homo sapiens
gcaagctgttgacat

SEQ ID NO: 501375 - DNA, 15 bp, Homo sapiens
caagctgttgacatt

SEQ ID NO: 501376 - DNA, 15 bp, Homo sapiens
aagctgttgacattg

SEQ ID NO: 501377 - DNA, 15 bp, Homo sapiens
agctgttgacattgt

SEQ ID NO: 501378 - DNA, 15 bp, Homo sapiens
gctgttgacattgtt

SEQ ID NO: 501379 - DNA, 15 bp, Homo sapiens
ctgttgacattgtta

SEQ ID NO: 501380 - DNA, 15 bp, Homo sapiens
tgttgacattgttac

SEQ ID NO: 501381 - DNA, 15 bp, Homo sapiens
gttgacattgttact

SEQ ID NO: 501382 - DNA, 15 bp, Homo sapiens
ttgacattgttactg

SEQ ID NO: 501383 - DNA, 15 bp, Homo sapiens
tgacattgttactgt

SEQ ID NO: 501384 - DNA, 15 bp, Homo sapiens
gacattgttactgta

SEQ ID NO: 501385 - DNA, 15 bp, Homo sapiens
acattgttactgtat

SEQ ID NO: 501386 - DNA, 15 bp, Homo sapiens
cattgttactgtatt

SEQ ID NO: 501387 - DNA, 15 bp, Homo sapiens
attgttactgtattt

SEQ ID NO: 501388 - DNA, 15 bp, Homo sapiens
ttgttactgtatttt

SEQ ID NO: 501389 - DNA, 15 bp, Homo sapiens
tgttactgtattttg

SEQ ID NO: 501390 - DNA, 15 bp, Homo sapiens
gttactgtattttgt

SEQ ID NO: 501391 - DNA, 15 bp, Homo sapiens
ttactgtattttgtt

SEQ ID NO: 501392 - DNA, 15 bp, Homo sapiens
tactgtattttgttt

SEQ ID NO: 501393 - DNA, 15 bp, Homo sapiens
actgtattttgtttg

SEQ ID NO: 501394 - DNA, 15 bp, Homo sapiens
ctgtattttgtttgg

SEQ ID NO: 501395 - DNA, 15 bp, Homo sapiens
tgtattttgtttggg

SEQ ID NO: 501396 - DNA, 15 bp, Homo sapiens
gtattttgtttgggg

SEQ ID NO: 501397 - DNA, 15 bp, Homo sapiens
tattttgtttggggg

SEQ ID NO: 501398 - DNA, 15 bp, Homo sapiens
attttgtttgggggt

SEQ ID NO: 501399 - DNA, 15 bp, Homo sapiens
ttttgtttgggggta

SEQ ID NO: 501400 - DNA, 15 bp, Homo sapiens
tttgtttgggggtac

SEQ ID NO: 501401 - DNA, 15 bp, Homo sapiens
ttgtttgggggtacc

SEQ ID NO: 501402 - DNA, 15 bp, Homo sapiens
tgtttgggggtaccc

SEQ ID NO: 501403 - DNA, 15 bp, Homo sapiens
gtttgggggtaccct

SEQ ID NO: 501404 - DNA, 15 bp, Homo sapiens
tttgggggtaccctc

SEQ ID NO: 501405 - DNA, 15 bp, Homo sapiens
ttgggggtaccctct

SEQ ID NO: 501406 - DNA, 15 bp, Homo sapiens
tgggggtaccctcta

SEQ ID NO: 501407 - DNA, 15 bp, Homo sapiens
gggggtaccctctac

SEQ ID NO: 501408 - DNA, 15 bp, Homo sapiens
ggggtaccctctacc

SEQ ID NO: 501409 - DNA, 15 bp, Homo sapiens
gggtaccctctacca

SEQ ID NO: 501410 - DNA, 15 bp, Homo sapiens
ggtaccctctaccaa

SEQ ID NO: 501411 - DNA, 15 bp, Homo sapiens
gtaccctctaccaaa

SEQ ID NO: 501412 - DNA, 15 bp, Homo sapiens
taccctctaccaaaa

SEQ ID NO: 501413 - DNA, 15 bp, Homo sapiens
accctctaccaaaaa

SEQ ID NO: 501414 - DNA, 15 bp, Homo sapiens
ccctctaccaaaaaa

SEQ ID NO: 501415 - DNA, 15 bp, Homo sapiens
cctctaccaaaaaaa

SEQ ID NO: 501416 - DNA, 15 bp, Homo sapiens
ctctaccaaaaaaaa

SEQ ID NO: 501417 - DNA, 15 bp, Homo sapiens
tctaccaaaaaaaaa

SEQ ID NO: 501418 - DNA, 15 bp, Homo sapiens
ctaccaaaaaaaaat

SEQ ID NO: 501419 - DNA, 15 bp, Homo sapiens
taccaaaaaaaaatt

SEQ ID NO: 501420 - DNA, 15 bp, Homo sapiens
accaaaaaaaaatta

SEQ ID NO: 501421 - DNA, 15 bp, Homo sapiens
ccaaaaaaaaattac

SEQ ID NO: 501422 - DNA, 15 bp, Homo sapiens
caaaaaaaaattaca

SEQ ID NO: 501423 - DNA, 15 bp, Homo sapiens
aaaaaaaaattacac

SEQ ID NO: 501424 - DNA, 15 bp, Homo sapiens
aaaaaaaattacacc

SEQ ID NO: 501425 - DNA, 15 bp, Homo sapiens
aaaaaaattacacct

SEQ ID NO: 501426 - DNA, 15 bp, Homo sapiens
aaaaaattacacctt

SEQ ID NO: 501427 - DNA, 15 bp, Homo sapiens
aaaaattacaccttt

SEQ ID NO: 501428 - DNA, 15 bp, Homo sapiens
aaaattacaccttta

SEQ ID NO: 501429 - DNA, 15 bp, Homo sapiens
aaattacacctttat

SEQ ID NO: 501430 - DNA, 15 bp, Homo sapiens
aattacacctttatt

SEQ ID NO: 501431 - DNA, 15 bp, Homo sapiens
attacacctttatta

SEQ ID NO: 501432 - DNA, 15 bp, Homo sapiens
ttacacctttattat

SEQ ID NO: 501433 - DNA, 15 bp, Homo sapiens
tacacctttattatt

SEQ ID NO: 501434 - DNA, 15 bp, Homo sapiens
acacctttattattt

SEQ ID NO: 501435 - DNA, 15 bp, Homo sapiens
cacctttattatttt

SEQ ID NO: 501436 - DNA, 15 bp, Homo sapiens
acctttattatttta

SEQ ID NO: 501437 - DNA, 15 bp, Homo sapiens
cctttattattttag

SEQ ID NO: 501438 - DNA, 15 bp, Homo sapiens
ctttattattttagg

SEQ ID NO: 501439 - DNA, 15 bp, Homo sapiens
tttattattttaggt

SEQ ID NO: 501440 - DNA, 15 bp, Homo sapiens
ttattattttaggtg

SEQ ID NO: 501441 - DNA, 15 bp, Homo sapiens
tattattttaggtgc

SEQ ID NO: 501442 - DNA, 15 bp, Homo sapiens
attattttaggtgca

SEQ ID NO: 501443 - DNA, 15 bp, Homo sapiens
ttattttaggtgcaa

SEQ ID NO: 501444 - DNA, 15 bp, Homo sapiens
tattttaggtgcaat

SEQ ID NO: 501445 - DNA, 15 bp, Homo sapiens
attttaggtgcaatt

SEQ ID NO: 501446 - DNA, 15 bp, Homo sapiens
ttttaggtgcaattt

SEQ ID NO: 501447 - DNA, 15 bp, Homo sapiens
tttaggtgcaatttt

SEQ ID NO: 501448 - DNA, 15 bp, Homo sapiens
ttaggtgcaattttt

SEQ ID NO: 501449 - DNA, 15 bp, Homo sapiens
taggtgcaatttttt

SEQ ID NO: 501450 - DNA, 15 bp, Homo sapiens
aggtgcaattttttt

SEQ ID NO: 501451 - DNA, 15 bp, Homo sapiens
ggtgcaattttttta

SEQ ID NO: 501452 - DNA, 15 bp, Homo sapiens
gtgcaatttttttat

SEQ ID NO: 501453 - DNA, 15 bp, Homo sapiens
tgcaatttttttatt

SEQ ID NO: 501454 - DNA, 15 bp, Homo sapiens
gcaatttttttattt

SEQ ID NO: 501455 - DNA, 15 bp, Homo sapiens
caatttttttatttg

SEQ ID NO: 501456 - DNA, 15 bp, Homo sapiens
aatttttttatttgg

SEQ ID NO: 501457 - DNA, 15 bp, Homo sapiens
atttttttatttggg

SEQ ID NO: 501458 - DNA, 15 bp, Homo sapiens
tttttttatttggga

SEQ ID NO: 501459 - DNA, 15 bp, Homo sapiens
ttttttatttgggag

SEQ ID NO: 501460 - DNA, 15 bp, Homo sapiens
tttttatttgggaga

SEQ ID NO: 501461 - DNA, 15 bp, Homo sapiens
ttttatttgggagat

SEQ ID NO: 501462 - DNA, 15 bp, Homo sapiens
tttatttgggagatt

SEQ ID NO: 501463 - DNA, 15 bp, Homo sapiens
ttatttgggagattg

SEQ ID NO: 501464 - DNA, 15 bp, Homo sapiens
tatttgggagattgt

SEQ ID NO: 501465 - DNA, 15 bp, Homo sapiens
atttgggagattgtc

SEQ ID NO: 501466 - DNA, 15 bp, Homo sapiens
tttgggagattgtca

SEQ ID NO: 501467 - DNA, 15 bp, Homo sapiens
ttgggagattgtcag

SEQ ID NO: 501468 - DNA, 15 bp, Homo sapiens
tgggagattgtcaga

SEQ ID NO: 501469 - DNA, 15 bp, Homo sapiens
gggagattgtcagaa

SEQ ID NO: 501470 - DNA, 15 bp, Homo sapiens
ggagattgtcagaaa

SEQ ID NO: 501471 - DNA, 15 bp, Homo sapiens
gagattgtcagaaaa

SEQ ID NO: 501472 - DNA, 15 bp, Homo sapiens
agattgtcagaaaag

SEQ ID NO: 501473 - DNA, 15 bp, Homo sapiens
gattgtcagaaaagt

SEQ ID NO: 501474 - DNA, 15 bp, Homo sapiens
attgtcagaaaagta

SEQ ID NO: 501475 - DNA, 15 bp, Homo sapiens
ttgtcagaaaagtat

SEQ ID NO: 501476 - DNA, 15 bp, Homo sapiens
tgtcagaaaagtata

SEQ ID NO: 501477 - DNA, 15 bp, Homo sapiens
gtcagaaaagtatag

SEQ ID NO: 501478 - DNA, 15 bp, Homo sapiens
tcagaaaagtataga

SEQ ID NO: 501479 - DNA, 15 bp, Homo sapiens
cagaaaagtatagaa

SEQ ID NO: 501480 - DNA, 15 bp, Homo sapiens
agaaaagtatagaac

SEQ ID NO: 501481 - DNA, 15 bp, Homo sapiens
gaaaagtatagaaca

SEQ ID NO: 501482 - DNA, 15 bp, Homo sapiens
aaaagtatagaacaa

SEQ ID NO: 501483 - DNA, 15 bp, Homo sapiens
aaagtatagaacaaa

SEQ ID NO: 501484 - DNA, 15 bp, Homo sapiens
aagtatagaacaaag

SEQ ID NO: 501485 - DNA, 15 bp, Homo sapiens
agtatagaacaaagt

SEQ ID NO: 501486 - DNA, 15 bp, Homo sapiens
gtatagaacaaagta

SEQ ID NO: 501487 - DNA, 15 bp, Homo sapiens
tatagaacaaagtat

SEQ ID NO: 501488 - DNA, 15 bp, Homo sapiens
atagaacaaagtatt

SEQ ID NO: 501489 - DNA, 15 bp, Homo sapiens
tagaacaaagtattt

SEQ ID NO: 501490 - DNA, 15 bp, Homo sapiens
agaacaaagtatttg

SEQ ID NO: 501491 - DNA, 15 bp, Homo sapiens
gaacaaagtatttgg

SEQ ID NO: 501492 - DNA, 15 bp, Homo sapiens
aacaaagtatttggg

SEQ ID NO: 501493 - DNA, 15 bp, Homo sapiens
acaaagtatttggga

SEQ ID NO: 501494 - DNA, 15 bp, Homo sapiens
caaagtatttgggat

SEQ ID NO: 501495 - DNA, 15 bp, Homo sapiens
aaagtatttgggatt

SEQ ID NO: 501496 - DNA, 15 bp, Homo sapiens
aagtatttgggatta

SEQ ID NO: 501497 - DNA, 15 bp, Homo sapiens
agtatttgggattaa

SEQ ID NO: 501498 - DNA, 15 bp, Homo sapiens
gtatttgggattaac

SEQ ID NO: 501499 - DNA, 15 bp, Homo sapiens
tatttgggattaacc

SEQ ID NO: 501500 - DNA, 15 bp, Homo sapiens
atttgggattaaccc

SEQ ID NO: 501501 - DNA, 15 bp, Homo sapiens
tttgggattaaccct

SEQ ID NO: 501502 - DNA, 15 bp, Homo sapiens
ttgggattaacccta

SEQ ID NO: 501503 - DNA, 15 bp, Homo sapiens
tgggattaaccctaa

SEQ ID NO: 501504 - DNA, 15 bp, Homo sapiens
gggattaaccctaag

SEQ ID NO: 501505 - DNA, 15 bp, Homo sapiens
ggattaaccctaaga

SEQ ID NO: 501506 - DNA, 15 bp, Homo sapiens
gattaaccctaagaa

SEQ ID NO: 501507 - DNA, 15 bp, Homo sapiens
attaaccctaagaat

SEQ ID NO: 501508 - DNA, 15 bp, Homo sapiens
ttaaccctaagaatt

SEQ ID NO: 501509 - DNA, 15 bp, Homo sapiens
taaccctaagaattt

SEQ ID NO: 501510 - DNA, 15 bp, Homo sapiens
aaccctaagaatttt

SEQ ID NO: 501511 - DNA, 15 bp, Homo sapiens
accctaagaattttt

SEQ ID NO: 501512 - DNA, 15 bp, Homo sapiens
ccctaagaattttta

SEQ ID NO: 501513 - DNA, 15 bp, Homo sapiens
cctaagaatttttaa

SEQ ID NO: 501514 - DNA, 15 bp, Homo sapiens
ctaagaatttttaat

SEQ ID NO: 501515 - DNA, 15 bp, Homo sapiens
taagaatttttaatc

SEQ ID NO: 501516 - DNA, 15 bp, Homo sapiens
aagaatttttaatcg

SEQ ID NO: 501517 - DNA, 15 bp, Homo sapiens
agaatttttaatcgc

SEQ ID NO: 501518 - DNA, 15 bp, Homo sapiens
gaatttttaatcgct

SEQ ID NO: 501519 - DNA, 15 bp, Homo sapiens
aatttttaatcgcta

SEQ ID NO: 501520 - DNA, 15 bp, Homo sapiens
atttttaatcgctag

SEQ ID NO: 501521 - DNA, 15 bp, Homo sapiens
tttttaatcgctagg

SEQ ID NO: 501522 - DNA, 15 bp, Homo sapiens
ttttaatcgctaggt

SEQ ID NO: 501523 - DNA, 15 bp, Homo sapiens
tttaatcgctaggtg

SEQ ID NO: 501524 - DNA, 15 bp, Homo sapiens
ttaatcgctaggtga

SEQ ID NO: 501525 - DNA, 15 bp, Homo sapiens
taatcgctaggtgag

SEQ ID NO: 501526 - DNA, 15 bp, Homo sapiens
aatcgctaggtgaga

SEQ ID NO: 501527 - DNA, 15 bp, Homo sapiens
atcgctaggtgagag

SEQ ID NO: 501528 - DNA, 15 bp, Homo sapiens
tcgctaggtgagagc

SEQ ID NO: 501529 - DNA, 15 bp, Homo sapiens
cgctaggtgagagct

SEQ ID NO: 501530 - DNA, 15 bp, Homo sapiens
gctaggtgagagcta

SEQ ID NO: 501531 - DNA, 15 bp, Homo sapiens
ctaggtgagagctaa

SEQ ID NO: 501532 - DNA, 15 bp, Homo sapiens
taggtgagagctaat

SEQ ID NO: 501533 - DNA, 15 bp, Homo sapiens
aggtgagagctaatt

SEQ ID NO: 501534 - DNA, 15 bp, Homo sapiens
ggtgagagctaattt

SEQ ID NO: 501535 - DNA, 15 bp, Homo sapiens
gtgagagctaatttg

SEQ ID NO: 501536 - DNA, 15 bp, Homo sapiens
tgagagctaatttgt

SEQ ID NO: 501537 - DNA, 15 bp, Homo sapiens
gagagctaatttgtt

SEQ ID NO: 501538 - DNA, 15 bp, Homo sapiens
agagctaatttgttt

SEQ ID NO: 501539 - DNA, 15 bp, Homo sapiens
gagctaatttgttta

SEQ ID NO: 501540 - DNA, 15 bp, Homo sapiens
agctaatttgtttat

SEQ ID NO: 501541 - DNA, 15 bp, Homo sapiens
gctaatttgtttatt

SEQ ID NO: 501542 - DNA, 15 bp, Homo sapiens
ctaatttgtttattc

SEQ ID NO: 501543 - DNA, 15 bp, Homo sapiens
taatttgtttattca

SEQ ID NO: 501544 - DNA, 15 bp, Homo sapiens
aatttgtttattcat

SEQ ID NO: 501545 - DNA, 15 bp, Homo sapiens
atttgtttattcatc

SEQ ID NO: 501546 - DNA, 15 bp, Homo sapiens
tttgtttattcatcg

SEQ ID NO: 501547 - DNA, 15 bp, Homo sapiens
ttgtttattcatcga

SEQ ID NO: 501548 - DNA, 15 bp, Homo sapiens
tgtttattcatcgat

SEQ ID NO: 501549 - DNA, 15 bp, Homo sapiens
gtttattcatcgatt

SEQ ID NO: 501550 - DNA, 15 bp, Homo sapiens
tttattcatcgattt

SEQ ID NO: 501551 - DNA, 15 bp, Homo sapiens
ttattcatcgatttt

SEQ ID NO: 501552 - DNA, 15 bp, Homo sapiens
tattcatcgattttt

SEQ ID NO: 501553 - DNA, 15 bp, Homo sapiens
attcatcgatttttt

SEQ ID NO: 501554 - DNA, 15 bp, Homo sapiens
ttcatcgattttttt

SEQ ID NO: 501555 - DNA, 15 bp, Homo sapiens
tcatcgatttttttt

SEQ ID NO: 501556 - DNA, 15 bp, Homo sapiens
catcgattttttttt

SEQ ID NO: 501557 - DNA, 15 bp, Homo sapiens
atcgatttttttttt

SEQ ID NO: 501558 - DNA, 15 bp, Homo sapiens
tcgattttttttttt

SEQ ID NO: 501559 - DNA, 15 bp, Homo sapiens
cgatttttttttttg

SEQ ID NO: 501560 - DNA, 15 bp, Homo sapiens
gatttttttttttgc

SEQ ID NO: 501561 - DNA, 15 bp, Homo sapiens
atttttttttttgct

SEQ ID NO: 501562 - DNA, 15 bp, Homo sapiens
tttttttttttgctt

SEQ ID NO: 501563 - DNA, 15 bp, Homo sapiens
ttttttttttgctta

SEQ ID NO: 501564 - DNA, 15 bp, Homo sapiens
tttttttttgcttaa

SEQ ID NO: 501565 - DNA, 15 bp, Homo sapiens
ttttttttgcttaaa

SEQ ID NO: 501566 - DNA, 15 bp, Homo sapiens
tttttttgcttaaaa

SEQ ID NO: 501567 - DNA, 15 bp, Homo sapiens
ttttttgcttaaaat

SEQ ID NO: 501568 - DNA, 15 bp, Homo sapiens
tttttgcttaaaata

SEQ ID NO: 501569 - DNA, 15 bp, Homo sapiens
ttttgcttaaaataa

SEQ ID NO: 501570 - DNA, 15 bp, Homo sapiens
tttgcttaaaataat

SEQ ID NO: 501571 - DNA, 15 bp, Homo sapiens
ttgcttaaaataatc

SEQ ID NO: 501572 - DNA, 15 bp, Homo sapiens
tgcttaaaataatct

SEQ ID NO: 501573 - DNA, 15 bp, Homo sapiens
gcttaaaataatctt

SEQ ID NO: 501574 - DNA, 15 bp, Homo sapiens
cttaaaataatctta

SEQ ID NO: 501575 - DNA, 15 bp, Homo sapiens
ttaaaataatcttag

SEQ ID NO: 501576 - DNA, 15 bp, Homo sapiens
taaaataatcttagt

SEQ ID NO: 501577 - DNA, 15 bp, Homo sapiens
aaaataatcttagtt

SEQ ID NO: 501578 - DNA, 15 bp, Homo sapiens
aaataatcttagttt

SEQ ID NO: 501579 - DNA, 15 bp, Homo sapiens
aataatcttagtttt

SEQ ID NO: 501580 - DNA, 15 bp, Homo sapiens
ataatcttagttttt

SEQ ID NO: 501581 - DNA, 15 bp, Homo sapiens
taatcttagttttta

SEQ ID NO: 501582 - DNA, 15 bp, Homo sapiens
aatcttagtttttat

SEQ ID NO: 501583 - DNA, 15 bp, Homo sapiens
atcttagtttttatt

SEQ ID NO: 501584 - DNA, 15 bp, Homo sapiens
tcttagtttttattt

SEQ ID NO: 501585 - DNA, 15 bp, Homo sapiens
cttagtttttatttt

SEQ ID NO: 501586 - DNA, 15 bp, Homo sapiens
ttagtttttatttta

SEQ ID NO: 501587 - DNA, 15 bp, Homo sapiens
tagtttttattttac

SEQ ID NO: 501588 - DNA, 15 bp, Homo sapiens
agtttttattttact

SEQ ID NO: 501589 - DNA, 15 bp, Homo sapiens
gtttttattttactt

SEQ ID NO: 501590 - DNA, 15 bp, Homo sapiens
tttttattttacttg

SEQ ID NO: 501591 - DNA, 15 bp, Homo sapiens
ttttattttacttgc

SEQ ID NO: 501592 - DNA, 15 bp, Homo sapiens
tttattttacttgca

SEQ ID NO: 501593 - DNA, 15 bp, Homo sapiens
ttattttacttgcag

SEQ ID NO: 501594 - DNA, 15 bp, Homo sapiens
tattttacttgcaga

SEQ ID NO: 501595 - DNA, 15 bp, Homo sapiens
attttacttgcagaa

SEQ ID NO: 501596 - DNA, 15 bp, Homo sapiens
ttttacttgcagaaa

SEQ ID NO: 501597 - DNA, 15 bp, Homo sapiens
tttacttgcagaaaa

SEQ ID NO: 501598 - DNA, 15 bp, Homo sapiens
ttacttgcagaaaaa

SEQ ID NO: 501599 - DNA, 15 bp, Homo sapiens
tacttgcagaaaaaa

SEQ ID NO: 501600 - DNA, 15 bp, Homo sapiens
acttgcagaaaaaaa

SEQ ID NO: 501601 - DNA, 15 bp, Homo sapiens
cttgcagaaaaaaag

SEQ ID NO: 501602 - DNA, 15 bp, Homo sapiens
ttgcagaaaaaaaga

SEQ ID NO: 501603 - DNA, 15 bp, Homo sapiens
tgcagaaaaaaagac

SEQ ID NO: 501604 - DNA, 15 bp, Homo sapiens
gcagaaaaaaagacc

SEQ ID NO: 501605 - DNA, 15 bp, Homo sapiens
cagaaaaaaagacca

SEQ ID NO: 501606 - DNA, 15 bp, Homo sapiens
agaaaaaaagaccaa

SEQ ID NO: 501607 - DNA, 15 bp, Homo sapiens
gaaaaaaagaccaaa

SEQ ID NO: 501608 - DNA, 15 bp, Homo sapiens
aaaaaaagaccaaat

SEQ ID NO: 501609 - DNA, 15 bp, Homo sapiens
aaaaaagaccaaatg

SEQ ID NO: 501610 - DNA, 15 bp, Homo sapiens
aaaaagaccaaatgg

SEQ ID NO: 501611 - DNA, 15 bp, Homo sapiens
aaaagaccaaatggc

SEQ ID NO: 501612 - DNA, 15 bp, Homo sapiens
aaagaccaaatggca

SEQ ID NO: 501613 - DNA, 15 bp, Homo sapiens
aagaccaaatggcaa

SEQ ID NO: 501614 - DNA, 15 bp, Homo sapiens
agaccaaatggcaaa

SEQ ID NO: 501615 - DNA, 15 bp, Homo sapiens
gaccaaatggcaaag

SEQ ID NO: 501616 - DNA, 15 bp, Homo sapiens
accaaatggcaaagc

SEQ ID NO: 501617 - DNA, 15 bp, Homo sapiens
ccaaatggcaaagca

SEQ ID NO: 501618 - DNA, 15 bp, Homo sapiens
caaatggcaaagcaa

SEQ ID NO: 501619 - DNA, 15 bp, Homo sapiens
aaatggcaaagcaac

SEQ ID NO: 501620 - DNA, 15 bp, Homo sapiens
aatggcaaagcaacc

SEQ ID NO: 501621 - DNA, 15 bp, Homo sapiens
atggcaaagcaacct

SEQ ID NO: 501622 - DNA, 15 bp, Homo sapiens
tggcaaagcaacctt

SEQ ID NO: 501623 - DNA, 15 bp, Homo sapiens
ggcaaagcaaccttc

SEQ ID NO: 501624 - DNA, 15 bp, Homo sapiens
gcaaagcaaccttct

SEQ ID NO: 501625 - DNA, 15 bp, Homo sapiens
caaagcaaccttctg

SEQ ID NO: 501626 - DNA, 15 bp, Homo sapiens
aaagcaaccttctga

SEQ ID NO: 501627 - DNA, 15 bp, Homo sapiens
aagcaaccttctgat

SEQ ID NO: 501628 - DNA, 15 bp, Homo sapiens
agcaaccttctgatg

SEQ ID NO: 501629 - DNA, 15 bp, Homo sapiens
gcaaccttctgatgt

SEQ ID NO: 501630 - DNA, 15 bp, Homo sapiens
caaccttctgatgta

SEQ ID NO: 501631 - DNA, 15 bp, Homo sapiens
aaccttctgatgtaa

SEQ ID NO: 501632 - DNA, 15 bp, Homo sapiens
accttctgatgtaag

SEQ ID NO: 501633 - DNA, 15 bp, Homo sapiens
ccttctgatgtaagt

SEQ ID NO: 501634 - DNA, 15 bp, Homo sapiens
cttctgatgtaagtt

SEQ ID NO: 501635 - DNA, 15 bp, Homo sapiens
ttctgatgtaagttc

SEQ ID NO: 501636 - DNA, 15 bp, Homo sapiens
tctgatgtaagttct

SEQ ID NO: 501637 - DNA, 15 bp, Homo sapiens
ctgatgtaagttctg

SEQ ID NO: 501638 - DNA, 15 bp, Homo sapiens
tgatgtaagttctga

SEQ ID NO: 501639 - DNA, 15 bp, Homo sapiens
gatgtaagttctgag

SEQ ID NO: 501640 - DNA, 15 bp, Homo sapiens
atgtaagttctgagt

SEQ ID NO: 501641 - DNA, 15 bp, Homo sapiens
tgtaagttctgagtg

SEQ ID NO: 501642 - DNA, 15 bp, Homo sapiens
gtaagttctgagtgt

SEQ ID NO: 501643 - DNA, 15 bp, Homo sapiens
taagttctgagtgtg

SEQ ID NO: 501644 - DNA, 15 bp, Homo sapiens
aagttctgagtgtga

SEQ ID NO: 501645 - DNA, 15 bp, Homo sapiens
agttctgagtgtgac

SEQ ID NO: 501646 - DNA, 15 bp, Homo sapiens
gttctgagtgtgacc

SEQ ID NO: 501647 - DNA, 15 bp, Homo sapiens
ttctgagtgtgaccg

SEQ ID NO: 501648 - DNA, 15 bp, Homo sapiens
tctgagtgtgaccga

SEQ ID NO: 501649 - DNA, 15 bp, Homo sapiens
ctgagtgtgaccgag

SEQ ID NO: 501650 - DNA, 15 bp, Homo sapiens
tgagtgtgaccgaga

SEQ ID NO: 501651 - DNA, 15 bp, Homo sapiens
gagtgtgaccgagaa

SEQ ID NO: 501652 - DNA, 15 bp, Homo sapiens
agtgtgaccgagaag

SEQ ID NO: 501653 - DNA, 15 bp, Homo sapiens
gtgtgaccgagaagg

SEQ ID NO: 501654 - DNA, 15 bp, Homo sapiens
tgtgaccgagaaggt

SEQ ID NO: 501655 - DNA, 15 bp, Homo sapiens
gtgaccgagaaggta

SEQ ID NO: 501656 - DNA, 15 bp, Homo sapiens
tgaccgagaaggtag

SEQ ID NO: 501657 - DNA, 15 bp, Homo sapiens
gaccgagaaggtaga

SEQ ID NO: 501658 - DNA, 15 bp, Homo sapiens
accgagaaggtagac

SEQ ID NO: 501659 - DNA, 15 bp, Homo sapiens
ccgagaaggtagaca

SEQ ID NO: 501660 - DNA, 15 bp, Homo sapiens
cgagaaggtagacaa

SEQ ID NO: 501661 - DNA, 15 bp, Homo sapiens
gagaaggtagacaat

SEQ ID NO: 501662 - DNA, 15 bp, Homo sapiens
agaaggtagacaatt

SEQ ID NO: 501663 - DNA, 15 bp, Homo sapiens
gaaggtagacaattg

SEQ ID NO: 501664 - DNA, 15 bp, Homo sapiens
aaggtagacaattgc

SEQ ID NO: 501665 - DNA, 15 bp, Homo sapiens
aggtagacaattgca

SEQ ID NO: 501666 - DNA, 15 bp, Homo sapiens
ggtagacaattgcag

SEQ ID NO: 501667 - DNA, 15 bp, Homo sapiens
gtagacaattgcagc

SEQ ID NO: 501668 - DNA, 15 bp, Homo sapiens
tagacaattgcagcc

SEQ ID NO: 501669 - DNA, 15 bp, Homo sapiens
agacaattgcagcct

SEQ ID NO: 501670 - DNA, 15 bp, Homo sapiens
gacaattgcagcctg

SEQ ID NO: 501671 - DNA, 15 bp, Homo sapiens
acaattgcagcctgc

SEQ ID NO: 501672 - DNA, 15 bp, Homo sapiens
caattgcagcctgcg

SEQ ID NO: 501673 - DNA, 15 bp, Homo sapiens
aattgcagcctgcgg

SEQ ID NO: 501674 - DNA, 15 bp, Homo sapiens
attgcagcctgcgga

SEQ ID NO: 501675 - DNA, 15 bp, Homo sapiens
ttgcagcctgcggag

SEQ ID NO: 501676 - DNA, 15 bp, Homo sapiens
tgcagcctgcggaga

SEQ ID NO: 501677 - DNA, 15 bp, Homo sapiens
gcagcctgcggagag

SEQ ID NO: 501678 - DNA, 15 bp, Homo sapiens
cagcctgcggagagg

SEQ ID NO: 501679 - DNA, 15 bp, Homo sapiens
agcctgcggagaggc

SEQ ID NO: 501680 - DNA, 15 bp, Homo sapiens
gcctgcggagaggcc

SEQ ID NO: 501681 - DNA, 15 bp, Homo sapiens
cctgcggagaggcct

SEQ ID NO: 501682 - DNA, 15 bp, Homo sapiens
ctgcggagaggcctc

SEQ ID NO: 501683 - DNA, 15 bp, Homo sapiens
tgcggagaggcctcc

SEQ ID NO: 501684 - DNA, 15 bp, Homo sapiens
gcggagaggcctccc

SEQ ID NO: 501685 - DNA, 15 bp, Homo sapiens
cggagaggcctcccc

SEQ ID NO: 501686 - DNA, 15 bp, Homo sapiens
ggagaggcctcccca

SEQ ID NO: 501687 - DNA, 15 bp, Homo sapiens
gagaggcctccccag

SEQ ID NO: 501688 - DNA, 15 bp, Homo sapiens
agaggcctccccagc

SEQ ID NO: 501689 - DNA, 15 bp, Homo sapiens
gaggcctccccagct

SEQ ID NO: 501690 - DNA, 15 bp, Homo sapiens
aggcctccccagctc

SEQ ID NO: 501691 - DNA, 15 bp, Homo sapiens
ggcctccccagctca

SEQ ID NO: 501692 - DNA, 15 bp, Homo sapiens
gcctccccagctcag

SEQ ID NO: 501693 - DNA, 15 bp, Homo sapiens
cctccccagctcaga

SEQ ID NO: 501694 - DNA, 15 bp, Homo sapiens
ctccccagctcagac

SEQ ID NO: 501695 - DNA, 15 bp, Homo sapiens
tccccagctcagacc

SEQ ID NO: 501696 - DNA, 15 bp, Homo sapiens
ccccagctcagacct

SEQ ID NO: 501697 - DNA, 15 bp, Homo sapiens
cccagctcagacctg

SEQ ID NO: 501698 - DNA, 15 bp, Homo sapiens
ccagctcagacctgg

SEQ ID NO: 501699 - DNA, 15 bp, Homo sapiens
cagctcagacctggg

SEQ ID NO: 501700 - DNA, 15 bp, Homo sapiens
agctcagacctgggg

SEQ ID NO: 501701 - DNA, 15 bp, Homo sapiens
gctcagacctggggc

SEQ ID NO: 501702 - DNA, 15 bp, Homo sapiens
ctcagacctggggcc

SEQ ID NO: 501703 - DNA, 15 bp, Homo sapiens
tcagacctggggccc

SEQ ID NO: 501704 - DNA, 15 bp, Homo sapiens
cagacctggggcccc

SEQ ID NO: 501705 - DNA, 15 bp, Homo sapiens
agacctggggcccct

SEQ ID NO: 501706 - DNA, 15 bp, Homo sapiens
gacctggggccccta

SEQ ID NO: 501707 - DNA, 15 bp, Homo sapiens
acctggggcccctac

SEQ ID NO: 501708 - DNA, 15 bp, Homo sapiens
cctggggcccctacc

SEQ ID NO: 501709 - DNA, 15 bp, Homo sapiens
ctggggcccctacct

SEQ ID NO: 501710 - DNA, 15 bp, Homo sapiens
tggggcccctacctc

SEQ ID NO: 501711 - DNA, 15 bp, Homo sapiens
ggggcccctacctcc

SEQ ID NO: 501712 - DNA, 15 bp, Homo sapiens
gggcccctacctccc

SEQ ID NO: 501713 - DNA, 15 bp, Homo sapiens
ggcccctacctccct

SEQ ID NO: 501714 - DNA, 15 bp, Homo sapiens
gcccctacctcccta

SEQ ID NO: 501715 - DNA, 15 bp, Homo sapiens
cccctacctccctac

SEQ ID NO: 501716 - DNA, 15 bp, Homo sapiens
ccctacctccctaca

SEQ ID NO: 501717 - DNA, 15 bp, Homo sapiens
cctacctccctacag

SEQ ID NO: 501718 - DNA, 15 bp, Homo sapiens
ctacctccctacaga

SEQ ID NO: 501719 - DNA, 15 bp, Homo sapiens
tacctccctacagac

SEQ ID NO: 501720 - DNA, 15 bp, Homo sapiens
acctccctacagaca

SEQ ID NO: 501721 - DNA, 15 bp, Homo sapiens
cctccctacagacag

SEQ ID NO: 501722 - DNA, 15 bp, Homo sapiens
ctccctacagacaga

SEQ ID NO: 501723 - DNA, 15 bp, Homo sapiens
tccctacagacagag

SEQ ID NO: 501724 - DNA, 15 bp, Homo sapiens
ccctacagacagagc

SEQ ID NO: 501725 - DNA, 15 bp, Homo sapiens
cctacagacagagcc

SEQ ID NO: 501726 - DNA, 15 bp, Homo sapiens
ctacagacagagcca

SEQ ID NO: 501727 - DNA, 15 bp, Homo sapiens
tacagacagagccac

SEQ ID NO: 501728 - DNA, 15 bp, Homo sapiens
acagacagagccaca

SEQ ID NO: 501729 - DNA, 15 bp, Homo sapiens
cagacagagccacaa

SEQ ID NO: 501730 - DNA, 15 bp, Homo sapiens
agacagagccacaag

SEQ ID NO: 501731 - DNA, 15 bp, Homo sapiens
gacagagccacaagg

SEQ ID NO: 501732 - DNA, 15 bp, Homo sapiens
acagagccacaaggt

SEQ ID NO: 501733 - DNA, 15 bp, Homo sapiens
cagagccacaaggta

SEQ ID NO: 501734 - DNA, 15 bp, Homo sapiens
agagccacaaggtaa

SEQ ID NO: 501735 - DNA, 15 bp, Homo sapiens
gagccacaaggtaat

SEQ ID NO: 501736 - DNA, 15 bp, Homo sapiens
agccacaaggtaatc

SEQ ID NO: 501737 - DNA, 15 bp, Homo sapiens
gccacaaggtaatcc

SEQ ID NO: 501738 - DNA, 15 bp, Homo sapiens
ccacaaggtaatcct

SEQ ID NO: 501739 - DNA, 15 bp, Homo sapiens
cacaaggtaatcctg

SEQ ID NO: 501740 - DNA, 15 bp, Homo sapiens
acaaggtaatcctga

SEQ ID NO: 501741 - DNA, 15 bp, Homo sapiens
caaggtaatcctgaa

SEQ ID NO: 501742 - DNA, 15 bp, Homo sapiens
aaggtaatcctgaag

SEQ ID NO: 501743 - DNA, 15 bp, Homo sapiens
aggtaatcctgaagg

SEQ ID NO: 501744 - DNA, 15 bp, Homo sapiens
ggtaatcctgaaggc

SEQ ID NO: 501745 - DNA, 15 bp, Homo sapiens
gtaatcctgaaggca

SEQ ID NO: 501746 - DNA, 15 bp, Homo sapiens
taatcctgaaggcaa

SEQ ID NO: 501747 - DNA, 15 bp, Homo sapiens
aatcctgaaggcaat

SEQ ID NO: 501748 - DNA, 15 bp, Homo sapiens
atcctgaaggcaatc

SEQ ID NO: 501749 - DNA, 15 bp, Homo sapiens
tcctgaaggcaatca

SEQ ID NO: 501750 - DNA, 15 bp, Homo sapiens
cctgaaggcaatcac

SEQ ID NO: 501751 - DNA, 15 bp, Homo sapiens
ctgaaggcaatcacg

SEQ ID NO: 501752 - DNA, 15 bp, Homo sapiens
tgaaggcaatcacgg

SEQ ID NO: 501753 - DNA, 15 bp, Homo sapiens
gaaggcaatcacgga

SEQ ID NO: 501754 - DNA, 15 bp, Homo sapiens
aaggcaatcacggag

SEQ ID NO: 501755 - DNA, 15 bp, Homo sapiens
aggcaatcacggagg

SEQ ID NO: 501756 - DNA, 15 bp, Homo sapiens
ggcaatcacggaggt

SEQ ID NO: 501757 - DNA, 15 bp, Homo sapiens
gcaatcacggaggtg

SEQ ID NO: 501758 - DNA, 15 bp, Homo sapiens
caatcacggaggtga

SEQ ID NO: 501759 - DNA, 15 bp, Homo sapiens
aatcacggaggtgaa

SEQ ID NO: 501760 - DNA, 15 bp, Homo sapiens
atcacggaggtgaag

SEQ ID NO: 501761 - DNA, 15 bp, Homo sapiens
tcacggaggtgaagg

SEQ ID NO: 501762 - DNA, 15 bp, Homo sapiens
cacggaggtgaaggg

SEQ ID NO: 501763 - DNA, 15 bp, Homo sapiens
acggaggtgaagggg

SEQ ID NO: 501764 - DNA, 15 bp, Homo sapiens
cggaggtgaagggga

SEQ ID NO: 501765 - DNA, 15 bp, Homo sapiens
ggaggtgaaggggac

SEQ ID NO: 501766 - DNA, 15 bp, Homo sapiens
gaggtgaaggggaca

SEQ ID NO: 501767 - DNA, 15 bp, Homo sapiens
aggtgaaggggacag

SEQ ID NO: 501768 - DNA, 15 bp, Homo sapiens
ggtgaaggggacagc

SEQ ID NO: 501769 - DNA, 15 bp, Homo sapiens
gtgaaggggacagct

SEQ ID NO: 501770 - DNA, 15 bp, Homo sapiens
tgaaggggacagctg

SEQ ID NO: 501771 - DNA, 15 bp, Homo sapiens
gaaggggacagctgc

SEQ ID NO: 501772 - DNA, 15 bp, Homo sapiens
aaggggacagctgcc

SEQ ID NO: 501773 - DNA, 15 bp, Homo sapiens
aggggacagctgccc

SEQ ID NO: 501774 - DNA, 15 bp, Homo sapiens
ggggacagctgcccc

SEQ ID NO: 501775 - DNA, 15 bp, Homo sapiens
gggacagctgccccc

SEQ ID NO: 501776 - DNA, 15 bp, Homo sapiens
ggacagctgccccca

SEQ ID NO: 501777 - DNA, 15 bp, Homo sapiens
gacagctgcccccac

SEQ ID NO: 501778 - DNA, 15 bp, Homo sapiens
acagctgcccccacg

SEQ ID NO: 501779 - DNA, 15 bp, Homo sapiens
cagctgcccccacgg

SEQ ID NO: 501780 - DNA, 15 bp, Homo sapiens
agctgcccccacggc

SEQ ID NO: 501781 - DNA, 15 bp, Homo sapiens
gctgcccccacggca

SEQ ID NO: 501782 - DNA, 15 bp, Homo sapiens
ctgcccccacggcag

SEQ ID NO: 501783 - DNA, 15 bp, Homo sapiens
tgcccccacggcagc

SEQ ID NO: 501784 - DNA, 15 bp, Homo sapiens
gcccccacggcagcc

SEQ ID NO: 501785 - DNA, 15 bp, Homo sapiens
cccccacggcagccc

SEQ ID NO: 501786 - DNA, 15 bp, Homo sapiens
ccccacggcagccct

SEQ ID NO: 501787 - DNA, 15 bp, Homo sapiens
cccacggcagccctc

SEQ ID NO: 501788 - DNA, 15 bp, Homo sapiens
ccacggcagccctca

SEQ ID NO: 501789 - DNA, 15 bp, Homo sapiens
cacggcagccctcag

SEQ ID NO: 501790 - DNA, 15 bp, Homo sapiens
acggcagccctcagg

SEQ ID NO: 501791 - DNA, 15 bp, Homo sapiens
cggcagccctcaggg

SEQ ID NO: 501792 - DNA, 15 bp, Homo sapiens
ggcagccctcagggc

SEQ ID NO: 501793 - DNA, 15 bp, Homo sapiens
gcagccctcagggcc

SEQ ID NO: 501794 - DNA, 15 bp, Homo sapiens
cagccctcagggccc

SEQ ID NO: 501795 - DNA, 15 bp, Homo sapiens
agccctcagggcccg

SEQ ID NO: 501796 - DNA, 15 bp, Homo sapiens
gccctcagggcccgc

SEQ ID NO: 501797 - DNA, 15 bp, Homo sapiens
ccctcagggcccgct

SEQ ID NO: 501798 - DNA, 15 bp, Homo sapiens
cctcagggcccgctg

SEQ ID NO: 501799 - DNA, 15 bp, Homo sapiens
ctcagggcccgctgg

SEQ ID NO: 501800 - DNA, 15 bp, Homo sapiens
tcagggcccgctggc

SEQ ID NO: 501801 - DNA, 15 bp, Homo sapiens
cagggcccgctggcc

SEQ ID NO: 501802 - DNA, 15 bp, Homo sapiens
agggcccgctggccc

SEQ ID NO: 501803 - DNA, 15 bp, Homo sapiens
gggcccgctggcccc

SEQ ID NO: 501804 - DNA, 15 bp, Homo sapiens
ggcccgctggcccca

SEQ ID NO: 501805 - DNA, 15 bp, Homo sapiens
gcccgctggccccac

SEQ ID NO: 501806 - DNA, 15 bp, Homo sapiens
cccgctggccccacc

SEQ ID NO: 501807 - DNA, 15 bp, Homo sapiens
ccgctggccccacct

SEQ ID NO: 501808 - DNA, 15 bp, Homo sapiens
cgctggccccacctg

SEQ ID NO: 501809 - DNA, 15 bp, Homo sapiens
gctggccccacctgc

SEQ ID NO: 501810 - DNA, 15 bp, Homo sapiens
ctggccccacctgcc

SEQ ID NO: 501811 - DNA, 15 bp, Homo sapiens
tggccccacctgcca

SEQ ID NO: 501812 - DNA, 15 bp, Homo sapiens
ggccccacctgccag

SEQ ID NO: 501813 - DNA, 15 bp, Homo sapiens
gccccacctgccagc

SEQ ID NO: 501814 - DNA, 15 bp, Homo sapiens
ccccacctgccagcc

SEQ ID NO: 501815 - DNA, 15 bp, Homo sapiens
cccacctgccagccc

SEQ ID NO: 501816 - DNA, 15 bp, Homo sapiens
ccacctgccagccct

SEQ ID NO: 501817 - DNA, 15 bp, Homo sapiens
cacctgccagccctg

SEQ ID NO: 501818 - DNA, 15 bp, Homo sapiens
acctgccagccctgg

SEQ ID NO: 501819 - DNA, 15 bp, Homo sapiens
cctgccagccctggc

SEQ ID NO: 501820 - DNA, 15 bp, Homo sapiens
ctgccagccctggcc

SEQ ID NO: 501821 - DNA, 15 bp, Homo sapiens
tgccagccctggccc

SEQ ID NO: 501822 - DNA, 15 bp, Homo sapiens
gccagccctggccct

SEQ ID NO: 501823 - DNA, 15 bp, Homo sapiens
ccagccctggccctt

SEQ ID NO: 501824 - DNA, 15 bp, Homo sapiens
cagccctggcccttt

SEQ ID NO: 501825 - DNA, 15 bp, Homo sapiens
agccctggccctttt

SEQ ID NO: 501826 - DNA, 15 bp, Homo sapiens
gccctggcccttttg

SEQ ID NO: 501827 - DNA, 15 bp, Homo sapiens
ccctggcccttttgc

SEQ ID NO: 501828 - DNA, 15 bp, Homo sapiens
cctggcccttttgct

SEQ ID NO: 501829 - DNA, 15 bp, Homo sapiens
ctggcccttttgcta

SEQ ID NO: 501830 - DNA, 15 bp, Homo sapiens
tggcccttttgctac

SEQ ID NO: 501831 - DNA, 15 bp, Homo sapiens
ggcccttttgctacc

SEQ ID NO: 501832 - DNA, 15 bp, Homo sapiens
gcccttttgctacca

SEQ ID NO: 501833 - DNA, 15 bp, Homo sapiens
cccttttgctaccag

SEQ ID NO: 501834 - DNA, 15 bp, Homo sapiens
ccttttgctaccaga

SEQ ID NO: 501835 - DNA, 15 bp, Homo sapiens
cttttgctaccagat

SEQ ID NO: 501836 - DNA, 15 bp, Homo sapiens
ttttgctaccagatc

SEQ ID NO: 501837 - DNA, 15 bp, Homo sapiens
tttgctaccagatcc

SEQ ID NO: 501838 - DNA, 15 bp, Homo sapiens
ttgctaccagatccc

SEQ ID NO: 501839 - DNA, 15 bp, Homo sapiens
tgctaccagatcccc

SEQ ID NO: 501840 - DNA, 15 bp, Homo sapiens
gctaccagatccccg

SEQ ID NO: 501841 - DNA, 15 bp, Homo sapiens
ctaccagatccccgc

SEQ ID NO: 501842 - DNA, 15 bp, Homo sapiens
taccagatccccgct

SEQ ID NO: 501843 - DNA, 15 bp, Homo sapiens
accagatccccgctt

SEQ ID NO: 501844 - DNA, 15 bp, Homo sapiens
ccagatccccgcttt

SEQ ID NO: 501845 - DNA, 15 bp, Homo sapiens
cagatccccgctttt

SEQ ID NO: 501846 - DNA, 15 bp, Homo sapiens
agatccccgcttttc

SEQ ID NO: 501847 - DNA, 15 bp, Homo sapiens
gatccccgcttttca

SEQ ID NO: 501848 - DNA, 15 bp, Homo sapiens
atccccgcttttcat

SEQ ID NO: 501849 - DNA, 15 bp, Homo sapiens
tccccgcttttcatc

SEQ ID NO: 501850 - DNA, 15 bp, Homo sapiens
ccccgcttttcatct

SEQ ID NO: 501851 - DNA, 15 bp, Homo sapiens
cccgcttttcatctt

SEQ ID NO: 501852 - DNA, 15 bp, Homo sapiens
ccgcttttcatcttt

SEQ ID NO: 501853 - DNA, 15 bp, Homo sapiens
cgcttttcatcttta

SEQ ID NO: 501854 - DNA, 15 bp, Homo sapiens
gcttttcatctttat

SEQ ID NO: 501855 - DNA, 15 bp, Homo sapiens
cttttcatctttatg

SEQ ID NO: 501856 - DNA, 15 bp, Homo sapiens
ttttcatctttatga

SEQ ID NO: 501857 - DNA, 15 bp, Homo sapiens
tttcatctttatgag

SEQ ID NO: 501858 - DNA, 15 bp, Homo sapiens
ttcatctttatgaga

SEQ ID NO: 501859 - DNA, 15 bp, Homo sapiens
tcatctttatgagaa

SEQ ID NO: 501860 - DNA, 15 bp, Homo sapiens
catctttatgagaag

SEQ ID NO: 501861 - DNA, 15 bp, Homo sapiens
atctttatgagaaga

SEQ ID NO: 501862 - DNA, 15 bp, Homo sapiens
tctttatgagaagat

SEQ ID NO: 501863 - DNA, 15 bp, Homo sapiens
ctttatgagaagatc

SEQ ID NO: 501864 - DNA, 15 bp, Homo sapiens
tttatgagaagatcc

SEQ ID NO: 501865 - DNA, 15 bp, Homo sapiens
ttatgagaagatcct

SEQ ID NO: 501866 - DNA, 15 bp, Homo sapiens
tatgagaagatcctc

SEQ ID NO: 501867 - DNA, 15 bp, Homo sapiens
atgagaagatcctcc

SEQ ID NO: 501868 - DNA, 15 bp, Homo sapiens
tgagaagatcctccc

SEQ ID NO: 501869 - DNA, 15 bp, Homo sapiens
gagaagatcctccct

SEQ ID NO: 501870 - DNA, 15 bp, Homo sapiens
agaagatcctccctg

SEQ ID NO: 501871 - DNA, 15 bp, Homo sapiens
gaagatcctccctgc

SEQ ID NO: 501872 - DNA, 15 bp, Homo sapiens
aagatcctccctgct

SEQ ID NO: 501873 - DNA, 15 bp, Homo sapiens
agatcctccctgctg

SEQ ID NO: 501874 - DNA, 15 bp, Homo sapiens
gatcctccctgctgt

SEQ ID NO: 501875 - DNA, 15 bp, Homo sapiens
atcctccctgctgtc

SEQ ID NO: 501876 - DNA, 15 bp, Homo sapiens
tcctccctgctgtct

SEQ ID NO: 501877 - DNA, 15 bp, Homo sapiens
cctccctgctgtctc

SEQ ID NO: 501878 - DNA, 15 bp, Homo sapiens
ctccctgctgtctcg

SEQ ID NO: 501879 - DNA, 15 bp, Homo sapiens
tccctgctgtctcga

SEQ ID NO: 501880 - DNA, 15 bp, Homo sapiens
ccctgctgtctcgat

SEQ ID NO: 501881 - DNA, 15 bp, Homo sapiens
cctgctgtctcgatc

SEQ ID NO: 501882 - DNA, 15 bp, Homo sapiens
ctgctgtctcgatcc

SEQ ID NO: 501883 - DNA, 15 bp, Homo sapiens
tgctgtctcgatcct

SEQ ID NO: 501884 - DNA, 15 bp, Homo sapiens
gctgtctcgatcctc

SEQ ID NO: 501885 - DNA, 15 bp, Homo sapiens
ctgtctcgatcctcc

SEQ ID NO: 501886 - DNA, 15 bp, Homo sapiens
tgtctcgatcctcca

SEQ ID NO: 501887 - DNA, 15 bp, Homo sapiens
gtctcgatcctccag

SEQ ID NO: 501888 - DNA, 15 bp, Homo sapiens
tctcgatcctccagt

SEQ ID NO: 501889 - DNA, 15 bp, Homo sapiens
ctcgatcctccagtg

SEQ ID NO: 501890 - DNA, 15 bp, Homo sapiens
tcgatcctccagtgg

SEQ ID NO: 501891 - DNA, 15 bp, Homo sapiens
cgatcctccagtggg

SEQ ID NO: 501892 - DNA, 15 bp, Homo sapiens
gatcctccagtgggt

SEQ ID NO: 501893 - DNA, 15 bp, Homo sapiens
atcctccagtgggta

SEQ ID NO: 501894 - DNA, 15 bp, Homo sapiens
tcctccagtgggtat

SEQ ID NO: 501895 - DNA, 15 bp, Homo sapiens
cctccagtgggtatt

SEQ ID NO: 501896 - DNA, 15 bp, Homo sapiens
ctccagtgggtattt

SEQ ID NO: 501897 - DNA, 15 bp, Homo sapiens
tccagtgggtatttc

SEQ ID NO: 501898 - DNA, 15 bp, Homo sapiens
ccagtgggtatttct

SEQ ID NO: 501899 - DNA, 15 bp, Homo sapiens
cagtgggtatttctc

SEQ ID NO: 501900 - DNA, 15 bp, Homo sapiens
agtgggtatttctct

SEQ ID NO: 501901 - DNA, 15 bp, Homo sapiens
gtgggtatttctctt

SEQ ID NO: 501902 - DNA, 15 bp, Homo sapiens
tgggtatttctcttt

SEQ ID NO: 501903 - DNA, 15 bp, Homo sapiens
gggtatttctctttt

SEQ ID NO: 501904 - DNA, 15 bp, Homo sapiens
ggtatttctcttttg

SEQ ID NO: 501905 - DNA, 15 bp, Homo sapiens
gtatttctcttttga

SEQ ID NO: 501906 - DNA, 15 bp, Homo sapiens
tatttctcttttgac

SEQ ID NO: 501907 - DNA, 15 bp, Homo sapiens
atttctcttttgaca

SEQ ID NO: 501908 - DNA, 15 bp, Homo sapiens
tttctcttttgacac

SEQ ID NO: 501909 - DNA, 15 bp, Homo sapiens
ttctcttttgacaca

SEQ ID NO: 501910 - DNA, 15 bp, Homo sapiens
tctcttttgacacag

SEQ ID NO: 501911 - DNA, 15 bp, Homo sapiens
ctcttttgacacaga

SEQ ID NO: 501912 - DNA, 15 bp, Homo sapiens
tcttttgacacagac

SEQ ID NO: 501913 - DNA, 15 bp, Homo sapiens
cttttgacacagaca

SEQ ID NO: 501914 - DNA, 15 bp, Homo sapiens
ttttgacacagacag

SEQ ID NO: 501915 - DNA, 15 bp, Homo sapiens
tttgacacagacagg

SEQ ID NO: 501916 - DNA, 15 bp, Homo sapiens
ttgacacagacagga

SEQ ID NO: 501917 - DNA, 15 bp, Homo sapiens
tgacacagacaggag

SEQ ID NO: 501918 - DNA, 15 bp, Homo sapiens
gacacagacaggagc

SEQ ID NO: 501919 - DNA, 15 bp, Homo sapiens
acacagacaggagcc

SEQ ID NO: 501920 - DNA, 15 bp, Homo sapiens
cacagacaggagccc

SEQ ID NO: 501921 - DNA, 15 bp, Homo sapiens
acagacaggagccca

SEQ ID NO: 501922 - DNA, 15 bp, Homo sapiens
cagacaggagcccag

SEQ ID NO: 501923 - DNA, 15 bp, Homo sapiens
agacaggagcccagc

SEQ ID NO: 501924 - DNA, 15 bp, Homo sapiens
gacaggagcccagca

SEQ ID NO: 501925 - DNA, 15 bp, Homo sapiens
acaggagcccagcac

SEQ ID NO: 501926 - DNA, 15 bp, Homo sapiens
caggagcccagcacc

SEQ ID NO: 501927 - DNA, 15 bp, Homo sapiens
aggagcccagcaccc

SEQ ID NO: 501928 - DNA, 15 bp, Homo sapiens
ggagcccagcaccca

SEQ ID NO: 501929 - DNA, 15 bp, Homo sapiens
gagcccagcacccat

SEQ ID NO: 501930 - DNA, 15 bp, Homo sapiens
agcccagcacccatg

SEQ ID NO: 501931 - DNA, 15 bp, Homo sapiens
gcccagcacccatga

SEQ ID NO: 501932 - DNA, 15 bp, Homo sapiens
cccagcacccatgag

SEQ ID NO: 501933 - DNA, 15 bp, Homo sapiens
ccagcacccatgagt

SEQ ID NO: 501934 - DNA, 15 bp, Homo sapiens
cagcacccatgagtt

SEQ ID NO: 501935 - DNA, 15 bp, Homo sapiens
agcacccatgagttg

SEQ ID NO: 501936 - DNA, 15 bp, Homo sapiens
gcacccatgagttgt

SEQ ID NO: 501937 - DNA, 15 bp, Homo sapiens
cacccatgagttgtg

SEQ ID NO: 501938 - DNA, 15 bp, Homo sapiens
acccatgagttgtga

SEQ ID NO: 501939 - DNA, 15 bp, Homo sapiens
cccatgagttgtgac

SEQ ID NO: 501940 - DNA, 15 bp, Homo sapiens
ccatgagttgtgaca

SEQ ID NO: 501941 - DNA, 15 bp, Homo sapiens
catgagttgtgacaa

SEQ ID NO: 501942 - DNA, 15 bp, Homo sapiens
atgagttgtgacaaa

SEQ ID NO: 501943 - DNA, 15 bp, Homo sapiens
tgagttgtgacaaat

SEQ ID NO: 501944 - DNA, 15 bp, Homo sapiens
gagttgtgacaaatc

SEQ ID NO: 501945 - DNA, 15 bp, Homo sapiens
agttgtgacaaatca

SEQ ID NO: 501946 - DNA, 15 bp, Homo sapiens
gttgtgacaaatcaa

SEQ ID NO: 501947 - DNA, 15 bp, Homo sapiens
ttgtgacaaatcaac

SEQ ID NO: 501948 - DNA, 15 bp, Homo sapiens
tgtgacaaatcaaca

SEQ ID NO: 501949 - DNA, 15 bp, Homo sapiens
gtgacaaatcaacac

SEQ ID NO: 501950 - DNA, 15 bp, Homo sapiens
tgacaaatcaacaca

SEQ ID NO: 501951 - DNA, 15 bp, Homo sapiens
gacaaatcaacacaa

SEQ ID NO: 501952 - DNA, 15 bp, Homo sapiens
acaaatcaacacaaa

SEQ ID NO: 501953 - DNA, 15 bp, Homo sapiens
caaatcaacacaaac

SEQ ID NO: 501954 - DNA, 15 bp, Homo sapiens
aaatcaacacaaacc

SEQ ID NO: 501955 - DNA, 15 bp, Homo sapiens
aatcaacacaaaccc

SEQ ID NO: 501956 - DNA, 15 bp, Homo sapiens
atcaacacaaacccc

SEQ ID NO: 501957 - DNA, 15 bp, Homo sapiens
tcaacacaaacccca

SEQ ID NO: 501958 - DNA, 15 bp, Homo sapiens
caacacaaaccccaa

SEQ ID NO: 501959 - DNA, 15 bp, Homo sapiens
aacacaaaccccaag

SEQ ID NO: 501960 - DNA, 15 bp, Homo sapiens
acacaaaccccaagt

SEQ ID NO: 501961 - DNA, 15 bp, Homo sapiens
cacaaaccccaagtc

SEQ ID NO: 501962 - DNA, 15 bp, Homo sapiens
acaaaccccaagtcc

SEQ ID NO: 501963 - DNA, 15 bp, Homo sapiens
caaaccccaagtcct

SEQ ID NO: 501964 - DNA, 15 bp, Homo sapiens
aaaccccaagtcctc

SEQ ID NO: 501965 - DNA, 15 bp, Homo sapiens
aaccccaagtcctcc

SEQ ID NO: 501966 - DNA, 15 bp, Homo sapiens
accccaagtcctcct

SEQ ID NO: 501967 - DNA, 15 bp, Homo sapiens
ccccaagtcctcctt

SEQ ID NO: 501968 - DNA, 15 bp, Homo sapiens
cccaagtcctccttg

SEQ ID NO: 501969 - DNA, 15 bp, Homo sapiens
ccaagtcctccttgc

SEQ ID NO: 501970 - DNA, 15 bp, Homo sapiens
caagtcctccttgcc

SEQ ID NO: 501971 - DNA, 15 bp, Homo sapiens
aagtcctccttgcca

SEQ ID NO: 501972 - DNA, 15 bp, Homo sapiens
agtcctccttgccag

SEQ ID NO: 501973 - DNA, 15 bp, Homo sapiens
gtcctccttgccagg

SEQ ID NO: 501974 - DNA, 15 bp, Homo sapiens
tcctccttgccaggc

SEQ ID NO: 501975 - DNA, 15 bp, Homo sapiens
cctccttgccaggcc

SEQ ID NO: 501976 - DNA, 15 bp, Homo sapiens
ctccttgccaggcct

SEQ ID NO: 501977 - DNA, 15 bp, Homo sapiens
tccttgccaggcctt

SEQ ID NO: 501978 - DNA, 15 bp, Homo sapiens
ccttgccaggccttc

SEQ ID NO: 501979 - DNA, 15 bp, Homo sapiens
cttgccaggccttca

SEQ ID NO: 501980 - DNA, 15 bp, Homo sapiens
ttgccaggccttcaa

SEQ ID NO: 501981 - DNA, 15 bp, Homo sapiens
tgccaggccttcaac

SEQ ID NO: 501982 - DNA, 15 bp, Homo sapiens
gccaggccttcaacc

SEQ ID NO: 501983 - DNA, 15 bp, Homo sapiens
ccaggccttcaacca

SEQ ID NO: 501984 - DNA, 15 bp, Homo sapiens
caggccttcaaccac

SEQ ID NO: 501985 - DNA, 15 bp, Homo sapiens
aggccttcaaccact

SEQ ID NO: 501986 - DNA, 15 bp, Homo sapiens
ggccttcaaccacta

SEQ ID NO: 501987 - DNA, 15 bp, Homo sapiens
gccttcaaccactat

SEQ ID NO: 501988 - DNA, 15 bp, Homo sapiens
ccttcaaccactatc

SEQ ID NO: 501989 - DNA, 15 bp, Homo sapiens
cttcaaccactatct

SEQ ID NO: 501990 - DNA, 15 bp, Homo sapiens
ttcaaccactatctc

SEQ ID NO: 501991 - DNA, 15 bp, Homo sapiens
tcaaccactatctca

SEQ ID NO: 501992 - DNA, 15 bp, Homo sapiens
caaccactatctcag

SEQ ID NO: 501993 - DNA, 15 bp, Homo sapiens
aaccactatctcagt

SEQ ID NO: 501994 - DNA, 15 bp, Homo sapiens
accactatctcagtg

SEQ ID NO: 501995 - DNA, 15 bp, Homo sapiens
ccactatctcagtgc

SEQ ID NO: 501996 - DNA, 15 bp, Homo sapiens
cactatctcagtgca

SEQ ID NO: 501997 - DNA, 15 bp, Homo sapiens
actatctcagtgcaa

SEQ ID NO: 501998 - DNA, 15 bp, Homo sapiens
ctatctcagtgcaat

SEQ ID NO: 501999 - DNA, 15 bp, Homo sapiens
tatctcagtgcaatg

SEQ ID NO: 502000 - DNA, 15 bp, Homo sapiens
atctcagtgcaatgg

SEQ ID NO: 502001 - DNA, 15 bp, Homo sapiens
tctcagtgcaatggg

SEQ ID NO: 502002 - DNA, 15 bp, Homo sapiens
ctcagtgcaatgggt

SEQ ID NO: 502003 - DNA, 15 bp, Homo sapiens
tcagtgcaatgggta

SEQ ID NO: 502004 - DNA, 15 bp, Homo sapiens
cagtgcaatgggtaa

SEQ ID NO: 502005 - DNA, 15 bp, Homo sapiens
agtgcaatgggtaag

SEQ ID NO: 502006 - DNA, 15 bp, Homo sapiens
gtgcaatgggtaagc

SEQ ID NO: 502007 - DNA, 15 bp, Homo sapiens
tgcaatgggtaagca

SEQ ID NO: 502008 - DNA, 15 bp, Homo sapiens
gcaatgggtaagcaa

SEQ ID NO: 502009 - DNA, 15 bp, Homo sapiens
caatgggtaagcaat

SEQ ID NO: 502010 - DNA, 15 bp, Homo sapiens
aatgggtaagcaatg

SEQ ID NO: 502011 - DNA, 15 bp, Homo sapiens
atgggtaagcaatgc

SEQ ID NO: 502012 - DNA, 15 bp, Homo sapiens
tgggtaagcaatgcc

SEQ ID NO: 502013 - DNA, 15 bp, Homo sapiens
gggtaagcaatgcct

SEQ ID NO: 502014 - DNA, 15 bp, Homo sapiens
ggtaagcaatgcctg

SEQ ID NO: 502015 - DNA, 15 bp, Homo sapiens
gtaagcaatgcctgg

SEQ ID NO: 502016 - DNA, 15 bp, Homo sapiens
taagcaatgcctggg

SEQ ID NO: 502017 - DNA, 15 bp, Homo sapiens
aagcaatgcctgggt

SEQ ID NO: 502018 - DNA, 15 bp, Homo sapiens
agcaatgcctgggta

SEQ ID NO: 502019 - DNA, 15 bp, Homo sapiens
gcaatgcctgggtaa

SEQ ID NO: 502020 - DNA, 15 bp, Homo sapiens
caatgcctgggtaag

SEQ ID NO: 502021 - DNA, 15 bp, Homo sapiens
aatgcctgggtaaga

SEQ ID NO: 502022 - DNA, 15 bp, Homo sapiens
atgcctgggtaagag

SEQ ID NO: 502023 - DNA, 15 bp, Homo sapiens
tgcctgggtaagagg

SEQ ID NO: 502024 - DNA, 15 bp, Homo sapiens
gcctgggtaagaggc

SEQ ID NO: 502025 - DNA, 15 bp, Homo sapiens
cctgggtaagaggca

SEQ ID NO: 502026 - DNA, 15 bp, Homo sapiens
ctgggtaagaggcag

SEQ ID NO: 502027 - DNA, 15 bp, Homo sapiens
tgggtaagaggcagt

SEQ ID NO: 502028 - DNA, 15 bp, Homo sapiens
gggtaagaggcagtt

SEQ ID NO: 502029 - DNA, 15 bp, Homo sapiens
ggtaagaggcagttg

SEQ ID NO: 502030 - DNA, 15 bp, Homo sapiens
gtaagaggcagttga

SEQ ID NO: 502031 - DNA, 15 bp, Homo sapiens
taagaggcagttgac

SEQ ID NO: 502032 - DNA, 15 bp, Homo sapiens
aagaggcagttgacg

SEQ ID NO: 502033 - DNA, 15 bp, Homo sapiens
agaggcagttgacgt

SEQ ID NO: 502034 - DNA, 15 bp, Homo sapiens
gaggcagttgacgtg

SEQ ID NO: 502035 - DNA, 15 bp, Homo sapiens
aggcagttgacgtgt

SEQ ID NO: 502036 - DNA, 15 bp, Homo sapiens
ggcagttgacgtgtg

SEQ ID NO: 502037 - DNA, 15 bp, Homo sapiens
gcagttgacgtgtgg

SEQ ID NO: 502038 - DNA, 15 bp, Homo sapiens
cagttgacgtgtgga

SEQ ID NO: 502039 - DNA, 15 bp, Homo sapiens
agttgacgtgtggat

SEQ ID NO: 502040 - DNA, 15 bp, Homo sapiens
gttgacgtgtggatg

SEQ ID NO: 502041 - DNA, 15 bp, Homo sapiens
ttgacgtgtggatgg

SEQ ID NO: 502042 - DNA, 15 bp, Homo sapiens
tgacgtgtggatggt

SEQ ID NO: 502043 - DNA, 15 bp, Homo sapiens
gacgtgtggatggtt

SEQ ID NO: 502044 - DNA, 15 bp, Homo sapiens
acgtgtggatggttg

SEQ ID NO: 502045 - DNA, 15 bp, Homo sapiens
cgtgtggatggttga

SEQ ID NO: 502046 - DNA, 15 bp, Homo sapiens
gtgtggatggttgaa

SEQ ID NO: 502047 - DNA, 15 bp, Homo sapiens
tgtggatggttgaat

SEQ ID NO: 502048 - DNA, 15 bp, Homo sapiens
gtggatggttgaatc

SEQ ID NO: 502049 - DNA, 15 bp, Homo sapiens
tggatggttgaatct

SEQ ID NO: 502050 - DNA, 15 bp, Homo sapiens
ggatggttgaatctg

SEQ ID NO: 502051 - DNA, 15 bp, Homo sapiens
gatggttgaatctgc

SEQ ID NO: 502052 - DNA, 15 bp, Homo sapiens
atggttgaatctgct

SEQ ID NO: 502053 - DNA, 15 bp, Homo sapiens
tggttgaatctgctt

SEQ ID NO: 502054 - DNA, 15 bp, Homo sapiens
ggttgaatctgcttg

SEQ ID NO: 502055 - DNA, 15 bp, Homo sapiens
gttgaatctgcttga

SEQ ID NO: 502056 - DNA, 15 bp, Homo sapiens
ttgaatctgcttgaa

SEQ ID NO: 502057 - DNA, 15 bp, Homo sapiens
tgaatctgcttgaag

SEQ ID NO: 502058 - DNA, 15 bp, Homo sapiens
gaatctgcttgaagg

SEQ ID NO: 502059 - DNA, 15 bp, Homo sapiens
aatctgcttgaaggc

SEQ ID NO: 502060 - DNA, 15 bp, Homo sapiens
atctgcttgaaggct

SEQ ID NO: 502061 - DNA, 15 bp, Homo sapiens
tctgcttgaaggctg

SEQ ID NO: 502062 - DNA, 15 bp, Homo sapiens
ctgcttgaaggctgt

SEQ ID NO: 502063 - DNA, 15 bp, Homo sapiens
tgcttgaaggctgtg

SEQ ID NO: 502064 - DNA, 15 bp, Homo sapiens
gcttgaaggctgtgt

SEQ ID NO: 502065 - DNA, 15 bp, Homo sapiens
cttgaaggctgtgtg

SEQ ID NO: 502066 - DNA, 15 bp, Homo sapiens
ttgaaggctgtgtgt

SEQ ID NO: 502067 - DNA, 15 bp, Homo sapiens
tgaaggctgtgtgtg

SEQ ID NO: 502068 - DNA, 15 bp, Homo sapiens
gaaggctgtgtgtgg

SEQ ID NO: 502069 - DNA, 15 bp, Homo sapiens
aaggctgtgtgtggc

SEQ ID NO: 502070 - DNA, 15 bp, Homo sapiens
aggctgtgtgtggca

SEQ ID NO: 502071 - DNA, 15 bp, Homo sapiens
ggctgtgtgtggcat

SEQ ID NO: 502072 - DNA, 15 bp, Homo sapiens
gctgtgtgtggcatt

SEQ ID NO: 502073 - DNA, 15 bp, Homo sapiens
ctgtgtgtggcattt

SEQ ID NO: 502074 - DNA, 15 bp, Homo sapiens
tgtgtgtggcattta

SEQ ID NO: 502075 - DNA, 15 bp, Homo sapiens
gtgtgtggcatttaa

SEQ ID NO: 502076 - DNA, 15 bp, Homo sapiens
tgtgtggcatttaaa

SEQ ID NO: 502077 - DNA, 15 bp, Homo sapiens
gtgtggcatttaaaa

SEQ ID NO: 502078 - DNA, 15 bp, Homo sapiens
tgtggcatttaaaat

SEQ ID NO: 502079 - DNA, 15 bp, Homo sapiens
gtggcatttaaaatc

SEQ ID NO: 502080 - DNA, 15 bp, Homo sapiens
tggcatttaaaatcc

SEQ ID NO: 502081 - DNA, 15 bp, Homo sapiens
ggcatttaaaatccc

SEQ ID NO: 502082 - DNA, 15 bp, Homo sapiens
gcatttaaaatcccc

SEQ ID NO: 502083 - DNA, 15 bp, Homo sapiens
catttaaaatcccct

SEQ ID NO: 502084 - DNA, 15 bp, Homo sapiens
atttaaaatcccctt

SEQ ID NO: 502085 - DNA, 15 bp, Homo sapiens
tttaaaatccccttt

SEQ ID NO: 502086 - DNA, 15 bp, Homo sapiens
ttaaaatcccctttt

SEQ ID NO: 502087 - DNA, 15 bp, Homo sapiens
taaaatcccctttta

SEQ ID NO: 502088 - DNA, 15 bp, Homo sapiens
aaaatccccttttaa

SEQ ID NO: 502089 - DNA, 15 bp, Homo sapiens
aaatccccttttaaa

SEQ ID NO: 502090 - DNA, 15 bp, Homo sapiens
aatccccttttaaaa

SEQ ID NO: 502091 - DNA, 15 bp, Homo sapiens
atccccttttaaaac

SEQ ID NO: 502092 - DNA, 15 bp, Homo sapiens
tccccttttaaaacc

SEQ ID NO: 502093 - DNA, 15 bp, Homo sapiens
ccccttttaaaaccc

SEQ ID NO: 502094 - DNA, 15 bp, Homo sapiens
cccttttaaaacccc

SEQ ID NO: 502095 - DNA, 15 bp, Homo sapiens
ccttttaaaaccccg

SEQ ID NO: 502096 - DNA, 15 bp, Homo sapiens
cttttaaaaccccgt

SEQ ID NO: 502097 - DNA, 15 bp, Homo sapiens
ttttaaaaccccgta

SEQ ID NO: 502098 - DNA, 15 bp, Homo sapiens
tttaaaaccccgtaa

SEQ ID NO: 502099 - DNA, 15 bp, Homo sapiens
ttaaaaccccgtaac

SEQ ID NO: 502100 - DNA, 15 bp, Homo sapiens
taaaaccccgtaact

SEQ ID NO: 502101 - DNA, 15 bp, Homo sapiens
aaaaccccgtaactg

SEQ ID NO: 502102 - DNA, 15 bp, Homo sapiens
aaaccccgtaactga

SEQ ID NO: 502103 - DNA, 15 bp, Homo sapiens
aaccccgtaactgat

SEQ ID NO: 502104 - DNA, 15 bp, Homo sapiens
accccgtaactgatt

SEQ ID NO: 502105 - DNA, 15 bp, Homo sapiens
ccccgtaactgattt

SEQ ID NO: 502106 - DNA, 15 bp, Homo sapiens
cccgtaactgattta

SEQ ID NO: 502107 - DNA, 15 bp, Homo sapiens
ccgtaactgatttat

SEQ ID NO: 502108 - DNA, 15 bp, Homo sapiens
cgtaactgatttatt

SEQ ID NO: 502109 - DNA, 15 bp, Homo sapiens
gtaactgatttattc

SEQ ID NO: 502110 - DNA, 15 bp, Homo sapiens
taactgatttattcc

SEQ ID NO: 502111 - DNA, 15 bp, Homo sapiens
aactgatttattcca

SEQ ID NO: 502112 - DNA, 15 bp, Homo sapiens
actgatttattccat

SEQ ID NO: 502113 - DNA, 15 bp, Homo sapiens
ctgatttattccatc

SEQ ID NO: 502114 - DNA, 15 bp, Homo sapiens
tgatttattccatct

SEQ ID NO: 502115 - DNA, 15 bp, Homo sapiens
gatttattccatctt

SEQ ID NO: 502116 - DNA, 15 bp, Homo sapiens
atttattccatcttt

SEQ ID NO: 502117 - DNA, 15 bp, Homo sapiens
tttattccatcttta

SEQ ID NO: 502118 - DNA, 15 bp, Homo sapiens
ttattccatctttag

SEQ ID NO: 502119 - DNA, 15 bp, Homo sapiens
tattccatctttaga

SEQ ID NO: 502120 - DNA, 15 bp, Homo sapiens
attccatctttagat

SEQ ID NO: 502121 - DNA, 15 bp, Homo sapiens
ttccatctttagatg

SEQ ID NO: 502122 - DNA, 15 bp, Homo sapiens
tccatctttagatgg

SEQ ID NO: 502123 - DNA, 15 bp, Homo sapiens
ccatctttagatggg

SEQ ID NO: 502124 - DNA, 15 bp, Homo sapiens
catctttagatggga

SEQ ID NO: 502125 - DNA, 15 bp, Homo sapiens
atctttagatgggaa

SEQ ID NO: 502126 - DNA, 15 bp, Homo sapiens
tctttagatgggaat

SEQ ID NO: 502127 - DNA, 15 bp, Homo sapiens
ctttagatgggaatg

SEQ ID NO: 502128 - DNA, 15 bp, Homo sapiens
tttagatgggaatgg

SEQ ID NO: 502129 - DNA, 15 bp, Homo sapiens
ttagatgggaatgga

SEQ ID NO: 502130 - DNA, 15 bp, Homo sapiens
tagatgggaatggag

SEQ ID NO: 502131 - DNA, 15 bp, Homo sapiens
agatgggaatggagg

SEQ ID NO: 502132 - DNA, 15 bp, Homo sapiens
gatgggaatggagga

SEQ ID NO: 502133 - DNA, 15 bp, Homo sapiens
atgggaatggaggat

SEQ ID NO: 502134 - DNA, 15 bp, Homo sapiens
tgggaatggaggatg

SEQ ID NO: 502135 - DNA, 15 bp, Homo sapiens
gggaatggaggatgt

SEQ ID NO: 502136 - DNA, 15 bp, Homo sapiens
ggaatggaggatgtg

SEQ ID NO: 502137 - DNA, 15 bp, Homo sapiens
gaatggaggatgtgt

SEQ ID NO: 502138 - DNA, 15 bp, Homo sapiens
aatggaggatgtgtc

SEQ ID NO: 502139 - DNA, 15 bp, Homo sapiens
atggaggatgtgtca

SEQ ID NO: 502140 - DNA, 15 bp, Homo sapiens
tggaggatgtgtcaa

SEQ ID NO: 502141 - DNA, 15 bp, Homo sapiens
ggaggatgtgtcaaa

SEQ ID NO: 502142 - DNA, 15 bp, Homo sapiens
gaggatgtgtcaaac

SEQ ID NO: 502143 - DNA, 15 bp, Homo sapiens
aggatgtgtcaaact

SEQ ID NO: 502144 - DNA, 15 bp, Homo sapiens
ggatgtgtcaaacta

SEQ ID NO: 502145 - DNA, 15 bp, Homo sapiens
gatgtgtcaaactat

SEQ ID NO: 502146 - DNA, 15 bp, Homo sapiens
atgtgtcaaactatc

SEQ ID NO: 502147 - DNA, 15 bp, Homo sapiens
tgtgtcaaactatca

SEQ ID NO: 502148 - DNA, 15 bp, Homo sapiens
gtgtcaaactatcaa

SEQ ID NO: 502149 - DNA, 15 bp, Homo sapiens
tgtcaaactatcaaa

SEQ ID NO: 502150 - DNA, 15 bp, Homo sapiens
gtcaaactatcaaac

SEQ ID NO: 502151 - DNA, 15 bp, Homo sapiens
tcaaactatcaaacc

SEQ ID NO: 502152 - DNA, 15 bp, Homo sapiens
caaactatcaaacca

SEQ ID NO: 502153 - DNA, 15 bp, Homo sapiens
aaactatcaaaccaa

SEQ ID NO: 502154 - DNA, 15 bp, Homo sapiens
aactatcaaaccaac

SEQ ID NO: 502155 - DNA, 15 bp, Homo sapiens
actatcaaaccaact

SEQ ID NO: 502156 - DNA, 15 bp, Homo sapiens
ctatcaaaccaactt

SEQ ID NO: 502157 - DNA, 15 bp, Homo sapiens
tatcaaaccaacttt

SEQ ID NO: 502158 - DNA, 15 bp, Homo sapiens
atcaaaccaactttt

SEQ ID NO: 502159 - DNA, 15 bp, Homo sapiens
tcaaaccaacttttt

SEQ ID NO: 502160 - DNA, 15 bp, Homo sapiens
caaaccaactttttt

SEQ ID NO: 502161 - DNA, 15 bp, Homo sapiens
aaaccaacttttttt

SEQ ID NO: 502162 - DNA, 15 bp, Homo sapiens
aaccaactttttttt

SEQ ID NO: 502163 - DNA, 15 bp, Homo sapiens
accaacttttttttt

SEQ ID NO: 502164 - DNA, 15 bp, Homo sapiens
ccaactttttttttt

SEQ ID NO: 502165 - DNA, 15 bp, Homo sapiens
caacttttttttttt

SEQ ID NO: 502166 - DNA, 15 bp, Homo sapiens
aactttttttttttt

SEQ ID NO: 502167 - DNA, 15 bp, Homo sapiens
acttttttttttttt

SEQ ID NO: 502168 - DNA, 15 bp, Homo sapiens
ctttttttttttttt

SEQ ID NO: 502169 - DNA, 15 bp, Homo sapiens
ttttttttttgagat

SEQ ID NO: 502170 - DNA, 15 bp, Homo sapiens
tttttttttgagatg

SEQ ID NO: 502171 - DNA, 15 bp, Homo sapiens
ttttttttgagatga

SEQ ID NO: 502172 - DNA, 15 bp, Homo sapiens
tttttttgagatgag

SEQ ID NO: 502173 - DNA, 15 bp, Homo sapiens
ttttttgagatgagt

SEQ ID NO: 502174 - DNA, 15 bp, Homo sapiens
tttttgagatgagtc

SEQ ID NO: 502175 - DNA, 15 bp, Homo sapiens
ttttgagatgagtct

SEQ ID NO: 502176 - DNA, 15 bp, Homo sapiens
tttgagatgagtctt

SEQ ID NO: 502177 - DNA, 15 bp, Homo sapiens
ttgagatgagtcttg

SEQ ID NO: 502178 - DNA, 15 bp, Homo sapiens
tgagatgagtcttgc

SEQ ID NO: 502179 - DNA, 15 bp, Homo sapiens
gagatgagtcttgct

SEQ ID NO: 502180 - DNA, 15 bp, Homo sapiens
agatgagtcttgctc

SEQ ID NO: 502181 - DNA, 15 bp, Homo sapiens
gatgagtcttgctct

SEQ ID NO: 502182 - DNA, 15 bp, Homo sapiens
atgagtcttgctctg

SEQ ID NO: 502183 - DNA, 15 bp, Homo sapiens
tgagtcttgctctgt

SEQ ID NO: 502184 - DNA, 15 bp, Homo sapiens
gagtcttgctctgtc

SEQ ID NO: 502185 - DNA, 15 bp, Homo sapiens
agtcttgctctgtcg

SEQ ID NO: 502186 - DNA, 15 bp, Homo sapiens
gtcttgctctgtcgc

SEQ ID NO: 502187 - DNA, 15 bp, Homo sapiens
tcttgctctgtcgcc

SEQ ID NO: 502188 - DNA, 15 bp, Homo sapiens
cttgctctgtcgccc

SEQ ID NO: 502189 - DNA, 15 bp, Homo sapiens
ttgctctgtcgccca

SEQ ID NO: 502190 - DNA, 15 bp, Homo sapiens
tgctctgtcgcccag

SEQ ID NO: 502191 - DNA, 15 bp, Homo sapiens
gctctgtcgcccagg

SEQ ID NO: 502192 - DNA, 15 bp, Homo sapiens
ctctgtcgcccaggc

SEQ ID NO: 502193 - DNA, 15 bp, Homo sapiens
tctgtcgcccaggct

SEQ ID NO: 502194 - DNA, 15 bp, Homo sapiens
ctgtcgcccaggctg

SEQ ID NO: 502195 - DNA, 15 bp, Homo sapiens
tgtcgcccaggctgg

SEQ ID NO: 502196 - DNA, 15 bp, Homo sapiens
gtcgcccaggctgga

SEQ ID NO: 502197 - DNA, 15 bp, Homo sapiens
tcgcccaggctggag

SEQ ID NO: 502198 - DNA, 15 bp, Homo sapiens
cgcccaggctggagt

SEQ ID NO: 502199 - DNA, 15 bp, Homo sapiens
gcccaggctggagtg

SEQ ID NO: 502200 - DNA, 15 bp, Homo sapiens
ctggagtgcagtggt

SEQ ID NO: 502201 - DNA, 15 bp, Homo sapiens
tggagtgcagtggtg

SEQ ID NO: 502202 - DNA, 15 bp, Homo sapiens
ggagtgcagtggtgc

SEQ ID NO: 502203 - DNA, 15 bp, Homo sapiens
gagtgcagtggtgca

SEQ ID NO: 502204 - DNA, 15 bp, Homo sapiens
agtgcagtggtgcaa

SEQ ID NO: 502205 - DNA, 15 bp, Homo sapiens
gtgcagtggtgcaat

SEQ ID NO: 502206 - DNA, 15 bp, Homo sapiens
tgcagtggtgcaatc

SEQ ID NO: 502207 - DNA, 15 bp, Homo sapiens
gcagtggtgcaatct

SEQ ID NO: 502208 - DNA, 15 bp, Homo sapiens
cagtggtgcaatctc

SEQ ID NO: 502209 - DNA, 15 bp, Homo sapiens
agtggtgcaatctca

SEQ ID NO: 502210 - DNA, 15 bp, Homo sapiens
gtggtgcaatctcag

SEQ ID NO: 502211 - DNA, 15 bp, Homo sapiens
tggtgcaatctcagc

SEQ ID NO: 502212 - DNA, 15 bp, Homo sapiens
ggtgcaatctcagct

SEQ ID NO: 502213 - DNA, 15 bp, Homo sapiens
gtgcaatctcagctc

SEQ ID NO: 502214 - DNA, 15 bp, Homo sapiens
tgcaatctcagctca

SEQ ID NO: 502215 - DNA, 15 bp, Homo sapiens
gcaatctcagctcac

SEQ ID NO: 502216 - DNA, 15 bp, Homo sapiens
caatctcagctcacc

SEQ ID NO: 502217 - DNA, 15 bp, Homo sapiens
aatctcagctcaccg

SEQ ID NO: 502218 - DNA, 15 bp, Homo sapiens
atctcagctcaccgc

SEQ ID NO: 502219 - DNA, 15 bp, Homo sapiens
tctcagctcaccgca

SEQ ID NO: 502220 - DNA, 15 bp, Homo sapiens
ctcagctcaccgcaa

SEQ ID NO: 502221 - DNA, 15 bp, Homo sapiens
tcagctcaccgcaag

SEQ ID NO: 502222 - DNA, 15 bp, Homo sapiens
cagctcaccgcaagc

SEQ ID NO: 502223 - DNA, 15 bp, Homo sapiens
agctcaccgcaagct

SEQ ID NO: 502224 - DNA, 15 bp, Homo sapiens
gctcaccgcaagctc

SEQ ID NO: 502225 - DNA, 15 bp, Homo sapiens
ctcaccgcaagctcc

SEQ ID NO: 502226 - DNA, 15 bp, Homo sapiens
tcaccgcaagctcca

SEQ ID NO: 502227 - DNA, 15 bp, Homo sapiens
caccgcaagctccac

SEQ ID NO: 502228 - DNA, 15 bp, Homo sapiens
accgcaagctccacc

SEQ ID NO: 502229 - DNA, 15 bp, Homo sapiens
ccgcaagctccacct

SEQ ID NO: 502230 - DNA, 15 bp, Homo sapiens
cgcaagctccacctc

SEQ ID NO: 502231 - DNA, 15 bp, Homo sapiens
gcaagctccacctcc

SEQ ID NO: 502232 - DNA, 15 bp, Homo sapiens
caagctccacctccc

SEQ ID NO: 502233 - DNA, 15 bp, Homo sapiens
aagctccacctcccg

SEQ ID NO: 502234 - DNA, 15 bp, Homo sapiens
agctccacctcccgg

SEQ ID NO: 502235 - DNA, 15 bp, Homo sapiens
gctccacctcccggg

SEQ ID NO: 502236 - DNA, 15 bp, Homo sapiens
ctccacctcccgggt

SEQ ID NO: 502237 - DNA, 15 bp, Homo sapiens
tccacctcccgggtt

SEQ ID NO: 502238 - DNA, 15 bp, Homo sapiens
ccacctcccgggttc

SEQ ID NO: 502239 - DNA, 15 bp, Homo sapiens
cacctcccgggttca

SEQ ID NO: 502240 - DNA, 15 bp, Homo sapiens
acctcccgggttcaa

SEQ ID NO: 502241 - DNA, 15 bp, Homo sapiens
cctcccgggttcaag

SEQ ID NO: 502242 - DNA, 15 bp, Homo sapiens
ctcccgggttcaagc

SEQ ID NO: 502243 - DNA, 15 bp, Homo sapiens
tcccgggttcaagca

SEQ ID NO: 502244 - DNA, 15 bp, Homo sapiens
cccgggttcaagcaa

SEQ ID NO: 502245 - DNA, 15 bp, Homo sapiens
ccgggttcaagcaat

SEQ ID NO: 502246 - DNA, 15 bp, Homo sapiens
cgggttcaagcaatt

SEQ ID NO: 502247 - DNA, 15 bp, Homo sapiens
gggttcaagcaattc

SEQ ID NO: 502248 - DNA, 15 bp, Homo sapiens
gttcaagcaattctc

SEQ ID NO: 502249 - DNA, 15 bp, Homo sapiens
ttcaagcaattctcc

SEQ ID NO: 502250 - DNA, 15 bp, Homo sapiens
tcaagcaattctcct

SEQ ID NO: 502251 - DNA, 15 bp, Homo sapiens
caagcaattctccta

SEQ ID NO: 502252 - DNA, 15 bp, Homo sapiens
aagcaattctcctac

SEQ ID NO: 502253 - DNA, 15 bp, Homo sapiens
agcaattctcctacc

SEQ ID NO: 502254 - DNA, 15 bp, Homo sapiens
gcaattctcctacct

SEQ ID NO: 502255 - DNA, 15 bp, Homo sapiens
caattctcctacctc

SEQ ID NO: 502256 - DNA, 15 bp, Homo sapiens
aattctcctacctca

SEQ ID NO: 502257 - DNA, 15 bp, Homo sapiens
attctcctacctcag

SEQ ID NO: 502258 - DNA, 15 bp, Homo sapiens
ttctcctacctcagc

SEQ ID NO: 502259 - DNA, 15 bp, Homo sapiens
tctcctacctcagcc

SEQ ID NO: 502260 - DNA, 15 bp, Homo sapiens
ctcctacctcagcct

SEQ ID NO: 502261 - DNA, 15 bp, Homo sapiens
tcctacctcagcctc

SEQ ID NO: 502262 - DNA, 15 bp, Homo sapiens
cctacctcagcctcc

SEQ ID NO: 502263 - DNA, 15 bp, Homo sapiens
ctacctcagcctcca

SEQ ID NO: 502264 - DNA, 15 bp, Homo sapiens
tacctcagcctccag

SEQ ID NO: 502265 - DNA, 15 bp, Homo sapiens
acctcagcctccaga

SEQ ID NO: 502266 - DNA, 15 bp, Homo sapiens
cctcagcctccagag

SEQ ID NO: 502267 - DNA, 15 bp, Homo sapiens
ctcagcctccagagt

SEQ ID NO: 502268 - DNA, 15 bp, Homo sapiens
tcagcctccagagta

SEQ ID NO: 502269 - DNA, 15 bp, Homo sapiens
cagcctccagagtag

SEQ ID NO: 502270 - DNA, 15 bp, Homo sapiens
agcctccagagtagc

SEQ ID NO: 502271 - DNA, 15 bp, Homo sapiens
gcctccagagtagct

SEQ ID NO: 502272 - DNA, 15 bp, Homo sapiens
cctccagagtagctg

SEQ ID NO: 502273 - DNA, 15 bp, Homo sapiens
ctccagagtagctgg

SEQ ID NO: 502274 - DNA, 15 bp, Homo sapiens
tccagagtagctggg

SEQ ID NO: 502275 - DNA, 15 bp, Homo sapiens
ccagagtagctggga

SEQ ID NO: 502276 - DNA, 15 bp, Homo sapiens
cagagtagctgggac

SEQ ID NO: 502277 - DNA, 15 bp, Homo sapiens
agagtagctgggact

SEQ ID NO: 502278 - DNA, 15 bp, Homo sapiens
gagtagctgggacta

SEQ ID NO: 502279 - DNA, 15 bp, Homo sapiens
agtagctgggactac

SEQ ID NO: 502280 - DNA, 15 bp, Homo sapiens
gtagctgggactaca

SEQ ID NO: 502281 - DNA, 15 bp, Homo sapiens
tagctgggactacag

SEQ ID NO: 502282 - DNA, 15 bp, Homo sapiens
agctgggactacagg

SEQ ID NO: 502283 - DNA, 15 bp, Homo sapiens
gctgggactacaggc

SEQ ID NO: 502284 - DNA, 15 bp, Homo sapiens
ctgggactacaggcg

SEQ ID NO: 502285 - DNA, 15 bp, Homo sapiens
tgggactacaggcgc

SEQ ID NO: 502286 - DNA, 15 bp, Homo sapiens
gggactacaggcgcg

SEQ ID NO: 502287 - DNA, 15 bp, Homo sapiens
ggactacaggcgcgt

SEQ ID NO: 502288 - DNA, 15 bp, Homo sapiens
gactacaggcgcgtg

SEQ ID NO: 502289 - DNA, 15 bp, Homo sapiens
actacaggcgcgtgc

SEQ ID NO: 502290 - DNA, 15 bp, Homo sapiens
ctacaggcgcgtgcc

SEQ ID NO: 502291 - DNA, 15 bp, Homo sapiens
tacaggcgcgtgcca

SEQ ID NO: 502292 - DNA, 15 bp, Homo sapiens
acaggcgcgtgccac

SEQ ID NO: 502293 - DNA, 15 bp, Homo sapiens
caggcgcgtgccacc

SEQ ID NO: 502294 - DNA, 15 bp, Homo sapiens
aggcgcgtgccacca

SEQ ID NO: 502295 - DNA, 15 bp, Homo sapiens
ggcgcgtgccaccac

SEQ ID NO: 502296 - DNA, 15 bp, Homo sapiens
gcgcgtgccaccacg

SEQ ID NO: 502297 - DNA, 15 bp, Homo sapiens
cgcgtgccaccacgc

SEQ ID NO: 502298 - DNA, 15 bp, Homo sapiens
gcgtgccaccacgcc

SEQ ID NO: 502299 - DNA, 15 bp, Homo sapiens
cgtgccaccacgccc

SEQ ID NO: 502300 - DNA, 15 bp, Homo sapiens
gtgccaccacgccca

SEQ ID NO: 502301 - DNA, 15 bp, Homo sapiens
tgccaccacgcccag

SEQ ID NO: 502302 - DNA, 15 bp, Homo sapiens
gccaccacgcccagc

SEQ ID NO: 502303 - DNA, 15 bp, Homo sapiens
ccaccacgcccagct

SEQ ID NO: 502304 - DNA, 15 bp, Homo sapiens
caccacgcccagcta

SEQ ID NO: 502305 - DNA, 15 bp, Homo sapiens
accacgcccagctaa

SEQ ID NO: 502306 - DNA, 15 bp, Homo sapiens
ccacgcccagctaat

SEQ ID NO: 502307 - DNA, 15 bp, Homo sapiens
cacgcccagctaatt

SEQ ID NO: 502308 - DNA, 15 bp, Homo sapiens
acgcccagctaattt

SEQ ID NO: 502309 - DNA, 15 bp, Homo sapiens
cgcccagctaatttt

SEQ ID NO: 502310 - DNA, 15 bp, Homo sapiens
gcccagctaattttt

SEQ ID NO: 502311 - DNA, 15 bp, Homo sapiens
cccagctaatttttt

SEQ ID NO: 502312 - DNA, 15 bp, Homo sapiens
ccagctaattttttc

SEQ ID NO: 502313 - DNA, 15 bp, Homo sapiens
cagctaattttttct

SEQ ID NO: 502314 - DNA, 15 bp, Homo sapiens
agctaattttttcta

SEQ ID NO: 502315 - DNA, 15 bp, Homo sapiens
gctaattttttctat

SEQ ID NO: 502316 - DNA, 15 bp, Homo sapiens
ctaattttttctatt

SEQ ID NO: 502317 - DNA, 15 bp, Homo sapiens
taattttttctattt

SEQ ID NO: 502318 - DNA, 15 bp, Homo sapiens
aattttttctatttt

SEQ ID NO: 502319 - DNA, 15 bp, Homo sapiens
attttttctattttt

SEQ ID NO: 502320 - DNA, 15 bp, Homo sapiens
ttttttctatttttg

SEQ ID NO: 502321 - DNA, 15 bp, Homo sapiens
tttttctatttttgg

SEQ ID NO: 502322 - DNA, 15 bp, Homo sapiens
ttttctatttttggt

SEQ ID NO: 502323 - DNA, 15 bp, Homo sapiens
tttctatttttggta

SEQ ID NO: 502324 - DNA, 15 bp, Homo sapiens
ttctatttttggtag

SEQ ID NO: 502325 - DNA, 15 bp, Homo sapiens
tctatttttggtaga

SEQ ID NO: 502326 - DNA, 15 bp, Homo sapiens
ctatttttggtagag

SEQ ID NO: 502327 - DNA, 15 bp, Homo sapiens
tatttttggtagaga

SEQ ID NO: 502328 - DNA, 15 bp, Homo sapiens
atttttggtagagat

SEQ ID NO: 502329 - DNA, 15 bp, Homo sapiens
tttttggtagagatg

SEQ ID NO: 502330 - DNA, 15 bp, Homo sapiens
ttttggtagagatgg

SEQ ID NO: 502331 - DNA, 15 bp, Homo sapiens
tttggtagagatggg

SEQ ID NO: 502332 - DNA, 15 bp, Homo sapiens
ttggtagagatgggg

SEQ ID NO: 502333 - DNA, 15 bp, Homo sapiens
tggtagagatggggt

SEQ ID NO: 502334 - DNA, 15 bp, Homo sapiens
ggtagagatggggtt

SEQ ID NO: 502335 - DNA, 15 bp, Homo sapiens
gatggggtttcaccg

SEQ ID NO: 502336 - DNA, 15 bp, Homo sapiens
atggggtttcaccgt

SEQ ID NO: 502337 - DNA, 15 bp, Homo sapiens
tggggtttcaccgtg

SEQ ID NO: 502338 - DNA, 15 bp, Homo sapiens
ggggtttcaccgtgt

SEQ ID NO: 502339 - DNA, 15 bp, Homo sapiens
gggtttcaccgtgtt

SEQ ID NO: 502340 - DNA, 15 bp, Homo sapiens
ggtttcaccgtgtta

SEQ ID NO: 502341 - DNA, 15 bp, Homo sapiens
gtttcaccgtgttag

SEQ ID NO: 502342 - DNA, 15 bp, Homo sapiens
tttcaccgtgttagc

SEQ ID NO: 502343 - DNA, 15 bp, Homo sapiens
ttcaccgtgttagcc

SEQ ID NO: 502344 - DNA, 15 bp, Homo sapiens
tcaccgtgttagcca

SEQ ID NO: 502345 - DNA, 15 bp, Homo sapiens
caccgtgttagccag

SEQ ID NO: 502346 - DNA, 15 bp, Homo sapiens
accgtgttagccagg

SEQ ID NO: 502347 - DNA, 15 bp, Homo sapiens
ccgtgttagccagga

SEQ ID NO: 502348 - DNA, 15 bp, Homo sapiens
cgtgttagccaggat

SEQ ID NO: 502349 - DNA, 15 bp, Homo sapiens
gtgttagccaggatg

SEQ ID NO: 502350 - DNA, 15 bp, Homo sapiens
tgttagccaggatgg

SEQ ID NO: 502351 - DNA, 15 bp, Homo sapiens
gttagccaggatggt

SEQ ID NO: 502352 - DNA, 15 bp, Homo sapiens
ttagccaggatggtc

SEQ ID NO: 502353 - DNA, 15 bp, Homo sapiens
tagccaggatggtct

SEQ ID NO: 502354 - DNA, 15 bp, Homo sapiens
agccaggatggtctc

SEQ ID NO: 502355 - DNA, 15 bp, Homo sapiens
gccaggatggtctca

SEQ ID NO: 502356 - DNA, 15 bp, Homo sapiens
ccaggatggtctcaa

SEQ ID NO: 502357 - DNA, 15 bp, Homo sapiens
caggatggtctcaat

SEQ ID NO: 502358 - DNA, 15 bp, Homo sapiens
aggatggtctcaatc

SEQ ID NO: 502359 - DNA, 15 bp, Homo sapiens
ggatggtctcaatct

SEQ ID NO: 502360 - DNA, 15 bp, Homo sapiens
gatggtctcaatctc

SEQ ID NO: 502361 - DNA, 15 bp, Homo sapiens
atggtctcaatctcc

SEQ ID NO: 502362 - DNA, 15 bp, Homo sapiens
tggtctcaatctcct

SEQ ID NO: 502363 - DNA, 15 bp, Homo sapiens
ggtctcaatctcctg

SEQ ID NO: 502364 - DNA, 15 bp, Homo sapiens
gtctcaatctcctga

SEQ ID NO: 502365 - DNA, 15 bp, Homo sapiens
tctcaatctcctgac

SEQ ID NO: 502366 - DNA, 15 bp, Homo sapiens
ctcaatctcctgacc

SEQ ID NO: 502367 - DNA, 15 bp, Homo sapiens
tcaatctcctgacct

SEQ ID NO: 502368 - DNA, 15 bp, Homo sapiens
caatctcctgacctt

SEQ ID NO: 502369 - DNA, 15 bp, Homo sapiens
aatctcctgaccttg

SEQ ID NO: 502370 - DNA, 15 bp, Homo sapiens
atctcctgaccttgt

SEQ ID NO: 502371 - DNA, 15 bp, Homo sapiens
tctcctgaccttgta

SEQ ID NO: 502372 - DNA, 15 bp, Homo sapiens
ctcctgaccttgtaa

SEQ ID NO: 502373 - DNA, 15 bp, Homo sapiens
tcctgaccttgtaat

SEQ ID NO: 502374 - DNA, 15 bp, Homo sapiens
cctgaccttgtaatc

SEQ ID NO: 502375 - DNA, 15 bp, Homo sapiens
ctgaccttgtaatct

SEQ ID NO: 502376 - DNA, 15 bp, Homo sapiens
tgaccttgtaatctg

SEQ ID NO: 502377 - DNA, 15 bp, Homo sapiens
gaccttgtaatctgc

SEQ ID NO: 502378 - DNA, 15 bp, Homo sapiens
accttgtaatctgcc

SEQ ID NO: 502379 - DNA, 15 bp, Homo sapiens
ccttgtaatctgcct

SEQ ID NO: 502380 - DNA, 15 bp, Homo sapiens
cttgtaatctgcctg

SEQ ID NO: 502381 - DNA, 15 bp, Homo sapiens
ttgtaatctgcctgt

SEQ ID NO: 502382 - DNA, 15 bp, Homo sapiens
tgtaatctgcctgtc

SEQ ID NO: 502383 - DNA, 15 bp, Homo sapiens
gtaatctgcctgtct

SEQ ID NO: 502384 - DNA, 15 bp, Homo sapiens
taatctgcctgtctc

SEQ ID NO: 502385 - DNA, 15 bp, Homo sapiens
aatctgcctgtctca

SEQ ID NO: 502386 - DNA, 15 bp, Homo sapiens
atctgcctgtctcag

SEQ ID NO: 502387 - DNA, 15 bp, Homo sapiens
tctgcctgtctcagc

SEQ ID NO: 502388 - DNA, 15 bp, Homo sapiens
ctgcctgtctcagcc

SEQ ID NO: 502389 - DNA, 15 bp, Homo sapiens
tgcctgtctcagcct

SEQ ID NO: 502390 - DNA, 15 bp, Homo sapiens
gcctgtctcagcctc

SEQ ID NO: 502391 - DNA, 15 bp, Homo sapiens
cctgtctcagcctcc

SEQ ID NO: 502392 - DNA, 15 bp, Homo sapiens
ctgtctcagcctccc

SEQ ID NO: 502393 - DNA, 15 bp, Homo sapiens
tctcagcctcccaaa

SEQ ID NO: 502394 - DNA, 15 bp, Homo sapiens
ctcagcctcccaaag

SEQ ID NO: 502395 - DNA, 15 bp, Homo sapiens
tcagcctcccaaagt

SEQ ID NO: 502396 - DNA, 15 bp, Homo sapiens
cagcctcccaaagtg

SEQ ID NO: 502397 - DNA, 15 bp, Homo sapiens
agcctcccaaagtgc

SEQ ID NO: 502398 - DNA, 15 bp, Homo sapiens
gcctcccaaagtgct

SEQ ID NO: 502399 - DNA, 15 bp, Homo sapiens
cctcccaaagtgctg

SEQ ID NO: 502400 - DNA, 15 bp, Homo sapiens
ctcccaaagtgctgg

SEQ ID NO: 502401 - DNA, 15 bp, Homo sapiens
tcccaaagtgctggg

SEQ ID NO: 502402 - DNA, 15 bp, Homo sapiens
cccaaagtgctggga

SEQ ID NO: 502403 - DNA, 15 bp, Homo sapiens
ccaaagtgctgggat

SEQ ID NO: 502404 - DNA, 15 bp, Homo sapiens
caaagtgctgggatt

SEQ ID NO: 502405 - DNA, 15 bp, Homo sapiens
aaagtgctgggatta

SEQ ID NO: 502406 - DNA, 15 bp, Homo sapiens
aagtgctgggattac

SEQ ID NO: 502407 - DNA, 15 bp, Homo sapiens
agtgctgggattaca

SEQ ID NO: 502408 - DNA, 15 bp, Homo sapiens
gtgctgggattacag

SEQ ID NO: 502409 - DNA, 15 bp, Homo sapiens
tgctgggattacagg

SEQ ID NO: 502410 - DNA, 15 bp, Homo sapiens
gctgggattacaggc

SEQ ID NO: 502411 - DNA, 15 bp, Homo sapiens
ctgggattacaggcg

SEQ ID NO: 502412 - DNA, 15 bp, Homo sapiens
tgggattacaggcgt

SEQ ID NO: 502413 - DNA, 15 bp, Homo sapiens
gggattacaggcgtg

SEQ ID NO: 502414 - DNA, 15 bp, Homo sapiens
ggattacaggcgtga

SEQ ID NO: 502415 - DNA, 15 bp, Homo sapiens
gattacaggcgtgag

SEQ ID NO: 502416 - DNA, 15 bp, Homo sapiens
attacaggcgtgagc

SEQ ID NO: 502417 - DNA, 15 bp, Homo sapiens
ttacaggcgtgagcc

SEQ ID NO: 502418 - DNA, 15 bp, Homo sapiens
tacaggcgtgagcca

SEQ ID NO: 502419 - DNA, 15 bp, Homo sapiens
acaggcgtgagccac

SEQ ID NO: 502420 - DNA, 15 bp, Homo sapiens
caggcgtgagccacc

SEQ ID NO: 502421 - DNA, 15 bp, Homo sapiens
aggcgtgagccaccg

SEQ ID NO: 502422 - DNA, 15 bp, Homo sapiens
ggcgtgagccaccgc

SEQ ID NO: 502423 - DNA, 15 bp, Homo sapiens
gcgtgagccaccgcg

SEQ ID NO: 502424 - DNA, 15 bp, Homo sapiens
cgtgagccaccgcgc

SEQ ID NO: 502425 - DNA, 15 bp, Homo sapiens
gtgagccaccgcgca

SEQ ID NO: 502426 - DNA, 15 bp, Homo sapiens
tgagccaccgcgcat

SEQ ID NO: 502427 - DNA, 15 bp, Homo sapiens
gagccaccgcgcatg

SEQ ID NO: 502428 - DNA, 15 bp, Homo sapiens
agccaccgcgcatgg

SEQ ID NO: 502429 - DNA, 15 bp, Homo sapiens
gccaccgcgcatggc

SEQ ID NO: 502430 - DNA, 15 bp, Homo sapiens
ccaccgcgcatggcc

SEQ ID NO: 502431 - DNA, 15 bp, Homo sapiens
caccgcgcatggccc

SEQ ID NO: 502432 - DNA, 15 bp, Homo sapiens
accgcgcatggccca

SEQ ID NO: 502433 - DNA, 15 bp, Homo sapiens
ccgcgcatggcccac

SEQ ID NO: 502434 - DNA, 15 bp, Homo sapiens
cgcgcatggcccaca

SEQ ID NO: 502435 - DNA, 15 bp, Homo sapiens
gcgcatggcccacat

SEQ ID NO: 502436 - DNA, 15 bp, Homo sapiens
cgcatggcccacatc

SEQ ID NO: 502437 - DNA, 15 bp, Homo sapiens
gcatggcccacatca

SEQ ID NO: 502438 - DNA, 15 bp, Homo sapiens
catggcccacatcaa

SEQ ID NO: 502439 - DNA, 15 bp, Homo sapiens
atggcccacatcaac

SEQ ID NO: 502440 - DNA, 15 bp, Homo sapiens
tggcccacatcaaca

SEQ ID NO: 502441 - DNA, 15 bp, Homo sapiens
ggcccacatcaacat

SEQ ID NO: 502442 - DNA, 15 bp, Homo sapiens
gcccacatcaacatt

SEQ ID NO: 502443 - DNA, 15 bp, Homo sapiens
cccacatcaacattt

SEQ ID NO: 502444 - DNA, 15 bp, Homo sapiens
ccacatcaacatttt

SEQ ID NO: 502445 - DNA, 15 bp, Homo sapiens
cacatcaacattttt

SEQ ID NO: 502446 - DNA, 15 bp, Homo sapiens
acatcaacattttta

SEQ ID NO: 502447 - DNA, 15 bp, Homo sapiens
catcaacatttttac

SEQ ID NO: 502448 - DNA, 15 bp, Homo sapiens
atcaacatttttaca

SEQ ID NO: 502449 - DNA, 15 bp, Homo sapiens
tcaacatttttacaa

SEQ ID NO: 502450 - DNA, 15 bp, Homo sapiens
caacatttttacaaa

SEQ ID NO: 502451 - DNA, 15 bp, Homo sapiens
aacatttttacaaag

SEQ ID NO: 502452 - DNA, 15 bp, Homo sapiens
acatttttacaaagt

SEQ ID NO: 502453 - DNA, 15 bp, Homo sapiens
catttttacaaagtt

SEQ ID NO: 502454 - DNA, 15 bp, Homo sapiens
atttttacaaagtta

SEQ ID NO: 502455 - DNA, 15 bp, Homo sapiens
tttttacaaagttac

SEQ ID NO: 502456 - DNA, 15 bp, Homo sapiens
ttttacaaagttact

SEQ ID NO: 502457 - DNA, 15 bp, Homo sapiens
tttacaaagttacta

SEQ ID NO: 502458 - DNA, 15 bp, Homo sapiens
ttacaaagttactaa

SEQ ID NO: 502459 - DNA, 15 bp, Homo sapiens
tacaaagttactaac

SEQ ID NO: 502460 - DNA, 15 bp, Homo sapiens
acaaagttactaact

SEQ ID NO: 502461 - DNA, 15 bp, Homo sapiens
caaagttactaactt

SEQ ID NO: 502462 - DNA, 15 bp, Homo sapiens
aaagttactaacttt

SEQ ID NO: 502463 - DNA, 15 bp, Homo sapiens
aagttactaactttt

SEQ ID NO: 502464 - DNA, 15 bp, Homo sapiens
agttactaacttttg

SEQ ID NO: 502465 - DNA, 15 bp, Homo sapiens
gttactaacttttgt

SEQ ID NO: 502466 - DNA, 15 bp, Homo sapiens
ttactaacttttgtg

SEQ ID NO: 502467 - DNA, 15 bp, Homo sapiens
tactaacttttgtgg

SEQ ID NO: 502468 - DNA, 15 bp, Homo sapiens
actaacttttgtggc

SEQ ID NO: 502469 - DNA, 15 bp, Homo sapiens
ctaacttttgtggca

SEQ ID NO: 502470 - DNA, 15 bp, Homo sapiens
taacttttgtggcag

SEQ ID NO: 502471 - DNA, 15 bp, Homo sapiens
aacttttgtggcagt

SEQ ID NO: 502472 - DNA, 15 bp, Homo sapiens
acttttgtggcagtg

SEQ ID NO: 502473 - DNA, 15 bp, Homo sapiens
cttttgtggcagtga

SEQ ID NO: 502474 - DNA, 15 bp, Homo sapiens
ttttgtggcagtgat

SEQ ID NO: 502475 - DNA, 15 bp, Homo sapiens
tttgtggcagtgatg

SEQ ID NO: 502476 - DNA, 15 bp, Homo sapiens
ttgtggcagtgatga

SEQ ID NO: 502477 - DNA, 15 bp, Homo sapiens
tgtggcagtgatgag

SEQ ID NO: 502478 - DNA, 15 bp, Homo sapiens
gtggcagtgatgagt

SEQ ID NO: 502479 - DNA, 15 bp, Homo sapiens
tggcagtgatgagtt

SEQ ID NO: 502480 - DNA, 15 bp, Homo sapiens
ggcagtgatgagttg

SEQ ID NO: 502481 - DNA, 15 bp, Homo sapiens
gcagtgatgagttga

SEQ ID NO: 502482 - DNA, 15 bp, Homo sapiens
cagtgatgagttgag

SEQ ID NO: 502483 - DNA, 15 bp, Homo sapiens
agtgatgagttgagg

SEQ ID NO: 502484 - DNA, 15 bp, Homo sapiens
gtgatgagttgaggt

SEQ ID NO: 502485 - DNA, 15 bp, Homo sapiens
tgatgagttgaggtc

SEQ ID NO: 502486 - DNA, 15 bp, Homo sapiens
gatgagttgaggtcc

SEQ ID NO: 502487 - DNA, 15 bp, Homo sapiens
atgagttgaggtcca

SEQ ID NO: 502488 - DNA, 15 bp, Homo sapiens
tgagttgaggtccaa

SEQ ID NO: 502489 - DNA, 15 bp, Homo sapiens
gagttgaggtccaaa

SEQ ID NO: 502490 - DNA, 15 bp, Homo sapiens
agttgaggtccaaac

SEQ ID NO: 502491 - DNA, 15 bp, Homo sapiens
gttgaggtccaaaca

SEQ ID NO: 502492 - DNA, 15 bp, Homo sapiens
ttgaggtccaaacat

SEQ ID NO: 502493 - DNA, 15 bp, Homo sapiens
tgaggtccaaacatt

SEQ ID NO: 502494 - DNA, 15 bp, Homo sapiens
gaggtccaaacatta

SEQ ID NO: 502495 - DNA, 15 bp, Homo sapiens
aggtccaaacattag

SEQ ID NO: 502496 - DNA, 15 bp, Homo sapiens
ggtccaaacattagc

SEQ ID NO: 502497 - DNA, 15 bp, Homo sapiens
gtccaaacattagct

SEQ ID NO: 502498 - DNA, 15 bp, Homo sapiens
tccaaacattagctt

SEQ ID NO: 502499 - DNA, 15 bp, Homo sapiens
ccaaacattagcttt

SEQ ID NO: 502500 - DNA, 15 bp, Homo sapiens
caaacattagctttc

SEQ ID NO: 502501 - DNA, 15 bp, Homo sapiens
aaacattagctttca

SEQ ID NO: 502502 - DNA, 15 bp, Homo sapiens
aacattagctttcag

SEQ ID NO: 502503 - DNA, 15 bp, Homo sapiens
acattagctttcagg

SEQ ID NO: 502504 - DNA, 15 bp, Homo sapiens
cattagctttcaggt

SEQ ID NO: 502505 - DNA, 15 bp, Homo sapiens
attagctttcaggtc

SEQ ID NO: 502506 - DNA, 15 bp, Homo sapiens
ttagctttcaggtct

SEQ ID NO: 502507 - DNA, 15 bp, Homo sapiens
tagctttcaggtctg

SEQ ID NO: 502508 - DNA, 15 bp, Homo sapiens
agctttcaggtctgt

SEQ ID NO: 502509 - DNA, 15 bp, Homo sapiens
gctttcaggtctgtc

SEQ ID NO: 502510 - DNA, 15 bp, Homo sapiens
ctttcaggtctgtct

SEQ ID NO: 502511 - DNA, 15 bp, Homo sapiens
tttcaggtctgtctt

SEQ ID NO: 502512 - DNA, 15 bp, Homo sapiens
ttcaggtctgtcttc

SEQ ID NO: 502513 - DNA, 15 bp, Homo sapiens
tcaggtctgtcttca

SEQ ID NO: 502514 - DNA, 15 bp, Homo sapiens
caggtctgtcttcat

SEQ ID NO: 502515 - DNA, 15 bp, Homo sapiens
aggtctgtcttcatt

SEQ ID NO: 502516 - DNA, 15 bp, Homo sapiens
ggtctgtcttcatta

SEQ ID NO: 502517 - DNA, 15 bp, Homo sapiens
gtctgtcttcattaa

SEQ ID NO: 502518 - DNA, 15 bp, Homo sapiens
tctgtcttcattaag

SEQ ID NO: 502519 - DNA, 15 bp, Homo sapiens
ctgtcttcattaagc

SEQ ID NO: 502520 - DNA, 15 bp, Homo sapiens
tgtcttcattaagct

SEQ ID NO: 502521 - DNA, 15 bp, Homo sapiens
gtcttcattaagcta

SEQ ID NO: 502522 - DNA, 15 bp, Homo sapiens
tcttcattaagctaa

SEQ ID NO: 502523 - DNA, 15 bp, Homo sapiens
cttcattaagctaaa

SEQ ID NO: 502524 - DNA, 15 bp, Homo sapiens
ttcattaagctaaag

SEQ ID NO: 502525 - DNA, 15 bp, Homo sapiens
tcattaagctaaagt

SEQ ID NO: 502526 - DNA, 15 bp, Homo sapiens
cattaagctaaagtg

SEQ ID NO: 502527 - DNA, 15 bp, Homo sapiens
attaagctaaagtgt

SEQ ID NO: 502528 - DNA, 15 bp, Homo sapiens
ttaagctaaagtgtg

SEQ ID NO: 502529 - DNA, 15 bp, Homo sapiens
taagctaaagtgtgt

SEQ ID NO: 502530 - DNA, 15 bp, Homo sapiens
aagctaaagtgtgtt

SEQ ID NO: 502531 - DNA, 15 bp, Homo sapiens
agctaaagtgtgttt

SEQ ID NO: 502532 - DNA, 15 bp, Homo sapiens
gctaaagtgtgtttt

SEQ ID NO: 502533 - DNA, 15 bp, Homo sapiens
ctaaagtgtgtttta

SEQ ID NO: 502534 - DNA, 15 bp, Homo sapiens
taaagtgtgttttaa

SEQ ID NO: 502535 - DNA, 15 bp, Homo sapiens
aaagtgtgttttaac

SEQ ID NO: 502536 - DNA, 15 bp, Homo sapiens
aagtgtgttttaacc

SEQ ID NO: 502537 - DNA, 15 bp, Homo sapiens
agtgtgttttaacca

SEQ ID NO: 502538 - DNA, 15 bp, Homo sapiens
gtgtgttttaaccac

SEQ ID NO: 502539 - DNA, 15 bp, Homo sapiens
tgtgttttaaccacc

SEQ ID NO: 502540 - DNA, 15 bp, Homo sapiens
gtgttttaaccacca

SEQ ID NO: 502541 - DNA, 15 bp, Homo sapiens
tgttttaaccaccag

SEQ ID NO: 502542 - DNA, 15 bp, Homo sapiens
gttttaaccaccagg

SEQ ID NO: 502543 - DNA, 15 bp, Homo sapiens
ttttaaccaccaggc

SEQ ID NO: 502544 - DNA, 15 bp, Homo sapiens
tttaaccaccaggct

SEQ ID NO: 502545 - DNA, 15 bp, Homo sapiens
ttaaccaccaggctt

SEQ ID NO: 502546 - DNA, 15 bp, Homo sapiens
taaccaccaggcttt

SEQ ID NO: 502547 - DNA, 15 bp, Homo sapiens
aaccaccaggcttta

SEQ ID NO: 502548 - DNA, 15 bp, Homo sapiens
accaccaggctttac

SEQ ID NO: 502549 - DNA, 15 bp, Homo sapiens
ccaccaggctttaca

SEQ ID NO: 502550 - DNA, 15 bp, Homo sapiens
caccaggctttacat

SEQ ID NO: 502551 - DNA, 15 bp, Homo sapiens
accaggctttacata

SEQ ID NO: 502552 - DNA, 15 bp, Homo sapiens
ccaggctttacatag

SEQ ID NO: 502553 - DNA, 15 bp, Homo sapiens
caggctttacatagt

SEQ ID NO: 502554 - DNA, 15 bp, Homo sapiens
aggctttacatagta

SEQ ID NO: 502555 - DNA, 15 bp, Homo sapiens
ggctttacatagtaa

SEQ ID NO: 502556 - DNA, 15 bp, Homo sapiens
gctttacatagtaat

SEQ ID NO: 502557 - DNA, 15 bp, Homo sapiens
ctttacatagtaatg

SEQ ID NO: 502558 - DNA, 15 bp, Homo sapiens
tttacatagtaatga

SEQ ID NO: 502559 - DNA, 15 bp, Homo sapiens
ttacatagtaatgac

SEQ ID NO: 502560 - DNA, 15 bp, Homo sapiens
tacatagtaatgaca

SEQ ID NO: 502561 - DNA, 15 bp, Homo sapiens
acatagtaatgacat

SEQ ID NO: 502562 - DNA, 15 bp, Homo sapiens
catagtaatgacatt

SEQ ID NO: 502563 - DNA, 15 bp, Homo sapiens
atagtaatgacattt

SEQ ID NO: 502564 - DNA, 15 bp, Homo sapiens
tagtaatgacatttt

SEQ ID NO: 502565 - DNA, 15 bp, Homo sapiens
agtaatgacattttg

SEQ ID NO: 502566 - DNA, 15 bp, Homo sapiens
gtaatgacattttgc

SEQ ID NO: 502567 - DNA, 15 bp, Homo sapiens
taatgacattttgct

SEQ ID NO: 502568 - DNA, 15 bp, Homo sapiens
aatgacattttgctt

SEQ ID NO: 502569 - DNA, 15 bp, Homo sapiens
atgacattttgcttg

SEQ ID NO: 502570 - DNA, 15 bp, Homo sapiens
tgacattttgcttga

SEQ ID NO: 502571 - DNA, 15 bp, Homo sapiens
gacattttgcttgaa

SEQ ID NO: 502572 - DNA, 15 bp, Homo sapiens
acattttgcttgaaa

SEQ ID NO: 502573 - DNA, 15 bp, Homo sapiens
cattttgcttgaaag

SEQ ID NO: 502574 - DNA, 15 bp, Homo sapiens
attttgcttgaaagg

SEQ ID NO: 502575 - DNA, 15 bp, Homo sapiens
ttttgcttgaaaggg

SEQ ID NO: 502576 - DNA, 15 bp, Homo sapiens
tttgcttgaaaggga

SEQ ID NO: 502577 - DNA, 15 bp, Homo sapiens
ttgcttgaaagggaa

SEQ ID NO: 502578 - DNA, 15 bp, Homo sapiens
tgcttgaaagggaac

SEQ ID NO: 502579 - DNA, 15 bp, Homo sapiens
gcttgaaagggaact

SEQ ID NO: 502580 - DNA, 15 bp, Homo sapiens
cttgaaagggaactg

SEQ ID NO: 502581 - DNA, 15 bp, Homo sapiens
ttgaaagggaactga

SEQ ID NO: 502582 - DNA, 15 bp, Homo sapiens
tgaaagggaactgat

SEQ ID NO: 502583 - DNA, 15 bp, Homo sapiens
gaaagggaactgatc

SEQ ID NO: 502584 - DNA, 15 bp, Homo sapiens
aaagggaactgatca

SEQ ID NO: 502585 - DNA, 15 bp, Homo sapiens
aagggaactgatcat

SEQ ID NO: 502586 - DNA, 15 bp, Homo sapiens
agggaactgatcatt

SEQ ID NO: 502587 - DNA, 15 bp, Homo sapiens
gggaactgatcattt

SEQ ID NO: 502588 - DNA, 15 bp, Homo sapiens
ggaactgatcattta

SEQ ID NO: 502589 - DNA, 15 bp, Homo sapiens
gaactgatcatttac

SEQ ID NO: 502590 - DNA, 15 bp, Homo sapiens
aactgatcatttaca

SEQ ID NO: 502591 - DNA, 15 bp, Homo sapiens
actgatcatttacag

SEQ ID NO: 502592 - DNA, 15 bp, Homo sapiens
ctgatcatttacaga

SEQ ID NO: 502593 - DNA, 15 bp, Homo sapiens
tgatcatttacagaa

SEQ ID NO: 502594 - DNA, 15 bp, Homo sapiens
gatcatttacagaaa

SEQ ID NO: 502595 - DNA, 15 bp, Homo sapiens
atcatttacagaaaa

SEQ ID NO: 502596 - DNA, 15 bp, Homo sapiens
tcatttacagaaaat

SEQ ID NO: 502597 - DNA, 15 bp, Homo sapiens
catttacagaaaata

SEQ ID NO: 502598 - DNA, 15 bp, Homo sapiens
atttacagaaaatag

SEQ ID NO: 502599 - DNA, 15 bp, Homo sapiens
tttacagaaaatagc

SEQ ID NO: 502600 - DNA, 15 bp, Homo sapiens
ttacagaaaatagct

SEQ ID NO: 502601 - DNA, 15 bp, Homo sapiens
tacagaaaatagctt

SEQ ID NO: 502602 - DNA, 15 bp, Homo sapiens
acagaaaatagctta

SEQ ID NO: 502603 - DNA, 15 bp, Homo sapiens
cagaaaatagcttaa

SEQ ID NO: 502604 - DNA, 15 bp, Homo sapiens
agaaaatagcttaat

SEQ ID NO: 502605 - DNA, 15 bp, Homo sapiens
gaaaatagcttaata

SEQ ID NO: 502606 - DNA, 15 bp, Homo sapiens
aaaatagcttaataa

SEQ ID NO: 502607 - DNA, 15 bp, Homo sapiens
aaatagcttaataat

SEQ ID NO: 502608 - DNA, 15 bp, Homo sapiens
aatagcttaataatc

SEQ ID NO: 502609 - DNA, 15 bp, Homo sapiens
atagcttaataatca

SEQ ID NO: 502610 - DNA, 15 bp, Homo sapiens
tagcttaataatcaa

SEQ ID NO: 502611 - DNA, 15 bp, Homo sapiens
agcttaataatcaaa

SEQ ID NO: 502612 - DNA, 15 bp, Homo sapiens
gcttaataatcaaaa

SEQ ID NO: 502613 - DNA, 15 bp, Homo sapiens
cttaataatcaaaag

SEQ ID NO: 502614 - DNA, 15 bp, Homo sapiens
ttaataatcaaaagt

SEQ ID NO: 502615 - DNA, 15 bp, Homo sapiens
taataatcaaaagtg

SEQ ID NO: 502616 - DNA, 15 bp, Homo sapiens
aataatcaaaagtgt

SEQ ID NO: 502617 - DNA, 15 bp, Homo sapiens
ataatcaaaagtgta

SEQ ID NO: 502618 - DNA, 15 bp, Homo sapiens
taatcaaaagtgtaa

SEQ ID NO: 502619 - DNA, 15 bp, Homo sapiens
aatcaaaagtgtaaa

SEQ ID NO: 502620 - DNA, 15 bp, Homo sapiens
atcaaaagtgtaaag

SEQ ID NO: 502621 - DNA, 15 bp, Homo sapiens
tcaaaagtgtaaaga

SEQ ID NO: 502622 - DNA, 15 bp, Homo sapiens
caaaagtgtaaagaa

SEQ ID NO: 502623 - DNA, 15 bp, Homo sapiens
aaaagtgtaaagaaa

SEQ ID NO: 502624 - DNA, 15 bp, Homo sapiens
aaagtgtaaagaaag

SEQ ID NO: 502625 - DNA, 15 bp, Homo sapiens
aagtgtaaagaaaga

SEQ ID NO: 502626 - DNA, 15 bp, Homo sapiens
agtgtaaagaaagat

SEQ ID NO: 502627 - DNA, 15 bp, Homo sapiens
gtgtaaagaaagatg

SEQ ID NO: 502628 - DNA, 15 bp, Homo sapiens
tgtaaagaaagatga

SEQ ID NO: 502629 - DNA, 15 bp, Homo sapiens
gtaaagaaagatgac

SEQ ID NO: 502630 - DNA, 15 bp, Homo sapiens
taaagaaagatgaca

SEQ ID NO: 502631 - DNA, 15 bp, Homo sapiens
aaagaaagatgacaa

SEQ ID NO: 502632 - DNA, 15 bp, Homo sapiens
aagaaagatgacaat

SEQ ID NO: 502633 - DNA, 15 bp, Homo sapiens
agaaagatgacaatc

SEQ ID NO: 502634 - DNA, 15 bp, Homo sapiens
gaaagatgacaatca

SEQ ID NO: 502635 - DNA, 15 bp, Homo sapiens
aaagatgacaatcat

SEQ ID NO: 502636 - DNA, 15 bp, Homo sapiens
aagatgacaatcatt

SEQ ID NO: 502637 - DNA, 15 bp, Homo sapiens
agatgacaatcattt

SEQ ID NO: 502638 - DNA, 15 bp, Homo sapiens
gatgacaatcatttt

SEQ ID NO: 502639 - DNA, 15 bp, Homo sapiens
atgacaatcattttt

SEQ ID NO: 502640 - DNA, 15 bp, Homo sapiens
tgacaatcatttttg

SEQ ID NO: 502641 - DNA, 15 bp, Homo sapiens
gacaatcatttttga

SEQ ID NO: 502642 - DNA, 15 bp, Homo sapiens
acaatcatttttgaa

SEQ ID NO: 502643 - DNA, 15 bp, Homo sapiens
caatcatttttgaaa

SEQ ID NO: 502644 - DNA, 15 bp, Homo sapiens
aatcatttttgaaaa

SEQ ID NO: 502645 - DNA, 15 bp, Homo sapiens
atcatttttgaaaat

SEQ ID NO: 502646 - DNA, 15 bp, Homo sapiens
tcatttttgaaaata

SEQ ID NO: 502647 - DNA, 15 bp, Homo sapiens
catttttgaaaataa

SEQ ID NO: 502648 - DNA, 15 bp, Homo sapiens
atttttgaaaataac

SEQ ID NO: 502649 - DNA, 15 bp, Homo sapiens
tttttgaaaataaca

SEQ ID NO: 502650 - DNA, 15 bp, Homo sapiens
ttttgaaaataacac

SEQ ID NO: 502651 - DNA, 15 bp, Homo sapiens
tttgaaaataacact

SEQ ID NO: 502652 - DNA, 15 bp, Homo sapiens
ttgaaaataacactt

SEQ ID NO: 502653 - DNA, 15 bp, Homo sapiens
tgaaaataacacttt

SEQ ID NO: 502654 - DNA, 15 bp, Homo sapiens
gaaaataacactttt

SEQ ID NO: 502655 - DNA, 15 bp, Homo sapiens
aaaataacactttta

SEQ ID NO: 502656 - DNA, 15 bp, Homo sapiens
aaataacacttttaa

SEQ ID NO: 502657 - DNA, 15 bp, Homo sapiens
aataacacttttaaa

SEQ ID NO: 502658 - DNA, 15 bp, Homo sapiens
ataacacttttaaaa

SEQ ID NO: 502659 - DNA, 15 bp, Homo sapiens
taacacttttaaaaa

SEQ ID NO: 502660 - DNA, 15 bp, Homo sapiens
aacacttttaaaaaa

SEQ ID NO: 502661 - DNA, 15 bp, Homo sapiens
acacttttaaaaaaa

SEQ ID NO: 502662 - DNA, 15 bp, Homo sapiens
cacttttaaaaaaat

SEQ ID NO: 502663 - DNA, 15 bp, Homo sapiens
acttttaaaaaaatg

SEQ ID NO: 502664 - DNA, 15 bp, Homo sapiens
cttttaaaaaaatga

SEQ ID NO: 502665 - DNA, 15 bp, Homo sapiens
ttttaaaaaaatgaa

SEQ ID NO: 502666 - DNA, 15 bp, Homo sapiens
tttaaaaaaatgaac

SEQ ID NO: 502667 - DNA, 15 bp, Homo sapiens
ttaaaaaaatgaact

SEQ ID NO: 502668 - DNA, 15 bp, Homo sapiens
taaaaaaatgaacta

SEQ ID NO: 502669 - DNA, 15 bp, Homo sapiens
aaaaaaatgaactag

SEQ ID NO: 502670 - DNA, 15 bp, Homo sapiens
aaaaaatgaactagt

SEQ ID NO: 502671 - DNA, 15 bp, Homo sapiens
aaaaatgaactagtt

SEQ ID NO: 502672 - DNA, 15 bp, Homo sapiens
aaaatgaactagttc

SEQ ID NO: 502673 - DNA, 15 bp, Homo sapiens
aaatgaactagttca

SEQ ID NO: 502674 - DNA, 15 bp, Homo sapiens
aatgaactagttcat

SEQ ID NO: 502675 - DNA, 15 bp, Homo sapiens
atgaactagttcatg

SEQ ID NO: 502676 - DNA, 15 bp, Homo sapiens
tgaactagttcatga

SEQ ID NO: 502677 - DNA, 15 bp, Homo sapiens
gaactagttcatgaa

SEQ ID NO: 502678 - DNA, 15 bp, Homo sapiens
aactagttcatgaaa

SEQ ID NO: 502679 - DNA, 15 bp, Homo sapiens
actagttcatgaaag

SEQ ID NO: 502680 - DNA, 15 bp, Homo sapiens
ctagttcatgaaagc

SEQ ID NO: 502681 - DNA, 15 bp, Homo sapiens
tagttcatgaaagca

SEQ ID NO: 502682 - DNA, 15 bp, Homo sapiens
agttcatgaaagcag

SEQ ID NO: 502683 - DNA, 15 bp, Homo sapiens
gttcatgaaagcagt

SEQ ID NO: 502684 - DNA, 15 bp, Homo sapiens
ttcatgaaagcagta

SEQ ID NO: 502685 - DNA, 15 bp, Homo sapiens
tcatgaaagcagtac

SEQ ID NO: 502686 - DNA, 15 bp, Homo sapiens
catgaaagcagtacc

SEQ ID NO: 502687 - DNA, 15 bp, Homo sapiens
atgaaagcagtacca

SEQ ID NO: 502688 - DNA, 15 bp, Homo sapiens
tgaaagcagtaccaa

SEQ ID NO: 502689 - DNA, 15 bp, Homo sapiens
gaaagcagtaccaac

SEQ ID NO: 502690 - DNA, 15 bp, Homo sapiens
aaagcagtaccaaca

SEQ ID NO: 502691 - DNA, 15 bp, Homo sapiens
aagcagtaccaacat

SEQ ID NO: 502692 - DNA, 15 bp, Homo sapiens
agcagtaccaacata

SEQ ID NO: 502693 - DNA, 15 bp, Homo sapiens
gcagtaccaacatag

SEQ ID NO: 502694 - DNA, 15 bp, Homo sapiens
cagtaccaacataga

SEQ ID NO: 502695 - DNA, 15 bp, Homo sapiens
agtaccaacatagaa

SEQ ID NO: 502696 - DNA, 15 bp, Homo sapiens
gtaccaacatagaac

SEQ ID NO: 502697 - DNA, 15 bp, Homo sapiens
taccaacatagaacc

SEQ ID NO: 502698 - DNA, 15 bp, Homo sapiens
accaacatagaacca

SEQ ID NO: 502699 - DNA, 15 bp, Homo sapiens
ccaacatagaaccat

SEQ ID NO: 502700 - DNA, 15 bp, Homo sapiens
caacatagaaccatg

SEQ ID NO: 502701 - DNA, 15 bp, Homo sapiens
aacatagaaccatga

SEQ ID NO: 502702 - DNA, 15 bp, Homo sapiens
acatagaaccatgaa

SEQ ID NO: 502703 - DNA, 15 bp, Homo sapiens
catagaaccatgaaa

SEQ ID NO: 502704 - DNA, 15 bp, Homo sapiens
atagaaccatgaaaa

SEQ ID NO: 502705 - DNA, 15 bp, Homo sapiens
tagaaccatgaaaat

SEQ ID NO: 502706 - DNA, 15 bp, Homo sapiens
agaaccatgaaaatg

SEQ ID NO: 502707 - DNA, 15 bp, Homo sapiens
gaaccatgaaaatgg

SEQ ID NO: 502708 - DNA, 15 bp, Homo sapiens
aaccatgaaaatggt

SEQ ID NO: 502709 - DNA, 15 bp, Homo sapiens
accatgaaaatggtt

SEQ ID NO: 502710 - DNA, 15 bp, Homo sapiens
ccatgaaaatggttt

SEQ ID NO: 502711 - DNA, 15 bp, Homo sapiens
catgaaaatggtttg

SEQ ID NO: 502712 - DNA, 15 bp, Homo sapiens
atgaaaatggtttgt

SEQ ID NO: 502713 - DNA, 15 bp, Homo sapiens
tgaaaatggtttgtt

SEQ ID NO: 502714 - DNA, 15 bp, Homo sapiens
gaaaatggtttgttt

SEQ ID NO: 502715 - DNA, 15 bp, Homo sapiens
aaaatggtttgtttt

SEQ ID NO: 502716 - DNA, 15 bp, Homo sapiens
aaatggtttgttttc

SEQ ID NO: 502717 - DNA, 15 bp, Homo sapiens
aatggtttgttttct

SEQ ID NO: 502718 - DNA, 15 bp, Homo sapiens
atggtttgttttctg

SEQ ID NO: 502719 - DNA, 15 bp, Homo sapiens
tggtttgttttctgc

SEQ ID NO: 502720 - DNA, 15 bp, Homo sapiens
ggtttgttttctgcc

SEQ ID NO: 502721 - DNA, 15 bp, Homo sapiens
gtttgttttctgcct

SEQ ID NO: 502722 - DNA, 15 bp, Homo sapiens
tttgttttctgccta

SEQ ID NO: 502723 - DNA, 15 bp, Homo sapiens
ttgttttctgcctaa

SEQ ID NO: 502724 - DNA, 15 bp, Homo sapiens
tgttttctgcctaaa

SEQ ID NO: 502725 - DNA, 15 bp, Homo sapiens
gttttctgcctaaat

SEQ ID NO: 502726 - DNA, 15 bp, Homo sapiens
ttttctgcctaaatt

SEQ ID NO: 502727 - DNA, 15 bp, Homo sapiens
tttctgcctaaattc

SEQ ID NO: 502728 - DNA, 15 bp, Homo sapiens
ttctgcctaaattcc

SEQ ID NO: 502729 - DNA, 15 bp, Homo sapiens
tctgcctaaattcct

SEQ ID NO: 502730 - DNA, 15 bp, Homo sapiens
ctgcctaaattcctc

SEQ ID NO: 502731 - DNA, 15 bp, Homo sapiens
tgcctaaattcctct

SEQ ID NO: 502732 - DNA, 15 bp, Homo sapiens
gcctaaattcctctt

SEQ ID NO: 502733 - DNA, 15 bp, Homo sapiens
cctaaattcctcttt

SEQ ID NO: 502734 - DNA, 15 bp, Homo sapiens
ctaaattcctctttg

SEQ ID NO: 502735 - DNA, 15 bp, Homo sapiens
taaattcctctttgt

SEQ ID NO: 502736 - DNA, 15 bp, Homo sapiens
aaattcctctttgtg

SEQ ID NO: 502737 - DNA, 15 bp, Homo sapiens
aattcctctttgtgc

SEQ ID NO: 502738 - DNA, 15 bp, Homo sapiens
attcctctttgtgct

SEQ ID NO: 502739 - DNA, 15 bp, Homo sapiens
ttcctctttgtgctt

SEQ ID NO: 502740 - DNA, 15 bp, Homo sapiens
tcctctttgtgctta

SEQ ID NO: 502741 - DNA, 15 bp, Homo sapiens
cctctttgtgcttat

SEQ ID NO: 502742 - DNA, 15 bp, Homo sapiens
ctctttgtgcttatt

SEQ ID NO: 502743 - DNA, 15 bp, Homo sapiens
tctttgtgcttattg

SEQ ID NO: 502744 - DNA, 15 bp, Homo sapiens
ctttgtgcttattgc

SEQ ID NO: 502745 - DNA, 15 bp, Homo sapiens
tttgtgcttattgct

SEQ ID NO: 502746 - DNA, 15 bp, Homo sapiens
ttgtgcttattgctc

SEQ ID NO: 502747 - DNA, 15 bp, Homo sapiens
tgtgcttattgctca

SEQ ID NO: 502748 - DNA, 15 bp, Homo sapiens
gtgcttattgctcag

SEQ ID NO: 502749 - DNA, 15 bp, Homo sapiens
tgcttattgctcaga

SEQ ID NO: 502750 - DNA, 15 bp, Homo sapiens
gcttattgctcagag

SEQ ID NO: 502751 - DNA, 15 bp, Homo sapiens
cttattgctcagagg

SEQ ID NO: 502752 - DNA, 15 bp, Homo sapiens
ttattgctcagaggg

SEQ ID NO: 502753 - DNA, 15 bp, Homo sapiens
tattgctcagagggt

SEQ ID NO: 502754 - DNA, 15 bp, Homo sapiens
attgctcagagggtt

SEQ ID NO: 502755 - DNA, 15 bp, Homo sapiens
ttgctcagagggttt

SEQ ID NO: 502756 - DNA, 15 bp, Homo sapiens
tgctcagagggtttg

SEQ ID NO: 502757 - DNA, 15 bp, Homo sapiens
gctcagagggtttgg

SEQ ID NO: 502758 - DNA, 15 bp, Homo sapiens
ctcagagggtttgga

SEQ ID NO: 502759 - DNA, 15 bp, Homo sapiens
tcagagggtttggac

SEQ ID NO: 502760 - DNA, 15 bp, Homo sapiens
cagagggtttggaca

SEQ ID NO: 502761 - DNA, 15 bp, Homo sapiens
agagggtttggacat

SEQ ID NO: 502762 - DNA, 15 bp, Homo sapiens
gagggtttggacata

SEQ ID NO: 502763 - DNA, 15 bp, Homo sapiens
agggtttggacatag

SEQ ID NO: 502764 - DNA, 15 bp, Homo sapiens
gggtttggacatagt

SEQ ID NO: 502765 - DNA, 15 bp, Homo sapiens
ggtttggacatagta

SEQ ID NO: 502766 - DNA, 15 bp, Homo sapiens
gtttggacatagtac

SEQ ID NO: 502767 - DNA, 15 bp, Homo sapiens
tttggacatagtact

SEQ ID NO: 502768 - DNA, 15 bp, Homo sapiens
ttggacatagtacta

SEQ ID NO: 502769 - DNA, 15 bp, Homo sapiens
tggacatagtactaa

SEQ ID NO: 502770 - DNA, 15 bp, Homo sapiens
ggacatagtactaat

SEQ ID NO: 502771 - DNA, 15 bp, Homo sapiens
gacatagtactaatc

SEQ ID NO: 502772 - DNA, 15 bp, Homo sapiens
acatagtactaatca

SEQ ID NO: 502773 - DNA, 15 bp, Homo sapiens
catagtactaatcag

SEQ ID NO: 502774 - DNA, 15 bp, Homo sapiens
atagtactaatcaga

SEQ ID NO: 502775 - DNA, 15 bp, Homo sapiens
tagtactaatcagat

SEQ ID NO: 502776 - DNA, 15 bp, Homo sapiens
agtactaatcagatt

SEQ ID NO: 502777 - DNA, 15 bp, Homo sapiens
gtactaatcagatta

SEQ ID NO: 502778 - DNA, 15 bp, Homo sapiens
tactaatcagattag

SEQ ID NO: 502779 - DNA, 15 bp, Homo sapiens
actaatcagattagg

SEQ ID NO: 502780 - DNA, 15 bp, Homo sapiens
ctaatcagattaggt

SEQ ID NO: 502781 - DNA, 15 bp, Homo sapiens
taatcagattaggtt

SEQ ID NO: 502782 - DNA, 15 bp, Homo sapiens
aatcagattaggttg

SEQ ID NO: 502783 - DNA, 15 bp, Homo sapiens
atcagattaggttgt

SEQ ID NO: 502784 - DNA, 15 bp, Homo sapiens
tcagattaggttgta

SEQ ID NO: 502785 - DNA, 15 bp, Homo sapiens
cagattaggttgtag

SEQ ID NO: 502786 - DNA, 15 bp, Homo sapiens
agattaggttgtagg

SEQ ID NO: 502787 - DNA, 15 bp, Homo sapiens
gattaggttgtaggt

SEQ ID NO: 502788 - DNA, 15 bp, Homo sapiens
attaggttgtaggtt

SEQ ID NO: 502789 - DNA, 15 bp, Homo sapiens
ttaggttgtaggttt

SEQ ID NO: 502790 - DNA, 15 bp, Homo sapiens
taggttgtaggtttt

SEQ ID NO: 502791 - DNA, 15 bp, Homo sapiens
aggttgtaggttttt

SEQ ID NO: 502792 - DNA, 15 bp, Homo sapiens
ggttgtaggttttta

SEQ ID NO: 502793 - DNA, 15 bp, Homo sapiens
gttgtaggtttttat

SEQ ID NO: 502794 - DNA, 15 bp, Homo sapiens
ttgtaggtttttatt

SEQ ID NO: 502795 - DNA, 15 bp, Homo sapiens
tgtaggtttttattt

SEQ ID NO: 502796 - DNA, 15 bp, Homo sapiens
gtaggtttttatttc

SEQ ID NO: 502797 - DNA, 15 bp, Homo sapiens
taggtttttatttca

SEQ ID NO: 502798 - DNA, 15 bp, Homo sapiens
aggtttttatttcag

SEQ ID NO: 502799 - DNA, 15 bp, Homo sapiens
ggtttttatttcagg

SEQ ID NO: 502800 - DNA, 15 bp, Homo sapiens
gtttttatttcaggg

SEQ ID NO: 502801 - DNA, 15 bp, Homo sapiens
tttttatttcaggga

SEQ ID NO: 502802 - DNA, 15 bp, Homo sapiens
ttttatttcagggat

SEQ ID NO: 502803 - DNA, 15 bp, Homo sapiens
tttatttcagggatt

SEQ ID NO: 502804 - DNA, 15 bp, Homo sapiens
ttatttcagggatta

SEQ ID NO: 502805 - DNA, 15 bp, Homo sapiens
tatttcagggattaa

SEQ ID NO: 502806 - DNA, 15 bp, Homo sapiens
atttcagggattaaa

SEQ ID NO: 502807 - DNA, 15 bp, Homo sapiens
tttcagggattaaag

SEQ ID NO: 502808 - DNA, 15 bp, Homo sapiens
ttcagggattaaagg

SEQ ID NO: 502809 - DNA, 15 bp, Homo sapiens
tcagggattaaaggc

SEQ ID NO: 502810 - DNA, 15 bp, Homo sapiens
cagggattaaaggca

SEQ ID NO: 502811 - DNA, 15 bp, Homo sapiens
agggattaaaggcag

SEQ ID NO: 502812 - DNA, 15 bp, Homo sapiens
gggattaaaggcagt

SEQ ID NO: 502813 - DNA, 15 bp, Homo sapiens
ggattaaaggcagta

SEQ ID NO: 502814 - DNA, 15 bp, Homo sapiens
gattaaaggcagtag

SEQ ID NO: 502815 - DNA, 15 bp, Homo sapiens
attaaaggcagtagt

SEQ ID NO: 502816 - DNA, 15 bp, Homo sapiens
ttaaaggcagtagta

SEQ ID NO: 502817 - DNA, 15 bp, Homo sapiens
taaaggcagtagtag

SEQ ID NO: 502818 - DNA, 15 bp, Homo sapiens
aaaggcagtagtagg

SEQ ID NO: 502819 - DNA, 15 bp, Homo sapiens
aaggcagtagtaggg

SEQ ID NO: 502820 - DNA, 15 bp, Homo sapiens
aggcagtagtagggt

SEQ ID NO: 502821 - DNA, 15 bp, Homo sapiens
ggcagtagtagggtt

SEQ ID NO: 502822 - DNA, 15 bp, Homo sapiens
gcagtagtagggttt

SEQ ID NO: 502823 - DNA, 15 bp, Homo sapiens
cagtagtagggtttg

SEQ ID NO: 502824 - DNA, 15 bp, Homo sapiens
agtagtagggtttga

SEQ ID NO: 502825 - DNA, 15 bp, Homo sapiens
gtagtagggtttgaa

SEQ ID NO: 502826 - DNA, 15 bp, Homo sapiens
tagtagggtttgaac

SEQ ID NO: 502827 - DNA, 15 bp, Homo sapiens
agtagggtttgaacc

SEQ ID NO: 502828 - DNA, 15 bp, Homo sapiens
gtagggtttgaacca

SEQ ID NO: 502829 - DNA, 15 bp, Homo sapiens
tagggtttgaaccaa

SEQ ID NO: 502830 - DNA, 15 bp, Homo sapiens
agggtttgaaccaag

SEQ ID NO: 502831 - DNA, 15 bp, Homo sapiens
gggtttgaaccaaga

SEQ ID NO: 502832 - DNA, 15 bp, Homo sapiens
ggtttgaaccaagag

SEQ ID NO: 502833 - DNA, 15 bp, Homo sapiens
gtttgaaccaagagt

SEQ ID NO: 502834 - DNA, 15 bp, Homo sapiens
tttgaaccaagagtg

SEQ ID NO: 502835 - DNA, 15 bp, Homo sapiens
ttgaaccaagagtgg

SEQ ID NO: 502836 - DNA, 15 bp, Homo sapiens
tgaaccaagagtggc

SEQ ID NO: 502837 - DNA, 15 bp, Homo sapiens
gaaccaagagtggct

SEQ ID NO: 502838 - DNA, 15 bp, Homo sapiens
aaccaagagtggcta

SEQ ID NO: 502839 - DNA, 15 bp, Homo sapiens
accaagagtggctaa

SEQ ID NO: 502840 - DNA, 15 bp, Homo sapiens
ccaagagtggctaac

SEQ ID NO: 502841 - DNA, 15 bp, Homo sapiens
caagagtggctaaca

SEQ ID NO: 502842 - DNA, 15 bp, Homo sapiens
aagagtggctaacat

SEQ ID NO: 502843 - DNA, 15 bp, Homo sapiens
agagtggctaacata

SEQ ID NO: 502844 - DNA, 15 bp, Homo sapiens
gagtggctaacataa

SEQ ID NO: 502845 - DNA, 15 bp, Homo sapiens
agtggctaacataaa

SEQ ID NO: 502846 - DNA, 15 bp, Homo sapiens
gtggctaacataaat

SEQ ID NO: 502847 - DNA, 15 bp, Homo sapiens
tggctaacataaata

SEQ ID NO: 502848 - DNA, 15 bp, Homo sapiens
ggctaacataaatac

SEQ ID NO: 502849 - DNA, 15 bp, Homo sapiens
gctaacataaatacc

SEQ ID NO: 502850 - DNA, 15 bp, Homo sapiens
ctaacataaatacca

SEQ ID NO: 502851 - DNA, 15 bp, Homo sapiens
taacataaataccac

SEQ ID NO: 502852 - DNA, 15 bp, Homo sapiens
aacataaataccaca

SEQ ID NO: 502853 - DNA, 15 bp, Homo sapiens
acataaataccacag

SEQ ID NO: 502854 - DNA, 15 bp, Homo sapiens
cataaataccacaga

SEQ ID NO: 502855 - DNA, 15 bp, Homo sapiens
ataaataccacagag

SEQ ID NO: 502856 - DNA, 15 bp, Homo sapiens
taaataccacagagg

SEQ ID NO: 502857 - DNA, 15 bp, Homo sapiens
aaataccacagaggc

SEQ ID NO: 502858 - DNA, 15 bp, Homo sapiens
aataccacagaggcc

SEQ ID NO: 502859 - DNA, 15 bp, Homo sapiens
ataccacagaggccc

SEQ ID NO: 502860 - DNA, 15 bp, Homo sapiens
taccacagaggccca

SEQ ID NO: 502861 - DNA, 15 bp, Homo sapiens
accacagaggcccac

SEQ ID NO: 502862 - DNA, 15 bp, Homo sapiens
ccacagaggcccaca

SEQ ID NO: 502863 - DNA, 15 bp, Homo sapiens
cacagaggcccacag

SEQ ID NO: 502864 - DNA, 15 bp, Homo sapiens
acagaggcccacagc

SEQ ID NO: 502865 - DNA, 15 bp, Homo sapiens
cagaggcccacagca

SEQ ID NO: 502866 - DNA, 15 bp, Homo sapiens
agaggcccacagcaa

SEQ ID NO: 502867 - DNA, 15 bp, Homo sapiens
gaggcccacagcaaa

SEQ ID NO: 502868 - DNA, 15 bp, Homo sapiens
aggcccacagcaaaa

SEQ ID NO: 502869 - DNA, 15 bp, Homo sapiens
ggcccacagcaaaat

SEQ ID NO: 502870 - DNA, 15 bp, Homo sapiens
gcccacagcaaaatc

SEQ ID NO: 502871 - DNA, 15 bp, Homo sapiens
cccacagcaaaatca

SEQ ID NO: 502872 - DNA, 15 bp, Homo sapiens
ccacagcaaaatcat

SEQ ID NO: 502873 - DNA, 15 bp, Homo sapiens
cacagcaaaatcatg

SEQ ID NO: 502874 - DNA, 15 bp, Homo sapiens
acagcaaaatcatgg

SEQ ID NO: 502875 - DNA, 15 bp, Homo sapiens
cagcaaaatcatgga

SEQ ID NO: 502876 - DNA, 15 bp, Homo sapiens
agcaaaatcatggaa

SEQ ID NO: 502877 - DNA, 15 bp, Homo sapiens
gcaaaatcatggaag

SEQ ID NO: 502878 - DNA, 15 bp, Homo sapiens
caaaatcatggaagg

SEQ ID NO: 502879 - DNA, 15 bp, Homo sapiens
aaaatcatggaagga

SEQ ID NO: 502880 - DNA, 15 bp, Homo sapiens
aaatcatggaaggaa

SEQ ID NO: 502881 - DNA, 15 bp, Homo sapiens
aatcatggaaggaac

SEQ ID NO: 502882 - DNA, 15 bp, Homo sapiens
atcatggaaggaact

SEQ ID NO: 502883 - DNA, 15 bp, Homo sapiens
tcatggaaggaactg

SEQ ID NO: 502884 - DNA, 15 bp, Homo sapiens
catggaaggaactga

SEQ ID NO: 502885 - DNA, 15 bp, Homo sapiens
atggaaggaactgac

SEQ ID NO: 502886 - DNA, 15 bp, Homo sapiens
tggaaggaactgacc

SEQ ID NO: 502887 - DNA, 15 bp, Homo sapiens
ggaaggaactgacct

SEQ ID NO: 502888 - DNA, 15 bp, Homo sapiens
gaaggaactgacctg

SEQ ID NO: 502889 - DNA, 15 bp, Homo sapiens
aaggaactgacctgg

SEQ ID NO: 502890 - DNA, 15 bp, Homo sapiens
aggaactgacctggt

SEQ ID NO: 502891 - DNA, 15 bp, Homo sapiens
ggaactgacctggtg

SEQ ID NO: 502892 - DNA, 15 bp, Homo sapiens
gaactgacctggtgg

SEQ ID NO: 502893 - DNA, 15 bp, Homo sapiens
aactgacctggtgga

SEQ ID NO: 502894 - DNA, 15 bp, Homo sapiens
actgacctggtggag

SEQ ID NO: 502895 - DNA, 15 bp, Homo sapiens
ctgacctggtggaga

SEQ ID NO: 502896 - DNA, 15 bp, Homo sapiens
tgacctggtggagac

SEQ ID NO: 502897 - DNA, 15 bp, Homo sapiens
gacctggtggagact

SEQ ID NO: 502898 - DNA, 15 bp, Homo sapiens
acctggtggagactg

SEQ ID NO: 502899 - DNA, 15 bp, Homo sapiens
cctggtggagactgg

SEQ ID NO: 502900 - DNA, 15 bp, Homo sapiens
ctggtggagactggt

SEQ ID NO: 502901 - DNA, 15 bp, Homo sapiens
tggtggagactggta

SEQ ID NO: 502902 - DNA, 15 bp, Homo sapiens
ggtggagactggtaa

SEQ ID NO: 502903 - DNA, 15 bp, Homo sapiens
gtggagactggtaaa

SEQ ID NO: 502904 - DNA, 15 bp, Homo sapiens
tggagactggtaaat

SEQ ID NO: 502905 - DNA, 15 bp, Homo sapiens
ggagactggtaaatt

SEQ ID NO: 502906 - DNA, 15 bp, Homo sapiens
gagactggtaaattg

SEQ ID NO: 502907 - DNA, 15 bp, Homo sapiens
agactggtaaattgg

SEQ ID NO: 502908 - DNA, 15 bp, Homo sapiens
gactggtaaattgga

SEQ ID NO: 502909 - DNA, 15 bp, Homo sapiens
actggtaaattggag

SEQ ID NO: 502910 - DNA, 15 bp, Homo sapiens
ctggtaaattggaga

SEQ ID NO: 502911 - DNA, 15 bp, Homo sapiens
tggtaaattggagag

SEQ ID NO: 502912 - DNA, 15 bp, Homo sapiens
ggtaaattggagagt

SEQ ID NO: 502913 - DNA, 15 bp, Homo sapiens
gtaaattggagagta

SEQ ID NO: 502914 - DNA, 15 bp, Homo sapiens
taaattggagagtat

SEQ ID NO: 502915 - DNA, 15 bp, Homo sapiens
aaattggagagtatt

SEQ ID NO: 502916 - DNA, 15 bp, Homo sapiens
aattggagagtattt

SEQ ID NO: 502917 - DNA, 15 bp, Homo sapiens
attggagagtatttg

SEQ ID NO: 502918 - DNA, 15 bp, Homo sapiens
ttggagagtatttgc

SEQ ID NO: 502919 - DNA, 15 bp, Homo sapiens
tggagagtatttgcc

SEQ ID NO: 502920 - DNA, 15 bp, Homo sapiens
ggagagtatttgccc

SEQ ID NO: 502921 - DNA, 15 bp, Homo sapiens
gagagtatttgcccc

SEQ ID NO: 502922 - DNA, 15 bp, Homo sapiens
agagtatttgcccct

SEQ ID NO: 502923 - DNA, 15 bp, Homo sapiens
gagtatttgcccctt

SEQ ID NO: 502924 - DNA, 15 bp, Homo sapiens
agtatttgccccttc

SEQ ID NO: 502925 - DNA, 15 bp, Homo sapiens
gtatttgccccttct

SEQ ID NO: 502926 - DNA, 15 bp, Homo sapiens
tatttgccccttcta

SEQ ID NO: 502927 - DNA, 15 bp, Homo sapiens
atttgccccttctat

SEQ ID NO: 502928 - DNA, 15 bp, Homo sapiens
tttgccccttctatg

SEQ ID NO: 502929 - DNA, 15 bp, Homo sapiens
ttgccccttctatgt

SEQ ID NO: 502930 - DNA, 15 bp, Homo sapiens
tgccccttctatgtt

SEQ ID NO: 502931 - DNA, 15 bp, Homo sapiens
gccccttctatgttt

SEQ ID NO: 502932 - DNA, 15 bp, Homo sapiens
ccccttctatgtttg

SEQ ID NO: 502933 - DNA, 15 bp, Homo sapiens
cccttctatgtttgg

SEQ ID NO: 502934 - DNA, 15 bp, Homo sapiens
ccttctatgtttggg

SEQ ID NO: 502935 - DNA, 15 bp, Homo sapiens
cttctatgtttgggc

SEQ ID NO: 502936 - DNA, 15 bp, Homo sapiens
ttctatgtttgggcc

SEQ ID NO: 502937 - DNA, 15 bp, Homo sapiens
tctatgtttgggcca

SEQ ID NO: 502938 - DNA, 15 bp, Homo sapiens
ctatgtttgggccac

SEQ ID NO: 502939 - DNA, 15 bp, Homo sapiens
tatgtttgggccaca

SEQ ID NO: 502940 - DNA, 15 bp, Homo sapiens
atgtttgggccacac

SEQ ID NO: 502941 - DNA, 15 bp, Homo sapiens
tgtttgggccacacc

SEQ ID NO: 502942 - DNA, 15 bp, Homo sapiens
gtttgggccacacct

SEQ ID NO: 502943 - DNA, 15 bp, Homo sapiens
tttgggccacaccta

SEQ ID NO: 502944 - DNA, 15 bp, Homo sapiens
ttgggccacacctaa

SEQ ID NO: 502945 - DNA, 15 bp, Homo sapiens
tgggccacacctaat

SEQ ID NO: 502946 - DNA, 15 bp, Homo sapiens
gggccacacctaatt

SEQ ID NO: 502947 - DNA, 15 bp, Homo sapiens
ggccacacctaattg

SEQ ID NO: 502948 - DNA, 15 bp, Homo sapiens
gccacacctaattgt

SEQ ID NO: 502949 - DNA, 15 bp, Homo sapiens
ccacacctaattgtg

SEQ ID NO: 502950 - DNA, 15 bp, Homo sapiens
cacacctaattgtgg

SEQ ID NO: 502951 - DNA, 15 bp, Homo sapiens
acacctaattgtggc

SEQ ID NO: 502952 - DNA, 15 bp, Homo sapiens
cacctaattgtggct

SEQ ID NO: 502953 - DNA, 15 bp, Homo sapiens
acctaattgtggctg

SEQ ID NO: 502954 - DNA, 15 bp, Homo sapiens
cctaattgtggctgt

SEQ ID NO: 502955 - DNA, 15 bp, Homo sapiens
ctaattgtggctgtg

SEQ ID NO: 502956 - DNA, 15 bp, Homo sapiens
taattgtggctgtga

SEQ ID NO: 502957 - DNA, 15 bp, Homo sapiens
aattgtggctgtgag

SEQ ID NO: 502958 - DNA, 15 bp, Homo sapiens
attgtggctgtgagg

SEQ ID NO: 502959 - DNA, 15 bp, Homo sapiens
ttgtggctgtgaggg

SEQ ID NO: 502960 - DNA, 15 bp, Homo sapiens
tgtggctgtgagggc

SEQ ID NO: 502961 - DNA, 15 bp, Homo sapiens
gtggctgtgagggca

SEQ ID NO: 502962 - DNA, 15 bp, Homo sapiens
tggctgtgagggcat

SEQ ID NO: 502963 - DNA, 15 bp, Homo sapiens
ggctgtgagggcatg

SEQ ID NO: 502964 - DNA, 15 bp, Homo sapiens
gctgtgagggcatgt

SEQ ID NO: 502965 - DNA, 15 bp, Homo sapiens
ctgtgagggcatgtg

SEQ ID NO: 502966 - DNA, 15 bp, Homo sapiens
tgtgagggcatgtgg

SEQ ID NO: 502967 - DNA, 15 bp, Homo sapiens
gtgagggcatgtggt

SEQ ID NO: 502968 - DNA, 15 bp, Homo sapiens
tgagggcatgtggtc

SEQ ID NO: 502969 - DNA, 15 bp, Homo sapiens
gagggcatgtggtct

SEQ ID NO: 502970 - DNA, 15 bp, Homo sapiens
agggcatgtggtctc

SEQ ID NO: 502971 - DNA, 15 bp, Homo sapiens
gggcatgtggtctca

SEQ ID NO: 502972 - DNA, 15 bp, Homo sapiens
ggcatgtggtctcag

SEQ ID NO: 502973 - DNA, 15 bp, Homo sapiens
gcatgtggtctcagg

SEQ ID NO: 502974 - DNA, 15 bp, Homo sapiens
catgtggtctcaggg

SEQ ID NO: 502975 - DNA, 15 bp, Homo sapiens
atgtggtctcagggt

SEQ ID NO: 502976 - DNA, 15 bp, Homo sapiens
tgtggtctcagggtg

SEQ ID NO: 502977 - DNA, 15 bp, Homo sapiens
gtggtctcagggtgg

SEQ ID NO: 502978 - DNA, 15 bp, Homo sapiens
tggtctcagggtggg

SEQ ID NO: 502979 - DNA, 15 bp, Homo sapiens
ggtctcagggtgggt

SEQ ID NO: 502980 - DNA, 15 bp, Homo sapiens
gtctcagggtgggtt

SEQ ID NO: 502981 - DNA, 15 bp, Homo sapiens
tctcagggtgggttt

SEQ ID NO: 502982 - DNA, 15 bp, Homo sapiens
ctcagggtgggtttt

SEQ ID NO: 502983 - DNA, 15 bp, Homo sapiens
tcagggtgggttttc

SEQ ID NO: 502984 - DNA, 15 bp, Homo sapiens
cagggtgggttttcc

SEQ ID NO: 502985 - DNA, 15 bp, Homo sapiens
agggtgggttttcct

SEQ ID NO: 502986 - DNA, 15 bp, Homo sapiens
gggtgggttttccta

SEQ ID NO: 502987 - DNA, 15 bp, Homo sapiens
ggtgggttttcctat

SEQ ID NO: 502988 - DNA, 15 bp, Homo sapiens
gtgggttttcctata

SEQ ID NO: 502989 - DNA, 15 bp, Homo sapiens
tgggttttcctatat

SEQ ID NO: 502990 - DNA, 15 bp, Homo sapiens
gggttttcctatatt

SEQ ID NO: 502991 - DNA, 15 bp, Homo sapiens
ggttttcctatattg

SEQ ID NO: 502992 - DNA, 15 bp, Homo sapiens
gttttcctatattgc

SEQ ID NO: 502993 - DNA, 15 bp, Homo sapiens
ttttcctatattgca

SEQ ID NO: 502994 - DNA, 15 bp, Homo sapiens
tttcctatattgcaa

SEQ ID NO: 502995 - DNA, 15 bp, Homo sapiens
ttcctatattgcaag

SEQ ID NO: 502996 - DNA, 15 bp, Homo sapiens
tcctatattgcaaga

SEQ ID NO: 502997 - DNA, 15 bp, Homo sapiens
cctatattgcaagat

SEQ ID NO: 502998 - DNA, 15 bp, Homo sapiens
ctatattgcaagata

SEQ ID NO: 502999 - DNA, 15 bp, Homo sapiens
tatattgcaagataa

SEQ ID NO: 503000 - DNA, 15 bp, Homo sapiens
atattgcaagataac

SEQ ID NO: 503001 - DNA, 15 bp, Homo sapiens
tattgcaagataacc

SEQ ID NO: 503002 - DNA, 15 bp, Homo sapiens
attgcaagataacct

SEQ ID NO: 503003 - DNA, 15 bp, Homo sapiens
ttgcaagataaccta

SEQ ID NO: 503004 - DNA, 15 bp, Homo sapiens
tgcaagataacctag

SEQ ID NO: 503005 - DNA, 15 bp, Homo sapiens
gcaagataacctagg

SEQ ID NO: 503006 - DNA, 15 bp, Homo sapiens
caagataacctagga

SEQ ID NO: 503007 - DNA, 15 bp, Homo sapiens
aagataacctaggaa

SEQ ID NO: 503008 - DNA, 15 bp, Homo sapiens
agataacctaggaat

SEQ ID NO: 503009 - DNA, 15 bp, Homo sapiens
gataacctaggaatg

SEQ ID NO: 503010 - DNA, 15 bp, Homo sapiens
ataacctaggaatgc

SEQ ID NO: 503011 - DNA, 15 bp, Homo sapiens
taacctaggaatgca

SEQ ID NO: 503012 - DNA, 15 bp, Homo sapiens
aacctaggaatgcaa

SEQ ID NO: 503013 - DNA, 15 bp, Homo sapiens
acctaggaatgcaaa

SEQ ID NO: 503014 - DNA, 15 bp, Homo sapiens
cctaggaatgcaaaa

SEQ ID NO: 503015 - DNA, 15 bp, Homo sapiens
ctaggaatgcaaaat

SEQ ID NO: 503016 - DNA, 15 bp, Homo sapiens
taggaatgcaaaatt

SEQ ID NO: 503017 - DNA, 15 bp, Homo sapiens
aggaatgcaaaattg

SEQ ID NO: 503018 - DNA, 15 bp, Homo sapiens
ggaatgcaaaattga

SEQ ID NO: 503019 - DNA, 15 bp, Homo sapiens
gaatgcaaaattgat

SEQ ID NO: 503020 - DNA, 15 bp, Homo sapiens
aatgcaaaattgatg

SEQ ID NO: 503021 - DNA, 15 bp, Homo sapiens
atgcaaaattgatgc

SEQ ID NO: 503022 - DNA, 15 bp, Homo sapiens
tgcaaaattgatgcc

SEQ ID NO: 503023 - DNA, 15 bp, Homo sapiens
gcaaaattgatgcca

SEQ ID NO: 503024 - DNA, 15 bp, Homo sapiens
caaaattgatgccag

SEQ ID NO: 503025 - DNA, 15 bp, Homo sapiens
aaaattgatgccaga

SEQ ID NO: 503026 - DNA, 15 bp, Homo sapiens
aaattgatgccagat

SEQ ID NO: 503027 - DNA, 15 bp, Homo sapiens
aattgatgccagata

SEQ ID NO: 503028 - DNA, 15 bp, Homo sapiens
attgatgccagatac

SEQ ID NO: 503029 - DNA, 15 bp, Homo sapiens
ttgatgccagatacc

SEQ ID NO: 503030 - DNA, 15 bp, Homo sapiens
tgatgccagataccc

SEQ ID NO: 503031 - DNA, 15 bp, Homo sapiens
gatgccagataccct

SEQ ID NO: 503032 - DNA, 15 bp, Homo sapiens
atgccagataccctg

SEQ ID NO: 503033 - DNA, 15 bp, Homo sapiens
tgccagataccctgt

SEQ ID NO: 503034 - DNA, 15 bp, Homo sapiens
gccagataccctgtt

SEQ ID NO: 503035 - DNA, 15 bp, Homo sapiens
ccagataccctgttt

SEQ ID NO: 503036 - DNA, 15 bp, Homo sapiens
cagataccctgtttc

SEQ ID NO: 503037 - DNA, 15 bp, Homo sapiens
agataccctgtttca

SEQ ID NO: 503038 - DNA, 15 bp, Homo sapiens
gataccctgtttcaa

SEQ ID NO: 503039 - DNA, 15 bp, Homo sapiens
ataccctgtttcaac

SEQ ID NO: 503040 - DNA, 15 bp, Homo sapiens
taccctgtttcaaca

SEQ ID NO: 503041 - DNA, 15 bp, Homo sapiens
accctgtttcaacat

SEQ ID NO: 503042 - DNA, 15 bp, Homo sapiens
ccctgtttcaacatt

SEQ ID NO: 503043 - DNA, 15 bp, Homo sapiens
cctgtttcaacattg

SEQ ID NO: 503044 - DNA, 15 bp, Homo sapiens
ctgtttcaacattga

SEQ ID NO: 503045 - DNA, 15 bp, Homo sapiens
tgtttcaacattgac

SEQ ID NO: 503046 - DNA, 15 bp, Homo sapiens
gtttcaacattgaca

SEQ ID NO: 503047 - DNA, 15 bp, Homo sapiens
tttcaacattgacag

SEQ ID NO: 503048 - DNA, 15 bp, Homo sapiens
ttcaacattgacagc

SEQ ID NO: 503049 - DNA, 15 bp, Homo sapiens
tcaacattgacagct

SEQ ID NO: 503050 - DNA, 15 bp, Homo sapiens
caacattgacagctg

SEQ ID NO: 503051 - DNA, 15 bp, Homo sapiens
aacattgacagctga

SEQ ID NO: 503052 - DNA, 15 bp, Homo sapiens
acattgacagctgat

SEQ ID NO: 503053 - DNA, 15 bp, Homo sapiens
cattgacagctgatt

SEQ ID NO: 503054 - DNA, 15 bp, Homo sapiens
attgacagctgattc

SEQ ID NO: 503055 - DNA, 15 bp, Homo sapiens
ttgacagctgattca

SEQ ID NO: 503056 - DNA, 15 bp, Homo sapiens
tgacagctgattcag

SEQ ID NO: 503057 - DNA, 15 bp, Homo sapiens
gacagctgattcaga

SEQ ID NO: 503058 - DNA, 15 bp, Homo sapiens
acagctgattcagat

SEQ ID NO: 503059 - DNA, 15 bp, Homo sapiens
cagctgattcagatt

SEQ ID NO: 503060 - DNA, 15 bp, Homo sapiens
agctgattcagattt

SEQ ID NO: 503061 - DNA, 15 bp, Homo sapiens
gctgattcagatttt

SEQ ID NO: 503062 - DNA, 15 bp, Homo sapiens
ctgattcagattttg

SEQ ID NO: 503063 - DNA, 15 bp, Homo sapiens
tgattcagattttga

SEQ ID NO: 503064 - DNA, 15 bp, Homo sapiens
gattcagattttgaa

SEQ ID NO: 503065 - DNA, 15 bp, Homo sapiens
attcagattttgaaa

SEQ ID NO: 503066 - DNA, 15 bp, Homo sapiens
ttcagattttgaaaa

SEQ ID NO: 503067 - DNA, 15 bp, Homo sapiens
tcagattttgaaaac

SEQ ID NO: 503068 - DNA, 15 bp, Homo sapiens
cagattttgaaaaca

SEQ ID NO: 503069 - DNA, 15 bp, Homo sapiens
agattttgaaaacat

SEQ ID NO: 503070 - DNA, 15 bp, Homo sapiens
gattttgaaaacatt

SEQ ID NO: 503071 - DNA, 15 bp, Homo sapiens
attttgaaaacattg

SEQ ID NO: 503072 - DNA, 15 bp, Homo sapiens
ttttgaaaacattgt

SEQ ID NO: 503073 - DNA, 15 bp, Homo sapiens
tttgaaaacattgta

SEQ ID NO: 503074 - DNA, 15 bp, Homo sapiens
ttgaaaacattgtac

SEQ ID NO: 503075 - DNA, 15 bp, Homo sapiens
tgaaaacattgtaca

SEQ ID NO: 503076 - DNA, 15 bp, Homo sapiens
gaaaacattgtacaa

SEQ ID NO: 503077 - DNA, 15 bp, Homo sapiens
aaaacattgtacaag

SEQ ID NO: 503078 - DNA, 15 bp, Homo sapiens
aaacattgtacaagc

SEQ ID NO: 503079 - DNA, 15 bp, Homo sapiens
aacattgtacaagct

SEQ ID NO: 503080 - DNA, 15 bp, Homo sapiens
acattgtacaagctg

SEQ ID NO: 503081 - DNA, 15 bp, Homo sapiens
cattgtacaagctga

SEQ ID NO: 503082 - DNA, 15 bp, Homo sapiens
attgtacaagctgaa

SEQ ID NO: 503083 - DNA, 15 bp, Homo sapiens
ttgtacaagctgaaa

SEQ ID NO: 503084 - DNA, 15 bp, Homo sapiens
tgtacaagctgaaaa

SEQ ID NO: 503085 - DNA, 15 bp, Homo sapiens
gtacaagctgaaaag

SEQ ID NO: 503086 - DNA, 15 bp, Homo sapiens
tacaagctgaaaaga

SEQ ID NO: 503087 - DNA, 15 bp, Homo sapiens
acaagctgaaaagaa

SEQ ID NO: 503088 - DNA, 15 bp, Homo sapiens
caagctgaaaagaaa

SEQ ID NO: 503089 - DNA, 15 bp, Homo sapiens
aagctgaaaagaaac

SEQ ID NO: 503090 - DNA, 15 bp, Homo sapiens
agctgaaaagaaaca

SEQ ID NO: 503091 - DNA, 15 bp, Homo sapiens
gctgaaaagaaacat

SEQ ID NO: 503092 - DNA, 15 bp, Homo sapiens
ctgaaaagaaacatc

SEQ ID NO: 503093 - DNA, 15 bp, Homo sapiens
tgaaaagaaacatct

SEQ ID NO: 503094 - DNA, 15 bp, Homo sapiens
gaaaagaaacatctg

SEQ ID NO: 503095 - DNA, 15 bp, Homo sapiens
aaaagaaacatctgc

SEQ ID NO: 503096 - DNA, 15 bp, Homo sapiens
aaagaaacatctgca

SEQ ID NO: 503097 - DNA, 15 bp, Homo sapiens
aagaaacatctgcag

SEQ ID NO: 503098 - DNA, 15 bp, Homo sapiens
agaaacatctgcaga

SEQ ID NO: 503099 - DNA, 15 bp, Homo sapiens
gaaacatctgcagac

SEQ ID NO: 503100 - DNA, 15 bp, Homo sapiens
aaacatctgcagact

SEQ ID NO: 503101 - DNA, 15 bp, Homo sapiens
aacatctgcagactt

SEQ ID NO: 503102 - DNA, 15 bp, Homo sapiens
acatctgcagacttg

SEQ ID NO: 503103 - DNA, 15 bp, Homo sapiens
catctgcagacttga

SEQ ID NO: 503104 - DNA, 15 bp, Homo sapiens
atctgcagacttgat

SEQ ID NO: 503105 - DNA, 15 bp, Homo sapiens
tctgcagacttgatt

SEQ ID NO: 503106 - DNA, 15 bp, Homo sapiens
ctgcagacttgattt

SEQ ID NO: 503107 - DNA, 15 bp, Homo sapiens
tgcagacttgatttg

SEQ ID NO: 503108 - DNA, 15 bp, Homo sapiens
gcagacttgatttgg

SEQ ID NO: 503109 - DNA, 15 bp, Homo sapiens
cagacttgatttggc

SEQ ID NO: 503110 - DNA, 15 bp, Homo sapiens
agacttgatttggcc

SEQ ID NO: 503111 - DNA, 15 bp, Homo sapiens
gacttgatttggccc

SEQ ID NO: 503112 - DNA, 15 bp, Homo sapiens
acttgatttggccct

SEQ ID NO: 503113 - DNA, 15 bp, Homo sapiens
cttgatttggccctt

SEQ ID NO: 503114 - DNA, 15 bp, Homo sapiens
ttgatttggcccttg

SEQ ID NO: 503115 - DNA, 15 bp, Homo sapiens
tgatttggcccttga

SEQ ID NO: 503116 - DNA, 15 bp, Homo sapiens
gatttggcccttgaa

SEQ ID NO: 503117 - DNA, 15 bp, Homo sapiens
atttggcccttgaac

SEQ ID NO: 503118 - DNA, 15 bp, Homo sapiens
tttggcccttgaacc

SEQ ID NO: 503119 - DNA, 15 bp, Homo sapiens
ttggcccttgaacct

SEQ ID NO: 503120 - DNA, 15 bp, Homo sapiens
tggcccttgaaccta

SEQ ID NO: 503121 - DNA, 15 bp, Homo sapiens
ggcccttgaacctac

SEQ ID NO: 503122 - DNA, 15 bp, Homo sapiens
gcccttgaacctaca

SEQ ID NO: 503123 - DNA, 15 bp, Homo sapiens
cccttgaacctacag

SEQ ID NO: 503124 - DNA, 15 bp, Homo sapiens
ccttgaacctacagc

SEQ ID NO: 503125 - DNA, 15 bp, Homo sapiens
cttgaacctacagca

SEQ ID NO: 503126 - DNA, 15 bp, Homo sapiens
ttgaacctacagcat

SEQ ID NO: 503127 - DNA, 15 bp, Homo sapiens
tgaacctacagcatg

SEQ ID NO: 503128 - DNA, 15 bp, Homo sapiens
gaacctacagcatgt

SEQ ID NO: 503129 - DNA, 15 bp, Homo sapiens
aacctacagcatgtg

SEQ ID NO: 503130 - DNA, 15 bp, Homo sapiens
acctacagcatgtga

SEQ ID NO: 503131 - DNA, 15 bp, Homo sapiens
cctacagcatgtgac

SEQ ID NO: 503132 - DNA, 15 bp, Homo sapiens
ctacagcatgtgact

SEQ ID NO: 503133 - DNA, 15 bp, Homo sapiens
tacagcatgtgactt

SEQ ID NO: 503134 - DNA, 15 bp, Homo sapiens
acagcatgtgacttt

SEQ ID NO: 503135 - DNA, 15 bp, Homo sapiens
cagcatgtgactttg

SEQ ID NO: 503136 - DNA, 15 bp, Homo sapiens
agcatgtgactttgg

SEQ ID NO: 503137 - DNA, 15 bp, Homo sapiens
gcatgtgactttggg

SEQ ID NO: 503138 - DNA, 15 bp, Homo sapiens
catgtgactttgggt

SEQ ID NO: 503139 - DNA, 15 bp, Homo sapiens
atgtgactttgggta

SEQ ID NO: 503140 - DNA, 15 bp, Homo sapiens
tgtgactttgggtac

SEQ ID NO: 503141 - DNA, 15 bp, Homo sapiens
gtgactttgggtaca

SEQ ID NO: 503142 - DNA, 15 bp, Homo sapiens
tgactttgggtacat

SEQ ID NO: 503143 - DNA, 15 bp, Homo sapiens
gactttgggtacata

SEQ ID NO: 503144 - DNA, 15 bp, Homo sapiens
actttgggtacatac

SEQ ID NO: 503145 - DNA, 15 bp, Homo sapiens
ctttgggtacatact

SEQ ID NO: 503146 - DNA, 15 bp, Homo sapiens
tttgggtacatactt

SEQ ID NO: 503147 - DNA, 15 bp, Homo sapiens
ttgggtacatacttt

SEQ ID NO: 503148 - DNA, 15 bp, Homo sapiens
tgggtacatactttg

SEQ ID NO: 503149 - DNA, 15 bp, Homo sapiens
gggtacatactttgg

SEQ ID NO: 503150 - DNA, 15 bp, Homo sapiens
ggtacatactttggg

SEQ ID NO: 503151 - DNA, 15 bp, Homo sapiens
gtacatactttgggt

SEQ ID NO: 503152 - DNA, 15 bp, Homo sapiens
tacatactttgggta

SEQ ID NO: 503153 - DNA, 15 bp, Homo sapiens
acatactttgggtaa

SEQ ID NO: 503154 - DNA, 15 bp, Homo sapiens
catactttgggtaac

SEQ ID NO: 503155 - DNA, 15 bp, Homo sapiens
atactttgggtaacc

SEQ ID NO: 503156 - DNA, 15 bp, Homo sapiens
tactttgggtaacct

SEQ ID NO: 503157 - DNA, 15 bp, Homo sapiens
actttgggtaacctt

SEQ ID NO: 503158 - DNA, 15 bp, Homo sapiens
ctttgggtaaccttg

SEQ ID NO: 503159 - DNA, 15 bp, Homo sapiens
tttgggtaaccttgg

SEQ ID NO: 503160 - DNA, 15 bp, Homo sapiens
ttgggtaaccttggt

SEQ ID NO: 503161 - DNA, 15 bp, Homo sapiens
tgggtaaccttggtg

SEQ ID NO: 503162 - DNA, 15 bp, Homo sapiens
gggtaaccttggtga

SEQ ID NO: 503163 - DNA, 15 bp, Homo sapiens
ggtaaccttggtgag

SEQ ID NO: 503164 - DNA, 15 bp, Homo sapiens
gtaaccttggtgagg

SEQ ID NO: 503165 - DNA, 15 bp, Homo sapiens
taaccttggtgaggg

SEQ ID NO: 503166 - DNA, 15 bp, Homo sapiens
aaccttggtgagggg

SEQ ID NO: 503167 - DNA, 15 bp, Homo sapiens
accttggtgaggggc

SEQ ID NO: 503168 - DNA, 15 bp, Homo sapiens
ccttggtgaggggct

SEQ ID NO: 503169 - DNA, 15 bp, Homo sapiens
cttggtgaggggctg

SEQ ID NO: 503170 - DNA, 15 bp, Homo sapiens
ttggtgaggggctga

SEQ ID NO: 503171 - DNA, 15 bp, Homo sapiens
tggtgaggggctgag

SEQ ID NO: 503172 - DNA, 15 bp, Homo sapiens
ggtgaggggctgagt

SEQ ID NO: 503173 - DNA, 15 bp, Homo sapiens
gtgaggggctgagtc

SEQ ID NO: 503174 - DNA, 15 bp, Homo sapiens
tgaggggctgagtct

SEQ ID NO: 503175 - DNA, 15 bp, Homo sapiens
gaggggctgagtctg

SEQ ID NO: 503176 - DNA, 15 bp, Homo sapiens
aggggctgagtctgt

SEQ ID NO: 503177 - DNA, 15 bp, Homo sapiens
ggggctgagtctgtg

SEQ ID NO: 503178 - DNA, 15 bp, Homo sapiens
gggctgagtctgtgt

SEQ ID NO: 503179 - DNA, 15 bp, Homo sapiens
ggctgagtctgtgtt

SEQ ID NO: 503180 - DNA, 15 bp, Homo sapiens
gctgagtctgtgttg

SEQ ID NO: 503181 - DNA, 15 bp, Homo sapiens
ctgagtctgtgttga

SEQ ID NO: 503182 - DNA, 15 bp, Homo sapiens
tgagtctgtgttgat

SEQ ID NO: 503183 - DNA, 15 bp, Homo sapiens
gagtctgtgttgatc

SEQ ID NO: 503184 - DNA, 15 bp, Homo sapiens
agtctgtgttgatcg

SEQ ID NO: 503185 - DNA, 15 bp, Homo sapiens
gtctgtgttgatcga

SEQ ID NO: 503186 - DNA, 15 bp, Homo sapiens
tctgtgttgatcgac

SEQ ID NO: 503187 - DNA, 15 bp, Homo sapiens
ctgtgttgatcgact

SEQ ID NO: 503188 - DNA, 15 bp, Homo sapiens
tgtgttgatcgactt

SEQ ID NO: 503189 - DNA, 15 bp, Homo sapiens
gtgttgatcgacttg

SEQ ID NO: 503190 - DNA, 15 bp, Homo sapiens
tgttgatcgacttgc

SEQ ID NO: 503191 - DNA, 15 bp, Homo sapiens
gttgatcgacttgct

SEQ ID NO: 503192 - DNA, 15 bp, Homo sapiens
ttgatcgacttgctg

SEQ ID NO: 503193 - DNA, 15 bp, Homo sapiens
tgatcgacttgctgt

SEQ ID NO: 503194 - DNA, 15 bp, Homo sapiens
gatcgacttgctgtt

SEQ ID NO: 503195 - DNA, 15 bp, Homo sapiens
atcgacttgctgttc

SEQ ID NO: 503196 - DNA, 15 bp, Homo sapiens
tcgacttgctgttcc

SEQ ID NO: 503197 - DNA, 15 bp, Homo sapiens
cgacttgctgttccc

SEQ ID NO: 503198 - DNA, 15 bp, Homo sapiens
gacttgctgttcccc

SEQ ID NO: 503199 - DNA, 15 bp, Homo sapiens
acttgctgttcccca

SEQ ID NO: 503200 - DNA, 15 bp, Homo sapiens
cttgctgttccccac

SEQ ID NO: 503201 - DNA, 15 bp, Homo sapiens
ttgctgttccccacc

SEQ ID NO: 503202 - DNA, 15 bp, Homo sapiens
tgctgttccccacca

SEQ ID NO: 503203 - DNA, 15 bp, Homo sapiens
gctgttccccaccaa

SEQ ID NO: 503204 - DNA, 15 bp, Homo sapiens
ctgttccccaccaat

SEQ ID NO: 503205 - DNA, 15 bp, Homo sapiens
tgttccccaccaatg

SEQ ID NO: 503206 - DNA, 15 bp, Homo sapiens
gttccccaccaatgg

SEQ ID NO: 503207 - DNA, 15 bp, Homo sapiens
ttccccaccaatgga

SEQ ID NO: 503208 - DNA, 15 bp, Homo sapiens
tccccaccaatggaa

SEQ ID NO: 503209 - DNA, 15 bp, Homo sapiens
ccccaccaatggaaa

SEQ ID NO: 503210 - DNA, 15 bp, Homo sapiens
cccaccaatggaaaa

SEQ ID NO: 503211 - DNA, 15 bp, Homo sapiens
ccaccaatggaaaag

SEQ ID NO: 503212 - DNA, 15 bp, Homo sapiens
caccaatggaaaagg

SEQ ID NO: 503213 - DNA, 15 bp, Homo sapiens
accaatggaaaaggt

SEQ ID NO: 503214 - DNA, 15 bp, Homo sapiens
ccaatggaaaaggtt

SEQ ID NO: 503215 - DNA, 15 bp, Homo sapiens
caatggaaaaggttc

SEQ ID NO: 503216 - DNA, 15 bp, Homo sapiens
aatggaaaaggttca

SEQ ID NO: 503217 - DNA, 15 bp, Homo sapiens
atggaaaaggttcat

SEQ ID NO: 503218 - DNA, 15 bp, Homo sapiens
tggaaaaggttcatg

SEQ ID NO: 503219 - DNA, 15 bp, Homo sapiens
ggaaaaggttcatgt

SEQ ID NO: 503220 - DNA, 15 bp, Homo sapiens
gaaaaggttcatgtc

SEQ ID NO: 503221 - DNA, 15 bp, Homo sapiens
aaaaggttcatgtct

SEQ ID NO: 503222 - DNA, 15 bp, Homo sapiens
aaaggttcatgtctt

SEQ ID NO: 503223 - DNA, 15 bp, Homo sapiens
aaggttcatgtcttg

SEQ ID NO: 503224 - DNA, 15 bp, Homo sapiens
aggttcatgtcttga

SEQ ID NO: 503225 - DNA, 15 bp, Homo sapiens
ggttcatgtcttgat

SEQ ID NO: 503226 - DNA, 15 bp, Homo sapiens
gttcatgtcttgatc

SEQ ID NO: 503227 - DNA, 15 bp, Homo sapiens
ttcatgtcttgatca

SEQ ID NO: 503228 - DNA, 15 bp, Homo sapiens
tcatgtcttgatcag

SEQ ID NO: 503229 - DNA, 15 bp, Homo sapiens
catgtcttgatcagt

SEQ ID NO: 503230 - DNA, 15 bp, Homo sapiens
atgtcttgatcagta

SEQ ID NO: 503231 - DNA, 15 bp, Homo sapiens
tgtcttgatcagtag

SEQ ID NO: 503232 - DNA, 15 bp, Homo sapiens
gtcttgatcagtagt

SEQ ID NO: 503233 - DNA, 15 bp, Homo sapiens
tcttgatcagtagtc

SEQ ID NO: 503234 - DNA, 15 bp, Homo sapiens
cttgatcagtagtca

SEQ ID NO: 503235 - DNA, 15 bp, Homo sapiens
ttgatcagtagtcaa

SEQ ID NO: 503236 - DNA, 15 bp, Homo sapiens
tgatcagtagtcaat

SEQ ID NO: 503237 - DNA, 15 bp, Homo sapiens
gatcagtagtcaatc

SEQ ID NO: 503238 - DNA, 15 bp, Homo sapiens
atcagtagtcaatca

SEQ ID NO: 503239 - DNA, 15 bp, Homo sapiens
tcagtagtcaatcac

SEQ ID NO: 503240 - DNA, 15 bp, Homo sapiens
cagtagtcaatcaca

SEQ ID NO: 503241 - DNA, 15 bp, Homo sapiens
agtagtcaatcacat

SEQ ID NO: 503242 - DNA, 15 bp, Homo sapiens
gtagtcaatcacatt

SEQ ID NO: 503243 - DNA, 15 bp, Homo sapiens
tagtcaatcacattg

SEQ ID NO: 503244 - DNA, 15 bp, Homo sapiens
agtcaatcacattga

SEQ ID NO: 503245 - DNA, 15 bp, Homo sapiens
gtcaatcacattgac

SEQ ID NO: 503246 - DNA, 15 bp, Homo sapiens
tcaatcacattgacc

SEQ ID NO: 503247 - DNA, 15 bp, Homo sapiens
caatcacattgacca

SEQ ID NO: 503248 - DNA, 15 bp, Homo sapiens
aatcacattgaccat

SEQ ID NO: 503249 - DNA, 15 bp, Homo sapiens
atcacattgaccatt

SEQ ID NO: 503250 - DNA, 15 bp, Homo sapiens
tcacattgaccattt

SEQ ID NO: 503251 - DNA, 15 bp, Homo sapiens
cacattgaccatttg

SEQ ID NO: 503252 - DNA, 15 bp, Homo sapiens
acattgaccatttgt

SEQ ID NO: 503253 - DNA, 15 bp, Homo sapiens
cattgaccatttgtc

SEQ ID NO: 503254 - DNA, 15 bp, Homo sapiens
attgaccatttgtcc

SEQ ID NO: 503255 - DNA, 15 bp, Homo sapiens
ttgaccatttgtcca

SEQ ID NO: 503256 - DNA, 15 bp, Homo sapiens
tgaccatttgtccag

SEQ ID NO: 503257 - DNA, 15 bp, Homo sapiens
gaccatttgtccaga

SEQ ID NO: 503258 - DNA, 15 bp, Homo sapiens
accatttgtccagat

SEQ ID NO: 503259 - DNA, 15 bp, Homo sapiens
ccatttgtccagatt

SEQ ID NO: 503260 - DNA, 15 bp, Homo sapiens
catttgtccagatta

SEQ ID NO: 503261 - DNA, 15 bp, Homo sapiens
atttgtccagattag

SEQ ID NO: 503262 - DNA, 15 bp, Homo sapiens
tttgtccagattagc

SEQ ID NO: 503263 - DNA, 15 bp, Homo sapiens
ttgtccagattagct

SEQ ID NO: 503264 - DNA, 15 bp, Homo sapiens
tgtccagattagctt

SEQ ID NO: 503265 - DNA, 15 bp, Homo sapiens
gtccagattagcttg

SEQ ID NO: 503266 - DNA, 15 bp, Homo sapiens
tccagattagcttgc

SEQ ID NO: 503267 - DNA, 15 bp, Homo sapiens
ccagattagcttgcc

SEQ ID NO: 503268 - DNA, 15 bp, Homo sapiens
cagattagcttgcca

SEQ ID NO: 503269 - DNA, 15 bp, Homo sapiens
agattagcttgccat

SEQ ID NO: 503270 - DNA, 15 bp, Homo sapiens
gattagcttgccata

SEQ ID NO: 503271 - DNA, 15 bp, Homo sapiens
attagcttgccatac

SEQ ID NO: 503272 - DNA, 15 bp, Homo sapiens
ttagcttgccataca

SEQ ID NO: 503273 - DNA, 15 bp, Homo sapiens
tagcttgccatacat

SEQ ID NO: 503274 - DNA, 15 bp, Homo sapiens
agcttgccatacatg

SEQ ID NO: 503275 - DNA, 15 bp, Homo sapiens
gcttgccatacatga

SEQ ID NO: 503276 - DNA, 15 bp, Homo sapiens
cttgccatacatgaa

SEQ ID NO: 503277 - DNA, 15 bp, Homo sapiens
ttgccatacatgaac

SEQ ID NO: 503278 - DNA, 15 bp, Homo sapiens
tgccatacatgaaca

SEQ ID NO: 503279 - DNA, 15 bp, Homo sapiens
gccatacatgaacaa

SEQ ID NO: 503280 - DNA, 15 bp, Homo sapiens
ccatacatgaacaag

SEQ ID NO: 503281 - DNA, 15 bp, Homo sapiens
catacatgaacaaga

SEQ ID NO: 503282 - DNA, 15 bp, Homo sapiens
atacatgaacaagat

SEQ ID NO: 503283 - DNA, 15 bp, Homo sapiens
tacatgaacaagata

SEQ ID NO: 503284 - DNA, 15 bp, Homo sapiens
acatgaacaagatag

SEQ ID NO: 503285 - DNA, 15 bp, Homo sapiens
catgaacaagataga

SEQ ID NO: 503286 - DNA, 15 bp, Homo sapiens
atgaacaagatagaa

SEQ ID NO: 503287 - DNA, 15 bp, Homo sapiens
tgaacaagatagaag

SEQ ID NO: 503288 - DNA, 15 bp, Homo sapiens
gaacaagatagaagt

SEQ ID NO: 503289 - DNA, 15 bp, Homo sapiens
aacaagatagaagta

SEQ ID NO: 503290 - DNA, 15 bp, Homo sapiens
acaagatagaagtaa

SEQ ID NO: 503291 - DNA, 15 bp, Homo sapiens
caagatagaagtaag

SEQ ID NO: 503292 - DNA, 15 bp, Homo sapiens
aagatagaagtaagt

SEQ ID NO: 503293 - DNA, 15 bp, Homo sapiens
agatagaagtaagtt

SEQ ID NO: 503294 - DNA, 15 bp, Homo sapiens
gatagaagtaagttg

SEQ ID NO: 503295 - DNA, 15 bp, Homo sapiens
atagaagtaagttgg

SEQ ID NO: 503296 - DNA, 15 bp, Homo sapiens
tagaagtaagttggt

SEQ ID NO: 503297 - DNA, 15 bp, Homo sapiens
agaagtaagttggta

SEQ ID NO: 503298 - DNA, 15 bp, Homo sapiens
gaagtaagttggtag

SEQ ID NO: 503299 - DNA, 15 bp, Homo sapiens
aagtaagttggtaga

SEQ ID NO: 503300 - DNA, 15 bp, Homo sapiens
agtaagttggtagag

SEQ ID NO: 503301 - DNA, 15 bp, Homo sapiens
gtaagttggtagagt

SEQ ID NO: 503302 - DNA, 15 bp, Homo sapiens
taagttggtagagtt

SEQ ID NO: 503303 - DNA, 15 bp, Homo sapiens
aagttggtagagtta

SEQ ID NO: 503304 - DNA, 15 bp, Homo sapiens
agttggtagagttat

SEQ ID NO: 503305 - DNA, 15 bp, Homo sapiens
gttggtagagttatc

SEQ ID NO: 503306 - DNA, 15 bp, Homo sapiens
ttggtagagttatca

SEQ ID NO: 503307 - DNA, 15 bp, Homo sapiens
tggtagagttatcaa

SEQ ID NO: 503308 - DNA, 15 bp, Homo sapiens
ggtagagttatcaat

SEQ ID NO: 503309 - DNA, 15 bp, Homo sapiens
gtagagttatcaatt

SEQ ID NO: 503310 - DNA, 15 bp, Homo sapiens
tagagttatcaatta

SEQ ID NO: 503311 - DNA, 15 bp, Homo sapiens
agagttatcaattag

SEQ ID NO: 503312 - DNA, 15 bp, Homo sapiens
gagttatcaattagg

SEQ ID NO: 503313 - DNA, 15 bp, Homo sapiens
agttatcaattagga

SEQ ID NO: 503314 - DNA, 15 bp, Homo sapiens
gttatcaattaggaa

SEQ ID NO: 503315 - DNA, 15 bp, Homo sapiens
ttatcaattaggaaa

SEQ ID NO: 503316 - DNA, 15 bp, Homo sapiens
tatcaattaggaaac

SEQ ID NO: 503317 - DNA, 15 bp, Homo sapiens
atcaattaggaaacc

SEQ ID NO: 503318 - DNA, 15 bp, Homo sapiens
tcaattaggaaaccc

SEQ ID NO: 503319 - DNA, 15 bp, Homo sapiens
caattaggaaaccca

SEQ ID NO: 503320 - DNA, 15 bp, Homo sapiens
aattaggaaacccag

SEQ ID NO: 503321 - DNA, 15 bp, Homo sapiens
attaggaaacccagt

SEQ ID NO: 503322 - DNA, 15 bp, Homo sapiens
ttaggaaacccagta

SEQ ID NO: 503323 - DNA, 15 bp, Homo sapiens
taggaaacccagtac

SEQ ID NO: 503324 - DNA, 15 bp, Homo sapiens
aggaaacccagtaca

SEQ ID NO: 503325 - DNA, 15 bp, Homo sapiens
ggaaacccagtacag

SEQ ID NO: 503326 - DNA, 15 bp, Homo sapiens
gaaacccagtacaga

SEQ ID NO: 503327 - DNA, 15 bp, Homo sapiens
aaacccagtacagag

SEQ ID NO: 503328 - DNA, 15 bp, Homo sapiens
aacccagtacagagt

SEQ ID NO: 503329 - DNA, 15 bp, Homo sapiens
acccagtacagagtc

SEQ ID NO: 503330 - DNA, 15 bp, Homo sapiens
cccagtacagagtct

SEQ ID NO: 503331 - DNA, 15 bp, Homo sapiens
ccagtacagagtcta

SEQ ID NO: 503332 - DNA, 15 bp, Homo sapiens
cagtacagagtctat

SEQ ID NO: 503333 - DNA, 15 bp, Homo sapiens
agtacagagtctatt

SEQ ID NO: 503334 - DNA, 15 bp, Homo sapiens
gtacagagtctatta

SEQ ID NO: 503335 - DNA, 15 bp, Homo sapiens
tacagagtctattat

SEQ ID NO: 503336 - DNA, 15 bp, Homo sapiens
acagagtctattata

SEQ ID NO: 503337 - DNA, 15 bp, Homo sapiens
cagagtctattataa

SEQ ID NO: 503338 - DNA, 15 bp, Homo sapiens
agagtctattataat

SEQ ID NO: 503339 - DNA, 15 bp, Homo sapiens
gagtctattataatt

SEQ ID NO: 503340 - DNA, 15 bp, Homo sapiens
agtctattataattt

SEQ ID NO: 503341 - DNA, 15 bp, Homo sapiens
gtctattataattta

SEQ ID NO: 503342 - DNA, 15 bp, Homo sapiens
tctattataatttag

SEQ ID NO: 503343 - DNA, 15 bp, Homo sapiens
ctattataatttaga

SEQ ID NO: 503344 - DNA, 15 bp, Homo sapiens
tattataatttagat

SEQ ID NO: 503345 - DNA, 15 bp, Homo sapiens
attataatttagatt

SEQ ID NO: 503346 - DNA, 15 bp, Homo sapiens
ttataatttagattg

SEQ ID NO: 503347 - DNA, 15 bp, Homo sapiens
tataatttagattgt

SEQ ID NO: 503348 - DNA, 15 bp, Homo sapiens
ataatttagattgta

SEQ ID NO: 503349 - DNA, 15 bp, Homo sapiens
taatttagattgtac

SEQ ID NO: 503350 - DNA, 15 bp, Homo sapiens
aatttagattgtacc

SEQ ID NO: 503351 - DNA, 15 bp, Homo sapiens
atttagattgtacct

SEQ ID NO: 503352 - DNA, 15 bp, Homo sapiens
tttagattgtacctc

SEQ ID NO: 503353 - DNA, 15 bp, Homo sapiens
ttagattgtacctca

SEQ ID NO: 503354 - DNA, 15 bp, Homo sapiens
tagattgtacctcat

SEQ ID NO: 503355 - DNA, 15 bp, Homo sapiens
agattgtacctcatg

SEQ ID NO: 503356 - DNA, 15 bp, Homo sapiens
gattgtacctcatga

SEQ ID NO: 503357 - DNA, 15 bp, Homo sapiens
attgtacctcatgat

SEQ ID NO: 503358 - DNA, 15 bp, Homo sapiens
ttgtacctcatgatg

SEQ ID NO: 503359 - DNA, 15 bp, Homo sapiens
tgtacctcatgatga

SEQ ID NO: 503360 - DNA, 15 bp, Homo sapiens
gtacctcatgatgaa

SEQ ID NO: 503361 - DNA, 15 bp, Homo sapiens
tacctcatgatgaag

SEQ ID NO: 503362 - DNA, 15 bp, Homo sapiens
acctcatgatgaagg

SEQ ID NO: 503363 - DNA, 15 bp, Homo sapiens
cctcatgatgaaggc

SEQ ID NO: 503364 - DNA, 15 bp, Homo sapiens
ctcatgatgaaggct

SEQ ID NO: 503365 - DNA, 15 bp, Homo sapiens
tcatgatgaaggcta

SEQ ID NO: 503366 - DNA, 15 bp, Homo sapiens
catgatgaaggctaa

SEQ ID NO: 503367 - DNA, 15 bp, Homo sapiens
atgatgaaggctaac

SEQ ID NO: 503368 - DNA, 15 bp, Homo sapiens
tgatgaaggctaact

SEQ ID NO: 503369 - DNA, 15 bp, Homo sapiens
gatgaaggctaactc

SEQ ID NO: 503370 - DNA, 15 bp, Homo sapiens
atgaaggctaactca

SEQ ID NO: 503371 - DNA, 15 bp, Homo sapiens
tgaaggctaactcaa

SEQ ID NO: 503372 - DNA, 15 bp, Homo sapiens
gaaggctaactcaac

SEQ ID NO: 503373 - DNA, 15 bp, Homo sapiens
aaggctaactcaaca

SEQ ID NO: 503374 - DNA, 15 bp, Homo sapiens
aggctaactcaacaa

SEQ ID NO: 503375 - DNA, 15 bp, Homo sapiens
ggctaactcaacaaa

SEQ ID NO: 503376 - DNA, 15 bp, Homo sapiens
gctaactcaacaaac

SEQ ID NO: 503377 - DNA, 15 bp, Homo sapiens
ctaactcaacaaacc

SEQ ID NO: 503378 - DNA, 15 bp, Homo sapiens
taactcaacaaaccc

SEQ ID NO: 503379 - DNA, 15 bp, Homo sapiens
aactcaacaaaccca

SEQ ID NO: 503380 - DNA, 15 bp, Homo sapiens
actcaacaaacccat

SEQ ID NO: 503381 - DNA, 15 bp, Homo sapiens
ctcaacaaacccatc

SEQ ID NO: 503382 - DNA, 15 bp, Homo sapiens
tcaacaaacccatca

SEQ ID NO: 503383 - DNA, 15 bp, Homo sapiens
caacaaacccatcag

SEQ ID NO: 503384 - DNA, 15 bp, Homo sapiens
aacaaacccatcaga

SEQ ID NO: 503385 - DNA, 15 bp, Homo sapiens
acaaacccatcagaa

SEQ ID NO: 503386 - DNA, 15 bp, Homo sapiens
caaacccatcagaac

SEQ ID NO: 503387 - DNA, 15 bp, Homo sapiens
aaacccatcagaaca

SEQ ID NO: 503388 - DNA, 15 bp, Homo sapiens
aacccatcagaacag

SEQ ID NO: 503389 - DNA, 15 bp, Homo sapiens
acccatcagaacaga

SEQ ID NO: 503390 - DNA, 15 bp, Homo sapiens
cccatcagaacagac

SEQ ID NO: 503391 - DNA, 15 bp, Homo sapiens
ccatcagaacagaca

SEQ ID NO: 503392 - DNA, 15 bp, Homo sapiens
catcagaacagacac

SEQ ID NO: 503393 - DNA, 15 bp, Homo sapiens
atcagaacagacact

SEQ ID NO: 503394 - DNA, 15 bp, Homo sapiens
tcagaacagacactg

SEQ ID NO: 503395 - DNA, 15 bp, Homo sapiens
cagaacagacactgg

SEQ ID NO: 503396 - DNA, 15 bp, Homo sapiens
agaacagacactgga

SEQ ID NO: 503397 - DNA, 15 bp, Homo sapiens
gaacagacactggaa

SEQ ID NO: 503398 - DNA, 15 bp, Homo sapiens
aacagacactggaac

SEQ ID NO: 503399 - DNA, 15 bp, Homo sapiens
acagacactggaaca

SEQ ID NO: 503400 - DNA, 15 bp, Homo sapiens
cagacactggaacaa

SEQ ID NO: 503401 - DNA, 15 bp, Homo sapiens
agacactggaacaaa

SEQ ID NO: 503402 - DNA, 15 bp, Homo sapiens
gacactggaacaaaa

SEQ ID NO: 503403 - DNA, 15 bp, Homo sapiens
acactggaacaaaat

SEQ ID NO: 503404 - DNA, 15 bp, Homo sapiens
cactggaacaaaatg

SEQ ID NO: 503405 - DNA, 15 bp, Homo sapiens
actggaacaaaatga

SEQ ID NO: 503406 - DNA, 15 bp, Homo sapiens
ctggaacaaaatgac

SEQ ID NO: 503407 - DNA, 15 bp, Homo sapiens
tggaacaaaatgaca

SEQ ID NO: 503408 - DNA, 15 bp, Homo sapiens
ggaacaaaatgacat

SEQ ID NO: 503409 - DNA, 15 bp, Homo sapiens
gaacaaaatgacatt

SEQ ID NO: 503410 - DNA, 15 bp, Homo sapiens
aacaaaatgacattt

SEQ ID NO: 503411 - DNA, 15 bp, Homo sapiens
acaaaatgacatttc

SEQ ID NO: 503412 - DNA, 15 bp, Homo sapiens
caaaatgacatttct

SEQ ID NO: 503413 - DNA, 15 bp, Homo sapiens
aaaatgacatttcta

SEQ ID NO: 503414 - DNA, 15 bp, Homo sapiens
aaatgacatttctaa

SEQ ID NO: 503415 - DNA, 15 bp, Homo sapiens
aatgacatttctaaa

SEQ ID NO: 503416 - DNA, 15 bp, Homo sapiens
atgacatttctaaat

SEQ ID NO: 503417 - DNA, 15 bp, Homo sapiens
tgacatttctaaata

SEQ ID NO: 503418 - DNA, 15 bp, Homo sapiens
gacatttctaaatac

SEQ ID NO: 503419 - DNA, 15 bp, Homo sapiens
acatttctaaatacc

SEQ ID NO: 503420 - DNA, 15 bp, Homo sapiens
catttctaaatacca

SEQ ID NO: 503421 - DNA, 15 bp, Homo sapiens
atttctaaataccat

SEQ ID NO: 503422 - DNA, 15 bp, Homo sapiens
tttctaaataccatc

SEQ ID NO: 503423 - DNA, 15 bp, Homo sapiens
ttctaaataccatcc

SEQ ID NO: 503424 - DNA, 15 bp, Homo sapiens
tctaaataccatcca

SEQ ID NO: 503425 - DNA, 15 bp, Homo sapiens
ctaaataccatccag

SEQ ID NO: 503426 - DNA, 15 bp, Homo sapiens
taaataccatccagc

SEQ ID NO: 503427 - DNA, 15 bp, Homo sapiens
aaataccatccagct

SEQ ID NO: 503428 - DNA, 15 bp, Homo sapiens
aataccatccagctc

SEQ ID NO: 503429 - DNA, 15 bp, Homo sapiens
ataccatccagctct

SEQ ID NO: 503430 - DNA, 15 bp, Homo sapiens
taccatccagctctg

SEQ ID NO: 503431 - DNA, 15 bp, Homo sapiens
accatccagctctgt

SEQ ID NO: 503432 - DNA, 15 bp, Homo sapiens
ccatccagctctgtc

SEQ ID NO: 503433 - DNA, 15 bp, Homo sapiens
catccagctctgtct

SEQ ID NO: 503434 - DNA, 15 bp, Homo sapiens
atccagctctgtctt

SEQ ID NO: 503435 - DNA, 15 bp, Homo sapiens
tccagctctgtcttc

SEQ ID NO: 503436 - DNA, 15 bp, Homo sapiens
ccagctctgtcttca

SEQ ID NO: 503437 - DNA, 15 bp, Homo sapiens
cagctctgtcttcat

SEQ ID NO: 503438 - DNA, 15 bp, Homo sapiens
agctctgtcttcata

SEQ ID NO: 503439 - DNA, 15 bp, Homo sapiens
gctctgtcttcatag

SEQ ID NO: 503440 - DNA, 15 bp, Homo sapiens
ctctgtcttcatagg

SEQ ID NO: 503441 - DNA, 15 bp, Homo sapiens
tctgtcttcataggc

SEQ ID NO: 503442 - DNA, 15 bp, Homo sapiens
ctgtcttcataggct

SEQ ID NO: 503443 - DNA, 15 bp, Homo sapiens
tgtcttcataggctt

SEQ ID NO: 503444 - DNA, 15 bp, Homo sapiens
gtcttcataggcttc

SEQ ID NO: 503445 - DNA, 15 bp, Homo sapiens
tcttcataggcttca

SEQ ID NO: 503446 - DNA, 15 bp, Homo sapiens
cttcataggcttcag

SEQ ID NO: 503447 - DNA, 15 bp, Homo sapiens
ttcataggcttcagt

SEQ ID NO: 503448 - DNA, 15 bp, Homo sapiens
tcataggcttcagtg

SEQ ID NO: 503449 - DNA, 15 bp, Homo sapiens
cataggcttcagtga

SEQ ID NO: 503450 - DNA, 15 bp, Homo sapiens
ataggcttcagtgag

SEQ ID NO: 503451 - DNA, 15 bp, Homo sapiens
taggcttcagtgagg

SEQ ID NO: 503452 - DNA, 15 bp, Homo sapiens
aggcttcagtgaggt

SEQ ID NO: 503453 - DNA, 15 bp, Homo sapiens
ggcttcagtgaggta

SEQ ID NO: 503454 - DNA, 15 bp, Homo sapiens
gcttcagtgaggtaa

SEQ ID NO: 503455 - DNA, 15 bp, Homo sapiens
cttcagtgaggtaaa

SEQ ID NO: 503456 - DNA, 15 bp, Homo sapiens
ttcagtgaggtaaat

SEQ ID NO: 503457 - DNA, 15 bp, Homo sapiens
tcagtgaggtaaatc

SEQ ID NO: 503458 - DNA, 15 bp, Homo sapiens
cagtgaggtaaatca

SEQ ID NO: 503459 - DNA, 15 bp, Homo sapiens
agtgaggtaaatcag

SEQ ID NO: 503460 - DNA, 15 bp, Homo sapiens
gtgaggtaaatcagg

SEQ ID NO: 503461 - DNA, 15 bp, Homo sapiens
tgaggtaaatcaggc

SEQ ID NO: 503462 - DNA, 15 bp, Homo sapiens
gaggtaaatcaggca

SEQ ID NO: 503463 - DNA, 15 bp, Homo sapiens
aggtaaatcaggcag

SEQ ID NO: 503464 - DNA, 15 bp, Homo sapiens
ggtaaatcaggcagg

SEQ ID NO: 503465 - DNA, 15 bp, Homo sapiens
gtaaatcaggcaggc

SEQ ID NO: 503466 - DNA, 15 bp, Homo sapiens
taaatcaggcaggcc

SEQ ID NO: 503467 - DNA, 15 bp, Homo sapiens
aaatcaggcaggcct

SEQ ID NO: 503468 - DNA, 15 bp, Homo sapiens
aatcaggcaggcctt

SEQ ID NO: 503469 - DNA, 15 bp, Homo sapiens
atcaggcaggccttt

SEQ ID NO: 503470 - DNA, 15 bp, Homo sapiens
tcaggcaggcctttg

SEQ ID NO: 503471 - DNA, 15 bp, Homo sapiens
caggcaggcctttgc

SEQ ID NO: 503472 - DNA, 15 bp, Homo sapiens
aggcaggcctttgcc

SEQ ID NO: 503473 - DNA, 15 bp, Homo sapiens
ggcaggcctttgccc

SEQ ID NO: 503474 - DNA, 15 bp, Homo sapiens
gcaggcctttgccca

SEQ ID NO: 503475 - DNA, 15 bp, Homo sapiens
caggcctttgcccat

SEQ ID NO: 503476 - DNA, 15 bp, Homo sapiens
aggcctttgcccatg

SEQ ID NO: 503477 - DNA, 15 bp, Homo sapiens
ggcctttgcccatgt

SEQ ID NO: 503478 - DNA, 15 bp, Homo sapiens
gcctttgcccatgtt

SEQ ID NO: 503479 - DNA, 15 bp, Homo sapiens
cctttgcccatgtta

SEQ ID NO: 503480 - DNA, 15 bp, Homo sapiens
ctttgcccatgttat

SEQ ID NO: 503481 - DNA, 15 bp, Homo sapiens
tttgcccatgttata

SEQ ID NO: 503482 - DNA, 15 bp, Homo sapiens
ttgcccatgttatag

SEQ ID NO: 503483 - DNA, 15 bp, Homo sapiens
tgcccatgttataga

SEQ ID NO: 503484 - DNA, 15 bp, Homo sapiens
gcccatgttatagaa

SEQ ID NO: 503485 - DNA, 15 bp, Homo sapiens
cccatgttatagaat

SEQ ID NO: 503486 - DNA, 15 bp, Homo sapiens
ccatgttatagaatt

SEQ ID NO: 503487 - DNA, 15 bp, Homo sapiens
catgttatagaattg

SEQ ID NO: 503488 - DNA, 15 bp, Homo sapiens
atgttatagaattgg

SEQ ID NO: 503489 - DNA, 15 bp, Homo sapiens
tgttatagaattgga

SEQ ID NO: 503490 - DNA, 15 bp, Homo sapiens
gttatagaattggaa

SEQ ID NO: 503491 - DNA, 15 bp, Homo sapiens
ttatagaattggaaa

SEQ ID NO: 503492 - DNA, 15 bp, Homo sapiens
tatagaattggaaag

SEQ ID NO: 503493 - DNA, 15 bp, Homo sapiens
atagaattggaaaga

SEQ ID NO: 503494 - DNA, 15 bp, Homo sapiens
tagaattggaaagaa

SEQ ID NO: 503495 - DNA, 15 bp, Homo sapiens
agaattggaaagaac

SEQ ID NO: 503496 - DNA, 15 bp, Homo sapiens
gaattggaaagaacc

SEQ ID NO: 503497 - DNA, 15 bp, Homo sapiens
aattggaaagaacct

SEQ ID NO: 503498 - DNA, 15 bp, Homo sapiens
attggaaagaacctc

SEQ ID NO: 503499 - DNA, 15 bp, Homo sapiens
ttggaaagaacctca

SEQ ID NO: 503500 - DNA, 15 bp, Homo sapiens
tggaaagaacctcag

SEQ ID NO: 503501 - DNA, 15 bp, Homo sapiens
ggaaagaacctcaga

SEQ ID NO: 503502 - DNA, 15 bp, Homo sapiens
gaaagaacctcagag

SEQ ID NO: 503503 - DNA, 15 bp, Homo sapiens
aaagaacctcagagt

SEQ ID NO: 503504 - DNA, 15 bp, Homo sapiens
aagaacctcagagtg

SEQ ID NO: 503505 - DNA, 15 bp, Homo sapiens
agaacctcagagtgg

SEQ ID NO: 503506 - DNA, 15 bp, Homo sapiens
gaacctcagagtggt

SEQ ID NO: 503507 - DNA, 15 bp, Homo sapiens
aacctcagagtggtg

SEQ ID NO: 503508 - DNA, 15 bp, Homo sapiens
acctcagagtggtgg

SEQ ID NO: 503509 - DNA, 15 bp, Homo sapiens
cctcagagtggtggt

SEQ ID NO: 503510 - DNA, 15 bp, Homo sapiens
ctcagagtggtggtc

SEQ ID NO: 503511 - DNA, 15 bp, Homo sapiens
tcagagtggtggtca

SEQ ID NO: 503512 - DNA, 15 bp, Homo sapiens
cagagtggtggtcac

SEQ ID NO: 503513 - DNA, 15 bp, Homo sapiens
agagtggtggtcact

SEQ ID NO: 503514 - DNA, 15 bp, Homo sapiens
gagtggtggtcactt

SEQ ID NO: 503515 - DNA, 15 bp, Homo sapiens
agtggtggtcacttg

SEQ ID NO: 503516 - DNA, 15 bp, Homo sapiens
gtggtggtcacttgt

SEQ ID NO: 503517 - DNA, 15 bp, Homo sapiens
tggtggtcacttgtc

SEQ ID NO: 503518 - DNA, 15 bp, Homo sapiens
ggtggtcacttgtca

SEQ ID NO: 503519 - DNA, 15 bp, Homo sapiens
gtggtcacttgtcag

SEQ ID NO: 503520 - DNA, 15 bp, Homo sapiens
tggtcacttgtcaga

SEQ ID NO: 503521 - DNA, 15 bp, Homo sapiens
ggtcacttgtcagag

SEQ ID NO: 503522 - DNA, 15 bp, Homo sapiens
gtcacttgtcagagg

SEQ ID NO: 503523 - DNA, 15 bp, Homo sapiens
tcacttgtcagaggt

SEQ ID NO: 503524 - DNA, 15 bp, Homo sapiens
cacttgtcagaggtt

SEQ ID NO: 503525 - DNA, 15 bp, Homo sapiens
acttgtcagaggttg

SEQ ID NO: 503526 - DNA, 15 bp, Homo sapiens
cttgtcagaggttgg

SEQ ID NO: 503527 - DNA, 15 bp, Homo sapiens
ttgtcagaggttggg

SEQ ID NO: 503528 - DNA, 15 bp, Homo sapiens
tgtcagaggttgggc

SEQ ID NO: 503529 - DNA, 15 bp, Homo sapiens
gtcagaggttgggca

SEQ ID NO: 503530 - DNA, 15 bp, Homo sapiens
tcagaggttgggcac

SEQ ID NO: 503531 - DNA, 15 bp, Homo sapiens
cagaggttgggcaca

SEQ ID NO: 503532 - DNA, 15 bp, Homo sapiens
agaggttgggcacac

SEQ ID NO: 503533 - DNA, 15 bp, Homo sapiens
gaggttgggcacacc

SEQ ID NO: 503534 - DNA, 15 bp, Homo sapiens
aggttgggcacacct

SEQ ID NO: 503535 - DNA, 15 bp, Homo sapiens
ggttgggcacacctg

SEQ ID NO: 503536 - DNA, 15 bp, Homo sapiens
gttgggcacacctgt

SEQ ID NO: 503537 - DNA, 15 bp, Homo sapiens
ttgggcacacctgtg

SEQ ID NO: 503538 - DNA, 15 bp, Homo sapiens
tgggcacacctgtga

SEQ ID NO: 503539 - DNA, 15 bp, Homo sapiens
gggcacacctgtgag

SEQ ID NO: 503540 - DNA, 15 bp, Homo sapiens
ggcacacctgtgagg

SEQ ID NO: 503541 - DNA, 15 bp, Homo sapiens
gcacacctgtgaggt

SEQ ID NO: 503542 - DNA, 15 bp, Homo sapiens
cacacctgtgaggtg

SEQ ID NO: 503543 - DNA, 15 bp, Homo sapiens
acacctgtgaggtgg

SEQ ID NO: 503544 - DNA, 15 bp, Homo sapiens
cacctgtgaggtggt

SEQ ID NO: 503545 - DNA, 15 bp, Homo sapiens
acctgtgaggtggtg

SEQ ID NO: 503546 - DNA, 15 bp, Homo sapiens
cctgtgaggtggtgg

SEQ ID NO: 503547 - DNA, 15 bp, Homo sapiens
ctgtgaggtggtggg

SEQ ID NO: 503548 - DNA, 15 bp, Homo sapiens
tgtgaggtggtgggg

SEQ ID NO: 503549 - DNA, 15 bp, Homo sapiens
gtgaggtggtgggga

SEQ ID NO: 503550 - DNA, 15 bp, Homo sapiens
tgaggtggtggggag

SEQ ID NO: 503551 - DNA, 15 bp, Homo sapiens
gaggtggtggggaga

SEQ ID NO: 503552 - DNA, 15 bp, Homo sapiens
aggtggtggggagaa

SEQ ID NO: 503553 - DNA, 15 bp, Homo sapiens
ggtggtggggagaaa

SEQ ID NO: 503554 - DNA, 15 bp, Homo sapiens
gtggtggggagaaat

SEQ ID NO: 503555 - DNA, 15 bp, Homo sapiens
tggtggggagaaatg

SEQ ID NO: 503556 - DNA, 15 bp, Homo sapiens
ggtggggagaaatga

SEQ ID NO: 503557 - DNA, 15 bp, Homo sapiens
gtggggagaaatgac

SEQ ID NO: 503558 - DNA, 15 bp, Homo sapiens
tggggagaaatgaca

SEQ ID NO: 503559 - DNA, 15 bp, Homo sapiens
ggggagaaatgacag

SEQ ID NO: 503560 - DNA, 15 bp, Homo sapiens
gggagaaatgacaga

SEQ ID NO: 503561 - DNA, 15 bp, Homo sapiens
ggagaaatgacagac

SEQ ID NO: 503562 - DNA, 15 bp, Homo sapiens
gagaaatgacagaca

SEQ ID NO: 503563 - DNA, 15 bp, Homo sapiens
agaaatgacagacat

SEQ ID NO: 503564 - DNA, 15 bp, Homo sapiens
ggaaattaaagtgta

SEQ ID NO: 503565 - DNA, 15 bp, Homo sapiens
gaaattaaagtgtag

SEQ ID NO: 503566 - DNA, 15 bp, Homo sapiens
aaattaaagtgtagt

SEQ ID NO: 503567 - DNA, 15 bp, Homo sapiens
aattaaagtgtagtc

SEQ ID NO: 503568 - DNA, 15 bp, Homo sapiens
attaaagtgtagtca

SEQ ID NO: 503569 - DNA, 15 bp, Homo sapiens
ttaaagtgtagtcag

SEQ ID NO: 503570 - DNA, 15 bp, Homo sapiens
taaagtgtagtcagt

SEQ ID NO: 503571 - DNA, 15 bp, Homo sapiens
aaagtgtagtcagta

SEQ ID NO: 503572 - DNA, 15 bp, Homo sapiens
aagtgtagtcagtac

SEQ ID NO: 503573 - DNA, 15 bp, Homo sapiens
agtgtagtcagtaca

SEQ ID NO: 503574 - DNA, 15 bp, Homo sapiens
gtgtagtcagtacac

SEQ ID NO: 503575 - DNA, 15 bp, Homo sapiens
tgtagtcagtacact

SEQ ID NO: 503576 - DNA, 15 bp, Homo sapiens
gtagtcagtacacta

SEQ ID NO: 503577 - DNA, 15 bp, Homo sapiens
tagtcagtacactaa

SEQ ID NO: 503578 - DNA, 15 bp, Homo sapiens
agtcagtacactaaa

SEQ ID NO: 503579 - DNA, 15 bp, Homo sapiens
gtcagtacactaaag

SEQ ID NO: 503580 - DNA, 15 bp, Homo sapiens
tcagtacactaaagt

SEQ ID NO: 503581 - DNA, 15 bp, Homo sapiens
cagtacactaaagtg

SEQ ID NO: 503582 - DNA, 15 bp, Homo sapiens
agtacactaaagtgt

SEQ ID NO: 503583 - DNA, 15 bp, Homo sapiens
gtacactaaagtgta

SEQ ID NO: 503584 - DNA, 15 bp, Homo sapiens
tacactaaagtgtag

SEQ ID NO: 503585 - DNA, 15 bp, Homo sapiens
acactaaagtgtagt

SEQ ID NO: 503586 - DNA, 15 bp, Homo sapiens
cactaaagtgtagtc

SEQ ID NO: 503587 - DNA, 15 bp, Homo sapiens
actaaagtgtagtca

SEQ ID NO: 503588 - DNA, 15 bp, Homo sapiens
ctaaagtgtagtcag

SEQ ID NO: 503589 - DNA, 15 bp, Homo sapiens
gtgtagtcagtacaa

SEQ ID NO: 503590 - DNA, 15 bp, Homo sapiens
tgtagtcagtacaat

SEQ ID NO: 503591 - DNA, 15 bp, Homo sapiens
gtagtcagtacaatt

SEQ ID NO: 503592 - DNA, 15 bp, Homo sapiens
tagtcagtacaattg

SEQ ID NO: 503593 - DNA, 15 bp, Homo sapiens
agtcagtacaattgg

SEQ ID NO: 503594 - DNA, 15 bp, Homo sapiens
gtcagtacaattgga

SEQ ID NO: 503595 - DNA, 15 bp, Homo sapiens
tcagtacaattggaa

SEQ ID NO: 503596 - DNA, 15 bp, Homo sapiens
cagtacaattggaaa

SEQ ID NO: 503597 - DNA, 15 bp, Homo sapiens
agtacaattggaaat

SEQ ID NO: 503598 - DNA, 15 bp, Homo sapiens
gtacaattggaaata

SEQ ID NO: 503599 - DNA, 15 bp, Homo sapiens
tacaattggaaataa

SEQ ID NO: 503600 - DNA, 15 bp, Homo sapiens
acaattggaaataag

SEQ ID NO: 503601 - DNA, 15 bp, Homo sapiens
caattggaaataaga

SEQ ID NO: 503602 - DNA, 15 bp, Homo sapiens
aattggaaataagag

SEQ ID NO: 503603 - DNA, 15 bp, Homo sapiens
attggaaataagagt

SEQ ID NO: 503604 - DNA, 15 bp, Homo sapiens
ttggaaataagagtt

SEQ ID NO: 503605 - DNA, 15 bp, Homo sapiens
tggaaataagagttg

SEQ ID NO: 503606 - DNA, 15 bp, Homo sapiens
ggaaataagagttga

SEQ ID NO: 503607 - DNA, 15 bp, Homo sapiens
gaaataagagttgag

SEQ ID NO: 503608 - DNA, 15 bp, Homo sapiens
aaataagagttgaga

SEQ ID NO: 503609 - DNA, 15 bp, Homo sapiens
aataagagttgagaa

SEQ ID NO: 503610 - DNA, 15 bp, Homo sapiens
ataagagttgagaaa

SEQ ID NO: 503611 - DNA, 15 bp, Homo sapiens
taagagttgagaaaa

SEQ ID NO: 503612 - DNA, 15 bp, Homo sapiens
aagagttgagaaaag

SEQ ID NO: 503613 - DNA, 15 bp, Homo sapiens
agagttgagaaaagt

SEQ ID NO: 503614 - DNA, 15 bp, Homo sapiens
gagttgagaaaagtc

SEQ ID NO: 503615 - DNA, 15 bp, Homo sapiens
agttgagaaaagtca

SEQ ID NO: 503616 - DNA, 15 bp, Homo sapiens
gttgagaaaagtcag

SEQ ID NO: 503617 - DNA, 15 bp, Homo sapiens
ttgagaaaagtcagg

SEQ ID NO: 503618 - DNA, 15 bp, Homo sapiens
tgagaaaagtcagga

SEQ ID NO: 503619 - DNA, 15 bp, Homo sapiens
gagaaaagtcaggat

SEQ ID NO: 503620 - DNA, 15 bp, Homo sapiens
agaaaagtcaggata

SEQ ID NO: 503621 - DNA, 15 bp, Homo sapiens
gaaaagtcaggatat

SEQ ID NO: 503622 - DNA, 15 bp, Homo sapiens
aaaagtcaggatatg

SEQ ID NO: 503623 - DNA, 15 bp, Homo sapiens
aaagtcaggatatgg

SEQ ID NO: 503624 - DNA, 15 bp, Homo sapiens
aagtcaggatatgga

SEQ ID NO: 503625 - DNA, 15 bp, Homo sapiens
agtcaggatatggag

SEQ ID NO: 503626 - DNA, 15 bp, Homo sapiens
gtcaggatatggagg

SEQ ID NO: 503627 - DNA, 15 bp, Homo sapiens
tcaggatatggagga

SEQ ID NO: 503628 - DNA, 15 bp, Homo sapiens
caggatatggaggaa

SEQ ID NO: 503629 - DNA, 15 bp, Homo sapiens
aggatatggaggaat

SEQ ID NO: 503630 - DNA, 15 bp, Homo sapiens
ggatatggaggaatg

SEQ ID NO: 503631 - DNA, 15 bp, Homo sapiens
gatatggaggaatgc

SEQ ID NO: 503632 - DNA, 15 bp, Homo sapiens
atatggaggaatgct

SEQ ID NO: 503633 - DNA, 15 bp, Homo sapiens
tatggaggaatgctc

SEQ ID NO: 503634 - DNA, 15 bp, Homo sapiens
atggaggaatgctcc

SEQ ID NO: 503635 - DNA, 15 bp, Homo sapiens
tggaggaatgctccc

SEQ ID NO: 503636 - DNA, 15 bp, Homo sapiens
ggaggaatgctccct

SEQ ID NO: 503637 - DNA, 15 bp, Homo sapiens
gaggaatgctcccta

SEQ ID NO: 503638 - DNA, 15 bp, Homo sapiens
aggaatgctccctag

SEQ ID NO: 503639 - DNA, 15 bp, Homo sapiens
ggaatgctccctagt

SEQ ID NO: 503640 - DNA, 15 bp, Homo sapiens
gaatgctccctagtg

SEQ ID NO: 503641 - DNA, 15 bp, Homo sapiens
aatgctccctagtgt

SEQ ID NO: 503642 - DNA, 15 bp, Homo sapiens
atgctccctagtgtc

SEQ ID NO: 503643 - DNA, 15 bp, Homo sapiens
tgctccctagtgtca

SEQ ID NO: 503644 - DNA, 15 bp, Homo sapiens
gctccctagtgtcat

SEQ ID NO: 503645 - DNA, 15 bp, Homo sapiens
ctccctagtgtcatg

SEQ ID NO: 503646 - DNA, 15 bp, Homo sapiens
tccctagtgtcatgt

SEQ ID NO: 503647 - DNA, 15 bp, Homo sapiens
ccctagtgtcatgtt

SEQ ID NO: 503648 - DNA, 15 bp, Homo sapiens
cctagtgtcatgtta

SEQ ID NO: 503649 - DNA, 15 bp, Homo sapiens
ctagtgtcatgttag

SEQ ID NO: 503650 - DNA, 15 bp, Homo sapiens
tagtgtcatgttagt

SEQ ID NO: 503651 - DNA, 15 bp, Homo sapiens
agtgtcatgttagta

SEQ ID NO: 503652 - DNA, 15 bp, Homo sapiens
gtgtcatgttagtaa

SEQ ID NO: 503653 - DNA, 15 bp, Homo sapiens
tgtcatgttagtaaa

SEQ ID NO: 503654 - DNA, 15 bp, Homo sapiens
gtcatgttagtaaat

SEQ ID NO: 503655 - DNA, 15 bp, Homo sapiens
tcatgttagtaaatg

SEQ ID NO: 503656 - DNA, 15 bp, Homo sapiens
catgttagtaaatgt

SEQ ID NO: 503657 - DNA, 15 bp, Homo sapiens
atgttagtaaatgtc

SEQ ID NO: 503658 - DNA, 15 bp, Homo sapiens
tgttagtaaatgtct

SEQ ID NO: 503659 - DNA, 15 bp, Homo sapiens
gttagtaaatgtctt

SEQ ID NO: 503660 - DNA, 15 bp, Homo sapiens
ttagtaaatgtctta

SEQ ID NO: 503661 - DNA, 15 bp, Homo sapiens
tagtaaatgtcttaa

SEQ ID NO: 503662 - DNA, 15 bp, Homo sapiens
agtaaatgtcttaaa

SEQ ID NO: 503663 - DNA, 15 bp, Homo sapiens
gtaaatgtcttaaat

SEQ ID NO: 503664 - DNA, 15 bp, Homo sapiens
taaatgtcttaaatt

SEQ ID NO: 503665 - DNA, 15 bp, Homo sapiens
aaatgtcttaaattt

SEQ ID NO: 503666 - DNA, 15 bp, Homo sapiens
aatgtcttaaatttt

SEQ ID NO: 503667 - DNA, 15 bp, Homo sapiens
atgtcttaaatttta

SEQ ID NO: 503668 - DNA, 15 bp, Homo sapiens
tgtcttaaattttat

SEQ ID NO: 503669 - DNA, 15 bp, Homo sapiens
gtcttaaattttata

SEQ ID NO: 503670 - DNA, 15 bp, Homo sapiens
tcttaaattttatac

SEQ ID NO: 503671 - DNA, 15 bp, Homo sapiens
cttaaattttatact

SEQ ID NO: 503672 - DNA, 15 bp, Homo sapiens
ttaaattttatactt

SEQ ID NO: 503673 - DNA, 15 bp, Homo sapiens
taaattttatacttg

SEQ ID NO: 503674 - DNA, 15 bp, Homo sapiens
aaattttatacttgt

SEQ ID NO: 503675 - DNA, 15 bp, Homo sapiens
aattttatacttgtt

SEQ ID NO: 503676 - DNA, 15 bp, Homo sapiens
attttatacttgttc

SEQ ID NO: 503677 - DNA, 15 bp, Homo sapiens
ttttatacttgttcc

SEQ ID NO: 503678 - DNA, 15 bp, Homo sapiens
tttatacttgttccc

SEQ ID NO: 503679 - DNA, 15 bp, Homo sapiens
ttatacttgttccct

SEQ ID NO: 503680 - DNA, 15 bp, Homo sapiens
tatacttgttccctg

SEQ ID NO: 503681 - DNA, 15 bp, Homo sapiens
atacttgttccctgg

SEQ ID NO: 503682 - DNA, 15 bp, Homo sapiens
tacttgttccctggc

SEQ ID NO: 503683 - DNA, 15 bp, Homo sapiens
acttgttccctggca

SEQ ID NO: 503684 - DNA, 15 bp, Homo sapiens
cttgttccctggcac

SEQ ID NO: 503685 - DNA, 15 bp, Homo sapiens
ttgttccctggcaca

SEQ ID NO: 503686 - DNA, 15 bp, Homo sapiens
tgttccctggcacat

SEQ ID NO: 503687 - DNA, 15 bp, Homo sapiens
gttccctggcacatt

SEQ ID NO: 503688 - DNA, 15 bp, Homo sapiens
ttccctggcacattg

SEQ ID NO: 503689 - DNA, 15 bp, Homo sapiens
tccctggcacattgg

SEQ ID NO: 503690 - DNA, 15 bp, Homo sapiens
ccctggcacattgga

SEQ ID NO: 503691 - DNA, 15 bp, Homo sapiens
cctggcacattggaa

SEQ ID NO: 503692 - DNA, 15 bp, Homo sapiens
ctggcacattggaat

SEQ ID NO: 503693 - DNA, 15 bp, Homo sapiens
tggcacattggaatt

SEQ ID NO: 503694 - DNA, 15 bp, Homo sapiens
ggcacattggaattc

SEQ ID NO: 503695 - DNA, 15 bp, Homo sapiens
gcacattggaattca

SEQ ID NO: 503696 - DNA, 15 bp, Homo sapiens
cacattggaattcac

SEQ ID NO: 503697 - DNA, 15 bp, Homo sapiens
acattggaattcaca

SEQ ID NO: 503698 - DNA, 15 bp, Homo sapiens
cattggaattcacag

SEQ ID NO: 503699 - DNA, 15 bp, Homo sapiens
attggaattcacaga

SEQ ID NO: 503700 - DNA, 15 bp, Homo sapiens
ttggaattcacagat

SEQ ID NO: 503701 - DNA, 15 bp, Homo sapiens
tggaattcacagatg

SEQ ID NO: 503702 - DNA, 15 bp, Homo sapiens
ggaattcacagatgg

SEQ ID NO: 503703 - DNA, 15 bp, Homo sapiens
gaattcacagatggg

SEQ ID NO: 503704 - DNA, 15 bp, Homo sapiens
aattcacagatggga

SEQ ID NO: 503705 - DNA, 15 bp, Homo sapiens
attcacagatgggag

SEQ ID NO: 503706 - DNA, 15 bp, Homo sapiens
ttcacagatgggagt

SEQ ID NO: 503707 - DNA, 15 bp, Homo sapiens
tcacagatgggagtt

SEQ ID NO: 503708 - DNA, 15 bp, Homo sapiens
cacagatgggagtta

SEQ ID NO: 503709 - DNA, 15 bp, Homo sapiens
acagatgggagttaa

SEQ ID NO: 503710 - DNA, 15 bp, Homo sapiens
cagatgggagttaat

SEQ ID NO: 503711 - DNA, 15 bp, Homo sapiens
agatgggagttaatg

SEQ ID NO: 503712 - DNA, 15 bp, Homo sapiens
gatgggagttaatgg

SEQ ID NO: 503713 - DNA, 15 bp, Homo sapiens
atgggagttaatggc

SEQ ID NO: 503714 - DNA, 15 bp, Homo sapiens
tgggagttaatggct

SEQ ID NO: 503715 - DNA, 15 bp, Homo sapiens
gggagttaatggctt

SEQ ID NO: 503716 - DNA, 15 bp, Homo sapiens
ggagttaatggcttt

SEQ ID NO: 503717 - DNA, 15 bp, Homo sapiens
gagttaatggctttc

SEQ ID NO: 503718 - DNA, 15 bp, Homo sapiens
agttaatggctttct

SEQ ID NO: 503719 - DNA, 15 bp, Homo sapiens
gttaatggctttctt

SEQ ID NO: 503720 - DNA, 15 bp, Homo sapiens
ttaatggctttcttt

SEQ ID NO: 503721 - DNA, 15 bp, Homo sapiens
taatggctttctttt

SEQ ID NO: 503722 - DNA, 15 bp, Homo sapiens
aatggctttcttttt

SEQ ID NO: 503723 - DNA, 15 bp, Homo sapiens
atggctttctttttt

SEQ ID NO: 503724 - DNA, 15 bp, Homo sapiens
tggctttcttttttt

SEQ ID NO: 503725 - DNA, 15 bp, Homo sapiens
ggctttctttttttt

SEQ ID NO: 503726 - DNA, 15 bp, Homo sapiens
gctttcttttttttt

SEQ ID NO: 503727 - DNA, 15 bp, Homo sapiens
ctttctttttttttt

SEQ ID NO: 503728 - DNA, 15 bp, Homo sapiens
tttcttttttttttt

SEQ ID NO: 503729 - DNA, 15 bp, Homo sapiens
ttctttttttttttt

SEQ ID NO: 503730 - DNA, 15 bp, Homo sapiens
tcttttttttttttt

SEQ ID NO: 503731 - DNA, 15 bp, Homo sapiens
ttttttttttttttc

SEQ ID NO: 503732 - DNA, 15 bp, Homo sapiens
tttttttttttttcc

SEQ ID NO: 503733 - DNA, 15 bp, Homo sapiens
ttttttttttttcct

SEQ ID NO: 503734 - DNA, 15 bp, Homo sapiens
tttttttttttcctc

SEQ ID NO: 503735 - DNA, 15 bp, Homo sapiens
ttttttttttcctca

SEQ ID NO: 503736 - DNA, 15 bp, Homo sapiens
tttttttttcctcag

SEQ ID NO: 503737 - DNA, 15 bp, Homo sapiens
ttttttttcctcagc

SEQ ID NO: 503738 - DNA, 15 bp, Homo sapiens
tttttttcctcagcg

SEQ ID NO: 503739 - DNA, 15 bp, Homo sapiens
ttttttcctcagcgt

SEQ ID NO: 503740 - DNA, 15 bp, Homo sapiens
tttttcctcagcgtc

SEQ ID NO: 503741 - DNA, 15 bp, Homo sapiens
ttttcctcagcgtct

SEQ ID NO: 503742 - DNA, 15 bp, Homo sapiens
tttcctcagcgtctt

SEQ ID NO: 503743 - DNA, 15 bp, Homo sapiens
ttcctcagcgtcttg

SEQ ID NO: 503744 - DNA, 15 bp, Homo sapiens
tcctcagcgtcttgt

SEQ ID NO: 503745 - DNA, 15 bp, Homo sapiens
cctcagcgtcttgtg

SEQ ID NO: 503746 - DNA, 15 bp, Homo sapiens
ctcagcgtcttgtgg

SEQ ID NO: 503747 - DNA, 15 bp, Homo sapiens
tcagcgtcttgtggg

SEQ ID NO: 503748 - DNA, 15 bp, Homo sapiens
cagcgtcttgtgggt

SEQ ID NO: 503749 - DNA, 15 bp, Homo sapiens
agcgtcttgtgggta

SEQ ID NO: 503750 - DNA, 15 bp, Homo sapiens
gcgtcttgtgggtac

SEQ ID NO: 503751 - DNA, 15 bp, Homo sapiens
cgtcttgtgggtact

SEQ ID NO: 503752 - DNA, 15 bp, Homo sapiens
gtcttgtgggtactt

SEQ ID NO: 503753 - DNA, 15 bp, Homo sapiens
tcttgtgggtacttc

SEQ ID NO: 503754 - DNA, 15 bp, Homo sapiens
cttgtgggtacttct

SEQ ID NO: 503755 - DNA, 15 bp, Homo sapiens
ttgtgggtacttctc

SEQ ID NO: 503756 - DNA, 15 bp, Homo sapiens
tgtgggtacttctct

SEQ ID NO: 503757 - DNA, 15 bp, Homo sapiens
gtgggtacttctctt

SEQ ID NO: 503758 - DNA, 15 bp, Homo sapiens
tgggtacttctctta

SEQ ID NO: 503759 - DNA, 15 bp, Homo sapiens
gggtacttctcttat

SEQ ID NO: 503760 - DNA, 15 bp, Homo sapiens
ggtacttctcttata

SEQ ID NO: 503761 - DNA, 15 bp, Homo sapiens
gtacttctcttatag

SEQ ID NO: 503762 - DNA, 15 bp, Homo sapiens
tacttctcttatagc

SEQ ID NO: 503763 - DNA, 15 bp, Homo sapiens
acttctcttatagct

SEQ ID NO: 503764 - DNA, 15 bp, Homo sapiens
cttctcttatagctg

SEQ ID NO: 503765 - DNA, 15 bp, Homo sapiens
ttctcttatagctgg

SEQ ID NO: 503766 - DNA, 15 bp, Homo sapiens
tctcttatagctggt

SEQ ID NO: 503767 - DNA, 15 bp, Homo sapiens
ctcttatagctggta

SEQ ID NO: 503768 - DNA, 15 bp, Homo sapiens
tcttatagctggtac

SEQ ID NO: 503769 - DNA, 15 bp, Homo sapiens
cttatagctggtact

SEQ ID NO: 503770 - DNA, 15 bp, Homo sapiens
ttatagctggtactt

SEQ ID NO: 503771 - DNA, 15 bp, Homo sapiens
tatagctggtacttg

SEQ ID NO: 503772 - DNA, 15 bp, Homo sapiens
atagctggtacttgt

SEQ ID NO: 503773 - DNA, 15 bp, Homo sapiens
tagctggtacttgtc

SEQ ID NO: 503774 - DNA, 15 bp, Homo sapiens
agctggtacttgtct

SEQ ID NO: 503775 - DNA, 15 bp, Homo sapiens
gctggtacttgtctg

SEQ ID NO: 503776 - DNA, 15 bp, Homo sapiens
ctggtacttgtctga

SEQ ID NO: 503777 - DNA, 15 bp, Homo sapiens
tggtacttgtctgac

SEQ ID NO: 503778 - DNA, 15 bp, Homo sapiens
ggtacttgtctgacc

SEQ ID NO: 503779 - DNA, 15 bp, Homo sapiens
gtacttgtctgaccc

SEQ ID NO: 503780 - DNA, 15 bp, Homo sapiens
tacttgtctgacccc

SEQ ID NO: 503781 - DNA, 15 bp, Homo sapiens
acttgtctgacccct

SEQ ID NO: 503782 - DNA, 15 bp, Homo sapiens
cttgtctgacccctc

SEQ ID NO: 503783 - DNA, 15 bp, Homo sapiens
ttgtctgacccctcc

SEQ ID NO: 503784 - DNA, 15 bp, Homo sapiens
tgtctgacccctcct

SEQ ID NO: 503785 - DNA, 15 bp, Homo sapiens
gtctgacccctcctt

SEQ ID NO: 503786 - DNA, 15 bp, Homo sapiens
tctgacccctccttt

SEQ ID NO: 503787 - DNA, 15 bp, Homo sapiens
ctgacccctccttta

SEQ ID NO: 503788 - DNA, 15 bp, Homo sapiens
tgacccctcctttag

SEQ ID NO: 503789 - DNA, 15 bp, Homo sapiens
gacccctcctttagt

SEQ ID NO: 503790 - DNA, 15 bp, Homo sapiens
acccctcctttagtt

SEQ ID NO: 503791 - DNA, 15 bp, Homo sapiens
cccctcctttagttt

SEQ ID NO: 503792 - DNA, 15 bp, Homo sapiens
ccctcctttagtttg

SEQ ID NO: 503793 - DNA, 15 bp, Homo sapiens
cctcctttagtttgt

SEQ ID NO: 503794 - DNA, 15 bp, Homo sapiens
ctcctttagtttgtg

SEQ ID NO: 503795 - DNA, 15 bp, Homo sapiens
tcctttagtttgtga

SEQ ID NO: 503796 - DNA, 15 bp, Homo sapiens
cctttagtttgtgag

SEQ ID NO: 503797 - DNA, 15 bp, Homo sapiens
ctttagtttgtgagc

SEQ ID NO: 503798 - DNA, 15 bp, Homo sapiens
tttagtttgtgagct

SEQ ID NO: 503799 - DNA, 15 bp, Homo sapiens
ttagtttgtgagctc

SEQ ID NO: 503800 - DNA, 15 bp, Homo sapiens
tagtttgtgagctcc

SEQ ID NO: 503801 - DNA, 15 bp, Homo sapiens
agtttgtgagctccc

SEQ ID NO: 503802 - DNA, 15 bp, Homo sapiens
gtttgtgagctccct

SEQ ID NO: 503803 - DNA, 15 bp, Homo sapiens
tttgtgagctccctg

SEQ ID NO: 503804 - DNA, 15 bp, Homo sapiens
ttgtgagctccctgg

SEQ ID NO: 503805 - DNA, 15 bp, Homo sapiens
tgtgagctccctggg

SEQ ID NO: 503806 - DNA, 15 bp, Homo sapiens
gtgagctccctgggc

SEQ ID NO: 503807 - DNA, 15 bp, Homo sapiens
tgagctccctgggcg

SEQ ID NO: 503808 - DNA, 15 bp, Homo sapiens
gagctccctgggcgg

SEQ ID NO: 503809 - DNA, 15 bp, Homo sapiens
agctccctgggcggg

SEQ ID NO: 503810 - DNA, 15 bp, Homo sapiens
gctccctgggcgggg

SEQ ID NO: 503811 - DNA, 15 bp, Homo sapiens
ctccctgggcgggga

SEQ ID NO: 503812 - DNA, 15 bp, Homo sapiens
tccctgggcggggaa

SEQ ID NO: 503813 - DNA, 15 bp, Homo sapiens
ccctgggcggggaat

SEQ ID NO: 503814 - DNA, 15 bp, Homo sapiens
cctgggcggggaata

SEQ ID NO: 503815 - DNA, 15 bp, Homo sapiens
ctgggcggggaataa

SEQ ID NO: 503816 - DNA, 15 bp, Homo sapiens
tgggcggggaataat

SEQ ID NO: 503817 - DNA, 15 bp, Homo sapiens
gggcggggaataatg

SEQ ID NO: 503818 - DNA, 15 bp, Homo sapiens
ggcggggaataatgg

SEQ ID NO: 503819 - DNA, 15 bp, Homo sapiens
gcggggaataatggc

SEQ ID NO: 503820 - DNA, 15 bp, Homo sapiens
cggggaataatggcc

SEQ ID NO: 503821 - DNA, 15 bp, Homo sapiens
ggggaataatggcct

SEQ ID NO: 503822 - DNA, 15 bp, Homo sapiens
gggaataatggcctg

SEQ ID NO: 503823 - DNA, 15 bp, Homo sapiens
ggaataatggcctgc

SEQ ID NO: 503824 - DNA, 15 bp, Homo sapiens
gaataatggcctgca

SEQ ID NO: 503825 - DNA, 15 bp, Homo sapiens
aataatggcctgcag

SEQ ID NO: 503826 - DNA, 15 bp, Homo sapiens
ataatggcctgcaga

SEQ ID NO: 503827 - DNA, 15 bp, Homo sapiens
taatggcctgcagat

SEQ ID NO: 503828 - DNA, 15 bp, Homo sapiens
aatggcctgcagatg

SEQ ID NO: 503829 - DNA, 15 bp, Homo sapiens
atggcctgcagatgc

SEQ ID NO: 503830 - DNA, 15 bp, Homo sapiens
tggcctgcagatgct

SEQ ID NO: 503831 - DNA, 15 bp, Homo sapiens
ggcctgcagatgcta

SEQ ID NO: 503832 - DNA, 15 bp, Homo sapiens
gcctgcagatgctag

SEQ ID NO: 503833 - DNA, 15 bp, Homo sapiens
cctgcagatgctagc

SEQ ID NO: 503834 - DNA, 15 bp, Homo sapiens
ctgcagatgctagcg

SEQ ID NO: 503835 - DNA, 15 bp, Homo sapiens
tgcagatgctagcga

SEQ ID NO: 503836 - DNA, 15 bp, Homo sapiens
gcagatgctagcgag

SEQ ID NO: 503837 - DNA, 15 bp, Homo sapiens
cagatgctagcgagt

SEQ ID NO: 503838 - DNA, 15 bp, Homo sapiens
agatgctagcgagtg

SEQ ID NO: 503839 - DNA, 15 bp, Homo sapiens
gatgctagcgagtgc

SEQ ID NO: 503840 - DNA, 15 bp, Homo sapiens
atgctagcgagtgcc

SEQ ID NO: 503841 - DNA, 15 bp, Homo sapiens
tgctagcgagtgcct

SEQ ID NO: 503842 - DNA, 15 bp, Homo sapiens
gctagcgagtgcctg

SEQ ID NO: 503843 - DNA, 15 bp, Homo sapiens
ctagcgagtgcctga

SEQ ID NO: 503844 - DNA, 15 bp, Homo sapiens
tagcgagtgcctgac

SEQ ID NO: 503845 - DNA, 15 bp, Homo sapiens
agcgagtgcctgaca

SEQ ID NO: 503846 - DNA, 15 bp, Homo sapiens
gcgagtgcctgacaa

SEQ ID NO: 503847 - DNA, 15 bp, Homo sapiens
cgagtgcctgacaaa

SEQ ID NO: 503848 - DNA, 15 bp, Homo sapiens
gagtgcctgacaaag

SEQ ID NO: 503849 - DNA, 15 bp, Homo sapiens
agtgcctgacaaaga

SEQ ID NO: 503850 - DNA, 15 bp, Homo sapiens
gtgcctgacaaagag

SEQ ID NO: 503851 - DNA, 15 bp, Homo sapiens
tgcctgacaaagagg

SEQ ID NO: 503852 - DNA, 15 bp, Homo sapiens
gcctgacaaagagga

SEQ ID NO: 503853 - DNA, 15 bp, Homo sapiens
cctgacaaagaggag

SEQ ID NO: 503854 - DNA, 15 bp, Homo sapiens
ctgacaaagaggaga

SEQ ID NO: 503855 - DNA, 15 bp, Homo sapiens
tgacaaagaggagaa

SEQ ID NO: 503856 - DNA, 15 bp, Homo sapiens
gacaaagaggagaag

SEQ ID NO: 503857 - DNA, 15 bp, Homo sapiens
acaaagaggagaagc

SEQ ID NO: 503858 - DNA, 15 bp, Homo sapiens
caaagaggagaagcc

SEQ ID NO: 503859 - DNA, 15 bp, Homo sapiens
aaagaggagaagccc

SEQ ID NO: 503860 - DNA, 15 bp, Homo sapiens
aagaggagaagccca

SEQ ID NO: 503861 - DNA, 15 bp, Homo sapiens
agaggagaagcccag

SEQ ID NO: 503862 - DNA, 15 bp, Homo sapiens
gaggagaagcccagg

SEQ ID NO: 503863 - DNA, 15 bp, Homo sapiens
aggagaagcccagga

SEQ ID NO: 503864 - DNA, 15 bp, Homo sapiens
ggagaagcccaggag

SEQ ID NO: 503865 - DNA, 15 bp, Homo sapiens
gagaagcccaggaga

SEQ ID NO: 503866 - DNA, 15 bp, Homo sapiens
agaagcccaggagat

SEQ ID NO: 503867 - DNA, 15 bp, Homo sapiens
gaagcccaggagatg

SEQ ID NO: 503868 - DNA, 15 bp, Homo sapiens
aagcccaggagatgt

SEQ ID NO: 503869 - DNA, 15 bp, Homo sapiens
agcccaggagatgtt

SEQ ID NO: 503870 - DNA, 15 bp, Homo sapiens
gcccaggagatgttg

SEQ ID NO: 503871 - DNA, 15 bp, Homo sapiens
cccaggagatgttga

SEQ ID NO: 503872 - DNA, 15 bp, Homo sapiens
ccaggagatgttgag

SEQ ID NO: 503873 - DNA, 15 bp, Homo sapiens
caggagatgttgaga

SEQ ID NO: 503874 - DNA, 15 bp, Homo sapiens
aggagatgttgagag

SEQ ID NO: 503875 - DNA, 15 bp, Homo sapiens
ggagatgttgagagt

SEQ ID NO: 503876 - DNA, 15 bp, Homo sapiens
gagatgttgagagtc

SEQ ID NO: 503877 - DNA, 15 bp, Homo sapiens
agatgttgagagtca

SEQ ID NO: 503878 - DNA, 15 bp, Homo sapiens
gatgttgagagtcag

SEQ ID NO: 503879 - DNA, 15 bp, Homo sapiens
atgttgagagtcagt

SEQ ID NO: 503880 - DNA, 15 bp, Homo sapiens
tgttgagagtcagtc

SEQ ID NO: 503881 - DNA, 15 bp, Homo sapiens
gttgagagtcagtcc

SEQ ID NO: 503882 - DNA, 15 bp, Homo sapiens
ttgagagtcagtcca

SEQ ID NO: 503883 - DNA, 15 bp, Homo sapiens
tgagagtcagtccag

SEQ ID NO: 503884 - DNA, 15 bp, Homo sapiens
gagagtcagtccagc

SEQ ID NO: 503885 - DNA, 15 bp, Homo sapiens
agagtcagtccagct

SEQ ID NO: 503886 - DNA, 15 bp, Homo sapiens
gagtcagtccagctc

SEQ ID NO: 503887 - DNA, 15 bp, Homo sapiens
agtcagtccagctct

SEQ ID NO: 503888 - DNA, 15 bp, Homo sapiens
gtcagtccagctctg

SEQ ID NO: 503889 - DNA, 15 bp, Homo sapiens
tcagtccagctctgc

SEQ ID NO: 503890 - DNA, 15 bp, Homo sapiens
cagtccagctctgcc

SEQ ID NO: 503891 - DNA, 15 bp, Homo sapiens
agtccagctctgcct

SEQ ID NO: 503892 - DNA, 15 bp, Homo sapiens
gtccagctctgcctg

SEQ ID NO: 503893 - DNA, 15 bp, Homo sapiens
tccagctctgcctgt

SEQ ID NO: 503894 - DNA, 15 bp, Homo sapiens
ccagctctgcctgtt

SEQ ID NO: 503895 - DNA, 15 bp, Homo sapiens
cagctctgcctgtta

SEQ ID NO: 503896 - DNA, 15 bp, Homo sapiens
agctctgcctgttag

SEQ ID NO: 503897 - DNA, 15 bp, Homo sapiens
gctctgcctgttagc

SEQ ID NO: 503898 - DNA, 15 bp, Homo sapiens
ctctgcctgttagcc

SEQ ID NO: 503899 - DNA, 15 bp, Homo sapiens
tctgcctgttagcct

SEQ ID NO: 503900 - DNA, 15 bp, Homo sapiens
ctgcctgttagcctt

SEQ ID NO: 503901 - DNA, 15 bp, Homo sapiens
tgcctgttagccttt

SEQ ID NO: 503902 - DNA, 15 bp, Homo sapiens
gcctgttagcctttc

SEQ ID NO: 503903 - DNA, 15 bp, Homo sapiens
cctgttagcctttca

SEQ ID NO: 503904 - DNA, 15 bp, Homo sapiens
ctgttagcctttcag

SEQ ID NO: 503905 - DNA, 15 bp, Homo sapiens
tgttagcctttcaga

SEQ ID NO: 503906 - DNA, 15 bp, Homo sapiens
gttagcctttcagac

SEQ ID NO: 503907 - DNA, 15 bp, Homo sapiens
ttagcctttcagaca

SEQ ID NO: 503908 - DNA, 15 bp, Homo sapiens
tagcctttcagacaa

SEQ ID NO: 503909 - DNA, 15 bp, Homo sapiens
agcctttcagacaaa

SEQ ID NO: 503910 - DNA, 15 bp, Homo sapiens
gcctttcagacaaat

SEQ ID NO: 503911 - DNA, 15 bp, Homo sapiens
cctttcagacaaata

SEQ ID NO: 503912 - DNA, 15 bp, Homo sapiens
ctttcagacaaataa

SEQ ID NO: 503913 - DNA, 15 bp, Homo sapiens
tttcagacaaataaa

SEQ ID NO: 503914 - DNA, 15 bp, Homo sapiens
ttcagacaaataaag

SEQ ID NO: 503915 - DNA, 15 bp, Homo sapiens
tcagacaaataaagt

SEQ ID NO: 503916 - DNA, 15 bp, Homo sapiens
cagacaaataaagtt

SEQ ID NO: 503917 - DNA, 15 bp, Homo sapiens
agacaaataaagttg

SEQ ID NO: 503918 - DNA, 15 bp, Homo sapiens
gacaaataaagttga

SEQ ID NO: 503919 - DNA, 15 bp, Homo sapiens
acaaataaagttgaa

SEQ ID NO: 503920 - DNA, 15 bp, Homo sapiens
caaataaagttgaag

SEQ ID NO: 503921 - DNA, 15 bp, Homo sapiens
aaataaagttgaaga

SEQ ID NO: 503922 - DNA, 15 bp, Homo sapiens
aataaagttgaagaa

SEQ ID NO: 503923 - DNA, 15 bp, Homo sapiens
ataaagttgaagaag

SEQ ID NO: 503924 - DNA, 15 bp, Homo sapiens
taaagttgaagaagg

SEQ ID NO: 503925 - DNA, 15 bp, Homo sapiens
aaagttgaagaaggc

SEQ ID NO: 503926 - DNA, 15 bp, Homo sapiens
aagttgaagaaggca

SEQ ID NO: 503927 - DNA, 15 bp, Homo sapiens
agttgaagaaggcag

SEQ ID NO: 503928 - DNA, 15 bp, Homo sapiens
gttgaagaaggcagg

SEQ ID NO: 503929 - DNA, 15 bp, Homo sapiens
ttgaagaaggcaggt

SEQ ID NO: 503930 - DNA, 15 bp, Homo sapiens
tgaagaaggcaggta

SEQ ID NO: 503931 - DNA, 15 bp, Homo sapiens
gaagaaggcaggtag

SEQ ID NO: 503932 - DNA, 15 bp, Homo sapiens
aagaaggcaggtagc

SEQ ID NO: 503933 - DNA, 15 bp, Homo sapiens
agaaggcaggtagca

SEQ ID NO: 503934 - DNA, 15 bp, Homo sapiens
gaaggcaggtagcaa

SEQ ID NO: 503935 - DNA, 15 bp, Homo sapiens
aaggcaggtagcaag

SEQ ID NO: 503936 - DNA, 15 bp, Homo sapiens
aggcaggtagcaaga

SEQ ID NO: 503937 - DNA, 15 bp, Homo sapiens
ggcaggtagcaagaa

SEQ ID NO: 503938 - DNA, 15 bp, Homo sapiens
gcaggtagcaagaaa

SEQ ID NO: 503939 - DNA, 15 bp, Homo sapiens
caggtagcaagaaaa

SEQ ID NO: 503940 - DNA, 15 bp, Homo sapiens
aggtagcaagaaaaa

SEQ ID NO: 503941 - DNA, 15 bp, Homo sapiens
ggtagcaagaaaaag

SEQ ID NO: 503942 - DNA, 15 bp, Homo sapiens
gtagcaagaaaaaga

SEQ ID NO: 503943 - DNA, 15 bp, Homo sapiens
tagcaagaaaaagat

SEQ ID NO: 503944 - DNA, 15 bp, Homo sapiens
agcaagaaaaagatc

SEQ ID NO: 503945 - DNA, 15 bp, Homo sapiens
gcaagaaaaagatcc

SEQ ID NO: 503946 - DNA, 15 bp, Homo sapiens
caagaaaaagatcct

SEQ ID NO: 503947 - DNA, 15 bp, Homo sapiens
aagaaaaagatcctg

SEQ ID NO: 503948 - DNA, 15 bp, Homo sapiens
agaaaaagatcctga

SEQ ID NO: 503949 - DNA, 15 bp, Homo sapiens
gaaaaagatcctgac

SEQ ID NO: 503950 - DNA, 15 bp, Homo sapiens
aaaaagatcctgacc

SEQ ID NO: 503951 - DNA, 15 bp, Homo sapiens
aaaagatcctgacct

SEQ ID NO: 503952 - DNA, 15 bp, Homo sapiens
aaagatcctgacctc

SEQ ID NO: 503953 - DNA, 15 bp, Homo sapiens
aagatcctgacctct

SEQ ID NO: 503954 - DNA, 15 bp, Homo sapiens
agatcctgacctctg

SEQ ID NO: 503955 - DNA, 15 bp, Homo sapiens
gatcctgacctctgc

SEQ ID NO: 503956 - DNA, 15 bp, Homo sapiens
atcctgacctctgct

SEQ ID NO: 503957 - DNA, 15 bp, Homo sapiens
tcctgacctctgctc

SEQ ID NO: 503958 - DNA, 15 bp, Homo sapiens
cctgacctctgctct

SEQ ID NO: 503959 - DNA, 15 bp, Homo sapiens
ctgacctctgctctg

SEQ ID NO: 503960 - DNA, 15 bp, Homo sapiens
tgacctctgctctgc

SEQ ID NO: 503961 - DNA, 15 bp, Homo sapiens
gacctctgctctgcc

SEQ ID NO: 503962 - DNA, 15 bp, Homo sapiens
acctctgctctgcca

SEQ ID NO: 503963 - DNA, 15 bp, Homo sapiens
cctctgctctgccaa

SEQ ID NO: 503964 - DNA, 15 bp, Homo sapiens
ctctgctctgccaaa

SEQ ID NO: 503965 - DNA, 15 bp, Homo sapiens
tctgctctgccaaag

SEQ ID NO: 503966 - DNA, 15 bp, Homo sapiens
ctgctctgccaaagt

SEQ ID NO: 503967 - DNA, 15 bp, Homo sapiens
tgctctgccaaagtg

SEQ ID NO: 503968 - DNA, 15 bp, Homo sapiens
gctctgccaaagtgt

SEQ ID NO: 503969 - DNA, 15 bp, Homo sapiens
ctctgccaaagtgtt

SEQ ID NO: 503970 - DNA, 15 bp, Homo sapiens
tctgccaaagtgttt

SEQ ID NO: 503971 - DNA, 15 bp, Homo sapiens
ctgccaaagtgtttt

SEQ ID NO: 503972 - DNA, 15 bp, Homo sapiens
tgccaaagtgttttt

SEQ ID NO: 503973 - DNA, 15 bp, Homo sapiens
gccaaagtgttttta

SEQ ID NO: 503974 - DNA, 15 bp, Homo sapiens
ccaaagtgtttttaa

SEQ ID NO: 503975 - DNA, 15 bp, Homo sapiens
caaagtgtttttaat

SEQ ID NO: 503976 - DNA, 15 bp, Homo sapiens
aaagtgtttttaatt

SEQ ID NO: 503977 - DNA, 15 bp, Homo sapiens
aagtgtttttaatta

SEQ ID NO: 503978 - DNA, 15 bp, Homo sapiens
agtgtttttaattac

SEQ ID NO: 503979 - DNA, 15 bp, Homo sapiens
gtgtttttaattacc

SEQ ID NO: 503980 - DNA, 15 bp, Homo sapiens
tgtttttaattacct

SEQ ID NO: 503981 - DNA, 15 bp, Homo sapiens
gtttttaattacctg

SEQ ID NO: 503982 - DNA, 15 bp, Homo sapiens
tttttaattacctgg

SEQ ID NO: 503983 - DNA, 15 bp, Homo sapiens
ttttaattacctgga

SEQ ID NO: 503984 - DNA, 15 bp, Homo sapiens
tttaattacctggat

SEQ ID NO: 503985 - DNA, 15 bp, Homo sapiens
ttaattacctggatc

SEQ ID NO: 503986 - DNA, 15 bp, Homo sapiens
taattacctggatct

SEQ ID NO: 503987 - DNA, 15 bp, Homo sapiens
aattacctggatcta

SEQ ID NO: 503988 - DNA, 15 bp, Homo sapiens
attacctggatctag

SEQ ID NO: 503989 - DNA, 15 bp, Homo sapiens
ttacctggatctagc

SEQ ID NO: 503990 - DNA, 15 bp, Homo sapiens
tacctggatctagct

SEQ ID NO: 503991 - DNA, 15 bp, Homo sapiens
acctggatctagctg

SEQ ID NO: 503992 - DNA, 15 bp, Homo sapiens
cctggatctagctgt

SEQ ID NO: 503993 - DNA, 15 bp, Homo sapiens
ctggatctagctgta

SEQ ID NO: 503994 - DNA, 15 bp, Homo sapiens
tggatctagctgtaa

SEQ ID NO: 503995 - DNA, 15 bp, Homo sapiens
ggatctagctgtaag

SEQ ID NO: 503996 - DNA, 15 bp, Homo sapiens
gatctagctgtaagg

SEQ ID NO: 503997 - DNA, 15 bp, Homo sapiens
atctagctgtaaggt

SEQ ID NO: 503998 - DNA, 15 bp, Homo sapiens
tctagctgtaaggtt

SEQ ID NO: 503999 - DNA, 15 bp, Homo sapiens
ctagctgtaaggttt

SEQ ID NO: 504000 - DNA, 15 bp, Homo sapiens
tagctgtaaggtttg

SEQ ID NO: 504001 - DNA, 15 bp, Homo sapiens
agctgtaaggtttgc

SEQ ID NO: 504002 - DNA, 15 bp, Homo sapiens
gctgtaaggtttgcc

SEQ ID NO: 504003 - DNA, 15 bp, Homo sapiens
ctgtaaggtttgcca

SEQ ID NO: 504004 - DNA, 15 bp, Homo sapiens
tgtaaggtttgccac

SEQ ID NO: 504005 - DNA, 15 bp, Homo sapiens
gtaaggtttgccacg

SEQ ID NO: 504006 - DNA, 15 bp, Homo sapiens
taaggtttgccacgt

SEQ ID NO: 504007 - DNA, 15 bp, Homo sapiens
aaggtttgccacgta

SEQ ID NO: 504008 - DNA, 15 bp, Homo sapiens
aggtttgccacgtag

SEQ ID NO: 504009 - DNA, 15 bp, Homo sapiens
ggtttgccacgtagt

SEQ ID NO: 504010 - DNA, 15 bp, Homo sapiens
gtttgccacgtagtg

SEQ ID NO: 504011 - DNA, 15 bp, Homo sapiens
tttgccacgtagtgg

SEQ ID NO: 504012 - DNA, 15 bp, Homo sapiens
ttgccacgtagtggt

SEQ ID NO: 504013 - DNA, 15 bp, Homo sapiens
tgccacgtagtggtg

SEQ ID NO: 504014 - DNA, 15 bp, Homo sapiens
gccacgtagtggtga

SEQ ID NO: 504015 - DNA, 15 bp, Homo sapiens
ccacgtagtggtgac

SEQ ID NO: 504016 - DNA, 15 bp, Homo sapiens
cacgtagtggtgaca

SEQ ID NO: 504017 - DNA, 15 bp, Homo sapiens
acgtagtggtgacag

SEQ ID NO: 504018 - DNA, 15 bp, Homo sapiens
cgtagtggtgacagc

SEQ ID NO: 504019 - DNA, 15 bp, Homo sapiens
gtagtggtgacagct

SEQ ID NO: 504020 - DNA, 15 bp, Homo sapiens
tagtggtgacagctg

SEQ ID NO: 504021 - DNA, 15 bp, Homo sapiens
agtggtgacagctga

SEQ ID NO: 504022 - DNA, 15 bp, Homo sapiens
gtggtgacagctgag

SEQ ID NO: 504023 - DNA, 15 bp, Homo sapiens
tggtgacagctgagg

SEQ ID NO: 504024 - DNA, 15 bp, Homo sapiens
ggtgacagctgaggt

SEQ ID NO: 504025 - DNA, 15 bp, Homo sapiens
gtgacagctgaggtc

SEQ ID NO: 504026 - DNA, 15 bp, Homo sapiens
tgacagctgaggtct

SEQ ID NO: 504027 - DNA, 15 bp, Homo sapiens
gacagctgaggtcta

SEQ ID NO: 504028 - DNA, 15 bp, Homo sapiens
acagctgaggtctag

SEQ ID NO: 504029 - DNA, 15 bp, Homo sapiens
cagctgaggtctagc

SEQ ID NO: 504030 - DNA, 15 bp, Homo sapiens
agctgaggtctagct

SEQ ID NO: 504031 - DNA, 15 bp, Homo sapiens
gctgaggtctagctc

SEQ ID NO: 504032 - DNA, 15 bp, Homo sapiens
ctgaggtctagctca

SEQ ID NO: 504033 - DNA, 15 bp, Homo sapiens
tgaggtctagctcag

SEQ ID NO: 504034 - DNA, 15 bp, Homo sapiens
gaggtctagctcagc

SEQ ID NO: 504035 - DNA, 15 bp, Homo sapiens
aggtctagctcagca

SEQ ID NO: 504036 - DNA, 15 bp, Homo sapiens
ggtctagctcagcac

SEQ ID NO: 504037 - DNA, 15 bp, Homo sapiens
gtctagctcagcact

SEQ ID NO: 504038 - DNA, 15 bp, Homo sapiens
tctagctcagcacta

SEQ ID NO: 504039 - DNA, 15 bp, Homo sapiens
ctagctcagcactac

SEQ ID NO: 504040 - DNA, 15 bp, Homo sapiens
tagctcagcactact

SEQ ID NO: 504041 - DNA, 15 bp, Homo sapiens
agctcagcactactc

SEQ ID NO: 504042 - DNA, 15 bp, Homo sapiens
gctcagcactactca

SEQ ID NO: 504043 - DNA, 15 bp, Homo sapiens
ctcagcactactcag

SEQ ID NO: 504044 - DNA, 15 bp, Homo sapiens
tcagcactactcagc

SEQ ID NO: 504045 - DNA, 15 bp, Homo sapiens
cagcactactcagca

SEQ ID NO: 504046 - DNA, 15 bp, Homo sapiens
agcactactcagcag

SEQ ID NO: 504047 - DNA, 15 bp, Homo sapiens
gcactactcagcagg

SEQ ID NO: 504048 - DNA, 15 bp, Homo sapiens
cactactcagcaggg

SEQ ID NO: 504049 - DNA, 15 bp, Homo sapiens
actactcagcaggga

SEQ ID NO: 504050 - DNA, 15 bp, Homo sapiens
ctactcagcagggaa

SEQ ID NO: 504051 - DNA, 15 bp, Homo sapiens
tactcagcagggaag

SEQ ID NO: 504052 - DNA, 15 bp, Homo sapiens
actcagcagggaagc

SEQ ID NO: 504053 - DNA, 15 bp, Homo sapiens
ctcagcagggaagcc

SEQ ID NO: 504054 - DNA, 15 bp, Homo sapiens
tcagcagggaagcca

SEQ ID NO: 504055 - DNA, 15 bp, Homo sapiens
cagcagggaagccac

SEQ ID NO: 504056 - DNA, 15 bp, Homo sapiens
agcagggaagccaca

SEQ ID NO: 504057 - DNA, 15 bp, Homo sapiens
gcagggaagccacac

SEQ ID NO: 504058 - DNA, 15 bp, Homo sapiens
cagggaagccacaca

SEQ ID NO: 504059 - DNA, 15 bp, Homo sapiens
agggaagccacacat

SEQ ID NO: 504060 - DNA, 15 bp, Homo sapiens
gggaagccacacatg

SEQ ID NO: 504061 - DNA, 15 bp, Homo sapiens
ggaagccacacatgc

SEQ ID NO: 504062 - DNA, 15 bp, Homo sapiens
gaagccacacatgca

SEQ ID NO: 504063 - DNA, 15 bp, Homo sapiens
aagccacacatgcat

SEQ ID NO: 504064 - DNA, 15 bp, Homo sapiens
agccacacatgcatt

SEQ ID NO: 504065 - DNA, 15 bp, Homo sapiens
gccacacatgcatta

SEQ ID NO: 504066 - DNA, 15 bp, Homo sapiens
ccacacatgcattaa

SEQ ID NO: 504067 - DNA, 15 bp, Homo sapiens
cacacatgcattaag

SEQ ID NO: 504068 - DNA, 15 bp, Homo sapiens
acacatgcattaagc

SEQ ID NO: 504069 - DNA, 15 bp, Homo sapiens
cacatgcattaagca

SEQ ID NO: 504070 - DNA, 15 bp, Homo sapiens
acatgcattaagcac

SEQ ID NO: 504071 - DNA, 15 bp, Homo sapiens
catgcattaagcact

SEQ ID NO: 504072 - DNA, 15 bp, Homo sapiens
atgcattaagcactt

SEQ ID NO: 504073 - DNA, 15 bp, Homo sapiens
tgcattaagcacttg

SEQ ID NO: 504074 - DNA, 15 bp, Homo sapiens
gcattaagcacttga

SEQ ID NO: 504075 - DNA, 15 bp, Homo sapiens
cattaagcacttgac

SEQ ID NO: 504076 - DNA, 15 bp, Homo sapiens
attaagcacttgaca

SEQ ID NO: 504077 - DNA, 15 bp, Homo sapiens
ttaagcacttgacat

SEQ ID NO: 504078 - DNA, 15 bp, Homo sapiens
taagcacttgacata

SEQ ID NO: 504079 - DNA, 15 bp, Homo sapiens
aagcacttgacatag

SEQ ID NO: 504080 - DNA, 15 bp, Homo sapiens
agcacttgacatagg

SEQ ID NO: 504081 - DNA, 15 bp, Homo sapiens
gcacttgacatagga

SEQ ID NO: 504082 - DNA, 15 bp, Homo sapiens
cacttgacataggac

SEQ ID NO: 504083 - DNA, 15 bp, Homo sapiens
acttgacataggact

SEQ ID NO: 504084 - DNA, 15 bp, Homo sapiens
cttgacataggacta

SEQ ID NO: 504085 - DNA, 15 bp, Homo sapiens
ttgacataggactag

SEQ ID NO: 504086 - DNA, 15 bp, Homo sapiens
tgacataggactagt

SEQ ID NO: 504087 - DNA, 15 bp, Homo sapiens
gacataggactagtc

SEQ ID NO: 504088 - DNA, 15 bp, Homo sapiens
acataggactagtct

SEQ ID NO: 504089 - DNA, 15 bp, Homo sapiens
cataggactagtctg

SEQ ID NO: 504090 - DNA, 15 bp, Homo sapiens
ataggactagtctga

SEQ ID NO: 504091 - DNA, 15 bp, Homo sapiens
taggactagtctgaa

SEQ ID NO: 504092 - DNA, 15 bp, Homo sapiens
aggactagtctgaac

SEQ ID NO: 504093 - DNA, 15 bp, Homo sapiens
ggactagtctgaact

SEQ ID NO: 504094 - DNA, 15 bp, Homo sapiens
gactagtctgaactg

SEQ ID NO: 504095 - DNA, 15 bp, Homo sapiens
actagtctgaactga

SEQ ID NO: 504096 - DNA, 15 bp, Homo sapiens
ctagtctgaactgag

SEQ ID NO: 504097 - DNA, 15 bp, Homo sapiens
tagtctgaactgagt

SEQ ID NO: 504098 - DNA, 15 bp, Homo sapiens
agtctgaactgagtt

SEQ ID NO: 504099 - DNA, 15 bp, Homo sapiens
gtctgaactgagttg

SEQ ID NO: 504100 - DNA, 15 bp, Homo sapiens
tctgaactgagttgt

SEQ ID NO: 504101 - DNA, 15 bp, Homo sapiens
ctgaactgagttgtg

SEQ ID NO: 504102 - DNA, 15 bp, Homo sapiens
tgaactgagttgtgc

SEQ ID NO: 504103 - DNA, 15 bp, Homo sapiens
gaactgagttgtgct

SEQ ID NO: 504104 - DNA, 15 bp, Homo sapiens
aactgagttgtgctg

SEQ ID NO: 504105 - DNA, 15 bp, Homo sapiens
actgagttgtgctgt

SEQ ID NO: 504106 - DNA, 15 bp, Homo sapiens
ctgagttgtgctgtc

SEQ ID NO: 504107 - DNA, 15 bp, Homo sapiens
tgagttgtgctgtca

SEQ ID NO: 504108 - DNA, 15 bp, Homo sapiens
gagttgtgctgtcat

SEQ ID NO: 504109 - DNA, 15 bp, Homo sapiens
agttgtgctgtcatt

SEQ ID NO: 504110 - DNA, 15 bp, Homo sapiens
gttgtgctgtcatta

SEQ ID NO: 504111 - DNA, 15 bp, Homo sapiens
ttgtgctgtcattat

SEQ ID NO: 504112 - DNA, 15 bp, Homo sapiens
tgtgctgtcattatt

SEQ ID NO: 504113 - DNA, 15 bp, Homo sapiens
gtgctgtcattattg

SEQ ID NO: 504114 - DNA, 15 bp, Homo sapiens
tgctgtcattattga

SEQ ID NO: 504115 - DNA, 15 bp, Homo sapiens
gctgtcattattgat

SEQ ID NO: 504116 - DNA, 15 bp, Homo sapiens
ctgtcattattgata

SEQ ID NO: 504117 - DNA, 15 bp, Homo sapiens
tgtcattattgatac

SEQ ID NO: 504118 - DNA, 15 bp, Homo sapiens
gtcattattgataca

SEQ ID NO: 504119 - DNA, 15 bp, Homo sapiens
tcattattgatacac

SEQ ID NO: 504120 - DNA, 15 bp, Homo sapiens
cattattgatacaca

SEQ ID NO: 504121 - DNA, 15 bp, Homo sapiens
attattgatacacac

SEQ ID NO: 504122 - DNA, 15 bp, Homo sapiens
ttattgatacacact

SEQ ID NO: 504123 - DNA, 15 bp, Homo sapiens
tattgatacacactg

SEQ ID NO: 504124 - DNA, 15 bp, Homo sapiens
attgatacacactgg

SEQ ID NO: 504125 - DNA, 15 bp, Homo sapiens
ttgatacacactgga

SEQ ID NO: 504126 - DNA, 15 bp, Homo sapiens
tgatacacactggat

SEQ ID NO: 504127 - DNA, 15 bp, Homo sapiens
gatacacactggatt

SEQ ID NO: 504128 - DNA, 15 bp, Homo sapiens
atacacactggattt

SEQ ID NO: 504129 - DNA, 15 bp, Homo sapiens
tacacactggatttt

SEQ ID NO: 504130 - DNA, 15 bp, Homo sapiens
acacactggattttg

SEQ ID NO: 504131 - DNA, 15 bp, Homo sapiens
cacactggattttga

SEQ ID NO: 504132 - DNA, 15 bp, Homo sapiens
acactggattttgag

SEQ ID NO: 504133 - DNA, 15 bp, Homo sapiens
cactggattttgagg

SEQ ID NO: 504134 - DNA, 15 bp, Homo sapiens
actggattttgagga

SEQ ID NO: 504135 - DNA, 15 bp, Homo sapiens
ctggattttgaggag

SEQ ID NO: 504136 - DNA, 15 bp, Homo sapiens
tggattttgaggaga

SEQ ID NO: 504137 - DNA, 15 bp, Homo sapiens
ggattttgaggagac

SEQ ID NO: 504138 - DNA, 15 bp, Homo sapiens
gattttgaggagaca

SEQ ID NO: 504139 - DNA, 15 bp, Homo sapiens
attttgaggagacaa

SEQ ID NO: 504140 - DNA, 15 bp, Homo sapiens
ttttgaggagacaaa

SEQ ID NO: 504141 - DNA, 15 bp, Homo sapiens
tttgaggagacaaaa

SEQ ID NO: 504142 - DNA, 15 bp, Homo sapiens
ttgaggagacaaaaa

SEQ ID NO: 504143 - DNA, 15 bp, Homo sapiens
tgaggagacaaaaaa

SEQ ID NO: 504144 - DNA, 15 bp, Homo sapiens
gaggagacaaaaaag

SEQ ID NO: 504145 - DNA, 15 bp, Homo sapiens
aggagacaaaaaaga

SEQ ID NO: 504146 - DNA, 15 bp, Homo sapiens
ggagacaaaaaagaa

SEQ ID NO: 504147 - DNA, 15 bp, Homo sapiens
gagacaaaaaagaat

SEQ ID NO: 504148 - DNA, 15 bp, Homo sapiens
agacaaaaaagaatg

SEQ ID NO: 504149 - DNA, 15 bp, Homo sapiens
gacaaaaaagaatgc

SEQ ID NO: 504150 - DNA, 15 bp, Homo sapiens
acaaaaaagaatgca

SEQ ID NO: 504151 - DNA, 15 bp, Homo sapiens
caaaaaagaatgcaa

SEQ ID NO: 504152 - DNA, 15 bp, Homo sapiens
aaaaaagaatgcaaa

SEQ ID NO: 504153 - DNA, 15 bp, Homo sapiens
aaaaagaatgcaaaa

SEQ ID NO: 504154 - DNA, 15 bp, Homo sapiens
aaaagaatgcaaaat

SEQ ID NO: 504155 - DNA, 15 bp, Homo sapiens
aaagaatgcaaaata

SEQ ID NO: 504156 - DNA, 15 bp, Homo sapiens
aagaatgcaaaatag

SEQ ID NO: 504157 - DNA, 15 bp, Homo sapiens
agaatgcaaaatagt

SEQ ID NO: 504158 - DNA, 15 bp, Homo sapiens
gaatgcaaaatagtt

SEQ ID NO: 504159 - DNA, 15 bp, Homo sapiens
aatgcaaaatagttt

SEQ ID NO: 504160 - DNA, 15 bp, Homo sapiens
atgcaaaatagttta

SEQ ID NO: 504161 - DNA, 15 bp, Homo sapiens
tgcaaaatagtttaa

SEQ ID NO: 504162 - DNA, 15 bp, Homo sapiens
gcaaaatagtttaat

SEQ ID NO: 504163 - DNA, 15 bp, Homo sapiens
caaaatagtttaatt

SEQ ID NO: 504164 - DNA, 15 bp, Homo sapiens
aaaatagtttaattg

SEQ ID NO: 504165 - DNA, 15 bp, Homo sapiens
aaatagtttaattgt

SEQ ID NO: 504166 - DNA, 15 bp, Homo sapiens
aatagtttaattgtt

SEQ ID NO: 504167 - DNA, 15 bp, Homo sapiens
atagtttaattgttt

SEQ ID NO: 504168 - DNA, 15 bp, Homo sapiens
tagtttaattgtttt

SEQ ID NO: 504169 - DNA, 15 bp, Homo sapiens
agtttaattgttttc

SEQ ID NO: 504170 - DNA, 15 bp, Homo sapiens
gtttaattgttttca

SEQ ID NO: 504171 - DNA, 15 bp, Homo sapiens
tttaattgttttcat

SEQ ID NO: 504172 - DNA, 15 bp, Homo sapiens
ttaattgttttcata

SEQ ID NO: 504173 - DNA, 15 bp, Homo sapiens
taattgttttcatat

SEQ ID NO: 504174 - DNA, 15 bp, Homo sapiens
aattgttttcatatg

SEQ ID NO: 504175 - DNA, 15 bp, Homo sapiens
attgttttcatatgg

SEQ ID NO: 504176 - DNA, 15 bp, Homo sapiens
ttgttttcatatggg

SEQ ID NO: 504177 - DNA, 15 bp, Homo sapiens
tgttttcatatgggt

SEQ ID NO: 504178 - DNA, 15 bp, Homo sapiens
gttttcatatgggtt

SEQ ID NO: 504179 - DNA, 15 bp, Homo sapiens
ttttcatatgggtta

SEQ ID NO: 504180 - DNA, 15 bp, Homo sapiens
tttcatatgggttac

SEQ ID NO: 504181 - DNA, 15 bp, Homo sapiens
ttcatatgggttaca

SEQ ID NO: 504182 - DNA, 15 bp, Homo sapiens
tcatatgggttacat

SEQ ID NO: 504183 - DNA, 15 bp, Homo sapiens
catatgggttacatg

SEQ ID NO: 504184 - DNA, 15 bp, Homo sapiens
atatgggttacatgt

SEQ ID NO: 504185 - DNA, 15 bp, Homo sapiens
tatgggttacatgtt

SEQ ID NO: 504186 - DNA, 15 bp, Homo sapiens
atgggttacatgttg

SEQ ID NO: 504187 - DNA, 15 bp, Homo sapiens
tgggttacatgttga

SEQ ID NO: 504188 - DNA, 15 bp, Homo sapiens
gggttacatgttgaa

SEQ ID NO: 504189 - DNA, 15 bp, Homo sapiens
ggttacatgttgaaa

SEQ ID NO: 504190 - DNA, 15 bp, Homo sapiens
gttacatgttgaaat

SEQ ID NO: 504191 - DNA, 15 bp, Homo sapiens
ttacatgttgaaatg

SEQ ID NO: 504192 - DNA, 15 bp, Homo sapiens
tacatgttgaaatgg

SEQ ID NO: 504193 - DNA, 15 bp, Homo sapiens
acatgttgaaatggt

SEQ ID NO: 504194 - DNA, 15 bp, Homo sapiens
catgttgaaatggtg

SEQ ID NO: 504195 - DNA, 15 bp, Homo sapiens
atgttgaaatggtgt

SEQ ID NO: 504196 - DNA, 15 bp, Homo sapiens
tgttgaaatggtgtt

SEQ ID NO: 504197 - DNA, 15 bp, Homo sapiens
gttgaaatggtgttt

SEQ ID NO: 504198 - DNA, 15 bp, Homo sapiens
ttgaaatggtgtttt

SEQ ID NO: 504199 - DNA, 15 bp, Homo sapiens
tgaaatggtgtttta

SEQ ID NO: 504200 - DNA, 15 bp, Homo sapiens
gaaatggtgttttaa

SEQ ID NO: 504201 - DNA, 15 bp, Homo sapiens
aaatggtgttttaaa

SEQ ID NO: 504202 - DNA, 15 bp, Homo sapiens
aatggtgttttaaat

SEQ ID NO: 504203 - DNA, 15 bp, Homo sapiens
atggtgttttaaata

SEQ ID NO: 504204 - DNA, 15 bp, Homo sapiens
tggtgttttaaatat

SEQ ID NO: 504205 - DNA, 15 bp, Homo sapiens
ggtgttttaaatata

SEQ ID NO: 504206 - DNA, 15 bp, Homo sapiens
gtgttttaaatatat

SEQ ID NO: 504207 - DNA, 15 bp, Homo sapiens
tgttttaaatatata

SEQ ID NO: 504208 - DNA, 15 bp, Homo sapiens
gttttaaatatatag

SEQ ID NO: 504209 - DNA, 15 bp, Homo sapiens
ttttaaatatatagg

SEQ ID NO: 504210 - DNA, 15 bp, Homo sapiens
tttaaatatataggt

SEQ ID NO: 504211 - DNA, 15 bp, Homo sapiens
ttaaatatataggtt

SEQ ID NO: 504212 - DNA, 15 bp, Homo sapiens
taaatatataggtta

SEQ ID NO: 504213 - DNA, 15 bp, Homo sapiens
aaatatataggttaa

SEQ ID NO: 504214 - DNA, 15 bp, Homo sapiens
aatatataggttaaa

SEQ ID NO: 504215 - DNA, 15 bp, Homo sapiens
atatataggttaaat

SEQ ID NO: 504216 - DNA, 15 bp, Homo sapiens
tatataggttaaata

SEQ ID NO: 504217 - DNA, 15 bp, Homo sapiens
atataggttaaataa

SEQ ID NO: 504218 - DNA, 15 bp, Homo sapiens
tataggttaaataaa

SEQ ID NO: 504219 - DNA, 15 bp, Homo sapiens
ataggttaaataaaa

SEQ ID NO: 504220 - DNA, 15 bp, Homo sapiens
taggttaaataaaat

SEQ ID NO: 504221 - DNA, 15 bp, Homo sapiens
aggttaaataaaata

SEQ ID NO: 504222 - DNA, 15 bp, Homo sapiens
ggttaaataaaatat

SEQ ID NO: 504223 - DNA, 15 bp, Homo sapiens
gttaaataaaatata

SEQ ID NO: 504224 - DNA, 15 bp, Homo sapiens
ttaaataaaatataa

SEQ ID NO: 504225 - DNA, 15 bp, Homo sapiens
taaataaaatataaa

SEQ ID NO: 504226 - DNA, 15 bp, Homo sapiens
aaataaaatataaac

SEQ ID NO: 504227 - DNA, 15 bp, Homo sapiens
aataaaatataaact

SEQ ID NO: 504228 - DNA, 15 bp, Homo sapiens
ataaaatataaactt

SEQ ID NO: 504229 - DNA, 15 bp, Homo sapiens
taaaatataaacttg

SEQ ID NO: 504230 - DNA, 15 bp, Homo sapiens
aaaatataaacttgt

SEQ ID NO: 504231 - DNA, 15 bp, Homo sapiens
aaatataaacttgta

SEQ ID NO: 504232 - DNA, 15 bp, Homo sapiens
aatataaacttgtat

SEQ ID NO: 504233 - DNA, 15 bp, Homo sapiens
atataaacttgtatt

SEQ ID NO: 504234 - DNA, 15 bp, Homo sapiens
tataaacttgtattg

SEQ ID NO: 504235 - DNA, 15 bp, Homo sapiens
ataaacttgtattgc

SEQ ID NO: 504236 - DNA, 15 bp, Homo sapiens
taaacttgtattgca

SEQ ID NO: 504237 - DNA, 15 bp, Homo sapiens
aaacttgtattgcag

SEQ ID NO: 504238 - DNA, 15 bp, Homo sapiens
aacttgtattgcagt

SEQ ID NO: 504239 - DNA, 15 bp, Homo sapiens
acttgtattgcagtt

SEQ ID NO: 504240 - DNA, 15 bp, Homo sapiens
cttgtattgcagtta

SEQ ID NO: 504241 - DNA, 15 bp, Homo sapiens
ttgtattgcagttaa

SEQ ID NO: 504242 - DNA, 15 bp, Homo sapiens
tgtattgcagttaaa

SEQ ID NO: 504243 - DNA, 15 bp, Homo sapiens
gtattgcagttaaac

SEQ ID NO: 504244 - DNA, 15 bp, Homo sapiens
tattgcagttaaaca

SEQ ID NO: 504245 - DNA, 15 bp, Homo sapiens
attgcagttaaacac

SEQ ID NO: 504246 - DNA, 15 bp, Homo sapiens
ttgcagttaaacaca

SEQ ID NO: 504247 - DNA, 15 bp, Homo sapiens
tgcagttaaacacaa

SEQ ID NO: 504248 - DNA, 15 bp, Homo sapiens
gcagttaaacacaaa

SEQ ID NO: 504249 - DNA, 15 bp, Homo sapiens
cagttaaacacaaag

SEQ ID NO: 504250 - DNA, 15 bp, Homo sapiens
agttaaacacaaagc

SEQ ID NO: 504251 - DNA, 15 bp, Homo sapiens
gttaaacacaaagcg

SEQ ID NO: 504252 - DNA, 15 bp, Homo sapiens
ttaaacacaaagcgt

SEQ ID NO: 504253 - DNA, 15 bp, Homo sapiens
taaacacaaagcgta

SEQ ID NO: 504254 - DNA, 15 bp, Homo sapiens
aaacacaaagcgtaa

SEQ ID NO: 504255 - DNA, 15 bp, Homo sapiens
aacacaaagcgtaaa

SEQ ID NO: 504256 - DNA, 15 bp, Homo sapiens
acacaaagcgtaaaa

SEQ ID NO: 504257 - DNA, 15 bp, Homo sapiens
cacaaagcgtaaaat

SEQ ID NO: 504258 - DNA, 15 bp, Homo sapiens
acaaagcgtaaaatt

SEQ ID NO: 504259 - DNA, 15 bp, Homo sapiens
caaagcgtaaaattt

SEQ ID NO: 504260 - DNA, 15 bp, Homo sapiens
aaagcgtaaaattta

SEQ ID NO: 504261 - DNA, 15 bp, Homo sapiens
aagcgtaaaatttac

SEQ ID NO: 504262 - DNA, 15 bp, Homo sapiens
agcgtaaaatttacc

SEQ ID NO: 504263 - DNA, 15 bp, Homo sapiens
gcgtaaaatttacca

SEQ ID NO: 504264 - DNA, 15 bp, Homo sapiens
cgtaaaatttaccat

SEQ ID NO: 504265 - DNA, 15 bp, Homo sapiens
gtaaaatttaccatc

SEQ ID NO: 504266 - DNA, 15 bp, Homo sapiens
taaaatttaccatct

SEQ ID NO: 504267 - DNA, 15 bp, Homo sapiens
aaaatttaccatctg

SEQ ID NO: 504268 - DNA, 15 bp, Homo sapiens
aaatttaccatctga

SEQ ID NO: 504269 - DNA, 15 bp, Homo sapiens
aatttaccatctgaa

SEQ ID NO: 504270 - DNA, 15 bp, Homo sapiens
atttaccatctgaac

SEQ ID NO: 504271 - DNA, 15 bp, Homo sapiens
tttaccatctgaacc

SEQ ID NO: 504272 - DNA, 15 bp, Homo sapiens
ttaccatctgaacca

SEQ ID NO: 504273 - DNA, 15 bp, Homo sapiens
taccatctgaaccat

SEQ ID NO: 504274 - DNA, 15 bp, Homo sapiens
accatctgaaccatt

SEQ ID NO: 504275 - DNA, 15 bp, Homo sapiens
ccatctgaaccattt

SEQ ID NO: 504276 - DNA, 15 bp, Homo sapiens
catctgaaccattta

SEQ ID NO: 504277 - DNA, 15 bp, Homo sapiens
atctgaaccatttat

SEQ ID NO: 504278 - DNA, 15 bp, Homo sapiens
tctgaaccatttatt

SEQ ID NO: 504279 - DNA, 15 bp, Homo sapiens
ctgaaccatttattt

SEQ ID NO: 504280 - DNA, 15 bp, Homo sapiens
tgaaccatttatttc

SEQ ID NO: 504281 - DNA, 15 bp, Homo sapiens
gaaccatttatttct

SEQ ID NO: 504282 - DNA, 15 bp, Homo sapiens
aaccatttatttcta

SEQ ID NO: 504283 - DNA, 15 bp, Homo sapiens
accatttatttctaa

SEQ ID NO: 504284 - DNA, 15 bp, Homo sapiens
ccatttatttctaag

SEQ ID NO: 504285 - DNA, 15 bp, Homo sapiens
catttatttctaagt

SEQ ID NO: 504286 - DNA, 15 bp, Homo sapiens
atttatttctaagtg

SEQ ID NO: 504287 - DNA, 15 bp, Homo sapiens
tttatttctaagtgt

SEQ ID NO: 504288 - DNA, 15 bp, Homo sapiens
ttatttctaagtgta

SEQ ID NO: 504289 - DNA, 15 bp, Homo sapiens
tatttctaagtgtac

SEQ ID NO: 504290 - DNA, 15 bp, Homo sapiens
atttctaagtgtact

SEQ ID NO: 504291 - DNA, 15 bp, Homo sapiens
tttctaagtgtactg

SEQ ID NO: 504292 - DNA, 15 bp, Homo sapiens
ttctaagtgtactgt

SEQ ID NO: 504293 - DNA, 15 bp, Homo sapiens
tctaagtgtactgtt

SEQ ID NO: 504294 - DNA, 15 bp, Homo sapiens
ctaagtgtactgttc

SEQ ID NO: 504295 - DNA, 15 bp, Homo sapiens
taagtgtactgttca

SEQ ID NO: 504296 - DNA, 15 bp, Homo sapiens
aagtgtactgttcag

SEQ ID NO: 504297 - DNA, 15 bp, Homo sapiens
agtgtactgttcagt

SEQ ID NO: 504298 - DNA, 15 bp, Homo sapiens
gtgtactgttcagta

SEQ ID NO: 504299 - DNA, 15 bp, Homo sapiens
tgtactgttcagtag

SEQ ID NO: 504300 - DNA, 15 bp, Homo sapiens
gtactgttcagtagt

SEQ ID NO: 504301 - DNA, 15 bp, Homo sapiens
tactgttcagtagtg

SEQ ID NO: 504302 - DNA, 15 bp, Homo sapiens
actgttcagtagtgt

SEQ ID NO: 504303 - DNA, 15 bp, Homo sapiens
ctgttcagtagtgtt

SEQ ID NO: 504304 - DNA, 15 bp, Homo sapiens
tgttcagtagtgtta

SEQ ID NO: 504305 - DNA, 15 bp, Homo sapiens
gttcagtagtgttaa

SEQ ID NO: 504306 - DNA, 15 bp, Homo sapiens
ttcagtagtgttaag

SEQ ID NO: 504307 - DNA, 15 bp, Homo sapiens
tcagtagtgttaagt

SEQ ID NO: 504308 - DNA, 15 bp, Homo sapiens
cagtagtgttaagtg

SEQ ID NO: 504309 - DNA, 15 bp, Homo sapiens
agtagtgttaagtgc

SEQ ID NO: 504310 - DNA, 15 bp, Homo sapiens
gtagtgttaagtgca

SEQ ID NO: 504311 - DNA, 15 bp, Homo sapiens
tagtgttaagtgcac

SEQ ID NO: 504312 - DNA, 15 bp, Homo sapiens
agtgttaagtgcact

SEQ ID NO: 504313 - DNA, 15 bp, Homo sapiens
gtgttaagtgcactt

SEQ ID NO: 504314 - DNA, 15 bp, Homo sapiens
tgttaagtgcactta

SEQ ID NO: 504315 - DNA, 15 bp, Homo sapiens
gttaagtgcacttat

SEQ ID NO: 504316 - DNA, 15 bp, Homo sapiens
ttaagtgcacttatt

SEQ ID NO: 504317 - DNA, 15 bp, Homo sapiens
taagtgcacttattt

SEQ ID NO: 504318 - DNA, 15 bp, Homo sapiens
aagtgcacttatttt

SEQ ID NO: 504319 - DNA, 15 bp, Homo sapiens
agtgcacttattttg

SEQ ID NO: 504320 - DNA, 15 bp, Homo sapiens
gtgcacttattttgt

SEQ ID NO: 504321 - DNA, 15 bp, Homo sapiens
tgcacttattttgtt

SEQ ID NO: 504322 - DNA, 15 bp, Homo sapiens
gcacttattttgttg

SEQ ID NO: 504323 - DNA, 15 bp, Homo sapiens
cacttattttgttgt

SEQ ID NO: 504324 - DNA, 15 bp, Homo sapiens
acttattttgttgtg

SEQ ID NO: 504325 - DNA, 15 bp, Homo sapiens
cttattttgttgtgc

SEQ ID NO: 504326 - DNA, 15 bp, Homo sapiens
ttattttgttgtgcg

SEQ ID NO: 504327 - DNA, 15 bp, Homo sapiens
tattttgttgtgcgg

SEQ ID NO: 504328 - DNA, 15 bp, Homo sapiens
attttgttgtgcggc

SEQ ID NO: 504329 - DNA, 15 bp, Homo sapiens
ttttgttgtgcggcc

SEQ ID NO: 504330 - DNA, 15 bp, Homo sapiens
tttgttgtgcggcca

SEQ ID NO: 504331 - DNA, 15 bp, Homo sapiens
ttgttgtgcggccaa

SEQ ID NO: 504332 - DNA, 15 bp, Homo sapiens
tgttgtgcggccaat

SEQ ID NO: 504333 - DNA, 15 bp, Homo sapiens
gttgtgcggccaatc

SEQ ID NO: 504334 - DNA, 15 bp, Homo sapiens
ttgtgcggccaatct

SEQ ID NO: 504335 - DNA, 15 bp, Homo sapiens
tgtgcggccaatctc

SEQ ID NO: 504336 - DNA, 15 bp, Homo sapiens
gtgcggccaatctcc

SEQ ID NO: 504337 - DNA, 15 bp, Homo sapiens
tgcggccaatctcca

SEQ ID NO: 504338 - DNA, 15 bp, Homo sapiens
gcggccaatctccag

SEQ ID NO: 504339 - DNA, 15 bp, Homo sapiens
cggccaatctccaga

SEQ ID NO: 504340 - DNA, 15 bp, Homo sapiens
ggccaatctccagaa

SEQ ID NO: 504341 - DNA, 15 bp, Homo sapiens
gccaatctccagaac

SEQ ID NO: 504342 - DNA, 15 bp, Homo sapiens
ccaatctccagaact

SEQ ID NO: 504343 - DNA, 15 bp, Homo sapiens
caatctccagaactt

SEQ ID NO: 504344 - DNA, 15 bp, Homo sapiens
aatctccagaacttc

SEQ ID NO: 504345 - DNA, 15 bp, Homo sapiens
atctccagaacttct

SEQ ID NO: 504346 - DNA, 15 bp, Homo sapiens
tctccagaacttctt

SEQ ID NO: 504347 - DNA, 15 bp, Homo sapiens
ctccagaacttcttc

SEQ ID NO: 504348 - DNA, 15 bp, Homo sapiens
tccagaacttcttca

SEQ ID NO: 504349 - DNA, 15 bp, Homo sapiens
ccagaacttcttcac

SEQ ID NO: 504350 - DNA, 15 bp, Homo sapiens
cagaacttcttcacc

SEQ ID NO: 504351 - DNA, 15 bp, Homo sapiens
agaacttcttcacct

SEQ ID NO: 504352 - DNA, 15 bp, Homo sapiens
gaacttcttcacctt

SEQ ID NO: 504353 - DNA, 15 bp, Homo sapiens
aacttcttcaccttg

SEQ ID NO: 504354 - DNA, 15 bp, Homo sapiens
acttcttcaccttgc

SEQ ID NO: 504355 - DNA, 15 bp, Homo sapiens
cttcttcaccttgca

SEQ ID NO: 504356 - DNA, 15 bp, Homo sapiens
ttcttcaccttgcaa

SEQ ID NO: 504357 - DNA, 15 bp, Homo sapiens
tcttcaccttgcaaa

SEQ ID NO: 504358 - DNA, 15 bp, Homo sapiens
cttcaccttgcaaaa

SEQ ID NO: 504359 - DNA, 15 bp, Homo sapiens
ttcaccttgcaaaac

SEQ ID NO: 504360 - DNA, 15 bp, Homo sapiens
tcaccttgcaaaaca

SEQ ID NO: 504361 - DNA, 15 bp, Homo sapiens
caccttgcaaaacag

SEQ ID NO: 504362 - DNA, 15 bp, Homo sapiens
accttgcaaaacaga

SEQ ID NO: 504363 - DNA, 15 bp, Homo sapiens
ccttgcaaaacagaa

SEQ ID NO: 504364 - DNA, 15 bp, Homo sapiens
cttgcaaaacagaaa

SEQ ID NO: 504365 - DNA, 15 bp, Homo sapiens
ttgcaaaacagaaat

SEQ ID NO: 504366 - DNA, 15 bp, Homo sapiens
tgcaaaacagaaatt

SEQ ID NO: 504367 - DNA, 15 bp, Homo sapiens
gcaaaacagaaattc

SEQ ID NO: 504368 - DNA, 15 bp, Homo sapiens
caaaacagaaattct

SEQ ID NO: 504369 - DNA, 15 bp, Homo sapiens
aaaacagaaattctg

SEQ ID NO: 504370 - DNA, 15 bp, Homo sapiens
aaacagaaattctgt

SEQ ID NO: 504371 - DNA, 15 bp, Homo sapiens
aacagaaattctgta

SEQ ID NO: 504372 - DNA, 15 bp, Homo sapiens
acagaaattctgtac

SEQ ID NO: 504373 - DNA, 15 bp, Homo sapiens
cagaaattctgtact

SEQ ID NO: 504374 - DNA, 15 bp, Homo sapiens
agaaattctgtactc

SEQ ID NO: 504375 - DNA, 15 bp, Homo sapiens
gaaattctgtactca

SEQ ID NO: 504376 - DNA, 15 bp, Homo sapiens
aaattctgtactcat

SEQ ID NO: 504377 - DNA, 15 bp, Homo sapiens
aattctgtactcatt

SEQ ID NO: 504378 - DNA, 15 bp, Homo sapiens
attctgtactcatta

SEQ ID NO: 504379 - DNA, 15 bp, Homo sapiens
ttctgtactcattaa

SEQ ID NO: 504380 - DNA, 15 bp, Homo sapiens
tctgtactcattaaa

SEQ ID NO: 504381 - DNA, 15 bp, Homo sapiens
ctgtactcattaaac

SEQ ID NO: 504382 - DNA, 15 bp, Homo sapiens
tgtactcattaaaca

SEQ ID NO: 504383 - DNA, 15 bp, Homo sapiens
gtactcattaaacaa

SEQ ID NO: 504384 - DNA, 15 bp, Homo sapiens
tactcattaaacaac

SEQ ID NO: 504385 - DNA, 15 bp, Homo sapiens
actcattaaacaact

SEQ ID NO: 504386 - DNA, 15 bp, Homo sapiens
ctcattaaacaactc

SEQ ID NO: 504387 - DNA, 15 bp, Homo sapiens
tcattaaacaactcc

SEQ ID NO: 504388 - DNA, 15 bp, Homo sapiens
cattaaacaactccc

SEQ ID NO: 504389 - DNA, 15 bp, Homo sapiens
attaaacaactcccc

SEQ ID NO: 504390 - DNA, 15 bp, Homo sapiens
ttaaacaactcccca

SEQ ID NO: 504391 - DNA, 15 bp, Homo sapiens
taaacaactccccat

SEQ ID NO: 504392 - DNA, 15 bp, Homo sapiens
aaacaactccccatt

SEQ ID NO: 504393 - DNA, 15 bp, Homo sapiens
aacaactccccattt

SEQ ID NO: 504394 - DNA, 15 bp, Homo sapiens
acaactccccatttc

SEQ ID NO: 504395 - DNA, 15 bp, Homo sapiens
caactccccatttcc

SEQ ID NO: 504396 - DNA, 15 bp, Homo sapiens
aactccccatttccc

SEQ ID NO: 504397 - DNA, 15 bp, Homo sapiens
actccccatttcccc

SEQ ID NO: 504398 - DNA, 15 bp, Homo sapiens
ctccccatttccccc

SEQ ID NO: 504399 - DNA, 15 bp, Homo sapiens
tccccatttccccct

SEQ ID NO: 504400 - DNA, 15 bp, Homo sapiens
ccccatttccccctc

SEQ ID NO: 504401 - DNA, 15 bp, Homo sapiens
cccatttccccctcc

SEQ ID NO: 504402 - DNA, 15 bp, Homo sapiens
ccatttccccctccc

SEQ ID NO: 504403 - DNA, 15 bp, Homo sapiens
catttccccctcccc

SEQ ID NO: 504404 - DNA, 15 bp, Homo sapiens
atttccccctccccc

SEQ ID NO: 504405 - DNA, 15 bp, Homo sapiens
tttccccctcccccc

SEQ ID NO: 504406 - DNA, 15 bp, Homo sapiens
ttccccctcccccca

SEQ ID NO: 504407 - DNA, 15 bp, Homo sapiens
tccccctccccccag

SEQ ID NO: 504408 - DNA, 15 bp, Homo sapiens
ccccctccccccagc

SEQ ID NO: 504409 - DNA, 15 bp, Homo sapiens
cccctccccccagct

SEQ ID NO: 504410 - DNA, 15 bp, Homo sapiens
ccctccccccagctt

SEQ ID NO: 504411 - DNA, 15 bp, Homo sapiens
cctccccccagcttc

SEQ ID NO: 504412 - DNA, 15 bp, Homo sapiens
ctccccccagcttct

SEQ ID NO: 504413 - DNA, 15 bp, Homo sapiens
tccccccagcttctg

SEQ ID NO: 504414 - DNA, 15 bp, Homo sapiens
ccccccagcttctga

SEQ ID NO: 504415 - DNA, 15 bp, Homo sapiens
cccccagcttctgac

SEQ ID NO: 504416 - DNA, 15 bp, Homo sapiens
ccccagcttctgaca

SEQ ID NO: 504417 - DNA, 15 bp, Homo sapiens
cccagcttctgacaa

SEQ ID NO: 504418 - DNA, 15 bp, Homo sapiens
ccagcttctgacaac

SEQ ID NO: 504419 - DNA, 15 bp, Homo sapiens
cagcttctgacaacc

SEQ ID NO: 504420 - DNA, 15 bp, Homo sapiens
agcttctgacaacca

SEQ ID NO: 504421 - DNA, 15 bp, Homo sapiens
gcttctgacaaccac

SEQ ID NO: 504422 - DNA, 15 bp, Homo sapiens
cttctgacaaccacc

SEQ ID NO: 504423 - DNA, 15 bp, Homo sapiens
ttctgacaaccacca

SEQ ID NO: 504424 - DNA, 15 bp, Homo sapiens
tctgacaaccaccat

SEQ ID NO: 504425 - DNA, 15 bp, Homo sapiens
ctgacaaccaccatt

SEQ ID NO: 504426 - DNA, 15 bp, Homo sapiens
tgacaaccaccattc

SEQ ID NO: 504427 - DNA, 15 bp, Homo sapiens
gacaaccaccattct

SEQ ID NO: 504428 - DNA, 15 bp, Homo sapiens
acaaccaccattcta

SEQ ID NO: 504429 - DNA, 15 bp, Homo sapiens
caaccaccattctat

SEQ ID NO: 504430 - DNA, 15 bp, Homo sapiens
aaccaccattctatt

SEQ ID NO: 504431 - DNA, 15 bp, Homo sapiens
accaccattctattt

SEQ ID NO: 504432 - DNA, 15 bp, Homo sapiens
ccaccattctatttt

SEQ ID NO: 504433 - DNA, 15 bp, Homo sapiens
caccattctattttc

SEQ ID NO: 504434 - DNA, 15 bp, Homo sapiens
accattctattttct

SEQ ID NO: 504435 - DNA, 15 bp, Homo sapiens
ccattctattttctg

SEQ ID NO: 504436 - DNA, 15 bp, Homo sapiens
cattctattttctgt

SEQ ID NO: 504437 - DNA, 15 bp, Homo sapiens
attctattttctgtc

SEQ ID NO: 504438 - DNA, 15 bp, Homo sapiens
ttctattttctgtct

SEQ ID NO: 504439 - DNA, 15 bp, Homo sapiens
tctattttctgtcta

SEQ ID NO: 504440 - DNA, 15 bp, Homo sapiens
ctattttctgtctat

SEQ ID NO: 504441 - DNA, 15 bp, Homo sapiens
tattttctgtctatt

SEQ ID NO: 504442 - DNA, 15 bp, Homo sapiens
attttctgtctatta

SEQ ID NO: 504443 - DNA, 15 bp, Homo sapiens
ttttctgtctattaa

SEQ ID NO: 504444 - DNA, 15 bp, Homo sapiens
tttctgtctattaat

SEQ ID NO: 504445 - DNA, 15 bp, Homo sapiens
ttctgtctattaatt

SEQ ID NO: 504446 - DNA, 15 bp, Homo sapiens
tctgtctattaattt

SEQ ID NO: 504447 - DNA, 15 bp, Homo sapiens
ctgtctattaatttg

SEQ ID NO: 504448 - DNA, 15 bp, Homo sapiens
tgtctattaatttga

SEQ ID NO: 504449 - DNA, 15 bp, Homo sapiens
gtctattaatttgac

SEQ ID NO: 504450 - DNA, 15 bp, Homo sapiens
tctattaatttgaca

SEQ ID NO: 504451 - DNA, 15 bp, Homo sapiens
ctattaatttgacaa

SEQ ID NO: 504452 - DNA, 15 bp, Homo sapiens
tattaatttgacaac

SEQ ID NO: 504453 - DNA, 15 bp, Homo sapiens
attaatttgacaact

SEQ ID NO: 504454 - DNA, 15 bp, Homo sapiens
ttaatttgacaactt

SEQ ID NO: 504455 - DNA, 15 bp, Homo sapiens
taatttgacaacttc

SEQ ID NO: 504456 - DNA, 15 bp, Homo sapiens
aatttgacaacttca

SEQ ID NO: 504457 - DNA, 15 bp, Homo sapiens
atttgacaacttcag

SEQ ID NO: 504458 - DNA, 15 bp, Homo sapiens
tttgacaacttcaga

SEQ ID NO: 504459 - DNA, 15 bp, Homo sapiens
ttgacaacttcagat

SEQ ID NO: 504460 - DNA, 15 bp, Homo sapiens
tgacaacttcagata

SEQ ID NO: 504461 - DNA, 15 bp, Homo sapiens
gacaacttcagatac

SEQ ID NO: 504462 - DNA, 15 bp, Homo sapiens
acaacttcagatacc

SEQ ID NO: 504463 - DNA, 15 bp, Homo sapiens
caacttcagatacct

SEQ ID NO: 504464 - DNA, 15 bp, Homo sapiens
aacttcagatacctt

SEQ ID NO: 504465 - DNA, 15 bp, Homo sapiens
acttcagatacctta

SEQ ID NO: 504466 - DNA, 15 bp, Homo sapiens
cttcagataccttat

SEQ ID NO: 504467 - DNA, 15 bp, Homo sapiens
ttcagataccttata

SEQ ID NO: 504468 - DNA, 15 bp, Homo sapiens
tcagataccttatat

SEQ ID NO: 504469 - DNA, 15 bp, Homo sapiens
cagataccttatata

SEQ ID NO: 504470 - DNA, 15 bp, Homo sapiens
agataccttatataa

SEQ ID NO: 504471 - DNA, 15 bp, Homo sapiens
gataccttatataag

SEQ ID NO: 504472 - DNA, 15 bp, Homo sapiens
ataccttatataagt

SEQ ID NO: 504473 - DNA, 15 bp, Homo sapiens
taccttatataagtg

SEQ ID NO: 504474 - DNA, 15 bp, Homo sapiens
accttatataagtga

SEQ ID NO: 504475 - DNA, 15 bp, Homo sapiens
ccttatataagtgaa

SEQ ID NO: 504476 - DNA, 15 bp, Homo sapiens
cttatataagtgaaa

SEQ ID NO: 504477 - DNA, 15 bp, Homo sapiens
ttatataagtgaaat

SEQ ID NO: 504478 - DNA, 15 bp, Homo sapiens
tatataagtgaaatt

SEQ ID NO: 504479 - DNA, 15 bp, Homo sapiens
atataagtgaaattt

SEQ ID NO: 504480 - DNA, 15 bp, Homo sapiens
tataagtgaaattta

SEQ ID NO: 504481 - DNA, 15 bp, Homo sapiens
ataagtgaaatttat

SEQ ID NO: 504482 - DNA, 15 bp, Homo sapiens
taagtgaaatttata

SEQ ID NO: 504483 - DNA, 15 bp, Homo sapiens
aagtgaaatttatat

SEQ ID NO: 504484 - DNA, 15 bp, Homo sapiens
agtgaaatttatata

SEQ ID NO: 504485 - DNA, 15 bp, Homo sapiens
gtgaaatttatatag

SEQ ID NO: 504486 - DNA, 15 bp, Homo sapiens
tgaaatttatatagt

SEQ ID NO: 504487 - DNA, 15 bp, Homo sapiens
gaaatttatatagta

SEQ ID NO: 504488 - DNA, 15 bp, Homo sapiens
aaatttatatagtat

SEQ ID NO: 504489 - DNA, 15 bp, Homo sapiens
aatttatatagtatt

SEQ ID NO: 504490 - DNA, 15 bp, Homo sapiens
atttatatagtattt

SEQ ID NO: 504491 - DNA, 15 bp, Homo sapiens
tttatatagtatttg

SEQ ID NO: 504492 - DNA, 15 bp, Homo sapiens
ttatatagtatttgc

SEQ ID NO: 504493 - DNA, 15 bp, Homo sapiens
tatatagtatttgct

SEQ ID NO: 504494 - DNA, 15 bp, Homo sapiens
atatagtatttgctc

SEQ ID NO: 504495 - DNA, 15 bp, Homo sapiens
tatagtatttgctct

SEQ ID NO: 504496 - DNA, 15 bp, Homo sapiens
atagtatttgctctt

SEQ ID NO: 504497 - DNA, 15 bp, Homo sapiens
tagtatttgctcttc

SEQ ID NO: 504498 - DNA, 15 bp, Homo sapiens
agtatttgctcttcc

SEQ ID NO: 504499 - DNA, 15 bp, Homo sapiens
gtatttgctcttcca

SEQ ID NO: 504500 - DNA, 15 bp, Homo sapiens
tatttgctcttccat

SEQ ID NO: 504501 - DNA, 15 bp, Homo sapiens
atttgctcttccatg

SEQ ID NO: 504502 - DNA, 15 bp, Homo sapiens
tttgctcttccatga

SEQ ID NO: 504503 - DNA, 15 bp, Homo sapiens
ttgctcttccatgac

SEQ ID NO: 504504 - DNA, 15 bp, Homo sapiens
tgctcttccatgaca

SEQ ID NO: 504505 - DNA, 15 bp, Homo sapiens
gctcttccatgacag

SEQ ID NO: 504506 - DNA, 15 bp, Homo sapiens
ctcttccatgacagg

SEQ ID NO: 504507 - DNA, 15 bp, Homo sapiens
tcttccatgacaggc

SEQ ID NO: 504508 - DNA, 15 bp, Homo sapiens
cttccatgacaggct

SEQ ID NO: 504509 - DNA, 15 bp, Homo sapiens
ttccatgacaggctt

SEQ ID NO: 504510 - DNA, 15 bp, Homo sapiens
tccatgacaggctta

SEQ ID NO: 504511 - DNA, 15 bp, Homo sapiens
ccatgacaggcttat

SEQ ID NO: 504512 - DNA, 15 bp, Homo sapiens
catgacaggcttatt

SEQ ID NO: 504513 - DNA, 15 bp, Homo sapiens
atgacaggcttattt

SEQ ID NO: 504514 - DNA, 15 bp, Homo sapiens
tgacaggcttatttc

SEQ ID NO: 504515 - DNA, 15 bp, Homo sapiens
gacaggcttatttca

SEQ ID NO: 504516 - DNA, 15 bp, Homo sapiens
acaggcttatttcac

SEQ ID NO: 504517 - DNA, 15 bp, Homo sapiens
caggcttatttcact

SEQ ID NO: 504518 - DNA, 15 bp, Homo sapiens
aggcttatttcactt

SEQ ID NO: 504519 - DNA, 15 bp, Homo sapiens
ggcttatttcactta

SEQ ID NO: 504520 - DNA, 15 bp, Homo sapiens
gcttatttcacttag

SEQ ID NO: 504521 - DNA, 15 bp, Homo sapiens
cttatttcacttagc

SEQ ID NO: 504522 - DNA, 15 bp, Homo sapiens
ttatttcacttagcg

SEQ ID NO: 504523 - DNA, 15 bp, Homo sapiens
tatttcacttagcgt

SEQ ID NO: 504524 - DNA, 15 bp, Homo sapiens
atttcacttagcgta

SEQ ID NO: 504525 - DNA, 15 bp, Homo sapiens
tttcacttagcgtaa

SEQ ID NO: 504526 - DNA, 15 bp, Homo sapiens
ttcacttagcgtaat

SEQ ID NO: 504527 - DNA, 15 bp, Homo sapiens
tcacttagcgtaatg

SEQ ID NO: 504528 - DNA, 15 bp, Homo sapiens
cacttagcgtaatgt

SEQ ID NO: 504529 - DNA, 15 bp, Homo sapiens
acttagcgtaatgtc

SEQ ID NO: 504530 - DNA, 15 bp, Homo sapiens
cttagcgtaatgtcg

SEQ ID NO: 504531 - DNA, 15 bp, Homo sapiens
ttagcgtaatgtcgt

SEQ ID NO: 504532 - DNA, 15 bp, Homo sapiens
tagcgtaatgtcgtc

SEQ ID NO: 504533 - DNA, 15 bp, Homo sapiens
agcgtaatgtcgtca

SEQ ID NO: 504534 - DNA, 15 bp, Homo sapiens
gcgtaatgtcgtcag

SEQ ID NO: 504535 - DNA, 15 bp, Homo sapiens
cgtaatgtcgtcagg

SEQ ID NO: 504536 - DNA, 15 bp, Homo sapiens
gtaatgtcgtcaggg

SEQ ID NO: 504537 - DNA, 15 bp, Homo sapiens
taatgtcgtcagggt

SEQ ID NO: 504538 - DNA, 15 bp, Homo sapiens
aatgtcgtcagggtt

SEQ ID NO: 504539 - DNA, 15 bp, Homo sapiens
atgtcgtcagggttc

SEQ ID NO: 504540 - DNA, 15 bp, Homo sapiens
tgtcgtcagggttca

SEQ ID NO: 504541 - DNA, 15 bp, Homo sapiens
gtcgtcagggttcat

SEQ ID NO: 504542 - DNA, 15 bp, Homo sapiens
tcgtcagggttcatt

SEQ ID NO: 504543 - DNA, 15 bp, Homo sapiens
cgtcagggttcattt

SEQ ID NO: 504544 - DNA, 15 bp, Homo sapiens
gtcagggttcattta

SEQ ID NO: 504545 - DNA, 15 bp, Homo sapiens
tcagggttcatttat

SEQ ID NO: 504546 - DNA, 15 bp, Homo sapiens
cagggttcatttatc

SEQ ID NO: 504547 - DNA, 15 bp, Homo sapiens
agggttcatttatct

SEQ ID NO: 504548 - DNA, 15 bp, Homo sapiens
gggttcatttatctt

SEQ ID NO: 504549 - DNA, 15 bp, Homo sapiens
ggttcatttatcttg

SEQ ID NO: 504550 - DNA, 15 bp, Homo sapiens
gttcatttatcttgc

SEQ ID NO: 504551 - DNA, 15 bp, Homo sapiens
ttcatttatcttgca

SEQ ID NO: 504552 - DNA, 15 bp, Homo sapiens
tcatttatcttgcaa

SEQ ID NO: 504553 - DNA, 15 bp, Homo sapiens
catttatcttgcaac

SEQ ID NO: 504554 - DNA, 15 bp, Homo sapiens
atttatcttgcaaca

SEQ ID NO: 504555 - DNA, 15 bp, Homo sapiens
tttatcttgcaacat

SEQ ID NO: 504556 - DNA, 15 bp, Homo sapiens
ttatcttgcaacatg

SEQ ID NO: 504557 - DNA, 15 bp, Homo sapiens
tatcttgcaacatgt

SEQ ID NO: 504558 - DNA, 15 bp, Homo sapiens
atcttgcaacatgtc

SEQ ID NO: 504559 - DNA, 15 bp, Homo sapiens
tcttgcaacatgtca

SEQ ID NO: 504560 - DNA, 15 bp, Homo sapiens
cttgcaacatgtcag

SEQ ID NO: 504561 - DNA, 15 bp, Homo sapiens
ttgcaacatgtcaga

SEQ ID NO: 504562 - DNA, 15 bp, Homo sapiens
tgcaacatgtcagaa

SEQ ID NO: 504563 - DNA, 15 bp, Homo sapiens
gcaacatgtcagaat

SEQ ID NO: 504564 - DNA, 15 bp, Homo sapiens
caacatgtcagaatt

SEQ ID NO: 504565 - DNA, 15 bp, Homo sapiens
aacatgtcagaattt

SEQ ID NO: 504566 - DNA, 15 bp, Homo sapiens
acatgtcagaatttc

SEQ ID NO: 504567 - DNA, 15 bp, Homo sapiens
catgtcagaatttcc

SEQ ID NO: 504568 - DNA, 15 bp, Homo sapiens
atgtcagaatttcct

SEQ ID NO: 504569 - DNA, 15 bp, Homo sapiens
tgtcagaatttcctt

SEQ ID NO: 504570 - DNA, 15 bp, Homo sapiens
gtcagaatttccttc

SEQ ID NO: 504571 - DNA, 15 bp, Homo sapiens
tcagaatttccttcc

SEQ ID NO: 504572 - DNA, 15 bp, Homo sapiens
cagaatttccttcct

SEQ ID NO: 504573 - DNA, 15 bp, Homo sapiens
agaatttccttcctt

SEQ ID NO: 504574 - DNA, 15 bp, Homo sapiens
gaatttccttccttt

SEQ ID NO: 504575 - DNA, 15 bp, Homo sapiens
aatttccttcctttt

SEQ ID NO: 504576 - DNA, 15 bp, Homo sapiens
atttccttccttttt

SEQ ID NO: 504577 - DNA, 15 bp, Homo sapiens
tttccttccttttta

SEQ ID NO: 504578 - DNA, 15 bp, Homo sapiens
ttccttcctttttaa

SEQ ID NO: 504579 - DNA, 15 bp, Homo sapiens
tccttcctttttaag

SEQ ID NO: 504580 - DNA, 15 bp, Homo sapiens
ccttcctttttaagg

SEQ ID NO: 504581 - DNA, 15 bp, Homo sapiens
cttcctttttaaggc

SEQ ID NO: 504582 - DNA, 15 bp, Homo sapiens
ttcctttttaaggct

SEQ ID NO: 504583 - DNA, 15 bp, Homo sapiens
tcctttttaaggctg

SEQ ID NO: 504584 - DNA, 15 bp, Homo sapiens
cctttttaaggctga

SEQ ID NO: 504585 - DNA, 15 bp, Homo sapiens
ctttttaaggctgaa

SEQ ID NO: 504586 - DNA, 15 bp, Homo sapiens
tttttaaggctgaag

SEQ ID NO: 504587 - DNA, 15 bp, Homo sapiens
ttttaaggctgaagg

SEQ ID NO: 504588 - DNA, 15 bp, Homo sapiens
tttaaggctgaaggt

SEQ ID NO: 504589 - DNA, 15 bp, Homo sapiens
ttaaggctgaaggtt

SEQ ID NO: 504590 - DNA, 15 bp, Homo sapiens
taaggctgaaggttg

SEQ ID NO: 504591 - DNA, 15 bp, Homo sapiens
aaggctgaaggttgt

SEQ ID NO: 504592 - DNA, 15 bp, Homo sapiens
aggctgaaggttgtt

SEQ ID NO: 504593 - DNA, 15 bp, Homo sapiens
ggctgaaggttgttc

SEQ ID NO: 504594 - DNA, 15 bp, Homo sapiens
gctgaaggttgttcc

SEQ ID NO: 504595 - DNA, 15 bp, Homo sapiens
ctgaaggttgttcca

SEQ ID NO: 504596 - DNA, 15 bp, Homo sapiens
tgaaggttgttccag

SEQ ID NO: 504597 - DNA, 15 bp, Homo sapiens
gaaggttgttccagt

SEQ ID NO: 504598 - DNA, 15 bp, Homo sapiens
aaggttgttccagtg

SEQ ID NO: 504599 - DNA, 15 bp, Homo sapiens
aggttgttccagtgt

SEQ ID NO: 504600 - DNA, 15 bp, Homo sapiens
ggttgttccagtgtg

SEQ ID NO: 504601 - DNA, 15 bp, Homo sapiens
gttgttccagtgtgt

SEQ ID NO: 504602 - DNA, 15 bp, Homo sapiens
ttgttccagtgtgtg

SEQ ID NO: 504603 - DNA, 15 bp, Homo sapiens
tgttccagtgtgtgt

SEQ ID NO: 504604 - DNA, 15 bp, Homo sapiens
gttccagtgtgtgta

SEQ ID NO: 504605 - DNA, 15 bp, Homo sapiens
ttccagtgtgtgtat

SEQ ID NO: 504606 - DNA, 15 bp, Homo sapiens
tccagtgtgtgtata

SEQ ID NO: 504607 - DNA, 15 bp, Homo sapiens
ccagtgtgtgtatat

SEQ ID NO: 504608 - DNA, 15 bp, Homo sapiens
cagtgtgtgtatatc

SEQ ID NO: 504609 - DNA, 15 bp, Homo sapiens
agtgtgtgtatatca

SEQ ID NO: 504610 - DNA, 15 bp, Homo sapiens
gtgtgtgtatatcac

SEQ ID NO: 504611 - DNA, 15 bp, Homo sapiens
tgtgtgtatatcaca

SEQ ID NO: 504612 - DNA, 15 bp, Homo sapiens
gtgtgtatatcacat

SEQ ID NO: 504613 - DNA, 15 bp, Homo sapiens
tgtgtatatcacata

SEQ ID NO: 504614 - DNA, 15 bp, Homo sapiens
gtgtatatcacatac

SEQ ID NO: 504615 - DNA, 15 bp, Homo sapiens
tgtatatcacatact

SEQ ID NO: 504616 - DNA, 15 bp, Homo sapiens
gtatatcacatactt

SEQ ID NO: 504617 - DNA, 15 bp, Homo sapiens
tatatcacatacttc

SEQ ID NO: 504618 - DNA, 15 bp, Homo sapiens
atatcacatacttca

SEQ ID NO: 504619 - DNA, 15 bp, Homo sapiens
tatcacatacttcat

SEQ ID NO: 504620 - DNA, 15 bp, Homo sapiens
atcacatacttcatt

SEQ ID NO: 504621 - DNA, 15 bp, Homo sapiens
tcacatacttcattt

SEQ ID NO: 504622 - DNA, 15 bp, Homo sapiens
cacatacttcattta

SEQ ID NO: 504623 - DNA, 15 bp, Homo sapiens
acatacttcatttat

SEQ ID NO: 504624 - DNA, 15 bp, Homo sapiens
catacttcatttatc

SEQ ID NO: 504625 - DNA, 15 bp, Homo sapiens
atacttcatttatcc

SEQ ID NO: 504626 - DNA, 15 bp, Homo sapiens
tacttcatttatcca

SEQ ID NO: 504627 - DNA, 15 bp, Homo sapiens
acttcatttatccat

SEQ ID NO: 504628 - DNA, 15 bp, Homo sapiens
cttcatttatccatt

SEQ ID NO: 504629 - DNA, 15 bp, Homo sapiens
ttcatttatccattc

SEQ ID NO: 504630 - DNA, 15 bp, Homo sapiens
tcatttatccattca

SEQ ID NO: 504631 - DNA, 15 bp, Homo sapiens
catttatccattcat

SEQ ID NO: 504632 - DNA, 15 bp, Homo sapiens
atttatccattcatc

SEQ ID NO: 504633 - DNA, 15 bp, Homo sapiens
tttatccattcatcc

SEQ ID NO: 504634 - DNA, 15 bp, Homo sapiens
ttatccattcatcca

SEQ ID NO: 504635 - DNA, 15 bp, Homo sapiens
tatccattcatccat

SEQ ID NO: 504636 - DNA, 15 bp, Homo sapiens
atccattcatccatc

SEQ ID NO: 504637 - DNA, 15 bp, Homo sapiens
tccattcatccatca

SEQ ID NO: 504638 - DNA, 15 bp, Homo sapiens
ccattcatccatcag

SEQ ID NO: 504639 - DNA, 15 bp, Homo sapiens
cattcatccatcagg

SEQ ID NO: 504640 - DNA, 15 bp, Homo sapiens
attcatccatcagga

SEQ ID NO: 504641 - DNA, 15 bp, Homo sapiens
ttcatccatcaggag

SEQ ID NO: 504642 - DNA, 15 bp, Homo sapiens
tcatccatcaggaga

SEQ ID NO: 504643 - DNA, 15 bp, Homo sapiens
catccatcaggagat

SEQ ID NO: 504644 - DNA, 15 bp, Homo sapiens
atccatcaggagata

SEQ ID NO: 504645 - DNA, 15 bp, Homo sapiens
tccatcaggagatac

SEQ ID NO: 504646 - DNA, 15 bp, Homo sapiens
ccatcaggagatact

SEQ ID NO: 504647 - DNA, 15 bp, Homo sapiens
catcaggagatactt

SEQ ID NO: 504648 - DNA, 15 bp, Homo sapiens
atcaggagatacttg

SEQ ID NO: 504649 - DNA, 15 bp, Homo sapiens
tcaggagatacttgg

SEQ ID NO: 504650 - DNA, 15 bp, Homo sapiens
caggagatacttggg

SEQ ID NO: 504651 - DNA, 15 bp, Homo sapiens
aggagatacttgggt

SEQ ID NO: 504652 - DNA, 15 bp, Homo sapiens
ggagatacttgggtt

SEQ ID NO: 504653 - DNA, 15 bp, Homo sapiens
gagatacttgggttg

SEQ ID NO: 504654 - DNA, 15 bp, Homo sapiens
agatacttgggttgc

SEQ ID NO: 504655 - DNA, 15 bp, Homo sapiens
gatacttgggttgct

SEQ ID NO: 504656 - DNA, 15 bp, Homo sapiens
atacttgggttgctt

SEQ ID NO: 504657 - DNA, 15 bp, Homo sapiens
tacttgggttgcttc

SEQ ID NO: 504658 - DNA, 15 bp, Homo sapiens
acttgggttgcttcc

SEQ ID NO: 504659 - DNA, 15 bp, Homo sapiens
cttgggttgcttcca

SEQ ID NO: 504660 - DNA, 15 bp, Homo sapiens
ttgggttgcttccac

SEQ ID NO: 504661 - DNA, 15 bp, Homo sapiens
tgggttgcttccact

SEQ ID NO: 504662 - DNA, 15 bp, Homo sapiens
gggttgcttccactt

SEQ ID NO: 504663 - DNA, 15 bp, Homo sapiens
ggttgcttccacttt

SEQ ID NO: 504664 - DNA, 15 bp, Homo sapiens
gttgcttccactttt

SEQ ID NO: 504665 - DNA, 15 bp, Homo sapiens
ttgcttccacttttt

SEQ ID NO: 504666 - DNA, 15 bp, Homo sapiens
tgcttccactttttg

SEQ ID NO: 504667 - DNA, 15 bp, Homo sapiens
gcttccactttttgg

SEQ ID NO: 504668 - DNA, 15 bp, Homo sapiens
cttccactttttggc

SEQ ID NO: 504669 - DNA, 15 bp, Homo sapiens
ttccactttttggct

SEQ ID NO: 504670 - DNA, 15 bp, Homo sapiens
tccactttttggcta

SEQ ID NO: 504671 - DNA, 15 bp, Homo sapiens
ccactttttggctat

SEQ ID NO: 504672 - DNA, 15 bp, Homo sapiens
cactttttggctatt

SEQ ID NO: 504673 - DNA, 15 bp, Homo sapiens
actttttggctattg

SEQ ID NO: 504674 - DNA, 15 bp, Homo sapiens
ctttttggctattgt

SEQ ID NO: 504675 - DNA, 15 bp, Homo sapiens
tttttggctattgtg

SEQ ID NO: 504676 - DNA, 15 bp, Homo sapiens
ttttggctattgtga

SEQ ID NO: 504677 - DNA, 15 bp, Homo sapiens
tttggctattgtgag

SEQ ID NO: 504678 - DNA, 15 bp, Homo sapiens
ttggctattgtgagt

SEQ ID NO: 504679 - DNA, 15 bp, Homo sapiens
tggctattgtgagta

SEQ ID NO: 504680 - DNA, 15 bp, Homo sapiens
ggctattgtgagtag

SEQ ID NO: 504681 - DNA, 15 bp, Homo sapiens
gctattgtgagtagt

SEQ ID NO: 504682 - DNA, 15 bp, Homo sapiens
ctattgtgagtagtg

SEQ ID NO: 504683 - DNA, 15 bp, Homo sapiens
tattgtgagtagtgc

SEQ ID NO: 504684 - DNA, 15 bp, Homo sapiens
attgtgagtagtgct

SEQ ID NO: 504685 - DNA, 15 bp, Homo sapiens
ttgtgagtagtgctg

SEQ ID NO: 504686 - DNA, 15 bp, Homo sapiens
tgtgagtagtgctgc

SEQ ID NO: 504687 - DNA, 15 bp, Homo sapiens
gtgagtagtgctgct

SEQ ID NO: 504688 - DNA, 15 bp, Homo sapiens
tgagtagtgctgcta

SEQ ID NO: 504689 - DNA, 15 bp, Homo sapiens
gagtagtgctgctat

SEQ ID NO: 504690 - DNA, 15 bp, Homo sapiens
agtagtgctgctatg

SEQ ID NO: 504691 - DNA, 15 bp, Homo sapiens
gtagtgctgctatga

SEQ ID NO: 504692 - DNA, 15 bp, Homo sapiens
tagtgctgctatgaa

SEQ ID NO: 504693 - DNA, 15 bp, Homo sapiens
agtgctgctatgaac

SEQ ID NO: 504694 - DNA, 15 bp, Homo sapiens
gtgctgctatgaaca

SEQ ID NO: 504695 - DNA, 15 bp, Homo sapiens
tgctgctatgaacat

SEQ ID NO: 504696 - DNA, 15 bp, Homo sapiens
gctgctatgaacatg

SEQ ID NO: 504697 - DNA, 15 bp, Homo sapiens
ctgctatgaacatgg

SEQ ID NO: 504698 - DNA, 15 bp, Homo sapiens
tgctatgaacatggg

SEQ ID NO: 504699 - DNA, 15 bp, Homo sapiens
gctatgaacatgggt

SEQ ID NO: 504700 - DNA, 15 bp, Homo sapiens
ctatgaacatgggta

SEQ ID NO: 504701 - DNA, 15 bp, Homo sapiens
tatgaacatgggtat

SEQ ID NO: 504702 - DNA, 15 bp, Homo sapiens
atgaacatgggtatg

SEQ ID NO: 504703 - DNA, 15 bp, Homo sapiens
tgaacatgggtatgc

SEQ ID NO: 504704 - DNA, 15 bp, Homo sapiens
gaacatgggtatgca

SEQ ID NO: 504705 - DNA, 15 bp, Homo sapiens
aacatgggtatgcaa

SEQ ID NO: 504706 - DNA, 15 bp, Homo sapiens
acatgggtatgcaaa

SEQ ID NO: 504707 - DNA, 15 bp, Homo sapiens
catgggtatgcaaat

SEQ ID NO: 504708 - DNA, 15 bp, Homo sapiens
atgggtatgcaaata

SEQ ID NO: 504709 - DNA, 15 bp, Homo sapiens
tgggtatgcaaatat

SEQ ID NO: 504710 - DNA, 15 bp, Homo sapiens
gggtatgcaaatatc

SEQ ID NO: 504711 - DNA, 15 bp, Homo sapiens
ggtatgcaaatatct

SEQ ID NO: 504712 - DNA, 15 bp, Homo sapiens
gtatgcaaatatctt

SEQ ID NO: 504713 - DNA, 15 bp, Homo sapiens
tatgcaaatatcttt

SEQ ID NO: 504714 - DNA, 15 bp, Homo sapiens
atgcaaatatctttt

SEQ ID NO: 504715 - DNA, 15 bp, Homo sapiens
tgcaaatatcttttg

SEQ ID NO: 504716 - DNA, 15 bp, Homo sapiens
gcaaatatcttttgg

SEQ ID NO: 504717 - DNA, 15 bp, Homo sapiens
caaatatcttttggg

SEQ ID NO: 504718 - DNA, 15 bp, Homo sapiens
aaatatcttttgggg

SEQ ID NO: 504719 - DNA, 15 bp, Homo sapiens
aatatcttttggggg

SEQ ID NO: 504720 - DNA, 15 bp, Homo sapiens
atatcttttggggga

SEQ ID NO: 504721 - DNA, 15 bp, Homo sapiens
tatcttttgggggat

SEQ ID NO: 504722 - DNA, 15 bp, Homo sapiens
atcttttgggggatt

SEQ ID NO: 504723 - DNA, 15 bp, Homo sapiens
tcttttgggggattc

SEQ ID NO: 504724 - DNA, 15 bp, Homo sapiens
cttttgggggattct

SEQ ID NO: 504725 - DNA, 15 bp, Homo sapiens
ttttgggggattctg

SEQ ID NO: 504726 - DNA, 15 bp, Homo sapiens
tttgggggattctgc

SEQ ID NO: 504727 - DNA, 15 bp, Homo sapiens
ttgggggattctgct

SEQ ID NO: 504728 - DNA, 15 bp, Homo sapiens
tgggggattctgctt

SEQ ID NO: 504729 - DNA, 15 bp, Homo sapiens
gggggattctgcttt

SEQ ID NO: 504730 - DNA, 15 bp, Homo sapiens
ggggattctgctttg

SEQ ID NO: 504731 - DNA, 15 bp, Homo sapiens
gggattctgctttga

SEQ ID NO: 504732 - DNA, 15 bp, Homo sapiens
ggattctgctttgaa

SEQ ID NO: 504733 - DNA, 15 bp, Homo sapiens
gattctgctttgaat

SEQ ID NO: 504734 - DNA, 15 bp, Homo sapiens
attctgctttgaatt

SEQ ID NO: 504735 - DNA, 15 bp, Homo sapiens
ttctgctttgaattt

SEQ ID NO: 504736 - DNA, 15 bp, Homo sapiens
tctgctttgaatttt

SEQ ID NO: 504737 - DNA, 15 bp, Homo sapiens
ctgctttgaattttt

SEQ ID NO: 504738 - DNA, 15 bp, Homo sapiens
tgctttgaatttttt

SEQ ID NO: 504739 - DNA, 15 bp, Homo sapiens
gctttgaattttttt

SEQ ID NO: 504740 - DNA, 15 bp, Homo sapiens
ctttgaatttttttg

SEQ ID NO: 504741 - DNA, 15 bp, Homo sapiens
tttgaatttttttgg

SEQ ID NO: 504742 - DNA, 15 bp, Homo sapiens
ttgaatttttttgga

SEQ ID NO: 504743 - DNA, 15 bp, Homo sapiens
tgaatttttttggat

SEQ ID NO: 504744 - DNA, 15 bp, Homo sapiens
gaatttttttggata

SEQ ID NO: 504745 - DNA, 15 bp, Homo sapiens
aatttttttggatat

SEQ ID NO: 504746 - DNA, 15 bp, Homo sapiens
atttttttggatata

SEQ ID NO: 504747 - DNA, 15 bp, Homo sapiens
tttttttggatatat

SEQ ID NO: 504748 - DNA, 15 bp, Homo sapiens
ttttttggatatata

SEQ ID NO: 504749 - DNA, 15 bp, Homo sapiens
tttttggatatatac

SEQ ID NO: 504750 - DNA, 15 bp, Homo sapiens
ttttggatatatact

SEQ ID NO: 504751 - DNA, 15 bp, Homo sapiens
tttggatatatactt

SEQ ID NO: 504752 - DNA, 15 bp, Homo sapiens
ttggatatatacttg

SEQ ID NO: 504753 - DNA, 15 bp, Homo sapiens
tggatatatacttgg

SEQ ID NO: 504754 - DNA, 15 bp, Homo sapiens
ggatatatacttgga

SEQ ID NO: 504755 - DNA, 15 bp, Homo sapiens
gatatatacttggaa

SEQ ID NO: 504756 - DNA, 15 bp, Homo sapiens
atatatacttggaag

SEQ ID NO: 504757 - DNA, 15 bp, Homo sapiens
tatatacttggaagt

SEQ ID NO: 504758 - DNA, 15 bp, Homo sapiens
atatacttggaagtg

SEQ ID NO: 504759 - DNA, 15 bp, Homo sapiens
tatacttggaagtgg

SEQ ID NO: 504760 - DNA, 15 bp, Homo sapiens
atacttggaagtgga

SEQ ID NO: 504761 - DNA, 15 bp, Homo sapiens
tacttggaagtggaa

SEQ ID NO: 504762 - DNA, 15 bp, Homo sapiens
acttggaagtggaat

SEQ ID NO: 504763 - DNA, 15 bp, Homo sapiens
cttggaagtggaatt

SEQ ID NO: 504764 - DNA, 15 bp, Homo sapiens
ttggaagtggaattg

SEQ ID NO: 504765 - DNA, 15 bp, Homo sapiens
tggaagtggaattgc

SEQ ID NO: 504766 - DNA, 15 bp, Homo sapiens
ggaagtggaattgct

SEQ ID NO: 504767 - DNA, 15 bp, Homo sapiens
gaagtggaattgctg

SEQ ID NO: 504768 - DNA, 15 bp, Homo sapiens
aagtggaattgctgg

SEQ ID NO: 504769 - DNA, 15 bp, Homo sapiens
agtggaattgctgga

SEQ ID NO: 504770 - DNA, 15 bp, Homo sapiens
gtggaattgctggat

SEQ ID NO: 504771 - DNA, 15 bp, Homo sapiens
tggaattgctggatc

SEQ ID NO: 504772 - DNA, 15 bp, Homo sapiens
ggaattgctggatca

SEQ ID NO: 504773 - DNA, 15 bp, Homo sapiens
gaattgctggatcat

SEQ ID NO: 504774 - DNA, 15 bp, Homo sapiens
aattgctggatcata

SEQ ID NO: 504775 - DNA, 15 bp, Homo sapiens
attgctggatcatat

SEQ ID NO: 504776 - DNA, 15 bp, Homo sapiens
ttgctggatcatatg

SEQ ID NO: 504777 - DNA, 15 bp, Homo sapiens
tgctggatcatatgg

SEQ ID NO: 504778 - DNA, 15 bp, Homo sapiens
gctggatcatatggt

SEQ ID NO: 504779 - DNA, 15 bp, Homo sapiens
ctggatcatatggta

SEQ ID NO: 504780 - DNA, 15 bp, Homo sapiens
tggatcatatggtaa

SEQ ID NO: 504781 - DNA, 15 bp, Homo sapiens
ggatcatatggtaat

SEQ ID NO: 504782 - DNA, 15 bp, Homo sapiens
gatcatatggtaatt

SEQ ID NO: 504783 - DNA, 15 bp, Homo sapiens
atcatatggtaattc

SEQ ID NO: 504784 - DNA, 15 bp, Homo sapiens
tcatatggtaattct

SEQ ID NO: 504785 - DNA, 15 bp, Homo sapiens
catatggtaattcta

SEQ ID NO: 504786 - DNA, 15 bp, Homo sapiens
atatggtaattctat

SEQ ID NO: 504787 - DNA, 15 bp, Homo sapiens
tatggtaattctatt

SEQ ID NO: 504788 - DNA, 15 bp, Homo sapiens
atggtaattctattt

SEQ ID NO: 504789 - DNA, 15 bp, Homo sapiens
tggtaattctatttt

SEQ ID NO: 504790 - DNA, 15 bp, Homo sapiens
ggtaattctattttt

SEQ ID NO: 504791 - DNA, 15 bp, Homo sapiens
gtaattctattttta

SEQ ID NO: 504792 - DNA, 15 bp, Homo sapiens
taattctatttttaa

SEQ ID NO: 504793 - DNA, 15 bp, Homo sapiens
aattctatttttaat

SEQ ID NO: 504794 - DNA, 15 bp, Homo sapiens
attctatttttaatt

SEQ ID NO: 504795 - DNA, 15 bp, Homo sapiens
ttctatttttaattt

SEQ ID NO: 504796 - DNA, 15 bp, Homo sapiens
tctatttttaatttt

SEQ ID NO: 504797 - DNA, 15 bp, Homo sapiens
ctatttttaattttt

SEQ ID NO: 504798 - DNA, 15 bp, Homo sapiens
tatttttaatttttt

SEQ ID NO: 504799 - DNA, 15 bp, Homo sapiens
atttttaattttttg

SEQ ID NO: 504800 - DNA, 15 bp, Homo sapiens
tttttaattttttgg

SEQ ID NO: 504801 - DNA, 15 bp, Homo sapiens
ttttaattttttggg

SEQ ID NO: 504802 - DNA, 15 bp, Homo sapiens
tttaattttttgggg

SEQ ID NO: 504803 - DNA, 15 bp, Homo sapiens
ttaattttttgggga

SEQ ID NO: 504804 - DNA, 15 bp, Homo sapiens
taattttttggggaa

SEQ ID NO: 504805 - DNA, 15 bp, Homo sapiens
aattttttggggaac

SEQ ID NO: 504806 - DNA, 15 bp, Homo sapiens
attttttggggaacc

SEQ ID NO: 504807 - DNA, 15 bp, Homo sapiens
ttttttggggaacca

SEQ ID NO: 504808 - DNA, 15 bp, Homo sapiens
tttttggggaaccat

SEQ ID NO: 504809 - DNA, 15 bp, Homo sapiens
ttttggggaaccatc

SEQ ID NO: 504810 - DNA, 15 bp, Homo sapiens
tttggggaaccatca

SEQ ID NO: 504811 - DNA, 15 bp, Homo sapiens
ttggggaaccatcat

SEQ ID NO: 504812 - DNA, 15 bp, Homo sapiens
tggggaaccatcatg

SEQ ID NO: 504813 - DNA, 15 bp, Homo sapiens
ggggaaccatcatgc

SEQ ID NO: 504814 - DNA, 15 bp, Homo sapiens
gggaaccatcatgct

SEQ ID NO: 504815 - DNA, 15 bp, Homo sapiens
ggaaccatcatgctg

SEQ ID NO: 504816 - DNA, 15 bp, Homo sapiens
gaaccatcatgctgt

SEQ ID NO: 504817 - DNA, 15 bp, Homo sapiens
aaccatcatgctgtt

SEQ ID NO: 504818 - DNA, 15 bp, Homo sapiens
accatcatgctgttc

SEQ ID NO: 504819 - DNA, 15 bp, Homo sapiens
ccatcatgctgttct

SEQ ID NO: 504820 - DNA, 15 bp, Homo sapiens
catcatgctgttctc

SEQ ID NO: 504821 - DNA, 15 bp, Homo sapiens
atcatgctgttctcc

SEQ ID NO: 504822 - DNA, 15 bp, Homo sapiens
tcatgctgttctcca

SEQ ID NO: 504823 - DNA, 15 bp, Homo sapiens
catgctgttctccat

SEQ ID NO: 504824 - DNA, 15 bp, Homo sapiens
atgctgttctccata

SEQ ID NO: 504825 - DNA, 15 bp, Homo sapiens
tgctgttctccatag

SEQ ID NO: 504826 - DNA, 15 bp, Homo sapiens
gctgttctccataga

SEQ ID NO: 504827 - DNA, 15 bp, Homo sapiens
ctgttctccatagag

SEQ ID NO: 504828 - DNA, 15 bp, Homo sapiens
tgttctccatagagg

SEQ ID NO: 504829 - DNA, 15 bp, Homo sapiens
gttctccatagaggc

SEQ ID NO: 504830 - DNA, 15 bp, Homo sapiens
ttctccatagaggct

SEQ ID NO: 504831 - DNA, 15 bp, Homo sapiens
tctccatagaggctg

SEQ ID NO: 504832 - DNA, 15 bp, Homo sapiens
ctccatagaggctgt

SEQ ID NO: 504833 - DNA, 15 bp, Homo sapiens
tccatagaggctgtg

SEQ ID NO: 504834 - DNA, 15 bp, Homo sapiens
ccatagaggctgtgc

SEQ ID NO: 504835 - DNA, 15 bp, Homo sapiens
catagaggctgtgcc

SEQ ID NO: 504836 - DNA, 15 bp, Homo sapiens
atagaggctgtgcca

SEQ ID NO: 504837 - DNA, 15 bp, Homo sapiens
tagaggctgtgccat

SEQ ID NO: 504838 - DNA, 15 bp, Homo sapiens
agaggctgtgccatt

SEQ ID NO: 504839 - DNA, 15 bp, Homo sapiens
gaggctgtgccattt

SEQ ID NO: 504840 - DNA, 15 bp, Homo sapiens
aggctgtgccatttt

SEQ ID NO: 504841 - DNA, 15 bp, Homo sapiens
ggctgtgccatttta

SEQ ID NO: 504842 - DNA, 15 bp, Homo sapiens
gctgtgccattttac

SEQ ID NO: 504843 - DNA, 15 bp, Homo sapiens
ctgtgccattttaca

SEQ ID NO: 504844 - DNA, 15 bp, Homo sapiens
tgtgccattttacat

SEQ ID NO: 504845 - DNA, 15 bp, Homo sapiens
gtgccattttacatt

SEQ ID NO: 504846 - DNA, 15 bp, Homo sapiens
tgccattttacattc

SEQ ID NO: 504847 - DNA, 15 bp, Homo sapiens
gccattttacattcc

SEQ ID NO: 504848 - DNA, 15 bp, Homo sapiens
ccattttacattccc

SEQ ID NO: 504849 - DNA, 15 bp, Homo sapiens
cattttacattccca

SEQ ID NO: 504850 - DNA, 15 bp, Homo sapiens
attttacattcccac

SEQ ID NO: 504851 - DNA, 15 bp, Homo sapiens
ttttacattcccacc

SEQ ID NO: 504852 - DNA, 15 bp, Homo sapiens
tttacattcccacca

SEQ ID NO: 504853 - DNA, 15 bp, Homo sapiens
ttacattcccaccaa

SEQ ID NO: 504854 - DNA, 15 bp, Homo sapiens
tacattcccaccaac

SEQ ID NO: 504855 - DNA, 15 bp, Homo sapiens
acattcccaccaaca

SEQ ID NO: 504856 - DNA, 15 bp, Homo sapiens
cattcccaccaacag

SEQ ID NO: 504857 - DNA, 15 bp, Homo sapiens
attcccaccaacagg

SEQ ID NO: 504858 - DNA, 15 bp, Homo sapiens
ttcccaccaacaggg

SEQ ID NO: 504859 - DNA, 15 bp, Homo sapiens
tcccaccaacagggc

SEQ ID NO: 504860 - DNA, 15 bp, Homo sapiens
cccaccaacagggca

SEQ ID NO: 504861 - DNA, 15 bp, Homo sapiens
ccaccaacagggcac

SEQ ID NO: 504862 - DNA, 15 bp, Homo sapiens
caccaacagggcaca

SEQ ID NO: 504863 - DNA, 15 bp, Homo sapiens
accaacagggcacaa

SEQ ID NO: 504864 - DNA, 15 bp, Homo sapiens
ccaacagggcacaag

SEQ ID NO: 504865 - DNA, 15 bp, Homo sapiens
caacagggcacaagg

SEQ ID NO: 504866 - DNA, 15 bp, Homo sapiens
aacagggcacaaggg

SEQ ID NO: 504867 - DNA, 15 bp, Homo sapiens
acagggcacaagggt

SEQ ID NO: 504868 - DNA, 15 bp, Homo sapiens
cagggcacaagggtt

SEQ ID NO: 504869 - DNA, 15 bp, Homo sapiens
agggcacaagggttc

SEQ ID NO: 504870 - DNA, 15 bp, Homo sapiens
gggcacaagggttcc

SEQ ID NO: 504871 - DNA, 15 bp, Homo sapiens
ggcacaagggttcca

SEQ ID NO: 504872 - DNA, 15 bp, Homo sapiens
gcacaagggttccag

SEQ ID NO: 504873 - DNA, 15 bp, Homo sapiens
cacaagggttccagt

SEQ ID NO: 504874 - DNA, 15 bp, Homo sapiens
acaagggttccagtt

SEQ ID NO: 504875 - DNA, 15 bp, Homo sapiens
caagggttccagttt

SEQ ID NO: 504876 - DNA, 15 bp, Homo sapiens
aagggttccagtttc

SEQ ID NO: 504877 - DNA, 15 bp, Homo sapiens
agggttccagtttct

SEQ ID NO: 504878 - DNA, 15 bp, Homo sapiens
gggttccagtttctc

SEQ ID NO: 504879 - DNA, 15 bp, Homo sapiens
ggttccagtttctcc

SEQ ID NO: 504880 - DNA, 15 bp, Homo sapiens
gttccagtttctcca

SEQ ID NO: 504881 - DNA, 15 bp, Homo sapiens
ttccagtttctccac

SEQ ID NO: 504882 - DNA, 15 bp, Homo sapiens
tccagtttctccaca

SEQ ID NO: 504883 - DNA, 15 bp, Homo sapiens
ccagtttctccacat

SEQ ID NO: 504884 - DNA, 15 bp, Homo sapiens
cagtttctccacata

SEQ ID NO: 504885 - DNA, 15 bp, Homo sapiens
agtttctccacatac

SEQ ID NO: 504886 - DNA, 15 bp, Homo sapiens
gtttctccacatact

SEQ ID NO: 504887 - DNA, 15 bp, Homo sapiens
tttctccacatactt

SEQ ID NO: 504888 - DNA, 15 bp, Homo sapiens
ttctccacatactta

SEQ ID NO: 504889 - DNA, 15 bp, Homo sapiens
tctccacatacttac

SEQ ID NO: 504890 - DNA, 15 bp, Homo sapiens
ctccacatacttacc

SEQ ID NO: 504891 - DNA, 15 bp, Homo sapiens
tccacatacttacca

SEQ ID NO: 504892 - DNA, 15 bp, Homo sapiens
ccacatacttaccaa

SEQ ID NO: 504893 - DNA, 15 bp, Homo sapiens
cacatacttaccaac

SEQ ID NO: 504894 - DNA, 15 bp, Homo sapiens
acatacttaccaaca

SEQ ID NO: 504895 - DNA, 15 bp, Homo sapiens
catacttaccaacac

SEQ ID NO: 504896 - DNA, 15 bp, Homo sapiens
atacttaccaacact

SEQ ID NO: 504897 - DNA, 15 bp, Homo sapiens
tacttaccaacactt

SEQ ID NO: 504898 - DNA, 15 bp, Homo sapiens
acttaccaacacttt

SEQ ID NO: 504899 - DNA, 15 bp, Homo sapiens
cttaccaacactttt

SEQ ID NO: 504900 - DNA, 15 bp, Homo sapiens
ttaccaacacttttt

SEQ ID NO: 504901 - DNA, 15 bp, Homo sapiens
taccaacactttttt

SEQ ID NO: 504902 - DNA, 15 bp, Homo sapiens
accaacacttttttt

SEQ ID NO: 504903 - DNA, 15 bp, Homo sapiens
ccaacactttttttt

SEQ ID NO: 504904 - DNA, 15 bp, Homo sapiens
caacacttttttttt

SEQ ID NO: 504905 - DNA, 15 bp, Homo sapiens
aacactttttttttt

SEQ ID NO: 504906 - DNA, 15 bp, Homo sapiens
acacttttttttttt

SEQ ID NO: 504907 - DNA, 15 bp, Homo sapiens
cactttttttttttt

SEQ ID NO: 504908 - DNA, 15 bp, Homo sapiens
tttttttttttttta

SEQ ID NO: 504909 - DNA, 15 bp, Homo sapiens
tttttttttttttaa

SEQ ID NO: 504910 - DNA, 15 bp, Homo sapiens
ttttttttttttaac

SEQ ID NO: 504911 - DNA, 15 bp, Homo sapiens
tttttttttttaaca

SEQ ID NO: 504912 - DNA, 15 bp, Homo sapiens
ttttttttttaacag

SEQ ID NO: 504913 - DNA, 15 bp, Homo sapiens
tttttttttaacagt

SEQ ID NO: 504914 - DNA, 15 bp, Homo sapiens
ttttttttaacagta

SEQ ID NO: 504915 - DNA, 15 bp, Homo sapiens
tttttttaacagtag

SEQ ID NO: 504916 - DNA, 15 bp, Homo sapiens
ttttttaacagtagt

SEQ ID NO: 504917 - DNA, 15 bp, Homo sapiens
tttttaacagtagtc

SEQ ID NO: 504918 - DNA, 15 bp, Homo sapiens
ttttaacagtagtca

SEQ ID NO: 504919 - DNA, 15 bp, Homo sapiens
tttaacagtagtcat

SEQ ID NO: 504920 - DNA, 15 bp, Homo sapiens
ttaacagtagtcatc

SEQ ID NO: 504921 - DNA, 15 bp, Homo sapiens
taacagtagtcatcc

SEQ ID NO: 504922 - DNA, 15 bp, Homo sapiens
aacagtagtcatcct

SEQ ID NO: 504923 - DNA, 15 bp, Homo sapiens
acagtagtcatccta

SEQ ID NO: 504924 - DNA, 15 bp, Homo sapiens
cagtagtcatcctag

SEQ ID NO: 504925 - DNA, 15 bp, Homo sapiens
agtagtcatcctaga

SEQ ID NO: 504926 - DNA, 15 bp, Homo sapiens
gtagtcatcctagag

SEQ ID NO: 504927 - DNA, 15 bp, Homo sapiens
tagtcatcctagagg

SEQ ID NO: 504928 - DNA, 15 bp, Homo sapiens
agtcatcctagagga

SEQ ID NO: 504929 - DNA, 15 bp, Homo sapiens
gtcatcctagaggat

SEQ ID NO: 504930 - DNA, 15 bp, Homo sapiens
tcatcctagaggata

SEQ ID NO: 504931 - DNA, 15 bp, Homo sapiens
catcctagaggatat

SEQ ID NO: 504932 - DNA, 15 bp, Homo sapiens
atcctagaggatata

SEQ ID NO: 504933 - DNA, 15 bp, Homo sapiens
tcctagaggatatag

SEQ ID NO: 504934 - DNA, 15 bp, Homo sapiens
cctagaggatatagg

SEQ ID NO: 504935 - DNA, 15 bp, Homo sapiens
ctagaggatataggt

SEQ ID NO: 504936 - DNA, 15 bp, Homo sapiens
tagaggatataggtg

SEQ ID NO: 504937 - DNA, 15 bp, Homo sapiens
agaggatataggtga

SEQ ID NO: 504938 - DNA, 15 bp, Homo sapiens
gaggatataggtgat

SEQ ID NO: 504939 - DNA, 15 bp, Homo sapiens
aggatataggtgatc

SEQ ID NO: 504940 - DNA, 15 bp, Homo sapiens
ggatataggtgatct

SEQ ID NO: 504941 - DNA, 15 bp, Homo sapiens
gatataggtgatctt

SEQ ID NO: 504942 - DNA, 15 bp, Homo sapiens
atataggtgatcttt

SEQ ID NO: 504943 - DNA, 15 bp, Homo sapiens
tataggtgatctttc

SEQ ID NO: 504944 - DNA, 15 bp, Homo sapiens
ataggtgatctttca

SEQ ID NO: 504945 - DNA, 15 bp, Homo sapiens
taggtgatctttcac

SEQ ID NO: 504946 - DNA, 15 bp, Homo sapiens
aggtgatctttcact

SEQ ID NO: 504947 - DNA, 15 bp, Homo sapiens
ggtgatctttcactg

SEQ ID NO: 504948 - DNA, 15 bp, Homo sapiens
gtgatctttcactgt

SEQ ID NO: 504949 - DNA, 15 bp, Homo sapiens
tgatctttcactgtg

SEQ ID NO: 504950 - DNA, 15 bp, Homo sapiens
gatctttcactgtgc

SEQ ID NO: 504951 - DNA, 15 bp, Homo sapiens
atctttcactgtgct

SEQ ID NO: 504952 - DNA, 15 bp, Homo sapiens
tctttcactgtgctt

SEQ ID NO: 504953 - DNA, 15 bp, Homo sapiens
ctttcactgtgcttt

SEQ ID NO: 504954 - DNA, 15 bp, Homo sapiens
tttcactgtgctttg

SEQ ID NO: 504955 - DNA, 15 bp, Homo sapiens
ttcactgtgctttgg

SEQ ID NO: 504956 - DNA, 15 bp, Homo sapiens
tcactgtgctttgga

SEQ ID NO: 504957 - DNA, 15 bp, Homo sapiens
cactgtgctttggat

SEQ ID NO: 504958 - DNA, 15 bp, Homo sapiens
actgtgctttggatt

SEQ ID NO: 504959 - DNA, 15 bp, Homo sapiens
ctgtgctttggattt

SEQ ID NO: 504960 - DNA, 15 bp, Homo sapiens
tgtgctttggattta

SEQ ID NO: 504961 - DNA, 15 bp, Homo sapiens
gtgctttggatttat

SEQ ID NO: 504962 - DNA, 15 bp, Homo sapiens
tgctttggatttata

SEQ ID NO: 504963 - DNA, 15 bp, Homo sapiens
gctttggatttatat

SEQ ID NO: 504964 - DNA, 15 bp, Homo sapiens
ctttggatttatatt

SEQ ID NO: 504965 - DNA, 15 bp, Homo sapiens
tttggatttatattt

SEQ ID NO: 504966 - DNA, 15 bp, Homo sapiens
ttggatttatattta

SEQ ID NO: 504967 - DNA, 15 bp, Homo sapiens
tggatttatatttac

SEQ ID NO: 504968 - DNA, 15 bp, Homo sapiens
ggatttatatttact

SEQ ID NO: 504969 - DNA, 15 bp, Homo sapiens
gatttatatttactg

SEQ ID NO: 504970 - DNA, 15 bp, Homo sapiens
atttatatttactgg

SEQ ID NO: 504971 - DNA, 15 bp, Homo sapiens
tttatatttactggc

SEQ ID NO: 504972 - DNA, 15 bp, Homo sapiens
ttatatttactggct

SEQ ID NO: 504973 - DNA, 15 bp, Homo sapiens
tatatttactggctt

SEQ ID NO: 504974 - DNA, 15 bp, Homo sapiens
atatttactggctta

SEQ ID NO: 504975 - DNA, 15 bp, Homo sapiens
tatttactggcttag

SEQ ID NO: 504976 - DNA, 15 bp, Homo sapiens
atttactggcttaga

SEQ ID NO: 504977 - DNA, 15 bp, Homo sapiens
tttactggcttagat

SEQ ID NO: 504978 - DNA, 15 bp, Homo sapiens
ttactggcttagatt

SEQ ID NO: 504979 - DNA, 15 bp, Homo sapiens
tactggcttagattt

SEQ ID NO: 504980 - DNA, 15 bp, Homo sapiens
actggcttagatttg

SEQ ID NO: 504981 - DNA, 15 bp, Homo sapiens
ctggcttagatttgt

SEQ ID NO: 504982 - DNA, 15 bp, Homo sapiens
tggcttagatttgta

SEQ ID NO: 504983 - DNA, 15 bp, Homo sapiens
ggcttagatttgtat

SEQ ID NO: 504984 - DNA, 15 bp, Homo sapiens
gcttagatttgtatg

SEQ ID NO: 504985 - DNA, 15 bp, Homo sapiens
cttagatttgtatgg

SEQ ID NO: 504986 - DNA, 15 bp, Homo sapiens
ttagatttgtatggc

SEQ ID NO: 504987 - DNA, 15 bp, Homo sapiens
tagatttgtatggcc

SEQ ID NO: 504988 - DNA, 15 bp, Homo sapiens
agatttgtatggcca

SEQ ID NO: 504989 - DNA, 15 bp, Homo sapiens
gatttgtatggccac

SEQ ID NO: 504990 - DNA, 15 bp, Homo sapiens
atttgtatggccacc

SEQ ID NO: 504991 - DNA, 15 bp, Homo sapiens
tttgtatggccacca

SEQ ID NO: 504992 - DNA, 15 bp, Homo sapiens
ttgtatggccaccac

SEQ ID NO: 504993 - DNA, 15 bp, Homo sapiens
tgtatggccaccacc

SEQ ID NO: 504994 - DNA, 15 bp, Homo sapiens
gtatggccaccacca

SEQ ID NO: 504995 - DNA, 15 bp, Homo sapiens
tatggccaccaccat

SEQ ID NO: 504996 - DNA, 15 bp, Homo sapiens
atggccaccaccata

SEQ ID NO: 504997 - DNA, 15 bp, Homo sapiens
tggccaccaccatag

SEQ ID NO: 504998 - DNA, 15 bp, Homo sapiens
ggccaccaccatagt

SEQ ID NO: 504999 - DNA, 15 bp, Homo sapiens
gccaccaccatagtc

SEQ ID NO: 505000 - DNA, 15 bp, Homo sapiens
ccaccaccatagtca

SEQ ID NO: 505001 - DNA, 15 bp, Homo sapiens
caccaccatagtcaa

SEQ ID NO: 505002 - DNA, 15 bp, Homo sapiens
accaccatagtcaag

SEQ ID NO: 505003 - DNA, 15 bp, Homo sapiens
ccaccatagtcaaga

SEQ ID NO: 505004 - DNA, 15 bp, Homo sapiens
caccatagtcaagat

SEQ ID NO: 505005 - DNA, 15 bp, Homo sapiens
accatagtcaagata

SEQ ID NO: 505006 - DNA, 15 bp, Homo sapiens
ccatagtcaagatac

SEQ ID NO: 505007 - DNA, 15 bp, Homo sapiens
catagtcaagataca

SEQ ID NO: 505008 - DNA, 15 bp, Homo sapiens
atagtcaagatacag

SEQ ID NO: 505009 - DNA, 15 bp, Homo sapiens
tagtcaagatacaga

SEQ ID NO: 505010 - DNA, 15 bp, Homo sapiens
agtcaagatacagaa

SEQ ID NO: 505011 - DNA, 15 bp, Homo sapiens
gtcaagatacagaac

SEQ ID NO: 505012 - DNA, 15 bp, Homo sapiens
tcaagatacagaaca

SEQ ID NO: 505013 - DNA, 15 bp, Homo sapiens
caagatacagaacaa

SEQ ID NO: 505014 - DNA, 15 bp, Homo sapiens
aagatacagaacaac

SEQ ID NO: 505015 - DNA, 15 bp, Homo sapiens
agatacagaacaact

SEQ ID NO: 505016 - DNA, 15 bp, Homo sapiens
gatacagaacaactc

SEQ ID NO: 505017 - DNA, 15 bp, Homo sapiens
atacagaacaactca

SEQ ID NO: 505018 - DNA, 15 bp, Homo sapiens
tacagaacaactcaa

SEQ ID NO: 505019 - DNA, 15 bp, Homo sapiens
acagaacaactcaac

SEQ ID NO: 505020 - DNA, 15 bp, Homo sapiens
cagaacaactcaacc

SEQ ID NO: 505021 - DNA, 15 bp, Homo sapiens
agaacaactcaacca

SEQ ID NO: 505022 - DNA, 15 bp, Homo sapiens
gaacaactcaaccac

SEQ ID NO: 505023 - DNA, 15 bp, Homo sapiens
aacaactcaaccaca

SEQ ID NO: 505024 - DNA, 15 bp, Homo sapiens
acaactcaaccacaa

SEQ ID NO: 505025 - DNA, 15 bp, Homo sapiens
caactcaaccacaag

SEQ ID NO: 505026 - DNA, 15 bp, Homo sapiens
aactcaaccacaagg

SEQ ID NO: 505027 - DNA, 15 bp, Homo sapiens
actcaaccacaagga

SEQ ID NO: 505028 - DNA, 15 bp, Homo sapiens
ctcaaccacaaggat

SEQ ID NO: 505029 - DNA, 15 bp, Homo sapiens
tcaaccacaaggatt

SEQ ID NO: 505030 - DNA, 15 bp, Homo sapiens
caaccacaaggattt

SEQ ID NO: 505031 - DNA, 15 bp, Homo sapiens
aaccacaaggatttc

SEQ ID NO: 505032 - DNA, 15 bp, Homo sapiens
accacaaggatttct

SEQ ID NO: 505033 - DNA, 15 bp, Homo sapiens
ccacaaggatttctc

SEQ ID NO: 505034 - DNA, 15 bp, Homo sapiens
cacaaggatttctca

SEQ ID NO: 505035 - DNA, 15 bp, Homo sapiens
acaaggatttctcat

SEQ ID NO: 505036 - DNA, 15 bp, Homo sapiens
caaggatttctcatg

SEQ ID NO: 505037 - DNA, 15 bp, Homo sapiens
aaggatttctcatga

SEQ ID NO: 505038 - DNA, 15 bp, Homo sapiens
aggatttctcatgat

SEQ ID NO: 505039 - DNA, 15 bp, Homo sapiens
ggatttctcatgata

SEQ ID NO: 505040 - DNA, 15 bp, Homo sapiens
gatttctcatgatac

SEQ ID NO: 505041 - DNA, 15 bp, Homo sapiens
atttctcatgatacc

SEQ ID NO: 505042 - DNA, 15 bp, Homo sapiens
tttctcatgatacct

SEQ ID NO: 505043 - DNA, 15 bp, Homo sapiens
ttctcatgatacctt

SEQ ID NO: 505044 - DNA, 15 bp, Homo sapiens
tctcatgataccttt

SEQ ID NO: 505045 - DNA, 15 bp, Homo sapiens
ctcatgatacctttt

SEQ ID NO: 505046 - DNA, 15 bp, Homo sapiens
tcatgataccttttt

SEQ ID NO: 505047 - DNA, 15 bp, Homo sapiens
catgataccttttta

SEQ ID NO: 505048 - DNA, 15 bp, Homo sapiens
atgatacctttttat

SEQ ID NO: 505049 - DNA, 15 bp, Homo sapiens
tgatacctttttata

SEQ ID NO: 505050 - DNA, 15 bp, Homo sapiens
gatacctttttatag

SEQ ID NO: 505051 - DNA, 15 bp, Homo sapiens
atacctttttatagc

SEQ ID NO: 505052 - DNA, 15 bp, Homo sapiens
tacctttttatagcc

SEQ ID NO: 505053 - DNA, 15 bp, Homo sapiens
acctttttatagcca

SEQ ID NO: 505054 - DNA, 15 bp, Homo sapiens
cctttttatagccac

SEQ ID NO: 505055 - DNA, 15 bp, Homo sapiens
ctttttatagccaca

SEQ ID NO: 505056 - DNA, 15 bp, Homo sapiens
tttttatagccacag

SEQ ID NO: 505057 - DNA, 15 bp, Homo sapiens
ttttatagccacagc

SEQ ID NO: 505058 - DNA, 15 bp, Homo sapiens
tttatagccacagcc

SEQ ID NO: 505059 - DNA, 15 bp, Homo sapiens
ttatagccacagcca

SEQ ID NO: 505060 - DNA, 15 bp, Homo sapiens
tatagccacagccac

SEQ ID NO: 505061 - DNA, 15 bp, Homo sapiens
atagccacagccacc

SEQ ID NO: 505062 - DNA, 15 bp, Homo sapiens
tagccacagccacct

SEQ ID NO: 505063 - DNA, 15 bp, Homo sapiens
agccacagccacctc

SEQ ID NO: 505064 - DNA, 15 bp, Homo sapiens
gccacagccacctct

SEQ ID NO: 505065 - DNA, 15 bp, Homo sapiens
ccacagccacctctc

SEQ ID NO: 505066 - DNA, 15 bp, Homo sapiens
cacagccacctctct

SEQ ID NO: 505067 - DNA, 15 bp, Homo sapiens
acagccacctctctc

SEQ ID NO: 505068 - DNA, 15 bp, Homo sapiens
cagccacctctctcc

SEQ ID NO: 505069 - DNA, 15 bp, Homo sapiens
agccacctctctccc

SEQ ID NO: 505070 - DNA, 15 bp, Homo sapiens
gccacctctctccct

SEQ ID NO: 505071 - DNA, 15 bp, Homo sapiens
ccacctctctccctc

SEQ ID NO: 505072 - DNA, 15 bp, Homo sapiens
cacctctctccctct

SEQ ID NO: 505073 - DNA, 15 bp, Homo sapiens
acctctctccctctt

SEQ ID NO: 505074 - DNA, 15 bp, Homo sapiens
cctctctccctcttc

SEQ ID NO: 505075 - DNA, 15 bp, Homo sapiens
ctctctccctcttcc

SEQ ID NO: 505076 - DNA, 15 bp, Homo sapiens
tctctccctcttcct

SEQ ID NO: 505077 - DNA, 15 bp, Homo sapiens
ctctccctcttcctt

SEQ ID NO: 505078 - DNA, 15 bp, Homo sapiens
tctccctcttccttg

SEQ ID NO: 505079 - DNA, 15 bp, Homo sapiens
ctccctcttccttga

SEQ ID NO: 505080 - DNA, 15 bp, Homo sapiens
tccctcttccttgag

SEQ ID NO: 505081 - DNA, 15 bp, Homo sapiens
ccctcttccttgagc

SEQ ID NO: 505082 - DNA, 15 bp, Homo sapiens
cctcttccttgagca

SEQ ID NO: 505083 - DNA, 15 bp, Homo sapiens
ctcttccttgagcat

SEQ ID NO: 505084 - DNA, 15 bp, Homo sapiens
tcttccttgagcatt

SEQ ID NO: 505085 - DNA, 15 bp, Homo sapiens
cttccttgagcattt

SEQ ID NO: 505086 - DNA, 15 bp, Homo sapiens
ttccttgagcatttt

SEQ ID NO: 505087 - DNA, 15 bp, Homo sapiens
tccttgagcattttg

SEQ ID NO: 505088 - DNA, 15 bp, Homo sapiens
ccttgagcattttgt

SEQ ID NO: 505089 - DNA, 15 bp, Homo sapiens
cttgagcattttgtc

SEQ ID NO: 505090 - DNA, 15 bp, Homo sapiens
ttgagcattttgtca

SEQ ID NO: 505091 - DNA, 15 bp, Homo sapiens
tgagcattttgtcat

SEQ ID NO: 505092 - DNA, 15 bp, Homo sapiens
gagcattttgtcata

SEQ ID NO: 505093 - DNA, 15 bp, Homo sapiens
agcattttgtcatat

SEQ ID NO: 505094 - DNA, 15 bp, Homo sapiens
gcattttgtcatatg

SEQ ID NO: 505095 - DNA, 15 bp, Homo sapiens
cattttgtcatatgg

SEQ ID NO: 505096 - DNA, 15 bp, Homo sapiens
attttgtcatatggt

SEQ ID NO: 505097 - DNA, 15 bp, Homo sapiens
ttttgtcatatggtc

SEQ ID NO: 505098 - DNA, 15 bp, Homo sapiens
tttgtcatatggtca

SEQ ID NO: 505099 - DNA, 15 bp, Homo sapiens
ttgtcatatggtcat

SEQ ID NO: 505100 - DNA, 15 bp, Homo sapiens
tgtcatatggtcatt

SEQ ID NO: 505101 - DNA, 15 bp, Homo sapiens
gtcatatggtcattg

SEQ ID NO: 505102 - DNA, 15 bp, Homo sapiens
tcatatggtcattgg

SEQ ID NO: 505103 - DNA, 15 bp, Homo sapiens
catatggtcattggt

SEQ ID NO: 505104 - DNA, 15 bp, Homo sapiens
atatggtcattggtg

SEQ ID NO: 505105 - DNA, 15 bp, Homo sapiens
tatggtcattggtga

SEQ ID NO: 505106 - DNA, 15 bp, Homo sapiens
atggtcattggtgat

SEQ ID NO: 505107 - DNA, 15 bp, Homo sapiens
tggtcattggtgatt

SEQ ID NO: 505108 - DNA, 15 bp, Homo sapiens
ggtcattggtgatta

SEQ ID NO: 505109 - DNA, 15 bp, Homo sapiens
gtcattggtgattaa

SEQ ID NO: 505110 - DNA, 15 bp, Homo sapiens
tcattggtgattaaa

SEQ ID NO: 505111 - DNA, 15 bp, Homo sapiens
cattggtgattaaat

SEQ ID NO: 505112 - DNA, 15 bp, Homo sapiens
attggtgattaaata

SEQ ID NO: 505113 - DNA, 15 bp, Homo sapiens
ttggtgattaaataa

SEQ ID NO: 505114 - DNA, 15 bp, Homo sapiens
tggtgattaaataaa

SEQ ID NO: 505115 - DNA, 15 bp, Homo sapiens
ggtgattaaataaaa

SEQ ID NO: 505116 - DNA, 15 bp, Homo sapiens
gtgattaaataaaat

SEQ ID NO: 505117 - DNA, 15 bp, Homo sapiens
tgattaaataaaatg

SEQ ID NO: 505118 - DNA, 15 bp, Homo sapiens
gattaaataaaatgt

SEQ ID NO: 505119 - DNA, 15 bp, Homo sapiens
attaaataaaatgta

SEQ ID NO: 505120 - DNA, 15 bp, Homo sapiens
ttaaataaaatgtat

SEQ ID NO: 505121 - DNA, 15 bp, Homo sapiens
taaataaaatgtatt

SEQ ID NO: 505122 - DNA, 15 bp, Homo sapiens
aaataaaatgtattt

SEQ ID NO: 505123 - DNA, 15 bp, Homo sapiens
aataaaatgtatttt

SEQ ID NO: 505124 - DNA, 15 bp, Homo sapiens
ataaaatgtatttta

SEQ ID NO: 505125 - DNA, 15 bp, Homo sapiens
taaaatgtattttaa

SEQ ID NO: 505126 - DNA, 15 bp, Homo sapiens
aaaatgtattttaat

SEQ ID NO: 505127 - DNA, 15 bp, Homo sapiens
aaatgtattttaata

SEQ ID NO: 505128 - DNA, 15 bp, Homo sapiens
aatgtattttaatat

SEQ ID NO: 505129 - DNA, 15 bp, Homo sapiens
atgtattttaatatt

SEQ ID NO: 505130 - DNA, 15 bp, Homo sapiens
tgtattttaatattg

SEQ ID NO: 505131 - DNA, 15 bp, Homo sapiens
gtattttaatattga

SEQ ID NO: 505132 - DNA, 15 bp, Homo sapiens
tattttaatattgac

SEQ ID NO: 505133 - DNA, 15 bp, Homo sapiens
attttaatattgact

SEQ ID NO: 505134 - DNA, 15 bp, Homo sapiens
ttttaatattgactt

SEQ ID NO: 505135 - DNA, 15 bp, Homo sapiens
tttaatattgacttt

SEQ ID NO: 505136 - DNA, 15 bp, Homo sapiens
ttaatattgactttc

SEQ ID NO: 505137 - DNA, 15 bp, Homo sapiens
taatattgactttct

SEQ ID NO: 505138 - DNA, 15 bp, Homo sapiens
aatattgactttctc

SEQ ID NO: 505139 - DNA, 15 bp, Homo sapiens
atattgactttctct

SEQ ID NO: 505140 - DNA, 15 bp, Homo sapiens
tattgactttctctg

SEQ ID NO: 505141 - DNA, 15 bp, Homo sapiens
attgactttctctgt

SEQ ID NO: 505142 - DNA, 15 bp, Homo sapiens
ttgactttctctgtt

SEQ ID NO: 505143 - DNA, 15 bp, Homo sapiens
tgactttctctgttt

SEQ ID NO: 505144 - DNA, 15 bp, Homo sapiens
gactttctctgtttc

SEQ ID NO: 505145 - DNA, 15 bp, Homo sapiens
actttctctgtttct

SEQ ID NO: 505146 - DNA, 15 bp, Homo sapiens
ctttctctgtttctt

SEQ ID NO: 505147 - DNA, 15 bp, Homo sapiens
tttctctgtttcttt

SEQ ID NO: 505148 - DNA, 15 bp, Homo sapiens
ttctctgtttctttc

SEQ ID NO: 505149 - DNA, 15 bp, Homo sapiens
tctctgtttctttct

SEQ ID NO: 505150 - DNA, 15 bp, Homo sapiens
ctctgtttctttcta

SEQ ID NO: 505151 - DNA, 15 bp, Homo sapiens
tctgtttctttctac

SEQ ID NO: 505152 - DNA, 15 bp, Homo sapiens
ctgtttctttctacc

SEQ ID NO: 505153 - DNA, 15 bp, Homo sapiens
tgtttctttctacct

SEQ ID NO: 505154 - DNA, 15 bp, Homo sapiens
gtttctttctacctt

SEQ ID NO: 505155 - DNA, 15 bp, Homo sapiens
tttctttctaccttt

SEQ ID NO: 505156 - DNA, 15 bp, Homo sapiens
ttctttctacctttt

SEQ ID NO: 505157 - DNA, 15 bp, Homo sapiens
tctttctaccttttt

SEQ ID NO: 505158 - DNA, 15 bp, Homo sapiens
ctttctaccttttta

SEQ ID NO: 505159 - DNA, 15 bp, Homo sapiens
tttctacctttttaa

SEQ ID NO: 505160 - DNA, 15 bp, Homo sapiens
ttctacctttttaaa

SEQ ID NO: 505161 - DNA, 15 bp, Homo sapiens
tctacctttttaaac

SEQ ID NO: 505162 - DNA, 15 bp, Homo sapiens
ctacctttttaaaca

SEQ ID NO: 505163 - DNA, 15 bp, Homo sapiens
tacctttttaaacat

SEQ ID NO: 505164 - DNA, 15 bp, Homo sapiens
acctttttaaacatg

SEQ ID NO: 505165 - DNA, 15 bp, Homo sapiens
cctttttaaacatgg

SEQ ID NO: 505166 - DNA, 15 bp, Homo sapiens
ctttttaaacatggc

SEQ ID NO: 505167 - DNA, 15 bp, Homo sapiens
tttttaaacatggct

SEQ ID NO: 505168 - DNA, 15 bp, Homo sapiens
ttttaaacatggcta

SEQ ID NO: 505169 - DNA, 15 bp, Homo sapiens
tttaaacatggctac

SEQ ID NO: 505170 - DNA, 15 bp, Homo sapiens
ttaaacatggctact

SEQ ID NO: 505171 - DNA, 15 bp, Homo sapiens
taaacatggctacta

SEQ ID NO: 505172 - DNA, 15 bp, Homo sapiens
aaacatggctactag

SEQ ID NO: 505173 - DNA, 15 bp, Homo sapiens
aacatggctactaga

SEQ ID NO: 505174 - DNA, 15 bp, Homo sapiens
acatggctactagaa

SEQ ID NO: 505175 - DNA, 15 bp, Homo sapiens
catggctactagaaa

SEQ ID NO: 505176 - DNA, 15 bp, Homo sapiens
atggctactagaaaa

SEQ ID NO: 505177 - DNA, 15 bp, Homo sapiens
tggctactagaaaaa

SEQ ID NO: 505178 - DNA, 15 bp, Homo sapiens
ggctactagaaaaat

SEQ ID NO: 505179 - DNA, 15 bp, Homo sapiens
gctactagaaaaatg

SEQ ID NO: 505180 - DNA, 15 bp, Homo sapiens
ctactagaaaaatgc

SEQ ID NO: 505181 - DNA, 15 bp, Homo sapiens
tactagaaaaatgca

SEQ ID NO: 505182 - DNA, 15 bp, Homo sapiens
actagaaaaatgcac

SEQ ID NO: 505183 - DNA, 15 bp, Homo sapiens
ctagaaaaatgcaca

SEQ ID NO: 505184 - DNA, 15 bp, Homo sapiens
tagaaaaatgcacaa

SEQ ID NO: 505185 - DNA, 15 bp, Homo sapiens
agaaaaatgcacaat

SEQ ID NO: 505186 - DNA, 15 bp, Homo sapiens
gaaaaatgcacaatt

SEQ ID NO: 505187 - DNA, 15 bp, Homo sapiens
aaaaatgcacaatta

SEQ ID NO: 505188 - DNA, 15 bp, Homo sapiens
aaaatgcacaattag

SEQ ID NO: 505189 - DNA, 15 bp, Homo sapiens
aaatgcacaattaga

SEQ ID NO: 505190 - DNA, 15 bp, Homo sapiens
aatgcacaattagat

SEQ ID NO: 505191 - DNA, 15 bp, Homo sapiens
atgcacaattagatt

SEQ ID NO: 505192 - DNA, 15 bp, Homo sapiens
tgcacaattagattt

SEQ ID NO: 505193 - DNA, 15 bp, Homo sapiens
gcacaattagatttg

SEQ ID NO: 505194 - DNA, 15 bp, Homo sapiens
cacaattagatttgt

SEQ ID NO: 505195 - DNA, 15 bp, Homo sapiens
acaattagatttgtg

SEQ ID NO: 505196 - DNA, 15 bp, Homo sapiens
caattagatttgtgg

SEQ ID NO: 505197 - DNA, 15 bp, Homo sapiens
aattagatttgtggc

SEQ ID NO: 505198 - DNA, 15 bp, Homo sapiens
attagatttgtggct

SEQ ID NO: 505199 - DNA, 15 bp, Homo sapiens
ttagatttgtggctg

SEQ ID NO: 505200 - DNA, 15 bp, Homo sapiens
tagatttgtggctgg

SEQ ID NO: 505201 - DNA, 15 bp, Homo sapiens
agatttgtggctggt

SEQ ID NO: 505202 - DNA, 15 bp, Homo sapiens
gatttgtggctggtg

SEQ ID NO: 505203 - DNA, 15 bp, Homo sapiens
atttgtggctggtgt

SEQ ID NO: 505204 - DNA, 15 bp, Homo sapiens
tttgtggctggtgtt

SEQ ID NO: 505205 - DNA, 15 bp, Homo sapiens
ttgtggctggtgttc

SEQ ID NO: 505206 - DNA, 15 bp, Homo sapiens
tgtggctggtgttct

SEQ ID NO: 505207 - DNA, 15 bp, Homo sapiens
gtggctggtgttctg

SEQ ID NO: 505208 - DNA, 15 bp, Homo sapiens
tggctggtgttctgt

SEQ ID NO: 505209 - DNA, 15 bp, Homo sapiens
ggctggtgttctgtt

SEQ ID NO: 505210 - DNA, 15 bp, Homo sapiens
gctggtgttctgttt

SEQ ID NO: 505211 - DNA, 15 bp, Homo sapiens
ctggtgttctgtttc

SEQ ID NO: 505212 - DNA, 15 bp, Homo sapiens
tggtgttctgtttca

SEQ ID NO: 505213 - DNA, 15 bp, Homo sapiens
ggtgttctgtttcat

SEQ ID NO: 505214 - DNA, 15 bp, Homo sapiens
gtgttctgtttcatc

SEQ ID NO: 505215 - DNA, 15 bp, Homo sapiens
tgttctgtttcatct

SEQ ID NO: 505216 - DNA, 15 bp, Homo sapiens
gttctgtttcatcta

SEQ ID NO: 505217 - DNA, 15 bp, Homo sapiens
ttctgtttcatctaa

SEQ ID NO: 505218 - DNA, 15 bp, Homo sapiens
tctgtttcatctaaa

SEQ ID NO: 505219 - DNA, 15 bp, Homo sapiens
ctgtttcatctaaac

SEQ ID NO: 505220 - DNA, 15 bp, Homo sapiens
tgtttcatctaaaca

SEQ ID NO: 505221 - DNA, 15 bp, Homo sapiens
gtttcatctaaacag

SEQ ID NO: 505222 - DNA, 15 bp, Homo sapiens
tttcatctaaacagg

SEQ ID NO: 505223 - DNA, 15 bp, Homo sapiens
ttcatctaaacaggc

SEQ ID NO: 505224 - DNA, 15 bp, Homo sapiens
tcatctaaacaggct

SEQ ID NO: 505225 - DNA, 15 bp, Homo sapiens
catctaaacaggctg

SEQ ID NO: 505226 - DNA, 15 bp, Homo sapiens
atctaaacaggctgg

SEQ ID NO: 505227 - DNA, 15 bp, Homo sapiens
tctaaacaggctggc

SEQ ID NO: 505228 - DNA, 15 bp, Homo sapiens
ctaaacaggctggcc

SEQ ID NO: 505229 - DNA, 15 bp, Homo sapiens
taaacaggctggcct

SEQ ID NO: 505230 - DNA, 15 bp, Homo sapiens
aaacaggctggcctc

SEQ ID NO: 505231 - DNA, 15 bp, Homo sapiens
aacaggctggcctca

SEQ ID NO: 505232 - DNA, 15 bp, Homo sapiens
acaggctggcctcac

SEQ ID NO: 505233 - DNA, 15 bp, Homo sapiens
caggctggcctcaca

SEQ ID NO: 505234 - DNA, 15 bp, Homo sapiens
aggctggcctcacag

SEQ ID NO: 505235 - DNA, 15 bp, Homo sapiens
ggctggcctcacaga

SEQ ID NO: 505236 - DNA, 15 bp, Homo sapiens
gctggcctcacagag

SEQ ID NO: 505237 - DNA, 15 bp, Homo sapiens
ctggcctcacagagg

SEQ ID NO: 505238 - DNA, 15 bp, Homo sapiens
tggcctcacagagga

SEQ ID NO: 505239 - DNA, 15 bp, Homo sapiens
ggcctcacagaggag

SEQ ID NO: 505240 - DNA, 15 bp, Homo sapiens
gcctcacagaggagc

SEQ ID NO: 505241 - DNA, 15 bp, Homo sapiens
cctcacagaggagct

SEQ ID NO: 505242 - DNA, 15 bp, Homo sapiens
ctcacagaggagctg

SEQ ID NO: 505243 - DNA, 15 bp, Homo sapiens
tcacagaggagctgg

SEQ ID NO: 505244 - DNA, 15 bp, Homo sapiens
cacagaggagctgga

SEQ ID NO: 505245 - DNA, 15 bp, Homo sapiens
acagaggagctggag

SEQ ID NO: 505246 - DNA, 15 bp, Homo sapiens
cagaggagctggagt

SEQ ID NO: 505247 - DNA, 15 bp, Homo sapiens
agaggagctggagtg

SEQ ID NO: 505248 - DNA, 15 bp, Homo sapiens
gaggagctggagtgt

SEQ ID NO: 505249 - DNA, 15 bp, Homo sapiens
aggagctggagtgtg

SEQ ID NO: 505250 - DNA, 15 bp, Homo sapiens
ggagctggagtgtgc

SEQ ID NO: 505251 - DNA, 15 bp, Homo sapiens
gagctggagtgtgca

SEQ ID NO: 505252 - DNA, 15 bp, Homo sapiens
agctggagtgtgcag

SEQ ID NO: 505253 - DNA, 15 bp, Homo sapiens
gctggagtgtgcagt

SEQ ID NO: 505254 - DNA, 15 bp, Homo sapiens
ctggagtgtgcagtg

SEQ ID NO: 505255 - DNA, 15 bp, Homo sapiens
tggagtgtgcagtgc

SEQ ID NO: 505256 - DNA, 15 bp, Homo sapiens
ggagtgtgcagtgct

SEQ ID NO: 505257 - DNA, 15 bp, Homo sapiens
gagtgtgcagtgctg

SEQ ID NO: 505258 - DNA, 15 bp, Homo sapiens
agtgtgcagtgctgc

SEQ ID NO: 505259 - DNA, 15 bp, Homo sapiens
gtgtgcagtgctgct

SEQ ID NO: 505260 - DNA, 15 bp, Homo sapiens
tgtgcagtgctgctc

SEQ ID NO: 505261 - DNA, 15 bp, Homo sapiens
gtgcagtgctgctct

SEQ ID NO: 505262 - DNA, 15 bp, Homo sapiens
tgcagtgctgctcta

SEQ ID NO: 505263 - DNA, 15 bp, Homo sapiens
gcagtgctgctctag

SEQ ID NO: 505264 - DNA, 15 bp, Homo sapiens
cagtgctgctctagc

SEQ ID NO: 505265 - DNA, 15 bp, Homo sapiens
agtgctgctctagca

SEQ ID NO: 505266 - DNA, 15 bp, Homo sapiens
gtgctgctctagcaa

SEQ ID NO: 505267 - DNA, 15 bp, Homo sapiens
tgctgctctagcaag

SEQ ID NO: 505268 - DNA, 15 bp, Homo sapiens
gctgctctagcaagc

SEQ ID NO: 505269 - DNA, 15 bp, Homo sapiens
ctgctctagcaagcc

SEQ ID NO: 505270 - DNA, 15 bp, Homo sapiens
tgctctagcaagcca

SEQ ID NO: 505271 - DNA, 15 bp, Homo sapiens
gctctagcaagccag

SEQ ID NO: 505272 - DNA, 15 bp, Homo sapiens
ctctagcaagccagg

SEQ ID NO: 505273 - DNA, 15 bp, Homo sapiens
tctagcaagccaggc

SEQ ID NO: 505274 - DNA, 15 bp, Homo sapiens
ctagcaagccaggct

SEQ ID NO: 505275 - DNA, 15 bp, Homo sapiens
tagcaagccaggctt

SEQ ID NO: 505276 - DNA, 15 bp, Homo sapiens
agcaagccaggcttg

SEQ ID NO: 505277 - DNA, 15 bp, Homo sapiens
gcaagccaggcttga

SEQ ID NO: 505278 - DNA, 15 bp, Homo sapiens
caagccaggcttgac

SEQ ID NO: 505279 - DNA, 15 bp, Homo sapiens
aagccaggcttgact

SEQ ID NO: 505280 - DNA, 15 bp, Homo sapiens
agccaggcttgactc

SEQ ID NO: 505281 - DNA, 15 bp, Homo sapiens
gccaggcttgactct

SEQ ID NO: 505282 - DNA, 15 bp, Homo sapiens
ccaggcttgactctt

SEQ ID NO: 505283 - DNA, 15 bp, Homo sapiens
caggcttgactcttc

SEQ ID NO: 505284 - DNA, 15 bp, Homo sapiens
aggcttgactcttcc

SEQ ID NO: 505285 - DNA, 15 bp, Homo sapiens
ggcttgactcttccc

SEQ ID NO: 505286 - DNA, 15 bp, Homo sapiens
gcttgactcttccca

SEQ ID NO: 505287 - DNA, 15 bp, Homo sapiens
cttgactcttcccac

SEQ ID NO: 505288 - DNA, 15 bp, Homo sapiens
ttgactcttcccact

SEQ ID NO: 505289 - DNA, 15 bp, Homo sapiens
tgactcttcccactc

SEQ ID NO: 505290 - DNA, 15 bp, Homo sapiens
gactcttcccactca

SEQ ID NO: 505291 - DNA, 15 bp, Homo sapiens
actcttcccactcag

SEQ ID NO: 505292 - DNA, 15 bp, Homo sapiens
ctcttcccactcagg

SEQ ID NO: 505293 - DNA, 15 bp, Homo sapiens
tcttcccactcaggg

SEQ ID NO: 505294 - DNA, 15 bp, Homo sapiens
cttcccactcagggc

SEQ ID NO: 505295 - DNA, 15 bp, Homo sapiens
ttcccactcagggca

SEQ ID NO: 505296 - DNA, 15 bp, Homo sapiens
tcccactcagggcac

SEQ ID NO: 505297 - DNA, 15 bp, Homo sapiens
cccactcagggcaca

SEQ ID NO: 505298 - DNA, 15 bp, Homo sapiens
ccactcagggcacat

SEQ ID NO: 505299 - DNA, 15 bp, Homo sapiens
cactcagggcacatc

SEQ ID NO: 505300 - DNA, 15 bp, Homo sapiens
actcagggcacatca

SEQ ID NO: 505301 - DNA, 15 bp, Homo sapiens
ctcagggcacatcac

SEQ ID NO: 505302 - DNA, 15 bp, Homo sapiens
tcagggcacatcact

SEQ ID NO: 505303 - DNA, 15 bp, Homo sapiens
cagggcacatcactt

SEQ ID NO: 505304 - DNA, 15 bp, Homo sapiens
agggcacatcacttc

SEQ ID NO: 505305 - DNA, 15 bp, Homo sapiens
gggcacatcacttcc

SEQ ID NO: 505306 - DNA, 15 bp, Homo sapiens
ggcacatcacttcca

SEQ ID NO: 505307 - DNA, 15 bp, Homo sapiens
gcacatcacttccat

SEQ ID NO: 505308 - DNA, 15 bp, Homo sapiens
cacatcacttccatg

SEQ ID NO: 505309 - DNA, 15 bp, Homo sapiens
acatcacttccatga

SEQ ID NO: 505310 - DNA, 15 bp, Homo sapiens
catcacttccatgaa

SEQ ID NO: 505311 - DNA, 15 bp, Homo sapiens
atcacttccatgaag

SEQ ID NO: 505312 - DNA, 15 bp, Homo sapiens
tcacttccatgaagc

SEQ ID NO: 505313 - DNA, 15 bp, Homo sapiens
cacttccatgaagct

SEQ ID NO: 505314 - DNA, 15 bp, Homo sapiens
acttccatgaagctt

SEQ ID NO: 505315 - DNA, 15 bp, Homo sapiens
cttccatgaagctta

SEQ ID NO: 505316 - DNA, 15 bp, Homo sapiens
ttccatgaagcttac

SEQ ID NO: 505317 - DNA, 15 bp, Homo sapiens
tccatgaagcttact

SEQ ID NO: 505318 - DNA, 15 bp, Homo sapiens
ccatgaagcttactc

SEQ ID NO: 505319 - DNA, 15 bp, Homo sapiens
catgaagcttactcc

SEQ ID NO: 505320 - DNA, 15 bp, Homo sapiens
atgaagcttactcct

SEQ ID NO: 505321 - DNA, 15 bp, Homo sapiens
tgaagcttactcctt

SEQ ID NO: 505322 - DNA, 15 bp, Homo sapiens
gaagcttactccttg

SEQ ID NO: 505323 - DNA, 15 bp, Homo sapiens
aagcttactccttgg

SEQ ID NO: 505324 - DNA, 15 bp, Homo sapiens
agcttactccttggg

SEQ ID NO: 505325 - DNA, 15 bp, Homo sapiens
gcttactccttgggt

SEQ ID NO: 505326 - DNA, 15 bp, Homo sapiens
cttactccttgggtt

SEQ ID NO: 505327 - DNA, 15 bp, Homo sapiens
ttactccttgggttg

SEQ ID NO: 505328 - DNA, 15 bp, Homo sapiens
tactccttgggttgt

SEQ ID NO: 505329 - DNA, 15 bp, Homo sapiens
actccttgggttgtt

SEQ ID NO: 505330 - DNA, 15 bp, Homo sapiens
ctccttgggttgttt

SEQ ID NO: 505331 - DNA, 15 bp, Homo sapiens
tccttgggttgtttg

SEQ ID NO: 505332 - DNA, 15 bp, Homo sapiens
ccttgggttgtttgg

SEQ ID NO: 505333 - DNA, 15 bp, Homo sapiens
cttgggttgtttggt

SEQ ID NO: 505334 - DNA, 15 bp, Homo sapiens
ttgggttgtttggtt

SEQ ID NO: 505335 - DNA, 15 bp, Homo sapiens
tgggttgtttggttg

SEQ ID NO: 505336 - DNA, 15 bp, Homo sapiens
gggttgtttggttga

SEQ ID NO: 505337 - DNA, 15 bp, Homo sapiens
ggttgtttggttgac

SEQ ID NO: 505338 - DNA, 15 bp, Homo sapiens
gttgtttggttgact

SEQ ID NO: 505339 - DNA, 15 bp, Homo sapiens
ttgtttggttgactt

SEQ ID NO: 505340 - DNA, 15 bp, Homo sapiens
tgtttggttgactta

SEQ ID NO: 505341 - DNA, 15 bp, Homo sapiens
gtttggttgacttag

SEQ ID NO: 505342 - DNA, 15 bp, Homo sapiens
tttggttgacttagg

SEQ ID NO: 505343 - DNA, 15 bp, Homo sapiens
ttggttgacttagga

SEQ ID NO: 505344 - DNA, 15 bp, Homo sapiens
tggttgacttaggag

SEQ ID NO: 505345 - DNA, 15 bp, Homo sapiens
ggttgacttaggaga

SEQ ID NO: 505346 - DNA, 15 bp, Homo sapiens
gttgacttaggagaa

SEQ ID NO: 505347 - DNA, 15 bp, Homo sapiens
ttgacttaggagaat

SEQ ID NO: 505348 - DNA, 15 bp, Homo sapiens
tgacttaggagaatg

SEQ ID NO: 505349 - DNA, 15 bp, Homo sapiens
gacttaggagaatgg

SEQ ID NO: 505350 - DNA, 15 bp, Homo sapiens
acttaggagaatgga

SEQ ID NO: 505351 - DNA, 15 bp, Homo sapiens
cttaggagaatggaa

SEQ ID NO: 505352 - DNA, 15 bp, Homo sapiens
ttaggagaatggaag

SEQ ID NO: 505353 - DNA, 15 bp, Homo sapiens
taggagaatggaagt

SEQ ID NO: 505354 - DNA, 15 bp, Homo sapiens
aggagaatggaagtg

SEQ ID NO: 505355 - DNA, 15 bp, Homo sapiens
ggagaatggaagtga

SEQ ID NO: 505356 - DNA, 15 bp, Homo sapiens
gagaatggaagtgat

SEQ ID NO: 505357 - DNA, 15 bp, Homo sapiens
agaatggaagtgatt

SEQ ID NO: 505358 - DNA, 15 bp, Homo sapiens
gaatggaagtgatta

SEQ ID NO: 505359 - DNA, 15 bp, Homo sapiens
aatggaagtgattag

SEQ ID NO: 505360 - DNA, 15 bp, Homo sapiens
atggaagtgattagc

SEQ ID NO: 505361 - DNA, 15 bp, Homo sapiens
tggaagtgattagca

SEQ ID NO: 505362 - DNA, 15 bp, Homo sapiens
ggaagtgattagcag

SEQ ID NO: 505363 - DNA, 15 bp, Homo sapiens
gaagtgattagcaga

SEQ ID NO: 505364 - DNA, 15 bp, Homo sapiens
aagtgattagcagaa

SEQ ID NO: 505365 - DNA, 15 bp, Homo sapiens
agtgattagcagaat

SEQ ID NO: 505366 - DNA, 15 bp, Homo sapiens
gtgattagcagaatc

SEQ ID NO: 505367 - DNA, 15 bp, Homo sapiens
tgattagcagaatct

SEQ ID NO: 505368 - DNA, 15 bp, Homo sapiens
gattagcagaatctt

SEQ ID NO: 505369 - DNA, 15 bp, Homo sapiens
attagcagaatcttg

SEQ ID NO: 505370 - DNA, 15 bp, Homo sapiens
ttagcagaatcttgt

SEQ ID NO: 505371 - DNA, 15 bp, Homo sapiens
tagcagaatcttgta

SEQ ID NO: 505372 - DNA, 15 bp, Homo sapiens
agcagaatcttgtaa

SEQ ID NO: 505373 - DNA, 15 bp, Homo sapiens
gcagaatcttgtaag

SEQ ID NO: 505374 - DNA, 15 bp, Homo sapiens
cagaatcttgtaagc

SEQ ID NO: 505375 - DNA, 15 bp, Homo sapiens
agaatcttgtaagca

SEQ ID NO: 505376 - DNA, 15 bp, Homo sapiens
gaatcttgtaagcat

SEQ ID NO: 505377 - DNA, 15 bp, Homo sapiens
aatcttgtaagcatt

SEQ ID NO: 505378 - DNA, 15 bp, Homo sapiens
atcttgtaagcattt

SEQ ID NO: 505379 - DNA, 15 bp, Homo sapiens
tcttgtaagcatttt

SEQ ID NO: 505380 - DNA, 15 bp, Homo sapiens
cttgtaagcatttta

SEQ ID NO: 505381 - DNA, 15 bp, Homo sapiens
ttgtaagcattttaa

SEQ ID NO: 505382 - DNA, 15 bp, Homo sapiens
tgtaagcattttaaa

SEQ ID NO: 505383 - DNA, 15 bp, Homo sapiens
gtaagcattttaaac

SEQ ID NO: 505384 - DNA, 15 bp, Homo sapiens
taagcattttaaaca

SEQ ID NO: 505385 - DNA, 15 bp, Homo sapiens
aagcattttaaacat

SEQ ID NO: 505386 - DNA, 15 bp, Homo sapiens
agcattttaaacatt

SEQ ID NO: 505387 - DNA, 15 bp, Homo sapiens
gcattttaaacatta

SEQ ID NO: 505388 - DNA, 15 bp, Homo sapiens
cattttaaacattaa

SEQ ID NO: 505389 - DNA, 15 bp, Homo sapiens
attttaaacattaaa

SEQ ID NO: 505390 - DNA, 15 bp, Homo sapiens
ttttaaacattaaat

SEQ ID NO: 505391 - DNA, 15 bp, Homo sapiens
tttaaacattaaatg

SEQ ID NO: 505392 - DNA, 15 bp, Homo sapiens
ttaaacattaaatga

SEQ ID NO: 505393 - DNA, 15 bp, Homo sapiens
taaacattaaatgag

SEQ ID NO: 505394 - DNA, 15 bp, Homo sapiens
aaacattaaatgagc

SEQ ID NO: 505395 - DNA, 15 bp, Homo sapiens
aacattaaatgagca

SEQ ID NO: 505396 - DNA, 15 bp, Homo sapiens
acattaaatgagcat

SEQ ID NO: 505397 - DNA, 15 bp, Homo sapiens
cattaaatgagcatt

SEQ ID NO: 505398 - DNA, 15 bp, Homo sapiens
attaaatgagcattg

SEQ ID NO: 505399 - DNA, 15 bp, Homo sapiens
ttaaatgagcattgt

SEQ ID NO: 505400 - DNA, 15 bp, Homo sapiens
taaatgagcattgta

SEQ ID NO: 505401 - DNA, 15 bp, Homo sapiens
aaatgagcattgtaa

SEQ ID NO: 505402 - DNA, 15 bp, Homo sapiens
aatgagcattgtaaa

SEQ ID NO: 505403 - DNA, 15 bp, Homo sapiens
atgagcattgtaaac

SEQ ID NO: 505404 - DNA, 15 bp, Homo sapiens
tgagcattgtaaaca

SEQ ID NO: 505405 - DNA, 15 bp, Homo sapiens
gagcattgtaaacag

SEQ ID NO: 505406 - DNA, 15 bp, Homo sapiens
agcattgtaaacagc

SEQ ID NO: 505407 - DNA, 15 bp, Homo sapiens
gcattgtaaacagcg

SEQ ID NO: 505408 - DNA, 15 bp, Homo sapiens
cattgtaaacagcgg

SEQ ID NO: 505409 - DNA, 15 bp, Homo sapiens
attgtaaacagcggc

SEQ ID NO: 505410 - DNA, 15 bp, Homo sapiens
ttgtaaacagcggca

SEQ ID NO: 505411 - DNA, 15 bp, Homo sapiens
tgtaaacagcggcat

SEQ ID NO: 505412 - DNA, 15 bp, Homo sapiens
gtaaacagcggcatt

SEQ ID NO: 505413 - DNA, 15 bp, Homo sapiens
taaacagcggcattc

SEQ ID NO: 505414 - DNA, 15 bp, Homo sapiens
aaacagcggcattct

SEQ ID NO: 505415 - DNA, 15 bp, Homo sapiens
aacagcggcattctt

SEQ ID NO: 505416 - DNA, 15 bp, Homo sapiens
acagcggcattcttc

SEQ ID NO: 505417 - DNA, 15 bp, Homo sapiens
cagcggcattcttca

SEQ ID NO: 505418 - DNA, 15 bp, Homo sapiens
agcggcattcttcag

SEQ ID NO: 505419 - DNA, 15 bp, Homo sapiens
gcggcattcttcagg

SEQ ID NO: 505420 - DNA, 15 bp, Homo sapiens
cggcattcttcaggc

SEQ ID NO: 505421 - DNA, 15 bp, Homo sapiens
ggcattcttcaggca

SEQ ID NO: 505422 - DNA, 15 bp, Homo sapiens
gcattcttcaggcaa

SEQ ID NO: 505423 - DNA, 15 bp, Homo sapiens
cattcttcaggcaaa

SEQ ID NO: 505424 - DNA, 15 bp, Homo sapiens
attcttcaggcaaat

SEQ ID NO: 505425 - DNA, 15 bp, Homo sapiens
ttcttcaggcaaata

SEQ ID NO: 505426 - DNA, 15 bp, Homo sapiens
tcttcaggcaaatac

SEQ ID NO: 505427 - DNA, 15 bp, Homo sapiens
cttcaggcaaataca

SEQ ID NO: 505428 - DNA, 15 bp, Homo sapiens
ttcaggcaaatacag

SEQ ID NO: 505429 - DNA, 15 bp, Homo sapiens
tcaggcaaatacagt

SEQ ID NO: 505430 - DNA, 15 bp, Homo sapiens
caggcaaatacagtt

SEQ ID NO: 505431 - DNA, 15 bp, Homo sapiens
aggcaaatacagttt

SEQ ID NO: 505432 - DNA, 15 bp, Homo sapiens
ggcaaatacagtttt

SEQ ID NO: 505433 - DNA, 15 bp, Homo sapiens
gcaaatacagttttg

SEQ ID NO: 505434 - DNA, 15 bp, Homo sapiens
caaatacagttttgt

SEQ ID NO: 505435 - DNA, 15 bp, Homo sapiens
aaatacagttttgtt

SEQ ID NO: 505436 - DNA, 15 bp, Homo sapiens
aatacagttttgttt

SEQ ID NO: 505437 - DNA, 15 bp, Homo sapiens
atacagttttgtttt

SEQ ID NO: 505438 - DNA, 15 bp, Homo sapiens
tacagttttgtttta

SEQ ID NO: 505439 - DNA, 15 bp, Homo sapiens
acagttttgttttac

SEQ ID NO: 505440 - DNA, 15 bp, Homo sapiens
cagttttgttttacc

SEQ ID NO: 505441 - DNA, 15 bp, Homo sapiens
agttttgttttacct

SEQ ID NO: 505442 - DNA, 15 bp, Homo sapiens
gttttgttttacctc

SEQ ID NO: 505443 - DNA, 15 bp, Homo sapiens
ttttgttttacctct

SEQ ID NO: 505444 - DNA, 15 bp, Homo sapiens
tttgttttacctctt

SEQ ID NO: 505445 - DNA, 15 bp, Homo sapiens
ttgttttacctcttt

SEQ ID NO: 505446 - DNA, 15 bp, Homo sapiens
tgttttacctcttta

SEQ ID NO: 505447 - DNA, 15 bp, Homo sapiens
gttttacctctttaa

SEQ ID NO: 505448 - DNA, 15 bp, Homo sapiens
ttttacctctttaaa

SEQ ID NO: 505449 - DNA, 15 bp, Homo sapiens
tttacctctttaaat

SEQ ID NO: 505450 - DNA, 15 bp, Homo sapiens
ttacctctttaaatt

SEQ ID NO: 505451 - DNA, 15 bp, Homo sapiens
tacctctttaaattc

SEQ ID NO: 505452 - DNA, 15 bp, Homo sapiens
acctctttaaattcc

SEQ ID NO: 505453 - DNA, 15 bp, Homo sapiens
cctctttaaattcca

SEQ ID NO: 505454 - DNA, 15 bp, Homo sapiens
ctctttaaattccat

SEQ ID NO: 505455 - DNA, 15 bp, Homo sapiens
tctttaaattccatg

SEQ ID NO: 505456 - DNA, 15 bp, Homo sapiens
ctttaaattccatgg

SEQ ID NO: 505457 - DNA, 15 bp, Homo sapiens
tttaaattccatggt

SEQ ID NO: 505458 - DNA, 15 bp, Homo sapiens
ttaaattccatggta

SEQ ID NO: 505459 - DNA, 15 bp, Homo sapiens
taaattccatggtat

SEQ ID NO: 505460 - DNA, 15 bp, Homo sapiens
aaattccatggtata

SEQ ID NO: 505461 - DNA, 15 bp, Homo sapiens
aattccatggtatat

SEQ ID NO: 505462 - DNA, 15 bp, Homo sapiens
attccatggtatatt

SEQ ID NO: 505463 - DNA, 15 bp, Homo sapiens
ttccatggtatattc

SEQ ID NO: 505464 - DNA, 15 bp, Homo sapiens
tccatggtatattcg

SEQ ID NO: 505465 - DNA, 15 bp, Homo sapiens
ccatggtatattcgg

SEQ ID NO: 505466 - DNA, 15 bp, Homo sapiens
catggtatattcgga

SEQ ID NO: 505467 - DNA, 15 bp, Homo sapiens
atggtatattcggac

SEQ ID NO: 505468 - DNA, 15 bp, Homo sapiens
tggtatattcggact

SEQ ID NO: 505469 - DNA, 15 bp, Homo sapiens
ggtatattcggactt

SEQ ID NO: 505470 - DNA, 15 bp, Homo sapiens
gtatattcggacttc

SEQ ID NO: 505471 - DNA, 15 bp, Homo sapiens
tatattcggacttca

SEQ ID NO: 505472 - DNA, 15 bp, Homo sapiens
atattcggacttcaa

SEQ ID NO: 505473 - DNA, 15 bp, Homo sapiens
tattcggacttcaaa

SEQ ID NO: 505474 - DNA, 15 bp, Homo sapiens
attcggacttcaaaa

SEQ ID NO: 505475 - DNA, 15 bp, Homo sapiens
ttcggacttcaaaaa

SEQ ID NO: 505476 - DNA, 15 bp, Homo sapiens
tcggacttcaaaaag

SEQ ID NO: 505477 - DNA, 15 bp, Homo sapiens
cggacttcaaaaagt

SEQ ID NO: 505478 - DNA, 15 bp, Homo sapiens
ggacttcaaaaagta

SEQ ID NO: 505479 - DNA, 15 bp, Homo sapiens
gacttcaaaaagtag

SEQ ID NO: 505480 - DNA, 15 bp, Homo sapiens
acttcaaaaagtaga

SEQ ID NO: 505481 - DNA, 15 bp, Homo sapiens
cttcaaaaagtagat

SEQ ID NO: 505482 - DNA, 15 bp, Homo sapiens
ttcaaaaagtagatg

SEQ ID NO: 505483 - DNA, 15 bp, Homo sapiens
tcaaaaagtagatgg

SEQ ID NO: 505484 - DNA, 15 bp, Homo sapiens
caaaaagtagatggt

SEQ ID NO: 505485 - DNA, 15 bp, Homo sapiens
aaaaagtagatggta

SEQ ID NO: 505486 - DNA, 15 bp, Homo sapiens
aaaagtagatggtag

SEQ ID NO: 505487 - DNA, 15 bp, Homo sapiens
aaagtagatggtaga

SEQ ID NO: 505488 - DNA, 15 bp, Homo sapiens
aagtagatggtagag

SEQ ID NO: 505489 - DNA, 15 bp, Homo sapiens
agtagatggtagagc

SEQ ID NO: 505490 - DNA, 15 bp, Homo sapiens
gtagatggtagagca

SEQ ID NO: 505491 - DNA, 15 bp, Homo sapiens
tagatggtagagcac

SEQ ID NO: 505492 - DNA, 15 bp, Homo sapiens
agatggtagagcaca

SEQ ID NO: 505493 - DNA, 15 bp, Homo sapiens
gatggtagagcacat

SEQ ID NO: 505494 - DNA, 15 bp, Homo sapiens
atggtagagcacatg

SEQ ID NO: 505495 - DNA, 15 bp, Homo sapiens
tggtagagcacatgc

SEQ ID NO: 505496 - DNA, 15 bp, Homo sapiens
ggtagagcacatgct

SEQ ID NO: 505497 - DNA, 15 bp, Homo sapiens
gtagagcacatgctt

SEQ ID NO: 505498 - DNA, 15 bp, Homo sapiens
tagagcacatgcttt

SEQ ID NO: 505499 - DNA, 15 bp, Homo sapiens
agagcacatgctttc

SEQ ID NO: 505500 - DNA, 15 bp, Homo sapiens
gagcacatgctttct

SEQ ID NO: 505501 - DNA, 15 bp, Homo sapiens
agcacatgctttctc

SEQ ID NO: 505502 - DNA, 15 bp, Homo sapiens
gcacatgctttctca

SEQ ID NO: 505503 - DNA, 15 bp, Homo sapiens
cacatgctttctcag

SEQ ID NO: 505504 - DNA, 15 bp, Homo sapiens
acatgctttctcagc

SEQ ID NO: 505505 - DNA, 15 bp, Homo sapiens
catgctttctcagca

SEQ ID NO: 505506 - DNA, 15 bp, Homo sapiens
atgctttctcagcac

SEQ ID NO: 505507 - DNA, 15 bp, Homo sapiens
tgctttctcagcacc

SEQ ID NO: 505508 - DNA, 15 bp, Homo sapiens
gctttctcagcacct

SEQ ID NO: 505509 - DNA, 15 bp, Homo sapiens
ctttctcagcacctt

SEQ ID NO: 505510 - DNA, 15 bp, Homo sapiens
tttctcagcaccttc

SEQ ID NO: 505511 - DNA, 15 bp, Homo sapiens
ttctcagcaccttca

SEQ ID NO: 505512 - DNA, 15 bp, Homo sapiens
tctcagcaccttcag

SEQ ID NO: 505513 - DNA, 15 bp, Homo sapiens
ctcagcaccttcagg

SEQ ID NO: 505514 - DNA, 15 bp, Homo sapiens
tcagcaccttcaggc

SEQ ID NO: 505515 - DNA, 15 bp, Homo sapiens
cagcaccttcaggct

SEQ ID NO: 505516 - DNA, 15 bp, Homo sapiens
agcaccttcaggctg

SEQ ID NO: 505517 - DNA, 15 bp, Homo sapiens
gcaccttcaggctgc

SEQ ID NO: 505518 - DNA, 15 bp, Homo sapiens
caccttcaggctgcc

SEQ ID NO: 505519 - DNA, 15 bp, Homo sapiens
accttcaggctgcct

SEQ ID NO: 505520 - DNA, 15 bp, Homo sapiens
ccttcaggctgcctg

SEQ ID NO: 505521 - DNA, 15 bp, Homo sapiens
cttcaggctgcctgg

SEQ ID NO: 505522 - DNA, 15 bp, Homo sapiens
ttcaggctgcctgga

SEQ ID NO: 505523 - DNA, 15 bp, Homo sapiens
tcaggctgcctggag

SEQ ID NO: 505524 - DNA, 15 bp, Homo sapiens
caggctgcctggagc

SEQ ID NO: 505525 - DNA, 15 bp, Homo sapiens
aggctgcctggagcc

SEQ ID NO: 505526 - DNA, 15 bp, Homo sapiens
ggctgcctggagcct

SEQ ID NO: 505527 - DNA, 15 bp, Homo sapiens
gctgcctggagcctc

SEQ ID NO: 505528 - DNA, 15 bp, Homo sapiens
ctgcctggagcctcc

SEQ ID NO: 505529 - DNA, 15 bp, Homo sapiens
tgcctggagcctccc

SEQ ID NO: 505530 - DNA, 15 bp, Homo sapiens
gcctggagcctccca

SEQ ID NO: 505531 - DNA, 15 bp, Homo sapiens
cctggagcctcccaa

SEQ ID NO: 505532 - DNA, 15 bp, Homo sapiens
ctggagcctcccaat

SEQ ID NO: 505533 - DNA, 15 bp, Homo sapiens
tggagcctcccaata

SEQ ID NO: 505534 - DNA, 15 bp, Homo sapiens
ggagcctcccaatag

SEQ ID NO: 505535 - DNA, 15 bp, Homo sapiens
gagcctcccaataga

SEQ ID NO: 505536 - DNA, 15 bp, Homo sapiens
agcctcccaatagag

SEQ ID NO: 505537 - DNA, 15 bp, Homo sapiens
gcctcccaatagagg

SEQ ID NO: 505538 - DNA, 15 bp, Homo sapiens
cctcccaatagaggt

SEQ ID NO: 505539 - DNA, 15 bp, Homo sapiens
ctcccaatagaggtg

SEQ ID NO: 505540 - DNA, 15 bp, Homo sapiens
tcccaatagaggtgt

SEQ ID NO: 505541 - DNA, 15 bp, Homo sapiens
cccaatagaggtgtc

SEQ ID NO: 505542 - DNA, 15 bp, Homo sapiens
ccaatagaggtgtct

SEQ ID NO: 505543 - DNA, 15 bp, Homo sapiens
caatagaggtgtctt

SEQ ID NO: 505544 - DNA, 15 bp, Homo sapiens
aatagaggtgtcttc

SEQ ID NO: 505545 - DNA, 15 bp, Homo sapiens
atagaggtgtcttcg

SEQ ID NO: 505546 - DNA, 15 bp, Homo sapiens
tagaggtgtcttcga

SEQ ID NO: 505547 - DNA, 15 bp, Homo sapiens
agaggtgtcttcgag

SEQ ID NO: 505548 - DNA, 15 bp, Homo sapiens
gaggtgtcttcgagg

SEQ ID NO: 505549 - DNA, 15 bp, Homo sapiens
aggtgtcttcgaggg

SEQ ID NO: 505550 - DNA, 15 bp, Homo sapiens
ggtgtcttcgaggga

SEQ ID NO: 505551 - DNA, 15 bp, Homo sapiens
gtgtcttcgagggag

SEQ ID NO: 505552 - DNA, 15 bp, Homo sapiens
tgtcttcgagggagt

SEQ ID NO: 505553 - DNA, 15 bp, Homo sapiens
gtcttcgagggagtc

SEQ ID NO: 505554 - DNA, 15 bp, Homo sapiens
tcttcgagggagtcc

SEQ ID NO: 505555 - DNA, 15 bp, Homo sapiens
cttcgagggagtccc

SEQ ID NO: 505556 - DNA, 15 bp, Homo sapiens
ttcgagggagtccca

SEQ ID NO: 505557 - DNA, 15 bp, Homo sapiens
tcgagggagtcccag

SEQ ID NO: 505558 - DNA, 15 bp, Homo sapiens
cgagggagtcccagc

SEQ ID NO: 505559 - DNA, 15 bp, Homo sapiens
gagggagtcccagct

SEQ ID NO: 505560 - DNA, 15 bp, Homo sapiens
agggagtcccagctc

SEQ ID NO: 505561 - DNA, 15 bp, Homo sapiens
gggagtcccagctct

SEQ ID NO: 505562 - DNA, 15 bp, Homo sapiens
ggagtcccagctctg

SEQ ID NO: 505563 - DNA, 15 bp, Homo sapiens
gagtcccagctctgt

SEQ ID NO: 505564 - DNA, 15 bp, Homo sapiens
agtcccagctctgtc

SEQ ID NO: 505565 - DNA, 15 bp, Homo sapiens
gtcccagctctgtct

SEQ ID NO: 505566 - DNA, 15 bp, Homo sapiens
tcccagctctgtctc

SEQ ID NO: 505567 - DNA, 15 bp, Homo sapiens
cccagctctgtctct

SEQ ID NO: 505568 - DNA, 15 bp, Homo sapiens
ccagctctgtctctg

SEQ ID NO: 505569 - DNA, 15 bp, Homo sapiens
cagctctgtctctga

SEQ ID NO: 505570 - DNA, 15 bp, Homo sapiens
agctctgtctctgaa

SEQ ID NO: 505571 - DNA, 15 bp, Homo sapiens
gctctgtctctgaaa

SEQ ID NO: 505572 - DNA, 15 bp, Homo sapiens
ctctgtctctgaaac

SEQ ID NO: 505573 - DNA, 15 bp, Homo sapiens
tctgtctctgaaacc

SEQ ID NO: 505574 - DNA, 15 bp, Homo sapiens
ctgtctctgaaaccc

SEQ ID NO: 505575 - DNA, 15 bp, Homo sapiens
tgtctctgaaacccc

SEQ ID NO: 505576 - DNA, 15 bp, Homo sapiens
gtctctgaaacccca

SEQ ID NO: 505577 - DNA, 15 bp, Homo sapiens
tctctgaaaccccaa

SEQ ID NO: 505578 - DNA, 15 bp, Homo sapiens
ctctgaaaccccaaa

SEQ ID NO: 505579 - DNA, 15 bp, Homo sapiens
tctgaaaccccaaag

SEQ ID NO: 505580 - DNA, 15 bp, Homo sapiens
ctgaaaccccaaagt

SEQ ID NO: 505581 - DNA, 15 bp, Homo sapiens
tgaaaccccaaagtt

SEQ ID NO: 505582 - DNA, 15 bp, Homo sapiens
gaaaccccaaagtta

SEQ ID NO: 505583 - DNA, 15 bp, Homo sapiens
aaaccccaaagttac

SEQ ID NO: 505584 - DNA, 15 bp, Homo sapiens
aaccccaaagttact

SEQ ID NO: 505585 - DNA, 15 bp, Homo sapiens
accccaaagttactt

SEQ ID NO: 505586 - DNA, 15 bp, Homo sapiens
ccccaaagttacttg

SEQ ID NO: 505587 - DNA, 15 bp, Homo sapiens
cccaaagttacttgt

SEQ ID NO: 505588 - DNA, 15 bp, Homo sapiens
ccaaagttacttgtt

SEQ ID NO: 505589 - DNA, 15 bp, Homo sapiens
caaagttacttgttt

SEQ ID NO: 505590 - DNA, 15 bp, Homo sapiens
aaagttacttgtttg

SEQ ID NO: 505591 - DNA, 15 bp, Homo sapiens
aagttacttgtttga

SEQ ID NO: 505592 - DNA, 15 bp, Homo sapiens
agttacttgtttgac

SEQ ID NO: 505593 - DNA, 15 bp, Homo sapiens
gttacttgtttgaca

SEQ ID NO: 505594 - DNA, 15 bp, Homo sapiens
ttacttgtttgacac

SEQ ID NO: 505595 - DNA, 15 bp, Homo sapiens
tacttgtttgacacc

SEQ ID NO: 505596 - DNA, 15 bp, Homo sapiens
acttgtttgacacca

SEQ ID NO: 505597 - DNA, 15 bp, Homo sapiens
cttgtttgacaccaa

SEQ ID NO: 505598 - DNA, 15 bp, Homo sapiens
ttgtttgacaccaag

SEQ ID NO: 505599 - DNA, 15 bp, Homo sapiens
tgtttgacaccaaga

SEQ ID NO: 505600 - DNA, 15 bp, Homo sapiens
gtttgacaccaagag

SEQ ID NO: 505601 - DNA, 15 bp, Homo sapiens
tttgacaccaagaga

SEQ ID NO: 505602 - DNA, 15 bp, Homo sapiens
ttgacaccaagagaa

SEQ ID NO: 505603 - DNA, 15 bp, Homo sapiens
tgacaccaagagaaa

SEQ ID NO: 505604 - DNA, 15 bp, Homo sapiens
gacaccaagagaaat

SEQ ID NO: 505605 - DNA, 15 bp, Homo sapiens
acaccaagagaaata

SEQ ID NO: 505606 - DNA, 15 bp, Homo sapiens
caccaagagaaataa

SEQ ID NO: 505607 - DNA, 15 bp, Homo sapiens
accaagagaaataag

SEQ ID NO: 505608 - DNA, 15 bp, Homo sapiens
ccaagagaaataagg

SEQ ID NO: 505609 - DNA, 15 bp, Homo sapiens
agtactaatgctgtc

SEQ ID NO: 505610 - DNA, 15 bp, Homo sapiens
gtactaatgctgtca

SEQ ID NO: 505611 - DNA, 15 bp, Homo sapiens
tactaatgctgtcat

SEQ ID NO: 505612 - DNA, 15 bp, Homo sapiens
actaatgctgtcatc

SEQ ID NO: 505613 - DNA, 15 bp, Homo sapiens
ctaatgctgtcatcg

SEQ ID NO: 505614 - DNA, 15 bp, Homo sapiens
taatgctgtcatcgt

SEQ ID NO: 505615 - DNA, 15 bp, Homo sapiens
aatgctgtcatcgta

SEQ ID NO: 505616 - DNA, 15 bp, Homo sapiens
atgctgtcatcgtat

SEQ ID NO: 505617 - DNA, 15 bp, Homo sapiens
tgctgtcatcgtatt

SEQ ID NO: 505618 - DNA, 15 bp, Homo sapiens
gctgtcatcgtattt

SEQ ID NO: 505619 - DNA, 15 bp, Homo sapiens
ctgtcatcgtatttc

SEQ ID NO: 505620 - DNA, 15 bp, Homo sapiens
tgtcatcgtatttct

SEQ ID NO: 505621 - DNA, 15 bp, Homo sapiens
gtcatcgtatttctc

SEQ ID NO: 505622 - DNA, 15 bp, Homo sapiens
tcatcgtatttctca

SEQ ID NO: 505623 - DNA, 15 bp, Homo sapiens
catcgtatttctcat

SEQ ID NO: 505624 - DNA, 15 bp, Homo sapiens
atcgtatttctcata

SEQ ID NO: 505625 - DNA, 15 bp, Homo sapiens
tcgtatttctcatag

SEQ ID NO: 505626 - DNA, 15 bp, Homo sapiens
cgtatttctcatagc

SEQ ID NO: 505627 - DNA, 15 bp, Homo sapiens
gtatttctcatagct

SEQ ID NO: 505628 - DNA, 15 bp, Homo sapiens
tatttctcatagctt

SEQ ID NO: 505629 - DNA, 15 bp, Homo sapiens
atttctcatagcttt

SEQ ID NO: 505630 - DNA, 15 bp, Homo sapiens
tttctcatagctttt

SEQ ID NO: 505631 - DNA, 15 bp, Homo sapiens
ttctcatagcttttg

SEQ ID NO: 505632 - DNA, 15 bp, Homo sapiens
tctcatagcttttgt

SEQ ID NO: 505633 - DNA, 15 bp, Homo sapiens
ctcatagcttttgtt

SEQ ID NO: 505634 - DNA, 15 bp, Homo sapiens
tcatagcttttgttt

SEQ ID NO: 505635 - DNA, 15 bp, Homo sapiens
catagcttttgtttt

SEQ ID NO: 505636 - DNA, 15 bp, Homo sapiens
atagcttttgttttc

SEQ ID NO: 505637 - DNA, 15 bp, Homo sapiens
tagcttttgttttca

SEQ ID NO: 505638 - DNA, 15 bp, Homo sapiens
agcttttgttttcat

SEQ ID NO: 505639 - DNA, 15 bp, Homo sapiens
gcttttgttttcatc

SEQ ID NO: 505640 - DNA, 15 bp, Homo sapiens
cttttgttttcatcc

SEQ ID NO: 505641 - DNA, 15 bp, Homo sapiens
ttttgttttcatcca

SEQ ID NO: 505642 - DNA, 15 bp, Homo sapiens
tttgttttcatccag

SEQ ID NO: 505643 - DNA, 15 bp, Homo sapiens
ttgttttcatccagt

SEQ ID NO: 505644 - DNA, 15 bp, Homo sapiens
tgttttcatccagtg

SEQ ID NO: 505645 - DNA, 15 bp, Homo sapiens
gttttcatccagtgg

SEQ ID NO: 505646 - DNA, 15 bp, Homo sapiens
ttttcatccagtggc

SEQ ID NO: 505647 - DNA, 15 bp, Homo sapiens
tttcatccagtggct

SEQ ID NO: 505648 - DNA, 15 bp, Homo sapiens
ttcatccagtggctc

SEQ ID NO: 505649 - DNA, 15 bp, Homo sapiens
tcatccagtggctca

SEQ ID NO: 505650 - DNA, 15 bp, Homo sapiens
catccagtggctcag

SEQ ID NO: 505651 - DNA, 15 bp, Homo sapiens
atccagtggctcagc

SEQ ID NO: 505652 - DNA, 15 bp, Homo sapiens
tccagtggctcagcg

SEQ ID NO: 505653 - DNA, 15 bp, Homo sapiens
ccagtggctcagcgg

SEQ ID NO: 505654 - DNA, 15 bp, Homo sapiens
cagtggctcagcgga

SEQ ID NO: 505655 - DNA, 15 bp, Homo sapiens
agtggctcagcggaa

SEQ ID NO: 505656 - DNA, 15 bp, Homo sapiens
gtggctcagcggaat

SEQ ID NO: 505657 - DNA, 15 bp, Homo sapiens
tggctcagcggaatt

SEQ ID NO: 505658 - DNA, 15 bp, Homo sapiens
ggctcagcggaattg

SEQ ID NO: 505659 - DNA, 15 bp, Homo sapiens
gctcagcggaattga

SEQ ID NO: 505660 - DNA, 15 bp, Homo sapiens
ctcagcggaattgat

SEQ ID NO: 505661 - DNA, 15 bp, Homo sapiens
tcagcggaattgatt

SEQ ID NO: 505662 - DNA, 15 bp, Homo sapiens
cagcggaattgattg

SEQ ID NO: 505663 - DNA, 15 bp, Homo sapiens
agcggaattgattgg

SEQ ID NO: 505664 - DNA, 15 bp, Homo sapiens
gcggaattgattggg

SEQ ID NO: 505665 - DNA, 15 bp, Homo sapiens
cggaattgattggga

SEQ ID NO: 505666 - DNA, 15 bp, Homo sapiens
ggaattgattgggat

SEQ ID NO: 505667 - DNA, 15 bp, Homo sapiens
gaattgattgggatt

SEQ ID NO: 505668 - DNA, 15 bp, Homo sapiens
aattgattgggattg

SEQ ID NO: 505669 - DNA, 15 bp, Homo sapiens
attgattgggattgc

SEQ ID NO: 505670 - DNA, 15 bp, Homo sapiens
ttgattgggattgcc

SEQ ID NO: 505671 - DNA, 15 bp, Homo sapiens
tgattgggattgcca

SEQ ID NO: 505672 - DNA, 15 bp, Homo sapiens
gattgggattgccaa

SEQ ID NO: 505673 - DNA, 15 bp, Homo sapiens
attgggattgccaaa

SEQ ID NO: 505674 - DNA, 15 bp, Homo sapiens
ttgggattgccaaaa

SEQ ID NO: 505675 - DNA, 15 bp, Homo sapiens
tgggattgccaaaaa

SEQ ID NO: 505676 - DNA, 15 bp, Homo sapiens
gggattgccaaaaaa

SEQ ID NO: 505677 - DNA, 15 bp, Homo sapiens
ggattgccaaaaaat

SEQ ID NO: 505678 - DNA, 15 bp, Homo sapiens
gattgccaaaaaata

SEQ ID NO: 505679 - DNA, 15 bp, Homo sapiens
attgccaaaaaataa

SEQ ID NO: 505680 - DNA, 15 bp, Homo sapiens
ttgccaaaaaataaa

SEQ ID NO: 505681 - DNA, 15 bp, Homo sapiens
tgccaaaaaataaaa

SEQ ID NO: 505682 - DNA, 15 bp, Homo sapiens
gccaaaaaataaaat

SEQ ID NO: 505683 - DNA, 15 bp, Homo sapiens
ccaaaaaataaaatg

SEQ ID NO: 505684 - DNA, 15 bp, Homo sapiens
caaaaaataaaatga

SEQ ID NO: 505685 - DNA, 15 bp, Homo sapiens
aaaaaataaaatgat

SEQ ID NO: 505686 - DNA, 15 bp, Homo sapiens
aaaaataaaatgata

SEQ ID NO: 505687 - DNA, 15 bp, Homo sapiens
aaaataaaatgatac

SEQ ID NO: 505688 - DNA, 15 bp, Homo sapiens
aaataaaatgataca

SEQ ID NO: 505689 - DNA, 15 bp, Homo sapiens
aataaaatgatacaa

SEQ ID NO: 505690 - DNA, 15 bp, Homo sapiens
ataaaatgatacaag

SEQ ID NO: 505691 - DNA, 15 bp, Homo sapiens
taaaatgatacaagt

SEQ ID NO: 505692 - DNA, 15 bp, Homo sapiens
aaaatgatacaagtg

SEQ ID NO: 505693 - DNA, 15 bp, Homo sapiens
aaatgatacaagtga

SEQ ID NO: 505694 - DNA, 15 bp, Homo sapiens
aatgatacaagtgag

SEQ ID NO: 505695 - DNA, 15 bp, Homo sapiens
atgatacaagtgaga

SEQ ID NO: 505696 - DNA, 15 bp, Homo sapiens
tgatacaagtgagaa

SEQ ID NO: 505697 - DNA, 15 bp, Homo sapiens
gatacaagtgagaaa

SEQ ID NO: 505698 - DNA, 15 bp, Homo sapiens
atacaagtgagaaat

SEQ ID NO: 505699 - DNA, 15 bp, Homo sapiens
tacaagtgagaaata

SEQ ID NO: 505700 - DNA, 15 bp, Homo sapiens
acaagtgagaaatag

SEQ ID NO: 505701 - DNA, 15 bp, Homo sapiens
caagtgagaaataga

SEQ ID NO: 505702 - DNA, 15 bp, Homo sapiens
aagtgagaaatagac

SEQ ID NO: 505703 - DNA, 15 bp, Homo sapiens
agtgagaaatagacc

SEQ ID NO: 505704 - DNA, 15 bp, Homo sapiens
gtgagaaatagacct

SEQ ID NO: 505705 - DNA, 15 bp, Homo sapiens
tgagaaatagacctg

SEQ ID NO: 505706 - DNA, 15 bp, Homo sapiens
gagaaatagacctgg

SEQ ID NO: 505707 - DNA, 15 bp, Homo sapiens
agaaatagacctgga

SEQ ID NO: 505708 - DNA, 15 bp, Homo sapiens
gaaatagacctggag

SEQ ID NO: 505709 - DNA, 15 bp, Homo sapiens
aaatagacctggagg

SEQ ID NO: 505710 - DNA, 15 bp, Homo sapiens
aatagacctggaggg

SEQ ID NO: 505711 - DNA, 15 bp, Homo sapiens
atagacctggaggga

SEQ ID NO: 505712 - DNA, 15 bp, Homo sapiens
tagacctggagggag

SEQ ID NO: 505713 - DNA, 15 bp, Homo sapiens
agacctggagggagg

SEQ ID NO: 505714 - DNA, 15 bp, Homo sapiens
gacctggagggaggt

SEQ ID NO: 505715 - DNA, 15 bp, Homo sapiens
acctggagggaggtg

SEQ ID NO: 505716 - DNA, 15 bp, Homo sapiens
cctggagggaggtgt

SEQ ID NO: 505717 - DNA, 15 bp, Homo sapiens
ctggagggaggtgtg

SEQ ID NO: 505718 - DNA, 15 bp, Homo sapiens
tggagggaggtgtgt

SEQ ID NO: 505719 - DNA, 15 bp, Homo sapiens
ggagggaggtgtgtg

SEQ ID NO: 505720 - DNA, 15 bp, Homo sapiens
gagggaggtgtgtgt

SEQ ID NO: 505721 - DNA, 15 bp, Homo sapiens
agggaggtgtgtgtg

SEQ ID NO: 505722 - DNA, 15 bp, Homo sapiens
gggaggtgtgtgtgt

SEQ ID NO: 505723 - DNA, 15 bp, Homo sapiens
ggaggtgtgtgtgtg

SEQ ID NO: 505724 - DNA, 15 bp, Homo sapiens
gaggtgtgtgtgtgt

SEQ ID NO: 505725 - DNA, 15 bp, Homo sapiens
aggtgtgtgtgtgtg

SEQ ID NO: 505726 - DNA, 15 bp, Homo sapiens
ggtgtgtgtgtgtgt

SEQ ID NO: 505727 - DNA, 15 bp, Homo sapiens
gtgtgtgtgtgtgtt

SEQ ID NO: 505728 - DNA, 15 bp, Homo sapiens
tgtgtgtgtgtgttg

SEQ ID NO: 505729 - DNA, 15 bp, Homo sapiens
gtgtgtgtgtgttgt

SEQ ID NO: 505730 - DNA, 15 bp, Homo sapiens
tgtgtgtgtgttgtt

SEQ ID NO: 505731 - DNA, 15 bp, Homo sapiens
gtgtgtgtgttgttg

SEQ ID NO: 505732 - DNA, 15 bp, Homo sapiens
tgtgtgtgttgttgg

SEQ ID NO: 505733 - DNA, 15 bp, Homo sapiens
gtgtgtgttgttggt

SEQ ID NO: 505734 - DNA, 15 bp, Homo sapiens
tgtgtgttgttggtt

SEQ ID NO: 505735 - DNA, 15 bp, Homo sapiens
gtgtgttgttggtta

SEQ ID NO: 505736 - DNA, 15 bp, Homo sapiens
tgtgttgttggttac

SEQ ID NO: 505737 - DNA, 15 bp, Homo sapiens
gtgttgttggttact

SEQ ID NO: 505738 - DNA, 15 bp, Homo sapiens
tgttgttggttactt

SEQ ID NO: 505739 - DNA, 15 bp, Homo sapiens
gttgttggttacttg

SEQ ID NO: 505740 - DNA, 15 bp, Homo sapiens
ttgttggttacttgc

SEQ ID NO: 505741 - DNA, 15 bp, Homo sapiens
tgttggttacttgct

SEQ ID NO: 505742 - DNA, 15 bp, Homo sapiens
gttggttacttgctt

SEQ ID NO: 505743 - DNA, 15 bp, Homo sapiens
ttggttacttgctta

SEQ ID NO: 505744 - DNA, 15 bp, Homo sapiens
tggttacttgcttat

SEQ ID NO: 505745 - DNA, 15 bp, Homo sapiens
ggttacttgcttatt

SEQ ID NO: 505746 - DNA, 15 bp, Homo sapiens
gttacttgcttattt

SEQ ID NO: 505747 - DNA, 15 bp, Homo sapiens
ttacttgcttatttt

SEQ ID NO: 505748 - DNA, 15 bp, Homo sapiens
tacttgcttatttta

SEQ ID NO: 505749 - DNA, 15 bp, Homo sapiens
acttgcttattttat

SEQ ID NO: 505750 - DNA, 15 bp, Homo sapiens
cttgcttattttatt

SEQ ID NO: 505751 - DNA, 15 bp, Homo sapiens
ttgcttattttattt

SEQ ID NO: 505752 - DNA, 15 bp, Homo sapiens
tgcttattttatttc

SEQ ID NO: 505753 - DNA, 15 bp, Homo sapiens
gcttattttatttct

SEQ ID NO: 505754 - DNA, 15 bp, Homo sapiens
cttattttatttctg

SEQ ID NO: 505755 - DNA, 15 bp, Homo sapiens
ttattttatttctga

SEQ ID NO: 505756 - DNA, 15 bp, Homo sapiens
tattttatttctgag

SEQ ID NO: 505757 - DNA, 15 bp, Homo sapiens
attttatttctgaga

SEQ ID NO: 505758 - DNA, 15 bp, Homo sapiens
ttttatttctgagaa

SEQ ID NO: 505759 - DNA, 15 bp, Homo sapiens
tttatttctgagaac

SEQ ID NO: 505760 - DNA, 15 bp, Homo sapiens
ttatttctgagaacc

SEQ ID NO: 505761 - DNA, 15 bp, Homo sapiens
tatttctgagaaccg

SEQ ID NO: 505762 - DNA, 15 bp, Homo sapiens
atttctgagaaccgt

SEQ ID NO: 505763 - DNA, 15 bp, Homo sapiens
tttctgagaaccgtc

SEQ ID NO: 505764 - DNA, 15 bp, Homo sapiens
ttctgagaaccgtca

SEQ ID NO: 505765 - DNA, 15 bp, Homo sapiens
tctgagaaccgtcag

SEQ ID NO: 505766 - DNA, 15 bp, Homo sapiens
ctgagaaccgtcaga

SEQ ID NO: 505767 - DNA, 15 bp, Homo sapiens
tgagaaccgtcagag

SEQ ID NO: 505768 - DNA, 15 bp, Homo sapiens
gagaaccgtcagagt

SEQ ID NO: 505769 - DNA, 15 bp, Homo sapiens
agaaccgtcagagtt

SEQ ID NO: 505770 - DNA, 15 bp, Homo sapiens
gaaccgtcagagttg

SEQ ID NO: 505771 - DNA, 15 bp, Homo sapiens
aaccgtcagagttga

SEQ ID NO: 505772 - DNA, 15 bp, Homo sapiens
accgtcagagttgag

SEQ ID NO: 505773 - DNA, 15 bp, Homo sapiens
ccgtcagagttgagg

SEQ ID NO: 505774 - DNA, 15 bp, Homo sapiens
cgtcagagttgagga

SEQ ID NO: 505775 - DNA, 15 bp, Homo sapiens
gtcagagttgaggat

SEQ ID NO: 505776 - DNA, 15 bp, Homo sapiens
tcagagttgaggatt

SEQ ID NO: 505777 - DNA, 15 bp, Homo sapiens
cagagttgaggattt

SEQ ID NO: 505778 - DNA, 15 bp, Homo sapiens
agagttgaggatttc

SEQ ID NO: 505779 - DNA, 15 bp, Homo sapiens
gagttgaggatttca

SEQ ID NO: 505780 - DNA, 15 bp, Homo sapiens
agttgaggatttcaa

SEQ ID NO: 505781 - DNA, 15 bp, Homo sapiens
gttgaggatttcaaa

SEQ ID NO: 505782 - DNA, 15 bp, Homo sapiens
ttgaggatttcaaac

SEQ ID NO: 505783 - DNA, 15 bp, Homo sapiens
tgaggatttcaaaca

SEQ ID NO: 505784 - DNA, 15 bp, Homo sapiens
gaggatttcaaacat

SEQ ID NO: 505785 - DNA, 15 bp, Homo sapiens
aggatttcaaacatg

SEQ ID NO: 505786 - DNA, 15 bp, Homo sapiens
ggatttcaaacatga

SEQ ID NO: 505787 - DNA, 15 bp, Homo sapiens
gatttcaaacatgat

SEQ ID NO: 505788 - DNA, 15 bp, Homo sapiens
atttcaaacatgatt

SEQ ID NO: 505789 - DNA, 15 bp, Homo sapiens
tttcaaacatgattc

SEQ ID NO: 505790 - DNA, 15 bp, Homo sapiens
ttcaaacatgattct

SEQ ID NO: 505791 - DNA, 15 bp, Homo sapiens
tcaaacatgattctg

SEQ ID NO: 505792 - DNA, 15 bp, Homo sapiens
caaacatgattctga

SEQ ID NO: 505793 - DNA, 15 bp, Homo sapiens
aaacatgattctgat

SEQ ID NO: 505794 - DNA, 15 bp, Homo sapiens
aacatgattctgata

SEQ ID NO: 505795 - DNA, 15 bp, Homo sapiens
acatgattctgatag

SEQ ID NO: 505796 - DNA, 15 bp, Homo sapiens
catgattctgatagc

SEQ ID NO: 505797 - DNA, 15 bp, Homo sapiens
atgattctgatagca

SEQ ID NO: 505798 - DNA, 15 bp, Homo sapiens
tgattctgatagcat

SEQ ID NO: 505799 - DNA, 15 bp, Homo sapiens
gattctgatagcatt

SEQ ID NO: 505800 - DNA, 15 bp, Homo sapiens
attctgatagcattt

SEQ ID NO: 505801 - DNA, 15 bp, Homo sapiens
ttctgatagcattta

SEQ ID NO: 505802 - DNA, 15 bp, Homo sapiens
tctgatagcatttac

SEQ ID NO: 505803 - DNA, 15 bp, Homo sapiens
ctgatagcatttacc

SEQ ID NO: 505804 - DNA, 15 bp, Homo sapiens
tgatagcatttaccg

SEQ ID NO: 505805 - DNA, 15 bp, Homo sapiens
gatagcatttaccgc

SEQ ID NO: 505806 - DNA, 15 bp, Homo sapiens
atagcatttaccgca

SEQ ID NO: 505807 - DNA, 15 bp, Homo sapiens
tagcatttaccgcaa

SEQ ID NO: 505808 - DNA, 15 bp, Homo sapiens
agcatttaccgcaaa

SEQ ID NO: 505809 - DNA, 15 bp, Homo sapiens
gcatttaccgcaaac

SEQ ID NO: 505810 - DNA, 15 bp, Homo sapiens
catttaccgcaaacg

SEQ ID NO: 505811 - DNA, 15 bp, Homo sapiens
atttaccgcaaacgc

SEQ ID NO: 505812 - DNA, 15 bp, Homo sapiens
tttaccgcaaacgct

SEQ ID NO: 505813 - DNA, 15 bp, Homo sapiens
ttaccgcaaacgctg

SEQ ID NO: 505814 - DNA, 15 bp, Homo sapiens
taccgcaaacgctga

SEQ ID NO: 505815 - DNA, 15 bp, Homo sapiens
accgcaaacgctgat

SEQ ID NO: 505816 - DNA, 15 bp, Homo sapiens
ccgcaaacgctgatg

SEQ ID NO: 505817 - DNA, 15 bp, Homo sapiens
cgcaaacgctgatgg

SEQ ID NO: 505818 - DNA, 15 bp, Homo sapiens
gcaaacgctgatggc

SEQ ID NO: 505819 - DNA, 15 bp, Homo sapiens
caaacgctgatggca

SEQ ID NO: 505820 - DNA, 15 bp, Homo sapiens
aaacgctgatggcag

SEQ ID NO: 505821 - DNA, 15 bp, Homo sapiens
aacgctgatggcagt

SEQ ID NO: 505822 - DNA, 15 bp, Homo sapiens
acgctgatggcagtt

SEQ ID NO: 505823 - DNA, 15 bp, Homo sapiens
cgctgatggcagttg

SEQ ID NO: 505824 - DNA, 15 bp, Homo sapiens
gctgatggcagttgc

SEQ ID NO: 505825 - DNA, 15 bp, Homo sapiens
ctgatggcagttgct

SEQ ID NO: 505826 - DNA, 15 bp, Homo sapiens
tgatggcagttgctc

SEQ ID NO: 505827 - DNA, 15 bp, Homo sapiens
gatggcagttgctct

SEQ ID NO: 505828 - DNA, 15 bp, Homo sapiens
atggcagttgctctc

SEQ ID NO: 505829 - DNA, 15 bp, Homo sapiens
tggcagttgctctcc

SEQ ID NO: 505830 - DNA, 15 bp, Homo sapiens
ggcagttgctctcct

SEQ ID NO: 505831 - DNA, 15 bp, Homo sapiens
gcagttgctctcctt

SEQ ID NO: 505832 - DNA, 15 bp, Homo sapiens
cagttgctctccttt

SEQ ID NO: 505833 - DNA, 15 bp, Homo sapiens
agttgctctcctttg

SEQ ID NO: 505834 - DNA, 15 bp, Homo sapiens
gttgctctcctttgc

SEQ ID NO: 505835 - DNA, 15 bp, Homo sapiens
ttgctctcctttgcc

SEQ ID NO: 505836 - DNA, 15 bp, Homo sapiens
tgctctcctttgcct

SEQ ID NO: 505837 - DNA, 15 bp, Homo sapiens
gctctcctttgcctt

SEQ ID NO: 505838 - DNA, 15 bp, Homo sapiens
ctctcctttgcctta

SEQ ID NO: 505839 - DNA, 15 bp, Homo sapiens
tctcctttgccttat

SEQ ID NO: 505840 - DNA, 15 bp, Homo sapiens
ctcctttgccttata

SEQ ID NO: 505841 - DNA, 15 bp, Homo sapiens
tcctttgccttatag

SEQ ID NO: 505842 - DNA, 15 bp, Homo sapiens
cctttgccttatagc

SEQ ID NO: 505843 - DNA, 15 bp, Homo sapiens
ctttgccttatagct

SEQ ID NO: 505844 - DNA, 15 bp, Homo sapiens
tttgccttatagcta

SEQ ID NO: 505845 - DNA, 15 bp, Homo sapiens
ttgccttatagctaa

SEQ ID NO: 505846 - DNA, 15 bp, Homo sapiens
tgccttatagctaac

SEQ ID NO: 505847 - DNA, 15 bp, Homo sapiens
gccttatagctaact

SEQ ID NO: 505848 - DNA, 15 bp, Homo sapiens
ccttatagctaactg

SEQ ID NO: 505849 - DNA, 15 bp, Homo sapiens
cttatagctaactgg

SEQ ID NO: 505850 - DNA, 15 bp, Homo sapiens
ttatagctaactggg

SEQ ID NO: 505851 - DNA, 15 bp, Homo sapiens
tatagctaactggga

SEQ ID NO: 505852 - DNA, 15 bp, Homo sapiens
atagctaactgggac

SEQ ID NO: 505853 - DNA, 15 bp, Homo sapiens
tagctaactgggact

SEQ ID NO: 505854 - DNA, 15 bp, Homo sapiens
agctaactgggacta

SEQ ID NO: 505855 - DNA, 15 bp, Homo sapiens
gctaactgggactag

SEQ ID NO: 505856 - DNA, 15 bp, Homo sapiens
ctaactgggactaga

SEQ ID NO: 505857 - DNA, 15 bp, Homo sapiens
taactgggactagaa

SEQ ID NO: 505858 - DNA, 15 bp, Homo sapiens
aactgggactagaaa

SEQ ID NO: 505859 - DNA, 15 bp, Homo sapiens
actgggactagaaac

SEQ ID NO: 505860 - DNA, 15 bp, Homo sapiens
ctgggactagaaaca

SEQ ID NO: 505861 - DNA, 15 bp, Homo sapiens
tgggactagaaacag

SEQ ID NO: 505862 - DNA, 15 bp, Homo sapiens
gggactagaaacagc

SEQ ID NO: 505863 - DNA, 15 bp, Homo sapiens
ggactagaaacagct

SEQ ID NO: 505864 - DNA, 15 bp, Homo sapiens
gactagaaacagctc

SEQ ID NO: 505865 - DNA, 15 bp, Homo sapiens
actagaaacagctcc

SEQ ID NO: 505866 - DNA, 15 bp, Homo sapiens
ctagaaacagctcca

SEQ ID NO: 505867 - DNA, 15 bp, Homo sapiens
tagaaacagctccat

SEQ ID NO: 505868 - DNA, 15 bp, Homo sapiens
agaaacagctccatc

SEQ ID NO: 505869 - DNA, 15 bp, Homo sapiens
gaaacagctccatca

SEQ ID NO: 505870 - DNA, 15 bp, Homo sapiens
aaacagctccatcac

SEQ ID NO: 505871 - DNA, 15 bp, Homo sapiens
aacagctccatcacc

SEQ ID NO: 505872 - DNA, 15 bp, Homo sapiens
acagctccatcaccc

SEQ ID NO: 505873 - DNA, 15 bp, Homo sapiens
cagctccatcaccca

SEQ ID NO: 505874 - DNA, 15 bp, Homo sapiens
agctccatcacccag

SEQ ID NO: 505875 - DNA, 15 bp, Homo sapiens
gctccatcacccagg

SEQ ID NO: 505876 - DNA, 15 bp, Homo sapiens
ctccatcacccaggt

SEQ ID NO: 505877 - DNA, 15 bp, Homo sapiens
tccatcacccaggtg

SEQ ID NO: 505878 - DNA, 15 bp, Homo sapiens
ccatcacccaggtga

SEQ ID NO: 505879 - DNA, 15 bp, Homo sapiens
catcacccaggtgag

SEQ ID NO: 505880 - DNA, 15 bp, Homo sapiens
atcacccaggtgagt

SEQ ID NO: 505881 - DNA, 15 bp, Homo sapiens
tcacccaggtgagtt

SEQ ID NO: 505882 - DNA, 15 bp, Homo sapiens
cacccaggtgagttt

SEQ ID NO: 505883 - DNA, 15 bp, Homo sapiens
acccaggtgagtttt

SEQ ID NO: 505884 - DNA, 15 bp, Homo sapiens
cccaggtgagtttta

SEQ ID NO: 505885 - DNA, 15 bp, Homo sapiens
ccaggtgagttttat

SEQ ID NO: 505886 - DNA, 15 bp, Homo sapiens
caggtgagttttata

SEQ ID NO: 505887 - DNA, 15 bp, Homo sapiens
aggtgagttttataa

SEQ ID NO: 505888 - DNA, 15 bp, Homo sapiens
ggtgagttttataag

SEQ ID NO: 505889 - DNA, 15 bp, Homo sapiens
gtgagttttataagg

SEQ ID NO: 505890 - DNA, 15 bp, Homo sapiens
tgagttttataagga

SEQ ID NO: 505891 - DNA, 15 bp, Homo sapiens
gagttttataaggaa

SEQ ID NO: 505892 - DNA, 15 bp, Homo sapiens
agttttataaggaaa

SEQ ID NO: 505893 - DNA, 15 bp, Homo sapiens
gttttataaggaaac

SEQ ID NO: 505894 - DNA, 15 bp, Homo sapiens
ttttataaggaaaca

SEQ ID NO: 505895 - DNA, 15 bp, Homo sapiens
tttataaggaaacat

SEQ ID NO: 505896 - DNA, 15 bp, Homo sapiens
ttataaggaaacata

SEQ ID NO: 505897 - DNA, 15 bp, Homo sapiens
tataaggaaacataa

SEQ ID NO: 505898 - DNA, 15 bp, Homo sapiens
ataaggaaacataag

SEQ ID NO: 505899 - DNA, 15 bp, Homo sapiens
taaggaaacataagg

SEQ ID NO: 505900 - DNA, 15 bp, Homo sapiens
aaggaaacataaggg

SEQ ID NO: 505901 - DNA, 15 bp, Homo sapiens
aggaaacataagggg

SEQ ID NO: 505902 - DNA, 15 bp, Homo sapiens
ggaaacataaggggg

SEQ ID NO: 505903 - DNA, 15 bp, Homo sapiens
gaaacataagggggc

SEQ ID NO: 505904 - DNA, 15 bp, Homo sapiens
aaacataagggggct

SEQ ID NO: 505905 - DNA, 15 bp, Homo sapiens
aacataagggggctg

SEQ ID NO: 505906 - DNA, 15 bp, Homo sapiens
acataagggggctgg

SEQ ID NO: 505907 - DNA, 15 bp, Homo sapiens
cataagggggctggt

SEQ ID NO: 505908 - DNA, 15 bp, Homo sapiens
ataagggggctggtc

SEQ ID NO: 505909 - DNA, 15 bp, Homo sapiens
taagggggctggtct

SEQ ID NO: 505910 - DNA, 15 bp, Homo sapiens
aagggggctggtctg

SEQ ID NO: 505911 - DNA, 15 bp, Homo sapiens
agggggctggtctgt

SEQ ID NO: 505912 - DNA, 15 bp, Homo sapiens
gggggctggtctgtt

SEQ ID NO: 505913 - DNA, 15 bp, Homo sapiens
ggggctggtctgttg

SEQ ID NO: 505914 - DNA, 15 bp, Homo sapiens
gggctggtctgttgc

SEQ ID NO: 505915 - DNA, 15 bp, Homo sapiens
ggctggtctgttgct

SEQ ID NO: 505916 - DNA, 15 bp, Homo sapiens
gctggtctgttgctt

SEQ ID NO: 505917 - DNA, 15 bp, Homo sapiens
ctggtctgttgcttc

SEQ ID NO: 505918 - DNA, 15 bp, Homo sapiens
tggtctgttgcttcc

SEQ ID NO: 505919 - DNA, 15 bp, Homo sapiens
ggtctgttgcttccc

SEQ ID NO: 505920 - DNA, 15 bp, Homo sapiens
gtctgttgcttccct

SEQ ID NO: 505921 - DNA, 15 bp, Homo sapiens
tctgttgcttccctc

SEQ ID NO: 505922 - DNA, 15 bp, Homo sapiens
ctgttgcttccctcc

SEQ ID NO: 505923 - DNA, 15 bp, Homo sapiens
tgttgcttccctcct

SEQ ID NO: 505924 - DNA, 15 bp, Homo sapiens
gttgcttccctcctc

SEQ ID NO: 505925 - DNA, 15 bp, Homo sapiens
ttgcttccctcctct

SEQ ID NO: 505926 - DNA, 15 bp, Homo sapiens
tgcttccctcctctt

SEQ ID NO: 505927 - DNA, 15 bp, Homo sapiens
gcttccctcctcttg

SEQ ID NO: 505928 - DNA, 15 bp, Homo sapiens
cttccctcctcttgt

SEQ ID NO: 505929 - DNA, 15 bp, Homo sapiens
ttccctcctcttgta

SEQ ID NO: 505930 - DNA, 15 bp, Homo sapiens
tccctcctcttgtaa

SEQ ID NO: 505931 - DNA, 15 bp, Homo sapiens
ccctcctcttgtaag

SEQ ID NO: 505932 - DNA, 15 bp, Homo sapiens
cctcctcttgtaagc

SEQ ID NO: 505933 - DNA, 15 bp, Homo sapiens
ctcctcttgtaagct

SEQ ID NO: 505934 - DNA, 15 bp, Homo sapiens
tcctcttgtaagctt

SEQ ID NO: 505935 - DNA, 15 bp, Homo sapiens
cctcttgtaagcttt

SEQ ID NO: 505936 - DNA, 15 bp, Homo sapiens
ctcttgtaagctttg

SEQ ID NO: 505937 - DNA, 15 bp, Homo sapiens
tcttgtaagctttgg

SEQ ID NO: 505938 - DNA, 15 bp, Homo sapiens
cttgtaagctttgga

SEQ ID NO: 505939 - DNA, 15 bp, Homo sapiens
ttgtaagctttggat

SEQ ID NO: 505940 - DNA, 15 bp, Homo sapiens
tgtaagctttggata

SEQ ID NO: 505941 - DNA, 15 bp, Homo sapiens
gtaagctttggataa

SEQ ID NO: 505942 - DNA, 15 bp, Homo sapiens
taagctttggataac

SEQ ID NO: 505943 - DNA, 15 bp, Homo sapiens
aagctttggataact

SEQ ID NO: 505944 - DNA, 15 bp, Homo sapiens
agctttggataactc

SEQ ID NO: 505945 - DNA, 15 bp, Homo sapiens
gctttggataactct

SEQ ID NO: 505946 - DNA, 15 bp, Homo sapiens
ctttggataactctg

SEQ ID NO: 505947 - DNA, 15 bp, Homo sapiens
tttggataactctga

SEQ ID NO: 505948 - DNA, 15 bp, Homo sapiens
ttggataactctgaa

SEQ ID NO: 505949 - DNA, 15 bp, Homo sapiens
tggataactctgaat

SEQ ID NO: 505950 - DNA, 15 bp, Homo sapiens
ggataactctgaatt

SEQ ID NO: 505951 - DNA, 15 bp, Homo sapiens
gataactctgaattt

SEQ ID NO: 505952 - DNA, 15 bp, Homo sapiens
ataactctgaattta

SEQ ID NO: 505953 - DNA, 15 bp, Homo sapiens
taactctgaatttag

SEQ ID NO: 505954 - DNA, 15 bp, Homo sapiens
aactctgaatttaga

SEQ ID NO: 505955 - DNA, 15 bp, Homo sapiens
actctgaatttagaa

SEQ ID NO: 505956 - DNA, 15 bp, Homo sapiens
ctctgaatttagaaa

SEQ ID NO: 505957 - DNA, 15 bp, Homo sapiens
tctgaatttagaaag

SEQ ID NO: 505958 - DNA, 15 bp, Homo sapiens
ctgaatttagaaaga

SEQ ID NO: 505959 - DNA, 15 bp, Homo sapiens
tgaatttagaaagat

SEQ ID NO: 505960 - DNA, 15 bp, Homo sapiens
gaatttagaaagata

SEQ ID NO: 505961 - DNA, 15 bp, Homo sapiens
aatttagaaagatat

SEQ ID NO: 505962 - DNA, 15 bp, Homo sapiens
atttagaaagatatt

SEQ ID NO: 505963 - DNA, 15 bp, Homo sapiens
tttagaaagatattt

SEQ ID NO: 505964 - DNA, 15 bp, Homo sapiens
ttagaaagatatttc

SEQ ID NO: 505965 - DNA, 15 bp, Homo sapiens
tagaaagatatttct

SEQ ID NO: 505966 - DNA, 15 bp, Homo sapiens
agaaagatatttctg

SEQ ID NO: 505967 - DNA, 15 bp, Homo sapiens
gaaagatatttctga

SEQ ID NO: 505968 - DNA, 15 bp, Homo sapiens
aaagatatttctgaa

SEQ ID NO: 505969 - DNA, 15 bp, Homo sapiens
aagatatttctgaag

SEQ ID NO: 505970 - DNA, 15 bp, Homo sapiens
agatatttctgaaga

SEQ ID NO: 505971 - DNA, 15 bp, Homo sapiens
gatatttctgaagat

SEQ ID NO: 505972 - DNA, 15 bp, Homo sapiens
atatttctgaagata

SEQ ID NO: 505973 - DNA, 15 bp, Homo sapiens
tatttctgaagatat

SEQ ID NO: 505974 - DNA, 15 bp, Homo sapiens
atttctgaagatatt

SEQ ID NO: 505975 - DNA, 15 bp, Homo sapiens
tttctgaagatattt

SEQ ID NO: 505976 - DNA, 15 bp, Homo sapiens
ttctgaagatattta

SEQ ID NO: 505977 - DNA, 15 bp, Homo sapiens
tctgaagatatttaa

SEQ ID NO: 505978 - DNA, 15 bp, Homo sapiens
ctgaagatatttaaa

SEQ ID NO: 505979 - DNA, 15 bp, Homo sapiens
tgaagatatttaaag

SEQ ID NO: 505980 - DNA, 15 bp, Homo sapiens
gaagatatttaaaga

SEQ ID NO: 505981 - DNA, 15 bp, Homo sapiens
aagatatttaaagaa

SEQ ID NO: 505982 - DNA, 15 bp, Homo sapiens
agatatttaaagaag

SEQ ID NO: 505983 - DNA, 15 bp, Homo sapiens
gatatttaaagaagg

SEQ ID NO: 505984 - DNA, 15 bp, Homo sapiens
atatttaaagaagga

SEQ ID NO: 505985 - DNA, 15 bp, Homo sapiens
tatttaaagaaggag

SEQ ID NO: 505986 - DNA, 15 bp, Homo sapiens
atttaaagaaggaga

SEQ ID NO: 505987 - DNA, 15 bp, Homo sapiens
tttaaagaaggagac

SEQ ID NO: 505988 - DNA, 15 bp, Homo sapiens
ttaaagaaggagact

SEQ ID NO: 505989 - DNA, 15 bp, Homo sapiens
taaagaaggagactt

SEQ ID NO: 505990 - DNA, 15 bp, Homo sapiens
aaagaaggagactta

SEQ ID NO: 505991 - DNA, 15 bp, Homo sapiens
aagaaggagacttac

SEQ ID NO: 505992 - DNA, 15 bp, Homo sapiens
agaaggagacttaca

SEQ ID NO: 505993 - DNA, 15 bp, Homo sapiens
gaaggagacttacag

SEQ ID NO: 505994 - DNA, 15 bp, Homo sapiens
aaggagacttacaga

SEQ ID NO: 505995 - DNA, 15 bp, Homo sapiens
aggagacttacagag

SEQ ID NO: 505996 - DNA, 15 bp, Homo sapiens
ggagacttacagagt

SEQ ID NO: 505997 - DNA, 15 bp, Homo sapiens
gagacttacagagtt

SEQ ID NO: 505998 - DNA, 15 bp, Homo sapiens
agacttacagagttg

SEQ ID NO: 505999 - DNA, 15 bp, Homo sapiens
gacttacagagttga

SEQ ID NO: 506000 - DNA, 15 bp, Homo sapiens
acttacagagttgaa

SEQ ID NO: 506001 - DNA, 15 bp, Homo sapiens
cttacagagttgaat

SEQ ID NO: 506002 - DNA, 15 bp, Homo sapiens
ttacagagttgaata

SEQ ID NO: 506003 - DNA, 15 bp, Homo sapiens
tacagagttgaataa

SEQ ID NO: 506004 - DNA, 15 bp, Homo sapiens
acagagttgaataaa

SEQ ID NO: 506005 - DNA, 15 bp, Homo sapiens
cagagttgaataaac

SEQ ID NO: 506006 - DNA, 15 bp, Homo sapiens
agagttgaataaaca

SEQ ID NO: 506007 - DNA, 15 bp, Homo sapiens
gagttgaataaacat

SEQ ID NO: 506008 - DNA, 15 bp, Homo sapiens
agttgaataaacatc

SEQ ID NO: 506009 - DNA, 15 bp, Homo sapiens
gttgaataaacatcc

SEQ ID NO: 506010 - DNA, 15 bp, Homo sapiens
ttgaataaacatcct

SEQ ID NO: 506011 - DNA, 15 bp, Homo sapiens
tgaataaacatcctg

SEQ ID NO: 506012 - DNA, 15 bp, Homo sapiens
gaataaacatcctgg

SEQ ID NO: 506013 - DNA, 15 bp, Homo sapiens
aataaacatcctgga

SEQ ID NO: 506014 - DNA, 15 bp, Homo sapiens
ataaacatcctggaa

SEQ ID NO: 506015 - DNA, 15 bp, Homo sapiens
taaacatcctggaat

SEQ ID NO: 506016 - DNA, 15 bp, Homo sapiens
aaacatcctggaatt

SEQ ID NO: 506017 - DNA, 15 bp, Homo sapiens
aacatcctggaattt

SEQ ID NO: 506018 - DNA, 15 bp, Homo sapiens
acatcctggaatttt

SEQ ID NO: 506019 - DNA, 15 bp, Homo sapiens
catcctggaattttt

SEQ ID NO: 506020 - DNA, 15 bp, Homo sapiens
atcctggaatttttc

SEQ ID NO: 506021 - DNA, 15 bp, Homo sapiens
tcctggaatttttct

SEQ ID NO: 506022 - DNA, 15 bp, Homo sapiens
cctggaatttttctt

SEQ ID NO: 506023 - DNA, 15 bp, Homo sapiens
ctggaatttttcttt

SEQ ID NO: 506024 - DNA, 15 bp, Homo sapiens
tggaatttttctttc

SEQ ID NO: 506025 - DNA, 15 bp, Homo sapiens
ggaatttttctttct

SEQ ID NO: 506026 - DNA, 15 bp, Homo sapiens
gaatttttctttctc

SEQ ID NO: 506027 - DNA, 15 bp, Homo sapiens
aatttttctttctct

SEQ ID NO: 506028 - DNA, 15 bp, Homo sapiens
atttttctttctcta

SEQ ID NO: 506029 - DNA, 15 bp, Homo sapiens
tttttctttctctaa

SEQ ID NO: 506030 - DNA, 15 bp, Homo sapiens
ttttctttctctaaa

SEQ ID NO: 506031 - DNA, 15 bp, Homo sapiens
tttctttctctaaat

SEQ ID NO: 506032 - DNA, 15 bp, Homo sapiens
ttctttctctaaatg

SEQ ID NO: 506033 - DNA, 15 bp, Homo sapiens
tctttctctaaatga

SEQ ID NO: 506034 - DNA, 15 bp, Homo sapiens
ctttctctaaatgaa

SEQ ID NO: 506035 - DNA, 15 bp, Homo sapiens
tttctctaaatgaat

SEQ ID NO: 506036 - DNA, 15 bp, Homo sapiens
ttctctaaatgaatg

SEQ ID NO: 506037 - DNA, 15 bp, Homo sapiens
tctctaaatgaatgt

SEQ ID NO: 506038 - DNA, 15 bp, Homo sapiens
ctctaaatgaatgtc

SEQ ID NO: 506039 - DNA, 15 bp, Homo sapiens
tctaaatgaatgtca

SEQ ID NO: 506040 - DNA, 15 bp, Homo sapiens
ctaaatgaatgtcag

SEQ ID NO: 506041 - DNA, 15 bp, Homo sapiens
taaatgaatgtcagc

SEQ ID NO: 506042 - DNA, 15 bp, Homo sapiens
aaatgaatgtcagct

SEQ ID NO: 506043 - DNA, 15 bp, Homo sapiens
aatgaatgtcagctt

SEQ ID NO: 506044 - DNA, 15 bp, Homo sapiens
atgaatgtcagcttc

SEQ ID NO: 506045 - DNA, 15 bp, Homo sapiens
tgaatgtcagcttca

SEQ ID NO: 506046 - DNA, 15 bp, Homo sapiens
gaatgtcagcttcag

SEQ ID NO: 506047 - DNA, 15 bp, Homo sapiens
aatgtcagcttcaga

SEQ ID NO: 506048 - DNA, 15 bp, Homo sapiens
atgtcagcttcagag

SEQ ID NO: 506049 - DNA, 15 bp, Homo sapiens
tgtcagcttcagaga

SEQ ID NO: 506050 - DNA, 15 bp, Homo sapiens
gtcagcttcagagag

SEQ ID NO: 506051 - DNA, 15 bp, Homo sapiens
tcagcttcagagagc

SEQ ID NO: 506052 - DNA, 15 bp, Homo sapiens
cagcttcagagagcc

SEQ ID NO: 506053 - DNA, 15 bp, Homo sapiens
agcttcagagagccc

SEQ ID NO: 506054 - DNA, 15 bp, Homo sapiens
gcttcagagagccca

SEQ ID NO: 506055 - DNA, 15 bp, Homo sapiens
cttcagagagcccac

SEQ ID NO: 506056 - DNA, 15 bp, Homo sapiens
ttcagagagcccacc

SEQ ID NO: 506057 - DNA, 15 bp, Homo sapiens
tcagagagcccacct

SEQ ID NO: 506058 - DNA, 15 bp, Homo sapiens
cagagagcccacctg

SEQ ID NO: 506059 - DNA, 15 bp, Homo sapiens
agagagcccacctgc

SEQ ID NO: 506060 - DNA, 15 bp, Homo sapiens
gagagcccacctgca

SEQ ID NO: 506061 - DNA, 15 bp, Homo sapiens
agagcccacctgcag

SEQ ID NO: 506062 - DNA, 15 bp, Homo sapiens
gagcccacctgcaga

SEQ ID NO: 506063 - DNA, 15 bp, Homo sapiens
agcccacctgcagac

SEQ ID NO: 506064 - DNA, 15 bp, Homo sapiens
gcccacctgcagaca

SEQ ID NO: 506065 - DNA, 15 bp, Homo sapiens
cccacctgcagacag

SEQ ID NO: 506066 - DNA, 15 bp, Homo sapiens
ccacctgcagacaga

SEQ ID NO: 506067 - DNA, 15 bp, Homo sapiens
cacctgcagacagag

SEQ ID NO: 506068 - DNA, 15 bp, Homo sapiens
acctgcagacagagg

SEQ ID NO: 506069 - DNA, 15 bp, Homo sapiens
cctgcagacagaggc

SEQ ID NO: 506070 - DNA, 15 bp, Homo sapiens
ctgcagacagaggca

SEQ ID NO: 506071 - DNA, 15 bp, Homo sapiens
tgcagacagaggcag

SEQ ID NO: 506072 - DNA, 15 bp, Homo sapiens
gcagacagaggcagt

SEQ ID NO: 506073 - DNA, 15 bp, Homo sapiens
cagacagaggcagtg

SEQ ID NO: 506074 - DNA, 15 bp, Homo sapiens
agacagaggcagtga

SEQ ID NO: 506075 - DNA, 15 bp, Homo sapiens
gacagaggcagtgac

SEQ ID NO: 506076 - DNA, 15 bp, Homo sapiens
acagaggcagtgact

SEQ ID NO: 506077 - DNA, 15 bp, Homo sapiens
cagaggcagtgactc

SEQ ID NO: 506078 - DNA, 15 bp, Homo sapiens
agaggcagtgactcc

SEQ ID NO: 506079 - DNA, 15 bp, Homo sapiens
gaggcagtgactccc

SEQ ID NO: 506080 - DNA, 15 bp, Homo sapiens
aggcagtgactcccc

SEQ ID NO: 506081 - DNA, 15 bp, Homo sapiens
ggcagtgactcccct

SEQ ID NO: 506082 - DNA, 15 bp, Homo sapiens
gcagtgactccccta

SEQ ID NO: 506083 - DNA, 15 bp, Homo sapiens
cagtgactcccctaa

SEQ ID NO: 506084 - DNA, 15 bp, Homo sapiens
agtgactcccctaaa

SEQ ID NO: 506085 - DNA, 15 bp, Homo sapiens
gtgactcccctaaac

SEQ ID NO: 506086 - DNA, 15 bp, Homo sapiens
tgactcccctaaaca

SEQ ID NO: 506087 - DNA, 15 bp, Homo sapiens
gactcccctaaacat

SEQ ID NO: 506088 - DNA, 15 bp, Homo sapiens
actcccctaaacatt

SEQ ID NO: 506089 - DNA, 15 bp, Homo sapiens
ctcccctaaacattt

SEQ ID NO: 506090 - DNA, 15 bp, Homo sapiens
tcccctaaacatttt

SEQ ID NO: 506091 - DNA, 15 bp, Homo sapiens
cccctaaacattttc

SEQ ID NO: 506092 - DNA, 15 bp, Homo sapiens
ccctaaacattttcg

SEQ ID NO: 506093 - DNA, 15 bp, Homo sapiens
cctaaacattttcgg

SEQ ID NO: 506094 - DNA, 15 bp, Homo sapiens
ctaaacattttcgga

SEQ ID NO: 506095 - DNA, 15 bp, Homo sapiens
taaacattttcggag

SEQ ID NO: 506096 - DNA, 15 bp, Homo sapiens
aaacattttcggagt

SEQ ID NO: 506097 - DNA, 15 bp, Homo sapiens
aacattttcggagta

SEQ ID NO: 506098 - DNA, 15 bp, Homo sapiens
acattttcggagtat

SEQ ID NO: 506099 - DNA, 15 bp, Homo sapiens
cattttcggagtatc

SEQ ID NO: 506100 - DNA, 15 bp, Homo sapiens
attttcggagtatct

SEQ ID NO: 506101 - DNA, 15 bp, Homo sapiens
ttttcggagtatctc

SEQ ID NO: 506102 - DNA, 15 bp, Homo sapiens
tttcggagtatctct

SEQ ID NO: 506103 - DNA, 15 bp, Homo sapiens
ttcggagtatctctt

SEQ ID NO: 506104 - DNA, 15 bp, Homo sapiens
tcggagtatctcttg

SEQ ID NO: 506105 - DNA, 15 bp, Homo sapiens
cggagtatctcttgg

SEQ ID NO: 506106 - DNA, 15 bp, Homo sapiens
ggagtatctcttgga

SEQ ID NO: 506107 - DNA, 15 bp, Homo sapiens
gagtatctcttggaa

SEQ ID NO: 506108 - DNA, 15 bp, Homo sapiens
agtatctcttggaat

SEQ ID NO: 506109 - DNA, 15 bp, Homo sapiens
gtatctcttggaatt

SEQ ID NO: 506110 - DNA, 15 bp, Homo sapiens
tatctcttggaattg

SEQ ID NO: 506111 - DNA, 15 bp, Homo sapiens
atctcttggaattgg

SEQ ID NO: 506112 - DNA, 15 bp, Homo sapiens
tctcttggaattggt

SEQ ID NO: 506113 - DNA, 15 bp, Homo sapiens
ctcttggaattggtt

SEQ ID NO: 506114 - DNA, 15 bp, Homo sapiens
tcttggaattggttt

SEQ ID NO: 506115 - DNA, 15 bp, Homo sapiens
cttggaattggttta

SEQ ID NO: 506116 - DNA, 15 bp, Homo sapiens
ttggaattggtttaa

SEQ ID NO: 506117 - DNA, 15 bp, Homo sapiens
tggaattggtttaaa

SEQ ID NO: 506118 - DNA, 15 bp, Homo sapiens
ggaattggtttaaag

SEQ ID NO: 506119 - DNA, 15 bp, Homo sapiens
gaattggtttaaagc

SEQ ID NO: 506120 - DNA, 15 bp, Homo sapiens
aattggtttaaagct

SEQ ID NO: 506121 - DNA, 15 bp, Homo sapiens
attggtttaaagctg

SEQ ID NO: 506122 - DNA, 15 bp, Homo sapiens
ttggtttaaagctgg

SEQ ID NO: 506123 - DNA, 15 bp, Homo sapiens
tggtttaaagctggt

SEQ ID NO: 506124 - DNA, 15 bp, Homo sapiens
ggtttaaagctggtt

SEQ ID NO: 506125 - DNA, 15 bp, Homo sapiens
gtttaaagctggttt

SEQ ID NO: 506126 - DNA, 15 bp, Homo sapiens
tttaaagctggtttc

SEQ ID NO: 506127 - DNA, 15 bp, Homo sapiens
ttaaagctggtttca

SEQ ID NO: 506128 - DNA, 15 bp, Homo sapiens
taaagctggtttcag

SEQ ID NO: 506129 - DNA, 15 bp, Homo sapiens
aaagctggtttcaga

SEQ ID NO: 506130 - DNA, 15 bp, Homo sapiens
aagctggtttcagag

SEQ ID NO: 506131 - DNA, 15 bp, Homo sapiens
agctggtttcagagt

SEQ ID NO: 506132 - DNA, 15 bp, Homo sapiens
gctggtttcagagtc

SEQ ID NO: 506133 - DNA, 15 bp, Homo sapiens
ctggtttcagagtcc

SEQ ID NO: 506134 - DNA, 15 bp, Homo sapiens
tggtttcagagtcca

SEQ ID NO: 506135 - DNA, 15 bp, Homo sapiens
ggtttcagagtccac

SEQ ID NO: 506136 - DNA, 15 bp, Homo sapiens
gtttcagagtccaca

SEQ ID NO: 506137 - DNA, 15 bp, Homo sapiens
tttcagagtccacaa

SEQ ID NO: 506138 - DNA, 15 bp, Homo sapiens
ttcagagtccacaaa

SEQ ID NO: 506139 - DNA, 15 bp, Homo sapiens
tcagagtccacaaag

SEQ ID NO: 506140 - DNA, 15 bp, Homo sapiens
cagagtccacaaaga

SEQ ID NO: 506141 - DNA, 15 bp, Homo sapiens
agagtccacaaagaa

SEQ ID NO: 506142 - DNA, 15 bp, Homo sapiens
gagtccacaaagaaa

SEQ ID NO: 506143 - DNA, 15 bp, Homo sapiens
agtccacaaagaaat

SEQ ID NO: 506144 - DNA, 15 bp, Homo sapiens
gtccacaaagaaatg

SEQ ID NO: 506145 - DNA, 15 bp, Homo sapiens
tccacaaagaaatgg

SEQ ID NO: 506146 - DNA, 15 bp, Homo sapiens
ccacaaagaaatggc

SEQ ID NO: 506147 - DNA, 15 bp, Homo sapiens
cacaaagaaatggcc

SEQ ID NO: 506148 - DNA, 15 bp, Homo sapiens
acaaagaaatggccc

SEQ ID NO: 506149 - DNA, 15 bp, Homo sapiens
caaagaaatggccct

SEQ ID NO: 506150 - DNA, 15 bp, Homo sapiens
aaagaaatggccctt

SEQ ID NO: 506151 - DNA, 15 bp, Homo sapiens
aagaaatggcccttt

SEQ ID NO: 506152 - DNA, 15 bp, Homo sapiens
agaaatggcccttta

SEQ ID NO: 506153 - DNA, 15 bp, Homo sapiens
gaaatggccctttac

SEQ ID NO: 506154 - DNA, 15 bp, Homo sapiens
aaatggccctttaca

SEQ ID NO: 506155 - DNA, 15 bp, Homo sapiens
aatggccctttacag

SEQ ID NO: 506156 - DNA, 15 bp, Homo sapiens
atggccctttacagg

SEQ ID NO: 506157 - DNA, 15 bp, Homo sapiens
tggccctttacagga

SEQ ID NO: 506158 - DNA, 15 bp, Homo sapiens
ggccctttacaggat

SEQ ID NO: 506159 - DNA, 15 bp, Homo sapiens
gccctttacaggatc

SEQ ID NO: 506160 - DNA, 15 bp, Homo sapiens
ccctttacaggatcc

SEQ ID NO: 506161 - DNA, 15 bp, Homo sapiens
cctttacaggatcct

SEQ ID NO: 506162 - DNA, 15 bp, Homo sapiens
ctttacaggatcctt

SEQ ID NO: 506163 - DNA, 15 bp, Homo sapiens
tttacaggatccttt

SEQ ID NO: 506164 - DNA, 15 bp, Homo sapiens
ttacaggatccttta

SEQ ID NO: 506165 - DNA, 15 bp, Homo sapiens
tacaggatcctttat

SEQ ID NO: 506166 - DNA, 15 bp, Homo sapiens
acaggatcctttatt

SEQ ID NO: 506167 - DNA, 15 bp, Homo sapiens
caggatcctttattg

SEQ ID NO: 506168 - DNA, 15 bp, Homo sapiens
aggatcctttattgc

SEQ ID NO: 506169 - DNA, 15 bp, Homo sapiens
ggatcctttattgct

SEQ ID NO: 506170 - DNA, 15 bp, Homo sapiens
gatcctttattgctt

SEQ ID NO: 506171 - DNA, 15 bp, Homo sapiens
atcctttattgcttt

SEQ ID NO: 506172 - DNA, 15 bp, Homo sapiens
tcctttattgctttt

SEQ ID NO: 506173 - DNA, 15 bp, Homo sapiens
cctttattgcttttg

SEQ ID NO: 506174 - DNA, 15 bp, Homo sapiens
ctttattgcttttgg

SEQ ID NO: 506175 - DNA, 15 bp, Homo sapiens
tttattgcttttggt

SEQ ID NO: 506176 - DNA, 15 bp, Homo sapiens
ttattgcttttggtg

SEQ ID NO: 506177 - DNA, 15 bp, Homo sapiens
tattgcttttggtgg

SEQ ID NO: 506178 - DNA, 15 bp, Homo sapiens
attgcttttggtggt

SEQ ID NO: 506179 - DNA, 15 bp, Homo sapiens
ttgcttttggtggtt

SEQ ID NO: 506180 - DNA, 15 bp, Homo sapiens
tgcttttggtggtta

SEQ ID NO: 506181 - DNA, 15 bp, Homo sapiens
gcttttggtggttaa

SEQ ID NO: 506182 - DNA, 15 bp, Homo sapiens
cttttggtggttaaa

SEQ ID NO: 506183 - DNA, 15 bp, Homo sapiens
ttttggtggttaaag

SEQ ID NO: 506184 - DNA, 15 bp, Homo sapiens
tttggtggttaaagc

SEQ ID NO: 506185 - DNA, 15 bp, Homo sapiens
ttggtggttaaagca

SEQ ID NO: 506186 - DNA, 15 bp, Homo sapiens
tggtggttaaagcag

SEQ ID NO: 506187 - DNA, 15 bp, Homo sapiens
ggtggttaaagcaga

SEQ ID NO: 506188 - DNA, 15 bp, Homo sapiens
gtggttaaagcagaa

SEQ ID NO: 506189 - DNA, 15 bp, Homo sapiens
tggttaaagcagaat

SEQ ID NO: 506190 - DNA, 15 bp, Homo sapiens
ggttaaagcagaatc

SEQ ID NO: 506191 - DNA, 15 bp, Homo sapiens
gttaaagcagaatct

SEQ ID NO: 506192 - DNA, 15 bp, Homo sapiens
ttaaagcagaatctc

SEQ ID NO: 506193 - DNA, 15 bp, Homo sapiens
taaagcagaatctct

SEQ ID NO: 506194 - DNA, 15 bp, Homo sapiens
aaagcagaatctctc

SEQ ID NO: 506195 - DNA, 15 bp, Homo sapiens
aagcagaatctctct

SEQ ID NO: 506196 - DNA, 15 bp, Homo sapiens
agcagaatctctctg

SEQ ID NO: 506197 - DNA, 15 bp, Homo sapiens
gcagaatctctctgg

SEQ ID NO: 506198 - DNA, 15 bp, Homo sapiens
cagaatctctctgga

SEQ ID NO: 506199 - DNA, 15 bp, Homo sapiens
agaatctctctggag

SEQ ID NO: 506200 - DNA, 15 bp, Homo sapiens
gaatctctctggaga

SEQ ID NO: 506201 - DNA, 15 bp, Homo sapiens
aatctctctggagag

SEQ ID NO: 506202 - DNA, 15 bp, Homo sapiens
atctctctggagagt

SEQ ID NO: 506203 - DNA, 15 bp, Homo sapiens
tctctctggagagta

SEQ ID NO: 506204 - DNA, 15 bp, Homo sapiens
ctctctggagagtaa

SEQ ID NO: 506205 - DNA, 15 bp, Homo sapiens
tctctggagagtaaa

SEQ ID NO: 506206 - DNA, 15 bp, Homo sapiens
ctctggagagtaaag

SEQ ID NO: 506207 - DNA, 15 bp, Homo sapiens
tctggagagtaaagg

SEQ ID NO: 506208 - DNA, 15 bp, Homo sapiens
ctggagagtaaaggt

SEQ ID NO: 506209 - DNA, 15 bp, Homo sapiens
tggagagtaaaggta

SEQ ID NO: 506210 - DNA, 15 bp, Homo sapiens
ggagagtaaaggtag

SEQ ID NO: 506211 - DNA, 15 bp, Homo sapiens
gagagtaaaggtaga

SEQ ID NO: 506212 - DNA, 15 bp, Homo sapiens
agagtaaaggtagac

SEQ ID NO: 506213 - DNA, 15 bp, Homo sapiens
gagtaaaggtagaca

SEQ ID NO: 506214 - DNA, 15 bp, Homo sapiens
agtaaaggtagacag

SEQ ID NO: 506215 - DNA, 15 bp, Homo sapiens
gtaaaggtagacagc

SEQ ID NO: 506216 - DNA, 15 bp, Homo sapiens
taaaggtagacagcc

SEQ ID NO: 506217 - DNA, 15 bp, Homo sapiens
aaaggtagacagccc

SEQ ID NO: 506218 - DNA, 15 bp, Homo sapiens
aaggtagacagccct

SEQ ID NO: 506219 - DNA, 15 bp, Homo sapiens
aggtagacagccctg

SEQ ID NO: 506220 - DNA, 15 bp, Homo sapiens
ggtagacagccctgc

SEQ ID NO: 506221 - DNA, 15 bp, Homo sapiens
gtagacagccctgca

SEQ ID NO: 506222 - DNA, 15 bp, Homo sapiens
tagacagccctgcaa

SEQ ID NO: 506223 - DNA, 15 bp, Homo sapiens
agacagccctgcaat

SEQ ID NO: 506224 - DNA, 15 bp, Homo sapiens
gacagccctgcaatg

SEQ ID NO: 506225 - DNA, 15 bp, Homo sapiens
acagccctgcaatgt

SEQ ID NO: 506226 - DNA, 15 bp, Homo sapiens
cagccctgcaatgtc

SEQ ID NO: 506227 - DNA, 15 bp, Homo sapiens
agccctgcaatgtct

SEQ ID NO: 506228 - DNA, 15 bp, Homo sapiens
gccctgcaatgtctg

SEQ ID NO: 506229 - DNA, 15 bp, Homo sapiens
ccctgcaatgtctga

SEQ ID NO: 506230 - DNA, 15 bp, Homo sapiens
cctgcaatgtctgaa

SEQ ID NO: 506231 - DNA, 15 bp, Homo sapiens
ctgcaatgtctgaag

SEQ ID NO: 506232 - DNA, 15 bp, Homo sapiens
tgcaatgtctgaagg

SEQ ID NO: 506233 - DNA, 15 bp, Homo sapiens
gcaatgtctgaagga

SEQ ID NO: 506234 - DNA, 15 bp, Homo sapiens
caatgtctgaaggac

SEQ ID NO: 506235 - DNA, 15 bp, Homo sapiens
aatgtctgaaggaca

SEQ ID NO: 506236 - DNA, 15 bp, Homo sapiens
atgtctgaaggacag

SEQ ID NO: 506237 - DNA, 15 bp, Homo sapiens
tgtctgaaggacagg

SEQ ID NO: 506238 - DNA, 15 bp, Homo sapiens
gtctgaaggacaggc

SEQ ID NO: 506239 - DNA, 15 bp, Homo sapiens
tctgaaggacaggcc

SEQ ID NO: 506240 - DNA, 15 bp, Homo sapiens
ctgaaggacaggcct

SEQ ID NO: 506241 - DNA, 15 bp, Homo sapiens
tgaaggacaggcctt

SEQ ID NO: 506242 - DNA, 15 bp, Homo sapiens
gaaggacaggccttc

SEQ ID NO: 506243 - DNA, 15 bp, Homo sapiens
aaggacaggccttct

SEQ ID NO: 506244 - DNA, 15 bp, Homo sapiens
aggacaggccttctt

SEQ ID NO: 506245 - DNA, 15 bp, Homo sapiens
ggacaggccttcttt

SEQ ID NO: 506246 - DNA, 15 bp, Homo sapiens
gacaggccttctttc

SEQ ID NO: 506247 - DNA, 15 bp, Homo sapiens
acaggccttctttct

SEQ ID NO: 506248 - DNA, 15 bp, Homo sapiens
caggccttctttctc

SEQ ID NO: 506249 - DNA, 15 bp, Homo sapiens
aggccttctttctcc

SEQ ID NO: 506250 - DNA, 15 bp, Homo sapiens
ggccttctttctcct

SEQ ID NO: 506251 - DNA, 15 bp, Homo sapiens
gccttctttctcctc

SEQ ID NO: 506252 - DNA, 15 bp, Homo sapiens
ccttctttctcctca

SEQ ID NO: 506253 - DNA, 15 bp, Homo sapiens
cttctttctcctcac

SEQ ID NO: 506254 - DNA, 15 bp, Homo sapiens
ttctttctcctcaca

SEQ ID NO: 506255 - DNA, 15 bp, Homo sapiens
tctttctcctcacac

SEQ ID NO: 506256 - DNA, 15 bp, Homo sapiens
ctttctcctcacacc

SEQ ID NO: 506257 - DNA, 15 bp, Homo sapiens
tttctcctcacaccc

SEQ ID NO: 506258 - DNA, 15 bp, Homo sapiens
ttctcctcacacccc

SEQ ID NO: 506259 - DNA, 15 bp, Homo sapiens
tctcctcacacccct

SEQ ID NO: 506260 - DNA, 15 bp, Homo sapiens
ctcctcacacccctg

SEQ ID NO: 506261 - DNA, 15 bp, Homo sapiens
tcctcacacccctgc

SEQ ID NO: 506262 - DNA, 15 bp, Homo sapiens
cctcacacccctgca

SEQ ID NO: 506263 - DNA, 15 bp, Homo sapiens
ctcacacccctgcag

SEQ ID NO: 506264 - DNA, 15 bp, Homo sapiens
tcacacccctgcagt

SEQ ID NO: 506265 - DNA, 15 bp, Homo sapiens
cacacccctgcagtc

SEQ ID NO: 506266 - DNA, 15 bp, Homo sapiens
acacccctgcagtcc

SEQ ID NO: 506267 - DNA, 15 bp, Homo sapiens
cacccctgcagtccc

SEQ ID NO: 506268 - DNA, 15 bp, Homo sapiens
acccctgcagtccct

SEQ ID NO: 506269 - DNA, 15 bp, Homo sapiens
cccctgcagtccctg

SEQ ID NO: 506270 - DNA, 15 bp, Homo sapiens
ccctgcagtccctgg

SEQ ID NO: 506271 - DNA, 15 bp, Homo sapiens
cctgcagtccctggc

SEQ ID NO: 506272 - DNA, 15 bp, Homo sapiens
ctgcagtccctggct

SEQ ID NO: 506273 - DNA, 15 bp, Homo sapiens
tgcagtccctggctg

SEQ ID NO: 506274 - DNA, 15 bp, Homo sapiens
gcagtccctggctgt

SEQ ID NO: 506275 - DNA, 15 bp, Homo sapiens
cagtccctggctgtg

SEQ ID NO: 506276 - DNA, 15 bp, Homo sapiens
agtccctggctgtgc

SEQ ID NO: 506277 - DNA, 15 bp, Homo sapiens
gtccctggctgtgcc

SEQ ID NO: 506278 - DNA, 15 bp, Homo sapiens
tccctggctgtgcct

SEQ ID NO: 506279 - DNA, 15 bp, Homo sapiens
ccctggctgtgcctg

SEQ ID NO: 506280 - DNA, 15 bp, Homo sapiens
cctggctgtgcctgg

SEQ ID NO: 506281 - DNA, 15 bp, Homo sapiens
ctggctgtgcctggc

SEQ ID NO: 506282 - DNA, 15 bp, Homo sapiens
tggctgtgcctggct

SEQ ID NO: 506283 - DNA, 15 bp, Homo sapiens
ggctgtgcctggctg

SEQ ID NO: 506284 - DNA, 15 bp, Homo sapiens
gctgtgcctggctgt

SEQ ID NO: 506285 - DNA, 15 bp, Homo sapiens
ctgtgcctggctgtt

SEQ ID NO: 506286 - DNA, 15 bp, Homo sapiens
tgtgcctggctgttt

SEQ ID NO: 506287 - DNA, 15 bp, Homo sapiens
gtgcctggctgtttc

SEQ ID NO: 506288 - DNA, 15 bp, Homo sapiens
tgcctggctgtttcc

SEQ ID NO: 506289 - DNA, 15 bp, Homo sapiens
gcctggctgtttccc

SEQ ID NO: 506290 - DNA, 15 bp, Homo sapiens
cctggctgtttcccg

SEQ ID NO: 506291 - DNA, 15 bp, Homo sapiens
ctggctgtttcccgc

SEQ ID NO: 506292 - DNA, 15 bp, Homo sapiens
tggctgtttcccgca

SEQ ID NO: 506293 - DNA, 15 bp, Homo sapiens
ggctgtttcccgcaa

SEQ ID NO: 506294 - DNA, 15 bp, Homo sapiens
gctgtttcccgcaag

SEQ ID NO: 506295 - DNA, 15 bp, Homo sapiens
ctgtttcccgcaagt

SEQ ID NO: 506296 - DNA, 15 bp, Homo sapiens
tgtttcccgcaagtg

SEQ ID NO: 506297 - DNA, 15 bp, Homo sapiens
gtttcccgcaagtgc

SEQ ID NO: 506298 - DNA, 15 bp, Homo sapiens
tttcccgcaagtgcc

SEQ ID NO: 506299 - DNA, 15 bp, Homo sapiens
ttcccgcaagtgcca

SEQ ID NO: 506300 - DNA, 15 bp, Homo sapiens
tcccgcaagtgccag

SEQ ID NO: 506301 - DNA, 15 bp, Homo sapiens
cccgcaagtgccaga

SEQ ID NO: 506302 - DNA, 15 bp, Homo sapiens
ccgcaagtgccagac

SEQ ID NO: 506303 - DNA, 15 bp, Homo sapiens
cgcaagtgccagaca

SEQ ID NO: 506304 - DNA, 15 bp, Homo sapiens
gcaagtgccagacag

SEQ ID NO: 506305 - DNA, 15 bp, Homo sapiens
caagtgccagacaga

SEQ ID NO: 506306 - DNA, 15 bp, Homo sapiens
aagtgccagacagaa

SEQ ID NO: 506307 - DNA, 15 bp, Homo sapiens
agtgccagacagaat

SEQ ID NO: 506308 - DNA, 15 bp, Homo sapiens
gtgccagacagaatg

SEQ ID NO: 506309 - DNA, 15 bp, Homo sapiens
tgccagacagaatgt

SEQ ID NO: 506310 - DNA, 15 bp, Homo sapiens
gccagacagaatgtg

SEQ ID NO: 506311 - DNA, 15 bp, Homo sapiens
ccagacagaatgtgc

SEQ ID NO: 506312 - DNA, 15 bp, Homo sapiens
cagacagaatgtgca

SEQ ID NO: 506313 - DNA, 15 bp, Homo sapiens
agacagaatgtgcac

SEQ ID NO: 506314 - DNA, 15 bp, Homo sapiens
gacagaatgtgcact

SEQ ID NO: 506315 - DNA, 15 bp, Homo sapiens
acagaatgtgcactt

SEQ ID NO: 506316 - DNA, 15 bp, Homo sapiens
cagaatgtgcacttt

SEQ ID NO: 506317 - DNA, 15 bp, Homo sapiens
agaatgtgcactttt

SEQ ID NO: 506318 - DNA, 15 bp, Homo sapiens
gaatgtgcacttttt

SEQ ID NO: 506319 - DNA, 15 bp, Homo sapiens
aatgtgcactttttg

SEQ ID NO: 506320 - DNA, 15 bp, Homo sapiens
atgtgcactttttgg

SEQ ID NO: 506321 - DNA, 15 bp, Homo sapiens
tgtgcactttttggc

SEQ ID NO: 506322 - DNA, 15 bp, Homo sapiens
gtgcactttttggct

SEQ ID NO: 506323 - DNA, 15 bp, Homo sapiens
tgcactttttggcta

SEQ ID NO: 506324 - DNA, 15 bp, Homo sapiens
gcactttttggctaa

SEQ ID NO: 506325 - DNA, 15 bp, Homo sapiens
cactttttggctaag

SEQ ID NO: 506326 - DNA, 15 bp, Homo sapiens
actttttggctaagt

SEQ ID NO: 506327 - DNA, 15 bp, Homo sapiens
ctttttggctaagta

SEQ ID NO: 506328 - DNA, 15 bp, Homo sapiens
tttttggctaagtat

SEQ ID NO: 506329 - DNA, 15 bp, Homo sapiens
ttttggctaagtatg

SEQ ID NO: 506330 - DNA, 15 bp, Homo sapiens
tttggctaagtatgt

SEQ ID NO: 506331 - DNA, 15 bp, Homo sapiens
ttggctaagtatgtt

SEQ ID NO: 506332 - DNA, 15 bp, Homo sapiens
tggctaagtatgttc

SEQ ID NO: 506333 - DNA, 15 bp, Homo sapiens
ggctaagtatgttct

SEQ ID NO: 506334 - DNA, 15 bp, Homo sapiens
gctaagtatgttcta

SEQ ID NO: 506335 - DNA, 15 bp, Homo sapiens
ctaagtatgttctat

SEQ ID NO: 506336 - DNA, 15 bp, Homo sapiens
taagtatgttctatt

SEQ ID NO: 506337 - DNA, 15 bp, Homo sapiens
aagtatgttctatta

SEQ ID NO: 506338 - DNA, 15 bp, Homo sapiens
agtatgttctattat

SEQ ID NO: 506339 - DNA, 15 bp, Homo sapiens
gtatgttctattatg

SEQ ID NO: 506340 - DNA, 15 bp, Homo sapiens
tatgttctattatgt

SEQ ID NO: 506341 - DNA, 15 bp, Homo sapiens
atgttctattatgtg

SEQ ID NO: 506342 - DNA, 15 bp, Homo sapiens
tgttctattatgtgt

SEQ ID NO: 506343 - DNA, 15 bp, Homo sapiens
gttctattatgtgtg

SEQ ID NO: 506344 - DNA, 15 bp, Homo sapiens
ttctattatgtgtgt

SEQ ID NO: 506345 - DNA, 15 bp, Homo sapiens
tctattatgtgtgta

SEQ ID NO: 506346 - DNA, 15 bp, Homo sapiens
ctattatgtgtgtaa

SEQ ID NO: 506347 - DNA, 15 bp, Homo sapiens
tattatgtgtgtaaa

SEQ ID NO: 506348 - DNA, 15 bp, Homo sapiens
attatgtgtgtaaaa

SEQ ID NO: 506349 - DNA, 15 bp, Homo sapiens
ttatgtgtgtaaaat

SEQ ID NO: 506350 - DNA, 15 bp, Homo sapiens
tatgtgtgtaaaatc

SEQ ID NO: 506351 - DNA, 15 bp, Homo sapiens
atgtgtgtaaaatcc

SEQ ID NO: 506352 - DNA, 15 bp, Homo sapiens
tgtgtgtaaaatcct

SEQ ID NO: 506353 - DNA, 15 bp, Homo sapiens
gtgtgtaaaatcctc

SEQ ID NO: 506354 - DNA, 15 bp, Homo sapiens
tgtgtaaaatcctct

SEQ ID NO: 506355 - DNA, 15 bp, Homo sapiens
gtgtaaaatcctctc

SEQ ID NO: 506356 - DNA, 15 bp, Homo sapiens
tgtaaaatcctctct

SEQ ID NO: 506357 - DNA, 15 bp, Homo sapiens
gtaaaatcctctctc

SEQ ID NO: 506358 - DNA, 15 bp, Homo sapiens
taaaatcctctctca

SEQ ID NO: 506359 - DNA, 15 bp, Homo sapiens
aaaatcctctctcag

SEQ ID NO: 506360 - DNA, 15 bp, Homo sapiens
aaatcctctctcagt

SEQ ID NO: 506361 - DNA, 15 bp, Homo sapiens
aatcctctctcagtt

SEQ ID NO: 506362 - DNA, 15 bp, Homo sapiens
atcctctctcagttc

SEQ ID NO: 506363 - DNA, 15 bp, Homo sapiens
tcctctctcagttct

SEQ ID NO: 506364 - DNA, 15 bp, Homo sapiens
cctctctcagttctg

SEQ ID NO: 506365 - DNA, 15 bp, Homo sapiens
ctctctcagttctga

SEQ ID NO: 506366 - DNA, 15 bp, Homo sapiens
tctctcagttctgag

SEQ ID NO: 506367 - DNA, 15 bp, Homo sapiens
ctctcagttctgagt

SEQ ID NO: 506368 - DNA, 15 bp, Homo sapiens
tctcagttctgagtt

SEQ ID NO: 506369 - DNA, 15 bp, Homo sapiens
ctcagttctgagttg

SEQ ID NO: 506370 - DNA, 15 bp, Homo sapiens
tcagttctgagttga

SEQ ID NO: 506371 - DNA, 15 bp, Homo sapiens
cagttctgagttgaa

SEQ ID NO: 506372 - DNA, 15 bp, Homo sapiens
agttctgagttgaat

SEQ ID NO: 506373 - DNA, 15 bp, Homo sapiens
gttctgagttgaata

SEQ ID NO: 506374 - DNA, 15 bp, Homo sapiens
ttctgagttgaatat

SEQ ID NO: 506375 - DNA, 15 bp, Homo sapiens
tctgagttgaatatc

SEQ ID NO: 506376 - DNA, 15 bp, Homo sapiens
ctgagttgaatatcg

SEQ ID NO: 506377 - DNA, 15 bp, Homo sapiens
tgagttgaatatcga

SEQ ID NO: 506378 - DNA, 15 bp, Homo sapiens
gagttgaatatcgat

SEQ ID NO: 506379 - DNA, 15 bp, Homo sapiens
agttgaatatcgatt

SEQ ID NO: 506380 - DNA, 15 bp, Homo sapiens
gttgaatatcgattc

SEQ ID NO: 506381 - DNA, 15 bp, Homo sapiens
ttgaatatcgattca

SEQ ID NO: 506382 - DNA, 15 bp, Homo sapiens
tgaatatcgattcaa

SEQ ID NO: 506383 - DNA, 15 bp, Homo sapiens
gaatatcgattcaaa

SEQ ID NO: 506384 - DNA, 15 bp, Homo sapiens
aatatcgattcaaag

SEQ ID NO: 506385 - DNA, 15 bp, Homo sapiens
atatcgattcaaagc

SEQ ID NO: 506386 - DNA, 15 bp, Homo sapiens
tatcgattcaaagct

SEQ ID NO: 506387 - DNA, 15 bp, Homo sapiens
atcgattcaaagctt

SEQ ID NO: 506388 - DNA, 15 bp, Homo sapiens
tcgattcaaagctta

SEQ ID NO: 506389 - DNA, 15 bp, Homo sapiens
cgattcaaagcttaa

SEQ ID NO: 506390 - DNA, 15 bp, Homo sapiens
gattcaaagcttaat

SEQ ID NO: 506391 - DNA, 15 bp, Homo sapiens
attcaaagcttaatt

SEQ ID NO: 506392 - DNA, 15 bp, Homo sapiens
ttcaaagcttaattc

SEQ ID NO: 506393 - DNA, 15 bp, Homo sapiens
tcaaagcttaattca

SEQ ID NO: 506394 - DNA, 15 bp, Homo sapiens
caaagcttaattcac

SEQ ID NO: 506395 - DNA, 15 bp, Homo sapiens
aaagcttaattcacg

SEQ ID NO: 506396 - DNA, 15 bp, Homo sapiens
aagcttaattcacgc

SEQ ID NO: 506397 - DNA, 15 bp, Homo sapiens
agcttaattcacgct

SEQ ID NO: 506398 - DNA, 15 bp, Homo sapiens
gcttaattcacgctg

SEQ ID NO: 506399 - DNA, 15 bp, Homo sapiens
cttaattcacgctga

SEQ ID NO: 506400 - DNA, 15 bp, Homo sapiens
ttaattcacgctgat

SEQ ID NO: 506401 - DNA, 15 bp, Homo sapiens
taattcacgctgatg

SEQ ID NO: 506402 - DNA, 15 bp, Homo sapiens
aattcacgctgatga

SEQ ID NO: 506403 - DNA, 15 bp, Homo sapiens
attcacgctgatgac

SEQ ID NO: 506404 - DNA, 15 bp, Homo sapiens
ttcacgctgatgact

SEQ ID NO: 506405 - DNA, 15 bp, Homo sapiens
tcacgctgatgactt

SEQ ID NO: 506406 - DNA, 15 bp, Homo sapiens
cacgctgatgacttg

SEQ ID NO: 506407 - DNA, 15 bp, Homo sapiens
acgctgatgacttga

SEQ ID NO: 506408 - DNA, 15 bp, Homo sapiens
cgctgatgacttgaa

SEQ ID NO: 506409 - DNA, 15 bp, Homo sapiens
gctgatgacttgaaa

SEQ ID NO: 506410 - DNA, 15 bp, Homo sapiens
ctgatgacttgaaaa

SEQ ID NO: 506411 - DNA, 15 bp, Homo sapiens
tgatgacttgaaaat

SEQ ID NO: 506412 - DNA, 15 bp, Homo sapiens
gatgacttgaaaatc

SEQ ID NO: 506413 - DNA, 15 bp, Homo sapiens
atgacttgaaaatct

SEQ ID NO: 506414 - DNA, 15 bp, Homo sapiens
tgacttgaaaatcta

SEQ ID NO: 506415 - DNA, 15 bp, Homo sapiens
gacttgaaaatctaa

SEQ ID NO: 506416 - DNA, 15 bp, Homo sapiens
acttgaaaatctaat

SEQ ID NO: 506417 - DNA, 15 bp, Homo sapiens
cttgaaaatctaatc

SEQ ID NO: 506418 - DNA, 15 bp, Homo sapiens
ttgaaaatctaatct

SEQ ID NO: 506419 - DNA, 15 bp, Homo sapiens
tgaaaatctaatctt

SEQ ID NO: 506420 - DNA, 15 bp, Homo sapiens
gaaaatctaatcttg

SEQ ID NO: 506421 - DNA, 15 bp, Homo sapiens
aaaatctaatcttga

SEQ ID NO: 506422 - DNA, 15 bp, Homo sapiens
aaatctaatcttgat

SEQ ID NO: 506423 - DNA, 15 bp, Homo sapiens
aatctaatcttgatt

SEQ ID NO: 506424 - DNA, 15 bp, Homo sapiens
atctaatcttgattc

SEQ ID NO: 506425 - DNA, 15 bp, Homo sapiens
tctaatcttgattct

SEQ ID NO: 506426 - DNA, 15 bp, Homo sapiens
ctaatcttgattcta

SEQ ID NO: 506427 - DNA, 15 bp, Homo sapiens
taatcttgattctac

SEQ ID NO: 506428 - DNA, 15 bp, Homo sapiens
aatcttgattctact

SEQ ID NO: 506429 - DNA, 15 bp, Homo sapiens
atcttgattctactc

SEQ ID NO: 506430 - DNA, 15 bp, Homo sapiens
tcttgattctactcg

SEQ ID NO: 506431 - DNA, 15 bp, Homo sapiens
cttgattctactcga

SEQ ID NO: 506432 - DNA, 15 bp, Homo sapiens
ttgattctactcgag

SEQ ID NO: 506433 - DNA, 15 bp, Homo sapiens
tgattctactcgagt

SEQ ID NO: 506434 - DNA, 15 bp, Homo sapiens
gattctactcgagtg

SEQ ID NO: 506435 - DNA, 15 bp, Homo sapiens
attctactcgagtgt

SEQ ID NO: 506436 - DNA, 15 bp, Homo sapiens
ttctactcgagtgtt

SEQ ID NO: 506437 - DNA, 15 bp, Homo sapiens
tctactcgagtgttt

SEQ ID NO: 506438 - DNA, 15 bp, Homo sapiens
ctactcgagtgtttg

SEQ ID NO: 506439 - DNA, 15 bp, Homo sapiens
tactcgagtgtttgt

SEQ ID NO: 506440 - DNA, 15 bp, Homo sapiens
actcgagtgtttgta

SEQ ID NO: 506441 - DNA, 15 bp, Homo sapiens
ctcgagtgtttgtag

SEQ ID NO: 506442 - DNA, 15 bp, Homo sapiens
tcgagtgtttgtaga

SEQ ID NO: 506443 - DNA, 15 bp, Homo sapiens
cgagtgtttgtagat

SEQ ID NO: 506444 - DNA, 15 bp, Homo sapiens
gagtgtttgtagata

SEQ ID NO: 506445 - DNA, 15 bp, Homo sapiens
agtgtttgtagatat

SEQ ID NO: 506446 - DNA, 15 bp, Homo sapiens
gtgtttgtagatatc

SEQ ID NO: 506447 - DNA, 15 bp, Homo sapiens
tgtttgtagatatct

SEQ ID NO: 506448 - DNA, 15 bp, Homo sapiens
gtttgtagatatctg

SEQ ID NO: 506449 - DNA, 15 bp, Homo sapiens
tttgtagatatctga

SEQ ID NO: 506450 - DNA, 15 bp, Homo sapiens
ttgtagatatctgaa

SEQ ID NO: 506451 - DNA, 15 bp, Homo sapiens
tgtagatatctgaac

SEQ ID NO: 506452 - DNA, 15 bp, Homo sapiens
gtagatatctgaaca

SEQ ID NO: 506453 - DNA, 15 bp, Homo sapiens
tagatatctgaacat

SEQ ID NO: 506454 - DNA, 15 bp, Homo sapiens
agatatctgaacatc

SEQ ID NO: 506455 - DNA, 15 bp, Homo sapiens
gatatctgaacatct

SEQ ID NO: 506456 - DNA, 15 bp, Homo sapiens
atatctgaacatctg

SEQ ID NO: 506457 - DNA, 15 bp, Homo sapiens
tatctgaacatctga

SEQ ID NO: 506458 - DNA, 15 bp, Homo sapiens
atctgaacatctgaa

SEQ ID NO: 506459 - DNA, 15 bp, Homo sapiens
tctgaacatctgaaa

SEQ ID NO: 506460 - DNA, 15 bp, Homo sapiens
ctgaacatctgaaaa

SEQ ID NO: 506461 - DNA, 15 bp, Homo sapiens
tgaacatctgaaaac

SEQ ID NO: 506462 - DNA, 15 bp, Homo sapiens
gaacatctgaaaaca

SEQ ID NO: 506463 - DNA, 15 bp, Homo sapiens
aacatctgaaaacag

SEQ ID NO: 506464 - DNA, 15 bp, Homo sapiens
acatctgaaaacagt

SEQ ID NO: 506465 - DNA, 15 bp, Homo sapiens
catctgaaaacagta

SEQ ID NO: 506466 - DNA, 15 bp, Homo sapiens
atctgaaaacagtac

SEQ ID NO: 506467 - DNA, 15 bp, Homo sapiens
tctgaaaacagtaca

SEQ ID NO: 506468 - DNA, 15 bp, Homo sapiens
ctgaaaacagtacag

SEQ ID NO: 506469 - DNA, 15 bp, Homo sapiens
tgaaaacagtacaga

SEQ ID NO: 506470 - DNA, 15 bp, Homo sapiens
gaaaacagtacagag

SEQ ID NO: 506471 - DNA, 15 bp, Homo sapiens
aaaacagtacagagt

SEQ ID NO: 506472 - DNA, 15 bp, Homo sapiens
aaacagtacagagtg

SEQ ID NO: 506473 - DNA, 15 bp, Homo sapiens
aacagtacagagtgc

SEQ ID NO: 506474 - DNA, 15 bp, Homo sapiens
acagtacagagtgca

SEQ ID NO: 506475 - DNA, 15 bp, Homo sapiens
cagtacagagtgcag

SEQ ID NO: 506476 - DNA, 15 bp, Homo sapiens
agtacagagtgcagc

SEQ ID NO: 506477 - DNA, 15 bp, Homo sapiens
gtacagagtgcagcg

SEQ ID NO: 506478 - DNA, 15 bp, Homo sapiens
tacagagtgcagcgt

SEQ ID NO: 506479 - DNA, 15 bp, Homo sapiens
acagagtgcagcgtt

SEQ ID NO: 506480 - DNA, 15 bp, Homo sapiens
cagagtgcagcgttc

SEQ ID NO: 506481 - DNA, 15 bp, Homo sapiens
agagtgcagcgttcc

SEQ ID NO: 506482 - DNA, 15 bp, Homo sapiens
gagtgcagcgttcct

SEQ ID NO: 506483 - DNA, 15 bp, Homo sapiens
agtgcagcgttcctg

SEQ ID NO: 506484 - DNA, 15 bp, Homo sapiens
gtgcagcgttcctgt

SEQ ID NO: 506485 - DNA, 15 bp, Homo sapiens
tgcagcgttcctgtg

SEQ ID NO: 506486 - DNA, 15 bp, Homo sapiens
gcagcgttcctgtga

SEQ ID NO: 506487 - DNA, 15 bp, Homo sapiens
cagcgttcctgtgaa

SEQ ID NO: 506488 - DNA, 15 bp, Homo sapiens
agcgttcctgtgaat

SEQ ID NO: 506489 - DNA, 15 bp, Homo sapiens
gcgttcctgtgaatt

SEQ ID NO: 506490 - DNA, 15 bp, Homo sapiens
cgttcctgtgaattt

SEQ ID NO: 506491 - DNA, 15 bp, Homo sapiens
gttcctgtgaatttt

SEQ ID NO: 506492 - DNA, 15 bp, Homo sapiens
ttcctgtgaatttta

SEQ ID NO: 506493 - DNA, 15 bp, Homo sapiens
tcctgtgaattttaa

SEQ ID NO: 506494 - DNA, 15 bp, Homo sapiens
cctgtgaattttaat

SEQ ID NO: 506495 - DNA, 15 bp, Homo sapiens
ctgtgaattttaatt

SEQ ID NO: 506496 - DNA, 15 bp, Homo sapiens
tgtgaattttaattt

SEQ ID NO: 506497 - DNA, 15 bp, Homo sapiens
gtgaattttaatttg

SEQ ID NO: 506498 - DNA, 15 bp, Homo sapiens
tgaattttaatttgg

SEQ ID NO: 506499 - DNA, 15 bp, Homo sapiens
gaattttaatttggt

SEQ ID NO: 506500 - DNA, 15 bp, Homo sapiens
aattttaatttggtt

SEQ ID NO: 506501 - DNA, 15 bp, Homo sapiens
attttaatttggttt

SEQ ID NO: 506502 - DNA, 15 bp, Homo sapiens
ttttaatttggtttc

SEQ ID NO: 506503 - DNA, 15 bp, Homo sapiens
tttaatttggtttct

SEQ ID NO: 506504 - DNA, 15 bp, Homo sapiens
ttaatttggtttctg

SEQ ID NO: 506505 - DNA, 15 bp, Homo sapiens
taatttggtttctgg

SEQ ID NO: 506506 - DNA, 15 bp, Homo sapiens
aatttggtttctggt

SEQ ID NO: 506507 - DNA, 15 bp, Homo sapiens
atttggtttctggta

SEQ ID NO: 506508 - DNA, 15 bp, Homo sapiens
tttggtttctggtac

SEQ ID NO: 506509 - DNA, 15 bp, Homo sapiens
ttggtttctggtact

SEQ ID NO: 506510 - DNA, 15 bp, Homo sapiens
tggtttctggtacta

SEQ ID NO: 506511 - DNA, 15 bp, Homo sapiens
ggtttctggtactac

SEQ ID NO: 506512 - DNA, 15 bp, Homo sapiens
gtttctggtactaca

SEQ ID NO: 506513 - DNA, 15 bp, Homo sapiens
tttctggtactacac

SEQ ID NO: 506514 - DNA, 15 bp, Homo sapiens
ttctggtactacact

SEQ ID NO: 506515 - DNA, 15 bp, Homo sapiens
tctggtactacactt

SEQ ID NO: 506516 - DNA, 15 bp, Homo sapiens
ctggtactacacttg

SEQ ID NO: 506517 - DNA, 15 bp, Homo sapiens
tggtactacacttga

SEQ ID NO: 506518 - DNA, 15 bp, Homo sapiens
ggtactacacttgaa

SEQ ID NO: 506519 - DNA, 15 bp, Homo sapiens
gtactacacttgaaa

SEQ ID NO: 506520 - DNA, 15 bp, Homo sapiens
tactacacttgaaat

SEQ ID NO: 506521 - DNA, 15 bp, Homo sapiens
actacacttgaaatt

SEQ ID NO: 506522 - DNA, 15 bp, Homo sapiens
ctacacttgaaattc

SEQ ID NO: 506523 - DNA, 15 bp, Homo sapiens
tacacttgaaattcc

SEQ ID NO: 506524 - DNA, 15 bp, Homo sapiens
acacttgaaattcca

SEQ ID NO: 506525 - DNA, 15 bp, Homo sapiens
cacttgaaattccag

SEQ ID NO: 506526 - DNA, 15 bp, Homo sapiens
acttgaaattccagt

SEQ ID NO: 506527 - DNA, 15 bp, Homo sapiens
cttgaaattccagta

SEQ ID NO: 506528 - DNA, 15 bp, Homo sapiens
ttgaaattccagtaa

SEQ ID NO: 506529 - DNA, 15 bp, Homo sapiens
tgaaattccagtaat

SEQ ID NO: 506530 - DNA, 15 bp, Homo sapiens
gaaattccagtaatg

SEQ ID NO: 506531 - DNA, 15 bp, Homo sapiens
aaattccagtaatga

SEQ ID NO: 506532 - DNA, 15 bp, Homo sapiens
aattccagtaatgat

SEQ ID NO: 506533 - DNA, 15 bp, Homo sapiens
attccagtaatgata

SEQ ID NO: 506534 - DNA, 15 bp, Homo sapiens
ttccagtaatgataa

SEQ ID NO: 506535 - DNA, 15 bp, Homo sapiens
tccagtaatgataag

SEQ ID NO: 506536 - DNA, 15 bp, Homo sapiens
ccagtaatgataaga

SEQ ID NO: 506537 - DNA, 15 bp, Homo sapiens
cagtaatgataagat

SEQ ID NO: 506538 - DNA, 15 bp, Homo sapiens
agtaatgataagatg

SEQ ID NO: 506539 - DNA, 15 bp, Homo sapiens
gtaatgataagatgg

SEQ ID NO: 506540 - DNA, 15 bp, Homo sapiens
taatgataagatggg

SEQ ID NO: 506541 - DNA, 15 bp, Homo sapiens
aatgataagatggga

SEQ ID NO: 506542 - DNA, 15 bp, Homo sapiens
atgataagatgggaa

SEQ ID NO: 506543 - DNA, 15 bp, Homo sapiens
tgataagatgggaac

SEQ ID NO: 506544 - DNA, 15 bp, Homo sapiens
gataagatgggaact

SEQ ID NO: 506545 - DNA, 15 bp, Homo sapiens
ataagatgggaacta

SEQ ID NO: 506546 - DNA, 15 bp, Homo sapiens
taagatgggaactaa

SEQ ID NO: 506547 - DNA, 15 bp, Homo sapiens
aagatgggaactaaa

SEQ ID NO: 506548 - DNA, 15 bp, Homo sapiens
agatgggaactaaaa

SEQ ID NO: 506549 - DNA, 15 bp, Homo sapiens
gatgggaactaaaac

SEQ ID NO: 506550 - DNA, 15 bp, Homo sapiens
atgggaactaaaaca

SEQ ID NO: 506551 - DNA, 15 bp, Homo sapiens
tgggaactaaaacag

SEQ ID NO: 506552 - DNA, 15 bp, Homo sapiens
gggaactaaaacagc

SEQ ID NO: 506553 - DNA, 15 bp, Homo sapiens
ggaactaaaacagca

SEQ ID NO: 506554 - DNA, 15 bp, Homo sapiens
gaactaaaacagcag

SEQ ID NO: 506555 - DNA, 15 bp, Homo sapiens
aactaaaacagcagc

SEQ ID NO: 506556 - DNA, 15 bp, Homo sapiens
actaaaacagcagct

SEQ ID NO: 506557 - DNA, 15 bp, Homo sapiens
ctaaaacagcagctg

SEQ ID NO: 506558 - DNA, 15 bp, Homo sapiens
taaaacagcagctgc

SEQ ID NO: 506559 - DNA, 15 bp, Homo sapiens
aaaacagcagctgcc

SEQ ID NO: 506560 - DNA, 15 bp, Homo sapiens
aaacagcagctgccc

SEQ ID NO: 506561 - DNA, 15 bp, Homo sapiens
aacagcagctgcccc

SEQ ID NO: 506562 - DNA, 15 bp, Homo sapiens
acagcagctgcccct

SEQ ID NO: 506563 - DNA, 15 bp, Homo sapiens
cagcagctgcccctc

SEQ ID NO: 506564 - DNA, 15 bp, Homo sapiens
agcagctgcccctcg

SEQ ID NO: 506565 - DNA, 15 bp, Homo sapiens
gcagctgcccctcgg

SEQ ID NO: 506566 - DNA, 15 bp, Homo sapiens
cagctgcccctcgga

SEQ ID NO: 506567 - DNA, 15 bp, Homo sapiens
agctgcccctcggaa

SEQ ID NO: 506568 - DNA, 15 bp, Homo sapiens
gctgcccctcggaaa

SEQ ID NO: 506569 - DNA, 15 bp, Homo sapiens
ctgcccctcggaaat

SEQ ID NO: 506570 - DNA, 15 bp, Homo sapiens
tgcccctcggaaatg

SEQ ID NO: 506571 - DNA, 15 bp, Homo sapiens
gcccctcggaaatga

SEQ ID NO: 506572 - DNA, 15 bp, Homo sapiens
cccctcggaaatgag

SEQ ID NO: 506573 - DNA, 15 bp, Homo sapiens
ccctcggaaatgagg

SEQ ID NO: 506574 - DNA, 15 bp, Homo sapiens
cctcggaaatgaggg

SEQ ID NO: 506575 - DNA, 15 bp, Homo sapiens
ctcggaaatgagggt

SEQ ID NO: 506576 - DNA, 15 bp, Homo sapiens
tcggaaatgagggtc

SEQ ID NO: 506577 - DNA, 15 bp, Homo sapiens
cggaaatgagggtcg

SEQ ID NO: 506578 - DNA, 15 bp, Homo sapiens
ggaaatgagggtcgc

SEQ ID NO: 506579 - DNA, 15 bp, Homo sapiens
gaaatgagggtcgca

SEQ ID NO: 506580 - DNA, 15 bp, Homo sapiens
aaatgagggtcgcac

SEQ ID NO: 506581 - DNA, 15 bp, Homo sapiens
aatgagggtcgcacc

SEQ ID NO: 506582 - DNA, 15 bp, Homo sapiens
atgagggtcgcacca

SEQ ID NO: 506583 - DNA, 15 bp, Homo sapiens
tgagggtcgcaccac

SEQ ID NO: 506584 - DNA, 15 bp, Homo sapiens
gagggtcgcaccacc

SEQ ID NO: 506585 - DNA, 15 bp, Homo sapiens
agggtcgcaccacct

SEQ ID NO: 506586 - DNA, 15 bp, Homo sapiens
gggtcgcaccacctc

SEQ ID NO: 506587 - DNA, 15 bp, Homo sapiens
ggtcgcaccacctcg

SEQ ID NO: 506588 - DNA, 15 bp, Homo sapiens
gtcgcaccacctcgt

SEQ ID NO: 506589 - DNA, 15 bp, Homo sapiens
tcgcaccacctcgtt

SEQ ID NO: 506590 - DNA, 15 bp, Homo sapiens
cgcaccacctcgttc

SEQ ID NO: 506591 - DNA, 15 bp, Homo sapiens
gcaccacctcgttcc

SEQ ID NO: 506592 - DNA, 15 bp, Homo sapiens
caccacctcgttccc

SEQ ID NO: 506593 - DNA, 15 bp, Homo sapiens
accacctcgttccca

SEQ ID NO: 506594 - DNA, 15 bp, Homo sapiens
ccacctcgttcccag

SEQ ID NO: 506595 - DNA, 15 bp, Homo sapiens
cacctcgttcccaga

SEQ ID NO: 506596 - DNA, 15 bp, Homo sapiens
acctcgttcccagac

SEQ ID NO: 506597 - DNA, 15 bp, Homo sapiens
cctcgttcccagact

SEQ ID NO: 506598 - DNA, 15 bp, Homo sapiens
ctcgttcccagactg

SEQ ID NO: 506599 - DNA, 15 bp, Homo sapiens
tcgttcccagactga

SEQ ID NO: 506600 - DNA, 15 bp, Homo sapiens
cgttcccagactgag

SEQ ID NO: 506601 - DNA, 15 bp, Homo sapiens
gttcccagactgagg

SEQ ID NO: 506602 - DNA, 15 bp, Homo sapiens
ttcccagactgaggc

SEQ ID NO: 506603 - DNA, 15 bp, Homo sapiens
tcccagactgaggct

SEQ ID NO: 506604 - DNA, 15 bp, Homo sapiens
cccagactgaggctg

SEQ ID NO: 506605 - DNA, 15 bp, Homo sapiens
ccagactgaggctgc

SEQ ID NO: 506606 - DNA, 15 bp, Homo sapiens
cagactgaggctgca

SEQ ID NO: 506607 - DNA, 15 bp, Homo sapiens
agactgaggctgcag

SEQ ID NO: 506608 - DNA, 15 bp, Homo sapiens
gactgaggctgcagt

SEQ ID NO: 506609 - DNA, 15 bp, Homo sapiens
actgaggctgcagtt

SEQ ID NO: 506610 - DNA, 15 bp, Homo sapiens
ctgaggctgcagttg

SEQ ID NO: 506611 - DNA, 15 bp, Homo sapiens
tgaggctgcagttga

SEQ ID NO: 506612 - DNA, 15 bp, Homo sapiens
gaggctgcagttgag

SEQ ID NO: 506613 - DNA, 15 bp, Homo sapiens
aggctgcagttgaga

SEQ ID NO: 506614 - DNA, 15 bp, Homo sapiens
ggctgcagttgagaa

SEQ ID NO: 506615 - DNA, 15 bp, Homo sapiens
gctgcagttgagaat

SEQ ID NO: 506616 - DNA, 15 bp, Homo sapiens
ctgcagttgagaatg

SEQ ID NO: 506617 - DNA, 15 bp, Homo sapiens
tgcagttgagaatgc

SEQ ID NO: 506618 - DNA, 15 bp, Homo sapiens
gcagttgagaatgct

SEQ ID NO: 506619 - DNA, 15 bp, Homo sapiens
cagttgagaatgctt

SEQ ID NO: 506620 - DNA, 15 bp, Homo sapiens
agttgagaatgcttg

SEQ ID NO: 506621 - DNA, 15 bp, Homo sapiens
gttgagaatgcttgt

SEQ ID NO: 506622 - DNA, 15 bp, Homo sapiens
ttgagaatgcttgtg

SEQ ID NO: 506623 - DNA, 15 bp, Homo sapiens
tgagaatgcttgtgt

SEQ ID NO: 506624 - DNA, 15 bp, Homo sapiens
gagaatgcttgtgtg

SEQ ID NO: 506625 - DNA, 15 bp, Homo sapiens
agaatgcttgtgtgt

SEQ ID NO: 506626 - DNA, 15 bp, Homo sapiens
gaatgcttgtgtgtg

SEQ ID NO: 506627 - DNA, 15 bp, Homo sapiens
aatgcttgtgtgtga

SEQ ID NO: 506628 - DNA, 15 bp, Homo sapiens
atgcttgtgtgtgac

SEQ ID NO: 506629 - DNA, 15 bp, Homo sapiens
tgcttgtgtgtgaca

SEQ ID NO: 506630 - DNA, 15 bp, Homo sapiens
gcttgtgtgtgacat

SEQ ID NO: 506631 - DNA, 15 bp, Homo sapiens
cttgtgtgtgacatg

SEQ ID NO: 506632 - DNA, 15 bp, Homo sapiens
ttgtgtgtgacatgc

SEQ ID NO: 506633 - DNA, 15 bp, Homo sapiens
tgtgtgtgacatgcc

SEQ ID NO: 506634 - DNA, 15 bp, Homo sapiens
gtgtgtgacatgccc

SEQ ID NO: 506635 - DNA, 15 bp, Homo sapiens
tgtgtgacatgcccc

SEQ ID NO: 506636 - DNA, 15 bp, Homo sapiens
gtgtgacatgcccct

SEQ ID NO: 506637 - DNA, 15 bp, Homo sapiens
tgtgacatgcccctg

SEQ ID NO: 506638 - DNA, 15 bp, Homo sapiens
gtgacatgcccctgc

SEQ ID NO: 506639 - DNA, 15 bp, Homo sapiens
tgacatgcccctgcc

SEQ ID NO: 506640 - DNA, 15 bp, Homo sapiens
gacatgcccctgcca

SEQ ID NO: 506641 - DNA, 15 bp, Homo sapiens
acatgcccctgccac

SEQ ID NO: 506642 - DNA, 15 bp, Homo sapiens
catgcccctgccacc

SEQ ID NO: 506643 - DNA, 15 bp, Homo sapiens
atgcccctgccaccc

SEQ ID NO: 506644 - DNA, 15 bp, Homo sapiens
tgcccctgccaccca

SEQ ID NO: 506645 - DNA, 15 bp, Homo sapiens
gcccctgccacccag

SEQ ID NO: 506646 - DNA, 15 bp, Homo sapiens
cccctgccacccagt

SEQ ID NO: 506647 - DNA, 15 bp, Homo sapiens
ccctgccacccagta

SEQ ID NO: 506648 - DNA, 15 bp, Homo sapiens
cctgccacccagtac

SEQ ID NO: 506649 - DNA, 15 bp, Homo sapiens
ctgccacccagtaca

SEQ ID NO: 506650 - DNA, 15 bp, Homo sapiens
tgccacccagtacac

SEQ ID NO: 506651 - DNA, 15 bp, Homo sapiens
gccacccagtacaca

SEQ ID NO: 506652 - DNA, 15 bp, Homo sapiens
ccacccagtacacac

SEQ ID NO: 506653 - DNA, 15 bp, Homo sapiens
cacccagtacacaca

SEQ ID NO: 506654 - DNA, 15 bp, Homo sapiens
acccagtacacacac

SEQ ID NO: 506655 - DNA, 15 bp, Homo sapiens
cccagtacacacacc

SEQ ID NO: 506656 - DNA, 15 bp, Homo sapiens
ccagtacacacacct

SEQ ID NO: 506657 - DNA, 15 bp, Homo sapiens
cagtacacacacctg

SEQ ID NO: 506658 - DNA, 15 bp, Homo sapiens
agtacacacacctga

SEQ ID NO: 506659 - DNA, 15 bp, Homo sapiens
gtacacacacctgag

SEQ ID NO: 506660 - DNA, 15 bp, Homo sapiens
tacacacacctgagt

SEQ ID NO: 506661 - DNA, 15 bp, Homo sapiens
acacacacctgagtc

SEQ ID NO: 506662 - DNA, 15 bp, Homo sapiens
cacacacctgagtca

SEQ ID NO: 506663 - DNA, 15 bp, Homo sapiens
acacacctgagtcat

SEQ ID NO: 506664 - DNA, 15 bp, Homo sapiens
cacacctgagtcatt

SEQ ID NO: 506665 - DNA, 15 bp, Homo sapiens
acacctgagtcatta

SEQ ID NO: 506666 - DNA, 15 bp, Homo sapiens
cacctgagtcattag

SEQ ID NO: 506667 - DNA, 15 bp, Homo sapiens
acctgagtcattaga

SEQ ID NO: 506668 - DNA, 15 bp, Homo sapiens
cctgagtcattagat

SEQ ID NO: 506669 - DNA, 15 bp, Homo sapiens
ctgagtcattagatg

SEQ ID NO: 506670 - DNA, 15 bp, Homo sapiens
tgagtcattagatgt

SEQ ID NO: 506671 - DNA, 15 bp, Homo sapiens
gagtcattagatgtc

SEQ ID NO: 506672 - DNA, 15 bp, Homo sapiens
agtcattagatgtca

SEQ ID NO: 506673 - DNA, 15 bp, Homo sapiens
gtcattagatgtcac

SEQ ID NO: 506674 - DNA, 15 bp, Homo sapiens
tcattagatgtcact

SEQ ID NO: 506675 - DNA, 15 bp, Homo sapiens
cattagatgtcactt

SEQ ID NO: 506676 - DNA, 15 bp, Homo sapiens
attagatgtcacttt

SEQ ID NO: 506677 - DNA, 15 bp, Homo sapiens
ttagatgtcacttta

SEQ ID NO: 506678 - DNA, 15 bp, Homo sapiens
tagatgtcactttat

SEQ ID NO: 506679 - DNA, 15 bp, Homo sapiens
agatgtcactttatg

SEQ ID NO: 506680 - DNA, 15 bp, Homo sapiens
gatgtcactttatgg

SEQ ID NO: 506681 - DNA, 15 bp, Homo sapiens
atgtcactttatggc

SEQ ID NO: 506682 - DNA, 15 bp, Homo sapiens
tgtcactttatggca

SEQ ID NO: 506683 - DNA, 15 bp, Homo sapiens
gtcactttatggcat

SEQ ID NO: 506684 - DNA, 15 bp, Homo sapiens
tcactttatggcatc

SEQ ID NO: 506685 - DNA, 15 bp, Homo sapiens
cactttatggcatcg

SEQ ID NO: 506686 - DNA, 15 bp, Homo sapiens
actttatggcatcgt

SEQ ID NO: 506687 - DNA, 15 bp, Homo sapiens
ctttatggcatcgtc

SEQ ID NO: 506688 - DNA, 15 bp, Homo sapiens
tttatggcatcgtca

SEQ ID NO: 506689 - DNA, 15 bp, Homo sapiens
ttatggcatcgtcac

SEQ ID NO: 506690 - DNA, 15 bp, Homo sapiens
tatggcatcgtcaca

SEQ ID NO: 506691 - DNA, 15 bp, Homo sapiens
atggcatcgtcacag

SEQ ID NO: 506692 - DNA, 15 bp, Homo sapiens
tggcatcgtcacaga

SEQ ID NO: 506693 - DNA, 15 bp, Homo sapiens
ggcatcgtcacagag

SEQ ID NO: 506694 - DNA, 15 bp, Homo sapiens
gcatcgtcacagaga

SEQ ID NO: 506695 - DNA, 15 bp, Homo sapiens
catcgtcacagagaa

SEQ ID NO: 506696 - DNA, 15 bp, Homo sapiens
atcgtcacagagaac

SEQ ID NO: 506697 - DNA, 15 bp, Homo sapiens
tcgtcacagagaaca

SEQ ID NO: 506698 - DNA, 15 bp, Homo sapiens
cgtcacagagaacaa

SEQ ID NO: 506699 - DNA, 15 bp, Homo sapiens
gtcacagagaacaac

SEQ ID NO: 506700 - DNA, 15 bp, Homo sapiens
tcacagagaacaact

SEQ ID NO: 506701 - DNA, 15 bp, Homo sapiens
cacagagaacaactg

SEQ ID NO: 506702 - DNA, 15 bp, Homo sapiens
acagagaacaactgg

SEQ ID NO: 506703 - DNA, 15 bp, Homo sapiens
cagagaacaactggg

SEQ ID NO: 506704 - DNA, 15 bp, Homo sapiens
agagaacaactgggt

SEQ ID NO: 506705 - DNA, 15 bp, Homo sapiens
gagaacaactgggtt

SEQ ID NO: 506706 - DNA, 15 bp, Homo sapiens
agaacaactgggttt

SEQ ID NO: 506707 - DNA, 15 bp, Homo sapiens
gaacaactgggtttt

SEQ ID NO: 506708 - DNA, 15 bp, Homo sapiens
aacaactgggttttg

SEQ ID NO: 506709 - DNA, 15 bp, Homo sapiens
acaactgggttttgg

SEQ ID NO: 506710 - DNA, 15 bp, Homo sapiens
caactgggttttgga

SEQ ID NO: 506711 - DNA, 15 bp, Homo sapiens
aactgggttttggag

SEQ ID NO: 506712 - DNA, 15 bp, Homo sapiens
actgggttttggaga

SEQ ID NO: 506713 - DNA, 15 bp, Homo sapiens
ctgggttttggagag

SEQ ID NO: 506714 - DNA, 15 bp, Homo sapiens
tgggttttggagaga

SEQ ID NO: 506715 - DNA, 15 bp, Homo sapiens
gggttttggagagag

SEQ ID NO: 506716 - DNA, 15 bp, Homo sapiens
ggttttggagagaga

SEQ ID NO: 506717 - DNA, 15 bp, Homo sapiens
gttttggagagagaa

SEQ ID NO: 506718 - DNA, 15 bp, Homo sapiens
ttttggagagagaat

SEQ ID NO: 506719 - DNA, 15 bp, Homo sapiens
tttggagagagaatg

SEQ ID NO: 506720 - DNA, 15 bp, Homo sapiens
ttggagagagaatgt

SEQ ID NO: 506721 - DNA, 15 bp, Homo sapiens
tggagagagaatgtc

SEQ ID NO: 506722 - DNA, 15 bp, Homo sapiens
ggagagagaatgtca

SEQ ID NO: 506723 - DNA, 15 bp, Homo sapiens
gagagagaatgtcat

SEQ ID NO: 506724 - DNA, 15 bp, Homo sapiens
agagagaatgtcatg

SEQ ID NO: 506725 - DNA, 15 bp, Homo sapiens
gagagaatgtcatga

SEQ ID NO: 506726 - DNA, 15 bp, Homo sapiens
agagaatgtcatgat

SEQ ID NO: 506727 - DNA, 15 bp, Homo sapiens
gagaatgtcatgatg

SEQ ID NO: 506728 - DNA, 15 bp, Homo sapiens
agaatgtcatgatgt

SEQ ID NO: 506729 - DNA, 15 bp, Homo sapiens
gaatgtcatgatgtg

SEQ ID NO: 506730 - DNA, 15 bp, Homo sapiens
aatgtcatgatgtga

SEQ ID NO: 506731 - DNA, 15 bp, Homo sapiens
atgtcatgatgtgac

SEQ ID NO: 506732 - DNA, 15 bp, Homo sapiens
tgtcatgatgtgact

SEQ ID NO: 506733 - DNA, 15 bp, Homo sapiens
gtcatgatgtgactt

SEQ ID NO: 506734 - DNA, 15 bp, Homo sapiens
tcatgatgtgacttc

SEQ ID NO: 506735 - DNA, 15 bp, Homo sapiens
catgatgtgacttca

SEQ ID NO: 506736 - DNA, 15 bp, Homo sapiens
atgatgtgacttcat

SEQ ID NO: 506737 - DNA, 15 bp, Homo sapiens
tgatgtgacttcatt

SEQ ID NO: 506738 - DNA, 15 bp, Homo sapiens
gatgtgacttcattt

SEQ ID NO: 506739 - DNA, 15 bp, Homo sapiens
atgtgacttcatttc

SEQ ID NO: 506740 - DNA, 15 bp, Homo sapiens
tgtgacttcatttcc

SEQ ID NO: 506741 - DNA, 15 bp, Homo sapiens
gtgacttcatttcct

SEQ ID NO: 506742 - DNA, 15 bp, Homo sapiens
tgacttcatttcctt

SEQ ID NO: 506743 - DNA, 15 bp, Homo sapiens
gacttcatttccttg

SEQ ID NO: 506744 - DNA, 15 bp, Homo sapiens
acttcatttccttgg

SEQ ID NO: 506745 - DNA, 15 bp, Homo sapiens
cttcatttccttgga

SEQ ID NO: 506746 - DNA, 15 bp, Homo sapiens
ttcatttccttggag

SEQ ID NO: 506747 - DNA, 15 bp, Homo sapiens
tcatttccttggagc

SEQ ID NO: 506748 - DNA, 15 bp, Homo sapiens
catttccttggagca

SEQ ID NO: 506749 - DNA, 15 bp, Homo sapiens
atttccttggagcac

SEQ ID NO: 506750 - DNA, 15 bp, Homo sapiens
tttccttggagcact

SEQ ID NO: 506751 - DNA, 15 bp, Homo sapiens
ttccttggagcactg

SEQ ID NO: 506752 - DNA, 15 bp, Homo sapiens
tccttggagcactgg

SEQ ID NO: 506753 - DNA, 15 bp, Homo sapiens
ccttggagcactggg

SEQ ID NO: 506754 - DNA, 15 bp, Homo sapiens
cttggagcactggga

SEQ ID NO: 506755 - DNA, 15 bp, Homo sapiens
ttggagcactgggat

SEQ ID NO: 506756 - DNA, 15 bp, Homo sapiens
tggagcactgggata

SEQ ID NO: 506757 - DNA, 15 bp, Homo sapiens
ggagcactgggatag

SEQ ID NO: 506758 - DNA, 15 bp, Homo sapiens
gagcactgggataga

SEQ ID NO: 506759 - DNA, 15 bp, Homo sapiens
agcactgggatagag

SEQ ID NO: 506760 - DNA, 15 bp, Homo sapiens
gcactgggatagagg

SEQ ID NO: 506761 - DNA, 15 bp, Homo sapiens
cactgggatagaggc

SEQ ID NO: 506762 - DNA, 15 bp, Homo sapiens
actgggatagaggct

SEQ ID NO: 506763 - DNA, 15 bp, Homo sapiens
ctgggatagaggctc

SEQ ID NO: 506764 - DNA, 15 bp, Homo sapiens
tgggatagaggctct

SEQ ID NO: 506765 - DNA, 15 bp, Homo sapiens
gggatagaggctctt

SEQ ID NO: 506766 - DNA, 15 bp, Homo sapiens
ggatagaggctcttg

SEQ ID NO: 506767 - DNA, 15 bp, Homo sapiens
gatagaggctcttgg

SEQ ID NO: 506768 - DNA, 15 bp, Homo sapiens
atagaggctcttggg

SEQ ID NO: 506769 - DNA, 15 bp, Homo sapiens
tagaggctcttgggt

SEQ ID NO: 506770 - DNA, 15 bp, Homo sapiens
agaggctcttgggtt

SEQ ID NO: 506771 - DNA, 15 bp, Homo sapiens
gaggctcttgggtta

SEQ ID NO: 506772 - DNA, 15 bp, Homo sapiens
aggctcttgggttag

SEQ ID NO: 506773 - DNA, 15 bp, Homo sapiens
ggctcttgggttaga

SEQ ID NO: 506774 - DNA, 15 bp, Homo sapiens
gctcttgggttagaa

SEQ ID NO: 506775 - DNA, 15 bp, Homo sapiens
ctcttgggttagaag

SEQ ID NO: 506776 - DNA, 15 bp, Homo sapiens
tcttgggttagaagc

SEQ ID NO: 506777 - DNA, 15 bp, Homo sapiens
cttgggttagaagct

SEQ ID NO: 506778 - DNA, 15 bp, Homo sapiens
ttgggttagaagctc

SEQ ID NO: 506779 - DNA, 15 bp, Homo sapiens
tgggttagaagctct

SEQ ID NO: 506780 - DNA, 15 bp, Homo sapiens
gggttagaagctctt

SEQ ID NO: 506781 - DNA, 15 bp, Homo sapiens
ggttagaagctcttg

SEQ ID NO: 506782 - DNA, 15 bp, Homo sapiens
gttagaagctcttgg

SEQ ID NO: 506783 - DNA, 15 bp, Homo sapiens
ttagaagctcttgga

SEQ ID NO: 506784 - DNA, 15 bp, Homo sapiens
tagaagctcttggac

SEQ ID NO: 506785 - DNA, 15 bp, Homo sapiens
agaagctcttggaca

SEQ ID NO: 506786 - DNA, 15 bp, Homo sapiens
gaagctcttggacat

SEQ ID NO: 506787 - DNA, 15 bp, Homo sapiens
aagctcttggacatt

SEQ ID NO: 506788 - DNA, 15 bp, Homo sapiens
agctcttggacatta

SEQ ID NO: 506789 - DNA, 15 bp, Homo sapiens
gctcttggacattaa

SEQ ID NO: 506790 - DNA, 15 bp, Homo sapiens
ctcttggacattaaa

SEQ ID NO: 506791 - DNA, 15 bp, Homo sapiens
tcttggacattaaag

SEQ ID NO: 506792 - DNA, 15 bp, Homo sapiens
cttggacattaaaga

SEQ ID NO: 506793 - DNA, 15 bp, Homo sapiens
ttggacattaaagag

SEQ ID NO: 506794 - DNA, 15 bp, Homo sapiens
tggacattaaagaga

SEQ ID NO: 506795 - DNA, 15 bp, Homo sapiens
ggacattaaagagaa

SEQ ID NO: 506796 - DNA, 15 bp, Homo sapiens
gacattaaagagaaa

SEQ ID NO: 506797 - DNA, 15 bp, Homo sapiens
acattaaagagaaat

SEQ ID NO: 506798 - DNA, 15 bp, Homo sapiens
cattaaagagaaatc

SEQ ID NO: 506799 - DNA, 15 bp, Homo sapiens
attaaagagaaatca

SEQ ID NO: 506800 - DNA, 15 bp, Homo sapiens
ttaaagagaaatcag

SEQ ID NO: 506801 - DNA, 15 bp, Homo sapiens
taaagagaaatcaga

SEQ ID NO: 506802 - DNA, 15 bp, Homo sapiens
aaagagaaatcagaa

SEQ ID NO: 506803 - DNA, 15 bp, Homo sapiens
aagagaaatcagaag

SEQ ID NO: 506804 - DNA, 15 bp, Homo sapiens
agagaaatcagaagg

SEQ ID NO: 506805 - DNA, 15 bp, Homo sapiens
gagaaatcagaaggt

SEQ ID NO: 506806 - DNA, 15 bp, Homo sapiens
agaaatcagaaggtt

SEQ ID NO: 506807 - DNA, 15 bp, Homo sapiens
gaaatcagaaggttt

SEQ ID NO: 506808 - DNA, 15 bp, Homo sapiens
aaatcagaaggttta

SEQ ID NO: 506809 - DNA, 15 bp, Homo sapiens
aatcagaaggtttag

SEQ ID NO: 506810 - DNA, 15 bp, Homo sapiens
atcagaaggtttagc

SEQ ID NO: 506811 - DNA, 15 bp, Homo sapiens
tcagaaggtttagcc

SEQ ID NO: 506812 - DNA, 15 bp, Homo sapiens
cagaaggtttagcct

SEQ ID NO: 506813 - DNA, 15 bp, Homo sapiens
agaaggtttagcctg

SEQ ID NO: 506814 - DNA, 15 bp, Homo sapiens
gaaggtttagcctga

SEQ ID NO: 506815 - DNA, 15 bp, Homo sapiens
aaggtttagcctgac

SEQ ID NO: 506816 - DNA, 15 bp, Homo sapiens
aggtttagcctgact

SEQ ID NO: 506817 - DNA, 15 bp, Homo sapiens
ggtttagcctgactg

SEQ ID NO: 506818 - DNA, 15 bp, Homo sapiens
gtttagcctgactga

SEQ ID NO: 506819 - DNA, 15 bp, Homo sapiens
tttagcctgactgat

SEQ ID NO: 506820 - DNA, 15 bp, Homo sapiens
ttagcctgactgata

SEQ ID NO: 506821 - DNA, 15 bp, Homo sapiens
tagcctgactgatac

SEQ ID NO: 506822 - DNA, 15 bp, Homo sapiens
agcctgactgatact

SEQ ID NO: 506823 - DNA, 15 bp, Homo sapiens
gcctgactgatactg

SEQ ID NO: 506824 - DNA, 15 bp, Homo sapiens
cctgactgatactga

SEQ ID NO: 506825 - DNA, 15 bp, Homo sapiens
ctgactgatactgag

SEQ ID NO: 506826 - DNA, 15 bp, Homo sapiens
tgactgatactgagc

SEQ ID NO: 506827 - DNA, 15 bp, Homo sapiens
gactgatactgagct

SEQ ID NO: 506828 - DNA, 15 bp, Homo sapiens
actgatactgagctc

SEQ ID NO: 506829 - DNA, 15 bp, Homo sapiens
ctgatactgagctca

SEQ ID NO: 506830 - DNA, 15 bp, Homo sapiens
tgatactgagctcat

SEQ ID NO: 506831 - DNA, 15 bp, Homo sapiens
gatactgagctcatt

SEQ ID NO: 506832 - DNA, 15 bp, Homo sapiens
atactgagctcatta

SEQ ID NO: 506833 - DNA, 15 bp, Homo sapiens
tactgagctcattat

SEQ ID NO: 506834 - DNA, 15 bp, Homo sapiens
actgagctcattata

SEQ ID NO: 506835 - DNA, 15 bp, Homo sapiens
ctgagctcattatag

SEQ ID NO: 506836 - DNA, 15 bp, Homo sapiens
tgagctcattataga

SEQ ID NO: 506837 - DNA, 15 bp, Homo sapiens
gagctcattatagat

SEQ ID NO: 506838 - DNA, 15 bp, Homo sapiens
agctcattatagatt

SEQ ID NO: 506839 - DNA, 15 bp, Homo sapiens
gctcattatagattg

SEQ ID NO: 506840 - DNA, 15 bp, Homo sapiens
ctcattatagattga

SEQ ID NO: 506841 - DNA, 15 bp, Homo sapiens
tcattatagattgac

SEQ ID NO: 506842 - DNA, 15 bp, Homo sapiens
cattatagattgaca

SEQ ID NO: 506843 - DNA, 15 bp, Homo sapiens
attatagattgacaa

SEQ ID NO: 506844 - DNA, 15 bp, Homo sapiens
ttatagattgacaat

SEQ ID NO: 506845 - DNA, 15 bp, Homo sapiens
tatagattgacaatc

SEQ ID NO: 506846 - DNA, 15 bp, Homo sapiens
atagattgacaatct

SEQ ID NO: 506847 - DNA, 15 bp, Homo sapiens
tagattgacaatctc

SEQ ID NO: 506848 - DNA, 15 bp, Homo sapiens
agattgacaatctct

SEQ ID NO: 506849 - DNA, 15 bp, Homo sapiens
gattgacaatctctc

SEQ ID NO: 506850 - DNA, 15 bp, Homo sapiens
attgacaatctctct

SEQ ID NO: 506851 - DNA, 15 bp, Homo sapiens
ttgacaatctctctt

SEQ ID NO: 506852 - DNA, 15 bp, Homo sapiens
tgacaatctctcttt

SEQ ID NO: 506853 - DNA, 15 bp, Homo sapiens
gacaatctctctttt

SEQ ID NO: 506854 - DNA, 15 bp, Homo sapiens
acaatctctcttttt

SEQ ID NO: 506855 - DNA, 15 bp, Homo sapiens
caatctctctttttt

SEQ ID NO: 506856 - DNA, 15 bp, Homo sapiens
aatctctcttttttt

SEQ ID NO: 506857 - DNA, 15 bp, Homo sapiens
atctctcttttttta

SEQ ID NO: 506858 - DNA, 15 bp, Homo sapiens
tctctctttttttaa

SEQ ID NO: 506859 - DNA, 15 bp, Homo sapiens
ctctctttttttaaa

SEQ ID NO: 506860 - DNA, 15 bp, Homo sapiens
tctctttttttaaaa

SEQ ID NO: 506861 - DNA, 15 bp, Homo sapiens
ctctttttttaaaaa

SEQ ID NO: 506862 - DNA, 15 bp, Homo sapiens
tctttttttaaaaaa

SEQ ID NO: 506863 - DNA, 15 bp, Homo sapiens
ctttttttaaaaaaa

SEQ ID NO: 506864 - DNA, 15 bp, Homo sapiens
tttttttaaaaaaaa

SEQ ID NO: 506865 - DNA, 15 bp, Homo sapiens
ttttttaaaaaaaaa

SEQ ID NO: 506866 - DNA, 15 bp, Homo sapiens
tttttaaaaaaaaaa

SEQ ID NO: 506867 - DNA, 15 bp, Homo sapiens
ttttaaaaaaaaaag

SEQ ID NO: 506868 - DNA, 15 bp, Homo sapiens
tttaaaaaaaaaagt

SEQ ID NO: 506869 - DNA, 15 bp, Homo sapiens
ttaaaaaaaaaagtt

SEQ ID NO: 506870 - DNA, 15 bp, Homo sapiens
taaaaaaaaaagttt

SEQ ID NO: 506871 - DNA, 15 bp, Homo sapiens
aaaaaaaaaagtttc

SEQ ID NO: 506872 - DNA, 15 bp, Homo sapiens
aaaaaaaaagtttcc

SEQ ID NO: 506873 - DNA, 15 bp, Homo sapiens
aaaaaaaagtttcct

SEQ ID NO: 506874 - DNA, 15 bp, Homo sapiens
aaaaaaagtttcctg

SEQ ID NO: 506875 - DNA, 15 bp, Homo sapiens
aaaaaagtttcctgc

SEQ ID NO: 506876 - DNA, 15 bp, Homo sapiens
aaaaagtttcctgcc

SEQ ID NO: 506877 - DNA, 15 bp, Homo sapiens
aaaagtttcctgccg

SEQ ID NO: 506878 - DNA, 15 bp, Homo sapiens
aaagtttcctgccgt

SEQ ID NO: 506879 - DNA, 15 bp, Homo sapiens
aagtttcctgccgtg

SEQ ID NO: 506880 - DNA, 15 bp, Homo sapiens
agtttcctgccgtgg

SEQ ID NO: 506881 - DNA, 15 bp, Homo sapiens
gtttcctgccgtggc

SEQ ID NO: 506882 - DNA, 15 bp, Homo sapiens
tttcctgccgtggct

SEQ ID NO: 506883 - DNA, 15 bp, Homo sapiens
ttcctgccgtggctg

SEQ ID NO: 506884 - DNA, 15 bp, Homo sapiens
tcctgccgtggctgc

SEQ ID NO: 506885 - DNA, 15 bp, Homo sapiens
cctgccgtggctgct

SEQ ID NO: 506886 - DNA, 15 bp, Homo sapiens
ctgccgtggctgctg

SEQ ID NO: 506887 - DNA, 15 bp, Homo sapiens
tgccgtggctgctgc

SEQ ID NO: 506888 - DNA, 15 bp, Homo sapiens
gccgtggctgctgct

SEQ ID NO: 506889 - DNA, 15 bp, Homo sapiens
ccgtggctgctgcta

SEQ ID NO: 506890 - DNA, 15 bp, Homo sapiens
cgtggctgctgctac

SEQ ID NO: 506891 - DNA, 15 bp, Homo sapiens
gtggctgctgctaca

SEQ ID NO: 506892 - DNA, 15 bp, Homo sapiens
tggctgctgctacag

SEQ ID NO: 506893 - DNA, 15 bp, Homo sapiens
ggctgctgctacaga

SEQ ID NO: 506894 - DNA, 15 bp, Homo sapiens
gctgctgctacagaa

SEQ ID NO: 506895 - DNA, 15 bp, Homo sapiens
ctgctgctacagaaa

SEQ ID NO: 506896 - DNA, 15 bp, Homo sapiens
tgctgctacagaaag

SEQ ID NO: 506897 - DNA, 15 bp, Homo sapiens
gctgctacagaaagt

SEQ ID NO: 506898 - DNA, 15 bp, Homo sapiens
ctgctacagaaagtc

SEQ ID NO: 506899 - DNA, 15 bp, Homo sapiens
tgctacagaaagtcc

SEQ ID NO: 506900 - DNA, 15 bp, Homo sapiens
gctacagaaagtcct

SEQ ID NO: 506901 - DNA, 15 bp, Homo sapiens
ctacagaaagtcctt

SEQ ID NO: 506902 - DNA, 15 bp, Homo sapiens
tacagaaagtccttt

SEQ ID NO: 506903 - DNA, 15 bp, Homo sapiens
acagaaagtcctttg

SEQ ID NO: 506904 - DNA, 15 bp, Homo sapiens
cagaaagtcctttgt

SEQ ID NO: 506905 - DNA, 15 bp, Homo sapiens
agaaagtcctttgtg

SEQ ID NO: 506906 - DNA, 15 bp, Homo sapiens
gaaagtcctttgtga

SEQ ID NO: 506907 - DNA, 15 bp, Homo sapiens
aaagtcctttgtgaa

SEQ ID NO: 506908 - DNA, 15 bp, Homo sapiens
aagtcctttgtgaaa

SEQ ID NO: 506909 - DNA, 15 bp, Homo sapiens
agtcctttgtgaaag

SEQ ID NO: 506910 - DNA, 15 bp, Homo sapiens
gtcctttgtgaaagc

SEQ ID NO: 506911 - DNA, 15 bp, Homo sapiens
tcctttgtgaaagcc

SEQ ID NO: 506912 - DNA, 15 bp, Homo sapiens
cctttgtgaaagccc

SEQ ID NO: 506913 - DNA, 15 bp, Homo sapiens
ctttgtgaaagcccc

SEQ ID NO: 506914 - DNA, 15 bp, Homo sapiens
tttgtgaaagcccca

SEQ ID NO: 506915 - DNA, 15 bp, Homo sapiens
ttgtgaaagccccag

SEQ ID NO: 506916 - DNA, 15 bp, Homo sapiens
tgtgaaagccccagc

SEQ ID NO: 506917 - DNA, 15 bp, Homo sapiens
gtgaaagccccagcc

SEQ ID NO: 506918 - DNA, 15 bp, Homo sapiens
tgaaagccccagcct

SEQ ID NO: 506919 - DNA, 15 bp, Homo sapiens
gaaagccccagcctg

SEQ ID NO: 506920 - DNA, 15 bp, Homo sapiens
aaagccccagcctga

SEQ ID NO: 506921 - DNA, 15 bp, Homo sapiens
aagccccagcctgat

SEQ ID NO: 506922 - DNA, 15 bp, Homo sapiens
agccccagcctgatt

SEQ ID NO: 506923 - DNA, 15 bp, Homo sapiens
gccccagcctgattt

SEQ ID NO: 506924 - DNA, 15 bp, Homo sapiens
ccccagcctgatttc

SEQ ID NO: 506925 - DNA, 15 bp, Homo sapiens
cccagcctgatttca

SEQ ID NO: 506926 - DNA, 15 bp, Homo sapiens
ccagcctgatttcac

SEQ ID NO: 506927 - DNA, 15 bp, Homo sapiens
cagcctgatttcact

SEQ ID NO: 506928 - DNA, 15 bp, Homo sapiens
agcctgatttcacta

SEQ ID NO: 506929 - DNA, 15 bp, Homo sapiens
gcctgatttcactat

SEQ ID NO: 506930 - DNA, 15 bp, Homo sapiens
cctgatttcactatc

SEQ ID NO: 506931 - DNA, 15 bp, Homo sapiens
ctgatttcactatca

SEQ ID NO: 506932 - DNA, 15 bp, Homo sapiens
tgatttcactatcaa

SEQ ID NO: 506933 - DNA, 15 bp, Homo sapiens
gatttcactatcaac

SEQ ID NO: 506934 - DNA, 15 bp, Homo sapiens
atttcactatcaacc

SEQ ID NO: 506935 - DNA, 15 bp, Homo sapiens
tttcactatcaacca

SEQ ID NO: 506936 - DNA, 15 bp, Homo sapiens
ttcactatcaaccac

SEQ ID NO: 506937 - DNA, 15 bp, Homo sapiens
tcactatcaaccact

SEQ ID NO: 506938 - DNA, 15 bp, Homo sapiens
cactatcaaccactt

SEQ ID NO: 506939 - DNA, 15 bp, Homo sapiens
actatcaaccactta

SEQ ID NO: 506940 - DNA, 15 bp, Homo sapiens
ctatcaaccacttaa

SEQ ID NO: 506941 - DNA, 15 bp, Homo sapiens
tatcaaccacttaac

SEQ ID NO: 506942 - DNA, 15 bp, Homo sapiens
atcaaccacttaacc

SEQ ID NO: 506943 - DNA, 15 bp, Homo sapiens
tcaaccacttaacca

SEQ ID NO: 506944 - DNA, 15 bp, Homo sapiens
caaccacttaaccac

SEQ ID NO: 506945 - DNA, 15 bp, Homo sapiens
aaccacttaaccacg

SEQ ID NO: 506946 - DNA, 15 bp, Homo sapiens
accacttaaccacgg

SEQ ID NO: 506947 - DNA, 15 bp, Homo sapiens
ccacttaaccacggt

SEQ ID NO: 506948 - DNA, 15 bp, Homo sapiens
cacttaaccacggta

SEQ ID NO: 506949 - DNA, 15 bp, Homo sapiens
acttaaccacggtat

SEQ ID NO: 506950 - DNA, 15 bp, Homo sapiens
cttaaccacggtatt

SEQ ID NO: 506951 - DNA, 15 bp, Homo sapiens
ttaaccacggtatta

SEQ ID NO: 506952 - DNA, 15 bp, Homo sapiens
taaccacggtattaa

SEQ ID NO: 506953 - DNA, 15 bp, Homo sapiens
aaccacggtattaat

SEQ ID NO: 506954 - DNA, 15 bp, Homo sapiens
accacggtattaatt

SEQ ID NO: 506955 - DNA, 15 bp, Homo sapiens
ccacggtattaattt

SEQ ID NO: 506956 - DNA, 15 bp, Homo sapiens
cacggtattaatttt

SEQ ID NO: 506957 - DNA, 15 bp, Homo sapiens
acggtattaattttt

SEQ ID NO: 506958 - DNA, 15 bp, Homo sapiens
cggtattaatttttc

SEQ ID NO: 506959 - DNA, 15 bp, Homo sapiens
ggtattaatttttca

SEQ ID NO: 506960 - DNA, 15 bp, Homo sapiens
gtattaatttttcag

SEQ ID NO: 506961 - DNA, 15 bp, Homo sapiens
tattaatttttcagt

SEQ ID NO: 506962 - DNA, 15 bp, Homo sapiens
attaatttttcagtt

SEQ ID NO: 506963 - DNA, 15 bp, Homo sapiens
ttaatttttcagttg

SEQ ID NO: 506964 - DNA, 15 bp, Homo sapiens
taatttttcagttgt

SEQ ID NO: 506965 - DNA, 15 bp, Homo sapiens
aatttttcagttgtt

SEQ ID NO: 506966 - DNA, 15 bp, Homo sapiens
atttttcagttgttg

SEQ ID NO: 506967 - DNA, 15 bp, Homo sapiens
tttttcagttgttga

SEQ ID NO: 506968 - DNA, 15 bp, Homo sapiens
ttttcagttgttgaa

SEQ ID NO: 506969 - DNA, 15 bp, Homo sapiens
tttcagttgttgaac

SEQ ID NO: 506970 - DNA, 15 bp, Homo sapiens
ttcagttgttgaact

SEQ ID NO: 506971 - DNA, 15 bp, Homo sapiens
tcagttgttgaactt

SEQ ID NO: 506972 - DNA, 15 bp, Homo sapiens
cagttgttgaacttt

SEQ ID NO: 506973 - DNA, 15 bp, Homo sapiens
agttgttgaactttt

SEQ ID NO: 506974 - DNA, 15 bp, Homo sapiens
gttgttgaactttta

SEQ ID NO: 506975 - DNA, 15 bp, Homo sapiens
ttgttgaacttttaa

SEQ ID NO: 506976 - DNA, 15 bp, Homo sapiens
tgttgaacttttaag

SEQ ID NO: 506977 - DNA, 15 bp, Homo sapiens
gttgaacttttaaga

SEQ ID NO: 506978 - DNA, 15 bp, Homo sapiens
ttgaacttttaagat

SEQ ID NO: 506979 - DNA, 15 bp, Homo sapiens
tgaacttttaagatt

SEQ ID NO: 506980 - DNA, 15 bp, Homo sapiens
gaacttttaagattt

SEQ ID NO: 506981 - DNA, 15 bp, Homo sapiens
aacttttaagatttt

SEQ ID NO: 506982 - DNA, 15 bp, Homo sapiens
acttttaagatttta

SEQ ID NO: 506983 - DNA, 15 bp, Homo sapiens
cttttaagattttaa

SEQ ID NO: 506984 - DNA, 15 bp, Homo sapiens
ttttaagattttaaa

SEQ ID NO: 506985 - DNA, 15 bp, Homo sapiens
tttaagattttaaat

SEQ ID NO: 506986 - DNA, 15 bp, Homo sapiens
ttaagattttaaatt

SEQ ID NO: 506987 - DNA, 15 bp, Homo sapiens
taagattttaaatta

SEQ ID NO: 506988 - DNA, 15 bp, Homo sapiens
aagattttaaattac

SEQ ID NO: 506989 - DNA, 15 bp, Homo sapiens
agattttaaattact

SEQ ID NO: 506990 - DNA, 15 bp, Homo sapiens
gattttaaattactt

SEQ ID NO: 506991 - DNA, 15 bp, Homo sapiens
attttaaattactta

SEQ ID NO: 506992 - DNA, 15 bp, Homo sapiens
ttttaaattacttaa

SEQ ID NO: 506993 - DNA, 15 bp, Homo sapiens
tttaaattacttaag

SEQ ID NO: 506994 - DNA, 15 bp, Homo sapiens
ttaaattacttaaga

SEQ ID NO: 506995 - DNA, 15 bp, Homo sapiens
taaattacttaagac

SEQ ID NO: 506996 - DNA, 15 bp, Homo sapiens
aaattacttaagact

SEQ ID NO: 506997 - DNA, 15 bp, Homo sapiens
aattacttaagactt

SEQ ID NO: 506998 - DNA, 15 bp, Homo sapiens
attacttaagacttt

SEQ ID NO: 506999 - DNA, 15 bp, Homo sapiens
ttacttaagacttta

SEQ ID NO: 507000 - DNA, 15 bp, Homo sapiens
tacttaagactttaa

SEQ ID NO: 507001 - DNA, 15 bp, Homo sapiens
acttaagactttaaa

SEQ ID NO: 507002 - DNA, 15 bp, Homo sapiens
cttaagactttaaaa

SEQ ID NO: 507003 - DNA, 15 bp, Homo sapiens
ttaagactttaaaaa

SEQ ID NO: 507004 - DNA, 15 bp, Homo sapiens
taagactttaaaaat

SEQ ID NO: 507005 - DNA, 15 bp, Homo sapiens
aagactttaaaaata

SEQ ID NO: 507006 - DNA, 15 bp, Homo sapiens
agactttaaaaatag

SEQ ID NO: 507007 - DNA, 15 bp, Homo sapiens
gactttaaaaatagt

SEQ ID NO: 507008 - DNA, 15 bp, Homo sapiens
actttaaaaatagtc

SEQ ID NO: 507009 - DNA, 15 bp, Homo sapiens
ctttaaaaatagtct

SEQ ID NO: 507010 - DNA, 15 bp, Homo sapiens
tttaaaaatagtctg

SEQ ID NO: 507011 - DNA, 15 bp, Homo sapiens
ttaaaaatagtctgt

SEQ ID NO: 507012 - DNA, 15 bp, Homo sapiens
taaaaatagtctgtt

SEQ ID NO: 507013 - DNA, 15 bp, Homo sapiens
aaaaatagtctgttg

SEQ ID NO: 507014 - DNA, 15 bp, Homo sapiens
aaaatagtctgttgc

SEQ ID NO: 507015 - DNA, 15 bp, Homo sapiens
aaatagtctgttgct

SEQ ID NO: 507016 - DNA, 15 bp, Homo sapiens
aatagtctgttgctg

SEQ ID NO: 507017 - DNA, 15 bp, Homo sapiens
atagtctgttgctga

SEQ ID NO: 507018 - DNA, 15 bp, Homo sapiens
tagtctgttgctgag

SEQ ID NO: 507019 - DNA, 15 bp, Homo sapiens
agtctgttgctgagc

SEQ ID NO: 507020 - DNA, 15 bp, Homo sapiens
gtctgttgctgagcc

SEQ ID NO: 507021 - DNA, 15 bp, Homo sapiens
tctgttgctgagcca

SEQ ID NO: 507022 - DNA, 15 bp, Homo sapiens
ctgttgctgagccag

SEQ ID NO: 507023 - DNA, 15 bp, Homo sapiens
tgttgctgagccaga

SEQ ID NO: 507024 - DNA, 15 bp, Homo sapiens
gttgctgagccagaa

SEQ ID NO: 507025 - DNA, 15 bp, Homo sapiens
ttgctgagccagaat

SEQ ID NO: 507026 - DNA, 15 bp, Homo sapiens
tgctgagccagaata

SEQ ID NO: 507027 - DNA, 15 bp, Homo sapiens
gctgagccagaatag

SEQ ID NO: 507028 - DNA, 15 bp, Homo sapiens
ctgagccagaatagt

SEQ ID NO: 507029 - DNA, 15 bp, Homo sapiens
tgagccagaatagtt

SEQ ID NO: 507030 - DNA, 15 bp, Homo sapiens
gagccagaatagttt

SEQ ID NO: 507031 - DNA, 15 bp, Homo sapiens
agccagaatagtttg

SEQ ID NO: 507032 - DNA, 15 bp, Homo sapiens
gccagaatagtttgt

SEQ ID NO: 507033 - DNA, 15 bp, Homo sapiens
ccagaatagtttgtt

SEQ ID NO: 507034 - DNA, 15 bp, Homo sapiens
cagaatagtttgtta

SEQ ID NO: 507035 - DNA, 15 bp, Homo sapiens
agaatagtttgttaa

SEQ ID NO: 507036 - DNA, 15 bp, Homo sapiens
gaatagtttgttaag

SEQ ID NO: 507037 - DNA, 15 bp, Homo sapiens
aatagtttgttaaga

SEQ ID NO: 507038 - DNA, 15 bp, Homo sapiens
atagtttgttaagaa

SEQ ID NO: 507039 - DNA, 15 bp, Homo sapiens
tagtttgttaagaaa

SEQ ID NO: 507040 - DNA, 15 bp, Homo sapiens
agtttgttaagaaac

SEQ ID NO: 507041 - DNA, 15 bp, Homo sapiens
gtttgttaagaaaca

SEQ ID NO: 507042 - DNA, 15 bp, Homo sapiens
tttgttaagaaacat

SEQ ID NO: 507043 - DNA, 15 bp, Homo sapiens
ttgttaagaaacatg

SEQ ID NO: 507044 - DNA, 15 bp, Homo sapiens
tgttaagaaacatgc

SEQ ID NO: 507045 - DNA, 15 bp, Homo sapiens
gttaagaaacatgca

SEQ ID NO: 507046 - DNA, 15 bp, Homo sapiens
ttaagaaacatgcat

SEQ ID NO: 507047 - DNA, 15 bp, Homo sapiens
taagaaacatgcatc

SEQ ID NO: 507048 - DNA, 15 bp, Homo sapiens
aagaaacatgcatct

SEQ ID NO: 507049 - DNA, 15 bp, Homo sapiens
agaaacatgcatctt

SEQ ID NO: 507050 - DNA, 15 bp, Homo sapiens
gaaacatgcatcttt

SEQ ID NO: 507051 - DNA, 15 bp, Homo sapiens
aaacatgcatctttg

SEQ ID NO: 507052 - DNA, 15 bp, Homo sapiens
aacatgcatctttga

SEQ ID NO: 507053 - DNA, 15 bp, Homo sapiens
acatgcatctttgag

SEQ ID NO: 507054 - DNA, 15 bp, Homo sapiens
catgcatctttgagt

SEQ ID NO: 507055 - DNA, 15 bp, Homo sapiens
atgcatctttgagta

SEQ ID NO: 507056 - DNA, 15 bp, Homo sapiens
tgcatctttgagtag

SEQ ID NO: 507057 - DNA, 15 bp, Homo sapiens
gcatctttgagtaga

SEQ ID NO: 507058 - DNA, 15 bp, Homo sapiens
catctttgagtagaa

SEQ ID NO: 507059 - DNA, 15 bp, Homo sapiens
atctttgagtagaac

SEQ ID NO: 507060 - DNA, 15 bp, Homo sapiens
tctttgagtagaact

SEQ ID NO: 507061 - DNA, 15 bp, Homo sapiens
ctttgagtagaacta

SEQ ID NO: 507062 - DNA, 15 bp, Homo sapiens
tttgagtagaactaa

SEQ ID NO: 507063 - DNA, 15 bp, Homo sapiens
ttgagtagaactaaa

SEQ ID NO: 507064 - DNA, 15 bp, Homo sapiens
tgagtagaactaaag

SEQ ID NO: 507065 - DNA, 15 bp, Homo sapiens
gagtagaactaaagt

SEQ ID NO: 507066 - DNA, 15 bp, Homo sapiens
agtagaactaaagtc

SEQ ID NO: 507067 - DNA, 15 bp, Homo sapiens
gtagaactaaagtcc

SEQ ID NO: 507068 - DNA, 15 bp, Homo sapiens
tagaactaaagtccc

SEQ ID NO: 507069 - DNA, 15 bp, Homo sapiens
agaactaaagtccct

SEQ ID NO: 507070 - DNA, 15 bp, Homo sapiens
gaactaaagtccctt

SEQ ID NO: 507071 - DNA, 15 bp, Homo sapiens
aactaaagtcccttg

SEQ ID NO: 507072 - DNA, 15 bp, Homo sapiens
actaaagtcccttgg

SEQ ID NO: 507073 - DNA, 15 bp, Homo sapiens
ctaaagtcccttggt

SEQ ID NO: 507074 - DNA, 15 bp, Homo sapiens
taaagtcccttggtg

SEQ ID NO: 507075 - DNA, 15 bp, Homo sapiens
aaagtcccttggtgt

SEQ ID NO: 507076 - DNA, 15 bp, Homo sapiens
aagtcccttggtgtt

SEQ ID NO: 507077 - DNA, 15 bp, Homo sapiens
agtcccttggtgttg

SEQ ID NO: 507078 - DNA, 15 bp, Homo sapiens
gtcccttggtgttgg

SEQ ID NO: 507079 - DNA, 15 bp, Homo sapiens
tcccttggtgttgga

SEQ ID NO: 507080 - DNA, 15 bp, Homo sapiens
cccttggtgttggaa

SEQ ID NO: 507081 - DNA, 15 bp, Homo sapiens
ccttggtgttggaaa

SEQ ID NO: 507082 - DNA, 15 bp, Homo sapiens
cttggtgttggaaaa

SEQ ID NO: 507083 - DNA, 15 bp, Homo sapiens
ttggtgttggaaaat

SEQ ID NO: 507084 - DNA, 15 bp, Homo sapiens
tggtgttggaaaatg

SEQ ID NO: 507085 - DNA, 15 bp, Homo sapiens
ggtgttggaaaatgc

SEQ ID NO: 507086 - DNA, 15 bp, Homo sapiens
gtgttggaaaatgcc

SEQ ID NO: 507087 - DNA, 15 bp, Homo sapiens
tgttggaaaatgccc

SEQ ID NO: 507088 - DNA, 15 bp, Homo sapiens
gttggaaaatgccct

SEQ ID NO: 507089 - DNA, 15 bp, Homo sapiens
ttggaaaatgccctc

SEQ ID NO: 507090 - DNA, 15 bp, Homo sapiens
tggaaaatgccctcc

SEQ ID NO: 507091 - DNA, 15 bp, Homo sapiens
ggaaaatgccctcca

SEQ ID NO: 507092 - DNA, 15 bp, Homo sapiens
gaaaatgccctccac

SEQ ID NO: 507093 - DNA, 15 bp, Homo sapiens
aaaatgccctccaca

SEQ ID NO: 507094 - DNA, 15 bp, Homo sapiens
aaatgccctccacac

SEQ ID NO: 507095 - DNA, 15 bp, Homo sapiens
aatgccctccacact

SEQ ID NO: 507096 - DNA, 15 bp, Homo sapiens
atgccctccacactc

SEQ ID NO: 507097 - DNA, 15 bp, Homo sapiens
tgccctccacactcc

SEQ ID NO: 507098 - DNA, 15 bp, Homo sapiens
gccctccacactcct

SEQ ID NO: 507099 - DNA, 15 bp, Homo sapiens
ccctccacactcctc

SEQ ID NO: 507100 - DNA, 15 bp, Homo sapiens
cctccacactcctcc

SEQ ID NO: 507101 - DNA, 15 bp, Homo sapiens
ctccacactcctcca

SEQ ID NO: 507102 - DNA, 15 bp, Homo sapiens
tccacactcctccaa

SEQ ID NO: 507103 - DNA, 15 bp, Homo sapiens
ccacactcctccaaa

SEQ ID NO: 507104 - DNA, 15 bp, Homo sapiens
cacactcctccaaaa

SEQ ID NO: 507105 - DNA, 15 bp, Homo sapiens
acactcctccaaaaa

SEQ ID NO: 507106 - DNA, 15 bp, Homo sapiens
cactcctccaaaaat

SEQ ID NO: 507107 - DNA, 15 bp, Homo sapiens
actcctccaaaaatg

SEQ ID NO: 507108 - DNA, 15 bp, Homo sapiens
ctcctccaaaaatgg

SEQ ID NO: 507109 - DNA, 15 bp, Homo sapiens
tcctccaaaaatgga

SEQ ID NO: 507110 - DNA, 15 bp, Homo sapiens
cctccaaaaatggat

SEQ ID NO: 507111 - DNA, 15 bp, Homo sapiens
ctccaaaaatggatt

SEQ ID NO: 507112 - DNA, 15 bp, Homo sapiens
tccaaaaatggatta

SEQ ID NO: 507113 - DNA, 15 bp, Homo sapiens
ccaaaaatggattaa

SEQ ID NO: 507114 - DNA, 15 bp, Homo sapiens
caaaaatggattaag

SEQ ID NO: 507115 - DNA, 15 bp, Homo sapiens
aaaaatggattaaga

SEQ ID NO: 507116 - DNA, 15 bp, Homo sapiens
aaaatggattaagaa

SEQ ID NO: 507117 - DNA, 15 bp, Homo sapiens
aaatggattaagaat

SEQ ID NO: 507118 - DNA, 15 bp, Homo sapiens
aatggattaagaata

SEQ ID NO: 507119 - DNA, 15 bp, Homo sapiens
atggattaagaatac

SEQ ID NO: 507120 - DNA, 15 bp, Homo sapiens
tggattaagaatact

SEQ ID NO: 507121 - DNA, 15 bp, Homo sapiens
ggattaagaatactt

SEQ ID NO: 507122 - DNA, 15 bp, Homo sapiens
gattaagaatacttc

SEQ ID NO: 507123 - DNA, 15 bp, Homo sapiens
attaagaatacttca

SEQ ID NO: 507124 - DNA, 15 bp, Homo sapiens
ttaagaatacttcat

SEQ ID NO: 507125 - DNA, 15 bp, Homo sapiens
taagaatacttcatg

SEQ ID NO: 507126 - DNA, 15 bp, Homo sapiens
aagaatacttcatgg

SEQ ID NO: 507127 - DNA, 15 bp, Homo sapiens
agaatacttcatggt

SEQ ID NO: 507128 - DNA, 15 bp, Homo sapiens
gaatacttcatggta

SEQ ID NO: 507129 - DNA, 15 bp, Homo sapiens
aatacttcatggtat

SEQ ID NO: 507130 - DNA, 15 bp, Homo sapiens
atacttcatggtatt

SEQ ID NO: 507131 - DNA, 15 bp, Homo sapiens
tacttcatggtattt

SEQ ID NO: 507132 - DNA, 15 bp, Homo sapiens
acttcatggtatttt

SEQ ID NO: 507133 - DNA, 15 bp, Homo sapiens
cttcatggtattttc

SEQ ID NO: 507134 - DNA, 15 bp, Homo sapiens
ttcatggtattttcc

SEQ ID NO: 507135 - DNA, 15 bp, Homo sapiens
tcatggtattttccc

SEQ ID NO: 507136 - DNA, 15 bp, Homo sapiens
catggtattttccca

SEQ ID NO: 507137 - DNA, 15 bp, Homo sapiens
atggtattttcccat

SEQ ID NO: 507138 - DNA, 15 bp, Homo sapiens
tggtattttcccata

SEQ ID NO: 507139 - DNA, 15 bp, Homo sapiens
ggtattttcccatag

SEQ ID NO: 507140 - DNA, 15 bp, Homo sapiens
gtattttcccatagg

SEQ ID NO: 507141 - DNA, 15 bp, Homo sapiens
tattttcccataggt

SEQ ID NO: 507142 - DNA, 15 bp, Homo sapiens
attttcccataggta

SEQ ID NO: 507143 - DNA, 15 bp, Homo sapiens
ttttcccataggtag

SEQ ID NO: 507144 - DNA, 15 bp, Homo sapiens
tttcccataggtagt

SEQ ID NO: 507145 - DNA, 15 bp, Homo sapiens
ttcccataggtagta

SEQ ID NO: 507146 - DNA, 15 bp, Homo sapiens
tcccataggtagtaa

SEQ ID NO: 507147 - DNA, 15 bp, Homo sapiens
cccataggtagtaat

SEQ ID NO: 507148 - DNA, 15 bp, Homo sapiens
ccataggtagtaatg

SEQ ID NO: 507149 - DNA, 15 bp, Homo sapiens
cataggtagtaatgt

SEQ ID NO: 507150 - DNA, 15 bp, Homo sapiens
ataggtagtaatgtt

SEQ ID NO: 507151 - DNA, 15 bp, Homo sapiens
taggtagtaatgtta

SEQ ID NO: 507152 - DNA, 15 bp, Homo sapiens
aggtagtaatgttac

SEQ ID NO: 507153 - DNA, 15 bp, Homo sapiens
ggtagtaatgttacc

SEQ ID NO: 507154 - DNA, 15 bp, Homo sapiens
gtagtaatgttacca

SEQ ID NO: 507155 - DNA, 15 bp, Homo sapiens
tagtaatgttaccag

SEQ ID NO: 507156 - DNA, 15 bp, Homo sapiens
agtaatgttaccagt

SEQ ID NO: 507157 - DNA, 15 bp, Homo sapiens
gtaatgttaccagta

SEQ ID NO: 507158 - DNA, 15 bp, Homo sapiens
taatgttaccagtaa

SEQ ID NO: 507159 - DNA, 15 bp, Homo sapiens
aatgttaccagtaag

SEQ ID NO: 507160 - DNA, 15 bp, Homo sapiens
atgttaccagtaagt

SEQ ID NO: 507161 - DNA, 15 bp, Homo sapiens
tgttaccagtaagtt

SEQ ID NO: 507162 - DNA, 15 bp, Homo sapiens
gttaccagtaagttc

SEQ ID NO: 507163 - DNA, 15 bp, Homo sapiens
ttaccagtaagttcc

SEQ ID NO: 507164 - DNA, 15 bp, Homo sapiens
taccagtaagttccg

SEQ ID NO: 507165 - DNA, 15 bp, Homo sapiens
accagtaagttccgg

SEQ ID NO: 507166 - DNA, 15 bp, Homo sapiens
ccagtaagttccggg

SEQ ID NO: 507167 - DNA, 15 bp, Homo sapiens
cagtaagttccgggc

SEQ ID NO: 507168 - DNA, 15 bp, Homo sapiens
agtaagttccgggct

SEQ ID NO: 507169 - DNA, 15 bp, Homo sapiens
gtaagttccgggctt

SEQ ID NO: 507170 - DNA, 15 bp, Homo sapiens
taagttccgggcttc

SEQ ID NO: 507171 - DNA, 15 bp, Homo sapiens
aagttccgggcttca

SEQ ID NO: 507172 - DNA, 15 bp, Homo sapiens
agttccgggcttcaa

SEQ ID NO: 507173 - DNA, 15 bp, Homo sapiens
gttccgggcttcaaa

SEQ ID NO: 507174 - DNA, 15 bp, Homo sapiens
ttccgggcttcaaaa

SEQ ID NO: 507175 - DNA, 15 bp, Homo sapiens
tccgggcttcaaaaa

SEQ ID NO: 507176 - DNA, 15 bp, Homo sapiens
ccgggcttcaaaaaa

SEQ ID NO: 507177 - DNA, 15 bp, Homo sapiens
cgggcttcaaaaaat

SEQ ID NO: 507178 - DNA, 15 bp, Homo sapiens
gggcttcaaaaaatg

SEQ ID NO: 507179 - DNA, 15 bp, Homo sapiens
ggcttcaaaaaatga

SEQ ID NO: 507180 - DNA, 15 bp, Homo sapiens
gcttcaaaaaatgat

SEQ ID NO: 507181 - DNA, 15 bp, Homo sapiens
cttcaaaaaatgatt

SEQ ID NO: 507182 - DNA, 15 bp, Homo sapiens
ttcaaaaaatgattt

SEQ ID NO: 507183 - DNA, 15 bp, Homo sapiens
tcaaaaaatgatttc

SEQ ID NO: 507184 - DNA, 15 bp, Homo sapiens
caaaaaatgatttct

SEQ ID NO: 507185 - DNA, 15 bp, Homo sapiens
aaaaaatgatttcta

SEQ ID NO: 507186 - DNA, 15 bp, Homo sapiens
aaaaatgatttctaa

SEQ ID NO: 507187 - DNA, 15 bp, Homo sapiens
aaaatgatttctaag

SEQ ID NO: 507188 - DNA, 15 bp, Homo sapiens
aaatgatttctaaga

SEQ ID NO: 507189 - DNA, 15 bp, Homo sapiens
aatgatttctaagaa

SEQ ID NO: 507190 - DNA, 15 bp, Homo sapiens
atgatttctaagaag

SEQ ID NO: 507191 - DNA, 15 bp, Homo sapiens
tgatttctaagaagt

SEQ ID NO: 507192 - DNA, 15 bp, Homo sapiens
gatttctaagaagtt

SEQ ID NO: 507193 - DNA, 15 bp, Homo sapiens
atttctaagaagttt

SEQ ID NO: 507194 - DNA, 15 bp, Homo sapiens
tttctaagaagtttg

SEQ ID NO: 507195 - DNA, 15 bp, Homo sapiens
ttctaagaagtttga

SEQ ID NO: 507196 - DNA, 15 bp, Homo sapiens
tctaagaagtttgaa

SEQ ID NO: 507197 - DNA, 15 bp, Homo sapiens
ctaagaagtttgaag

SEQ ID NO: 507198 - DNA, 15 bp, Homo sapiens
taagaagtttgaaga

SEQ ID NO: 507199 - DNA, 15 bp, Homo sapiens
aagaagtttgaagat

SEQ ID NO: 507200 - DNA, 15 bp, Homo sapiens
agaagtttgaagatt

SEQ ID NO: 507201 - DNA, 15 bp, Homo sapiens
gaagtttgaagattc

SEQ ID NO: 507202 - DNA, 15 bp, Homo sapiens
aagtttgaagattca

SEQ ID NO: 507203 - DNA, 15 bp, Homo sapiens
agtttgaagattcag

SEQ ID NO: 507204 - DNA, 15 bp, Homo sapiens
gtttgaagattcagt

SEQ ID NO: 507205 - DNA, 15 bp, Homo sapiens
tttgaagattcagtg

SEQ ID NO: 507206 - DNA, 15 bp, Homo sapiens
ttgaagattcagtgg

SEQ ID NO: 507207 - DNA, 15 bp, Homo sapiens
tgaagattcagtgga

SEQ ID NO: 507208 - DNA, 15 bp, Homo sapiens
gaagattcagtggac

SEQ ID NO: 507209 - DNA, 15 bp, Homo sapiens
aagattcagtggaca

SEQ ID NO: 507210 - DNA, 15 bp, Homo sapiens
agattcagtggacac

SEQ ID NO: 507211 - DNA, 15 bp, Homo sapiens
gattcagtggacaca

SEQ ID NO: 507212 - DNA, 15 bp, Homo sapiens
attcagtggacacac

SEQ ID NO: 507213 - DNA, 15 bp, Homo sapiens
ttcagtggacacact

SEQ ID NO: 507214 - DNA, 15 bp, Homo sapiens
tcagtggacacactt

SEQ ID NO: 507215 - DNA, 15 bp, Homo sapiens
cagtggacacacttt

SEQ ID NO: 507216 - DNA, 15 bp, Homo sapiens
agtggacacactttt

SEQ ID NO: 507217 - DNA, 15 bp, Homo sapiens
gtggacacacttttg

SEQ ID NO: 507218 - DNA, 15 bp, Homo sapiens
tggacacacttttgg

SEQ ID NO: 507219 - DNA, 15 bp, Homo sapiens
ggacacacttttggc

SEQ ID NO: 507220 - DNA, 15 bp, Homo sapiens
gacacacttttggca

SEQ ID NO: 507221 - DNA, 15 bp, Homo sapiens
acacacttttggcaa

SEQ ID NO: 507222 - DNA, 15 bp, Homo sapiens
cacacttttggcaaa

SEQ ID NO: 507223 - DNA, 15 bp, Homo sapiens
acacttttggcaaaa

SEQ ID NO: 507224 - DNA, 15 bp, Homo sapiens
cacttttggcaaaaa

SEQ ID NO: 507225 - DNA, 15 bp, Homo sapiens
acttttggcaaaaat

SEQ ID NO: 507226 - DNA, 15 bp, Homo sapiens
cttttggcaaaaatt

SEQ ID NO: 507227 - DNA, 15 bp, Homo sapiens
ttttggcaaaaattg

SEQ ID NO: 507228 - DNA, 15 bp, Homo sapiens
tttggcaaaaattgc

SEQ ID NO: 507229 - DNA, 15 bp, Homo sapiens
ttggcaaaaattgct

SEQ ID NO: 507230 - DNA, 15 bp, Homo sapiens
tggcaaaaattgctt

SEQ ID NO: 507231 - DNA, 15 bp, Homo sapiens
ggcaaaaattgctta

SEQ ID NO: 507232 - DNA, 15 bp, Homo sapiens
gcaaaaattgcttat

SEQ ID NO: 507233 - DNA, 15 bp, Homo sapiens
caaaaattgcttata

SEQ ID NO: 507234 - DNA, 15 bp, Homo sapiens
aaaaattgcttatat

SEQ ID NO: 507235 - DNA, 15 bp, Homo sapiens
aaaattgcttatatc

SEQ ID NO: 507236 - DNA, 15 bp, Homo sapiens
aaattgcttatatct

SEQ ID NO: 507237 - DNA, 15 bp, Homo sapiens
aattgcttatatctg

SEQ ID NO: 507238 - DNA, 15 bp, Homo sapiens
attgcttatatctga

SEQ ID NO: 507239 - DNA, 15 bp, Homo sapiens
ttgcttatatctgac

SEQ ID NO: 507240 - DNA, 15 bp, Homo sapiens
tgcttatatctgaca

SEQ ID NO: 507241 - DNA, 15 bp, Homo sapiens
gcttatatctgacat

SEQ ID NO: 507242 - DNA, 15 bp, Homo sapiens
cttatatctgacata

SEQ ID NO: 507243 - DNA, 15 bp, Homo sapiens
ttatatctgacatat

SEQ ID NO: 507244 - DNA, 15 bp, Homo sapiens
tatatctgacatatt

SEQ ID NO: 507245 - DNA, 15 bp, Homo sapiens
atatctgacatattg

SEQ ID NO: 507246 - DNA, 15 bp, Homo sapiens
tatctgacatattgc

SEQ ID NO: 507247 - DNA, 15 bp, Homo sapiens
atctgacatattgca

SEQ ID NO: 507248 - DNA, 15 bp, Homo sapiens
tctgacatattgcat

SEQ ID NO: 507249 - DNA, 15 bp, Homo sapiens
ctgacatattgcatt

SEQ ID NO: 507250 - DNA, 15 bp, Homo sapiens
tgacatattgcatta

SEQ ID NO: 507251 - DNA, 15 bp, Homo sapiens
gacatattgcattat

SEQ ID NO: 507252 - DNA, 15 bp, Homo sapiens
acatattgcattata

SEQ ID NO: 507253 - DNA, 15 bp, Homo sapiens
catattgcattataa

SEQ ID NO: 507254 - DNA, 15 bp, Homo sapiens
atattgcattataaa

SEQ ID NO: 507255 - DNA, 15 bp, Homo sapiens
tattgcattataaaa

SEQ ID NO: 507256 - DNA, 15 bp, Homo sapiens
attgcattataaaag

SEQ ID NO: 507257 - DNA, 15 bp, Homo sapiens
ttgcattataaaagt

SEQ ID NO: 507258 - DNA, 15 bp, Homo sapiens
tgcattataaaagtt

SEQ ID NO: 507259 - DNA, 15 bp, Homo sapiens
gcattataaaagttt

SEQ ID NO: 507260 - DNA, 15 bp, Homo sapiens
cattataaaagtttt

SEQ ID NO: 507261 - DNA, 15 bp, Homo sapiens
attataaaagttttg

SEQ ID NO: 507262 - DNA, 15 bp, Homo sapiens
ttataaaagttttga

SEQ ID NO: 507263 - DNA, 15 bp, Homo sapiens
tataaaagttttgat

SEQ ID NO: 507264 - DNA, 15 bp, Homo sapiens
ataaaagttttgatt

SEQ ID NO: 507265 - DNA, 15 bp, Homo sapiens
taaaagttttgatta

SEQ ID NO: 507266 - DNA, 15 bp, Homo sapiens
aaaagttttgattag

SEQ ID NO: 507267 - DNA, 15 bp, Homo sapiens
aaagttttgattagt

SEQ ID NO: 507268 - DNA, 15 bp, Homo sapiens
aagttttgattagtg

SEQ ID NO: 507269 - DNA, 15 bp, Homo sapiens
agttttgattagtgg

SEQ ID NO: 507270 - DNA, 15 bp, Homo sapiens
gttttgattagtggc

SEQ ID NO: 507271 - DNA, 15 bp, Homo sapiens
ttttgattagtggct

SEQ ID NO: 507272 - DNA, 15 bp, Homo sapiens
tttgattagtggctt

SEQ ID NO: 507273 - DNA, 15 bp, Homo sapiens
ttgattagtggcttt

SEQ ID NO: 507274 - DNA, 15 bp, Homo sapiens
tgattagtggctttc

SEQ ID NO: 507275 - DNA, 15 bp, Homo sapiens
gattagtggctttct

SEQ ID NO: 507276 - DNA, 15 bp, Homo sapiens
attagtggctttctt

SEQ ID NO: 507277 - DNA, 15 bp, Homo sapiens
ttagtggctttcttt

SEQ ID NO: 507278 - DNA, 15 bp, Homo sapiens
tagtggctttctttt

SEQ ID NO: 507279 - DNA, 15 bp, Homo sapiens
agtggctttcttttt

SEQ ID NO: 507280 - DNA, 15 bp, Homo sapiens
gtggctttctttttt

SEQ ID NO: 507281 - DNA, 15 bp, Homo sapiens
ttttttttttttgta

SEQ ID NO: 507282 - DNA, 15 bp, Homo sapiens
tttttttttttgtaa

SEQ ID NO: 507283 - DNA, 15 bp, Homo sapiens
ttttttttttgtaac

SEQ ID NO: 507284 - DNA, 15 bp, Homo sapiens
tttttttttgtaaca

SEQ ID NO: 507285 - DNA, 15 bp, Homo sapiens
ttttttttgtaacaa

SEQ ID NO: 507286 - DNA, 15 bp, Homo sapiens
tttttttgtaacaag

SEQ ID NO: 507287 - DNA, 15 bp, Homo sapiens
ttttttgtaacaagt

SEQ ID NO: 507288 - DNA, 15 bp, Homo sapiens
tttttgtaacaagta

SEQ ID NO: 507289 - DNA, 15 bp, Homo sapiens
ttttgtaacaagtaa

SEQ ID NO: 507290 - DNA, 15 bp, Homo sapiens
tttgtaacaagtaaa

SEQ ID NO: 507291 - DNA, 15 bp, Homo sapiens
ttgtaacaagtaaag

SEQ ID NO: 507292 - DNA, 15 bp, Homo sapiens
tgtaacaagtaaaga

SEQ ID NO: 507293 - DNA, 15 bp, Homo sapiens
gtaacaagtaaagag

SEQ ID NO: 507294 - DNA, 15 bp, Homo sapiens
taacaagtaaagaga

SEQ ID NO: 507295 - DNA, 15 bp, Homo sapiens
aacaagtaaagagaa

SEQ ID NO: 507296 - DNA, 15 bp, Homo sapiens
acaagtaaagagaaa

SEQ ID NO: 507297 - DNA, 15 bp, Homo sapiens
caagtaaagagaaag

SEQ ID NO: 507298 - DNA, 15 bp, Homo sapiens
aagtaaagagaaaga

SEQ ID NO: 507299 - DNA, 15 bp, Homo sapiens
agtaaagagaaagaa

SEQ ID NO: 507300 - DNA, 15 bp, Homo sapiens
gtaaagagaaagaaa

SEQ ID NO: 507301 - DNA, 15 bp, Homo sapiens
taaagagaaagaaaa

SEQ ID NO: 507302 - DNA, 15 bp, Homo sapiens
aaagagaaagaaaac

SEQ ID NO: 507303 - DNA, 15 bp, Homo sapiens
aagagaaagaaaaca

SEQ ID NO: 507304 - DNA, 15 bp, Homo sapiens
agagaaagaaaacat

SEQ ID NO: 507305 - DNA, 15 bp, Homo sapiens
gagaaagaaaacatg

SEQ ID NO: 507306 - DNA, 15 bp, Homo sapiens
agaaagaaaacatgg

SEQ ID NO: 507307 - DNA, 15 bp, Homo sapiens
gaaagaaaacatgga

SEQ ID NO: 507308 - DNA, 15 bp, Homo sapiens
aaagaaaacatggat

SEQ ID NO: 507309 - DNA, 15 bp, Homo sapiens
aagaaaacatggatc

SEQ ID NO: 507310 - DNA, 15 bp, Homo sapiens
agaaaacatggatct

SEQ ID NO: 507311 - DNA, 15 bp, Homo sapiens
gaaaacatggatctg

SEQ ID NO: 507312 - DNA, 15 bp, Homo sapiens
aaaacatggatctgc

SEQ ID NO: 507313 - DNA, 15 bp, Homo sapiens
aaacatggatctgcc

SEQ ID NO: 507314 - DNA, 15 bp, Homo sapiens
aacatggatctgcct

SEQ ID NO: 507315 - DNA, 15 bp, Homo sapiens
acatggatctgccta

SEQ ID NO: 507316 - DNA, 15 bp, Homo sapiens
catggatctgcctag

SEQ ID NO: 507317 - DNA, 15 bp, Homo sapiens
atggatctgcctagg

SEQ ID NO: 507318 - DNA, 15 bp, Homo sapiens
tggatctgcctagga

SEQ ID NO: 507319 - DNA, 15 bp, Homo sapiens
ggatctgcctaggaa

SEQ ID NO: 507320 - DNA, 15 bp, Homo sapiens
gatctgcctaggaag

SEQ ID NO: 507321 - DNA, 15 bp, Homo sapiens
atctgcctaggaagt

SEQ ID NO: 507322 - DNA, 15 bp, Homo sapiens
tctgcctaggaagtc

SEQ ID NO: 507323 - DNA, 15 bp, Homo sapiens
ctgcctaggaagtca

SEQ ID NO: 507324 - DNA, 15 bp, Homo sapiens
tgcctaggaagtcac

SEQ ID NO: 507325 - DNA, 15 bp, Homo sapiens
gcctaggaagtcacc

SEQ ID NO: 507326 - DNA, 15 bp, Homo sapiens
cctaggaagtcacct

SEQ ID NO: 507327 - DNA, 15 bp, Homo sapiens
ctaggaagtcacctc

SEQ ID NO: 507328 - DNA, 15 bp, Homo sapiens
taggaagtcacctct

SEQ ID NO: 507329 - DNA, 15 bp, Homo sapiens
aggaagtcacctctg

SEQ ID NO: 507330 - DNA, 15 bp, Homo sapiens
ggaagtcacctctgc

SEQ ID NO: 507331 - DNA, 15 bp, Homo sapiens
gaagtcacctctgcc

SEQ ID NO: 507332 - DNA, 15 bp, Homo sapiens
aagtcacctctgcct

SEQ ID NO: 507333 - DNA, 15 bp, Homo sapiens
agtcacctctgcctg

SEQ ID NO: 507334 - DNA, 15 bp, Homo sapiens
gtcacctctgcctga

SEQ ID NO: 507335 - DNA, 15 bp, Homo sapiens
tcacctctgcctgag

SEQ ID NO: 507336 - DNA, 15 bp, Homo sapiens
cacctctgcctgagt

SEQ ID NO: 507337 - DNA, 15 bp, Homo sapiens
acctctgcctgagtc

SEQ ID NO: 507338 - DNA, 15 bp, Homo sapiens
cctctgcctgagtct

SEQ ID NO: 507339 - DNA, 15 bp, Homo sapiens
ctctgcctgagtctg

SEQ ID NO: 507340 - DNA, 15 bp, Homo sapiens
tctgcctgagtctgc

SEQ ID NO: 507341 - DNA, 15 bp, Homo sapiens
ctgcctgagtctgct

SEQ ID NO: 507342 - DNA, 15 bp, Homo sapiens
tgcctgagtctgcta

SEQ ID NO: 507343 - DNA, 15 bp, Homo sapiens
gcctgagtctgctac

SEQ ID NO: 507344 - DNA, 15 bp, Homo sapiens
cctgagtctgctact

SEQ ID NO: 507345 - DNA, 15 bp, Homo sapiens
ctgagtctgctactt

SEQ ID NO: 507346 - DNA, 15 bp, Homo sapiens
tgagtctgctacttg

SEQ ID NO: 507347 - DNA, 15 bp, Homo sapiens
gagtctgctacttgc

SEQ ID NO: 507348 - DNA, 15 bp, Homo sapiens
agtctgctacttgca

SEQ ID NO: 507349 - DNA, 15 bp, Homo sapiens
gtctgctacttgcag

SEQ ID NO: 507350 - DNA, 15 bp, Homo sapiens
tctgctacttgcagg

SEQ ID NO: 507351 - DNA, 15 bp, Homo sapiens
ctgctacttgcagga

SEQ ID NO: 507352 - DNA, 15 bp, Homo sapiens
tgctacttgcaggat

SEQ ID NO: 507353 - DNA, 15 bp, Homo sapiens
gctacttgcaggatt

SEQ ID NO: 507354 - DNA, 15 bp, Homo sapiens
ctacttgcaggattg

SEQ ID NO: 507355 - DNA, 15 bp, Homo sapiens
tacttgcaggattgg

SEQ ID NO: 507356 - DNA, 15 bp, Homo sapiens
acttgcaggattgga

SEQ ID NO: 507357 - DNA, 15 bp, Homo sapiens
cttgcaggattggag

SEQ ID NO: 507358 - DNA, 15 bp, Homo sapiens
ttgcaggattggagc

SEQ ID NO: 507359 - DNA, 15 bp, Homo sapiens
tgcaggattggagct

SEQ ID NO: 507360 - DNA, 15 bp, Homo sapiens
gcaggattggagctt

SEQ ID NO: 507361 - DNA, 15 bp, Homo sapiens
caggattggagcttt

SEQ ID NO: 507362 - DNA, 15 bp, Homo sapiens
aggattggagctttt

SEQ ID NO: 507363 - DNA, 15 bp, Homo sapiens
ggattggagcttttg

SEQ ID NO: 507364 - DNA, 15 bp, Homo sapiens
gattggagcttttgc

SEQ ID NO: 507365 - DNA, 15 bp, Homo sapiens
attggagcttttgct

SEQ ID NO: 507366 - DNA, 15 bp, Homo sapiens
ttggagcttttgctg

SEQ ID NO: 507367 - DNA, 15 bp, Homo sapiens
tggagcttttgctgc

SEQ ID NO: 507368 - DNA, 15 bp, Homo sapiens
ggagcttttgctgca

SEQ ID NO: 507369 - DNA, 15 bp, Homo sapiens
gagcttttgctgcag

SEQ ID NO: 507370 - DNA, 15 bp, Homo sapiens
agcttttgctgcaga

SEQ ID NO: 507371 - DNA, 15 bp, Homo sapiens
gcttttgctgcagat

SEQ ID NO: 507372 - DNA, 15 bp, Homo sapiens
cttttgctgcagatt

SEQ ID NO: 507373 - DNA, 15 bp, Homo sapiens
ttttgctgcagatta

SEQ ID NO: 507374 - DNA, 15 bp, Homo sapiens
tttgctgcagattac

SEQ ID NO: 507375 - DNA, 15 bp, Homo sapiens
ttgctgcagattaca

SEQ ID NO: 507376 - DNA, 15 bp, Homo sapiens
tgctgcagattacag

SEQ ID NO: 507377 - DNA, 15 bp, Homo sapiens
gctgcagattacagc

SEQ ID NO: 507378 - DNA, 15 bp, Homo sapiens
ctgcagattacagct

SEQ ID NO: 507379 - DNA, 15 bp, Homo sapiens
tgcagattacagctt

SEQ ID NO: 507380 - DNA, 15 bp, Homo sapiens
gcagattacagcttt

SEQ ID NO: 507381 - DNA, 15 bp, Homo sapiens
cagattacagctttg

SEQ ID NO: 507382 - DNA, 15 bp, Homo sapiens
agattacagctttga

SEQ ID NO: 507383 - DNA, 15 bp, Homo sapiens
gattacagctttgaa

SEQ ID NO: 507384 - DNA, 15 bp, Homo sapiens
attacagctttgaag

SEQ ID NO: 507385 - DNA, 15 bp, Homo sapiens
ttacagctttgaagt

SEQ ID NO: 507386 - DNA, 15 bp, Homo sapiens
tacagctttgaagtc

SEQ ID NO: 507387 - DNA, 15 bp, Homo sapiens
acagctttgaagtca

SEQ ID NO: 507388 - DNA, 15 bp, Homo sapiens
cagctttgaagtcac

SEQ ID NO: 507389 - DNA, 15 bp, Homo sapiens
agctttgaagtcact

SEQ ID NO: 507390 - DNA, 15 bp, Homo sapiens
gctttgaagtcactt

SEQ ID NO: 507391 - DNA, 15 bp, Homo sapiens
ctttgaagtcacttt

SEQ ID NO: 507392 - DNA, 15 bp, Homo sapiens
tttgaagtcacttta

SEQ ID NO: 507393 - DNA, 15 bp, Homo sapiens
ttgaagtcactttac

SEQ ID NO: 507394 - DNA, 15 bp, Homo sapiens
tgaagtcactttacc

SEQ ID NO: 507395 - DNA, 15 bp, Homo sapiens
gaagtcactttacct

SEQ ID NO: 507396 - DNA, 15 bp, Homo sapiens
aagtcactttacctc

SEQ ID NO: 507397 - DNA, 15 bp, Homo sapiens
agtcactttacctca

SEQ ID NO: 507398 - DNA, 15 bp, Homo sapiens
gtcactttacctcaa

SEQ ID NO: 507399 - DNA, 15 bp, Homo sapiens
tcactttacctcaag

SEQ ID NO: 507400 - DNA, 15 bp, Homo sapiens
cactttacctcaaga

SEQ ID NO: 507401 - DNA, 15 bp, Homo sapiens
actttacctcaagag

SEQ ID NO: 507402 - DNA, 15 bp, Homo sapiens
ctttacctcaagagc

SEQ ID NO: 507403 - DNA, 15 bp, Homo sapiens
tttacctcaagagca

SEQ ID NO: 507404 - DNA, 15 bp, Homo sapiens
ttacctcaagagcag

SEQ ID NO: 507405 - DNA, 15 bp, Homo sapiens
tacctcaagagcagt

SEQ ID NO: 507406 - DNA, 15 bp, Homo sapiens
acctcaagagcagtt

SEQ ID NO: 507407 - DNA, 15 bp, Homo sapiens
cctcaagagcagttt

SEQ ID NO: 507408 - DNA, 15 bp, Homo sapiens
ctcaagagcagttta

SEQ ID NO: 507409 - DNA, 15 bp, Homo sapiens
tcaagagcagtttat

SEQ ID NO: 507410 - DNA, 15 bp, Homo sapiens
caagagcagtttata

SEQ ID NO: 507411 - DNA, 15 bp, Homo sapiens
aagagcagtttatat

SEQ ID NO: 507412 - DNA, 15 bp, Homo sapiens
agagcagtttatatt

SEQ ID NO: 507413 - DNA, 15 bp, Homo sapiens
gagcagtttatattt

SEQ ID NO: 507414 - DNA, 15 bp, Homo sapiens
agcagtttatatttt

SEQ ID NO: 507415 - DNA, 15 bp, Homo sapiens
gcagtttatatttta

SEQ ID NO: 507416 - DNA, 15 bp, Homo sapiens
cagtttatattttat

SEQ ID NO: 507417 - DNA, 15 bp, Homo sapiens
agtttatattttatt

SEQ ID NO: 507418 - DNA, 15 bp, Homo sapiens
gtttatattttattg

SEQ ID NO: 507419 - DNA, 15 bp, Homo sapiens
tttatattttattgt

SEQ ID NO: 507420 - DNA, 15 bp, Homo sapiens
ttatattttattgtg

SEQ ID NO: 507421 - DNA, 15 bp, Homo sapiens
tatattttattgtgc

SEQ ID NO: 507422 - DNA, 15 bp, Homo sapiens
atattttattgtgct

SEQ ID NO: 507423 - DNA, 15 bp, Homo sapiens
tattttattgtgctt

SEQ ID NO: 507424 - DNA, 15 bp, Homo sapiens
attttattgtgcttt

SEQ ID NO: 507425 - DNA, 15 bp, Homo sapiens
ttttattgtgcttta

SEQ ID NO: 507426 - DNA, 15 bp, Homo sapiens
tttattgtgctttaa

SEQ ID NO: 507427 - DNA, 15 bp, Homo sapiens
ttattgtgctttaaa

SEQ ID NO: 507428 - DNA, 15 bp, Homo sapiens
tattgtgctttaaaa

SEQ ID NO: 507429 - DNA, 15 bp, Homo sapiens
attgtgctttaaaaa

SEQ ID NO: 507430 - DNA, 15 bp, Homo sapiens
ttgtgctttaaaaaa

SEQ ID NO: 507431 - DNA, 15 bp, Homo sapiens
tgtgctttaaaaaaa

SEQ ID NO: 507432 - DNA, 15 bp, Homo sapiens
gtgctttaaaaaaaa

SEQ ID NO: 507433 - DNA, 15 bp, Homo sapiens
tgctttaaaaaaaaa

SEQ ID NO: 507434 - DNA, 15 bp, Homo sapiens
gctttaaaaaaaaaa

SEQ ID NO: 507435 - DNA, 15 bp, Homo sapiens
ctttaaaaaaaaaat

SEQ ID NO: 507436 - DNA, 15 bp, Homo sapiens
tttaaaaaaaaaatt

SEQ ID NO: 507437 - DNA, 15 bp, Homo sapiens
ttaaaaaaaaaattt

SEQ ID NO: 507438 - DNA, 15 bp, Homo sapiens
taaaaaaaaaattta

SEQ ID NO: 507439 - DNA, 15 bp, Homo sapiens
aaaaaaaaaatttag

SEQ ID NO: 507440 - DNA, 15 bp, Homo sapiens
aaaaaaaaatttagt

SEQ ID NO: 507441 - DNA, 15 bp, Homo sapiens
aaaaaaaatttagtg

SEQ ID NO: 507442 - DNA, 15 bp, Homo sapiens
aaaaaaatttagtgc

SEQ ID NO: 507443 - DNA, 15 bp, Homo sapiens
aaaaaatttagtgcc

SEQ ID NO: 507444 - DNA, 15 bp, Homo sapiens
aaaaatttagtgcca

SEQ ID NO: 507445 - DNA, 15 bp, Homo sapiens
aaaatttagtgccag

SEQ ID NO: 507446 - DNA, 15 bp, Homo sapiens
aaatttagtgccagg

SEQ ID NO: 507447 - DNA, 15 bp, Homo sapiens
aatttagtgccaggt

SEQ ID NO: 507448 - DNA, 15 bp, Homo sapiens
atttagtgccaggtt

SEQ ID NO: 507449 - DNA, 15 bp, Homo sapiens
tttagtgccaggttt

SEQ ID NO: 507450 - DNA, 15 bp, Homo sapiens
ttagtgccaggttta

SEQ ID NO: 507451 - DNA, 15 bp, Homo sapiens
tagtgccaggtttat

SEQ ID NO: 507452 - DNA, 15 bp, Homo sapiens
agtgccaggtttatg

SEQ ID NO: 507453 - DNA, 15 bp, Homo sapiens
gtgccaggtttatgg

SEQ ID NO: 507454 - DNA, 15 bp, Homo sapiens
tgccaggtttatgga

SEQ ID NO: 507455 - DNA, 15 bp, Homo sapiens
gccaggtttatggag

SEQ ID NO: 507456 - DNA, 15 bp, Homo sapiens
ccaggtttatggagt

SEQ ID NO: 507457 - DNA, 15 bp, Homo sapiens
caggtttatggagtg

SEQ ID NO: 507458 - DNA, 15 bp, Homo sapiens
aggtttatggagtga

SEQ ID NO: 507459 - DNA, 15 bp, Homo sapiens
ggtttatggagtgaa

SEQ ID NO: 507460 - DNA, 15 bp, Homo sapiens
gtttatggagtgaag

SEQ ID NO: 507461 - DNA, 15 bp, Homo sapiens
tttatggagtgaagt

SEQ ID NO: 507462 - DNA, 15 bp, Homo sapiens
ttatggagtgaagtg

SEQ ID NO: 507463 - DNA, 15 bp, Homo sapiens
tatggagtgaagtgc

SEQ ID NO: 507464 - DNA, 15 bp, Homo sapiens
atggagtgaagtgct

SEQ ID NO: 507465 - DNA, 15 bp, Homo sapiens
tggagtgaagtgctt

SEQ ID NO: 507466 - DNA, 15 bp, Homo sapiens
ggagtgaagtgcttt

SEQ ID NO: 507467 - DNA, 15 bp, Homo sapiens
gagtgaagtgctttc

SEQ ID NO: 507468 - DNA, 15 bp, Homo sapiens
agtgaagtgctttca

SEQ ID NO: 507469 - DNA, 15 bp, Homo sapiens
gtgaagtgctttcat

SEQ ID NO: 507470 - DNA, 15 bp, Homo sapiens
tgaagtgctttcata

SEQ ID NO: 507471 - DNA, 15 bp, Homo sapiens
gaagtgctttcataa

SEQ ID NO: 507472 - DNA, 15 bp, Homo sapiens
aagtgctttcataaa

SEQ ID NO: 507473 - DNA, 15 bp, Homo sapiens
agtgctttcataaat

SEQ ID NO: 507474 - DNA, 15 bp, Homo sapiens
gtgctttcataaatg

SEQ ID NO: 507475 - DNA, 15 bp, Homo sapiens
tgctttcataaatgc

SEQ ID NO: 507476 - DNA, 15 bp, Homo sapiens
gctttcataaatgct

SEQ ID NO: 507477 - DNA, 15 bp, Homo sapiens
ctttcataaatgctg

SEQ ID NO: 507478 - DNA, 15 bp, Homo sapiens
tttcataaatgctga

SEQ ID NO: 507479 - DNA, 15 bp, Homo sapiens
ttcataaatgctgaa

SEQ ID NO: 507480 - DNA, 15 bp, Homo sapiens
tcataaatgctgaaa

SEQ ID NO: 507481 - DNA, 15 bp, Homo sapiens
cataaatgctgaaac

SEQ ID NO: 507482 - DNA, 15 bp, Homo sapiens
ataaatgctgaaact

SEQ ID NO: 507483 - DNA, 15 bp, Homo sapiens
taaatgctgaaacta

SEQ ID NO: 507484 - DNA, 15 bp, Homo sapiens
aaatgctgaaactac

SEQ ID NO: 507485 - DNA, 15 bp, Homo sapiens
aatgctgaaactaca

SEQ ID NO: 507486 - DNA, 15 bp, Homo sapiens
atgctgaaactacat

SEQ ID NO: 507487 - DNA, 15 bp, Homo sapiens
tgctgaaactacatt

SEQ ID NO: 507488 - DNA, 15 bp, Homo sapiens
gctgaaactacattt

SEQ ID NO: 507489 - DNA, 15 bp, Homo sapiens
ctgaaactacatttt

SEQ ID NO: 507490 - DNA, 15 bp, Homo sapiens
tgaaactacattttc

SEQ ID NO: 507491 - DNA, 15 bp, Homo sapiens
gaaactacattttct

SEQ ID NO: 507492 - DNA, 15 bp, Homo sapiens
aaactacattttctg

SEQ ID NO: 507493 - DNA, 15 bp, Homo sapiens
aactacattttctgt

SEQ ID NO: 507494 - DNA, 15 bp, Homo sapiens
actacattttctgtg

SEQ ID NO: 507495 - DNA, 15 bp, Homo sapiens
ctacattttctgtgg

SEQ ID NO: 507496 - DNA, 15 bp, Homo sapiens
tacattttctgtggg

SEQ ID NO: 507497 - DNA, 15 bp, Homo sapiens
acattttctgtgggt

SEQ ID NO: 507498 - DNA, 15 bp, Homo sapiens
cattttctgtgggta

SEQ ID NO: 507499 - DNA, 15 bp, Homo sapiens
attttctgtgggtaa

SEQ ID NO: 507500 - DNA, 15 bp, Homo sapiens
ttttctgtgggtaaa

SEQ ID NO: 507501 - DNA, 15 bp, Homo sapiens
tttctgtgggtaaaa

SEQ ID NO: 507502 - DNA, 15 bp, Homo sapiens
ttctgtgggtaaaaa

SEQ ID NO: 507503 - DNA, 15 bp, Homo sapiens
tctgtgggtaaaaat

SEQ ID NO: 507504 - DNA, 15 bp, Homo sapiens
ctgtgggtaaaaatg

SEQ ID NO: 507505 - DNA, 15 bp, Homo sapiens
tgtgggtaaaaatgc

SEQ ID NO: 507506 - DNA, 15 bp, Homo sapiens
gtgggtaaaaatgca

SEQ ID NO: 507507 - DNA, 15 bp, Homo sapiens
tgggtaaaaatgcag

SEQ ID NO: 507508 - DNA, 15 bp, Homo sapiens
gggtaaaaatgcagc

SEQ ID NO: 507509 - DNA, 15 bp, Homo sapiens
ggtaaaaatgcagct

SEQ ID NO: 507510 - DNA, 15 bp, Homo sapiens
gtaaaaatgcagctc

SEQ ID NO: 507511 - DNA, 15 bp, Homo sapiens
taaaaatgcagctca

SEQ ID NO: 507512 - DNA, 15 bp, Homo sapiens
aaaaatgcagctcat

SEQ ID NO: 507513 - DNA, 15 bp, Homo sapiens
aaaatgcagctcatc

SEQ ID NO: 507514 - DNA, 15 bp, Homo sapiens
aaatgcagctcatca

SEQ ID NO: 507515 - DNA, 15 bp, Homo sapiens
aatgcagctcatcag

SEQ ID NO: 507516 - DNA, 15 bp, Homo sapiens
atgcagctcatcaga

SEQ ID NO: 507517 - DNA, 15 bp, Homo sapiens
tgcagctcatcagaa

SEQ ID NO: 507518 - DNA, 15 bp, Homo sapiens
gcagctcatcagaat

SEQ ID NO: 507519 - DNA, 15 bp, Homo sapiens
cagctcatcagaatt

SEQ ID NO: 507520 - DNA, 15 bp, Homo sapiens
agctcatcagaattt

SEQ ID NO: 507521 - DNA, 15 bp, Homo sapiens
gctcatcagaatttc

SEQ ID NO: 507522 - DNA, 15 bp, Homo sapiens
ctcatcagaatttcc

SEQ ID NO: 507523 - DNA, 15 bp, Homo sapiens
tcatcagaatttccc

SEQ ID NO: 507524 - DNA, 15 bp, Homo sapiens
catcagaatttcccc

SEQ ID NO: 507525 - DNA, 15 bp, Homo sapiens
atcagaatttcccct

SEQ ID NO: 507526 - DNA, 15 bp, Homo sapiens
tcagaatttcccctt

SEQ ID NO: 507527 - DNA, 15 bp, Homo sapiens
cagaatttccccttt

SEQ ID NO: 507528 - DNA, 15 bp, Homo sapiens
agaatttcccctttg

SEQ ID NO: 507529 - DNA, 15 bp, Homo sapiens
gaatttcccctttga

SEQ ID NO: 507530 - DNA, 15 bp, Homo sapiens
aatttcccctttgaa

SEQ ID NO: 507531 - DNA, 15 bp, Homo sapiens
atttcccctttgaag

SEQ ID NO: 507532 - DNA, 15 bp, Homo sapiens
tttcccctttgaaga

SEQ ID NO: 507533 - DNA, 15 bp, Homo sapiens
ttcccctttgaagaa

SEQ ID NO: 507534 - DNA, 15 bp, Homo sapiens
tcccctttgaagaat

SEQ ID NO: 507535 - DNA, 15 bp, Homo sapiens
cccctttgaagaatt

SEQ ID NO: 507536 - DNA, 15 bp, Homo sapiens
ccctttgaagaattt

SEQ ID NO: 507537 - DNA, 15 bp, Homo sapiens
cctttgaagaatttt

SEQ ID NO: 507538 - DNA, 15 bp, Homo sapiens
ctttgaagaattttt

SEQ ID NO: 507539 - DNA, 15 bp, Homo sapiens
tttgaagaatttttt

SEQ ID NO: 507540 - DNA, 15 bp, Homo sapiens
ttgaagaatttttta

SEQ ID NO: 507541 - DNA, 15 bp, Homo sapiens
tgaagaattttttat

SEQ ID NO: 507542 - DNA, 15 bp, Homo sapiens
gaagaattttttatg

SEQ ID NO: 507543 - DNA, 15 bp, Homo sapiens
aagaattttttatgt

SEQ ID NO: 507544 - DNA, 15 bp, Homo sapiens
agaattttttatgtt

SEQ ID NO: 507545 - DNA, 15 bp, Homo sapiens
gaattttttatgttc

SEQ ID NO: 507546 - DNA, 15 bp, Homo sapiens
aattttttatgttca

SEQ ID NO: 507547 - DNA, 15 bp, Homo sapiens
attttttatgttcac

SEQ ID NO: 507548 - DNA, 15 bp, Homo sapiens
ttttttatgttcaca

SEQ ID NO: 507549 - DNA, 15 bp, Homo sapiens
tttttatgttcacat

SEQ ID NO: 507550 - DNA, 15 bp, Homo sapiens
ttttatgttcacata

SEQ ID NO: 507551 - DNA, 15 bp, Homo sapiens
tttatgttcacataa

SEQ ID NO: 507552 - DNA, 15 bp, Homo sapiens
ttatgttcacataaa

SEQ ID NO: 507553 - DNA, 15 bp, Homo sapiens
tatgttcacataaaa

SEQ ID NO: 507554 - DNA, 15 bp, Homo sapiens
atgttcacataaaat

SEQ ID NO: 507555 - DNA, 15 bp, Homo sapiens
tgttcacataaaatt

SEQ ID NO: 507556 - DNA, 15 bp, Homo sapiens
gttcacataaaattg

SEQ ID NO: 507557 - DNA, 15 bp, Homo sapiens
ttcacataaaattgc

SEQ ID NO: 507558 - DNA, 15 bp, Homo sapiens
tcacataaaattgcc

SEQ ID NO: 507559 - DNA, 15 bp, Homo sapiens
cacataaaattgcca

SEQ ID NO: 507560 - DNA, 15 bp, Homo sapiens
acataaaattgccaa

SEQ ID NO: 507561 - DNA, 15 bp, Homo sapiens
cataaaattgccaag

SEQ ID NO: 507562 - DNA, 15 bp, Homo sapiens
ataaaattgccaagt

SEQ ID NO: 507563 - DNA, 15 bp, Homo sapiens
taaaattgccaagtt

SEQ ID NO: 507564 - DNA, 15 bp, Homo sapiens
aaaattgccaagtta

SEQ ID NO: 507565 - DNA, 15 bp, Homo sapiens
aaattgccaagttaa

SEQ ID NO: 507566 - DNA, 15 bp, Homo sapiens
aattgccaagttaaa

SEQ ID NO: 507567 - DNA, 15 bp, Homo sapiens
attgccaagttaaaa

SEQ ID NO: 507568 - DNA, 15 bp, Homo sapiens
ttgccaagttaaaaa

SEQ ID NO: 507569 - DNA, 15 bp, Homo sapiens
tgccaagttaaaaat

SEQ ID NO: 507570 - DNA, 15 bp, Homo sapiens
gccaagttaaaaatt

SEQ ID NO: 507571 - DNA, 15 bp, Homo sapiens
ccaagttaaaaattt

SEQ ID NO: 507572 - DNA, 15 bp, Homo sapiens
caagttaaaaatttg

SEQ ID NO: 507573 - DNA, 15 bp, Homo sapiens
aagttaaaaatttga

SEQ ID NO: 507574 - DNA, 15 bp, Homo sapiens
agttaaaaatttgat

SEQ ID NO: 507575 - DNA, 15 bp, Homo sapiens
gttaaaaatttgatc

SEQ ID NO: 507576 - DNA, 15 bp, Homo sapiens
ttaaaaatttgatct

SEQ ID NO: 507577 - DNA, 15 bp, Homo sapiens
taaaaatttgatctc

SEQ ID NO: 507578 - DNA, 15 bp, Homo sapiens
aaaaatttgatctcc

SEQ ID NO: 507579 - DNA, 15 bp, Homo sapiens
aaaatttgatctccc

SEQ ID NO: 507580 - DNA, 15 bp, Homo sapiens
aaatttgatctccct

SEQ ID NO: 507581 - DNA, 15 bp, Homo sapiens
aatttgatctcccta

SEQ ID NO: 507582 - DNA, 15 bp, Homo sapiens
atttgatctccctac

SEQ ID NO: 507583 - DNA, 15 bp, Homo sapiens
tttgatctccctaca

SEQ ID NO: 507584 - DNA, 15 bp, Homo sapiens
ttgatctccctacag

SEQ ID NO: 507585 - DNA, 15 bp, Homo sapiens
tgatctccctacaga

SEQ ID NO: 507586 - DNA, 15 bp, Homo sapiens
gatctccctacagag

SEQ ID NO: 507587 - DNA, 15 bp, Homo sapiens
atctccctacagagt

SEQ ID NO: 507588 - DNA, 15 bp, Homo sapiens
tctccctacagagta

SEQ ID NO: 507589 - DNA, 15 bp, Homo sapiens
ctccctacagagtaa

SEQ ID NO: 507590 - DNA, 15 bp, Homo sapiens
tccctacagagtaag

SEQ ID NO: 507591 - DNA, 15 bp, Homo sapiens
ccctacagagtaaga

SEQ ID NO: 507592 - DNA, 15 bp, Homo sapiens
cctacagagtaagag

SEQ ID NO: 507593 - DNA, 15 bp, Homo sapiens
ctacagagtaagagc

SEQ ID NO: 507594 - DNA, 15 bp, Homo sapiens
tacagagtaagagct

SEQ ID NO: 507595 - DNA, 15 bp, Homo sapiens
acagagtaagagctt

SEQ ID NO: 507596 - DNA, 15 bp, Homo sapiens
cagagtaagagcttt

SEQ ID NO: 507597 - DNA, 15 bp, Homo sapiens
agagtaagagctttc

SEQ ID NO: 507598 - DNA, 15 bp, Homo sapiens
gagtaagagctttca

SEQ ID NO: 507599 - DNA, 15 bp, Homo sapiens
agtaagagctttcat

SEQ ID NO: 507600 - DNA, 15 bp, Homo sapiens
gtaagagctttcatt

SEQ ID NO: 507601 - DNA, 15 bp, Homo sapiens
taagagctttcattt

SEQ ID NO: 507602 - DNA, 15 bp, Homo sapiens
aagagctttcatttc

SEQ ID NO: 507603 - DNA, 15 bp, Homo sapiens
agagctttcatttca

SEQ ID NO: 507604 - DNA, 15 bp, Homo sapiens
gagctttcatttcaa

SEQ ID NO: 507605 - DNA, 15 bp, Homo sapiens
agctttcatttcaaa

SEQ ID NO: 507606 - DNA, 15 bp, Homo sapiens
gctttcatttcaaat

SEQ ID NO: 507607 - DNA, 15 bp, Homo sapiens
ctttcatttcaaata

SEQ ID NO: 507608 - DNA, 15 bp, Homo sapiens
tttcatttcaaataa

SEQ ID NO: 507609 - DNA, 15 bp, Homo sapiens
ttcatttcaaataaa

SEQ ID NO: 507610 - DNA, 15 bp, Homo sapiens
tcatttcaaataaaa

SEQ ID NO: 507611 - DNA, 15 bp, Homo sapiens
catttcaaataaaac

SEQ ID NO: 507612 - DNA, 15 bp, Homo sapiens
atttcaaataaaacc

SEQ ID NO: 507613 - DNA, 15 bp, Homo sapiens
tttcaaataaaacca

SEQ ID NO: 507614 - DNA, 15 bp, Homo sapiens
ttcaaataaaaccat

SEQ ID NO: 507615 - DNA, 15 bp, Homo sapiens
tcaaataaaaccatt

SEQ ID NO: 507616 - DNA, 15 bp, Homo sapiens
caaataaaaccattt

SEQ ID NO: 507617 - DNA, 15 bp, Homo sapiens
aaataaaaccatttt

SEQ ID NO: 507618 - DNA, 15 bp, Homo sapiens
aataaaaccatttta

SEQ ID NO: 507619 - DNA, 15 bp, Homo sapiens
ataaaaccattttat

SEQ ID NO: 507620 - DNA, 15 bp, Homo sapiens
taaaaccattttata

SEQ ID NO: 507621 - DNA, 15 bp, Homo sapiens
aaaaccattttatag

SEQ ID NO: 507622 - DNA, 15 bp, Homo sapiens
aaaccattttataga

SEQ ID NO: 507623 - DNA, 15 bp, Homo sapiens
aaccattttatagac

SEQ ID NO: 507624 - DNA, 15 bp, Homo sapiens
accattttatagacc

SEQ ID NO: 507625 - DNA, 15 bp, Homo sapiens
ccattttatagacca

SEQ ID NO: 507626 - DNA, 15 bp, Homo sapiens
cattttatagaccag

SEQ ID NO: 507627 - DNA, 15 bp, Homo sapiens
attttatagaccagg

SEQ ID NO: 507628 - DNA, 15 bp, Homo sapiens
ttttatagaccaggt

SEQ ID NO: 507629 - DNA, 15 bp, Homo sapiens
tttatagaccaggta

SEQ ID NO: 507630 - DNA, 15 bp, Homo sapiens
ttatagaccaggtat

SEQ ID NO: 507631 - DNA, 15 bp, Homo sapiens
tatagaccaggtatc

SEQ ID NO: 507632 - DNA, 15 bp, Homo sapiens
atagaccaggtatca

SEQ ID NO: 507633 - DNA, 15 bp, Homo sapiens
tagaccaggtatcaa

SEQ ID NO: 507634 - DNA, 15 bp, Homo sapiens
agaccaggtatcaac

SEQ ID NO: 507635 - DNA, 15 bp, Homo sapiens
gaccaggtatcaaca

SEQ ID NO: 507636 - DNA, 15 bp, Homo sapiens
accaggtatcaacat

SEQ ID NO: 507637 - DNA, 15 bp, Homo sapiens
ccaggtatcaacatt

SEQ ID NO: 507638 - DNA, 15 bp, Homo sapiens
caggtatcaacattt

SEQ ID NO: 507639 - DNA, 15 bp, Homo sapiens
aggtatcaacattta

SEQ ID NO: 507640 - DNA, 15 bp, Homo sapiens
ggtatcaacatttac

SEQ ID NO: 507641 - DNA, 15 bp, Homo sapiens
gtatcaacatttacg

SEQ ID NO: 507642 - DNA, 15 bp, Homo sapiens
tatcaacatttacgg

SEQ ID NO: 507643 - DNA, 15 bp, Homo sapiens
atcaacatttacggc

SEQ ID NO: 507644 - DNA, 15 bp, Homo sapiens
tcaacatttacggcg

SEQ ID NO: 507645 - DNA, 15 bp, Homo sapiens
caacatttacggcgg

SEQ ID NO: 507646 - DNA, 15 bp, Homo sapiens
aacatttacggcggt

SEQ ID NO: 507647 - DNA, 15 bp, Homo sapiens
acatttacggcggtc

SEQ ID NO: 507648 - DNA, 15 bp, Homo sapiens
catttacggcggtca

SEQ ID NO: 507649 - DNA, 15 bp, Homo sapiens
atttacggcggtcag

SEQ ID NO: 507650 - DNA, 15 bp, Homo sapiens
tttacggcggtcaga

SEQ ID NO: 507651 - DNA, 15 bp, Homo sapiens
ttacggcggtcagac

SEQ ID NO: 507652 - DNA, 15 bp, Homo sapiens
tacggcggtcagaca

SEQ ID NO: 507653 - DNA, 15 bp, Homo sapiens
acggcggtcagacac

SEQ ID NO: 507654 - DNA, 15 bp, Homo sapiens
cggcggtcagacaca

SEQ ID NO: 507655 - DNA, 15 bp, Homo sapiens
ggcggtcagacacat

SEQ ID NO: 507656 - DNA, 15 bp, Homo sapiens
gcggtcagacacatt

SEQ ID NO: 507657 - DNA, 15 bp, Homo sapiens
cggtcagacacattg

SEQ ID NO: 507658 - DNA, 15 bp, Homo sapiens
ggtcagacacattgc

SEQ ID NO: 507659 - DNA, 15 bp, Homo sapiens
gtcagacacattgca

SEQ ID NO: 507660 - DNA, 15 bp, Homo sapiens
tcagacacattgcag

SEQ ID NO: 507661 - DNA, 15 bp, Homo sapiens
cagacacattgcaga

SEQ ID NO: 507662 - DNA, 15 bp, Homo sapiens
agacacattgcagat

SEQ ID NO: 507663 - DNA, 15 bp, Homo sapiens
gacacattgcagata

SEQ ID NO: 507664 - DNA, 15 bp, Homo sapiens
acacattgcagatag

SEQ ID NO: 507665 - DNA, 15 bp, Homo sapiens
cacattgcagatagc

SEQ ID NO: 507666 - DNA, 15 bp, Homo sapiens
acattgcagatagca

SEQ ID NO: 507667 - DNA, 15 bp, Homo sapiens
cattgcagatagcaa

SEQ ID NO: 507668 - DNA, 15 bp, Homo sapiens
attgcagatagcaaa

SEQ ID NO: 507669 - DNA, 15 bp, Homo sapiens
ttgcagatagcaaaa

SEQ ID NO: 507670 - DNA, 15 bp, Homo sapiens
tgcagatagcaaaat

SEQ ID NO: 507671 - DNA, 15 bp, Homo sapiens
gcagatagcaaaata

SEQ ID NO: 507672 - DNA, 15 bp, Homo sapiens
cagatagcaaaataa

SEQ ID NO: 507673 - DNA, 15 bp, Homo sapiens
agatagcaaaataaa

SEQ ID NO: 507674 - DNA, 15 bp, Homo sapiens
gatagcaaaataaaa

SEQ ID NO: 507675 - DNA, 15 bp, Homo sapiens
atagcaaaataaaat

SEQ ID NO: 507676 - DNA, 15 bp, Homo sapiens
tagcaaaataaaata

SEQ ID NO: 507677 - DNA, 15 bp, Homo sapiens
agcaaaataaaatat

SEQ ID NO: 507678 - DNA, 15 bp, Homo sapiens
gcaaaataaaatatt

SEQ ID NO: 507679 - DNA, 15 bp, Homo sapiens
caaaataaaatattt

SEQ ID NO: 507680 - DNA, 15 bp, Homo sapiens
aaaataaaatattta

SEQ ID NO: 507681 - DNA, 15 bp, Homo sapiens
aaataaaatatttat

SEQ ID NO: 507682 - DNA, 15 bp, Homo sapiens
aataaaatatttatg

SEQ ID NO: 507683 - DNA, 15 bp, Homo sapiens
ataaaatatttatgc

SEQ ID NO: 507684 - DNA, 15 bp, Homo sapiens
taaaatatttatgct

SEQ ID NO: 507685 - DNA, 15 bp, Homo sapiens
aaaatatttatgctt

SEQ ID NO: 507686 - DNA, 15 bp, Homo sapiens
aaatatttatgcttg

SEQ ID NO: 507687 - DNA, 15 bp, Homo sapiens
aatatttatgcttgg

SEQ ID NO: 507688 - DNA, 15 bp, Homo sapiens
atatttatgcttggt

SEQ ID NO: 507689 - DNA, 15 bp, Homo sapiens
tatttatgcttggtt

SEQ ID NO: 507690 - DNA, 15 bp, Homo sapiens
atttatgcttggttc

SEQ ID NO: 507691 - DNA, 15 bp, Homo sapiens
tttatgcttggttct

SEQ ID NO: 507692 - DNA, 15 bp, Homo sapiens
ttatgcttggttctt

SEQ ID NO: 507693 - DNA, 15 bp, Homo sapiens
tatgcttggttctta

SEQ ID NO: 507694 - DNA, 15 bp, Homo sapiens
atgcttggttcttac

SEQ ID NO: 507695 - DNA, 15 bp, Homo sapiens
tgcttggttcttact

SEQ ID NO: 507696 - DNA, 15 bp, Homo sapiens
gcttggttcttactt

SEQ ID NO: 507697 - DNA, 15 bp, Homo sapiens
cttggttcttacttt

SEQ ID NO: 507698 - DNA, 15 bp, Homo sapiens
ttggttcttactttt

SEQ ID NO: 507699 - DNA, 15 bp, Homo sapiens
tggttcttacttttc

SEQ ID NO: 507700 - DNA, 15 bp, Homo sapiens
ggttcttacttttct

SEQ ID NO: 507701 - DNA, 15 bp, Homo sapiens
gttcttacttttctt

SEQ ID NO: 507702 - DNA, 15 bp, Homo sapiens
ttcttacttttctta

SEQ ID NO: 507703 - DNA, 15 bp, Homo sapiens
tcttacttttcttat

SEQ ID NO: 507704 - DNA, 15 bp, Homo sapiens
cttacttttcttata

SEQ ID NO: 507705 - DNA, 15 bp, Homo sapiens
ttacttttcttataa

SEQ ID NO: 507706 - DNA, 15 bp, Homo sapiens
tacttttcttataaa

SEQ ID NO: 507707 - DNA, 15 bp, Homo sapiens
acttttcttataaac

SEQ ID NO: 507708 - DNA, 15 bp, Homo sapiens
cttttcttataaact

SEQ ID NO: 507709 - DNA, 15 bp, Homo sapiens
ttttcttataaacta

SEQ ID NO: 507710 - DNA, 15 bp, Homo sapiens
tttcttataaactag

SEQ ID NO: 507711 - DNA, 15 bp, Homo sapiens
ttcttataaactaga

SEQ ID NO: 507712 - DNA, 15 bp, Homo sapiens
tcttataaactagaa

SEQ ID NO: 507713 - DNA, 15 bp, Homo sapiens
cttataaactagaaa

SEQ ID NO: 507714 - DNA, 15 bp, Homo sapiens
ttataaactagaaat

SEQ ID NO: 507715 - DNA, 15 bp, Homo sapiens
tataaactagaaatg

SEQ ID NO: 507716 - DNA, 15 bp, Homo sapiens
ataaactagaaatgt

SEQ ID NO: 507717 - DNA, 15 bp, Homo sapiens
taaactagaaatgtc

SEQ ID NO: 507718 - DNA, 15 bp, Homo sapiens
aaactagaaatgtca

SEQ ID NO: 507719 - DNA, 15 bp, Homo sapiens
aactagaaatgtcaa

SEQ ID NO: 507720 - DNA, 15 bp, Homo sapiens
actagaaatgtcaac

SEQ ID NO: 507721 - DNA, 15 bp, Homo sapiens
ctagaaatgtcaacc

SEQ ID NO: 507722 - DNA, 15 bp, Homo sapiens
tagaaatgtcaacct

SEQ ID NO: 507723 - DNA, 15 bp, Homo sapiens
agaaatgtcaaccta

SEQ ID NO: 507724 - DNA, 15 bp, Homo sapiens
gaaatgtcaacctaa

SEQ ID NO: 507725 - DNA, 15 bp, Homo sapiens
aaatgtcaacctaag

SEQ ID NO: 507726 - DNA, 15 bp, Homo sapiens
aatgtcaacctaagt

SEQ ID NO: 507727 - DNA, 15 bp, Homo sapiens
atgtcaacctaagtt

SEQ ID NO: 507728 - DNA, 15 bp, Homo sapiens
tgtcaacctaagtta

SEQ ID NO: 507729 - DNA, 15 bp, Homo sapiens
gtcaacctaagttat

SEQ ID NO: 507730 - DNA, 15 bp, Homo sapiens
tcaacctaagttatc

SEQ ID NO: 507731 - DNA, 15 bp, Homo sapiens
caacctaagttatct

SEQ ID NO: 507732 - DNA, 15 bp, Homo sapiens
aacctaagttatctt

SEQ ID NO: 507733 - DNA, 15 bp, Homo sapiens
acctaagttatcttt

SEQ ID NO: 507734 - DNA, 15 bp, Homo sapiens
cctaagttatctttt

SEQ ID NO: 507735 - DNA, 15 bp, Homo sapiens
ctaagttatcttttt

SEQ ID NO: 507736 - DNA, 15 bp, Homo sapiens
taagttatctttttg

SEQ ID NO: 507737 - DNA, 15 bp, Homo sapiens
aagttatctttttga

SEQ ID NO: 507738 - DNA, 15 bp, Homo sapiens
agttatctttttgat

SEQ ID NO: 507739 - DNA, 15 bp, Homo sapiens
gttatctttttgata

SEQ ID NO: 507740 - DNA, 15 bp, Homo sapiens
ttatctttttgatag

SEQ ID NO: 507741 - DNA, 15 bp, Homo sapiens
tatctttttgatagc

SEQ ID NO: 507742 - DNA, 15 bp, Homo sapiens
atctttttgatagct

SEQ ID NO: 507743 - DNA, 15 bp, Homo sapiens
tctttttgatagctc

SEQ ID NO: 507744 - DNA, 15 bp, Homo sapiens
ctttttgatagctcg

SEQ ID NO: 507745 - DNA, 15 bp, Homo sapiens
tttttgatagctcga

SEQ ID NO: 507746 - DNA, 15 bp, Homo sapiens
ttttgatagctcgag

SEQ ID NO: 507747 - DNA, 15 bp, Homo sapiens
tttgatagctcgagt

SEQ ID NO: 507748 - DNA, 15 bp, Homo sapiens
ttgatagctcgagta

SEQ ID NO: 507749 - DNA, 15 bp, Homo sapiens
tgatagctcgagtat

SEQ ID NO: 507750 - DNA, 15 bp, Homo sapiens
gatagctcgagtatg

SEQ ID NO: 507751 - DNA, 15 bp, Homo sapiens
atagctcgagtatgt

SEQ ID NO: 507752 - DNA, 15 bp, Homo sapiens
tagctcgagtatgtt

SEQ ID NO: 507753 - DNA, 15 bp, Homo sapiens
agctcgagtatgtta

SEQ ID NO: 507754 - DNA, 15 bp, Homo sapiens
gctcgagtatgttag

SEQ ID NO: 507755 - DNA, 15 bp, Homo sapiens
ctcgagtatgttagg

SEQ ID NO: 507756 - DNA, 15 bp, Homo sapiens
tcgagtatgttagga

SEQ ID NO: 507757 - DNA, 15 bp, Homo sapiens
cgagtatgttaggat

SEQ ID NO: 507758 - DNA, 15 bp, Homo sapiens
gagtatgttaggata

SEQ ID NO: 507759 - DNA, 15 bp, Homo sapiens
agtatgttaggatag

SEQ ID NO: 507760 - DNA, 15 bp, Homo sapiens
gtatgttaggatagg

SEQ ID NO: 507761 - DNA, 15 bp, Homo sapiens
tatgttaggatagga

SEQ ID NO: 507762 - DNA, 15 bp, Homo sapiens
atgttaggataggag

SEQ ID NO: 507763 - DNA, 15 bp, Homo sapiens
tgttaggataggagg

SEQ ID NO: 507764 - DNA, 15 bp, Homo sapiens
gttaggataggagga

SEQ ID NO: 507765 - DNA, 15 bp, Homo sapiens
ttaggataggaggaa

SEQ ID NO: 507766 - DNA, 15 bp, Homo sapiens
taggataggaggaat

SEQ ID NO: 507767 - DNA, 15 bp, Homo sapiens
aggataggaggaatt

SEQ ID NO: 507768 - DNA, 15 bp, Homo sapiens
ggataggaggaattg

SEQ ID NO: 507769 - DNA, 15 bp, Homo sapiens
gataggaggaattgg

SEQ ID NO: 507770 - DNA, 15 bp, Homo sapiens
ataggaggaattggg

SEQ ID NO: 507771 - DNA, 15 bp, Homo sapiens
taggaggaattgggt

SEQ ID NO: 507772 - DNA, 15 bp, Homo sapiens
aggaggaattgggtt

SEQ ID NO: 507773 - DNA, 15 bp, Homo sapiens
ggaggaattgggttg

SEQ ID NO: 507774 - DNA, 15 bp, Homo sapiens
gaggaattgggttga

SEQ ID NO: 507775 - DNA, 15 bp, Homo sapiens
aggaattgggttgag

SEQ ID NO: 507776 - DNA, 15 bp, Homo sapiens
ggaattgggttgagt

SEQ ID NO: 507777 - DNA, 15 bp, Homo sapiens
gaattgggttgagta

SEQ ID NO: 507778 - DNA, 15 bp, Homo sapiens
aattgggttgagtat

SEQ ID NO: 507779 - DNA, 15 bp, Homo sapiens
attgggttgagtatc

SEQ ID NO: 507780 - DNA, 15 bp, Homo sapiens
ttgggttgagtatcc

SEQ ID NO: 507781 - DNA, 15 bp, Homo sapiens
tgggttgagtatcca

SEQ ID NO: 507782 - DNA, 15 bp, Homo sapiens
gggttgagtatccag

SEQ ID NO: 507783 - DNA, 15 bp, Homo sapiens
ggttgagtatccagg

SEQ ID NO: 507784 - DNA, 15 bp, Homo sapiens
gttgagtatccaggt

SEQ ID NO: 507785 - DNA, 15 bp, Homo sapiens
ttgagtatccaggta

SEQ ID NO: 507786 - DNA, 15 bp, Homo sapiens
tgagtatccaggtaa

SEQ ID NO: 507787 - DNA, 15 bp, Homo sapiens
gagtatccaggtaag

SEQ ID NO: 507788 - DNA, 15 bp, Homo sapiens
agtatccaggtaaga

SEQ ID NO: 507789 - DNA, 15 bp, Homo sapiens
gtatccaggtaagat

SEQ ID NO: 507790 - DNA, 15 bp, Homo sapiens
tatccaggtaagatt

SEQ ID NO: 507791 - DNA, 15 bp, Homo sapiens
atccaggtaagatta

SEQ ID NO: 507792 - DNA, 15 bp, Homo sapiens
tccaggtaagattac

SEQ ID NO: 507793 - DNA, 15 bp, Homo sapiens
ccaggtaagattaca

SEQ ID NO: 507794 - DNA, 15 bp, Homo sapiens
caggtaagattacag

SEQ ID NO: 507795 - DNA, 15 bp, Homo sapiens
aggtaagattacagg

SEQ ID NO: 507796 - DNA, 15 bp, Homo sapiens
ggtaagattacagga

SEQ ID NO: 507797 - DNA, 15 bp, Homo sapiens
gtaagattacaggag

SEQ ID NO: 507798 - DNA, 15 bp, Homo sapiens
taagattacaggagt

SEQ ID NO: 507799 - DNA, 15 bp, Homo sapiens
aagattacaggagtg

SEQ ID NO: 507800 - DNA, 15 bp, Homo sapiens
agattacaggagtga

SEQ ID NO: 507801 - DNA, 15 bp, Homo sapiens
gattacaggagtgag

SEQ ID NO: 507802 - DNA, 15 bp, Homo sapiens
attacaggagtgagg

SEQ ID NO: 507803 - DNA, 15 bp, Homo sapiens
ttacaggagtgaggg

SEQ ID NO: 507804 - DNA, 15 bp, Homo sapiens
tacaggagtgagggt

SEQ ID NO: 507805 - DNA, 15 bp, Homo sapiens
acaggagtgagggtg

SEQ ID NO: 507806 - DNA, 15 bp, Homo sapiens
caggagtgagggtgg

SEQ ID NO: 507807 - DNA, 15 bp, Homo sapiens
aggagtgagggtgga

SEQ ID NO: 507808 - DNA, 15 bp, Homo sapiens
ggagtgagggtggag

SEQ ID NO: 507809 - DNA, 15 bp, Homo sapiens
gagtgagggtggagc

SEQ ID NO: 507810 - DNA, 15 bp, Homo sapiens
agtgagggtggagca

SEQ ID NO: 507811 - DNA, 15 bp, Homo sapiens
gtgagggtggagcag

SEQ ID NO: 507812 - DNA, 15 bp, Homo sapiens
tgagggtggagcagc

SEQ ID NO: 507813 - DNA, 15 bp, Homo sapiens
gagggtggagcagcg

SEQ ID NO: 507814 - DNA, 15 bp, Homo sapiens
agggtggagcagcgt

SEQ ID NO: 507815 - DNA, 15 bp, Homo sapiens
gggtggagcagcgtg

SEQ ID NO: 507816 - DNA, 15 bp, Homo sapiens
ggtggagcagcgtgt

SEQ ID NO: 507817 - DNA, 15 bp, Homo sapiens
gtggagcagcgtgtg

SEQ ID NO: 507818 - DNA, 15 bp, Homo sapiens
tggagcagcgtgtgt

SEQ ID NO: 507819 - DNA, 15 bp, Homo sapiens
ggagcagcgtgtgtt

SEQ ID NO: 507820 - DNA, 15 bp, Homo sapiens
gagcagcgtgtgttt

SEQ ID NO: 507821 - DNA, 15 bp, Homo sapiens
agcagcgtgtgtttg

SEQ ID NO: 507822 - DNA, 15 bp, Homo sapiens
gcagcgtgtgtttgg

SEQ ID NO: 507823 - DNA, 15 bp, Homo sapiens
cagcgtgtgtttgga

SEQ ID NO: 507824 - DNA, 15 bp, Homo sapiens
agcgtgtgtttggag

SEQ ID NO: 507825 - DNA, 15 bp, Homo sapiens
gcgtgtgtttggaga

SEQ ID NO: 507826 - DNA, 15 bp, Homo sapiens
cgtgtgtttggagat

SEQ ID NO: 507827 - DNA, 15 bp, Homo sapiens
gtgtgtttggagatt

SEQ ID NO: 507828 - DNA, 15 bp, Homo sapiens
tgtgtttggagattt

SEQ ID NO: 507829 - DNA, 15 bp, Homo sapiens
gtgtttggagatttc

SEQ ID NO: 507830 - DNA, 15 bp, Homo sapiens
tgtttggagatttct

SEQ ID NO: 507831 - DNA, 15 bp, Homo sapiens
gtttggagatttctg

SEQ ID NO: 507832 - DNA, 15 bp, Homo sapiens
tttggagatttctgt

SEQ ID NO: 507833 - DNA, 15 bp, Homo sapiens
ttggagatttctgta

SEQ ID NO: 507834 - DNA, 15 bp, Homo sapiens
tggagatttctgtat

SEQ ID NO: 507835 - DNA, 15 bp, Homo sapiens
ggagatttctgtatg

SEQ ID NO: 507836 - DNA, 15 bp, Homo sapiens
gagatttctgtatgc

SEQ ID NO: 507837 - DNA, 15 bp, Homo sapiens
agatttctgtatgcc

SEQ ID NO: 507838 - DNA, 15 bp, Homo sapiens
gatttctgtatgcca

SEQ ID NO: 507839 - DNA, 15 bp, Homo sapiens
atttctgtatgccaa

SEQ ID NO: 507840 - DNA, 15 bp, Homo sapiens
tttctgtatgccaaa

SEQ ID NO: 507841 - DNA, 15 bp, Homo sapiens
ttctgtatgccaaac

SEQ ID NO: 507842 - DNA, 15 bp, Homo sapiens
tctgtatgccaaacc

SEQ ID NO: 507843 - DNA, 15 bp, Homo sapiens
ctgtatgccaaaccc

SEQ ID NO: 507844 - DNA, 15 bp, Homo sapiens
tgtatgccaaacccc

SEQ ID NO: 507845 - DNA, 15 bp, Homo sapiens
gtatgccaaacccca

SEQ ID NO: 507846 - DNA, 15 bp, Homo sapiens
tatgccaaaccccac

SEQ ID NO: 507847 - DNA, 15 bp, Homo sapiens
atgccaaaccccacg

SEQ ID NO: 507848 - DNA, 15 bp, Homo sapiens
tgccaaaccccacgg

SEQ ID NO: 507849 - DNA, 15 bp, Homo sapiens
gccaaaccccacggg

SEQ ID NO: 507850 - DNA, 15 bp, Homo sapiens
ccaaaccccacgggc

SEQ ID NO: 507851 - DNA, 15 bp, Homo sapiens
caaaccccacgggct

SEQ ID NO: 507852 - DNA, 15 bp, Homo sapiens
ctgccaactttataa

SEQ ID NO: 507853 - DNA, 15 bp, Homo sapiens
tgccaactttataaa

SEQ ID NO: 507854 - DNA, 15 bp, Homo sapiens
gccaactttataaaa

SEQ ID NO: 507855 - DNA, 15 bp, Homo sapiens
ccaactttataaaac

SEQ ID NO: 507856 - DNA, 15 bp, Homo sapiens
caactttataaaaca

SEQ ID NO: 507857 - DNA, 15 bp, Homo sapiens
aactttataaaacat

SEQ ID NO: 507858 - DNA, 15 bp, Homo sapiens
actttataaaacatc

SEQ ID NO: 507859 - DNA, 15 bp, Homo sapiens
ctttataaaacatca

SEQ ID NO: 507860 - DNA, 15 bp, Homo sapiens
tttataaaacatcaa

SEQ ID NO: 507861 - DNA, 15 bp, Homo sapiens
ttataaaacatcaat

SEQ ID NO: 507862 - DNA, 15 bp, Homo sapiens
tataaaacatcaatc

SEQ ID NO: 507863 - DNA, 15 bp, Homo sapiens
ataaaacatcaatct

SEQ ID NO: 507864 - DNA, 15 bp, Homo sapiens
taaaacatcaatctg

SEQ ID NO: 507865 - DNA, 15 bp, Homo sapiens
aaaacatcaatctgt

SEQ ID NO: 507866 - DNA, 15 bp, Homo sapiens
aaacatcaatctgta

SEQ ID NO: 507867 - DNA, 15 bp, Homo sapiens
aacatcaatctgtag

SEQ ID NO: 507868 - DNA, 15 bp, Homo sapiens
acatcaatctgtagt

SEQ ID NO: 507869 - DNA, 15 bp, Homo sapiens
catcaatctgtagtt

SEQ ID NO: 507870 - DNA, 15 bp, Homo sapiens
atcaatctgtagttc

SEQ ID NO: 507871 - DNA, 15 bp, Homo sapiens
tcaatctgtagttca

SEQ ID NO: 507872 - DNA, 15 bp, Homo sapiens
caatctgtagttcac

SEQ ID NO: 507873 - DNA, 15 bp, Homo sapiens
aatctgtagttcaca

SEQ ID NO: 507874 - DNA, 15 bp, Homo sapiens
atctgtagttcacag

SEQ ID NO: 507875 - DNA, 15 bp, Homo sapiens
tctgtagttcacaga

SEQ ID NO: 507876 - DNA, 15 bp, Homo sapiens
ctgtagttcacagat

SEQ ID NO: 507877 - DNA, 15 bp, Homo sapiens
tgtagttcacagatg

SEQ ID NO: 507878 - DNA, 15 bp, Homo sapiens
gtagttcacagatgt

SEQ ID NO: 507879 - DNA, 15 bp, Homo sapiens
tagttcacagatgtc

SEQ ID NO: 507880 - DNA, 15 bp, Homo sapiens
agttcacagatgtcc

SEQ ID NO: 507881 - DNA, 15 bp, Homo sapiens
gttcacagatgtcct

SEQ ID NO: 507882 - DNA, 15 bp, Homo sapiens
ttcacagatgtcctt

SEQ ID NO: 507883 - DNA, 15 bp, Homo sapiens
tcacagatgtccttt

SEQ ID NO: 507884 - DNA, 15 bp, Homo sapiens
cacagatgtcctttt

SEQ ID NO: 507885 - DNA, 15 bp, Homo sapiens
acagatgtccttttg

SEQ ID NO: 507886 - DNA, 15 bp, Homo sapiens
cagatgtccttttga

SEQ ID NO: 507887 - DNA, 15 bp, Homo sapiens
agatgtccttttgat

SEQ ID NO: 507888 - DNA, 15 bp, Homo sapiens
gatgtccttttgata

SEQ ID NO: 507889 - DNA, 15 bp, Homo sapiens
atgtccttttgataa

SEQ ID NO: 507890 - DNA, 15 bp, Homo sapiens
tgtccttttgataat

SEQ ID NO: 507891 - DNA, 15 bp, Homo sapiens
gtccttttgataatt

SEQ ID NO: 507892 - DNA, 15 bp, Homo sapiens
tccttttgataattg

SEQ ID NO: 507893 - DNA, 15 bp, Homo sapiens
ccttttgataattgg

SEQ ID NO: 507894 - DNA, 15 bp, Homo sapiens
cttttgataattggt

SEQ ID NO: 507895 - DNA, 15 bp, Homo sapiens
ttttgataattggtg

SEQ ID NO: 507896 - DNA, 15 bp, Homo sapiens
tttgataattggtgt

SEQ ID NO: 507897 - DNA, 15 bp, Homo sapiens
ttgataattggtgtt

SEQ ID NO: 507898 - DNA, 15 bp, Homo sapiens
tgataattggtgttt

SEQ ID NO: 507899 - DNA, 15 bp, Homo sapiens
gataattggtgtttt

SEQ ID NO: 507900 - DNA, 15 bp, Homo sapiens
ataattggtgttttc

SEQ ID NO: 507901 - DNA, 15 bp, Homo sapiens
taattggtgttttct

SEQ ID NO: 507902 - DNA, 15 bp, Homo sapiens
aattggtgttttctt

SEQ ID NO: 507903 - DNA, 15 bp, Homo sapiens
attggtgttttcttc

SEQ ID NO: 507904 - DNA, 15 bp, Homo sapiens
ttggtgttttcttca

SEQ ID NO: 507905 - DNA, 15 bp, Homo sapiens
tggtgttttcttcac

SEQ ID NO: 507906 - DNA, 15 bp, Homo sapiens
ggtgttttcttcact

SEQ ID NO: 507907 - DNA, 15 bp, Homo sapiens
gtgttttcttcactt

SEQ ID NO: 507908 - DNA, 15 bp, Homo sapiens
tgttttcttcacttc

SEQ ID NO: 507909 - DNA, 15 bp, Homo sapiens
gttttcttcacttct

SEQ ID NO: 507910 - DNA, 15 bp, Homo sapiens
ttttcttcacttctg

SEQ ID NO: 507911 - DNA, 15 bp, Homo sapiens
tttcttcacttctga

SEQ ID NO: 507912 - DNA, 15 bp, Homo sapiens
ttcttcacttctgac

SEQ ID NO: 507913 - DNA, 15 bp, Homo sapiens
tcttcacttctgact

SEQ ID NO: 507914 - DNA, 15 bp, Homo sapiens
cttcacttctgactc

SEQ ID NO: 507915 - DNA, 15 bp, Homo sapiens
ttcacttctgactcc

SEQ ID NO: 507916 - DNA, 15 bp, Homo sapiens
tcacttctgactccg

SEQ ID NO: 507917 - DNA, 15 bp, Homo sapiens
cacttctgactccgg

SEQ ID NO: 507918 - DNA, 15 bp, Homo sapiens
acttctgactccggg

SEQ ID NO: 507919 - DNA, 15 bp, Homo sapiens
cttctgactccgggg

SEQ ID NO: 507920 - DNA, 15 bp, Homo sapiens
ttctgactccggggc

SEQ ID NO: 507921 - DNA, 15 bp, Homo sapiens
tctgactccggggct

SEQ ID NO: 507922 - DNA, 15 bp, Homo sapiens
ctgactccggggctg

SEQ ID NO: 507923 - DNA, 15 bp, Homo sapiens
tgactccggggctga

SEQ ID NO: 507924 - DNA, 15 bp, Homo sapiens
gactccggggctgaa

SEQ ID NO: 507925 - DNA, 15 bp, Homo sapiens
actccggggctgaag

SEQ ID NO: 507926 - DNA, 15 bp, Homo sapiens
ctccggggctgaagg

SEQ ID NO: 507927 - DNA, 15 bp, Homo sapiens
tccggggctgaaggc

SEQ ID NO: 507928 - DNA, 15 bp, Homo sapiens
ccggggctgaaggca

SEQ ID NO: 507929 - DNA, 15 bp, Homo sapiens
cggggctgaaggcag

SEQ ID NO: 507930 - DNA, 15 bp, Homo sapiens
ggggctgaaggcagt

SEQ ID NO: 507931 - DNA, 15 bp, Homo sapiens
gggctgaaggcagtt

SEQ ID NO: 507932 - DNA, 15 bp, Homo sapiens
ggctgaaggcagttt

SEQ ID NO: 507933 - DNA, 15 bp, Homo sapiens
gctgaaggcagtttt

SEQ ID NO: 507934 - DNA, 15 bp, Homo sapiens
ctgaaggcagttttc

SEQ ID NO: 507935 - DNA, 15 bp, Homo sapiens
tgaaggcagttttct

SEQ ID NO: 507936 - DNA, 15 bp, Homo sapiens
gaaggcagttttctc

SEQ ID NO: 507937 - DNA, 15 bp, Homo sapiens
aaggcagttttctct

SEQ ID NO: 507938 - DNA, 15 bp, Homo sapiens
aggcagttttctctc

SEQ ID NO: 507939 - DNA, 15 bp, Homo sapiens
ggcagttttctctct

SEQ ID NO: 507940 - DNA, 15 bp, Homo sapiens
gcagttttctctctc

SEQ ID NO: 507941 - DNA, 15 bp, Homo sapiens
cagttttctctctca

SEQ ID NO: 507942 - DNA, 15 bp, Homo sapiens
agttttctctctcag

SEQ ID NO: 507943 - DNA, 15 bp, Homo sapiens
gttttctctctcagt

SEQ ID NO: 507944 - DNA, 15 bp, Homo sapiens
ttttctctctcagtc

SEQ ID NO: 507945 - DNA, 15 bp, Homo sapiens
tttctctctcagtca

SEQ ID NO: 507946 - DNA, 15 bp, Homo sapiens
ttctctctcagtcat

SEQ ID NO: 507947 - DNA, 15 bp, Homo sapiens
tctctctcagtcatg

SEQ ID NO: 507948 - DNA, 15 bp, Homo sapiens
ctctctcagtcatgt

SEQ ID NO: 507949 - DNA, 15 bp, Homo sapiens
tctctcagtcatgtg

SEQ ID NO: 507950 - DNA, 15 bp, Homo sapiens
ctctcagtcatgtgt

SEQ ID NO: 507951 - DNA, 15 bp, Homo sapiens
tctcagtcatgtgta

SEQ ID NO: 507952 - DNA, 15 bp, Homo sapiens
ctcagtcatgtgtag

SEQ ID NO: 507953 - DNA, 15 bp, Homo sapiens
tcagtcatgtgtagt

SEQ ID NO: 507954 - DNA, 15 bp, Homo sapiens
cagtcatgtgtagtg

SEQ ID NO: 507955 - DNA, 15 bp, Homo sapiens
agtcatgtgtagtga

SEQ ID NO: 507956 - DNA, 15 bp, Homo sapiens
gtcatgtgtagtgag

SEQ ID NO: 507957 - DNA, 15 bp, Homo sapiens
tcatgtgtagtgaga

SEQ ID NO: 507958 - DNA, 15 bp, Homo sapiens
catgtgtagtgagaa

SEQ ID NO: 507959 - DNA, 15 bp, Homo sapiens
atgtgtagtgagaaa

SEQ ID NO: 507960 - DNA, 15 bp, Homo sapiens
tgtgtagtgagaaac

SEQ ID NO: 507961 - DNA, 15 bp, Homo sapiens
gtgtagtgagaaaca

SEQ ID NO: 507962 - DNA, 15 bp, Homo sapiens
tgtagtgagaaacag

SEQ ID NO: 507963 - DNA, 15 bp, Homo sapiens
gtagtgagaaacagg

SEQ ID NO: 507964 - DNA, 15 bp, Homo sapiens
tagtgagaaacaggt

SEQ ID NO: 507965 - DNA, 15 bp, Homo sapiens
agtgagaaacaggtg

SEQ ID NO: 507966 - DNA, 15 bp, Homo sapiens
gtgagaaacaggtgg

SEQ ID NO: 507967 - DNA, 15 bp, Homo sapiens
tgagaaacaggtgga

SEQ ID NO: 507968 - DNA, 15 bp, Homo sapiens
gagaaacaggtggag

SEQ ID NO: 507969 - DNA, 15 bp, Homo sapiens
agaaacaggtggagc

SEQ ID NO: 507970 - DNA, 15 bp, Homo sapiens
gaaacaggtggagct

SEQ ID NO: 507971 - DNA, 15 bp, Homo sapiens
aaacaggtggagctt

SEQ ID NO: 507972 - DNA, 15 bp, Homo sapiens
aacaggtggagcttg

SEQ ID NO: 507973 - DNA, 15 bp, Homo sapiens
acaggtggagcttga

SEQ ID NO: 507974 - DNA, 15 bp, Homo sapiens
caggtggagcttgaa

SEQ ID NO: 507975 - DNA, 15 bp, Homo sapiens
aggtggagcttgaag

SEQ ID NO: 507976 - DNA, 15 bp, Homo sapiens
ggtggagcttgaagc

SEQ ID NO: 507977 - DNA, 15 bp, Homo sapiens
gtggagcttgaagct

SEQ ID NO: 507978 - DNA, 15 bp, Homo sapiens
tggagcttgaagctc

SEQ ID NO: 507979 - DNA, 15 bp, Homo sapiens
ggagcttgaagctca

SEQ ID NO: 507980 - DNA, 15 bp, Homo sapiens
gagcttgaagctcag

SEQ ID NO: 507981 - DNA, 15 bp, Homo sapiens
agcttgaagctcagg

SEQ ID NO: 507982 - DNA, 15 bp, Homo sapiens
gcttgaagctcagga

SEQ ID NO: 507983 - DNA, 15 bp, Homo sapiens
cttgaagctcaggag

SEQ ID NO: 507984 - DNA, 15 bp, Homo sapiens
ttgaagctcaggaga

SEQ ID NO: 507985 - DNA, 15 bp, Homo sapiens
tgaagctcaggagag

SEQ ID NO: 507986 - DNA, 15 bp, Homo sapiens
gaagctcaggagagg

SEQ ID NO: 507987 - DNA, 15 bp, Homo sapiens
aagctcaggagaggt

SEQ ID NO: 507988 - DNA, 15 bp, Homo sapiens
agctcaggagaggtg

SEQ ID NO: 507989 - DNA, 15 bp, Homo sapiens
gctcaggagaggtgg

SEQ ID NO: 507990 - DNA, 15 bp, Homo sapiens
ctcaggagaggtggg

SEQ ID NO: 507991 - DNA, 15 bp, Homo sapiens
tcaggagaggtgggt

SEQ ID NO: 507992 - DNA, 15 bp, Homo sapiens
caggagaggtgggtg

SEQ ID NO: 507993 - DNA, 15 bp, Homo sapiens
aggagaggtgggtga

SEQ ID NO: 507994 - DNA, 15 bp, Homo sapiens
ggagaggtgggtgat

SEQ ID NO: 507995 - DNA, 15 bp, Homo sapiens
gagaggtgggtgatg

SEQ ID NO: 507996 - DNA, 15 bp, Homo sapiens
agaggtgggtgatgg

SEQ ID NO: 507997 - DNA, 15 bp, Homo sapiens
gaggtgggtgatggt

SEQ ID NO: 507998 - DNA, 15 bp, Homo sapiens
aggtgggtgatggtg

SEQ ID NO: 507999 - DNA, 15 bp, Homo sapiens
ggtgggtgatggtgt

SEQ ID NO: 508000 - DNA, 15 bp, Homo sapiens
gtgggtgatggtgtc

SEQ ID NO: 508001 - DNA, 15 bp, Homo sapiens
tgggtgatggtgtct

SEQ ID NO: 508002 - DNA, 15 bp, Homo sapiens
gggtgatggtgtctt

SEQ ID NO: 508003 - DNA, 15 bp, Homo sapiens
ggtgatggtgtcttg

SEQ ID NO: 508004 - DNA, 15 bp, Homo sapiens
gtgatggtgtcttgc

SEQ ID NO: 508005 - DNA, 15 bp, Homo sapiens
tgatggtgtcttgct

SEQ ID NO: 508006 - DNA, 15 bp, Homo sapiens
gatggtgtcttgctg

SEQ ID NO: 508007 - DNA, 15 bp, Homo sapiens
atggtgtcttgctgg

SEQ ID NO: 508008 - DNA, 15 bp, Homo sapiens
tggtgtcttgctggc

SEQ ID NO: 508009 - DNA, 15 bp, Homo sapiens
ggtgtcttgctggct

SEQ ID NO: 508010 - DNA, 15 bp, Homo sapiens
gtgtcttgctggctg

SEQ ID NO: 508011 - DNA, 15 bp, Homo sapiens
tgtcttgctggctgg

SEQ ID NO: 508012 - DNA, 15 bp, Homo sapiens
gtcttgctggctgga

SEQ ID NO: 508013 - DNA, 15 bp, Homo sapiens
tcttgctggctggac

SEQ ID NO: 508014 - DNA, 15 bp, Homo sapiens
cttgctggctggacg

SEQ ID NO: 508015 - DNA, 15 bp, Homo sapiens
ttgctggctggacgt

SEQ ID NO: 508016 - DNA, 15 bp, Homo sapiens
tgctggctggacgtt

SEQ ID NO: 508017 - DNA, 15 bp, Homo sapiens
gctggctggacgttc

SEQ ID NO: 508018 - DNA, 15 bp, Homo sapiens
ctggctggacgttca

SEQ ID NO: 508019 - DNA, 15 bp, Homo sapiens
tggctggacgttcac

SEQ ID NO: 508020 - DNA, 15 bp, Homo sapiens
ggctggacgttcact

SEQ ID NO: 508021 - DNA, 15 bp, Homo sapiens
gctggacgttcactt

SEQ ID NO: 508022 - DNA, 15 bp, Homo sapiens
ctggacgttcacttg

SEQ ID NO: 508023 - DNA, 15 bp, Homo sapiens
tggacgttcacttgt

SEQ ID NO: 508024 - DNA, 15 bp, Homo sapiens
ggacgttcacttgtg

SEQ ID NO: 508025 - DNA, 15 bp, Homo sapiens
gacgttcacttgtgc

SEQ ID NO: 508026 - DNA, 15 bp, Homo sapiens
acgttcacttgtgca

SEQ ID NO: 508027 - DNA, 15 bp, Homo sapiens
cgttcacttgtgcat

SEQ ID NO: 508028 - DNA, 15 bp, Homo sapiens
gttcacttgtgcata

SEQ ID NO: 508029 - DNA, 15 bp, Homo sapiens
ttcacttgtgcatat

SEQ ID NO: 508030 - DNA, 15 bp, Homo sapiens
tcacttgtgcatatg

SEQ ID NO: 508031 - DNA, 15 bp, Homo sapiens
cacttgtgcatatgg

SEQ ID NO: 508032 - DNA, 15 bp, Homo sapiens
acttgtgcatatggg

SEQ ID NO: 508033 - DNA, 15 bp, Homo sapiens
cttgtgcatatgggt

SEQ ID NO: 508034 - DNA, 15 bp, Homo sapiens
ttgtgcatatgggta

SEQ ID NO: 508035 - DNA, 15 bp, Homo sapiens
tgtgcatatgggtag

SEQ ID NO: 508036 - DNA, 15 bp, Homo sapiens
gtgcatatgggtagg

SEQ ID NO: 508037 - DNA, 15 bp, Homo sapiens
tgcatatgggtaggc

SEQ ID NO: 508038 - DNA, 15 bp, Homo sapiens
gcatatgggtaggca

SEQ ID NO: 508039 - DNA, 15 bp, Homo sapiens
catatgggtaggcac

SEQ ID NO: 508040 - DNA, 15 bp, Homo sapiens
atatgggtaggcaca

SEQ ID NO: 508041 - DNA, 15 bp, Homo sapiens
tatgggtaggcacac

SEQ ID NO: 508042 - DNA, 15 bp, Homo sapiens
atgggtaggcacacc

SEQ ID NO: 508043 - DNA, 15 bp, Homo sapiens
tgggtaggcacacct

SEQ ID NO: 508044 - DNA, 15 bp, Homo sapiens
gggtaggcacacctc

SEQ ID NO: 508045 - DNA, 15 bp, Homo sapiens
ggtaggcacacctcc

SEQ ID NO: 508046 - DNA, 15 bp, Homo sapiens
gtaggcacacctcct

SEQ ID NO: 508047 - DNA, 15 bp, Homo sapiens
taggcacacctcctt

SEQ ID NO: 508048 - DNA, 15 bp, Homo sapiens
aggcacacctccttt

SEQ ID NO: 508049 - DNA, 15 bp, Homo sapiens
ggcacacctccttta

SEQ ID NO: 508050 - DNA, 15 bp, Homo sapiens
gcacacctcctttag

SEQ ID NO: 508051 - DNA, 15 bp, Homo sapiens
cacacctcctttagg

SEQ ID NO: 508052 - DNA, 15 bp, Homo sapiens
acacctcctttagga

SEQ ID NO: 508053 - DNA, 15 bp, Homo sapiens
cacctcctttaggag

SEQ ID NO: 508054 - DNA, 15 bp, Homo sapiens
acctcctttaggagg

SEQ ID NO: 508055 - DNA, 15 bp, Homo sapiens
cctcctttaggagga

SEQ ID NO: 508056 - DNA, 15 bp, Homo sapiens
ctcctttaggaggac

SEQ ID NO: 508057 - DNA, 15 bp, Homo sapiens
tcctttaggaggact

SEQ ID NO: 508058 - DNA, 15 bp, Homo sapiens
cctttaggaggactg

SEQ ID NO: 508059 - DNA, 15 bp, Homo sapiens
ctttaggaggactgc

SEQ ID NO: 508060 - DNA, 15 bp, Homo sapiens
tttaggaggactgca

SEQ ID NO: 508061 - DNA, 15 bp, Homo sapiens
ttaggaggactgcat

SEQ ID NO: 508062 - DNA, 15 bp, Homo sapiens
taggaggactgcatg

SEQ ID NO: 508063 - DNA, 15 bp, Homo sapiens
aggaggactgcatga

SEQ ID NO: 508064 - DNA, 15 bp, Homo sapiens
ggaggactgcatgag

SEQ ID NO: 508065 - DNA, 15 bp, Homo sapiens
gaggactgcatgaga

SEQ ID NO: 508066 - DNA, 15 bp, Homo sapiens
aggactgcatgagac

SEQ ID NO: 508067 - DNA, 15 bp, Homo sapiens
ggactgcatgagacc

SEQ ID NO: 508068 - DNA, 15 bp, Homo sapiens
gactgcatgagaccc

SEQ ID NO: 508069 - DNA, 15 bp, Homo sapiens
actgcatgagaccct

SEQ ID NO: 508070 - DNA, 15 bp, Homo sapiens
ctgcatgagaccctt

SEQ ID NO: 508071 - DNA, 15 bp, Homo sapiens
tgcatgagacccttg

SEQ ID NO: 508072 - DNA, 15 bp, Homo sapiens
gcatgagacccttgt

SEQ ID NO: 508073 - DNA, 15 bp, Homo sapiens
catgagacccttgtg

SEQ ID NO: 508074 - DNA, 15 bp, Homo sapiens
atgagacccttgtgc

SEQ ID NO: 508075 - DNA, 15 bp, Homo sapiens
tgagacccttgtgca

SEQ ID NO: 508076 - DNA, 15 bp, Homo sapiens
gagacccttgtgcag

SEQ ID NO: 508077 - DNA, 15 bp, Homo sapiens
agacccttgtgcagt

SEQ ID NO: 508078 - DNA, 15 bp, Homo sapiens
gacccttgtgcagtg

SEQ ID NO: 508079 - DNA, 15 bp, Homo sapiens
acccttgtgcagtgg

SEQ ID NO: 508080 - DNA, 15 bp, Homo sapiens
cccttgtgcagtggg

SEQ ID NO: 508081 - DNA, 15 bp, Homo sapiens
ccttgtgcagtgggt

SEQ ID NO: 508082 - DNA, 15 bp, Homo sapiens
cttgtgcagtgggtg

SEQ ID NO: 508083 - DNA, 15 bp, Homo sapiens
ttgtgcagtgggtgc

SEQ ID NO: 508084 - DNA, 15 bp, Homo sapiens
tgtgcagtgggtgcc

SEQ ID NO: 508085 - DNA, 15 bp, Homo sapiens
gtgcagtgggtgccc

SEQ ID NO: 508086 - DNA, 15 bp, Homo sapiens
tgcagtgggtgccca

SEQ ID NO: 508087 - DNA, 15 bp, Homo sapiens
gcagtgggtgcccaa

SEQ ID NO: 508088 - DNA, 15 bp, Homo sapiens
cagtgggtgcccaaa

SEQ ID NO: 508089 - DNA, 15 bp, Homo sapiens
agtgggtgcccaaac

SEQ ID NO: 508090 - DNA, 15 bp, Homo sapiens
gtgggtgcccaaaca

SEQ ID NO: 508091 - DNA, 15 bp, Homo sapiens
tgggtgcccaaacaa

SEQ ID NO: 508092 - DNA, 15 bp, Homo sapiens
gggtgcccaaacaaa

SEQ ID NO: 508093 - DNA, 15 bp, Homo sapiens
ggtgcccaaacaaaa

SEQ ID NO: 508094 - DNA, 15 bp, Homo sapiens
gtgcccaaacaaaac

SEQ ID NO: 508095 - DNA, 15 bp, Homo sapiens
tgcccaaacaaaaca

SEQ ID NO: 508096 - DNA, 15 bp, Homo sapiens
gcccaaacaaaacac

SEQ ID NO: 508097 - DNA, 15 bp, Homo sapiens
cccaaacaaaacaca

SEQ ID NO: 508098 - DNA, 15 bp, Homo sapiens
ccaaacaaaacacac

SEQ ID NO: 508099 - DNA, 15 bp, Homo sapiens
caaacaaaacacact

SEQ ID NO: 508100 - DNA, 15 bp, Homo sapiens
aaacaaaacacactt

SEQ ID NO: 508101 - DNA, 15 bp, Homo sapiens
aacaaaacacacttt

SEQ ID NO: 508102 - DNA, 15 bp, Homo sapiens
acaaaacacactttt

SEQ ID NO: 508103 - DNA, 15 bp, Homo sapiens
caaaacacacttttc

SEQ ID NO: 508104 - DNA, 15 bp, Homo sapiens
aaaacacacttttct

SEQ ID NO: 508105 - DNA, 15 bp, Homo sapiens
aaacacacttttctt

SEQ ID NO: 508106 - DNA, 15 bp, Homo sapiens
aacacacttttcttc

SEQ ID NO: 508107 - DNA, 15 bp, Homo sapiens
acacacttttcttct

SEQ ID NO: 508108 - DNA, 15 bp, Homo sapiens
cacacttttcttctt

SEQ ID NO: 508109 - DNA, 15 bp, Homo sapiens
acacttttcttcttc

SEQ ID NO: 508110 - DNA, 15 bp, Homo sapiens
cacttttcttcttcc

SEQ ID NO: 508111 - DNA, 15 bp, Homo sapiens
acttttcttcttccc

SEQ ID NO: 508112 - DNA, 15 bp, Homo sapiens
cttttcttcttcccc

SEQ ID NO: 508113 - DNA, 15 bp, Homo sapiens
ttttcttcttcccct

SEQ ID NO: 508114 - DNA, 15 bp, Homo sapiens
tttcttcttccccta

SEQ ID NO: 508115 - DNA, 15 bp, Homo sapiens
ttcttcttcccctaa

SEQ ID NO: 508116 - DNA, 15 bp, Homo sapiens
tcttcttcccctaag

SEQ ID NO: 508117 - DNA, 15 bp, Homo sapiens
cttcttcccctaagg

SEQ ID NO: 508118 - DNA, 15 bp, Homo sapiens
ttcttcccctaaggg

SEQ ID NO: 508119 - DNA, 15 bp, Homo sapiens
tcttcccctaagggc

SEQ ID NO: 508120 - DNA, 15 bp, Homo sapiens
cttcccctaagggcg

SEQ ID NO: 508121 - DNA, 15 bp, Homo sapiens
ttcccctaagggcga

SEQ ID NO: 508122 - DNA, 15 bp, Homo sapiens
tcccctaagggcgaa

SEQ ID NO: 508123 - DNA, 15 bp, Homo sapiens
cccctaagggcgaac

SEQ ID NO: 508124 - DNA, 15 bp, Homo sapiens
ccctaagggcgaact

SEQ ID NO: 508125 - DNA, 15 bp, Homo sapiens
cctaagggcgaacta

SEQ ID NO: 508126 - DNA, 15 bp, Homo sapiens
ctaagggcgaactaa

SEQ ID NO: 508127 - DNA, 15 bp, Homo sapiens
taagggcgaactaac

SEQ ID NO: 508128 - DNA, 15 bp, Homo sapiens
aagggcgaactaact

SEQ ID NO: 508129 - DNA, 15 bp, Homo sapiens
agggcgaactaactt

SEQ ID NO: 508130 - DNA, 15 bp, Homo sapiens
gggcgaactaacttg

SEQ ID NO: 508131 - DNA, 15 bp, Homo sapiens
ggcgaactaacttgt

SEQ ID NO: 508132 - DNA, 15 bp, Homo sapiens
gcgaactaacttgtt

SEQ ID NO: 508133 - DNA, 15 bp, Homo sapiens
cgaactaacttgtta

SEQ ID NO: 508134 - DNA, 15 bp, Homo sapiens
gaactaacttgttaa

SEQ ID NO: 508135 - DNA, 15 bp, Homo sapiens
aactaacttgttaaa

SEQ ID NO: 508136 - DNA, 15 bp, Homo sapiens
actaacttgttaaaa

SEQ ID NO: 508137 - DNA, 15 bp, Homo sapiens
ctaacttgttaaaag

SEQ ID NO: 508138 - DNA, 15 bp, Homo sapiens
taacttgttaaaagc

SEQ ID NO: 508139 - DNA, 15 bp, Homo sapiens
aacttgttaaaagct

SEQ ID NO: 508140 - DNA, 15 bp, Homo sapiens
acttgttaaaagctt

SEQ ID NO: 508141 - DNA, 15 bp, Homo sapiens
cttgttaaaagcttc

SEQ ID NO: 508142 - DNA, 15 bp, Homo sapiens
ttgttaaaagcttct

SEQ ID NO: 508143 - DNA, 15 bp, Homo sapiens
tgttaaaagcttcta

SEQ ID NO: 508144 - DNA, 15 bp, Homo sapiens
gttaaaagcttctaa

SEQ ID NO: 508145 - DNA, 15 bp, Homo sapiens
ttaaaagcttctaaa

SEQ ID NO: 508146 - DNA, 15 bp, Homo sapiens
taaaagcttctaaat

SEQ ID NO: 508147 - DNA, 15 bp, Homo sapiens
aaaagcttctaaatc

SEQ ID NO: 508148 - DNA, 15 bp, Homo sapiens
aaagcttctaaatca

SEQ ID NO: 508149 - DNA, 15 bp, Homo sapiens
aagcttctaaatcag

SEQ ID NO: 508150 - DNA, 15 bp, Homo sapiens
agcttctaaatcagg

SEQ ID NO: 508151 - DNA, 15 bp, Homo sapiens
gcttctaaatcaggg

SEQ ID NO: 508152 - DNA, 15 bp, Homo sapiens
cttctaaatcaggga

SEQ ID NO: 508153 - DNA, 15 bp, Homo sapiens
ttctaaatcagggaa

SEQ ID NO: 508154 - DNA, 15 bp, Homo sapiens
tctaaatcagggaaa

SEQ ID NO: 508155 - DNA, 15 bp, Homo sapiens
ctaaatcagggaaag

SEQ ID NO: 508156 - DNA, 15 bp, Homo sapiens
taaatcagggaaaga

SEQ ID NO: 508157 - DNA, 15 bp, Homo sapiens
aaatcagggaaagaa

SEQ ID NO: 508158 - DNA, 15 bp, Homo sapiens
aatcagggaaagaac

SEQ ID NO: 508159 - DNA, 15 bp, Homo sapiens
atcagggaaagaaca

SEQ ID NO: 508160 - DNA, 15 bp, Homo sapiens
tcagggaaagaacac

SEQ ID NO: 508161 - DNA, 15 bp, Homo sapiens
cagggaaagaacact

SEQ ID NO: 508162 - DNA, 15 bp, Homo sapiens
agggaaagaacactt

SEQ ID NO: 508163 - DNA, 15 bp, Homo sapiens
gggaaagaacactta

SEQ ID NO: 508164 - DNA, 15 bp, Homo sapiens
ggaaagaacacttaa

SEQ ID NO: 508165 - DNA, 15 bp, Homo sapiens
gaaagaacacttaaa

SEQ ID NO: 508166 - DNA, 15 bp, Homo sapiens
aaagaacacttaaaa

SEQ ID NO: 508167 - DNA, 15 bp, Homo sapiens
aagaacacttaaaaa

SEQ ID NO: 508168 - DNA, 15 bp, Homo sapiens
agaacacttaaaaag

SEQ ID NO: 508169 - DNA, 15 bp, Homo sapiens
gaacacttaaaaaga

SEQ ID NO: 508170 - DNA, 15 bp, Homo sapiens
aacacttaaaaagag

SEQ ID NO: 508171 - DNA, 15 bp, Homo sapiens
acacttaaaaagagt

SEQ ID NO: 508172 - DNA, 15 bp, Homo sapiens
cacttaaaaagagta

SEQ ID NO: 508173 - DNA, 15 bp, Homo sapiens
acttaaaaagagtag

SEQ ID NO: 508174 - DNA, 15 bp, Homo sapiens
cttaaaaagagtagc

SEQ ID NO: 508175 - DNA, 15 bp, Homo sapiens
ttaaaaagagtagct

SEQ ID NO: 508176 - DNA, 15 bp, Homo sapiens
taaaaagagtagctc

SEQ ID NO: 508177 - DNA, 15 bp, Homo sapiens
aaaaagagtagctct

SEQ ID NO: 508178 - DNA, 15 bp, Homo sapiens
aaaagagtagctctt

SEQ ID NO: 508179 - DNA, 15 bp, Homo sapiens
aaagagtagctcttt

SEQ ID NO: 508180 - DNA, 15 bp, Homo sapiens
aagagtagctcttta

SEQ ID NO: 508181 - DNA, 15 bp, Homo sapiens
agagtagctctttaa

SEQ ID NO: 508182 - DNA, 15 bp, Homo sapiens
gagtagctctttaag

SEQ ID NO: 508183 - DNA, 15 bp, Homo sapiens
agtagctctttaagg

SEQ ID NO: 508184 - DNA, 15 bp, Homo sapiens
gtagctctttaaggg

SEQ ID NO: 508185 - DNA, 15 bp, Homo sapiens
tagctctttaagggg

SEQ ID NO: 508186 - DNA, 15 bp, Homo sapiens
agctctttaaggggc

SEQ ID NO: 508187 - DNA, 15 bp, Homo sapiens
gctctttaaggggca

SEQ ID NO: 508188 - DNA, 15 bp, Homo sapiens
ctctttaaggggcag

SEQ ID NO: 508189 - DNA, 15 bp, Homo sapiens
tctttaaggggcagt

SEQ ID NO: 508190 - DNA, 15 bp, Homo sapiens
ctttaaggggcagta

SEQ ID NO: 508191 - DNA, 15 bp, Homo sapiens
tttaaggggcagtaa

SEQ ID NO: 508192 - DNA, 15 bp, Homo sapiens
ttaaggggcagtaag

SEQ ID NO: 508193 - DNA, 15 bp, Homo sapiens
taaggggcagtaagc

SEQ ID NO: 508194 - DNA, 15 bp, Homo sapiens
aaggggcagtaagcc

SEQ ID NO: 508195 - DNA, 15 bp, Homo sapiens
aggggcagtaagccc

SEQ ID NO: 508196 - DNA, 15 bp, Homo sapiens
ggggcagtaagccca

SEQ ID NO: 508197 - DNA, 15 bp, Homo sapiens
gggcagtaagcccag

SEQ ID NO: 508198 - DNA, 15 bp, Homo sapiens
ggcagtaagcccagg

SEQ ID NO: 508199 - DNA, 15 bp, Homo sapiens
gcagtaagcccagga

SEQ ID NO: 508200 - DNA, 15 bp, Homo sapiens
cagtaagcccaggaa

SEQ ID NO: 508201 - DNA, 15 bp, Homo sapiens
agtaagcccaggaaa

SEQ ID NO: 508202 - DNA, 15 bp, Homo sapiens
gtaagcccaggaaaa

SEQ ID NO: 508203 - DNA, 15 bp, Homo sapiens
taagcccaggaaaag

SEQ ID NO: 508204 - DNA, 15 bp, Homo sapiens
aagcccaggaaaagg

SEQ ID NO: 508205 - DNA, 15 bp, Homo sapiens
agcccaggaaaagga

SEQ ID NO: 508206 - DNA, 15 bp, Homo sapiens
gcccaggaaaaggaa

SEQ ID NO: 508207 - DNA, 15 bp, Homo sapiens
cccaggaaaaggaac

SEQ ID NO: 508208 - DNA, 15 bp, Homo sapiens
ccaggaaaaggaact

SEQ ID NO: 508209 - DNA, 15 bp, Homo sapiens
caggaaaaggaacta

SEQ ID NO: 508210 - DNA, 15 bp, Homo sapiens
aggaaaaggaactat

SEQ ID NO: 508211 - DNA, 15 bp, Homo sapiens
ggaaaaggaactatg

SEQ ID NO: 508212 - DNA, 15 bp, Homo sapiens
gaaaaggaactatga

SEQ ID NO: 508213 - DNA, 15 bp, Homo sapiens
aaaaggaactatgac

SEQ ID NO: 508214 - DNA, 15 bp, Homo sapiens
aaaggaactatgaca

SEQ ID NO: 508215 - DNA, 15 bp, Homo sapiens
aaggaactatgacat

SEQ ID NO: 508216 - DNA, 15 bp, Homo sapiens
aggaactatgacatc

SEQ ID NO: 508217 - DNA, 15 bp, Homo sapiens
ggaactatgacatca

SEQ ID NO: 508218 - DNA, 15 bp, Homo sapiens
gaactatgacatcag

SEQ ID NO: 508219 - DNA, 15 bp, Homo sapiens
aactatgacatcagc

SEQ ID NO: 508220 - DNA, 15 bp, Homo sapiens
actatgacatcagca

SEQ ID NO: 508221 - DNA, 15 bp, Homo sapiens
ctatgacatcagcat

SEQ ID NO: 508222 - DNA, 15 bp, Homo sapiens
tatgacatcagcatc

SEQ ID NO: 508223 - DNA, 15 bp, Homo sapiens
atgacatcagcatca

SEQ ID NO: 508224 - DNA, 15 bp, Homo sapiens
tgacatcagcatcac

SEQ ID NO: 508225 - DNA, 15 bp, Homo sapiens
gacatcagcatcacc

SEQ ID NO: 508226 - DNA, 15 bp, Homo sapiens
acatcagcatcacct

SEQ ID NO: 508227 - DNA, 15 bp, Homo sapiens
catcagcatcacctc

SEQ ID NO: 508228 - DNA, 15 bp, Homo sapiens
atcagcatcacctca

SEQ ID NO: 508229 - DNA, 15 bp, Homo sapiens
tcagcatcacctcat

SEQ ID NO: 508230 - DNA, 15 bp, Homo sapiens
cagcatcacctcata

SEQ ID NO: 508231 - DNA, 15 bp, Homo sapiens
agcatcacctcatat

SEQ ID NO: 508232 - DNA, 15 bp, Homo sapiens
gcatcacctcatatc

SEQ ID NO: 508233 - DNA, 15 bp, Homo sapiens
catcacctcatatca

SEQ ID NO: 508234 - DNA, 15 bp, Homo sapiens
atcacctcatatcac

SEQ ID NO: 508235 - DNA, 15 bp, Homo sapiens
tcacctcatatcaca

SEQ ID NO: 508236 - DNA, 15 bp, Homo sapiens
cacctcatatcacat

SEQ ID NO: 508237 - DNA, 15 bp, Homo sapiens
acctcatatcacatc

SEQ ID NO: 508238 - DNA, 15 bp, Homo sapiens
cctcatatcacatct

SEQ ID NO: 508239 - DNA, 15 bp, Homo sapiens
ctcatatcacatcta

SEQ ID NO: 508240 - DNA, 15 bp, Homo sapiens
tcatatcacatctac

SEQ ID NO: 508241 - DNA, 15 bp, Homo sapiens
catatcacatctacc

SEQ ID NO: 508242 - DNA, 15 bp, Homo sapiens
atatcacatctaccc

SEQ ID NO: 508243 - DNA, 15 bp, Homo sapiens
tatcacatctaccca

SEQ ID NO: 508244 - DNA, 15 bp, Homo sapiens
atcacatctacccag

SEQ ID NO: 508245 - DNA, 15 bp, Homo sapiens
tcacatctacccaga

SEQ ID NO: 508246 - DNA, 15 bp, Homo sapiens
cacatctacccagaa

SEQ ID NO: 508247 - DNA, 15 bp, Homo sapiens
acatctacccagaaa

SEQ ID NO: 508248 - DNA, 15 bp, Homo sapiens
catctacccagaaat

SEQ ID NO: 508249 - DNA, 15 bp, Homo sapiens
atctacccagaaatt

SEQ ID NO: 508250 - DNA, 15 bp, Homo sapiens
tctacccagaaattt

SEQ ID NO: 508251 - DNA, 15 bp, Homo sapiens
ctacccagaaatttt

SEQ ID NO: 508252 - DNA, 15 bp, Homo sapiens
tacccagaaattttg

SEQ ID NO: 508253 - DNA, 15 bp, Homo sapiens
acccagaaattttgt

SEQ ID NO: 508254 - DNA, 15 bp, Homo sapiens
cccagaaattttgtt

SEQ ID NO: 508255 - DNA, 15 bp, Homo sapiens
ccagaaattttgttt

SEQ ID NO: 508256 - DNA, 15 bp, Homo sapiens
cagaaattttgtttt

SEQ ID NO: 508257 - DNA, 15 bp, Homo sapiens
agaaattttgttttc

SEQ ID NO: 508258 - DNA, 15 bp, Homo sapiens
gaaattttgttttct

SEQ ID NO: 508259 - DNA, 15 bp, Homo sapiens
aaattttgttttctc

SEQ ID NO: 508260 - DNA, 15 bp, Homo sapiens
aattttgttttctcc

SEQ ID NO: 508261 - DNA, 15 bp, Homo sapiens
attttgttttctccc

SEQ ID NO: 508262 - DNA, 15 bp, Homo sapiens
ttttgttttctccca

SEQ ID NO: 508263 - DNA, 15 bp, Homo sapiens
tttgttttctcccag

SEQ ID NO: 508264 - DNA, 15 bp, Homo sapiens
ttgttttctcccagt

SEQ ID NO: 508265 - DNA, 15 bp, Homo sapiens
tgttttctcccagtt

SEQ ID NO: 508266 - DNA, 15 bp, Homo sapiens
gttttctcccagttt

SEQ ID NO: 508267 - DNA, 15 bp, Homo sapiens
ttttctcccagttta

SEQ ID NO: 508268 - DNA, 15 bp, Homo sapiens
tttctcccagtttag

SEQ ID NO: 508269 - DNA, 15 bp, Homo sapiens
ttctcccagtttagt

SEQ ID NO: 508270 - DNA, 15 bp, Homo sapiens
tctcccagtttagtt

SEQ ID NO: 508271 - DNA, 15 bp, Homo sapiens
ctcccagtttagttc

SEQ ID NO: 508272 - DNA, 15 bp, Homo sapiens
tcccagtttagttca

SEQ ID NO: 508273 - DNA, 15 bp, Homo sapiens
cccagtttagttcaa

SEQ ID NO: 508274 - DNA, 15 bp, Homo sapiens
ccagtttagttcaaa

SEQ ID NO: 508275 - DNA, 15 bp, Homo sapiens
cagtttagttcaaaa

SEQ ID NO: 508276 - DNA, 15 bp, Homo sapiens
agtttagttcaaaaa

SEQ ID NO: 508277 - DNA, 15 bp, Homo sapiens
gtttagttcaaaaat

SEQ ID NO: 508278 - DNA, 15 bp, Homo sapiens
tttagttcaaaaatt

SEQ ID NO: 508279 - DNA, 15 bp, Homo sapiens
ttagttcaaaaatta

SEQ ID NO: 508280 - DNA, 15 bp, Homo sapiens
tagttcaaaaattaa

SEQ ID NO: 508281 - DNA, 15 bp, Homo sapiens
agttcaaaaattaat

SEQ ID NO: 508282 - DNA, 15 bp, Homo sapiens
gttcaaaaattaatt

SEQ ID NO: 508283 - DNA, 15 bp, Homo sapiens
ttcaaaaattaattt

SEQ ID NO: 508284 - DNA, 15 bp, Homo sapiens
tcaaaaattaatttt

SEQ ID NO: 508285 - DNA, 15 bp, Homo sapiens
caaaaattaatttta

SEQ ID NO: 508286 - DNA, 15 bp, Homo sapiens
aaaaattaattttaa

SEQ ID NO: 508287 - DNA, 15 bp, Homo sapiens
aaaattaattttaag

SEQ ID NO: 508288 - DNA, 15 bp, Homo sapiens
aaattaattttaaga

SEQ ID NO: 508289 - DNA, 15 bp, Homo sapiens
aattaattttaagac

SEQ ID NO: 508290 - DNA, 15 bp, Homo sapiens
attaattttaagact

SEQ ID NO: 508291 - DNA, 15 bp, Homo sapiens
ttaattttaagactt

SEQ ID NO: 508292 - DNA, 15 bp, Homo sapiens
taattttaagacttt

SEQ ID NO: 508293 - DNA, 15 bp, Homo sapiens
aattttaagactttt

SEQ ID NO: 508294 - DNA, 15 bp, Homo sapiens
attttaagacttttt

SEQ ID NO: 508295 - DNA, 15 bp, Homo sapiens
ttttaagacttttta

SEQ ID NO: 508296 - DNA, 15 bp, Homo sapiens
tttaagactttttac

SEQ ID NO: 508297 - DNA, 15 bp, Homo sapiens
ttaagactttttaca

SEQ ID NO: 508298 - DNA, 15 bp, Homo sapiens
taagactttttacag

SEQ ID NO: 508299 - DNA, 15 bp, Homo sapiens
aagactttttacaga

SEQ ID NO: 508300 - DNA, 15 bp, Homo sapiens
agactttttacagat

SEQ ID NO: 508301 - DNA, 15 bp, Homo sapiens
gactttttacagatt

SEQ ID NO: 508302 - DNA, 15 bp, Homo sapiens
actttttacagattt

SEQ ID NO: 508303 - DNA, 15 bp, Homo sapiens
ctttttacagatttg

SEQ ID NO: 508304 - DNA, 15 bp, Homo sapiens
tttttacagatttgt

SEQ ID NO: 508305 - DNA, 15 bp, Homo sapiens
ttttacagatttgtt

SEQ ID NO: 508306 - DNA, 15 bp, Homo sapiens
tttacagatttgtta

SEQ ID NO: 508307 - DNA, 15 bp, Homo sapiens
ttacagatttgttag

SEQ ID NO: 508308 - DNA, 15 bp, Homo sapiens
tacagatttgttaga

SEQ ID NO: 508309 - DNA, 15 bp, Homo sapiens
acagatttgttagaa

SEQ ID NO: 508310 - DNA, 15 bp, Homo sapiens
cagatttgttagaaa

SEQ ID NO: 508311 - DNA, 15 bp, Homo sapiens
agatttgttagaaat

SEQ ID NO: 508312 - DNA, 15 bp, Homo sapiens
gatttgttagaaata

SEQ ID NO: 508313 - DNA, 15 bp, Homo sapiens
atttgttagaaatat

SEQ ID NO: 508314 - DNA, 15 bp, Homo sapiens
tttgttagaaatatt

SEQ ID NO: 508315 - DNA, 15 bp, Homo sapiens
ttgttagaaatattt

SEQ ID NO: 508316 - DNA, 15 bp, Homo sapiens
tgttagaaatatttg

SEQ ID NO: 508317 - DNA, 15 bp, Homo sapiens
gttagaaatatttgt

SEQ ID NO: 508318 - DNA, 15 bp, Homo sapiens
ttagaaatatttgtg

SEQ ID NO: 508319 - DNA, 15 bp, Homo sapiens
tagaaatatttgtgt

SEQ ID NO: 508320 - DNA, 15 bp, Homo sapiens
agaaatatttgtgtg

SEQ ID NO: 508321 - DNA, 15 bp, Homo sapiens
gaaatatttgtgtga

SEQ ID NO: 508322 - DNA, 15 bp, Homo sapiens
aaatatttgtgtgac

SEQ ID NO: 508323 - DNA, 15 bp, Homo sapiens
aatatttgtgtgaca

SEQ ID NO: 508324 - DNA, 15 bp, Homo sapiens
atatttgtgtgacac

SEQ ID NO: 508325 - DNA, 15 bp, Homo sapiens
tatttgtgtgacaca

SEQ ID NO: 508326 - DNA, 15 bp, Homo sapiens
atttgtgtgacacag

SEQ ID NO: 508327 - DNA, 15 bp, Homo sapiens
tttgtgtgacacagg

SEQ ID NO: 508328 - DNA, 15 bp, Homo sapiens
ttgtgtgacacaggt

SEQ ID NO: 508329 - DNA, 15 bp, Homo sapiens
tgtgtgacacaggta

SEQ ID NO: 508330 - DNA, 15 bp, Homo sapiens
gtgtgacacaggtac

SEQ ID NO: 508331 - DNA, 15 bp, Homo sapiens
tgtgacacaggtaca

SEQ ID NO: 508332 - DNA, 15 bp, Homo sapiens
gtgacacaggtacaa

SEQ ID NO: 508333 - DNA, 15 bp, Homo sapiens
tgacacaggtacaat

SEQ ID NO: 508334 - DNA, 15 bp, Homo sapiens
gacacaggtacaatc

SEQ ID NO: 508335 - DNA, 15 bp, Homo sapiens
acacaggtacaatca

SEQ ID NO: 508336 - DNA, 15 bp, Homo sapiens
cacaggtacaatcaa

SEQ ID NO: 508337 - DNA, 15 bp, Homo sapiens
acaggtacaatcaaa

SEQ ID NO: 508338 - DNA, 15 bp, Homo sapiens
caggtacaatcaaag

SEQ ID NO: 508339 - DNA, 15 bp, Homo sapiens
aggtacaatcaaagt

SEQ ID NO: 508340 - DNA, 15 bp, Homo sapiens
ggtacaatcaaagta

SEQ ID NO: 508341 - DNA, 15 bp, Homo sapiens
gtacaatcaaagtaa

SEQ ID NO: 508342 - DNA, 15 bp, Homo sapiens
tacaatcaaagtaaa

SEQ ID NO: 508343 - DNA, 15 bp, Homo sapiens
acaatcaaagtaaat

SEQ ID NO: 508344 - DNA, 15 bp, Homo sapiens
caatcaaagtaaatt

SEQ ID NO: 508345 - DNA, 15 bp, Homo sapiens
aatcaaagtaaattt

SEQ ID NO: 508346 - DNA, 15 bp, Homo sapiens
atcaaagtaaatttt

SEQ ID NO: 508347 - DNA, 15 bp, Homo sapiens
tcaaagtaaattttg

SEQ ID NO: 508348 - DNA, 15 bp, Homo sapiens
caaagtaaattttgt

SEQ ID NO: 508349 - DNA, 15 bp, Homo sapiens
aaagtaaattttgta

SEQ ID NO: 508350 - DNA, 15 bp, Homo sapiens
aagtaaattttgtat

SEQ ID NO: 508351 - DNA, 15 bp, Homo sapiens
agtaaattttgtatg

SEQ ID NO: 508352 - DNA, 15 bp, Homo sapiens
gtaaattttgtatga

SEQ ID NO: 508353 - DNA, 15 bp, Homo sapiens
taaattttgtatgat

SEQ ID NO: 508354 - DNA, 15 bp, Homo sapiens
aaattttgtatgatt

SEQ ID NO: 508355 - DNA, 15 bp, Homo sapiens
aattttgtatgattg

SEQ ID NO: 508356 - DNA, 15 bp, Homo sapiens
attttgtatgattgg

SEQ ID NO: 508357 - DNA, 15 bp, Homo sapiens
ttttgtatgattgga

SEQ ID NO: 508358 - DNA, 15 bp, Homo sapiens
tttgtatgattggat

SEQ ID NO: 508359 - DNA, 15 bp, Homo sapiens
ttgtatgattggatg

SEQ ID NO: 508360 - DNA, 15 bp, Homo sapiens
tgtatgattggatgt

SEQ ID NO: 508361 - DNA, 15 bp, Homo sapiens
gtatgattggatgta

SEQ ID NO: 508362 - DNA, 15 bp, Homo sapiens
tatgattggatgtat

SEQ ID NO: 508363 - DNA, 15 bp, Homo sapiens
atgattggatgtatt

SEQ ID NO: 508364 - DNA, 15 bp, Homo sapiens
tgattggatgtattc

SEQ ID NO: 508365 - DNA, 15 bp, Homo sapiens
gattggatgtattca

SEQ ID NO: 508366 - DNA, 15 bp, Homo sapiens
attggatgtattcag

SEQ ID NO: 508367 - DNA, 15 bp, Homo sapiens
ttggatgtattcaga

SEQ ID NO: 508368 - DNA, 15 bp, Homo sapiens
tggatgtattcagag

SEQ ID NO: 508369 - DNA, 15 bp, Homo sapiens
ggatgtattcagagg

SEQ ID NO: 508370 - DNA, 15 bp, Homo sapiens
gatgtattcagaggc

SEQ ID NO: 508371 - DNA, 15 bp, Homo sapiens
atgtattcagaggcc

SEQ ID NO: 508372 - DNA, 15 bp, Homo sapiens
tgtattcagaggcca

SEQ ID NO: 508373 - DNA, 15 bp, Homo sapiens
gtattcagaggccat

SEQ ID NO: 508374 - DNA, 15 bp, Homo sapiens
tattcagaggccatg

SEQ ID NO: 508375 - DNA, 15 bp, Homo sapiens
attcagaggccatgc

SEQ ID NO: 508376 - DNA, 15 bp, Homo sapiens
ttcagaggccatgcc

SEQ ID NO: 508377 - DNA, 15 bp, Homo sapiens
tcagaggccatgcct

SEQ ID NO: 508378 - DNA, 15 bp, Homo sapiens
cagaggccatgcctg

SEQ ID NO: 508379 - DNA, 15 bp, Homo sapiens
agaggccatgcctga

SEQ ID NO: 508380 - DNA, 15 bp, Homo sapiens
gaggccatgcctgac

SEQ ID NO: 508381 - DNA, 15 bp, Homo sapiens
aggccatgcctgaca

SEQ ID NO: 508382 - DNA, 15 bp, Homo sapiens
ggccatgcctgacat

SEQ ID NO: 508383 - DNA, 15 bp, Homo sapiens
gccatgcctgacatc

SEQ ID NO: 508384 - DNA, 15 bp, Homo sapiens
ccatgcctgacatcc

SEQ ID NO: 508385 - DNA, 15 bp, Homo sapiens
catgcctgacatcct

SEQ ID NO: 508386 - DNA, 15 bp, Homo sapiens
atgcctgacatcctg

SEQ ID NO: 508387 - DNA, 15 bp, Homo sapiens
tgcctgacatcctga

SEQ ID NO: 508388 - DNA, 15 bp, Homo sapiens
gcctgacatcctgaa

SEQ ID NO: 508389 - DNA, 15 bp, Homo sapiens
cctgacatcctgaaa

SEQ ID NO: 508390 - DNA, 15 bp, Homo sapiens
ctgacatcctgaaag

SEQ ID NO: 508391 - DNA, 15 bp, Homo sapiens
tgacatcctgaaagt

SEQ ID NO: 508392 - DNA, 15 bp, Homo sapiens
gacatcctgaaagtt

SEQ ID NO: 508393 - DNA, 15 bp, Homo sapiens
acatcctgaaagttt

SEQ ID NO: 508394 - DNA, 15 bp, Homo sapiens
catcctgaaagtttc

SEQ ID NO: 508395 - DNA, 15 bp, Homo sapiens
atcctgaaagtttcc

SEQ ID NO: 508396 - DNA, 15 bp, Homo sapiens
tcctgaaagtttccc

SEQ ID NO: 508397 - DNA, 15 bp, Homo sapiens
cctgaaagtttcccc

SEQ ID NO: 508398 - DNA, 15 bp, Homo sapiens
ctgaaagtttcccct

SEQ ID NO: 508399 - DNA, 15 bp, Homo sapiens
tgaaagtttcccctt

SEQ ID NO: 508400 - DNA, 15 bp, Homo sapiens
gaaagtttccccttc

SEQ ID NO: 508401 - DNA, 15 bp, Homo sapiens
aaagtttccccttca

SEQ ID NO: 508402 - DNA, 15 bp, Homo sapiens
aagtttccccttcat

SEQ ID NO: 508403 - DNA, 15 bp, Homo sapiens
agtttccccttcatc

SEQ ID NO: 508404 - DNA, 15 bp, Homo sapiens
gtttccccttcatca

SEQ ID NO: 508405 - DNA, 15 bp, Homo sapiens
tttccccttcatcag

SEQ ID NO: 508406 - DNA, 15 bp, Homo sapiens
ttccccttcatcagc

SEQ ID NO: 508407 - DNA, 15 bp, Homo sapiens
tccccttcatcagcc

SEQ ID NO: 508408 - DNA, 15 bp, Homo sapiens
ccccttcatcagcct

SEQ ID NO: 508409 - DNA, 15 bp, Homo sapiens
cccttcatcagcctt

SEQ ID NO: 508410 - DNA, 15 bp, Homo sapiens
ccttcatcagccttt

SEQ ID NO: 508411 - DNA, 15 bp, Homo sapiens
cttcatcagcctttg

SEQ ID NO: 508412 - DNA, 15 bp, Homo sapiens
ttcatcagcctttgt

SEQ ID NO: 508413 - DNA, 15 bp, Homo sapiens
tcatcagcctttgtg

SEQ ID NO: 508414 - DNA, 15 bp, Homo sapiens
catcagcctttgtgc

SEQ ID NO: 508415 - DNA, 15 bp, Homo sapiens
atcagcctttgtgct

SEQ ID NO: 508416 - DNA, 15 bp, Homo sapiens
tcagcctttgtgctt

SEQ ID NO: 508417 - DNA, 15 bp, Homo sapiens
cagcctttgtgcttc

SEQ ID NO: 508418 - DNA, 15 bp, Homo sapiens
agcctttgtgcttct

SEQ ID NO: 508419 - DNA, 15 bp, Homo sapiens
gcctttgtgcttctc

SEQ ID NO: 508420 - DNA, 15 bp, Homo sapiens
cctttgtgcttctcc

SEQ ID NO: 508421 - DNA, 15 bp, Homo sapiens
ctttgtgcttctcca

SEQ ID NO: 508422 - DNA, 15 bp, Homo sapiens
tttgtgcttctccac

SEQ ID NO: 508423 - DNA, 15 bp, Homo sapiens
ttgtgcttctccacc

SEQ ID NO: 508424 - DNA, 15 bp, Homo sapiens
tgtgcttctccacca

SEQ ID NO: 508425 - DNA, 15 bp, Homo sapiens
gtgcttctccaccag

SEQ ID NO: 508426 - DNA, 15 bp, Homo sapiens
tgcttctccaccagg

SEQ ID NO: 508427 - DNA, 15 bp, Homo sapiens
gcttctccaccaggg

SEQ ID NO: 508428 - DNA, 15 bp, Homo sapiens
cttctccaccagggc

SEQ ID NO: 508429 - DNA, 15 bp, Homo sapiens
ttctccaccagggct

SEQ ID NO: 508430 - DNA, 15 bp, Homo sapiens
tctccaccagggctt

SEQ ID NO: 508431 - DNA, 15 bp, Homo sapiens
ctccaccagggcttc

SEQ ID NO: 508432 - DNA, 15 bp, Homo sapiens
tccaccagggcttcc

SEQ ID NO: 508433 - DNA, 15 bp, Homo sapiens
ccaccagggcttcct

SEQ ID NO: 508434 - DNA, 15 bp, Homo sapiens
caccagggcttccta

SEQ ID NO: 508435 - DNA, 15 bp, Homo sapiens
accagggcttcctac

SEQ ID NO: 508436 - DNA, 15 bp, Homo sapiens
ccagggcttcctaca

SEQ ID NO: 508437 - DNA, 15 bp, Homo sapiens
cagggcttcctacag

SEQ ID NO: 508438 - DNA, 15 bp, Homo sapiens
agggcttcctacagc

SEQ ID NO: 508439 - DNA, 15 bp, Homo sapiens
gggcttcctacagca

SEQ ID NO: 508440 - DNA, 15 bp, Homo sapiens
ggcttcctacagcag

SEQ ID NO: 508441 - DNA, 15 bp, Homo sapiens
gcttcctacagcagt

SEQ ID NO: 508442 - DNA, 15 bp, Homo sapiens
cttcctacagcagtt

SEQ ID NO: 508443 - DNA, 15 bp, Homo sapiens
ttcctacagcagttc

SEQ ID NO: 508444 - DNA, 15 bp, Homo sapiens
tcctacagcagttcc

SEQ ID NO: 508445 - DNA, 15 bp, Homo sapiens
cctacagcagttcct

SEQ ID NO: 508446 - DNA, 15 bp, Homo sapiens
ctacagcagttcctc

SEQ ID NO: 508447 - DNA, 15 bp, Homo sapiens
tacagcagttcctcc

SEQ ID NO: 508448 - DNA, 15 bp, Homo sapiens
acagcagttcctccc

SEQ ID NO: 508449 - DNA, 15 bp, Homo sapiens
cagcagttcctccct

SEQ ID NO: 508450 - DNA, 15 bp, Homo sapiens
agcagttcctccctc

SEQ ID NO: 508451 - DNA, 15 bp, Homo sapiens
gcagttcctccctct

SEQ ID NO: 508452 - DNA, 15 bp, Homo sapiens
cagttcctccctctg

SEQ ID NO: 508453 - DNA, 15 bp, Homo sapiens
agttcctccctctgg

SEQ ID NO: 508454 - DNA, 15 bp, Homo sapiens
gttcctccctctggt

SEQ ID NO: 508455 - DNA, 15 bp, Homo sapiens
ttcctccctctggtt

SEQ ID NO: 508456 - DNA, 15 bp, Homo sapiens
tcctccctctggttt

SEQ ID NO: 508457 - DNA, 15 bp, Homo sapiens
cctccctctggttta

SEQ ID NO: 508458 - DNA, 15 bp, Homo sapiens
ctccctctggtttat

SEQ ID NO: 508459 - DNA, 15 bp, Homo sapiens
tccctctggtttatt

SEQ ID NO: 508460 - DNA, 15 bp, Homo sapiens
ccctctggtttattc

SEQ ID NO: 508461 - DNA, 15 bp, Homo sapiens
cctctggtttattca

SEQ ID NO: 508462 - DNA, 15 bp, Homo sapiens
ctctggtttattcac

SEQ ID NO: 508463 - DNA, 15 bp, Homo sapiens
tctggtttattcaca

SEQ ID NO: 508464 - DNA, 15 bp, Homo sapiens
ctggtttattcacag

SEQ ID NO: 508465 - DNA, 15 bp, Homo sapiens
tggtttattcacaga

SEQ ID NO: 508466 - DNA, 15 bp, Homo sapiens
ggtttattcacagac

SEQ ID NO: 508467 - DNA, 15 bp, Homo sapiens
gtttattcacagact

SEQ ID NO: 508468 - DNA, 15 bp, Homo sapiens
tttattcacagactg

SEQ ID NO: 508469 - DNA, 15 bp, Homo sapiens
ttattcacagactgc

SEQ ID NO: 508470 - DNA, 15 bp, Homo sapiens
tattcacagactgca

SEQ ID NO: 508471 - DNA, 15 bp, Homo sapiens
attcacagactgcag

SEQ ID NO: 508472 - DNA, 15 bp, Homo sapiens
ttcacagactgcaga

SEQ ID NO: 508473 - DNA, 15 bp, Homo sapiens
tcacagactgcagat

SEQ ID NO: 508474 - DNA, 15 bp, Homo sapiens
cacagactgcagata

SEQ ID NO: 508475 - DNA, 15 bp, Homo sapiens
acagactgcagataa

SEQ ID NO: 508476 - DNA, 15 bp, Homo sapiens
cagactgcagataac

SEQ ID NO: 508477 - DNA, 15 bp, Homo sapiens
agactgcagataact

SEQ ID NO: 508478 - DNA, 15 bp, Homo sapiens
gactgcagataactc

SEQ ID NO: 508479 - DNA, 15 bp, Homo sapiens
actgcagataactct

SEQ ID NO: 508480 - DNA, 15 bp, Homo sapiens
ctgcagataactctg

SEQ ID NO: 508481 - DNA, 15 bp, Homo sapiens
tgcagataactctgg

SEQ ID NO: 508482 - DNA, 15 bp, Homo sapiens
gcagataactctgga

SEQ ID NO: 508483 - DNA, 15 bp, Homo sapiens
cagataactctggag

SEQ ID NO: 508484 - DNA, 15 bp, Homo sapiens
agataactctggagg

SEQ ID NO: 508485 - DNA, 15 bp, Homo sapiens
gataactctggaggg

SEQ ID NO: 508486 - DNA, 15 bp, Homo sapiens
ataactctggagggg

SEQ ID NO: 508487 - DNA, 15 bp, Homo sapiens
taactctggagggga

SEQ ID NO: 508488 - DNA, 15 bp, Homo sapiens
aactctggaggggat

SEQ ID NO: 508489 - DNA, 15 bp, Homo sapiens
actctggaggggatc

SEQ ID NO: 508490 - DNA, 15 bp, Homo sapiens
ctctggaggggatcg

SEQ ID NO: 508491 - DNA, 15 bp, Homo sapiens
tctggaggggatcgg

SEQ ID NO: 508492 - DNA, 15 bp, Homo sapiens
ctggaggggatcggt

SEQ ID NO: 508493 - DNA, 15 bp, Homo sapiens
tggaggggatcggtg

SEQ ID NO: 508494 - DNA, 15 bp, Homo sapiens
ggaggggatcggtgt

SEQ ID NO: 508495 - DNA, 15 bp, Homo sapiens
gaggggatcggtgtg

SEQ ID NO: 508496 - DNA, 15 bp, Homo sapiens
aggggatcggtgtgt

SEQ ID NO: 508497 - DNA, 15 bp, Homo sapiens
ggggatcggtgtgtg

SEQ ID NO: 508498 - DNA, 15 bp, Homo sapiens
gggatcggtgtgtgt

SEQ ID NO: 508499 - DNA, 15 bp, Homo sapiens
ggatcggtgtgtgtc

SEQ ID NO: 508500 - DNA, 15 bp, Homo sapiens
gatcggtgtgtgtcc

SEQ ID NO: 508501 - DNA, 15 bp, Homo sapiens
atcggtgtgtgtccc

SEQ ID NO: 508502 - DNA, 15 bp, Homo sapiens
tcggtgtgtgtccct

SEQ ID NO: 508503 - DNA, 15 bp, Homo sapiens
cggtgtgtgtccctc

SEQ ID NO: 508504 - DNA, 15 bp, Homo sapiens
ggtgtgtgtccctct

SEQ ID NO: 508505 - DNA, 15 bp, Homo sapiens
gtgtgtgtccctctt

SEQ ID NO: 508506 - DNA, 15 bp, Homo sapiens
tgtgtgtccctctta

SEQ ID NO: 508507 - DNA, 15 bp, Homo sapiens
gtgtgtccctcttac

SEQ ID NO: 508508 - DNA, 15 bp, Homo sapiens
tgtgtccctcttacc

SEQ ID NO: 508509 - DNA, 15 bp, Homo sapiens
gtgtccctcttaccc

SEQ ID NO: 508510 - DNA, 15 bp, Homo sapiens
tgtccctcttacccc

SEQ ID NO: 508511 - DNA, 15 bp, Homo sapiens
gtccctcttacccca

SEQ ID NO: 508512 - DNA, 15 bp, Homo sapiens
tccctcttaccccac

SEQ ID NO: 508513 - DNA, 15 bp, Homo sapiens
ccctcttaccccact

SEQ ID NO: 508514 - DNA, 15 bp, Homo sapiens
cctcttaccccactg

SEQ ID NO: 508515 - DNA, 15 bp, Homo sapiens
ctcttaccccactgc

SEQ ID NO: 508516 - DNA, 15 bp, Homo sapiens
tcttaccccactgcc

SEQ ID NO: 508517 - DNA, 15 bp, Homo sapiens
cttaccccactgcca

SEQ ID NO: 508518 - DNA, 15 bp, Homo sapiens
ttaccccactgccac

SEQ ID NO: 508519 - DNA, 15 bp, Homo sapiens
taccccactgccacc

SEQ ID NO: 508520 - DNA, 15 bp, Homo sapiens
accccactgccaccc

SEQ ID NO: 508521 - DNA, 15 bp, Homo sapiens
ccccactgccacccc

SEQ ID NO: 508522 - DNA, 15 bp, Homo sapiens
cccactgccaccccc

SEQ ID NO: 508523 - DNA, 15 bp, Homo sapiens
ccactgccaccccca

SEQ ID NO: 508524 - DNA, 15 bp, Homo sapiens
cactgccacccccac

SEQ ID NO: 508525 - DNA, 15 bp, Homo sapiens
actgccacccccaca

SEQ ID NO: 508526 - DNA, 15 bp, Homo sapiens
ctgccacccccacag

SEQ ID NO: 508527 - DNA, 15 bp, Homo sapiens
tgccacccccacagg

SEQ ID NO: 508528 - DNA, 15 bp, Homo sapiens
gccacccccacaggg

SEQ ID NO: 508529 - DNA, 15 bp, Homo sapiens
ccacccccacagggg

SEQ ID NO: 508530 - DNA, 15 bp, Homo sapiens
cacccccacaggggt

SEQ ID NO: 508531 - DNA, 15 bp, Homo sapiens
acccccacaggggtg

SEQ ID NO: 508532 - DNA, 15 bp, Homo sapiens
cccccacaggggtgg

SEQ ID NO: 508533 - DNA, 15 bp, Homo sapiens
ccccacaggggtggt

SEQ ID NO: 508534 - DNA, 15 bp, Homo sapiens
cccacaggggtggtg

SEQ ID NO: 508535 - DNA, 15 bp, Homo sapiens
ccacaggggtggtgt

SEQ ID NO: 508536 - DNA, 15 bp, Homo sapiens
cacaggggtggtgtg

SEQ ID NO: 508537 - DNA, 15 bp, Homo sapiens
acaggggtggtgtga

SEQ ID NO: 508538 - DNA, 15 bp, Homo sapiens
caggggtggtgtgat

SEQ ID NO: 508539 - DNA, 15 bp, Homo sapiens
aggggtggtgtgata

SEQ ID NO: 508540 - DNA, 15 bp, Homo sapiens
ggggtggtgtgatat

SEQ ID NO: 508541 - DNA, 15 bp, Homo sapiens
gggtggtgtgatatt

SEQ ID NO: 508542 - DNA, 15 bp, Homo sapiens
ggtggtgtgatattc

SEQ ID NO: 508543 - DNA, 15 bp, Homo sapiens
gtggtgtgatattct

SEQ ID NO: 508544 - DNA, 15 bp, Homo sapiens
tggtgtgatattctg

SEQ ID NO: 508545 - DNA, 15 bp, Homo sapiens
ggtgtgatattctgc

SEQ ID NO: 508546 - DNA, 15 bp, Homo sapiens
gtgtgatattctgcc

SEQ ID NO: 508547 - DNA, 15 bp, Homo sapiens
tgtgatattctgcct

SEQ ID NO: 508548 - DNA, 15 bp, Homo sapiens
gtgatattctgcctc

SEQ ID NO: 508549 - DNA, 15 bp, Homo sapiens
tgatattctgcctct

SEQ ID NO: 508550 - DNA, 15 bp, Homo sapiens
gatattctgcctctc

SEQ ID NO: 508551 - DNA, 15 bp, Homo sapiens
atattctgcctctcc

SEQ ID NO: 508552 - DNA, 15 bp, Homo sapiens
tattctgcctctcct

SEQ ID NO: 508553 - DNA, 15 bp, Homo sapiens
attctgcctctccta

SEQ ID NO: 508554 - DNA, 15 bp, Homo sapiens
ttctgcctctcctag

SEQ ID NO: 508555 - DNA, 15 bp, Homo sapiens
tctgcctctcctagg

SEQ ID NO: 508556 - DNA, 15 bp, Homo sapiens
ctgcctctcctaggc

SEQ ID NO: 508557 - DNA, 15 bp, Homo sapiens
tgcctctcctaggcc

SEQ ID NO: 508558 - DNA, 15 bp, Homo sapiens
gcctctcctaggccc

SEQ ID NO: 508559 - DNA, 15 bp, Homo sapiens
cctctcctaggccct

SEQ ID NO: 508560 - DNA, 15 bp, Homo sapiens
ctctcctaggccctc

SEQ ID NO: 508561 - DNA, 15 bp, Homo sapiens
tctcctaggccctca

SEQ ID NO: 508562 - DNA, 15 bp, Homo sapiens
ctcctaggccctcag

SEQ ID NO: 508563 - DNA, 15 bp, Homo sapiens
tcctaggccctcagt

SEQ ID NO: 508564 - DNA, 15 bp, Homo sapiens
cctaggccctcagtc

SEQ ID NO: 508565 - DNA, 15 bp, Homo sapiens
ctaggccctcagtct

SEQ ID NO: 508566 - DNA, 15 bp, Homo sapiens
taggccctcagtctt

SEQ ID NO: 508567 - DNA, 15 bp, Homo sapiens
aggccctcagtcttt

SEQ ID NO: 508568 - DNA, 15 bp, Homo sapiens
ggccctcagtctttg

SEQ ID NO: 508569 - DNA, 15 bp, Homo sapiens
gccctcagtctttgt

SEQ ID NO: 508570 - DNA, 15 bp, Homo sapiens
ccctcagtctttgtg

SEQ ID NO: 508571 - DNA, 15 bp, Homo sapiens
cctcagtctttgtgg

SEQ ID NO: 508572 - DNA, 15 bp, Homo sapiens
ctcagtctttgtggg

SEQ ID NO: 508573 - DNA, 15 bp, Homo sapiens
tcagtctttgtggga

SEQ ID NO: 508574 - DNA, 15 bp, Homo sapiens
cagtctttgtgggat

SEQ ID NO: 508575 - DNA, 15 bp, Homo sapiens
agtctttgtgggatt

SEQ ID NO: 508576 - DNA, 15 bp, Homo sapiens
gtctttgtgggatta

SEQ ID NO: 508577 - DNA, 15 bp, Homo sapiens
tctttgtgggattat

SEQ ID NO: 508578 - DNA, 15 bp, Homo sapiens
ctttgtgggattatt

SEQ ID NO: 508579 - DNA, 15 bp, Homo sapiens
tttgtgggattattg

SEQ ID NO: 508580 - DNA, 15 bp, Homo sapiens
ttgtgggattattgt

SEQ ID NO: 508581 - DNA, 15 bp, Homo sapiens
tgtgggattattgtt

SEQ ID NO: 508582 - DNA, 15 bp, Homo sapiens
gtgggattattgtta

SEQ ID NO: 508583 - DNA, 15 bp, Homo sapiens
tgggattattgttaa

SEQ ID NO: 508584 - DNA, 15 bp, Homo sapiens
gggattattgttaaa

SEQ ID NO: 508585 - DNA, 15 bp, Homo sapiens
ggattattgttaaat

SEQ ID NO: 508586 - DNA, 15 bp, Homo sapiens
gattattgttaaatt

SEQ ID NO: 508587 - DNA, 15 bp, Homo sapiens
attattgttaaattc

SEQ ID NO: 508588 - DNA, 15 bp, Homo sapiens
ttattgttaaattca

SEQ ID NO: 508589 - DNA, 15 bp, Homo sapiens
tattgttaaattcac

SEQ ID NO: 508590 - DNA, 15 bp, Homo sapiens
attgttaaattcact

SEQ ID NO: 508591 - DNA, 15 bp, Homo sapiens
ttgttaaattcactt

SEQ ID NO: 508592 - DNA, 15 bp, Homo sapiens
tgttaaattcacttg

SEQ ID NO: 508593 - DNA, 15 bp, Homo sapiens
gttaaattcacttgg

SEQ ID NO: 508594 - DNA, 15 bp, Homo sapiens
ttaaattcacttggg

SEQ ID NO: 508595 - DNA, 15 bp, Homo sapiens
taaattcacttgggt

SEQ ID NO: 508596 - DNA, 15 bp, Homo sapiens
aaattcacttgggta

SEQ ID NO: 508597 - DNA, 15 bp, Homo sapiens
aattcacttgggtat

SEQ ID NO: 508598 - DNA, 15 bp, Homo sapiens
attcacttgggtata

SEQ ID NO: 508599 - DNA, 15 bp, Homo sapiens
ttcacttgggtataa

SEQ ID NO: 508600 - DNA, 15 bp, Homo sapiens
tcacttgggtataag

SEQ ID NO: 508601 - DNA, 15 bp, Homo sapiens
cacttgggtataaga

SEQ ID NO: 508602 - DNA, 15 bp, Homo sapiens
acttgggtataagat

SEQ ID NO: 508603 - DNA, 15 bp, Homo sapiens
cttgggtataagatg

SEQ ID NO: 508604 - DNA, 15 bp, Homo sapiens
ttgggtataagatga

SEQ ID NO: 508605 - DNA, 15 bp, Homo sapiens
tgggtataagatgag

SEQ ID NO: 508606 - DNA, 15 bp, Homo sapiens
gggtataagatgagg

SEQ ID NO: 508607 - DNA, 15 bp, Homo sapiens
ggtataagatgaggc

SEQ ID NO: 508608 - DNA, 15 bp, Homo sapiens
gtataagatgaggca

SEQ ID NO: 508609 - DNA, 15 bp, Homo sapiens
tataagatgaggcaa

SEQ ID NO: 508610 - DNA, 15 bp, Homo sapiens
ataagatgaggcaag

SEQ ID NO: 508611 - DNA, 15 bp, Homo sapiens
taagatgaggcaaga

SEQ ID NO: 508612 - DNA, 15 bp, Homo sapiens
aagatgaggcaagag

SEQ ID NO: 508613 - DNA, 15 bp, Homo sapiens
agatgaggcaagaga

SEQ ID NO: 508614 - DNA, 15 bp, Homo sapiens
gatgaggcaagagat

SEQ ID NO: 508615 - DNA, 15 bp, Homo sapiens
atgaggcaagagatt

SEQ ID NO: 508616 - DNA, 15 bp, Homo sapiens
tgaggcaagagattg

SEQ ID NO: 508617 - DNA, 15 bp, Homo sapiens
gaggcaagagattgt

SEQ ID NO: 508618 - DNA, 15 bp, Homo sapiens
aggcaagagattgta

SEQ ID NO: 508619 - DNA, 15 bp, Homo sapiens
ggcaagagattgtag

SEQ ID NO: 508620 - DNA, 15 bp, Homo sapiens
gcaagagattgtaga

SEQ ID NO: 508621 - DNA, 15 bp, Homo sapiens
caagagattgtagag

SEQ ID NO: 508622 - DNA, 15 bp, Homo sapiens
aagagattgtagagg

SEQ ID NO: 508623 - DNA, 15 bp, Homo sapiens
agagattgtagagga

SEQ ID NO: 508624 - DNA, 15 bp, Homo sapiens
gagattgtagaggaa

SEQ ID NO: 508625 - DNA, 15 bp, Homo sapiens
agattgtagaggaat

SEQ ID NO: 508626 - DNA, 15 bp, Homo sapiens
gattgtagaggaatt

SEQ ID NO: 508627 - DNA, 15 bp, Homo sapiens
attgtagaggaattg

SEQ ID NO: 508628 - DNA, 15 bp, Homo sapiens
ttgtagaggaattgg

SEQ ID NO: 508629 - DNA, 15 bp, Homo sapiens
tgtagaggaattggc

SEQ ID NO: 508630 - DNA, 15 bp, Homo sapiens
gtagaggaattggca

SEQ ID NO: 508631 - DNA, 15 bp, Homo sapiens
tagaggaattggcaa

SEQ ID NO: 508632 - DNA, 15 bp, Homo sapiens
agaggaattggcaaa

SEQ ID NO: 508633 - DNA, 15 bp, Homo sapiens
gaggaattggcaaaa

SEQ ID NO: 508634 - DNA, 15 bp, Homo sapiens
aggaattggcaaaaa

SEQ ID NO: 508635 - DNA, 15 bp, Homo sapiens
ggaattggcaaaaac

SEQ ID NO: 508636 - DNA, 15 bp, Homo sapiens
gaattggcaaaaact

SEQ ID NO: 508637 - DNA, 15 bp, Homo sapiens
aattggcaaaaactc

SEQ ID NO: 508638 - DNA, 15 bp, Homo sapiens
attggcaaaaactct

SEQ ID NO: 508639 - DNA, 15 bp, Homo sapiens
ttggcaaaaactctt

SEQ ID NO: 508640 - DNA, 15 bp, Homo sapiens
tggcaaaaactcttc

SEQ ID NO: 508641 - DNA, 15 bp, Homo sapiens
ggcaaaaactcttca

SEQ ID NO: 508642 - DNA, 15 bp, Homo sapiens
gcaaaaactcttcaa

SEQ ID NO: 508643 - DNA, 15 bp, Homo sapiens
caaaaactcttcaaa

SEQ ID NO: 508644 - DNA, 15 bp, Homo sapiens
aaaaactcttcaaag

SEQ ID NO: 508645 - DNA, 15 bp, Homo sapiens
aaaactcttcaaagt

SEQ ID NO: 508646 - DNA, 15 bp, Homo sapiens
aaactcttcaaagtg

SEQ ID NO: 508647 - DNA, 15 bp, Homo sapiens
aactcttcaaagtgt

SEQ ID NO: 508648 - DNA, 15 bp, Homo sapiens
actcttcaaagtgtt

SEQ ID NO: 508649 - DNA, 15 bp, Homo sapiens
ctcttcaaagtgttc

SEQ ID NO: 508650 - DNA, 15 bp, Homo sapiens
tcttcaaagtgttca

SEQ ID NO: 508651 - DNA, 15 bp, Homo sapiens
cttcaaagtgttcac

SEQ ID NO: 508652 - DNA, 15 bp, Homo sapiens
ttcaaagtgttcact

SEQ ID NO: 508653 - DNA, 15 bp, Homo sapiens
tcaaagtgttcactt

SEQ ID NO: 508654 - DNA, 15 bp, Homo sapiens
caaagtgttcacttt

SEQ ID NO: 508655 - DNA, 15 bp, Homo sapiens
aaagtgttcactttt

SEQ ID NO: 508656 - DNA, 15 bp, Homo sapiens
aagtgttcactttta

SEQ ID NO: 508657 - DNA, 15 bp, Homo sapiens
agtgttcacttttaa

SEQ ID NO: 508658 - DNA, 15 bp, Homo sapiens
gtgttcacttttaag

SEQ ID NO: 508659 - DNA, 15 bp, Homo sapiens
tgttcacttttaagt

SEQ ID NO: 508660 - DNA, 15 bp, Homo sapiens
gttcacttttaagtg

SEQ ID NO: 508661 - DNA, 15 bp, Homo sapiens
ttcacttttaagtgt

SEQ ID NO: 508662 - DNA, 15 bp, Homo sapiens
tcacttttaagtgtt

SEQ ID NO: 508663 - DNA, 15 bp, Homo sapiens
cacttttaagtgttt

SEQ ID NO: 508664 - DNA, 15 bp, Homo sapiens
acttttaagtgtttt

SEQ ID NO: 508665 - DNA, 15 bp, Homo sapiens
cttttaagtgttttt

SEQ ID NO: 508666 - DNA, 15 bp, Homo sapiens
ttttaagtgttttta

SEQ ID NO: 508667 - DNA, 15 bp, Homo sapiens
tttaagtgtttttat

SEQ ID NO: 508668 - DNA, 15 bp, Homo sapiens
ttaagtgtttttata

SEQ ID NO: 508669 - DNA, 15 bp, Homo sapiens
taagtgtttttatag

SEQ ID NO: 508670 - DNA, 15 bp, Homo sapiens
aagtgtttttataga

SEQ ID NO: 508671 - DNA, 15 bp, Homo sapiens
agtgtttttatagag

SEQ ID NO: 508672 - DNA, 15 bp, Homo sapiens
gtgtttttatagagc

SEQ ID NO: 508673 - DNA, 15 bp, Homo sapiens
tgtttttatagagct

SEQ ID NO: 508674 - DNA, 15 bp, Homo sapiens
gtttttatagagctc

SEQ ID NO: 508675 - DNA, 15 bp, Homo sapiens
tttttatagagctct

SEQ ID NO: 508676 - DNA, 15 bp, Homo sapiens
ttttatagagctctg

SEQ ID NO: 508677 - DNA, 15 bp, Homo sapiens
tttatagagctctga

SEQ ID NO: 508678 - DNA, 15 bp, Homo sapiens
ttatagagctctgaa

SEQ ID NO: 508679 - DNA, 15 bp, Homo sapiens
tatagagctctgaat

SEQ ID NO: 508680 - DNA, 15 bp, Homo sapiens
atagagctctgaatc

SEQ ID NO: 508681 - DNA, 15 bp, Homo sapiens
tagagctctgaatca

SEQ ID NO: 508682 - DNA, 15 bp, Homo sapiens
agagctctgaatcag

SEQ ID NO: 508683 - DNA, 15 bp, Homo sapiens
gagctctgaatcagt

SEQ ID NO: 508684 - DNA, 15 bp, Homo sapiens
agctctgaatcagta

SEQ ID NO: 508685 - DNA, 15 bp, Homo sapiens
gctctgaatcagtat

SEQ ID NO: 508686 - DNA, 15 bp, Homo sapiens
ctctgaatcagtatc

SEQ ID NO: 508687 - DNA, 15 bp, Homo sapiens
tctgaatcagtatca

SEQ ID NO: 508688 - DNA, 15 bp, Homo sapiens
ctgaatcagtatcag

SEQ ID NO: 508689 - DNA, 15 bp, Homo sapiens
tgaatcagtatcagt

SEQ ID NO: 508690 - DNA, 15 bp, Homo sapiens
gaatcagtatcagtt

SEQ ID NO: 508691 - DNA, 15 bp, Homo sapiens
aatcagtatcagttt

SEQ ID NO: 508692 - DNA, 15 bp, Homo sapiens
atcagtatcagtttt

SEQ ID NO: 508693 - DNA, 15 bp, Homo sapiens
tcagtatcagtttta

SEQ ID NO: 508694 - DNA, 15 bp, Homo sapiens
cagtatcagttttac

SEQ ID NO: 508695 - DNA, 15 bp, Homo sapiens
agtatcagttttact

SEQ ID NO: 508696 - DNA, 15 bp, Homo sapiens
gtatcagttttactg

SEQ ID NO: 508697 - DNA, 15 bp, Homo sapiens
tatcagttttactgg

SEQ ID NO: 508698 - DNA, 15 bp, Homo sapiens
atcagttttactggc

SEQ ID NO: 508699 - DNA, 15 bp, Homo sapiens
tcagttttactggcc

SEQ ID NO: 508700 - DNA, 15 bp, Homo sapiens
cagttttactggcct

SEQ ID NO: 508701 - DNA, 15 bp, Homo sapiens
agttttactggcctt

SEQ ID NO: 508702 - DNA, 15 bp, Homo sapiens
gttttactggccttt

SEQ ID NO: 508703 - DNA, 15 bp, Homo sapiens
ttttactggcctttt

SEQ ID NO: 508704 - DNA, 15 bp, Homo sapiens
tttactggcctttta

SEQ ID NO: 508705 - DNA, 15 bp, Homo sapiens
ttactggccttttac

SEQ ID NO: 508706 - DNA, 15 bp, Homo sapiens
tactggccttttaca

SEQ ID NO: 508707 - DNA, 15 bp, Homo sapiens
actggccttttacaa

SEQ ID NO: 508708 - DNA, 15 bp, Homo sapiens
ctggccttttacaaa

SEQ ID NO: 508709 - DNA, 15 bp, Homo sapiens
tggccttttacaaaa

SEQ ID NO: 508710 - DNA, 15 bp, Homo sapiens
ggccttttacaaaaa

SEQ ID NO: 508711 - DNA, 15 bp, Homo sapiens
gccttttacaaaaat

SEQ ID NO: 508712 - DNA, 15 bp, Homo sapiens
ccttttacaaaaata

SEQ ID NO: 508713 - DNA, 15 bp, Homo sapiens
cttttacaaaaataa

SEQ ID NO: 508714 - DNA, 15 bp, Homo sapiens
ttttacaaaaataaa

SEQ ID NO: 508715 - DNA, 15 bp, Homo sapiens
tttacaaaaataaag

SEQ ID NO: 508716 - DNA, 15 bp, Homo sapiens
ttacaaaaataaaga

SEQ ID NO: 508717 - DNA, 15 bp, Homo sapiens
tacaaaaataaagac

SEQ ID NO: 508718 - DNA, 15 bp, Homo sapiens
acaaaaataaagaca

SEQ ID NO: 508719 - DNA, 15 bp, Homo sapiens
caaaaataaagacag

SEQ ID NO: 508720 - DNA, 15 bp, Homo sapiens
aaaaataaagacagg

SEQ ID NO: 508721 - DNA, 15 bp, Homo sapiens
aaaataaagacagga

SEQ ID NO: 508722 - DNA, 15 bp, Homo sapiens
aaataaagacaggaa

SEQ ID NO: 508723 - DNA, 15 bp, Homo sapiens
aataaagacaggaag

SEQ ID NO: 508724 - DNA, 15 bp, Homo sapiens
ataaagacaggaagt

SEQ ID NO: 508725 - DNA, 15 bp, Homo sapiens
taaagacaggaagtt

SEQ ID NO: 508726 - DNA, 15 bp, Homo sapiens
aaagacaggaagtta

SEQ ID NO: 508727 - DNA, 15 bp, Homo sapiens
aagacaggaagttat

SEQ ID NO: 508728 - DNA, 15 bp, Homo sapiens
agacaggaagttatg

SEQ ID NO: 508729 - DNA, 15 bp, Homo sapiens
gacaggaagttatgt

SEQ ID NO: 508730 - DNA, 15 bp, Homo sapiens
acaggaagttatgtt

SEQ ID NO: 508731 - DNA, 15 bp, Homo sapiens
caggaagttatgttc

SEQ ID NO: 508732 - DNA, 15 bp, Homo sapiens
aggaagttatgttcc

SEQ ID NO: 508733 - DNA, 15 bp, Homo sapiens
ggaagttatgttcct

SEQ ID NO: 508734 - DNA, 15 bp, Homo sapiens
gaagttatgttcctt

SEQ ID NO: 508735 - DNA, 15 bp, Homo sapiens
aagttatgttccttc

SEQ ID NO: 508736 - DNA, 15 bp, Homo sapiens
agttatgttccttcg

SEQ ID NO: 508737 - DNA, 15 bp, Homo sapiens
gttatgttccttcgt

SEQ ID NO: 508738 - DNA, 15 bp, Homo sapiens
ttatgttccttcgta

SEQ ID NO: 508739 - DNA, 15 bp, Homo sapiens
tatgttccttcgtat

SEQ ID NO: 508740 - DNA, 15 bp, Homo sapiens
atgttccttcgtatg

SEQ ID NO: 508741 - DNA, 15 bp, Homo sapiens
tgttccttcgtatgg

SEQ ID NO: 508742 - DNA, 15 bp, Homo sapiens
gttccttcgtatggc

SEQ ID NO: 508743 - DNA, 15 bp, Homo sapiens
ttccttcgtatggca

SEQ ID NO: 508744 - DNA, 15 bp, Homo sapiens
tccttcgtatggcaa

SEQ ID NO: 508745 - DNA, 15 bp, Homo sapiens
ccttcgtatggcaaa

SEQ ID NO: 508746 - DNA, 15 bp, Homo sapiens
cttcgtatggcaaaa

SEQ ID NO: 508747 - DNA, 15 bp, Homo sapiens
ttcgtatggcaaaat

SEQ ID NO: 508748 - DNA, 15 bp, Homo sapiens
tcgtatggcaaaatc

SEQ ID NO: 508749 - DNA, 15 bp, Homo sapiens
cgtatggcaaaatcc

SEQ ID NO: 508750 - DNA, 15 bp, Homo sapiens
gtatggcaaaatcct

SEQ ID NO: 508751 - DNA, 15 bp, Homo sapiens
tatggcaaaatccta

SEQ ID NO: 508752 - DNA, 15 bp, Homo sapiens
atggcaaaatcctat

SEQ ID NO: 508753 - DNA, 15 bp, Homo sapiens
tggcaaaatcctatt

SEQ ID NO: 508754 - DNA, 15 bp, Homo sapiens
ggcaaaatcctatta

SEQ ID NO: 508755 - DNA, 15 bp, Homo sapiens
gcaaaatcctattat

SEQ ID NO: 508756 - DNA, 15 bp, Homo sapiens
caaaatcctattatc

SEQ ID NO: 508757 - DNA, 15 bp, Homo sapiens
aaaatcctattatcg

SEQ ID NO: 508758 - DNA, 15 bp, Homo sapiens
aaatcctattatcgt

SEQ ID NO: 508759 - DNA, 15 bp, Homo sapiens
aatcctattatcgta

SEQ ID NO: 508760 - DNA, 15 bp, Homo sapiens
atcctattatcgtag

SEQ ID NO: 508761 - DNA, 15 bp, Homo sapiens
tcctattatcgtagg

SEQ ID NO: 508762 - DNA, 15 bp, Homo sapiens
cctattatcgtaggt

SEQ ID NO: 508763 - DNA, 15 bp, Homo sapiens
ctattatcgtaggtt

SEQ ID NO: 508764 - DNA, 15 bp, Homo sapiens
tattatcgtaggttt

SEQ ID NO: 508765 - DNA, 15 bp, Homo sapiens
attatcgtaggtttt

SEQ ID NO: 508766 - DNA, 15 bp, Homo sapiens
ttatcgtaggttttt

SEQ ID NO: 508767 - DNA, 15 bp, Homo sapiens
tatcgtaggttttta

SEQ ID NO: 508768 - DNA, 15 bp, Homo sapiens
atcgtaggtttttac

SEQ ID NO: 508769 - DNA, 15 bp, Homo sapiens
tcgtaggtttttacc

SEQ ID NO: 508770 - DNA, 15 bp, Homo sapiens
cgtaggtttttacct

SEQ ID NO: 508771 - DNA, 15 bp, Homo sapiens
gtaggtttttaccta

SEQ ID NO: 508772 - DNA, 15 bp, Homo sapiens
taggtttttacctat

SEQ ID NO: 508773 - DNA, 15 bp, Homo sapiens
aggtttttacctatt

SEQ ID NO: 508774 - DNA, 15 bp, Homo sapiens
ggtttttacctattt

SEQ ID NO: 508775 - DNA, 15 bp, Homo sapiens
gtttttacctatttt

SEQ ID NO: 508776 - DNA, 15 bp, Homo sapiens
tttttacctattttg

SEQ ID NO: 508777 - DNA, 15 bp, Homo sapiens
ttttacctattttgt

SEQ ID NO: 508778 - DNA, 15 bp, Homo sapiens
tttacctattttgtt

SEQ ID NO: 508779 - DNA, 15 bp, Homo sapiens
ttacctattttgttc

SEQ ID NO: 508780 - DNA, 15 bp, Homo sapiens
tacctattttgttct

SEQ ID NO: 508781 - DNA, 15 bp, Homo sapiens
acctattttgttctg

SEQ ID NO: 508782 - DNA, 15 bp, Homo sapiens
cctattttgttctgg

SEQ ID NO: 508783 - DNA, 15 bp, Homo sapiens
ctattttgttctggt

SEQ ID NO: 508784 - DNA, 15 bp, Homo sapiens
tattttgttctggtg

SEQ ID NO: 508785 - DNA, 15 bp, Homo sapiens
attttgttctggtga

SEQ ID NO: 508786 - DNA, 15 bp, Homo sapiens
ttttgttctggtgaa

SEQ ID NO: 508787 - DNA, 15 bp, Homo sapiens
tttgttctggtgaaa

SEQ ID NO: 508788 - DNA, 15 bp, Homo sapiens
ttgttctggtgaaaa

SEQ ID NO: 508789 - DNA, 15 bp, Homo sapiens
tgttctggtgaaaac

SEQ ID NO: 508790 - DNA, 15 bp, Homo sapiens
gttctggtgaaaacg

SEQ ID NO: 508791 - DNA, 15 bp, Homo sapiens
ttctggtgaaaacgt

SEQ ID NO: 508792 - DNA, 15 bp, Homo sapiens
tctggtgaaaacgta

SEQ ID NO: 508793 - DNA, 15 bp, Homo sapiens
ctggtgaaaacgtaa

SEQ ID NO: 508794 - DNA, 15 bp, Homo sapiens
tggtgaaaacgtaat

SEQ ID NO: 508795 - DNA, 15 bp, Homo sapiens
ggtgaaaacgtaata

SEQ ID NO: 508796 - DNA, 15 bp, Homo sapiens
gtgaaaacgtaatat

SEQ ID NO: 508797 - DNA, 15 bp, Homo sapiens
tgaaaacgtaatatg

SEQ ID NO: 508798 - DNA, 15 bp, Homo sapiens
gaaaacgtaatatgt

SEQ ID NO: 508799 - DNA, 15 bp, Homo sapiens
aaaacgtaatatgtg

SEQ ID NO: 508800 - DNA, 15 bp, Homo sapiens
aaacgtaatatgtgt

SEQ ID NO: 508801 - DNA, 15 bp, Homo sapiens
aacgtaatatgtgtg

SEQ ID NO: 508802 - DNA, 15 bp, Homo sapiens
acgtaatatgtgtgt

SEQ ID NO: 508803 - DNA, 15 bp, Homo sapiens
cgtaatatgtgtgtt

SEQ ID NO: 508804 - DNA, 15 bp, Homo sapiens
gtaatatgtgtgttt

SEQ ID NO: 508805 - DNA, 15 bp, Homo sapiens
taatatgtgtgttta

SEQ ID NO: 508806 - DNA, 15 bp, Homo sapiens
aatatgtgtgtttaa

SEQ ID NO: 508807 - DNA, 15 bp, Homo sapiens
atatgtgtgtttaat

SEQ ID NO: 508808 - DNA, 15 bp, Homo sapiens
tatgtgtgtttaatt

SEQ ID NO: 508809 - DNA, 15 bp, Homo sapiens
atgtgtgtttaattg

SEQ ID NO: 508810 - DNA, 15 bp, Homo sapiens
tgtgtgtttaattgt

SEQ ID NO: 508811 - DNA, 15 bp, Homo sapiens
gtgtgtttaattgtg

SEQ ID NO: 508812 - DNA, 15 bp, Homo sapiens
tgtgtttaattgtga

SEQ ID NO: 508813 - DNA, 15 bp, Homo sapiens
gtgtttaattgtgag

SEQ ID NO: 508814 - DNA, 15 bp, Homo sapiens
tgtttaattgtgagt

SEQ ID NO: 508815 - DNA, 15 bp, Homo sapiens
gtttaattgtgagta

SEQ ID NO: 508816 - DNA, 15 bp, Homo sapiens
tttaattgtgagtac

SEQ ID NO: 508817 - DNA, 15 bp, Homo sapiens
ttaattgtgagtacg

SEQ ID NO: 508818 - DNA, 15 bp, Homo sapiens
taattgtgagtacgg

SEQ ID NO: 508819 - DNA, 15 bp, Homo sapiens
aattgtgagtacggt

SEQ ID NO: 508820 - DNA, 15 bp, Homo sapiens
attgtgagtacggtg

SEQ ID NO: 508821 - DNA, 15 bp, Homo sapiens
ttgtgagtacggtgt

SEQ ID NO: 508822 - DNA, 15 bp, Homo sapiens
tgtgagtacggtgtg

SEQ ID NO: 508823 - DNA, 15 bp, Homo sapiens
gtgagtacggtgtgc

SEQ ID NO: 508824 - DNA, 15 bp, Homo sapiens
tgagtacggtgtgcc

SEQ ID NO: 508825 - DNA, 15 bp, Homo sapiens
gagtacggtgtgccc

SEQ ID NO: 508826 - DNA, 15 bp, Homo sapiens
agtacggtgtgccca

SEQ ID NO: 508827 - DNA, 15 bp, Homo sapiens
gtacggtgtgcccat

SEQ ID NO: 508828 - DNA, 15 bp, Homo sapiens
tacggtgtgcccatt

SEQ ID NO: 508829 - DNA, 15 bp, Homo sapiens
acggtgtgcccattt

SEQ ID NO: 508830 - DNA, 15 bp, Homo sapiens
cggtgtgcccatttt

SEQ ID NO: 508831 - DNA, 15 bp, Homo sapiens
ggtgtgcccattttt

SEQ ID NO: 508832 - DNA, 15 bp, Homo sapiens
gtgtgcccattttta

SEQ ID NO: 508833 - DNA, 15 bp, Homo sapiens
tgtgcccatttttac

SEQ ID NO: 508834 - DNA, 15 bp, Homo sapiens
gtgcccatttttaca

SEQ ID NO: 508835 - DNA, 15 bp, Homo sapiens
tgcccatttttacag

SEQ ID NO: 508836 - DNA, 15 bp, Homo sapiens
gcccatttttacagt

SEQ ID NO: 508837 - DNA, 15 bp, Homo sapiens
cccatttttacagta

SEQ ID NO: 508838 - DNA, 15 bp, Homo sapiens
ccatttttacagtaa

SEQ ID NO: 508839 - DNA, 15 bp, Homo sapiens
catttttacagtaag

SEQ ID NO: 508840 - DNA, 15 bp, Homo sapiens
atttttacagtaagt

SEQ ID NO: 508841 - DNA, 15 bp, Homo sapiens
tttttacagtaagtt

SEQ ID NO: 508842 - DNA, 15 bp, Homo sapiens
ttttacagtaagtta

SEQ ID NO: 508843 - DNA, 15 bp, Homo sapiens
tttacagtaagttaa

SEQ ID NO: 508844 - DNA, 15 bp, Homo sapiens
ttacagtaagttaac

SEQ ID NO: 508845 - DNA, 15 bp, Homo sapiens
tacagtaagttaacg

SEQ ID NO: 508846 - DNA, 15 bp, Homo sapiens
acagtaagttaacgt

SEQ ID NO: 508847 - DNA, 15 bp, Homo sapiens
cagtaagttaacgta

SEQ ID NO: 508848 - DNA, 15 bp, Homo sapiens
agtaagttaacgtaa

SEQ ID NO: 508849 - DNA, 15 bp, Homo sapiens
gtaagttaacgtaag

SEQ ID NO: 508850 - DNA, 15 bp, Homo sapiens
taagttaacgtaagt

SEQ ID NO: 508851 - DNA, 15 bp, Homo sapiens
aagttaacgtaagtc

SEQ ID NO: 508852 - DNA, 15 bp, Homo sapiens
agttaacgtaagtca

SEQ ID NO: 508853 - DNA, 15 bp, Homo sapiens
gttaacgtaagtcac

SEQ ID NO: 508854 - DNA, 15 bp, Homo sapiens
ttaacgtaagtcaca

SEQ ID NO: 508855 - DNA, 15 bp, Homo sapiens
taacgtaagtcacac

SEQ ID NO: 508856 - DNA, 15 bp, Homo sapiens
aacgtaagtcacacg

SEQ ID NO: 508857 - DNA, 15 bp, Homo sapiens
acgtaagtcacacgt

SEQ ID NO: 508858 - DNA, 15 bp, Homo sapiens
cgtaagtcacacgtg

SEQ ID NO: 508859 - DNA, 15 bp, Homo sapiens
gtaagtcacacgtga

SEQ ID NO: 508860 - DNA, 15 bp, Homo sapiens
taagtcacacgtgaa

SEQ ID NO: 508861 - DNA, 15 bp, Homo sapiens
aagtcacacgtgaat

SEQ ID NO: 508862 - DNA, 15 bp, Homo sapiens
agtcacacgtgaata

SEQ ID NO: 508863 - DNA, 15 bp, Homo sapiens
gtcacacgtgaatag

SEQ ID NO: 508864 - DNA, 15 bp, Homo sapiens
tcacacgtgaatagc

SEQ ID NO: 508865 - DNA, 15 bp, Homo sapiens
cacacgtgaatagcg

SEQ ID NO: 508866 - DNA, 15 bp, Homo sapiens
acacgtgaatagcgg

SEQ ID NO: 508867 - DNA, 15 bp, Homo sapiens
cacgtgaatagcggt

SEQ ID NO: 508868 - DNA, 15 bp, Homo sapiens
acgtgaatagcggtg

SEQ ID NO: 508869 - DNA, 15 bp, Homo sapiens
cgtgaatagcggtgg

SEQ ID NO: 508870 - DNA, 15 bp, Homo sapiens
gtgaatagcggtgga

SEQ ID NO: 508871 - DNA, 15 bp, Homo sapiens
tgaatagcggtggaa

SEQ ID NO: 508872 - DNA, 15 bp, Homo sapiens
gaatagcggtggaaa

SEQ ID NO: 508873 - DNA, 15 bp, Homo sapiens
aatagcggtggaaat

SEQ ID NO: 508874 - DNA, 15 bp, Homo sapiens
atagcggtggaaatc

SEQ ID NO: 508875 - DNA, 15 bp, Homo sapiens
tagcggtggaaatcc

SEQ ID NO: 508876 - DNA, 15 bp, Homo sapiens
agcggtggaaatcca

SEQ ID NO: 508877 - DNA, 15 bp, Homo sapiens
gcggtggaaatccaa

SEQ ID NO: 508878 - DNA, 15 bp, Homo sapiens
cggtggaaatccaag

SEQ ID NO: 508879 - DNA, 15 bp, Homo sapiens
ggtggaaatccaaga

SEQ ID NO: 508880 - DNA, 15 bp, Homo sapiens
gtggaaatccaagaa

SEQ ID NO: 508881 - DNA, 15 bp, Homo sapiens
tggaaatccaagaat

SEQ ID NO: 508882 - DNA, 15 bp, Homo sapiens
ggaaatccaagaatt

SEQ ID NO: 508883 - DNA, 15 bp, Homo sapiens
gaaatccaagaattt

SEQ ID NO: 508884 - DNA, 15 bp, Homo sapiens
aaatccaagaatttt

SEQ ID NO: 508885 - DNA, 15 bp, Homo sapiens
aatccaagaatttta

SEQ ID NO: 508886 - DNA, 15 bp, Homo sapiens
atccaagaattttat

SEQ ID NO: 508887 - DNA, 15 bp, Homo sapiens
tccaagaattttatc

SEQ ID NO: 508888 - DNA, 15 bp, Homo sapiens
ccaagaattttatct

SEQ ID NO: 508889 - DNA, 15 bp, Homo sapiens
caagaattttatctc

SEQ ID NO: 508890 - DNA, 15 bp, Homo sapiens
aagaattttatctca

SEQ ID NO: 508891 - DNA, 15 bp, Homo sapiens
agaattttatctcat

SEQ ID NO: 508892 - DNA, 15 bp, Homo sapiens
gaattttatctcatt

SEQ ID NO: 508893 - DNA, 15 bp, Homo sapiens
aattttatctcattt

SEQ ID NO: 508894 - DNA, 15 bp, Homo sapiens
attttatctcatttc

SEQ ID NO: 508895 - DNA, 15 bp, Homo sapiens
ttttatctcatttcc

SEQ ID NO: 508896 - DNA, 15 bp, Homo sapiens
tttatctcatttcct

SEQ ID NO: 508897 - DNA, 15 bp, Homo sapiens
ttatctcatttcctg

SEQ ID NO: 508898 - DNA, 15 bp, Homo sapiens
tatctcatttcctgt

SEQ ID NO: 508899 - DNA, 15 bp, Homo sapiens
atctcatttcctgta

SEQ ID NO: 508900 - DNA, 15 bp, Homo sapiens
tctcatttcctgtac

SEQ ID NO: 508901 - DNA, 15 bp, Homo sapiens
ctcatttcctgtaca

SEQ ID NO: 508902 - DNA, 15 bp, Homo sapiens
tcatttcctgtacac

SEQ ID NO: 508903 - DNA, 15 bp, Homo sapiens
catttcctgtacacg

SEQ ID NO: 508904 - DNA, 15 bp, Homo sapiens
atttcctgtacacgt

SEQ ID NO: 508905 - DNA, 15 bp, Homo sapiens
tttcctgtacacgtt

SEQ ID NO: 508906 - DNA, 15 bp, Homo sapiens
ttcctgtacacgtta

SEQ ID NO: 508907 - DNA, 15 bp, Homo sapiens
tcctgtacacgttac

SEQ ID NO: 508908 - DNA, 15 bp, Homo sapiens
cctgtacacgttact

SEQ ID NO: 508909 - DNA, 15 bp, Homo sapiens
ctgtacacgttactg

SEQ ID NO: 508910 - DNA, 15 bp, Homo sapiens
tgtacacgttactga

SEQ ID NO: 508911 - DNA, 15 bp, Homo sapiens
gtacacgttactgaa

SEQ ID NO: 508912 - DNA, 15 bp, Homo sapiens
tacacgttactgaac

SEQ ID NO: 508913 - DNA, 15 bp, Homo sapiens
acacgttactgaact

SEQ ID NO: 508914 - DNA, 15 bp, Homo sapiens
cacgttactgaactg

SEQ ID NO: 508915 - DNA, 15 bp, Homo sapiens
acgttactgaactgt

SEQ ID NO: 508916 - DNA, 15 bp, Homo sapiens
cgttactgaactgtt

SEQ ID NO: 508917 - DNA, 15 bp, Homo sapiens
gttactgaactgttc

SEQ ID NO: 508918 - DNA, 15 bp, Homo sapiens
ttactgaactgttca

SEQ ID NO: 508919 - DNA, 15 bp, Homo sapiens
tactgaactgttcac

SEQ ID NO: 508920 - DNA, 15 bp, Homo sapiens
actgaactgttcacc

SEQ ID NO: 508921 - DNA, 15 bp, Homo sapiens
ctgaactgttcacct

SEQ ID NO: 508922 - DNA, 15 bp, Homo sapiens
tgaactgttcacctc

SEQ ID NO: 508923 - DNA, 15 bp, Homo sapiens
gaactgttcacctct

SEQ ID NO: 508924 - DNA, 15 bp, Homo sapiens
aactgttcacctctg

SEQ ID NO: 508925 - DNA, 15 bp, Homo sapiens
actgttcacctctga

SEQ ID NO: 508926 - DNA, 15 bp, Homo sapiens
ctgttcacctctgag

SEQ ID NO: 508927 - DNA, 15 bp, Homo sapiens
tgttcacctctgagt

SEQ ID NO: 508928 - DNA, 15 bp, Homo sapiens
gttcacctctgagtg

SEQ ID NO: 508929 - DNA, 15 bp, Homo sapiens
ttcacctctgagtgt

SEQ ID NO: 508930 - DNA, 15 bp, Homo sapiens
tcacctctgagtgta

SEQ ID NO: 508931 - DNA, 15 bp, Homo sapiens
cacctctgagtgtaa

SEQ ID NO: 508932 - DNA, 15 bp, Homo sapiens
acctctgagtgtaat

SEQ ID NO: 508933 - DNA, 15 bp, Homo sapiens
cctctgagtgtaatg

SEQ ID NO: 508934 - DNA, 15 bp, Homo sapiens
ctctgagtgtaatgc

SEQ ID NO: 508935 - DNA, 15 bp, Homo sapiens
tctgagtgtaatgct

SEQ ID NO: 508936 - DNA, 15 bp, Homo sapiens
ctgagtgtaatgctt

SEQ ID NO: 508937 - DNA, 15 bp, Homo sapiens
tgagtgtaatgcttt

SEQ ID NO: 508938 - DNA, 15 bp, Homo sapiens
gagtgtaatgctttc

SEQ ID NO: 508939 - DNA, 15 bp, Homo sapiens
agtgtaatgctttcc

SEQ ID NO: 508940 - DNA, 15 bp, Homo sapiens
gtgtaatgctttcct

SEQ ID NO: 508941 - DNA, 15 bp, Homo sapiens
tgtaatgctttcctg

SEQ ID NO: 508942 - DNA, 15 bp, Homo sapiens
gtaatgctttcctgg

SEQ ID NO: 508943 - DNA, 15 bp, Homo sapiens
taatgctttcctggt

SEQ ID NO: 508944 - DNA, 15 bp, Homo sapiens
aatgctttcctggtg

SEQ ID NO: 508945 - DNA, 15 bp, Homo sapiens
atgctttcctggtgg

SEQ ID NO: 508946 - DNA, 15 bp, Homo sapiens
tgctttcctggtggc

SEQ ID NO: 508947 - DNA, 15 bp, Homo sapiens
gctttcctggtggca

SEQ ID NO: 508948 - DNA, 15 bp, Homo sapiens
ctttcctggtggcac

SEQ ID NO: 508949 - DNA, 15 bp, Homo sapiens
tttcctggtggcaca

SEQ ID NO: 508950 - DNA, 15 bp, Homo sapiens
ttcctggtggcacat

SEQ ID NO: 508951 - DNA, 15 bp, Homo sapiens
tcctggtggcacatg

SEQ ID NO: 508952 - DNA, 15 bp, Homo sapiens
cctggtggcacatgg

SEQ ID NO: 508953 - DNA, 15 bp, Homo sapiens
ctggtggcacatgga

SEQ ID NO: 508954 - DNA, 15 bp, Homo sapiens
tggtggcacatggag

SEQ ID NO: 508955 - DNA, 15 bp, Homo sapiens
ggtggcacatggaga

SEQ ID NO: 508956 - DNA, 15 bp, Homo sapiens
gtggcacatggagaa

SEQ ID NO: 508957 - DNA, 15 bp, Homo sapiens
tggcacatggagaat

SEQ ID NO: 508958 - DNA, 15 bp, Homo sapiens
ggcacatggagaata

SEQ ID NO: 508959 - DNA, 15 bp, Homo sapiens
gcacatggagaatat

SEQ ID NO: 508960 - DNA, 15 bp, Homo sapiens
cacatggagaatata

SEQ ID NO: 508961 - DNA, 15 bp, Homo sapiens
acatggagaatataa

SEQ ID NO: 508962 - DNA, 15 bp, Homo sapiens
catggagaatataat

SEQ ID NO: 508963 - DNA, 15 bp, Homo sapiens
atggagaatataatc

SEQ ID NO: 508964 - DNA, 15 bp, Homo sapiens
tggagaatataatct

SEQ ID NO: 508965 - DNA, 15 bp, Homo sapiens
ggagaatataatctt

SEQ ID NO: 508966 - DNA, 15 bp, Homo sapiens
gagaatataatcttc

SEQ ID NO: 508967 - DNA, 15 bp, Homo sapiens
agaatataatcttcc

SEQ ID NO: 508968 - DNA, 15 bp, Homo sapiens
gaatataatcttcct

SEQ ID NO: 508969 - DNA, 15 bp, Homo sapiens
aatataatcttccta

SEQ ID NO: 508970 - DNA, 15 bp, Homo sapiens
atataatcttcctaa

SEQ ID NO: 508971 - DNA, 15 bp, Homo sapiens
tataatcttcctaat

SEQ ID NO: 508972 - DNA, 15 bp, Homo sapiens
ataatcttcctaatg

SEQ ID NO: 508973 - DNA, 15 bp, Homo sapiens
taatcttcctaatgc

SEQ ID NO: 508974 - DNA, 15 bp, Homo sapiens
aatcttcctaatgca

SEQ ID NO: 508975 - DNA, 15 bp, Homo sapiens
atcttcctaatgcat

SEQ ID NO: 508976 - DNA, 15 bp, Homo sapiens
tcttcctaatgcata

SEQ ID NO: 508977 - DNA, 15 bp, Homo sapiens
cttcctaatgcataa

SEQ ID NO: 508978 - DNA, 15 bp, Homo sapiens
ttcctaatgcataat

SEQ ID NO: 508979 - DNA, 15 bp, Homo sapiens
tcctaatgcataatg

SEQ ID NO: 508980 - DNA, 15 bp, Homo sapiens
cctaatgcataatgg

SEQ ID NO: 508981 - DNA, 15 bp, Homo sapiens
ctaatgcataatggg

SEQ ID NO: 508982 - DNA, 15 bp, Homo sapiens
taatgcataatggga

SEQ ID NO: 508983 - DNA, 15 bp, Homo sapiens
aatgcataatgggat

SEQ ID NO: 508984 - DNA, 15 bp, Homo sapiens
atgcataatgggatc

SEQ ID NO: 508985 - DNA, 15 bp, Homo sapiens
tgcataatgggatct

SEQ ID NO: 508986 - DNA, 15 bp, Homo sapiens
gcataatgggatctt

SEQ ID NO: 508987 - DNA, 15 bp, Homo sapiens
cataatgggatcttt

SEQ ID NO: 508988 - DNA, 15 bp, Homo sapiens
ataatgggatctttt

SEQ ID NO: 508989 - DNA, 15 bp, Homo sapiens
taatgggatcttttg

SEQ ID NO: 508990 - DNA, 15 bp, Homo sapiens
aatgggatcttttga

SEQ ID NO: 508991 - DNA, 15 bp, Homo sapiens
atgggatcttttgac

SEQ ID NO: 508992 - DNA, 15 bp, Homo sapiens
tgggatcttttgaca

SEQ ID NO: 508993 - DNA, 15 bp, Homo sapiens
gggatcttttgacaa

SEQ ID NO: 508994 - DNA, 15 bp, Homo sapiens
ggatcttttgacaac

SEQ ID NO: 508995 - DNA, 15 bp, Homo sapiens
gatcttttgacaact

SEQ ID NO: 508996 - DNA, 15 bp, Homo sapiens
atcttttgacaactc

SEQ ID NO: 508997 - DNA, 15 bp, Homo sapiens
tcttttgacaactca

SEQ ID NO: 508998 - DNA, 15 bp, Homo sapiens
cttttgacaactcac

SEQ ID NO: 508999 - DNA, 15 bp, Homo sapiens
ttttgacaactcaca

SEQ ID NO: 509000 - DNA, 15 bp, Homo sapiens
tttgacaactcacat

SEQ ID NO: 509001 - DNA, 15 bp, Homo sapiens
ttgacaactcacatt

SEQ ID NO: 509002 - DNA, 15 bp, Homo sapiens
tgacaactcacattt

SEQ ID NO: 509003 - DNA, 15 bp, Homo sapiens
gacaactcacatttt

SEQ ID NO: 509004 - DNA, 15 bp, Homo sapiens
acaactcacattttt

SEQ ID NO: 509005 - DNA, 15 bp, Homo sapiens
caactcacatttttg

SEQ ID NO: 509006 - DNA, 15 bp, Homo sapiens
aactcacatttttgt

SEQ ID NO: 509007 - DNA, 15 bp, Homo sapiens
actcacatttttgtt

SEQ ID NO: 509008 - DNA, 15 bp, Homo sapiens
ctcacatttttgttc

SEQ ID NO: 509009 - DNA, 15 bp, Homo sapiens
tcacatttttgttct

SEQ ID NO: 509010 - DNA, 15 bp, Homo sapiens
cacatttttgttctc

SEQ ID NO: 509011 - DNA, 15 bp, Homo sapiens
acatttttgttctcc

SEQ ID NO: 509012 - DNA, 15 bp, Homo sapiens
catttttgttctcct

SEQ ID NO: 509013 - DNA, 15 bp, Homo sapiens
atttttgttctcctt

SEQ ID NO: 509014 - DNA, 15 bp, Homo sapiens
tttttgttctccttc

SEQ ID NO: 509015 - DNA, 15 bp, Homo sapiens
ttttgttctccttca

SEQ ID NO: 509016 - DNA, 15 bp, Homo sapiens
tttgttctccttcat

SEQ ID NO: 509017 - DNA, 15 bp, Homo sapiens
ttgttctccttcatt

SEQ ID NO: 509018 - DNA, 15 bp, Homo sapiens
tgttctccttcattt

SEQ ID NO: 509019 - DNA, 15 bp, Homo sapiens
gttctccttcatttt

SEQ ID NO: 509020 - DNA, 15 bp, Homo sapiens
ttctccttcattttt

SEQ ID NO: 509021 - DNA, 15 bp, Homo sapiens
tctccttcatttttg

SEQ ID NO: 509022 - DNA, 15 bp, Homo sapiens
ctccttcatttttgg

SEQ ID NO: 509023 - DNA, 15 bp, Homo sapiens
tccttcatttttggc

SEQ ID NO: 509024 - DNA, 15 bp, Homo sapiens
ccttcatttttggct

SEQ ID NO: 509025 - DNA, 15 bp, Homo sapiens
cttcatttttggctg

SEQ ID NO: 509026 - DNA, 15 bp, Homo sapiens
ttcatttttggctgt

SEQ ID NO: 509027 - DNA, 15 bp, Homo sapiens
tcatttttggctgtc

SEQ ID NO: 509028 - DNA, 15 bp, Homo sapiens
catttttggctgtca

SEQ ID NO: 509029 - DNA, 15 bp, Homo sapiens
atttttggctgtcac

SEQ ID NO: 509030 - DNA, 15 bp, Homo sapiens
tttttggctgtcaca

SEQ ID NO: 509031 - DNA, 15 bp, Homo sapiens
ttttggctgtcacat

SEQ ID NO: 509032 - DNA, 15 bp, Homo sapiens
tttggctgtcacatg

SEQ ID NO: 509033 - DNA, 15 bp, Homo sapiens
ttggctgtcacatgg

SEQ ID NO: 509034 - DNA, 15 bp, Homo sapiens
tggctgtcacatggc

SEQ ID NO: 509035 - DNA, 15 bp, Homo sapiens
ggctgtcacatggct

SEQ ID NO: 509036 - DNA, 15 bp, Homo sapiens
gctgtcacatggctt

SEQ ID NO: 509037 - DNA, 15 bp, Homo sapiens
ctgtcacatggcttt

SEQ ID NO: 509038 - DNA, 15 bp, Homo sapiens
tgtcacatggctttt

SEQ ID NO: 509039 - DNA, 15 bp, Homo sapiens
gtcacatggctttta

SEQ ID NO: 509040 - DNA, 15 bp, Homo sapiens
tcacatggcttttaa

SEQ ID NO: 509041 - DNA, 15 bp, Homo sapiens
cacatggcttttaat

SEQ ID NO: 509042 - DNA, 15 bp, Homo sapiens
acatggcttttaatg

SEQ ID NO: 509043 - DNA, 15 bp, Homo sapiens
catggcttttaatgg

SEQ ID NO: 509044 - DNA, 15 bp, Homo sapiens
atggcttttaatggt

SEQ ID NO: 509045 - DNA, 15 bp, Homo sapiens
tggcttttaatggtt

SEQ ID NO: 509046 - DNA, 15 bp, Homo sapiens
ggcttttaatggttt

SEQ ID NO: 509047 - DNA, 15 bp, Homo sapiens
gcttttaatggtttc

SEQ ID NO: 509048 - DNA, 15 bp, Homo sapiens
cttttaatggtttca

SEQ ID NO: 509049 - DNA, 15 bp, Homo sapiens
ttttaatggtttcat

SEQ ID NO: 509050 - DNA, 15 bp, Homo sapiens
tttaatggtttcatt

SEQ ID NO: 509051 - DNA, 15 bp, Homo sapiens
ttaatggtttcatta

SEQ ID NO: 509052 - DNA, 15 bp, Homo sapiens
taatggtttcattag

SEQ ID NO: 509053 - DNA, 15 bp, Homo sapiens
aatggtttcattagt

SEQ ID NO: 509054 - DNA, 15 bp, Homo sapiens
atggtttcattagta

SEQ ID NO: 509055 - DNA, 15 bp, Homo sapiens
tggtttcattagtaa

SEQ ID NO: 509056 - DNA, 15 bp, Homo sapiens
ggtttcattagtaaa

SEQ ID NO: 509057 - DNA, 15 bp, Homo sapiens
gtttcattagtaaac

SEQ ID NO: 509058 - DNA, 15 bp, Homo sapiens
tttcattagtaaaca

SEQ ID NO: 509059 - DNA, 15 bp, Homo sapiens
ttcattagtaaacag

SEQ ID NO: 509060 - DNA, 15 bp, Homo sapiens
tcattagtaaacaga

SEQ ID NO: 509061 - DNA, 15 bp, Homo sapiens
cattagtaaacagat

SEQ ID NO: 509062 - DNA, 15 bp, Homo sapiens
attagtaaacagatg

SEQ ID NO: 509063 - DNA, 15 bp, Homo sapiens
ttagtaaacagatga

SEQ ID NO: 509064 - DNA, 15 bp, Homo sapiens
tagtaaacagatgaa

SEQ ID NO: 509065 - DNA, 15 bp, Homo sapiens
agtaaacagatgaat

SEQ ID NO: 509066 - DNA, 15 bp, Homo sapiens
gtaaacagatgaatg

SEQ ID NO: 509067 - DNA, 15 bp, Homo sapiens
taaacagatgaatgt

SEQ ID NO: 509068 - DNA, 15 bp, Homo sapiens
aaacagatgaatgta

SEQ ID NO: 509069 - DNA, 15 bp, Homo sapiens
aacagatgaatgtac

SEQ ID NO: 509070 - DNA, 15 bp, Homo sapiens
acagatgaatgtact

SEQ ID NO: 509071 - DNA, 15 bp, Homo sapiens
cagatgaatgtactg

SEQ ID NO: 509072 - DNA, 15 bp, Homo sapiens
agatgaatgtactgg

SEQ ID NO: 509073 - DNA, 15 bp, Homo sapiens
gatgaatgtactggg

SEQ ID NO: 509074 - DNA, 15 bp, Homo sapiens
atgaatgtactgggt

SEQ ID NO: 509075 - DNA, 15 bp, Homo sapiens
tgaatgtactgggtg

SEQ ID NO: 509076 - DNA, 15 bp, Homo sapiens
gaatgtactgggtgt

SEQ ID NO: 509077 - DNA, 15 bp, Homo sapiens
aatgtactgggtgtg

SEQ ID NO: 509078 - DNA, 15 bp, Homo sapiens
atgtactgggtgtga

SEQ ID NO: 509079 - DNA, 15 bp, Homo sapiens
tgtactgggtgtgaa

SEQ ID NO: 509080 - DNA, 15 bp, Homo sapiens
gtactgggtgtgaat

SEQ ID NO: 509081 - DNA, 15 bp, Homo sapiens
tactgggtgtgaatg

SEQ ID NO: 509082 - DNA, 15 bp, Homo sapiens
actgggtgtgaatgt

SEQ ID NO: 509083 - DNA, 15 bp, Homo sapiens
ctgggtgtgaatgtt

SEQ ID NO: 509084 - DNA, 15 bp, Homo sapiens
tgggtgtgaatgtta

SEQ ID NO: 509085 - DNA, 15 bp, Homo sapiens
gggtgtgaatgttag

SEQ ID NO: 509086 - DNA, 15 bp, Homo sapiens
ggtgtgaatgttagt

SEQ ID NO: 509087 - DNA, 15 bp, Homo sapiens
gtgtgaatgttagtg

SEQ ID NO: 509088 - DNA, 15 bp, Homo sapiens
tgtgaatgttagtga

SEQ ID NO: 509089 - DNA, 15 bp, Homo sapiens
gtgaatgttagtgac

SEQ ID NO: 509090 - DNA, 15 bp, Homo sapiens
tgaatgttagtgaca

SEQ ID NO: 509091 - DNA, 15 bp, Homo sapiens
gaatgttagtgacag

SEQ ID NO: 509092 - DNA, 15 bp, Homo sapiens
aatgttagtgacagc

SEQ ID NO: 509093 - DNA, 15 bp, Homo sapiens
atgttagtgacagct

SEQ ID NO: 509094 - DNA, 15 bp, Homo sapiens
tgttagtgacagctt

SEQ ID NO: 509095 - DNA, 15 bp, Homo sapiens
gttagtgacagctta

SEQ ID NO: 509096 - DNA, 15 bp, Homo sapiens
ttagtgacagcttaa

SEQ ID NO: 509097 - DNA, 15 bp, Homo sapiens
tagtgacagcttaat

SEQ ID NO: 509098 - DNA, 15 bp, Homo sapiens
agtgacagcttaatg

SEQ ID NO: 509099 - DNA, 15 bp, Homo sapiens
gtgacagcttaatga

SEQ ID NO: 509100 - DNA, 15 bp, Homo sapiens
tgacagcttaatgaa

SEQ ID NO: 509101 - DNA, 15 bp, Homo sapiens
gacagcttaatgaaa

SEQ ID NO: 509102 - DNA, 15 bp, Homo sapiens
acagcttaatgaaag

SEQ ID NO: 509103 - DNA, 15 bp, Homo sapiens
cagcttaatgaaagg

SEQ ID NO: 509104 - DNA, 15 bp, Homo sapiens
agcttaatgaaaggg

SEQ ID NO: 509105 - DNA, 15 bp, Homo sapiens
gcttaatgaaagggc

SEQ ID NO: 509106 - DNA, 15 bp, Homo sapiens
cttaatgaaagggca

SEQ ID NO: 509107 - DNA, 15 bp, Homo sapiens
ttaatgaaagggcag

SEQ ID NO: 509108 - DNA, 15 bp, Homo sapiens
taatgaaagggcagt

SEQ ID NO: 509109 - DNA, 15 bp, Homo sapiens
aatgaaagggcagtc

SEQ ID NO: 509110 - DNA, 15 bp, Homo sapiens
atgaaagggcagtcc

SEQ ID NO: 509111 - DNA, 15 bp, Homo sapiens
tgaaagggcagtcct

SEQ ID NO: 509112 - DNA, 15 bp, Homo sapiens
gaaagggcagtcctc

SEQ ID NO: 509113 - DNA, 15 bp, Homo sapiens
aaagggcagtcctcc

SEQ ID NO: 509114 - DNA, 15 bp, Homo sapiens
aagggcagtcctccc

SEQ ID NO: 509115 - DNA, 15 bp, Homo sapiens
agggcagtcctccct

SEQ ID NO: 509116 - DNA, 15 bp, Homo sapiens
gggcagtcctccctc

SEQ ID NO: 509117 - DNA, 15 bp, Homo sapiens
ggcagtcctccctct

SEQ ID NO: 509118 - DNA, 15 bp, Homo sapiens
gcagtcctccctctt

SEQ ID NO: 509119 - DNA, 15 bp, Homo sapiens
cagtcctccctcttt

SEQ ID NO: 509120 - DNA, 15 bp, Homo sapiens
agtcctccctctttc

SEQ ID NO: 509121 - DNA, 15 bp, Homo sapiens
gtcctccctctttct

SEQ ID NO: 509122 - DNA, 15 bp, Homo sapiens
tcctccctctttctt

SEQ ID NO: 509123 - DNA, 15 bp, Homo sapiens
cctccctctttcttc

SEQ ID NO: 509124 - DNA, 15 bp, Homo sapiens
ctccctctttcttct

SEQ ID NO: 509125 - DNA, 15 bp, Homo sapiens
tccctctttcttctc

SEQ ID NO: 509126 - DNA, 15 bp, Homo sapiens
ccctctttcttctcc

SEQ ID NO: 509127 - DNA, 15 bp, Homo sapiens
cctctttcttctcct

SEQ ID NO: 509128 - DNA, 15 bp, Homo sapiens
ctctttcttctcctt

SEQ ID NO: 509129 - DNA, 15 bp, Homo sapiens
tctttcttctccttt

SEQ ID NO: 509130 - DNA, 15 bp, Homo sapiens
ctttcttctcctttc

SEQ ID NO: 509131 - DNA, 15 bp, Homo sapiens
tttcttctcctttca

SEQ ID NO: 509132 - DNA, 15 bp, Homo sapiens
ttcttctcctttcaa

SEQ ID NO: 509133 - DNA, 15 bp, Homo sapiens
tcttctcctttcaaa

SEQ ID NO: 509134 - DNA, 15 bp, Homo sapiens
cttctcctttcaaaa

SEQ ID NO: 509135 - DNA, 15 bp, Homo sapiens
ttctcctttcaaaaa

SEQ ID NO: 509136 - DNA, 15 bp, Homo sapiens
tctcctttcaaaaat

SEQ ID NO: 509137 - DNA, 15 bp, Homo sapiens
ctcctttcaaaaatg

SEQ ID NO: 509138 - DNA, 15 bp, Homo sapiens
tcctttcaaaaatgc

SEQ ID NO: 509139 - DNA, 15 bp, Homo sapiens
cctttcaaaaatgcc

SEQ ID NO: 509140 - DNA, 15 bp, Homo sapiens
ctttcaaaaatgcct

SEQ ID NO: 509141 - DNA, 15 bp, Homo sapiens
tttcaaaaatgcctt

SEQ ID NO: 509142 - DNA, 15 bp, Homo sapiens
ttcaaaaatgccttt

SEQ ID NO: 509143 - DNA, 15 bp, Homo sapiens
tcaaaaatgcctttg

SEQ ID NO: 509144 - DNA, 15 bp, Homo sapiens
caaaaatgcctttgc

SEQ ID NO: 509145 - DNA, 15 bp, Homo sapiens
aaaaatgcctttgct

SEQ ID NO: 509146 - DNA, 15 bp, Homo sapiens
aaaatgcctttgctc

SEQ ID NO: 509147 - DNA, 15 bp, Homo sapiens
aaatgcctttgctct

SEQ ID NO: 509148 - DNA, 15 bp, Homo sapiens
aatgcctttgctctt

SEQ ID NO: 509149 - DNA, 15 bp, Homo sapiens
atgcctttgctctta

SEQ ID NO: 509150 - DNA, 15 bp, Homo sapiens
tgcctttgctcttag

SEQ ID NO: 509151 - DNA, 15 bp, Homo sapiens
gcctttgctcttaga

SEQ ID NO: 509152 - DNA, 15 bp, Homo sapiens
cctttgctcttagac

SEQ ID NO: 509153 - DNA, 15 bp, Homo sapiens
ctttgctcttagacc

SEQ ID NO: 509154 - DNA, 15 bp, Homo sapiens
tttgctcttagaccc

SEQ ID NO: 509155 - DNA, 15 bp, Homo sapiens
ttgctcttagaccca

SEQ ID NO: 509156 - DNA, 15 bp, Homo sapiens
tgctcttagacccaa

SEQ ID NO: 509157 - DNA, 15 bp, Homo sapiens
gctcttagacccaaa

SEQ ID NO: 509158 - DNA, 15 bp, Homo sapiens
ctcttagacccaaaa

SEQ ID NO: 509159 - DNA, 15 bp, Homo sapiens
tcttagacccaaaaa

SEQ ID NO: 509160 - DNA, 15 bp, Homo sapiens
cttagacccaaaaac

SEQ ID NO: 509161 - DNA, 15 bp, Homo sapiens
ttagacccaaaaaca

SEQ ID NO: 509162 - DNA, 15 bp, Homo sapiens
tagacccaaaaacat

SEQ ID NO: 509163 - DNA, 15 bp, Homo sapiens
agacccaaaaacatg

SEQ ID NO: 509164 - DNA, 15 bp, Homo sapiens
gacccaaaaacatgt

SEQ ID NO: 509165 - DNA, 15 bp, Homo sapiens
acccaaaaacatgtt

SEQ ID NO: 509166 - DNA, 15 bp, Homo sapiens
cccaaaaacatgttt

SEQ ID NO: 509167 - DNA, 15 bp, Homo sapiens
ccaaaaacatgtttt

SEQ ID NO: 509168 - DNA, 15 bp, Homo sapiens
caaaaacatgttttc

SEQ ID NO: 509169 - DNA, 15 bp, Homo sapiens
aaaaacatgttttct

SEQ ID NO: 509170 - DNA, 15 bp, Homo sapiens
aaaacatgttttctc

SEQ ID NO: 509171 - DNA, 15 bp, Homo sapiens
aaacatgttttctct

SEQ ID NO: 509172 - DNA, 15 bp, Homo sapiens
aacatgttttctctc

SEQ ID NO: 509173 - DNA, 15 bp, Homo sapiens
acatgttttctctcc

SEQ ID NO: 509174 - DNA, 15 bp, Homo sapiens
catgttttctctcca

SEQ ID NO: 509175 - DNA, 15 bp, Homo sapiens
atgttttctctccat

SEQ ID NO: 509176 - DNA, 15 bp, Homo sapiens
tgttttctctccatg

SEQ ID NO: 509177 - DNA, 15 bp, Homo sapiens
gttttctctccatgt

SEQ ID NO: 509178 - DNA, 15 bp, Homo sapiens
ttttctctccatgtg

SEQ ID NO: 509179 - DNA, 15 bp, Homo sapiens
tttctctccatgtgg

SEQ ID NO: 509180 - DNA, 15 bp, Homo sapiens
ttctctccatgtggt

SEQ ID NO: 509181 - DNA, 15 bp, Homo sapiens
tctctccatgtggtg

SEQ ID NO: 509182 - DNA, 15 bp, Homo sapiens
ctctccatgtggtgt

SEQ ID NO: 509183 - DNA, 15 bp, Homo sapiens
tctccatgtggtgtt

SEQ ID NO: 509184 - DNA, 15 bp, Homo sapiens
ctccatgtggtgttt

SEQ ID NO: 509185 - DNA, 15 bp, Homo sapiens
tccatgtggtgtttg

SEQ ID NO: 509186 - DNA, 15 bp, Homo sapiens
ccatgtggtgtttgc

SEQ ID NO: 509187 - DNA, 15 bp, Homo sapiens
catgtggtgtttgca

SEQ ID NO: 509188 - DNA, 15 bp, Homo sapiens
atgtggtgtttgcag

SEQ ID NO: 509189 - DNA, 15 bp, Homo sapiens
tgtggtgtttgcaga

SEQ ID NO: 509190 - DNA, 15 bp, Homo sapiens
gtggtgtttgcagac

SEQ ID NO: 509191 - DNA, 15 bp, Homo sapiens
tggtgtttgcagact

SEQ ID NO: 509192 - DNA, 15 bp, Homo sapiens
ggtgtttgcagactt

SEQ ID NO: 509193 - DNA, 15 bp, Homo sapiens
gtgtttgcagacttg

SEQ ID NO: 509194 - DNA, 15 bp, Homo sapiens
tgtttgcagacttga

SEQ ID NO: 509195 - DNA, 15 bp, Homo sapiens
gtttgcagacttgag

SEQ ID NO: 509196 - DNA, 15 bp, Homo sapiens
tttgcagacttgagc

SEQ ID NO: 509197 - DNA, 15 bp, Homo sapiens
ttgcagacttgagct

SEQ ID NO: 509198 - DNA, 15 bp, Homo sapiens
tgcagacttgagctc

SEQ ID NO: 509199 - DNA, 15 bp, Homo sapiens
gcagacttgagctca

SEQ ID NO: 509200 - DNA, 15 bp, Homo sapiens
cagacttgagctcat

SEQ ID NO: 509201 - DNA, 15 bp, Homo sapiens
agacttgagctcatc

SEQ ID NO: 509202 - DNA, 15 bp, Homo sapiens
gacttgagctcatct

SEQ ID NO: 509203 - DNA, 15 bp, Homo sapiens
acttgagctcatctt

SEQ ID NO: 509204 - DNA, 15 bp, Homo sapiens
cttgagctcatcttg

SEQ ID NO: 509205 - DNA, 15 bp, Homo sapiens
ttgagctcatcttga

SEQ ID NO: 509206 - DNA, 15 bp, Homo sapiens
tgagctcatcttgat

SEQ ID NO: 509207 - DNA, 15 bp, Homo sapiens
gagctcatcttgatt

SEQ ID NO: 509208 - DNA, 15 bp, Homo sapiens
agctcatcttgattg

SEQ ID NO: 509209 - DNA, 15 bp, Homo sapiens
gctcatcttgattgg

SEQ ID NO: 509210 - DNA, 15 bp, Homo sapiens
ctcatcttgattggc

SEQ ID NO: 509211 - DNA, 15 bp, Homo sapiens
tcatcttgattggct

SEQ ID NO: 509212 - DNA, 15 bp, Homo sapiens
catcttgattggctg

SEQ ID NO: 509213 - DNA, 15 bp, Homo sapiens
atcttgattggctgc

SEQ ID NO: 509214 - DNA, 15 bp, Homo sapiens
tcttgattggctgca

SEQ ID NO: 509215 - DNA, 15 bp, Homo sapiens
cttgattggctgcat

SEQ ID NO: 509216 - DNA, 15 bp, Homo sapiens
ttgattggctgcatt

SEQ ID NO: 509217 - DNA, 15 bp, Homo sapiens
tgattggctgcatta

SEQ ID NO: 509218 - DNA, 15 bp, Homo sapiens
gattggctgcattaa

SEQ ID NO: 509219 - DNA, 15 bp, Homo sapiens
attggctgcattaat

SEQ ID NO: 509220 - DNA, 15 bp, Homo sapiens
ttggctgcattaata

SEQ ID NO: 509221 - DNA, 15 bp, Homo sapiens
tggctgcattaatat

SEQ ID NO: 509222 - DNA, 15 bp, Homo sapiens
ggctgcattaatatt

SEQ ID NO: 509223 - DNA, 15 bp, Homo sapiens
gctgcattaatattg

SEQ ID NO: 509224 - DNA, 15 bp, Homo sapiens
ctgcattaatattga

SEQ ID NO: 509225 - DNA, 15 bp, Homo sapiens
tgcattaatattgag

SEQ ID NO: 509226 - DNA, 15 bp, Homo sapiens
gcattaatattgaga

SEQ ID NO: 509227 - DNA, 15 bp, Homo sapiens
cattaatattgagac

SEQ ID NO: 509228 - DNA, 15 bp, Homo sapiens
attaatattgagaca

SEQ ID NO: 509229 - DNA, 15 bp, Homo sapiens
ttaatattgagacaa

SEQ ID NO: 509230 - DNA, 15 bp, Homo sapiens
taatattgagacaaa

SEQ ID NO: 509231 - DNA, 15 bp, Homo sapiens
aatattgagacaaaa

SEQ ID NO: 509232 - DNA, 15 bp, Homo sapiens
atattgagacaaaac

SEQ ID NO: 509233 - DNA, 15 bp, Homo sapiens
tattgagacaaaaca

SEQ ID NO: 509234 - DNA, 15 bp, Homo sapiens
attgagacaaaacat

SEQ ID NO: 509235 - DNA, 15 bp, Homo sapiens
ttgagacaaaacatg

SEQ ID NO: 509236 - DNA, 15 bp, Homo sapiens
tgagacaaaacatgc

SEQ ID NO: 509237 - DNA, 15 bp, Homo sapiens
gagacaaaacatgca

SEQ ID NO: 509238 - DNA, 15 bp, Homo sapiens
agacaaaacatgcaa

SEQ ID NO: 509239 - DNA, 15 bp, Homo sapiens
gacaaaacatgcaat

SEQ ID NO: 509240 - DNA, 15 bp, Homo sapiens
acaaaacatgcaatt

SEQ ID NO: 509241 - DNA, 15 bp, Homo sapiens
caaaacatgcaatta

SEQ ID NO: 509242 - DNA, 15 bp, Homo sapiens
aaaacatgcaattat

SEQ ID NO: 509243 - DNA, 15 bp, Homo sapiens
aaacatgcaattatg

SEQ ID NO: 509244 - DNA, 15 bp, Homo sapiens
aacatgcaattatgc

SEQ ID NO: 509245 - DNA, 15 bp, Homo sapiens
acatgcaattatgct

SEQ ID NO: 509246 - DNA, 15 bp, Homo sapiens
catgcaattatgctt

SEQ ID NO: 509247 - DNA, 15 bp, Homo sapiens
atgcaattatgcttt

SEQ ID NO: 509248 - DNA, 15 bp, Homo sapiens
tgcaattatgctttc

SEQ ID NO: 509249 - DNA, 15 bp, Homo sapiens
gcaattatgctttca

SEQ ID NO: 509250 - DNA, 15 bp, Homo sapiens
caattatgctttcat

SEQ ID NO: 509251 - DNA, 15 bp, Homo sapiens
aattatgctttcatt

SEQ ID NO: 509252 - DNA, 15 bp, Homo sapiens
attatgctttcattt

SEQ ID NO: 509253 - DNA, 15 bp, Homo sapiens
ttatgctttcatttg

SEQ ID NO: 509254 - DNA, 15 bp, Homo sapiens
tatgctttcatttgg

SEQ ID NO: 509255 - DNA, 15 bp, Homo sapiens
atgctttcatttggc

SEQ ID NO: 509256 - DNA, 15 bp, Homo sapiens
tgctttcatttggcc

SEQ ID NO: 509257 - DNA, 15 bp, Homo sapiens
gctttcatttggccc

SEQ ID NO: 509258 - DNA, 15 bp, Homo sapiens
ctttcatttggccct

SEQ ID NO: 509259 - DNA, 15 bp, Homo sapiens
tttcatttggccctg

SEQ ID NO: 509260 - DNA, 15 bp, Homo sapiens
ttcatttggccctgg

SEQ ID NO: 509261 - DNA, 15 bp, Homo sapiens
tcatttggccctggg

SEQ ID NO: 509262 - DNA, 15 bp, Homo sapiens
catttggccctgggg

SEQ ID NO: 509263 - DNA, 15 bp, Homo sapiens
atttggccctggggt

SEQ ID NO: 509264 - DNA, 15 bp, Homo sapiens
tttggccctggggta

SEQ ID NO: 509265 - DNA, 15 bp, Homo sapiens
ttggccctggggtag

SEQ ID NO: 509266 - DNA, 15 bp, Homo sapiens
tggccctggggtagc

SEQ ID NO: 509267 - DNA, 15 bp, Homo sapiens
ggccctggggtagcc

SEQ ID NO: 509268 - DNA, 15 bp, Homo sapiens
gccctggggtagcca

SEQ ID NO: 509269 - DNA, 15 bp, Homo sapiens
ccctggggtagccat

SEQ ID NO: 509270 - DNA, 15 bp, Homo sapiens
cctggggtagccatt

SEQ ID NO: 509271 - DNA, 15 bp, Homo sapiens
ctggggtagccattc

SEQ ID NO: 509272 - DNA, 15 bp, Homo sapiens
tggggtagccattct

SEQ ID NO: 509273 - DNA, 15 bp, Homo sapiens
ggggtagccattctg

SEQ ID NO: 509274 - DNA, 15 bp, Homo sapiens
gggtagccattctga

SEQ ID NO: 509275 - DNA, 15 bp, Homo sapiens
ggtagccattctgaa

SEQ ID NO: 509276 - DNA, 15 bp, Homo sapiens
gtagccattctgaag

SEQ ID NO: 509277 - DNA, 15 bp, Homo sapiens
tagccattctgaaga

SEQ ID NO: 509278 - DNA, 15 bp, Homo sapiens
agccattctgaagac

SEQ ID NO: 509279 - DNA, 15 bp, Homo sapiens
gccattctgaagaca

SEQ ID NO: 509280 - DNA, 15 bp, Homo sapiens
ccattctgaagacag

SEQ ID NO: 509281 - DNA, 15 bp, Homo sapiens
cattctgaagacagc

SEQ ID NO: 509282 - DNA, 15 bp, Homo sapiens
attctgaagacagct

SEQ ID NO: 509283 - DNA, 15 bp, Homo sapiens
ttctgaagacagctg

SEQ ID NO: 509284 - DNA, 15 bp, Homo sapiens
tctgaagacagctgt

SEQ ID NO: 509285 - DNA, 15 bp, Homo sapiens
ctgaagacagctgtc

SEQ ID NO: 509286 - DNA, 15 bp, Homo sapiens
tgaagacagctgtct

SEQ ID NO: 509287 - DNA, 15 bp, Homo sapiens
gaagacagctgtctg

SEQ ID NO: 509288 - DNA, 15 bp, Homo sapiens
aagacagctgtctgt

SEQ ID NO: 509289 - DNA, 15 bp, Homo sapiens
agacagctgtctgta

SEQ ID NO: 509290 - DNA, 15 bp, Homo sapiens
gacagctgtctgtat

SEQ ID NO: 509291 - DNA, 15 bp, Homo sapiens
acagctgtctgtatc

SEQ ID NO: 509292 - DNA, 15 bp, Homo sapiens
cagctgtctgtatca

SEQ ID NO: 509293 - DNA, 15 bp, Homo sapiens
agctgtctgtatcat

SEQ ID NO: 509294 - DNA, 15 bp, Homo sapiens
gctgtctgtatcatt

SEQ ID NO: 509295 - DNA, 15 bp, Homo sapiens
ctgtctgtatcattg

SEQ ID NO: 509296 - DNA, 15 bp, Homo sapiens
tgtctgtatcattgt

SEQ ID NO: 509297 - DNA, 15 bp, Homo sapiens
gtctgtatcattgta

SEQ ID NO: 509298 - DNA, 15 bp, Homo sapiens
tctgtatcattgtac

SEQ ID NO: 509299 - DNA, 15 bp, Homo sapiens
ctgtatcattgtacc

SEQ ID NO: 509300 - DNA, 15 bp, Homo sapiens
tgtatcattgtacct

SEQ ID NO: 509301 - DNA, 15 bp, Homo sapiens
gtatcattgtacctg

SEQ ID NO: 509302 - DNA, 15 bp, Homo sapiens
tatcattgtacctgc

SEQ ID NO: 509303 - DNA, 15 bp, Homo sapiens
atcattgtacctgct

SEQ ID NO: 509304 - DNA, 15 bp, Homo sapiens
tcattgtacctgctt

SEQ ID NO: 509305 - DNA, 15 bp, Homo sapiens
cattgtacctgcttt

SEQ ID NO: 509306 - DNA, 15 bp, Homo sapiens
attgtacctgctttc

SEQ ID NO: 509307 - DNA, 15 bp, Homo sapiens
ttgtacctgctttca

SEQ ID NO: 509308 - DNA, 15 bp, Homo sapiens
tgtacctgctttcat

SEQ ID NO: 509309 - DNA, 15 bp, Homo sapiens
gtacctgctttcata

SEQ ID NO: 509310 - DNA, 15 bp, Homo sapiens
tacctgctttcatag

SEQ ID NO: 509311 - DNA, 15 bp, Homo sapiens
acctgctttcataga

SEQ ID NO: 509312 - DNA, 15 bp, Homo sapiens
cctgctttcatagaa

SEQ ID NO: 509313 - DNA, 15 bp, Homo sapiens
ctgctttcatagaaa

SEQ ID NO: 509314 - DNA, 15 bp, Homo sapiens
tgctttcatagaaac

SEQ ID NO: 509315 - DNA, 15 bp, Homo sapiens
gctttcatagaaacc

SEQ ID NO: 509316 - DNA, 15 bp, Homo sapiens
ctttcatagaaacca

SEQ ID NO: 509317 - DNA, 15 bp, Homo sapiens
tttcatagaaaccaa

SEQ ID NO: 509318 - DNA, 15 bp, Homo sapiens
ttcatagaaaccaac

SEQ ID NO: 509319 - DNA, 15 bp, Homo sapiens
tcatagaaaccaact

SEQ ID NO: 509320 - DNA, 15 bp, Homo sapiens
catagaaaccaactt

SEQ ID NO: 509321 - DNA, 15 bp, Homo sapiens
atagaaaccaactta

SEQ ID NO: 509322 - DNA, 15 bp, Homo sapiens
tagaaaccaacttat

SEQ ID NO: 509323 - DNA, 15 bp, Homo sapiens
agaaaccaacttatt

SEQ ID NO: 509324 - DNA, 15 bp, Homo sapiens
gaaaccaacttattc

SEQ ID NO: 509325 - DNA, 15 bp, Homo sapiens
aaaccaacttattca

SEQ ID NO: 509326 - DNA, 15 bp, Homo sapiens
aaccaacttattcag

SEQ ID NO: 509327 - DNA, 15 bp, Homo sapiens
accaacttattcagg

SEQ ID NO: 509328 - DNA, 15 bp, Homo sapiens
ccaacttattcaggt

SEQ ID NO: 509329 - DNA, 15 bp, Homo sapiens
caacttattcaggtt

SEQ ID NO: 509330 - DNA, 15 bp, Homo sapiens
aacttattcaggttt

SEQ ID NO: 509331 - DNA, 15 bp, Homo sapiens
acttattcaggtttc

SEQ ID NO: 509332 - DNA, 15 bp, Homo sapiens
cttattcaggtttct

SEQ ID NO: 509333 - DNA, 15 bp, Homo sapiens
ttattcaggtttctc

SEQ ID NO: 509334 - DNA, 15 bp, Homo sapiens
tattcaggtttctca

SEQ ID NO: 509335 - DNA, 15 bp, Homo sapiens
attcaggtttctcag

SEQ ID NO: 509336 - DNA, 15 bp, Homo sapiens
ttcaggtttctcagg

SEQ ID NO: 509337 - DNA, 15 bp, Homo sapiens
tcaggtttctcaggg

SEQ ID NO: 509338 - DNA, 15 bp, Homo sapiens
caggtttctcagggt

SEQ ID NO: 509339 - DNA, 15 bp, Homo sapiens
aggtttctcagggtt

SEQ ID NO: 509340 - DNA, 15 bp, Homo sapiens
ggtttctcagggttt

SEQ ID NO: 509341 - DNA, 15 bp, Homo sapiens
gtttctcagggtttc

SEQ ID NO: 509342 - DNA, 15 bp, Homo sapiens
tttctcagggtttcg

SEQ ID NO: 509343 - DNA, 15 bp, Homo sapiens
ttctcagggtttcgc

SEQ ID NO: 509344 - DNA, 15 bp, Homo sapiens
tctcagggtttcgct

SEQ ID NO: 509345 - DNA, 15 bp, Homo sapiens
ctcagggtttcgctt

SEQ ID NO: 509346 - DNA, 15 bp, Homo sapiens
tcagggtttcgctta

SEQ ID NO: 509347 - DNA, 15 bp, Homo sapiens
cagggtttcgcttat

SEQ ID NO: 509348 - DNA, 15 bp, Homo sapiens
agggtttcgcttatt

SEQ ID NO: 509349 - DNA, 15 bp, Homo sapiens
gggtttcgcttattt

SEQ ID NO: 509350 - DNA, 15 bp, Homo sapiens
ggtttcgcttatttt

SEQ ID NO: 509351 - DNA, 15 bp, Homo sapiens
gtttcgcttattttg

SEQ ID NO: 509352 - DNA, 15 bp, Homo sapiens
tttcgcttattttgc

SEQ ID NO: 509353 - DNA, 15 bp, Homo sapiens
ttcgcttattttgct

SEQ ID NO: 509354 - DNA, 15 bp, Homo sapiens
tcgcttattttgctt

SEQ ID NO: 509355 - DNA, 15 bp, Homo sapiens
cgcttattttgcttt

SEQ ID NO: 509356 - DNA, 15 bp, Homo sapiens
gcttattttgctttg

SEQ ID NO: 509357 - DNA, 15 bp, Homo sapiens
cttattttgctttga

SEQ ID NO: 509358 - DNA, 15 bp, Homo sapiens
ttattttgctttgaa

SEQ ID NO: 509359 - DNA, 15 bp, Homo sapiens
tattttgctttgaat

SEQ ID NO: 509360 - DNA, 15 bp, Homo sapiens
attttgctttgaatg

SEQ ID NO: 509361 - DNA, 15 bp, Homo sapiens
ttttgctttgaatgg

SEQ ID NO: 509362 - DNA, 15 bp, Homo sapiens
tttgctttgaatggg

SEQ ID NO: 509363 - DNA, 15 bp, Homo sapiens
ttgctttgaatggga

SEQ ID NO: 509364 - DNA, 15 bp, Homo sapiens
tgctttgaatgggac

SEQ ID NO: 509365 - DNA, 15 bp, Homo sapiens
gctttgaatgggaca

SEQ ID NO: 509366 - DNA, 15 bp, Homo sapiens
ctttgaatgggacag

SEQ ID NO: 509367 - DNA, 15 bp, Homo sapiens
tttgaatgggacagc

SEQ ID NO: 509368 - DNA, 15 bp, Homo sapiens
ttgaatgggacagcc

SEQ ID NO: 509369 - DNA, 15 bp, Homo sapiens
tgaatgggacagcca

SEQ ID NO: 509370 - DNA, 15 bp, Homo sapiens
gaatgggacagccat

SEQ ID NO: 509371 - DNA, 15 bp, Homo sapiens
aatgggacagccatt

SEQ ID NO: 509372 - DNA, 15 bp, Homo sapiens
atgggacagccattt

SEQ ID NO: 509373 - DNA, 15 bp, Homo sapiens
tgggacagccatttc

SEQ ID NO: 509374 - DNA, 15 bp, Homo sapiens
gggacagccatttca

SEQ ID NO: 509375 - DNA, 15 bp, Homo sapiens
ggacagccatttcac

SEQ ID NO: 509376 - DNA, 15 bp, Homo sapiens
gacagccatttcacc

SEQ ID NO: 509377 - DNA, 15 bp, Homo sapiens
acagccatttcacct

SEQ ID NO: 509378 - DNA, 15 bp, Homo sapiens
cagccatttcacctc

SEQ ID NO: 509379 - DNA, 15 bp, Homo sapiens
agccatttcacctca

SEQ ID NO: 509380 - DNA, 15 bp, Homo sapiens
gccatttcacctcat

SEQ ID NO: 509381 - DNA, 15 bp, Homo sapiens
ccatttcacctcata

SEQ ID NO: 509382 - DNA, 15 bp, Homo sapiens
catttcacctcatat

SEQ ID NO: 509383 - DNA, 15 bp, Homo sapiens
atttcacctcatatt

SEQ ID NO: 509384 - DNA, 15 bp, Homo sapiens
tttcacctcatattt

SEQ ID NO: 509385 - DNA, 15 bp, Homo sapiens
ttcacctcatatttt

SEQ ID NO: 509386 - DNA, 15 bp, Homo sapiens
tcacctcatattttt

SEQ ID NO: 509387 - DNA, 15 bp, Homo sapiens
cacctcatatttttg

SEQ ID NO: 509388 - DNA, 15 bp, Homo sapiens
acctcatatttttgg

SEQ ID NO: 509389 - DNA, 15 bp, Homo sapiens
cctcatatttttgga

SEQ ID NO: 509390 - DNA, 15 bp, Homo sapiens
ctcatatttttggat

SEQ ID NO: 509391 - DNA, 15 bp, Homo sapiens
tcatatttttggatg

SEQ ID NO: 509392 - DNA, 15 bp, Homo sapiens
catatttttggatga

SEQ ID NO: 509393 - DNA, 15 bp, Homo sapiens
atatttttggatgat

SEQ ID NO: 509394 - DNA, 15 bp, Homo sapiens
tatttttggatgatg

SEQ ID NO: 509395 - DNA, 15 bp, Homo sapiens
atttttggatgatgt

SEQ ID NO: 509396 - DNA, 15 bp, Homo sapiens
tttttggatgatgtt

SEQ ID NO: 509397 - DNA, 15 bp, Homo sapiens
ttttggatgatgttt

SEQ ID NO: 509398 - DNA, 15 bp, Homo sapiens
tttggatgatgtttg

SEQ ID NO: 509399 - DNA, 15 bp, Homo sapiens
ttggatgatgtttga

SEQ ID NO: 509400 - DNA, 15 bp, Homo sapiens
tggatgatgtttgaa

SEQ ID NO: 509401 - DNA, 15 bp, Homo sapiens
ggatgatgtttgaaa

SEQ ID NO: 509402 - DNA, 15 bp, Homo sapiens
gatgatgtttgaaag

SEQ ID NO: 509403 - DNA, 15 bp, Homo sapiens
atgatgtttgaaagt

SEQ ID NO: 509404 - DNA, 15 bp, Homo sapiens
tgatgtttgaaagtt

SEQ ID NO: 509405 - DNA, 15 bp, Homo sapiens
gatgtttgaaagtta

SEQ ID NO: 509406 - DNA, 15 bp, Homo sapiens
atgtttgaaagttat

SEQ ID NO: 509407 - DNA, 15 bp, Homo sapiens
tgtttgaaagttata

SEQ ID NO: 509408 - DNA, 15 bp, Homo sapiens
gtttgaaagttatat

SEQ ID NO: 509409 - DNA, 15 bp, Homo sapiens
tttgaaagttatata

SEQ ID NO: 509410 - DNA, 15 bp, Homo sapiens
ttgaaagttatatag

SEQ ID NO: 509411 - DNA, 15 bp, Homo sapiens
tgaaagttatatagg

SEQ ID NO: 509412 - DNA, 15 bp, Homo sapiens
gaaagttatatagga

SEQ ID NO: 509413 - DNA, 15 bp, Homo sapiens
aaagttatataggaa

SEQ ID NO: 509414 - DNA, 15 bp, Homo sapiens
aagttatataggaat

SEQ ID NO: 509415 - DNA, 15 bp, Homo sapiens
agttatataggaata

SEQ ID NO: 509416 - DNA, 15 bp, Homo sapiens
gttatataggaatat

SEQ ID NO: 509417 - DNA, 15 bp, Homo sapiens
ttatataggaatatt

SEQ ID NO: 509418 - DNA, 15 bp, Homo sapiens
tatataggaatattt

SEQ ID NO: 509419 - DNA, 15 bp, Homo sapiens
atataggaatatttg

SEQ ID NO: 509420 - DNA, 15 bp, Homo sapiens
tataggaatatttgc

SEQ ID NO: 509421 - DNA, 15 bp, Homo sapiens
ataggaatatttgcc

SEQ ID NO: 509422 - DNA, 15 bp, Homo sapiens
taggaatatttgcct

SEQ ID NO: 509423 - DNA, 15 bp, Homo sapiens
aggaatatttgcctt

SEQ ID NO: 509424 - DNA, 15 bp, Homo sapiens
ggaatatttgccttg

SEQ ID NO: 509425 - DNA, 15 bp, Homo sapiens
gaatatttgccttgt

SEQ ID NO: 509426 - DNA, 15 bp, Homo sapiens
aatatttgccttgta

SEQ ID NO: 509427 - DNA, 15 bp, Homo sapiens
atatttgccttgtaa

SEQ ID NO: 509428 - DNA, 15 bp, Homo sapiens
tatttgccttgtaat

SEQ ID NO: 509429 - DNA, 15 bp, Homo sapiens
atttgccttgtaata

SEQ ID NO: 509430 - DNA, 15 bp, Homo sapiens
tttgccttgtaataa

SEQ ID NO: 509431 - DNA, 15 bp, Homo sapiens
ttgccttgtaataag

SEQ ID NO: 509432 - DNA, 15 bp, Homo sapiens
tgccttgtaataaga

SEQ ID NO: 509433 - DNA, 15 bp, Homo sapiens
gccttgtaataagat

SEQ ID NO: 509434 - DNA, 15 bp, Homo sapiens
ccttgtaataagatc

SEQ ID NO: 509435 - DNA, 15 bp, Homo sapiens
cttgtaataagatca

SEQ ID NO: 509436 - DNA, 15 bp, Homo sapiens
ttgtaataagatcag

SEQ ID NO: 509437 - DNA, 15 bp, Homo sapiens
tgtaataagatcaga

SEQ ID NO: 509438 - DNA, 15 bp, Homo sapiens
gtaataagatcagaa

SEQ ID NO: 509439 - DNA, 15 bp, Homo sapiens
taataagatcagaat

SEQ ID NO: 509440 - DNA, 15 bp, Homo sapiens
aataagatcagaatg

SEQ ID NO: 509441 - DNA, 15 bp, Homo sapiens
ataagatcagaatga

SEQ ID NO: 509442 - DNA, 15 bp, Homo sapiens
taagatcagaatgat

SEQ ID NO: 509443 - DNA, 15 bp, Homo sapiens
aagatcagaatgatt

SEQ ID NO: 509444 - DNA, 15 bp, Homo sapiens
agatcagaatgatta

SEQ ID NO: 509445 - DNA, 15 bp, Homo sapiens
gatcagaatgattat

SEQ ID NO: 509446 - DNA, 15 bp, Homo sapiens
atcagaatgattatt

SEQ ID NO: 509447 - DNA, 15 bp, Homo sapiens
tcagaatgattattt

SEQ ID NO: 509448 - DNA, 15 bp, Homo sapiens
cagaatgattatttt

SEQ ID NO: 509449 - DNA, 15 bp, Homo sapiens
agaatgattatttta

SEQ ID NO: 509450 - DNA, 15 bp, Homo sapiens
gaatgattattttac

SEQ ID NO: 509451 - DNA, 15 bp, Homo sapiens
aatgattattttact

SEQ ID NO: 509452 - DNA, 15 bp, Homo sapiens
atgattattttactg

SEQ ID NO: 509453 - DNA, 15 bp, Homo sapiens
tgattattttactga

SEQ ID NO: 509454 - DNA, 15 bp, Homo sapiens
gattattttactgaa

SEQ ID NO: 509455 - DNA, 15 bp, Homo sapiens
attattttactgaaa

SEQ ID NO: 509456 - DNA, 15 bp, Homo sapiens
ttattttactgaaaa

SEQ ID NO: 509457 - DNA, 15 bp, Homo sapiens
tattttactgaaaaa

SEQ ID NO: 509458 - DNA, 15 bp, Homo sapiens
attttactgaaaaac

SEQ ID NO: 509459 - DNA, 15 bp, Homo sapiens
ttttactgaaaaact

SEQ ID NO: 509460 - DNA, 15 bp, Homo sapiens
tttactgaaaaacta

SEQ ID NO: 509461 - DNA, 15 bp, Homo sapiens
ttactgaaaaactaa

SEQ ID NO: 509462 - DNA, 15 bp, Homo sapiens
tactgaaaaactaaa

SEQ ID NO: 509463 - DNA, 15 bp, Homo sapiens
actgaaaaactaaat

SEQ ID NO: 509464 - DNA, 15 bp, Homo sapiens
ctgaaaaactaaatt

SEQ ID NO: 509465 - DNA, 15 bp, Homo sapiens
tgaaaaactaaattg

SEQ ID NO: 509466 - DNA, 15 bp, Homo sapiens
gaaaaactaaattgt

SEQ ID NO: 509467 - DNA, 15 bp, Homo sapiens
aaaaactaaattgtt

SEQ ID NO: 509468 - DNA, 15 bp, Homo sapiens
aaaactaaattgtta

SEQ ID NO: 509469 - DNA, 15 bp, Homo sapiens
aaactaaattgttat

SEQ ID NO: 509470 - DNA, 15 bp, Homo sapiens
aactaaattgttatg

SEQ ID NO: 509471 - DNA, 15 bp, Homo sapiens
actaaattgttatgt

SEQ ID NO: 509472 - DNA, 15 bp, Homo sapiens
ctaaattgttatgtt

SEQ ID NO: 509473 - DNA, 15 bp, Homo sapiens
taaattgttatgtta

SEQ ID NO: 509474 - DNA, 15 bp, Homo sapiens
aaattgttatgttat

SEQ ID NO: 509475 - DNA, 15 bp, Homo sapiens
aattgttatgttata

SEQ ID NO: 509476 - DNA, 15 bp, Homo sapiens
attgttatgttataa

SEQ ID NO: 509477 - DNA, 15 bp, Homo sapiens
ttgttatgttataat

SEQ ID NO: 509478 - DNA, 15 bp, Homo sapiens
tgttatgttataatt

SEQ ID NO: 509479 - DNA, 15 bp, Homo sapiens
gttatgttataatta

SEQ ID NO: 509480 - DNA, 15 bp, Homo sapiens
ttatgttataattat

SEQ ID NO: 509481 - DNA, 15 bp, Homo sapiens
tatgttataattatg

SEQ ID NO: 509482 - DNA, 15 bp, Homo sapiens
atgttataattatgt

SEQ ID NO: 509483 - DNA, 15 bp, Homo sapiens
tgttataattatgtt

SEQ ID NO: 509484 - DNA, 15 bp, Homo sapiens
gttataattatgttt

SEQ ID NO: 509485 - DNA, 15 bp, Homo sapiens
ttataattatgtttc

SEQ ID NO: 509486 - DNA, 15 bp, Homo sapiens
tataattatgtttca

SEQ ID NO: 509487 - DNA, 15 bp, Homo sapiens
ataattatgtttcaa

SEQ ID NO: 509488 - DNA, 15 bp, Homo sapiens
taattatgtttcaag

SEQ ID NO: 509489 - DNA, 15 bp, Homo sapiens
aattatgtttcaagc

SEQ ID NO: 509490 - DNA, 15 bp, Homo sapiens
attatgtttcaagca

SEQ ID NO: 509491 - DNA, 15 bp, Homo sapiens
ttatgtttcaagcat

SEQ ID NO: 509492 - DNA, 15 bp, Homo sapiens
tatgtttcaagcata

SEQ ID NO: 509493 - DNA, 15 bp, Homo sapiens
atgtttcaagcatat

SEQ ID NO: 509494 - DNA, 15 bp, Homo sapiens
tgtttcaagcatatt

SEQ ID NO: 509495 - DNA, 15 bp, Homo sapiens
gtttcaagcatattt

SEQ ID NO: 509496 - DNA, 15 bp, Homo sapiens
tttcaagcatatttc

SEQ ID NO: 509497 - DNA, 15 bp, Homo sapiens
ttcaagcatatttct

SEQ ID NO: 509498 - DNA, 15 bp, Homo sapiens
tcaagcatatttctt

SEQ ID NO: 509499 - DNA, 15 bp, Homo sapiens
caagcatatttcttt

SEQ ID NO: 509500 - DNA, 15 bp, Homo sapiens
aagcatatttctttg

SEQ ID NO: 509501 - DNA, 15 bp, Homo sapiens
agcatatttctttgg

SEQ ID NO: 509502 - DNA, 15 bp, Homo sapiens
gcatatttctttggc

SEQ ID NO: 509503 - DNA, 15 bp, Homo sapiens
catatttctttggca

SEQ ID NO: 509504 - DNA, 15 bp, Homo sapiens
atatttctttggcag

SEQ ID NO: 509505 - DNA, 15 bp, Homo sapiens
tatttctttggcagt

SEQ ID NO: 509506 - DNA, 15 bp, Homo sapiens
atttctttggcagta

SEQ ID NO: 509507 - DNA, 15 bp, Homo sapiens
tttctttggcagtat

SEQ ID NO: 509508 - DNA, 15 bp, Homo sapiens
ttctttggcagtatt

SEQ ID NO: 509509 - DNA, 15 bp, Homo sapiens
tctttggcagtattt

SEQ ID NO: 509510 - DNA, 15 bp, Homo sapiens
ctttggcagtatttt

SEQ ID NO: 509511 - DNA, 15 bp, Homo sapiens
tttggcagtattttc

SEQ ID NO: 509512 - DNA, 15 bp, Homo sapiens
ttggcagtattttcc

SEQ ID NO: 509513 - DNA, 15 bp, Homo sapiens
tggcagtattttcca

SEQ ID NO: 509514 - DNA, 15 bp, Homo sapiens
ggcagtattttccat

SEQ ID NO: 509515 - DNA, 15 bp, Homo sapiens
gcagtattttccatt

SEQ ID NO: 509516 - DNA, 15 bp, Homo sapiens
cagtattttccattt

SEQ ID NO: 509517 - DNA, 15 bp, Homo sapiens
agtattttccatttt

SEQ ID NO: 509518 - DNA, 15 bp, Homo sapiens
gtattttccattttc

SEQ ID NO: 509519 - DNA, 15 bp, Homo sapiens
tattttccattttct

SEQ ID NO: 509520 - DNA, 15 bp, Homo sapiens
attttccattttctt

SEQ ID NO: 509521 - DNA, 15 bp, Homo sapiens
ttttccattttcttg

SEQ ID NO: 509522 - DNA, 15 bp, Homo sapiens
tttccattttcttgt

SEQ ID NO: 509523 - DNA, 15 bp, Homo sapiens
ttccattttcttgtg

SEQ ID NO: 509524 - DNA, 15 bp, Homo sapiens
tccattttcttgtga

SEQ ID NO: 509525 - DNA, 15 bp, Homo sapiens
ccattttcttgtgag

SEQ ID NO: 509526 - DNA, 15 bp, Homo sapiens
cattttcttgtgagt

SEQ ID NO: 509527 - DNA, 15 bp, Homo sapiens
attttcttgtgagta

SEQ ID NO: 509528 - DNA, 15 bp, Homo sapiens
ttttcttgtgagtaa

SEQ ID NO: 509529 - DNA, 15 bp, Homo sapiens
tttcttgtgagtaac

SEQ ID NO: 509530 - DNA, 15 bp, Homo sapiens
ttcttgtgagtaact

SEQ ID NO: 509531 - DNA, 15 bp, Homo sapiens
tcttgtgagtaactt

SEQ ID NO: 509532 - DNA, 15 bp, Homo sapiens
cttgtgagtaacttc

SEQ ID NO: 509533 - DNA, 15 bp, Homo sapiens
ttgtgagtaacttct

SEQ ID NO: 509534 - DNA, 15 bp, Homo sapiens
tgtgagtaacttctg

SEQ ID NO: 509535 - DNA, 15 bp, Homo sapiens
gtgagtaacttctgg

SEQ ID NO: 509536 - DNA, 15 bp, Homo sapiens
tgagtaacttctgga

SEQ ID NO: 509537 - DNA, 15 bp, Homo sapiens
gagtaacttctggaa

SEQ ID NO: 509538 - DNA, 15 bp, Homo sapiens
agtaacttctggaaa

SEQ ID NO: 509539 - DNA, 15 bp, Homo sapiens
gtaacttctggaaat

SEQ ID NO: 509540 - DNA, 15 bp, Homo sapiens
taacttctggaaatg

SEQ ID NO: 509541 - DNA, 15 bp, Homo sapiens
aacttctggaaatgg

SEQ ID NO: 509542 - DNA, 15 bp, Homo sapiens
acttctggaaatgga

SEQ ID NO: 509543 - DNA, 15 bp, Homo sapiens
cttctggaaatggaa

SEQ ID NO: 509544 - DNA, 15 bp, Homo sapiens
ttctggaaatggaag

SEQ ID NO: 509545 - DNA, 15 bp, Homo sapiens
tctggaaatggaagt

SEQ ID NO: 509546 - DNA, 15 bp, Homo sapiens
ctggaaatggaagtg

SEQ ID NO: 509547 - DNA, 15 bp, Homo sapiens
tggaaatggaagtgt

SEQ ID NO: 509548 - DNA, 15 bp, Homo sapiens
ggaaatggaagtgtg

SEQ ID NO: 509549 - DNA, 15 bp, Homo sapiens
gaaatggaagtgtgt

SEQ ID NO: 509550 - DNA, 15 bp, Homo sapiens
aaatggaagtgtgta

SEQ ID NO: 509551 - DNA, 15 bp, Homo sapiens
aatggaagtgtgtat

SEQ ID NO: 509552 - DNA, 15 bp, Homo sapiens
atggaagtgtgtatg

SEQ ID NO: 509553 - DNA, 15 bp, Homo sapiens
tggaagtgtgtatga

SEQ ID NO: 509554 - DNA, 15 bp, Homo sapiens
ggaagtgtgtatgaa

SEQ ID NO: 509555 - DNA, 15 bp, Homo sapiens
gaagtgtgtatgaat

SEQ ID NO: 509556 - DNA, 15 bp, Homo sapiens
aagtgtgtatgaatg

SEQ ID NO: 509557 - DNA, 15 bp, Homo sapiens
agtgtgtatgaatgg

SEQ ID NO: 509558 - DNA, 15 bp, Homo sapiens
gtgtgtatgaatggg

SEQ ID NO: 509559 - DNA, 15 bp, Homo sapiens
tgtgtatgaatgggt

SEQ ID NO: 509560 - DNA, 15 bp, Homo sapiens
gtgtatgaatgggtt

SEQ ID NO: 509561 - DNA, 15 bp, Homo sapiens
tgtatgaatgggttg

SEQ ID NO: 509562 - DNA, 15 bp, Homo sapiens
gtatgaatgggttgg

SEQ ID NO: 509563 - DNA, 15 bp, Homo sapiens
tatgaatgggttgga

SEQ ID NO: 509564 - DNA, 15 bp, Homo sapiens
atgaatgggttggaa

SEQ ID NO: 509565 - DNA, 15 bp, Homo sapiens
tgaatgggttggaat

SEQ ID NO: 509566 - DNA, 15 bp, Homo sapiens
gaatgggttggaatg

SEQ ID NO: 509567 - DNA, 15 bp, Homo sapiens
aatgggttggaatgt

SEQ ID NO: 509568 - DNA, 15 bp, Homo sapiens
atgggttggaatgtt

SEQ ID NO: 509569 - DNA, 15 bp, Homo sapiens
tgggttggaatgttt

SEQ ID NO: 509570 - DNA, 15 bp, Homo sapiens
gggttggaatgtttt

SEQ ID NO: 509571 - DNA, 15 bp, Homo sapiens
ggttggaatgttttc

SEQ ID NO: 509572 - DNA, 15 bp, Homo sapiens
gttggaatgttttca

SEQ ID NO: 509573 - DNA, 15 bp, Homo sapiens
ttggaatgttttcag

SEQ ID NO: 509574 - DNA, 15 bp, Homo sapiens
tggaatgttttcagt

SEQ ID NO: 509575 - DNA, 15 bp, Homo sapiens
ggaatgttttcagtt

SEQ ID NO: 509576 - DNA, 15 bp, Homo sapiens
gaatgttttcagttc

SEQ ID NO: 509577 - DNA, 15 bp, Homo sapiens
aatgttttcagttct

SEQ ID NO: 509578 - DNA, 15 bp, Homo sapiens
atgttttcagttctt

SEQ ID NO: 509579 - DNA, 15 bp, Homo sapiens
tgttttcagttcttg

SEQ ID NO: 509580 - DNA, 15 bp, Homo sapiens
gttttcagttcttgc

SEQ ID NO: 509581 - DNA, 15 bp, Homo sapiens
ttttcagttcttgca

SEQ ID NO: 509582 - DNA, 15 bp, Homo sapiens
tttcagttcttgcaa

SEQ ID NO: 509583 - DNA, 15 bp, Homo sapiens
ttcagttcttgcaat

SEQ ID NO: 509584 - DNA, 15 bp, Homo sapiens
tcagttcttgcaatt

SEQ ID NO: 509585 - DNA, 15 bp, Homo sapiens
cagttcttgcaattc

SEQ ID NO: 509586 - DNA, 15 bp, Homo sapiens
agttcttgcaattct

SEQ ID NO: 509587 - DNA, 15 bp, Homo sapiens
gttcttgcaattctg

SEQ ID NO: 509588 - DNA, 15 bp, Homo sapiens
ttcttgcaattctga

SEQ ID NO: 509589 - DNA, 15 bp, Homo sapiens
tcttgcaattctgaa

SEQ ID NO: 509590 - DNA, 15 bp, Homo sapiens
cttgcaattctgaat

SEQ ID NO: 509591 - DNA, 15 bp, Homo sapiens
ttgcaattctgaatc

SEQ ID NO: 509592 - DNA, 15 bp, Homo sapiens
tgcaattctgaatct

SEQ ID NO: 509593 - DNA, 15 bp, Homo sapiens
gcaattctgaatctc

SEQ ID NO: 509594 - DNA, 15 bp, Homo sapiens
caattctgaatctcc

SEQ ID NO: 509595 - DNA, 15 bp, Homo sapiens
aattctgaatctcca

SEQ ID NO: 509596 - DNA, 15 bp, Homo sapiens
attctgaatctccag

SEQ ID NO: 509597 - DNA, 15 bp, Homo sapiens
ttctgaatctccagt

SEQ ID NO: 509598 - DNA, 15 bp, Homo sapiens
tctgaatctccagtt

SEQ ID NO: 509599 - DNA, 15 bp, Homo sapiens
ctgaatctccagttt

SEQ ID NO: 509600 - DNA, 15 bp, Homo sapiens
tgaatctccagtttt

SEQ ID NO: 509601 - DNA, 15 bp, Homo sapiens
gaatctccagtttta

SEQ ID NO: 509602 - DNA, 15 bp, Homo sapiens
aatctccagttttaa

SEQ ID NO: 509603 - DNA, 15 bp, Homo sapiens
atctccagttttaaa

SEQ ID NO: 509604 - DNA, 15 bp, Homo sapiens
tctccagttttaaaa

SEQ ID NO: 509605 - DNA, 15 bp, Homo sapiens
ctccagttttaaaaa

SEQ ID NO: 509606 - DNA, 15 bp, Homo sapiens
tccagttttaaaaaa

SEQ ID NO: 509607 - DNA, 15 bp, Homo sapiens
ccagttttaaaaaag

SEQ ID NO: 509608 - DNA, 15 bp, Homo sapiens
cagttttaaaaaagg

SEQ ID NO: 509609 - DNA, 15 bp, Homo sapiens
agttttaaaaaagga

SEQ ID NO: 509610 - DNA, 15 bp, Homo sapiens
gttttaaaaaaggaa

SEQ ID NO: 509611 - DNA, 15 bp, Homo sapiens
ttttaaaaaaggaaa

SEQ ID NO: 509612 - DNA, 15 bp, Homo sapiens
tttaaaaaaggaaat

SEQ ID NO: 509613 - DNA, 15 bp, Homo sapiens
ttaaaaaaggaaatt

SEQ ID NO: 509614 - DNA, 15 bp, Homo sapiens
taaaaaaggaaattt

SEQ ID NO: 509615 - DNA, 15 bp, Homo sapiens
aaaaaaggaaatttt

SEQ ID NO: 509616 - DNA, 15 bp, Homo sapiens
aaaaaggaaatttta

SEQ ID NO: 509617 - DNA, 15 bp, Homo sapiens
aaaaggaaattttat

SEQ ID NO: 509618 - DNA, 15 bp, Homo sapiens
aaaggaaattttatt

SEQ ID NO: 509619 - DNA, 15 bp, Homo sapiens
aaggaaattttattc

SEQ ID NO: 509620 - DNA, 15 bp, Homo sapiens
aggaaattttattct

SEQ ID NO: 509621 - DNA, 15 bp, Homo sapiens
ggaaattttattcta

SEQ ID NO: 509622 - DNA, 15 bp, Homo sapiens
gaaattttattctat

SEQ ID NO: 509623 - DNA, 15 bp, Homo sapiens
aaattttattctata

SEQ ID NO: 509624 - DNA, 15 bp, Homo sapiens
aattttattctatat

SEQ ID NO: 509625 - DNA, 15 bp, Homo sapiens
attttattctatatc

SEQ ID NO: 509626 - DNA, 15 bp, Homo sapiens
ttttattctatatct

SEQ ID NO: 509627 - DNA, 15 bp, Homo sapiens
tttattctatatctc

SEQ ID NO: 509628 - DNA, 15 bp, Homo sapiens
ttattctatatctct

SEQ ID NO: 509629 - DNA, 15 bp, Homo sapiens
tattctatatctctt

SEQ ID NO: 509630 - DNA, 15 bp, Homo sapiens
attctatatctctta

SEQ ID NO: 509631 - DNA, 15 bp, Homo sapiens
ttctatatctcttat

SEQ ID NO: 509632 - DNA, 15 bp, Homo sapiens
tctatatctcttatt

SEQ ID NO: 509633 - DNA, 15 bp, Homo sapiens
ctatatctcttattc

SEQ ID NO: 509634 - DNA, 15 bp, Homo sapiens
tatatctcttattct

SEQ ID NO: 509635 - DNA, 15 bp, Homo sapiens
atatctcttattctt

SEQ ID NO: 509636 - DNA, 15 bp, Homo sapiens
tatctcttattcttt

SEQ ID NO: 509637 - DNA, 15 bp, Homo sapiens
atctcttattcttta

SEQ ID NO: 509638 - DNA, 15 bp, Homo sapiens
tctcttattctttaa

SEQ ID NO: 509639 - DNA, 15 bp, Homo sapiens
ctcttattctttaac

SEQ ID NO: 509640 - DNA, 15 bp, Homo sapiens
tcttattctttaacc

SEQ ID NO: 509641 - DNA, 15 bp, Homo sapiens
cttattctttaacca

SEQ ID NO: 509642 - DNA, 15 bp, Homo sapiens
ttattctttaaccag

SEQ ID NO: 509643 - DNA, 15 bp, Homo sapiens
tattctttaaccaga

SEQ ID NO: 509644 - DNA, 15 bp, Homo sapiens
attctttaaccagag

SEQ ID NO: 509645 - DNA, 15 bp, Homo sapiens
ttctttaaccagagt

SEQ ID NO: 509646 - DNA, 15 bp, Homo sapiens
tctttaaccagagtt

SEQ ID NO: 509647 - DNA, 15 bp, Homo sapiens
ctttaaccagagtta

SEQ ID NO: 509648 - DNA, 15 bp, Homo sapiens
tttaaccagagttat

SEQ ID NO: 509649 - DNA, 15 bp, Homo sapiens
ttaaccagagttatg

SEQ ID NO: 509650 - DNA, 15 bp, Homo sapiens
taaccagagttatgt

SEQ ID NO: 509651 - DNA, 15 bp, Homo sapiens
aaccagagttatgta

SEQ ID NO: 509652 - DNA, 15 bp, Homo sapiens
accagagttatgtag

SEQ ID NO: 509653 - DNA, 15 bp, Homo sapiens
ccagagttatgtaga

SEQ ID NO: 509654 - DNA, 15 bp, Homo sapiens
cagagttatgtagaa

SEQ ID NO: 509655 - DNA, 15 bp, Homo sapiens
agagttatgtagaag

SEQ ID NO: 509656 - DNA, 15 bp, Homo sapiens
gagttatgtagaaga

SEQ ID NO: 509657 - DNA, 15 bp, Homo sapiens
agttatgtagaagac

SEQ ID NO: 509658 - DNA, 15 bp, Homo sapiens
gttatgtagaagact

SEQ ID NO: 509659 - DNA, 15 bp, Homo sapiens
ttatgtagaagactc

SEQ ID NO: 509660 - DNA, 15 bp, Homo sapiens
tatgtagaagactct

SEQ ID NO: 509661 - DNA, 15 bp, Homo sapiens
atgtagaagactctg

SEQ ID NO: 509662 - DNA, 15 bp, Homo sapiens
tgtagaagactctgc

SEQ ID NO: 509663 - DNA, 15 bp, Homo sapiens
gtagaagactctgcc

SEQ ID NO: 509664 - DNA, 15 bp, Homo sapiens
tagaagactctgcca

SEQ ID NO: 509665 - DNA, 15 bp, Homo sapiens
agaagactctgccac

SEQ ID NO: 509666 - DNA, 15 bp, Homo sapiens
gaagactctgccact

SEQ ID NO: 509667 - DNA, 15 bp, Homo sapiens
aagactctgccactc

SEQ ID NO: 509668 - DNA, 15 bp, Homo sapiens
agactctgccactct

SEQ ID NO: 509669 - DNA, 15 bp, Homo sapiens
gactctgccactcta

SEQ ID NO: 509670 - DNA, 15 bp, Homo sapiens
actctgccactctaa

SEQ ID NO: 509671 - DNA, 15 bp, Homo sapiens
ctctgccactctaat

SEQ ID NO: 509672 - DNA, 15 bp, Homo sapiens
tctgccactctaatc

SEQ ID NO: 509673 - DNA, 15 bp, Homo sapiens
ctgccactctaatct

SEQ ID NO: 509674 - DNA, 15 bp, Homo sapiens
tgccactctaatctt

SEQ ID NO: 509675 - DNA, 15 bp, Homo sapiens
gccactctaatcttt

SEQ ID NO: 509676 - DNA, 15 bp, Homo sapiens
ccactctaatcttta

SEQ ID NO: 509677 - DNA, 15 bp, Homo sapiens
cactctaatctttag

SEQ ID NO: 509678 - DNA, 15 bp, Homo sapiens
actctaatctttagt

SEQ ID NO: 509679 - DNA, 15 bp, Homo sapiens
ctctaatctttagta

SEQ ID NO: 509680 - DNA, 15 bp, Homo sapiens
tctaatctttagtac

SEQ ID NO: 509681 - DNA, 15 bp, Homo sapiens
ctaatctttagtaca

SEQ ID NO: 509682 - DNA, 15 bp, Homo sapiens
taatctttagtacat

SEQ ID NO: 509683 - DNA, 15 bp, Homo sapiens
aatctttagtacatg

SEQ ID NO: 509684 - DNA, 15 bp, Homo sapiens
atctttagtacatgg

SEQ ID NO: 509685 - DNA, 15 bp, Homo sapiens
tctttagtacatggc

SEQ ID NO: 509686 - DNA, 15 bp, Homo sapiens
ctttagtacatggct

SEQ ID NO: 509687 - DNA, 15 bp, Homo sapiens
tttagtacatggctg

SEQ ID NO: 509688 - DNA, 15 bp, Homo sapiens
ttagtacatggctgt

SEQ ID NO: 509689 - DNA, 15 bp, Homo sapiens
tagtacatggctgta

SEQ ID NO: 509690 - DNA, 15 bp, Homo sapiens
agtacatggctgtag

SEQ ID NO: 509691 - DNA, 15 bp, Homo sapiens
gtacatggctgtagt

SEQ ID NO: 509692 - DNA, 15 bp, Homo sapiens
tacatggctgtagtt

SEQ ID NO: 509693 - DNA, 15 bp, Homo sapiens
acatggctgtagttg

SEQ ID NO: 509694 - DNA, 15 bp, Homo sapiens
catggctgtagttgt

SEQ ID NO: 509695 - DNA, 15 bp, Homo sapiens
atggctgtagttgtt

SEQ ID NO: 509696 - DNA, 15 bp, Homo sapiens
tggctgtagttgttg

SEQ ID NO: 509697 - DNA, 15 bp, Homo sapiens
ggctgtagttgttga

SEQ ID NO: 509698 - DNA, 15 bp, Homo sapiens
gctgtagttgttgaa

SEQ ID NO: 509699 - DNA, 15 bp, Homo sapiens
ctgtagttgttgaag

SEQ ID NO: 509700 - DNA, 15 bp, Homo sapiens
tgtagttgttgaagt

SEQ ID NO: 509701 - DNA, 15 bp, Homo sapiens
gtagttgttgaagtc

SEQ ID NO: 509702 - DNA, 15 bp, Homo sapiens
tagttgttgaagtca

SEQ ID NO: 509703 - DNA, 15 bp, Homo sapiens
agttgttgaagtcag

SEQ ID NO: 509704 - DNA, 15 bp, Homo sapiens
gttgttgaagtcagg

SEQ ID NO: 509705 - DNA, 15 bp, Homo sapiens
ttgttgaagtcaggg

SEQ ID NO: 509706 - DNA, 15 bp, Homo sapiens
tgttgaagtcaggga

SEQ ID NO: 509707 - DNA, 15 bp, Homo sapiens
gttgaagtcagggag

SEQ ID NO: 509708 - DNA, 15 bp, Homo sapiens
ttgaagtcagggagc

SEQ ID NO: 509709 - DNA, 15 bp, Homo sapiens
tgaagtcagggagct

SEQ ID NO: 509710 - DNA, 15 bp, Homo sapiens
gaagtcagggagctc

SEQ ID NO: 509711 - DNA, 15 bp, Homo sapiens
aagtcagggagctcc

SEQ ID NO: 509712 - DNA, 15 bp, Homo sapiens
agtcagggagctccc

SEQ ID NO: 509713 - DNA, 15 bp, Homo sapiens
gtcagggagctccca

SEQ ID NO: 509714 - DNA, 15 bp, Homo sapiens
tcagggagctcccag

SEQ ID NO: 509715 - DNA, 15 bp, Homo sapiens
cagggagctcccaga

SEQ ID NO: 509716 - DNA, 15 bp, Homo sapiens
agggagctcccagaa

SEQ ID NO: 509717 - DNA, 15 bp, Homo sapiens
gggagctcccagaaa

SEQ ID NO: 509718 - DNA, 15 bp, Homo sapiens
ggagctcccagaaat

SEQ ID NO: 509719 - DNA, 15 bp, Homo sapiens
gagctcccagaaatg

SEQ ID NO: 509720 - DNA, 15 bp, Homo sapiens
agctcccagaaatgt

SEQ ID NO: 509721 - DNA, 15 bp, Homo sapiens
gctcccagaaatgtg

SEQ ID NO: 509722 - DNA, 15 bp, Homo sapiens
ctcccagaaatgtga

SEQ ID NO: 509723 - DNA, 15 bp, Homo sapiens
tcccagaaatgtgaa

SEQ ID NO: 509724 - DNA, 15 bp, Homo sapiens
cccagaaatgtgaaa

SEQ ID NO: 509725 - DNA, 15 bp, Homo sapiens
ccagaaatgtgaaag

SEQ ID NO: 509726 - DNA, 15 bp, Homo sapiens
cagaaatgtgaaaga

SEQ ID NO: 509727 - DNA, 15 bp, Homo sapiens
agaaatgtgaaagag

SEQ ID NO: 509728 - DNA, 15 bp, Homo sapiens
gaaatgtgaaagagt

SEQ ID NO: 509729 - DNA, 15 bp, Homo sapiens
aaatgtgaaagagtg

SEQ ID NO: 509730 - DNA, 15 bp, Homo sapiens
aatgtgaaagagtgt

SEQ ID NO: 509731 - DNA, 15 bp, Homo sapiens
atgtgaaagagtgtg

SEQ ID NO: 509732 - DNA, 15 bp, Homo sapiens
tgtgaaagagtgtgt

SEQ ID NO: 509733 - DNA, 15 bp, Homo sapiens
gtgaaagagtgtgtg

SEQ ID NO: 509734 - DNA, 15 bp, Homo sapiens
tgaaagagtgtgtga

SEQ ID NO: 509735 - DNA, 15 bp, Homo sapiens
gaaagagtgtgtgag

SEQ ID NO: 509736 - DNA, 15 bp, Homo sapiens
aaagagtgtgtgaga

SEQ ID NO: 509737 - DNA, 15 bp, Homo sapiens
aagagtgtgtgagat

SEQ ID NO: 509738 - DNA, 15 bp, Homo sapiens
agagtgtgtgagatg

SEQ ID NO: 509739 - DNA, 15 bp, Homo sapiens
gagtgtgtgagatgg

SEQ ID NO: 509740 - DNA, 15 bp, Homo sapiens
agtgtgtgagatggg

SEQ ID NO: 509741 - DNA, 15 bp, Homo sapiens
gtgtgtgagatgggc

SEQ ID NO: 509742 - DNA, 15 bp, Homo sapiens
tgtgtgagatgggct

SEQ ID NO: 509743 - DNA, 15 bp, Homo sapiens
gtgtgagatgggctt

SEQ ID NO: 509744 - DNA, 15 bp, Homo sapiens
tgtgagatgggcttg

SEQ ID NO: 509745 - DNA, 15 bp, Homo sapiens
gtgagatgggcttgc

SEQ ID NO: 509746 - DNA, 15 bp, Homo sapiens
tgagatgggcttgcc

SEQ ID NO: 509747 - DNA, 15 bp, Homo sapiens
gagatgggcttgcct

SEQ ID NO: 509748 - DNA, 15 bp, Homo sapiens
agatgggcttgcctc

SEQ ID NO: 509749 - DNA, 15 bp, Homo sapiens
gatgggcttgcctct

SEQ ID NO: 509750 - DNA, 15 bp, Homo sapiens
atgggcttgcctcta

SEQ ID NO: 509751 - DNA, 15 bp, Homo sapiens
tgggcttgcctctag

SEQ ID NO: 509752 - DNA, 15 bp, Homo sapiens
gggcttgcctctaga

SEQ ID NO: 509753 - DNA, 15 bp, Homo sapiens
ggcttgcctctagag

SEQ ID NO: 509754 - DNA, 15 bp, Homo sapiens
gcttgcctctagaga

SEQ ID NO: 509755 - DNA, 15 bp, Homo sapiens
cttgcctctagagac

SEQ ID NO: 509756 - DNA, 15 bp, Homo sapiens
ttgcctctagagact

SEQ ID NO: 509757 - DNA, 15 bp, Homo sapiens
tgcctctagagactt

SEQ ID NO: 509758 - DNA, 15 bp, Homo sapiens
gcctctagagactta

SEQ ID NO: 509759 - DNA, 15 bp, Homo sapiens
cctctagagacttat

SEQ ID NO: 509760 - DNA, 15 bp, Homo sapiens
ctctagagacttatc

SEQ ID NO: 509761 - DNA, 15 bp, Homo sapiens
tctagagacttatct

SEQ ID NO: 509762 - DNA, 15 bp, Homo sapiens
ctagagacttatctt

SEQ ID NO: 509763 - DNA, 15 bp, Homo sapiens
tagagacttatcttt

SEQ ID NO: 509764 - DNA, 15 bp, Homo sapiens
agagacttatctttg

SEQ ID NO: 509765 - DNA, 15 bp, Homo sapiens
gagacttatctttgg

SEQ ID NO: 509766 - DNA, 15 bp, Homo sapiens
agacttatctttgga

SEQ ID NO: 509767 - DNA, 15 bp, Homo sapiens
gacttatctttggaa

SEQ ID NO: 509768 - DNA, 15 bp, Homo sapiens
acttatctttggaac

SEQ ID NO: 509769 - DNA, 15 bp, Homo sapiens
cttatctttggaact

SEQ ID NO: 509770 - DNA, 15 bp, Homo sapiens
ttatctttggaactt

SEQ ID NO: 509771 - DNA, 15 bp, Homo sapiens
tatctttggaacttt

SEQ ID NO: 509772 - DNA, 15 bp, Homo sapiens
atctttggaactttc

SEQ ID NO: 509773 - DNA, 15 bp, Homo sapiens
tctttggaactttcc

SEQ ID NO: 509774 - DNA, 15 bp, Homo sapiens
ctttggaactttccc

SEQ ID NO: 509775 - DNA, 15 bp, Homo sapiens
tttggaactttccca

SEQ ID NO: 509776 - DNA, 15 bp, Homo sapiens
ttggaactttcccag

SEQ ID NO: 509777 - DNA, 15 bp, Homo sapiens
tggaactttcccagt

SEQ ID NO: 509778 - DNA, 15 bp, Homo sapiens
ggaactttcccagtg

SEQ ID NO: 509779 - DNA, 15 bp, Homo sapiens
gaactttcccagtga

SEQ ID NO: 509780 - DNA, 15 bp, Homo sapiens
aactttcccagtgat

SEQ ID NO: 509781 - DNA, 15 bp, Homo sapiens
actttcccagtgatc

SEQ ID NO: 509782 - DNA, 15 bp, Homo sapiens
ctttcccagtgatct

SEQ ID NO: 509783 - DNA, 15 bp, Homo sapiens
tttcccagtgatctg

SEQ ID NO: 509784 - DNA, 15 bp, Homo sapiens
ttcccagtgatctgt

SEQ ID NO: 509785 - DNA, 15 bp, Homo sapiens
tcccagtgatctgtg

SEQ ID NO: 509786 - DNA, 15 bp, Homo sapiens
cccagtgatctgtgg

SEQ ID NO: 509787 - DNA, 15 bp, Homo sapiens
ccagtgatctgtgga

SEQ ID NO: 509788 - DNA, 15 bp, Homo sapiens
cagtgatctgtggac

SEQ ID NO: 509789 - DNA, 15 bp, Homo sapiens
agtgatctgtggacc

SEQ ID NO: 509790 - DNA, 15 bp, Homo sapiens
gtgatctgtggacca

SEQ ID NO: 509791 - DNA, 15 bp, Homo sapiens
tgatctgtggaccac

SEQ ID NO: 509792 - DNA, 15 bp, Homo sapiens
gatctgtggaccaca

SEQ ID NO: 509793 - DNA, 15 bp, Homo sapiens
atctgtggaccacaa

SEQ ID NO: 509794 - DNA, 15 bp, Homo sapiens
tctgtggaccacaat

SEQ ID NO: 509795 - DNA, 15 bp, Homo sapiens
ctgtggaccacaatg

SEQ ID NO: 509796 - DNA, 15 bp, Homo sapiens
tgtggaccacaatgt

SEQ ID NO: 509797 - DNA, 15 bp, Homo sapiens
gtggaccacaatgtg

SEQ ID NO: 509798 - DNA, 15 bp, Homo sapiens
tggaccacaatgtga

SEQ ID NO: 509799 - DNA, 15 bp, Homo sapiens
ggaccacaatgtgat

SEQ ID NO: 509800 - DNA, 15 bp, Homo sapiens
gaccacaatgtgatt

SEQ ID NO: 509801 - DNA, 15 bp, Homo sapiens
accacaatgtgattt

SEQ ID NO: 509802 - DNA, 15 bp, Homo sapiens
ccacaatgtgatttt

SEQ ID NO: 509803 - DNA, 15 bp, Homo sapiens
cacaatgtgattttt

SEQ ID NO: 509804 - DNA, 15 bp, Homo sapiens
acaatgtgatttttg

SEQ ID NO: 509805 - DNA, 15 bp, Homo sapiens
caatgtgatttttgt

SEQ ID NO: 509806 - DNA, 15 bp, Homo sapiens
aatgtgatttttgtt

SEQ ID NO: 509807 - DNA, 15 bp, Homo sapiens
atgtgatttttgttt

SEQ ID NO: 509808 - DNA, 15 bp, Homo sapiens
tgtgatttttgtttt

SEQ ID NO: 509809 - DNA, 15 bp, Homo sapiens
gtgatttttgttttg

SEQ ID NO: 509810 - DNA, 15 bp, Homo sapiens
tgatttttgttttgt

SEQ ID NO: 509811 - DNA, 15 bp, Homo sapiens
gatttttgttttgtt

SEQ ID NO: 509812 - DNA, 15 bp, Homo sapiens
atttttgttttgttt

SEQ ID NO: 509813 - DNA, 15 bp, Homo sapiens
tttttgttttgtttt

SEQ ID NO: 509814 - DNA, 15 bp, Homo sapiens
ttttgttttgttttg

SEQ ID NO: 509815 - DNA, 15 bp, Homo sapiens
tttgttttgttttgt

SEQ ID NO: 509816 - DNA, 15 bp, Homo sapiens
ttgttttgttttgtt

SEQ ID NO: 509817 - DNA, 15 bp, Homo sapiens
tgttttgttttgttc

SEQ ID NO: 509818 - DNA, 15 bp, Homo sapiens
gttttgttttgttct

SEQ ID NO: 509819 - DNA, 15 bp, Homo sapiens
ttttgttttgttctg

SEQ ID NO: 509820 - DNA, 15 bp, Homo sapiens
tttgttttgttctga

SEQ ID NO: 509821 - DNA, 15 bp, Homo sapiens
ttgttttgttctgat

SEQ ID NO: 509822 - DNA, 15 bp, Homo sapiens
tgttttgttctgatg

SEQ ID NO: 509823 - DNA, 15 bp, Homo sapiens
gttttgttctgatgc

SEQ ID NO: 509824 - DNA, 15 bp, Homo sapiens
ttttgttctgatgca

SEQ ID NO: 509825 - DNA, 15 bp, Homo sapiens
tttgttctgatgcag

SEQ ID NO: 509826 - DNA, 15 bp, Homo sapiens
ttgttctgatgcagc

SEQ ID NO: 509827 - DNA, 15 bp, Homo sapiens
tgttctgatgcagct

SEQ ID NO: 509828 - DNA, 15 bp, Homo sapiens
gttctgatgcagctt

SEQ ID NO: 509829 - DNA, 15 bp, Homo sapiens
ttctgatgcagcttc

SEQ ID NO: 509830 - DNA, 15 bp, Homo sapiens
tctgatgcagcttcc

SEQ ID NO: 509831 - DNA, 15 bp, Homo sapiens
ctgatgcagcttcca

SEQ ID NO: 509832 - DNA, 15 bp, Homo sapiens
tgatgcagcttccat

SEQ ID NO: 509833 - DNA, 15 bp, Homo sapiens
gatgcagcttccatg

SEQ ID NO: 509834 - DNA, 15 bp, Homo sapiens
atgcagcttccatga

SEQ ID NO: 509835 - DNA, 15 bp, Homo sapiens
tgcagcttccatgag

SEQ ID NO: 509836 - DNA, 15 bp, Homo sapiens
gcagcttccatgagg

SEQ ID NO: 509837 - DNA, 15 bp, Homo sapiens
cagcttccatgaggc

SEQ ID NO: 509838 - DNA, 15 bp, Homo sapiens
agcttccatgaggca

SEQ ID NO: 509839 - DNA, 15 bp, Homo sapiens
gcttccatgaggcag

SEQ ID NO: 509840 - DNA, 15 bp, Homo sapiens
cttccatgaggcagg

SEQ ID NO: 509841 - DNA, 15 bp, Homo sapiens
ttccatgaggcaggc

SEQ ID NO: 509842 - DNA, 15 bp, Homo sapiens
tccatgaggcaggct

SEQ ID NO: 509843 - DNA, 15 bp, Homo sapiens
ccatgaggcaggctg

SEQ ID NO: 509844 - DNA, 15 bp, Homo sapiens
catgaggcaggctga

SEQ ID NO: 509845 - DNA, 15 bp, Homo sapiens
atgaggcaggctgaa

SEQ ID NO: 509846 - DNA, 15 bp, Homo sapiens
tgaggcaggctgaac

SEQ ID NO: 509847 - DNA, 15 bp, Homo sapiens
gaggcaggctgaacc

SEQ ID NO: 509848 - DNA, 15 bp, Homo sapiens
aggcaggctgaacct

SEQ ID NO: 509849 - DNA, 15 bp, Homo sapiens
ggcaggctgaacctg

SEQ ID NO: 509850 - DNA, 15 bp, Homo sapiens
gcaggctgaacctgc

SEQ ID NO: 509851 - DNA, 15 bp, Homo sapiens
caggctgaacctgca

SEQ ID NO: 509852 - DNA, 15 bp, Homo sapiens
aggctgaacctgcag

SEQ ID NO: 509853 - DNA, 15 bp, Homo sapiens
ggctgaacctgcaga

SEQ ID NO: 509854 - DNA, 15 bp, Homo sapiens
gctgaacctgcagat

SEQ ID NO: 509855 - DNA, 15 bp, Homo sapiens
ctgaacctgcagata

SEQ ID NO: 509856 - DNA, 15 bp, Homo sapiens
tgaacctgcagatat

SEQ ID NO: 509857 - DNA, 15 bp, Homo sapiens
gaacctgcagatatg

SEQ ID NO: 509858 - DNA, 15 bp, Homo sapiens
aacctgcagatatgc

SEQ ID NO: 509859 - DNA, 15 bp, Homo sapiens
acctgcagatatgcg

SEQ ID NO: 509860 - DNA, 15 bp, Homo sapiens
cctgcagatatgcgc

SEQ ID NO: 509861 - DNA, 15 bp, Homo sapiens
ctgcagatatgcgcc

SEQ ID NO: 509862 - DNA, 15 bp, Homo sapiens
tgcagatatgcgccc

SEQ ID NO: 509863 - DNA, 15 bp, Homo sapiens
gcagatatgcgccca

SEQ ID NO: 509864 - DNA, 15 bp, Homo sapiens
cagatatgcgcccag

SEQ ID NO: 509865 - DNA, 15 bp, Homo sapiens
agatatgcgcccaga

SEQ ID NO: 509866 - DNA, 15 bp, Homo sapiens
gatatgcgcccagag

SEQ ID NO: 509867 - DNA, 15 bp, Homo sapiens
atatgcgcccagaga

SEQ ID NO: 509868 - DNA, 15 bp, Homo sapiens
tatgcgcccagagat

SEQ ID NO: 509869 - DNA, 15 bp, Homo sapiens
atgcgcccagagata

SEQ ID NO: 509870 - DNA, 15 bp, Homo sapiens
tgcgcccagagatat

SEQ ID NO: 509871 - DNA, 15 bp, Homo sapiens
gcgcccagagatatg

SEQ ID NO: 509872 - DNA, 15 bp, Homo sapiens
cgcccagagatatgg

SEQ ID NO: 509873 - DNA, 15 bp, Homo sapiens
gcccagagatatgga

SEQ ID NO: 509874 - DNA, 15 bp, Homo sapiens
cccagagatatggat

SEQ ID NO: 509875 - DNA, 15 bp, Homo sapiens
ccagagatatggatc

SEQ ID NO: 509876 - DNA, 15 bp, Homo sapiens
cagagatatggatcg

SEQ ID NO: 509877 - DNA, 15 bp, Homo sapiens
agagatatggatcgc

SEQ ID NO: 509878 - DNA, 15 bp, Homo sapiens
gagatatggatcgcc

SEQ ID NO: 509879 - DNA, 15 bp, Homo sapiens
agatatggatcgccc

SEQ ID NO: 509880 - DNA, 15 bp, Homo sapiens
gatatggatcgccca

SEQ ID NO: 509881 - DNA, 15 bp, Homo sapiens
atatggatcgcccaa

SEQ ID NO: 509882 - DNA, 15 bp, Homo sapiens
tatggatcgcccaag

SEQ ID NO: 509883 - DNA, 15 bp, Homo sapiens
atggatcgcccaaga

SEQ ID NO: 509884 - DNA, 15 bp, Homo sapiens
tggatcgcccaagag

SEQ ID NO: 509885 - DNA, 15 bp, Homo sapiens
ggatcgcccaagagt

SEQ ID NO: 509886 - DNA, 15 bp, Homo sapiens
gatcgcccaagagtt

SEQ ID NO: 509887 - DNA, 15 bp, Homo sapiens
atcgcccaagagttg

SEQ ID NO: 509888 - DNA, 15 bp, Homo sapiens
tcgcccaagagttgc

SEQ ID NO: 509889 - DNA, 15 bp, Homo sapiens
cgcccaagagttgcg

SEQ ID NO: 509890 - DNA, 15 bp, Homo sapiens
gcccaagagttgcgg

SEQ ID NO: 509891 - DNA, 15 bp, Homo sapiens
cccaagagttgcggc

SEQ ID NO: 509892 - DNA, 15 bp, Homo sapiens
ccaagagttgcggcg

SEQ ID NO: 509893 - DNA, 15 bp, Homo sapiens
caagagttgcggcgt

SEQ ID NO: 509894 - DNA, 15 bp, Homo sapiens
aagagttgcggcgta

SEQ ID NO: 509895 - DNA, 15 bp, Homo sapiens
agagttgcggcgtat

SEQ ID NO: 509896 - DNA, 15 bp, Homo sapiens
gagttgcggcgtatt

SEQ ID NO: 509897 - DNA, 15 bp, Homo sapiens
agttgcggcgtattg

SEQ ID NO: 509898 - DNA, 15 bp, Homo sapiens
gttgcggcgtattgg

SEQ ID NO: 509899 - DNA, 15 bp, Homo sapiens
ttgcggcgtattgga

SEQ ID NO: 509900 - DNA, 15 bp, Homo sapiens
tgcggcgtattggag

SEQ ID NO: 509901 - DNA, 15 bp, Homo sapiens
gcggcgtattggaga

SEQ ID NO: 509902 - DNA, 15 bp, Homo sapiens
cggcgtattggagac

SEQ ID NO: 509903 - DNA, 15 bp, Homo sapiens
ggcgtattggagacg

SEQ ID NO: 509904 - DNA, 15 bp, Homo sapiens
gcgtattggagacga

SEQ ID NO: 509905 - DNA, 15 bp, Homo sapiens
cgtattggagacgag

SEQ ID NO: 509906 - DNA, 15 bp, Homo sapiens
gtattggagacgagt

SEQ ID NO: 509907 - DNA, 15 bp, Homo sapiens
tattggagacgagtt

SEQ ID NO: 509908 - DNA, 15 bp, Homo sapiens
attggagacgagttt

SEQ ID NO: 509909 - DNA, 15 bp, Homo sapiens
ttggagacgagttta

SEQ ID NO: 509910 - DNA, 15 bp, Homo sapiens
tggagacgagtttaa

SEQ ID NO: 509911 - DNA, 15 bp, Homo sapiens
ggagacgagtttaac

SEQ ID NO: 509912 - DNA, 15 bp, Homo sapiens
gagacgagtttaacg

SEQ ID NO: 509913 - DNA, 15 bp, Homo sapiens
agacgagtttaacgc

SEQ ID NO: 509914 - DNA, 15 bp, Homo sapiens
gacgagtttaacgct

SEQ ID NO: 509915 - DNA, 15 bp, Homo sapiens
acgagtttaacgctt

SEQ ID NO: 509916 - DNA, 15 bp, Homo sapiens
cgagtttaacgctta

SEQ ID NO: 509917 - DNA, 15 bp, Homo sapiens
gagtttaacgcttac

SEQ ID NO: 509918 - DNA, 15 bp, Homo sapiens
agtttaacgcttact

SEQ ID NO: 509919 - DNA, 15 bp, Homo sapiens
gtttaacgcttacta

SEQ ID NO: 509920 - DNA, 15 bp, Homo sapiens
tttaacgcttactat

SEQ ID NO: 509921 - DNA, 15 bp, Homo sapiens
ttaacgcttactatg

SEQ ID NO: 509922 - DNA, 15 bp, Homo sapiens
taacgcttactatgc

SEQ ID NO: 509923 - DNA, 15 bp, Homo sapiens
aacgcttactatgca

SEQ ID NO: 509924 - DNA, 15 bp, Homo sapiens
acgcttactatgcaa

SEQ ID NO: 509925 - DNA, 15 bp, Homo sapiens
cgcttactatgcaag

SEQ ID NO: 509926 - DNA, 15 bp, Homo sapiens
gcttactatgcaagg

SEQ ID NO: 509927 - DNA, 15 bp, Homo sapiens
cttactatgcaagga

SEQ ID NO: 509928 - DNA, 15 bp, Homo sapiens
ttactatgcaaggag

SEQ ID NO: 509929 - DNA, 15 bp, Homo sapiens
tactatgcaaggagg

SEQ ID NO: 509930 - DNA, 15 bp, Homo sapiens
actatgcaaggaggg

SEQ ID NO: 509931 - DNA, 15 bp, Homo sapiens
ctatgcaaggagggt

SEQ ID NO: 509932 - DNA, 15 bp, Homo sapiens
tatgcaaggagggta

SEQ ID NO: 509933 - DNA, 15 bp, Homo sapiens
atgcaaggagggtaa

SEQ ID NO: 509934 - DNA, 15 bp, Homo sapiens
tgcaaggagggtaat

SEQ ID NO: 509935 - DNA, 15 bp, Homo sapiens
gcaaggagggtaatg

SEQ ID NO: 509936 - DNA, 15 bp, Homo sapiens
caaggagggtaatga

SEQ ID NO: 509937 - DNA, 15 bp, Homo sapiens
aaggagggtaatgat

SEQ ID NO: 509938 - DNA, 15 bp, Homo sapiens
aggagggtaatgatg

SEQ ID NO: 509939 - DNA, 15 bp, Homo sapiens
ggagggtaatgatgt

SEQ ID NO: 509940 - DNA, 15 bp, Homo sapiens
gagggtaatgatgtt

SEQ ID NO: 509941 - DNA, 15 bp, Homo sapiens
agggtaatgatgttt

SEQ ID NO: 509942 - DNA, 15 bp, Homo sapiens
gggtaatgatgtttt

SEQ ID NO: 509943 - DNA, 15 bp, Homo sapiens
ggtaatgatgttttc

SEQ ID NO: 509944 - DNA, 15 bp, Homo sapiens
gtaatgatgttttct

SEQ ID NO: 509945 - DNA, 15 bp, Homo sapiens
taatgatgttttctt

SEQ ID NO: 509946 - DNA, 15 bp, Homo sapiens
aatgatgttttcttt

SEQ ID NO: 509947 - DNA, 15 bp, Homo sapiens
atgatgttttcttta

SEQ ID NO: 509948 - DNA, 15 bp, Homo sapiens
tgatgttttctttac

SEQ ID NO: 509949 - DNA, 15 bp, Homo sapiens
gatgttttctttacc

SEQ ID NO: 509950 - DNA, 15 bp, Homo sapiens
atgttttctttaccc

SEQ ID NO: 509951 - DNA, 15 bp, Homo sapiens
tgttttctttacccg

SEQ ID NO: 509952 - DNA, 15 bp, Homo sapiens
gttttctttacccgc

SEQ ID NO: 509953 - DNA, 15 bp, Homo sapiens
ttttctttacccgct

SEQ ID NO: 509954 - DNA, 15 bp, Homo sapiens
tttctttacccgctt

SEQ ID NO: 509955 - DNA, 15 bp, Homo sapiens
ttctttacccgcttt

SEQ ID NO: 509956 - DNA, 15 bp, Homo sapiens
tctttacccgctttt

SEQ ID NO: 509957 - DNA, 15 bp, Homo sapiens
ctttacccgcttttc

SEQ ID NO: 509958 - DNA, 15 bp, Homo sapiens
tttacccgcttttct

SEQ ID NO: 509959 - DNA, 15 bp, Homo sapiens
ttacccgcttttctg

SEQ ID NO: 509960 - DNA, 15 bp, Homo sapiens
tacccgcttttctgc

SEQ ID NO: 509961 - DNA, 15 bp, Homo sapiens
acccgcttttctgct

SEQ ID NO: 509962 - DNA, 15 bp, Homo sapiens
cccgcttttctgctc

SEQ ID NO: 509963 - DNA, 15 bp, Homo sapiens
ccgcttttctgctca

SEQ ID NO: 509964 - DNA, 15 bp, Homo sapiens
cgcttttctgctcac

SEQ ID NO: 509965 - DNA, 15 bp, Homo sapiens
gcttttctgctcaca

SEQ ID NO: 509966 - DNA, 15 bp, Homo sapiens
cttttctgctcacac

SEQ ID NO: 509967 - DNA, 15 bp, Homo sapiens
ttttctgctcacacc

SEQ ID NO: 509968 - DNA, 15 bp, Homo sapiens
tttctgctcacaccc

SEQ ID NO: 509969 - DNA, 15 bp, Homo sapiens
ttctgctcacaccct

SEQ ID NO: 509970 - DNA, 15 bp, Homo sapiens
tctgctcacaccctc

SEQ ID NO: 509971 - DNA, 15 bp, Homo sapiens
ctgctcacaccctcc

SEQ ID NO: 509972 - DNA, 15 bp, Homo sapiens
tgctcacaccctccc

SEQ ID NO: 509973 - DNA, 15 bp, Homo sapiens
gctcacaccctcccc

SEQ ID NO: 509974 - DNA, 15 bp, Homo sapiens
ctcacaccctcccct

SEQ ID NO: 509975 - DNA, 15 bp, Homo sapiens
tcacaccctcccctt

SEQ ID NO: 509976 - DNA, 15 bp, Homo sapiens
cacaccctccccttc

SEQ ID NO: 509977 - DNA, 15 bp, Homo sapiens
acaccctccccttcc

SEQ ID NO: 509978 - DNA, 15 bp, Homo sapiens
caccctccccttcca

SEQ ID NO: 509979 - DNA, 15 bp, Homo sapiens
accctccccttccac

SEQ ID NO: 509980 - DNA, 15 bp, Homo sapiens
ccctccccttccaca

SEQ ID NO: 509981 - DNA, 15 bp, Homo sapiens
cctccccttccacac

SEQ ID NO: 509982 - DNA, 15 bp, Homo sapiens
ctccccttccacact

SEQ ID NO: 509983 - DNA, 15 bp, Homo sapiens
tccccttccacacta

SEQ ID NO: 509984 - DNA, 15 bp, Homo sapiens
ccccttccacactat

SEQ ID NO: 509985 - DNA, 15 bp, Homo sapiens
cccttccacactata

SEQ ID NO: 509986 - DNA, 15 bp, Homo sapiens
ccttccacactatat

SEQ ID NO: 509987 - DNA, 15 bp, Homo sapiens
cttccacactatatt

SEQ ID NO: 509988 - DNA, 15 bp, Homo sapiens
ttccacactatattt

SEQ ID NO: 509989 - DNA, 15 bp, Homo sapiens
tccacactatatttt

SEQ ID NO: 509990 - DNA, 15 bp, Homo sapiens
ccacactatattttt

SEQ ID NO: 509991 - DNA, 15 bp, Homo sapiens
cacactatatttttt

SEQ ID NO: 509992 - DNA, 15 bp, Homo sapiens
acactatattttttt

SEQ ID NO: 509993 - DNA, 15 bp, Homo sapiens
cactatattttttta

SEQ ID NO: 509994 - DNA, 15 bp, Homo sapiens
actatatttttttaa

SEQ ID NO: 509995 - DNA, 15 bp, Homo sapiens
ctatatttttttaaa

SEQ ID NO: 509996 - DNA, 15 bp, Homo sapiens
tatatttttttaaaa

SEQ ID NO: 509997 - DNA, 15 bp, Homo sapiens
atatttttttaaaaa

SEQ ID NO: 509998 - DNA, 15 bp, Homo sapiens
tatttttttaaaaag

SEQ ID NO: 509999 - DNA, 15 bp, Homo sapiens
atttttttaaaaaga

SEQ ID NO: 510000 - DNA, 15 bp, Homo sapiens
tttttttaaaaagac

SEQ ID NO: 510001 - DNA, 15 bp, Homo sapiens
ttttttaaaaagaca

SEQ ID NO: 510002 - DNA, 15 bp, Homo sapiens
tttttaaaaagacag

SEQ ID NO: 510003 - DNA, 15 bp, Homo sapiens
ttttaaaaagacagt

SEQ ID NO: 510004 - DNA, 15 bp, Homo sapiens
tttaaaaagacagtg

SEQ ID NO: 510005 - DNA, 15 bp, Homo sapiens
ttaaaaagacagtga

SEQ ID NO: 510006 - DNA, 15 bp, Homo sapiens
taaaaagacagtgac

SEQ ID NO: 510007 - DNA, 15 bp, Homo sapiens
aaaaagacagtgact

SEQ ID NO: 510008 - DNA, 15 bp, Homo sapiens
aaaagacagtgactt

SEQ ID NO: 510009 - DNA, 15 bp, Homo sapiens
aaagacagtgacttc

SEQ ID NO: 510010 - DNA, 15 bp, Homo sapiens
aagacagtgacttct

SEQ ID NO: 510011 - DNA, 15 bp, Homo sapiens
agacagtgacttctt

SEQ ID NO: 510012 - DNA, 15 bp, Homo sapiens
gacagtgacttcttg

SEQ ID NO: 510013 - DNA, 15 bp, Homo sapiens
acagtgacttcttgt

SEQ ID NO: 510014 - DNA, 15 bp, Homo sapiens
cagtgacttcttgta

SEQ ID NO: 510015 - DNA, 15 bp, Homo sapiens
agtgacttcttgtaa

SEQ ID NO: 510016 - DNA, 15 bp, Homo sapiens
gtgacttcttgtaac

SEQ ID NO: 510017 - DNA, 15 bp, Homo sapiens
tgacttcttgtaact

SEQ ID NO: 510018 - DNA, 15 bp, Homo sapiens
gacttcttgtaacta

SEQ ID NO: 510019 - DNA, 15 bp, Homo sapiens
acttcttgtaactac

SEQ ID NO: 510020 - DNA, 15 bp, Homo sapiens
cttcttgtaactaca

SEQ ID NO: 510021 - DNA, 15 bp, Homo sapiens
ttcttgtaactacat

SEQ ID NO: 510022 - DNA, 15 bp, Homo sapiens
tcttgtaactacatg

SEQ ID NO: 510023 - DNA, 15 bp, Homo sapiens
cttgtaactacatgc

SEQ ID NO: 510024 - DNA, 15 bp, Homo sapiens
ttgtaactacatgct

SEQ ID NO: 510025 - DNA, 15 bp, Homo sapiens
tgtaactacatgcta

SEQ ID NO: 510026 - DNA, 15 bp, Homo sapiens
gtaactacatgctaa

SEQ ID NO: 510027 - DNA, 15 bp, Homo sapiens
taactacatgctaat

SEQ ID NO: 510028 - DNA, 15 bp, Homo sapiens
aactacatgctaatt

SEQ ID NO: 510029 - DNA, 15 bp, Homo sapiens
actacatgctaattc

SEQ ID NO: 510030 - DNA, 15 bp, Homo sapiens
ctacatgctaattct

SEQ ID NO: 510031 - DNA, 15 bp, Homo sapiens
tacatgctaattctg

SEQ ID NO: 510032 - DNA, 15 bp, Homo sapiens
acatgctaattctgg

SEQ ID NO: 510033 - DNA, 15 bp, Homo sapiens
catgctaattctgga

SEQ ID NO: 510034 - DNA, 15 bp, Homo sapiens
atgctaattctggaa

SEQ ID NO: 510035 - DNA, 15 bp, Homo sapiens
tgctaattctggaaa

SEQ ID NO: 510036 - DNA, 15 bp, Homo sapiens
gctaattctggaaat

SEQ ID NO: 510037 - DNA, 15 bp, Homo sapiens
ctaattctggaaatg

SEQ ID NO: 510038 - DNA, 15 bp, Homo sapiens
taattctggaaatga

SEQ ID NO: 510039 - DNA, 15 bp, Homo sapiens
aattctggaaatgat

SEQ ID NO: 510040 - DNA, 15 bp, Homo sapiens
attctggaaatgatt

SEQ ID NO: 510041 - DNA, 15 bp, Homo sapiens
ttctggaaatgatta

SEQ ID NO: 510042 - DNA, 15 bp, Homo sapiens
tctggaaatgattac

SEQ ID NO: 510043 - DNA, 15 bp, Homo sapiens
ctggaaatgattact

SEQ ID NO: 510044 - DNA, 15 bp, Homo sapiens
tggaaatgattactg

SEQ ID NO: 510045 - DNA, 15 bp, Homo sapiens
ggaaatgattactgt

SEQ ID NO: 510046 - DNA, 15 bp, Homo sapiens
gaaatgattactgtt

SEQ ID NO: 510047 - DNA, 15 bp, Homo sapiens
aaatgattactgttg

SEQ ID NO: 510048 - DNA, 15 bp, Homo sapiens
aatgattactgttgc

SEQ ID NO: 510049 - DNA, 15 bp, Homo sapiens
atgattactgttgcc

SEQ ID NO: 510050 - DNA, 15 bp, Homo sapiens
tgattactgttgcct

SEQ ID NO: 510051 - DNA, 15 bp, Homo sapiens
gattactgttgccta

SEQ ID NO: 510052 - DNA, 15 bp, Homo sapiens
attactgttgcctag

SEQ ID NO: 510053 - DNA, 15 bp, Homo sapiens
ttactgttgcctagt

SEQ ID NO: 510054 - DNA, 15 bp, Homo sapiens
tactgttgcctagtt

SEQ ID NO: 510055 - DNA, 15 bp, Homo sapiens
actgttgcctagttg

SEQ ID NO: 510056 - DNA, 15 bp, Homo sapiens
ctgttgcctagttgt

SEQ ID NO: 510057 - DNA, 15 bp, Homo sapiens
tgttgcctagttgtg

SEQ ID NO: 510058 - DNA, 15 bp, Homo sapiens
gttgcctagttgtga

SEQ ID NO: 510059 - DNA, 15 bp, Homo sapiens
ttgcctagttgtgac

SEQ ID NO: 510060 - DNA, 15 bp, Homo sapiens
tgcctagttgtgacc

SEQ ID NO: 510061 - DNA, 15 bp, Homo sapiens
gcctagttgtgacct

SEQ ID NO: 510062 - DNA, 15 bp, Homo sapiens
cctagttgtgacctt

SEQ ID NO: 510063 - DNA, 15 bp, Homo sapiens
ctagttgtgaccttt

SEQ ID NO: 510064 - DNA, 15 bp, Homo sapiens
tagttgtgacctttc

SEQ ID NO: 510065 - DNA, 15 bp, Homo sapiens
agttgtgacctttca

SEQ ID NO: 510066 - DNA, 15 bp, Homo sapiens
gttgtgacctttcat

SEQ ID NO: 510067 - DNA, 15 bp, Homo sapiens
ttgtgacctttcatt

SEQ ID NO: 510068 - DNA, 15 bp, Homo sapiens
tgtgacctttcattg

SEQ ID NO: 510069 - DNA, 15 bp, Homo sapiens
gtgacctttcattgt

SEQ ID NO: 510070 - DNA, 15 bp, Homo sapiens
tgacctttcattgtt

SEQ ID NO: 510071 - DNA, 15 bp, Homo sapiens
gacctttcattgttt

SEQ ID NO: 510072 - DNA, 15 bp, Homo sapiens
acctttcattgtttc

SEQ ID NO: 510073 - DNA, 15 bp, Homo sapiens
cctttcattgtttct

SEQ ID NO: 510074 - DNA, 15 bp, Homo sapiens
ctttcattgtttctc

SEQ ID NO: 510075 - DNA, 15 bp, Homo sapiens
tttcattgtttctcc

SEQ ID NO: 510076 - DNA, 15 bp, Homo sapiens
ttcattgtttctcct

SEQ ID NO: 510077 - DNA, 15 bp, Homo sapiens
tcattgtttctcctt

SEQ ID NO: 510078 - DNA, 15 bp, Homo sapiens
cattgtttctccttt

SEQ ID NO: 510079 - DNA, 15 bp, Homo sapiens
attgtttctcctttc

SEQ ID NO: 510080 - DNA, 15 bp, Homo sapiens
ttgtttctcctttcc

SEQ ID NO: 510081 - DNA, 15 bp, Homo sapiens
tgtttctcctttccc

SEQ ID NO: 510082 - DNA, 15 bp, Homo sapiens
gtttctcctttccca

SEQ ID NO: 510083 - DNA, 15 bp, Homo sapiens
tttctcctttcccat

SEQ ID NO: 510084 - DNA, 15 bp, Homo sapiens
ttctcctttcccatt

SEQ ID NO: 510085 - DNA, 15 bp, Homo sapiens
tctcctttcccattt

SEQ ID NO: 510086 - DNA, 15 bp, Homo sapiens
ctcctttcccatttt

SEQ ID NO: 510087 - DNA, 15 bp, Homo sapiens
tcctttcccattttt

SEQ ID NO: 510088 - DNA, 15 bp, Homo sapiens
cctttcccatttttc

SEQ ID NO: 510089 - DNA, 15 bp, Homo sapiens
ctttcccatttttca

SEQ ID NO: 510090 - DNA, 15 bp, Homo sapiens
tttcccatttttcat

SEQ ID NO: 510091 - DNA, 15 bp, Homo sapiens
ttcccatttttcatt

SEQ ID NO: 510092 - DNA, 15 bp, Homo sapiens
tcccatttttcattt

SEQ ID NO: 510093 - DNA, 15 bp, Homo sapiens
cccatttttcatttg

SEQ ID NO: 510094 - DNA, 15 bp, Homo sapiens
ccatttttcatttgt

SEQ ID NO: 510095 - DNA, 15 bp, Homo sapiens
catttttcatttgtt

SEQ ID NO: 510096 - DNA, 15 bp, Homo sapiens
atttttcatttgttt

SEQ ID NO: 510097 - DNA, 15 bp, Homo sapiens
tttttcatttgtttt

SEQ ID NO: 510098 - DNA, 15 bp, Homo sapiens
ttttcatttgtttta

SEQ ID NO: 510099 - DNA, 15 bp, Homo sapiens
tttcatttgttttat

SEQ ID NO: 510100 - DNA, 15 bp, Homo sapiens
ttcatttgttttatg

SEQ ID NO: 510101 - DNA, 15 bp, Homo sapiens
tcatttgttttatga

SEQ ID NO: 510102 - DNA, 15 bp, Homo sapiens
catttgttttatgac

SEQ ID NO: 510103 - DNA, 15 bp, Homo sapiens
atttgttttatgact

SEQ ID NO: 510104 - DNA, 15 bp, Homo sapiens
tttgttttatgacta

SEQ ID NO: 510105 - DNA, 15 bp, Homo sapiens
ttgttttatgactaa

SEQ ID NO: 510106 - DNA, 15 bp, Homo sapiens
tgttttatgactaag

SEQ ID NO: 510107 - DNA, 15 bp, Homo sapiens
gttttatgactaagt

SEQ ID NO: 510108 - DNA, 15 bp, Homo sapiens
ttttatgactaagta

SEQ ID NO: 510109 - DNA, 15 bp, Homo sapiens
tttatgactaagtaa

SEQ ID NO: 510110 - DNA, 15 bp, Homo sapiens
ttatgactaagtaat

SEQ ID NO: 510111 - DNA, 15 bp, Homo sapiens
tatgactaagtaatg

SEQ ID NO: 510112 - DNA, 15 bp, Homo sapiens
atgactaagtaatgg

SEQ ID NO: 510113 - DNA, 15 bp, Homo sapiens
tgactaagtaatggc

SEQ ID NO: 510114 - DNA, 15 bp, Homo sapiens
gactaagtaatggca

SEQ ID NO: 510115 - DNA, 15 bp, Homo sapiens
actaagtaatggcac

SEQ ID NO: 510116 - DNA, 15 bp, Homo sapiens
ctaagtaatggcact

SEQ ID NO: 510117 - DNA, 15 bp, Homo sapiens
taagtaatggcactt

SEQ ID NO: 510118 - DNA, 15 bp, Homo sapiens
aagtaatggcactta

SEQ ID NO: 510119 - DNA, 15 bp, Homo sapiens
agtaatggcacttaa

SEQ ID NO: 510120 - DNA, 15 bp, Homo sapiens
gtaatggcacttaaa

SEQ ID NO: 510121 - DNA, 15 bp, Homo sapiens
taatggcacttaaat

SEQ ID NO: 510122 - DNA, 15 bp, Homo sapiens
aatggcacttaaata

SEQ ID NO: 510123 - DNA, 15 bp, Homo sapiens
atggcacttaaataa

SEQ ID NO: 510124 - DNA, 15 bp, Homo sapiens
tggcacttaaataaa

SEQ ID NO: 510125 - DNA, 15 bp, Homo sapiens
ggcacttaaataaaa

SEQ ID NO: 510126 - DNA, 15 bp, Homo sapiens
gcacttaaataaaat

SEQ ID NO: 510127 - DNA, 15 bp, Homo sapiens
cacttaaataaaata

SEQ ID NO: 510128 - DNA, 15 bp, Homo sapiens
acttaaataaaataa

SEQ ID NO: 510129 - DNA, 15 bp, Homo sapiens
cttaaataaaataat

SEQ ID NO: 510130 - DNA, 15 bp, Homo sapiens
ttaaataaaataata

SEQ ID NO: 510131 - DNA, 15 bp, Homo sapiens
taaataaaataatac

SEQ ID NO: 510132 - DNA, 15 bp, Homo sapiens
aaataaaataataca

SEQ ID NO: 510133 - DNA, 15 bp, Homo sapiens
aataaaataatacag

SEQ ID NO: 510134 - DNA, 15 bp, Homo sapiens
ataaaataatacagt

SEQ ID NO: 510135 - DNA, 15 bp, Homo sapiens
taaaataatacagta

SEQ ID NO: 510136 - DNA, 15 bp, Homo sapiens
aaaataatacagtag

SEQ ID NO: 510137 - DNA, 15 bp, Homo sapiens
aaataatacagtagg

SEQ ID NO: 510138 - DNA, 15 bp, Homo sapiens
aataatacagtagga

SEQ ID NO: 510139 - DNA, 15 bp, Homo sapiens
ataatacagtaggag

SEQ ID NO: 510140 - DNA, 15 bp, Homo sapiens
taatacagtaggagg

SEQ ID NO: 510141 - DNA, 15 bp, Homo sapiens
aatacagtaggaggc

SEQ ID NO: 510142 - DNA, 15 bp, Homo sapiens
atacagtaggaggca

SEQ ID NO: 510143 - DNA, 15 bp, Homo sapiens
tacagtaggaggcag

SEQ ID NO: 510144 - DNA, 15 bp, Homo sapiens
acagtaggaggcagc

SEQ ID NO: 510145 - DNA, 15 bp, Homo sapiens
cagtaggaggcagca

SEQ ID NO: 510146 - DNA, 15 bp, Homo sapiens
agtaggaggcagcaa

SEQ ID NO: 510147 - DNA, 15 bp, Homo sapiens
gtaggaggcagcaaa

SEQ ID NO: 510148 - DNA, 15 bp, Homo sapiens
taggaggcagcaaag

SEQ ID NO: 510149 - DNA, 15 bp, Homo sapiens
aggaggcagcaaagg

SEQ ID NO: 510150 - DNA, 15 bp, Homo sapiens
ggaggcagcaaagga

SEQ ID NO: 510151 - DNA, 15 bp, Homo sapiens
gaggcagcaaaggaa

SEQ ID NO: 510152 - DNA, 15 bp, Homo sapiens
aggcagcaaaggaat

SEQ ID NO: 510153 - DNA, 15 bp, Homo sapiens
ggcagcaaaggaatt

SEQ ID NO: 510154 - DNA, 15 bp, Homo sapiens
gcagcaaaggaattt

SEQ ID NO: 510155 - DNA, 15 bp, Homo sapiens
cagcaaaggaatttt

SEQ ID NO: 510156 - DNA, 15 bp, Homo sapiens
agcaaaggaatttta

SEQ ID NO: 510157 - DNA, 15 bp, Homo sapiens
gcaaaggaattttat

SEQ ID NO: 510158 - DNA, 15 bp, Homo sapiens
caaaggaattttatg

SEQ ID NO: 510159 - DNA, 15 bp, Homo sapiens
aaaggaattttatga

SEQ ID NO: 510160 - DNA, 15 bp, Homo sapiens
aaggaattttatgag

SEQ ID NO: 510161 - DNA, 15 bp, Homo sapiens
aggaattttatgagc

SEQ ID NO: 510162 - DNA, 15 bp, Homo sapiens
ggaattttatgagca

SEQ ID NO: 510163 - DNA, 15 bp, Homo sapiens
gaattttatgagcac

SEQ ID NO: 510164 - DNA, 15 bp, Homo sapiens
aattttatgagcaca

SEQ ID NO: 510165 - DNA, 15 bp, Homo sapiens
attttatgagcacag

SEQ ID NO: 510166 - DNA, 15 bp, Homo sapiens
ttttatgagcacaga

SEQ ID NO: 510167 - DNA, 15 bp, Homo sapiens
tttatgagcacagac

SEQ ID NO: 510168 - DNA, 15 bp, Homo sapiens
ttatgagcacagact

SEQ ID NO: 510169 - DNA, 15 bp, Homo sapiens
tatgagcacagactt

SEQ ID NO: 510170 - DNA, 15 bp, Homo sapiens
atgagcacagacttt

SEQ ID NO: 510171 - DNA, 15 bp, Homo sapiens
tgagcacagacttta

SEQ ID NO: 510172 - DNA, 15 bp, Homo sapiens
gagcacagactttaa

SEQ ID NO: 510173 - DNA, 15 bp, Homo sapiens
agcacagactttaaa

SEQ ID NO: 510174 - DNA, 15 bp, Homo sapiens
gcacagactttaaaa

SEQ ID NO: 510175 - DNA, 15 bp, Homo sapiens
cacagactttaaaac

SEQ ID NO: 510176 - DNA, 15 bp, Homo sapiens
acagactttaaaaca

SEQ ID NO: 510177 - DNA, 15 bp, Homo sapiens
cagactttaaaacaa

SEQ ID NO: 510178 - DNA, 15 bp, Homo sapiens
agactttaaaacaat

SEQ ID NO: 510179 - DNA, 15 bp, Homo sapiens
gactttaaaacaatg

SEQ ID NO: 510180 - DNA, 15 bp, Homo sapiens
actttaaaacaatgc

SEQ ID NO: 510181 - DNA, 15 bp, Homo sapiens
ctttaaaacaatgct

SEQ ID NO: 510182 - DNA, 15 bp, Homo sapiens
tttaaaacaatgcta

SEQ ID NO: 510183 - DNA, 15 bp, Homo sapiens
ttaaaacaatgctaa

SEQ ID NO: 510184 - DNA, 15 bp, Homo sapiens
taaaacaatgctaaa

SEQ ID NO: 510185 - DNA, 15 bp, Homo sapiens
aaaacaatgctaaaa

SEQ ID NO: 510186 - DNA, 15 bp, Homo sapiens
aaacaatgctaaaaa

SEQ ID NO: 510187 - DNA, 15 bp, Homo sapiens
aacaatgctaaaaaa

SEQ ID NO: 510188 - DNA, 15 bp, Homo sapiens
acaatgctaaaaaag

SEQ ID NO: 510189 - DNA, 15 bp, Homo sapiens
caatgctaaaaaagg

SEQ ID NO: 510190 - DNA, 15 bp, Homo sapiens
aatgctaaaaaaggg

SEQ ID NO: 510191 - DNA, 15 bp, Homo sapiens
atgctaaaaaaggga

SEQ ID NO: 510192 - DNA, 15 bp, Homo sapiens
tgctaaaaaagggat

SEQ ID NO: 510193 - DNA, 15 bp, Homo sapiens
gctaaaaaagggatt

SEQ ID NO: 510194 - DNA, 15 bp, Homo sapiens
ctaaaaaagggatta

SEQ ID NO: 510195 - DNA, 15 bp, Homo sapiens
taaaaaagggattat

SEQ ID NO: 510196 - DNA, 15 bp, Homo sapiens
aaaaaagggattatt

SEQ ID NO: 510197 - DNA, 15 bp, Homo sapiens
aaaaagggattattt

SEQ ID NO: 510198 - DNA, 15 bp, Homo sapiens
aaaagggattattta

SEQ ID NO: 510199 - DNA, 15 bp, Homo sapiens
aaagggattatttat

SEQ ID NO: 510200 - DNA, 15 bp, Homo sapiens
aagggattatttata

SEQ ID NO: 510201 - DNA, 15 bp, Homo sapiens
agggattatttatag

SEQ ID NO: 510202 - DNA, 15 bp, Homo sapiens
gggattatttataga

SEQ ID NO: 510203 - DNA, 15 bp, Homo sapiens
ggattatttatagac

SEQ ID NO: 510204 - DNA, 15 bp, Homo sapiens
gattatttatagact

SEQ ID NO: 510205 - DNA, 15 bp, Homo sapiens
attatttatagactt

SEQ ID NO: 510206 - DNA, 15 bp, Homo sapiens
ttatttatagacttt

SEQ ID NO: 510207 - DNA, 15 bp, Homo sapiens
tatttatagactttg

SEQ ID NO: 510208 - DNA, 15 bp, Homo sapiens
atttatagactttga

SEQ ID NO: 510209 - DNA, 15 bp, Homo sapiens
tttatagactttgag

SEQ ID NO: 510210 - DNA, 15 bp, Homo sapiens
ttatagactttgaga

SEQ ID NO: 510211 - DNA, 15 bp, Homo sapiens
tatagactttgagat

SEQ ID NO: 510212 - DNA, 15 bp, Homo sapiens
atagactttgagata

SEQ ID NO: 510213 - DNA, 15 bp, Homo sapiens
tagactttgagatag

SEQ ID NO: 510214 - DNA, 15 bp, Homo sapiens
agactttgagatagt

SEQ ID NO: 510215 - DNA, 15 bp, Homo sapiens
gactttgagatagtc

SEQ ID NO: 510216 - DNA, 15 bp, Homo sapiens
actttgagatagtct

SEQ ID NO: 510217 - DNA, 15 bp, Homo sapiens
ctttgagatagtcta

SEQ ID NO: 510218 - DNA, 15 bp, Homo sapiens
tttgagatagtctag

SEQ ID NO: 510219 - DNA, 15 bp, Homo sapiens
ttgagatagtctaga

SEQ ID NO: 510220 - DNA, 15 bp, Homo sapiens
tgagatagtctagaa

SEQ ID NO: 510221 - DNA, 15 bp, Homo sapiens
gagatagtctagaaa

SEQ ID NO: 510222 - DNA, 15 bp, Homo sapiens
agatagtctagaaat

SEQ ID NO: 510223 - DNA, 15 bp, Homo sapiens
gatagtctagaaata

SEQ ID NO: 510224 - DNA, 15 bp, Homo sapiens
atagtctagaaatac

SEQ ID NO: 510225 - DNA, 15 bp, Homo sapiens
tagtctagaaatact

SEQ ID NO: 510226 - DNA, 15 bp, Homo sapiens
agtctagaaatacta

SEQ ID NO: 510227 - DNA, 15 bp, Homo sapiens
gtctagaaatactat

SEQ ID NO: 510228 - DNA, 15 bp, Homo sapiens
tctagaaatactatt

SEQ ID NO: 510229 - DNA, 15 bp, Homo sapiens
ctagaaatactatta

SEQ ID NO: 510230 - DNA, 15 bp, Homo sapiens
tagaaatactattaa

SEQ ID NO: 510231 - DNA, 15 bp, Homo sapiens
agaaatactattaac

SEQ ID NO: 510232 - DNA, 15 bp, Homo sapiens
gaaatactattaaca

SEQ ID NO: 510233 - DNA, 15 bp, Homo sapiens
aaatactattaacat

SEQ ID NO: 510234 - DNA, 15 bp, Homo sapiens
aatactattaacata

SEQ ID NO: 510235 - DNA, 15 bp, Homo sapiens
atactattaacatag

SEQ ID NO: 510236 - DNA, 15 bp, Homo sapiens
tactattaacatagg

SEQ ID NO: 510237 - DNA, 15 bp, Homo sapiens
actattaacataggt

SEQ ID NO: 510238 - DNA, 15 bp, Homo sapiens
ctattaacataggtt

SEQ ID NO: 510239 - DNA, 15 bp, Homo sapiens
tattaacataggttt

SEQ ID NO: 510240 - DNA, 15 bp, Homo sapiens
attaacataggtttc

SEQ ID NO: 510241 - DNA, 15 bp, Homo sapiens
ttaacataggtttca

SEQ ID NO: 510242 - DNA, 15 bp, Homo sapiens
taacataggtttcaa

SEQ ID NO: 510243 - DNA, 15 bp, Homo sapiens
aacataggtttcaat

SEQ ID NO: 510244 - DNA, 15 bp, Homo sapiens
acataggtttcaatc

SEQ ID NO: 510245 - DNA, 15 bp, Homo sapiens
cataggtttcaatcc

SEQ ID NO: 510246 - DNA, 15 bp, Homo sapiens
ataggtttcaatcca

SEQ ID NO: 510247 - DNA, 15 bp, Homo sapiens
taggtttcaatccat

SEQ ID NO: 510248 - DNA, 15 bp, Homo sapiens
aggtttcaatccatg

SEQ ID NO: 510249 - DNA, 15 bp, Homo sapiens
ggtttcaatccatgt

SEQ ID NO: 510250 - DNA, 15 bp, Homo sapiens
gtttcaatccatgta

SEQ ID NO: 510251 - DNA, 15 bp, Homo sapiens
tttcaatccatgtag

SEQ ID NO: 510252 - DNA, 15 bp, Homo sapiens
ttcaatccatgtagt

SEQ ID NO: 510253 - DNA, 15 bp, Homo sapiens
tcaatccatgtagtg

SEQ ID NO: 510254 - DNA, 15 bp, Homo sapiens
caatccatgtagtgt

SEQ ID NO: 510255 - DNA, 15 bp, Homo sapiens
aatccatgtagtgtg

SEQ ID NO: 510256 - DNA, 15 bp, Homo sapiens
atccatgtagtgtgt

SEQ ID NO: 510257 - DNA, 15 bp, Homo sapiens
tccatgtagtgtgtt

SEQ ID NO: 510258 - DNA, 15 bp, Homo sapiens
ccatgtagtgtgttt

SEQ ID NO: 510259 - DNA, 15 bp, Homo sapiens
catgtagtgtgtttc

SEQ ID NO: 510260 - DNA, 15 bp, Homo sapiens
atgtagtgtgtttct

SEQ ID NO: 510261 - DNA, 15 bp, Homo sapiens
tgtagtgtgtttctg

SEQ ID NO: 510262 - DNA, 15 bp, Homo sapiens
gtagtgtgtttctgt

SEQ ID NO: 510263 - DNA, 15 bp, Homo sapiens
tagtgtgtttctgta

SEQ ID NO: 510264 - DNA, 15 bp, Homo sapiens
agtgtgtttctgtac

SEQ ID NO: 510265 - DNA, 15 bp, Homo sapiens
gtgtgtttctgtact

SEQ ID NO: 510266 - DNA, 15 bp, Homo sapiens
tgtgtttctgtactc

SEQ ID NO: 510267 - DNA, 15 bp, Homo sapiens
gtgtttctgtactcc

SEQ ID NO: 510268 - DNA, 15 bp, Homo sapiens
tgtttctgtactccc

SEQ ID NO: 510269 - DNA, 15 bp, Homo sapiens
gtttctgtactcccc

SEQ ID NO: 510270 - DNA, 15 bp, Homo sapiens
tttctgtactcccct

SEQ ID NO: 510271 - DNA, 15 bp, Homo sapiens
ttctgtactcccctt

SEQ ID NO: 510272 - DNA, 15 bp, Homo sapiens
tctgtactccccttg

SEQ ID NO: 510273 - DNA, 15 bp, Homo sapiens
ctgtactccccttgt

SEQ ID NO: 510274 - DNA, 15 bp, Homo sapiens
tgtactccccttgtg

SEQ ID NO: 510275 - DNA, 15 bp, Homo sapiens
gtactccccttgtgc

SEQ ID NO: 510276 - DNA, 15 bp, Homo sapiens
tactccccttgtgca

SEQ ID NO: 510277 - DNA, 15 bp, Homo sapiens
actccccttgtgcat

SEQ ID NO: 510278 - DNA, 15 bp, Homo sapiens
ctccccttgtgcatt

SEQ ID NO: 510279 - DNA, 15 bp, Homo sapiens
tccccttgtgcattt

SEQ ID NO: 510280 - DNA, 15 bp, Homo sapiens
ccccttgtgcatttt

SEQ ID NO: 510281 - DNA, 15 bp, Homo sapiens
cccttgtgcatttta

SEQ ID NO: 510282 - DNA, 15 bp, Homo sapiens
ccttgtgcattttag

SEQ ID NO: 510283 - DNA, 15 bp, Homo sapiens
cttgtgcattttagg

SEQ ID NO: 510284 - DNA, 15 bp, Homo sapiens
ttgtgcattttaggt

SEQ ID NO: 510285 - DNA, 15 bp, Homo sapiens
tgtgcattttaggtc

SEQ ID NO: 510286 - DNA, 15 bp, Homo sapiens
gtgcattttaggtca

SEQ ID NO: 510287 - DNA, 15 bp, Homo sapiens
tgcattttaggtcaa

SEQ ID NO: 510288 - DNA, 15 bp, Homo sapiens
gcattttaggtcaaa

SEQ ID NO: 510289 - DNA, 15 bp, Homo sapiens
cattttaggtcaaag

SEQ ID NO: 510290 - DNA, 15 bp, Homo sapiens
attttaggtcaaagt

SEQ ID NO: 510291 - DNA, 15 bp, Homo sapiens
ttttaggtcaaagtt

SEQ ID NO: 510292 - DNA, 15 bp, Homo sapiens
tttaggtcaaagtta

SEQ ID NO: 510293 - DNA, 15 bp, Homo sapiens
ttaggtcaaagttaa

SEQ ID NO: 510294 - DNA, 15 bp, Homo sapiens
taggtcaaagttaaa

SEQ ID NO: 510295 - DNA, 15 bp, Homo sapiens
aggtcaaagttaaag

SEQ ID NO: 510296 - DNA, 15 bp, Homo sapiens
ggtcaaagttaaagg

SEQ ID NO: 510297 - DNA, 15 bp, Homo sapiens
gtcaaagttaaaggt

SEQ ID NO: 510298 - DNA, 15 bp, Homo sapiens
tcaaagttaaaggta

SEQ ID NO: 510299 - DNA, 15 bp, Homo sapiens
caaagttaaaggtaa

SEQ ID NO: 510300 - DNA, 15 bp, Homo sapiens
aaagttaaaggtaat

SEQ ID NO: 510301 - DNA, 15 bp, Homo sapiens
aagttaaaggtaatt

SEQ ID NO: 510302 - DNA, 15 bp, Homo sapiens
agttaaaggtaattt

SEQ ID NO: 510303 - DNA, 15 bp, Homo sapiens
gttaaaggtaatttt

SEQ ID NO: 510304 - DNA, 15 bp, Homo sapiens
ttaaaggtaattttt

SEQ ID NO: 510305 - DNA, 15 bp, Homo sapiens
taaaggtaattttta

SEQ ID NO: 510306 - DNA, 15 bp, Homo sapiens
aaaggtaatttttaa

SEQ ID NO: 510307 - DNA, 15 bp, Homo sapiens
aaggtaatttttaaa

SEQ ID NO: 510308 - DNA, 15 bp, Homo sapiens
aggtaatttttaaac

SEQ ID NO: 510309 - DNA, 15 bp, Homo sapiens
ggtaatttttaaaca

SEQ ID NO: 510310 - DNA, 15 bp, Homo sapiens
gtaatttttaaacaa

SEQ ID NO: 510311 - DNA, 15 bp, Homo sapiens
taatttttaaacaac

SEQ ID NO: 510312 - DNA, 15 bp, Homo sapiens
aatttttaaacaaca

SEQ ID NO: 510313 - DNA, 15 bp, Homo sapiens
atttttaaacaacat

SEQ ID NO: 510314 - DNA, 15 bp, Homo sapiens
tttttaaacaacatc

SEQ ID NO: 510315 - DNA, 15 bp, Homo sapiens
ttttaaacaacatct

SEQ ID NO: 510316 - DNA, 15 bp, Homo sapiens
tttaaacaacatctt

SEQ ID NO: 510317 - DNA, 15 bp, Homo sapiens
ttaaacaacatcttt

SEQ ID NO: 510318 - DNA, 15 bp, Homo sapiens
taaacaacatctttt

SEQ ID NO: 510319 - DNA, 15 bp, Homo sapiens
aaacaacatcttttg

SEQ ID NO: 510320 - DNA, 15 bp, Homo sapiens
aacaacatcttttgt

SEQ ID NO: 510321 - DNA, 15 bp, Homo sapiens
acaacatcttttgtc

SEQ ID NO: 510322 - DNA, 15 bp, Homo sapiens
caacatcttttgtca

SEQ ID NO: 510323 - DNA, 15 bp, Homo sapiens
aacatcttttgtcac

SEQ ID NO: 510324 - DNA, 15 bp, Homo sapiens
acatcttttgtcact

SEQ ID NO: 510325 - DNA, 15 bp, Homo sapiens
catcttttgtcactt

SEQ ID NO: 510326 - DNA, 15 bp, Homo sapiens
atcttttgtcactta

SEQ ID NO: 510327 - DNA, 15 bp, Homo sapiens
tcttttgtcacttag

SEQ ID NO: 510328 - DNA, 15 bp, Homo sapiens
cttttgtcacttagc

SEQ ID NO: 510329 - DNA, 15 bp, Homo sapiens
ttttgtcacttagcg

SEQ ID NO: 510330 - DNA, 15 bp, Homo sapiens
tttgtcacttagcgc

SEQ ID NO: 510331 - DNA, 15 bp, Homo sapiens
ttgtcacttagcgca

SEQ ID NO: 510332 - DNA, 15 bp, Homo sapiens
tgtcacttagcgcat

SEQ ID NO: 510333 - DNA, 15 bp, Homo sapiens
gtcacttagcgcatg

SEQ ID NO: 510334 - DNA, 15 bp, Homo sapiens
tcacttagcgcatgg

SEQ ID NO: 510335 - DNA, 15 bp, Homo sapiens
cacttagcgcatggg

SEQ ID NO: 510336 - DNA, 15 bp, Homo sapiens
acttagcgcatggga

SEQ ID NO: 510337 - DNA, 15 bp, Homo sapiens
cttagcgcatgggag

SEQ ID NO: 510338 - DNA, 15 bp, Homo sapiens
ttagcgcatgggagc

SEQ ID NO: 510339 - DNA, 15 bp, Homo sapiens
tagcgcatgggagcg

SEQ ID NO: 510340 - DNA, 15 bp, Homo sapiens
agcgcatgggagcga

SEQ ID NO: 510341 - DNA, 15 bp, Homo sapiens
gcgcatgggagcgat

SEQ ID NO: 510342 - DNA, 15 bp, Homo sapiens
cgcatgggagcgatg

SEQ ID NO: 510343 - DNA, 15 bp, Homo sapiens
gcatgggagcgatgc

SEQ ID NO: 510344 - DNA, 15 bp, Homo sapiens
catgggagcgatgcc

SEQ ID NO: 510345 - DNA, 15 bp, Homo sapiens
atgggagcgatgcca

SEQ ID NO: 510346 - DNA, 15 bp, Homo sapiens
tgggagcgatgccag

SEQ ID NO: 510347 - DNA, 15 bp, Homo sapiens
gggagcgatgccagc

SEQ ID NO: 510348 - DNA, 15 bp, Homo sapiens
ggagcgatgccagca

SEQ ID NO: 510349 - DNA, 15 bp, Homo sapiens
gagcgatgccagcac

SEQ ID NO: 510350 - DNA, 15 bp, Homo sapiens
agcgatgccagcact

SEQ ID NO: 510351 - DNA, 15 bp, Homo sapiens
gcgatgccagcactc

SEQ ID NO: 510352 - DNA, 15 bp, Homo sapiens
cgatgccagcactca

SEQ ID NO: 510353 - DNA, 15 bp, Homo sapiens
gatgccagcactcat

SEQ ID NO: 510354 - DNA, 15 bp, Homo sapiens
atgccagcactcatg

SEQ ID NO: 510355 - DNA, 15 bp, Homo sapiens
tgccagcactcatgt

SEQ ID NO: 510356 - DNA, 15 bp, Homo sapiens
gccagcactcatgta

SEQ ID NO: 510357 - DNA, 15 bp, Homo sapiens
ccagcactcatgtaa

SEQ ID NO: 510358 - DNA, 15 bp, Homo sapiens
cagcactcatgtaaa

SEQ ID NO: 510359 - DNA, 15 bp, Homo sapiens
agcactcatgtaaaa

SEQ ID NO: 510360 - DNA, 15 bp, Homo sapiens
gcactcatgtaaaag

SEQ ID NO: 510361 - DNA, 15 bp, Homo sapiens
cactcatgtaaaaga

SEQ ID NO: 510362 - DNA, 15 bp, Homo sapiens
actcatgtaaaagac

SEQ ID NO: 510363 - DNA, 15 bp, Homo sapiens
ctcatgtaaaagact

SEQ ID NO: 510364 - DNA, 15 bp, Homo sapiens
tcatgtaaaagactc

SEQ ID NO: 510365 - DNA, 15 bp, Homo sapiens
catgtaaaagactct

SEQ ID NO: 510366 - DNA, 15 bp, Homo sapiens
atgtaaaagactctc

SEQ ID NO: 510367 - DNA, 15 bp, Homo sapiens
tgtaaaagactctcc

SEQ ID NO: 510368 - DNA, 15 bp, Homo sapiens
gtaaaagactctcct

SEQ ID NO: 510369 - DNA, 15 bp, Homo sapiens
taaaagactctcctg

SEQ ID NO: 510370 - DNA, 15 bp, Homo sapiens
aaaagactctcctgc

SEQ ID NO: 510371 - DNA, 15 bp, Homo sapiens
aaagactctcctgca

SEQ ID NO: 510372 - DNA, 15 bp, Homo sapiens
aagactctcctgcaa

SEQ ID NO: 510373 - DNA, 15 bp, Homo sapiens
agactctcctgcaat

SEQ ID NO: 510374 - DNA, 15 bp, Homo sapiens
gactctcctgcaatt

SEQ ID NO: 510375 - DNA, 15 bp, Homo sapiens
actctcctgcaattt

SEQ ID NO: 510376 - DNA, 15 bp, Homo sapiens
ctctcctgcaatttg

SEQ ID NO: 510377 - DNA, 15 bp, Homo sapiens
tctcctgcaatttgc

SEQ ID NO: 510378 - DNA, 15 bp, Homo sapiens
ctcctgcaatttgca

SEQ ID NO: 510379 - DNA, 15 bp, Homo sapiens
tcctgcaatttgcag

SEQ ID NO: 510380 - DNA, 15 bp, Homo sapiens
cctgcaatttgcagg

SEQ ID NO: 510381 - DNA, 15 bp, Homo sapiens
ctgcaatttgcaggg

SEQ ID NO: 510382 - DNA, 15 bp, Homo sapiens
tgcaatttgcagggt

SEQ ID NO: 510383 - DNA, 15 bp, Homo sapiens
gcaatttgcagggtg

SEQ ID NO: 510384 - DNA, 15 bp, Homo sapiens
caatttgcagggtgg

SEQ ID NO: 510385 - DNA, 15 bp, Homo sapiens
aatttgcagggtggc

SEQ ID NO: 510386 - DNA, 15 bp, Homo sapiens
atttgcagggtggcc

SEQ ID NO: 510387 - DNA, 15 bp, Homo sapiens
tttgcagggtggccc

SEQ ID NO: 510388 - DNA, 15 bp, Homo sapiens
ttgcagggtggcccg

SEQ ID NO: 510389 - DNA, 15 bp, Homo sapiens
tgcagggtggcccga

SEQ ID NO: 510390 - DNA, 15 bp, Homo sapiens
gcagggtggcccgag

SEQ ID NO: 510391 - DNA, 15 bp, Homo sapiens
cagggtggcccgagg

SEQ ID NO: 510392 - DNA, 15 bp, Homo sapiens
agggtggcccgagga

SEQ ID NO: 510393 - DNA, 15 bp, Homo sapiens
gggtggcccgaggaa

SEQ ID NO: 510394 - DNA, 15 bp, Homo sapiens
ggtggcccgaggaag

SEQ ID NO: 510395 - DNA, 15 bp, Homo sapiens
gtggcccgaggaagc

SEQ ID NO: 510396 - DNA, 15 bp, Homo sapiens
tggcccgaggaagca

SEQ ID NO: 510397 - DNA, 15 bp, Homo sapiens
ggcccgaggaagcag

SEQ ID NO: 510398 - DNA, 15 bp, Homo sapiens
gcccgaggaagcagg

SEQ ID NO: 510399 - DNA, 15 bp, Homo sapiens
cccgaggaagcaggg

SEQ ID NO: 510400 - DNA, 15 bp, Homo sapiens
ccgaggaagcaggga

SEQ ID NO: 510401 - DNA, 15 bp, Homo sapiens
cgaggaagcagggag

SEQ ID NO: 510402 - DNA, 15 bp, Homo sapiens
gaggaagcagggagc

SEQ ID NO: 510403 - DNA, 15 bp, Homo sapiens
aggaagcagggagcc

SEQ ID NO: 510404 - DNA, 15 bp, Homo sapiens
ggaagcagggagcca

SEQ ID NO: 510405 - DNA, 15 bp, Homo sapiens
gaagcagggagccat

SEQ ID NO: 510406 - DNA, 15 bp, Homo sapiens
aagcagggagccatt

SEQ ID NO: 510407 - DNA, 15 bp, Homo sapiens
agcagggagccattg

SEQ ID NO: 510408 - DNA, 15 bp, Homo sapiens
gcagggagccattgc

SEQ ID NO: 510409 - DNA, 15 bp, Homo sapiens
cagggagccattgcc

SEQ ID NO: 510410 - DNA, 15 bp, Homo sapiens
agggagccattgccc

SEQ ID NO: 510411 - DNA, 15 bp, Homo sapiens
gggagccattgccct

SEQ ID NO: 510412 - DNA, 15 bp, Homo sapiens
ggagccattgccctt

SEQ ID NO: 510413 - DNA, 15 bp, Homo sapiens
gagccattgcccttg

SEQ ID NO: 510414 - DNA, 15 bp, Homo sapiens
agccattgcccttgc

SEQ ID NO: 510415 - DNA, 15 bp, Homo sapiens
gccattgcccttgca

SEQ ID NO: 510416 - DNA, 15 bp, Homo sapiens
ccattgcccttgcag

SEQ ID NO: 510417 - DNA, 15 bp, Homo sapiens
cattgcccttgcaga

SEQ ID NO: 510418 - DNA, 15 bp, Homo sapiens
attgcccttgcagag

SEQ ID NO: 510419 - DNA, 15 bp, Homo sapiens
ttgcccttgcagagc

SEQ ID NO: 510420 - DNA, 15 bp, Homo sapiens
tgcccttgcagagcc

SEQ ID NO: 510421 - DNA, 15 bp, Homo sapiens
gcccttgcagagccc

SEQ ID NO: 510422 - DNA, 15 bp, Homo sapiens
cccttgcagagccca

SEQ ID NO: 510423 - DNA, 15 bp, Homo sapiens
ccttgcagagcccat

SEQ ID NO: 510424 - DNA, 15 bp, Homo sapiens
cttgcagagcccatt

SEQ ID NO: 510425 - DNA, 15 bp, Homo sapiens
ttgcagagcccattg

SEQ ID NO: 510426 - DNA, 15 bp, Homo sapiens
tgcagagcccattgc

SEQ ID NO: 510427 - DNA, 15 bp, Homo sapiens
gcagagcccattgct

SEQ ID NO: 510428 - DNA, 15 bp, Homo sapiens
cagagcccattgctg

SEQ ID NO: 510429 - DNA, 15 bp, Homo sapiens
agagcccattgctgt

SEQ ID NO: 510430 - DNA, 15 bp, Homo sapiens
gagcccattgctgtc

SEQ ID NO: 510431 - DNA, 15 bp, Homo sapiens
agcccattgctgtct

SEQ ID NO: 510432 - DNA, 15 bp, Homo sapiens
gcccattgctgtctt

SEQ ID NO: 510433 - DNA, 15 bp, Homo sapiens
cccattgctgtcttt

SEQ ID NO: 510434 - DNA, 15 bp, Homo sapiens
ccattgctgtctttg

SEQ ID NO: 510435 - DNA, 15 bp, Homo sapiens
cattgctgtctttgg

SEQ ID NO: 510436 - DNA, 15 bp, Homo sapiens
attgctgtctttgga

SEQ ID NO: 510437 - DNA, 15 bp, Homo sapiens
ttgctgtctttggac

SEQ ID NO: 510438 - DNA, 15 bp, Homo sapiens
tgctgtctttggaca

SEQ ID NO: 510439 - DNA, 15 bp, Homo sapiens
gctgtctttggacat

SEQ ID NO: 510440 - DNA, 15 bp, Homo sapiens
ctgtctttggacatt

SEQ ID NO: 510441 - DNA, 15 bp, Homo sapiens
tgtctttggacattt

SEQ ID NO: 510442 - DNA, 15 bp, Homo sapiens
gtctttggacattta

SEQ ID NO: 510443 - DNA, 15 bp, Homo sapiens
tctttggacatttaa

SEQ ID NO: 510444 - DNA, 15 bp, Homo sapiens
ctttggacatttaat

SEQ ID NO: 510445 - DNA, 15 bp, Homo sapiens
tttggacatttaatt

SEQ ID NO: 510446 - DNA, 15 bp, Homo sapiens
ttggacatttaattg

SEQ ID NO: 510447 - DNA, 15 bp, Homo sapiens
tggacatttaattgt

SEQ ID NO: 510448 - DNA, 15 bp, Homo sapiens
ggacatttaattgtt

SEQ ID NO: 510449 - DNA, 15 bp, Homo sapiens
gacatttaattgttg

SEQ ID NO: 510450 - DNA, 15 bp, Homo sapiens
acatttaattgttga

SEQ ID NO: 510451 - DNA, 15 bp, Homo sapiens
catttaattgttgaa

SEQ ID NO: 510452 - DNA, 15 bp, Homo sapiens
atttaattgttgaaa

SEQ ID NO: 510453 - DNA, 15 bp, Homo sapiens
tttaattgttgaaat

SEQ ID NO: 510454 - DNA, 15 bp, Homo sapiens
ttaattgttgaaatg

SEQ ID NO: 510455 - DNA, 15 bp, Homo sapiens
taattgttgaaatgt

SEQ ID NO: 510456 - DNA, 15 bp, Homo sapiens
aattgttgaaatgta

SEQ ID NO: 510457 - DNA, 15 bp, Homo sapiens
attgttgaaatgtat

SEQ ID NO: 510458 - DNA, 15 bp, Homo sapiens
ttgttgaaatgtatt

SEQ ID NO: 510459 - DNA, 15 bp, Homo sapiens
tgttgaaatgtatta

SEQ ID NO: 510460 - DNA, 15 bp, Homo sapiens
gttgaaatgtattag

SEQ ID NO: 510461 - DNA, 15 bp, Homo sapiens
ttgaaatgtattagg

SEQ ID NO: 510462 - DNA, 15 bp, Homo sapiens
tgaaatgtattagga

SEQ ID NO: 510463 - DNA, 15 bp, Homo sapiens
gaaatgtattaggag

SEQ ID NO: 510464 - DNA, 15 bp, Homo sapiens
aaatgtattaggagg

SEQ ID NO: 510465 - DNA, 15 bp, Homo sapiens
aatgtattaggaggc

SEQ ID NO: 510466 - DNA, 15 bp, Homo sapiens
atgtattaggaggcc

SEQ ID NO: 510467 - DNA, 15 bp, Homo sapiens
tgtattaggaggccg

SEQ ID NO: 510468 - DNA, 15 bp, Homo sapiens
gtattaggaggccgc

SEQ ID NO: 510469 - DNA, 15 bp, Homo sapiens
tattaggaggccgct

SEQ ID NO: 510470 - DNA, 15 bp, Homo sapiens
attaggaggccgcta

SEQ ID NO: 510471 - DNA, 15 bp, Homo sapiens
ttaggaggccgctaa

SEQ ID NO: 510472 - DNA, 15 bp, Homo sapiens
taggaggccgctaat

SEQ ID NO: 510473 - DNA, 15 bp, Homo sapiens
aggaggccgctaatc

SEQ ID NO: 510474 - DNA, 15 bp, Homo sapiens
ggaggccgctaatca

SEQ ID NO: 510475 - DNA, 15 bp, Homo sapiens
gaggccgctaatcaa

SEQ ID NO: 510476 - DNA, 15 bp, Homo sapiens
aggccgctaatcaat

SEQ ID NO: 510477 - DNA, 15 bp, Homo sapiens
ggccgctaatcaata

SEQ ID NO: 510478 - DNA, 15 bp, Homo sapiens
gccgctaatcaatag

SEQ ID NO: 510479 - DNA, 15 bp, Homo sapiens
ccgctaatcaatagc

SEQ ID NO: 510480 - DNA, 15 bp, Homo sapiens
cgctaatcaatagcc

SEQ ID NO: 510481 - DNA, 15 bp, Homo sapiens
gctaatcaatagcct

SEQ ID NO: 510482 - DNA, 15 bp, Homo sapiens
ctaatcaatagcctg

SEQ ID NO: 510483 - DNA, 15 bp, Homo sapiens
taatcaatagcctgt

SEQ ID NO: 510484 - DNA, 15 bp, Homo sapiens
aatcaatagcctgta

SEQ ID NO: 510485 - DNA, 15 bp, Homo sapiens
atcaatagcctgtaa

SEQ ID NO: 510486 - DNA, 15 bp, Homo sapiens
tcaatagcctgtaat

SEQ ID NO: 510487 - DNA, 15 bp, Homo sapiens
caatagcctgtaatt

SEQ ID NO: 510488 - DNA, 15 bp, Homo sapiens
aatagcctgtaattt

SEQ ID NO: 510489 - DNA, 15 bp, Homo sapiens
atagcctgtaatttg

SEQ ID NO: 510490 - DNA, 15 bp, Homo sapiens
tagcctgtaatttgg

SEQ ID NO: 510491 - DNA, 15 bp, Homo sapiens
agcctgtaatttggg

SEQ ID NO: 510492 - DNA, 15 bp, Homo sapiens
gcctgtaatttgggc

SEQ ID NO: 510493 - DNA, 15 bp, Homo sapiens
cctgtaatttgggct

SEQ ID NO: 510494 - DNA, 15 bp, Homo sapiens
ctgtaatttgggctg

SEQ ID NO: 510495 - DNA, 15 bp, Homo sapiens
tgtaatttgggctgt

SEQ ID NO: 510496 - DNA, 15 bp, Homo sapiens
gtaatttgggctgta

SEQ ID NO: 510497 - DNA, 15 bp, Homo sapiens
taatttgggctgtaa

SEQ ID NO: 510498 - DNA, 15 bp, Homo sapiens
aatttgggctgtaaa

SEQ ID NO: 510499 - DNA, 15 bp, Homo sapiens
atttgggctgtaaaa

SEQ ID NO: 510500 - DNA, 15 bp, Homo sapiens
tttgggctgtaaaaa

SEQ ID NO: 510501 - DNA, 15 bp, Homo sapiens
ttgggctgtaaaaac

SEQ ID NO: 510502 - DNA, 15 bp, Homo sapiens
tgggctgtaaaaact

SEQ ID NO: 510503 - DNA, 15 bp, Homo sapiens
gggctgtaaaaactt

SEQ ID NO: 510504 - DNA, 15 bp, Homo sapiens
ggctgtaaaaacttt

SEQ ID NO: 510505 - DNA, 15 bp, Homo sapiens
gctgtaaaaacttta

SEQ ID NO: 510506 - DNA, 15 bp, Homo sapiens
ctgtaaaaactttat

SEQ ID NO: 510507 - DNA, 15 bp, Homo sapiens
tgtaaaaactttata

SEQ ID NO: 510508 - DNA, 15 bp, Homo sapiens
gtaaaaactttatat

SEQ ID NO: 510509 - DNA, 15 bp, Homo sapiens
taaaaactttatatt

SEQ ID NO: 510510 - DNA, 15 bp, Homo sapiens
aaaaactttatatta

SEQ ID NO: 510511 - DNA, 15 bp, Homo sapiens
aaaactttatattat

SEQ ID NO: 510512 - DNA, 15 bp, Homo sapiens
aaactttatattata

SEQ ID NO: 510513 - DNA, 15 bp, Homo sapiens
aactttatattatag

SEQ ID NO: 510514 - DNA, 15 bp, Homo sapiens
actttatattataga

SEQ ID NO: 510515 - DNA, 15 bp, Homo sapiens
ctttatattatagat

SEQ ID NO: 510516 - DNA, 15 bp, Homo sapiens
tttatattatagata

SEQ ID NO: 510517 - DNA, 15 bp, Homo sapiens
ttatattatagataa

SEQ ID NO: 510518 - DNA, 15 bp, Homo sapiens
tatattatagataat

SEQ ID NO: 510519 - DNA, 15 bp, Homo sapiens
atattatagataatt

SEQ ID NO: 510520 - DNA, 15 bp, Homo sapiens
tattatagataattg

SEQ ID NO: 510521 - DNA, 15 bp, Homo sapiens
attatagataattgc

SEQ ID NO: 510522 - DNA, 15 bp, Homo sapiens
ttatagataattgcc

SEQ ID NO: 510523 - DNA, 15 bp, Homo sapiens
tatagataattgcca

SEQ ID NO: 510524 - DNA, 15 bp, Homo sapiens
atagataattgccac

SEQ ID NO: 510525 - DNA, 15 bp, Homo sapiens
tagataattgccact

SEQ ID NO: 510526 - DNA, 15 bp, Homo sapiens
agataattgccactt

SEQ ID NO: 510527 - DNA, 15 bp, Homo sapiens
gataattgccactta

SEQ ID NO: 510528 - DNA, 15 bp, Homo sapiens
ataattgccacttat

SEQ ID NO: 510529 - DNA, 15 bp, Homo sapiens
taattgccacttatt

SEQ ID NO: 510530 - DNA, 15 bp, Homo sapiens
aattgccacttattt

SEQ ID NO: 510531 - DNA, 15 bp, Homo sapiens
attgccacttatttt

SEQ ID NO: 510532 - DNA, 15 bp, Homo sapiens
ttgccacttattttg

SEQ ID NO: 510533 - DNA, 15 bp, Homo sapiens
tgccacttattttga

SEQ ID NO: 510534 - DNA, 15 bp, Homo sapiens
gccacttattttgag

SEQ ID NO: 510535 - DNA, 15 bp, Homo sapiens
ccacttattttgagc

SEQ ID NO: 510536 - DNA, 15 bp, Homo sapiens
cacttattttgagct

SEQ ID NO: 510537 - DNA, 15 bp, Homo sapiens
acttattttgagcta

SEQ ID NO: 510538 - DNA, 15 bp, Homo sapiens
cttattttgagctat

SEQ ID NO: 510539 - DNA, 15 bp, Homo sapiens
ttattttgagctatg

SEQ ID NO: 510540 - DNA, 15 bp, Homo sapiens
tattttgagctatgt

SEQ ID NO: 510541 - DNA, 15 bp, Homo sapiens
attttgagctatgtt

SEQ ID NO: 510542 - DNA, 15 bp, Homo sapiens
ttttgagctatgttc

SEQ ID NO: 510543 - DNA, 15 bp, Homo sapiens
tttgagctatgttct

SEQ ID NO: 510544 - DNA, 15 bp, Homo sapiens
ttgagctatgttctt

SEQ ID NO: 510545 - DNA, 15 bp, Homo sapiens
tgagctatgttcttg

SEQ ID NO: 510546 - DNA, 15 bp, Homo sapiens
gagctatgttcttga

SEQ ID NO: 510547 - DNA, 15 bp, Homo sapiens
agctatgttcttgat

SEQ ID NO: 510548 - DNA, 15 bp, Homo sapiens
gctatgttcttgatt

SEQ ID NO: 510549 - DNA, 15 bp, Homo sapiens
ctatgttcttgattt

SEQ ID NO: 510550 - DNA, 15 bp, Homo sapiens
tatgttcttgatttt

SEQ ID NO: 510551 - DNA, 15 bp, Homo sapiens
atgttcttgattttt

SEQ ID NO: 510552 - DNA, 15 bp, Homo sapiens
tgttcttgatttttt

SEQ ID NO: 510553 - DNA, 15 bp, Homo sapiens
gttcttgatttttta

SEQ ID NO: 510554 - DNA, 15 bp, Homo sapiens
ttcttgattttttaa

SEQ ID NO: 510555 - DNA, 15 bp, Homo sapiens
tcttgattttttaaa

SEQ ID NO: 510556 - DNA, 15 bp, Homo sapiens
cttgattttttaaaa

SEQ ID NO: 510557 - DNA, 15 bp, Homo sapiens
ttgattttttaaaaa

SEQ ID NO: 510558 - DNA, 15 bp, Homo sapiens
tgattttttaaaaat

SEQ ID NO: 510559 - DNA, 15 bp, Homo sapiens
gattttttaaaaatt

SEQ ID NO: 510560 - DNA, 15 bp, Homo sapiens
attttttaaaaattt

SEQ ID NO: 510561 - DNA, 15 bp, Homo sapiens
ttttttaaaaatttt

SEQ ID NO: 510562 - DNA, 15 bp, Homo sapiens
tttttaaaaatttta

SEQ ID NO: 510563 - DNA, 15 bp, Homo sapiens
ttttaaaaattttag

SEQ ID NO: 510564 - DNA, 15 bp, Homo sapiens
tttaaaaattttagc

SEQ ID NO: 510565 - DNA, 15 bp, Homo sapiens
ttaaaaattttagcc

SEQ ID NO: 510566 - DNA, 15 bp, Homo sapiens
taaaaattttagcct

SEQ ID NO: 510567 - DNA, 15 bp, Homo sapiens
aaaaattttagccta

SEQ ID NO: 510568 - DNA, 15 bp, Homo sapiens
aaaattttagcctat

SEQ ID NO: 510569 - DNA, 15 bp, Homo sapiens
aaattttagcctatg

SEQ ID NO: 510570 - DNA, 15 bp, Homo sapiens
aattttagcctatgt

SEQ ID NO: 510571 - DNA, 15 bp, Homo sapiens
attttagcctatgtc

SEQ ID NO: 510572 - DNA, 15 bp, Homo sapiens
ttttagcctatgtca

SEQ ID NO: 510573 - DNA, 15 bp, Homo sapiens
tttagcctatgtcat

SEQ ID NO: 510574 - DNA, 15 bp, Homo sapiens
ttagcctatgtcatc

SEQ ID NO: 510575 - DNA, 15 bp, Homo sapiens
tagcctatgtcatct

SEQ ID NO: 510576 - DNA, 15 bp, Homo sapiens
agcctatgtcatctt

SEQ ID NO: 510577 - DNA, 15 bp, Homo sapiens
gcctatgtcatcttc

SEQ ID NO: 510578 - DNA, 15 bp, Homo sapiens
cctatgtcatcttct

SEQ ID NO: 510579 - DNA, 15 bp, Homo sapiens
ctatgtcatcttctg

SEQ ID NO: 510580 - DNA, 15 bp, Homo sapiens
tatgtcatcttctgt

SEQ ID NO: 510581 - DNA, 15 bp, Homo sapiens
atgtcatcttctgta

SEQ ID NO: 510582 - DNA, 15 bp, Homo sapiens
tgtcatcttctgtag

SEQ ID NO: 510583 - DNA, 15 bp, Homo sapiens
gtcatcttctgtagt

SEQ ID NO: 510584 - DNA, 15 bp, Homo sapiens
tcatcttctgtagtt

SEQ ID NO: 510585 - DNA, 15 bp, Homo sapiens
catcttctgtagtta

SEQ ID NO: 510586 - DNA, 15 bp, Homo sapiens
atcttctgtagttag

SEQ ID NO: 510587 - DNA, 15 bp, Homo sapiens
tcttctgtagttagt

SEQ ID NO: 510588 - DNA, 15 bp, Homo sapiens
cttctgtagttagta

SEQ ID NO: 510589 - DNA, 15 bp, Homo sapiens
ttctgtagttagtag

SEQ ID NO: 510590 - DNA, 15 bp, Homo sapiens
tctgtagttagtaga

SEQ ID NO: 510591 - DNA, 15 bp, Homo sapiens
ctgtagttagtagaa

SEQ ID NO: 510592 - DNA, 15 bp, Homo sapiens
tgtagttagtagaag

SEQ ID NO: 510593 - DNA, 15 bp, Homo sapiens
gtagttagtagaagc

SEQ ID NO: 510594 - DNA, 15 bp, Homo sapiens
tagttagtagaagcg

SEQ ID NO: 510595 - DNA, 15 bp, Homo sapiens
agttagtagaagcgg

SEQ ID NO: 510596 - DNA, 15 bp, Homo sapiens
gttagtagaagcggt

SEQ ID NO: 510597 - DNA, 15 bp, Homo sapiens
ttagtagaagcggtg

SEQ ID NO: 510598 - DNA, 15 bp, Homo sapiens
tagtagaagcggtgt

SEQ ID NO: 510599 - DNA, 15 bp, Homo sapiens
agtagaagcggtgtt

SEQ ID NO: 510600 - DNA, 15 bp, Homo sapiens
gtagaagcggtgttt

SEQ ID NO: 510601 - DNA, 15 bp, Homo sapiens
tagaagcggtgtttt

SEQ ID NO: 510602 - DNA, 15 bp, Homo sapiens
agaagcggtgttttt

SEQ ID NO: 510603 - DNA, 15 bp, Homo sapiens
gaagcggtgtttttt

SEQ ID NO: 510604 - DNA, 15 bp, Homo sapiens
aagcggtgttttttg

SEQ ID NO: 510605 - DNA, 15 bp, Homo sapiens
agcggtgttttttgt

SEQ ID NO: 510606 - DNA, 15 bp, Homo sapiens
gcggtgttttttgtt

SEQ ID NO: 510607 - DNA, 15 bp, Homo sapiens
cggtgttttttgttt

SEQ ID NO: 510608 - DNA, 15 bp, Homo sapiens
ggtgttttttgtttg

SEQ ID NO: 510609 - DNA, 15 bp, Homo sapiens
gtgttttttgtttgt

SEQ ID NO: 510610 - DNA, 15 bp, Homo sapiens
tgttttttgtttgtt

SEQ ID NO: 510611 - DNA, 15 bp, Homo sapiens
gttttttgtttgttt

SEQ ID NO: 510612 - DNA, 15 bp, Homo sapiens
ttttttgtttgtttt

SEQ ID NO: 510613 - DNA, 15 bp, Homo sapiens
tttttgtttgtttta

SEQ ID NO: 510614 - DNA, 15 bp, Homo sapiens
ttttgtttgttttac

SEQ ID NO: 510615 - DNA, 15 bp, Homo sapiens
tttgtttgttttacc

SEQ ID NO: 510616 - DNA, 15 bp, Homo sapiens
ttgtttgttttacct

SEQ ID NO: 510617 - DNA, 15 bp, Homo sapiens
tgtttgttttacctg

SEQ ID NO: 510618 - DNA, 15 bp, Homo sapiens
gtttgttttacctgg

SEQ ID NO: 510619 - DNA, 15 bp, Homo sapiens
tttgttttacctggg

SEQ ID NO: 510620 - DNA, 15 bp, Homo sapiens
ttgttttacctgggg

SEQ ID NO: 510621 - DNA, 15 bp, Homo sapiens
tgttttacctggggg

SEQ ID NO: 510622 - DNA, 15 bp, Homo sapiens
gttttacctgggggc

SEQ ID NO: 510623 - DNA, 15 bp, Homo sapiens
ttttacctgggggca

SEQ ID NO: 510624 - DNA, 15 bp, Homo sapiens
tttacctgggggcaa

SEQ ID NO: 510625 - DNA, 15 bp, Homo sapiens
ttacctgggggcaat

SEQ ID NO: 510626 - DNA, 15 bp, Homo sapiens
tacctgggggcaatg

SEQ ID NO: 510627 - DNA, 15 bp, Homo sapiens
acctgggggcaatgt

SEQ ID NO: 510628 - DNA, 15 bp, Homo sapiens
cctgggggcaatgta

SEQ ID NO: 510629 - DNA, 15 bp, Homo sapiens
ctgggggcaatgtag

SEQ ID NO: 510630 - DNA, 15 bp, Homo sapiens
tgggggcaatgtagg

SEQ ID NO: 510631 - DNA, 15 bp, Homo sapiens
gggggcaatgtaggt

SEQ ID NO: 510632 - DNA, 15 bp, Homo sapiens
ggggcaatgtaggtg

SEQ ID NO: 510633 - DNA, 15 bp, Homo sapiens
gggcaatgtaggtga

SEQ ID NO: 510634 - DNA, 15 bp, Homo sapiens
ggcaatgtaggtgac

SEQ ID NO: 510635 - DNA, 15 bp, Homo sapiens
gcaatgtaggtgacc

SEQ ID NO: 510636 - DNA, 15 bp, Homo sapiens
caatgtaggtgacca

SEQ ID NO: 510637 - DNA, 15 bp, Homo sapiens
aatgtaggtgaccat

SEQ ID NO: 510638 - DNA, 15 bp, Homo sapiens
atgtaggtgaccatt

SEQ ID NO: 510639 - DNA, 15 bp, Homo sapiens
tgtaggtgaccattt

SEQ ID NO: 510640 - DNA, 15 bp, Homo sapiens
gtaggtgaccatttg

SEQ ID NO: 510641 - DNA, 15 bp, Homo sapiens
taggtgaccatttgg

SEQ ID NO: 510642 - DNA, 15 bp, Homo sapiens
aggtgaccatttgga

SEQ ID NO: 510643 - DNA, 15 bp, Homo sapiens
ggtgaccatttggac

SEQ ID NO: 510644 - DNA, 15 bp, Homo sapiens
gtgaccatttggaca

SEQ ID NO: 510645 - DNA, 15 bp, Homo sapiens
tgaccatttggacac

SEQ ID NO: 510646 - DNA, 15 bp, Homo sapiens
gaccatttggacacc

SEQ ID NO: 510647 - DNA, 15 bp, Homo sapiens
accatttggacacct

SEQ ID NO: 510648 - DNA, 15 bp, Homo sapiens
ccatttggacacctt

SEQ ID NO: 510649 - DNA, 15 bp, Homo sapiens
catttggacaccttt

SEQ ID NO: 510650 - DNA, 15 bp, Homo sapiens
atttggacacctttt

SEQ ID NO: 510651 - DNA, 15 bp, Homo sapiens
tttggacaccttttt

SEQ ID NO: 510652 - DNA, 15 bp, Homo sapiens
ttggacacctttttc

SEQ ID NO: 510653 - DNA, 15 bp, Homo sapiens
tggacacctttttca

SEQ ID NO: 510654 - DNA, 15 bp, Homo sapiens
ggacacctttttcac

SEQ ID NO: 510655 - DNA, 15 bp, Homo sapiens
gacacctttttcaca

SEQ ID NO: 510656 - DNA, 15 bp, Homo sapiens
acacctttttcacat

SEQ ID NO: 510657 - DNA, 15 bp, Homo sapiens
cacctttttcacatg

SEQ ID NO: 510658 - DNA, 15 bp, Homo sapiens
acctttttcacatgg

SEQ ID NO: 510659 - DNA, 15 bp, Homo sapiens
cctttttcacatggg

SEQ ID NO: 510660 - DNA, 15 bp, Homo sapiens
ctttttcacatggga

SEQ ID NO: 510661 - DNA, 15 bp, Homo sapiens
tttttcacatgggac

SEQ ID NO: 510662 - DNA, 15 bp, Homo sapiens
ttttcacatgggaca

SEQ ID NO: 510663 - DNA, 15 bp, Homo sapiens
tttcacatgggacac

SEQ ID NO: 510664 - DNA, 15 bp, Homo sapiens
ttcacatgggacact

SEQ ID NO: 510665 - DNA, 15 bp, Homo sapiens
tcacatgggacactt

SEQ ID NO: 510666 - DNA, 15 bp, Homo sapiens
cacatgggacacttt

SEQ ID NO: 510667 - DNA, 15 bp, Homo sapiens
acatgggacactttt

SEQ ID NO: 510668 - DNA, 15 bp, Homo sapiens
catgggacacttttg

SEQ ID NO: 510669 - DNA, 15 bp, Homo sapiens
atgggacacttttgt

SEQ ID NO: 510670 - DNA, 15 bp, Homo sapiens
tgggacacttttgtt

SEQ ID NO: 510671 - DNA, 15 bp, Homo sapiens
gggacacttttgttt

SEQ ID NO: 510672 - DNA, 15 bp, Homo sapiens
ggacacttttgtttg

SEQ ID NO: 510673 - DNA, 15 bp, Homo sapiens
gacacttttgtttgt

SEQ ID NO: 510674 - DNA, 15 bp, Homo sapiens
acacttttgtttgtt

SEQ ID NO: 510675 - DNA, 15 bp, Homo sapiens
cacttttgtttgttt

SEQ ID NO: 510676 - DNA, 15 bp, Homo sapiens
acttttgtttgtttg

SEQ ID NO: 510677 - DNA, 15 bp, Homo sapiens
cttttgtttgtttgt

SEQ ID NO: 510678 - DNA, 15 bp, Homo sapiens
ttttgtttgtttgtt

SEQ ID NO: 510679 - DNA, 15 bp, Homo sapiens
tttgtttgtttgttt

SEQ ID NO: 510680 - DNA, 15 bp, Homo sapiens
ttgtttgtttgtttg

SEQ ID NO: 510681 - DNA, 15 bp, Homo sapiens
tgtttgtttgtttgt

SEQ ID NO: 510682 - DNA, 15 bp, Homo sapiens
gtttgtttgtttgtt

SEQ ID NO: 510683 - DNA, 15 bp, Homo sapiens
gtttgtttgtttgtg

SEQ ID NO: 510684 - DNA, 15 bp, Homo sapiens
tttgtttgtttgtgt

SEQ ID NO: 510685 - DNA, 15 bp, Homo sapiens
ttgtttgtttgtgtg

SEQ ID NO: 510686 - DNA, 15 bp, Homo sapiens
tgtttgtttgtgtgt

SEQ ID NO: 510687 - DNA, 15 bp, Homo sapiens
gtttgtttgtgtgtg

SEQ ID NO: 510688 - DNA, 15 bp, Homo sapiens
tttgtttgtgtgtgt

SEQ ID NO: 510689 - DNA, 15 bp, Homo sapiens
ttgtttgtgtgtgtg

SEQ ID NO: 510690 - DNA, 15 bp, Homo sapiens
tgtttgtgtgtgtgt

SEQ ID NO: 510691 - DNA, 15 bp, Homo sapiens
gtttgtgtgtgtgtt

SEQ ID NO: 510692 - DNA, 15 bp, Homo sapiens
tttgtgtgtgtgttt

SEQ ID NO: 510693 - DNA, 15 bp, Homo sapiens
ttgtgtgtgtgtttg

SEQ ID NO: 510694 - DNA, 15 bp, Homo sapiens
tgtgtgtgtgtttgt

SEQ ID NO: 510695 - DNA, 15 bp, Homo sapiens
gtgtgtgtgtttgtt

SEQ ID NO: 510696 - DNA, 15 bp, Homo sapiens
tgtgtgtgtttgttt

SEQ ID NO: 510697 - DNA, 15 bp, Homo sapiens
gtgtgtgtttgtttt

SEQ ID NO: 510698 - DNA, 15 bp, Homo sapiens
tgtgtgtttgttttt

SEQ ID NO: 510699 - DNA, 15 bp, Homo sapiens
gtgtgtttgtttttg

SEQ ID NO: 510700 - DNA, 15 bp, Homo sapiens
tgtgtttgtttttga

SEQ ID NO: 510701 - DNA, 15 bp, Homo sapiens
gtgtttgtttttgag

SEQ ID NO: 510702 - DNA, 15 bp, Homo sapiens
tgtttgtttttgaga

SEQ ID NO: 510703 - DNA, 15 bp, Homo sapiens
gtttgtttttgagac

SEQ ID NO: 510704 - DNA, 15 bp, Homo sapiens
tttgtttttgagacg

SEQ ID NO: 510705 - DNA, 15 bp, Homo sapiens
ttgtttttgagacgg

SEQ ID NO: 510706 - DNA, 15 bp, Homo sapiens
tgtttttgagacgga

SEQ ID NO: 510707 - DNA, 15 bp, Homo sapiens
gtttttgagacggag

SEQ ID NO: 510708 - DNA, 15 bp, Homo sapiens
ttttgagacggagtc

SEQ ID NO: 510709 - DNA, 15 bp, Homo sapiens
tttgagacggagtct

SEQ ID NO: 510710 - DNA, 15 bp, Homo sapiens
ttgagacggagtctt

SEQ ID NO: 510711 - DNA, 15 bp, Homo sapiens
tgagacggagtcttg

SEQ ID NO: 510712 - DNA, 15 bp, Homo sapiens
gagacggagtcttgc

SEQ ID NO: 510713 - DNA, 15 bp, Homo sapiens
agacggagtcttgct

SEQ ID NO: 510714 - DNA, 15 bp, Homo sapiens
gacggagtcttgctc

SEQ ID NO: 510715 - DNA, 15 bp, Homo sapiens
acggagtcttgctct

SEQ ID NO: 510716 - DNA, 15 bp, Homo sapiens
cggagtcttgctctg

SEQ ID NO: 510717 - DNA, 15 bp, Homo sapiens
ggagtcttgctctgt

SEQ ID NO: 510718 - DNA, 15 bp, Homo sapiens
agtcttgctctgtca

SEQ ID NO: 510719 - DNA, 15 bp, Homo sapiens
gtcttgctctgtcac

SEQ ID NO: 510720 - DNA, 15 bp, Homo sapiens
tcttgctctgtcacc

SEQ ID NO: 510721 - DNA, 15 bp, Homo sapiens
cttgctctgtcacca

SEQ ID NO: 510722 - DNA, 15 bp, Homo sapiens
ttgctctgtcaccag

SEQ ID NO: 510723 - DNA, 15 bp, Homo sapiens
tgctctgtcaccagg

SEQ ID NO: 510724 - DNA, 15 bp, Homo sapiens
gctctgtcaccaggc

SEQ ID NO: 510725 - DNA, 15 bp, Homo sapiens
ctctgtcaccaggct

SEQ ID NO: 510726 - DNA, 15 bp, Homo sapiens
tctgtcaccaggctg

SEQ ID NO: 510727 - DNA, 15 bp, Homo sapiens
ctgtcaccaggctga

SEQ ID NO: 510728 - DNA, 15 bp, Homo sapiens
tgtcaccaggctgaa

SEQ ID NO: 510729 - DNA, 15 bp, Homo sapiens
gtcaccaggctgaag

SEQ ID NO: 510730 - DNA, 15 bp, Homo sapiens
tcaccaggctgaagt

SEQ ID NO: 510731 - DNA, 15 bp, Homo sapiens
caccaggctgaagtg

SEQ ID NO: 510732 - DNA, 15 bp, Homo sapiens
accaggctgaagtgc

SEQ ID NO: 510733 - DNA, 15 bp, Homo sapiens
ccaggctgaagtgca

SEQ ID NO: 510734 - DNA, 15 bp, Homo sapiens
caggctgaagtgcag

SEQ ID NO: 510735 - DNA, 15 bp, Homo sapiens
aggctgaagtgcagt

SEQ ID NO: 510736 - DNA, 15 bp, Homo sapiens
ggctgaagtgcagtg

SEQ ID NO: 510737 - DNA, 15 bp, Homo sapiens
gctgaagtgcagtgg

SEQ ID NO: 510738 - DNA, 15 bp, Homo sapiens
ctgaagtgcagtggc

SEQ ID NO: 510739 - DNA, 15 bp, Homo sapiens
tgaagtgcagtggcg

SEQ ID NO: 510740 - DNA, 15 bp, Homo sapiens
gaagtgcagtggcgc

SEQ ID NO: 510741 - DNA, 15 bp, Homo sapiens
aagtgcagtggcgca

SEQ ID NO: 510742 - DNA, 15 bp, Homo sapiens
agtgcagtggcgcaa

SEQ ID NO: 510743 - DNA, 15 bp, Homo sapiens
gtgcagtggcgcaat

SEQ ID NO: 510744 - DNA, 15 bp, Homo sapiens
tgcagtggcgcaatc

SEQ ID NO: 510745 - DNA, 15 bp, Homo sapiens
gcagtggcgcaatcc

SEQ ID NO: 510746 - DNA, 15 bp, Homo sapiens
cagtggcgcaatccc

SEQ ID NO: 510747 - DNA, 15 bp, Homo sapiens
agtggcgcaatccca

SEQ ID NO: 510748 - DNA, 15 bp, Homo sapiens
gtggcgcaatcccag

SEQ ID NO: 510749 - DNA, 15 bp, Homo sapiens
tggcgcaatcccagc

SEQ ID NO: 510750 - DNA, 15 bp, Homo sapiens
ggcgcaatcccagct

SEQ ID NO: 510751 - DNA, 15 bp, Homo sapiens
gcgcaatcccagctc

SEQ ID NO: 510752 - DNA, 15 bp, Homo sapiens
cgcaatcccagctca

SEQ ID NO: 510753 - DNA, 15 bp, Homo sapiens
gcaatcccagctcac

SEQ ID NO: 510754 - DNA, 15 bp, Homo sapiens
caatcccagctcact

SEQ ID NO: 510755 - DNA, 15 bp, Homo sapiens
aatcccagctcactg

SEQ ID NO: 510756 - DNA, 15 bp, Homo sapiens
atcccagctcactgc

SEQ ID NO: 510757 - DNA, 15 bp, Homo sapiens
tcccagctcactgca

SEQ ID NO: 510758 - DNA, 15 bp, Homo sapiens
cccagctcactgcaa

SEQ ID NO: 510759 - DNA, 15 bp, Homo sapiens
ccagctcactgcaac

SEQ ID NO: 510760 - DNA, 15 bp, Homo sapiens
cagctcactgcaacc

SEQ ID NO: 510761 - DNA, 15 bp, Homo sapiens
agctcactgcaacct

SEQ ID NO: 510762 - DNA, 15 bp, Homo sapiens
tcactgcaacctccg

SEQ ID NO: 510763 - DNA, 15 bp, Homo sapiens
cactgcaacctccgc

SEQ ID NO: 510764 - DNA, 15 bp, Homo sapiens
actgcaacctccgcc

SEQ ID NO: 510765 - DNA, 15 bp, Homo sapiens
ctgcaacctccgcct

SEQ ID NO: 510766 - DNA, 15 bp, Homo sapiens
tgcaacctccgcctc

SEQ ID NO: 510767 - DNA, 15 bp, Homo sapiens
gcaacctccgcctcc

SEQ ID NO: 510768 - DNA, 15 bp, Homo sapiens
caacctccgcctccc

SEQ ID NO: 510769 - DNA, 15 bp, Homo sapiens
aacctccgcctccca

SEQ ID NO: 510770 - DNA, 15 bp, Homo sapiens
acctccgcctcccag

SEQ ID NO: 510771 - DNA, 15 bp, Homo sapiens
cctccgcctcccagg

SEQ ID NO: 510772 - DNA, 15 bp, Homo sapiens
aggttcaagtgattc

SEQ ID NO: 510773 - DNA, 15 bp, Homo sapiens
ggttcaagtgattct

SEQ ID NO: 510774 - DNA, 15 bp, Homo sapiens
gttcaagtgattctc

SEQ ID NO: 510775 - DNA, 15 bp, Homo sapiens
ttcaagtgattctcc

SEQ ID NO: 510776 - DNA, 15 bp, Homo sapiens
tcaagtgattctcct

SEQ ID NO: 510777 - DNA, 15 bp, Homo sapiens
caagtgattctcctg

SEQ ID NO: 510778 - DNA, 15 bp, Homo sapiens
aagtgattctcctgc

SEQ ID NO: 510779 - DNA, 15 bp, Homo sapiens
agtgattctcctgcc

SEQ ID NO: 510780 - DNA, 15 bp, Homo sapiens
gtgattctcctgcct

SEQ ID NO: 510781 - DNA, 15 bp, Homo sapiens
tgattctcctgcctc

SEQ ID NO: 510782 - DNA, 15 bp, Homo sapiens
cctgcctcagcctct

SEQ ID NO: 510783 - DNA, 15 bp, Homo sapiens
ctgcctcagcctctt

SEQ ID NO: 510784 - DNA, 15 bp, Homo sapiens
tgcctcagcctcttg

SEQ ID NO: 510785 - DNA, 15 bp, Homo sapiens
gcctcagcctcttga

SEQ ID NO: 510786 - DNA, 15 bp, Homo sapiens
cctcagcctcttgag

SEQ ID NO: 510787 - DNA, 15 bp, Homo sapiens
ctcagcctcttgagt

SEQ ID NO: 510788 - DNA, 15 bp, Homo sapiens
tcagcctcttgagta

SEQ ID NO: 510789 - DNA, 15 bp, Homo sapiens
cagcctcttgagtag

SEQ ID NO: 510790 - DNA, 15 bp, Homo sapiens
agcctcttgagtagc

SEQ ID NO: 510791 - DNA, 15 bp, Homo sapiens
gcctcttgagtagct

SEQ ID NO: 510792 - DNA, 15 bp, Homo sapiens
cctcttgagtagctg

SEQ ID NO: 510793 - DNA, 15 bp, Homo sapiens
ctcttgagtagctgg

SEQ ID NO: 510794 - DNA, 15 bp, Homo sapiens
tcttgagtagctggg

SEQ ID NO: 510795 - DNA, 15 bp, Homo sapiens
cttgagtagctggga

SEQ ID NO: 510796 - DNA, 15 bp, Homo sapiens
ttgagtagctgggat

SEQ ID NO: 510797 - DNA, 15 bp, Homo sapiens
tgggattacaggcgc

SEQ ID NO: 510798 - DNA, 15 bp, Homo sapiens
gggattacaggcgcc

SEQ ID NO: 510799 - DNA, 15 bp, Homo sapiens
ggattacaggcgcct

SEQ ID NO: 510800 - DNA, 15 bp, Homo sapiens
gattacaggcgcctg

SEQ ID NO: 510801 - DNA, 15 bp, Homo sapiens
attacaggcgcctgc

SEQ ID NO: 510802 - DNA, 15 bp, Homo sapiens
ttacaggcgcctgca

SEQ ID NO: 510803 - DNA, 15 bp, Homo sapiens
tacaggcgcctgcaa

SEQ ID NO: 510804 - DNA, 15 bp, Homo sapiens
acaggcgcctgcaac

SEQ ID NO: 510805 - DNA, 15 bp, Homo sapiens
caggcgcctgcaacc

SEQ ID NO: 510806 - DNA, 15 bp, Homo sapiens
aggcgcctgcaacca

SEQ ID NO: 510807 - DNA, 15 bp, Homo sapiens
ggcgcctgcaaccac

SEQ ID NO: 510808 - DNA, 15 bp, Homo sapiens
gcgcctgcaaccaca

SEQ ID NO: 510809 - DNA, 15 bp, Homo sapiens
cgcctgcaaccacac

SEQ ID NO: 510810 - DNA, 15 bp, Homo sapiens
gcctgcaaccacacc

SEQ ID NO: 510811 - DNA, 15 bp, Homo sapiens
cctgcaaccacaccc

SEQ ID NO: 510812 - DNA, 15 bp, Homo sapiens
ctgcaaccacaccca

SEQ ID NO: 510813 - DNA, 15 bp, Homo sapiens
tgcaaccacacccag

SEQ ID NO: 510814 - DNA, 15 bp, Homo sapiens
gcaaccacacccagc

SEQ ID NO: 510815 - DNA, 15 bp, Homo sapiens
caaccacacccagct

SEQ ID NO: 510816 - DNA, 15 bp, Homo sapiens
aaccacacccagcta

SEQ ID NO: 510817 - DNA, 15 bp, Homo sapiens
accacacccagctag

SEQ ID NO: 510818 - DNA, 15 bp, Homo sapiens
ccacacccagctagt

SEQ ID NO: 510819 - DNA, 15 bp, Homo sapiens
cacacccagctagtt

SEQ ID NO: 510820 - DNA, 15 bp, Homo sapiens
acacccagctagttt

SEQ ID NO: 510821 - DNA, 15 bp, Homo sapiens
cacccagctagtttt

SEQ ID NO: 510822 - DNA, 15 bp, Homo sapiens
acccagctagttttg

SEQ ID NO: 510823 - DNA, 15 bp, Homo sapiens
cccagctagttttgt

SEQ ID NO: 510824 - DNA, 15 bp, Homo sapiens
ccagctagttttgta

SEQ ID NO: 510825 - DNA, 15 bp, Homo sapiens
cagctagttttgtat

SEQ ID NO: 510826 - DNA, 15 bp, Homo sapiens
agctagttttgtatt

SEQ ID NO: 510827 - DNA, 15 bp, Homo sapiens
gctagttttgtattt

SEQ ID NO: 510828 - DNA, 15 bp, Homo sapiens
ctagttttgtatttt

SEQ ID NO: 510829 - DNA, 15 bp, Homo sapiens
tagttttgtattttt

SEQ ID NO: 510830 - DNA, 15 bp, Homo sapiens
agttttgtattttta

SEQ ID NO: 510831 - DNA, 15 bp, Homo sapiens
gttttgtatttttag

SEQ ID NO: 510832 - DNA, 15 bp, Homo sapiens
tttgtatttttagtt

SEQ ID NO: 510833 - DNA, 15 bp, Homo sapiens
ttgtatttttagttg

SEQ ID NO: 510834 - DNA, 15 bp, Homo sapiens
tgtatttttagttga

SEQ ID NO: 510835 - DNA, 15 bp, Homo sapiens
gtatttttagttgag

SEQ ID NO: 510836 - DNA, 15 bp, Homo sapiens
tatttttagttgaga

SEQ ID NO: 510837 - DNA, 15 bp, Homo sapiens
atttttagttgagat

SEQ ID NO: 510838 - DNA, 15 bp, Homo sapiens
tttttagttgagatg

SEQ ID NO: 510839 - DNA, 15 bp, Homo sapiens
ttttagttgagatgg

SEQ ID NO: 510840 - DNA, 15 bp, Homo sapiens
tttagttgagatggg

SEQ ID NO: 510841 - DNA, 15 bp, Homo sapiens
ttagttgagatgggg

SEQ ID NO: 510842 - DNA, 15 bp, Homo sapiens
tagttgagatggggt

SEQ ID NO: 510843 - DNA, 15 bp, Homo sapiens
agttgagatggggtt

SEQ ID NO: 510844 - DNA, 15 bp, Homo sapiens
gttgagatggggttt

SEQ ID NO: 510845 - DNA, 15 bp, Homo sapiens
ttgagatggggtttc

SEQ ID NO: 510846 - DNA, 15 bp, Homo sapiens
tgagatggggtttca

SEQ ID NO: 510847 - DNA, 15 bp, Homo sapiens
tggggtttcaccata

SEQ ID NO: 510848 - DNA, 15 bp, Homo sapiens
ggggtttcaccatat

SEQ ID NO: 510849 - DNA, 15 bp, Homo sapiens
gggtttcaccatatt

SEQ ID NO: 510850 - DNA, 15 bp, Homo sapiens
ggtttcaccatattg

SEQ ID NO: 510851 - DNA, 15 bp, Homo sapiens
gtttcaccatattgt

SEQ ID NO: 510852 - DNA, 15 bp, Homo sapiens
tttcaccatattgtc

SEQ ID NO: 510853 - DNA, 15 bp, Homo sapiens
ttcaccatattgtcc

SEQ ID NO: 510854 - DNA, 15 bp, Homo sapiens
tcaccatattgtcca

SEQ ID NO: 510855 - DNA, 15 bp, Homo sapiens
caccatattgtccag

SEQ ID NO: 510856 - DNA, 15 bp, Homo sapiens
accatattgtccagg

SEQ ID NO: 510857 - DNA, 15 bp, Homo sapiens
ccatattgtccagga

SEQ ID NO: 510858 - DNA, 15 bp, Homo sapiens
catattgtccaggat

SEQ ID NO: 510859 - DNA, 15 bp, Homo sapiens
atattgtccaggatg

SEQ ID NO: 510860 - DNA, 15 bp, Homo sapiens
tattgtccaggatga

SEQ ID NO: 510861 - DNA, 15 bp, Homo sapiens
attgtccaggatgat

SEQ ID NO: 510862 - DNA, 15 bp, Homo sapiens
ttgtccaggatgatc

SEQ ID NO: 510863 - DNA, 15 bp, Homo sapiens
tgtccaggatgatct

SEQ ID NO: 510864 - DNA, 15 bp, Homo sapiens
gtccaggatgatctc

SEQ ID NO: 510865 - DNA, 15 bp, Homo sapiens
tccaggatgatctcg

SEQ ID NO: 510866 - DNA, 15 bp, Homo sapiens
ccaggatgatctcga

SEQ ID NO: 510867 - DNA, 15 bp, Homo sapiens
caggatgatctcgat

SEQ ID NO: 510868 - DNA, 15 bp, Homo sapiens
aggatgatctcgatt

SEQ ID NO: 510869 - DNA, 15 bp, Homo sapiens
ggatgatctcgattt

SEQ ID NO: 510870 - DNA, 15 bp, Homo sapiens
gatgatctcgatttc

SEQ ID NO: 510871 - DNA, 15 bp, Homo sapiens
atgatctcgatttcc

SEQ ID NO: 510872 - DNA, 15 bp, Homo sapiens
tgatctcgatttcct

SEQ ID NO: 510873 - DNA, 15 bp, Homo sapiens
gatctcgatttcctg

SEQ ID NO: 510874 - DNA, 15 bp, Homo sapiens
atctcgatttcctga

SEQ ID NO: 510875 - DNA, 15 bp, Homo sapiens
tctcgatttcctgac

SEQ ID NO: 510876 - DNA, 15 bp, Homo sapiens
ctcgatttcctgact

SEQ ID NO: 510877 - DNA, 15 bp, Homo sapiens
tcgatttcctgactc

SEQ ID NO: 510878 - DNA, 15 bp, Homo sapiens
cgatttcctgactct

SEQ ID NO: 510879 - DNA, 15 bp, Homo sapiens
gatttcctgactctg

SEQ ID NO: 510880 - DNA, 15 bp, Homo sapiens
cctgccgtcccatga

SEQ ID NO: 510881 - DNA, 15 bp, Homo sapiens
ctgccgtcccatgaa

SEQ ID NO: 510882 - DNA, 15 bp, Homo sapiens
tgccgtcccatgaag

SEQ ID NO: 510883 - DNA, 15 bp, Homo sapiens
gccgtcccatgaagt

SEQ ID NO: 510884 - DNA, 15 bp, Homo sapiens
ccgtcccatgaagtt

SEQ ID NO: 510885 - DNA, 15 bp, Homo sapiens
cgtcccatgaagtta

SEQ ID NO: 510886 - DNA, 15 bp, Homo sapiens
gtcccatgaagttaa

SEQ ID NO: 510887 - DNA, 15 bp, Homo sapiens
tcccatgaagttaac

SEQ ID NO: 510888 - DNA, 15 bp, Homo sapiens
cccatgaagttaact

SEQ ID NO: 510889 - DNA, 15 bp, Homo sapiens
ccatgaagttaactc

SEQ ID NO: 510890 - DNA, 15 bp, Homo sapiens
catgaagttaactcc

SEQ ID NO: 510891 - DNA, 15 bp, Homo sapiens
atgaagttaactcct

SEQ ID NO: 510892 - DNA, 15 bp, Homo sapiens
tgaagttaactcctg

SEQ ID NO: 510893 - DNA, 15 bp, Homo sapiens
gaagttaactcctga

SEQ ID NO: 510894 - DNA, 15 bp, Homo sapiens
aagttaactcctgag

SEQ ID NO: 510895 - DNA, 15 bp, Homo sapiens
agttaactcctgaga

SEQ ID NO: 510896 - DNA, 15 bp, Homo sapiens
gttaactcctgagag

SEQ ID NO: 510897 - DNA, 15 bp, Homo sapiens
ttaactcctgagagt

SEQ ID NO: 510898 - DNA, 15 bp, Homo sapiens
taactcctgagagtt

SEQ ID NO: 510899 - DNA, 15 bp, Homo sapiens
aactcctgagagttg

SEQ ID NO: 510900 - DNA, 15 bp, Homo sapiens
actcctgagagttgt

SEQ ID NO: 510901 - DNA, 15 bp, Homo sapiens
ctcctgagagttgtc

SEQ ID NO: 510902 - DNA, 15 bp, Homo sapiens
tcctgagagttgtcg

SEQ ID NO: 510903 - DNA, 15 bp, Homo sapiens
cctgagagttgtcgg

SEQ ID NO: 510904 - DNA, 15 bp, Homo sapiens
ctgagagttgtcggg

SEQ ID NO: 510905 - DNA, 15 bp, Homo sapiens
tgagagttgtcgggg

SEQ ID NO: 510906 - DNA, 15 bp, Homo sapiens
gagagttgtcggggg

SEQ ID NO: 510907 - DNA, 15 bp, Homo sapiens
agagttgtcgggggt

SEQ ID NO: 510908 - DNA, 15 bp, Homo sapiens
gagttgtcgggggtg

SEQ ID NO: 510909 - DNA, 15 bp, Homo sapiens
agttgtcgggggtga

SEQ ID NO: 510910 - DNA, 15 bp, Homo sapiens
gttgtcgggggtgac

SEQ ID NO: 510911 - DNA, 15 bp, Homo sapiens
ttgtcgggggtgact

SEQ ID NO: 510912 - DNA, 15 bp, Homo sapiens
tgtcgggggtgactg

SEQ ID NO: 510913 - DNA, 15 bp, Homo sapiens
gtcgggggtgactgg

SEQ ID NO: 510914 - DNA, 15 bp, Homo sapiens
tcgggggtgactgga

SEQ ID NO: 510915 - DNA, 15 bp, Homo sapiens
cgggggtgactggag

SEQ ID NO: 510916 - DNA, 15 bp, Homo sapiens
gggggtgactggaga

SEQ ID NO: 510917 - DNA, 15 bp, Homo sapiens
ggggtgactggagag

SEQ ID NO: 510918 - DNA, 15 bp, Homo sapiens
gggtgactggagagc

SEQ ID NO: 510919 - DNA, 15 bp, Homo sapiens
ggtgactggagagct

SEQ ID NO: 510920 - DNA, 15 bp, Homo sapiens
gtgactggagagctc

SEQ ID NO: 510921 - DNA, 15 bp, Homo sapiens
tgactggagagctca

SEQ ID NO: 510922 - DNA, 15 bp, Homo sapiens
gactggagagctcat

SEQ ID NO: 510923 - DNA, 15 bp, Homo sapiens
actggagagctcatt

SEQ ID NO: 510924 - DNA, 15 bp, Homo sapiens
ctggagagctcattg

SEQ ID NO: 510925 - DNA, 15 bp, Homo sapiens
tggagagctcattgc

SEQ ID NO: 510926 - DNA, 15 bp, Homo sapiens
ggagagctcattgca

SEQ ID NO: 510927 - DNA, 15 bp, Homo sapiens
gagagctcattgcag

SEQ ID NO: 510928 - DNA, 15 bp, Homo sapiens
agagctcattgcaga

SEQ ID NO: 510929 - DNA, 15 bp, Homo sapiens
gagctcattgcagac

SEQ ID NO: 510930 - DNA, 15 bp, Homo sapiens
agctcattgcagacc

SEQ ID NO: 510931 - DNA, 15 bp, Homo sapiens
gctcattgcagacca

SEQ ID NO: 510932 - DNA, 15 bp, Homo sapiens
ctcattgcagaccac

SEQ ID NO: 510933 - DNA, 15 bp, Homo sapiens
tcattgcagaccacg

SEQ ID NO: 510934 - DNA, 15 bp, Homo sapiens
cattgcagaccacgt

SEQ ID NO: 510935 - DNA, 15 bp, Homo sapiens
attgcagaccacgtg

SEQ ID NO: 510936 - DNA, 15 bp, Homo sapiens
ttgcagaccacgtgg

SEQ ID NO: 510937 - DNA, 15 bp, Homo sapiens
tgcagaccacgtggt

SEQ ID NO: 510938 - DNA, 15 bp, Homo sapiens
gcagaccacgtggtc

SEQ ID NO: 510939 - DNA, 15 bp, Homo sapiens
cagaccacgtggtcc

SEQ ID NO: 510940 - DNA, 15 bp, Homo sapiens
agaccacgtggtcct

SEQ ID NO: 510941 - DNA, 15 bp, Homo sapiens
gaccacgtggtcctc

SEQ ID NO: 510942 - DNA, 15 bp, Homo sapiens
accacgtggtcctcc

SEQ ID NO: 510943 - DNA, 15 bp, Homo sapiens
ccacgtggtcctcca

SEQ ID NO: 510944 - DNA, 15 bp, Homo sapiens
cacgtggtcctccag

SEQ ID NO: 510945 - DNA, 15 bp, Homo sapiens
acgtggtcctccagg

SEQ ID NO: 510946 - DNA, 15 bp, Homo sapiens
cgtggtcctccaggg

SEQ ID NO: 510947 - DNA, 15 bp, Homo sapiens
gtggtcctccagggt

SEQ ID NO: 510948 - DNA, 15 bp, Homo sapiens
tggtcctccagggtg

SEQ ID NO: 510949 - DNA, 15 bp, Homo sapiens
ggtcctccagggtgg

SEQ ID NO: 510950 - DNA, 15 bp, Homo sapiens
gtcctccagggtggc

SEQ ID NO: 510951 - DNA, 15 bp, Homo sapiens
tcctccagggtggct

SEQ ID NO: 510952 - DNA, 15 bp, Homo sapiens
cctccagggtggctc

SEQ ID NO: 510953 - DNA, 15 bp, Homo sapiens
ctccagggtggctct

SEQ ID NO: 510954 - DNA, 15 bp, Homo sapiens
tccagggtggctctc

SEQ ID NO: 510955 - DNA, 15 bp, Homo sapiens
ccagggtggctctcc

SEQ ID NO: 510956 - DNA, 15 bp, Homo sapiens
cagggtggctctcca

SEQ ID NO: 510957 - DNA, 15 bp, Homo sapiens
agggtggctctccac

SEQ ID NO: 510958 - DNA, 15 bp, Homo sapiens
gggtggctctccacc

SEQ ID NO: 510959 - DNA, 15 bp, Homo sapiens
ggtggctctccacct

SEQ ID NO: 510960 - DNA, 15 bp, Homo sapiens
gtggctctccacctt

SEQ ID NO: 510961 - DNA, 15 bp, Homo sapiens
tggctctccaccttc

SEQ ID NO: 510962 - DNA, 15 bp, Homo sapiens
ggctctccaccttcg

SEQ ID NO: 510963 - DNA, 15 bp, Homo sapiens
gctctccaccttcgg

SEQ ID NO: 510964 - DNA, 15 bp, Homo sapiens
ctctccaccttcggg

SEQ ID NO: 510965 - DNA, 15 bp, Homo sapiens
tctccaccttcgggt

SEQ ID NO: 510966 - DNA, 15 bp, Homo sapiens
ctccaccttcgggtc

SEQ ID NO: 510967 - DNA, 15 bp, Homo sapiens
tccaccttcgggtcc

SEQ ID NO: 510968 - DNA, 15 bp, Homo sapiens
ccaccttcgggtcct

SEQ ID NO: 510969 - DNA, 15 bp, Homo sapiens
caccttcgggtcctg

SEQ ID NO: 510970 - DNA, 15 bp, Homo sapiens
accttcgggtcctgg

SEQ ID NO: 510971 - DNA, 15 bp, Homo sapiens
ccttcgggtcctggt

SEQ ID NO: 510972 - DNA, 15 bp, Homo sapiens
cttcgggtcctggta

SEQ ID NO: 510973 - DNA, 15 bp, Homo sapiens
ttcgggtcctggtat

SEQ ID NO: 510974 - DNA, 15 bp, Homo sapiens
tcgggtcctggtatt

SEQ ID NO: 510975 - DNA, 15 bp, Homo sapiens
cgggtcctggtattt

SEQ ID NO: 510976 - DNA, 15 bp, Homo sapiens
gggtcctggtatttc

SEQ ID NO: 510977 - DNA, 15 bp, Homo sapiens
ggtcctggtatttcc

SEQ ID NO: 510978 - DNA, 15 bp, Homo sapiens
gtcctggtatttcca

SEQ ID NO: 510979 - DNA, 15 bp, Homo sapiens
tcctggtatttccag

SEQ ID NO: 510980 - DNA, 15 bp, Homo sapiens
cctggtatttccagt

SEQ ID NO: 510981 - DNA, 15 bp, Homo sapiens
ctggtatttccagtc

SEQ ID NO: 510982 - DNA, 15 bp, Homo sapiens
tggtatttccagtca

SEQ ID NO: 510983 - DNA, 15 bp, Homo sapiens
ggtatttccagtcaa

SEQ ID NO: 510984 - DNA, 15 bp, Homo sapiens
gtatttccagtcaag

SEQ ID NO: 510985 - DNA, 15 bp, Homo sapiens
tatttccagtcaagt

SEQ ID NO: 510986 - DNA, 15 bp, Homo sapiens
atttccagtcaagtg

SEQ ID NO: 510987 - DNA, 15 bp, Homo sapiens
tttccagtcaagtgg

SEQ ID NO: 510988 - DNA, 15 bp, Homo sapiens
ttccagtcaagtggg

SEQ ID NO: 510989 - DNA, 15 bp, Homo sapiens
tccagtcaagtgggt

SEQ ID NO: 510990 - DNA, 15 bp, Homo sapiens
ccagtcaagtgggtt

SEQ ID NO: 510991 - DNA, 15 bp, Homo sapiens
cagtcaagtgggttt

SEQ ID NO: 510992 - DNA, 15 bp, Homo sapiens
agtcaagtgggtttc

SEQ ID NO: 510993 - DNA, 15 bp, Homo sapiens
gtcaagtgggtttca

SEQ ID NO: 510994 - DNA, 15 bp, Homo sapiens
tcaagtgggtttcaa

SEQ ID NO: 510995 - DNA, 15 bp, Homo sapiens
caagtgggtttcaat

SEQ ID NO: 510996 - DNA, 15 bp, Homo sapiens
aagtgggtttcaatt

SEQ ID NO: 510997 - DNA, 15 bp, Homo sapiens
agtgggtttcaattc

SEQ ID NO: 510998 - DNA, 15 bp, Homo sapiens
gtgggtttcaattct

SEQ ID NO: 510999 - DNA, 15 bp, Homo sapiens
tgggtttcaattctt

SEQ ID NO: 511000 - DNA, 15 bp, Homo sapiens
gggtttcaattcttg

SEQ ID NO: 511001 - DNA, 15 bp, Homo sapiens
ggtttcaattcttgg

SEQ ID NO: 511002 - DNA, 15 bp, Homo sapiens
gtttcaattcttggg

SEQ ID NO: 511003 - DNA, 15 bp, Homo sapiens
tttcaattcttgggc

SEQ ID NO: 511004 - DNA, 15 bp, Homo sapiens
ttcaattcttgggct

SEQ ID NO: 511005 - DNA, 15 bp, Homo sapiens
tcaattcttgggctt

SEQ ID NO: 511006 - DNA, 15 bp, Homo sapiens
caattcttgggcttt

SEQ ID NO: 511007 - DNA, 15 bp, Homo sapiens
aattcttgggctttg

SEQ ID NO: 511008 - DNA, 15 bp, Homo sapiens
attcttgggctttgc

SEQ ID NO: 511009 - DNA, 15 bp, Homo sapiens
ttcttgggctttgcc

SEQ ID NO: 511010 - DNA, 15 bp, Homo sapiens
tcttgggctttgccg

SEQ ID NO: 511011 - DNA, 15 bp, Homo sapiens
cttgggctttgccgc

SEQ ID NO: 511012 - DNA, 15 bp, Homo sapiens
ttgggctttgccgcc

SEQ ID NO: 511013 - DNA, 15 bp, Homo sapiens
tgggctttgccgccc

SEQ ID NO: 511014 - DNA, 15 bp, Homo sapiens
gggctttgccgccct

SEQ ID NO: 511015 - DNA, 15 bp, Homo sapiens
ggctttgccgccctt

SEQ ID NO: 511016 - DNA, 15 bp, Homo sapiens
gctttgccgccctta

SEQ ID NO: 511017 - DNA, 15 bp, Homo sapiens
ctttgccgcccttat

SEQ ID NO: 511018 - DNA, 15 bp, Homo sapiens
tttgccgcccttatg

SEQ ID NO: 511019 - DNA, 15 bp, Homo sapiens
ttgccgcccttatga

SEQ ID NO: 511020 - DNA, 15 bp, Homo sapiens
tgccgcccttatgat

SEQ ID NO: 511021 - DNA, 15 bp, Homo sapiens
gccgcccttatgatg

SEQ ID NO: 511022 - DNA, 15 bp, Homo sapiens
ccgcccttatgatga

SEQ ID NO: 511023 - DNA, 15 bp, Homo sapiens
cgcccttatgatgaa

SEQ ID NO: 511024 - DNA, 15 bp, Homo sapiens
gcccttatgatgaag

SEQ ID NO: 511025 - DNA, 15 bp, Homo sapiens
cccttatgatgaagt

SEQ ID NO: 511026 - DNA, 15 bp, Homo sapiens
ccttatgatgaagtg

SEQ ID NO: 511027 - DNA, 15 bp, Homo sapiens
cttatgatgaagtgt

SEQ ID NO: 511028 - DNA, 15 bp, Homo sapiens
ttatgatgaagtgtg

SEQ ID NO: 511029 - DNA, 15 bp, Homo sapiens
tatgatgaagtgtgt

SEQ ID NO: 511030 - DNA, 15 bp, Homo sapiens
atgatgaagtgtgtg

SEQ ID NO: 511031 - DNA, 15 bp, Homo sapiens
tgatgaagtgtgtgt

SEQ ID NO: 511032 - DNA, 15 bp, Homo sapiens
gatgaagtgtgtgtt

SEQ ID NO: 511033 - DNA, 15 bp, Homo sapiens
atgaagtgtgtgttt

SEQ ID NO: 511034 - DNA, 15 bp, Homo sapiens
tgaagtgtgtgtttg

SEQ ID NO: 511035 - DNA, 15 bp, Homo sapiens
gaagtgtgtgtttga

SEQ ID NO: 511036 - DNA, 15 bp, Homo sapiens
aagtgtgtgtttgat

SEQ ID NO: 511037 - DNA, 15 bp, Homo sapiens
agtgtgtgtttgatg

SEQ ID NO: 511038 - DNA, 15 bp, Homo sapiens
gtgtgtgtttgatgc

SEQ ID NO: 511039 - DNA, 15 bp, Homo sapiens
tgtgtgtttgatgcc

SEQ ID NO: 511040 - DNA, 15 bp, Homo sapiens
gtgtgtttgatgcca

SEQ ID NO: 511041 - DNA, 15 bp, Homo sapiens
tgtgtttgatgccag

SEQ ID NO: 511042 - DNA, 15 bp, Homo sapiens
gtgtttgatgccagt

SEQ ID NO: 511043 - DNA, 15 bp, Homo sapiens
tgtttgatgccagtg

SEQ ID NO: 511044 - DNA, 15 bp, Homo sapiens
gtttgatgccagtga

SEQ ID NO: 511045 - DNA, 15 bp, Homo sapiens
tttgatgccagtgag

SEQ ID NO: 511046 - DNA, 15 bp, Homo sapiens
ttgatgccagtgaga

SEQ ID NO: 511047 - DNA, 15 bp, Homo sapiens
tgatgccagtgagaa

SEQ ID NO: 511048 - DNA, 15 bp, Homo sapiens
gatgccagtgagaaa

SEQ ID NO: 511049 - DNA, 15 bp, Homo sapiens
atgccagtgagaaac

SEQ ID NO: 511050 - DNA, 15 bp, Homo sapiens
tgccagtgagaaact

SEQ ID NO: 511051 - DNA, 15 bp, Homo sapiens
gccagtgagaaactc

SEQ ID NO: 511052 - DNA, 15 bp, Homo sapiens
ccagtgagaaactca

SEQ ID NO: 511053 - DNA, 15 bp, Homo sapiens
cagtgagaaactcag

SEQ ID NO: 511054 - DNA, 15 bp, Homo sapiens
agtgagaaactcagt

SEQ ID NO: 511055 - DNA, 15 bp, Homo sapiens
gtgagaaactcagtc

SEQ ID NO: 511056 - DNA, 15 bp, Homo sapiens
tgagaaactcagtct

SEQ ID NO: 511057 - DNA, 15 bp, Homo sapiens
gagaaactcagtctg

SEQ ID NO: 511058 - DNA, 15 bp, Homo sapiens
agaaactcagtctgg

SEQ ID NO: 511059 - DNA, 15 bp, Homo sapiens
gaaactcagtctggc

SEQ ID NO: 511060 - DNA, 15 bp, Homo sapiens
aaactcagtctggca

SEQ ID NO: 511061 - DNA, 15 bp, Homo sapiens
aactcagtctggcag

SEQ ID NO: 511062 - DNA, 15 bp, Homo sapiens
actcagtctggcagg

SEQ ID NO: 511063 - DNA, 15 bp, Homo sapiens
ctcagtctggcaggc

SEQ ID NO: 511064 - DNA, 15 bp, Homo sapiens
tcagtctggcaggct

SEQ ID NO: 511065 - DNA, 15 bp, Homo sapiens
cagtctggcaggcta

SEQ ID NO: 511066 - DNA, 15 bp, Homo sapiens
agtctggcaggctac

SEQ ID NO: 511067 - DNA, 15 bp, Homo sapiens
gtctggcaggctaca

SEQ ID NO: 511068 - DNA, 15 bp, Homo sapiens
tctggcaggctacaa

SEQ ID NO: 511069 - DNA, 15 bp, Homo sapiens
ctggcaggctacaaa

SEQ ID NO: 511070 - DNA, 15 bp, Homo sapiens
tggcaggctacaaaa

SEQ ID NO: 511071 - DNA, 15 bp, Homo sapiens
ggcaggctacaaaat

SEQ ID NO: 511072 - DNA, 15 bp, Homo sapiens
gcaggctacaaaatt

SEQ ID NO: 511073 - DNA, 15 bp, Homo sapiens
caggctacaaaattc

SEQ ID NO: 511074 - DNA, 15 bp, Homo sapiens
aggctacaaaattct

SEQ ID NO: 511075 - DNA, 15 bp, Homo sapiens
ggctacaaaattcta

SEQ ID NO: 511076 - DNA, 15 bp, Homo sapiens
gctacaaaattctac

SEQ ID NO: 511077 - DNA, 15 bp, Homo sapiens
ctacaaaattctact

SEQ ID NO: 511078 - DNA, 15 bp, Homo sapiens
tacaaaattctactc

SEQ ID NO: 511079 - DNA, 15 bp, Homo sapiens
acaaaattctactcc

SEQ ID NO: 511080 - DNA, 15 bp, Homo sapiens
caaaattctactcca

SEQ ID NO: 511081 - DNA, 15 bp, Homo sapiens
aaaattctactccaa

SEQ ID NO: 511082 - DNA, 15 bp, Homo sapiens
aaattctactccaag

SEQ ID NO: 511083 - DNA, 15 bp, Homo sapiens
aattctactccaaga

SEQ ID NO: 511084 - DNA, 15 bp, Homo sapiens
attctactccaagaa

SEQ ID NO: 511085 - DNA, 15 bp, Homo sapiens
ttctactccaagaaa

SEQ ID NO: 511086 - DNA, 15 bp, Homo sapiens
tctactccaagaaat

SEQ ID NO: 511087 - DNA, 15 bp, Homo sapiens
ctactccaagaaata

SEQ ID NO: 511088 - DNA, 15 bp, Homo sapiens
tactccaagaaatac

SEQ ID NO: 511089 - DNA, 15 bp, Homo sapiens
actccaagaaatacc

SEQ ID NO: 511090 - DNA, 15 bp, Homo sapiens
ctccaagaaataccc

SEQ ID NO: 511091 - DNA, 15 bp, Homo sapiens
tccaagaaataccca

SEQ ID NO: 511092 - DNA, 15 bp, Homo sapiens
ccaagaaatacccag

SEQ ID NO: 511093 - DNA, 15 bp, Homo sapiens
caagaaatacccagc

SEQ ID NO: 511094 - DNA, 15 bp, Homo sapiens
aagaaatacccagca

SEQ ID NO: 511095 - DNA, 15 bp, Homo sapiens
agaaatacccagcaa

SEQ ID NO: 511096 - DNA, 15 bp, Homo sapiens
gaaatacccagcaac

SEQ ID NO: 511097 - DNA, 15 bp, Homo sapiens
aaatacccagcaacc

SEQ ID NO: 511098 - DNA, 15 bp, Homo sapiens
aatacccagcaacct

SEQ ID NO: 511099 - DNA, 15 bp, Homo sapiens
atacccagcaacctt

SEQ ID NO: 511100 - DNA, 15 bp, Homo sapiens
tacccagcaaccttc

SEQ ID NO: 511101 - DNA, 15 bp, Homo sapiens
acccagcaaccttct

SEQ ID NO: 511102 - DNA, 15 bp, Homo sapiens
cccagcaaccttctg

SEQ ID NO: 511103 - DNA, 15 bp, Homo sapiens
ccagcaaccttctgt

SEQ ID NO: 511104 - DNA, 15 bp, Homo sapiens
cagcaaccttctgtt

SEQ ID NO: 511105 - DNA, 15 bp, Homo sapiens
agcaaccttctgttt

SEQ ID NO: 511106 - DNA, 15 bp, Homo sapiens
gcaaccttctgtttg

SEQ ID NO: 511107 - DNA, 15 bp, Homo sapiens
caaccttctgtttgt

SEQ ID NO: 511108 - DNA, 15 bp, Homo sapiens
aaccttctgtttgtt

SEQ ID NO: 511109 - DNA, 15 bp, Homo sapiens
accttctgtttgttc

SEQ ID NO: 511110 - DNA, 15 bp, Homo sapiens
ccttctgtttgttcc

SEQ ID NO: 511111 - DNA, 15 bp, Homo sapiens
cttctgtttgttcca

SEQ ID NO: 511112 - DNA, 15 bp, Homo sapiens
ttctgtttgttccaa

SEQ ID NO: 511113 - DNA, 15 bp, Homo sapiens
tctgtttgttccaaa

SEQ ID NO: 511114 - DNA, 15 bp, Homo sapiens
ctgtttgttccaaag

SEQ ID NO: 511115 - DNA, 15 bp, Homo sapiens
tgtttgttccaaagc

SEQ ID NO: 511116 - DNA, 15 bp, Homo sapiens
gtttgttccaaagca

SEQ ID NO: 511117 - DNA, 15 bp, Homo sapiens
tttgttccaaagcaa

SEQ ID NO: 511118 - DNA, 15 bp, Homo sapiens
ttgttccaaagcaac

SEQ ID NO: 511119 - DNA, 15 bp, Homo sapiens
tgttccaaagcaact

SEQ ID NO: 511120 - DNA, 15 bp, Homo sapiens
gttccaaagcaacta

SEQ ID NO: 511121 - DNA, 15 bp, Homo sapiens
ttccaaagcaactag

SEQ ID NO: 511122 - DNA, 15 bp, Homo sapiens
tccaaagcaactagc

SEQ ID NO: 511123 - DNA, 15 bp, Homo sapiens
ccaaagcaactagct

SEQ ID NO: 511124 - DNA, 15 bp, Homo sapiens
caaagcaactagctt

SEQ ID NO: 511125 - DNA, 15 bp, Homo sapiens
aaagcaactagctta

SEQ ID NO: 511126 - DNA, 15 bp, Homo sapiens
aagcaactagcttat

SEQ ID NO: 511127 - DNA, 15 bp, Homo sapiens
agcaactagcttatc

SEQ ID NO: 511128 - DNA, 15 bp, Homo sapiens
gcaactagcttatca

SEQ ID NO: 511129 - DNA, 15 bp, Homo sapiens
caactagcttatcat

SEQ ID NO: 511130 - DNA, 15 bp, Homo sapiens
aactagcttatcatg

SEQ ID NO: 511131 - DNA, 15 bp, Homo sapiens
actagcttatcatgc

SEQ ID NO: 511132 - DNA, 15 bp, Homo sapiens
ctagcttatcatgca

SEQ ID NO: 511133 - DNA, 15 bp, Homo sapiens
tagcttatcatgcaa

SEQ ID NO: 511134 - DNA, 15 bp, Homo sapiens
agcttatcatgcaag

SEQ ID NO: 511135 - DNA, 15 bp, Homo sapiens
gcttatcatgcaagc

SEQ ID NO: 511136 - DNA, 15 bp, Homo sapiens
cttatcatgcaagca

SEQ ID NO: 511137 - DNA, 15 bp, Homo sapiens
ttatcatgcaagcaa

SEQ ID NO: 511138 - DNA, 15 bp, Homo sapiens
tatcatgcaagcaaa

SEQ ID NO: 511139 - DNA, 15 bp, Homo sapiens
atcatgcaagcaaat

SEQ ID NO: 511140 - DNA, 15 bp, Homo sapiens
tcatgcaagcaaatt

SEQ ID NO: 511141 - DNA, 15 bp, Homo sapiens
catgcaagcaaattt

SEQ ID NO: 511142 - DNA, 15 bp, Homo sapiens
atgcaagcaaatttt

SEQ ID NO: 511143 - DNA, 15 bp, Homo sapiens
tgcaagcaaattttg

SEQ ID NO: 511144 - DNA, 15 bp, Homo sapiens
gcaagcaaattttgc

SEQ ID NO: 511145 - DNA, 15 bp, Homo sapiens
caagcaaattttgct

SEQ ID NO: 511146 - DNA, 15 bp, Homo sapiens
aagcaaattttgctg

SEQ ID NO: 511147 - DNA, 15 bp, Homo sapiens
agcaaattttgctga

SEQ ID NO: 511148 - DNA, 15 bp, Homo sapiens
gcaaattttgctgac

SEQ ID NO: 511149 - DNA, 15 bp, Homo sapiens
caaattttgctgact

SEQ ID NO: 511150 - DNA, 15 bp, Homo sapiens
aaattttgctgactc

SEQ ID NO: 511151 - DNA, 15 bp, Homo sapiens
aattttgctgactcc

SEQ ID NO: 511152 - DNA, 15 bp, Homo sapiens
attttgctgactcca

SEQ ID NO: 511153 - DNA, 15 bp, Homo sapiens
ttttgctgactccag

SEQ ID NO: 511154 - DNA, 15 bp, Homo sapiens
tttgctgactccagg

SEQ ID NO: 511155 - DNA, 15 bp, Homo sapiens
ttgctgactccaggc

SEQ ID NO: 511156 - DNA, 15 bp, Homo sapiens
tgctgactccaggct

SEQ ID NO: 511157 - DNA, 15 bp, Homo sapiens
gctgactccaggctt

SEQ ID NO: 511158 - DNA, 15 bp, Homo sapiens
ctgactccaggcttt

SEQ ID NO: 511159 - DNA, 15 bp, Homo sapiens
tgactccaggcttta

SEQ ID NO: 511160 - DNA, 15 bp, Homo sapiens
gactccaggctttat

SEQ ID NO: 511161 - DNA, 15 bp, Homo sapiens
actccaggctttatc

SEQ ID NO: 511162 - DNA, 15 bp, Homo sapiens
ctccaggctttatct

SEQ ID NO: 511163 - DNA, 15 bp, Homo sapiens
tccaggctttatctt

SEQ ID NO: 511164 - DNA, 15 bp, Homo sapiens
ccaggctttatcttt

SEQ ID NO: 511165 - DNA, 15 bp, Homo sapiens
caggctttatcttta

SEQ ID NO: 511166 - DNA, 15 bp, Homo sapiens
aggctttatctttag

SEQ ID NO: 511167 - DNA, 15 bp, Homo sapiens
ggctttatctttagg

SEQ ID NO: 511168 - DNA, 15 bp, Homo sapiens
gctttatctttagga

SEQ ID NO: 511169 - DNA, 15 bp, Homo sapiens
ctttatctttaggaa

SEQ ID NO: 511170 - DNA, 15 bp, Homo sapiens
tttatctttaggaaa

SEQ ID NO: 511171 - DNA, 15 bp, Homo sapiens
ttatctttaggaaaa

SEQ ID NO: 511172 - DNA, 15 bp, Homo sapiens
tatctttaggaaaac

SEQ ID NO: 511173 - DNA, 15 bp, Homo sapiens
atctttaggaaaaca

SEQ ID NO: 511174 - DNA, 15 bp, Homo sapiens
tctttaggaaaacaa

SEQ ID NO: 511175 - DNA, 15 bp, Homo sapiens
ctttaggaaaacaaa

SEQ ID NO: 511176 - DNA, 15 bp, Homo sapiens
tttaggaaaacaaaa

SEQ ID NO: 511177 - DNA, 15 bp, Homo sapiens
ttaggaaaacaaaaa

SEQ ID NO: 511178 - DNA, 15 bp, Homo sapiens
taggaaaacaaaaaa

SEQ ID NO: 511179 - DNA, 15 bp, Homo sapiens
aggaaaacaaaaaaa

SEQ ID NO: 511180 - DNA, 15 bp, Homo sapiens
ggaaaacaaaaaaac

SEQ ID NO: 511181 - DNA, 15 bp, Homo sapiens
gaaaacaaaaaaacc

SEQ ID NO: 511182 - DNA, 15 bp, Homo sapiens
aaaacaaaaaaacca

SEQ ID NO: 511183 - DNA, 15 bp, Homo sapiens
aaacaaaaaaaccaa

SEQ ID NO: 511184 - DNA, 15 bp, Homo sapiens
aacaaaaaaaccaaa

SEQ ID NO: 511185 - DNA, 15 bp, Homo sapiens
acaaaaaaaccaaag

SEQ ID NO: 511186 - DNA, 15 bp, Homo sapiens
caaaaaaaccaaagt

SEQ ID NO: 511187 - DNA, 15 bp, Homo sapiens
aaaaaaaccaaagta

SEQ ID NO: 511188 - DNA, 15 bp, Homo sapiens
aaaaaaccaaagtat

SEQ ID NO: 511189 - DNA, 15 bp, Homo sapiens
aaaaaccaaagtatt

SEQ ID NO: 511190 - DNA, 15 bp, Homo sapiens
aaaaccaaagtatta

SEQ ID NO: 511191 - DNA, 15 bp, Homo sapiens
aaaccaaagtattat

SEQ ID NO: 511192 - DNA, 15 bp, Homo sapiens
aaccaaagtattatc

SEQ ID NO: 511193 - DNA, 15 bp, Homo sapiens
accaaagtattatca

SEQ ID NO: 511194 - DNA, 15 bp, Homo sapiens
ccaaagtattatcag

SEQ ID NO: 511195 - DNA, 15 bp, Homo sapiens
caaagtattatcagc

SEQ ID NO: 511196 - DNA, 15 bp, Homo sapiens
aaagtattatcagca

SEQ ID NO: 511197 - DNA, 15 bp, Homo sapiens
aagtattatcagcag

SEQ ID NO: 511198 - DNA, 15 bp, Homo sapiens
agtattatcagcagg

SEQ ID NO: 511199 - DNA, 15 bp, Homo sapiens
gtattatcagcaggt

SEQ ID NO: 511200 - DNA, 15 bp, Homo sapiens
tattatcagcaggtg

SEQ ID NO: 511201 - DNA, 15 bp, Homo sapiens
attatcagcaggtgg

SEQ ID NO: 511202 - DNA, 15 bp, Homo sapiens
ttatcagcaggtggg

SEQ ID NO: 511203 - DNA, 15 bp, Homo sapiens
tatcagcaggtggga

SEQ ID NO: 511204 - DNA, 15 bp, Homo sapiens
atcagcaggtgggaa

SEQ ID NO: 511205 - DNA, 15 bp, Homo sapiens
tcagcaggtgggaaa

SEQ ID NO: 511206 - DNA, 15 bp, Homo sapiens
cagcaggtgggaaag

SEQ ID NO: 511207 - DNA, 15 bp, Homo sapiens
agcaggtgggaaaga

SEQ ID NO: 511208 - DNA, 15 bp, Homo sapiens
gcaggtgggaaagat

SEQ ID NO: 511209 - DNA, 15 bp, Homo sapiens
caggtgggaaagatt

SEQ ID NO: 511210 - DNA, 15 bp, Homo sapiens
aggtgggaaagattt

SEQ ID NO: 511211 - DNA, 15 bp, Homo sapiens
ggtgggaaagatttt

SEQ ID NO: 511212 - DNA, 15 bp, Homo sapiens
gtgggaaagattttt

SEQ ID NO: 511213 - DNA, 15 bp, Homo sapiens
tgggaaagatttttc

SEQ ID NO: 511214 - DNA, 15 bp, Homo sapiens
gggaaagatttttct

SEQ ID NO: 511215 - DNA, 15 bp, Homo sapiens
ggaaagatttttcta

SEQ ID NO: 511216 - DNA, 15 bp, Homo sapiens
gaaagatttttctat

SEQ ID NO: 511217 - DNA, 15 bp, Homo sapiens
aaagatttttctatt

SEQ ID NO: 511218 - DNA, 15 bp, Homo sapiens
aagatttttctattg

SEQ ID NO: 511219 - DNA, 15 bp, Homo sapiens
agatttttctattga

SEQ ID NO: 511220 - DNA, 15 bp, Homo sapiens
gatttttctattgaa

SEQ ID NO: 511221 - DNA, 15 bp, Homo sapiens
atttttctattgaaa

SEQ ID NO: 511222 - DNA, 15 bp, Homo sapiens
tttttctattgaaaa

SEQ ID NO: 511223 - DNA, 15 bp, Homo sapiens
ttttctattgaaaat

SEQ ID NO: 511224 - DNA, 15 bp, Homo sapiens
tttctattgaaaatt

SEQ ID NO: 511225 - DNA, 15 bp, Homo sapiens
ttctattgaaaattt

SEQ ID NO: 511226 - DNA, 15 bp, Homo sapiens
tctattgaaaattta

SEQ ID NO: 511227 - DNA, 15 bp, Homo sapiens
ctattgaaaatttat

SEQ ID NO: 511228 - DNA, 15 bp, Homo sapiens
tattgaaaatttatc

SEQ ID NO: 511229 - DNA, 15 bp, Homo sapiens
attgaaaatttatcc

SEQ ID NO: 511230 - DNA, 15 bp, Homo sapiens
ttgaaaatttatccc

SEQ ID NO: 511231 - DNA, 15 bp, Homo sapiens
tgaaaatttatccct

SEQ ID NO: 511232 - DNA, 15 bp, Homo sapiens
gaaaatttatccctg

SEQ ID NO: 511233 - DNA, 15 bp, Homo sapiens
aaaatttatccctga

SEQ ID NO: 511234 - DNA, 15 bp, Homo sapiens
aaatttatccctgac

SEQ ID NO: 511235 - DNA, 15 bp, Homo sapiens
aatttatccctgaca

SEQ ID NO: 511236 - DNA, 15 bp, Homo sapiens
atttatccctgacaa

SEQ ID NO: 511237 - DNA, 15 bp, Homo sapiens
tttatccctgacaac

SEQ ID NO: 511238 - DNA, 15 bp, Homo sapiens
ttatccctgacaact

SEQ ID NO: 511239 - DNA, 15 bp, Homo sapiens
tatccctgacaactc

SEQ ID NO: 511240 - DNA, 15 bp, Homo sapiens
atccctgacaactca

SEQ ID NO: 511241 - DNA, 15 bp, Homo sapiens
tccctgacaactcag

SEQ ID NO: 511242 - DNA, 15 bp, Homo sapiens
ccctgacaactcagc

SEQ ID NO: 511243 - DNA, 15 bp, Homo sapiens
cctgacaactcagcg

SEQ ID NO: 511244 - DNA, 15 bp, Homo sapiens
ctgacaactcagcgt

SEQ ID NO: 511245 - DNA, 15 bp, Homo sapiens
tgacaactcagcgtt

SEQ ID NO: 511246 - DNA, 15 bp, Homo sapiens
gacaactcagcgttt

SEQ ID NO: 511247 - DNA, 15 bp, Homo sapiens
acaactcagcgttta

SEQ ID NO: 511248 - DNA, 15 bp, Homo sapiens
caactcagcgtttag

SEQ ID NO: 511249 - DNA, 15 bp, Homo sapiens
aactcagcgtttaga

SEQ ID NO: 511250 - DNA, 15 bp, Homo sapiens
actcagcgtttagaa

SEQ ID NO: 511251 - DNA, 15 bp, Homo sapiens
ctcagcgtttagaaa

SEQ ID NO: 511252 - DNA, 15 bp, Homo sapiens
tcagcgtttagaaaa

SEQ ID NO: 511253 - DNA, 15 bp, Homo sapiens
cagcgtttagaaaag

SEQ ID NO: 511254 - DNA, 15 bp, Homo sapiens
agcgtttagaaaaga

SEQ ID NO: 511255 - DNA, 15 bp, Homo sapiens
gcgtttagaaaagaa

SEQ ID NO: 511256 - DNA, 15 bp, Homo sapiens
cgtttagaaaagaaa

SEQ ID NO: 511257 - DNA, 15 bp, Homo sapiens
gtttagaaaagaaat

SEQ ID NO: 511258 - DNA, 15 bp, Homo sapiens
tttagaaaagaaata

SEQ ID NO: 511259 - DNA, 15 bp, Homo sapiens
ttagaaaagaaataa

SEQ ID NO: 511260 - DNA, 15 bp, Homo sapiens
tagaaaagaaataaa

SEQ ID NO: 511261 - DNA, 15 bp, Homo sapiens
agaaaagaaataaaa

SEQ ID NO: 511262 - DNA, 15 bp, Homo sapiens
gaaaagaaataaaat

SEQ ID NO: 511263 - DNA, 15 bp, Homo sapiens
aaaagaaataaaatg

SEQ ID NO: 511264 - DNA, 15 bp, Homo sapiens
aaagaaataaaatgt

SEQ ID NO: 511265 - DNA, 15 bp, Homo sapiens
aagaaataaaatgtg

SEQ ID NO: 511266 - DNA, 15 bp, Homo sapiens
agaaataaaatgtgc

SEQ ID NO: 511267 - DNA, 15 bp, Homo sapiens
gaaataaaatgtgcc

SEQ ID NO: 511268 - DNA, 15 bp, Homo sapiens
aaataaaatgtgcca

SEQ ID NO: 511269 - DNA, 15 bp, Homo sapiens
aataaaatgtgccac

SEQ ID NO: 511270 - DNA, 15 bp, Homo sapiens
ataaaatgtgccact

SEQ ID NO: 511271 - DNA, 15 bp, Homo sapiens
taaaatgtgccactt

SEQ ID NO: 511272 - DNA, 15 bp, Homo sapiens
aaaatgtgccacttc

SEQ ID NO: 511273 - DNA, 15 bp, Homo sapiens
aaatgtgccacttcc

SEQ ID NO: 511274 - DNA, 15 bp, Homo sapiens
aatgtgccacttcca

SEQ ID NO: 511275 - DNA, 15 bp, Homo sapiens
atgtgccacttccag

SEQ ID NO: 511276 - DNA, 15 bp, Homo sapiens
tgtgccacttccaga

SEQ ID NO: 511277 - DNA, 15 bp, Homo sapiens
gtgccacttccagag

SEQ ID NO: 511278 - DNA, 15 bp, Homo sapiens
tgccacttccagagg

SEQ ID NO: 511279 - DNA, 15 bp, Homo sapiens
gccacttccagaggt

SEQ ID NO: 511280 - DNA, 15 bp, Homo sapiens
ccacttccagaggtg

SEQ ID NO: 511281 - DNA, 15 bp, Homo sapiens
cacttccagaggtgc

SEQ ID NO: 511282 - DNA, 15 bp, Homo sapiens
acttccagaggtgct

SEQ ID NO: 511283 - DNA, 15 bp, Homo sapiens
cttccagaggtgctg

SEQ ID NO: 511284 - DNA, 15 bp, Homo sapiens
ttccagaggtgctgc

SEQ ID NO: 511285 - DNA, 15 bp, Homo sapiens
tccagaggtgctgca

SEQ ID NO: 511286 - DNA, 15 bp, Homo sapiens
ccagaggtgctgcat

SEQ ID NO: 511287 - DNA, 15 bp, Homo sapiens
cagaggtgctgcatt

SEQ ID NO: 511288 - DNA, 15 bp, Homo sapiens
agaggtgctgcattg

SEQ ID NO: 511289 - DNA, 15 bp, Homo sapiens
gaggtgctgcattgc

SEQ ID NO: 511290 - DNA, 15 bp, Homo sapiens
aggtgctgcattgca

SEQ ID NO: 511291 - DNA, 15 bp, Homo sapiens
ggtgctgcattgcag

SEQ ID NO: 511292 - DNA, 15 bp, Homo sapiens
gtgctgcattgcagt

SEQ ID NO: 511293 - DNA, 15 bp, Homo sapiens
tgctgcattgcagtt

SEQ ID NO: 511294 - DNA, 15 bp, Homo sapiens
gctgcattgcagttg

SEQ ID NO: 511295 - DNA, 15 bp, Homo sapiens
ctgcattgcagttgt

SEQ ID NO: 511296 - DNA, 15 bp, Homo sapiens
tgcattgcagttgtt

SEQ ID NO: 511297 - DNA, 15 bp, Homo sapiens
gcattgcagttgttc

SEQ ID NO: 511298 - DNA, 15 bp, Homo sapiens
cattgcagttgttca

SEQ ID NO: 511299 - DNA, 15 bp, Homo sapiens
attgcagttgttcag

SEQ ID NO: 511300 - DNA, 15 bp, Homo sapiens
ttgcagttgttcagg

SEQ ID NO: 511301 - DNA, 15 bp, Homo sapiens
tgcagttgttcaggg

SEQ ID NO: 511302 - DNA, 15 bp, Homo sapiens
gcagttgttcagggc

SEQ ID NO: 511303 - DNA, 15 bp, Homo sapiens
cagttgttcagggct

SEQ ID NO: 511304 - DNA, 15 bp, Homo sapiens
agttgttcagggcta

SEQ ID NO: 511305 - DNA, 15 bp, Homo sapiens
gttgttcagggctag

SEQ ID NO: 511306 - DNA, 15 bp, Homo sapiens
ttgttcagggctagg

SEQ ID NO: 511307 - DNA, 15 bp, Homo sapiens
tgttcagggctaggg

SEQ ID NO: 511308 - DNA, 15 bp, Homo sapiens
gttcagggctagggc

SEQ ID NO: 511309 - DNA, 15 bp, Homo sapiens
ttcagggctagggcc

SEQ ID NO: 511310 - DNA, 15 bp, Homo sapiens
tcagggctagggcca

SEQ ID NO: 511311 - DNA, 15 bp, Homo sapiens
cagggctagggccag

SEQ ID NO: 511312 - DNA, 15 bp, Homo sapiens
agggctagggccagg

SEQ ID NO: 511313 - DNA, 15 bp, Homo sapiens
gggctagggccaggc

SEQ ID NO: 511314 - DNA, 15 bp, Homo sapiens
ggctagggccaggca

SEQ ID NO: 511315 - DNA, 15 bp, Homo sapiens
gctagggccaggcag

SEQ ID NO: 511316 - DNA, 15 bp, Homo sapiens
ctagggccaggcagg

SEQ ID NO: 511317 - DNA, 15 bp, Homo sapiens
tagggccaggcagga

SEQ ID NO: 511318 - DNA, 15 bp, Homo sapiens
agggccaggcaggac

SEQ ID NO: 511319 - DNA, 15 bp, Homo sapiens
gggccaggcaggaca

SEQ ID NO: 511320 - DNA, 15 bp, Homo sapiens
ggccaggcaggacaa

SEQ ID NO: 511321 - DNA, 15 bp, Homo sapiens
gccaggcaggacaag

SEQ ID NO: 511322 - DNA, 15 bp, Homo sapiens
ccaggcaggacaagt

SEQ ID NO: 511323 - DNA, 15 bp, Homo sapiens
caggcaggacaagtg

SEQ ID NO: 511324 - DNA, 15 bp, Homo sapiens
aggcaggacaagtga

SEQ ID NO: 511325 - DNA, 15 bp, Homo sapiens
ggcaggacaagtgaa

SEQ ID NO: 511326 - DNA, 15 bp, Homo sapiens
gcaggacaagtgaat

SEQ ID NO: 511327 - DNA, 15 bp, Homo sapiens
caggacaagtgaatg

SEQ ID NO: 511328 - DNA, 15 bp, Homo sapiens
aggacaagtgaatgg

SEQ ID NO: 511329 - DNA, 15 bp, Homo sapiens
ggacaagtgaatggg

SEQ ID NO: 511330 - DNA, 15 bp, Homo sapiens
gacaagtgaatgggt

SEQ ID NO: 511331 - DNA, 15 bp, Homo sapiens
acaagtgaatgggtg

SEQ ID NO: 511332 - DNA, 15 bp, Homo sapiens
caagtgaatgggtgg

SEQ ID NO: 511333 - DNA, 15 bp, Homo sapiens
aagtgaatgggtggg

SEQ ID NO: 511334 - DNA, 15 bp, Homo sapiens
agtgaatgggtggga

SEQ ID NO: 511335 - DNA, 15 bp, Homo sapiens
gtgaatgggtgggac

SEQ ID NO: 511336 - DNA, 15 bp, Homo sapiens
tgaatgggtgggaca

SEQ ID NO: 511337 - DNA, 15 bp, Homo sapiens
gaatgggtgggacag

SEQ ID NO: 511338 - DNA, 15 bp, Homo sapiens
aatgggtgggacagg

SEQ ID NO: 511339 - DNA, 15 bp, Homo sapiens
atgggtgggacaggt

SEQ ID NO: 511340 - DNA, 15 bp, Homo sapiens
tgggtgggacaggtg

SEQ ID NO: 511341 - DNA, 15 bp, Homo sapiens
gggtgggacaggtgg

SEQ ID NO: 511342 - DNA, 15 bp, Homo sapiens
ggtgggacaggtggc

SEQ ID NO: 511343 - DNA, 15 bp, Homo sapiens
gtgggacaggtggct

SEQ ID NO: 511344 - DNA, 15 bp, Homo sapiens
tgggacaggtggctc

SEQ ID NO: 511345 - DNA, 15 bp, Homo sapiens
gggacaggtggctcc

SEQ ID NO: 511346 - DNA, 15 bp, Homo sapiens
ggacaggtggctcct

SEQ ID NO: 511347 - DNA, 15 bp, Homo sapiens
gacaggtggctcctg

SEQ ID NO: 511348 - DNA, 15 bp, Homo sapiens
acaggtggctcctgc

SEQ ID NO: 511349 - DNA, 15 bp, Homo sapiens
caggtggctcctgcc

SEQ ID NO: 511350 - DNA, 15 bp, Homo sapiens
aggtggctcctgcct

SEQ ID NO: 511351 - DNA, 15 bp, Homo sapiens
ggtggctcctgccta

SEQ ID NO: 511352 - DNA, 15 bp, Homo sapiens
gtggctcctgcctaa

SEQ ID NO: 511353 - DNA, 15 bp, Homo sapiens
tggctcctgcctaag

SEQ ID NO: 511354 - DNA, 15 bp, Homo sapiens
ggctcctgcctaagg

SEQ ID NO: 511355 - DNA, 15 bp, Homo sapiens
gctcctgcctaagga

SEQ ID NO: 511356 - DNA, 15 bp, Homo sapiens
ctcctgcctaaggac

SEQ ID NO: 511357 - DNA, 15 bp, Homo sapiens
tcctgcctaaggacc

SEQ ID NO: 511358 - DNA, 15 bp, Homo sapiens
cctgcctaaggacca

SEQ ID NO: 511359 - DNA, 15 bp, Homo sapiens
ctgcctaaggaccac

SEQ ID NO: 511360 - DNA, 15 bp, Homo sapiens
tgcctaaggaccacc

SEQ ID NO: 511361 - DNA, 15 bp, Homo sapiens
gcctaaggaccacct

SEQ ID NO: 511362 - DNA, 15 bp, Homo sapiens
cctaaggaccacctc

SEQ ID NO: 511363 - DNA, 15 bp, Homo sapiens
ctaaggaccacctca

SEQ ID NO: 511364 - DNA, 15 bp, Homo sapiens
taaggaccacctcag

SEQ ID NO: 511365 - DNA, 15 bp, Homo sapiens
aaggaccacctcagg

SEQ ID NO: 511366 - DNA, 15 bp, Homo sapiens
aggaccacctcaggc

SEQ ID NO: 511367 - DNA, 15 bp, Homo sapiens
ggaccacctcaggcc

SEQ ID NO: 511368 - DNA, 15 bp, Homo sapiens
gaccacctcaggcca

SEQ ID NO: 511369 - DNA, 15 bp, Homo sapiens
accacctcaggccac

SEQ ID NO: 511370 - DNA, 15 bp, Homo sapiens
ccacctcaggccact

SEQ ID NO: 511371 - DNA, 15 bp, Homo sapiens
cacctcaggccacta

SEQ ID NO: 511372 - DNA, 15 bp, Homo sapiens
acctcaggccactaa

SEQ ID NO: 511373 - DNA, 15 bp, Homo sapiens
cctcaggccactaac

SEQ ID NO: 511374 - DNA, 15 bp, Homo sapiens
ctcaggccactaacc

SEQ ID NO: 511375 - DNA, 15 bp, Homo sapiens
tcaggccactaaccc

SEQ ID NO: 511376 - DNA, 15 bp, Homo sapiens
caggccactaacccc

SEQ ID NO: 511377 - DNA, 15 bp, Homo sapiens
aggccactaacccct

SEQ ID NO: 511378 - DNA, 15 bp, Homo sapiens
ggccactaacccctt

SEQ ID NO: 511379 - DNA, 15 bp, Homo sapiens
gccactaaccccttg

SEQ ID NO: 511380 - DNA, 15 bp, Homo sapiens
ccactaaccccttgt

SEQ ID NO: 511381 - DNA, 15 bp, Homo sapiens
cactaaccccttgtg

SEQ ID NO: 511382 - DNA, 15 bp, Homo sapiens
actaaccccttgtgg

SEQ ID NO: 511383 - DNA, 15 bp, Homo sapiens
ctaaccccttgtgga

SEQ ID NO: 511384 - DNA, 15 bp, Homo sapiens
taaccccttgtggac

SEQ ID NO: 511385 - DNA, 15 bp, Homo sapiens
aaccccttgtggaca

SEQ ID NO: 511386 - DNA, 15 bp, Homo sapiens
accccttgtggacaa

SEQ ID NO: 511387 - DNA, 15 bp, Homo sapiens
ccccttgtggacaac

SEQ ID NO: 511388 - DNA, 15 bp, Homo sapiens
cccttgtggacaact

SEQ ID NO: 511389 - DNA, 15 bp, Homo sapiens
ccttgtggacaactg

SEQ ID NO: 511390 - DNA, 15 bp, Homo sapiens
cttgtggacaactgt

SEQ ID NO: 511391 - DNA, 15 bp, Homo sapiens
ttgtggacaactgtg

SEQ ID NO: 511392 - DNA, 15 bp, Homo sapiens
tgtggacaactgtga

SEQ ID NO: 511393 - DNA, 15 bp, Homo sapiens
gtggacaactgtgag

SEQ ID NO: 511394 - DNA, 15 bp, Homo sapiens
tggacaactgtgagt

SEQ ID NO: 511395 - DNA, 15 bp, Homo sapiens
ggacaactgtgagta

SEQ ID NO: 511396 - DNA, 15 bp, Homo sapiens
gacaactgtgagtag

SEQ ID NO: 511397 - DNA, 15 bp, Homo sapiens
acaactgtgagtagc

SEQ ID NO: 511398 - DNA, 15 bp, Homo sapiens
caactgtgagtagct

SEQ ID NO: 511399 - DNA, 15 bp, Homo sapiens
aactgtgagtagctg

SEQ ID NO: 511400 - DNA, 15 bp, Homo sapiens
actgtgagtagctgg

SEQ ID NO: 511401 - DNA, 15 bp, Homo sapiens
ctgtgagtagctggg

SEQ ID NO: 511402 - DNA, 15 bp, Homo sapiens
tgtgagtagctgggt

SEQ ID NO: 511403 - DNA, 15 bp, Homo sapiens
gtgagtagctgggtt

SEQ ID NO: 511404 - DNA, 15 bp, Homo sapiens
tgagtagctgggttt

SEQ ID NO: 511405 - DNA, 15 bp, Homo sapiens
gagtagctgggtttt

SEQ ID NO: 511406 - DNA, 15 bp, Homo sapiens
agtagctgggttttc

SEQ ID NO: 511407 - DNA, 15 bp, Homo sapiens
gtagctgggttttcc

SEQ ID NO: 511408 - DNA, 15 bp, Homo sapiens
tagctgggttttccc

SEQ ID NO: 511409 - DNA, 15 bp, Homo sapiens
agctgggttttcccc

SEQ ID NO: 511410 - DNA, 15 bp, Homo sapiens
gctgggttttccccc

SEQ ID NO: 511411 - DNA, 15 bp, Homo sapiens
ctgggttttccccca

SEQ ID NO: 511412 - DNA, 15 bp, Homo sapiens
tgggttttcccccac

SEQ ID NO: 511413 - DNA, 15 bp, Homo sapiens
gggttttcccccacc

SEQ ID NO: 511414 - DNA, 15 bp, Homo sapiens
ggttttcccccacct

SEQ ID NO: 511415 - DNA, 15 bp, Homo sapiens
gttttcccccacctg

SEQ ID NO: 511416 - DNA, 15 bp, Homo sapiens
ttttcccccacctgc

SEQ ID NO: 511417 - DNA, 15 bp, Homo sapiens
tttcccccacctgct

SEQ ID NO: 511418 - DNA, 15 bp, Homo sapiens
ttcccccacctgctg

SEQ ID NO: 511419 - DNA, 15 bp, Homo sapiens
tcccccacctgctgt

SEQ ID NO: 511420 - DNA, 15 bp, Homo sapiens
cccccacctgctgtg

SEQ ID NO: 511421 - DNA, 15 bp, Homo sapiens
ccccacctgctgtgc

SEQ ID NO: 511422 - DNA, 15 bp, Homo sapiens
cccacctgctgtgca

SEQ ID NO: 511423 - DNA, 15 bp, Homo sapiens
ccacctgctgtgcaa

SEQ ID NO: 511424 - DNA, 15 bp, Homo sapiens
cacctgctgtgcaac

SEQ ID NO: 511425 - DNA, 15 bp, Homo sapiens
acctgctgtgcaact

SEQ ID NO: 511426 - DNA, 15 bp, Homo sapiens
cctgctgtgcaactt

SEQ ID NO: 511427 - DNA, 15 bp, Homo sapiens
ctgctgtgcaacttc

SEQ ID NO: 511428 - DNA, 15 bp, Homo sapiens
tgctgtgcaacttcc

SEQ ID NO: 511429 - DNA, 15 bp, Homo sapiens
gctgtgcaacttcct

SEQ ID NO: 511430 - DNA, 15 bp, Homo sapiens
ctgtgcaacttcctg

SEQ ID NO: 511431 - DNA, 15 bp, Homo sapiens
tgtgcaacttcctgt

SEQ ID NO: 511432 - DNA, 15 bp, Homo sapiens
gtgcaacttcctgtg

SEQ ID NO: 511433 - DNA, 15 bp, Homo sapiens
tgcaacttcctgtgc

SEQ ID NO: 511434 - DNA, 15 bp, Homo sapiens
gcaacttcctgtgct

SEQ ID NO: 511435 - DNA, 15 bp, Homo sapiens
caacttcctgtgctt

SEQ ID NO: 511436 - DNA, 15 bp, Homo sapiens
aacttcctgtgcttt

SEQ ID NO: 511437 - DNA, 15 bp, Homo sapiens
acttcctgtgctttg

SEQ ID NO: 511438 - DNA, 15 bp, Homo sapiens
cttcctgtgctttga

SEQ ID NO: 511439 - DNA, 15 bp, Homo sapiens
ttcctgtgctttgag

SEQ ID NO: 511440 - DNA, 15 bp, Homo sapiens
tcctgtgctttgagg

SEQ ID NO: 511441 - DNA, 15 bp, Homo sapiens
cctgtgctttgaggt

SEQ ID NO: 511442 - DNA, 15 bp, Homo sapiens
ctgtgctttgaggtt

SEQ ID NO: 511443 - DNA, 15 bp, Homo sapiens
tgtgctttgaggttg

SEQ ID NO: 511444 - DNA, 15 bp, Homo sapiens
gtgctttgaggttgg

SEQ ID NO: 511445 - DNA, 15 bp, Homo sapiens
tgctttgaggttgga

SEQ ID NO: 511446 - DNA, 15 bp, Homo sapiens
gctttgaggttggac

SEQ ID NO: 511447 - DNA, 15 bp, Homo sapiens
ctttgaggttggact

SEQ ID NO: 511448 - DNA, 15 bp, Homo sapiens
tttgaggttggacta

SEQ ID NO: 511449 - DNA, 15 bp, Homo sapiens
ttgaggttggactaa

SEQ ID NO: 511450 - DNA, 15 bp, Homo sapiens
tgaggttggactaac

SEQ ID NO: 511451 - DNA, 15 bp, Homo sapiens
gaggttggactaact

SEQ ID NO: 511452 - DNA, 15 bp, Homo sapiens
aggttggactaactt

SEQ ID NO: 511453 - DNA, 15 bp, Homo sapiens
ggttggactaacttg

SEQ ID NO: 511454 - DNA, 15 bp, Homo sapiens
gttggactaacttgt

SEQ ID NO: 511455 - DNA, 15 bp, Homo sapiens
ttggactaacttgtc

SEQ ID NO: 511456 - DNA, 15 bp, Homo sapiens
tggactaacttgtct

SEQ ID NO: 511457 - DNA, 15 bp, Homo sapiens
ggactaacttgtctt

SEQ ID NO: 511458 - DNA, 15 bp, Homo sapiens
gactaacttgtcttc

SEQ ID NO: 511459 - DNA, 15 bp, Homo sapiens
actaacttgtcttca

SEQ ID NO: 511460 - DNA, 15 bp, Homo sapiens
ctaacttgtcttcag

SEQ ID NO: 511461 - DNA, 15 bp, Homo sapiens
taacttgtcttcagg

SEQ ID NO: 511462 - DNA, 15 bp, Homo sapiens
aacttgtcttcagga

SEQ ID NO: 511463 - DNA, 15 bp, Homo sapiens
acttgtcttcaggag

SEQ ID NO: 511464 - DNA, 15 bp, Homo sapiens
cttgtcttcaggagc

SEQ ID NO: 511465 - DNA, 15 bp, Homo sapiens
ttgtcttcaggagct

SEQ ID NO: 511466 - DNA, 15 bp, Homo sapiens
tgtcttcaggagcta

SEQ ID NO: 511467 - DNA, 15 bp, Homo sapiens
gtcttcaggagctaa

SEQ ID NO: 511468 - DNA, 15 bp, Homo sapiens
tcttcaggagctaat

SEQ ID NO: 511469 - DNA, 15 bp, Homo sapiens
cttcaggagctaatt

SEQ ID NO: 511470 - DNA, 15 bp, Homo sapiens
ttcaggagctaatta

SEQ ID NO: 511471 - DNA, 15 bp, Homo sapiens
tcaggagctaattaa

SEQ ID NO: 511472 - DNA, 15 bp, Homo sapiens
caggagctaattaac

SEQ ID NO: 511473 - DNA, 15 bp, Homo sapiens
aggagctaattaact

SEQ ID NO: 511474 - DNA, 15 bp, Homo sapiens
ggagctaattaactg

SEQ ID NO: 511475 - DNA, 15 bp, Homo sapiens
gagctaattaactgt

SEQ ID NO: 511476 - DNA, 15 bp, Homo sapiens
agctaattaactgta

SEQ ID NO: 511477 - DNA, 15 bp, Homo sapiens
gctaattaactgtac

SEQ ID NO: 511478 - DNA, 15 bp, Homo sapiens
ctaattaactgtaca

SEQ ID NO: 511479 - DNA, 15 bp, Homo sapiens
taattaactgtacag

SEQ ID NO: 511480 - DNA, 15 bp, Homo sapiens
aattaactgtacagc

SEQ ID NO: 511481 - DNA, 15 bp, Homo sapiens
attaactgtacagcc

SEQ ID NO: 511482 - DNA, 15 bp, Homo sapiens
ttaactgtacagccc

SEQ ID NO: 511483 - DNA, 15 bp, Homo sapiens
taactgtacagccct

SEQ ID NO: 511484 - DNA, 15 bp, Homo sapiens
aactgtacagccctc

SEQ ID NO: 511485 - DNA, 15 bp, Homo sapiens
actgtacagccctcc

SEQ ID NO: 511486 - DNA, 15 bp, Homo sapiens
ctgtacagccctccc

SEQ ID NO: 511487 - DNA, 15 bp, Homo sapiens
tgtacagccctcccc

SEQ ID NO: 511488 - DNA, 15 bp, Homo sapiens
gtacagccctcccca

SEQ ID NO: 511489 - DNA, 15 bp, Homo sapiens
tacagccctccccac

SEQ ID NO: 511490 - DNA, 15 bp, Homo sapiens
acagccctccccacg

SEQ ID NO: 511491 - DNA, 15 bp, Homo sapiens
cagccctccccacgc

SEQ ID NO: 511492 - DNA, 15 bp, Homo sapiens
agccctccccacgcc

SEQ ID NO: 511493 - DNA, 15 bp, Homo sapiens
gccctccccacgccc

SEQ ID NO: 511494 - DNA, 15 bp, Homo sapiens
ccctccccacgcccc

SEQ ID NO: 511495 - DNA, 15 bp, Homo sapiens
cctccccacgcccca

SEQ ID NO: 511496 - DNA, 15 bp, Homo sapiens
ctccccacgccccac

SEQ ID NO: 511497 - DNA, 15 bp, Homo sapiens
tccccacgccccacc

SEQ ID NO: 511498 - DNA, 15 bp, Homo sapiens
ccccacgccccaccc

SEQ ID NO: 511499 - DNA, 15 bp, Homo sapiens
cccacgccccaccca

SEQ ID NO: 511500 - DNA, 15 bp, Homo sapiens
ccacgccccacccat

SEQ ID NO: 511501 - DNA, 15 bp, Homo sapiens
cacgccccacccata

SEQ ID NO: 511502 - DNA, 15 bp, Homo sapiens
acgccccacccatac

SEQ ID NO: 511503 - DNA, 15 bp, Homo sapiens
cgccccacccatacg

SEQ ID NO: 511504 - DNA, 15 bp, Homo sapiens
gccccacccatacgg

SEQ ID NO: 511505 - DNA, 15 bp, Homo sapiens
ccccacccatacggt

SEQ ID NO: 511506 - DNA, 15 bp, Homo sapiens
cccacccatacggtc

SEQ ID NO: 511507 - DNA, 15 bp, Homo sapiens
ccacccatacggtca

SEQ ID NO: 511508 - DNA, 15 bp, Homo sapiens
cacccatacggtcac

SEQ ID NO: 511509 - DNA, 15 bp, Homo sapiens
acccatacggtcact

SEQ ID NO: 511510 - DNA, 15 bp, Homo sapiens
cccatacggtcactg

SEQ ID NO: 511511 - DNA, 15 bp, Homo sapiens
ccatacggtcactgc

SEQ ID NO: 511512 - DNA, 15 bp, Homo sapiens
catacggtcactgca

SEQ ID NO: 511513 - DNA, 15 bp, Homo sapiens
atacggtcactgcat

SEQ ID NO: 511514 - DNA, 15 bp, Homo sapiens
tacggtcactgcatt

SEQ ID NO: 511515 - DNA, 15 bp, Homo sapiens
acggtcactgcattt

SEQ ID NO: 511516 - DNA, 15 bp, Homo sapiens
cggtcactgcatttg

SEQ ID NO: 511517 - DNA, 15 bp, Homo sapiens
ggtcactgcatttgg

SEQ ID NO: 511518 - DNA, 15 bp, Homo sapiens
gtcactgcatttggt

SEQ ID NO: 511519 - DNA, 15 bp, Homo sapiens
tcactgcatttggtc

SEQ ID NO: 511520 - DNA, 15 bp, Homo sapiens
cactgcatttggtca

SEQ ID NO: 511521 - DNA, 15 bp, Homo sapiens
actgcatttggtcag

SEQ ID NO: 511522 - DNA, 15 bp, Homo sapiens
ctgcatttggtcagc

SEQ ID NO: 511523 - DNA, 15 bp, Homo sapiens
tgcatttggtcagcc

SEQ ID NO: 511524 - DNA, 15 bp, Homo sapiens
gcatttggtcagcct

SEQ ID NO: 511525 - DNA, 15 bp, Homo sapiens
catttggtcagcctg

SEQ ID NO: 511526 - DNA, 15 bp, Homo sapiens
atttggtcagcctgc

SEQ ID NO: 511527 - DNA, 15 bp, Homo sapiens
tttggtcagcctgct

SEQ ID NO: 511528 - DNA, 15 bp, Homo sapiens
ttggtcagcctgctt

SEQ ID NO: 511529 - DNA, 15 bp, Homo sapiens
tggtcagcctgcttc

SEQ ID NO: 511530 - DNA, 15 bp, Homo sapiens
ggtcagcctgcttct

SEQ ID NO: 511531 - DNA, 15 bp, Homo sapiens
gtcagcctgcttctt

SEQ ID NO: 511532 - DNA, 15 bp, Homo sapiens
tcagcctgcttcttc

SEQ ID NO: 511533 - DNA, 15 bp, Homo sapiens
cagcctgcttcttca

SEQ ID NO: 511534 - DNA, 15 bp, Homo sapiens
agcctgcttcttcag

SEQ ID NO: 511535 - DNA, 15 bp, Homo sapiens
gcctgcttcttcagg

SEQ ID NO: 511536 - DNA, 15 bp, Homo sapiens
cctgcttcttcaggt

SEQ ID NO: 511537 - DNA, 15 bp, Homo sapiens
ctgcttcttcaggtc

SEQ ID NO: 511538 - DNA, 15 bp, Homo sapiens
tgcttcttcaggtcg

SEQ ID NO: 511539 - DNA, 15 bp, Homo sapiens
gcttcttcaggtcga

SEQ ID NO: 511540 - DNA, 15 bp, Homo sapiens
cttcttcaggtcgat

SEQ ID NO: 511541 - DNA, 15 bp, Homo sapiens
ttcttcaggtcgatg

SEQ ID NO: 511542 - DNA, 15 bp, Homo sapiens
tcttcaggtcgatgc

SEQ ID NO: 511543 - DNA, 15 bp, Homo sapiens
cttcaggtcgatgcc

SEQ ID NO: 511544 - DNA, 15 bp, Homo sapiens
ttcaggtcgatgccc

SEQ ID NO: 511545 - DNA, 15 bp, Homo sapiens
tcaggtcgatgccct

SEQ ID NO: 511546 - DNA, 15 bp, Homo sapiens
caggtcgatgccctc

SEQ ID NO: 511547 - DNA, 15 bp, Homo sapiens
aggtcgatgccctcc

SEQ ID NO: 511548 - DNA, 15 bp, Homo sapiens
ggtcgatgccctcct

SEQ ID NO: 511549 - DNA, 15 bp, Homo sapiens
gtcgatgccctcctt

SEQ ID NO: 511550 - DNA, 15 bp, Homo sapiens
tcgatgccctccttc

SEQ ID NO: 511551 - DNA, 15 bp, Homo sapiens
cgatgccctccttct

SEQ ID NO: 511552 - DNA, 15 bp, Homo sapiens
gatgccctccttctg

SEQ ID NO: 511553 - DNA, 15 bp, Homo sapiens
atgccctccttctga

SEQ ID NO: 511554 - DNA, 15 bp, Homo sapiens
tgccctccttctgat

SEQ ID NO: 511555 - DNA, 15 bp, Homo sapiens
gccctccttctgata

SEQ ID NO: 511556 - DNA, 15 bp, Homo sapiens
ccctccttctgatac

SEQ ID NO: 511557 - DNA, 15 bp, Homo sapiens
cctccttctgatact

SEQ ID NO: 511558 - DNA, 15 bp, Homo sapiens
ctccttctgatactc

SEQ ID NO: 511559 - DNA, 15 bp, Homo sapiens
tccttctgatactcc

SEQ ID NO: 511560 - DNA, 15 bp, Homo sapiens
ccttctgatactcca

SEQ ID NO: 511561 - DNA, 15 bp, Homo sapiens
cttctgatactccat

SEQ ID NO: 511562 - DNA, 15 bp, Homo sapiens
ttctgatactccatc

SEQ ID NO: 511563 - DNA, 15 bp, Homo sapiens
tctgatactccatct

SEQ ID NO: 511564 - DNA, 15 bp, Homo sapiens
ctgatactccatctc

SEQ ID NO: 511565 - DNA, 15 bp, Homo sapiens
tgatactccatctcc

SEQ ID NO: 511566 - DNA, 15 bp, Homo sapiens
gatactccatctcct

SEQ ID NO: 511567 - DNA, 15 bp, Homo sapiens
atactccatctcctt

SEQ ID NO: 511568 - DNA, 15 bp, Homo sapiens
tactccatctccttc

SEQ ID NO: 511569 - DNA, 15 bp, Homo sapiens
actccatctccttca

SEQ ID NO: 511570 - DNA, 15 bp, Homo sapiens
ctccatctccttcag

SEQ ID NO: 511571 - DNA, 15 bp, Homo sapiens
tccatctccttcagg

SEQ ID NO: 511572 - DNA, 15 bp, Homo sapiens
ccatctccttcaggg

SEQ ID NO: 511573 - DNA, 15 bp, Homo sapiens
catctccttcagggg

SEQ ID NO: 511574 - DNA, 15 bp, Homo sapiens
atctccttcagggga

SEQ ID NO: 511575 - DNA, 15 bp, Homo sapiens
tctccttcaggggag

SEQ ID NO: 511576 - DNA, 15 bp, Homo sapiens
ctccttcaggggagg

SEQ ID NO: 511577 - DNA, 15 bp, Homo sapiens
tccttcaggggaggt

SEQ ID NO: 511578 - DNA, 15 bp, Homo sapiens
ccttcaggggaggtt

SEQ ID NO: 511579 - DNA, 15 bp, Homo sapiens
cttcaggggaggttg

SEQ ID NO: 511580 - DNA, 15 bp, Homo sapiens
ttcaggggaggttgg

SEQ ID NO: 511581 - DNA, 15 bp, Homo sapiens
tcaggggaggttggg

SEQ ID NO: 511582 - DNA, 15 bp, Homo sapiens
caggggaggttgggg

SEQ ID NO: 511583 - DNA, 15 bp, Homo sapiens
aggggaggttggggc

SEQ ID NO: 511584 - DNA, 15 bp, Homo sapiens
ggggaggttggggcc

SEQ ID NO: 511585 - DNA, 15 bp, Homo sapiens
gggaggttggggccc

SEQ ID NO: 511586 - DNA, 15 bp, Homo sapiens
ggaggttggggcccc

SEQ ID NO: 511587 - DNA, 15 bp, Homo sapiens
gaggttggggcccca

SEQ ID NO: 511588 - DNA, 15 bp, Homo sapiens
aggttggggccccac

SEQ ID NO: 511589 - DNA, 15 bp, Homo sapiens
ggttggggccccact

SEQ ID NO: 511590 - DNA, 15 bp, Homo sapiens
gttggggccccactg

SEQ ID NO: 511591 - DNA, 15 bp, Homo sapiens
ttggggccccactgg

SEQ ID NO: 511592 - DNA, 15 bp, Homo sapiens
tggggccccactgga

SEQ ID NO: 511593 - DNA, 15 bp, Homo sapiens
ggggccccactggac

SEQ ID NO: 511594 - DNA, 15 bp, Homo sapiens
gggccccactggact

SEQ ID NO: 511595 - DNA, 15 bp, Homo sapiens
ggccccactggactg

SEQ ID NO: 511596 - DNA, 15 bp, Homo sapiens
gccccactggactgg

SEQ ID NO: 511597 - DNA, 15 bp, Homo sapiens
ccccactggactggg

SEQ ID NO: 511598 - DNA, 15 bp, Homo sapiens
cccactggactgggt

SEQ ID NO: 511599 - DNA, 15 bp, Homo sapiens
ccactggactgggtg

SEQ ID NO: 511600 - DNA, 15 bp, Homo sapiens
cactggactgggtgt

SEQ ID NO: 511601 - DNA, 15 bp, Homo sapiens
actggactgggtgtc

SEQ ID NO: 511602 - DNA, 15 bp, Homo sapiens
ctggactgggtgtca

SEQ ID NO: 511603 - DNA, 15 bp, Homo sapiens
tggactgggtgtcaa

SEQ ID NO: 511604 - DNA, 15 bp, Homo sapiens
ggactgggtgtcaag

SEQ ID NO: 511605 - DNA, 15 bp, Homo sapiens
gactgggtgtcaaga

SEQ ID NO: 511606 - DNA, 15 bp, Homo sapiens
actgggtgtcaagat

SEQ ID NO: 511607 - DNA, 15 bp, Homo sapiens
ctgggtgtcaagatg

SEQ ID NO: 511608 - DNA, 15 bp, Homo sapiens
tgggtgtcaagatgt

SEQ ID NO: 511609 - DNA, 15 bp, Homo sapiens
gggtgtcaagatgtg

SEQ ID NO: 511610 - DNA, 15 bp, Homo sapiens
ggtgtcaagatgtga

SEQ ID NO: 511611 - DNA, 15 bp, Homo sapiens
gtgtcaagatgtgaa

SEQ ID NO: 511612 - DNA, 15 bp, Homo sapiens
tgtcaagatgtgaaa

SEQ ID NO: 511613 - DNA, 15 bp, Homo sapiens
gtcaagatgtgaaag

SEQ ID NO: 511614 - DNA, 15 bp, Homo sapiens
tcaagatgtgaaagc

SEQ ID NO: 511615 - DNA, 15 bp, Homo sapiens
caagatgtgaaagct

SEQ ID NO: 511616 - DNA, 15 bp, Homo sapiens
aagatgtgaaagctt

SEQ ID NO: 511617 - DNA, 15 bp, Homo sapiens
agatgtgaaagctta

SEQ ID NO: 511618 - DNA, 15 bp, Homo sapiens
gatgtgaaagcttat

SEQ ID NO: 511619 - DNA, 15 bp, Homo sapiens
atgtgaaagcttatg

SEQ ID NO: 511620 - DNA, 15 bp, Homo sapiens
tgtgaaagcttatgg

SEQ ID NO: 511621 - DNA, 15 bp, Homo sapiens
gtgaaagcttatggg

SEQ ID NO: 511622 - DNA, 15 bp, Homo sapiens
tgaaagcttatggga

SEQ ID NO: 511623 - DNA, 15 bp, Homo sapiens
gaaagcttatgggag

SEQ ID NO: 511624 - DNA, 15 bp, Homo sapiens
aaagcttatgggagc

SEQ ID NO: 511625 - DNA, 15 bp, Homo sapiens
aagcttatgggagct

SEQ ID NO: 511626 - DNA, 15 bp, Homo sapiens
agcttatgggagctt

SEQ ID NO: 511627 - DNA, 15 bp, Homo sapiens
gcttatgggagcttt

SEQ ID NO: 511628 - DNA, 15 bp, Homo sapiens
cttatgggagcttta

SEQ ID NO: 511629 - DNA, 15 bp, Homo sapiens
ttatgggagctttaa

SEQ ID NO: 511630 - DNA, 15 bp, Homo sapiens
tatgggagctttaag

SEQ ID NO: 511631 - DNA, 15 bp, Homo sapiens
atgggagctttaagg

SEQ ID NO: 511632 - DNA, 15 bp, Homo sapiens
tgggagctttaagga

SEQ ID NO: 511633 - DNA, 15 bp, Homo sapiens
gggagctttaaggag

SEQ ID NO: 511634 - DNA, 15 bp, Homo sapiens
ggagctttaaggaga

SEQ ID NO: 511635 - DNA, 15 bp, Homo sapiens
gagctttaaggagac

SEQ ID NO: 511636 - DNA, 15 bp, Homo sapiens
agctttaaggagact

SEQ ID NO: 511637 - DNA, 15 bp, Homo sapiens
gctttaaggagactt

SEQ ID NO: 511638 - DNA, 15 bp, Homo sapiens
ctttaaggagacttc

SEQ ID NO: 511639 - DNA, 15 bp, Homo sapiens
tttaaggagacttca

SEQ ID NO: 511640 - DNA, 15 bp, Homo sapiens
ttaaggagacttcat

SEQ ID NO: 511641 - DNA, 15 bp, Homo sapiens
taaggagacttcatg

SEQ ID NO: 511642 - DNA, 15 bp, Homo sapiens
aaggagacttcatgg

SEQ ID NO: 511643 - DNA, 15 bp, Homo sapiens
aggagacttcatggt

SEQ ID NO: 511644 - DNA, 15 bp, Homo sapiens
ggagacttcatggtg

SEQ ID NO: 511645 - DNA, 15 bp, Homo sapiens
gagacttcatggtgg

SEQ ID NO: 511646 - DNA, 15 bp, Homo sapiens
agacttcatggtggt

SEQ ID NO: 511647 - DNA, 15 bp, Homo sapiens
gacttcatggtggtt

SEQ ID NO: 511648 - DNA, 15 bp, Homo sapiens
acttcatggtggttc

SEQ ID NO: 511649 - DNA, 15 bp, Homo sapiens
cttcatggtggttcc

SEQ ID NO: 511650 - DNA, 15 bp, Homo sapiens
ttcatggtggttcca

SEQ ID NO: 511651 - DNA, 15 bp, Homo sapiens
tcatggtggttccat

SEQ ID NO: 511652 - DNA, 15 bp, Homo sapiens
catggtggttccatg

SEQ ID NO: 511653 - DNA, 15 bp, Homo sapiens
atggtggttccatgc

SEQ ID NO: 511654 - DNA, 15 bp, Homo sapiens
tggtggttccatgca

SEQ ID NO: 511655 - DNA, 15 bp, Homo sapiens
ggtggttccatgcag

SEQ ID NO: 511656 - DNA, 15 bp, Homo sapiens
gtggttccatgcagg

SEQ ID NO: 511657 - DNA, 15 bp, Homo sapiens
tggttccatgcaggt

SEQ ID NO: 511658 - DNA, 15 bp, Homo sapiens
ggttccatgcaggtg

SEQ ID NO: 511659 - DNA, 15 bp, Homo sapiens
gttccatgcaggtgg

SEQ ID NO: 511660 - DNA, 15 bp, Homo sapiens
ttccatgcaggtggt

SEQ ID NO: 511661 - DNA, 15 bp, Homo sapiens
tccatgcaggtggtt

SEQ ID NO: 511662 - DNA, 15 bp, Homo sapiens
ccatgcaggtggttc

SEQ ID NO: 511663 - DNA, 15 bp, Homo sapiens
catgcaggtggttct

SEQ ID NO: 511664 - DNA, 15 bp, Homo sapiens
atgcaggtggttctg

SEQ ID NO: 511665 - DNA, 15 bp, Homo sapiens
tgcaggtggttctgc

SEQ ID NO: 511666 - DNA, 15 bp, Homo sapiens
gcaggtggttctgcc

SEQ ID NO: 511667 - DNA, 15 bp, Homo sapiens
caggtggttctgcca

SEQ ID NO: 511668 - DNA, 15 bp, Homo sapiens
aggtggttctgccat

SEQ ID NO: 511669 - DNA, 15 bp, Homo sapiens
ggtggttctgccatc

SEQ ID NO: 511670 - DNA, 15 bp, Homo sapiens
gtggttctgccatcc

SEQ ID NO: 511671 - DNA, 15 bp, Homo sapiens
tggttctgccatccc

SEQ ID NO: 511672 - DNA, 15 bp, Homo sapiens
ggttctgccatccct

SEQ ID NO: 511673 - DNA, 15 bp, Homo sapiens
gttctgccatccctg

SEQ ID NO: 511674 - DNA, 15 bp, Homo sapiens
ttctgccatccctgc

SEQ ID NO: 511675 - DNA, 15 bp, Homo sapiens
tctgccatccctgct

SEQ ID NO: 511676 - DNA, 15 bp, Homo sapiens
ctgccatccctgctg

SEQ ID NO: 511677 - DNA, 15 bp, Homo sapiens
tgccatccctgctga

SEQ ID NO: 511678 - DNA, 15 bp, Homo sapiens
gccatccctgctgat

SEQ ID NO: 511679 - DNA, 15 bp, Homo sapiens
ccatccctgctgatt

SEQ ID NO: 511680 - DNA, 15 bp, Homo sapiens
catccctgctgattt

SEQ ID NO: 511681 - DNA, 15 bp, Homo sapiens
atccctgctgattta

SEQ ID NO: 511682 - DNA, 15 bp, Homo sapiens
tccctgctgatttag

SEQ ID NO: 511683 - DNA, 15 bp, Homo sapiens
ccctgctgatttagc

SEQ ID NO: 511684 - DNA, 15 bp, Homo sapiens
cctgctgatttagcc

SEQ ID NO: 511685 - DNA, 15 bp, Homo sapiens
ctgctgatttagcct

SEQ ID NO: 511686 - DNA, 15 bp, Homo sapiens
tgctgatttagcctg

SEQ ID NO: 511687 - DNA, 15 bp, Homo sapiens
gctgatttagcctgg

SEQ ID NO: 511688 - DNA, 15 bp, Homo sapiens
ctgatttagcctggt

SEQ ID NO: 511689 - DNA, 15 bp, Homo sapiens
tgatttagcctggtg

SEQ ID NO: 511690 - DNA, 15 bp, Homo sapiens
gatttagcctggtgc

SEQ ID NO: 511691 - DNA, 15 bp, Homo sapiens
atttagcctggtgcc

SEQ ID NO: 511692 - DNA, 15 bp, Homo sapiens
tttagcctggtgcct

SEQ ID NO: 511693 - DNA, 15 bp, Homo sapiens
ttagcctggtgcctg

SEQ ID NO: 511694 - DNA, 15 bp, Homo sapiens
tagcctggtgcctgt

SEQ ID NO: 511695 - DNA, 15 bp, Homo sapiens
agcctggtgcctgtg

SEQ ID NO: 511696 - DNA, 15 bp, Homo sapiens
gcctggtgcctgtgt

SEQ ID NO: 511697 - DNA, 15 bp, Homo sapiens
cctggtgcctgtgtg

SEQ ID NO: 511698 - DNA, 15 bp, Homo sapiens
ctggtgcctgtgtgt

SEQ ID NO: 511699 - DNA, 15 bp, Homo sapiens
tggtgcctgtgtgtg

SEQ ID NO: 511700 - DNA, 15 bp, Homo sapiens
ggtgcctgtgtgtgt

SEQ ID NO: 511701 - DNA, 15 bp, Homo sapiens
gtgcctgtgtgtgtc

SEQ ID NO: 511702 - DNA, 15 bp, Homo sapiens
tgcctgtgtgtgtcc

SEQ ID NO: 511703 - DNA, 15 bp, Homo sapiens
gcctgtgtgtgtcca

SEQ ID NO: 511704 - DNA, 15 bp, Homo sapiens
cctgtgtgtgtccac

SEQ ID NO: 511705 - DNA, 15 bp, Homo sapiens
ctgtgtgtgtccact

SEQ ID NO: 511706 - DNA, 15 bp, Homo sapiens
tgtgtgtgtccactc

SEQ ID NO: 511707 - DNA, 15 bp, Homo sapiens
gtgtgtgtccactca

SEQ ID NO: 511708 - DNA, 15 bp, Homo sapiens
tgtgtgtccactcac

SEQ ID NO: 511709 - DNA, 15 bp, Homo sapiens
gtgtgtccactcacg

SEQ ID NO: 511710 - DNA, 15 bp, Homo sapiens
tgtgtccactcacgt

SEQ ID NO: 511711 - DNA, 15 bp, Homo sapiens
gtgtccactcacgta

SEQ ID NO: 511712 - DNA, 15 bp, Homo sapiens
tgtccactcacgtac

SEQ ID NO: 511713 - DNA, 15 bp, Homo sapiens
gtccactcacgtaca

SEQ ID NO: 511714 - DNA, 15 bp, Homo sapiens
tccactcacgtacac

SEQ ID NO: 511715 - DNA, 15 bp, Homo sapiens
ccactcacgtacacg

SEQ ID NO: 511716 - DNA, 15 bp, Homo sapiens
cactcacgtacacgt

SEQ ID NO: 511717 - DNA, 15 bp, Homo sapiens
actcacgtacacgtg

SEQ ID NO: 511718 - DNA, 15 bp, Homo sapiens
ctcacgtacacgtgg

SEQ ID NO: 511719 - DNA, 15 bp, Homo sapiens
tcacgtacacgtggg

SEQ ID NO: 511720 - DNA, 15 bp, Homo sapiens
cacgtacacgtgggg

SEQ ID NO: 511721 - DNA, 15 bp, Homo sapiens
acgtacacgtggggt

SEQ ID NO: 511722 - DNA, 15 bp, Homo sapiens
cgtacacgtggggtg

SEQ ID NO: 511723 - DNA, 15 bp, Homo sapiens
gtacacgtggggtgg

SEQ ID NO: 511724 - DNA, 15 bp, Homo sapiens
tacacgtggggtggg

SEQ ID NO: 511725 - DNA, 15 bp, Homo sapiens
acacgtggggtgggg

SEQ ID NO: 511726 - DNA, 15 bp, Homo sapiens
cacgtggggtggggg

SEQ ID NO: 511727 - DNA, 15 bp, Homo sapiens
acgtggggtggggga

SEQ ID NO: 511728 - DNA, 15 bp, Homo sapiens
cgtggggtgggggaa

SEQ ID NO: 511729 - DNA, 15 bp, Homo sapiens
gtggggtgggggaaa

SEQ ID NO: 511730 - DNA, 15 bp, Homo sapiens
tggggtgggggaaac

SEQ ID NO: 511731 - DNA, 15 bp, Homo sapiens
ggggtgggggaaacg

SEQ ID NO: 511732 - DNA, 15 bp, Homo sapiens
gggtgggggaaacgt

SEQ ID NO: 511733 - DNA, 15 bp, Homo sapiens
ggtgggggaaacgtg

SEQ ID NO: 511734 - DNA, 15 bp, Homo sapiens
gtgggggaaacgtgt

SEQ ID NO: 511735 - DNA, 15 bp, Homo sapiens
tgggggaaacgtgtc

SEQ ID NO: 511736 - DNA, 15 bp, Homo sapiens
gggggaaacgtgtct

SEQ ID NO: 511737 - DNA, 15 bp, Homo sapiens
ggggaaacgtgtcta

SEQ ID NO: 511738 - DNA, 15 bp, Homo sapiens
gggaaacgtgtctac

SEQ ID NO: 511739 - DNA, 15 bp, Homo sapiens
ggaaacgtgtctaca

SEQ ID NO: 511740 - DNA, 15 bp, Homo sapiens
gaaacgtgtctacag

SEQ ID NO: 511741 - DNA, 15 bp, Homo sapiens
aaacgtgtctacaga

SEQ ID NO: 511742 - DNA, 15 bp, Homo sapiens
aacgtgtctacagat

SEQ ID NO: 511743 - DNA, 15 bp, Homo sapiens
acgtgtctacagatg

SEQ ID NO: 511744 - DNA, 15 bp, Homo sapiens
cgtgtctacagatga

SEQ ID NO: 511745 - DNA, 15 bp, Homo sapiens
gtgtctacagatgac

SEQ ID NO: 511746 - DNA, 15 bp, Homo sapiens
tgtctacagatgacg

SEQ ID NO: 511747 - DNA, 15 bp, Homo sapiens
gtctacagatgacgc

SEQ ID NO: 511748 - DNA, 15 bp, Homo sapiens
tctacagatgacgct

SEQ ID NO: 511749 - DNA, 15 bp, Homo sapiens
ctacagatgacgcta

SEQ ID NO: 511750 - DNA, 15 bp, Homo sapiens
tacagatgacgctaa

SEQ ID NO: 511751 - DNA, 15 bp, Homo sapiens
acagatgacgctaaa

SEQ ID NO: 511752 - DNA, 15 bp, Homo sapiens
cagatgacgctaaat

SEQ ID NO: 511753 - DNA, 15 bp, Homo sapiens
agatgacgctaaatc

SEQ ID NO: 511754 - DNA, 15 bp, Homo sapiens
gatgacgctaaatca

SEQ ID NO: 511755 - DNA, 15 bp, Homo sapiens
atgacgctaaatcag

SEQ ID NO: 511756 - DNA, 15 bp, Homo sapiens
tgacgctaaatcagt

SEQ ID NO: 511757 - DNA, 15 bp, Homo sapiens
gacgctaaatcagtt

SEQ ID NO: 511758 - DNA, 15 bp, Homo sapiens
acgctaaatcagttg

SEQ ID NO: 511759 - DNA, 15 bp, Homo sapiens
cgctaaatcagttgg

SEQ ID NO: 511760 - DNA, 15 bp, Homo sapiens
gctaaatcagttggg

SEQ ID NO: 511761 - DNA, 15 bp, Homo sapiens
ctaaatcagttgggg

SEQ ID NO: 511762 - DNA, 15 bp, Homo sapiens
taaatcagttggggt

SEQ ID NO: 511763 - DNA, 15 bp, Homo sapiens
aaatcagttggggtc

SEQ ID NO: 511764 - DNA, 15 bp, Homo sapiens
aatcagttggggtct

SEQ ID NO: 511765 - DNA, 15 bp, Homo sapiens
atcagttggggtcta

SEQ ID NO: 511766 - DNA, 15 bp, Homo sapiens
tcagttggggtctac

SEQ ID NO: 511767 - DNA, 15 bp, Homo sapiens
cagttggggtctact

SEQ ID NO: 511768 - DNA, 15 bp, Homo sapiens
agttggggtctactc

SEQ ID NO: 511769 - DNA, 15 bp, Homo sapiens
gttggggtctactct

SEQ ID NO: 511770 - DNA, 15 bp, Homo sapiens
ttggggtctactcta

SEQ ID NO: 511771 - DNA, 15 bp, Homo sapiens
tggggtctactctaa

SEQ ID NO: 511772 - DNA, 15 bp, Homo sapiens
ggggtctactctaaa

SEQ ID NO: 511773 - DNA, 15 bp, Homo sapiens
gggtctactctaaac

SEQ ID NO: 511774 - DNA, 15 bp, Homo sapiens
ggtctactctaaaca

SEQ ID NO: 511775 - DNA, 15 bp, Homo sapiens
gtctactctaaacag

SEQ ID NO: 511776 - DNA, 15 bp, Homo sapiens
tctactctaaacagc

SEQ ID NO: 511777 - DNA, 15 bp, Homo sapiens
ctactctaaacagca

SEQ ID NO: 511778 - DNA, 15 bp, Homo sapiens
tactctaaacagcat

SEQ ID NO: 511779 - DNA, 15 bp, Homo sapiens
actctaaacagcatt

SEQ ID NO: 511780 - DNA, 15 bp, Homo sapiens
ctctaaacagcattg

SEQ ID NO: 511781 - DNA, 15 bp, Homo sapiens
tctaaacagcattgt

SEQ ID NO: 511782 - DNA, 15 bp, Homo sapiens
ctaaacagcattgtg

SEQ ID NO: 511783 - DNA, 15 bp, Homo sapiens
taaacagcattgtgt

SEQ ID NO: 511784 - DNA, 15 bp, Homo sapiens
aaacagcattgtgtg

SEQ ID NO: 511785 - DNA, 15 bp, Homo sapiens
aacagcattgtgtgt

SEQ ID NO: 511786 - DNA, 15 bp, Homo sapiens
acagcattgtgtgta

SEQ ID NO: 511787 - DNA, 15 bp, Homo sapiens
cagcattgtgtgtaa

SEQ ID NO: 511788 - DNA, 15 bp, Homo sapiens
agcattgtgtgtaag

SEQ ID NO: 511789 - DNA, 15 bp, Homo sapiens
gcattgtgtgtaaga

SEQ ID NO: 511790 - DNA, 15 bp, Homo sapiens
cattgtgtgtaagaa

SEQ ID NO: 511791 - DNA, 15 bp, Homo sapiens
attgtgtgtaagaag

SEQ ID NO: 511792 - DNA, 15 bp, Homo sapiens
ttgtgtgtaagaagc

SEQ ID NO: 511793 - DNA, 15 bp, Homo sapiens
tgtgtgtaagaagca

SEQ ID NO: 511794 - DNA, 15 bp, Homo sapiens
gtgtgtaagaagcat

SEQ ID NO: 511795 - DNA, 15 bp, Homo sapiens
tgtgtaagaagcatc

SEQ ID NO: 511796 - DNA, 15 bp, Homo sapiens
gtgtaagaagcatcc

SEQ ID NO: 511797 - DNA, 15 bp, Homo sapiens
tgtaagaagcatcct

SEQ ID NO: 511798 - DNA, 15 bp, Homo sapiens
gtaagaagcatcctc

SEQ ID NO: 511799 - DNA, 15 bp, Homo sapiens
taagaagcatcctca

SEQ ID NO: 511800 - DNA, 15 bp, Homo sapiens
aagaagcatcctcaa

SEQ ID NO: 511801 - DNA, 15 bp, Homo sapiens
agaagcatcctcaag

SEQ ID NO: 511802 - DNA, 15 bp, Homo sapiens
gaagcatcctcaagc

SEQ ID NO: 511803 - DNA, 15 bp, Homo sapiens
aagcatcctcaagct

SEQ ID NO: 511804 - DNA, 15 bp, Homo sapiens
agcatcctcaagctc

SEQ ID NO: 511805 - DNA, 15 bp, Homo sapiens
gcatcctcaagctcc

SEQ ID NO: 511806 - DNA, 15 bp, Homo sapiens
catcctcaagctccc

SEQ ID NO: 511807 - DNA, 15 bp, Homo sapiens
atcctcaagctccca

SEQ ID NO: 511808 - DNA, 15 bp, Homo sapiens
tcctcaagctcccag

SEQ ID NO: 511809 - DNA, 15 bp, Homo sapiens
cctcaagctcccagt

SEQ ID NO: 511810 - DNA, 15 bp, Homo sapiens
ctcaagctcccagtt

SEQ ID NO: 511811 - DNA, 15 bp, Homo sapiens
tcaagctcccagtta

SEQ ID NO: 511812 - DNA, 15 bp, Homo sapiens
caagctcccagttaa

SEQ ID NO: 511813 - DNA, 15 bp, Homo sapiens
aagctcccagttaag

SEQ ID NO: 511814 - DNA, 15 bp, Homo sapiens
agctcccagttaagt

SEQ ID NO: 511815 - DNA, 15 bp, Homo sapiens
gctcccagttaagta

SEQ ID NO: 511816 - DNA, 15 bp, Homo sapiens
ctcccagttaagtaa

SEQ ID NO: 511817 - DNA, 15 bp, Homo sapiens
tcccagttaagtaac

SEQ ID NO: 511818 - DNA, 15 bp, Homo sapiens
cccagttaagtaact

SEQ ID NO: 511819 - DNA, 15 bp, Homo sapiens
ccagttaagtaactt

SEQ ID NO: 511820 - DNA, 15 bp, Homo sapiens
cagttaagtaacttg

SEQ ID NO: 511821 - DNA, 15 bp, Homo sapiens
agttaagtaacttga

SEQ ID NO: 511822 - DNA, 15 bp, Homo sapiens
gttaagtaacttgac

SEQ ID NO: 511823 - DNA, 15 bp, Homo sapiens
ttaagtaacttgact

SEQ ID NO: 511824 - DNA, 15 bp, Homo sapiens
taagtaacttgacta

SEQ ID NO: 511825 - DNA, 15 bp, Homo sapiens
aagtaacttgactac

SEQ ID NO: 511826 - DNA, 15 bp, Homo sapiens
agtaacttgactact

SEQ ID NO: 511827 - DNA, 15 bp, Homo sapiens
gtaacttgactactt

SEQ ID NO: 511828 - DNA, 15 bp, Homo sapiens
taacttgactacttt

SEQ ID NO: 511829 - DNA, 15 bp, Homo sapiens
aacttgactactttt

SEQ ID NO: 511830 - DNA, 15 bp, Homo sapiens
acttgactactttta

SEQ ID NO: 511831 - DNA, 15 bp, Homo sapiens
cttgactacttttat

SEQ ID NO: 511832 - DNA, 15 bp, Homo sapiens
ttgactacttttatt

SEQ ID NO: 511833 - DNA, 15 bp, Homo sapiens
tgactacttttattt

SEQ ID NO: 511834 - DNA, 15 bp, Homo sapiens
gactacttttatttg

SEQ ID NO: 511835 - DNA, 15 bp, Homo sapiens
actacttttatttgg

SEQ ID NO: 511836 - DNA, 15 bp, Homo sapiens
ctacttttatttggg

SEQ ID NO: 511837 - DNA, 15 bp, Homo sapiens
tacttttatttggga

SEQ ID NO: 511838 - DNA, 15 bp, Homo sapiens
acttttatttgggaa

SEQ ID NO: 511839 - DNA, 15 bp, Homo sapiens
cttttatttgggaat

SEQ ID NO: 511840 - DNA, 15 bp, Homo sapiens
ttttatttgggaatt

SEQ ID NO: 511841 - DNA, 15 bp, Homo sapiens
tttatttgggaattt

SEQ ID NO: 511842 - DNA, 15 bp, Homo sapiens
ttatttgggaatttc

SEQ ID NO: 511843 - DNA, 15 bp, Homo sapiens
tatttgggaatttca

SEQ ID NO: 511844 - DNA, 15 bp, Homo sapiens
atttgggaatttcag

SEQ ID NO: 511845 - DNA, 15 bp, Homo sapiens
tttgggaatttcaga

SEQ ID NO: 511846 - DNA, 15 bp, Homo sapiens
ttgggaatttcagac

SEQ ID NO: 511847 - DNA, 15 bp, Homo sapiens
tgggaatttcagact

SEQ ID NO: 511848 - DNA, 15 bp, Homo sapiens
gggaatttcagacta

SEQ ID NO: 511849 - DNA, 15 bp, Homo sapiens
ggaatttcagactat

SEQ ID NO: 511850 - DNA, 15 bp, Homo sapiens
gaatttcagactata

SEQ ID NO: 511851 - DNA, 15 bp, Homo sapiens
aatttcagactatag

SEQ ID NO: 511852 - DNA, 15 bp, Homo sapiens
atttcagactataga

SEQ ID NO: 511853 - DNA, 15 bp, Homo sapiens
tttcagactatagaa

SEQ ID NO: 511854 - DNA, 15 bp, Homo sapiens
ttcagactatagaag

SEQ ID NO: 511855 - DNA, 15 bp, Homo sapiens
tcagactatagaagc

SEQ ID NO: 511856 - DNA, 15 bp, Homo sapiens
cagactatagaagct

SEQ ID NO: 511857 - DNA, 15 bp, Homo sapiens
agactatagaagctc

SEQ ID NO: 511858 - DNA, 15 bp, Homo sapiens
gactatagaagctct

SEQ ID NO: 511859 - DNA, 15 bp, Homo sapiens
actatagaagctctc

SEQ ID NO: 511860 - DNA, 15 bp, Homo sapiens
ctatagaagctctct

SEQ ID NO: 511861 - DNA, 15 bp, Homo sapiens
tatagaagctctctt

SEQ ID NO: 511862 - DNA, 15 bp, Homo sapiens
atagaagctctctta

SEQ ID NO: 511863 - DNA, 15 bp, Homo sapiens
tagaagctctcttat

SEQ ID NO: 511864 - DNA, 15 bp, Homo sapiens
agaagctctcttatg

SEQ ID NO: 511865 - DNA, 15 bp, Homo sapiens
gaagctctcttatgt

SEQ ID NO: 511866 - DNA, 15 bp, Homo sapiens
aagctctcttatgtt

SEQ ID NO: 511867 - DNA, 15 bp, Homo sapiens
agctctcttatgttt

SEQ ID NO: 511868 - DNA, 15 bp, Homo sapiens
gctctcttatgtttt

SEQ ID NO: 511869 - DNA, 15 bp, Homo sapiens
ctctcttatgtttta

SEQ ID NO: 511870 - DNA, 15 bp, Homo sapiens
tctcttatgttttat

SEQ ID NO: 511871 - DNA, 15 bp, Homo sapiens
ctcttatgttttatg

SEQ ID NO: 511872 - DNA, 15 bp, Homo sapiens
tcttatgttttatgt

SEQ ID NO: 511873 - DNA, 15 bp, Homo sapiens
cttatgttttatgtc

SEQ ID NO: 511874 - DNA, 15 bp, Homo sapiens
ttatgttttatgtcc

SEQ ID NO: 511875 - DNA, 15 bp, Homo sapiens
tatgttttatgtcca

SEQ ID NO: 511876 - DNA, 15 bp, Homo sapiens
atgttttatgtccag

SEQ ID NO: 511877 - DNA, 15 bp, Homo sapiens
tgttttatgtccaga

SEQ ID NO: 511878 - DNA, 15 bp, Homo sapiens
gttttatgtccagat

SEQ ID NO: 511879 - DNA, 15 bp, Homo sapiens
ttttatgtccagatt

SEQ ID NO: 511880 - DNA, 15 bp, Homo sapiens
tttatgtccagattc

SEQ ID NO: 511881 - DNA, 15 bp, Homo sapiens
ttatgtccagattct

SEQ ID NO: 511882 - DNA, 15 bp, Homo sapiens
tatgtccagattctg

SEQ ID NO: 511883 - DNA, 15 bp, Homo sapiens
atgtccagattctgt

SEQ ID NO: 511884 - DNA, 15 bp, Homo sapiens
tgtccagattctgtg

SEQ ID NO: 511885 - DNA, 15 bp, Homo sapiens
gtccagattctgtga

SEQ ID NO: 511886 - DNA, 15 bp, Homo sapiens
tccagattctgtgac

SEQ ID NO: 511887 - DNA, 15 bp, Homo sapiens
ccagattctgtgacc

SEQ ID NO: 511888 - DNA, 15 bp, Homo sapiens
cagattctgtgacca

SEQ ID NO: 511889 - DNA, 15 bp, Homo sapiens
agattctgtgaccac

SEQ ID NO: 511890 - DNA, 15 bp, Homo sapiens
gattctgtgaccact

SEQ ID NO: 511891 - DNA, 15 bp, Homo sapiens
attctgtgaccacta

SEQ ID NO: 511892 - DNA, 15 bp, Homo sapiens
ttctgtgaccactag

SEQ ID NO: 511893 - DNA, 15 bp, Homo sapiens
tctgtgaccactagt

SEQ ID NO: 511894 - DNA, 15 bp, Homo sapiens
ctgtgaccactagtt

SEQ ID NO: 511895 - DNA, 15 bp, Homo sapiens
tgtgaccactagtta

SEQ ID NO: 511896 - DNA, 15 bp, Homo sapiens
gtgaccactagttac

SEQ ID NO: 511897 - DNA, 15 bp, Homo sapiens
tgaccactagttact

SEQ ID NO: 511898 - DNA, 15 bp, Homo sapiens
gaccactagttactg

SEQ ID NO: 511899 - DNA, 15 bp, Homo sapiens
accactagttactgt

SEQ ID NO: 511900 - DNA, 15 bp, Homo sapiens
ccactagttactgta

SEQ ID NO: 511901 - DNA, 15 bp, Homo sapiens
cactagttactgtat

SEQ ID NO: 511902 - DNA, 15 bp, Homo sapiens
actagttactgtatc

SEQ ID NO: 511903 - DNA, 15 bp, Homo sapiens
ctagttactgtatca

SEQ ID NO: 511904 - DNA, 15 bp, Homo sapiens
tagttactgtatcag

SEQ ID NO: 511905 - DNA, 15 bp, Homo sapiens
agttactgtatcaga

SEQ ID NO: 511906 - DNA, 15 bp, Homo sapiens
gttactgtatcagaa

SEQ ID NO: 511907 - DNA, 15 bp, Homo sapiens
ttactgtatcagaac

SEQ ID NO: 511908 - DNA, 15 bp, Homo sapiens
tactgtatcagaact

SEQ ID NO: 511909 - DNA, 15 bp, Homo sapiens
actgtatcagaactc

SEQ ID NO: 511910 - DNA, 15 bp, Homo sapiens
ctgtatcagaactca

SEQ ID NO: 511911 - DNA, 15 bp, Homo sapiens
tgtatcagaactcat

SEQ ID NO: 511912 - DNA, 15 bp, Homo sapiens
gtatcagaactcatc

SEQ ID NO: 511913 - DNA, 15 bp, Homo sapiens
tatcagaactcatca

SEQ ID NO: 511914 - DNA, 15 bp, Homo sapiens
atcagaactcatcag

SEQ ID NO: 511915 - DNA, 15 bp, Homo sapiens
tcagaactcatcagg

SEQ ID NO: 511916 - DNA, 15 bp, Homo sapiens
cagaactcatcaggt

SEQ ID NO: 511917 - DNA, 15 bp, Homo sapiens
agaactcatcaggta

SEQ ID NO: 511918 - DNA, 15 bp, Homo sapiens
gaactcatcaggtac

SEQ ID NO: 511919 - DNA, 15 bp, Homo sapiens
aactcatcaggtacc

SEQ ID NO: 511920 - DNA, 15 bp, Homo sapiens
actcatcaggtaccc

SEQ ID NO: 511921 - DNA, 15 bp, Homo sapiens
ctcatcaggtaccca

SEQ ID NO: 511922 - DNA, 15 bp, Homo sapiens
tcatcaggtacccac

SEQ ID NO: 511923 - DNA, 15 bp, Homo sapiens
catcaggtacccact

SEQ ID NO: 511924 - DNA, 15 bp, Homo sapiens
atcaggtacccactt

SEQ ID NO: 511925 - DNA, 15 bp, Homo sapiens
tcaggtacccactta

SEQ ID NO: 511926 - DNA, 15 bp, Homo sapiens
caggtacccacttat

SEQ ID NO: 511927 - DNA, 15 bp, Homo sapiens
aggtacccacttata

SEQ ID NO: 511928 - DNA, 15 bp, Homo sapiens
ggtacccacttataa

SEQ ID NO: 511929 - DNA, 15 bp, Homo sapiens
gtacccacttataaa

SEQ ID NO: 511930 - DNA, 15 bp, Homo sapiens
tacccacttataaat

SEQ ID NO: 511931 - DNA, 15 bp, Homo sapiens
acccacttataaata

SEQ ID NO: 511932 - DNA, 15 bp, Homo sapiens
cccacttataaatag

SEQ ID NO: 511933 - DNA, 15 bp, Homo sapiens
ccacttataaatagc

SEQ ID NO: 511934 - DNA, 15 bp, Homo sapiens
cacttataaatagca

SEQ ID NO: 511935 - DNA, 15 bp, Homo sapiens
acttataaatagcac

SEQ ID NO: 511936 - DNA, 15 bp, Homo sapiens
cttataaatagcact

SEQ ID NO: 511937 - DNA, 15 bp, Homo sapiens
ttataaatagcactg

SEQ ID NO: 511938 - DNA, 15 bp, Homo sapiens
tataaatagcactga

SEQ ID NO: 511939 - DNA, 15 bp, Homo sapiens
ataaatagcactgat

SEQ ID NO: 511940 - DNA, 15 bp, Homo sapiens
taaatagcactgatc

SEQ ID NO: 511941 - DNA, 15 bp, Homo sapiens
aaatagcactgatct

SEQ ID NO: 511942 - DNA, 15 bp, Homo sapiens
aatagcactgatctg

SEQ ID NO: 511943 - DNA, 15 bp, Homo sapiens
atagcactgatctgg

SEQ ID NO: 511944 - DNA, 15 bp, Homo sapiens
tagcactgatctggc

SEQ ID NO: 511945 - DNA, 15 bp, Homo sapiens
agcactgatctggct

SEQ ID NO: 511946 - DNA, 15 bp, Homo sapiens
gcactgatctggctg

SEQ ID NO: 511947 - DNA, 15 bp, Homo sapiens
cactgatctggctgt

SEQ ID NO: 511948 - DNA, 15 bp, Homo sapiens
actgatctggctgta

SEQ ID NO: 511949 - DNA, 15 bp, Homo sapiens
ctgatctggctgtat

SEQ ID NO: 511950 - DNA, 15 bp, Homo sapiens
tgatctggctgtata

SEQ ID NO: 511951 - DNA, 15 bp, Homo sapiens
gatctggctgtatac

SEQ ID NO: 511952 - DNA, 15 bp, Homo sapiens
atctggctgtatact

SEQ ID NO: 511953 - DNA, 15 bp, Homo sapiens
tctggctgtatactg

SEQ ID NO: 511954 - DNA, 15 bp, Homo sapiens
ctggctgtatactga

SEQ ID NO: 511955 - DNA, 15 bp, Homo sapiens
tggctgtatactgat

SEQ ID NO: 511956 - DNA, 15 bp, Homo sapiens
ggctgtatactgatc

SEQ ID NO: 511957 - DNA, 15 bp, Homo sapiens
gctgtatactgatcc

SEQ ID NO: 511958 - DNA, 15 bp, Homo sapiens
ctgtatactgatcca

SEQ ID NO: 511959 - DNA, 15 bp, Homo sapiens
tgtatactgatccat

SEQ ID NO: 511960 - DNA, 15 bp, Homo sapiens
gtatactgatccatc

SEQ ID NO: 511961 - DNA, 15 bp, Homo sapiens
tatactgatccatca

SEQ ID NO: 511962 - DNA, 15 bp, Homo sapiens
atactgatccatcac

SEQ ID NO: 511963 - DNA, 15 bp, Homo sapiens
tactgatccatcact

SEQ ID NO: 511964 - DNA, 15 bp, Homo sapiens
actgatccatcacta

SEQ ID NO: 511965 - DNA, 15 bp, Homo sapiens
ctgatccatcactaa

SEQ ID NO: 511966 - DNA, 15 bp, Homo sapiens
tgatccatcactaac

SEQ ID NO: 511967 - DNA, 15 bp, Homo sapiens
gatccatcactaacc

SEQ ID NO: 511968 - DNA, 15 bp, Homo sapiens
atccatcactaacct

SEQ ID NO: 511969 - DNA, 15 bp, Homo sapiens
tccatcactaacctg

SEQ ID NO: 511970 - DNA, 15 bp, Homo sapiens
ccatcactaacctgt

SEQ ID NO: 511971 - DNA, 15 bp, Homo sapiens
catcactaacctgtt

SEQ ID NO: 511972 - DNA, 15 bp, Homo sapiens
atcactaacctgttt

SEQ ID NO: 511973 - DNA, 15 bp, Homo sapiens
tcactaacctgtttt

SEQ ID NO: 511974 - DNA, 15 bp, Homo sapiens
cactaacctgttttc

SEQ ID NO: 511975 - DNA, 15 bp, Homo sapiens
actaacctgttttct

SEQ ID NO: 511976 - DNA, 15 bp, Homo sapiens
ctaacctgttttcta

SEQ ID NO: 511977 - DNA, 15 bp, Homo sapiens
taacctgttttctag

SEQ ID NO: 511978 - DNA, 15 bp, Homo sapiens
aacctgttttctagg

SEQ ID NO: 511979 - DNA, 15 bp, Homo sapiens
acctgttttctagga

SEQ ID NO: 511980 - DNA, 15 bp, Homo sapiens
cctgttttctaggac

SEQ ID NO: 511981 - DNA, 15 bp, Homo sapiens
ctgttttctaggacc

SEQ ID NO: 511982 - DNA, 15 bp, Homo sapiens
tgttttctaggaccc

SEQ ID NO: 511983 - DNA, 15 bp, Homo sapiens
gttttctaggaccca

SEQ ID NO: 511984 - DNA, 15 bp, Homo sapiens
ttttctaggacccag

SEQ ID NO: 511985 - DNA, 15 bp, Homo sapiens
tttctaggacccagc

SEQ ID NO: 511986 - DNA, 15 bp, Homo sapiens
ttctaggacccagcg

SEQ ID NO: 511987 - DNA, 15 bp, Homo sapiens
tctaggacccagcgt

SEQ ID NO: 511988 - DNA, 15 bp, Homo sapiens
ctaggacccagcgta

SEQ ID NO: 511989 - DNA, 15 bp, Homo sapiens
taggacccagcgtat

SEQ ID NO: 511990 - DNA, 15 bp, Homo sapiens
aggacccagcgtatg

SEQ ID NO: 511991 - DNA, 15 bp, Homo sapiens
ggacccagcgtatgt

SEQ ID NO: 511992 - DNA, 15 bp, Homo sapiens
gacccagcgtatgta

SEQ ID NO: 511993 - DNA, 15 bp, Homo sapiens
acccagcgtatgtag

SEQ ID NO: 511994 - DNA, 15 bp, Homo sapiens
cccagcgtatgtagc

SEQ ID NO: 511995 - DNA, 15 bp, Homo sapiens
ccagcgtatgtagca

SEQ ID NO: 511996 - DNA, 15 bp, Homo sapiens
cagcgtatgtagcat

SEQ ID NO: 511997 - DNA, 15 bp, Homo sapiens
agcgtatgtagcatt

SEQ ID NO: 511998 - DNA, 15 bp, Homo sapiens
gcgtatgtagcattt

SEQ ID NO: 511999 - DNA, 15 bp, Homo sapiens
cgtatgtagcatttg

SEQ ID NO: 512000 - DNA, 15 bp, Homo sapiens
gtatgtagcatttgt

SEQ ID NO: 512001 - DNA, 15 bp, Homo sapiens
tatgtagcatttgta

SEQ ID NO: 512002 - DNA, 15 bp, Homo sapiens
atgtagcatttgtat

SEQ ID NO: 512003 - DNA, 15 bp, Homo sapiens
tgtagcatttgtatt

SEQ ID NO: 512004 - DNA, 15 bp, Homo sapiens
gtagcatttgtattg

SEQ ID NO: 512005 - DNA, 15 bp, Homo sapiens
tagcatttgtattgc

SEQ ID NO: 512006 - DNA, 15 bp, Homo sapiens
agcatttgtattgca

SEQ ID NO: 512007 - DNA, 15 bp, Homo sapiens
gcatttgtattgcag

SEQ ID NO: 512008 - DNA, 15 bp, Homo sapiens
catttgtattgcagt

SEQ ID NO: 512009 - DNA, 15 bp, Homo sapiens
atttgtattgcagtt

SEQ ID NO: 512010 - DNA, 15 bp, Homo sapiens
tttgtattgcagttt

SEQ ID NO: 512011 - DNA, 15 bp, Homo sapiens
ttgtattgcagtttc

SEQ ID NO: 512012 - DNA, 15 bp, Homo sapiens
tgtattgcagtttcc

SEQ ID NO: 512013 - DNA, 15 bp, Homo sapiens
gtattgcagtttccc

SEQ ID NO: 512014 - DNA, 15 bp, Homo sapiens
tattgcagtttccct

SEQ ID NO: 512015 - DNA, 15 bp, Homo sapiens
attgcagtttccctg

SEQ ID NO: 512016 - DNA, 15 bp, Homo sapiens
ttgcagtttccctgg

SEQ ID NO: 512017 - DNA, 15 bp, Homo sapiens
tgcagtttccctggc

SEQ ID NO: 512018 - DNA, 15 bp, Homo sapiens
gcagtttccctggct

SEQ ID NO: 512019 - DNA, 15 bp, Homo sapiens
cagtttccctggctt

SEQ ID NO: 512020 - DNA, 15 bp, Homo sapiens
agtttccctggctta

SEQ ID NO: 512021 - DNA, 15 bp, Homo sapiens
gtttccctggcttac

SEQ ID NO: 512022 - DNA, 15 bp, Homo sapiens
tttccctggcttact

SEQ ID NO: 512023 - DNA, 15 bp, Homo sapiens
ttccctggcttactt

SEQ ID NO: 512024 - DNA, 15 bp, Homo sapiens
tccctggcttacttg

SEQ ID NO: 512025 - DNA, 15 bp, Homo sapiens
ccctggcttacttgt

SEQ ID NO: 512026 - DNA, 15 bp, Homo sapiens
cctggcttacttgtg

SEQ ID NO: 512027 - DNA, 15 bp, Homo sapiens
ctggcttacttgtgt

SEQ ID NO: 512028 - DNA, 15 bp, Homo sapiens
tggcttacttgtgtt

SEQ ID NO: 512029 - DNA, 15 bp, Homo sapiens
ggcttacttgtgttt

SEQ ID NO: 512030 - DNA, 15 bp, Homo sapiens
gcttacttgtgtttt

SEQ ID NO: 512031 - DNA, 15 bp, Homo sapiens
cttacttgtgttttg

SEQ ID NO: 512032 - DNA, 15 bp, Homo sapiens
ttacttgtgttttgc

SEQ ID NO: 512033 - DNA, 15 bp, Homo sapiens
tacttgtgttttgca

SEQ ID NO: 512034 - DNA, 15 bp, Homo sapiens
acttgtgttttgcac

SEQ ID NO: 512035 - DNA, 15 bp, Homo sapiens
cttgtgttttgcact

SEQ ID NO: 512036 - DNA, 15 bp, Homo sapiens
ttgtgttttgcactg

SEQ ID NO: 512037 - DNA, 15 bp, Homo sapiens
tgtgttttgcactga

SEQ ID NO: 512038 - DNA, 15 bp, Homo sapiens
gtgttttgcactgat

SEQ ID NO: 512039 - DNA, 15 bp, Homo sapiens
tgttttgcactgatg

SEQ ID NO: 512040 - DNA, 15 bp, Homo sapiens
gttttgcactgatga

SEQ ID NO: 512041 - DNA, 15 bp, Homo sapiens
ttttgcactgatgaa

SEQ ID NO: 512042 - DNA, 15 bp, Homo sapiens
tttgcactgatgaat

SEQ ID NO: 512043 - DNA, 15 bp, Homo sapiens
ttgcactgatgaatt

SEQ ID NO: 512044 - DNA, 15 bp, Homo sapiens
tgcactgatgaattt

SEQ ID NO: 512045 - DNA, 15 bp, Homo sapiens
gcactgatgaatttt

SEQ ID NO: 512046 - DNA, 15 bp, Homo sapiens
cactgatgaattttg

SEQ ID NO: 512047 - DNA, 15 bp, Homo sapiens
actgatgaattttga

SEQ ID NO: 512048 - DNA, 15 bp, Homo sapiens
ctgatgaattttgac

SEQ ID NO: 512049 - DNA, 15 bp, Homo sapiens
tgatgaattttgaca

SEQ ID NO: 512050 - DNA, 15 bp, Homo sapiens
gatgaattttgacag

SEQ ID NO: 512051 - DNA, 15 bp, Homo sapiens
atgaattttgacagg

SEQ ID NO: 512052 - DNA, 15 bp, Homo sapiens
tgaattttgacaggg

SEQ ID NO: 512053 - DNA, 15 bp, Homo sapiens
gaattttgacagggt

SEQ ID NO: 512054 - DNA, 15 bp, Homo sapiens
aattttgacagggta

SEQ ID NO: 512055 - DNA, 15 bp, Homo sapiens
attttgacagggtaa

SEQ ID NO: 512056 - DNA, 15 bp, Homo sapiens
ttttgacagggtaat

SEQ ID NO: 512057 - DNA, 15 bp, Homo sapiens
tttgacagggtaatt

SEQ ID NO: 512058 - DNA, 15 bp, Homo sapiens
ttgacagggtaattg

SEQ ID NO: 512059 - DNA, 15 bp, Homo sapiens
tgacagggtaattgc

SEQ ID NO: 512060 - DNA, 15 bp, Homo sapiens
gacagggtaattgcc

SEQ ID NO: 512061 - DNA, 15 bp, Homo sapiens
acagggtaattgcca

SEQ ID NO: 512062 - DNA, 15 bp, Homo sapiens
cagggtaattgccac

SEQ ID NO: 512063 - DNA, 15 bp, Homo sapiens
agggtaattgccact

SEQ ID NO: 512064 - DNA, 15 bp, Homo sapiens
gggtaattgccactt

SEQ ID NO: 512065 - DNA, 15 bp, Homo sapiens
ggtaattgccacttt

SEQ ID NO: 512066 - DNA, 15 bp, Homo sapiens
gtaattgccacttta

SEQ ID NO: 512067 - DNA, 15 bp, Homo sapiens
taattgccactttac

SEQ ID NO: 512068 - DNA, 15 bp, Homo sapiens
aattgccactttact

SEQ ID NO: 512069 - DNA, 15 bp, Homo sapiens
attgccactttactt

SEQ ID NO: 512070 - DNA, 15 bp, Homo sapiens
ttgccactttacttg

SEQ ID NO: 512071 - DNA, 15 bp, Homo sapiens
tgccactttacttgt

SEQ ID NO: 512072 - DNA, 15 bp, Homo sapiens
gccactttacttgtg

SEQ ID NO: 512073 - DNA, 15 bp, Homo sapiens
ccactttacttgtgc

SEQ ID NO: 512074 - DNA, 15 bp, Homo sapiens
cactttacttgtgca

SEQ ID NO: 512075 - DNA, 15 bp, Homo sapiens
actttacttgtgcaa

SEQ ID NO: 512076 - DNA, 15 bp, Homo sapiens
ctttacttgtgcaat

SEQ ID NO: 512077 - DNA, 15 bp, Homo sapiens
tttacttgtgcaata

SEQ ID NO: 512078 - DNA, 15 bp, Homo sapiens
ttacttgtgcaatac

SEQ ID NO: 512079 - DNA, 15 bp, Homo sapiens
tacttgtgcaatact

SEQ ID NO: 512080 - DNA, 15 bp, Homo sapiens
acttgtgcaatactg

SEQ ID NO: 512081 - DNA, 15 bp, Homo sapiens
cttgtgcaatactgc

SEQ ID NO: 512082 - DNA, 15 bp, Homo sapiens
ttgtgcaatactgct

SEQ ID NO: 512083 - DNA, 15 bp, Homo sapiens
tgtgcaatactgctg

SEQ ID NO: 512084 - DNA, 15 bp, Homo sapiens
gtgcaatactgctgt

SEQ ID NO: 512085 - DNA, 15 bp, Homo sapiens
tgcaatactgctgta

SEQ ID NO: 512086 - DNA, 15 bp, Homo sapiens
gcaatactgctgtaa

SEQ ID NO: 512087 - DNA, 15 bp, Homo sapiens
caatactgctgtaaa

SEQ ID NO: 512088 - DNA, 15 bp, Homo sapiens
aatactgctgtaaat

SEQ ID NO: 512089 - DNA, 15 bp, Homo sapiens
atactgctgtaaata

SEQ ID NO: 512090 - DNA, 15 bp, Homo sapiens
tactgctgtaaataa

SEQ ID NO: 512091 - DNA, 15 bp, Homo sapiens
actgctgtaaataac

SEQ ID NO: 512092 - DNA, 15 bp, Homo sapiens
ctgctgtaaataact

SEQ ID NO: 512093 - DNA, 15 bp, Homo sapiens
tgctgtaaataactg

SEQ ID NO: 512094 - DNA, 15 bp, Homo sapiens
gctgtaaataactgc

SEQ ID NO: 512095 - DNA, 15 bp, Homo sapiens
ctgtaaataactgca

SEQ ID NO: 512096 - DNA, 15 bp, Homo sapiens
tgtaaataactgcag

SEQ ID NO: 512097 - DNA, 15 bp, Homo sapiens
gtaaataactgcaga

SEQ ID NO: 512098 - DNA, 15 bp, Homo sapiens
taaataactgcagat

SEQ ID NO: 512099 - DNA, 15 bp, Homo sapiens
aaataactgcagatt

SEQ ID NO: 512100 - DNA, 15 bp, Homo sapiens
aataactgcagattt

SEQ ID NO: 512101 - DNA, 15 bp, Homo sapiens
ataactgcagatttt

SEQ ID NO: 512102 - DNA, 15 bp, Homo sapiens
taactgcagattttt

SEQ ID NO: 512103 - DNA, 15 bp, Homo sapiens
aactgcagattttta

SEQ ID NO: 512104 - DNA, 15 bp, Homo sapiens
actgcagatttttaa

SEQ ID NO: 512105 - DNA, 15 bp, Homo sapiens
ctgcagatttttaaa

SEQ ID NO: 512106 - DNA, 15 bp, Homo sapiens
tgcagatttttaaac

SEQ ID NO: 512107 - DNA, 15 bp, Homo sapiens
gcagatttttaaaca

SEQ ID NO: 512108 - DNA, 15 bp, Homo sapiens
cagatttttaaacaa

SEQ ID NO: 512109 - DNA, 15 bp, Homo sapiens
agatttttaaacaat

SEQ ID NO: 512110 - DNA, 15 bp, Homo sapiens
gatttttaaacaatc

SEQ ID NO: 512111 - DNA, 15 bp, Homo sapiens
atttttaaacaatct

SEQ ID NO: 512112 - DNA, 15 bp, Homo sapiens
tttttaaacaatctt

SEQ ID NO: 512113 - DNA, 15 bp, Homo sapiens
ttttaaacaatcttt

SEQ ID NO: 512114 - DNA, 15 bp, Homo sapiens
tttaaacaatctttt

SEQ ID NO: 512115 - DNA, 15 bp, Homo sapiens
ttaaacaatctttta

SEQ ID NO: 512116 - DNA, 15 bp, Homo sapiens
taaacaatcttttat

SEQ ID NO: 512117 - DNA, 15 bp, Homo sapiens
aaacaatcttttatg

SEQ ID NO: 512118 - DNA, 15 bp, Homo sapiens
aacaatcttttatgt

SEQ ID NO: 512119 - DNA, 15 bp, Homo sapiens
acaatcttttatgtt

SEQ ID NO: 512120 - DNA, 15 bp, Homo sapiens
caatcttttatgtta

SEQ ID NO: 512121 - DNA, 15 bp, Homo sapiens
aatcttttatgttaa

SEQ ID NO: 512122 - DNA, 15 bp, Homo sapiens
atcttttatgttaat

SEQ ID NO: 512123 - DNA, 15 bp, Homo sapiens
tcttttatgttaatt

SEQ ID NO: 512124 - DNA, 15 bp, Homo sapiens
cttttatgttaattt

SEQ ID NO: 512125 - DNA, 15 bp, Homo sapiens
ttttatgttaatttt

SEQ ID NO: 512126 - DNA, 15 bp, Homo sapiens
tttatgttaatttta

SEQ ID NO: 512127 - DNA, 15 bp, Homo sapiens
ttatgttaattttat

SEQ ID NO: 512128 - DNA, 15 bp, Homo sapiens
tatgttaattttata

SEQ ID NO: 512129 - DNA, 15 bp, Homo sapiens
atgttaattttataa

SEQ ID NO: 512130 - DNA, 15 bp, Homo sapiens
tgttaattttataaa

SEQ ID NO: 512131 - DNA, 15 bp, Homo sapiens
gttaattttataaaa

SEQ ID NO: 512132 - DNA, 15 bp, Homo sapiens
ttaattttataaaaa

SEQ ID NO: 512133 - DNA, 15 bp, Homo sapiens
taattttataaaaat

SEQ ID NO: 512134 - DNA, 15 bp, Homo sapiens
aattttataaaaata

SEQ ID NO: 512135 - DNA, 15 bp, Homo sapiens
attttataaaaataa

SEQ ID NO: 512136 - DNA, 15 bp, Homo sapiens
ttttataaaaataaa

SEQ ID NO: 512137 - DNA, 15 bp, Homo sapiens
tttataaaaataaaa

SEQ ID NO: 512138 - DNA, 15 bp, Homo sapiens
ttataaaaataaaac

SEQ ID NO: 512139 - DNA, 15 bp, Homo sapiens
tataaaaataaaact

SEQ ID NO: 512140 - DNA, 15 bp, Homo sapiens
ataaaaataaaactt

SEQ ID NO: 512141 - DNA, 15 bp, Homo sapiens
taaaaataaaacttt

SEQ ID NO: 512142 - DNA, 15 bp, Homo sapiens
aaaaataaaactttc

SEQ ID NO: 512143 - DNA, 15 bp, Homo sapiens
aaaataaaactttca

SEQ ID NO: 512144 - DNA, 15 bp, Homo sapiens
aaataaaactttcaa

SEQ ID NO: 512145 - DNA, 15 bp, Homo sapiens
aataaaactttcaac

SEQ ID NO: 512146 - DNA, 15 bp, Homo sapiens
ataaaactttcaact

SEQ ID NO: 512147 - DNA, 15 bp, Homo sapiens
taaaactttcaacta

SEQ ID NO: 512148 - DNA, 15 bp, Homo sapiens
aaaactttcaactag

SEQ ID NO: 512149 - DNA, 15 bp, Homo sapiens
aaactttcaactagt

SEQ ID NO: 512150 - DNA, 15 bp, Homo sapiens
aactttcaactagtt

SEQ ID NO: 512151 - DNA, 15 bp, Homo sapiens
actttcaactagttt

SEQ ID NO: 512152 - DNA, 15 bp, Homo sapiens
ctttcaactagtttt

SEQ ID NO: 512153 - DNA, 15 bp, Homo sapiens
tttcaactagttttg

SEQ ID NO: 512154 - DNA, 15 bp, Homo sapiens
ttcaactagttttgg

SEQ ID NO: 512155 - DNA, 15 bp, Homo sapiens
tcaactagttttggt

SEQ ID NO: 512156 - DNA, 15 bp, Homo sapiens
caactagttttggtg

SEQ ID NO: 512157 - DNA, 15 bp, Homo sapiens
aactagttttggtga

SEQ ID NO: 512158 - DNA, 15 bp, Homo sapiens
actagttttggtgag

SEQ ID NO: 512159 - DNA, 15 bp, Homo sapiens
ctagttttggtgagc

SEQ ID NO: 512160 - DNA, 15 bp, Homo sapiens
tagttttggtgagcg

SEQ ID NO: 512161 - DNA, 15 bp, Homo sapiens
agttttggtgagcgt

SEQ ID NO: 512162 - DNA, 15 bp, Homo sapiens
gttttggtgagcgtt

SEQ ID NO: 512163 - DNA, 15 bp, Homo sapiens
ttttggtgagcgttt

SEQ ID NO: 512164 - DNA, 15 bp, Homo sapiens
tttggtgagcgtttg

SEQ ID NO: 512165 - DNA, 15 bp, Homo sapiens
ttggtgagcgtttga

SEQ ID NO: 512166 - DNA, 15 bp, Homo sapiens
tggtgagcgtttgat

SEQ ID NO: 512167 - DNA, 15 bp, Homo sapiens
ggtgagcgtttgatt

SEQ ID NO: 512168 - DNA, 15 bp, Homo sapiens
gtgagcgtttgattt

SEQ ID NO: 512169 - DNA, 15 bp, Homo sapiens
tgagcgtttgatttg

SEQ ID NO: 512170 - DNA, 15 bp, Homo sapiens
gagcgtttgatttgt

SEQ ID NO: 512171 - DNA, 15 bp, Homo sapiens
agcgtttgatttgtt

SEQ ID NO: 512172 - DNA, 15 bp, Homo sapiens
gcgtttgatttgttt

SEQ ID NO: 512173 - DNA, 15 bp, Homo sapiens
cgtttgatttgtttg

SEQ ID NO: 512174 - DNA, 15 bp, Homo sapiens
gtttgatttgtttgc

SEQ ID NO: 512175 - DNA, 15 bp, Homo sapiens
tttgatttgtttgca

SEQ ID NO: 512176 - DNA, 15 bp, Homo sapiens
ttgatttgtttgcac

SEQ ID NO: 512177 - DNA, 15 bp, Homo sapiens
tgatttgtttgcaca

SEQ ID NO: 512178 - DNA, 15 bp, Homo sapiens
gatttgtttgcacaa

SEQ ID NO: 512179 - DNA, 15 bp, Homo sapiens
atttgtttgcacaaa

SEQ ID NO: 512180 - DNA, 15 bp, Homo sapiens
tttgtttgcacaaaa

SEQ ID NO: 512181 - DNA, 15 bp, Homo sapiens
ttgtttgcacaaaat

SEQ ID NO: 512182 - DNA, 15 bp, Homo sapiens
tgtttgcacaaaatg

SEQ ID NO: 512183 - DNA, 15 bp, Homo sapiens
gtttgcacaaaatgt

SEQ ID NO: 512184 - DNA, 15 bp, Homo sapiens
tttgcacaaaatgtc

SEQ ID NO: 512185 - DNA, 15 bp, Homo sapiens
ttgcacaaaatgtca

SEQ ID NO: 512186 - DNA, 15 bp, Homo sapiens
tgcacaaaatgtcag

SEQ ID NO: 512187 - DNA, 15 bp, Homo sapiens
gcacaaaatgtcaga

SEQ ID NO: 512188 - DNA, 15 bp, Homo sapiens
cacaaaatgtcagag

SEQ ID NO: 512189 - DNA, 15 bp, Homo sapiens
acaaaatgtcagaga

SEQ ID NO: 512190 - DNA, 15 bp, Homo sapiens
caaaatgtcagagaa

SEQ ID NO: 512191 - DNA, 15 bp, Homo sapiens
aaaatgtcagagaaa

SEQ ID NO: 512192 - DNA, 15 bp, Homo sapiens
aaatgtcagagaaac

SEQ ID NO: 512193 - DNA, 15 bp, Homo sapiens
aatgtcagagaaaca

SEQ ID NO: 512194 - DNA, 15 bp, Homo sapiens
atgtcagagaaacag

SEQ ID NO: 512195 - DNA, 15 bp, Homo sapiens
tgtcagagaaacagc

SEQ ID NO: 512196 - DNA, 15 bp, Homo sapiens
gtcagagaaacagct

SEQ ID NO: 512197 - DNA, 15 bp, Homo sapiens
tcagagaaacagctg

SEQ ID NO: 512198 - DNA, 15 bp, Homo sapiens
cagagaaacagctga

SEQ ID NO: 512199 - DNA, 15 bp, Homo sapiens
agagaaacagctgaa

SEQ ID NO: 512200 - DNA, 15 bp, Homo sapiens
gagaaacagctgaaa

SEQ ID NO: 512201 - DNA, 15 bp, Homo sapiens
agaaacagctgaaat

SEQ ID NO: 512202 - DNA, 15 bp, Homo sapiens
gaaacagctgaaatt

SEQ ID NO: 512203 - DNA, 15 bp, Homo sapiens
aaacagctgaaatta

SEQ ID NO: 512204 - DNA, 15 bp, Homo sapiens
aacagctgaaattat

SEQ ID NO: 512205 - DNA, 15 bp, Homo sapiens
acagctgaaattata

SEQ ID NO: 512206 - DNA, 15 bp, Homo sapiens
cagctgaaattatat

SEQ ID NO: 512207 - DNA, 15 bp, Homo sapiens
agctgaaattatata

SEQ ID NO: 512208 - DNA, 15 bp, Homo sapiens
gctgaaattatatat

SEQ ID NO: 512209 - DNA, 15 bp, Homo sapiens
ctgaaattatatatg

SEQ ID NO: 512210 - DNA, 15 bp, Homo sapiens
tgaaattatatatga

SEQ ID NO: 512211 - DNA, 15 bp, Homo sapiens
gaaattatatatgaa

SEQ ID NO: 512212 - DNA, 15 bp, Homo sapiens
aaattatatatgaac

SEQ ID NO: 512213 - DNA, 15 bp, Homo sapiens
aattatatatgaaca

SEQ ID NO: 512214 - DNA, 15 bp, Homo sapiens
attatatatgaacat

SEQ ID NO: 512215 - DNA, 15 bp, Homo sapiens
ttatatatgaacatg

SEQ ID NO: 512216 - DNA, 15 bp, Homo sapiens
tatatatgaacatgt

SEQ ID NO: 512217 - DNA, 15 bp, Homo sapiens
atatatgaacatgta

SEQ ID NO: 512218 - DNA, 15 bp, Homo sapiens
tatatgaacatgtac

SEQ ID NO: 512219 - DNA, 15 bp, Homo sapiens
atatgaacatgtaca

SEQ ID NO: 512220 - DNA, 15 bp, Homo sapiens
tatgaacatgtacac

SEQ ID NO: 512221 - DNA, 15 bp, Homo sapiens
atgaacatgtacacg

SEQ ID NO: 512222 - DNA, 15 bp, Homo sapiens
tgaacatgtacacgc

SEQ ID NO: 512223 - DNA, 15 bp, Homo sapiens
gaacatgtacacgcc

SEQ ID NO: 512224 - DNA, 15 bp, Homo sapiens
aacatgtacacgccc

SEQ ID NO: 512225 - DNA, 15 bp, Homo sapiens
acatgtacacgccca

SEQ ID NO: 512226 - DNA, 15 bp, Homo sapiens
catgtacacgcccac

SEQ ID NO: 512227 - DNA, 15 bp, Homo sapiens
atgtacacgcccaca

SEQ ID NO: 512228 - DNA, 15 bp, Homo sapiens
tgtacacgcccacac

SEQ ID NO: 512229 - DNA, 15 bp, Homo sapiens
gtacacgcccacaca

SEQ ID NO: 512230 - DNA, 15 bp, Homo sapiens
tacacgcccacacat

SEQ ID NO: 512231 - DNA, 15 bp, Homo sapiens
acacgcccacacatc

SEQ ID NO: 512232 - DNA, 15 bp, Homo sapiens
cacgcccacacatct

SEQ ID NO: 512233 - DNA, 15 bp, Homo sapiens
acgcccacacatctg

SEQ ID NO: 512234 - DNA, 15 bp, Homo sapiens
cgcccacacatctgc

SEQ ID NO: 512235 - DNA, 15 bp, Homo sapiens
gcccacacatctgct

SEQ ID NO: 512236 - DNA, 15 bp, Homo sapiens
cccacacatctgcta

SEQ ID NO: 512237 - DNA, 15 bp, Homo sapiens
ccacacatctgctat

SEQ ID NO: 512238 - DNA, 15 bp, Homo sapiens
cacacatctgctatt

SEQ ID NO: 512239 - DNA, 15 bp, Homo sapiens
acacatctgctatta

SEQ ID NO: 512240 - DNA, 15 bp, Homo sapiens
cacatctgctattat

SEQ ID NO: 512241 - DNA, 15 bp, Homo sapiens
acatctgctattatc

SEQ ID NO: 512242 - DNA, 15 bp, Homo sapiens
catctgctattatca

SEQ ID NO: 512243 - DNA, 15 bp, Homo sapiens
atctgctattatcag

SEQ ID NO: 512244 - DNA, 15 bp, Homo sapiens
tctgctattatcagt

SEQ ID NO: 512245 - DNA, 15 bp, Homo sapiens
ctgctattatcagtc

SEQ ID NO: 512246 - DNA, 15 bp, Homo sapiens
tgctattatcagtca

SEQ ID NO: 512247 - DNA, 15 bp, Homo sapiens
gctattatcagtcat

SEQ ID NO: 512248 - DNA, 15 bp, Homo sapiens
ctattatcagtcata

SEQ ID NO: 512249 - DNA, 15 bp, Homo sapiens
tattatcagtcataa

SEQ ID NO: 512250 - DNA, 15 bp, Homo sapiens
attatcagtcataaa

SEQ ID NO: 512251 - DNA, 15 bp, Homo sapiens
ttatcagtcataaaa

SEQ ID NO: 512252 - DNA, 15 bp, Homo sapiens
tatcagtcataaaat

SEQ ID NO: 512253 - DNA, 15 bp, Homo sapiens
atcagtcataaaatg

SEQ ID NO: 512254 - DNA, 15 bp, Homo sapiens
tcagtcataaaatgt

SEQ ID NO: 512255 - DNA, 15 bp, Homo sapiens
cagtcataaaatgta

SEQ ID NO: 512256 - DNA, 15 bp, Homo sapiens
agtcataaaatgtag

SEQ ID NO: 512257 - DNA, 15 bp, Homo sapiens
gtcataaaatgtagc

SEQ ID NO: 512258 - DNA, 15 bp, Homo sapiens
tcataaaatgtagct

SEQ ID NO: 512259 - DNA, 15 bp, Homo sapiens
cataaaatgtagctg

SEQ ID NO: 512260 - DNA, 15 bp, Homo sapiens
ataaaatgtagctgt

SEQ ID NO: 512261 - DNA, 15 bp, Homo sapiens
taaaatgtagctgtg

SEQ ID NO: 512262 - DNA, 15 bp, Homo sapiens
aaaatgtagctgtgt

SEQ ID NO: 512263 - DNA, 15 bp, Homo sapiens
aaatgtagctgtgtg

SEQ ID NO: 512264 - DNA, 15 bp, Homo sapiens
aatgtagctgtgtgt

SEQ ID NO: 512265 - DNA, 15 bp, Homo sapiens
atgtagctgtgtgta

SEQ ID NO: 512266 - DNA, 15 bp, Homo sapiens
tgtagctgtgtgtag

SEQ ID NO: 512267 - DNA, 15 bp, Homo sapiens
gtagctgtgtgtagc

SEQ ID NO: 512268 - DNA, 15 bp, Homo sapiens
tagctgtgtgtagct

SEQ ID NO: 512269 - DNA, 15 bp, Homo sapiens
agctgtgtgtagctc

SEQ ID NO: 512270 - DNA, 15 bp, Homo sapiens
gctgtgtgtagctca

SEQ ID NO: 512271 - DNA, 15 bp, Homo sapiens
ctgtgtgtagctcat

SEQ ID NO: 512272 - DNA, 15 bp, Homo sapiens
tgtgtgtagctcata

SEQ ID NO: 512273 - DNA, 15 bp, Homo sapiens
gtgtgtagctcatat

SEQ ID NO: 512274 - DNA, 15 bp, Homo sapiens
tgtgtagctcatata

SEQ ID NO: 512275 - DNA, 15 bp, Homo sapiens
gtgtagctcatatat

SEQ ID NO: 512276 - DNA, 15 bp, Homo sapiens
tgtagctcatatatt

SEQ ID NO: 512277 - DNA, 15 bp, Homo sapiens
gtagctcatatattt

SEQ ID NO: 512278 - DNA, 15 bp, Homo sapiens
tagctcatatatttt

SEQ ID NO: 512279 - DNA, 15 bp, Homo sapiens
agctcatatattttt

SEQ ID NO: 512280 - DNA, 15 bp, Homo sapiens
gctcatatatttttg

SEQ ID NO: 512281 - DNA, 15 bp, Homo sapiens
ctcatatatttttgc

SEQ ID NO: 512282 - DNA, 15 bp, Homo sapiens
tcatatatttttgct

SEQ ID NO: 512283 - DNA, 15 bp, Homo sapiens
catatatttttgctt

SEQ ID NO: 512284 - DNA, 15 bp, Homo sapiens
atatatttttgcttg

SEQ ID NO: 512285 - DNA, 15 bp, Homo sapiens
tatatttttgcttga

SEQ ID NO: 512286 - DNA, 15 bp, Homo sapiens
atatttttgcttgaa

SEQ ID NO: 512287 - DNA, 15 bp, Homo sapiens
tatttttgcttgaag

SEQ ID NO: 512288 - DNA, 15 bp, Homo sapiens
atttttgcttgaaga

SEQ ID NO: 512289 - DNA, 15 bp, Homo sapiens
tttttgcttgaagac

SEQ ID NO: 512290 - DNA, 15 bp, Homo sapiens
ttttgcttgaagacg

SEQ ID NO: 512291 - DNA, 15 bp, Homo sapiens
tttgcttgaagacga

SEQ ID NO: 512292 - DNA, 15 bp, Homo sapiens
ttgcttgaagacgaa

SEQ ID NO: 512293 - DNA, 15 bp, Homo sapiens
tgcttgaagacgaat

SEQ ID NO: 512294 - DNA, 15 bp, Homo sapiens
gcttgaagacgaatc

SEQ ID NO: 512295 - DNA, 15 bp, Homo sapiens
cttgaagacgaatcc

SEQ ID NO: 512296 - DNA, 15 bp, Homo sapiens
ttgaagacgaatccg

SEQ ID NO: 512297 - DNA, 15 bp, Homo sapiens
tgaagacgaatccgt

SEQ ID NO: 512298 - DNA, 15 bp, Homo sapiens
gaagacgaatccgtg

SEQ ID NO: 512299 - DNA, 15 bp, Homo sapiens
aagacgaatccgtgc

SEQ ID NO: 512300 - DNA, 15 bp, Homo sapiens
agacgaatccgtgca

SEQ ID NO: 512301 - DNA, 15 bp, Homo sapiens
gacgaatccgtgcag

SEQ ID NO: 512302 - DNA, 15 bp, Homo sapiens
acgaatccgtgcagt

SEQ ID NO: 512303 - DNA, 15 bp, Homo sapiens
cgaatccgtgcagta

SEQ ID NO: 512304 - DNA, 15 bp, Homo sapiens
gaatccgtgcagtac

SEQ ID NO: 512305 - DNA, 15 bp, Homo sapiens
aatccgtgcagtaca

SEQ ID NO: 512306 - DNA, 15 bp, Homo sapiens
atccgtgcagtacac

SEQ ID NO: 512307 - DNA, 15 bp, Homo sapiens
tccgtgcagtacact

SEQ ID NO: 512308 - DNA, 15 bp, Homo sapiens
ccgtgcagtacactt

SEQ ID NO: 512309 - DNA, 15 bp, Homo sapiens
cgtgcagtacactta

SEQ ID NO: 512310 - DNA, 15 bp, Homo sapiens
gtgcagtacacttaa

SEQ ID NO: 512311 - DNA, 15 bp, Homo sapiens
tgcagtacacttaaa

SEQ ID NO: 512312 - DNA, 15 bp, Homo sapiens
gcagtacacttaaaa

SEQ ID NO: 512313 - DNA, 15 bp, Homo sapiens
cagtacacttaaaag

SEQ ID NO: 512314 - DNA, 15 bp, Homo sapiens
agtacacttaaaagt

SEQ ID NO: 512315 - DNA, 15 bp, Homo sapiens
gtacacttaaaagta

SEQ ID NO: 512316 - DNA, 15 bp, Homo sapiens
tacacttaaaagtaa

SEQ ID NO: 512317 - DNA, 15 bp, Homo sapiens
acacttaaaagtaaa

SEQ ID NO: 512318 - DNA, 15 bp, Homo sapiens
cacttaaaagtaaac

SEQ ID NO: 512319 - DNA, 15 bp, Homo sapiens
acttaaaagtaaacg

SEQ ID NO: 512320 - DNA, 15 bp, Homo sapiens
cttaaaagtaaacga

SEQ ID NO: 512321 - DNA, 15 bp, Homo sapiens
ttaaaagtaaacgag

SEQ ID NO: 512322 - DNA, 15 bp, Homo sapiens
taaaagtaaacgagt

SEQ ID NO: 512323 - DNA, 15 bp, Homo sapiens
aaaagtaaacgagtc

SEQ ID NO: 512324 - DNA, 15 bp, Homo sapiens
aaagtaaacgagtct

SEQ ID NO: 512325 - DNA, 15 bp, Homo sapiens
aagtaaacgagtctt

SEQ ID NO: 512326 - DNA, 15 bp, Homo sapiens
agtaaacgagtcttt

SEQ ID NO: 512327 - DNA, 15 bp, Homo sapiens
gtaaacgagtcttta

SEQ ID NO: 512328 - DNA, 15 bp, Homo sapiens
taaacgagtctttaa

SEQ ID NO: 512329 - DNA, 15 bp, Homo sapiens
aaacgagtctttaaa

SEQ ID NO: 512330 - DNA, 15 bp, Homo sapiens
aacgagtctttaaag

SEQ ID NO: 512331 - DNA, 15 bp, Homo sapiens
acgagtctttaaagt

SEQ ID NO: 512332 - DNA, 15 bp, Homo sapiens
cgagtctttaaagtt

SEQ ID NO: 512333 - DNA, 15 bp, Homo sapiens
gagtctttaaagttt

SEQ ID NO: 512334 - DNA, 15 bp, Homo sapiens
agtctttaaagtttt

SEQ ID NO: 512335 - DNA, 15 bp, Homo sapiens
gtctttaaagttttg

SEQ ID NO: 512336 - DNA, 15 bp, Homo sapiens
tctttaaagttttga

SEQ ID NO: 512337 - DNA, 15 bp, Homo sapiens
ctttaaagttttgat

SEQ ID NO: 512338 - DNA, 15 bp, Homo sapiens
tttaaagttttgatg

SEQ ID NO: 512339 - DNA, 15 bp, Homo sapiens
ttaaagttttgatgt

SEQ ID NO: 512340 - DNA, 15 bp, Homo sapiens
taaagttttgatgtg

SEQ ID NO: 512341 - DNA, 15 bp, Homo sapiens
aaagttttgatgtgg

SEQ ID NO: 512342 - DNA, 15 bp, Homo sapiens
aagttttgatgtggc

SEQ ID NO: 512343 - DNA, 15 bp, Homo sapiens
agttttgatgtggct

SEQ ID NO: 512344 - DNA, 15 bp, Homo sapiens
gttttgatgtggctg

SEQ ID NO: 512345 - DNA, 15 bp, Homo sapiens
ttttgatgtggctgg

SEQ ID NO: 512346 - DNA, 15 bp, Homo sapiens
tttgatgtggctggt

SEQ ID NO: 512347 - DNA, 15 bp, Homo sapiens
ttgatgtggctggtg

SEQ ID NO: 512348 - DNA, 15 bp, Homo sapiens
tgatgtggctggtgc

SEQ ID NO: 512349 - DNA, 15 bp, Homo sapiens
gatgtggctggtgcg

SEQ ID NO: 512350 - DNA, 15 bp, Homo sapiens
atgtggctggtgcga

SEQ ID NO: 512351 - DNA, 15 bp, Homo sapiens
tgtggctggtgcgaa

SEQ ID NO: 512352 - DNA, 15 bp, Homo sapiens
gtggctggtgcgaaa

SEQ ID NO: 512353 - DNA, 15 bp, Homo sapiens
tggctggtgcgaaaa

SEQ ID NO: 512354 - DNA, 15 bp, Homo sapiens
ggctggtgcgaaaag

SEQ ID NO: 512355 - DNA, 15 bp, Homo sapiens
gctggtgcgaaaagt

SEQ ID NO: 512356 - DNA, 15 bp, Homo sapiens
ctggtgcgaaaagta

SEQ ID NO: 512357 - DNA, 15 bp, Homo sapiens
tggtgcgaaaagtat

SEQ ID NO: 512358 - DNA, 15 bp, Homo sapiens
ggtgcgaaaagtatt

SEQ ID NO: 512359 - DNA, 15 bp, Homo sapiens
gtgcgaaaagtattc

SEQ ID NO: 512360 - DNA, 15 bp, Homo sapiens
tgcgaaaagtattct

SEQ ID NO: 512361 - DNA, 15 bp, Homo sapiens
gcgaaaagtattctg

SEQ ID NO: 512362 - DNA, 15 bp, Homo sapiens
cgaaaagtattctgc

SEQ ID NO: 512363 - DNA, 15 bp, Homo sapiens
gaaaagtattctgcc

SEQ ID NO: 512364 - DNA, 15 bp, Homo sapiens
aaaagtattctgcct

SEQ ID NO: 512365 - DNA, 15 bp, Homo sapiens
aaagtattctgcctg

SEQ ID NO: 512366 - DNA, 15 bp, Homo sapiens
aagtattctgcctgc

SEQ ID NO: 512367 - DNA, 15 bp, Homo sapiens
agtattctgcctgca

SEQ ID NO: 512368 - DNA, 15 bp, Homo sapiens
gtattctgcctgcac

SEQ ID NO: 512369 - DNA, 15 bp, Homo sapiens
tattctgcctgcaca

SEQ ID NO: 512370 - DNA, 15 bp, Homo sapiens
attctgcctgcacag

SEQ ID NO: 512371 - DNA, 15 bp, Homo sapiens
ttctgcctgcacagt

SEQ ID NO: 512372 - DNA, 15 bp, Homo sapiens
tctgcctgcacagtc

SEQ ID NO: 512373 - DNA, 15 bp, Homo sapiens
ctgcctgcacagtca

SEQ ID NO: 512374 - DNA, 15 bp, Homo sapiens
tgcctgcacagtcag

SEQ ID NO: 512375 - DNA, 15 bp, Homo sapiens
gcctgcacagtcaga

SEQ ID NO: 512376 - DNA, 15 bp, Homo sapiens
cctgcacagtcagat

SEQ ID NO: 512377 - DNA, 15 bp, Homo sapiens
ctgcacagtcagata

SEQ ID NO: 512378 - DNA, 15 bp, Homo sapiens
tgcacagtcagatat

SEQ ID NO: 512379 - DNA, 15 bp, Homo sapiens
gcacagtcagatatg

SEQ ID NO: 512380 - DNA, 15 bp, Homo sapiens
cacagtcagatatga

SEQ ID NO: 512381 - DNA, 15 bp, Homo sapiens
acagtcagatatgac

SEQ ID NO: 512382 - DNA, 15 bp, Homo sapiens
cagtcagatatgact

SEQ ID NO: 512383 - DNA, 15 bp, Homo sapiens
agtcagatatgactc

SEQ ID NO: 512384 - DNA, 15 bp, Homo sapiens
gtcagatatgactca

SEQ ID NO: 512385 - DNA, 15 bp, Homo sapiens
tcagatatgactcag

SEQ ID NO: 512386 - DNA, 15 bp, Homo sapiens
cagatatgactcagc

SEQ ID NO: 512387 - DNA, 15 bp, Homo sapiens
agatatgactcagca

SEQ ID NO: 512388 - DNA, 15 bp, Homo sapiens
gatatgactcagcac

SEQ ID NO: 512389 - DNA, 15 bp, Homo sapiens
atatgactcagcact

SEQ ID NO: 512390 - DNA, 15 bp, Homo sapiens
tatgactcagcactt

SEQ ID NO: 512391 - DNA, 15 bp, Homo sapiens
atgactcagcacttg

SEQ ID NO: 512392 - DNA, 15 bp, Homo sapiens
tgactcagcacttgg

SEQ ID NO: 512393 - DNA, 15 bp, Homo sapiens
gactcagcacttggg

SEQ ID NO: 512394 - DNA, 15 bp, Homo sapiens
actcagcacttgggt

SEQ ID NO: 512395 - DNA, 15 bp, Homo sapiens
ctcagcacttgggtg

SEQ ID NO: 512396 - DNA, 15 bp, Homo sapiens
tcagcacttgggtgg

SEQ ID NO: 512397 - DNA, 15 bp, Homo sapiens
cagcacttgggtggg

SEQ ID NO: 512398 - DNA, 15 bp, Homo sapiens
agcacttgggtgggg

SEQ ID NO: 512399 - DNA, 15 bp, Homo sapiens
gcacttgggtgggga

SEQ ID NO: 512400 - DNA, 15 bp, Homo sapiens
cacttgggtggggag

SEQ ID NO: 512401 - DNA, 15 bp, Homo sapiens
acttgggtggggagt

SEQ ID NO: 512402 - DNA, 15 bp, Homo sapiens
cttgggtggggagtt

SEQ ID NO: 512403 - DNA, 15 bp, Homo sapiens
ttgggtggggagttg

SEQ ID NO: 512404 - DNA, 15 bp, Homo sapiens
tgggtggggagttgt

SEQ ID NO: 512405 - DNA, 15 bp, Homo sapiens
gggtggggagttgtg

SEQ ID NO: 512406 - DNA, 15 bp, Homo sapiens
ggtggggagttgtgg

SEQ ID NO: 512407 - DNA, 15 bp, Homo sapiens
gtggggagttgtggg

SEQ ID NO: 512408 - DNA, 15 bp, Homo sapiens
tggggagttgtgggg

SEQ ID NO: 512409 - DNA, 15 bp, Homo sapiens
ggggagttgtggggg

SEQ ID NO: 512410 - DNA, 15 bp, Homo sapiens
gggagttgtgggggc

SEQ ID NO: 512411 - DNA, 15 bp, Homo sapiens
ggagttgtgggggca

SEQ ID NO: 512412 - DNA, 15 bp, Homo sapiens
gagttgtgggggcag

SEQ ID NO: 512413 - DNA, 15 bp, Homo sapiens
agttgtgggggcagg

SEQ ID NO: 512414 - DNA, 15 bp, Homo sapiens
gttgtgggggcaggg

SEQ ID NO: 512415 - DNA, 15 bp, Homo sapiens
ttgtgggggcaggga

SEQ ID NO: 512416 - DNA, 15 bp, Homo sapiens
tgtgggggcagggaa

SEQ ID NO: 512417 - DNA, 15 bp, Homo sapiens
gtgggggcagggaag

SEQ ID NO: 512418 - DNA, 15 bp, Homo sapiens
tgggggcagggaagt

SEQ ID NO: 512419 - DNA, 15 bp, Homo sapiens
gggggcagggaagtg

SEQ ID NO: 512420 - DNA, 15 bp, Homo sapiens
ggggcagggaagtgt

SEQ ID NO: 512421 - DNA, 15 bp, Homo sapiens
gggcagggaagtgta

SEQ ID NO: 512422 - DNA, 15 bp, Homo sapiens
ggcagggaagtgtac

SEQ ID NO: 512423 - DNA, 15 bp, Homo sapiens
gcagggaagtgtact

SEQ ID NO: 512424 - DNA, 15 bp, Homo sapiens
cagggaagtgtacta

SEQ ID NO: 512425 - DNA, 15 bp, Homo sapiens
agggaagtgtactag

SEQ ID NO: 512426 - DNA, 15 bp, Homo sapiens
gggaagtgtactagg

SEQ ID NO: 512427 - DNA, 15 bp, Homo sapiens
ggaagtgtactagga

SEQ ID NO: 512428 - DNA, 15 bp, Homo sapiens
gaagtgtactaggag

SEQ ID NO: 512429 - DNA, 15 bp, Homo sapiens
aagtgtactaggagc

SEQ ID NO: 512430 - DNA, 15 bp, Homo sapiens
agtgtactaggagcc

SEQ ID NO: 512431 - DNA, 15 bp, Homo sapiens
gtgtactaggagccg

SEQ ID NO: 512432 - DNA, 15 bp, Homo sapiens
tgtactaggagccgg

SEQ ID NO: 512433 - DNA, 15 bp, Homo sapiens
gtactaggagccggc

SEQ ID NO: 512434 - DNA, 15 bp, Homo sapiens
tactaggagccggct

SEQ ID NO: 512435 - DNA, 15 bp, Homo sapiens
actaggagccggctc

SEQ ID NO: 512436 - DNA, 15 bp, Homo sapiens
ctaggagccggctct

SEQ ID NO: 512437 - DNA, 15 bp, Homo sapiens
taggagccggctctg

SEQ ID NO: 512438 - DNA, 15 bp, Homo sapiens
aggagccggctctgt

SEQ ID NO: 512439 - DNA, 15 bp, Homo sapiens
ggagccggctctgta

SEQ ID NO: 512440 - DNA, 15 bp, Homo sapiens
gagccggctctgtac

SEQ ID NO: 512441 - DNA, 15 bp, Homo sapiens
agccggctctgtact

SEQ ID NO: 512442 - DNA, 15 bp, Homo sapiens
gccggctctgtactg

SEQ ID NO: 512443 - DNA, 15 bp, Homo sapiens
ccggctctgtactgt

SEQ ID NO: 512444 - DNA, 15 bp, Homo sapiens
cggctctgtactgtg

SEQ ID NO: 512445 - DNA, 15 bp, Homo sapiens
ggctctgtactgtgt

SEQ ID NO: 512446 - DNA, 15 bp, Homo sapiens
gctctgtactgtgtt

SEQ ID NO: 512447 - DNA, 15 bp, Homo sapiens
ctctgtactgtgttg

SEQ ID NO: 512448 - DNA, 15 bp, Homo sapiens
tctgtactgtgttga

SEQ ID NO: 512449 - DNA, 15 bp, Homo sapiens
ctgtactgtgttgat

SEQ ID NO: 512450 - DNA, 15 bp, Homo sapiens
tgtactgtgttgatg

SEQ ID NO: 512451 - DNA, 15 bp, Homo sapiens
gtactgtgttgatga

SEQ ID NO: 512452 - DNA, 15 bp, Homo sapiens
tactgtgttgatgag

SEQ ID NO: 512453 - DNA, 15 bp, Homo sapiens
actgtgttgatgagt

SEQ ID NO: 512454 - DNA, 15 bp, Homo sapiens
ctgtgttgatgagtg

SEQ ID NO: 512455 - DNA, 15 bp, Homo sapiens
tgtgttgatgagtga

SEQ ID NO: 512456 - DNA, 15 bp, Homo sapiens
gtgttgatgagtgat

SEQ ID NO: 512457 - DNA, 15 bp, Homo sapiens
tgttgatgagtgata

SEQ ID NO: 512458 - DNA, 15 bp, Homo sapiens
gttgatgagtgatat

SEQ ID NO: 512459 - DNA, 15 bp, Homo sapiens
ttgatgagtgatatg

SEQ ID NO: 512460 - DNA, 15 bp, Homo sapiens
tgatgagtgatatgg

SEQ ID NO: 512461 - DNA, 15 bp, Homo sapiens
gatgagtgatatggc

SEQ ID NO: 512462 - DNA, 15 bp, Homo sapiens
atgagtgatatggca

SEQ ID NO: 512463 - DNA, 15 bp, Homo sapiens
tgagtgatatggcag

SEQ ID NO: 512464 - DNA, 15 bp, Homo sapiens
gagtgatatggcagg

SEQ ID NO: 512465 - DNA, 15 bp, Homo sapiens
agtgatatggcaggt

SEQ ID NO: 512466 - DNA, 15 bp, Homo sapiens
gtgatatggcaggtg

SEQ ID NO: 512467 - DNA, 15 bp, Homo sapiens
tgatatggcaggtgc

SEQ ID NO: 512468 - DNA, 15 bp, Homo sapiens
gatatggcaggtgcc

SEQ ID NO: 512469 - DNA, 15 bp, Homo sapiens
atatggcaggtgccc

SEQ ID NO: 512470 - DNA, 15 bp, Homo sapiens
tatggcaggtgccca

SEQ ID NO: 512471 - DNA, 15 bp, Homo sapiens
atggcaggtgcccag

SEQ ID NO: 512472 - DNA, 15 bp, Homo sapiens
tggcaggtgcccagc

SEQ ID NO: 512473 - DNA, 15 bp, Homo sapiens
ggcaggtgcccagcc

SEQ ID NO: 512474 - DNA, 15 bp, Homo sapiens
gcaggtgcccagcca

SEQ ID NO: 512475 - DNA, 15 bp, Homo sapiens
caggtgcccagccat

SEQ ID NO: 512476 - DNA, 15 bp, Homo sapiens
aggtgcccagccatc

SEQ ID NO: 512477 - DNA, 15 bp, Homo sapiens
ggtgcccagccatct

SEQ ID NO: 512478 - DNA, 15 bp, Homo sapiens
gtgcccagccatctt

SEQ ID NO: 512479 - DNA, 15 bp, Homo sapiens
tgcccagccatctta

SEQ ID NO: 512480 - DNA, 15 bp, Homo sapiens
gcccagccatcttac

SEQ ID NO: 512481 - DNA, 15 bp, Homo sapiens
cccagccatcttacc

SEQ ID NO: 512482 - DNA, 15 bp, Homo sapiens
ccagccatcttaccc

SEQ ID NO: 512483 - DNA, 15 bp, Homo sapiens
cagccatcttacccc

SEQ ID NO: 512484 - DNA, 15 bp, Homo sapiens
agccatcttacccca

SEQ ID NO: 512485 - DNA, 15 bp, Homo sapiens
gccatcttaccccat

SEQ ID NO: 512486 - DNA, 15 bp, Homo sapiens
ccatcttaccccatc

SEQ ID NO: 512487 - DNA, 15 bp, Homo sapiens
catcttaccccatca

SEQ ID NO: 512488 - DNA, 15 bp, Homo sapiens
atcttaccccatcaa

SEQ ID NO: 512489 - DNA, 15 bp, Homo sapiens
tcttaccccatcaac

SEQ ID NO: 512490 - DNA, 15 bp, Homo sapiens
cttaccccatcaacc

SEQ ID NO: 512491 - DNA, 15 bp, Homo sapiens
ttaccccatcaaccc

SEQ ID NO: 512492 - DNA, 15 bp, Homo sapiens
taccccatcaacccc

SEQ ID NO: 512493 - DNA, 15 bp, Homo sapiens
accccatcaacccca

SEQ ID NO: 512494 - DNA, 15 bp, Homo sapiens
ccccatcaaccccat

SEQ ID NO: 512495 - DNA, 15 bp, Homo sapiens
cccatcaaccccata

SEQ ID NO: 512496 - DNA, 15 bp, Homo sapiens
ccatcaaccccataa

SEQ ID NO: 512497 - DNA, 15 bp, Homo sapiens
catcaaccccataat

SEQ ID NO: 512498 - DNA, 15 bp, Homo sapiens
atcaaccccataata

SEQ ID NO: 512499 - DNA, 15 bp, Homo sapiens
tcaaccccataatag

SEQ ID NO: 512500 - DNA, 15 bp, Homo sapiens
caaccccataataga

SEQ ID NO: 512501 - DNA, 15 bp, Homo sapiens
aaccccataatagaa

SEQ ID NO: 512502 - DNA, 15 bp, Homo sapiens
accccataatagaaa

SEQ ID NO: 512503 - DNA, 15 bp, Homo sapiens
ccccataatagaaag

SEQ ID NO: 512504 - DNA, 15 bp, Homo sapiens
cccataatagaaagg

SEQ ID NO: 512505 - DNA, 15 bp, Homo sapiens
ccataatagaaaggg

SEQ ID NO: 512506 - DNA, 15 bp, Homo sapiens
cataatagaaagggc

SEQ ID NO: 512507 - DNA, 15 bp, Homo sapiens
ataatagaaagggct

SEQ ID NO: 512508 - DNA, 15 bp, Homo sapiens
taatagaaagggctt

SEQ ID NO: 512509 - DNA, 15 bp, Homo sapiens
aatagaaagggcttg

SEQ ID NO: 512510 - DNA, 15 bp, Homo sapiens
atagaaagggcttgt

SEQ ID NO: 512511 - DNA, 15 bp, Homo sapiens
tagaaagggcttgtc

SEQ ID NO: 512512 - DNA, 15 bp, Homo sapiens
agaaagggcttgtct

SEQ ID NO: 512513 - DNA, 15 bp, Homo sapiens
gaaagggcttgtctg

SEQ ID NO: 512514 - DNA, 15 bp, Homo sapiens
aaagggcttgtctgc

SEQ ID NO: 512515 - DNA, 15 bp, Homo sapiens
aagggcttgtctgca

SEQ ID NO: 512516 - DNA, 15 bp, Homo sapiens
agggcttgtctgcag

SEQ ID NO: 512517 - DNA, 15 bp, Homo sapiens
gggcttgtctgcagc

SEQ ID NO: 512518 - DNA, 15 bp, Homo sapiens
ggcttgtctgcagca

SEQ ID NO: 512519 - DNA, 15 bp, Homo sapiens
gcttgtctgcagcac

SEQ ID NO: 512520 - DNA, 15 bp, Homo sapiens
cttgtctgcagcacc

SEQ ID NO: 512521 - DNA, 15 bp, Homo sapiens
ttgtctgcagcacct

SEQ ID NO: 512522 - DNA, 15 bp, Homo sapiens
tgtctgcagcacctg

SEQ ID NO: 512523 - DNA, 15 bp, Homo sapiens
gtctgcagcacctgc

SEQ ID NO: 512524 - DNA, 15 bp, Homo sapiens
tctgcagcacctgct

SEQ ID NO: 512525 - DNA, 15 bp, Homo sapiens
ctgcagcacctgctc

SEQ ID NO: 512526 - DNA, 15 bp, Homo sapiens
tgcagcacctgctca

SEQ ID NO: 512527 - DNA, 15 bp, Homo sapiens
gcagcacctgctcag

SEQ ID NO: 512528 - DNA, 15 bp, Homo sapiens
cagcacctgctcagg

SEQ ID NO: 512529 - DNA, 15 bp, Homo sapiens
agcacctgctcaggg

SEQ ID NO: 512530 - DNA, 15 bp, Homo sapiens
gcacctgctcagggt

SEQ ID NO: 512531 - DNA, 15 bp, Homo sapiens
cacctgctcagggtc

SEQ ID NO: 512532 - DNA, 15 bp, Homo sapiens
acctgctcagggtca

SEQ ID NO: 512533 - DNA, 15 bp, Homo sapiens
cctgctcagggtcaa

SEQ ID NO: 512534 - DNA, 15 bp, Homo sapiens
ctgctcagggtcaaa

SEQ ID NO: 512535 - DNA, 15 bp, Homo sapiens
tgctcagggtcaaag

SEQ ID NO: 512536 - DNA, 15 bp, Homo sapiens
gctcagggtcaaagg

SEQ ID NO: 512537 - DNA, 15 bp, Homo sapiens
ctcagggtcaaaggg

SEQ ID NO: 512538 - DNA, 15 bp, Homo sapiens
tcagggtcaaagggg

SEQ ID NO: 512539 - DNA, 15 bp, Homo sapiens
cagggtcaaaggggt

SEQ ID NO: 512540 - DNA, 15 bp, Homo sapiens
agggtcaaaggggtc

SEQ ID NO: 512541 - DNA, 15 bp, Homo sapiens
gggtcaaaggggtca

SEQ ID NO: 512542 - DNA, 15 bp, Homo sapiens
ggtcaaaggggtcac

SEQ ID NO: 512543 - DNA, 15 bp, Homo sapiens
gtcaaaggggtcacc

SEQ ID NO: 512544 - DNA, 15 bp, Homo sapiens
tcaaaggggtcaccc

SEQ ID NO: 512545 - DNA, 15 bp, Homo sapiens
caaaggggtcaccca

SEQ ID NO: 512546 - DNA, 15 bp, Homo sapiens
aaaggggtcacccaa

SEQ ID NO: 512547 - DNA, 15 bp, Homo sapiens
aaggggtcacccaaa

SEQ ID NO: 512548 - DNA, 15 bp, Homo sapiens
aggggtcacccaaac

SEQ ID NO: 512549 - DNA, 15 bp, Homo sapiens
ggggtcacccaaacg

SEQ ID NO: 512550 - DNA, 15 bp, Homo sapiens
gggtcacccaaacgt

SEQ ID NO: 512551 - DNA, 15 bp, Homo sapiens
ggtcacccaaacgtg

SEQ ID NO: 512552 - DNA, 15 bp, Homo sapiens
gtcacccaaacgtgc

SEQ ID NO: 512553 - DNA, 15 bp, Homo sapiens
tcacccaaacgtgcc

SEQ ID NO: 512554 - DNA, 15 bp, Homo sapiens
cacccaaacgtgcct

SEQ ID NO: 512555 - DNA, 15 bp, Homo sapiens
acccaaacgtgccta

SEQ ID NO: 512556 - DNA, 15 bp, Homo sapiens
cccaaacgtgcctag

SEQ ID NO: 512557 - DNA, 15 bp, Homo sapiens
ccaaacgtgcctaga

SEQ ID NO: 512558 - DNA, 15 bp, Homo sapiens
caaacgtgcctagac

SEQ ID NO: 512559 - DNA, 15 bp, Homo sapiens
aaacgtgcctagacc

SEQ ID NO: 512560 - DNA, 15 bp, Homo sapiens
aacgtgcctagaccc

SEQ ID NO: 512561 - DNA, 15 bp, Homo sapiens
acgtgcctagaccct

SEQ ID NO: 512562 - DNA, 15 bp, Homo sapiens
cgtgcctagaccctg

SEQ ID NO: 512563 - DNA, 15 bp, Homo sapiens
gtgcctagaccctgt

SEQ ID NO: 512564 - DNA, 15 bp, Homo sapiens
tgcctagaccctgtg

SEQ ID NO: 512565 - DNA, 15 bp, Homo sapiens
gcctagaccctgtgt

SEQ ID NO: 512566 - DNA, 15 bp, Homo sapiens
cctagaccctgtgtg

SEQ ID NO: 512567 - DNA, 15 bp, Homo sapiens
ctagaccctgtgtgt

SEQ ID NO: 512568 - DNA, 15 bp, Homo sapiens
tagaccctgtgtgtg

SEQ ID NO: 512569 - DNA, 15 bp, Homo sapiens
agaccctgtgtgtga

SEQ ID NO: 512570 - DNA, 15 bp, Homo sapiens
gaccctgtgtgtgaa

SEQ ID NO: 512571 - DNA, 15 bp, Homo sapiens
accctgtgtgtgaaa

SEQ ID NO: 512572 - DNA, 15 bp, Homo sapiens
ccctgtgtgtgaaat

SEQ ID NO: 512573 - DNA, 15 bp, Homo sapiens
cctgtgtgtgaaatg

SEQ ID NO: 512574 - DNA, 15 bp, Homo sapiens
ctgtgtgtgaaatga

SEQ ID NO: 512575 - DNA, 15 bp, Homo sapiens
tgtgtgtgaaatgat

SEQ ID NO: 512576 - DNA, 15 bp, Homo sapiens
gtgtgtgaaatgatg

SEQ ID NO: 512577 - DNA, 15 bp, Homo sapiens
tgtgtgaaatgatga

SEQ ID NO: 512578 - DNA, 15 bp, Homo sapiens
gtgtgaaatgatgac

SEQ ID NO: 512579 - DNA, 15 bp, Homo sapiens
tgtgaaatgatgacc

SEQ ID NO: 512580 - DNA, 15 bp, Homo sapiens
gtgaaatgatgacca

SEQ ID NO: 512581 - DNA, 15 bp, Homo sapiens
tgaaatgatgaccag

SEQ ID NO: 512582 - DNA, 15 bp, Homo sapiens
gaaatgatgaccagg

SEQ ID NO: 512583 - DNA, 15 bp, Homo sapiens
aaatgatgaccagga

SEQ ID NO: 512584 - DNA, 15 bp, Homo sapiens
aatgatgaccaggaa

SEQ ID NO: 512585 - DNA, 15 bp, Homo sapiens
atgatgaccaggaac

SEQ ID NO: 512586 - DNA, 15 bp, Homo sapiens
tgatgaccaggaacc

SEQ ID NO: 512587 - DNA, 15 bp, Homo sapiens
gatgaccaggaaccg

SEQ ID NO: 512588 - DNA, 15 bp, Homo sapiens
atgaccaggaaccgc

SEQ ID NO: 512589 - DNA, 15 bp, Homo sapiens
tgaccaggaaccgcc

SEQ ID NO: 512590 - DNA, 15 bp, Homo sapiens
gaccaggaaccgcca

SEQ ID NO: 512591 - DNA, 15 bp, Homo sapiens
accaggaaccgccaa

SEQ ID NO: 512592 - DNA, 15 bp, Homo sapiens
ccaggaaccgccaag

SEQ ID NO: 512593 - DNA, 15 bp, Homo sapiens
caggaaccgccaagt

SEQ ID NO: 512594 - DNA, 15 bp, Homo sapiens
aggaaccgccaagtt

SEQ ID NO: 512595 - DNA, 15 bp, Homo sapiens
ggaaccgccaagttc

SEQ ID NO: 512596 - DNA, 15 bp, Homo sapiens
gaaccgccaagttcc

SEQ ID NO: 512597 - DNA, 15 bp, Homo sapiens
aaccgccaagttccc

SEQ ID NO: 512598 - DNA, 15 bp, Homo sapiens
accgccaagttccca

SEQ ID NO: 512599 - DNA, 15 bp, Homo sapiens
ccgccaagttcccag

SEQ ID NO: 512600 - DNA, 15 bp, Homo sapiens
cgccaagttcccagc

SEQ ID NO: 512601 - DNA, 15 bp, Homo sapiens
gccaagttcccagct

SEQ ID NO: 512602 - DNA, 15 bp, Homo sapiens
ccaagttcccagctc

SEQ ID NO: 512603 - DNA, 15 bp, Homo sapiens
caagttcccagctcc

SEQ ID NO: 512604 - DNA, 15 bp, Homo sapiens
aagttcccagctccc

SEQ ID NO: 512605 - DNA, 15 bp, Homo sapiens
agttcccagctcccg

SEQ ID NO: 512606 - DNA, 15 bp, Homo sapiens
gttcccagctcccgt

SEQ ID NO: 512607 - DNA, 15 bp, Homo sapiens
ttcccagctcccgtc

SEQ ID NO: 512608 - DNA, 15 bp, Homo sapiens
tcccagctcccgtca

SEQ ID NO: 512609 - DNA, 15 bp, Homo sapiens
cccagctcccgtcat

SEQ ID NO: 512610 - DNA, 15 bp, Homo sapiens
ccagctcccgtcatg

SEQ ID NO: 512611 - DNA, 15 bp, Homo sapiens
cagctcccgtcatgt

SEQ ID NO: 512612 - DNA, 15 bp, Homo sapiens
agctcccgtcatgta

SEQ ID NO: 512613 - DNA, 15 bp, Homo sapiens
gctcccgtcatgtag

SEQ ID NO: 512614 - DNA, 15 bp, Homo sapiens
ctcccgtcatgtagg

SEQ ID NO: 512615 - DNA, 15 bp, Homo sapiens
tcccgtcatgtaggg

SEQ ID NO: 512616 - DNA, 15 bp, Homo sapiens
cccgtcatgtagggt

SEQ ID NO: 512617 - DNA, 15 bp, Homo sapiens
ccgtcatgtagggtg

SEQ ID NO: 512618 - DNA, 15 bp, Homo sapiens
cgtcatgtagggtgg

SEQ ID NO: 512619 - DNA, 15 bp, Homo sapiens
gtcatgtagggtgga

SEQ ID NO: 512620 - DNA, 15 bp, Homo sapiens
tcatgtagggtggat

SEQ ID NO: 512621 - DNA, 15 bp, Homo sapiens
catgtagggtggatg

SEQ ID NO: 512622 - DNA, 15 bp, Homo sapiens
atgtagggtggatgg

SEQ ID NO: 512623 - DNA, 15 bp, Homo sapiens
tgtagggtggatggg

SEQ ID NO: 512624 - DNA, 15 bp, Homo sapiens
gtagggtggatggga

SEQ ID NO: 512625 - DNA, 15 bp, Homo sapiens
tagggtggatgggaa

SEQ ID NO: 512626 - DNA, 15 bp, Homo sapiens
agggtggatgggaat

SEQ ID NO: 512627 - DNA, 15 bp, Homo sapiens
gggtggatgggaatt

SEQ ID NO: 512628 - DNA, 15 bp, Homo sapiens
ggtggatgggaattg

SEQ ID NO: 512629 - DNA, 15 bp, Homo sapiens
gtggatgggaattgc

SEQ ID NO: 512630 - DNA, 15 bp, Homo sapiens
tggatgggaattgcc

SEQ ID NO: 512631 - DNA, 15 bp, Homo sapiens
ggatgggaattgcct

SEQ ID NO: 512632 - DNA, 15 bp, Homo sapiens
gatgggaattgcctt

SEQ ID NO: 512633 - DNA, 15 bp, Homo sapiens
atgggaattgcctta

SEQ ID NO: 512634 - DNA, 15 bp, Homo sapiens
tgggaattgccttag

SEQ ID NO: 512635 - DNA, 15 bp, Homo sapiens
gggaattgccttagg

SEQ ID NO: 512636 - DNA, 15 bp, Homo sapiens
ggaattgccttagga

SEQ ID NO: 512637 - DNA, 15 bp, Homo sapiens
gaattgccttaggaa

SEQ ID NO: 512638 - DNA, 15 bp, Homo sapiens
aattgccttaggaat

SEQ ID NO: 512639 - DNA, 15 bp, Homo sapiens
attgccttaggaatg

SEQ ID NO: 512640 - DNA, 15 bp, Homo sapiens
ttgccttaggaatga

SEQ ID NO: 512641 - DNA, 15 bp, Homo sapiens
tgccttaggaatgag

SEQ ID NO: 512642 - DNA, 15 bp, Homo sapiens
gccttaggaatgagt

SEQ ID NO: 512643 - DNA, 15 bp, Homo sapiens
ccttaggaatgagtg

SEQ ID NO: 512644 - DNA, 15 bp, Homo sapiens
cttaggaatgagtga

SEQ ID NO: 512645 - DNA, 15 bp, Homo sapiens
ttaggaatgagtgaa

SEQ ID NO: 512646 - DNA, 15 bp, Homo sapiens
taggaatgagtgaaa

SEQ ID NO: 512647 - DNA, 15 bp, Homo sapiens
aggaatgagtgaaag

SEQ ID NO: 512648 - DNA, 15 bp, Homo sapiens
ggaatgagtgaaaga

SEQ ID NO: 512649 - DNA, 15 bp, Homo sapiens
gaatgagtgaaagaa

SEQ ID NO: 512650 - DNA, 15 bp, Homo sapiens
aatgagtgaaagaaa

SEQ ID NO: 512651 - DNA, 15 bp, Homo sapiens
atgagtgaaagaaat

SEQ ID NO: 512652 - DNA, 15 bp, Homo sapiens
tgagtgaaagaaatt

SEQ ID NO: 512653 - DNA, 15 bp, Homo sapiens
gagtgaaagaaatta

SEQ ID NO: 512654 - DNA, 15 bp, Homo sapiens
agtgaaagaaattaa

SEQ ID NO: 512655 - DNA, 15 bp, Homo sapiens
gtgaaagaaattaaa

SEQ ID NO: 512656 - DNA, 15 bp, Homo sapiens
tgaaagaaattaaag

SEQ ID NO: 512657 - DNA, 15 bp, Homo sapiens
gaaagaaattaaagc

SEQ ID NO: 512658 - DNA, 15 bp, Homo sapiens
aaagaaattaaagcc

SEQ ID NO: 512659 - DNA, 15 bp, Homo sapiens
aagaaattaaagcct

SEQ ID NO: 512660 - DNA, 15 bp, Homo sapiens
agaaattaaagcctg

SEQ ID NO: 512661 - DNA, 15 bp, Homo sapiens
gaaattaaagcctgg

SEQ ID NO: 512662 - DNA, 15 bp, Homo sapiens
aaattaaagcctggt

SEQ ID NO: 512663 - DNA, 15 bp, Homo sapiens
aattaaagcctggtt

SEQ ID NO: 512664 - DNA, 15 bp, Homo sapiens
attaaagcctggttt

SEQ ID NO: 512665 - DNA, 15 bp, Homo sapiens
ttaaagcctggtttg

SEQ ID NO: 512666 - DNA, 15 bp, Homo sapiens
taaagcctggtttgg

SEQ ID NO: 512667 - DNA, 15 bp, Homo sapiens
aaagcctggtttggg

SEQ ID NO: 512668 - DNA, 15 bp, Homo sapiens
aagcctggtttgggg

SEQ ID NO: 512669 - DNA, 15 bp, Homo sapiens
agcctggtttgggga

SEQ ID NO: 512670 - DNA, 15 bp, Homo sapiens
gcctggtttggggat

SEQ ID NO: 512671 - DNA, 15 bp, Homo sapiens
cctggtttggggata

SEQ ID NO: 512672 - DNA, 15 bp, Homo sapiens
ctggtttggggatac

SEQ ID NO: 512673 - DNA, 15 bp, Homo sapiens
tggtttggggataca

SEQ ID NO: 512674 - DNA, 15 bp, Homo sapiens
ggtttggggatacag

SEQ ID NO: 512675 - DNA, 15 bp, Homo sapiens
gtttggggatacagg

SEQ ID NO: 512676 - DNA, 15 bp, Homo sapiens
tttggggatacaggt

SEQ ID NO: 512677 - DNA, 15 bp, Homo sapiens
ttggggatacaggtg

SEQ ID NO: 512678 - DNA, 15 bp, Homo sapiens
tggggatacaggtga

SEQ ID NO: 512679 - DNA, 15 bp, Homo sapiens
ggggatacaggtgat

SEQ ID NO: 512680 - DNA, 15 bp, Homo sapiens
gggatacaggtgata

SEQ ID NO: 512681 - DNA, 15 bp, Homo sapiens
ggatacaggtgataa

SEQ ID NO: 512682 - DNA, 15 bp, Homo sapiens
gatacaggtgataaa

SEQ ID NO: 512683 - DNA, 15 bp, Homo sapiens
atacaggtgataaaa

SEQ ID NO: 512684 - DNA, 15 bp, Homo sapiens
tacaggtgataaaat

SEQ ID NO: 512685 - DNA, 15 bp, Homo sapiens
acaggtgataaaatc

SEQ ID NO: 512686 - DNA, 15 bp, Homo sapiens
caggtgataaaatcc

SEQ ID NO: 512687 - DNA, 15 bp, Homo sapiens
aggtgataaaatcct

SEQ ID NO: 512688 - DNA, 15 bp, Homo sapiens
ggtgataaaatccta

SEQ ID NO: 512689 - DNA, 15 bp, Homo sapiens
gtgataaaatcctaa

SEQ ID NO: 512690 - DNA, 15 bp, Homo sapiens
tgataaaatcctaat

SEQ ID NO: 512691 - DNA, 15 bp, Homo sapiens
gataaaatcctaata

SEQ ID NO: 512692 - DNA, 15 bp, Homo sapiens
ataaaatcctaataa

SEQ ID NO: 512693 - DNA, 15 bp, Homo sapiens
taaaatcctaataag

SEQ ID NO: 512694 - DNA, 15 bp, Homo sapiens
aaaatcctaataagt

SEQ ID NO: 512695 - DNA, 15 bp, Homo sapiens
aaatcctaataagta

SEQ ID NO: 512696 - DNA, 15 bp, Homo sapiens
aatcctaataagtat

SEQ ID NO: 512697 - DNA, 15 bp, Homo sapiens
atcctaataagtatt

SEQ ID NO: 512698 - DNA, 15 bp, Homo sapiens
tcctaataagtattt

SEQ ID NO: 512699 - DNA, 15 bp, Homo sapiens
cctaataagtattta

SEQ ID NO: 512700 - DNA, 15 bp, Homo sapiens
ctaataagtatttaa

SEQ ID NO: 512701 - DNA, 15 bp, Homo sapiens
taataagtatttaat

SEQ ID NO: 512702 - DNA, 15 bp, Homo sapiens
aataagtatttaatt

SEQ ID NO: 512703 - DNA, 15 bp, Homo sapiens
ataagtatttaattt

SEQ ID NO: 512704 - DNA, 15 bp, Homo sapiens
taagtatttaatttg

SEQ ID NO: 512705 - DNA, 15 bp, Homo sapiens
aagtatttaatttgg

SEQ ID NO: 512706 - DNA, 15 bp, Homo sapiens
agtatttaatttggc

SEQ ID NO: 512707 - DNA, 15 bp, Homo sapiens
gtatttaatttggca

SEQ ID NO: 512708 - DNA, 15 bp, Homo sapiens
tatttaatttggcac

SEQ ID NO: 512709 - DNA, 15 bp, Homo sapiens
atttaatttggcact

SEQ ID NO: 512710 - DNA, 15 bp, Homo sapiens
tttaatttggcactt

SEQ ID NO: 512711 - DNA, 15 bp, Homo sapiens
ttaatttggcacttt

SEQ ID NO: 512712 - DNA, 15 bp, Homo sapiens
taatttggcactttc

SEQ ID NO: 512713 - DNA, 15 bp, Homo sapiens
aatttggcactttca

SEQ ID NO: 512714 - DNA, 15 bp, Homo sapiens
atttggcactttcac

SEQ ID NO: 512715 - DNA, 15 bp, Homo sapiens
tttggcactttcacc

SEQ ID NO: 512716 - DNA, 15 bp, Homo sapiens
ttggcactttcaccc

SEQ ID NO: 512717 - DNA, 15 bp, Homo sapiens
tggcactttcaccct

SEQ ID NO: 512718 - DNA, 15 bp, Homo sapiens
ggcactttcacccta

SEQ ID NO: 512719 - DNA, 15 bp, Homo sapiens
gcactttcaccctaa

SEQ ID NO: 512720 - DNA, 15 bp, Homo sapiens
cactttcaccctaag

SEQ ID NO: 512721 - DNA, 15 bp, Homo sapiens
actttcaccctaagt

SEQ ID NO: 512722 - DNA, 15 bp, Homo sapiens
ctttcaccctaagtg

SEQ ID NO: 512723 - DNA, 15 bp, Homo sapiens
tttcaccctaagtgc

SEQ ID NO: 512724 - DNA, 15 bp, Homo sapiens
ttcaccctaagtgct

SEQ ID NO: 512725 - DNA, 15 bp, Homo sapiens
tcaccctaagtgctg

SEQ ID NO: 512726 - DNA, 15 bp, Homo sapiens
caccctaagtgctgg

SEQ ID NO: 512727 - DNA, 15 bp, Homo sapiens
accctaagtgctggg

SEQ ID NO: 512728 - DNA, 15 bp, Homo sapiens
ccctaagtgctggga

SEQ ID NO: 512729 - DNA, 15 bp, Homo sapiens
cctaagtgctgggaa

SEQ ID NO: 512730 - DNA, 15 bp, Homo sapiens
ctaagtgctgggaaa

SEQ ID NO: 512731 - DNA, 15 bp, Homo sapiens
taagtgctgggaaag

SEQ ID NO: 512732 - DNA, 15 bp, Homo sapiens
aagtgctgggaaagt

SEQ ID NO: 512733 - DNA, 15 bp, Homo sapiens
agtgctgggaaagtg

SEQ ID NO: 512734 - DNA, 15 bp, Homo sapiens
gtgctgggaaagtga

SEQ ID NO: 512735 - DNA, 15 bp, Homo sapiens
tgctgggaaagtgaa

SEQ ID NO: 512736 - DNA, 15 bp, Homo sapiens
gctgggaaagtgaaa

SEQ ID NO: 512737 - DNA, 15 bp, Homo sapiens
ctgggaaagtgaaag

SEQ ID NO: 512738 - DNA, 15 bp, Homo sapiens
tgggaaagtgaaaga

SEQ ID NO: 512739 - DNA, 15 bp, Homo sapiens
gggaaagtgaaagac

SEQ ID NO: 512740 - DNA, 15 bp, Homo sapiens
ggaaagtgaaagaca

SEQ ID NO: 512741 - DNA, 15 bp, Homo sapiens
gaaagtgaaagacag

SEQ ID NO: 512742 - DNA, 15 bp, Homo sapiens
aaagtgaaagacaga

SEQ ID NO: 512743 - DNA, 15 bp, Homo sapiens
aagtgaaagacagac

SEQ ID NO: 512744 - DNA, 15 bp, Homo sapiens
agtgaaagacagact

SEQ ID NO: 512745 - DNA, 15 bp, Homo sapiens
gtgaaagacagactc

SEQ ID NO: 512746 - DNA, 15 bp, Homo sapiens
tgaaagacagactca

SEQ ID NO: 512747 - DNA, 15 bp, Homo sapiens
gaaagacagactcag

SEQ ID NO: 512748 - DNA, 15 bp, Homo sapiens
aaagacagactcagc

SEQ ID NO: 512749 - DNA, 15 bp, Homo sapiens
aagacagactcagct

SEQ ID NO: 512750 - DNA, 15 bp, Homo sapiens
agacagactcagctt

SEQ ID NO: 512751 - DNA, 15 bp, Homo sapiens
gacagactcagcttt

SEQ ID NO: 512752 - DNA, 15 bp, Homo sapiens
acagactcagctttc

SEQ ID NO: 512753 - DNA, 15 bp, Homo sapiens
cagactcagctttct

SEQ ID NO: 512754 - DNA, 15 bp, Homo sapiens
agactcagctttctt

SEQ ID NO: 512755 - DNA, 15 bp, Homo sapiens
gactcagctttcttt

SEQ ID NO: 512756 - DNA, 15 bp, Homo sapiens
actcagctttctttt

SEQ ID NO: 512757 - DNA, 15 bp, Homo sapiens
ctcagctttctttta

SEQ ID NO: 512758 - DNA, 15 bp, Homo sapiens
tcagctttcttttag

SEQ ID NO: 512759 - DNA, 15 bp, Homo sapiens
cagctttcttttaga

SEQ ID NO: 512760 - DNA, 15 bp, Homo sapiens
agctttcttttagac

SEQ ID NO: 512761 - DNA, 15 bp, Homo sapiens
gctttcttttagact

SEQ ID NO: 512762 - DNA, 15 bp, Homo sapiens
ctttcttttagacta

SEQ ID NO: 512763 - DNA, 15 bp, Homo sapiens
tttcttttagactaa

SEQ ID NO: 512764 - DNA, 15 bp, Homo sapiens
ttcttttagactaac

SEQ ID NO: 512765 - DNA, 15 bp, Homo sapiens
tcttttagactaaca

SEQ ID NO: 512766 - DNA, 15 bp, Homo sapiens
cttttagactaacaa

SEQ ID NO: 512767 - DNA, 15 bp, Homo sapiens
ttttagactaacaat

SEQ ID NO: 512768 - DNA, 15 bp, Homo sapiens
tttagactaacaatc

SEQ ID NO: 512769 - DNA, 15 bp, Homo sapiens
ttagactaacaatct

SEQ ID NO: 512770 - DNA, 15 bp, Homo sapiens
tagactaacaatctg

SEQ ID NO: 512771 - DNA, 15 bp, Homo sapiens
agactaacaatctgt

SEQ ID NO: 512772 - DNA, 15 bp, Homo sapiens
gactaacaatctgtt

SEQ ID NO: 512773 - DNA, 15 bp, Homo sapiens
actaacaatctgtta

SEQ ID NO: 512774 - DNA, 15 bp, Homo sapiens
ctaacaatctgttaa

SEQ ID NO: 512775 - DNA, 15 bp, Homo sapiens
taacaatctgttaat

SEQ ID NO: 512776 - DNA, 15 bp, Homo sapiens
aacaatctgttaatg

SEQ ID NO: 512777 - DNA, 15 bp, Homo sapiens
acaatctgttaatgc

SEQ ID NO: 512778 - DNA, 15 bp, Homo sapiens
caatctgttaatgct

SEQ ID NO: 512779 - DNA, 15 bp, Homo sapiens
aatctgttaatgctt

SEQ ID NO: 512780 - DNA, 15 bp, Homo sapiens
atctgttaatgcttt

SEQ ID NO: 512781 - DNA, 15 bp, Homo sapiens
tctgttaatgctttc

SEQ ID NO: 512782 - DNA, 15 bp, Homo sapiens
ctgttaatgctttca

SEQ ID NO: 512783 - DNA, 15 bp, Homo sapiens
tgttaatgctttcaa

SEQ ID NO: 512784 - DNA, 15 bp, Homo sapiens
gttaatgctttcaat

SEQ ID NO: 512785 - DNA, 15 bp, Homo sapiens
ttaatgctttcaatc

SEQ ID NO: 512786 - DNA, 15 bp, Homo sapiens
taatgctttcaatcg

SEQ ID NO: 512787 - DNA, 15 bp, Homo sapiens
aatgctttcaatcgg

SEQ ID NO: 512788 - DNA, 15 bp, Homo sapiens
atgctttcaatcggg

SEQ ID NO: 512789 - DNA, 15 bp, Homo sapiens
tgctttcaatcgggt

SEQ ID NO: 512790 - DNA, 15 bp, Homo sapiens
gctttcaatcgggtg

SEQ ID NO: 512791 - DNA, 15 bp, Homo sapiens
ctttcaatcgggtga

SEQ ID NO: 512792 - DNA, 15 bp, Homo sapiens
tttcaatcgggtgag

SEQ ID NO: 512793 - DNA, 15 bp, Homo sapiens
ttcaatcgggtgagt

SEQ ID NO: 512794 - DNA, 15 bp, Homo sapiens
tcaatcgggtgagta

SEQ ID NO: 512795 - DNA, 15 bp, Homo sapiens
caatcgggtgagtaa

SEQ ID NO: 512796 - DNA, 15 bp, Homo sapiens
aatcgggtgagtaat

SEQ ID NO: 512797 - DNA, 15 bp, Homo sapiens
atcgggtgagtaata

SEQ ID NO: 512798 - DNA, 15 bp, Homo sapiens
tcgggtgagtaatac

SEQ ID NO: 512799 - DNA, 15 bp, Homo sapiens
cgggtgagtaataca

SEQ ID NO: 512800 - DNA, 15 bp, Homo sapiens
gggtgagtaatacat

SEQ ID NO: 512801 - DNA, 15 bp, Homo sapiens
ggtgagtaatacatg

SEQ ID NO: 512802 - DNA, 15 bp, Homo sapiens
gtgagtaatacatga

SEQ ID NO: 512803 - DNA, 15 bp, Homo sapiens
tgagtaatacatgaa

SEQ ID NO: 512804 - DNA, 15 bp, Homo sapiens
gagtaatacatgaat

SEQ ID NO: 512805 - DNA, 15 bp, Homo sapiens
agtaatacatgaata

SEQ ID NO: 512806 - DNA, 15 bp, Homo sapiens
gtaatacatgaatat

SEQ ID NO: 512807 - DNA, 15 bp, Homo sapiens
taatacatgaatatg

SEQ ID NO: 512808 - DNA, 15 bp, Homo sapiens
aatacatgaatatgg

SEQ ID NO: 512809 - DNA, 15 bp, Homo sapiens
atacatgaatatggt

SEQ ID NO: 512810 - DNA, 15 bp, Homo sapiens
tacatgaatatggtc

SEQ ID NO: 512811 - DNA, 15 bp, Homo sapiens
acatgaatatggtct

SEQ ID NO: 512812 - DNA, 15 bp, Homo sapiens
catgaatatggtctt

SEQ ID NO: 512813 - DNA, 15 bp, Homo sapiens
atgaatatggtcttg

SEQ ID NO: 512814 - DNA, 15 bp, Homo sapiens
tgaatatggtcttgt

SEQ ID NO: 512815 - DNA, 15 bp, Homo sapiens
gaatatggtcttgta

SEQ ID NO: 512816 - DNA, 15 bp, Homo sapiens
aatatggtcttgtaa

SEQ ID NO: 512817 - DNA, 15 bp, Homo sapiens
atatggtcttgtaaa

SEQ ID NO: 512818 - DNA, 15 bp, Homo sapiens
tatggtcttgtaaat

SEQ ID NO: 512819 - DNA, 15 bp, Homo sapiens
atggtcttgtaaatt

SEQ ID NO: 512820 - DNA, 15 bp, Homo sapiens
tggtcttgtaaattt

SEQ ID NO: 512821 - DNA, 15 bp, Homo sapiens
ggtcttgtaaattta

SEQ ID NO: 512822 - DNA, 15 bp, Homo sapiens
gtcttgtaaatttat

SEQ ID NO: 512823 - DNA, 15 bp, Homo sapiens
tcttgtaaatttatt

SEQ ID NO: 512824 - DNA, 15 bp, Homo sapiens
cttgtaaatttattt

SEQ ID NO: 512825 - DNA, 15 bp, Homo sapiens
ttgtaaatttatttc

SEQ ID NO: 512826 - DNA, 15 bp, Homo sapiens
tgtaaatttatttca

SEQ ID NO: 512827 - DNA, 15 bp, Homo sapiens
gtaaatttatttcaa

SEQ ID NO: 512828 - DNA, 15 bp, Homo sapiens
taaatttatttcaaa

SEQ ID NO: 512829 - DNA, 15 bp, Homo sapiens
aaatttatttcaaat

SEQ ID NO: 512830 - DNA, 15 bp, Homo sapiens
aatttatttcaaatt

SEQ ID NO: 512831 - DNA, 15 bp, Homo sapiens
atttatttcaaattg

SEQ ID NO: 512832 - DNA, 15 bp, Homo sapiens
tttatttcaaattgt

SEQ ID NO: 512833 - DNA, 15 bp, Homo sapiens
ttatttcaaattgta

SEQ ID NO: 512834 - DNA, 15 bp, Homo sapiens
tatttcaaattgtat

SEQ ID NO: 512835 - DNA, 15 bp, Homo sapiens
atttcaaattgtatt

SEQ ID NO: 512836 - DNA, 15 bp, Homo sapiens
tttcaaattgtattt

SEQ ID NO: 512837 - DNA, 15 bp, Homo sapiens
ttcaaattgtatttg

SEQ ID NO: 512838 - DNA, 15 bp, Homo sapiens
tcaaattgtatttgt

SEQ ID NO: 512839 - DNA, 15 bp, Homo sapiens
caaattgtatttgtt

SEQ ID NO: 512840 - DNA, 15 bp, Homo sapiens
aaattgtatttgttt

SEQ ID NO: 512841 - DNA, 15 bp, Homo sapiens
aattgtatttgtttc

SEQ ID NO: 512842 - DNA, 15 bp, Homo sapiens
attgtatttgtttca

SEQ ID NO: 512843 - DNA, 15 bp, Homo sapiens
ttgtatttgtttcaa

SEQ ID NO: 512844 - DNA, 15 bp, Homo sapiens
tgtatttgtttcaaa

SEQ ID NO: 512845 - DNA, 15 bp, Homo sapiens
gtatttgtttcaaat

SEQ ID NO: 512846 - DNA, 15 bp, Homo sapiens
tatttgtttcaaatc

SEQ ID NO: 512847 - DNA, 15 bp, Homo sapiens
atttgtttcaaatca

SEQ ID NO: 512848 - DNA, 15 bp, Homo sapiens
tttgtttcaaatcaa

SEQ ID NO: 512849 - DNA, 15 bp, Homo sapiens
ttgtttcaaatcaaa

SEQ ID NO: 512850 - DNA, 15 bp, Homo sapiens
tgtttcaaatcaaat

SEQ ID NO: 512851 - DNA, 15 bp, Homo sapiens
gtttcaaatcaaatt

SEQ ID NO: 512852 - DNA, 15 bp, Homo sapiens
tttcaaatcaaattg

SEQ ID NO: 512853 - DNA, 15 bp, Homo sapiens
ttcaaatcaaattgt

SEQ ID NO: 512854 - DNA, 15 bp, Homo sapiens
tcaaatcaaattgtt

SEQ ID NO: 512855 - DNA, 15 bp, Homo sapiens
caaatcaaattgttc

SEQ ID NO: 512856 - DNA, 15 bp, Homo sapiens
aaatcaaattgttct

SEQ ID NO: 512857 - DNA, 15 bp, Homo sapiens
aatcaaattgttctg

SEQ ID NO: 512858 - DNA, 15 bp, Homo sapiens
atcaaattgttctgt

SEQ ID NO: 512859 - DNA, 15 bp, Homo sapiens
tcaaattgttctgtc

SEQ ID NO: 512860 - DNA, 15 bp, Homo sapiens
caaattgttctgtct

SEQ ID NO: 512861 - DNA, 15 bp, Homo sapiens
aaattgttctgtctt

SEQ ID NO: 512862 - DNA, 15 bp, Homo sapiens
aattgttctgtctta

SEQ ID NO: 512863 - DNA, 15 bp, Homo sapiens
attgttctgtcttaa

SEQ ID NO: 512864 - DNA, 15 bp, Homo sapiens
ttgttctgtcttaat

SEQ ID NO: 512865 - DNA, 15 bp, Homo sapiens
tgttctgtcttaatc

SEQ ID NO: 512866 - DNA, 15 bp, Homo sapiens
gttctgtcttaatcc

SEQ ID NO: 512867 - DNA, 15 bp, Homo sapiens
ttctgtcttaatcct

SEQ ID NO: 512868 - DNA, 15 bp, Homo sapiens
tctgtcttaatccta

SEQ ID NO: 512869 - DNA, 15 bp, Homo sapiens
ctgtcttaatcctac

SEQ ID NO: 512870 - DNA, 15 bp, Homo sapiens
tgtcttaatcctacc

SEQ ID NO: 512871 - DNA, 15 bp, Homo sapiens
gtcttaatcctacct

SEQ ID NO: 512872 - DNA, 15 bp, Homo sapiens
tcttaatcctacctc

SEQ ID NO: 512873 - DNA, 15 bp, Homo sapiens
cttaatcctacctcc

SEQ ID NO: 512874 - DNA, 15 bp, Homo sapiens
ttaatcctacctcct

SEQ ID NO: 512875 - DNA, 15 bp, Homo sapiens
taatcctacctcctc

SEQ ID NO: 512876 - DNA, 15 bp, Homo sapiens
aatcctacctcctca

SEQ ID NO: 512877 - DNA, 15 bp, Homo sapiens
atcctacctcctcac

SEQ ID NO: 512878 - DNA, 15 bp, Homo sapiens
tcctacctcctcact

SEQ ID NO: 512879 - DNA, 15 bp, Homo sapiens
cctacctcctcactg

SEQ ID NO: 512880 - DNA, 15 bp, Homo sapiens
ctacctcctcactga

SEQ ID NO: 512881 - DNA, 15 bp, Homo sapiens
tacctcctcactgag

SEQ ID NO: 512882 - DNA, 15 bp, Homo sapiens
acctcctcactgagg

SEQ ID NO: 512883 - DNA, 15 bp, Homo sapiens
cctcctcactgaggt

SEQ ID NO: 512884 - DNA, 15 bp, Homo sapiens
ctcctcactgaggta

SEQ ID NO: 512885 - DNA, 15 bp, Homo sapiens
tcctcactgaggtag

SEQ ID NO: 512886 - DNA, 15 bp, Homo sapiens
cctcactgaggtagg

SEQ ID NO: 512887 - DNA, 15 bp, Homo sapiens
ctcactgaggtagga

SEQ ID NO: 512888 - DNA, 15 bp, Homo sapiens
tcactgaggtaggag

SEQ ID NO: 512889 - DNA, 15 bp, Homo sapiens
cactgaggtaggagt

SEQ ID NO: 512890 - DNA, 15 bp, Homo sapiens
actgaggtaggagtt

SEQ ID NO: 512891 - DNA, 15 bp, Homo sapiens
ctgaggtaggagttt

SEQ ID NO: 512892 - DNA, 15 bp, Homo sapiens
tgaggtaggagtttg

SEQ ID NO: 512893 - DNA, 15 bp, Homo sapiens
gaggtaggagtttgc

SEQ ID NO: 512894 - DNA, 15 bp, Homo sapiens
aggtaggagtttgca

SEQ ID NO: 512895 - DNA, 15 bp, Homo sapiens
ggtaggagtttgcat

SEQ ID NO: 512896 - DNA, 15 bp, Homo sapiens
gtaggagtttgcatt

SEQ ID NO: 512897 - DNA, 15 bp, Homo sapiens
taggagtttgcattc

SEQ ID NO: 512898 - DNA, 15 bp, Homo sapiens
aggagtttgcattct

SEQ ID NO: 512899 - DNA, 15 bp, Homo sapiens
ggagtttgcattctc

SEQ ID NO: 512900 - DNA, 15 bp, Homo sapiens
gagtttgcattctcc

SEQ ID NO: 512901 - DNA, 15 bp, Homo sapiens
agtttgcattctcct

SEQ ID NO: 512902 - DNA, 15 bp, Homo sapiens
gtttgcattctcctg

SEQ ID NO: 512903 - DNA, 15 bp, Homo sapiens
tttgcattctcctgg

SEQ ID NO: 512904 - DNA, 15 bp, Homo sapiens
ttgcattctcctgga

SEQ ID NO: 512905 - DNA, 15 bp, Homo sapiens
tgcattctcctggac

SEQ ID NO: 512906 - DNA, 15 bp, Homo sapiens
gcattctcctggact

SEQ ID NO: 512907 - DNA, 15 bp, Homo sapiens
cattctcctggactc

SEQ ID NO: 512908 - DNA, 15 bp, Homo sapiens
attctcctggactct

SEQ ID NO: 512909 - DNA, 15 bp, Homo sapiens
ttctcctggactctt

SEQ ID NO: 512910 - DNA, 15 bp, Homo sapiens
tctcctggactctta

SEQ ID NO: 512911 - DNA, 15 bp, Homo sapiens
ctcctggactcttaa

SEQ ID NO: 512912 - DNA, 15 bp, Homo sapiens
tcctggactcttaat

SEQ ID NO: 512913 - DNA, 15 bp, Homo sapiens
cctggactcttaatc

SEQ ID NO: 512914 - DNA, 15 bp, Homo sapiens
ctggactcttaatct

SEQ ID NO: 512915 - DNA, 15 bp, Homo sapiens
tggactcttaatctg

SEQ ID NO: 512916 - DNA, 15 bp, Homo sapiens
ggactcttaatctgc

SEQ ID NO: 512917 - DNA, 15 bp, Homo sapiens
gactcttaatctgca

SEQ ID NO: 512918 - DNA, 15 bp, Homo sapiens
actcttaatctgcag

SEQ ID NO: 512919 - DNA, 15 bp, Homo sapiens
ctcttaatctgcagt

SEQ ID NO: 512920 - DNA, 15 bp, Homo sapiens
tcttaatctgcagtg

SEQ ID NO: 512921 - DNA, 15 bp, Homo sapiens
cttaatctgcagtgt

SEQ ID NO: 512922 - DNA, 15 bp, Homo sapiens
ttaatctgcagtgtg

SEQ ID NO: 512923 - DNA, 15 bp, Homo sapiens
taatctgcagtgtgt

SEQ ID NO: 512924 - DNA, 15 bp, Homo sapiens
aatctgcagtgtgtg

SEQ ID NO: 512925 - DNA, 15 bp, Homo sapiens
atctgcagtgtgtgt

SEQ ID NO: 512926 - DNA, 15 bp, Homo sapiens
tctgcagtgtgtgtg

SEQ ID NO: 512927 - DNA, 15 bp, Homo sapiens
ctgcagtgtgtgtgt

SEQ ID NO: 512928 - DNA, 15 bp, Homo sapiens
tgcagtgtgtgtgtg

SEQ ID NO: 512929 - DNA, 15 bp, Homo sapiens
gcagtgtgtgtgtgt

SEQ ID NO: 512930 - DNA, 15 bp, Homo sapiens
cagtgtgtgtgtgtg

SEQ ID NO: 512931 - DNA, 15 bp, Homo sapiens
agtgtgtgtgtgtgt

SEQ ID NO: 512932 - DNA, 15 bp, Homo sapiens
gtgtgtgtgtgtgtg

SEQ ID NO: 512933 - DNA, 15 bp, Homo sapiens
tgtgtgtgtgtgtgt

SEQ ID NO: 512934 - DNA, 15 bp, Homo sapiens
tgtgtgtgtgttgtg

SEQ ID NO: 512935 - DNA, 15 bp, Homo sapiens
gtgtgtgtgttgtgt

SEQ ID NO: 512936 - DNA, 15 bp, Homo sapiens
tgtgtgtgttgtgtg

SEQ ID NO: 512937 - DNA, 15 bp, Homo sapiens
gtgtgtgttgtgtgt

SEQ ID NO: 512938 - DNA, 15 bp, Homo sapiens
tgtgtgttgtgtgta

SEQ ID NO: 512939 - DNA, 15 bp, Homo sapiens
gtgtgttgtgtgtac

SEQ ID NO: 512940 - DNA, 15 bp, Homo sapiens
tgtgttgtgtgtact

SEQ ID NO: 512941 - DNA, 15 bp, Homo sapiens
gtgttgtgtgtactc

SEQ ID NO: 512942 - DNA, 15 bp, Homo sapiens
tgttgtgtgtactca

SEQ ID NO: 512943 - DNA, 15 bp, Homo sapiens
gttgtgtgtactcac

SEQ ID NO: 512944 - DNA, 15 bp, Homo sapiens
ttgtgtgtactcaca

SEQ ID NO: 512945 - DNA, 15 bp, Homo sapiens
tgtgtgtactcacac

SEQ ID NO: 512946 - DNA, 15 bp, Homo sapiens
gtgtgtactcacaca

SEQ ID NO: 512947 - DNA, 15 bp, Homo sapiens
tgtgtactcacacag

SEQ ID NO: 512948 - DNA, 15 bp, Homo sapiens
gtgtactcacacagc

SEQ ID NO: 512949 - DNA, 15 bp, Homo sapiens
tgtactcacacagca

SEQ ID NO: 512950 - DNA, 15 bp, Homo sapiens
gtactcacacagcag

SEQ ID NO: 512951 - DNA, 15 bp, Homo sapiens
tactcacacagcagt

SEQ ID NO: 512952 - DNA, 15 bp, Homo sapiens
actcacacagcagtt

SEQ ID NO: 512953 - DNA, 15 bp, Homo sapiens
ctcacacagcagttt

SEQ ID NO: 512954 - DNA, 15 bp, Homo sapiens
tcacacagcagtttt

SEQ ID NO: 512955 - DNA, 15 bp, Homo sapiens
cacacagcagttttg

SEQ ID NO: 512956 - DNA, 15 bp, Homo sapiens
acacagcagttttgc

SEQ ID NO: 512957 - DNA, 15 bp, Homo sapiens
cacagcagttttgct

SEQ ID NO: 512958 - DNA, 15 bp, Homo sapiens
acagcagttttgctt

SEQ ID NO: 512959 - DNA, 15 bp, Homo sapiens
cagcagttttgcttt

SEQ ID NO: 512960 - DNA, 15 bp, Homo sapiens
agcagttttgctttt

SEQ ID NO: 512961 - DNA, 15 bp, Homo sapiens
gcagttttgcttttc

SEQ ID NO: 512962 - DNA, 15 bp, Homo sapiens
cagttttgcttttct

SEQ ID NO: 512963 - DNA, 15 bp, Homo sapiens
agttttgcttttctg

SEQ ID NO: 512964 - DNA, 15 bp, Homo sapiens
gttttgcttttctgt

SEQ ID NO: 512965 - DNA, 15 bp, Homo sapiens
ttttgcttttctgta

SEQ ID NO: 512966 - DNA, 15 bp, Homo sapiens
tttgcttttctgtaa

SEQ ID NO: 512967 - DNA, 15 bp, Homo sapiens
ttgcttttctgtaag

SEQ ID NO: 512968 - DNA, 15 bp, Homo sapiens
tgcttttctgtaagt

SEQ ID NO: 512969 - DNA, 15 bp, Homo sapiens
gcttttctgtaagtg

SEQ ID NO: 512970 - DNA, 15 bp, Homo sapiens
cttttctgtaagtgc

SEQ ID NO: 512971 - DNA, 15 bp, Homo sapiens
ttttctgtaagtgcc

SEQ ID NO: 512972 - DNA, 15 bp, Homo sapiens
tttctgtaagtgcca

SEQ ID NO: 512973 - DNA, 15 bp, Homo sapiens
ttctgtaagtgccat

SEQ ID NO: 512974 - DNA, 15 bp, Homo sapiens
tctgtaagtgccata

SEQ ID NO: 512975 - DNA, 15 bp, Homo sapiens
ctgtaagtgccatag

SEQ ID NO: 512976 - DNA, 15 bp, Homo sapiens
tgtaagtgccatagc

SEQ ID NO: 512977 - DNA, 15 bp, Homo sapiens
gtaagtgccatagct

SEQ ID NO: 512978 - DNA, 15 bp, Homo sapiens
taagtgccatagctc

SEQ ID NO: 512979 - DNA, 15 bp, Homo sapiens
aagtgccatagctct

SEQ ID NO: 512980 - DNA, 15 bp, Homo sapiens
agtgccatagctctg

SEQ ID NO: 512981 - DNA, 15 bp, Homo sapiens
gtgccatagctctgt

SEQ ID NO: 512982 - DNA, 15 bp, Homo sapiens
tgccatagctctgta

SEQ ID NO: 512983 - DNA, 15 bp, Homo sapiens
gccatagctctgtat

SEQ ID NO: 512984 - DNA, 15 bp, Homo sapiens
ccatagctctgtata

SEQ ID NO: 512985 - DNA, 15 bp, Homo sapiens
catagctctgtatat

SEQ ID NO: 512986 - DNA, 15 bp, Homo sapiens
atagctctgtatatg

SEQ ID NO: 512987 - DNA, 15 bp, Homo sapiens
tagctctgtatatgg

SEQ ID NO: 512988 - DNA, 15 bp, Homo sapiens
agctctgtatatggt

SEQ ID NO: 512989 - DNA, 15 bp, Homo sapiens
gctctgtatatggtt

SEQ ID NO: 512990 - DNA, 15 bp, Homo sapiens
ctctgtatatggttc

SEQ ID NO: 512991 - DNA, 15 bp, Homo sapiens
tctgtatatggttct

SEQ ID NO: 512992 - DNA, 15 bp, Homo sapiens
ctgtatatggttctg

SEQ ID NO: 512993 - DNA, 15 bp, Homo sapiens
tgtatatggttctga

SEQ ID NO: 512994 - DNA, 15 bp, Homo sapiens
gtatatggttctgac

SEQ ID NO: 512995 - DNA, 15 bp, Homo sapiens
tatatggttctgact

SEQ ID NO: 512996 - DNA, 15 bp, Homo sapiens
atatggttctgactt

SEQ ID NO: 512997 - DNA, 15 bp, Homo sapiens
tatggttctgactta

SEQ ID NO: 512998 - DNA, 15 bp, Homo sapiens
atggttctgacttag

SEQ ID NO: 512999 - DNA, 15 bp, Homo sapiens
tggttctgacttagc

SEQ ID NO: 513000 - DNA, 15 bp, Homo sapiens
ggttctgacttagca

SEQ ID NO: 513001 - DNA, 15 bp, Homo sapiens
gttctgacttagcaa

SEQ ID NO: 513002 - DNA, 15 bp, Homo sapiens
ttctgacttagcaat

SEQ ID NO: 513003 - DNA, 15 bp, Homo sapiens
tctgacttagcaata

SEQ ID NO: 513004 - DNA, 15 bp, Homo sapiens
ctgacttagcaatag

SEQ ID NO: 513005 - DNA, 15 bp, Homo sapiens
tgacttagcaatagg

SEQ ID NO: 513006 - DNA, 15 bp, Homo sapiens
gacttagcaataggt

SEQ ID NO: 513007 - DNA, 15 bp, Homo sapiens
acttagcaataggtc

SEQ ID NO: 513008 - DNA, 15 bp, Homo sapiens
cttagcaataggtca

SEQ ID NO: 513009 - DNA, 15 bp, Homo sapiens
ttagcaataggtcac

SEQ ID NO: 513010 - DNA, 15 bp, Homo sapiens
tagcaataggtcaca

SEQ ID NO: 513011 - DNA, 15 bp, Homo sapiens
agcaataggtcacat

SEQ ID NO: 513012 - DNA, 15 bp, Homo sapiens
gcaataggtcacata

SEQ ID NO: 513013 - DNA, 15 bp, Homo sapiens
caataggtcacatat

SEQ ID NO: 513014 - DNA, 15 bp, Homo sapiens
aataggtcacatatc

SEQ ID NO: 513015 - DNA, 15 bp, Homo sapiens
ataggtcacatatct

SEQ ID NO: 513016 - DNA, 15 bp, Homo sapiens
taggtcacatatctt

SEQ ID NO: 513017 - DNA, 15 bp, Homo sapiens
aggtcacatatcttt

SEQ ID NO: 513018 - DNA, 15 bp, Homo sapiens
ggtcacatatctttc

SEQ ID NO: 513019 - DNA, 15 bp, Homo sapiens
gtcacatatctttcc

SEQ ID NO: 513020 - DNA, 15 bp, Homo sapiens
tcacatatctttcca

SEQ ID NO: 513021 - DNA, 15 bp, Homo sapiens
cacatatctttccat

SEQ ID NO: 513022 - DNA, 15 bp, Homo sapiens
acatatctttccata

SEQ ID NO: 513023 - DNA, 15 bp, Homo sapiens
catatctttccatag

SEQ ID NO: 513024 - DNA, 15 bp, Homo sapiens
atatctttccatagc

SEQ ID NO: 513025 - DNA, 15 bp, Homo sapiens
tatctttccatagcg

SEQ ID NO: 513026 - DNA, 15 bp, Homo sapiens
atctttccatagcga

SEQ ID NO: 513027 - DNA, 15 bp, Homo sapiens
tctttccatagcgac

SEQ ID NO: 513028 - DNA, 15 bp, Homo sapiens
ctttccatagcgact

SEQ ID NO: 513029 - DNA, 15 bp, Homo sapiens
tttccatagcgactc

SEQ ID NO: 513030 - DNA, 15 bp, Homo sapiens
ttccatagcgactcc

SEQ ID NO: 513031 - DNA, 15 bp, Homo sapiens
tccatagcgactcca

SEQ ID NO: 513032 - DNA, 15 bp, Homo sapiens
ccatagcgactccac

SEQ ID NO: 513033 - DNA, 15 bp, Homo sapiens
catagcgactccact

SEQ ID NO: 513034 - DNA, 15 bp, Homo sapiens
atagcgactccactt

SEQ ID NO: 513035 - DNA, 15 bp, Homo sapiens
tagcgactccacttc

SEQ ID NO: 513036 - DNA, 15 bp, Homo sapiens
agcgactccacttca

SEQ ID NO: 513037 - DNA, 15 bp, Homo sapiens
gcgactccacttcat

SEQ ID NO: 513038 - DNA, 15 bp, Homo sapiens
cgactccacttcatg

SEQ ID NO: 513039 - DNA, 15 bp, Homo sapiens
gactccacttcatgc

SEQ ID NO: 513040 - DNA, 15 bp, Homo sapiens
actccacttcatgct

SEQ ID NO: 513041 - DNA, 15 bp, Homo sapiens
ctccacttcatgcta

SEQ ID NO: 513042 - DNA, 15 bp, Homo sapiens
tccacttcatgctaa

SEQ ID NO: 513043 - DNA, 15 bp, Homo sapiens
ccacttcatgctaac

SEQ ID NO: 513044 - DNA, 15 bp, Homo sapiens
cacttcatgctaact

SEQ ID NO: 513045 - DNA, 15 bp, Homo sapiens
acttcatgctaacta

SEQ ID NO: 513046 - DNA, 15 bp, Homo sapiens
cttcatgctaactac

SEQ ID NO: 513047 - DNA, 15 bp, Homo sapiens
ttcatgctaactact

SEQ ID NO: 513048 - DNA, 15 bp, Homo sapiens
tcatgctaactactg

SEQ ID NO: 513049 - DNA, 15 bp, Homo sapiens
catgctaactactgc

SEQ ID NO: 513050 - DNA, 15 bp, Homo sapiens
atgctaactactgca

SEQ ID NO: 513051 - DNA, 15 bp, Homo sapiens
tgctaactactgcag

SEQ ID NO: 513052 - DNA, 15 bp, Homo sapiens
gctaactactgcagc

SEQ ID NO: 513053 - DNA, 15 bp, Homo sapiens
ctaactactgcagca

SEQ ID NO: 513054 - DNA, 15 bp, Homo sapiens
taactactgcagcaa

SEQ ID NO: 513055 - DNA, 15 bp, Homo sapiens
aactactgcagcaag

SEQ ID NO: 513056 - DNA, 15 bp, Homo sapiens
actactgcagcaagt

SEQ ID NO: 513057 - DNA, 15 bp, Homo sapiens
ctactgcagcaagtg

SEQ ID NO: 513058 - DNA, 15 bp, Homo sapiens
tactgcagcaagtgc

SEQ ID NO: 513059 - DNA, 15 bp, Homo sapiens
actgcagcaagtgcc

SEQ ID NO: 513060 - DNA, 15 bp, Homo sapiens
ctgcagcaagtgcca

SEQ ID NO: 513061 - DNA, 15 bp, Homo sapiens
tgcagcaagtgccag

SEQ ID NO: 513062 - DNA, 15 bp, Homo sapiens
gcagcaagtgccaga

SEQ ID NO: 513063 - DNA, 15 bp, Homo sapiens
cagcaagtgccagag

SEQ ID NO: 513064 - DNA, 15 bp, Homo sapiens
agcaagtgccagagc

SEQ ID NO: 513065 - DNA, 15 bp, Homo sapiens
gcaagtgccagagca

SEQ ID NO: 513066 - DNA, 15 bp, Homo sapiens
caagtgccagagcac

SEQ ID NO: 513067 - DNA, 15 bp, Homo sapiens
aagtgccagagcaca

SEQ ID NO: 513068 - DNA, 15 bp, Homo sapiens
agtgccagagcacag

SEQ ID NO: 513069 - DNA, 15 bp, Homo sapiens
gtgccagagcacagg

SEQ ID NO: 513070 - DNA, 15 bp, Homo sapiens
tgccagagcacaggc

SEQ ID NO: 513071 - DNA, 15 bp, Homo sapiens
gccagagcacaggca

SEQ ID NO: 513072 - DNA, 15 bp, Homo sapiens
ccagagcacaggcat

SEQ ID NO: 513073 - DNA, 15 bp, Homo sapiens
cagagcacaggcata

SEQ ID NO: 513074 - DNA, 15 bp, Homo sapiens
agagcacaggcatag

SEQ ID NO: 513075 - DNA, 15 bp, Homo sapiens
gagcacaggcataga

SEQ ID NO: 513076 - DNA, 15 bp, Homo sapiens
agcacaggcatagaa

SEQ ID NO: 513077 - DNA, 15 bp, Homo sapiens
gcacaggcatagaat

SEQ ID NO: 513078 - DNA, 15 bp, Homo sapiens
cacaggcatagaatt

SEQ ID NO: 513079 - DNA, 15 bp, Homo sapiens
acaggcatagaattt

SEQ ID NO: 513080 - DNA, 15 bp, Homo sapiens
caggcatagaatttg

SEQ ID NO: 513081 - DNA, 15 bp, Homo sapiens
aggcatagaatttgc

SEQ ID NO: 513082 - DNA, 15 bp, Homo sapiens
ggcatagaatttgct

SEQ ID NO: 513083 - DNA, 15 bp, Homo sapiens
gcatagaatttgctc

SEQ ID NO: 513084 - DNA, 15 bp, Homo sapiens
catagaatttgctca

SEQ ID NO: 513085 - DNA, 15 bp, Homo sapiens
atagaatttgctcat

SEQ ID NO: 513086 - DNA, 15 bp, Homo sapiens
tagaatttgctcata

SEQ ID NO: 513087 - DNA, 15 bp, Homo sapiens
agaatttgctcatag

SEQ ID NO: 513088 - DNA, 15 bp, Homo sapiens
gaatttgctcatagg

SEQ ID NO: 513089 - DNA, 15 bp, Homo sapiens
aatttgctcataggt

SEQ ID NO: 513090 - DNA, 15 bp, Homo sapiens
atttgctcataggta

SEQ ID NO: 513091 - DNA, 15 bp, Homo sapiens
tttgctcataggtat

SEQ ID NO: 513092 - DNA, 15 bp, Homo sapiens
ttgctcataggtatc

SEQ ID NO: 513093 - DNA, 15 bp, Homo sapiens
tgctcataggtatcc

SEQ ID NO: 513094 - DNA, 15 bp, Homo sapiens
gctcataggtatccc

SEQ ID NO: 513095 - DNA, 15 bp, Homo sapiens
ctcataggtatccca

SEQ ID NO: 513096 - DNA, 15 bp, Homo sapiens
tcataggtatcccac

SEQ ID NO: 513097 - DNA, 15 bp, Homo sapiens
cataggtatcccact

SEQ ID NO: 513098 - DNA, 15 bp, Homo sapiens
ataggtatcccactc

SEQ ID NO: 513099 - DNA, 15 bp, Homo sapiens
taggtatcccactct

SEQ ID NO: 513100 - DNA, 15 bp, Homo sapiens
aggtatcccactctt

SEQ ID NO: 513101 - DNA, 15 bp, Homo sapiens
ggtatcccactcttg

SEQ ID NO: 513102 - DNA, 15 bp, Homo sapiens
gtatcccactcttgt

SEQ ID NO: 513103 - DNA, 15 bp, Homo sapiens
tatcccactcttgtg

SEQ ID NO: 513104 - DNA, 15 bp, Homo sapiens
atcccactcttgtgg

SEQ ID NO: 513105 - DNA, 15 bp, Homo sapiens
tcccactcttgtggt

SEQ ID NO: 513106 - DNA, 15 bp, Homo sapiens
cccactcttgtggta

SEQ ID NO: 513107 - DNA, 15 bp, Homo sapiens
ccactcttgtggtac

SEQ ID NO: 513108 - DNA, 15 bp, Homo sapiens
cactcttgtggtaca

SEQ ID NO: 513109 - DNA, 15 bp, Homo sapiens
actcttgtggtacag

SEQ ID NO: 513110 - DNA, 15 bp, Homo sapiens
ctcttgtggtacagg

SEQ ID NO: 513111 - DNA, 15 bp, Homo sapiens
tcttgtggtacaggg

SEQ ID NO: 513112 - DNA, 15 bp, Homo sapiens
cttgtggtacaggga

SEQ ID NO: 513113 - DNA, 15 bp, Homo sapiens
ttgtggtacagggag

SEQ ID NO: 513114 - DNA, 15 bp, Homo sapiens
tgtggtacagggagg

SEQ ID NO: 513115 - DNA, 15 bp, Homo sapiens
gtggtacagggaggt

SEQ ID NO: 513116 - DNA, 15 bp, Homo sapiens
tggtacagggaggtg

SEQ ID NO: 513117 - DNA, 15 bp, Homo sapiens
ggtacagggaggtgg

SEQ ID NO: 513118 - DNA, 15 bp, Homo sapiens
gtacagggaggtgga

SEQ ID NO: 513119 - DNA, 15 bp, Homo sapiens
tacagggaggtggaa

SEQ ID NO: 513120 - DNA, 15 bp, Homo sapiens
acagggaggtggaag

SEQ ID NO: 513121 - DNA, 15 bp, Homo sapiens
cagggaggtggaaga

SEQ ID NO: 513122 - DNA, 15 bp, Homo sapiens
agggaggtggaagat

SEQ ID NO: 513123 - DNA, 15 bp, Homo sapiens
gggaggtggaagatc

SEQ ID NO: 513124 - DNA, 15 bp, Homo sapiens
ggaggtggaagatca

SEQ ID NO: 513125 - DNA, 15 bp, Homo sapiens
gaggtggaagatcag

SEQ ID NO: 513126 - DNA, 15 bp, Homo sapiens
aggtggaagatcagc

SEQ ID NO: 513127 - DNA, 15 bp, Homo sapiens
ggtggaagatcagcc

SEQ ID NO: 513128 - DNA, 15 bp, Homo sapiens
gtggaagatcagcct

SEQ ID NO: 513129 - DNA, 15 bp, Homo sapiens
tggaagatcagcctc

SEQ ID NO: 513130 - DNA, 15 bp, Homo sapiens
ggaagatcagcctca

SEQ ID NO: 513131 - DNA, 15 bp, Homo sapiens
gaagatcagcctcaa

SEQ ID NO: 513132 - DNA, 15 bp, Homo sapiens
aagatcagcctcaac

SEQ ID NO: 513133 - DNA, 15 bp, Homo sapiens
agatcagcctcaaca

SEQ ID NO: 513134 - DNA, 15 bp, Homo sapiens
gatcagcctcaacag

SEQ ID NO: 513135 - DNA, 15 bp, Homo sapiens
atcagcctcaacaga

SEQ ID NO: 513136 - DNA, 15 bp, Homo sapiens
tcagcctcaacagac

SEQ ID NO: 513137 - DNA, 15 bp, Homo sapiens
cagcctcaacagact

SEQ ID NO: 513138 - DNA, 15 bp, Homo sapiens
agcctcaacagactc

SEQ ID NO: 513139 - DNA, 15 bp, Homo sapiens
gcctcaacagactct

SEQ ID NO: 513140 - DNA, 15 bp, Homo sapiens
cctcaacagactctg

SEQ ID NO: 513141 - DNA, 15 bp, Homo sapiens
ctcaacagactctgg

SEQ ID NO: 513142 - DNA, 15 bp, Homo sapiens
tcaacagactctgga

SEQ ID NO: 513143 - DNA, 15 bp, Homo sapiens
caacagactctggaa

SEQ ID NO: 513144 - DNA, 15 bp, Homo sapiens
aacagactctggaag

SEQ ID NO: 513145 - DNA, 15 bp, Homo sapiens
acagactctggaaga

SEQ ID NO: 513146 - DNA, 15 bp, Homo sapiens
cagactctggaagac

SEQ ID NO: 513147 - DNA, 15 bp, Homo sapiens
agactctggaagaca

SEQ ID NO: 513148 - DNA, 15 bp, Homo sapiens
gactctggaagacac

SEQ ID NO: 513149 - DNA, 15 bp, Homo sapiens
actctggaagacact

SEQ ID NO: 513150 - DNA, 15 bp, Homo sapiens
ctctggaagacactg

SEQ ID NO: 513151 - DNA, 15 bp, Homo sapiens
tctggaagacactgt

SEQ ID NO: 513152 - DNA, 15 bp, Homo sapiens
ctggaagacactgtc

SEQ ID NO: 513153 - DNA, 15 bp, Homo sapiens
tggaagacactgtca

SEQ ID NO: 513154 - DNA, 15 bp, Homo sapiens
ggaagacactgtcaa

SEQ ID NO: 513155 - DNA, 15 bp, Homo sapiens
gaagacactgtcaaa

SEQ ID NO: 513156 - DNA, 15 bp, Homo sapiens
aagacactgtcaaag

SEQ ID NO: 513157 - DNA, 15 bp, Homo sapiens
agacactgtcaaagt

SEQ ID NO: 513158 - DNA, 15 bp, Homo sapiens
gacactgtcaaagtg

SEQ ID NO: 513159 - DNA, 15 bp, Homo sapiens
acactgtcaaagtgg

SEQ ID NO: 513160 - DNA, 15 bp, Homo sapiens
cactgtcaaagtggc

SEQ ID NO: 513161 - DNA, 15 bp, Homo sapiens
actgtcaaagtggca

SEQ ID NO: 513162 - DNA, 15 bp, Homo sapiens
ctgtcaaagtggcag

SEQ ID NO: 513163 - DNA, 15 bp, Homo sapiens
tgtcaaagtggcagc

SEQ ID NO: 513164 - DNA, 15 bp, Homo sapiens
gtcaaagtggcagct

SEQ ID NO: 513165 - DNA, 15 bp, Homo sapiens
tcaaagtggcagctc

SEQ ID NO: 513166 - DNA, 15 bp, Homo sapiens
caaagtggcagctcc

SEQ ID NO: 513167 - DNA, 15 bp, Homo sapiens
aaagtggcagctcca

SEQ ID NO: 513168 - DNA, 15 bp, Homo sapiens
aagtggcagctccac

SEQ ID NO: 513169 - DNA, 15 bp, Homo sapiens
agtggcagctccact

SEQ ID NO: 513170 - DNA, 15 bp, Homo sapiens
gtggcagctccactt

SEQ ID NO: 513171 - DNA, 15 bp, Homo sapiens
tggcagctccacttc

SEQ ID NO: 513172 - DNA, 15 bp, Homo sapiens
ggcagctccacttca

SEQ ID NO: 513173 - DNA, 15 bp, Homo sapiens
gcagctccacttcac

SEQ ID NO: 513174 - DNA, 15 bp, Homo sapiens
cagctccacttcaca

SEQ ID NO: 513175 - DNA, 15 bp, Homo sapiens
agctccacttcacac

SEQ ID NO: 513176 - DNA, 15 bp, Homo sapiens
gctccacttcacacg

SEQ ID NO: 513177 - DNA, 15 bp, Homo sapiens
ctccacttcacacgg

SEQ ID NO: 513178 - DNA, 15 bp, Homo sapiens
tccacttcacacggg

SEQ ID NO: 513179 - DNA, 15 bp, Homo sapiens
ccacttcacacgggc

SEQ ID NO: 513180 - DNA, 15 bp, Homo sapiens
cacttcacacgggcc

SEQ ID NO: 513181 - DNA, 15 bp, Homo sapiens
acttcacacgggccc

SEQ ID NO: 513182 - DNA, 15 bp, Homo sapiens
cttcacacgggccct

SEQ ID NO: 513183 - DNA, 15 bp, Homo sapiens
ttcacacgggccctg

SEQ ID NO: 513184 - DNA, 15 bp, Homo sapiens
tcacacgggccctgg

SEQ ID NO: 513185 - DNA, 15 bp, Homo sapiens
cacacgggccctggc

SEQ ID NO: 513186 - DNA, 15 bp, Homo sapiens
acacgggccctggca

SEQ ID NO: 513187 - DNA, 15 bp, Homo sapiens
cacgggccctggcag

SEQ ID NO: 513188 - DNA, 15 bp, Homo sapiens
acgggccctggcagc

SEQ ID NO: 513189 - DNA, 15 bp, Homo sapiens
cgggccctggcagca

SEQ ID NO: 513190 - DNA, 15 bp, Homo sapiens
gggccctggcagcac

SEQ ID NO: 513191 - DNA, 15 bp, Homo sapiens
ggccctggcagcaca

SEQ ID NO: 513192 - DNA, 15 bp, Homo sapiens
gccctggcagcacat

SEQ ID NO: 513193 - DNA, 15 bp, Homo sapiens
ccctggcagcacata

SEQ ID NO: 513194 - DNA, 15 bp, Homo sapiens
cctggcagcacataa

SEQ ID NO: 513195 - DNA, 15 bp, Homo sapiens
ctggcagcacataag

SEQ ID NO: 513196 - DNA, 15 bp, Homo sapiens
tggcagcacataaga

SEQ ID NO: 513197 - DNA, 15 bp, Homo sapiens
ggcagcacataagaa

SEQ ID NO: 513198 - DNA, 15 bp, Homo sapiens
gcagcacataagaac

SEQ ID NO: 513199 - DNA, 15 bp, Homo sapiens
cagcacataagaaca

SEQ ID NO: 513200 - DNA, 15 bp, Homo sapiens
agcacataagaacac

SEQ ID NO: 513201 - DNA, 15 bp, Homo sapiens
gcacataagaacacc

SEQ ID NO: 513202 - DNA, 15 bp, Homo sapiens
cacataagaacaccc

SEQ ID NO: 513203 - DNA, 15 bp, Homo sapiens
acataagaacaccca

SEQ ID NO: 513204 - DNA, 15 bp, Homo sapiens
cataagaacacccac

SEQ ID NO: 513205 - DNA, 15 bp, Homo sapiens
ataagaacacccact

SEQ ID NO: 513206 - DNA, 15 bp, Homo sapiens
taagaacacccactt

SEQ ID NO: 513207 - DNA, 15 bp, Homo sapiens
aagaacacccactta

SEQ ID NO: 513208 - DNA, 15 bp, Homo sapiens
agaacacccacttac

SEQ ID NO: 513209 - DNA, 15 bp, Homo sapiens
gaacacccacttacc

SEQ ID NO: 513210 - DNA, 15 bp, Homo sapiens
aacacccacttaccc

SEQ ID NO: 513211 - DNA, 15 bp, Homo sapiens
acacccacttacccc

SEQ ID NO: 513212 - DNA, 15 bp, Homo sapiens
cacccacttaccccc

SEQ ID NO: 513213 - DNA, 15 bp, Homo sapiens
acccacttaccccca

SEQ ID NO: 513214 - DNA, 15 bp, Homo sapiens
cccacttacccccag

SEQ ID NO: 513215 - DNA, 15 bp, Homo sapiens
ccacttacccccagt

SEQ ID NO: 513216 - DNA, 15 bp, Homo sapiens
cacttacccccagtg

SEQ ID NO: 513217 - DNA, 15 bp, Homo sapiens
acttacccccagtgc

SEQ ID NO: 513218 - DNA, 15 bp, Homo sapiens
cttacccccagtgct

SEQ ID NO: 513219 - DNA, 15 bp, Homo sapiens
ttacccccagtgctg

SEQ ID NO: 513220 - DNA, 15 bp, Homo sapiens
tacccccagtgctgt

SEQ ID NO: 513221 - DNA, 15 bp, Homo sapiens
acccccagtgctgtc

SEQ ID NO: 513222 - DNA, 15 bp, Homo sapiens
cccccagtgctgtca

SEQ ID NO: 513223 - DNA, 15 bp, Homo sapiens
ccccagtgctgtcag

SEQ ID NO: 513224 - DNA, 15 bp, Homo sapiens
cccagtgctgtcaga

SEQ ID NO: 513225 - DNA, 15 bp, Homo sapiens
ccagtgctgtcagac

SEQ ID NO: 513226 - DNA, 15 bp, Homo sapiens
cagtgctgtcagaca

SEQ ID NO: 513227 - DNA, 15 bp, Homo sapiens
agtgctgtcagacat

SEQ ID NO: 513228 - DNA, 15 bp, Homo sapiens
gtgctgtcagacatg

SEQ ID NO: 513229 - DNA, 15 bp, Homo sapiens
tgctgtcagacatga

SEQ ID NO: 513230 - DNA, 15 bp, Homo sapiens
gctgtcagacatgag

SEQ ID NO: 513231 - DNA, 15 bp, Homo sapiens
ctgtcagacatgagt

SEQ ID NO: 513232 - DNA, 15 bp, Homo sapiens
tgtcagacatgagtg

SEQ ID NO: 513233 - DNA, 15 bp, Homo sapiens
gtcagacatgagtga

SEQ ID NO: 513234 - DNA, 15 bp, Homo sapiens
tcagacatgagtgag

SEQ ID NO: 513235 - DNA, 15 bp, Homo sapiens
cagacatgagtgagc

SEQ ID NO: 513236 - DNA, 15 bp, Homo sapiens
agacatgagtgagct

SEQ ID NO: 513237 - DNA, 15 bp, Homo sapiens
gacatgagtgagctg

SEQ ID NO: 513238 - DNA, 15 bp, Homo sapiens
acatgagtgagctgg

SEQ ID NO: 513239 - DNA, 15 bp, Homo sapiens
catgagtgagctggt

SEQ ID NO: 513240 - DNA, 15 bp, Homo sapiens
atgagtgagctggtg

SEQ ID NO: 513241 - DNA, 15 bp, Homo sapiens
tgagtgagctggtgt

SEQ ID NO: 513242 - DNA, 15 bp, Homo sapiens
gagtgagctggtgtc

SEQ ID NO: 513243 - DNA, 15 bp, Homo sapiens
agtgagctggtgtct

SEQ ID NO: 513244 - DNA, 15 bp, Homo sapiens
gtgagctggtgtctg

SEQ ID NO: 513245 - DNA, 15 bp, Homo sapiens
tgagctggtgtctgc

SEQ ID NO: 513246 - DNA, 15 bp, Homo sapiens
gagctggtgtctgcc

SEQ ID NO: 513247 - DNA, 15 bp, Homo sapiens
agctggtgtctgcct

SEQ ID NO: 513248 - DNA, 15 bp, Homo sapiens
gctggtgtctgcctg

SEQ ID NO: 513249 - DNA, 15 bp, Homo sapiens
ctggtgtctgcctgc

SEQ ID NO: 513250 - DNA, 15 bp, Homo sapiens
tggtgtctgcctgct

SEQ ID NO: 513251 - DNA, 15 bp, Homo sapiens
ggtgtctgcctgctg

SEQ ID NO: 513252 - DNA, 15 bp, Homo sapiens
gtgtctgcctgctgg

SEQ ID NO: 513253 - DNA, 15 bp, Homo sapiens
tgtctgcctgctggg

SEQ ID NO: 513254 - DNA, 15 bp, Homo sapiens
gtctgcctgctgggt

SEQ ID NO: 513255 - DNA, 15 bp, Homo sapiens
tctgcctgctgggtg

SEQ ID NO: 513256 - DNA, 15 bp, Homo sapiens
ctgcctgctgggtga

SEQ ID NO: 513257 - DNA, 15 bp, Homo sapiens
tgcctgctgggtgag

SEQ ID NO: 513258 - DNA, 15 bp, Homo sapiens
gcctgctgggtgagg

SEQ ID NO: 513259 - DNA, 15 bp, Homo sapiens
cctgctgggtgagga

SEQ ID NO: 513260 - DNA, 15 bp, Homo sapiens
ctgctgggtgaggag

SEQ ID NO: 513261 - DNA, 15 bp, Homo sapiens
tgctgggtgaggagc

SEQ ID NO: 513262 - DNA, 15 bp, Homo sapiens
gctgggtgaggagca

SEQ ID NO: 513263 - DNA, 15 bp, Homo sapiens
ctgggtgaggagcaa

SEQ ID NO: 513264 - DNA, 15 bp, Homo sapiens
tgggtgaggagcaag

SEQ ID NO: 513265 - DNA, 15 bp, Homo sapiens
gggtgaggagcaagt

SEQ ID NO: 513266 - DNA, 15 bp, Homo sapiens
ggtgaggagcaagtg

SEQ ID NO: 513267 - DNA, 15 bp, Homo sapiens
gtgaggagcaagtgg

SEQ ID NO: 513268 - DNA, 15 bp, Homo sapiens
tgaggagcaagtggt

SEQ ID NO: 513269 - DNA, 15 bp, Homo sapiens
gaggagcaagtggtg

SEQ ID NO: 513270 - DNA, 15 bp, Homo sapiens
aggagcaagtggtgc

SEQ ID NO: 513271 - DNA, 15 bp, Homo sapiens
ggagcaagtggtgct

SEQ ID NO: 513272 - DNA, 15 bp, Homo sapiens
gagcaagtggtgctc

SEQ ID NO: 513273 - DNA, 15 bp, Homo sapiens
agcaagtggtgctca

SEQ ID NO: 513274 - DNA, 15 bp, Homo sapiens
gcaagtggtgctcat

SEQ ID NO: 513275 - DNA, 15 bp, Homo sapiens
caagtggtgctcatt

SEQ ID NO: 513276 - DNA, 15 bp, Homo sapiens
aagtggtgctcattt

SEQ ID NO: 513277 - DNA, 15 bp, Homo sapiens
agtggtgctcatttg

SEQ ID NO: 513278 - DNA, 15 bp, Homo sapiens
gtggtgctcatttga

SEQ ID NO: 513279 - DNA, 15 bp, Homo sapiens
tggtgctcatttgaa

SEQ ID NO: 513280 - DNA, 15 bp, Homo sapiens
ggtgctcatttgaat

SEQ ID NO: 513281 - DNA, 15 bp, Homo sapiens
gtgctcatttgaatt

SEQ ID NO: 513282 - DNA, 15 bp, Homo sapiens
tgctcatttgaattt

SEQ ID NO: 513283 - DNA, 15 bp, Homo sapiens
gctcatttgaatttt

SEQ ID NO: 513284 - DNA, 15 bp, Homo sapiens
ctcatttgaattttt

SEQ ID NO: 513285 - DNA, 15 bp, Homo sapiens
tcatttgaatttttc

SEQ ID NO: 513286 - DNA, 15 bp, Homo sapiens
catttgaatttttct

SEQ ID NO: 513287 - DNA, 15 bp, Homo sapiens
atttgaatttttcta

SEQ ID NO: 513288 - DNA, 15 bp, Homo sapiens
tttgaatttttctat

SEQ ID NO: 513289 - DNA, 15 bp, Homo sapiens
ttgaatttttctatc

SEQ ID NO: 513290 - DNA, 15 bp, Homo sapiens
tgaatttttctatca

SEQ ID NO: 513291 - DNA, 15 bp, Homo sapiens
gaatttttctatcaa

SEQ ID NO: 513292 - DNA, 15 bp, Homo sapiens
aatttttctatcaat

SEQ ID NO: 513293 - DNA, 15 bp, Homo sapiens
atttttctatcaatg

SEQ ID NO: 513294 - DNA, 15 bp, Homo sapiens
tttttctatcaatgc

SEQ ID NO: 513295 - DNA, 15 bp, Homo sapiens
ttttctatcaatgca

SEQ ID NO: 513296 - DNA, 15 bp, Homo sapiens
tttctatcaatgcag

SEQ ID NO: 513297 - DNA, 15 bp, Homo sapiens
ttctatcaatgcagt

SEQ ID NO: 513298 - DNA, 15 bp, Homo sapiens
tctatcaatgcagta

SEQ ID NO: 513299 - DNA, 15 bp, Homo sapiens
ctatcaatgcagtag

SEQ ID NO: 513300 - DNA, 15 bp, Homo sapiens
tatcaatgcagtagg

SEQ ID NO: 513301 - DNA, 15 bp, Homo sapiens
atcaatgcagtagga

SEQ ID NO: 513302 - DNA, 15 bp, Homo sapiens
tcaatgcagtaggat

SEQ ID NO: 513303 - DNA, 15 bp, Homo sapiens
caatgcagtaggatg

SEQ ID NO: 513304 - DNA, 15 bp, Homo sapiens
aatgcagtaggatga

SEQ ID NO: 513305 - DNA, 15 bp, Homo sapiens
atgcagtaggatgat

SEQ ID NO: 513306 - DNA, 15 bp, Homo sapiens
tgcagtaggatgatc

SEQ ID NO: 513307 - DNA, 15 bp, Homo sapiens
gcagtaggatgatct

SEQ ID NO: 513308 - DNA, 15 bp, Homo sapiens
cagtaggatgatctt

SEQ ID NO: 513309 - DNA, 15 bp, Homo sapiens
agtaggatgatcttt

SEQ ID NO: 513310 - DNA, 15 bp, Homo sapiens
gtaggatgatctttt

SEQ ID NO: 513311 - DNA, 15 bp, Homo sapiens
taggatgatcttttc

SEQ ID NO: 513312 - DNA, 15 bp, Homo sapiens
aggatgatcttttca

SEQ ID NO: 513313 - DNA, 15 bp, Homo sapiens
ggatgatcttttcag

SEQ ID NO: 513314 - DNA, 15 bp, Homo sapiens
gatgatcttttcagg

SEQ ID NO: 513315 - DNA, 15 bp, Homo sapiens
atgatcttttcaggc

SEQ ID NO: 513316 - DNA, 15 bp, Homo sapiens
tgatcttttcaggca

SEQ ID NO: 513317 - DNA, 15 bp, Homo sapiens
gatcttttcaggcac

SEQ ID NO: 513318 - DNA, 15 bp, Homo sapiens
atcttttcaggcact

SEQ ID NO: 513319 - DNA, 15 bp, Homo sapiens
tcttttcaggcactg

SEQ ID NO: 513320 - DNA, 15 bp, Homo sapiens
cttttcaggcactgg

SEQ ID NO: 513321 - DNA, 15 bp, Homo sapiens
ttttcaggcactggt

SEQ ID NO: 513322 - DNA, 15 bp, Homo sapiens
tttcaggcactggtg

SEQ ID NO: 513323 - DNA, 15 bp, Homo sapiens
ttcaggcactggtgg

SEQ ID NO: 513324 - DNA, 15 bp, Homo sapiens
tcaggcactggtggc

SEQ ID NO: 513325 - DNA, 15 bp, Homo sapiens
caggcactggtggca

SEQ ID NO: 513326 - DNA, 15 bp, Homo sapiens
aggcactggtggcat

SEQ ID NO: 513327 - DNA, 15 bp, Homo sapiens
ggcactggtggcatt

SEQ ID NO: 513328 - DNA, 15 bp, Homo sapiens
gcactggtggcattt

SEQ ID NO: 513329 - DNA, 15 bp, Homo sapiens
cactggtggcatttg

SEQ ID NO: 513330 - DNA, 15 bp, Homo sapiens
actggtggcatttgc

SEQ ID NO: 513331 - DNA, 15 bp, Homo sapiens
ctggtggcatttgcc

SEQ ID NO: 513332 - DNA, 15 bp, Homo sapiens
tggtggcatttgcct

SEQ ID NO: 513333 - DNA, 15 bp, Homo sapiens
ggtggcatttgcctt

SEQ ID NO: 513334 - DNA, 15 bp, Homo sapiens
gtggcatttgccttt

SEQ ID NO: 513335 - DNA, 15 bp, Homo sapiens
tggcatttgcctttt

SEQ ID NO: 513336 - DNA, 15 bp, Homo sapiens
ggcatttgccttttt

SEQ ID NO: 513337 - DNA, 15 bp, Homo sapiens
gcatttgcctttttt

SEQ ID NO: 513338 - DNA, 15 bp, Homo sapiens
catttgccttttttt

SEQ ID NO: 513339 - DNA, 15 bp, Homo sapiens
atttgcctttttttc

SEQ ID NO: 513340 - DNA, 15 bp, Homo sapiens
tttgcctttttttct

SEQ ID NO: 513341 - DNA, 15 bp, Homo sapiens
ttgcctttttttctg

SEQ ID NO: 513342 - DNA, 15 bp, Homo sapiens
tgcctttttttctga

SEQ ID NO: 513343 - DNA, 15 bp, Homo sapiens
gcctttttttctgaa

SEQ ID NO: 513344 - DNA, 15 bp, Homo sapiens
cctttttttctgaaa

SEQ ID NO: 513345 - DNA, 15 bp, Homo sapiens
ctttttttctgaaag

SEQ ID NO: 513346 - DNA, 15 bp, Homo sapiens
tttttttctgaaagt

SEQ ID NO: 513347 - DNA, 15 bp, Homo sapiens
ttttttctgaaagtt

SEQ ID NO: 513348 - DNA, 15 bp, Homo sapiens
tttttctgaaagttt

SEQ ID NO: 513349 - DNA, 15 bp, Homo sapiens
ttttctgaaagtttt

SEQ ID NO: 513350 - DNA, 15 bp, Homo sapiens
tttctgaaagttttt

SEQ ID NO: 513351 - DNA, 15 bp, Homo sapiens
ttctgaaagtttttg

SEQ ID NO: 513352 - DNA, 15 bp, Homo sapiens
tctgaaagtttttgc

SEQ ID NO: 513353 - DNA, 15 bp, Homo sapiens
ctgaaagtttttgct

SEQ ID NO: 513354 - DNA, 15 bp, Homo sapiens
tgaaagtttttgcta

SEQ ID NO: 513355 - DNA, 15 bp, Homo sapiens
gaaagtttttgctaa

SEQ ID NO: 513356 - DNA, 15 bp, Homo sapiens
aaagtttttgctaat

SEQ ID NO: 513357 - DNA, 15 bp, Homo sapiens
aagtttttgctaatt

SEQ ID NO: 513358 - DNA, 15 bp, Homo sapiens
agtttttgctaattt

SEQ ID NO: 513359 - DNA, 15 bp, Homo sapiens
gtttttgctaatttt

SEQ ID NO: 513360 - DNA, 15 bp, Homo sapiens
tttttgctaattttt

SEQ ID NO: 513361 - DNA, 15 bp, Homo sapiens
ttttgctaatttttg

SEQ ID NO: 513362 - DNA, 15 bp, Homo sapiens
tttgctaatttttgg

SEQ ID NO: 513363 - DNA, 15 bp, Homo sapiens
ttgctaatttttggt

SEQ ID NO: 513364 - DNA, 15 bp, Homo sapiens
tgctaatttttggtt

SEQ ID NO: 513365 - DNA, 15 bp, Homo sapiens
gctaatttttggttg

SEQ ID NO: 513366 - DNA, 15 bp, Homo sapiens
ctaatttttggttga

SEQ ID NO: 513367 - DNA, 15 bp, Homo sapiens
taatttttggttgag

SEQ ID NO: 513368 - DNA, 15 bp, Homo sapiens
aatttttggttgagt

SEQ ID NO: 513369 - DNA, 15 bp, Homo sapiens
atttttggttgagta

SEQ ID NO: 513370 - DNA, 15 bp, Homo sapiens
tttttggttgagtat

SEQ ID NO: 513371 - DNA, 15 bp, Homo sapiens
ttttggttgagtatt

SEQ ID NO: 513372 - DNA, 15 bp, Homo sapiens
tttggttgagtattt

SEQ ID NO: 513373 - DNA, 15 bp, Homo sapiens
ttggttgagtatttt

SEQ ID NO: 513374 - DNA, 15 bp, Homo sapiens
tggttgagtattttt

SEQ ID NO: 513375 - DNA, 15 bp, Homo sapiens
ggttgagtatttttt

SEQ ID NO: 513376 - DNA, 15 bp, Homo sapiens
gttgagtattttttc

SEQ ID NO: 513377 - DNA, 15 bp, Homo sapiens
ttgagtattttttct

SEQ ID NO: 513378 - DNA, 15 bp, Homo sapiens
tgagtattttttcta

SEQ ID NO: 513379 - DNA, 15 bp, Homo sapiens
gagtattttttctat

SEQ ID NO: 513380 - DNA, 15 bp, Homo sapiens
agtattttttctatt

SEQ ID NO: 513381 - DNA, 15 bp, Homo sapiens
gtattttttctattg

SEQ ID NO: 513382 - DNA, 15 bp, Homo sapiens
tattttttctattga

SEQ ID NO: 513383 - DNA, 15 bp, Homo sapiens
attttttctattgat

SEQ ID NO: 513384 - DNA, 15 bp, Homo sapiens
ttttttctattgatg

SEQ ID NO: 513385 - DNA, 15 bp, Homo sapiens
tttttctattgatga

SEQ ID NO: 513386 - DNA, 15 bp, Homo sapiens
ttttctattgatgat

SEQ ID NO: 513387 - DNA, 15 bp, Homo sapiens
tttctattgatgatt

SEQ ID NO: 513388 - DNA, 15 bp, Homo sapiens
ttctattgatgatta

SEQ ID NO: 513389 - DNA, 15 bp, Homo sapiens
tctattgatgattag

SEQ ID NO: 513390 - DNA, 15 bp, Homo sapiens
ctattgatgattagc

SEQ ID NO: 513391 - DNA, 15 bp, Homo sapiens
tattgatgattagct

SEQ ID NO: 513392 - DNA, 15 bp, Homo sapiens
attgatgattagctc

SEQ ID NO: 513393 - DNA, 15 bp, Homo sapiens
ttgatgattagctct

SEQ ID NO: 513394 - DNA, 15 bp, Homo sapiens
tgatgattagctctt

SEQ ID NO: 513395 - DNA, 15 bp, Homo sapiens
gatgattagctcttt

SEQ ID NO: 513396 - DNA, 15 bp, Homo sapiens
atgattagctcttta

SEQ ID NO: 513397 - DNA, 15 bp, Homo sapiens
tgattagctctttat

SEQ ID NO: 513398 - DNA, 15 bp, Homo sapiens
gattagctctttata

SEQ ID NO: 513399 - DNA, 15 bp, Homo sapiens
attagctctttatac

SEQ ID NO: 513400 - DNA, 15 bp, Homo sapiens
ttagctctttataca

SEQ ID NO: 513401 - DNA, 15 bp, Homo sapiens
tagctctttatacat

SEQ ID NO: 513402 - DNA, 15 bp, Homo sapiens
agctctttatacatt

SEQ ID NO: 513403 - DNA, 15 bp, Homo sapiens
gctctttatacattc

SEQ ID NO: 513404 - DNA, 15 bp, Homo sapiens
ctctttatacattct

SEQ ID NO: 513405 - DNA, 15 bp, Homo sapiens
tctttatacattctg

SEQ ID NO: 513406 - DNA, 15 bp, Homo sapiens
ctttatacattctgg

SEQ ID NO: 513407 - DNA, 15 bp, Homo sapiens
tttatacattctgga

SEQ ID NO: 513408 - DNA, 15 bp, Homo sapiens
ttatacattctggac

SEQ ID NO: 513409 - DNA, 15 bp, Homo sapiens
tatacattctggaca

SEQ ID NO: 513410 - DNA, 15 bp, Homo sapiens
atacattctggacaa

SEQ ID NO: 513411 - DNA, 15 bp, Homo sapiens
tacattctggacaaa

SEQ ID NO: 513412 - DNA, 15 bp, Homo sapiens
acattctggacaaaa

SEQ ID NO: 513413 - DNA, 15 bp, Homo sapiens
cattctggacaaaaa

SEQ ID NO: 513414 - DNA, 15 bp, Homo sapiens
attctggacaaaaaa

SEQ ID NO: 513415 - DNA, 15 bp, Homo sapiens
ttctggacaaaaaaa

SEQ ID NO: 513416 - DNA, 15 bp, Homo sapiens
tctggacaaaaaaat

SEQ ID NO: 513417 - DNA, 15 bp, Homo sapiens
ctggacaaaaaaatc

SEQ ID NO: 513418 - DNA, 15 bp, Homo sapiens
tggacaaaaaaatct

SEQ ID NO: 513419 - DNA, 15 bp, Homo sapiens
ggacaaaaaaatctc

SEQ ID NO: 513420 - DNA, 15 bp, Homo sapiens
gacaaaaaaatctct

SEQ ID NO: 513421 - DNA, 15 bp, Homo sapiens
acaaaaaaatctctt

SEQ ID NO: 513422 - DNA, 15 bp, Homo sapiens
caaaaaaatctctta

SEQ ID NO: 513423 - DNA, 15 bp, Homo sapiens
aaaaaaatctcttat

SEQ ID NO: 513424 - DNA, 15 bp, Homo sapiens
aaaaaatctcttata

SEQ ID NO: 513425 - DNA, 15 bp, Homo sapiens
aaaaatctcttatat

SEQ ID NO: 513426 - DNA, 15 bp, Homo sapiens
aaaatctcttatatg

SEQ ID NO: 513427 - DNA, 15 bp, Homo sapiens
aaatctcttatatgt

SEQ ID NO: 513428 - DNA, 15 bp, Homo sapiens
aatctcttatatgtt

SEQ ID NO: 513429 - DNA, 15 bp, Homo sapiens
atctcttatatgttg

SEQ ID NO: 513430 - DNA, 15 bp, Homo sapiens
tctcttatatgttgg

SEQ ID NO: 513431 - DNA, 15 bp, Homo sapiens
ctcttatatgttgga

SEQ ID NO: 513432 - DNA, 15 bp, Homo sapiens
tcttatatgttggaa

SEQ ID NO: 513433 - DNA, 15 bp, Homo sapiens
cttatatgttggaaa

SEQ ID NO: 513434 - DNA, 15 bp, Homo sapiens
ttatatgttggaaat

SEQ ID NO: 513435 - DNA, 15 bp, Homo sapiens
tatatgttggaaata

SEQ ID NO: 513436 - DNA, 15 bp, Homo sapiens
atatgttggaaatac

SEQ ID NO: 513437 - DNA, 15 bp, Homo sapiens
tatgttggaaatact

SEQ ID NO: 513438 - DNA, 15 bp, Homo sapiens
atgttggaaatactt

SEQ ID NO: 513439 - DNA, 15 bp, Homo sapiens
tgttggaaatacttt

SEQ ID NO: 513440 - DNA, 15 bp, Homo sapiens
gttggaaatactttt

SEQ ID NO: 513441 - DNA, 15 bp, Homo sapiens
ttggaaatacttttc

SEQ ID NO: 513442 - DNA, 15 bp, Homo sapiens
tggaaatacttttcc

SEQ ID NO: 513443 - DNA, 15 bp, Homo sapiens
ggaaatacttttcct

SEQ ID NO: 513444 - DNA, 15 bp, Homo sapiens
gaaatacttttcctt

SEQ ID NO: 513445 - DNA, 15 bp, Homo sapiens
aaatacttttccttc

SEQ ID NO: 513446 - DNA, 15 bp, Homo sapiens
aatacttttccttca

SEQ ID NO: 513447 - DNA, 15 bp, Homo sapiens
atacttttccttcaa

SEQ ID NO: 513448 - DNA, 15 bp, Homo sapiens
tacttttccttcaat

SEQ ID NO: 513449 - DNA, 15 bp, Homo sapiens
acttttccttcaatc

SEQ ID NO: 513450 - DNA, 15 bp, Homo sapiens
cttttccttcaatct

SEQ ID NO: 513451 - DNA, 15 bp, Homo sapiens
ttttccttcaatctg

SEQ ID NO: 513452 - DNA, 15 bp, Homo sapiens
tttccttcaatctgt

SEQ ID NO: 513453 - DNA, 15 bp, Homo sapiens
ttccttcaatctgtt

SEQ ID NO: 513454 - DNA, 15 bp, Homo sapiens
tccttcaatctgttg

SEQ ID NO: 513455 - DNA, 15 bp, Homo sapiens
ccttcaatctgttgc

SEQ ID NO: 513456 - DNA, 15 bp, Homo sapiens
cttcaatctgttgcc

SEQ ID NO: 513457 - DNA, 15 bp, Homo sapiens
ttcaatctgttgcct

SEQ ID NO: 513458 - DNA, 15 bp, Homo sapiens
tcaatctgttgcctt

SEQ ID NO: 513459 - DNA, 15 bp, Homo sapiens
caatctgttgccttt

SEQ ID NO: 513460 - DNA, 15 bp, Homo sapiens
aatctgttgcctttt

SEQ ID NO: 513461 - DNA, 15 bp, Homo sapiens
atctgttgccttttt

SEQ ID NO: 513462 - DNA, 15 bp, Homo sapiens
tctgttgcctttttt

SEQ ID NO: 513463 - DNA, 15 bp, Homo sapiens
ctgttgccttttttt

SEQ ID NO: 513464 - DNA, 15 bp, Homo sapiens
tgttgcctttttttc

SEQ ID NO: 513465 - DNA, 15 bp, Homo sapiens
gttgcctttttttcc

SEQ ID NO: 513466 - DNA, 15 bp, Homo sapiens
ttgcctttttttccc

SEQ ID NO: 513467 - DNA, 15 bp, Homo sapiens
tgcctttttttccca

SEQ ID NO: 513468 - DNA, 15 bp, Homo sapiens
gcctttttttcccaa

SEQ ID NO: 513469 - DNA, 15 bp, Homo sapiens
cctttttttcccaac

SEQ ID NO: 513470 - DNA, 15 bp, Homo sapiens
ctttttttcccaaca

SEQ ID NO: 513471 - DNA, 15 bp, Homo sapiens
tttttttcccaacat

SEQ ID NO: 513472 - DNA, 15 bp, Homo sapiens
ttttttcccaacatt

SEQ ID NO: 513473 - DNA, 15 bp, Homo sapiens
tttttcccaacattt

SEQ ID NO: 513474 - DNA, 15 bp, Homo sapiens
ttttcccaacatttt

SEQ ID NO: 513475 - DNA, 15 bp, Homo sapiens
tttcccaacatttta

SEQ ID NO: 513476 - DNA, 15 bp, Homo sapiens
ttcccaacattttat

SEQ ID NO: 513477 - DNA, 15 bp, Homo sapiens
tcccaacattttatt

SEQ ID NO: 513478 - DNA, 15 bp, Homo sapiens
cccaacattttattg

SEQ ID NO: 513479 - DNA, 15 bp, Homo sapiens
ccaacattttattgt

SEQ ID NO: 513480 - DNA, 15 bp, Homo sapiens
caacattttattgtg

SEQ ID NO: 513481 - DNA, 15 bp, Homo sapiens
aacattttattgtga

SEQ ID NO: 513482 - DNA, 15 bp, Homo sapiens
acattttattgtgaa

SEQ ID NO: 513483 - DNA, 15 bp, Homo sapiens
cattttattgtgaaa

SEQ ID NO: 513484 - DNA, 15 bp, Homo sapiens
attttattgtgaaaa

SEQ ID NO: 513485 - DNA, 15 bp, Homo sapiens
ttttattgtgaaaac

SEQ ID NO: 513486 - DNA, 15 bp, Homo sapiens
tttattgtgaaaact

SEQ ID NO: 513487 - DNA, 15 bp, Homo sapiens
ttattgtgaaaactt

SEQ ID NO: 513488 - DNA, 15 bp, Homo sapiens
tattgtgaaaacttc

SEQ ID NO: 513489 - DNA, 15 bp, Homo sapiens
attgtgaaaacttcc

SEQ ID NO: 513490 - DNA, 15 bp, Homo sapiens
ttgtgaaaacttcca

SEQ ID NO: 513491 - DNA, 15 bp, Homo sapiens
tgtgaaaacttccaa

SEQ ID NO: 513492 - DNA, 15 bp, Homo sapiens
gtgaaaacttccaaa

SEQ ID NO: 513493 - DNA, 15 bp, Homo sapiens
tgaaaacttccaaac

SEQ ID NO: 513494 - DNA, 15 bp, Homo sapiens
gaaaacttccaaaca

SEQ ID NO: 513495 - DNA, 15 bp, Homo sapiens
aaaacttccaaacat

SEQ ID NO: 513496 - DNA, 15 bp, Homo sapiens
aaacttccaaacatt

SEQ ID NO: 513497 - DNA, 15 bp, Homo sapiens
aacttccaaacattc

SEQ ID NO: 513498 - DNA, 15 bp, Homo sapiens
acttccaaacattca

SEQ ID NO: 513499 - DNA, 15 bp, Homo sapiens
cttccaaacattcag

SEQ ID NO: 513500 - DNA, 15 bp, Homo sapiens
ttccaaacattcaga

SEQ ID NO: 513501 - DNA, 15 bp, Homo sapiens
tccaaacattcagaa

SEQ ID NO: 513502 - DNA, 15 bp, Homo sapiens
ccaaacattcagaaa

SEQ ID NO: 513503 - DNA, 15 bp, Homo sapiens
caaacattcagaaaa

SEQ ID NO: 513504 - DNA, 15 bp, Homo sapiens
aaacattcagaaaag

SEQ ID NO: 513505 - DNA, 15 bp, Homo sapiens
aacattcagaaaagt

SEQ ID NO: 513506 - DNA, 15 bp, Homo sapiens
acattcagaaaagtc

SEQ ID NO: 513507 - DNA, 15 bp, Homo sapiens
cattcagaaaagtca

SEQ ID NO: 513508 - DNA, 15 bp, Homo sapiens
attcagaaaagtcaa

SEQ ID NO: 513509 - DNA, 15 bp, Homo sapiens
ttcagaaaagtcaaa

SEQ ID NO: 513510 - DNA, 15 bp, Homo sapiens
tcagaaaagtcaaaa

SEQ ID NO: 513511 - DNA, 15 bp, Homo sapiens
cagaaaagtcaaaag

SEQ ID NO: 513512 - DNA, 15 bp, Homo sapiens
agaaaagtcaaaaga

SEQ ID NO: 513513 - DNA, 15 bp, Homo sapiens
gaaaagtcaaaagag

SEQ ID NO: 513514 - DNA, 15 bp, Homo sapiens
ggatagacaggtagg

SEQ ID NO: 513515 - DNA, 15 bp, Homo sapiens
gatagacaggtaggg

SEQ ID NO: 513516 - DNA, 15 bp, Homo sapiens
atagacaggtaggga

SEQ ID NO: 513517 - DNA, 15 bp, Homo sapiens
tagacaggtagggat

SEQ ID NO: 513518 - DNA, 15 bp, Homo sapiens
agacaggtagggatg

SEQ ID NO: 513519 - DNA, 15 bp, Homo sapiens
gacaggtagggatgg

SEQ ID NO: 513520 - DNA, 15 bp, Homo sapiens
acaggtagggatggg

SEQ ID NO: 513521 - DNA, 15 bp, Homo sapiens
caggtagggatggga

SEQ ID NO: 513522 - DNA, 15 bp, Homo sapiens
aggtagggatgggaa

SEQ ID NO: 513523 - DNA, 15 bp, Homo sapiens
ggtagggatgggaac

SEQ ID NO: 513524 - DNA, 15 bp, Homo sapiens
gtagggatgggaact

SEQ ID NO: 513525 - DNA, 15 bp, Homo sapiens
tagggatgggaactt

SEQ ID NO: 513526 - DNA, 15 bp, Homo sapiens
agggatgggaacttg

SEQ ID NO: 513527 - DNA, 15 bp, Homo sapiens
gggatgggaacttgg

SEQ ID NO: 513528 - DNA, 15 bp, Homo sapiens
ggatgggaacttggg

SEQ ID NO: 513529 - DNA, 15 bp, Homo sapiens
gatgggaacttgggt

SEQ ID NO: 513530 - DNA, 15 bp, Homo sapiens
atgggaacttgggtg

SEQ ID NO: 513531 - DNA, 15 bp, Homo sapiens
tgggaacttgggtga

SEQ ID NO: 513532 - DNA, 15 bp, Homo sapiens
gggaacttgggtgat

SEQ ID NO: 513533 - DNA, 15 bp, Homo sapiens
ggaacttgggtgatg

SEQ ID NO: 513534 - DNA, 15 bp, Homo sapiens
gaacttgggtgatgt

SEQ ID NO: 513535 - DNA, 15 bp, Homo sapiens
aacttgggtgatgta

SEQ ID NO: 513536 - DNA, 15 bp, Homo sapiens
acttgggtgatgtat

SEQ ID NO: 513537 - DNA, 15 bp, Homo sapiens
cttgggtgatgtatt

SEQ ID NO: 513538 - DNA, 15 bp, Homo sapiens
ttgggtgatgtattt

SEQ ID NO: 513539 - DNA, 15 bp, Homo sapiens
tgggtgatgtatttt

SEQ ID NO: 513540 - DNA, 15 bp, Homo sapiens
gggtgatgtattttc

SEQ ID NO: 513541 - DNA, 15 bp, Homo sapiens
ggtgatgtattttct

SEQ ID NO: 513542 - DNA, 15 bp, Homo sapiens
gtgatgtattttctg

SEQ ID NO: 513543 - DNA, 15 bp, Homo sapiens
tgatgtattttctga

SEQ ID NO: 513544 - DNA, 15 bp, Homo sapiens
gatgtattttctgaa

SEQ ID NO: 513545 - DNA, 15 bp, Homo sapiens
atgtattttctgaag

SEQ ID NO: 513546 - DNA, 15 bp, Homo sapiens
tgtattttctgaagt

SEQ ID NO: 513547 - DNA, 15 bp, Homo sapiens
gtattttctgaagtt

SEQ ID NO: 513548 - DNA, 15 bp, Homo sapiens
tattttctgaagttt

SEQ ID NO: 513549 - DNA, 15 bp, Homo sapiens
attttctgaagtttt

SEQ ID NO: 513550 - DNA, 15 bp, Homo sapiens
ttttctgaagttttt

SEQ ID NO: 513551 - DNA, 15 bp, Homo sapiens
tttctgaagttttta

SEQ ID NO: 513552 - DNA, 15 bp, Homo sapiens
ttctgaagtttttat

SEQ ID NO: 513553 - DNA, 15 bp, Homo sapiens
tctgaagtttttatt

SEQ ID NO: 513554 - DNA, 15 bp, Homo sapiens
ctgaagtttttattt

SEQ ID NO: 513555 - DNA, 15 bp, Homo sapiens
tgaagtttttatttt

SEQ ID NO: 513556 - DNA, 15 bp, Homo sapiens
gaagtttttattttt

SEQ ID NO: 513557 - DNA, 15 bp, Homo sapiens
aagtttttattttta

SEQ ID NO: 513558 - DNA, 15 bp, Homo sapiens
agtttttatttttaa

SEQ ID NO: 513559 - DNA, 15 bp, Homo sapiens
gtttttatttttaag

SEQ ID NO: 513560 - DNA, 15 bp, Homo sapiens
tttttatttttaagc

SEQ ID NO: 513561 - DNA, 15 bp, Homo sapiens
ttttatttttaagct

SEQ ID NO: 513562 - DNA, 15 bp, Homo sapiens
tttatttttaagctt

SEQ ID NO: 513563 - DNA, 15 bp, Homo sapiens
ttatttttaagctta

SEQ ID NO: 513564 - DNA, 15 bp, Homo sapiens
tatttttaagcttat

SEQ ID NO: 513565 - DNA, 15 bp, Homo sapiens
atttttaagcttatt

SEQ ID NO: 513566 - DNA, 15 bp, Homo sapiens
tttttaagcttatta

SEQ ID NO: 513567 - DNA, 15 bp, Homo sapiens
ttttaagcttattat

SEQ ID NO: 513568 - DNA, 15 bp, Homo sapiens
tttaagcttattatt

SEQ ID NO: 513569 - DNA, 15 bp, Homo sapiens
ttaagcttattatta

SEQ ID NO: 513570 - DNA, 15 bp, Homo sapiens
taagcttattattat

SEQ ID NO: 513571 - DNA, 15 bp, Homo sapiens
aagcttattattatt

SEQ ID NO: 513572 - DNA, 15 bp, Homo sapiens
agcttattattattt

SEQ ID NO: 513573 - DNA, 15 bp, Homo sapiens
gcttattattatttt

SEQ ID NO: 513574 - DNA, 15 bp, Homo sapiens
cttattattattttg

SEQ ID NO: 513575 - DNA, 15 bp, Homo sapiens
ttattattttgagat

SEQ ID NO: 513576 - DNA, 15 bp, Homo sapiens
tattattttgagatg

SEQ ID NO: 513577 - DNA, 15 bp, Homo sapiens
attattttgagatgg

SEQ ID NO: 513578 - DNA, 15 bp, Homo sapiens
ttattttgagatgga

SEQ ID NO: 513579 - DNA, 15 bp, Homo sapiens
tattttgagatggag

SEQ ID NO: 513580 - DNA, 15 bp, Homo sapiens
attttgagatggagt

SEQ ID NO: 513581 - DNA, 15 bp, Homo sapiens
tttgagatggagtcc

SEQ ID NO: 513582 - DNA, 15 bp, Homo sapiens
ttgagatggagtcca

SEQ ID NO: 513583 - DNA, 15 bp, Homo sapiens
tgagatggagtccag

SEQ ID NO: 513584 - DNA, 15 bp, Homo sapiens
gagatggagtccagc

SEQ ID NO: 513585 - DNA, 15 bp, Homo sapiens
agatggagtccagct

SEQ ID NO: 513586 - DNA, 15 bp, Homo sapiens
gatggagtccagctc

SEQ ID NO: 513587 - DNA, 15 bp, Homo sapiens
atggagtccagctct

SEQ ID NO: 513588 - DNA, 15 bp, Homo sapiens
tggagtccagctctg

SEQ ID NO: 513589 - DNA, 15 bp, Homo sapiens
ggagtccagctctgt

SEQ ID NO: 513590 - DNA, 15 bp, Homo sapiens
gagtccagctctgtc

SEQ ID NO: 513591 - DNA, 15 bp, Homo sapiens
agtccagctctgtcg

SEQ ID NO: 513592 - DNA, 15 bp, Homo sapiens
gtccagctctgtcgc

SEQ ID NO: 513593 - DNA, 15 bp, Homo sapiens
tccagctctgtcgcc

SEQ ID NO: 513594 - DNA, 15 bp, Homo sapiens
ccagctctgtcgccc

SEQ ID NO: 513595 - DNA, 15 bp, Homo sapiens
cagctctgtcgccca

SEQ ID NO: 513596 - DNA, 15 bp, Homo sapiens
agctctgtcgcccag

SEQ ID NO: 513597 - DNA, 15 bp, Homo sapiens
ctctgtcgcccaggt

SEQ ID NO: 513598 - DNA, 15 bp, Homo sapiens
tctgtcgcccaggtt

SEQ ID NO: 513599 - DNA, 15 bp, Homo sapiens
ctgtcgcccaggttg

SEQ ID NO: 513600 - DNA, 15 bp, Homo sapiens
tgtcgcccaggttgg

SEQ ID NO: 513601 - DNA, 15 bp, Homo sapiens
gtcgcccaggttgga

SEQ ID NO: 513602 - DNA, 15 bp, Homo sapiens
tcgcccaggttggag

SEQ ID NO: 513603 - DNA, 15 bp, Homo sapiens
cgcccaggttggagt

SEQ ID NO: 513604 - DNA, 15 bp, Homo sapiens
gcccaggttggagta

SEQ ID NO: 513605 - DNA, 15 bp, Homo sapiens
cccaggttggagtac

SEQ ID NO: 513606 - DNA, 15 bp, Homo sapiens
ccaggttggagtaca

SEQ ID NO: 513607 - DNA, 15 bp, Homo sapiens
caggttggagtacag

SEQ ID NO: 513608 - DNA, 15 bp, Homo sapiens
aggttggagtacagt

SEQ ID NO: 513609 - DNA, 15 bp, Homo sapiens
ggttggagtacagtg

SEQ ID NO: 513610 - DNA, 15 bp, Homo sapiens
gttggagtacagtgg

SEQ ID NO: 513611 - DNA, 15 bp, Homo sapiens
ttggagtacagtggc

SEQ ID NO: 513612 - DNA, 15 bp, Homo sapiens
tggagtacagtggcg

SEQ ID NO: 513613 - DNA, 15 bp, Homo sapiens
ggagtacagtggcgc

SEQ ID NO: 513614 - DNA, 15 bp, Homo sapiens
gagtacagtggcgcg

SEQ ID NO: 513615 - DNA, 15 bp, Homo sapiens
agtacagtggcgcga

SEQ ID NO: 513616 - DNA, 15 bp, Homo sapiens
gtacagtggcgcgat

SEQ ID NO: 513617 - DNA, 15 bp, Homo sapiens
tacagtggcgcgatc

SEQ ID NO: 513618 - DNA, 15 bp, Homo sapiens
acagtggcgcgatct

SEQ ID NO: 513619 - DNA, 15 bp, Homo sapiens
cagtggcgcgatctt

SEQ ID NO: 513620 - DNA, 15 bp, Homo sapiens
agtggcgcgatcttg

SEQ ID NO: 513621 - DNA, 15 bp, Homo sapiens
gtggcgcgatcttgg

SEQ ID NO: 513622 - DNA, 15 bp, Homo sapiens
tggcgcgatcttggc

SEQ ID NO: 513623 - DNA, 15 bp, Homo sapiens
ggcgcgatcttggct

SEQ ID NO: 513624 - DNA, 15 bp, Homo sapiens
gcgcgatcttggctc

SEQ ID NO: 513625 - DNA, 15 bp, Homo sapiens
cgcgatcttggctca

SEQ ID NO: 513626 - DNA, 15 bp, Homo sapiens
gcgatcttggctcac

SEQ ID NO: 513627 - DNA, 15 bp, Homo sapiens
tggctcactgcaacg

SEQ ID NO: 513628 - DNA, 15 bp, Homo sapiens
ggctcactgcaacgt

SEQ ID NO: 513629 - DNA, 15 bp, Homo sapiens
gctcactgcaacgtg

SEQ ID NO: 513630 - DNA, 15 bp, Homo sapiens
ctcactgcaacgtgc

SEQ ID NO: 513631 - DNA, 15 bp, Homo sapiens
tcactgcaacgtgca

SEQ ID NO: 513632 - DNA, 15 bp, Homo sapiens
cactgcaacgtgcac

SEQ ID NO: 513633 - DNA, 15 bp, Homo sapiens
actgcaacgtgcact

SEQ ID NO: 513634 - DNA, 15 bp, Homo sapiens
ctgcaacgtgcactt

SEQ ID NO: 513635 - DNA, 15 bp, Homo sapiens
tgcaacgtgcacttc

SEQ ID NO: 513636 - DNA, 15 bp, Homo sapiens
gcaacgtgcacttcc

SEQ ID NO: 513637 - DNA, 15 bp, Homo sapiens
caacgtgcacttccc

SEQ ID NO: 513638 - DNA, 15 bp, Homo sapiens
aacgtgcacttcccc

SEQ ID NO: 513639 - DNA, 15 bp, Homo sapiens
acgtgcacttccccg

SEQ ID NO: 513640 - DNA, 15 bp, Homo sapiens
cgtgcacttccccgg

SEQ ID NO: 513641 - DNA, 15 bp, Homo sapiens
gtgcacttccccggt

SEQ ID NO: 513642 - DNA, 15 bp, Homo sapiens
tgcacttccccggtt

SEQ ID NO: 513643 - DNA, 15 bp, Homo sapiens
gcacttccccggttc

SEQ ID NO: 513644 - DNA, 15 bp, Homo sapiens
cacttccccggttca

SEQ ID NO: 513645 - DNA, 15 bp, Homo sapiens
acttccccggttcaa

SEQ ID NO: 513646 - DNA, 15 bp, Homo sapiens
cttccccggttcaag

SEQ ID NO: 513647 - DNA, 15 bp, Homo sapiens
ttccccggttcaagc

SEQ ID NO: 513648 - DNA, 15 bp, Homo sapiens
tccccggttcaagcg

SEQ ID NO: 513649 - DNA, 15 bp, Homo sapiens
ccccggttcaagcga

SEQ ID NO: 513650 - DNA, 15 bp, Homo sapiens
cccggttcaagcgat

SEQ ID NO: 513651 - DNA, 15 bp, Homo sapiens
ccggttcaagcgatt

SEQ ID NO: 513652 - DNA, 15 bp, Homo sapiens
cggttcaagcgattc

SEQ ID NO: 513653 - DNA, 15 bp, Homo sapiens
ggttcaagcgattct

SEQ ID NO: 513654 - DNA, 15 bp, Homo sapiens
gttcaagcgattctc

SEQ ID NO: 513655 - DNA, 15 bp, Homo sapiens
ttcaagcgattctcc

SEQ ID NO: 513656 - DNA, 15 bp, Homo sapiens
tcaagcgattctcct

SEQ ID NO: 513657 - DNA, 15 bp, Homo sapiens
caagcgattctcctg

SEQ ID NO: 513658 - DNA, 15 bp, Homo sapiens
aagcgattctcctgc

SEQ ID NO: 513659 - DNA, 15 bp, Homo sapiens
agcgattctcctgcc

SEQ ID NO: 513660 - DNA, 15 bp, Homo sapiens
gcgattctcctgcct

SEQ ID NO: 513661 - DNA, 15 bp, Homo sapiens
cgattctcctgcctt

SEQ ID NO: 513662 - DNA, 15 bp, Homo sapiens
gattctcctgcctta

SEQ ID NO: 513663 - DNA, 15 bp, Homo sapiens
attctcctgccttag

SEQ ID NO: 513664 - DNA, 15 bp, Homo sapiens
ttctcctgccttagc

SEQ ID NO: 513665 - DNA, 15 bp, Homo sapiens
tctcctgccttagcc

SEQ ID NO: 513666 - DNA, 15 bp, Homo sapiens
ctcctgccttagcct

SEQ ID NO: 513667 - DNA, 15 bp, Homo sapiens
tcctgccttagcctc

SEQ ID NO: 513668 - DNA, 15 bp, Homo sapiens
cctgccttagcctcc

SEQ ID NO: 513669 - DNA, 15 bp, Homo sapiens
ctgccttagcctccc

SEQ ID NO: 513670 - DNA, 15 bp, Homo sapiens
tgccttagcctccca

SEQ ID NO: 513671 - DNA, 15 bp, Homo sapiens
gccttagcctcccaa

SEQ ID NO: 513672 - DNA, 15 bp, Homo sapiens
ccttagcctcccaag

SEQ ID NO: 513673 - DNA, 15 bp, Homo sapiens
cttagcctcccaagt

SEQ ID NO: 513674 - DNA, 15 bp, Homo sapiens
ttagcctcccaagta

SEQ ID NO: 513675 - DNA, 15 bp, Homo sapiens
tagcctcccaagtag

SEQ ID NO: 513676 - DNA, 15 bp, Homo sapiens
cctcccaagtagctg

SEQ ID NO: 513677 - DNA, 15 bp, Homo sapiens
ctcccaagtagctgg

SEQ ID NO: 513678 - DNA, 15 bp, Homo sapiens
tcccaagtagctggg

SEQ ID NO: 513679 - DNA, 15 bp, Homo sapiens
ccaagtagctgggat

SEQ ID NO: 513680 - DNA, 15 bp, Homo sapiens
caagtagctgggatt

SEQ ID NO: 513681 - DNA, 15 bp, Homo sapiens
aagtagctgggatta

SEQ ID NO: 513682 - DNA, 15 bp, Homo sapiens
agtagctgggattac

SEQ ID NO: 513683 - DNA, 15 bp, Homo sapiens
gtagctgggattaca

SEQ ID NO: 513684 - DNA, 15 bp, Homo sapiens
tagctgggattacag

SEQ ID NO: 513685 - DNA, 15 bp, Homo sapiens
agctgggattacagg

SEQ ID NO: 513686 - DNA, 15 bp, Homo sapiens
tgggattacaggcgc

SEQ ID NO: 513687 - DNA, 15 bp, Homo sapiens
gggattacaggcgca

SEQ ID NO: 513688 - DNA, 15 bp, Homo sapiens
ggattacaggcgcat

SEQ ID NO: 513689 - DNA, 15 bp, Homo sapiens
gattacaggcgcatg

SEQ ID NO: 513690 - DNA, 15 bp, Homo sapiens
attacaggcgcatgc

SEQ ID NO: 513691 - DNA, 15 bp, Homo sapiens
ttacaggcgcatgcc

SEQ ID NO: 513692 - DNA, 15 bp, Homo sapiens
tacaggcgcatgcca

SEQ ID NO: 513693 - DNA, 15 bp, Homo sapiens
acaggcgcatgccac

SEQ ID NO: 513694 - DNA, 15 bp, Homo sapiens
caggcgcatgccacc

SEQ ID NO: 513695 - DNA, 15 bp, Homo sapiens
aggcgcatgccacca

SEQ ID NO: 513696 - DNA, 15 bp, Homo sapiens
ggcgcatgccaccat

SEQ ID NO: 513697 - DNA, 15 bp, Homo sapiens
gcgcatgccaccatg

SEQ ID NO: 513698 - DNA, 15 bp, Homo sapiens
cgcatgccaccatgc

SEQ ID NO: 513699 - DNA, 15 bp, Homo sapiens
gcatgccaccatgcc

SEQ ID NO: 513700 - DNA, 15 bp, Homo sapiens
catgccaccatgccc

SEQ ID NO: 513701 - DNA, 15 bp, Homo sapiens
atgccaccatgccca

SEQ ID NO: 513702 - DNA, 15 bp, Homo sapiens
tgccaccatgcccag

SEQ ID NO: 513703 - DNA, 15 bp, Homo sapiens
gccaccatgcccagt

SEQ ID NO: 513704 - DNA, 15 bp, Homo sapiens
ccaccatgcccagtt

SEQ ID NO: 513705 - DNA, 15 bp, Homo sapiens
caccatgcccagtta

SEQ ID NO: 513706 - DNA, 15 bp, Homo sapiens
accatgcccagttag

SEQ ID NO: 513707 - DNA, 15 bp, Homo sapiens
ccatgcccagttagt

SEQ ID NO: 513708 - DNA, 15 bp, Homo sapiens
catgcccagttagtt

SEQ ID NO: 513709 - DNA, 15 bp, Homo sapiens
atgcccagttagttt

SEQ ID NO: 513710 - DNA, 15 bp, Homo sapiens
tgcccagttagtttt

SEQ ID NO: 513711 - DNA, 15 bp, Homo sapiens
gcccagttagttttg

SEQ ID NO: 513712 - DNA, 15 bp, Homo sapiens
cccagttagttttgg

SEQ ID NO: 513713 - DNA, 15 bp, Homo sapiens
ccagttagttttggt

SEQ ID NO: 513714 - DNA, 15 bp, Homo sapiens
cagttagttttggta

SEQ ID NO: 513715 - DNA, 15 bp, Homo sapiens
agttagttttggtat

SEQ ID NO: 513716 - DNA, 15 bp, Homo sapiens
gttagttttggtatt

SEQ ID NO: 513717 - DNA, 15 bp, Homo sapiens
ttagttttggtattt

SEQ ID NO: 513718 - DNA, 15 bp, Homo sapiens
tagttttggtatttt

SEQ ID NO: 513719 - DNA, 15 bp, Homo sapiens
agttttggtattttt

SEQ ID NO: 513720 - DNA, 15 bp, Homo sapiens
gttttggtattttta

SEQ ID NO: 513721 - DNA, 15 bp, Homo sapiens
ttttggtatttttag

SEQ ID NO: 513722 - DNA, 15 bp, Homo sapiens
tttggtatttttagt

SEQ ID NO: 513723 - DNA, 15 bp, Homo sapiens
ttggtatttttagta

SEQ ID NO: 513724 - DNA, 15 bp, Homo sapiens
tggtatttttagtag

SEQ ID NO: 513725 - DNA, 15 bp, Homo sapiens
ggtatttttagtaga

SEQ ID NO: 513726 - DNA, 15 bp, Homo sapiens
tttagtagagacagc

SEQ ID NO: 513727 - DNA, 15 bp, Homo sapiens
ttagtagagacagcg

SEQ ID NO: 513728 - DNA, 15 bp, Homo sapiens
tagtagagacagcgt

SEQ ID NO: 513729 - DNA, 15 bp, Homo sapiens
agtagagacagcgtt

SEQ ID NO: 513730 - DNA, 15 bp, Homo sapiens
gtagagacagcgttt

SEQ ID NO: 513731 - DNA, 15 bp, Homo sapiens
tagagacagcgtttc

SEQ ID NO: 513732 - DNA, 15 bp, Homo sapiens
agagacagcgtttca

SEQ ID NO: 513733 - DNA, 15 bp, Homo sapiens
gagacagcgtttcac

SEQ ID NO: 513734 - DNA, 15 bp, Homo sapiens
agacagcgtttcact

SEQ ID NO: 513735 - DNA, 15 bp, Homo sapiens
gacagcgtttcactg

SEQ ID NO: 513736 - DNA, 15 bp, Homo sapiens
acagcgtttcactgt

SEQ ID NO: 513737 - DNA, 15 bp, Homo sapiens
cagcgtttcactgtg

SEQ ID NO: 513738 - DNA, 15 bp, Homo sapiens
agcgtttcactgtgt

SEQ ID NO: 513739 - DNA, 15 bp, Homo sapiens
gcgtttcactgtgtt

SEQ ID NO: 513740 - DNA, 15 bp, Homo sapiens
cgtttcactgtgttg

SEQ ID NO: 513741 - DNA, 15 bp, Homo sapiens
gtttcactgtgttgg

SEQ ID NO: 513742 - DNA, 15 bp, Homo sapiens
tttcactgtgttggc

SEQ ID NO: 513743 - DNA, 15 bp, Homo sapiens
ttcactgtgttggcc

SEQ ID NO: 513744 - DNA, 15 bp, Homo sapiens
tcactgtgttggcca

SEQ ID NO: 513745 - DNA, 15 bp, Homo sapiens
cactgtgttggccag

SEQ ID NO: 513746 - DNA, 15 bp, Homo sapiens
actgtgttggccagg

SEQ ID NO: 513747 - DNA, 15 bp, Homo sapiens
ctgtgttggccaggc

SEQ ID NO: 513748 - DNA, 15 bp, Homo sapiens
tgtgttggccaggct

SEQ ID NO: 513749 - DNA, 15 bp, Homo sapiens
gtgttggccaggctg

SEQ ID NO: 513750 - DNA, 15 bp, Homo sapiens
tgttggccaggctgg

SEQ ID NO: 513751 - DNA, 15 bp, Homo sapiens
gttggccaggctggt

SEQ ID NO: 513752 - DNA, 15 bp, Homo sapiens
ttggccaggctggtc

SEQ ID NO: 513753 - DNA, 15 bp, Homo sapiens
tggccaggctggtct

SEQ ID NO: 513754 - DNA, 15 bp, Homo sapiens
ggccaggctggtctc

SEQ ID NO: 513755 - DNA, 15 bp, Homo sapiens
gccaggctggtctcg

SEQ ID NO: 513756 - DNA, 15 bp, Homo sapiens
ccaggctggtctcga

SEQ ID NO: 513757 - DNA, 15 bp, Homo sapiens
caggctggtctcgaa

SEQ ID NO: 513758 - DNA, 15 bp, Homo sapiens
aggctggtctcgaaa

SEQ ID NO: 513759 - DNA, 15 bp, Homo sapiens
ggctggtctcgaaat

SEQ ID NO: 513760 - DNA, 15 bp, Homo sapiens
gctggtctcgaaatc

SEQ ID NO: 513761 - DNA, 15 bp, Homo sapiens
ctggtctcgaaatcc

SEQ ID NO: 513762 - DNA, 15 bp, Homo sapiens
tggtctcgaaatcct

SEQ ID NO: 513763 - DNA, 15 bp, Homo sapiens
ggtctcgaaatcctg

SEQ ID NO: 513764 - DNA, 15 bp, Homo sapiens
gtctcgaaatcctga

SEQ ID NO: 513765 - DNA, 15 bp, Homo sapiens
tctcgaaatcctgac

SEQ ID NO: 513766 - DNA, 15 bp, Homo sapiens
ctcgaaatcctgacc

SEQ ID NO: 513767 - DNA, 15 bp, Homo sapiens
tcgaaatcctgacct

SEQ ID NO: 513768 - DNA, 15 bp, Homo sapiens
cgaaatcctgacctc

SEQ ID NO: 513769 - DNA, 15 bp, Homo sapiens
gaaatcctgacctca

SEQ ID NO: 513770 - DNA, 15 bp, Homo sapiens
aaatcctgacctcat

SEQ ID NO: 513771 - DNA, 15 bp, Homo sapiens
aatcctgacctcatg

SEQ ID NO: 513772 - DNA, 15 bp, Homo sapiens
atcctgacctcatga

SEQ ID NO: 513773 - DNA, 15 bp, Homo sapiens
tcctgacctcatgat

SEQ ID NO: 513774 - DNA, 15 bp, Homo sapiens
cctgacctcatgatc

SEQ ID NO: 513775 - DNA, 15 bp, Homo sapiens
ctgacctcatgatcc

SEQ ID NO: 513776 - DNA, 15 bp, Homo sapiens
tgacctcatgatccg

SEQ ID NO: 513777 - DNA, 15 bp, Homo sapiens
gacctcatgatccgc

SEQ ID NO: 513778 - DNA, 15 bp, Homo sapiens
acctcatgatccgcc

SEQ ID NO: 513779 - DNA, 15 bp, Homo sapiens
cctcatgatccgccc

SEQ ID NO: 513780 - DNA, 15 bp, Homo sapiens
ctcatgatccgcccg

SEQ ID NO: 513781 - DNA, 15 bp, Homo sapiens
tcatgatccgcccgc

SEQ ID NO: 513782 - DNA, 15 bp, Homo sapiens
catgatccgcccgcc

SEQ ID NO: 513783 - DNA, 15 bp, Homo sapiens
atgatccgcccgcct

SEQ ID NO: 513784 - DNA, 15 bp, Homo sapiens
tgatccgcccgcctc

SEQ ID NO: 513785 - DNA, 15 bp, Homo sapiens
gatccgcccgcctcg

SEQ ID NO: 513786 - DNA, 15 bp, Homo sapiens
atccgcccgcctcgg

SEQ ID NO: 513787 - DNA, 15 bp, Homo sapiens
tccgcccgcctcggc

SEQ ID NO: 513788 - DNA, 15 bp, Homo sapiens
ccgcccgcctcggcc

SEQ ID NO: 513789 - DNA, 15 bp, Homo sapiens
cgcccgcctcggcct

SEQ ID NO: 513790 - DNA, 15 bp, Homo sapiens
gcccgcctcggcctc

SEQ ID NO: 513791 - DNA, 15 bp, Homo sapiens
cccgcctcggcctcc

SEQ ID NO: 513792 - DNA, 15 bp, Homo sapiens
ccgcctcggcctccc

SEQ ID NO: 513793 - DNA, 15 bp, Homo sapiens
cgcctcggcctccca

SEQ ID NO: 513794 - DNA, 15 bp, Homo sapiens
gcctcggcctcccaa

SEQ ID NO: 513795 - DNA, 15 bp, Homo sapiens
cctcggcctcccaag

SEQ ID NO: 513796 - DNA, 15 bp, Homo sapiens
ctcggcctcccaagt

SEQ ID NO: 513797 - DNA, 15 bp, Homo sapiens
tcggcctcccaagtg

SEQ ID NO: 513798 - DNA, 15 bp, Homo sapiens
cggcctcccaagtgc

SEQ ID NO: 513799 - DNA, 15 bp, Homo sapiens
ggcctcccaagtgct

SEQ ID NO: 513800 - DNA, 15 bp, Homo sapiens
gcctcccaagtgctg

SEQ ID NO: 513801 - DNA, 15 bp, Homo sapiens
cctcccaagtgctgg

SEQ ID NO: 513802 - DNA, 15 bp, Homo sapiens
ctcccaagtgctggg

SEQ ID NO: 513803 - DNA, 15 bp, Homo sapiens
tcccaagtgctggga

SEQ ID NO: 513804 - DNA, 15 bp, Homo sapiens
cccaagtgctgggat

SEQ ID NO: 513805 - DNA, 15 bp, Homo sapiens
ccaagtgctgggatt

SEQ ID NO: 513806 - DNA, 15 bp, Homo sapiens
caagtgctgggatta

SEQ ID NO: 513807 - DNA, 15 bp, Homo sapiens
gtgctgggattacaa

SEQ ID NO: 513808 - DNA, 15 bp, Homo sapiens
tgctgggattacaag

SEQ ID NO: 513809 - DNA, 15 bp, Homo sapiens
gctgggattacaagc

SEQ ID NO: 513810 - DNA, 15 bp, Homo sapiens
ctgggattacaagca

SEQ ID NO: 513811 - DNA, 15 bp, Homo sapiens
tgggattacaagcat

SEQ ID NO: 513812 - DNA, 15 bp, Homo sapiens
gggattacaagcatg

SEQ ID NO: 513813 - DNA, 15 bp, Homo sapiens
ggattacaagcatga

SEQ ID NO: 513814 - DNA, 15 bp, Homo sapiens
gattacaagcatgag

SEQ ID NO: 513815 - DNA, 15 bp, Homo sapiens
attacaagcatgagc

SEQ ID NO: 513816 - DNA, 15 bp, Homo sapiens
ttacaagcatgagcc

SEQ ID NO: 513817 - DNA, 15 bp, Homo sapiens
tacaagcatgagccc

SEQ ID NO: 513818 - DNA, 15 bp, Homo sapiens
acaagcatgagcccc

SEQ ID NO: 513819 - DNA, 15 bp, Homo sapiens
caagcatgagccccc

SEQ ID NO: 513820 - DNA, 15 bp, Homo sapiens
aagcatgagcccccg

SEQ ID NO: 513821 - DNA, 15 bp, Homo sapiens
agcatgagcccccgt

SEQ ID NO: 513822 - DNA, 15 bp, Homo sapiens
gcatgagcccccgtg

SEQ ID NO: 513823 - DNA, 15 bp, Homo sapiens
catgagcccccgtgt

SEQ ID NO: 513824 - DNA, 15 bp, Homo sapiens
atgagcccccgtgtc

SEQ ID NO: 513825 - DNA, 15 bp, Homo sapiens
tgagcccccgtgtct

SEQ ID NO: 513826 - DNA, 15 bp, Homo sapiens
gagcccccgtgtctg

SEQ ID NO: 513827 - DNA, 15 bp, Homo sapiens
agcccccgtgtctgg

SEQ ID NO: 513828 - DNA, 15 bp, Homo sapiens
gcccccgtgtctggc

SEQ ID NO: 513829 - DNA, 15 bp, Homo sapiens
cccccgtgtctggcc

SEQ ID NO: 513830 - DNA, 15 bp, Homo sapiens
ccccgtgtctggcct

SEQ ID NO: 513831 - DNA, 15 bp, Homo sapiens
cccgtgtctggcctt

SEQ ID NO: 513832 - DNA, 15 bp, Homo sapiens
ccgtgtctggcctta

SEQ ID NO: 513833 - DNA, 15 bp, Homo sapiens
cgtgtctggccttat

SEQ ID NO: 513834 - DNA, 15 bp, Homo sapiens
gtgtctggccttatt

SEQ ID NO: 513835 - DNA, 15 bp, Homo sapiens
tgtctggccttattt

SEQ ID NO: 513836 - DNA, 15 bp, Homo sapiens
gtctggccttatttt

SEQ ID NO: 513837 - DNA, 15 bp, Homo sapiens
tctggccttattttc

SEQ ID NO: 513838 - DNA, 15 bp, Homo sapiens
ctggccttattttct

SEQ ID NO: 513839 - DNA, 15 bp, Homo sapiens
tggccttattttctt

SEQ ID NO: 513840 - DNA, 15 bp, Homo sapiens
ggccttattttcttt

SEQ ID NO: 513841 - DNA, 15 bp, Homo sapiens
gccttattttctttt

SEQ ID NO: 513842 - DNA, 15 bp, Homo sapiens
ccttattttcttttt

SEQ ID NO: 513843 - DNA, 15 bp, Homo sapiens
cttattttctttttt

SEQ ID NO: 513844 - DNA, 15 bp, Homo sapiens
ttattttcttttttt

SEQ ID NO: 513845 - DNA, 15 bp, Homo sapiens
tattttctttttttt

SEQ ID NO: 513846 - DNA, 15 bp, Homo sapiens
attttcttttttttg

SEQ ID NO: 513847 - DNA, 15 bp, Homo sapiens
ttttcttttttttga

SEQ ID NO: 513848 - DNA, 15 bp, Homo sapiens
tttcttttttttgag

SEQ ID NO: 513849 - DNA, 15 bp, Homo sapiens
ttcttttttttgaga

SEQ ID NO: 513850 - DNA, 15 bp, Homo sapiens
tcttttttttgagac

SEQ ID NO: 513851 - DNA, 15 bp, Homo sapiens
cttttttttgagaca

SEQ ID NO: 513852 - DNA, 15 bp, Homo sapiens
ttttttgagacagag

SEQ ID NO: 513853 - DNA, 15 bp, Homo sapiens
tttttgagacagagt

SEQ ID NO: 513854 - DNA, 15 bp, Homo sapiens
ttttgagacagagtc

SEQ ID NO: 513855 - DNA, 15 bp, Homo sapiens
tttgagacagagtct

SEQ ID NO: 513856 - DNA, 15 bp, Homo sapiens
ttgagacagagtctt

SEQ ID NO: 513857 - DNA, 15 bp, Homo sapiens
tgagacagagtcttc

SEQ ID NO: 513858 - DNA, 15 bp, Homo sapiens
gagacagagtcttcc

SEQ ID NO: 513859 - DNA, 15 bp, Homo sapiens
agacagagtcttcct

SEQ ID NO: 513860 - DNA, 15 bp, Homo sapiens
gacagagtcttcctc

SEQ ID NO: 513861 - DNA, 15 bp, Homo sapiens
acagagtcttcctct

SEQ ID NO: 513862 - DNA, 15 bp, Homo sapiens
cagagtcttcctctg

SEQ ID NO: 513863 - DNA, 15 bp, Homo sapiens
agagtcttcctctgt

SEQ ID NO: 513864 - DNA, 15 bp, Homo sapiens
gagtcttcctctgtc

SEQ ID NO: 513865 - DNA, 15 bp, Homo sapiens
agtcttcctctgtca

SEQ ID NO: 513866 - DNA, 15 bp, Homo sapiens
gtcttcctctgtcac

SEQ ID NO: 513867 - DNA, 15 bp, Homo sapiens
tcttcctctgtcacc

SEQ ID NO: 513868 - DNA, 15 bp, Homo sapiens
cttcctctgtcacct

SEQ ID NO: 513869 - DNA, 15 bp, Homo sapiens
ttcctctgtcaccta

SEQ ID NO: 513870 - DNA, 15 bp, Homo sapiens
tcctctgtcacctag

SEQ ID NO: 513871 - DNA, 15 bp, Homo sapiens
cctctgtcacctagg

SEQ ID NO: 513872 - DNA, 15 bp, Homo sapiens
ctctgtcacctaggc

SEQ ID NO: 513873 - DNA, 15 bp, Homo sapiens
tctgtcacctaggct

SEQ ID NO: 513874 - DNA, 15 bp, Homo sapiens
ctgtcacctaggctg

SEQ ID NO: 513875 - DNA, 15 bp, Homo sapiens
tgtcacctaggctgg

SEQ ID NO: 513876 - DNA, 15 bp, Homo sapiens
gtcacctaggctgga

SEQ ID NO: 513877 - DNA, 15 bp, Homo sapiens
tcacctaggctggag

SEQ ID NO: 513878 - DNA, 15 bp, Homo sapiens
cacctaggctggagt

SEQ ID NO: 513879 - DNA, 15 bp, Homo sapiens
acctaggctggagtg

SEQ ID NO: 513880 - DNA, 15 bp, Homo sapiens
tgcagtggcacgata

SEQ ID NO: 513881 - DNA, 15 bp, Homo sapiens
gcagtggcacgatat

SEQ ID NO: 513882 - DNA, 15 bp, Homo sapiens
cagtggcacgatatt

SEQ ID NO: 513883 - DNA, 15 bp, Homo sapiens
agtggcacgatattg

SEQ ID NO: 513884 - DNA, 15 bp, Homo sapiens
gtggcacgatattgg

SEQ ID NO: 513885 - DNA, 15 bp, Homo sapiens
tggcacgatattggc

SEQ ID NO: 513886 - DNA, 15 bp, Homo sapiens
ggcacgatattggct

SEQ ID NO: 513887 - DNA, 15 bp, Homo sapiens
gcacgatattggctc

SEQ ID NO: 513888 - DNA, 15 bp, Homo sapiens
cacgatattggctca

SEQ ID NO: 513889 - DNA, 15 bp, Homo sapiens
acgatattggctcac

SEQ ID NO: 513890 - DNA, 15 bp, Homo sapiens
cgatattggctcact

SEQ ID NO: 513891 - DNA, 15 bp, Homo sapiens
gatattggctcactc

SEQ ID NO: 513892 - DNA, 15 bp, Homo sapiens
atattggctcactct

SEQ ID NO: 513893 - DNA, 15 bp, Homo sapiens
tattggctcactctg

SEQ ID NO: 513894 - DNA, 15 bp, Homo sapiens
attggctcactctgc

SEQ ID NO: 513895 - DNA, 15 bp, Homo sapiens
ttggctcactctgca

SEQ ID NO: 513896 - DNA, 15 bp, Homo sapiens
tggctcactctgcaa

SEQ ID NO: 513897 - DNA, 15 bp, Homo sapiens
ggctcactctgcaac

SEQ ID NO: 513898 - DNA, 15 bp, Homo sapiens
gctcactctgcaacc

SEQ ID NO: 513899 - DNA, 15 bp, Homo sapiens
ctcactctgcaacct

SEQ ID NO: 513900 - DNA, 15 bp, Homo sapiens
tcactctgcaacctc

SEQ ID NO: 513901 - DNA, 15 bp, Homo sapiens
cactctgcaacctcc

SEQ ID NO: 513902 - DNA, 15 bp, Homo sapiens
actctgcaacctcca

SEQ ID NO: 513903 - DNA, 15 bp, Homo sapiens
ctctgcaacctccac

SEQ ID NO: 513904 - DNA, 15 bp, Homo sapiens
tctgcaacctccacc

SEQ ID NO: 513905 - DNA, 15 bp, Homo sapiens
ctgcaacctccacct

SEQ ID NO: 513906 - DNA, 15 bp, Homo sapiens
tgcaacctccacctc

SEQ ID NO: 513907 - DNA, 15 bp, Homo sapiens
gcaacctccacctcc

SEQ ID NO: 513908 - DNA, 15 bp, Homo sapiens
caacctccacctcca

SEQ ID NO: 513909 - DNA, 15 bp, Homo sapiens
aacctccacctccag

SEQ ID NO: 513910 - DNA, 15 bp, Homo sapiens
acctccacctccagg

SEQ ID NO: 513911 - DNA, 15 bp, Homo sapiens
cctccacctccagga

SEQ ID NO: 513912 - DNA, 15 bp, Homo sapiens
ctccacctccaggat

SEQ ID NO: 513913 - DNA, 15 bp, Homo sapiens
tccacctccaggatt

SEQ ID NO: 513914 - DNA, 15 bp, Homo sapiens
ccacctccaggattc

SEQ ID NO: 513915 - DNA, 15 bp, Homo sapiens
cacctccaggattca

SEQ ID NO: 513916 - DNA, 15 bp, Homo sapiens
acctccaggattcaa

SEQ ID NO: 513917 - DNA, 15 bp, Homo sapiens
cctccaggattcaag

SEQ ID NO: 513918 - DNA, 15 bp, Homo sapiens
ctccaggattcaagt

SEQ ID NO: 513919 - DNA, 15 bp, Homo sapiens
tccaggattcaagtg

SEQ ID NO: 513920 - DNA, 15 bp, Homo sapiens
ccaggattcaagtga

SEQ ID NO: 513921 - DNA, 15 bp, Homo sapiens
caggattcaagtgat

SEQ ID NO: 513922 - DNA, 15 bp, Homo sapiens
aggattcaagtgatc

SEQ ID NO: 513923 - DNA, 15 bp, Homo sapiens
ggattcaagtgatcc

SEQ ID NO: 513924 - DNA, 15 bp, Homo sapiens
gattcaagtgatcct

SEQ ID NO: 513925 - DNA, 15 bp, Homo sapiens
attcaagtgatcctt

SEQ ID NO: 513926 - DNA, 15 bp, Homo sapiens
ttcaagtgatccttc

SEQ ID NO: 513927 - DNA, 15 bp, Homo sapiens
tcaagtgatccttct

SEQ ID NO: 513928 - DNA, 15 bp, Homo sapiens
caagtgatccttcta

SEQ ID NO: 513929 - DNA, 15 bp, Homo sapiens
aagtgatccttctac

SEQ ID NO: 513930 - DNA, 15 bp, Homo sapiens
agtgatccttctacc

SEQ ID NO: 513931 - DNA, 15 bp, Homo sapiens
gtgatccttctacct

SEQ ID NO: 513932 - DNA, 15 bp, Homo sapiens
tgatccttctacctt

SEQ ID NO: 513933 - DNA, 15 bp, Homo sapiens
gatccttctacctta

SEQ ID NO: 513934 - DNA, 15 bp, Homo sapiens
atccttctaccttag

SEQ ID NO: 513935 - DNA, 15 bp, Homo sapiens
tccttctaccttagt

SEQ ID NO: 513936 - DNA, 15 bp, Homo sapiens
ccttctaccttagtc

SEQ ID NO: 513937 - DNA, 15 bp, Homo sapiens
cttctaccttagtct

SEQ ID NO: 513938 - DNA, 15 bp, Homo sapiens
ttctaccttagtctc

SEQ ID NO: 513939 - DNA, 15 bp, Homo sapiens
tctaccttagtctcc

SEQ ID NO: 513940 - DNA, 15 bp, Homo sapiens
ctaccttagtctcca

SEQ ID NO: 513941 - DNA, 15 bp, Homo sapiens
taccttagtctccaa

SEQ ID NO: 513942 - DNA, 15 bp, Homo sapiens
accttagtctccaaa

SEQ ID NO: 513943 - DNA, 15 bp, Homo sapiens
ccttagtctccaaag

SEQ ID NO: 513944 - DNA, 15 bp, Homo sapiens
cttagtctccaaagt

SEQ ID NO: 513945 - DNA, 15 bp, Homo sapiens
ttagtctccaaagta

SEQ ID NO: 513946 - DNA, 15 bp, Homo sapiens
tagtctccaaagtag

SEQ ID NO: 513947 - DNA, 15 bp, Homo sapiens
agtctccaaagtagc

SEQ ID NO: 513948 - DNA, 15 bp, Homo sapiens
gtctccaaagtagct

SEQ ID NO: 513949 - DNA, 15 bp, Homo sapiens
tctccaaagtagctg

SEQ ID NO: 513950 - DNA, 15 bp, Homo sapiens
ctccaaagtagctga

SEQ ID NO: 513951 - DNA, 15 bp, Homo sapiens
tccaaagtagctgag

SEQ ID NO: 513952 - DNA, 15 bp, Homo sapiens
ccaaagtagctgaga

SEQ ID NO: 513953 - DNA, 15 bp, Homo sapiens
caaagtagctgagac

SEQ ID NO: 513954 - DNA, 15 bp, Homo sapiens
aaagtagctgagacc

SEQ ID NO: 513955 - DNA, 15 bp, Homo sapiens
aagtagctgagacca

SEQ ID NO: 513956 - DNA, 15 bp, Homo sapiens
agtagctgagaccac

SEQ ID NO: 513957 - DNA, 15 bp, Homo sapiens
gtagctgagaccaca

SEQ ID NO: 513958 - DNA, 15 bp, Homo sapiens
tagctgagaccacag

SEQ ID NO: 513959 - DNA, 15 bp, Homo sapiens
agctgagaccacagg

SEQ ID NO: 513960 - DNA, 15 bp, Homo sapiens
gctgagaccacaggc

SEQ ID NO: 513961 - DNA, 15 bp, Homo sapiens
ctgagaccacaggca

SEQ ID NO: 513962 - DNA, 15 bp, Homo sapiens
tgagaccacaggcat

SEQ ID NO: 513963 - DNA, 15 bp, Homo sapiens
gagaccacaggcatg

SEQ ID NO: 513964 - DNA, 15 bp, Homo sapiens
agaccacaggcatgc

SEQ ID NO: 513965 - DNA, 15 bp, Homo sapiens
gaccacaggcatgcg

SEQ ID NO: 513966 - DNA, 15 bp, Homo sapiens
accacaggcatgcgc

SEQ ID NO: 513967 - DNA, 15 bp, Homo sapiens
ccacaggcatgcgcc

SEQ ID NO: 513968 - DNA, 15 bp, Homo sapiens
cacaggcatgcgcca

SEQ ID NO: 513969 - DNA, 15 bp, Homo sapiens
acaggcatgcgccac

SEQ ID NO: 513970 - DNA, 15 bp, Homo sapiens
caggcatgcgccacc

SEQ ID NO: 513971 - DNA, 15 bp, Homo sapiens
aggcatgcgccacca

SEQ ID NO: 513972 - DNA, 15 bp, Homo sapiens
ggcatgcgccaccac

SEQ ID NO: 513973 - DNA, 15 bp, Homo sapiens
gcatgcgccaccacg

SEQ ID NO: 513974 - DNA, 15 bp, Homo sapiens
catgcgccaccacgc

SEQ ID NO: 513975 - DNA, 15 bp, Homo sapiens
atgcgccaccacgcc

SEQ ID NO: 513976 - DNA, 15 bp, Homo sapiens
tgcgccaccacgccc

SEQ ID NO: 513977 - DNA, 15 bp, Homo sapiens
gcgccaccacgcccg

SEQ ID NO: 513978 - DNA, 15 bp, Homo sapiens
cgccaccacgcccgg

SEQ ID NO: 513979 - DNA, 15 bp, Homo sapiens
gccaccacgcccggc

SEQ ID NO: 513980 - DNA, 15 bp, Homo sapiens
cccggctaatttttg

SEQ ID NO: 513981 - DNA, 15 bp, Homo sapiens
ccggctaatttttgt

SEQ ID NO: 513982 - DNA, 15 bp, Homo sapiens
cggctaatttttgta

SEQ ID NO: 513983 - DNA, 15 bp, Homo sapiens
ggctaatttttgtat

SEQ ID NO: 513984 - DNA, 15 bp, Homo sapiens
atttttgtattttta

SEQ ID NO: 513985 - DNA, 15 bp, Homo sapiens
ttttgtatttttagc

SEQ ID NO: 513986 - DNA, 15 bp, Homo sapiens
tttgtatttttagcg

SEQ ID NO: 513987 - DNA, 15 bp, Homo sapiens
ttgtatttttagcgt

SEQ ID NO: 513988 - DNA, 15 bp, Homo sapiens
tgtatttttagcgta

SEQ ID NO: 513989 - DNA, 15 bp, Homo sapiens
gtatttttagcgtag

SEQ ID NO: 513990 - DNA, 15 bp, Homo sapiens
tatttttagcgtaga

SEQ ID NO: 513991 - DNA, 15 bp, Homo sapiens
atttttagcgtagac

SEQ ID NO: 513992 - DNA, 15 bp, Homo sapiens
tttttagcgtagaca

SEQ ID NO: 513993 - DNA, 15 bp, Homo sapiens
ttttagcgtagacag

SEQ ID NO: 513994 - DNA, 15 bp, Homo sapiens
tttagcgtagacagg

SEQ ID NO: 513995 - DNA, 15 bp, Homo sapiens
ttagcgtagacaggg

SEQ ID NO: 513996 - DNA, 15 bp, Homo sapiens
tagcgtagacagggt

SEQ ID NO: 513997 - DNA, 15 bp, Homo sapiens
agcgtagacagggtt

SEQ ID NO: 513998 - DNA, 15 bp, Homo sapiens
gcgtagacagggttt

SEQ ID NO: 513999 - DNA, 15 bp, Homo sapiens
cgtagacagggtttc

SEQ ID NO: 514000 - DNA, 15 bp, Homo sapiens
gtagacagggtttca

SEQ ID NO: 514001 - DNA, 15 bp, Homo sapiens
tagacagggtttcac

SEQ ID NO: 514002 - DNA, 15 bp, Homo sapiens
agacagggtttcacc

SEQ ID NO: 514003 - DNA, 15 bp, Homo sapiens
gacagggtttcacca

SEQ ID NO: 514004 - DNA, 15 bp, Homo sapiens
acagggtttcaccat

SEQ ID NO: 514005 - DNA, 15 bp, Homo sapiens
cagggtttcaccata

SEQ ID NO: 514006 - DNA, 15 bp, Homo sapiens
agggtttcaccatat

SEQ ID NO: 514007 - DNA, 15 bp, Homo sapiens
gggtttcaccatatt

SEQ ID NO: 514008 - DNA, 15 bp, Homo sapiens
ggtttcaccatattg

SEQ ID NO: 514009 - DNA, 15 bp, Homo sapiens
gtttcaccatattgt

SEQ ID NO: 514010 - DNA, 15 bp, Homo sapiens
tttcaccatattgtc

SEQ ID NO: 514011 - DNA, 15 bp, Homo sapiens
ttcaccatattgtcc

SEQ ID NO: 514012 - DNA, 15 bp, Homo sapiens
tcaccatattgtcca

SEQ ID NO: 514013 - DNA, 15 bp, Homo sapiens
caccatattgtccag

SEQ ID NO: 514014 - DNA, 15 bp, Homo sapiens
accatattgtccagg

SEQ ID NO: 514015 - DNA, 15 bp, Homo sapiens
ccatattgtccagga

SEQ ID NO: 514016 - DNA, 15 bp, Homo sapiens
catattgtccaggat

SEQ ID NO: 514017 - DNA, 15 bp, Homo sapiens
atattgtccaggatg

SEQ ID NO: 514018 - DNA, 15 bp, Homo sapiens
tattgtccaggatga

SEQ ID NO: 514019 - DNA, 15 bp, Homo sapiens
attgtccaggatgat

SEQ ID NO: 514020 - DNA, 15 bp, Homo sapiens
ttgtccaggatgatc

SEQ ID NO: 514021 - DNA, 15 bp, Homo sapiens
tgtccaggatgatct

SEQ ID NO: 514022 - DNA, 15 bp, Homo sapiens
gtccaggatgatctg

SEQ ID NO: 514023 - DNA, 15 bp, Homo sapiens
tccaggatgatctgg

SEQ ID NO: 514024 - DNA, 15 bp, Homo sapiens
ccaggatgatctgga

SEQ ID NO: 514025 - DNA, 15 bp, Homo sapiens
caggatgatctggaa

SEQ ID NO: 514026 - DNA, 15 bp, Homo sapiens
aggatgatctggaac

SEQ ID NO: 514027 - DNA, 15 bp, Homo sapiens
ggatgatctggaact

SEQ ID NO: 514028 - DNA, 15 bp, Homo sapiens
gatgatctggaactc

SEQ ID NO: 514029 - DNA, 15 bp, Homo sapiens
atgatctggaactcc

SEQ ID NO: 514030 - DNA, 15 bp, Homo sapiens
tgatctggaactcct

SEQ ID NO: 514031 - DNA, 15 bp, Homo sapiens
gatctggaactcctg

SEQ ID NO: 514032 - DNA, 15 bp, Homo sapiens
atctggaactcctga

SEQ ID NO: 514033 - DNA, 15 bp, Homo sapiens
tctggaactcctgag

SEQ ID NO: 514034 - DNA, 15 bp, Homo sapiens
ctggaactcctgagc

SEQ ID NO: 514035 - DNA, 15 bp, Homo sapiens
tggaactcctgagct

SEQ ID NO: 514036 - DNA, 15 bp, Homo sapiens
ggaactcctgagctc

SEQ ID NO: 514037 - DNA, 15 bp, Homo sapiens
gaactcctgagctca

SEQ ID NO: 514038 - DNA, 15 bp, Homo sapiens
aactcctgagctcag

SEQ ID NO: 514039 - DNA, 15 bp, Homo sapiens
actcctgagctcagg

SEQ ID NO: 514040 - DNA, 15 bp, Homo sapiens
ctcctgagctcaggt

SEQ ID NO: 514041 - DNA, 15 bp, Homo sapiens
tcctgagctcaggtg

SEQ ID NO: 514042 - DNA, 15 bp, Homo sapiens
cctgagctcaggtga

SEQ ID NO: 514043 - DNA, 15 bp, Homo sapiens
ctgagctcaggtgat

SEQ ID NO: 514044 - DNA, 15 bp, Homo sapiens
tgagctcaggtgatc

SEQ ID NO: 514045 - DNA, 15 bp, Homo sapiens
gagctcaggtgatcc

SEQ ID NO: 514046 - DNA, 15 bp, Homo sapiens
agctcaggtgatcca

SEQ ID NO: 514047 - DNA, 15 bp, Homo sapiens
gctcaggtgatccac

SEQ ID NO: 514048 - DNA, 15 bp, Homo sapiens
ctcaggtgatccacc

SEQ ID NO: 514049 - DNA, 15 bp, Homo sapiens
tcaggtgatccaccc

SEQ ID NO: 514050 - DNA, 15 bp, Homo sapiens
caggtgatccaccca

SEQ ID NO: 514051 - DNA, 15 bp, Homo sapiens
aggtgatccacccac

SEQ ID NO: 514052 - DNA, 15 bp, Homo sapiens
ggtgatccacccacc

SEQ ID NO: 514053 - DNA, 15 bp, Homo sapiens
gtgatccacccacct

SEQ ID NO: 514054 - DNA, 15 bp, Homo sapiens
tgatccacccacctc

SEQ ID NO: 514055 - DNA, 15 bp, Homo sapiens
gatccacccacctca

SEQ ID NO: 514056 - DNA, 15 bp, Homo sapiens
atccacccacctcag

SEQ ID NO: 514057 - DNA, 15 bp, Homo sapiens
tccacccacctcagc

SEQ ID NO: 514058 - DNA, 15 bp, Homo sapiens
ccacccacctcagcc

SEQ ID NO: 514059 - DNA, 15 bp, Homo sapiens
cacccacctcagcct

SEQ ID NO: 514060 - DNA, 15 bp, Homo sapiens
acccacctcagcctc

SEQ ID NO: 514061 - DNA, 15 bp, Homo sapiens
ccacctcagcctccc

SEQ ID NO: 514062 - DNA, 15 bp, Homo sapiens
cacctcagcctccca

SEQ ID NO: 514063 - DNA, 15 bp, Homo sapiens
acctcagcctcccaa

SEQ ID NO: 514064 - DNA, 15 bp, Homo sapiens
cctcagcctcccaaa

SEQ ID NO: 514065 - DNA, 15 bp, Homo sapiens
ctcagcctcccaaag

SEQ ID NO: 514066 - DNA, 15 bp, Homo sapiens
tcagcctcccaaagt

SEQ ID NO: 514067 - DNA, 15 bp, Homo sapiens
cagcctcccaaagtg

SEQ ID NO: 514068 - DNA, 15 bp, Homo sapiens
agcctcccaaagtgc

SEQ ID NO: 514069 - DNA, 15 bp, Homo sapiens
aggattacaggcatg

SEQ ID NO: 514070 - DNA, 15 bp, Homo sapiens
ggattacaggcatga

SEQ ID NO: 514071 - DNA, 15 bp, Homo sapiens
gattacaggcatgag

SEQ ID NO: 514072 - DNA, 15 bp, Homo sapiens
attacaggcatgagg

SEQ ID NO: 514073 - DNA, 15 bp, Homo sapiens
ttacaggcatgaggc

SEQ ID NO: 514074 - DNA, 15 bp, Homo sapiens
tacaggcatgaggca

SEQ ID NO: 514075 - DNA, 15 bp, Homo sapiens
acaggcatgaggcac

SEQ ID NO: 514076 - DNA, 15 bp, Homo sapiens
caggcatgaggcacc

SEQ ID NO: 514077 - DNA, 15 bp, Homo sapiens
aggcatgaggcacca

SEQ ID NO: 514078 - DNA, 15 bp, Homo sapiens
ggcatgaggcaccat

SEQ ID NO: 514079 - DNA, 15 bp, Homo sapiens
gcatgaggcaccatg

SEQ ID NO: 514080 - DNA, 15 bp, Homo sapiens
catgaggcaccatgc

SEQ ID NO: 514081 - DNA, 15 bp, Homo sapiens
atgaggcaccatgcc

SEQ ID NO: 514082 - DNA, 15 bp, Homo sapiens
tgaggcaccatgccc

SEQ ID NO: 514083 - DNA, 15 bp, Homo sapiens
gaggcaccatgcccg

SEQ ID NO: 514084 - DNA, 15 bp, Homo sapiens
aggcaccatgcccgg

SEQ ID NO: 514085 - DNA, 15 bp, Homo sapiens
ggcaccatgcccggc

SEQ ID NO: 514086 - DNA, 15 bp, Homo sapiens
gcaccatgcccggcc

SEQ ID NO: 514087 - DNA, 15 bp, Homo sapiens
caccatgcccggcct

SEQ ID NO: 514088 - DNA, 15 bp, Homo sapiens
accatgcccggcctt

SEQ ID NO: 514089 - DNA, 15 bp, Homo sapiens
ccatgcccggcctta

SEQ ID NO: 514090 - DNA, 15 bp, Homo sapiens
catgcccggccttaa

SEQ ID NO: 514091 - DNA, 15 bp, Homo sapiens
atgcccggccttaag

SEQ ID NO: 514092 - DNA, 15 bp, Homo sapiens
tgcccggccttaagc

SEQ ID NO: 514093 - DNA, 15 bp, Homo sapiens
gcccggccttaagct

SEQ ID NO: 514094 - DNA, 15 bp, Homo sapiens
cccggccttaagctt

SEQ ID NO: 514095 - DNA, 15 bp, Homo sapiens
ccggccttaagctta

SEQ ID NO: 514096 - DNA, 15 bp, Homo sapiens
cggccttaagcttat

SEQ ID NO: 514097 - DNA, 15 bp, Homo sapiens
ggccttaagcttatc

SEQ ID NO: 514098 - DNA, 15 bp, Homo sapiens
gccttaagcttatca

SEQ ID NO: 514099 - DNA, 15 bp, Homo sapiens
ccttaagcttatcat

SEQ ID NO: 514100 - DNA, 15 bp, Homo sapiens
cttaagcttatcatt

SEQ ID NO: 514101 - DNA, 15 bp, Homo sapiens
ttaagcttatcattt

SEQ ID NO: 514102 - DNA, 15 bp, Homo sapiens
taagcttatcatttt

SEQ ID NO: 514103 - DNA, 15 bp, Homo sapiens
aagcttatcattttc

SEQ ID NO: 514104 - DNA, 15 bp, Homo sapiens
agcttatcattttct

SEQ ID NO: 514105 - DNA, 15 bp, Homo sapiens
gcttatcattttcta

SEQ ID NO: 514106 - DNA, 15 bp, Homo sapiens
cttatcattttctaa

SEQ ID NO: 514107 - DNA, 15 bp, Homo sapiens
ttatcattttctaaa

SEQ ID NO: 514108 - DNA, 15 bp, Homo sapiens
tatcattttctaaat

SEQ ID NO: 514109 - DNA, 15 bp, Homo sapiens
atcattttctaaatt

SEQ ID NO: 514110 - DNA, 15 bp, Homo sapiens
tcattttctaaattt

SEQ ID NO: 514111 - DNA, 15 bp, Homo sapiens
cattttctaaatttc

SEQ ID NO: 514112 - DNA, 15 bp, Homo sapiens
attttctaaatttcc

SEQ ID NO: 514113 - DNA, 15 bp, Homo sapiens
ttttctaaatttcct

SEQ ID NO: 514114 - DNA, 15 bp, Homo sapiens
tttctaaatttcctt

SEQ ID NO: 514115 - DNA, 15 bp, Homo sapiens
ttctaaatttccttt

SEQ ID NO: 514116 - DNA, 15 bp, Homo sapiens
tctaaatttccttta

SEQ ID NO: 514117 - DNA, 15 bp, Homo sapiens
ctaaatttcctttag

SEQ ID NO: 514118 - DNA, 15 bp, Homo sapiens
taaatttcctttagt

SEQ ID NO: 514119 - DNA, 15 bp, Homo sapiens
aaatttcctttagtg

SEQ ID NO: 514120 - DNA, 15 bp, Homo sapiens
aatttcctttagtga

SEQ ID NO: 514121 - DNA, 15 bp, Homo sapiens
atttcctttagtgag

SEQ ID NO: 514122 - DNA, 15 bp, Homo sapiens
tttcctttagtgagt

SEQ ID NO: 514123 - DNA, 15 bp, Homo sapiens
ttcctttagtgagta

SEQ ID NO: 514124 - DNA, 15 bp, Homo sapiens
tcctttagtgagtac

SEQ ID NO: 514125 - DNA, 15 bp, Homo sapiens
cctttagtgagtact

SEQ ID NO: 514126 - DNA, 15 bp, Homo sapiens
ctttagtgagtactt

SEQ ID NO: 514127 - DNA, 15 bp, Homo sapiens
tttagtgagtactta

SEQ ID NO: 514128 - DNA, 15 bp, Homo sapiens
ttagtgagtacttat

SEQ ID NO: 514129 - DNA, 15 bp, Homo sapiens
tagtgagtacttatt

SEQ ID NO: 514130 - DNA, 15 bp, Homo sapiens
agtgagtacttatta

SEQ ID NO: 514131 - DNA, 15 bp, Homo sapiens
gtgagtacttattac

SEQ ID NO: 514132 - DNA, 15 bp, Homo sapiens
tgagtacttattaca

SEQ ID NO: 514133 - DNA, 15 bp, Homo sapiens
gagtacttattacac

SEQ ID NO: 514134 - DNA, 15 bp, Homo sapiens
agtacttattacact

SEQ ID NO: 514135 - DNA, 15 bp, Homo sapiens
gtacttattacactg

SEQ ID NO: 514136 - DNA, 15 bp, Homo sapiens
tacttattacactgt

SEQ ID NO: 514137 - DNA, 15 bp, Homo sapiens
acttattacactgtt

SEQ ID NO: 514138 - DNA, 15 bp, Homo sapiens
cttattacactgttt

SEQ ID NO: 514139 - DNA, 15 bp, Homo sapiens
ttattacactgtttt

SEQ ID NO: 514140 - DNA, 15 bp, Homo sapiens
tattacactgttttt

SEQ ID NO: 514141 - DNA, 15 bp, Homo sapiens
attacactgttttta

SEQ ID NO: 514142 - DNA, 15 bp, Homo sapiens
ttacactgtttttac

SEQ ID NO: 514143 - DNA, 15 bp, Homo sapiens
tacactgtttttaca

SEQ ID NO: 514144 - DNA, 15 bp, Homo sapiens
acactgtttttacaa

SEQ ID NO: 514145 - DNA, 15 bp, Homo sapiens
cactgtttttacaaa

SEQ ID NO: 514146 - DNA, 15 bp, Homo sapiens
actgtttttacaaag

SEQ ID NO: 514147 - DNA, 15 bp, Homo sapiens
ctgtttttacaaagt

SEQ ID NO: 514148 - DNA, 15 bp, Homo sapiens
tgtttttacaaagta

SEQ ID NO: 514149 - DNA, 15 bp, Homo sapiens
gtttttacaaagtaa

SEQ ID NO: 514150 - DNA, 15 bp, Homo sapiens
tttttacaaagtaat

SEQ ID NO: 514151 - DNA, 15 bp, Homo sapiens
ttttacaaagtaatc

SEQ ID NO: 514152 - DNA, 15 bp, Homo sapiens
tttacaaagtaatca

SEQ ID NO: 514153 - DNA, 15 bp, Homo sapiens
ttacaaagtaatcac

SEQ ID NO: 514154 - DNA, 15 bp, Homo sapiens
tacaaagtaatcaca

SEQ ID NO: 514155 - DNA, 15 bp, Homo sapiens
acaaagtaatcacaa

SEQ ID NO: 514156 - DNA, 15 bp, Homo sapiens
caaagtaatcacaaa

SEQ ID NO: 514157 - DNA, 15 bp, Homo sapiens
aaagtaatcacaaac

SEQ ID NO: 514158 - DNA, 15 bp, Homo sapiens
aagtaatcacaaacc

SEQ ID NO: 514159 - DNA, 15 bp, Homo sapiens
agtaatcacaaacca

SEQ ID NO: 514160 - DNA, 15 bp, Homo sapiens
gtaatcacaaaccaa

SEQ ID NO: 514161 - DNA, 15 bp, Homo sapiens
taatcacaaaccaaa

SEQ ID NO: 514162 - DNA, 15 bp, Homo sapiens
aatcacaaaccaaac

SEQ ID NO: 514163 - DNA, 15 bp, Homo sapiens
atcacaaaccaaaca

SEQ ID NO: 514164 - DNA, 15 bp, Homo sapiens
tcacaaaccaaacat

SEQ ID NO: 514165 - DNA, 15 bp, Homo sapiens
cacaaaccaaacatc

SEQ ID NO: 514166 - DNA, 15 bp, Homo sapiens
acaaaccaaacatca

SEQ ID NO: 514167 - DNA, 15 bp, Homo sapiens
caaaccaaacatcat

SEQ ID NO: 514168 - DNA, 15 bp, Homo sapiens
aaaccaaacatcatg

SEQ ID NO: 514169 - DNA, 15 bp, Homo sapiens
aaccaaacatcatgc

SEQ ID NO: 514170 - DNA, 15 bp, Homo sapiens
accaaacatcatgcc

SEQ ID NO: 514171 - DNA, 15 bp, Homo sapiens
ccaaacatcatgcct

SEQ ID NO: 514172 - DNA, 15 bp, Homo sapiens
caaacatcatgcctc

SEQ ID NO: 514173 - DNA, 15 bp, Homo sapiens
aaacatcatgcctct

SEQ ID NO: 514174 - DNA, 15 bp, Homo sapiens
aacatcatgcctctt

SEQ ID NO: 514175 - DNA, 15 bp, Homo sapiens
acatcatgcctcttc

SEQ ID NO: 514176 - DNA, 15 bp, Homo sapiens
catcatgcctcttct

SEQ ID NO: 514177 - DNA, 15 bp, Homo sapiens
atcatgcctcttctg

SEQ ID NO: 514178 - DNA, 15 bp, Homo sapiens
tcatgcctcttctga

SEQ ID NO: 514179 - DNA, 15 bp, Homo sapiens
catgcctcttctgaa

SEQ ID NO: 514180 - DNA, 15 bp, Homo sapiens
atgcctcttctgaag

SEQ ID NO: 514181 - DNA, 15 bp, Homo sapiens
tgcctcttctgaagt

SEQ ID NO: 514182 - DNA, 15 bp, Homo sapiens
gcctcttctgaagtg

SEQ ID NO: 514183 - DNA, 15 bp, Homo sapiens
cctcttctgaagtga

SEQ ID NO: 514184 - DNA, 15 bp, Homo sapiens
ctcttctgaagtgat

SEQ ID NO: 514185 - DNA, 15 bp, Homo sapiens
tcttctgaagtgatc

SEQ ID NO: 514186 - DNA, 15 bp, Homo sapiens
cttctgaagtgatct

SEQ ID NO: 514187 - DNA, 15 bp, Homo sapiens
ttctgaagtgatcta

SEQ ID NO: 514188 - DNA, 15 bp, Homo sapiens
tctgaagtgatctaa

SEQ ID NO: 514189 - DNA, 15 bp, Homo sapiens
ctgaagtgatctaat

SEQ ID NO: 514190 - DNA, 15 bp, Homo sapiens
tgaagtgatctaata

SEQ ID NO: 514191 - DNA, 15 bp, Homo sapiens
gaagtgatctaataa

SEQ ID NO: 514192 - DNA, 15 bp, Homo sapiens
aagtgatctaataag

SEQ ID NO: 514193 - DNA, 15 bp, Homo sapiens
agtgatctaataaga

SEQ ID NO: 514194 - DNA, 15 bp, Homo sapiens
gtgatctaataagag

SEQ ID NO: 514195 - DNA, 15 bp, Homo sapiens
tgatctaataagagt

SEQ ID NO: 514196 - DNA, 15 bp, Homo sapiens
gatctaataagagta

SEQ ID NO: 514197 - DNA, 15 bp, Homo sapiens
atctaataagagtac

SEQ ID NO: 514198 - DNA, 15 bp, Homo sapiens
tctaataagagtaca

SEQ ID NO: 514199 - DNA, 15 bp, Homo sapiens
ctaataagagtacac

SEQ ID NO: 514200 - DNA, 15 bp, Homo sapiens
taataagagtacaca

SEQ ID NO: 514201 - DNA, 15 bp, Homo sapiens
aataagagtacacag

SEQ ID NO: 514202 - DNA, 15 bp, Homo sapiens
ataagagtacacagt

SEQ ID NO: 514203 - DNA, 15 bp, Homo sapiens
taagagtacacagta

SEQ ID NO: 514204 - DNA, 15 bp, Homo sapiens
aagagtacacagtac

SEQ ID NO: 514205 - DNA, 15 bp, Homo sapiens
agagtacacagtacc

SEQ ID NO: 514206 - DNA, 15 bp, Homo sapiens
gagtacacagtacca

SEQ ID NO: 514207 - DNA, 15 bp, Homo sapiens
agtacacagtaccat

SEQ ID NO: 514208 - DNA, 15 bp, Homo sapiens
gtacacagtaccatc

SEQ ID NO: 514209 - DNA, 15 bp, Homo sapiens
tacacagtaccatct

SEQ ID NO: 514210 - DNA, 15 bp, Homo sapiens
acacagtaccatctg

SEQ ID NO: 514211 - DNA, 15 bp, Homo sapiens
cacagtaccatctgt

SEQ ID NO: 514212 - DNA, 15 bp, Homo sapiens
acagtaccatctgta

SEQ ID NO: 514213 - DNA, 15 bp, Homo sapiens
cagtaccatctgtaa

SEQ ID NO: 514214 - DNA, 15 bp, Homo sapiens
agtaccatctgtaaa

SEQ ID NO: 514215 - DNA, 15 bp, Homo sapiens
gtaccatctgtaaag

SEQ ID NO: 514216 - DNA, 15 bp, Homo sapiens
taccatctgtaaagt

SEQ ID NO: 514217 - DNA, 15 bp, Homo sapiens
accatctgtaaagtg

SEQ ID NO: 514218 - DNA, 15 bp, Homo sapiens
ccatctgtaaagtgt

SEQ ID NO: 514219 - DNA, 15 bp, Homo sapiens
catctgtaaagtgtt

SEQ ID NO: 514220 - DNA, 15 bp, Homo sapiens
atctgtaaagtgttc

SEQ ID NO: 514221 - DNA, 15 bp, Homo sapiens
tctgtaaagtgttct

SEQ ID NO: 514222 - DNA, 15 bp, Homo sapiens
ctgtaaagtgttctt

SEQ ID NO: 514223 - DNA, 15 bp, Homo sapiens
tgtaaagtgttcttg

SEQ ID NO: 514224 - DNA, 15 bp, Homo sapiens
gtaaagtgttcttgc

SEQ ID NO: 514225 - DNA, 15 bp, Homo sapiens
taaagtgttcttgcc

SEQ ID NO: 514226 - DNA, 15 bp, Homo sapiens
aaagtgttcttgcca

SEQ ID NO: 514227 - DNA, 15 bp, Homo sapiens
aagtgttcttgccag

SEQ ID NO: 514228 - DNA, 15 bp, Homo sapiens
agtgttcttgccaga

SEQ ID NO: 514229 - DNA, 15 bp, Homo sapiens
gtgttcttgccagaa

SEQ ID NO: 514230 - DNA, 15 bp, Homo sapiens
tgttcttgccagaaa

SEQ ID NO: 514231 - DNA, 15 bp, Homo sapiens
gttcttgccagaaag

SEQ ID NO: 514232 - DNA, 15 bp, Homo sapiens
ttcttgccagaaagt

SEQ ID NO: 514233 - DNA, 15 bp, Homo sapiens
tcttgccagaaagtt

SEQ ID NO: 514234 - DNA, 15 bp, Homo sapiens
cttgccagaaagttg

SEQ ID NO: 514235 - DNA, 15 bp, Homo sapiens
ttgccagaaagttga

SEQ ID NO: 514236 - DNA, 15 bp, Homo sapiens
tgccagaaagttgaa

SEQ ID NO: 514237 - DNA, 15 bp, Homo sapiens
gccagaaagttgaac

SEQ ID NO: 514238 - DNA, 15 bp, Homo sapiens
ccagaaagttgaacc

SEQ ID NO: 514239 - DNA, 15 bp, Homo sapiens
cagaaagttgaacct

SEQ ID NO: 514240 - DNA, 15 bp, Homo sapiens
agaaagttgaacctg

SEQ ID NO: 514241 - DNA, 15 bp, Homo sapiens
gaaagttgaacctga

SEQ ID NO: 514242 - DNA, 15 bp, Homo sapiens
aaagttgaacctgaa

SEQ ID NO: 514243 - DNA, 15 bp, Homo sapiens
aagttgaacctgaat

SEQ ID NO: 514244 - DNA, 15 bp, Homo sapiens
agttgaacctgaatg

SEQ ID NO: 514245 - DNA, 15 bp, Homo sapiens
gttgaacctgaatga

SEQ ID NO: 514246 - DNA, 15 bp, Homo sapiens
ttgaacctgaatgat

SEQ ID NO: 514247 - DNA, 15 bp, Homo sapiens
tgaacctgaatgatt

SEQ ID NO: 514248 - DNA, 15 bp, Homo sapiens
gaacctgaatgatta

SEQ ID NO: 514249 - DNA, 15 bp, Homo sapiens
aacctgaatgattaa

SEQ ID NO: 514250 - DNA, 15 bp, Homo sapiens
acctgaatgattaag

SEQ ID NO: 514251 - DNA, 15 bp, Homo sapiens
cctgaatgattaagc

SEQ ID NO: 514252 - DNA, 15 bp, Homo sapiens
ctgaatgattaagcc

SEQ ID NO: 514253 - DNA, 15 bp, Homo sapiens
tgaatgattaagcct

SEQ ID NO: 514254 - DNA, 15 bp, Homo sapiens
gaatgattaagcctg

SEQ ID NO: 514255 - DNA, 15 bp, Homo sapiens
aatgattaagcctgt

SEQ ID NO: 514256 - DNA, 15 bp, Homo sapiens
atgattaagcctgta

SEQ ID NO: 514257 - DNA, 15 bp, Homo sapiens
tgattaagcctgtaa

SEQ ID NO: 514258 - DNA, 15 bp, Homo sapiens
gattaagcctgtaag

SEQ ID NO: 514259 - DNA, 15 bp, Homo sapiens
attaagcctgtaagt

SEQ ID NO: 514260 - DNA, 15 bp, Homo sapiens
ttaagcctgtaagtc

SEQ ID NO: 514261 - DNA, 15 bp, Homo sapiens
taagcctgtaagtct

SEQ ID NO: 514262 - DNA, 15 bp, Homo sapiens
aagcctgtaagtcta

SEQ ID NO: 514263 - DNA, 15 bp, Homo sapiens
agcctgtaagtctag

SEQ ID NO: 514264 - DNA, 15 bp, Homo sapiens
gcctgtaagtctagt

SEQ ID NO: 514265 - DNA, 15 bp, Homo sapiens
cctgtaagtctagtt

SEQ ID NO: 514266 - DNA, 15 bp, Homo sapiens
ctgtaagtctagttt

SEQ ID NO: 514267 - DNA, 15 bp, Homo sapiens
tgtaagtctagttta

SEQ ID NO: 514268 - DNA, 15 bp, Homo sapiens
gtaagtctagtttat

SEQ ID NO: 514269 - DNA, 15 bp, Homo sapiens
taagtctagtttata

SEQ ID NO: 514270 - DNA, 15 bp, Homo sapiens
aagtctagtttatag

SEQ ID NO: 514271 - DNA, 15 bp, Homo sapiens
agtctagtttatagg

SEQ ID NO: 514272 - DNA, 15 bp, Homo sapiens
gtctagtttatagga

SEQ ID NO: 514273 - DNA, 15 bp, Homo sapiens
tctagtttataggaa

SEQ ID NO: 514274 - DNA, 15 bp, Homo sapiens
ctagtttataggaaa

SEQ ID NO: 514275 - DNA, 15 bp, Homo sapiens
tagtttataggaaat

SEQ ID NO: 514276 - DNA, 15 bp, Homo sapiens
agtttataggaaata

SEQ ID NO: 514277 - DNA, 15 bp, Homo sapiens
gtttataggaaataa

SEQ ID NO: 514278 - DNA, 15 bp, Homo sapiens
tttataggaaataag

SEQ ID NO: 514279 - DNA, 15 bp, Homo sapiens
ttataggaaataagg

SEQ ID NO: 514280 - DNA, 15 bp, Homo sapiens
tataggaaataaggc

SEQ ID NO: 514281 - DNA, 15 bp, Homo sapiens
ataggaaataaggct

SEQ ID NO: 514282 - DNA, 15 bp, Homo sapiens
taggaaataaggcta

SEQ ID NO: 514283 - DNA, 15 bp, Homo sapiens
aggaaataaggctag

SEQ ID NO: 514284 - DNA, 15 bp, Homo sapiens
ggaaataaggctaga

SEQ ID NO: 514285 - DNA, 15 bp, Homo sapiens
gaaataaggctagag

SEQ ID NO: 514286 - DNA, 15 bp, Homo sapiens
aaataaggctagagg

SEQ ID NO: 514287 - DNA, 15 bp, Homo sapiens
aataaggctagagga

SEQ ID NO: 514288 - DNA, 15 bp, Homo sapiens
ataaggctagaggaa

SEQ ID NO: 514289 - DNA, 15 bp, Homo sapiens
taaggctagaggaac

SEQ ID NO: 514290 - DNA, 15 bp, Homo sapiens
aaggctagaggaaca

SEQ ID NO: 514291 - DNA, 15 bp, Homo sapiens
aggctagaggaacaa

SEQ ID NO: 514292 - DNA, 15 bp, Homo sapiens
ggctagaggaacaag

SEQ ID NO: 514293 - DNA, 15 bp, Homo sapiens
gctagaggaacaagt

SEQ ID NO: 514294 - DNA, 15 bp, Homo sapiens
ctagaggaacaagtt

SEQ ID NO: 514295 - DNA, 15 bp, Homo sapiens
tagaggaacaagtta

SEQ ID NO: 514296 - DNA, 15 bp, Homo sapiens
agaggaacaagttaa

SEQ ID NO: 514297 - DNA, 15 bp, Homo sapiens
gaggaacaagttaaa

SEQ ID NO: 514298 - DNA, 15 bp, Homo sapiens
aggaacaagttaaac

SEQ ID NO: 514299 - DNA, 15 bp, Homo sapiens
ggaacaagttaaacc

SEQ ID NO: 514300 - DNA, 15 bp, Homo sapiens
gaacaagttaaacct

SEQ ID NO: 514301 - DNA, 15 bp, Homo sapiens
aacaagttaaacctc

SEQ ID NO: 514302 - DNA, 15 bp, Homo sapiens
acaagttaaacctca

SEQ ID NO: 514303 - DNA, 15 bp, Homo sapiens
caagttaaacctcac

SEQ ID NO: 514304 - DNA, 15 bp, Homo sapiens
aagttaaacctcacc

SEQ ID NO: 514305 - DNA, 15 bp, Homo sapiens
agttaaacctcacca

SEQ ID NO: 514306 - DNA, 15 bp, Homo sapiens
gttaaacctcaccat

SEQ ID NO: 514307 - DNA, 15 bp, Homo sapiens
ttaaacctcaccata

SEQ ID NO: 514308 - DNA, 15 bp, Homo sapiens
taaacctcaccatag

SEQ ID NO: 514309 - DNA, 15 bp, Homo sapiens
aaacctcaccatagg

SEQ ID NO: 514310 - DNA, 15 bp, Homo sapiens
aacctcaccataggg

SEQ ID NO: 514311 - DNA, 15 bp, Homo sapiens
acctcaccatagggt

SEQ ID NO: 514312 - DNA, 15 bp, Homo sapiens
cctcaccatagggtt

SEQ ID NO: 514313 - DNA, 15 bp, Homo sapiens
ctcaccatagggtta

SEQ ID NO: 514314 - DNA, 15 bp, Homo sapiens
tcaccatagggttat

SEQ ID NO: 514315 - DNA, 15 bp, Homo sapiens
caccatagggttata

SEQ ID NO: 514316 - DNA, 15 bp, Homo sapiens
accatagggttatac

SEQ ID NO: 514317 - DNA, 15 bp, Homo sapiens
ccatagggttataca

SEQ ID NO: 514318 - DNA, 15 bp, Homo sapiens
catagggttatacaa

SEQ ID NO: 514319 - DNA, 15 bp, Homo sapiens
atagggttatacaat

SEQ ID NO: 514320 - DNA, 15 bp, Homo sapiens
tagggttatacaatc

SEQ ID NO: 514321 - DNA, 15 bp, Homo sapiens
agggttatacaatca

SEQ ID NO: 514322 - DNA, 15 bp, Homo sapiens
gggttatacaatcag

SEQ ID NO: 514323 - DNA, 15 bp, Homo sapiens
ggttatacaatcagc

SEQ ID NO: 514324 - DNA, 15 bp, Homo sapiens
gttatacaatcagca

SEQ ID NO: 514325 - DNA, 15 bp, Homo sapiens
ttatacaatcagcaa

SEQ ID NO: 514326 - DNA, 15 bp, Homo sapiens
tatacaatcagcaaa

SEQ ID NO: 514327 - DNA, 15 bp, Homo sapiens
atacaatcagcaaaa

SEQ ID NO: 514328 - DNA, 15 bp, Homo sapiens
tacaatcagcaaaat

SEQ ID NO: 514329 - DNA, 15 bp, Homo sapiens
acaatcagcaaaatc

SEQ ID NO: 514330 - DNA, 15 bp, Homo sapiens
caatcagcaaaatcc

SEQ ID NO: 514331 - DNA, 15 bp, Homo sapiens
aatcagcaaaatcca

SEQ ID NO: 514332 - DNA, 15 bp, Homo sapiens
atcagcaaaatccag

SEQ ID NO: 514333 - DNA, 15 bp, Homo sapiens
tcagcaaaatccaga

SEQ ID NO: 514334 - DNA, 15 bp, Homo sapiens
cagcaaaatccagaa

SEQ ID NO: 514335 - DNA, 15 bp, Homo sapiens
agcaaaatccagaat

SEQ ID NO: 514336 - DNA, 15 bp, Homo sapiens
gcaaaatccagaatg

SEQ ID NO: 514337 - DNA, 15 bp, Homo sapiens
caaaatccagaatgg

SEQ ID NO: 514338 - DNA, 15 bp, Homo sapiens
aaaatccagaatggg

SEQ ID NO: 514339 - DNA, 15 bp, Homo sapiens
aaatccagaatgggg

SEQ ID NO: 514340 - DNA, 15 bp, Homo sapiens
aatccagaatggggg

SEQ ID NO: 514341 - DNA, 15 bp, Homo sapiens
atccagaatggggga

SEQ ID NO: 514342 - DNA, 15 bp, Homo sapiens
tccagaatgggggaa

SEQ ID NO: 514343 - DNA, 15 bp, Homo sapiens
ccagaatgggggaaa

SEQ ID NO: 514344 - DNA, 15 bp, Homo sapiens
cagaatgggggaaac

SEQ ID NO: 514345 - DNA, 15 bp, Homo sapiens
agaatgggggaaact

SEQ ID NO: 514346 - DNA, 15 bp, Homo sapiens
gaatgggggaaactc

SEQ ID NO: 514347 - DNA, 15 bp, Homo sapiens
aatgggggaaactcc

SEQ ID NO: 514348 - DNA, 15 bp, Homo sapiens
atgggggaaactcca

SEQ ID NO: 514349 - DNA, 15 bp, Homo sapiens
tgggggaaactccac

SEQ ID NO: 514350 - DNA, 15 bp, Homo sapiens
gggggaaactccaca

SEQ ID NO: 514351 - DNA, 15 bp, Homo sapiens
ggggaaactccacag

SEQ ID NO: 514352 - DNA, 15 bp, Homo sapiens
gggaaactccacagg

SEQ ID NO: 514353 - DNA, 15 bp, Homo sapiens
ggaaactccacaggt

SEQ ID NO: 514354 - DNA, 15 bp, Homo sapiens
gaaactccacaggtc

SEQ ID NO: 514355 - DNA, 15 bp, Homo sapiens
aaactccacaggtca

SEQ ID NO: 514356 - DNA, 15 bp, Homo sapiens
aactccacaggtcaa

SEQ ID NO: 514357 - DNA, 15 bp, Homo sapiens
actccacaggtcaaa

SEQ ID NO: 514358 - DNA, 15 bp, Homo sapiens
ctccacaggtcaaat

SEQ ID NO: 514359 - DNA, 15 bp, Homo sapiens
tccacaggtcaaatg

SEQ ID NO: 514360 - DNA, 15 bp, Homo sapiens
ccacaggtcaaatga

SEQ ID NO: 514361 - DNA, 15 bp, Homo sapiens
cacaggtcaaatgac

SEQ ID NO: 514362 - DNA, 15 bp, Homo sapiens
acaggtcaaatgacc

SEQ ID NO: 514363 - DNA, 15 bp, Homo sapiens
caggtcaaatgacct

SEQ ID NO: 514364 - DNA, 15 bp, Homo sapiens
aggtcaaatgaccta

SEQ ID NO: 514365 - DNA, 15 bp, Homo sapiens
ggtcaaatgacctaa

SEQ ID NO: 514366 - DNA, 15 bp, Homo sapiens
gtcaaatgacctaat

SEQ ID NO: 514367 - DNA, 15 bp, Homo sapiens
tcaaatgacctaatt

SEQ ID NO: 514368 - DNA, 15 bp, Homo sapiens
caaatgacctaattt

SEQ ID NO: 514369 - DNA, 15 bp, Homo sapiens
aaatgacctaatttt

SEQ ID NO: 514370 - DNA, 15 bp, Homo sapiens
aatgacctaatttta

SEQ ID NO: 514371 - DNA, 15 bp, Homo sapiens
atgacctaattttaa

SEQ ID NO: 514372 - DNA, 15 bp, Homo sapiens
tgacctaattttaaa

SEQ ID NO: 514373 - DNA, 15 bp, Homo sapiens
gacctaattttaaaa

SEQ ID NO: 514374 - DNA, 15 bp, Homo sapiens
acctaattttaaaaa

SEQ ID NO: 514375 - DNA, 15 bp, Homo sapiens
cctaattttaaaaat

SEQ ID NO: 514376 - DNA, 15 bp, Homo sapiens
ctaattttaaaaata

SEQ ID NO: 514377 - DNA, 15 bp, Homo sapiens
taattttaaaaataa

SEQ ID NO: 514378 - DNA, 15 bp, Homo sapiens
aattttaaaaataaa

SEQ ID NO: 514379 - DNA, 15 bp, Homo sapiens
attttaaaaataaat

SEQ ID NO: 514380 - DNA, 15 bp, Homo sapiens
ttttaaaaataaatg

SEQ ID NO: 514381 - DNA, 15 bp, Homo sapiens
tttaaaaataaatga

SEQ ID NO: 514382 - DNA, 15 bp, Homo sapiens
ttaaaaataaatgac

SEQ ID NO: 514383 - DNA, 15 bp, Homo sapiens
taaaaataaatgaca

SEQ ID NO: 514384 - DNA, 15 bp, Homo sapiens
aaaaataaatgacaa

SEQ ID NO: 514385 - DNA, 15 bp, Homo sapiens
aaaataaatgacaag

SEQ ID NO: 514386 - DNA, 15 bp, Homo sapiens
aaataaatgacaagg

SEQ ID NO: 514387 - DNA, 15 bp, Homo sapiens
aataaatgacaaggg

SEQ ID NO: 514388 - DNA, 15 bp, Homo sapiens
ataaatgacaaggga

SEQ ID NO: 514389 - DNA, 15 bp, Homo sapiens
taaatgacaagggag

SEQ ID NO: 514390 - DNA, 15 bp, Homo sapiens
aaatgacaagggaga

SEQ ID NO: 514391 - DNA, 15 bp, Homo sapiens
aatgacaagggagaa

SEQ ID NO: 514392 - DNA, 15 bp, Homo sapiens
atgacaagggagaaa

SEQ ID NO: 514393 - DNA, 15 bp, Homo sapiens
tgacaagggagaaaa

SEQ ID NO: 514394 - DNA, 15 bp, Homo sapiens
gacaagggagaaaaa

SEQ ID NO: 514395 - DNA, 15 bp, Homo sapiens
acaagggagaaaaag

SEQ ID NO: 514396 - DNA, 15 bp, Homo sapiens
caagggagaaaaagt

SEQ ID NO: 514397 - DNA, 15 bp, Homo sapiens
aagggagaaaaagta

SEQ ID NO: 514398 - DNA, 15 bp, Homo sapiens
agggagaaaaagtaa

SEQ ID NO: 514399 - DNA, 15 bp, Homo sapiens
gggagaaaaagtaag

SEQ ID NO: 514400 - DNA, 15 bp, Homo sapiens
ggagaaaaagtaaga

SEQ ID NO: 514401 - DNA, 15 bp, Homo sapiens
gagaaaaagtaagag

SEQ ID NO: 514402 - DNA, 15 bp, Homo sapiens
agaaaaagtaagaga

SEQ ID NO: 514403 - DNA, 15 bp, Homo sapiens
gaaaaagtaagagac

SEQ ID NO: 514404 - DNA, 15 bp, Homo sapiens
aaaaagtaagagaca

SEQ ID NO: 514405 - DNA, 15 bp, Homo sapiens
aaaagtaagagacac

SEQ ID NO: 514406 - DNA, 15 bp, Homo sapiens
aaagtaagagacacc

SEQ ID NO: 514407 - DNA, 15 bp, Homo sapiens
aagtaagagacacct

SEQ ID NO: 514408 - DNA, 15 bp, Homo sapiens
agtaagagacaccta

SEQ ID NO: 514409 - DNA, 15 bp, Homo sapiens
gtaagagacacctat

SEQ ID NO: 514410 - DNA, 15 bp, Homo sapiens
taagagacacctata

SEQ ID NO: 514411 - DNA, 15 bp, Homo sapiens
aagagacacctatag

SEQ ID NO: 514412 - DNA, 15 bp, Homo sapiens
agagacacctataga

SEQ ID NO: 514413 - DNA, 15 bp, Homo sapiens
gagacacctatagat

SEQ ID NO: 514414 - DNA, 15 bp, Homo sapiens
agacacctatagatc

SEQ ID NO: 514415 - DNA, 15 bp, Homo sapiens
gacacctatagatca

SEQ ID NO: 514416 - DNA, 15 bp, Homo sapiens
acacctatagatcag

SEQ ID NO: 514417 - DNA, 15 bp, Homo sapiens
cacctatagatcaga

SEQ ID NO: 514418 - DNA, 15 bp, Homo sapiens
acctatagatcagaa

SEQ ID NO: 514419 - DNA, 15 bp, Homo sapiens
cctatagatcagaag

SEQ ID NO: 514420 - DNA, 15 bp, Homo sapiens
ctatagatcagaaga

SEQ ID NO: 514421 - DNA, 15 bp, Homo sapiens
tatagatcagaagac

SEQ ID NO: 514422 - DNA, 15 bp, Homo sapiens
atagatcagaagaca

SEQ ID NO: 514423 - DNA, 15 bp, Homo sapiens
tagatcagaagacac

SEQ ID NO: 514424 - DNA, 15 bp, Homo sapiens
agatcagaagacact

SEQ ID NO: 514425 - DNA, 15 bp, Homo sapiens
gatcagaagacactt

SEQ ID NO: 514426 - DNA, 15 bp, Homo sapiens
atcagaagacacttg

SEQ ID NO: 514427 - DNA, 15 bp, Homo sapiens
tcagaagacacttgg

SEQ ID NO: 514428 - DNA, 15 bp, Homo sapiens
cagaagacacttggg

SEQ ID NO: 514429 - DNA, 15 bp, Homo sapiens
agaagacacttgggg

SEQ ID NO: 514430 - DNA, 15 bp, Homo sapiens
gaagacacttggggc

SEQ ID NO: 514431 - DNA, 15 bp, Homo sapiens
aagacacttggggct

SEQ ID NO: 514432 - DNA, 15 bp, Homo sapiens
agacacttggggctg

SEQ ID NO: 514433 - DNA, 15 bp, Homo sapiens
gacacttggggctgg

SEQ ID NO: 514434 - DNA, 15 bp, Homo sapiens
acacttggggctggg

SEQ ID NO: 514435 - DNA, 15 bp, Homo sapiens
cacttggggctgggc

SEQ ID NO: 514436 - DNA, 15 bp, Homo sapiens
acttggggctgggca

SEQ ID NO: 514437 - DNA, 15 bp, Homo sapiens
cttggggctgggcat

SEQ ID NO: 514438 - DNA, 15 bp, Homo sapiens
ttggggctgggcatg

SEQ ID NO: 514439 - DNA, 15 bp, Homo sapiens
tggggctgggcatgg

SEQ ID NO: 514440 - DNA, 15 bp, Homo sapiens
ggggctgggcatggt

SEQ ID NO: 514441 - DNA, 15 bp, Homo sapiens
gggctgggcatggtg

SEQ ID NO: 514442 - DNA, 15 bp, Homo sapiens
ggctgggcatggtgg

SEQ ID NO: 514443 - DNA, 15 bp, Homo sapiens
gctgggcatggtggc

SEQ ID NO: 514444 - DNA, 15 bp, Homo sapiens
ctgggcatggtggct

SEQ ID NO: 514445 - DNA, 15 bp, Homo sapiens
tgggcatggtggctc

SEQ ID NO: 514446 - DNA, 15 bp, Homo sapiens
gggcatggtggctca

SEQ ID NO: 514447 - DNA, 15 bp, Homo sapiens
gcatggtggctcaca

SEQ ID NO: 514448 - DNA, 15 bp, Homo sapiens
catggtggctcacac

SEQ ID NO: 514449 - DNA, 15 bp, Homo sapiens
atggtggctcacacc

SEQ ID NO: 514450 - DNA, 15 bp, Homo sapiens
tggtggctcacacct

SEQ ID NO: 514451 - DNA, 15 bp, Homo sapiens
ggtggctcacacctg

SEQ ID NO: 514452 - DNA, 15 bp, Homo sapiens
gtggctcacacctgt

SEQ ID NO: 514453 - DNA, 15 bp, Homo sapiens
tggctcacacctgta

SEQ ID NO: 514454 - DNA, 15 bp, Homo sapiens
ggctcacacctgtaa

SEQ ID NO: 514455 - DNA, 15 bp, Homo sapiens
gaggccaaggcaggc

SEQ ID NO: 514456 - DNA, 15 bp, Homo sapiens
aggccaaggcaggcg

SEQ ID NO: 514457 - DNA, 15 bp, Homo sapiens
ggccaaggcaggcgg

SEQ ID NO: 514458 - DNA, 15 bp, Homo sapiens
gccaaggcaggcgga

SEQ ID NO: 514459 - DNA, 15 bp, Homo sapiens
ccaaggcaggcggat

SEQ ID NO: 514460 - DNA, 15 bp, Homo sapiens
caaggcaggcggatc

SEQ ID NO: 514461 - DNA, 15 bp, Homo sapiens
aaggcaggcggatca

SEQ ID NO: 514462 - DNA, 15 bp, Homo sapiens
ggcaggcggatcacc

SEQ ID NO: 514463 - DNA, 15 bp, Homo sapiens
gcaggcggatcacct

SEQ ID NO: 514464 - DNA, 15 bp, Homo sapiens
caggcggatcacctg

SEQ ID NO: 514465 - DNA, 15 bp, Homo sapiens
aggcggatcacctga

SEQ ID NO: 514466 - DNA, 15 bp, Homo sapiens
ggcggatcacctgag

SEQ ID NO: 514467 - DNA, 15 bp, Homo sapiens
gcggatcacctgagg

SEQ ID NO: 514468 - DNA, 15 bp, Homo sapiens
cggatcacctgaggt

SEQ ID NO: 514469 - DNA, 15 bp, Homo sapiens
ggatcacctgaggtc

SEQ ID NO: 514470 - DNA, 15 bp, Homo sapiens
gatcacctgaggtca

SEQ ID NO: 514471 - DNA, 15 bp, Homo sapiens
atcacctgaggtcag

SEQ ID NO: 514472 - DNA, 15 bp, Homo sapiens
tcacctgaggtcagg

SEQ ID NO: 514473 - DNA, 15 bp, Homo sapiens
cacctgaggtcagga

SEQ ID NO: 514474 - DNA, 15 bp, Homo sapiens
acctgaggtcaggag

SEQ ID NO: 514475 - DNA, 15 bp, Homo sapiens
cctgaggtcaggagt

SEQ ID NO: 514476 - DNA, 15 bp, Homo sapiens
ctgaggtcaggagtt

SEQ ID NO: 514477 - DNA, 15 bp, Homo sapiens
gaggtcaggagttca

SEQ ID NO: 514478 - DNA, 15 bp, Homo sapiens
aggtcaggagttcaa

SEQ ID NO: 514479 - DNA, 15 bp, Homo sapiens
ggtcaggagttcaag

SEQ ID NO: 514480 - DNA, 15 bp, Homo sapiens
gtcaggagttcaaga

SEQ ID NO: 514481 - DNA, 15 bp, Homo sapiens
gttcaagaccagccg

SEQ ID NO: 514482 - DNA, 15 bp, Homo sapiens
ttcaagaccagccgg

SEQ ID NO: 514483 - DNA, 15 bp, Homo sapiens
tcaagaccagccggc

SEQ ID NO: 514484 - DNA, 15 bp, Homo sapiens
caagaccagccggcc

SEQ ID NO: 514485 - DNA, 15 bp, Homo sapiens
aagaccagccggcca

SEQ ID NO: 514486 - DNA, 15 bp, Homo sapiens
agaccagccggccaa

SEQ ID NO: 514487 - DNA, 15 bp, Homo sapiens
gaccagccggccaac

SEQ ID NO: 514488 - DNA, 15 bp, Homo sapiens
accagccggccaaca

SEQ ID NO: 514489 - DNA, 15 bp, Homo sapiens
ccagccggccaacat

SEQ ID NO: 514490 - DNA, 15 bp, Homo sapiens
cagccggccaacatg

SEQ ID NO: 514491 - DNA, 15 bp, Homo sapiens
agccggccaacatgg

SEQ ID NO: 514492 - DNA, 15 bp, Homo sapiens
gccggccaacatggt

SEQ ID NO: 514493 - DNA, 15 bp, Homo sapiens
ccggccaacatggtg

SEQ ID NO: 514494 - DNA, 15 bp, Homo sapiens
cggccaacatggtga

SEQ ID NO: 514495 - DNA, 15 bp, Homo sapiens
atggtgaaaccccaa

SEQ ID NO: 514496 - DNA, 15 bp, Homo sapiens
tggtgaaaccccaac

SEQ ID NO: 514497 - DNA, 15 bp, Homo sapiens
ggtgaaaccccaact

SEQ ID NO: 514498 - DNA, 15 bp, Homo sapiens
gtgaaaccccaactc

SEQ ID NO: 514499 - DNA, 15 bp, Homo sapiens
tgaaaccccaactct

SEQ ID NO: 514500 - DNA, 15 bp, Homo sapiens
gaaaccccaactcta

SEQ ID NO: 514501 - DNA, 15 bp, Homo sapiens
aaaccccaactctac

SEQ ID NO: 514502 - DNA, 15 bp, Homo sapiens
aaccccaactctact

SEQ ID NO: 514503 - DNA, 15 bp, Homo sapiens
accccaactctacta

SEQ ID NO: 514504 - DNA, 15 bp, Homo sapiens
ccccaactctactaa

SEQ ID NO: 514505 - DNA, 15 bp, Homo sapiens
cccaactctactaaa

SEQ ID NO: 514506 - DNA, 15 bp, Homo sapiens
ccaactctactaaaa

SEQ ID NO: 514507 - DNA, 15 bp, Homo sapiens
caactctactaaaaa

SEQ ID NO: 514508 - DNA, 15 bp, Homo sapiens
aactctactaaaaat

SEQ ID NO: 514509 - DNA, 15 bp, Homo sapiens
actctactaaaaata

SEQ ID NO: 514510 - DNA, 15 bp, Homo sapiens
tctactaaaaatacg

SEQ ID NO: 514511 - DNA, 15 bp, Homo sapiens
ctactaaaaatacga

SEQ ID NO: 514512 - DNA, 15 bp, Homo sapiens
tactaaaaatacgaa

SEQ ID NO: 514513 - DNA, 15 bp, Homo sapiens
actaaaaatacgaaa

SEQ ID NO: 514514 - DNA, 15 bp, Homo sapiens
ctaaaaatacgaaaa

SEQ ID NO: 514515 - DNA, 15 bp, Homo sapiens
taaaaatacgaaaaa

SEQ ID NO: 514516 - DNA, 15 bp, Homo sapiens
aaaaatacgaaaaat

SEQ ID NO: 514517 - DNA, 15 bp, Homo sapiens
aaaatacgaaaaatc

SEQ ID NO: 514518 - DNA, 15 bp, Homo sapiens
aaatacgaaaaatca

SEQ ID NO: 514519 - DNA, 15 bp, Homo sapiens
aatacgaaaaatcag

SEQ ID NO: 514520 - DNA, 15 bp, Homo sapiens
atacgaaaaatcagc

SEQ ID NO: 514521 - DNA, 15 bp, Homo sapiens
tacgaaaaatcagcc

SEQ ID NO: 514522 - DNA, 15 bp, Homo sapiens
acgaaaaatcagccg

SEQ ID NO: 514523 - DNA, 15 bp, Homo sapiens
cgaaaaatcagccgg

SEQ ID NO: 514524 - DNA, 15 bp, Homo sapiens
gaaaaatcagccggg

SEQ ID NO: 514525 - DNA, 15 bp, Homo sapiens
aaaaatcagccgggc

SEQ ID NO: 514526 - DNA, 15 bp, Homo sapiens
aaaatcagccgggcg

SEQ ID NO: 514527 - DNA, 15 bp, Homo sapiens
aaatcagccgggcgt

SEQ ID NO: 514528 - DNA, 15 bp, Homo sapiens
aatcagccgggcgtg

SEQ ID NO: 514529 - DNA, 15 bp, Homo sapiens
atcagccgggcgtgg

SEQ ID NO: 514530 - DNA, 15 bp, Homo sapiens
tcagccgggcgtggt

SEQ ID NO: 514531 - DNA, 15 bp, Homo sapiens
cagccgggcgtggtg

SEQ ID NO: 514532 - DNA, 15 bp, Homo sapiens
agccgggcgtggtgg

SEQ ID NO: 514533 - DNA, 15 bp, Homo sapiens
gccgggcgtggtggc

SEQ ID NO: 514534 - DNA, 15 bp, Homo sapiens
ccgggcgtggtggcg

SEQ ID NO: 514535 - DNA, 15 bp, Homo sapiens
cgggcgtggtggcgc

SEQ ID NO: 514536 - DNA, 15 bp, Homo sapiens
gggcgtggtggcgca

SEQ ID NO: 514537 - DNA, 15 bp, Homo sapiens
ggcgtggtggcgcac

SEQ ID NO: 514538 - DNA, 15 bp, Homo sapiens
gcgtggtggcgcacg

SEQ ID NO: 514539 - DNA, 15 bp, Homo sapiens
cgtggtggcgcacgc

SEQ ID NO: 514540 - DNA, 15 bp, Homo sapiens
gtggtggcgcacgcc

SEQ ID NO: 514541 - DNA, 15 bp, Homo sapiens
tggtggcgcacgcct

SEQ ID NO: 514542 - DNA, 15 bp, Homo sapiens
ggtggcgcacgcctg

SEQ ID NO: 514543 - DNA, 15 bp, Homo sapiens
gtggcgcacgcctgt

SEQ ID NO: 514544 - DNA, 15 bp, Homo sapiens
tggcgcacgcctgta

SEQ ID NO: 514545 - DNA, 15 bp, Homo sapiens
ggcgcacgcctgtag

SEQ ID NO: 514546 - DNA, 15 bp, Homo sapiens
gcgcacgcctgtagt

SEQ ID NO: 514547 - DNA, 15 bp, Homo sapiens
cgcacgcctgtagtt

SEQ ID NO: 514548 - DNA, 15 bp, Homo sapiens
gcacgcctgtagttc

SEQ ID NO: 514549 - DNA, 15 bp, Homo sapiens
cacgcctgtagttcc

SEQ ID NO: 514550 - DNA, 15 bp, Homo sapiens
acgcctgtagttcca

SEQ ID NO: 514551 - DNA, 15 bp, Homo sapiens
cgcctgtagttccaa

SEQ ID NO: 514552 - DNA, 15 bp, Homo sapiens
gcctgtagttccaac

SEQ ID NO: 514553 - DNA, 15 bp, Homo sapiens
cctgtagttccaact

SEQ ID NO: 514554 - DNA, 15 bp, Homo sapiens
ctgtagttccaacta

SEQ ID NO: 514555 - DNA, 15 bp, Homo sapiens
tgtagttccaactac

SEQ ID NO: 514556 - DNA, 15 bp, Homo sapiens
gtagttccaactacc

SEQ ID NO: 514557 - DNA, 15 bp, Homo sapiens
tagttccaactacct

SEQ ID NO: 514558 - DNA, 15 bp, Homo sapiens
agttccaactacctg

SEQ ID NO: 514559 - DNA, 15 bp, Homo sapiens
gttccaactacctgg

SEQ ID NO: 514560 - DNA, 15 bp, Homo sapiens
ttccaactacctggg

SEQ ID NO: 514561 - DNA, 15 bp, Homo sapiens
tccaactacctggga

SEQ ID NO: 514562 - DNA, 15 bp, Homo sapiens
ccaactacctgggag

SEQ ID NO: 514563 - DNA, 15 bp, Homo sapiens
caactacctgggagg

SEQ ID NO: 514564 - DNA, 15 bp, Homo sapiens
aactacctgggaggc

SEQ ID NO: 514565 - DNA, 15 bp, Homo sapiens
actacctgggaggct

SEQ ID NO: 514566 - DNA, 15 bp, Homo sapiens
ctacctgggaggctg

SEQ ID NO: 514567 - DNA, 15 bp, Homo sapiens
tacctgggaggctga

SEQ ID NO: 514568 - DNA, 15 bp, Homo sapiens
acctgggaggctgag

SEQ ID NO: 514569 - DNA, 15 bp, Homo sapiens
cctgggaggctgagg

SEQ ID NO: 514570 - DNA, 15 bp, Homo sapiens
ctgggaggctgaggc

SEQ ID NO: 514571 - DNA, 15 bp, Homo sapiens
agaatcacttgaact

SEQ ID NO: 514572 - DNA, 15 bp, Homo sapiens
gaatcacttgaactt

SEQ ID NO: 514573 - DNA, 15 bp, Homo sapiens
aatcacttgaacttg

SEQ ID NO: 514574 - DNA, 15 bp, Homo sapiens
atcacttgaacttgg

SEQ ID NO: 514575 - DNA, 15 bp, Homo sapiens
tcacttgaacttggg

SEQ ID NO: 514576 - DNA, 15 bp, Homo sapiens
cacttgaacttggga

SEQ ID NO: 514577 - DNA, 15 bp, Homo sapiens
acttgaacttgggag

SEQ ID NO: 514578 - DNA, 15 bp, Homo sapiens
cttgaacttgggagg

SEQ ID NO: 514579 - DNA, 15 bp, Homo sapiens
ttgaacttgggaggc

SEQ ID NO: 514580 - DNA, 15 bp, Homo sapiens
tgaacttgggaggca

SEQ ID NO: 514581 - DNA, 15 bp, Homo sapiens
gaacttgggaggcag

SEQ ID NO: 514582 - DNA, 15 bp, Homo sapiens
aacttgggaggcaga

SEQ ID NO: 514583 - DNA, 15 bp, Homo sapiens
acttgggaggcagag

SEQ ID NO: 514584 - DNA, 15 bp, Homo sapiens
cttgggaggcagagg

SEQ ID NO: 514585 - DNA, 15 bp, Homo sapiens
ttgggaggcagaggt

SEQ ID NO: 514586 - DNA, 15 bp, Homo sapiens
tgggaggcagaggtt

SEQ ID NO: 514587 - DNA, 15 bp, Homo sapiens
gggaggcagaggttg

SEQ ID NO: 514588 - DNA, 15 bp, Homo sapiens
tgagccgagatcgca

SEQ ID NO: 514589 - DNA, 15 bp, Homo sapiens
gagccgagatcgcac

SEQ ID NO: 514590 - DNA, 15 bp, Homo sapiens
agccgagatcgcacc

SEQ ID NO: 514591 - DNA, 15 bp, Homo sapiens
gccgagatcgcacca

SEQ ID NO: 514592 - DNA, 15 bp, Homo sapiens
ccgagatcgcaccat

SEQ ID NO: 514593 - DNA, 15 bp, Homo sapiens
cgagatcgcaccatt

SEQ ID NO: 514594 - DNA, 15 bp, Homo sapiens
gagatcgcaccattg

SEQ ID NO: 514595 - DNA, 15 bp, Homo sapiens
agatcgcaccattgc

SEQ ID NO: 514596 - DNA, 15 bp, Homo sapiens
gatcgcaccattgca

SEQ ID NO: 514597 - DNA, 15 bp, Homo sapiens
atcgcaccattgcat

SEQ ID NO: 514598 - DNA, 15 bp, Homo sapiens
tcgcaccattgcatg

SEQ ID NO: 514599 - DNA, 15 bp, Homo sapiens
cgcaccattgcatgc

SEQ ID NO: 514600 - DNA, 15 bp, Homo sapiens
gcaccattgcatgcc

SEQ ID NO: 514601 - DNA, 15 bp, Homo sapiens
caccattgcatgcca

SEQ ID NO: 514602 - DNA, 15 bp, Homo sapiens
accattgcatgccag

SEQ ID NO: 514603 - DNA, 15 bp, Homo sapiens
ccattgcatgccagt

SEQ ID NO: 514604 - DNA, 15 bp, Homo sapiens
cattgcatgccagtc

SEQ ID NO: 514605 - DNA, 15 bp, Homo sapiens
attgcatgccagtct

SEQ ID NO: 514606 - DNA, 15 bp, Homo sapiens
ttgcatgccagtctg

SEQ ID NO: 514607 - DNA, 15 bp, Homo sapiens
tgcatgccagtctgg

SEQ ID NO: 514608 - DNA, 15 bp, Homo sapiens
gcatgccagtctggg

SEQ ID NO: 514609 - DNA, 15 bp, Homo sapiens
catgccagtctgggc

SEQ ID NO: 514610 - DNA, 15 bp, Homo sapiens
atgccagtctgggct

SEQ ID NO: 514611 - DNA, 15 bp, Homo sapiens
tgccagtctgggcta

SEQ ID NO: 514612 - DNA, 15 bp, Homo sapiens
gccagtctgggctac

SEQ ID NO: 514613 - DNA, 15 bp, Homo sapiens
ccagtctgggctaca

SEQ ID NO: 514614 - DNA, 15 bp, Homo sapiens
cagtctgggctacaa

SEQ ID NO: 514615 - DNA, 15 bp, Homo sapiens
agtctgggctacaaa

SEQ ID NO: 514616 - DNA, 15 bp, Homo sapiens
gtctgggctacaaaa

SEQ ID NO: 514617 - DNA, 15 bp, Homo sapiens
tctgggctacaaaag

SEQ ID NO: 514618 - DNA, 15 bp, Homo sapiens
ctgggctacaaaagc

SEQ ID NO: 514619 - DNA, 15 bp, Homo sapiens
tgggctacaaaagca

SEQ ID NO: 514620 - DNA, 15 bp, Homo sapiens
gggctacaaaagcaa

SEQ ID NO: 514621 - DNA, 15 bp, Homo sapiens
ggctacaaaagcaaa

SEQ ID NO: 514622 - DNA, 15 bp, Homo sapiens
gctacaaaagcaaaa

SEQ ID NO: 514623 - DNA, 15 bp, Homo sapiens
ctacaaaagcaaaac

SEQ ID NO: 514624 - DNA, 15 bp, Homo sapiens
tacaaaagcaaaacc

SEQ ID NO: 514625 - DNA, 15 bp, Homo sapiens
acaaaagcaaaaccc

SEQ ID NO: 514626 - DNA, 15 bp, Homo sapiens
caaaagcaaaacccc

SEQ ID NO: 514627 - DNA, 15 bp, Homo sapiens
aaaagcaaaacccca

SEQ ID NO: 514628 - DNA, 15 bp, Homo sapiens
aaagcaaaaccccat

SEQ ID NO: 514629 - DNA, 15 bp, Homo sapiens
aagcaaaaccccatc

SEQ ID NO: 514630 - DNA, 15 bp, Homo sapiens
agcaaaaccccatct

SEQ ID NO: 514631 - DNA, 15 bp, Homo sapiens
gcaaaaccccatctc

SEQ ID NO: 514632 - DNA, 15 bp, Homo sapiens
caaaaccccatctca

SEQ ID NO: 514633 - DNA, 15 bp, Homo sapiens
aaaaccccatctcaa

SEQ ID NO: 514634 - DNA, 15 bp, Homo sapiens
aaaccccatctcaaa

SEQ ID NO: 514635 - DNA, 15 bp, Homo sapiens
aaccccatctcaaaa

SEQ ID NO: 514636 - DNA, 15 bp, Homo sapiens
accccatctcaaaaa

SEQ ID NO: 514637 - DNA, 15 bp, Homo sapiens
ccccatctcaaaaaa

SEQ ID NO: 514638 - DNA, 15 bp, Homo sapiens
cccatctcaaaaaaa

SEQ ID NO: 514639 - DNA, 15 bp, Homo sapiens
catctcaaaaaaaag

SEQ ID NO: 514640 - DNA, 15 bp, Homo sapiens
atctcaaaaaaaaga

SEQ ID NO: 514641 - DNA, 15 bp, Homo sapiens
tctcaaaaaaaagaa

SEQ ID NO: 514642 - DNA, 15 bp, Homo sapiens
ctcaaaaaaaagaag

SEQ ID NO: 514643 - DNA, 15 bp, Homo sapiens
tcaaaaaaaagaaga

SEQ ID NO: 514644 - DNA, 15 bp, Homo sapiens
caaaaaaaagaagac

SEQ ID NO: 514645 - DNA, 15 bp, Homo sapiens
aaaaaaaagaagaca

SEQ ID NO: 514646 - DNA, 15 bp, Homo sapiens
aaaaaaagaagacac

SEQ ID NO: 514647 - DNA, 15 bp, Homo sapiens
aaaaaagaagacact

SEQ ID NO: 514648 - DNA, 15 bp, Homo sapiens
aaaaagaagacactt

SEQ ID NO: 514649 - DNA, 15 bp, Homo sapiens
aaaagaagacacttg

SEQ ID NO: 514650 - DNA, 15 bp, Homo sapiens
aaagaagacacttgg

SEQ ID NO: 514651 - DNA, 15 bp, Homo sapiens
aagaagacacttggg

SEQ ID NO: 514652 - DNA, 15 bp, Homo sapiens
agaagacacttgggt

SEQ ID NO: 514653 - DNA, 15 bp, Homo sapiens
gaagacacttgggtt

SEQ ID NO: 514654 - DNA, 15 bp, Homo sapiens
aagacacttgggttt

SEQ ID NO: 514655 - DNA, 15 bp, Homo sapiens
agacacttgggtttg

SEQ ID NO: 514656 - DNA, 15 bp, Homo sapiens
gacacttgggtttgg

SEQ ID NO: 514657 - DNA, 15 bp, Homo sapiens
acacttgggtttggg

SEQ ID NO: 514658 - DNA, 15 bp, Homo sapiens
cacttgggtttgggt

SEQ ID NO: 514659 - DNA, 15 bp, Homo sapiens
acttgggtttgggtg

SEQ ID NO: 514660 - DNA, 15 bp, Homo sapiens
cttgggtttgggtgt

SEQ ID NO: 514661 - DNA, 15 bp, Homo sapiens
ttgggtttgggtgtg

SEQ ID NO: 514662 - DNA, 15 bp, Homo sapiens
tgggtttgggtgtgt

SEQ ID NO: 514663 - DNA, 15 bp, Homo sapiens
gggtttgggtgtgtt

SEQ ID NO: 514664 - DNA, 15 bp, Homo sapiens
ggtttgggtgtgttg

SEQ ID NO: 514665 - DNA, 15 bp, Homo sapiens
gtttgggtgtgttgg

SEQ ID NO: 514666 - DNA, 15 bp, Homo sapiens
tttgggtgtgttggc

SEQ ID NO: 514667 - DNA, 15 bp, Homo sapiens
ttgggtgtgttggct

SEQ ID NO: 514668 - DNA, 15 bp, Homo sapiens
tgggtgtgttggctc

SEQ ID NO: 514669 - DNA, 15 bp, Homo sapiens
gggtgtgttggctca

SEQ ID NO: 514670 - DNA, 15 bp, Homo sapiens
ggtgtgttggctcat

SEQ ID NO: 514671 - DNA, 15 bp, Homo sapiens
gtgtgttggctcatg

SEQ ID NO: 514672 - DNA, 15 bp, Homo sapiens
tgtgttggctcatgc

SEQ ID NO: 514673 - DNA, 15 bp, Homo sapiens
gtgttggctcatgcc

SEQ ID NO: 514674 - DNA, 15 bp, Homo sapiens
tgttggctcatgcct

SEQ ID NO: 514675 - DNA, 15 bp, Homo sapiens
gttggctcatgcctg

SEQ ID NO: 514676 - DNA, 15 bp, Homo sapiens
ttggctcatgcctgt

SEQ ID NO: 514677 - DNA, 15 bp, Homo sapiens
gctcatgcctgtaaa

SEQ ID NO: 514678 - DNA, 15 bp, Homo sapiens
ctcatgcctgtaaac

SEQ ID NO: 514679 - DNA, 15 bp, Homo sapiens
tcatgcctgtaaacc

SEQ ID NO: 514680 - DNA, 15 bp, Homo sapiens
catgcctgtaaaccc

SEQ ID NO: 514681 - DNA, 15 bp, Homo sapiens
atgcctgtaaacccc

SEQ ID NO: 514682 - DNA, 15 bp, Homo sapiens
tgcctgtaaaccccg

SEQ ID NO: 514683 - DNA, 15 bp, Homo sapiens
gcctgtaaaccccgt

SEQ ID NO: 514684 - DNA, 15 bp, Homo sapiens
cctgtaaaccccgtg

SEQ ID NO: 514685 - DNA, 15 bp, Homo sapiens
ctgtaaaccccgtgc

SEQ ID NO: 514686 - DNA, 15 bp, Homo sapiens
tgtaaaccccgtgct

SEQ ID NO: 514687 - DNA, 15 bp, Homo sapiens
gtaaaccccgtgctg

SEQ ID NO: 514688 - DNA, 15 bp, Homo sapiens
taaaccccgtgctgg

SEQ ID NO: 514689 - DNA, 15 bp, Homo sapiens
aaaccccgtgctggg

SEQ ID NO: 514690 - DNA, 15 bp, Homo sapiens
aaccccgtgctggga

SEQ ID NO: 514691 - DNA, 15 bp, Homo sapiens
accccgtgctgggag

SEQ ID NO: 514692 - DNA, 15 bp, Homo sapiens
ccccgtgctgggagg

SEQ ID NO: 514693 - DNA, 15 bp, Homo sapiens
cccgtgctgggagga

SEQ ID NO: 514694 - DNA, 15 bp, Homo sapiens
ccgtgctgggaggat

SEQ ID NO: 514695 - DNA, 15 bp, Homo sapiens
cgtgctgggaggatt

SEQ ID NO: 514696 - DNA, 15 bp, Homo sapiens
gtgctgggaggattg

SEQ ID NO: 514697 - DNA, 15 bp, Homo sapiens
tgctgggaggattgc

SEQ ID NO: 514698 - DNA, 15 bp, Homo sapiens
gctgggaggattgct

SEQ ID NO: 514699 - DNA, 15 bp, Homo sapiens
ctgggaggattgctt

SEQ ID NO: 514700 - DNA, 15 bp, Homo sapiens
tgggaggattgcttg

SEQ ID NO: 514701 - DNA, 15 bp, Homo sapiens
gggaggattgcttga

SEQ ID NO: 514702 - DNA, 15 bp, Homo sapiens
ggaggattgcttgag

SEQ ID NO: 514703 - DNA, 15 bp, Homo sapiens
gaggattgcttgagc

SEQ ID NO: 514704 - DNA, 15 bp, Homo sapiens
aggattgcttgagcc

SEQ ID NO: 514705 - DNA, 15 bp, Homo sapiens
ggattgcttgagccc

SEQ ID NO: 514706 - DNA, 15 bp, Homo sapiens
gattgcttgagccca

SEQ ID NO: 514707 - DNA, 15 bp, Homo sapiens
attgcttgagcccag

SEQ ID NO: 514708 - DNA, 15 bp, Homo sapiens
ttgcttgagcccagg

SEQ ID NO: 514709 - DNA, 15 bp, Homo sapiens
tgcttgagcccagga

SEQ ID NO: 514710 - DNA, 15 bp, Homo sapiens
gcttgagcccaggag

SEQ ID NO: 514711 - DNA, 15 bp, Homo sapiens
cttgagcccaggagt

SEQ ID NO: 514712 - DNA, 15 bp, Homo sapiens
ttgagcccaggagtt

SEQ ID NO: 514713 - DNA, 15 bp, Homo sapiens
tgagcccaggagttc

SEQ ID NO: 514714 - DNA, 15 bp, Homo sapiens
gagcccaggagttca

SEQ ID NO: 514715 - DNA, 15 bp, Homo sapiens
agcccaggagttcaa

SEQ ID NO: 514716 - DNA, 15 bp, Homo sapiens
gcccaggagttcaag

SEQ ID NO: 514717 - DNA, 15 bp, Homo sapiens
cccaggagttcaagg

SEQ ID NO: 514718 - DNA, 15 bp, Homo sapiens
ccaggagttcaaggc

SEQ ID NO: 514719 - DNA, 15 bp, Homo sapiens
caggagttcaaggct

SEQ ID NO: 514720 - DNA, 15 bp, Homo sapiens
aggagttcaaggctg

SEQ ID NO: 514721 - DNA, 15 bp, Homo sapiens
ggagttcaaggctgc

SEQ ID NO: 514722 - DNA, 15 bp, Homo sapiens
gagttcaaggctgca

SEQ ID NO: 514723 - DNA, 15 bp, Homo sapiens
agttcaaggctgcag

SEQ ID NO: 514724 - DNA, 15 bp, Homo sapiens
gttcaaggctgcagt

SEQ ID NO: 514725 - DNA, 15 bp, Homo sapiens
ttcaaggctgcagtg

SEQ ID NO: 514726 - DNA, 15 bp, Homo sapiens
tcaaggctgcagtga

SEQ ID NO: 514727 - DNA, 15 bp, Homo sapiens
caaggctgcagtgag

SEQ ID NO: 514728 - DNA, 15 bp, Homo sapiens
aaggctgcagtgagg

SEQ ID NO: 514729 - DNA, 15 bp, Homo sapiens
aggctgcagtgaggt

SEQ ID NO: 514730 - DNA, 15 bp, Homo sapiens
ggctgcagtgaggta

SEQ ID NO: 514731 - DNA, 15 bp, Homo sapiens
gctgcagtgaggtat

SEQ ID NO: 514732 - DNA, 15 bp, Homo sapiens
ctgcagtgaggtatg

SEQ ID NO: 514733 - DNA, 15 bp, Homo sapiens
tgcagtgaggtatgt

SEQ ID NO: 514734 - DNA, 15 bp, Homo sapiens
gcagtgaggtatgtt

SEQ ID NO: 514735 - DNA, 15 bp, Homo sapiens
cagtgaggtatgttt

SEQ ID NO: 514736 - DNA, 15 bp, Homo sapiens
agtgaggtatgtttg

SEQ ID NO: 514737 - DNA, 15 bp, Homo sapiens
gtgaggtatgtttgc

SEQ ID NO: 514738 - DNA, 15 bp, Homo sapiens
tgaggtatgtttgca

SEQ ID NO: 514739 - DNA, 15 bp, Homo sapiens
gaggtatgtttgcac

SEQ ID NO: 514740 - DNA, 15 bp, Homo sapiens
aggtatgtttgcacc

SEQ ID NO: 514741 - DNA, 15 bp, Homo sapiens
ggtatgtttgcacca

SEQ ID NO: 514742 - DNA, 15 bp, Homo sapiens
gtatgtttgcaccac

SEQ ID NO: 514743 - DNA, 15 bp, Homo sapiens
tatgtttgcaccact

SEQ ID NO: 514744 - DNA, 15 bp, Homo sapiens
atgtttgcaccactg

SEQ ID NO: 514745 - DNA, 15 bp, Homo sapiens
tgtttgcaccactgc

SEQ ID NO: 514746 - DNA, 15 bp, Homo sapiens
gtttgcaccactgca

SEQ ID NO: 514747 - DNA, 15 bp, Homo sapiens
tttgcaccactgcac

SEQ ID NO: 514748 - DNA, 15 bp, Homo sapiens
ttgcaccactgcact

SEQ ID NO: 514749 - DNA, 15 bp, Homo sapiens
tgcaccactgcactc

SEQ ID NO: 514750 - DNA, 15 bp, Homo sapiens
gcaccactgcactcc

SEQ ID NO: 514751 - DNA, 15 bp, Homo sapiens
ctgcactccagccta

SEQ ID NO: 514752 - DNA, 15 bp, Homo sapiens
tgcactccagcctag

SEQ ID NO: 514753 - DNA, 15 bp, Homo sapiens
gcactccagcctagg

SEQ ID NO: 514754 - DNA, 15 bp, Homo sapiens
cactccagcctaggt

SEQ ID NO: 514755 - DNA, 15 bp, Homo sapiens
actccagcctaggtg

SEQ ID NO: 514756 - DNA, 15 bp, Homo sapiens
ctccagcctaggtga

SEQ ID NO: 514757 - DNA, 15 bp, Homo sapiens
tccagcctaggtgac

SEQ ID NO: 514758 - DNA, 15 bp, Homo sapiens
ccagcctaggtgaca

SEQ ID NO: 514759 - DNA, 15 bp, Homo sapiens
cagcctaggtgacag

SEQ ID NO: 514760 - DNA, 15 bp, Homo sapiens
agcctaggtgacaga

SEQ ID NO: 514761 - DNA, 15 bp, Homo sapiens
gcctaggtgacagag

SEQ ID NO: 514762 - DNA, 15 bp, Homo sapiens
cctaggtgacagagt

SEQ ID NO: 514763 - DNA, 15 bp, Homo sapiens
ctaggtgacagagtg

SEQ ID NO: 514764 - DNA, 15 bp, Homo sapiens
taggtgacagagtgt

SEQ ID NO: 514765 - DNA, 15 bp, Homo sapiens
aggtgacagagtgtg

SEQ ID NO: 514766 - DNA, 15 bp, Homo sapiens
ggtgacagagtgtga

SEQ ID NO: 514767 - DNA, 15 bp, Homo sapiens
gtgacagagtgtgac

SEQ ID NO: 514768 - DNA, 15 bp, Homo sapiens
tgacagagtgtgacc

SEQ ID NO: 514769 - DNA, 15 bp, Homo sapiens
gacagagtgtgacct

SEQ ID NO: 514770 - DNA, 15 bp, Homo sapiens
acagagtgtgacctt

SEQ ID NO: 514771 - DNA, 15 bp, Homo sapiens
cagagtgtgacctta

SEQ ID NO: 514772 - DNA, 15 bp, Homo sapiens
agagtgtgaccttat

SEQ ID NO: 514773 - DNA, 15 bp, Homo sapiens
gagtgtgaccttatc

SEQ ID NO: 514774 - DNA, 15 bp, Homo sapiens
agtgtgaccttatct

SEQ ID NO: 514775 - DNA, 15 bp, Homo sapiens
gtgtgaccttatctt

SEQ ID NO: 514776 - DNA, 15 bp, Homo sapiens
tgtgaccttatctta

SEQ ID NO: 514777 - DNA, 15 bp, Homo sapiens
gtgaccttatcttaa

SEQ ID NO: 514778 - DNA, 15 bp, Homo sapiens
tgaccttatcttaaa

SEQ ID NO: 514779 - DNA, 15 bp, Homo sapiens
gaccttatcttaaaa

SEQ ID NO: 514780 - DNA, 15 bp, Homo sapiens
accttatcttaaaag

SEQ ID NO: 514781 - DNA, 15 bp, Homo sapiens
ccttatcttaaaagt

SEQ ID NO: 514782 - DNA, 15 bp, Homo sapiens
cttatcttaaaagta

SEQ ID NO: 514783 - DNA, 15 bp, Homo sapiens
ttatcttaaaagtaa

SEQ ID NO: 514784 - DNA, 15 bp, Homo sapiens
tatcttaaaagtaat

SEQ ID NO: 514785 - DNA, 15 bp, Homo sapiens
atcttaaaagtaata

SEQ ID NO: 514786 - DNA, 15 bp, Homo sapiens
tcttaaaagtaataa

SEQ ID NO: 514787 - DNA, 15 bp, Homo sapiens
cttaaaagtaataat

SEQ ID NO: 514788 - DNA, 15 bp, Homo sapiens
ttaaaagtaataata

SEQ ID NO: 514789 - DNA, 15 bp, Homo sapiens
taaaagtaataataa

SEQ ID NO: 514790 - DNA, 15 bp, Homo sapiens
aaaagtaataataat

SEQ ID NO: 514791 - DNA, 15 bp, Homo sapiens
aaagtaataataatt

SEQ ID NO: 514792 - DNA, 15 bp, Homo sapiens
aagtaataataatta

SEQ ID NO: 514793 - DNA, 15 bp, Homo sapiens
agtaataataattaa

SEQ ID NO: 514794 - DNA, 15 bp, Homo sapiens
gtaataataattaaa

SEQ ID NO: 514795 - DNA, 15 bp, Homo sapiens
taataataattaaaa

SEQ ID NO: 514796 - DNA, 15 bp, Homo sapiens
aataataattaaaat

SEQ ID NO: 514797 - DNA, 15 bp, Homo sapiens
ataataattaaaata

SEQ ID NO: 514798 - DNA, 15 bp, Homo sapiens
taataattaaaataa

SEQ ID NO: 514799 - DNA, 15 bp, Homo sapiens
aataattaaaataat

SEQ ID NO: 514800 - DNA, 15 bp, Homo sapiens
ataattaaaataatc

SEQ ID NO: 514801 - DNA, 15 bp, Homo sapiens
taattaaaataatct

SEQ ID NO: 514802 - DNA, 15 bp, Homo sapiens
aattaaaataatctg

SEQ ID NO: 514803 - DNA, 15 bp, Homo sapiens
attaaaataatctgg

SEQ ID NO: 514804 - DNA, 15 bp, Homo sapiens
ttaaaataatctggg

SEQ ID NO: 514805 - DNA, 15 bp, Homo sapiens
taaaataatctgggg

SEQ ID NO: 514806 - DNA, 15 bp, Homo sapiens
aaaataatctggggt

SEQ ID NO: 514807 - DNA, 15 bp, Homo sapiens
aaataatctggggta

SEQ ID NO: 514808 - DNA, 15 bp, Homo sapiens
aataatctggggtag

SEQ ID NO: 514809 - DNA, 15 bp, Homo sapiens
ataatctggggtagg

SEQ ID NO: 514810 - DNA, 15 bp, Homo sapiens
taatctggggtaggg

SEQ ID NO: 514811 - DNA, 15 bp, Homo sapiens
aatctggggtagggg

SEQ ID NO: 514812 - DNA, 15 bp, Homo sapiens
atctggggtaggggt

SEQ ID NO: 514813 - DNA, 15 bp, Homo sapiens
tctggggtaggggtg

SEQ ID NO: 514814 - DNA, 15 bp, Homo sapiens
ctggggtaggggtgg

SEQ ID NO: 514815 - DNA, 15 bp, Homo sapiens
tggggtaggggtgga

SEQ ID NO: 514816 - DNA, 15 bp, Homo sapiens
ggggtaggggtggat

SEQ ID NO: 514817 - DNA, 15 bp, Homo sapiens
gggtaggggtggata

SEQ ID NO: 514818 - DNA, 15 bp, Homo sapiens
ggtaggggtggatat

SEQ ID NO: 514819 - DNA, 15 bp, Homo sapiens
gtaggggtggatatg

SEQ ID NO: 514820 - DNA, 15 bp, Homo sapiens
taggggtggatatgg

SEQ ID NO: 514821 - DNA, 15 bp, Homo sapiens
aggggtggatatggg

SEQ ID NO: 514822 - DNA, 15 bp, Homo sapiens
ggggtggatatgggt

SEQ ID NO: 514823 - DNA, 15 bp, Homo sapiens
gggtggatatgggtg

SEQ ID NO: 514824 - DNA, 15 bp, Homo sapiens
ggtggatatgggtga

SEQ ID NO: 514825 - DNA, 15 bp, Homo sapiens
gtggatatgggtgaa

SEQ ID NO: 514826 - DNA, 15 bp, Homo sapiens
tggatatgggtgaaa

SEQ ID NO: 514827 - DNA, 15 bp, Homo sapiens
ggatatgggtgaaac

SEQ ID NO: 514828 - DNA, 15 bp, Homo sapiens
gatatgggtgaaaca

SEQ ID NO: 514829 - DNA, 15 bp, Homo sapiens
atatgggtgaaacag

SEQ ID NO: 514830 - DNA, 15 bp, Homo sapiens
tatgggtgaaacagc

SEQ ID NO: 514831 - DNA, 15 bp, Homo sapiens
atgggtgaaacagct

SEQ ID NO: 514832 - DNA, 15 bp, Homo sapiens
tgggtgaaacagctt

SEQ ID NO: 514833 - DNA, 15 bp, Homo sapiens
gggtgaaacagcttg

SEQ ID NO: 514834 - DNA, 15 bp, Homo sapiens
ggtgaaacagcttgg

SEQ ID NO: 514835 - DNA, 15 bp, Homo sapiens
gtgaaacagcttggc

SEQ ID NO: 514836 - DNA, 15 bp, Homo sapiens
tgaaacagcttggcc

SEQ ID NO: 514837 - DNA, 15 bp, Homo sapiens
gaaacagcttggcca

SEQ ID NO: 514838 - DNA, 15 bp, Homo sapiens
aaacagcttggccat

SEQ ID NO: 514839 - DNA, 15 bp, Homo sapiens
aacagcttggccatg

SEQ ID NO: 514840 - DNA, 15 bp, Homo sapiens
acagcttggccatga

SEQ ID NO: 514841 - DNA, 15 bp, Homo sapiens
cagcttggccatgag

SEQ ID NO: 514842 - DNA, 15 bp, Homo sapiens
agcttggccatgagt

SEQ ID NO: 514843 - DNA, 15 bp, Homo sapiens
gcttggccatgagtt

SEQ ID NO: 514844 - DNA, 15 bp, Homo sapiens
cttggccatgagttg

SEQ ID NO: 514845 - DNA, 15 bp, Homo sapiens
ttggccatgagttga

SEQ ID NO: 514846 - DNA, 15 bp, Homo sapiens
tggccatgagttgat

SEQ ID NO: 514847 - DNA, 15 bp, Homo sapiens
ggccatgagttgatg

SEQ ID NO: 514848 - DNA, 15 bp, Homo sapiens
gccatgagttgatgg

SEQ ID NO: 514849 - DNA, 15 bp, Homo sapiens
ccatgagttgatggt

SEQ ID NO: 514850 - DNA, 15 bp, Homo sapiens
catgagttgatggtt

SEQ ID NO: 514851 - DNA, 15 bp, Homo sapiens
atgagttgatggttg

SEQ ID NO: 514852 - DNA, 15 bp, Homo sapiens
tgagttgatggttgt

SEQ ID NO: 514853 - DNA, 15 bp, Homo sapiens
gagttgatggttgtt

SEQ ID NO: 514854 - DNA, 15 bp, Homo sapiens
agttgatggttgttg

SEQ ID NO: 514855 - DNA, 15 bp, Homo sapiens
gttgatggttgttgg

SEQ ID NO: 514856 - DNA, 15 bp, Homo sapiens
ttgatggttgttgga

SEQ ID NO: 514857 - DNA, 15 bp, Homo sapiens
tgatggttgttggac

SEQ ID NO: 514858 - DNA, 15 bp, Homo sapiens
gatggttgttggacc

SEQ ID NO: 514859 - DNA, 15 bp, Homo sapiens
atggttgttggacca

SEQ ID NO: 514860 - DNA, 15 bp, Homo sapiens
tggttgttggaccag

SEQ ID NO: 514861 - DNA, 15 bp, Homo sapiens
ggttgttggaccagg

SEQ ID NO: 514862 - DNA, 15 bp, Homo sapiens
gttgttggaccaggg

SEQ ID NO: 514863 - DNA, 15 bp, Homo sapiens
ttgttggaccagggt

SEQ ID NO: 514864 - DNA, 15 bp, Homo sapiens
tgttggaccagggtg

SEQ ID NO: 514865 - DNA, 15 bp, Homo sapiens
gttggaccagggtga

SEQ ID NO: 514866 - DNA, 15 bp, Homo sapiens
ttggaccagggtgat

SEQ ID NO: 514867 - DNA, 15 bp, Homo sapiens
tggaccagggtgatg

SEQ ID NO: 514868 - DNA, 15 bp, Homo sapiens
ggaccagggtgatgg

SEQ ID NO: 514869 - DNA, 15 bp, Homo sapiens
gaccagggtgatggt

SEQ ID NO: 514870 - DNA, 15 bp, Homo sapiens
accagggtgatggtc

SEQ ID NO: 514871 - DNA, 15 bp, Homo sapiens
ccagggtgatggtcc

SEQ ID NO: 514872 - DNA, 15 bp, Homo sapiens
cagggtgatggtcca

SEQ ID NO: 514873 - DNA, 15 bp, Homo sapiens
agggtgatggtccat

SEQ ID NO: 514874 - DNA, 15 bp, Homo sapiens
gggtgatggtccata

SEQ ID NO: 514875 - DNA, 15 bp, Homo sapiens
ggtgatggtccatat

SEQ ID NO: 514876 - DNA, 15 bp, Homo sapiens
gtgatggtccatata

SEQ ID NO: 514877 - DNA, 15 bp, Homo sapiens
tgatggtccatatag

SEQ ID NO: 514878 - DNA, 15 bp, Homo sapiens
gatggtccatatagt

SEQ ID NO: 514879 - DNA, 15 bp, Homo sapiens
atggtccatatagtt

SEQ ID NO: 514880 - DNA, 15 bp, Homo sapiens
tggtccatatagttc

SEQ ID NO: 514881 - DNA, 15 bp, Homo sapiens
ggtccatatagttca

SEQ ID NO: 514882 - DNA, 15 bp, Homo sapiens
gtccatatagttcat

SEQ ID NO: 514883 - DNA, 15 bp, Homo sapiens
tccatatagttcatt

SEQ ID NO: 514884 - DNA, 15 bp, Homo sapiens
ccatatagttcattt

SEQ ID NO: 514885 - DNA, 15 bp, Homo sapiens
catatagttcatttt

SEQ ID NO: 514886 - DNA, 15 bp, Homo sapiens
atatagttcatttta

SEQ ID NO: 514887 - DNA, 15 bp, Homo sapiens
tatagttcattttat

SEQ ID NO: 514888 - DNA, 15 bp, Homo sapiens
atagttcattttatt

SEQ ID NO: 514889 - DNA, 15 bp, Homo sapiens
tagttcattttatta

SEQ ID NO: 514890 - DNA, 15 bp, Homo sapiens
agttcattttattat

SEQ ID NO: 514891 - DNA, 15 bp, Homo sapiens
gttcattttattatt

SEQ ID NO: 514892 - DNA, 15 bp, Homo sapiens
ttcattttattattt

SEQ ID NO: 514893 - DNA, 15 bp, Homo sapiens
tcattttattatttt

SEQ ID NO: 514894 - DNA, 15 bp, Homo sapiens
cattttattatttta

SEQ ID NO: 514895 - DNA, 15 bp, Homo sapiens
attttattattttat

SEQ ID NO: 514896 - DNA, 15 bp, Homo sapiens
ttttattattttatt

SEQ ID NO: 514897 - DNA, 15 bp, Homo sapiens
tttattattttattt

SEQ ID NO: 514898 - DNA, 15 bp, Homo sapiens
ttattattttattta

SEQ ID NO: 514899 - DNA, 15 bp, Homo sapiens
tattattttatttac

SEQ ID NO: 514900 - DNA, 15 bp, Homo sapiens
attattttatttact

SEQ ID NO: 514901 - DNA, 15 bp, Homo sapiens
ttattttatttactt

SEQ ID NO: 514902 - DNA, 15 bp, Homo sapiens
tattttatttacttg

SEQ ID NO: 514903 - DNA, 15 bp, Homo sapiens
attttatttacttga

SEQ ID NO: 514904 - DNA, 15 bp, Homo sapiens
ttttatttacttgaa

SEQ ID NO: 514905 - DNA, 15 bp, Homo sapiens
tttatttacttgaaa

SEQ ID NO: 514906 - DNA, 15 bp, Homo sapiens
ttatttacttgaaat

SEQ ID NO: 514907 - DNA, 15 bp, Homo sapiens
tatttacttgaaatt

SEQ ID NO: 514908 - DNA, 15 bp, Homo sapiens
atttacttgaaattt

SEQ ID NO: 514909 - DNA, 15 bp, Homo sapiens
tttacttgaaatttt

SEQ ID NO: 514910 - DNA, 15 bp, Homo sapiens
ttacttgaaattttg

SEQ ID NO: 514911 - DNA, 15 bp, Homo sapiens
tacttgaaattttga

SEQ ID NO: 514912 - DNA, 15 bp, Homo sapiens
acttgaaattttgaa

SEQ ID NO: 514913 - DNA, 15 bp, Homo sapiens
cttgaaattttgaaa

SEQ ID NO: 514914 - DNA, 15 bp, Homo sapiens
ttgaaattttgaaat

SEQ ID NO: 514915 - DNA, 15 bp, Homo sapiens
tgaaattttgaaata

SEQ ID NO: 514916 - DNA, 15 bp, Homo sapiens
gaaattttgaaatac

SEQ ID NO: 514917 - DNA, 15 bp, Homo sapiens
aaattttgaaatact

SEQ ID NO: 514918 - DNA, 15 bp, Homo sapiens
aattttgaaatactt

SEQ ID NO: 514919 - DNA, 15 bp, Homo sapiens
attttgaaatacttg

SEQ ID NO: 514920 - DNA, 15 bp, Homo sapiens
ttttgaaatacttga

SEQ ID NO: 514921 - DNA, 15 bp, Homo sapiens
tttgaaatacttgaa

SEQ ID NO: 514922 - DNA, 15 bp, Homo sapiens
ttgaaatacttgaaa

SEQ ID NO: 514923 - DNA, 15 bp, Homo sapiens
tgaaatacttgaaat

SEQ ID NO: 514924 - DNA, 15 bp, Homo sapiens
gaaatacttgaaatt

SEQ ID NO: 514925 - DNA, 15 bp, Homo sapiens
aaatacttgaaattt

SEQ ID NO: 514926 - DNA, 15 bp, Homo sapiens
aatacttgaaatttt

SEQ ID NO: 514927 - DNA, 15 bp, Homo sapiens
atacttgaaattttc

SEQ ID NO: 514928 - DNA, 15 bp, Homo sapiens
tacttgaaattttcc

SEQ ID NO: 514929 - DNA, 15 bp, Homo sapiens
acttgaaattttcca

SEQ ID NO: 514930 - DNA, 15 bp, Homo sapiens
cttgaaattttccat

SEQ ID NO: 514931 - DNA, 15 bp, Homo sapiens
ttgaaattttccata

SEQ ID NO: 514932 - DNA, 15 bp, Homo sapiens
tgaaattttccatat

SEQ ID NO: 514933 - DNA, 15 bp, Homo sapiens
gaaattttccatatt

SEQ ID NO: 514934 - DNA, 15 bp, Homo sapiens
aaattttccatatta

SEQ ID NO: 514935 - DNA, 15 bp, Homo sapiens
aattttccatattaa

SEQ ID NO: 514936 - DNA, 15 bp, Homo sapiens
attttccatattaag

SEQ ID NO: 514937 - DNA, 15 bp, Homo sapiens
ttttccatattaagt

SEQ ID NO: 514938 - DNA, 15 bp, Homo sapiens
tttccatattaagtt

SEQ ID NO: 514939 - DNA, 15 bp, Homo sapiens
ttccatattaagtta

SEQ ID NO: 514940 - DNA, 15 bp, Homo sapiens
tccatattaagttaa

SEQ ID NO: 514941 - DNA, 15 bp, Homo sapiens
ccatattaagttaaa

SEQ ID NO: 514942 - DNA, 15 bp, Homo sapiens
catattaagttaaaa

SEQ ID NO: 514943 - DNA, 15 bp, Homo sapiens
atattaagttaaaaa

SEQ ID NO: 514944 - DNA, 15 bp, Homo sapiens
tattaagttaaaaag

SEQ ID NO: 514945 - DNA, 15 bp, Homo sapiens
attaagttaaaaagg

SEQ ID NO: 514946 - DNA, 15 bp, Homo sapiens
ttaagttaaaaaggc

SEQ ID NO: 514947 - DNA, 15 bp, Homo sapiens
taagttaaaaaggca

SEQ ID NO: 514948 - DNA, 15 bp, Homo sapiens
aagttaaaaaggcat

SEQ ID NO: 514949 - DNA, 15 bp, Homo sapiens
agttaaaaaggcatt

SEQ ID NO: 514950 - DNA, 15 bp, Homo sapiens
gttaaaaaggcattt

SEQ ID NO: 514951 - DNA, 15 bp, Homo sapiens
ttaaaaaggcattta

SEQ ID NO: 514952 - DNA, 15 bp, Homo sapiens
taaaaaggcatttac

SEQ ID NO: 514953 - DNA, 15 bp, Homo sapiens
aaaaaggcatttaca

SEQ ID NO: 514954 - DNA, 15 bp, Homo sapiens
aaaaggcatttacag

SEQ ID NO: 514955 - DNA, 15 bp, Homo sapiens
aaaggcatttacagt

SEQ ID NO: 514956 - DNA, 15 bp, Homo sapiens
aaggcatttacagta

SEQ ID NO: 514957 - DNA, 15 bp, Homo sapiens
aggcatttacagtaa

SEQ ID NO: 514958 - DNA, 15 bp, Homo sapiens
ggcatttacagtaaa

SEQ ID NO: 514959 - DNA, 15 bp, Homo sapiens
gcatttacagtaaac

SEQ ID NO: 514960 - DNA, 15 bp, Homo sapiens
catttacagtaaaca

SEQ ID NO: 514961 - DNA, 15 bp, Homo sapiens
atttacagtaaacaa

SEQ ID NO: 514962 - DNA, 15 bp, Homo sapiens
tttacagtaaacaaa

SEQ ID NO: 514963 - DNA, 15 bp, Homo sapiens
ttacagtaaacaaaa

SEQ ID NO: 514964 - DNA, 15 bp, Homo sapiens
tacagtaaacaaaaa

SEQ ID NO: 514965 - DNA, 15 bp, Homo sapiens
acagtaaacaaaaaa

SEQ ID NO: 514966 - DNA, 15 bp, Homo sapiens
cagtaaacaaaaaaa

SEQ ID NO: 514967 - DNA, 15 bp, Homo sapiens
agtaaacaaaaaaaa

SEQ ID NO: 514968 - DNA, 15 bp, Homo sapiens
gtaaacaaaaaaaag

SEQ ID NO: 514969 - DNA, 15 bp, Homo sapiens
taaacaaaaaaaagt

SEQ ID NO: 514970 - DNA, 15 bp, Homo sapiens
aaacaaaaaaaagtt

SEQ ID NO: 514971 - DNA, 15 bp, Homo sapiens
aacaaaaaaaagttc

SEQ ID NO: 514972 - DNA, 15 bp, Homo sapiens
acaaaaaaaagttct

SEQ ID NO: 514973 - DNA, 15 bp, Homo sapiens
caaaaaaaagttcta

SEQ ID NO: 514974 - DNA, 15 bp, Homo sapiens
aaaaaaaagttctag

SEQ ID NO: 514975 - DNA, 15 bp, Homo sapiens
aaaaaaagttctagg

SEQ ID NO: 514976 - DNA, 15 bp, Homo sapiens
aaaaaagttctagga

SEQ ID NO: 514977 - DNA, 15 bp, Homo sapiens
aaaaagttctaggaa

SEQ ID NO: 514978 - DNA, 15 bp, Homo sapiens
aaaagttctaggaag

SEQ ID NO: 514979 - DNA, 15 bp, Homo sapiens
aaagttctaggaagg

SEQ ID NO: 514980 - DNA, 15 bp, Homo sapiens
aagttctaggaagga

SEQ ID NO: 514981 - DNA, 15 bp, Homo sapiens
agttctaggaaggaa

SEQ ID NO: 514982 - DNA, 15 bp, Homo sapiens
gttctaggaaggaat

SEQ ID NO: 514983 - DNA, 15 bp, Homo sapiens
ttctaggaaggaatt

SEQ ID NO: 514984 - DNA, 15 bp, Homo sapiens
tctaggaaggaattc

SEQ ID NO: 514985 - DNA, 15 bp, Homo sapiens
ctaggaaggaattca

SEQ ID NO: 514986 - DNA, 15 bp, Homo sapiens
taggaaggaattcaa

SEQ ID NO: 514987 - DNA, 15 bp, Homo sapiens
aggaaggaattcaaa

SEQ ID NO: 514988 - DNA, 15 bp, Homo sapiens
ggaaggaattcaaaa

SEQ ID NO: 514989 - DNA, 15 bp, Homo sapiens
gaaggaattcaaaag

SEQ ID NO: 514990 - DNA, 15 bp, Homo sapiens
aaggaattcaaaaga

SEQ ID NO: 514991 - DNA, 15 bp, Homo sapiens
aggaattcaaaagaa

SEQ ID NO: 514992 - DNA, 15 bp, Homo sapiens
ggaattcaaaagaaa

SEQ ID NO: 514993 - DNA, 15 bp, Homo sapiens
gaattcaaaagaaat

SEQ ID NO: 514994 - DNA, 15 bp, Homo sapiens
aattcaaaagaaata

SEQ ID NO: 514995 - DNA, 15 bp, Homo sapiens
attcaaaagaaatat

SEQ ID NO: 514996 - DNA, 15 bp, Homo sapiens
ttcaaaagaaatata

SEQ ID NO: 514997 - DNA, 15 bp, Homo sapiens
tcaaaagaaatataa

SEQ ID NO: 514998 - DNA, 15 bp, Homo sapiens
caaaagaaatataag

SEQ ID NO: 514999 - DNA, 15 bp, Homo sapiens
aaaagaaatataagc

SEQ ID NO: 515000 - DNA, 15 bp, Homo sapiens
aaagaaatataagca

SEQ ID NO: 515001 - DNA, 15 bp, Homo sapiens
aagaaatataagcag

SEQ ID NO: 515002 - DNA, 15 bp, Homo sapiens
agaaatataagcaga

SEQ ID NO: 515003 - DNA, 15 bp, Homo sapiens
gaaatataagcagaa

SEQ ID NO: 515004 - DNA, 15 bp, Homo sapiens
aaatataagcagaaa

SEQ ID NO: 515005 - DNA, 15 bp, Homo sapiens
aatataagcagaaaa

SEQ ID NO: 515006 - DNA, 15 bp, Homo sapiens
atataagcagaaaat

SEQ ID NO: 515007 - DNA, 15 bp, Homo sapiens
tataagcagaaaatt

SEQ ID NO: 515008 - DNA, 15 bp, Homo sapiens
ataagcagaaaattt

SEQ ID NO: 515009 - DNA, 15 bp, Homo sapiens
taagcagaaaatttt

SEQ ID NO: 515010 - DNA, 15 bp, Homo sapiens
aagcagaaaattttg

SEQ ID NO: 515011 - DNA, 15 bp, Homo sapiens
agcagaaaattttgt

SEQ ID NO: 515012 - DNA, 15 bp, Homo sapiens
gcagaaaattttgtc

SEQ ID NO: 515013 - DNA, 15 bp, Homo sapiens
cagaaaattttgtct

SEQ ID NO: 515014 - DNA, 15 bp, Homo sapiens
agaaaattttgtctt

SEQ ID NO: 515015 - DNA, 15 bp, Homo sapiens
gaaaattttgtcttt

SEQ ID NO: 515016 - DNA, 15 bp, Homo sapiens
aaaattttgtcttta

SEQ ID NO: 515017 - DNA, 15 bp, Homo sapiens
aaattttgtctttat

SEQ ID NO: 515018 - DNA, 15 bp, Homo sapiens
aattttgtctttatg

SEQ ID NO: 515019 - DNA, 15 bp, Homo sapiens
attttgtctttatgg

SEQ ID NO: 515020 - DNA, 15 bp, Homo sapiens
ttttgtctttatgga

SEQ ID NO: 515021 - DNA, 15 bp, Homo sapiens
tttgtctttatggag

SEQ ID NO: 515022 - DNA, 15 bp, Homo sapiens
ttgtctttatggagc

SEQ ID NO: 515023 - DNA, 15 bp, Homo sapiens
tgtctttatggagct

SEQ ID NO: 515024 - DNA, 15 bp, Homo sapiens
gtctttatggagctt

SEQ ID NO: 515025 - DNA, 15 bp, Homo sapiens
tctttatggagctta

SEQ ID NO: 515026 - DNA, 15 bp, Homo sapiens
ctttatggagcttaa

SEQ ID NO: 515027 - DNA, 15 bp, Homo sapiens
tttatggagcttaaa

SEQ ID NO: 515028 - DNA, 15 bp, Homo sapiens
ttatggagcttaaag

SEQ ID NO: 515029 - DNA, 15 bp, Homo sapiens
tatggagcttaaaga

SEQ ID NO: 515030 - DNA, 15 bp, Homo sapiens
atggagcttaaagat

SEQ ID NO: 515031 - DNA, 15 bp, Homo sapiens
tggagcttaaagatg

SEQ ID NO: 515032 - DNA, 15 bp, Homo sapiens
ggagcttaaagatga

SEQ ID NO: 515033 - DNA, 15 bp, Homo sapiens
gagcttaaagatgag

SEQ ID NO: 515034 - DNA, 15 bp, Homo sapiens
agcttaaagatgaga

SEQ ID NO: 515035 - DNA, 15 bp, Homo sapiens
gcttaaagatgagat

SEQ ID NO: 515036 - DNA, 15 bp, Homo sapiens
cttaaagatgagatg

SEQ ID NO: 515037 - DNA, 15 bp, Homo sapiens
ttaaagatgagatgt

SEQ ID NO: 515038 - DNA, 15 bp, Homo sapiens
taaagatgagatgtg

SEQ ID NO: 515039 - DNA, 15 bp, Homo sapiens
aaagatgagatgtgc

SEQ ID NO: 515040 - DNA, 15 bp, Homo sapiens
aagatgagatgtgca

SEQ ID NO: 515041 - DNA, 15 bp, Homo sapiens
agatgagatgtgcac

SEQ ID NO: 515042 - DNA, 15 bp, Homo sapiens
gatgagatgtgcacc

SEQ ID NO: 515043 - DNA, 15 bp, Homo sapiens
atgagatgtgcaccc

SEQ ID NO: 515044 - DNA, 15 bp, Homo sapiens
tgagatgtgcaccca

SEQ ID NO: 515045 - DNA, 15 bp, Homo sapiens
gagatgtgcacccac

SEQ ID NO: 515046 - DNA, 15 bp, Homo sapiens
agatgtgcacccaca

SEQ ID NO: 515047 - DNA, 15 bp, Homo sapiens
gatgtgcacccacag

SEQ ID NO: 515048 - DNA, 15 bp, Homo sapiens
atgtgcacccacagt

SEQ ID NO: 515049 - DNA, 15 bp, Homo sapiens
tgtgcacccacagtg

SEQ ID NO: 515050 - DNA, 15 bp, Homo sapiens
gtgcacccacagtga

SEQ ID NO: 515051 - DNA, 15 bp, Homo sapiens
tgcacccacagtgat

SEQ ID NO: 515052 - DNA, 15 bp, Homo sapiens
gcacccacagtgata

SEQ ID NO: 515053 - DNA, 15 bp, Homo sapiens
cacccacagtgatag

SEQ ID NO: 515054 - DNA, 15 bp, Homo sapiens
acccacagtgatagt

SEQ ID NO: 515055 - DNA, 15 bp, Homo sapiens
cccacagtgatagtg

SEQ ID NO: 515056 - DNA, 15 bp, Homo sapiens
ccacagtgatagtgc

SEQ ID NO: 515057 - DNA, 15 bp, Homo sapiens
cacagtgatagtgca

SEQ ID NO: 515058 - DNA, 15 bp, Homo sapiens
acagtgatagtgcag

SEQ ID NO: 515059 - DNA, 15 bp, Homo sapiens
cagtgatagtgcaga

SEQ ID NO: 515060 - DNA, 15 bp, Homo sapiens
agtgatagtgcagaa

SEQ ID NO: 515061 - DNA, 15 bp, Homo sapiens
gtgatagtgcagaaa

SEQ ID NO: 515062 - DNA, 15 bp, Homo sapiens
tgatagtgcagaaaa

SEQ ID NO: 515063 - DNA, 15 bp, Homo sapiens
gatagtgcagaaaaa

SEQ ID NO: 515064 - DNA, 15 bp, Homo sapiens
atagtgcagaaaaat

SEQ ID NO: 515065 - DNA, 15 bp, Homo sapiens
tagtgcagaaaaata

SEQ ID NO: 515066 - DNA, 15 bp, Homo sapiens
agtgcagaaaaatat

SEQ ID NO: 515067 - DNA, 15 bp, Homo sapiens
gtgcagaaaaatata

SEQ ID NO: 515068 - DNA, 15 bp, Homo sapiens
tgcagaaaaatatat

SEQ ID NO: 515069 - DNA, 15 bp, Homo sapiens
gcagaaaaatatatc

SEQ ID NO: 515070 - DNA, 15 bp, Homo sapiens
cagaaaaatatatca

SEQ ID NO: 515071 - DNA, 15 bp, Homo sapiens
agaaaaatatatcac

SEQ ID NO: 515072 - DNA, 15 bp, Homo sapiens
gaaaaatatatcact

SEQ ID NO: 515073 - DNA, 15 bp, Homo sapiens
aaaaatatatcactg

SEQ ID NO: 515074 - DNA, 15 bp, Homo sapiens
aaaatatatcactgg

SEQ ID NO: 515075 - DNA, 15 bp, Homo sapiens
aaatatatcactgga

SEQ ID NO: 515076 - DNA, 15 bp, Homo sapiens
aatatatcactggaa

SEQ ID NO: 515077 - DNA, 15 bp, Homo sapiens
atatatcactggaaa

SEQ ID NO: 515078 - DNA, 15 bp, Homo sapiens
tatatcactggaaat

SEQ ID NO: 515079 - DNA, 15 bp, Homo sapiens
atatcactggaaatg

SEQ ID NO: 515080 - DNA, 15 bp, Homo sapiens
tatcactggaaatga

SEQ ID NO: 515081 - DNA, 15 bp, Homo sapiens
atcactggaaatgaa

SEQ ID NO: 515082 - DNA, 15 bp, Homo sapiens
tcactggaaatgaat

SEQ ID NO: 515083 - DNA, 15 bp, Homo sapiens
cactggaaatgaatt

SEQ ID NO: 515084 - DNA, 15 bp, Homo sapiens
actggaaatgaattc

SEQ ID NO: 515085 - DNA, 15 bp, Homo sapiens
ctggaaatgaattcg

SEQ ID NO: 515086 - DNA, 15 bp, Homo sapiens
tggaaatgaattcgt

SEQ ID NO: 515087 - DNA, 15 bp, Homo sapiens
ggaaatgaattcgta

SEQ ID NO: 515088 - DNA, 15 bp, Homo sapiens
gaaatgaattcgtac

SEQ ID NO: 515089 - DNA, 15 bp, Homo sapiens
aaatgaattcgtacg

SEQ ID NO: 515090 - DNA, 15 bp, Homo sapiens
aatgaattcgtacga

SEQ ID NO: 515091 - DNA, 15 bp, Homo sapiens
atgaattcgtacgaa

SEQ ID NO: 515092 - DNA, 15 bp, Homo sapiens
tgaattcgtacgaac

SEQ ID NO: 515093 - DNA, 15 bp, Homo sapiens
gaattcgtacgaact

SEQ ID NO: 515094 - DNA, 15 bp, Homo sapiens
aattcgtacgaacta

SEQ ID NO: 515095 - DNA, 15 bp, Homo sapiens
attcgtacgaactat

SEQ ID NO: 515096 - DNA, 15 bp, Homo sapiens
ttcgtacgaactatt

SEQ ID NO: 515097 - DNA, 15 bp, Homo sapiens
tcgtacgaactatta

SEQ ID NO: 515098 - DNA, 15 bp, Homo sapiens
cgtacgaactattat

SEQ ID NO: 515099 - DNA, 15 bp, Homo sapiens
gtacgaactattatc

SEQ ID NO: 515100 - DNA, 15 bp, Homo sapiens
tacgaactattatca

SEQ ID NO: 515101 - DNA, 15 bp, Homo sapiens
acgaactattatcaa

SEQ ID NO: 515102 - DNA, 15 bp, Homo sapiens
cgaactattatcaac

SEQ ID NO: 515103 - DNA, 15 bp, Homo sapiens
gaactattatcaact

SEQ ID NO: 515104 - DNA, 15 bp, Homo sapiens
aactattatcaacta

SEQ ID NO: 515105 - DNA, 15 bp, Homo sapiens
actattatcaactaa

SEQ ID NO: 515106 - DNA, 15 bp, Homo sapiens
ctattatcaactaat

SEQ ID NO: 515107 - DNA, 15 bp, Homo sapiens
tattatcaactaatc

SEQ ID NO: 515108 - DNA, 15 bp, Homo sapiens
attatcaactaatct

SEQ ID NO: 515109 - DNA, 15 bp, Homo sapiens
ttatcaactaatctt

SEQ ID NO: 515110 - DNA, 15 bp, Homo sapiens
tatcaactaatcttt

SEQ ID NO: 515111 - DNA, 15 bp, Homo sapiens
atcaactaatctttt

SEQ ID NO: 515112 - DNA, 15 bp, Homo sapiens
tcaactaatctttta

SEQ ID NO: 515113 - DNA, 15 bp, Homo sapiens
caactaatcttttaa

SEQ ID NO: 515114 - DNA, 15 bp, Homo sapiens
aactaatcttttaaa

SEQ ID NO: 515115 - DNA, 15 bp, Homo sapiens
actaatcttttaaat

SEQ ID NO: 515116 - DNA, 15 bp, Homo sapiens
ctaatcttttaaatg

SEQ ID NO: 515117 - DNA, 15 bp, Homo sapiens
taatcttttaaatgc

SEQ ID NO: 515118 - DNA, 15 bp, Homo sapiens
aatcttttaaatgct

SEQ ID NO: 515119 - DNA, 15 bp, Homo sapiens
atcttttaaatgctg

SEQ ID NO: 515120 - DNA, 15 bp, Homo sapiens
tcttttaaatgctga

SEQ ID NO: 515121 - DNA, 15 bp, Homo sapiens
cttttaaatgctgat

SEQ ID NO: 515122 - DNA, 15 bp, Homo sapiens
ttttaaatgctgatg

SEQ ID NO: 515123 - DNA, 15 bp, Homo sapiens
tttaaatgctgatga

SEQ ID NO: 515124 - DNA, 15 bp, Homo sapiens
ttaaatgctgatgat

SEQ ID NO: 515125 - DNA, 15 bp, Homo sapiens
taaatgctgatgata

SEQ ID NO: 515126 - DNA, 15 bp, Homo sapiens
aaatgctgatgatag

SEQ ID NO: 515127 - DNA, 15 bp, Homo sapiens
aatgctgatgatagt

SEQ ID NO: 515128 - DNA, 15 bp, Homo sapiens
atgctgatgatagta

SEQ ID NO: 515129 - DNA, 15 bp, Homo sapiens
tgctgatgatagtat

SEQ ID NO: 515130 - DNA, 15 bp, Homo sapiens
gctgatgatagtata

SEQ ID NO: 515131 - DNA, 15 bp, Homo sapiens
ctgatgatagtatag

SEQ ID NO: 515132 - DNA, 15 bp, Homo sapiens
tgatgatagtataga

SEQ ID NO: 515133 - DNA, 15 bp, Homo sapiens
gatgatagtatagag

SEQ ID NO: 515134 - DNA, 15 bp, Homo sapiens
atgatagtatagagt

SEQ ID NO: 515135 - DNA, 15 bp, Homo sapiens
tgatagtatagagta

SEQ ID NO: 515136 - DNA, 15 bp, Homo sapiens
gatagtatagagtat

SEQ ID NO: 515137 - DNA, 15 bp, Homo sapiens
atagtatagagtatt

SEQ ID NO: 515138 - DNA, 15 bp, Homo sapiens
tagtatagagtattg

SEQ ID NO: 515139 - DNA, 15 bp, Homo sapiens
agtatagagtattga

SEQ ID NO: 515140 - DNA, 15 bp, Homo sapiens
gtatagagtattgaa

SEQ ID NO: 515141 - DNA, 15 bp, Homo sapiens
tatagagtattgaag

SEQ ID NO: 515142 - DNA, 15 bp, Homo sapiens
atagagtattgaagg

SEQ ID NO: 515143 - DNA, 15 bp, Homo sapiens
tagagtattgaaggg

SEQ ID NO: 515144 - DNA, 15 bp, Homo sapiens
agagtattgaaggga

SEQ ID NO: 515145 - DNA, 15 bp, Homo sapiens
gagtattgaagggat

SEQ ID NO: 515146 - DNA, 15 bp, Homo sapiens
agtattgaagggatc

SEQ ID NO: 515147 - DNA, 15 bp, Homo sapiens
gtattgaagggatca

SEQ ID NO: 515148 - DNA, 15 bp, Homo sapiens
tattgaagggatcaa

SEQ ID NO: 515149 - DNA, 15 bp, Homo sapiens
attgaagggatcaat

SEQ ID NO: 515150 - DNA, 15 bp, Homo sapiens
ttgaagggatcaata

SEQ ID NO: 515151 - DNA, 15 bp, Homo sapiens
tgaagggatcaatat

SEQ ID NO: 515152 - DNA, 15 bp, Homo sapiens
gaagggatcaatata

SEQ ID NO: 515153 - DNA, 15 bp, Homo sapiens
aagggatcaatataa

SEQ ID NO: 515154 - DNA, 15 bp, Homo sapiens
agggatcaatataat

SEQ ID NO: 515155 - DNA, 15 bp, Homo sapiens
gggatcaatataatt

SEQ ID NO: 515156 - DNA, 15 bp, Homo sapiens
ggatcaatataattc

SEQ ID NO: 515157 - DNA, 15 bp, Homo sapiens
gatcaatataattct

SEQ ID NO: 515158 - DNA, 15 bp, Homo sapiens
atcaatataattctg

SEQ ID NO: 515159 - DNA, 15 bp, Homo sapiens
tcaatataattctgt

SEQ ID NO: 515160 - DNA, 15 bp, Homo sapiens
caatataattctgtt

SEQ ID NO: 515161 - DNA, 15 bp, Homo sapiens
aatataattctgttt

SEQ ID NO: 515162 - DNA, 15 bp, Homo sapiens
atataattctgtttt

SEQ ID NO: 515163 - DNA, 15 bp, Homo sapiens
tataattctgttttg

SEQ ID NO: 515164 - DNA, 15 bp, Homo sapiens
ataattctgttttga

SEQ ID NO: 515165 - DNA, 15 bp, Homo sapiens
taattctgttttgat

SEQ ID NO: 515166 - DNA, 15 bp, Homo sapiens
aattctgttttgata

SEQ ID NO: 515167 - DNA, 15 bp, Homo sapiens
attctgttttgatat

SEQ ID NO: 515168 - DNA, 15 bp, Homo sapiens
ttctgttttgatatc

SEQ ID NO: 515169 - DNA, 15 bp, Homo sapiens
tctgttttgatatct

SEQ ID NO: 515170 - DNA, 15 bp, Homo sapiens
ctgttttgatatctg

SEQ ID NO: 515171 - DNA, 15 bp, Homo sapiens
tgttttgatatctga

SEQ ID NO: 515172 - DNA, 15 bp, Homo sapiens
gttttgatatctgaa

SEQ ID NO: 515173 - DNA, 15 bp, Homo sapiens
ttttgatatctgaaa

SEQ ID NO: 515174 - DNA, 15 bp, Homo sapiens
tttgatatctgaaag

SEQ ID NO: 515175 - DNA, 15 bp, Homo sapiens
ttgatatctgaaagc

SEQ ID NO: 515176 - DNA, 15 bp, Homo sapiens
tgatatctgaaagct

SEQ ID NO: 515177 - DNA, 15 bp, Homo sapiens
gatatctgaaagctc

SEQ ID NO: 515178 - DNA, 15 bp, Homo sapiens
atatctgaaagctca

SEQ ID NO: 515179 - DNA, 15 bp, Homo sapiens
tatctgaaagctcac

SEQ ID NO: 515180 - DNA, 15 bp, Homo sapiens
atctgaaagctcact

SEQ ID NO: 515181 - DNA, 15 bp, Homo sapiens
tctgaaagctcactg

SEQ ID NO: 515182 - DNA, 15 bp, Homo sapiens
ctgaaagctcactga

SEQ ID NO: 515183 - DNA, 15 bp, Homo sapiens
tgaaagctcactgaa

SEQ ID NO: 515184 - DNA, 15 bp, Homo sapiens
gaaagctcactgaag

SEQ ID NO: 515185 - DNA, 15 bp, Homo sapiens
aaagctcactgaagg

SEQ ID NO: 515186 - DNA, 15 bp, Homo sapiens
aagctcactgaaggt

SEQ ID NO: 515187 - DNA, 15 bp, Homo sapiens
agctcactgaaggta

SEQ ID NO: 515188 - DNA, 15 bp, Homo sapiens
gctcactgaaggtaa

SEQ ID NO: 515189 - DNA, 15 bp, Homo sapiens
ctcactgaaggtaag

SEQ ID NO: 515190 - DNA, 15 bp, Homo sapiens
tcactgaaggtaagg

SEQ ID NO: 515191 - DNA, 15 bp, Homo sapiens
cactgaaggtaagga

SEQ ID NO: 515192 - DNA, 15 bp, Homo sapiens
actgaaggtaaggat

SEQ ID NO: 515193 - DNA, 15 bp, Homo sapiens
ctgaaggtaaggatc

SEQ ID NO: 515194 - DNA, 15 bp, Homo sapiens
tgaaggtaaggatcg

SEQ ID NO: 515195 - DNA, 15 bp, Homo sapiens
gaaggtaaggatcgt

SEQ ID NO: 515196 - DNA, 15 bp, Homo sapiens
aaggtaaggatcgta

SEQ ID NO: 515197 - DNA, 15 bp, Homo sapiens
aggtaaggatcgtat

SEQ ID NO: 515198 - DNA, 15 bp, Homo sapiens
ggtaaggatcgtatt

SEQ ID NO: 515199 - DNA, 15 bp, Homo sapiens
gtaaggatcgtattc

SEQ ID NO: 515200 - DNA, 15 bp, Homo sapiens
taaggatcgtattct

SEQ ID NO: 515201 - DNA, 15 bp, Homo sapiens
aaggatcgtattctc

SEQ ID NO: 515202 - DNA, 15 bp, Homo sapiens
aggatcgtattctct

SEQ ID NO: 515203 - DNA, 15 bp, Homo sapiens
ggatcgtattctctg

SEQ ID NO: 515204 - DNA, 15 bp, Homo sapiens
gatcgtattctctgc

SEQ ID NO: 515205 - DNA, 15 bp, Homo sapiens
atcgtattctctgct

SEQ ID NO: 515206 - DNA, 15 bp, Homo sapiens
tcgtattctctgctg

SEQ ID NO: 515207 - DNA, 15 bp, Homo sapiens
cgtattctctgctgt

SEQ ID NO: 515208 - DNA, 15 bp, Homo sapiens
gtattctctgctgta

SEQ ID NO: 515209 - DNA, 15 bp, Homo sapiens
tattctctgctgtat

SEQ ID NO: 515210 - DNA, 15 bp, Homo sapiens
attctctgctgtatt

SEQ ID NO: 515211 - DNA, 15 bp, Homo sapiens
ttctctgctgtattc

SEQ ID NO: 515212 - DNA, 15 bp, Homo sapiens
tctctgctgtattct

SEQ ID NO: 515213 - DNA, 15 bp, Homo sapiens
ctctgctgtattctc

SEQ ID NO: 515214 - DNA, 15 bp, Homo sapiens
tctgctgtattctca

SEQ ID NO: 515215 - DNA, 15 bp, Homo sapiens
ctgctgtattctcag

SEQ ID NO: 515216 - DNA, 15 bp, Homo sapiens
tgctgtattctcagt

SEQ ID NO: 515217 - DNA, 15 bp, Homo sapiens
gctgtattctcagtt

SEQ ID NO: 515218 - DNA, 15 bp, Homo sapiens
ctgtattctcagttc

SEQ ID NO: 515219 - DNA, 15 bp, Homo sapiens
tgtattctcagttcc

SEQ ID NO: 515220 - DNA, 15 bp, Homo sapiens
gtattctcagttcct

SEQ ID NO: 515221 - DNA, 15 bp, Homo sapiens
tattctcagttcctg

SEQ ID NO: 515222 - DNA, 15 bp, Homo sapiens
attctcagttcctga

SEQ ID NO: 515223 - DNA, 15 bp, Homo sapiens
ttctcagttcctgac

SEQ ID NO: 515224 - DNA, 15 bp, Homo sapiens
tctcagttcctgaca

SEQ ID NO: 515225 - DNA, 15 bp, Homo sapiens
ctcagttcctgacac

SEQ ID NO: 515226 - DNA, 15 bp, Homo sapiens
tcagttcctgacaca

SEQ ID NO: 515227 - DNA, 15 bp, Homo sapiens
cagttcctgacacag

SEQ ID NO: 515228 - DNA, 15 bp, Homo sapiens
agttcctgacacagc

SEQ ID NO: 515229 - DNA, 15 bp, Homo sapiens
gttcctgacacagca

SEQ ID NO: 515230 - DNA, 15 bp, Homo sapiens
ttcctgacacagcag

SEQ ID NO: 515231 - DNA, 15 bp, Homo sapiens
tcctgacacagcaga

SEQ ID NO: 515232 - DNA, 15 bp, Homo sapiens
cctgacacagcagac

SEQ ID NO: 515233 - DNA, 15 bp, Homo sapiens
ctgacacagcagaca

SEQ ID NO: 515234 - DNA, 15 bp, Homo sapiens
tgacacagcagacat

SEQ ID NO: 515235 - DNA, 15 bp, Homo sapiens
gacacagcagacatt

SEQ ID NO: 515236 - DNA, 15 bp, Homo sapiens
acacagcagacattt

SEQ ID NO: 515237 - DNA, 15 bp, Homo sapiens
cacagcagacattta

SEQ ID NO: 515238 - DNA, 15 bp, Homo sapiens
acagcagacatttaa

SEQ ID NO: 515239 - DNA, 15 bp, Homo sapiens
cagcagacatttaat

SEQ ID NO: 515240 - DNA, 15 bp, Homo sapiens
agcagacatttaata

SEQ ID NO: 515241 - DNA, 15 bp, Homo sapiens
gcagacatttaataa

SEQ ID NO: 515242 - DNA, 15 bp, Homo sapiens
cagacatttaataaa

SEQ ID NO: 515243 - DNA, 15 bp, Homo sapiens
agacatttaataaat

SEQ ID NO: 515244 - DNA, 15 bp, Homo sapiens
gacatttaataaata

SEQ ID NO: 515245 - DNA, 15 bp, Homo sapiens
acatttaataaatat

SEQ ID NO: 515246 - DNA, 15 bp, Homo sapiens
catttaataaatatt

SEQ ID NO: 515247 - DNA, 15 bp, Homo sapiens
atttaataaatattg

SEQ ID NO: 515248 - DNA, 15 bp, Homo sapiens
tttaataaatattga

SEQ ID NO: 515249 - DNA, 15 bp, Homo sapiens
ttaataaatattgaa

SEQ ID NO: 515250 - DNA, 15 bp, Homo sapiens
taataaatattgaac

SEQ ID NO: 515251 - DNA, 15 bp, Homo sapiens
aataaatattgaacg

SEQ ID NO: 515252 - DNA, 15 bp, Homo sapiens
ataaatattgaacga

SEQ ID NO: 515253 - DNA, 15 bp, Homo sapiens
taaatattgaacgaa

SEQ ID NO: 515254 - DNA, 15 bp, Homo sapiens
aaatattgaacgaac

SEQ ID NO: 515255 - DNA, 15 bp, Homo sapiens
aatattgaacgaact

SEQ ID NO: 515256 - DNA, 15 bp, Homo sapiens
atattgaacgaactt

SEQ ID NO: 515257 - DNA, 15 bp, Homo sapiens
tattgaacgaacttg

SEQ ID NO: 515258 - DNA, 15 bp, Homo sapiens
attgaacgaacttga

SEQ ID NO: 515259 - DNA, 15 bp, Homo sapiens
ttgaacgaacttgag

SEQ ID NO: 515260 - DNA, 15 bp, Homo sapiens
tgaacgaacttgagg

SEQ ID NO: 515261 - DNA, 15 bp, Homo sapiens
gaacgaacttgaggc

SEQ ID NO: 515262 - DNA, 15 bp, Homo sapiens
aacgaacttgaggcc

SEQ ID NO: 515263 - DNA, 15 bp, Homo sapiens
acgaacttgaggcct

SEQ ID NO: 515264 - DNA, 15 bp, Homo sapiens
cgaacttgaggcctt

SEQ ID NO: 515265 - DNA, 15 bp, Homo sapiens
gaacttgaggcctta

SEQ ID NO: 515266 - DNA, 15 bp, Homo sapiens
aacttgaggccttat

SEQ ID NO: 515267 - DNA, 15 bp, Homo sapiens
acttgaggccttatg

SEQ ID NO: 515268 - DNA, 15 bp, Homo sapiens
cttgaggccttatgt

SEQ ID NO: 515269 - DNA, 15 bp, Homo sapiens
ttgaggccttatgtt

SEQ ID NO: 515270 - DNA, 15 bp, Homo sapiens
tgaggccttatgttg

SEQ ID NO: 515271 - DNA, 15 bp, Homo sapiens
gaggccttatgttga

SEQ ID NO: 515272 - DNA, 15 bp, Homo sapiens
aggccttatgttgac

SEQ ID NO: 515273 - DNA, 15 bp, Homo sapiens
ggccttatgttgact

SEQ ID NO: 515274 - DNA, 15 bp, Homo sapiens
gccttatgttgactc

SEQ ID NO: 515275 - DNA, 15 bp, Homo sapiens
ccttatgttgactca

SEQ ID NO: 515276 - DNA, 15 bp, Homo sapiens
cttatgttgactcag

SEQ ID NO: 515277 - DNA, 15 bp, Homo sapiens
ttatgttgactcagt

SEQ ID NO: 515278 - DNA, 15 bp, Homo sapiens
tatgttgactcagtc

SEQ ID NO: 515279 - DNA, 15 bp, Homo sapiens
atgttgactcagtca

SEQ ID NO: 515280 - DNA, 15 bp, Homo sapiens
tgttgactcagtcat

SEQ ID NO: 515281 - DNA, 15 bp, Homo sapiens
gttgactcagtcata

SEQ ID NO: 515282 - DNA, 15 bp, Homo sapiens
ttgactcagtcataa

SEQ ID NO: 515283 - DNA, 15 bp, Homo sapiens
tgactcagtcataac

SEQ ID NO: 515284 - DNA, 15 bp, Homo sapiens
gactcagtcataaca

SEQ ID NO: 515285 - DNA, 15 bp, Homo sapiens
actcagtcataacag

SEQ ID NO: 515286 - DNA, 15 bp, Homo sapiens
ctcagtcataacagc

SEQ ID NO: 515287 - DNA, 15 bp, Homo sapiens
tcagtcataacagct

SEQ ID NO: 515288 - DNA, 15 bp, Homo sapiens
cagtcataacagctc

SEQ ID NO: 515289 - DNA, 15 bp, Homo sapiens
agtcataacagctca

SEQ ID NO: 515290 - DNA, 15 bp, Homo sapiens
gtcataacagctcaa

SEQ ID NO: 515291 - DNA, 15 bp, Homo sapiens
tcataacagctcaaa

SEQ ID NO: 515292 - DNA, 15 bp, Homo sapiens
cataacagctcaaag

SEQ ID NO: 515293 - DNA, 15 bp, Homo sapiens
ataacagctcaaagt

SEQ ID NO: 515294 - DNA, 15 bp, Homo sapiens
taacagctcaaagtt

SEQ ID NO: 515295 - DNA, 15 bp, Homo sapiens
aacagctcaaagttg

SEQ ID NO: 515296 - DNA, 15 bp, Homo sapiens
acagctcaaagttga

SEQ ID NO: 515297 - DNA, 15 bp, Homo sapiens
cagctcaaagttgaa

SEQ ID NO: 515298 - DNA, 15 bp, Homo sapiens
agctcaaagttgaac

SEQ ID NO: 515299 - DNA, 15 bp, Homo sapiens
gctcaaagttgaact

SEQ ID NO: 515300 - DNA, 15 bp, Homo sapiens
ctcaaagttgaactt

SEQ ID NO: 515301 - DNA, 15 bp, Homo sapiens
tcaaagttgaactta

SEQ ID NO: 515302 - DNA, 15 bp, Homo sapiens
caaagttgaacttat

SEQ ID NO: 515303 - DNA, 15 bp, Homo sapiens
aaagttgaacttatt

SEQ ID NO: 515304 - DNA, 15 bp, Homo sapiens
aagttgaacttattc

SEQ ID NO: 515305 - DNA, 15 bp, Homo sapiens
agttgaacttattca

SEQ ID NO: 515306 - DNA, 15 bp, Homo sapiens
gttgaacttattcac

SEQ ID NO: 515307 - DNA, 15 bp, Homo sapiens
ttgaacttattcact

SEQ ID NO: 515308 - DNA, 15 bp, Homo sapiens
tgaacttattcacta

SEQ ID NO: 515309 - DNA, 15 bp, Homo sapiens
gaacttattcactaa

SEQ ID NO: 515310 - DNA, 15 bp, Homo sapiens
aacttattcactaag

SEQ ID NO: 515311 - DNA, 15 bp, Homo sapiens
acttattcactaaga

SEQ ID NO: 515312 - DNA, 15 bp, Homo sapiens
cttattcactaagaa

SEQ ID NO: 515313 - DNA, 15 bp, Homo sapiens
ttattcactaagaat

SEQ ID NO: 515314 - DNA, 15 bp, Homo sapiens
tattcactaagaata

SEQ ID NO: 515315 - DNA, 15 bp, Homo sapiens
attcactaagaatag

SEQ ID NO: 515316 - DNA, 15 bp, Homo sapiens
ttcactaagaatagc

SEQ ID NO: 515317 - DNA, 15 bp, Homo sapiens
tcactaagaatagct

SEQ ID NO: 515318 - DNA, 15 bp, Homo sapiens
cactaagaatagctt

SEQ ID NO: 515319 - DNA, 15 bp, Homo sapiens
actaagaatagcttt

SEQ ID NO: 515320 - DNA, 15 bp, Homo sapiens
ctaagaatagcttta

SEQ ID NO: 515321 - DNA, 15 bp, Homo sapiens
taagaatagctttat

SEQ ID NO: 515322 - DNA, 15 bp, Homo sapiens
aagaatagctttatt

SEQ ID NO: 515323 - DNA, 15 bp, Homo sapiens
agaatagctttattt

SEQ ID NO: 515324 - DNA, 15 bp, Homo sapiens
gaatagctttatttt

SEQ ID NO: 515325 - DNA, 15 bp, Homo sapiens
aatagctttattttt

SEQ ID NO: 515326 - DNA, 15 bp, Homo sapiens
atagctttattttta

SEQ ID NO: 515327 - DNA, 15 bp, Homo sapiens
tagctttatttttaa

SEQ ID NO: 515328 - DNA, 15 bp, Homo sapiens
agctttatttttaaa

SEQ ID NO: 515329 - DNA, 15 bp, Homo sapiens
gctttatttttaaat

SEQ ID NO: 515330 - DNA, 15 bp, Homo sapiens
ctttatttttaaata

SEQ ID NO: 515331 - DNA, 15 bp, Homo sapiens
tttatttttaaataa

SEQ ID NO: 515332 - DNA, 15 bp, Homo sapiens
ttatttttaaataaa

SEQ ID NO: 515333 - DNA, 15 bp, Homo sapiens
tatttttaaataaat

SEQ ID NO: 515334 - DNA, 15 bp, Homo sapiens
atttttaaataaatt

SEQ ID NO: 515335 - DNA, 15 bp, Homo sapiens
tttttaaataaatta

SEQ ID NO: 515336 - DNA, 15 bp, Homo sapiens
ttttaaataaattat

SEQ ID NO: 515337 - DNA, 15 bp, Homo sapiens
tttaaataaattatt

SEQ ID NO: 515338 - DNA, 15 bp, Homo sapiens
ttaaataaattattg

SEQ ID NO: 515339 - DNA, 15 bp, Homo sapiens
taaataaattattga

SEQ ID NO: 515340 - DNA, 15 bp, Homo sapiens
aaataaattattgag

SEQ ID NO: 515341 - DNA, 15 bp, Homo sapiens
aataaattattgagc

SEQ ID NO: 515342 - DNA, 15 bp, Homo sapiens
ataaattattgagcc

SEQ ID NO: 515343 - DNA, 15 bp, Homo sapiens
taaattattgagcct

SEQ ID NO: 515344 - DNA, 15 bp, Homo sapiens
aaattattgagcctc

SEQ ID NO: 515345 - DNA, 15 bp, Homo sapiens
aattattgagcctca

SEQ ID NO: 515346 - DNA, 15 bp, Homo sapiens
attattgagcctcat

SEQ ID NO: 515347 - DNA, 15 bp, Homo sapiens
ttattgagcctcatt

SEQ ID NO: 515348 - DNA, 15 bp, Homo sapiens
tattgagcctcattt

SEQ ID NO: 515349 - DNA, 15 bp, Homo sapiens
attgagcctcattta

SEQ ID NO: 515350 - DNA, 15 bp, Homo sapiens
ttgagcctcatttat

SEQ ID NO: 515351 - DNA, 15 bp, Homo sapiens
tgagcctcatttatt

SEQ ID NO: 515352 - DNA, 15 bp, Homo sapiens
gagcctcatttattt

SEQ ID NO: 515353 - DNA, 15 bp, Homo sapiens
agcctcatttatttt

SEQ ID NO: 515354 - DNA, 15 bp, Homo sapiens
gcctcatttattttc

SEQ ID NO: 515355 - DNA, 15 bp, Homo sapiens
cctcatttattttct

SEQ ID NO: 515356 - DNA, 15 bp, Homo sapiens
ctcatttattttctt

SEQ ID NO: 515357 - DNA, 15 bp, Homo sapiens
tcatttattttcttt

SEQ ID NO: 515358 - DNA, 15 bp, Homo sapiens
catttattttctttt

SEQ ID NO: 515359 - DNA, 15 bp, Homo sapiens
atttattttcttttt

SEQ ID NO: 515360 - DNA, 15 bp, Homo sapiens
tttattttctttttc

SEQ ID NO: 515361 - DNA, 15 bp, Homo sapiens
ttattttctttttct

SEQ ID NO: 515362 - DNA, 15 bp, Homo sapiens
tattttctttttctc

SEQ ID NO: 515363 - DNA, 15 bp, Homo sapiens
attttctttttctcc

SEQ ID NO: 515364 - DNA, 15 bp, Homo sapiens
ttttctttttctccc

SEQ ID NO: 515365 - DNA, 15 bp, Homo sapiens
tttctttttctcccc

SEQ ID NO: 515366 - DNA, 15 bp, Homo sapiens
ttctttttctccccc

SEQ ID NO: 515367 - DNA, 15 bp, Homo sapiens
tctttttctcccccc

SEQ ID NO: 515368 - DNA, 15 bp, Homo sapiens
ctttttctccccccc

SEQ ID NO: 515369 - DNA, 15 bp, Homo sapiens
tttttctccccccct

SEQ ID NO: 515370 - DNA, 15 bp, Homo sapiens
ttttctcccccccta

SEQ ID NO: 515371 - DNA, 15 bp, Homo sapiens
tttctccccccctac

SEQ ID NO: 515372 - DNA, 15 bp, Homo sapiens
ttctccccccctacc

SEQ ID NO: 515373 - DNA, 15 bp, Homo sapiens
tctccccccctaccc

SEQ ID NO: 515374 - DNA, 15 bp, Homo sapiens
ctccccccctaccct

SEQ ID NO: 515375 - DNA, 15 bp, Homo sapiens
tccccccctaccctg

SEQ ID NO: 515376 - DNA, 15 bp, Homo sapiens
ccccccctaccctgc

SEQ ID NO: 515377 - DNA, 15 bp, Homo sapiens
cccccctaccctgct

SEQ ID NO: 515378 - DNA, 15 bp, Homo sapiens
ccccctaccctgcta

SEQ ID NO: 515379 - DNA, 15 bp, Homo sapiens
cccctaccctgctag

SEQ ID NO: 515380 - DNA, 15 bp, Homo sapiens
ccctaccctgctagt

SEQ ID NO: 515381 - DNA, 15 bp, Homo sapiens
cctaccctgctagtc

SEQ ID NO: 515382 - DNA, 15 bp, Homo sapiens
ctaccctgctagtct

SEQ ID NO: 515383 - DNA, 15 bp, Homo sapiens
taccctgctagtctg

SEQ ID NO: 515384 - DNA, 15 bp, Homo sapiens
accctgctagtctgg

SEQ ID NO: 515385 - DNA, 15 bp, Homo sapiens
ccctgctagtctgga

SEQ ID NO: 515386 - DNA, 15 bp, Homo sapiens
cctgctagtctggag

SEQ ID NO: 515387 - DNA, 15 bp, Homo sapiens
ctgctagtctggagt

SEQ ID NO: 515388 - DNA, 15 bp, Homo sapiens
tgctagtctggagtt

SEQ ID NO: 515389 - DNA, 15 bp, Homo sapiens
gctagtctggagttg

SEQ ID NO: 515390 - DNA, 15 bp, Homo sapiens
ctagtctggagttga

SEQ ID NO: 515391 - DNA, 15 bp, Homo sapiens
tagtctggagttgat

SEQ ID NO: 515392 - DNA, 15 bp, Homo sapiens
agtctggagttgatc

SEQ ID NO: 515393 - DNA, 15 bp, Homo sapiens
gtctggagttgatca

SEQ ID NO: 515394 - DNA, 15 bp, Homo sapiens
tctggagttgatcaa

SEQ ID NO: 515395 - DNA, 15 bp, Homo sapiens
ctggagttgatcaag

SEQ ID NO: 515396 - DNA, 15 bp, Homo sapiens
tggagttgatcaagg

SEQ ID NO: 515397 - DNA, 15 bp, Homo sapiens
ggagttgatcaagga

SEQ ID NO: 515398 - DNA, 15 bp, Homo sapiens
gagttgatcaaggaa

SEQ ID NO: 515399 - DNA, 15 bp, Homo sapiens
agttgatcaaggaac

SEQ ID NO: 515400 - DNA, 15 bp, Homo sapiens
gttgatcaaggaacc

SEQ ID NO: 515401 - DNA, 15 bp, Homo sapiens
ttgatcaaggaacct

SEQ ID NO: 515402 - DNA, 15 bp, Homo sapiens
tgatcaaggaacctg

SEQ ID NO: 515403 - DNA, 15 bp, Homo sapiens
gatcaaggaacctgt

SEQ ID NO: 515404 - DNA, 15 bp, Homo sapiens
atcaaggaacctgtc

SEQ ID NO: 515405 - DNA, 15 bp, Homo sapiens
tcaaggaacctgtct

SEQ ID NO: 515406 - DNA, 15 bp, Homo sapiens
caaggaacctgtctc

SEQ ID NO: 515407 - DNA, 15 bp, Homo sapiens
aaggaacctgtctcc

SEQ ID NO: 515408 - DNA, 15 bp, Homo sapiens
aggaacctgtctcca

SEQ ID NO: 515409 - DNA, 15 bp, Homo sapiens
ggaacctgtctccac

SEQ ID NO: 515410 - DNA, 15 bp, Homo sapiens
gaacctgtctccaca

SEQ ID NO: 515411 - DNA, 15 bp, Homo sapiens
aacctgtctccacaa

SEQ ID NO: 515412 - DNA, 15 bp, Homo sapiens
acctgtctccacaaa

SEQ ID NO: 515413 - DNA, 15 bp, Homo sapiens
cctgtctccacaaag

SEQ ID NO: 515414 - DNA, 15 bp, Homo sapiens
ctgtctccacaaagt

SEQ ID NO: 515415 - DNA, 15 bp, Homo sapiens
tgtctccacaaagtg

SEQ ID NO: 515416 - DNA, 15 bp, Homo sapiens
gtctccacaaagtgt

SEQ ID NO: 515417 - DNA, 15 bp, Homo sapiens
tctccacaaagtgtg

SEQ ID NO: 515418 - DNA, 15 bp, Homo sapiens
ctccacaaagtgtga

SEQ ID NO: 515419 - DNA, 15 bp, Homo sapiens
tccacaaagtgtgac

SEQ ID NO: 515420 - DNA, 15 bp, Homo sapiens
ccacaaagtgtgacc

SEQ ID NO: 515421 - DNA, 15 bp, Homo sapiens
cacaaagtgtgacca

SEQ ID NO: 515422 - DNA, 15 bp, Homo sapiens
acaaagtgtgaccac

SEQ ID NO: 515423 - DNA, 15 bp, Homo sapiens
caaagtgtgaccaca

SEQ ID NO: 515424 - DNA, 15 bp, Homo sapiens
aaagtgtgaccacat

SEQ ID NO: 515425 - DNA, 15 bp, Homo sapiens
aagtgtgaccacata

SEQ ID NO: 515426 - DNA, 15 bp, Homo sapiens
agtgtgaccacatat

SEQ ID NO: 515427 - DNA, 15 bp, Homo sapiens
gtgtgaccacatatt

SEQ ID NO: 515428 - DNA, 15 bp, Homo sapiens
tgtgaccacatattt

SEQ ID NO: 515429 - DNA, 15 bp, Homo sapiens
gtgaccacatatttt

SEQ ID NO: 515430 - DNA, 15 bp, Homo sapiens
tgaccacatattttg

SEQ ID NO: 515431 - DNA, 15 bp, Homo sapiens
gaccacatattttgc

SEQ ID NO: 515432 - DNA, 15 bp, Homo sapiens
accacatattttgca

SEQ ID NO: 515433 - DNA, 15 bp, Homo sapiens
ccacatattttgcaa

SEQ ID NO: 515434 - DNA, 15 bp, Homo sapiens
cacatattttgcaag

SEQ ID NO: 515435 - DNA, 15 bp, Homo sapiens
acatattttgcaagt

SEQ ID NO: 515436 - DNA, 15 bp, Homo sapiens
catattttgcaagta

SEQ ID NO: 515437 - DNA, 15 bp, Homo sapiens
atattttgcaagtaa

SEQ ID NO: 515438 - DNA, 15 bp, Homo sapiens
tattttgcaagtaag

SEQ ID NO: 515439 - DNA, 15 bp, Homo sapiens
attttgcaagtaagt

SEQ ID NO: 515440 - DNA, 15 bp, Homo sapiens
ttttgcaagtaagtt

SEQ ID NO: 515441 - DNA, 15 bp, Homo sapiens
tttgcaagtaagttt

SEQ ID NO: 515442 - DNA, 15 bp, Homo sapiens
ttgcaagtaagtttg

SEQ ID NO: 515443 - DNA, 15 bp, Homo sapiens
tgcaagtaagtttga

SEQ ID NO: 515444 - DNA, 15 bp, Homo sapiens
gcaagtaagtttgaa

SEQ ID NO: 515445 - DNA, 15 bp, Homo sapiens
caagtaagtttgaat

SEQ ID NO: 515446 - DNA, 15 bp, Homo sapiens
aagtaagtttgaatg

SEQ ID NO: 515447 - DNA, 15 bp, Homo sapiens
agtaagtttgaatgt

SEQ ID NO: 515448 - DNA, 15 bp, Homo sapiens
gtaagtttgaatgtg

SEQ ID NO: 515449 - DNA, 15 bp, Homo sapiens
taagtttgaatgtgt

SEQ ID NO: 515450 - DNA, 15 bp, Homo sapiens
aagtttgaatgtgtt

SEQ ID NO: 515451 - DNA, 15 bp, Homo sapiens
agtttgaatgtgtta

SEQ ID NO: 515452 - DNA, 15 bp, Homo sapiens
gtttgaatgtgttat

SEQ ID NO: 515453 - DNA, 15 bp, Homo sapiens
tttgaatgtgttatg

SEQ ID NO: 515454 - DNA, 15 bp, Homo sapiens
ttgaatgtgttatgt

SEQ ID NO: 515455 - DNA, 15 bp, Homo sapiens
tgaatgtgttatgtg

SEQ ID NO: 515456 - DNA, 15 bp, Homo sapiens
gaatgtgttatgtgg

SEQ ID NO: 515457 - DNA, 15 bp, Homo sapiens
aatgtgttatgtggc

SEQ ID NO: 515458 - DNA, 15 bp, Homo sapiens
atgtgttatgtggct

SEQ ID NO: 515459 - DNA, 15 bp, Homo sapiens
tgtgttatgtggctc

SEQ ID NO: 515460 - DNA, 15 bp, Homo sapiens
gtgttatgtggctcc

SEQ ID NO: 515461 - DNA, 15 bp, Homo sapiens
tgttatgtggctcca

SEQ ID NO: 515462 - DNA, 15 bp, Homo sapiens
gttatgtggctccat

SEQ ID NO: 515463 - DNA, 15 bp, Homo sapiens
ttatgtggctccatt

SEQ ID NO: 515464 - DNA, 15 bp, Homo sapiens
tatgtggctccatta

SEQ ID NO: 515465 - DNA, 15 bp, Homo sapiens
atgtggctccattat

SEQ ID NO: 515466 - DNA, 15 bp, Homo sapiens
tgtggctccattatt

SEQ ID NO: 515467 - DNA, 15 bp, Homo sapiens
gtggctccattatta

SEQ ID NO: 515468 - DNA, 15 bp, Homo sapiens
tggctccattattag

SEQ ID NO: 515469 - DNA, 15 bp, Homo sapiens
ggctccattattagc

SEQ ID NO: 515470 - DNA, 15 bp, Homo sapiens
gctccattattagct

SEQ ID NO: 515471 - DNA, 15 bp, Homo sapiens
ctccattattagctt

SEQ ID NO: 515472 - DNA, 15 bp, Homo sapiens
tccattattagcttt

SEQ ID NO: 515473 - DNA, 15 bp, Homo sapiens
ccattattagctttt

SEQ ID NO: 515474 - DNA, 15 bp, Homo sapiens
cattattagcttttg

SEQ ID NO: 515475 - DNA, 15 bp, Homo sapiens
attattagcttttgt

SEQ ID NO: 515476 - DNA, 15 bp, Homo sapiens
ttattagcttttgtt

SEQ ID NO: 515477 - DNA, 15 bp, Homo sapiens
tattagcttttgttt

SEQ ID NO: 515478 - DNA, 15 bp, Homo sapiens
attagcttttgtttt

SEQ ID NO: 515479 - DNA, 15 bp, Homo sapiens
ttagcttttgttttt

SEQ ID NO: 515480 - DNA, 15 bp, Homo sapiens
tagcttttgtttttg

SEQ ID NO: 515481 - DNA, 15 bp, Homo sapiens
agcttttgtttttgt

SEQ ID NO: 515482 - DNA, 15 bp, Homo sapiens
gcttttgtttttgtc

SEQ ID NO: 515483 - DNA, 15 bp, Homo sapiens
cttttgtttttgtcc

SEQ ID NO: 515484 - DNA, 15 bp, Homo sapiens
ttttgtttttgtcct

SEQ ID NO: 515485 - DNA, 15 bp, Homo sapiens
tttgtttttgtcctt

SEQ ID NO: 515486 - DNA, 15 bp, Homo sapiens
ttgtttttgtccttc

SEQ ID NO: 515487 - DNA, 15 bp, Homo sapiens
tgtttttgtccttca

SEQ ID NO: 515488 - DNA, 15 bp, Homo sapiens
gtttttgtccttcat

SEQ ID NO: 515489 - DNA, 15 bp, Homo sapiens
tttttgtccttcata

SEQ ID NO: 515490 - DNA, 15 bp, Homo sapiens
ttttgtccttcataa

SEQ ID NO: 515491 - DNA, 15 bp, Homo sapiens
tttgtccttcataac

SEQ ID NO: 515492 - DNA, 15 bp, Homo sapiens
ttgtccttcataacc

SEQ ID NO: 515493 - DNA, 15 bp, Homo sapiens
tgtccttcataaccc

SEQ ID NO: 515494 - DNA, 15 bp, Homo sapiens
gtccttcataaccca

SEQ ID NO: 515495 - DNA, 15 bp, Homo sapiens
tccttcataacccag

SEQ ID NO: 515496 - DNA, 15 bp, Homo sapiens
ccttcataacccagg

SEQ ID NO: 515497 - DNA, 15 bp, Homo sapiens
cttcataacccagga

SEQ ID NO: 515498 - DNA, 15 bp, Homo sapiens
ttcataacccaggaa

SEQ ID NO: 515499 - DNA, 15 bp, Homo sapiens
tcataacccaggaaa

SEQ ID NO: 515500 - DNA, 15 bp, Homo sapiens
cataacccaggaaac

SEQ ID NO: 515501 - DNA, 15 bp, Homo sapiens
ataacccaggaaaca

SEQ ID NO: 515502 - DNA, 15 bp, Homo sapiens
taacccaggaaacac

SEQ ID NO: 515503 - DNA, 15 bp, Homo sapiens
aacccaggaaacacc

SEQ ID NO: 515504 - DNA, 15 bp, Homo sapiens
acccaggaaacacct

SEQ ID NO: 515505 - DNA, 15 bp, Homo sapiens
cccaggaaacaccta

SEQ ID NO: 515506 - DNA, 15 bp, Homo sapiens
ccaggaaacacctaa

SEQ ID NO: 515507 - DNA, 15 bp, Homo sapiens
caggaaacacctaac

SEQ ID NO: 515508 - DNA, 15 bp, Homo sapiens
aggaaacacctaact

SEQ ID NO: 515509 - DNA, 15 bp, Homo sapiens
ggaaacacctaactt

SEQ ID NO: 515510 - DNA, 15 bp, Homo sapiens
gaaacacctaacttt

SEQ ID NO: 515511 - DNA, 15 bp, Homo sapiens
aaacacctaacttta

SEQ ID NO: 515512 - DNA, 15 bp, Homo sapiens
aacacctaactttat

SEQ ID NO: 515513 - DNA, 15 bp, Homo sapiens
acacctaactttata

SEQ ID NO: 515514 - DNA, 15 bp, Homo sapiens
cacctaactttatag

SEQ ID NO: 515515 - DNA, 15 bp, Homo sapiens
acctaactttataga

SEQ ID NO: 515516 - DNA, 15 bp, Homo sapiens
cctaactttatagaa

SEQ ID NO: 515517 - DNA, 15 bp, Homo sapiens
ctaactttatagaag

SEQ ID NO: 515518 - DNA, 15 bp, Homo sapiens
taactttatagaagc

SEQ ID NO: 515519 - DNA, 15 bp, Homo sapiens
aactttatagaagct

SEQ ID NO: 515520 - DNA, 15 bp, Homo sapiens
actttatagaagctt

SEQ ID NO: 515521 - DNA, 15 bp, Homo sapiens
ctttatagaagcttt

SEQ ID NO: 515522 - DNA, 15 bp, Homo sapiens
tttatagaagcttta

SEQ ID NO: 515523 - DNA, 15 bp, Homo sapiens
ttatagaagctttac

SEQ ID NO: 515524 - DNA, 15 bp, Homo sapiens
tatagaagctttact

SEQ ID NO: 515525 - DNA, 15 bp, Homo sapiens
atagaagctttactt

SEQ ID NO: 515526 - DNA, 15 bp, Homo sapiens
tagaagctttacttt

SEQ ID NO: 515527 - DNA, 15 bp, Homo sapiens
agaagctttactttc

SEQ ID NO: 515528 - DNA, 15 bp, Homo sapiens
gaagctttactttct

SEQ ID NO: 515529 - DNA, 15 bp, Homo sapiens
aagctttactttctt

SEQ ID NO: 515530 - DNA, 15 bp, Homo sapiens
agctttactttcttc

SEQ ID NO: 515531 - DNA, 15 bp, Homo sapiens
gctttactttcttca

SEQ ID NO: 515532 - DNA, 15 bp, Homo sapiens
ctttactttcttcaa

SEQ ID NO: 515533 - DNA, 15 bp, Homo sapiens
tttactttcttcaat

SEQ ID NO: 515534 - DNA, 15 bp, Homo sapiens
ttactttcttcaatt

SEQ ID NO: 515535 - DNA, 15 bp, Homo sapiens
tactttcttcaatta

SEQ ID NO: 515536 - DNA, 15 bp, Homo sapiens
actttcttcaattaa

SEQ ID NO: 515537 - DNA, 15 bp, Homo sapiens
ctttcttcaattaag

SEQ ID NO: 515538 - DNA, 15 bp, Homo sapiens
tttcttcaattaagt

SEQ ID NO: 515539 - DNA, 15 bp, Homo sapiens
ttcttcaattaagtg

SEQ ID NO: 515540 - DNA, 15 bp, Homo sapiens
tcttcaattaagtga

SEQ ID NO: 515541 - DNA, 15 bp, Homo sapiens
cttcaattaagtgag

SEQ ID NO: 515542 - DNA, 15 bp, Homo sapiens
ttcaattaagtgaga

SEQ ID NO: 515543 - DNA, 15 bp, Homo sapiens
tcaattaagtgagaa

SEQ ID NO: 515544 - DNA, 15 bp, Homo sapiens
caattaagtgagaac

SEQ ID NO: 515545 - DNA, 15 bp, Homo sapiens
aattaagtgagaacg

SEQ ID NO: 515546 - DNA, 15 bp, Homo sapiens
attaagtgagaacga

SEQ ID NO: 515547 - DNA, 15 bp, Homo sapiens
ttaagtgagaacgaa

SEQ ID NO: 515548 - DNA, 15 bp, Homo sapiens
taagtgagaacgaaa

SEQ ID NO: 515549 - DNA, 15 bp, Homo sapiens
aagtgagaacgaaaa

SEQ ID NO: 515550 - DNA, 15 bp, Homo sapiens
agtgagaacgaaaaa

SEQ ID NO: 515551 - DNA, 15 bp, Homo sapiens
gtgagaacgaaaaat

SEQ ID NO: 515552 - DNA, 15 bp, Homo sapiens
tgagaacgaaaaatc

SEQ ID NO: 515553 - DNA, 15 bp, Homo sapiens
gagaacgaaaaatcc

SEQ ID NO: 515554 - DNA, 15 bp, Homo sapiens
agaacgaaaaatcca

SEQ ID NO: 515555 - DNA, 15 bp, Homo sapiens
gaacgaaaaatccaa

SEQ ID NO: 515556 - DNA, 15 bp, Homo sapiens
aacgaaaaatccaac

SEQ ID NO: 515557 - DNA, 15 bp, Homo sapiens
acgaaaaatccaact

SEQ ID NO: 515558 - DNA, 15 bp, Homo sapiens
cgaaaaatccaactc

SEQ ID NO: 515559 - DNA, 15 bp, Homo sapiens
gaaaaatccaactcc

SEQ ID NO: 515560 - DNA, 15 bp, Homo sapiens
aaaaatccaactcca

SEQ ID NO: 515561 - DNA, 15 bp, Homo sapiens
aaaatccaactccat

SEQ ID NO: 515562 - DNA, 15 bp, Homo sapiens
aaatccaactccatt

SEQ ID NO: 515563 - DNA, 15 bp, Homo sapiens
aatccaactccattt

SEQ ID NO: 515564 - DNA, 15 bp, Homo sapiens
atccaactccatttc

SEQ ID NO: 515565 - DNA, 15 bp, Homo sapiens
tccaactccatttca

SEQ ID NO: 515566 - DNA, 15 bp, Homo sapiens
ccaactccatttcat

SEQ ID NO: 515567 - DNA, 15 bp, Homo sapiens
caactccatttcatt

SEQ ID NO: 515568 - DNA, 15 bp, Homo sapiens
aactccatttcattc

SEQ ID NO: 515569 - DNA, 15 bp, Homo sapiens
actccatttcattct

SEQ ID NO: 515570 - DNA, 15 bp, Homo sapiens
ctccatttcattctt

SEQ ID NO: 515571 - DNA, 15 bp, Homo sapiens
tccatttcattcttt

SEQ ID NO: 515572 - DNA, 15 bp, Homo sapiens
ccatttcattctttc

SEQ ID NO: 515573 - DNA, 15 bp, Homo sapiens
catttcattctttct

SEQ ID NO: 515574 - DNA, 15 bp, Homo sapiens
atttcattctttctc

SEQ ID NO: 515575 - DNA, 15 bp, Homo sapiens
tttcattctttctca

SEQ ID NO: 515576 - DNA, 15 bp, Homo sapiens
ttcattctttctcag

SEQ ID NO: 515577 - DNA, 15 bp, Homo sapiens
tcattctttctcaga

SEQ ID NO: 515578 - DNA, 15 bp, Homo sapiens
cattctttctcagag

SEQ ID NO: 515579 - DNA, 15 bp, Homo sapiens
attctttctcagaga

SEQ ID NO: 515580 - DNA, 15 bp, Homo sapiens
ttctttctcagagag

SEQ ID NO: 515581 - DNA, 15 bp, Homo sapiens
tctttctcagagagt

SEQ ID NO: 515582 - DNA, 15 bp, Homo sapiens
ctttctcagagagta

SEQ ID NO: 515583 - DNA, 15 bp, Homo sapiens
tttctcagagagtat

SEQ ID NO: 515584 - DNA, 15 bp, Homo sapiens
ttctcagagagtata

SEQ ID NO: 515585 - DNA, 15 bp, Homo sapiens
tctcagagagtatat

SEQ ID NO: 515586 - DNA, 15 bp, Homo sapiens
ctcagagagtatata

SEQ ID NO: 515587 - DNA, 15 bp, Homo sapiens
tcagagagtatatag

SEQ ID NO: 515588 - DNA, 15 bp, Homo sapiens
cagagagtatatagt

SEQ ID NO: 515589 - DNA, 15 bp, Homo sapiens
agagagtatatagtt

SEQ ID NO: 515590 - DNA, 15 bp, Homo sapiens
gagagtatatagtta

SEQ ID NO: 515591 - DNA, 15 bp, Homo sapiens
agagtatatagttat

SEQ ID NO: 515592 - DNA, 15 bp, Homo sapiens
gagtatatagttatc

SEQ ID NO: 515593 - DNA, 15 bp, Homo sapiens
agtatatagttatca

SEQ ID NO: 515594 - DNA, 15 bp, Homo sapiens
gtatatagttatcaa

SEQ ID NO: 515595 - DNA, 15 bp, Homo sapiens
tatatagttatcaaa

SEQ ID NO: 515596 - DNA, 15 bp, Homo sapiens
atatagttatcaaaa

SEQ ID NO: 515597 - DNA, 15 bp, Homo sapiens
tatagttatcaaaag

SEQ ID NO: 515598 - DNA, 15 bp, Homo sapiens
atagttatcaaaagt

SEQ ID NO: 515599 - DNA, 15 bp, Homo sapiens
tagttatcaaaagtt

SEQ ID NO: 515600 - DNA, 15 bp, Homo sapiens
agttatcaaaagttg

SEQ ID NO: 515601 - DNA, 15 bp, Homo sapiens
gttatcaaaagttgg

SEQ ID NO: 515602 - DNA, 15 bp, Homo sapiens
ttatcaaaagttggt

SEQ ID NO: 515603 - DNA, 15 bp, Homo sapiens
tatcaaaagttggtt

SEQ ID NO: 515604 - DNA, 15 bp, Homo sapiens
atcaaaagttggttg

SEQ ID NO: 515605 - DNA, 15 bp, Homo sapiens
tcaaaagttggttgt

SEQ ID NO: 515606 - DNA, 15 bp, Homo sapiens
caaaagttggttgta

SEQ ID NO: 515607 - DNA, 15 bp, Homo sapiens
aaaagttggttgtaa

SEQ ID NO: 515608 - DNA, 15 bp, Homo sapiens
aaagttggttgtaat

SEQ ID NO: 515609 - DNA, 15 bp, Homo sapiens
aagttggttgtaatc

SEQ ID NO: 515610 - DNA, 15 bp, Homo sapiens
agttggttgtaatca

SEQ ID NO: 515611 - DNA, 15 bp, Homo sapiens
gttggttgtaatcat

SEQ ID NO: 515612 - DNA, 15 bp, Homo sapiens
ttggttgtaatcata

SEQ ID NO: 515613 - DNA, 15 bp, Homo sapiens
tggttgtaatcatag

SEQ ID NO: 515614 - DNA, 15 bp, Homo sapiens
ggttgtaatcatagt

SEQ ID NO: 515615 - DNA, 15 bp, Homo sapiens
gttgtaatcatagtt

SEQ ID NO: 515616 - DNA, 15 bp, Homo sapiens
ttgtaatcatagttc

SEQ ID NO: 515617 - DNA, 15 bp, Homo sapiens
tgtaatcatagttcc

SEQ ID NO: 515618 - DNA, 15 bp, Homo sapiens
gtaatcatagttcct

SEQ ID NO: 515619 - DNA, 15 bp, Homo sapiens
taatcatagttcctg

SEQ ID NO: 515620 - DNA, 15 bp, Homo sapiens
aatcatagttcctgg

SEQ ID NO: 515621 - DNA, 15 bp, Homo sapiens
atcatagttcctggt

SEQ ID NO: 515622 - DNA, 15 bp, Homo sapiens
tcatagttcctggta

SEQ ID NO: 515623 - DNA, 15 bp, Homo sapiens
catagttcctggtaa

SEQ ID NO: 515624 - DNA, 15 bp, Homo sapiens
atagttcctggtaaa

SEQ ID NO: 515625 - DNA, 15 bp, Homo sapiens
tagttcctggtaaag

SEQ ID NO: 515626 - DNA, 15 bp, Homo sapiens
agttcctggtaaagt

SEQ ID NO: 515627 - DNA, 15 bp, Homo sapiens
gttcctggtaaagtt

SEQ ID NO: 515628 - DNA, 15 bp, Homo sapiens
ttcctggtaaagttt

SEQ ID NO: 515629 - DNA, 15 bp, Homo sapiens
tcctggtaaagtttt

SEQ ID NO: 515630 - DNA, 15 bp, Homo sapiens
cctggtaaagttttg

SEQ ID NO: 515631 - DNA, 15 bp, Homo sapiens
ctggtaaagttttga

SEQ ID NO: 515632 - DNA, 15 bp, Homo sapiens
tggtaaagttttgac

SEQ ID NO: 515633 - DNA, 15 bp, Homo sapiens
ggtaaagttttgaca

SEQ ID NO: 515634 - DNA, 15 bp, Homo sapiens
gtaaagttttgacat

SEQ ID NO: 515635 - DNA, 15 bp, Homo sapiens
taaagttttgacata

SEQ ID NO: 515636 - DNA, 15 bp, Homo sapiens
aaagttttgacatat

SEQ ID NO: 515637 - DNA, 15 bp, Homo sapiens
aagttttgacatata

SEQ ID NO: 515638 - DNA, 15 bp, Homo sapiens
agttttgacatatat

SEQ ID NO: 515639 - DNA, 15 bp, Homo sapiens
gttttgacatatatt

SEQ ID NO: 515640 - DNA, 15 bp, Homo sapiens
ttttgacatatatta

SEQ ID NO: 515641 - DNA, 15 bp, Homo sapiens
tttgacatatattat

SEQ ID NO: 515642 - DNA, 15 bp, Homo sapiens
ttgacatatattatc

SEQ ID NO: 515643 - DNA, 15 bp, Homo sapiens
tgacatatattatct

SEQ ID NO: 515644 - DNA, 15 bp, Homo sapiens
gacatatattatctt

SEQ ID NO: 515645 - DNA, 15 bp, Homo sapiens
acatatattatcttt

SEQ ID NO: 515646 - DNA, 15 bp, Homo sapiens
catatattatctttt

SEQ ID NO: 515647 - DNA, 15 bp, Homo sapiens
atatattatcttttt

SEQ ID NO: 515648 - DNA, 15 bp, Homo sapiens
tatattatctttttt

SEQ ID NO: 515649 - DNA, 15 bp, Homo sapiens
atattatcttttttt

SEQ ID NO: 515650 - DNA, 15 bp, Homo sapiens
tattatctttttttt

SEQ ID NO: 515651 - DNA, 15 bp, Homo sapiens
attatcttttttttt

SEQ ID NO: 515652 - DNA, 15 bp, Homo sapiens
ttatctttttttttt

SEQ ID NO: 515653 - DNA, 15 bp, Homo sapiens
tatcttttttttttt

SEQ ID NO: 515654 - DNA, 15 bp, Homo sapiens
atctttttttttttt

SEQ ID NO: 515655 - DNA, 15 bp, Homo sapiens
ttttttttgagacaa

SEQ ID NO: 515656 - DNA, 15 bp, Homo sapiens
tttttttgagacaaa

SEQ ID NO: 515657 - DNA, 15 bp, Homo sapiens
ttttttgagacaaag

SEQ ID NO: 515658 - DNA, 15 bp, Homo sapiens
tttttgagacaaagt

SEQ ID NO: 515659 - DNA, 15 bp, Homo sapiens
ttttgagacaaagtc

SEQ ID NO: 515660 - DNA, 15 bp, Homo sapiens
tttgagacaaagtct

SEQ ID NO: 515661 - DNA, 15 bp, Homo sapiens
ttgagacaaagtctc

SEQ ID NO: 515662 - DNA, 15 bp, Homo sapiens
tgagacaaagtctcg

SEQ ID NO: 515663 - DNA, 15 bp, Homo sapiens
gagacaaagtctcgc

SEQ ID NO: 515664 - DNA, 15 bp, Homo sapiens
agacaaagtctcgct

SEQ ID NO: 515665 - DNA, 15 bp, Homo sapiens
gacaaagtctcgctc

SEQ ID NO: 515666 - DNA, 15 bp, Homo sapiens
acaaagtctcgctct

SEQ ID NO: 515667 - DNA, 15 bp, Homo sapiens
caaagtctcgctctg

SEQ ID NO: 515668 - DNA, 15 bp, Homo sapiens
aaagtctcgctctgt

SEQ ID NO: 515669 - DNA, 15 bp, Homo sapiens
aagtctcgctctgtc

SEQ ID NO: 515670 - DNA, 15 bp, Homo sapiens
agtctcgctctgtcg

SEQ ID NO: 515671 - DNA, 15 bp, Homo sapiens
gtctcgctctgtcgc

SEQ ID NO: 515672 - DNA, 15 bp, Homo sapiens
tctcgctctgtcgcc

SEQ ID NO: 515673 - DNA, 15 bp, Homo sapiens
ctcgctctgtcgccc

SEQ ID NO: 515674 - DNA, 15 bp, Homo sapiens
tcgctctgtcgccca

SEQ ID NO: 515675 - DNA, 15 bp, Homo sapiens
cgctctgtcgcccag

SEQ ID NO: 515676 - DNA, 15 bp, Homo sapiens
ggagtgcagtggcat

SEQ ID NO: 515677 - DNA, 15 bp, Homo sapiens
gagtgcagtggcatg

SEQ ID NO: 515678 - DNA, 15 bp, Homo sapiens
agtgcagtggcatga

SEQ ID NO: 515679 - DNA, 15 bp, Homo sapiens
gtgcagtggcatgat

SEQ ID NO: 515680 - DNA, 15 bp, Homo sapiens
tgcagtggcatgatc

SEQ ID NO: 515681 - DNA, 15 bp, Homo sapiens
gcagtggcatgatct

SEQ ID NO: 515682 - DNA, 15 bp, Homo sapiens
cagtggcatgatctt

SEQ ID NO: 515683 - DNA, 15 bp, Homo sapiens
agtggcatgatcttg

SEQ ID NO: 515684 - DNA, 15 bp, Homo sapiens
gtggcatgatcttgg

SEQ ID NO: 515685 - DNA, 15 bp, Homo sapiens
tggcatgatcttggc

SEQ ID NO: 515686 - DNA, 15 bp, Homo sapiens
ggcatgatcttggct

SEQ ID NO: 515687 - DNA, 15 bp, Homo sapiens
gcatgatcttggctc

SEQ ID NO: 515688 - DNA, 15 bp, Homo sapiens
catgatcttggctca

SEQ ID NO: 515689 - DNA, 15 bp, Homo sapiens
atgatcttggctcac

SEQ ID NO: 515690 - DNA, 15 bp, Homo sapiens
tgatcttggctcact

SEQ ID NO: 515691 - DNA, 15 bp, Homo sapiens
ctgcaacctccgccc

SEQ ID NO: 515692 - DNA, 15 bp, Homo sapiens
tgcaacctccgcccc

SEQ ID NO: 515693 - DNA, 15 bp, Homo sapiens
gcaacctccgccccc

SEQ ID NO: 515694 - DNA, 15 bp, Homo sapiens
caacctccgcccccc

SEQ ID NO: 515695 - DNA, 15 bp, Homo sapiens
aacctccgccccccg

SEQ ID NO: 515696 - DNA, 15 bp, Homo sapiens
acctccgccccccga

SEQ ID NO: 515697 - DNA, 15 bp, Homo sapiens
cctccgccccccgag

SEQ ID NO: 515698 - DNA, 15 bp, Homo sapiens
ctccgccccccgagt

SEQ ID NO: 515699 - DNA, 15 bp, Homo sapiens
tccgccccccgagtt

SEQ ID NO: 515700 - DNA, 15 bp, Homo sapiens
ccgccccccgagttc

SEQ ID NO: 515701 - DNA, 15 bp, Homo sapiens
cgccccccgagttca

SEQ ID NO: 515702 - DNA, 15 bp, Homo sapiens
gccccccgagttcaa

SEQ ID NO: 515703 - DNA, 15 bp, Homo sapiens
ccccccgagttcaag

SEQ ID NO: 515704 - DNA, 15 bp, Homo sapiens
cccccgagttcaagc

SEQ ID NO: 515705 - DNA, 15 bp, Homo sapiens
ccccgagttcaagcg

SEQ ID NO: 515706 - DNA, 15 bp, Homo sapiens
cccgagttcaagcga

SEQ ID NO: 515707 - DNA, 15 bp, Homo sapiens
ccgagttcaagcgat

SEQ ID NO: 515708 - DNA, 15 bp, Homo sapiens
cgagttcaagcgatt

SEQ ID NO: 515709 - DNA, 15 bp, Homo sapiens
gagttcaagcgattc

SEQ ID NO: 515710 - DNA, 15 bp, Homo sapiens
agttcaagcgattct

SEQ ID NO: 515711 - DNA, 15 bp, Homo sapiens
gttcaagcgattctt

SEQ ID NO: 515712 - DNA, 15 bp, Homo sapiens
ttcaagcgattcttc

SEQ ID NO: 515713 - DNA, 15 bp, Homo sapiens
tcaagcgattcttct

SEQ ID NO: 515714 - DNA, 15 bp, Homo sapiens
caagcgattcttcta

SEQ ID NO: 515715 - DNA, 15 bp, Homo sapiens
aagcgattcttctac

SEQ ID NO: 515716 - DNA, 15 bp, Homo sapiens
agcgattcttctacc

SEQ ID NO: 515717 - DNA, 15 bp, Homo sapiens
gcgattcttctacct

SEQ ID NO: 515718 - DNA, 15 bp, Homo sapiens
cgattcttctacctc

SEQ ID NO: 515719 - DNA, 15 bp, Homo sapiens
gattcttctacctca

SEQ ID NO: 515720 - DNA, 15 bp, Homo sapiens
attcttctacctcag

SEQ ID NO: 515721 - DNA, 15 bp, Homo sapiens
ttcttctacctcagc

SEQ ID NO: 515722 - DNA, 15 bp, Homo sapiens
tcttctacctcagcc

SEQ ID NO: 515723 - DNA, 15 bp, Homo sapiens
cttctacctcagcct

SEQ ID NO: 515724 - DNA, 15 bp, Homo sapiens
ttctacctcagcctc

SEQ ID NO: 515725 - DNA, 15 bp, Homo sapiens
tctacctcagcctcc

SEQ ID NO: 515726 - DNA, 15 bp, Homo sapiens
ctacctcagcctccc

SEQ ID NO: 515727 - DNA, 15 bp, Homo sapiens
tacctcagcctccca

SEQ ID NO: 515728 - DNA, 15 bp, Homo sapiens
acctcagcctcccag

SEQ ID NO: 515729 - DNA, 15 bp, Homo sapiens
cctcagcctcccagg

SEQ ID NO: 515730 - DNA, 15 bp, Homo sapiens
ctcagcctcccaggt

SEQ ID NO: 515731 - DNA, 15 bp, Homo sapiens
tcagcctcccaggta

SEQ ID NO: 515732 - DNA, 15 bp, Homo sapiens
cagcctcccaggtag

SEQ ID NO: 515733 - DNA, 15 bp, Homo sapiens
agcctcccaggtagc

SEQ ID NO: 515734 - DNA, 15 bp, Homo sapiens
gcctcccaggtagct

SEQ ID NO: 515735 - DNA, 15 bp, Homo sapiens
cctcccaggtagctg

SEQ ID NO: 515736 - DNA, 15 bp, Homo sapiens
ctcccaggtagctgg

SEQ ID NO: 515737 - DNA, 15 bp, Homo sapiens
tcccaggtagctggg

SEQ ID NO: 515738 - DNA, 15 bp, Homo sapiens
cccaggtagctggga

SEQ ID NO: 515739 - DNA, 15 bp, Homo sapiens
ccaggtagctgggac

SEQ ID NO: 515740 - DNA, 15 bp, Homo sapiens
caggtagctgggact

SEQ ID NO: 515741 - DNA, 15 bp, Homo sapiens
aggtagctgggacta

SEQ ID NO: 515742 - DNA, 15 bp, Homo sapiens
ggtagctgggactac

SEQ ID NO: 515743 - DNA, 15 bp, Homo sapiens
ctgggactacaggca

SEQ ID NO: 515744 - DNA, 15 bp, Homo sapiens
tgggactacaggcac

SEQ ID NO: 515745 - DNA, 15 bp, Homo sapiens
gggactacaggcacc

SEQ ID NO: 515746 - DNA, 15 bp, Homo sapiens
ggactacaggcaccc

SEQ ID NO: 515747 - DNA, 15 bp, Homo sapiens
gactacaggcacccg

SEQ ID NO: 515748 - DNA, 15 bp, Homo sapiens
actacaggcacccgc

SEQ ID NO: 515749 - DNA, 15 bp, Homo sapiens
ctacaggcacccgcc

SEQ ID NO: 515750 - DNA, 15 bp, Homo sapiens
tacaggcacccgcca

SEQ ID NO: 515751 - DNA, 15 bp, Homo sapiens
acaggcacccgccac

SEQ ID NO: 515752 - DNA, 15 bp, Homo sapiens
caggcacccgccacc

SEQ ID NO: 515753 - DNA, 15 bp, Homo sapiens
aggcacccgccacca

SEQ ID NO: 515754 - DNA, 15 bp, Homo sapiens
ggcacccgccaccat

SEQ ID NO: 515755 - DNA, 15 bp, Homo sapiens
gcacccgccaccatg

SEQ ID NO: 515756 - DNA, 15 bp, Homo sapiens
cacccgccaccatgc

SEQ ID NO: 515757 - DNA, 15 bp, Homo sapiens
acccgccaccatgct

SEQ ID NO: 515758 - DNA, 15 bp, Homo sapiens
cccgccaccatgctt

SEQ ID NO: 515759 - DNA, 15 bp, Homo sapiens
ccgccaccatgcttg

SEQ ID NO: 515760 - DNA, 15 bp, Homo sapiens
cgccaccatgcttgg

SEQ ID NO: 515761 - DNA, 15 bp, Homo sapiens
gccaccatgcttggc

SEQ ID NO: 515762 - DNA, 15 bp, Homo sapiens
ccaccatgcttggct

SEQ ID NO: 515763 - DNA, 15 bp, Homo sapiens
caccatgcttggcta

SEQ ID NO: 515764 - DNA, 15 bp, Homo sapiens
accatgcttggctaa

SEQ ID NO: 515765 - DNA, 15 bp, Homo sapiens
ccatgcttggctaat

SEQ ID NO: 515766 - DNA, 15 bp, Homo sapiens
catgcttggctaatt

SEQ ID NO: 515767 - DNA, 15 bp, Homo sapiens
atgcttggctaattt

SEQ ID NO: 515768 - DNA, 15 bp, Homo sapiens
tgcttggctaatttt

SEQ ID NO: 515769 - DNA, 15 bp, Homo sapiens
gcttggctaattttt

SEQ ID NO: 515770 - DNA, 15 bp, Homo sapiens
cttggctaatttttg

SEQ ID NO: 515771 - DNA, 15 bp, Homo sapiens
ttggctaatttttgt

SEQ ID NO: 515772 - DNA, 15 bp, Homo sapiens
tggctaatttttgta

SEQ ID NO: 515773 - DNA, 15 bp, Homo sapiens
ggctaatttttgtac

SEQ ID NO: 515774 - DNA, 15 bp, Homo sapiens
gctaatttttgtact

SEQ ID NO: 515775 - DNA, 15 bp, Homo sapiens
ctaatttttgtactt

SEQ ID NO: 515776 - DNA, 15 bp, Homo sapiens
taatttttgtacttt

SEQ ID NO: 515777 - DNA, 15 bp, Homo sapiens
aatttttgtactttt

SEQ ID NO: 515778 - DNA, 15 bp, Homo sapiens
atttttgtactttta

SEQ ID NO: 515779 - DNA, 15 bp, Homo sapiens
tttttgtacttttag

SEQ ID NO: 515780 - DNA, 15 bp, Homo sapiens
ttttgtacttttagt

SEQ ID NO: 515781 - DNA, 15 bp, Homo sapiens
tttgtacttttagta

SEQ ID NO: 515782 - DNA, 15 bp, Homo sapiens
ttgtacttttagtag

SEQ ID NO: 515783 - DNA, 15 bp, Homo sapiens
tgtacttttagtaga

SEQ ID NO: 515784 - DNA, 15 bp, Homo sapiens
gtacttttagtagag

SEQ ID NO: 515785 - DNA, 15 bp, Homo sapiens
tacttttagtagaga

SEQ ID NO: 515786 - DNA, 15 bp, Homo sapiens
acttttagtagagat

SEQ ID NO: 515787 - DNA, 15 bp, Homo sapiens
cttttagtagagata

SEQ ID NO: 515788 - DNA, 15 bp, Homo sapiens
ttttagtagagataa

SEQ ID NO: 515789 - DNA, 15 bp, Homo sapiens
tttagtagagataag

SEQ ID NO: 515790 - DNA, 15 bp, Homo sapiens
ttagtagagataagg

SEQ ID NO: 515791 - DNA, 15 bp, Homo sapiens
tagtagagataaggt

SEQ ID NO: 515792 - DNA, 15 bp, Homo sapiens
agtagagataaggtt

SEQ ID NO: 515793 - DNA, 15 bp, Homo sapiens
gtagagataaggttt

SEQ ID NO: 515794 - DNA, 15 bp, Homo sapiens
tagagataaggtttc

SEQ ID NO: 515795 - DNA, 15 bp, Homo sapiens
agagataaggtttca

SEQ ID NO: 515796 - DNA, 15 bp, Homo sapiens
gagataaggtttcac

SEQ ID NO: 515797 - DNA, 15 bp, Homo sapiens
agataaggtttcacc

SEQ ID NO: 515798 - DNA, 15 bp, Homo sapiens
gataaggtttcacca

SEQ ID NO: 515799 - DNA, 15 bp, Homo sapiens
ataaggtttcaccat

SEQ ID NO: 515800 - DNA, 15 bp, Homo sapiens
taaggtttcaccata

SEQ ID NO: 515801 - DNA, 15 bp, Homo sapiens
aaggtttcaccatat

SEQ ID NO: 515802 - DNA, 15 bp, Homo sapiens
aggtttcaccatatt

SEQ ID NO: 515803 - DNA, 15 bp, Homo sapiens
gtttcaccatattgg

SEQ ID NO: 515804 - DNA, 15 bp, Homo sapiens
tttcaccatattggc

SEQ ID NO: 515805 - DNA, 15 bp, Homo sapiens
ttcaccatattggcc

SEQ ID NO: 515806 - DNA, 15 bp, Homo sapiens
tcaccatattggcca

SEQ ID NO: 515807 - DNA, 15 bp, Homo sapiens
caccatattggccag

SEQ ID NO: 515808 - DNA, 15 bp, Homo sapiens
accatattggccagg

SEQ ID NO: 515809 - DNA, 15 bp, Homo sapiens
ccatattggccaggc

SEQ ID NO: 515810 - DNA, 15 bp, Homo sapiens
catattggccaggct

SEQ ID NO: 515811 - DNA, 15 bp, Homo sapiens
atattggccaggctg

SEQ ID NO: 515812 - DNA, 15 bp, Homo sapiens
tattggccaggctgg

SEQ ID NO: 515813 - DNA, 15 bp, Homo sapiens
attggccaggctggt

SEQ ID NO: 515814 - DNA, 15 bp, Homo sapiens
aggctggtctcgaac

SEQ ID NO: 515815 - DNA, 15 bp, Homo sapiens
ggctggtctcgaact

SEQ ID NO: 515816 - DNA, 15 bp, Homo sapiens
gctggtctcgaactc

SEQ ID NO: 515817 - DNA, 15 bp, Homo sapiens
ctggtctcgaactcc

SEQ ID NO: 515818 - DNA, 15 bp, Homo sapiens
cgaactcctgacctt

SEQ ID NO: 515819 - DNA, 15 bp, Homo sapiens
gaactcctgaccttg

SEQ ID NO: 515820 - DNA, 15 bp, Homo sapiens
aactcctgaccttgt

SEQ ID NO: 515821 - DNA, 15 bp, Homo sapiens
actcctgaccttgtg

SEQ ID NO: 515822 - DNA, 15 bp, Homo sapiens
ccttgtgatccacct

SEQ ID NO: 515823 - DNA, 15 bp, Homo sapiens
cttgtgatccacctg

SEQ ID NO: 515824 - DNA, 15 bp, Homo sapiens
ttgtgatccacctgc

SEQ ID NO: 515825 - DNA, 15 bp, Homo sapiens
tgtgatccacctgcc

SEQ ID NO: 515826 - DNA, 15 bp, Homo sapiens
gtgatccacctgcct

SEQ ID NO: 515827 - DNA, 15 bp, Homo sapiens
tgatccacctgcctc

SEQ ID NO: 515828 - DNA, 15 bp, Homo sapiens
gatccacctgcctcg

SEQ ID NO: 515829 - DNA, 15 bp, Homo sapiens
atccacctgcctcgg

SEQ ID NO: 515830 - DNA, 15 bp, Homo sapiens
tccacctgcctcggc

SEQ ID NO: 515831 - DNA, 15 bp, Homo sapiens
ccacctgcctcggcc

SEQ ID NO: 515832 - DNA, 15 bp, Homo sapiens
cacctgcctcggcct

SEQ ID NO: 515833 - DNA, 15 bp, Homo sapiens
acctgcctcggcctc

SEQ ID NO: 515834 - DNA, 15 bp, Homo sapiens
cctgcctcggcctcc

SEQ ID NO: 515835 - DNA, 15 bp, Homo sapiens
ctgcctcggcctccc

SEQ ID NO: 515836 - DNA, 15 bp, Homo sapiens
tgcctcggcctccca

SEQ ID NO: 515837 - DNA, 15 bp, Homo sapiens
cggcctcccaaagtt

SEQ ID NO: 515838 - DNA, 15 bp, Homo sapiens
ggcctcccaaagttc

SEQ ID NO: 515839 - DNA, 15 bp, Homo sapiens
gcctcccaaagttct

SEQ ID NO: 515840 - DNA, 15 bp, Homo sapiens
cctcccaaagttctg

SEQ ID NO: 515841 - DNA, 15 bp, Homo sapiens
ctcccaaagttctgg

SEQ ID NO: 515842 - DNA, 15 bp, Homo sapiens
tcccaaagttctggg

SEQ ID NO: 515843 - DNA, 15 bp, Homo sapiens
cccaaagttctggga

SEQ ID NO: 515844 - DNA, 15 bp, Homo sapiens
ccaaagttctgggat

SEQ ID NO: 515845 - DNA, 15 bp, Homo sapiens
caaagttctgggatt

SEQ ID NO: 515846 - DNA, 15 bp, Homo sapiens
aaagttctgggatta

SEQ ID NO: 515847 - DNA, 15 bp, Homo sapiens
aagttctgggattac

SEQ ID NO: 515848 - DNA, 15 bp, Homo sapiens
agttctgggattaca

SEQ ID NO: 515849 - DNA, 15 bp, Homo sapiens
gttctgggattacag

SEQ ID NO: 515850 - DNA, 15 bp, Homo sapiens
ttctgggattacagg

SEQ ID NO: 515851 - DNA, 15 bp, Homo sapiens
tctgggattacaggc

SEQ ID NO: 515852 - DNA, 15 bp, Homo sapiens
aggcgtgagccacca

SEQ ID NO: 515853 - DNA, 15 bp, Homo sapiens
ggcgtgagccaccac

SEQ ID NO: 515854 - DNA, 15 bp, Homo sapiens
gcgtgagccaccaca

SEQ ID NO: 515855 - DNA, 15 bp, Homo sapiens
cgtgagccaccacac

SEQ ID NO: 515856 - DNA, 15 bp, Homo sapiens
gtgagccaccacacc

SEQ ID NO: 515857 - DNA, 15 bp, Homo sapiens
tgagccaccacaccc

SEQ ID NO: 515858 - DNA, 15 bp, Homo sapiens
gagccaccacacccg

SEQ ID NO: 515859 - DNA, 15 bp, Homo sapiens
agccaccacacccga

SEQ ID NO: 515860 - DNA, 15 bp, Homo sapiens
gccaccacacccgac

SEQ ID NO: 515861 - DNA, 15 bp, Homo sapiens
ccaccacacccgact

SEQ ID NO: 515862 - DNA, 15 bp, Homo sapiens
caccacacccgactg

SEQ ID NO: 515863 - DNA, 15 bp, Homo sapiens
accacacccgactga

SEQ ID NO: 515864 - DNA, 15 bp, Homo sapiens
ccacacccgactgac

SEQ ID NO: 515865 - DNA, 15 bp, Homo sapiens
cacacccgactgaca

SEQ ID NO: 515866 - DNA, 15 bp, Homo sapiens
acacccgactgacat

SEQ ID NO: 515867 - DNA, 15 bp, Homo sapiens
cacccgactgacata

SEQ ID NO: 515868 - DNA, 15 bp, Homo sapiens
acccgactgacatat

SEQ ID NO: 515869 - DNA, 15 bp, Homo sapiens
cccgactgacatata

SEQ ID NO: 515870 - DNA, 15 bp, Homo sapiens
ccgactgacatatat

SEQ ID NO: 515871 - DNA, 15 bp, Homo sapiens
cgactgacatatatt

SEQ ID NO: 515872 - DNA, 15 bp, Homo sapiens
gactgacatatatta

SEQ ID NO: 515873 - DNA, 15 bp, Homo sapiens
actgacatatattat

SEQ ID NO: 515874 - DNA, 15 bp, Homo sapiens
ctgacatatattatc

SEQ ID NO: 515875 - DNA, 15 bp, Homo sapiens
gacatatattatcta

SEQ ID NO: 515876 - DNA, 15 bp, Homo sapiens
acatatattatctat

SEQ ID NO: 515877 - DNA, 15 bp, Homo sapiens
catatattatctatt

SEQ ID NO: 515878 - DNA, 15 bp, Homo sapiens
atatattatctatta

SEQ ID NO: 515879 - DNA, 15 bp, Homo sapiens
tatattatctattag

SEQ ID NO: 515880 - DNA, 15 bp, Homo sapiens
atattatctattagg

SEQ ID NO: 515881 - DNA, 15 bp, Homo sapiens
tattatctattagga

SEQ ID NO: 515882 - DNA, 15 bp, Homo sapiens
attatctattaggat

SEQ ID NO: 515883 - DNA, 15 bp, Homo sapiens
ttatctattaggatg

SEQ ID NO: 515884 - DNA, 15 bp, Homo sapiens
tatctattaggatgt

SEQ ID NO: 515885 - DNA, 15 bp, Homo sapiens
atctattaggatgta

SEQ ID NO: 515886 - DNA, 15 bp, Homo sapiens
tctattaggatgtaa

SEQ ID NO: 515887 - DNA, 15 bp, Homo sapiens
ctattaggatgtaac

SEQ ID NO: 515888 - DNA, 15 bp, Homo sapiens
tattaggatgtaaca

SEQ ID NO: 515889 - DNA, 15 bp, Homo sapiens
attaggatgtaacat

SEQ ID NO: 515890 - DNA, 15 bp, Homo sapiens
ttaggatgtaacatc

SEQ ID NO: 515891 - DNA, 15 bp, Homo sapiens
taggatgtaacatca

SEQ ID NO: 515892 - DNA, 15 bp, Homo sapiens
aggatgtaacatcat

SEQ ID NO: 515893 - DNA, 15 bp, Homo sapiens
ggatgtaacatcatt

SEQ ID NO: 515894 - DNA, 15 bp, Homo sapiens
gatgtaacatcattt

SEQ ID NO: 515895 - DNA, 15 bp, Homo sapiens
atgtaacatcatttt

SEQ ID NO: 515896 - DNA, 15 bp, Homo sapiens
tgtaacatcattttg

SEQ ID NO: 515897 - DNA, 15 bp, Homo sapiens
gtaacatcattttga

SEQ ID NO: 515898 - DNA, 15 bp, Homo sapiens
taacatcattttgaa

SEQ ID NO: 515899 - DNA, 15 bp, Homo sapiens
aacatcattttgaac

SEQ ID NO: 515900 - DNA, 15 bp, Homo sapiens
acatcattttgaaca

SEQ ID NO: 515901 - DNA, 15 bp, Homo sapiens
catcattttgaacag

SEQ ID NO: 515902 - DNA, 15 bp, Homo sapiens
atcattttgaacagt

SEQ ID NO: 515903 - DNA, 15 bp, Homo sapiens
tcattttgaacagtg

SEQ ID NO: 515904 - DNA, 15 bp, Homo sapiens
cattttgaacagtgt

SEQ ID NO: 515905 - DNA, 15 bp, Homo sapiens
attttgaacagtgtt

SEQ ID NO: 515906 - DNA, 15 bp, Homo sapiens
ttttgaacagtgttt

SEQ ID NO: 515907 - DNA, 15 bp, Homo sapiens
tttgaacagtgtttt

SEQ ID NO: 515908 - DNA, 15 bp, Homo sapiens
ttgaacagtgttttg

SEQ ID NO: 515909 - DNA, 15 bp, Homo sapiens
tgaacagtgttttgt

SEQ ID NO: 515910 - DNA, 15 bp, Homo sapiens
gaacagtgttttgta

SEQ ID NO: 515911 - DNA, 15 bp, Homo sapiens
aacagtgttttgtat

SEQ ID NO: 515912 - DNA, 15 bp, Homo sapiens
acagtgttttgtatt

SEQ ID NO: 515913 - DNA, 15 bp, Homo sapiens
cagtgttttgtattt

SEQ ID NO: 515914 - DNA, 15 bp, Homo sapiens
agtgttttgtatttt

SEQ ID NO: 515915 - DNA, 15 bp, Homo sapiens
gtgttttgtattttt

SEQ ID NO: 515916 - DNA, 15 bp, Homo sapiens
tgttttgtatttttt

SEQ ID NO: 515917 - DNA, 15 bp, Homo sapiens
gttttgtattttttg

SEQ ID NO: 515918 - DNA, 15 bp, Homo sapiens
ttttgtattttttgt

SEQ ID NO: 515919 - DNA, 15 bp, Homo sapiens
tttgtattttttgtg

SEQ ID NO: 515920 - DNA, 15 bp, Homo sapiens
ttgtattttttgtgt

SEQ ID NO: 515921 - DNA, 15 bp, Homo sapiens
tgtattttttgtgtc

SEQ ID NO: 515922 - DNA, 15 bp, Homo sapiens
gtattttttgtgtcc

SEQ ID NO: 515923 - DNA, 15 bp, Homo sapiens
tattttttgtgtcca

SEQ ID NO: 515924 - DNA, 15 bp, Homo sapiens
attttttgtgtccat

SEQ ID NO: 515925 - DNA, 15 bp, Homo sapiens
ttttttgtgtccatc

SEQ ID NO: 515926 - DNA, 15 bp, Homo sapiens
tttttgtgtccatca

SEQ ID NO: 515927 - DNA, 15 bp, Homo sapiens
ttttgtgtccatcag

SEQ ID NO: 515928 - DNA, 15 bp, Homo sapiens
tttgtgtccatcagt

SEQ ID NO: 515929 - DNA, 15 bp, Homo sapiens
ttgtgtccatcagtg

SEQ ID NO: 515930 - DNA, 15 bp, Homo sapiens
tgtgtccatcagtga

SEQ ID NO: 515931 - DNA, 15 bp, Homo sapiens
gtgtccatcagtgaa

SEQ ID NO: 515932 - DNA, 15 bp, Homo sapiens
tgtccatcagtgaaa

SEQ ID NO: 515933 - DNA, 15 bp, Homo sapiens
gtccatcagtgaaag

SEQ ID NO: 515934 - DNA, 15 bp, Homo sapiens
tccatcagtgaaagc

SEQ ID NO: 515935 - DNA, 15 bp, Homo sapiens
ccatcagtgaaagca

SEQ ID NO: 515936 - DNA, 15 bp, Homo sapiens
catcagtgaaagcaa

SEQ ID NO: 515937 - DNA, 15 bp, Homo sapiens
atcagtgaaagcaaa

SEQ ID NO: 515938 - DNA, 15 bp, Homo sapiens
tcagtgaaagcaaac

SEQ ID NO: 515939 - DNA, 15 bp, Homo sapiens
cagtgaaagcaaact

SEQ ID NO: 515940 - DNA, 15 bp, Homo sapiens
agtgaaagcaaactg

SEQ ID NO: 515941 - DNA, 15 bp, Homo sapiens
gtgaaagcaaactgc

SEQ ID NO: 515942 - DNA, 15 bp, Homo sapiens
tgaaagcaaactgca

SEQ ID NO: 515943 - DNA, 15 bp, Homo sapiens
gaaagcaaactgcaa

SEQ ID NO: 515944 - DNA, 15 bp, Homo sapiens
aaagcaaactgcaag

SEQ ID NO: 515945 - DNA, 15 bp, Homo sapiens
aagcaaactgcaagc

SEQ ID NO: 515946 - DNA, 15 bp, Homo sapiens
agcaaactgcaagca

SEQ ID NO: 515947 - DNA, 15 bp, Homo sapiens
gcaaactgcaagcag

SEQ ID NO: 515948 - DNA, 15 bp, Homo sapiens
caaactgcaagcagt

SEQ ID NO: 515949 - DNA, 15 bp, Homo sapiens
aaactgcaagcagtt

SEQ ID NO: 515950 - DNA, 15 bp, Homo sapiens
aactgcaagcagttt

SEQ ID NO: 515951 - DNA, 15 bp, Homo sapiens
actgcaagcagtttt

SEQ ID NO: 515952 - DNA, 15 bp, Homo sapiens
ctgcaagcagttttg

SEQ ID NO: 515953 - DNA, 15 bp, Homo sapiens
tgcaagcagttttga

SEQ ID NO: 515954 - DNA, 15 bp, Homo sapiens
gcaagcagttttgaa

SEQ ID NO: 515955 - DNA, 15 bp, Homo sapiens
caagcagttttgaaa

SEQ ID NO: 515956 - DNA, 15 bp, Homo sapiens
aagcagttttgaaat

SEQ ID NO: 515957 - DNA, 15 bp, Homo sapiens
agcagttttgaaata

SEQ ID NO: 515958 - DNA, 15 bp, Homo sapiens
gcagttttgaaataa

SEQ ID NO: 515959 - DNA, 15 bp, Homo sapiens
cagttttgaaataag

SEQ ID NO: 515960 - DNA, 15 bp, Homo sapiens
agttttgaaataagc

SEQ ID NO: 515961 - DNA, 15 bp, Homo sapiens
gttttgaaataagca

SEQ ID NO: 515962 - DNA, 15 bp, Homo sapiens
ttttgaaataagcac

SEQ ID NO: 515963 - DNA, 15 bp, Homo sapiens
tttgaaataagcaca

SEQ ID NO: 515964 - DNA, 15 bp, Homo sapiens
ttgaaataagcacat

SEQ ID NO: 515965 - DNA, 15 bp, Homo sapiens
tgaaataagcacatt

SEQ ID NO: 515966 - DNA, 15 bp, Homo sapiens
gaaataagcacattg

SEQ ID NO: 515967 - DNA, 15 bp, Homo sapiens
aaataagcacattgt

SEQ ID NO: 515968 - DNA, 15 bp, Homo sapiens
aataagcacattgtg

SEQ ID NO: 515969 - DNA, 15 bp, Homo sapiens
ataagcacattgtgt

SEQ ID NO: 515970 - DNA, 15 bp, Homo sapiens
taagcacattgtgtt

SEQ ID NO: 515971 - DNA, 15 bp, Homo sapiens
aagcacattgtgttt

SEQ ID NO: 515972 - DNA, 15 bp, Homo sapiens
agcacattgtgtttg

SEQ ID NO: 515973 - DNA, 15 bp, Homo sapiens
gcacattgtgtttga

SEQ ID NO: 515974 - DNA, 15 bp, Homo sapiens
cacattgtgtttgag

SEQ ID NO: 515975 - DNA, 15 bp, Homo sapiens
acattgtgtttgagc

SEQ ID NO: 515976 - DNA, 15 bp, Homo sapiens
cattgtgtttgagcc

SEQ ID NO: 515977 - DNA, 15 bp, Homo sapiens
attgtgtttgagcct

SEQ ID NO: 515978 - DNA, 15 bp, Homo sapiens
ttgtgtttgagcctt

SEQ ID NO: 515979 - DNA, 15 bp, Homo sapiens
tgtgtttgagccttc

SEQ ID NO: 515980 - DNA, 15 bp, Homo sapiens
gtgtttgagccttcc

SEQ ID NO: 515981 - DNA, 15 bp, Homo sapiens
tgtttgagccttccc

SEQ ID NO: 515982 - DNA, 15 bp, Homo sapiens
gtttgagccttccca

SEQ ID NO: 515983 - DNA, 15 bp, Homo sapiens
tttgagccttcccag

SEQ ID NO: 515984 - DNA, 15 bp, Homo sapiens
ttgagccttcccagt

SEQ ID NO: 515985 - DNA, 15 bp, Homo sapiens
tgagccttcccagtt

SEQ ID NO: 515986 - DNA, 15 bp, Homo sapiens
gagccttcccagttt

SEQ ID NO: 515987 - DNA, 15 bp, Homo sapiens
agccttcccagtttc

SEQ ID NO: 515988 - DNA, 15 bp, Homo sapiens
gccttcccagtttct

SEQ ID NO: 515989 - DNA, 15 bp, Homo sapiens
ccttcccagtttctc

SEQ ID NO: 515990 - DNA, 15 bp, Homo sapiens
cttcccagtttctcc

SEQ ID NO: 515991 - DNA, 15 bp, Homo sapiens
ttcccagtttctcct

SEQ ID NO: 515992 - DNA, 15 bp, Homo sapiens
tcccagtttctcctt

SEQ ID NO: 515993 - DNA, 15 bp, Homo sapiens
cccagtttctccttt

SEQ ID NO: 515994 - DNA, 15 bp, Homo sapiens
ccagtttctcctttc

SEQ ID NO: 515995 - DNA, 15 bp, Homo sapiens
cagtttctcctttct

SEQ ID NO: 515996 - DNA, 15 bp, Homo sapiens
agtttctcctttctg

SEQ ID NO: 515997 - DNA, 15 bp, Homo sapiens
gtttctcctttctgt

SEQ ID NO: 515998 - DNA, 15 bp, Homo sapiens
tttctcctttctgtt

SEQ ID NO: 515999 - DNA, 15 bp, Homo sapiens
ttctcctttctgttc

SEQ ID NO: 516000 - DNA, 15 bp, Homo sapiens
tctcctttctgttca

SEQ ID NO: 516001 - DNA, 15 bp, Homo sapiens
ctcctttctgttcat

SEQ ID NO: 516002 - DNA, 15 bp, Homo sapiens
tcctttctgttcatt

SEQ ID NO: 516003 - DNA, 15 bp, Homo sapiens
cctttctgttcattt

SEQ ID NO: 516004 - DNA, 15 bp, Homo sapiens
ctttctgttcatttc

SEQ ID NO: 516005 - DNA, 15 bp, Homo sapiens
tttctgttcatttct

SEQ ID NO: 516006 - DNA, 15 bp, Homo sapiens
ttctgttcatttctg

SEQ ID NO: 516007 - DNA, 15 bp, Homo sapiens
tctgttcatttctgc

SEQ ID NO: 516008 - DNA, 15 bp, Homo sapiens
ctgttcatttctgca

SEQ ID NO: 516009 - DNA, 15 bp, Homo sapiens
tgttcatttctgcat

SEQ ID NO: 516010 - DNA, 15 bp, Homo sapiens
gttcatttctgcata

SEQ ID NO: 516011 - DNA, 15 bp, Homo sapiens
ttcatttctgcatat

SEQ ID NO: 516012 - DNA, 15 bp, Homo sapiens
tcatttctgcatatc

SEQ ID NO: 516013 - DNA, 15 bp, Homo sapiens
catttctgcatatcc

SEQ ID NO: 516014 - DNA, 15 bp, Homo sapiens
atttctgcatatcct

SEQ ID NO: 516015 - DNA, 15 bp, Homo sapiens
tttctgcatatcctt

SEQ ID NO: 516016 - DNA, 15 bp, Homo sapiens
ttctgcatatcctta

SEQ ID NO: 516017 - DNA, 15 bp, Homo sapiens
tctgcatatccttat

SEQ ID NO: 516018 - DNA, 15 bp, Homo sapiens
ctgcatatccttatg

SEQ ID NO: 516019 - DNA, 15 bp, Homo sapiens
tgcatatccttatgc

SEQ ID NO: 516020 - DNA, 15 bp, Homo sapiens
gcatatccttatgca

SEQ ID NO: 516021 - DNA, 15 bp, Homo sapiens
catatccttatgcat

SEQ ID NO: 516022 - DNA, 15 bp, Homo sapiens
atatccttatgcatt

SEQ ID NO: 516023 - DNA, 15 bp, Homo sapiens
tatccttatgcattc

SEQ ID NO: 516024 - DNA, 15 bp, Homo sapiens
atccttatgcattcc

SEQ ID NO: 516025 - DNA, 15 bp, Homo sapiens
tccttatgcattccc

SEQ ID NO: 516026 - DNA, 15 bp, Homo sapiens
ccttatgcattcccc

SEQ ID NO: 516027 - DNA, 15 bp, Homo sapiens
cttatgcattccccc

SEQ ID NO: 516028 - DNA, 15 bp, Homo sapiens
ttatgcattccccct

SEQ ID NO: 516029 - DNA, 15 bp, Homo sapiens
tatgcattccccctt

SEQ ID NO: 516030 - DNA, 15 bp, Homo sapiens
atgcattcccccttc

SEQ ID NO: 516031 - DNA, 15 bp, Homo sapiens
tgcattcccccttct

SEQ ID NO: 516032 - DNA, 15 bp, Homo sapiens
gcattcccccttcta

SEQ ID NO: 516033 - DNA, 15 bp, Homo sapiens
cattcccccttctaa

SEQ ID NO: 516034 - DNA, 15 bp, Homo sapiens
attcccccttctaag

SEQ ID NO: 516035 - DNA, 15 bp, Homo sapiens
ttcccccttctaagg

SEQ ID NO: 516036 - DNA, 15 bp, Homo sapiens
tcccccttctaaggg

SEQ ID NO: 516037 - DNA, 15 bp, Homo sapiens
cccccttctaagggt

SEQ ID NO: 516038 - DNA, 15 bp, Homo sapiens
ccccttctaagggtc

SEQ ID NO: 516039 - DNA, 15 bp, Homo sapiens
cccttctaagggtca

SEQ ID NO: 516040 - DNA, 15 bp, Homo sapiens
ccttctaagggtcag

SEQ ID NO: 516041 - DNA, 15 bp, Homo sapiens
cttctaagggtcagt

SEQ ID NO: 516042 - DNA, 15 bp, Homo sapiens
ttctaagggtcagtg

SEQ ID NO: 516043 - DNA, 15 bp, Homo sapiens
tctaagggtcagtgt

SEQ ID NO: 516044 - DNA, 15 bp, Homo sapiens
ctaagggtcagtgtt

SEQ ID NO: 516045 - DNA, 15 bp, Homo sapiens
taagggtcagtgttt

SEQ ID NO: 516046 - DNA, 15 bp, Homo sapiens
aagggtcagtgtttg

SEQ ID NO: 516047 - DNA, 15 bp, Homo sapiens
agggtcagtgtttgc

SEQ ID NO: 516048 - DNA, 15 bp, Homo sapiens
gggtcagtgtttgcc

SEQ ID NO: 516049 - DNA, 15 bp, Homo sapiens
ggtcagtgtttgccc

SEQ ID NO: 516050 - DNA, 15 bp, Homo sapiens
gtcagtgtttgcccg

SEQ ID NO: 516051 - DNA, 15 bp, Homo sapiens
tcagtgtttgcccgc

SEQ ID NO: 516052 - DNA, 15 bp, Homo sapiens
cagtgtttgcccgct

SEQ ID NO: 516053 - DNA, 15 bp, Homo sapiens
agtgtttgcccgctt

SEQ ID NO: 516054 - DNA, 15 bp, Homo sapiens
gtgtttgcccgcttt

SEQ ID NO: 516055 - DNA, 15 bp, Homo sapiens
tgtttgcccgctttg

SEQ ID NO: 516056 - DNA, 15 bp, Homo sapiens
gtttgcccgctttgt

SEQ ID NO: 516057 - DNA, 15 bp, Homo sapiens
tttgcccgctttgta

SEQ ID NO: 516058 - DNA, 15 bp, Homo sapiens
ttgcccgctttgtaa

SEQ ID NO: 516059 - DNA, 15 bp, Homo sapiens
tgcccgctttgtaat

SEQ ID NO: 516060 - DNA, 15 bp, Homo sapiens
gcccgctttgtaatc

SEQ ID NO: 516061 - DNA, 15 bp, Homo sapiens
cccgctttgtaatca

SEQ ID NO: 516062 - DNA, 15 bp, Homo sapiens
ccgctttgtaatcat

SEQ ID NO: 516063 - DNA, 15 bp, Homo sapiens
cgctttgtaatcatt

SEQ ID NO: 516064 - DNA, 15 bp, Homo sapiens
gctttgtaatcattg

SEQ ID NO: 516065 - DNA, 15 bp, Homo sapiens
ctttgtaatcattgt

SEQ ID NO: 516066 - DNA, 15 bp, Homo sapiens
tttgtaatcattgtg

SEQ ID NO: 516067 - DNA, 15 bp, Homo sapiens
ttgtaatcattgtga

SEQ ID NO: 516068 - DNA, 15 bp, Homo sapiens
tgtaatcattgtgaa

SEQ ID NO: 516069 - DNA, 15 bp, Homo sapiens
gtaatcattgtgaag

SEQ ID NO: 516070 - DNA, 15 bp, Homo sapiens
taatcattgtgaaga

SEQ ID NO: 516071 - DNA, 15 bp, Homo sapiens
aatcattgtgaagac

SEQ ID NO: 516072 - DNA, 15 bp, Homo sapiens
atcattgtgaagaca

SEQ ID NO: 516073 - DNA, 15 bp, Homo sapiens
tcattgtgaagacag

SEQ ID NO: 516074 - DNA, 15 bp, Homo sapiens
cattgtgaagacagg

SEQ ID NO: 516075 - DNA, 15 bp, Homo sapiens
attgtgaagacagga

SEQ ID NO: 516076 - DNA, 15 bp, Homo sapiens
ttgtgaagacaggaa

SEQ ID NO: 516077 - DNA, 15 bp, Homo sapiens
tgtgaagacaggaaa

SEQ ID NO: 516078 - DNA, 15 bp, Homo sapiens
gtgaagacaggaaag

SEQ ID NO: 516079 - DNA, 15 bp, Homo sapiens
tgaagacaggaaagg

SEQ ID NO: 516080 - DNA, 15 bp, Homo sapiens
gaagacaggaaagga

SEQ ID NO: 516081 - DNA, 15 bp, Homo sapiens
aagacaggaaaggac

SEQ ID NO: 516082 - DNA, 15 bp, Homo sapiens
agacaggaaaggacc

SEQ ID NO: 516083 - DNA, 15 bp, Homo sapiens
gacaggaaaggacct

SEQ ID NO: 516084 - DNA, 15 bp, Homo sapiens
acaggaaaggacctg

SEQ ID NO: 516085 - DNA, 15 bp, Homo sapiens
caggaaaggacctga

SEQ ID NO: 516086 - DNA, 15 bp, Homo sapiens
aggaaaggacctgat

SEQ ID NO: 516087 - DNA, 15 bp, Homo sapiens
ggaaaggacctgata

SEQ ID NO: 516088 - DNA, 15 bp, Homo sapiens
gaaaggacctgatac

SEQ ID NO: 516089 - DNA, 15 bp, Homo sapiens
aaaggacctgatacc

SEQ ID NO: 516090 - DNA, 15 bp, Homo sapiens
aaggacctgatacca

SEQ ID NO: 516091 - DNA, 15 bp, Homo sapiens
aggacctgataccag

SEQ ID NO: 516092 - DNA, 15 bp, Homo sapiens
ggacctgataccagt

SEQ ID NO: 516093 - DNA, 15 bp, Homo sapiens
gacctgataccagtt

SEQ ID NO: 516094 - DNA, 15 bp, Homo sapiens
acctgataccagttt

SEQ ID NO: 516095 - DNA, 15 bp, Homo sapiens
cctgataccagtttc

SEQ ID NO: 516096 - DNA, 15 bp, Homo sapiens
ctgataccagtttct

SEQ ID NO: 516097 - DNA, 15 bp, Homo sapiens
tgataccagtttcta

SEQ ID NO: 516098 - DNA, 15 bp, Homo sapiens
gataccagtttctat

SEQ ID NO: 516099 - DNA, 15 bp, Homo sapiens
ataccagtttctatt

SEQ ID NO: 516100 - DNA, 15 bp, Homo sapiens
taccagtttctattt

SEQ ID NO: 516101 - DNA, 15 bp, Homo sapiens
accagtttctattta

SEQ ID NO: 516102 - DNA, 15 bp, Homo sapiens
ccagtttctatttag

SEQ ID NO: 516103 - DNA, 15 bp, Homo sapiens
cagtttctatttagg

SEQ ID NO: 516104 - DNA, 15 bp, Homo sapiens
agtttctatttaggc

SEQ ID NO: 516105 - DNA, 15 bp, Homo sapiens
gtttctatttaggcc

SEQ ID NO: 516106 - DNA, 15 bp, Homo sapiens
tttctatttaggcca

SEQ ID NO: 516107 - DNA, 15 bp, Homo sapiens
ttctatttaggccaa

SEQ ID NO: 516108 - DNA, 15 bp, Homo sapiens
tctatttaggccaaa

SEQ ID NO: 516109 - DNA, 15 bp, Homo sapiens
ctatttaggccaaaa

SEQ ID NO: 516110 - DNA, 15 bp, Homo sapiens
tatttaggccaaaat

SEQ ID NO: 516111 - DNA, 15 bp, Homo sapiens
atttaggccaaaatt

SEQ ID NO: 516112 - DNA, 15 bp, Homo sapiens
tttaggccaaaattc

SEQ ID NO: 516113 - DNA, 15 bp, Homo sapiens
ttaggccaaaattca

SEQ ID NO: 516114 - DNA, 15 bp, Homo sapiens
taggccaaaattcat

SEQ ID NO: 516115 - DNA, 15 bp, Homo sapiens
aggccaaaattcatt

SEQ ID NO: 516116 - DNA, 15 bp, Homo sapiens
ggccaaaattcattt

SEQ ID NO: 516117 - DNA, 15 bp, Homo sapiens
gccaaaattcattta

SEQ ID NO: 516118 - DNA, 15 bp, Homo sapiens
ccaaaattcatttat

SEQ ID NO: 516119 - DNA, 15 bp, Homo sapiens
caaaattcatttata

SEQ ID NO: 516120 - DNA, 15 bp, Homo sapiens
aaaattcatttatag

SEQ ID NO: 516121 - DNA, 15 bp, Homo sapiens
aaattcatttatagc

SEQ ID NO: 516122 - DNA, 15 bp, Homo sapiens
aattcatttatagca

SEQ ID NO: 516123 - DNA, 15 bp, Homo sapiens
attcatttatagcag

SEQ ID NO: 516124 - DNA, 15 bp, Homo sapiens
ttcatttatagcagt

SEQ ID NO: 516125 - DNA, 15 bp, Homo sapiens
tcatttatagcagtg

SEQ ID NO: 516126 - DNA, 15 bp, Homo sapiens
catttatagcagtga

SEQ ID NO: 516127 - DNA, 15 bp, Homo sapiens
atttatagcagtgat

SEQ ID NO: 516128 - DNA, 15 bp, Homo sapiens
tttatagcagtgatt

SEQ ID NO: 516129 - DNA, 15 bp, Homo sapiens
ttatagcagtgattc

SEQ ID NO: 516130 - DNA, 15 bp, Homo sapiens
tatagcagtgattca

SEQ ID NO: 516131 - DNA, 15 bp, Homo sapiens
atagcagtgattcaa

SEQ ID NO: 516132 - DNA, 15 bp, Homo sapiens
tagcagtgattcaag

SEQ ID NO: 516133 - DNA, 15 bp, Homo sapiens
agcagtgattcaagt

SEQ ID NO: 516134 - DNA, 15 bp, Homo sapiens
gcagtgattcaagtt

SEQ ID NO: 516135 - DNA, 15 bp, Homo sapiens
cagtgattcaagtta

SEQ ID NO: 516136 - DNA, 15 bp, Homo sapiens
agtgattcaagttat

SEQ ID NO: 516137 - DNA, 15 bp, Homo sapiens
gtgattcaagttata

SEQ ID NO: 516138 - DNA, 15 bp, Homo sapiens
tgattcaagttatat

SEQ ID NO: 516139 - DNA, 15 bp, Homo sapiens
gattcaagttatatt

SEQ ID NO: 516140 - DNA, 15 bp, Homo sapiens
attcaagttatattt

SEQ ID NO: 516141 - DNA, 15 bp, Homo sapiens
ttcaagttatattta

SEQ ID NO: 516142 - DNA, 15 bp, Homo sapiens
tcaagttatatttac

SEQ ID NO: 516143 - DNA, 15 bp, Homo sapiens
caagttatatttacg

SEQ ID NO: 516144 - DNA, 15 bp, Homo sapiens
aagttatatttacgt

SEQ ID NO: 516145 - DNA, 15 bp, Homo sapiens
agttatatttacgta

SEQ ID NO: 516146 - DNA, 15 bp, Homo sapiens
gttatatttacgtat

SEQ ID NO: 516147 - DNA, 15 bp, Homo sapiens
ttatatttacgtatt

SEQ ID NO: 516148 - DNA, 15 bp, Homo sapiens
tatatttacgtattt

SEQ ID NO: 516149 - DNA, 15 bp, Homo sapiens
atatttacgtatttg

SEQ ID NO: 516150 - DNA, 15 bp, Homo sapiens
tatttacgtatttga

SEQ ID NO: 516151 - DNA, 15 bp, Homo sapiens
atttacgtatttgat

SEQ ID NO: 516152 - DNA, 15 bp, Homo sapiens
tttacgtatttgatg

SEQ ID NO: 516153 - DNA, 15 bp, Homo sapiens
ttacgtatttgatga

SEQ ID NO: 516154 - DNA, 15 bp, Homo sapiens
tacgtatttgatgat

SEQ ID NO: 516155 - DNA, 15 bp, Homo sapiens
acgtatttgatgatc

SEQ ID NO: 516156 - DNA, 15 bp, Homo sapiens
cgtatttgatgatct

SEQ ID NO: 516157 - DNA, 15 bp, Homo sapiens
gtatttgatgatctt

SEQ ID NO: 516158 - DNA, 15 bp, Homo sapiens
tatttgatgatcttg

SEQ ID NO: 516159 - DNA, 15 bp, Homo sapiens
atttgatgatcttgt

SEQ ID NO: 516160 - DNA, 15 bp, Homo sapiens
tttgatgatcttgtc

SEQ ID NO: 516161 - DNA, 15 bp, Homo sapiens
ttgatgatcttgtct

SEQ ID NO: 516162 - DNA, 15 bp, Homo sapiens
tgatgatcttgtctt

SEQ ID NO: 516163 - DNA, 15 bp, Homo sapiens
gatgatcttgtcttt

SEQ ID NO: 516164 - DNA, 15 bp, Homo sapiens
atgatcttgtctttt

SEQ ID NO: 516165 - DNA, 15 bp, Homo sapiens
tgatcttgtcttttg

SEQ ID NO: 516166 - DNA, 15 bp, Homo sapiens
gatcttgtcttttga

SEQ ID NO: 516167 - DNA, 15 bp, Homo sapiens
atcttgtcttttgaa

SEQ ID NO: 516168 - DNA, 15 bp, Homo sapiens
tcttgtcttttgaaa

SEQ ID NO: 516169 - DNA, 15 bp, Homo sapiens
cttgtcttttgaaat

SEQ ID NO: 516170 - DNA, 15 bp, Homo sapiens
ttgtcttttgaaatg

SEQ ID NO: 516171 - DNA, 15 bp, Homo sapiens
tgtcttttgaaatga

SEQ ID NO: 516172 - DNA, 15 bp, Homo sapiens
gtcttttgaaatgaa

SEQ ID NO: 516173 - DNA, 15 bp, Homo sapiens
tcttttgaaatgaaa

SEQ ID NO: 516174 - DNA, 15 bp, Homo sapiens
cttttgaaatgaaaa

SEQ ID NO: 516175 - DNA, 15 bp, Homo sapiens
ttttgaaatgaaaat

SEQ ID NO: 516176 - DNA, 15 bp, Homo sapiens
tttgaaatgaaaatg

SEQ ID NO: 516177 - DNA, 15 bp, Homo sapiens
ttgaaatgaaaatgt

SEQ ID NO: 516178 - DNA, 15 bp, Homo sapiens
tgaaatgaaaatgtt

SEQ ID NO: 516179 - DNA, 15 bp, Homo sapiens
gaaatgaaaatgttt

SEQ ID NO: 516180 - DNA, 15 bp, Homo sapiens
aaatgaaaatgtttg

SEQ ID NO: 516181 - DNA, 15 bp, Homo sapiens
aatgaaaatgtttgt

SEQ ID NO: 516182 - DNA, 15 bp, Homo sapiens
atgaaaatgtttgtt

SEQ ID NO: 516183 - DNA, 15 bp, Homo sapiens
tgaaaatgtttgttt

SEQ ID NO: 516184 - DNA, 15 bp, Homo sapiens
gaaaatgtttgtttc

SEQ ID NO: 516185 - DNA, 15 bp, Homo sapiens
aaaatgtttgtttct

SEQ ID NO: 516186 - DNA, 15 bp, Homo sapiens
aaatgtttgtttctt

SEQ ID NO: 516187 - DNA, 15 bp, Homo sapiens
aatgtttgtttctta

SEQ ID NO: 516188 - DNA, 15 bp, Homo sapiens
atgtttgtttcttaa

SEQ ID NO: 516189 - DNA, 15 bp, Homo sapiens
tgtttgtttcttaat

SEQ ID NO: 516190 - DNA, 15 bp, Homo sapiens
gtttgtttcttaata

SEQ ID NO: 516191 - DNA, 15 bp, Homo sapiens
tttgtttcttaataa

SEQ ID NO: 516192 - DNA, 15 bp, Homo sapiens
ttgtttcttaataaa

SEQ ID NO: 516193 - DNA, 15 bp, Homo sapiens
tgtttcttaataaaa

SEQ ID NO: 516194 - DNA, 15 bp, Homo sapiens
gtttcttaataaaag

SEQ ID NO: 516195 - DNA, 15 bp, Homo sapiens
tttcttaataaaaga

SEQ ID NO: 516196 - DNA, 15 bp, Homo sapiens
ttcttaataaaagaa

SEQ ID NO: 516197 - DNA, 15 bp, Homo sapiens
tcttaataaaagaat

SEQ ID NO: 516198 - DNA, 15 bp, Homo sapiens
cttaataaaagaatt

SEQ ID NO: 516199 - DNA, 15 bp, Homo sapiens
ttaataaaagaattt

SEQ ID NO: 516200 - DNA, 15 bp, Homo sapiens
taataaaagaatttc

SEQ ID NO: 516201 - DNA, 15 bp, Homo sapiens
aataaaagaatttca

SEQ ID NO: 516202 - DNA, 15 bp, Homo sapiens
ataaaagaatttcag

SEQ ID NO: 516203 - DNA, 15 bp, Homo sapiens
taaaagaatttcaga

SEQ ID NO: 516204 - DNA, 15 bp, Homo sapiens
aaaagaatttcagaa

SEQ ID NO: 516205 - DNA, 15 bp, Homo sapiens
aaagaatttcagaaa

SEQ ID NO: 516206 - DNA, 15 bp, Homo sapiens
aagaatttcagaaaa

SEQ ID NO: 516207 - DNA, 15 bp, Homo sapiens
agaatttcagaaaaa

SEQ ID NO: 516208 - DNA, 15 bp, Homo sapiens
gaatttcagaaaaag

SEQ ID NO: 516209 - DNA, 15 bp, Homo sapiens
aatttcagaaaaagt

SEQ ID NO: 516210 - DNA, 15 bp, Homo sapiens
atttcagaaaaagta

SEQ ID NO: 516211 - DNA, 15 bp, Homo sapiens
tttcagaaaaagtag

SEQ ID NO: 516212 - DNA, 15 bp, Homo sapiens
ttcagaaaaagtaga

SEQ ID NO: 516213 - DNA, 15 bp, Homo sapiens
tcagaaaaagtagag

SEQ ID NO: 516214 - DNA, 15 bp, Homo sapiens
cagaaaaagtagagt

SEQ ID NO: 516215 - DNA, 15 bp, Homo sapiens
agaaaaagtagagta

SEQ ID NO: 516216 - DNA, 15 bp, Homo sapiens
gaaaaagtagagtag

SEQ ID NO: 516217 - DNA, 15 bp, Homo sapiens
aaaaagtagagtagg

SEQ ID NO: 516218 - DNA, 15 bp, Homo sapiens
aaaagtagagtaggt

SEQ ID NO: 516219 - DNA, 15 bp, Homo sapiens
aaagtagagtaggta

SEQ ID NO: 516220 - DNA, 15 bp, Homo sapiens
aagtagagtaggtaa

SEQ ID NO: 516221 - DNA, 15 bp, Homo sapiens
agtagagtaggtaat

SEQ ID NO: 516222 - DNA, 15 bp, Homo sapiens
gtagagtaggtaatt

SEQ ID NO: 516223 - DNA, 15 bp, Homo sapiens
tagagtaggtaattt

SEQ ID NO: 516224 - DNA, 15 bp, Homo sapiens
agagtaggtaattta

SEQ ID NO: 516225 - DNA, 15 bp, Homo sapiens
gagtaggtaatttag

SEQ ID NO: 516226 - DNA, 15 bp, Homo sapiens
agtaggtaatttagt

SEQ ID NO: 516227 - DNA, 15 bp, Homo sapiens
gtaggtaatttagta

SEQ ID NO: 516228 - DNA, 15 bp, Homo sapiens
taggtaatttagtag

SEQ ID NO: 516229 - DNA, 15 bp, Homo sapiens
aggtaatttagtaga

SEQ ID NO: 516230 - DNA, 15 bp, Homo sapiens
ggtaatttagtagaa

SEQ ID NO: 516231 - DNA, 15 bp, Homo sapiens
gtaatttagtagaac

SEQ ID NO: 516232 - DNA, 15 bp, Homo sapiens
taatttagtagaaca

SEQ ID NO: 516233 - DNA, 15 bp, Homo sapiens
aatttagtagaacaa

SEQ ID NO: 516234 - DNA, 15 bp, Homo sapiens
atttagtagaacaag

SEQ ID NO: 516235 - DNA, 15 bp, Homo sapiens
tttagtagaacaagt

SEQ ID NO: 516236 - DNA, 15 bp, Homo sapiens
ttagtagaacaagtg

SEQ ID NO: 516237 - DNA, 15 bp, Homo sapiens
tagtagaacaagtgg

SEQ ID NO: 516238 - DNA, 15 bp, Homo sapiens
agtagaacaagtggg

SEQ ID NO: 516239 - DNA, 15 bp, Homo sapiens
gtagaacaagtgggc

SEQ ID NO: 516240 - DNA, 15 bp, Homo sapiens
tagaacaagtgggct

SEQ ID NO: 516241 - DNA, 15 bp, Homo sapiens
agaacaagtgggctt

SEQ ID NO: 516242 - DNA, 15 bp, Homo sapiens
gaacaagtgggcttt

SEQ ID NO: 516243 - DNA, 15 bp, Homo sapiens
aacaagtgggctttc

SEQ ID NO: 516244 - DNA, 15 bp, Homo sapiens
acaagtgggctttct

SEQ ID NO: 516245 - DNA, 15 bp, Homo sapiens
caagtgggctttctc

SEQ ID NO: 516246 - DNA, 15 bp, Homo sapiens
aagtgggctttctcc

SEQ ID NO: 516247 - DNA, 15 bp, Homo sapiens
agtgggctttctcct

SEQ ID NO: 516248 - DNA, 15 bp, Homo sapiens
gtgggctttctcctt

SEQ ID NO: 516249 - DNA, 15 bp, Homo sapiens
tgggctttctccttt

SEQ ID NO: 516250 - DNA, 15 bp, Homo sapiens
gggctttctcctttt

SEQ ID NO: 516251 - DNA, 15 bp, Homo sapiens
ggctttctccttttc

SEQ ID NO: 516252 - DNA, 15 bp, Homo sapiens
gctttctccttttct

SEQ ID NO: 516253 - DNA, 15 bp, Homo sapiens
ctttctccttttctt

SEQ ID NO: 516254 - DNA, 15 bp, Homo sapiens
tttctccttttcttt

SEQ ID NO: 516255 - DNA, 15 bp, Homo sapiens
ttctccttttcttta

SEQ ID NO: 516256 - DNA, 15 bp, Homo sapiens
tctccttttctttat

SEQ ID NO: 516257 - DNA, 15 bp, Homo sapiens
ctccttttctttatg

SEQ ID NO: 516258 - DNA, 15 bp, Homo sapiens
tccttttctttatgt

SEQ ID NO: 516259 - DNA, 15 bp, Homo sapiens
ccttttctttatgtt

SEQ ID NO: 516260 - DNA, 15 bp, Homo sapiens
cttttctttatgtta

SEQ ID NO: 516261 - DNA, 15 bp, Homo sapiens
ttttctttatgttaa

SEQ ID NO: 516262 - DNA, 15 bp, Homo sapiens
tttctttatgttaag

SEQ ID NO: 516263 - DNA, 15 bp, Homo sapiens
ttctttatgttaagc

SEQ ID NO: 516264 - DNA, 15 bp, Homo sapiens
tctttatgttaagct

SEQ ID NO: 516265 - DNA, 15 bp, Homo sapiens
ctttatgttaagcta

SEQ ID NO: 516266 - DNA, 15 bp, Homo sapiens
tttatgttaagctat

SEQ ID NO: 516267 - DNA, 15 bp, Homo sapiens
ttatgttaagctatg

SEQ ID NO: 516268 - DNA, 15 bp, Homo sapiens
tatgttaagctatgg

SEQ ID NO: 516269 - DNA, 15 bp, Homo sapiens
atgttaagctatggc

SEQ ID NO: 516270 - DNA, 15 bp, Homo sapiens
tgttaagctatggct

SEQ ID NO: 516271 - DNA, 15 bp, Homo sapiens
gttaagctatggctc

SEQ ID NO: 516272 - DNA, 15 bp, Homo sapiens
ttaagctatggctca

SEQ ID NO: 516273 - DNA, 15 bp, Homo sapiens
taagctatggctcac

SEQ ID NO: 516274 - DNA, 15 bp, Homo sapiens
aagctatggctcaca

SEQ ID NO: 516275 - DNA, 15 bp, Homo sapiens
agctatggctcacat

SEQ ID NO: 516276 - DNA, 15 bp, Homo sapiens
gctatggctcacatc

SEQ ID NO: 516277 - DNA, 15 bp, Homo sapiens
ctatggctcacatct

SEQ ID NO: 516278 - DNA, 15 bp, Homo sapiens
tatggctcacatctt

SEQ ID NO: 516279 - DNA, 15 bp, Homo sapiens
atggctcacatctta

SEQ ID NO: 516280 - DNA, 15 bp, Homo sapiens
tggctcacatcttac

SEQ ID NO: 516281 - DNA, 15 bp, Homo sapiens
ggctcacatcttacc

SEQ ID NO: 516282 - DNA, 15 bp, Homo sapiens
gctcacatcttacct

SEQ ID NO: 516283 - DNA, 15 bp, Homo sapiens
ctcacatcttacctt

SEQ ID NO: 516284 - DNA, 15 bp, Homo sapiens
tcacatcttacctta

SEQ ID NO: 516285 - DNA, 15 bp, Homo sapiens
cacatcttaccttaa

SEQ ID NO: 516286 - DNA, 15 bp, Homo sapiens
acatcttaccttaaa

SEQ ID NO: 516287 - DNA, 15 bp, Homo sapiens
catcttaccttaaat

SEQ ID NO: 516288 - DNA, 15 bp, Homo sapiens
atcttaccttaaatg

SEQ ID NO: 516289 - DNA, 15 bp, Homo sapiens
tcttaccttaaatgt

SEQ ID NO: 516290 - DNA, 15 bp, Homo sapiens
cttaccttaaatgtc

SEQ ID NO: 516291 - DNA, 15 bp, Homo sapiens
ttaccttaaatgtca

SEQ ID NO: 516292 - DNA, 15 bp, Homo sapiens
taccttaaatgtcaa

SEQ ID NO: 516293 - DNA, 15 bp, Homo sapiens
accttaaatgtcaac

SEQ ID NO: 516294 - DNA, 15 bp, Homo sapiens
ccttaaatgtcaact

SEQ ID NO: 516295 - DNA, 15 bp, Homo sapiens
cttaaatgtcaacta

SEQ ID NO: 516296 - DNA, 15 bp, Homo sapiens
ttaaatgtcaactaa

SEQ ID NO: 516297 - DNA, 15 bp, Homo sapiens
taaatgtcaactaat

SEQ ID NO: 516298 - DNA, 15 bp, Homo sapiens
aaatgtcaactaatt

SEQ ID NO: 516299 - DNA, 15 bp, Homo sapiens
aatgtcaactaattt

SEQ ID NO: 516300 - DNA, 15 bp, Homo sapiens
atgtcaactaatttg

SEQ ID NO: 516301 - DNA, 15 bp, Homo sapiens
tgtcaactaatttgt

SEQ ID NO: 516302 - DNA, 15 bp, Homo sapiens
gtcaactaatttgtt

SEQ ID NO: 516303 - DNA, 15 bp, Homo sapiens
tcaactaatttgttt

SEQ ID NO: 516304 - DNA, 15 bp, Homo sapiens
caactaatttgtttt

SEQ ID NO: 516305 - DNA, 15 bp, Homo sapiens
aactaatttgttttt

SEQ ID NO: 516306 - DNA, 15 bp, Homo sapiens
actaatttgttttta

SEQ ID NO: 516307 - DNA, 15 bp, Homo sapiens
ctaatttgtttttaa

SEQ ID NO: 516308 - DNA, 15 bp, Homo sapiens
taatttgtttttaag

SEQ ID NO: 516309 - DNA, 15 bp, Homo sapiens
aatttgtttttaagt

SEQ ID NO: 516310 - DNA, 15 bp, Homo sapiens
atttgtttttaagta

SEQ ID NO: 516311 - DNA, 15 bp, Homo sapiens
tttgtttttaagtat

SEQ ID NO: 516312 - DNA, 15 bp, Homo sapiens
ttgtttttaagtatt

SEQ ID NO: 516313 - DNA, 15 bp, Homo sapiens
tgtttttaagtattt

SEQ ID NO: 516314 - DNA, 15 bp, Homo sapiens
gtttttaagtattta

SEQ ID NO: 516315 - DNA, 15 bp, Homo sapiens
tttttaagtatttat

SEQ ID NO: 516316 - DNA, 15 bp, Homo sapiens
ttttaagtatttatg

SEQ ID NO: 516317 - DNA, 15 bp, Homo sapiens
tttaagtatttatgt

SEQ ID NO: 516318 - DNA, 15 bp, Homo sapiens
ttaagtatttatgta

SEQ ID NO: 516319 - DNA, 15 bp, Homo sapiens
taagtatttatgtac

SEQ ID NO: 516320 - DNA, 15 bp, Homo sapiens
aagtatttatgtacc

SEQ ID NO: 516321 - DNA, 15 bp, Homo sapiens
agtatttatgtacct

SEQ ID NO: 516322 - DNA, 15 bp, Homo sapiens
gtatttatgtacctg

SEQ ID NO: 516323 - DNA, 15 bp, Homo sapiens
tatttatgtacctgg

SEQ ID NO: 516324 - DNA, 15 bp, Homo sapiens
atttatgtacctggt

SEQ ID NO: 516325 - DNA, 15 bp, Homo sapiens
tttatgtacctggta

SEQ ID NO: 516326 - DNA, 15 bp, Homo sapiens
ttatgtacctggtac

SEQ ID NO: 516327 - DNA, 15 bp, Homo sapiens
tatgtacctggtaca

SEQ ID NO: 516328 - DNA, 15 bp, Homo sapiens
atgtacctggtacat

SEQ ID NO: 516329 - DNA, 15 bp, Homo sapiens
tgtacctggtacata

SEQ ID NO: 516330 - DNA, 15 bp, Homo sapiens
gtacctggtacataa

SEQ ID NO: 516331 - DNA, 15 bp, Homo sapiens
tacctggtacataac

SEQ ID NO: 516332 - DNA, 15 bp, Homo sapiens
acctggtacataacc

SEQ ID NO: 516333 - DNA, 15 bp, Homo sapiens
cctggtacataacct

SEQ ID NO: 516334 - DNA, 15 bp, Homo sapiens
ctggtacataacctg

SEQ ID NO: 516335 - DNA, 15 bp, Homo sapiens
tggtacataacctgg

SEQ ID NO: 516336 - DNA, 15 bp, Homo sapiens
ggtacataacctggt

SEQ ID NO: 516337 - DNA, 15 bp, Homo sapiens
gtacataacctggta

SEQ ID NO: 516338 - DNA, 15 bp, Homo sapiens
tacataacctggtac

SEQ ID NO: 516339 - DNA, 15 bp, Homo sapiens
acataacctggtacc

SEQ ID NO: 516340 - DNA, 15 bp, Homo sapiens
cataacctggtacca

SEQ ID NO: 516341 - DNA, 15 bp, Homo sapiens
ataacctggtaccag

SEQ ID NO: 516342 - DNA, 15 bp, Homo sapiens
taacctggtaccagg

SEQ ID NO: 516343 - DNA, 15 bp, Homo sapiens
aacctggtaccaggt

SEQ ID NO: 516344 - DNA, 15 bp, Homo sapiens
acctggtaccaggta

SEQ ID NO: 516345 - DNA, 15 bp, Homo sapiens
cctggtaccaggtac

SEQ ID NO: 516346 - DNA, 15 bp, Homo sapiens
ctggtaccaggtaca

SEQ ID NO: 516347 - DNA, 15 bp, Homo sapiens
tggtaccaggtacaa

SEQ ID NO: 516348 - DNA, 15 bp, Homo sapiens
ggtaccaggtacaaa

SEQ ID NO: 516349 - DNA, 15 bp, Homo sapiens
gtaccaggtacaaac

SEQ ID NO: 516350 - DNA, 15 bp, Homo sapiens
taccaggtacaaact

SEQ ID NO: 516351 - DNA, 15 bp, Homo sapiens
accaggtacaaacta

SEQ ID NO: 516352 - DNA, 15 bp, Homo sapiens
ccaggtacaaactat

SEQ ID NO: 516353 - DNA, 15 bp, Homo sapiens
caggtacaaactatg

SEQ ID NO: 516354 - DNA, 15 bp, Homo sapiens
aggtacaaactatgt

SEQ ID NO: 516355 - DNA, 15 bp, Homo sapiens
ggtacaaactatgta

SEQ ID NO: 516356 - DNA, 15 bp, Homo sapiens
gtacaaactatgtac

SEQ ID NO: 516357 - DNA, 15 bp, Homo sapiens
tacaaactatgtact

SEQ ID NO: 516358 - DNA, 15 bp, Homo sapiens
acaaactatgtactt

SEQ ID NO: 516359 - DNA, 15 bp, Homo sapiens
caaactatgtacttg

SEQ ID NO: 516360 - DNA, 15 bp, Homo sapiens
aaactatgtacttgg

SEQ ID NO: 516361 - DNA, 15 bp, Homo sapiens
aactatgtacttggt

SEQ ID NO: 516362 - DNA, 15 bp, Homo sapiens
actatgtacttggta

SEQ ID NO: 516363 - DNA, 15 bp, Homo sapiens
ctatgtacttggtaa

SEQ ID NO: 516364 - DNA, 15 bp, Homo sapiens
tatgtacttggtaaa

SEQ ID NO: 516365 - DNA, 15 bp, Homo sapiens
atgtacttggtaaaa

SEQ ID NO: 516366 - DNA, 15 bp, Homo sapiens
tgtacttggtaaaaa

SEQ ID NO: 516367 - DNA, 15 bp, Homo sapiens
gtacttggtaaaaag

SEQ ID NO: 516368 - DNA, 15 bp, Homo sapiens
tacttggtaaaaagt

SEQ ID NO: 516369 - DNA, 15 bp, Homo sapiens
acttggtaaaaagtt

SEQ ID NO: 516370 - DNA, 15 bp, Homo sapiens
cttggtaaaaagttt

SEQ ID NO: 516371 - DNA, 15 bp, Homo sapiens
ttggtaaaaagttta

SEQ ID NO: 516372 - DNA, 15 bp, Homo sapiens
tggtaaaaagtttat

SEQ ID NO: 516373 - DNA, 15 bp, Homo sapiens
ggtaaaaagtttatt

SEQ ID NO: 516374 - DNA, 15 bp, Homo sapiens
gtaaaaagtttatta

SEQ ID NO: 516375 - DNA, 15 bp, Homo sapiens
taaaaagtttattag

SEQ ID NO: 516376 - DNA, 15 bp, Homo sapiens
aaaaagtttattagc

SEQ ID NO: 516377 - DNA, 15 bp, Homo sapiens
aaaagtttattagca

SEQ ID NO: 516378 - DNA, 15 bp, Homo sapiens
aaagtttattagcac

SEQ ID NO: 516379 - DNA, 15 bp, Homo sapiens
aagtttattagcaca

SEQ ID NO: 516380 - DNA, 15 bp, Homo sapiens
agtttattagcacaa

SEQ ID NO: 516381 - DNA, 15 bp, Homo sapiens
gtttattagcacaaa

SEQ ID NO: 516382 - DNA, 15 bp, Homo sapiens
tttattagcacaaaa

SEQ ID NO: 516383 - DNA, 15 bp, Homo sapiens
ttattagcacaaaaa

SEQ ID NO: 516384 - DNA, 15 bp, Homo sapiens
tattagcacaaaaag

SEQ ID NO: 516385 - DNA, 15 bp, Homo sapiens
attagcacaaaaagg

SEQ ID NO: 516386 - DNA, 15 bp, Homo sapiens
ttagcacaaaaaggt

SEQ ID NO: 516387 - DNA, 15 bp, Homo sapiens
tagcacaaaaaggta

SEQ ID NO: 516388 - DNA, 15 bp, Homo sapiens
agcacaaaaaggtat

SEQ ID NO: 516389 - DNA, 15 bp, Homo sapiens
gcacaaaaaggtata

SEQ ID NO: 516390 - DNA, 15 bp, Homo sapiens
cacaaaaaggtatat

SEQ ID NO: 516391 - DNA, 15 bp, Homo sapiens
acaaaaaggtatatg

SEQ ID NO: 516392 - DNA, 15 bp, Homo sapiens
caaaaaggtatatga

SEQ ID NO: 516393 - DNA, 15 bp, Homo sapiens
aaaaaggtatatgat

SEQ ID NO: 516394 - DNA, 15 bp, Homo sapiens
aaaaggtatatgatg

SEQ ID NO: 516395 - DNA, 15 bp, Homo sapiens
aaaggtatatgatgc

SEQ ID NO: 516396 - DNA, 15 bp, Homo sapiens
aaggtatatgatgca

SEQ ID NO: 516397 - DNA, 15 bp, Homo sapiens
aggtatatgatgcaa

SEQ ID NO: 516398 - DNA, 15 bp, Homo sapiens
ggtatatgatgcaaa

SEQ ID NO: 516399 - DNA, 15 bp, Homo sapiens
gtatatgatgcaaag

SEQ ID NO: 516400 - DNA, 15 bp, Homo sapiens
tatatgatgcaaagt

SEQ ID NO: 516401 - DNA, 15 bp, Homo sapiens
atatgatgcaaagta

SEQ ID NO: 516402 - DNA, 15 bp, Homo sapiens
tatgatgcaaagtat

SEQ ID NO: 516403 - DNA, 15 bp, Homo sapiens
atgatgcaaagtata

SEQ ID NO: 516404 - DNA, 15 bp, Homo sapiens
tgatgcaaagtatac

SEQ ID NO: 516405 - DNA, 15 bp, Homo sapiens
gatgcaaagtatact

SEQ ID NO: 516406 - DNA, 15 bp, Homo sapiens
atgcaaagtatactt

SEQ ID NO: 516407 - DNA, 15 bp, Homo sapiens
tgcaaagtatacttc

SEQ ID NO: 516408 - DNA, 15 bp, Homo sapiens
gcaaagtatacttcc

SEQ ID NO: 516409 - DNA, 15 bp, Homo sapiens
caaagtatacttccc

SEQ ID NO: 516410 - DNA, 15 bp, Homo sapiens
aaagtatacttccct

SEQ ID NO: 516411 - DNA, 15 bp, Homo sapiens
aagtatacttccctc

SEQ ID NO: 516412 - DNA, 15 bp, Homo sapiens
agtatacttccctct

SEQ ID NO: 516413 - DNA, 15 bp, Homo sapiens
gtatacttccctctt

SEQ ID NO: 516414 - DNA, 15 bp, Homo sapiens
tatacttccctctta

SEQ ID NO: 516415 - DNA, 15 bp, Homo sapiens
atacttccctcttac

SEQ ID NO: 516416 - DNA, 15 bp, Homo sapiens
tacttccctcttacc

SEQ ID NO: 516417 - DNA, 15 bp, Homo sapiens
acttccctcttaccc

SEQ ID NO: 516418 - DNA, 15 bp, Homo sapiens
cttccctcttaccct

SEQ ID NO: 516419 - DNA, 15 bp, Homo sapiens
ttccctcttacccta

SEQ ID NO: 516420 - DNA, 15 bp, Homo sapiens
tccctcttaccctac

SEQ ID NO: 516421 - DNA, 15 bp, Homo sapiens
ccctcttaccctaca

SEQ ID NO: 516422 - DNA, 15 bp, Homo sapiens
cctcttaccctacaa

SEQ ID NO: 516423 - DNA, 15 bp, Homo sapiens
ctcttaccctacaac

SEQ ID NO: 516424 - DNA, 15 bp, Homo sapiens
tcttaccctacaacc

SEQ ID NO: 516425 - DNA, 15 bp, Homo sapiens
cttaccctacaaccc

SEQ ID NO: 516426 - DNA, 15 bp, Homo sapiens
ttaccctacaacccc

SEQ ID NO: 516427 - DNA, 15 bp, Homo sapiens
taccctacaacccct

SEQ ID NO: 516428 - DNA, 15 bp, Homo sapiens
accctacaacccctg

SEQ ID NO: 516429 - DNA, 15 bp, Homo sapiens
ccctacaacccctgc

SEQ ID NO: 516430 - DNA, 15 bp, Homo sapiens
cctacaacccctgcc

SEQ ID NO: 516431 - DNA, 15 bp, Homo sapiens
ctacaacccctgcct

SEQ ID NO: 516432 - DNA, 15 bp, Homo sapiens
tacaacccctgcctc

SEQ ID NO: 516433 - DNA, 15 bp, Homo sapiens
acaacccctgcctcc

SEQ ID NO: 516434 - DNA, 15 bp, Homo sapiens
caacccctgcctccc

SEQ ID NO: 516435 - DNA, 15 bp, Homo sapiens
aacccctgcctccct

SEQ ID NO: 516436 - DNA, 15 bp, Homo sapiens
acccctgcctccctg

SEQ ID NO: 516437 - DNA, 15 bp, Homo sapiens
cccctgcctccctgt

SEQ ID NO: 516438 - DNA, 15 bp, Homo sapiens
ccctgcctccctgtt

SEQ ID NO: 516439 - DNA, 15 bp, Homo sapiens
cctgcctccctgttc

SEQ ID NO: 516440 - DNA, 15 bp, Homo sapiens
ctgcctccctgttcc

SEQ ID NO: 516441 - DNA, 15 bp, Homo sapiens
tgcctccctgttccc

SEQ ID NO: 516442 - DNA, 15 bp, Homo sapiens
gcctccctgttccct

SEQ ID NO: 516443 - DNA, 15 bp, Homo sapiens
cctccctgttccctc

SEQ ID NO: 516444 - DNA, 15 bp, Homo sapiens
ctccctgttccctcc

SEQ ID NO: 516445 - DNA, 15 bp, Homo sapiens
tccctgttccctccc

SEQ ID NO: 516446 - DNA, 15 bp, Homo sapiens
ccctgttccctcccc

SEQ ID NO: 516447 - DNA, 15 bp, Homo sapiens
cctgttccctcccca

SEQ ID NO: 516448 - DNA, 15 bp, Homo sapiens
ctgttccctccccag

SEQ ID NO: 516449 - DNA, 15 bp, Homo sapiens
tgttccctccccaga

SEQ ID NO: 516450 - DNA, 15 bp, Homo sapiens
gttccctccccagac

SEQ ID NO: 516451 - DNA, 15 bp, Homo sapiens
ttccctccccagaca

SEQ ID NO: 516452 - DNA, 15 bp, Homo sapiens
tccctccccagacaa

SEQ ID NO: 516453 - DNA, 15 bp, Homo sapiens
ccctccccagacaac

SEQ ID NO: 516454 - DNA, 15 bp, Homo sapiens
cctccccagacaacc

SEQ ID NO: 516455 - DNA, 15 bp, Homo sapiens
ctccccagacaacca

SEQ ID NO: 516456 - DNA, 15 bp, Homo sapiens
tccccagacaaccac

SEQ ID NO: 516457 - DNA, 15 bp, Homo sapiens
ccccagacaaccaca

SEQ ID NO: 516458 - DNA, 15 bp, Homo sapiens
cccagacaaccacaa

SEQ ID NO: 516459 - DNA, 15 bp, Homo sapiens
ccagacaaccacaat

SEQ ID NO: 516460 - DNA, 15 bp, Homo sapiens
cagacaaccacaatg

SEQ ID NO: 516461 - DNA, 15 bp, Homo sapiens
agacaaccacaatga

SEQ ID NO: 516462 - DNA, 15 bp, Homo sapiens
gacaaccacaatgat

SEQ ID NO: 516463 - DNA, 15 bp, Homo sapiens
acaaccacaatgatc

SEQ ID NO: 516464 - DNA, 15 bp, Homo sapiens
caaccacaatgatca

SEQ ID NO: 516465 - DNA, 15 bp, Homo sapiens
aaccacaatgatcaa

SEQ ID NO: 516466 - DNA, 15 bp, Homo sapiens
accacaatgatcaat

SEQ ID NO: 516467 - DNA, 15 bp, Homo sapiens
ccacaatgatcaatt

SEQ ID NO: 516468 - DNA, 15 bp, Homo sapiens
cacaatgatcaattt

SEQ ID NO: 516469 - DNA, 15 bp, Homo sapiens
acaatgatcaatttc

SEQ ID NO: 516470 - DNA, 15 bp, Homo sapiens
caatgatcaatttct

SEQ ID NO: 516471 - DNA, 15 bp, Homo sapiens
aatgatcaatttctt

SEQ ID NO: 516472 - DNA, 15 bp, Homo sapiens
atgatcaatttctta

SEQ ID NO: 516473 - DNA, 15 bp, Homo sapiens
tgatcaatttcttat

SEQ ID NO: 516474 - DNA, 15 bp, Homo sapiens
gatcaatttcttatg

SEQ ID NO: 516475 - DNA, 15 bp, Homo sapiens
atcaatttcttatgt

SEQ ID NO: 516476 - DNA, 15 bp, Homo sapiens
tcaatttcttatgta

SEQ ID NO: 516477 - DNA, 15 bp, Homo sapiens
caatttcttatgtat

SEQ ID NO: 516478 - DNA, 15 bp, Homo sapiens
aatttcttatgtatc

SEQ ID NO: 516479 - DNA, 15 bp, Homo sapiens
atttcttatgtatcc

SEQ ID NO: 516480 - DNA, 15 bp, Homo sapiens
tttcttatgtatcct

SEQ ID NO: 516481 - DNA, 15 bp, Homo sapiens
ttcttatgtatcctt

SEQ ID NO: 516482 - DNA, 15 bp, Homo sapiens
tcttatgtatccttt

SEQ ID NO: 516483 - DNA, 15 bp, Homo sapiens
cttatgtatcctttg

SEQ ID NO: 516484 - DNA, 15 bp, Homo sapiens
ttatgtatcctttga

SEQ ID NO: 516485 - DNA, 15 bp, Homo sapiens
tatgtatcctttgag

SEQ ID NO: 516486 - DNA, 15 bp, Homo sapiens
atgtatcctttgagg

SEQ ID NO: 516487 - DNA, 15 bp, Homo sapiens
tgtatcctttgagga

SEQ ID NO: 516488 - DNA, 15 bp, Homo sapiens
gtatcctttgaggaa

SEQ ID NO: 516489 - DNA, 15 bp, Homo sapiens
tatcctttgaggaat

SEQ ID NO: 516490 - DNA, 15 bp, Homo sapiens
atcctttgaggaatt

SEQ ID NO: 516491 - DNA, 15 bp, Homo sapiens
tcctttgaggaattt

SEQ ID NO: 516492 - DNA, 15 bp, Homo sapiens
cctttgaggaatttt

SEQ ID NO: 516493 - DNA, 15 bp, Homo sapiens
ctttgaggaattttt

SEQ ID NO: 516494 - DNA, 15 bp, Homo sapiens
tttgaggaattttta

SEQ ID NO: 516495 - DNA, 15 bp, Homo sapiens
ttgaggaatttttaa

SEQ ID NO: 516496 - DNA, 15 bp, Homo sapiens
tgaggaatttttaaa

SEQ ID NO: 516497 - DNA, 15 bp, Homo sapiens
gaggaatttttaaat

SEQ ID NO: 516498 - DNA, 15 bp, Homo sapiens
aggaatttttaaatt

SEQ ID NO: 516499 - DNA, 15 bp, Homo sapiens
ggaatttttaaattc

SEQ ID NO: 516500 - DNA, 15 bp, Homo sapiens
gaatttttaaattcc

SEQ ID NO: 516501 - DNA, 15 bp, Homo sapiens
aatttttaaattcca

SEQ ID NO: 516502 - DNA, 15 bp, Homo sapiens
atttttaaattccag

SEQ ID NO: 516503 - DNA, 15 bp, Homo sapiens
tttttaaattccaga

SEQ ID NO: 516504 - DNA, 15 bp, Homo sapiens
ttttaaattccagag

SEQ ID NO: 516505 - DNA, 15 bp, Homo sapiens
tttaaattccagagt

SEQ ID NO: 516506 - DNA, 15 bp, Homo sapiens
ttaaattccagagtt

SEQ ID NO: 516507 - DNA, 15 bp, Homo sapiens
taaattccagagttc

SEQ ID NO: 516508 - DNA, 15 bp, Homo sapiens
aaattccagagttct

SEQ ID NO: 516509 - DNA, 15 bp, Homo sapiens
aattccagagttctt

SEQ ID NO: 516510 - DNA, 15 bp, Homo sapiens
attccagagttctta

SEQ ID NO: 516511 - DNA, 15 bp, Homo sapiens
ttccagagttcttaa

SEQ ID NO: 516512 - DNA, 15 bp, Homo sapiens
tccagagttcttaac

SEQ ID NO: 516513 - DNA, 15 bp, Homo sapiens
ccagagttcttaact

SEQ ID NO: 516514 - DNA, 15 bp, Homo sapiens
cagagttcttaactt

SEQ ID NO: 516515 - DNA, 15 bp, Homo sapiens
agagttcttaacttg

SEQ ID NO: 516516 - DNA, 15 bp, Homo sapiens
gagttcttaacttgg

SEQ ID NO: 516517 - DNA, 15 bp, Homo sapiens
agttcttaacttggg

SEQ ID NO: 516518 - DNA, 15 bp, Homo sapiens
gttcttaacttgggg

SEQ ID NO: 516519 - DNA, 15 bp, Homo sapiens
ttcttaacttggggt

SEQ ID NO: 516520 - DNA, 15 bp, Homo sapiens
tcttaacttggggtt

SEQ ID NO: 516521 - DNA, 15 bp, Homo sapiens
cttaacttggggttt

SEQ ID NO: 516522 - DNA, 15 bp, Homo sapiens
ttaacttggggttta

SEQ ID NO: 516523 - DNA, 15 bp, Homo sapiens
taacttggggtttat

SEQ ID NO: 516524 - DNA, 15 bp, Homo sapiens
aacttggggtttatg

SEQ ID NO: 516525 - DNA, 15 bp, Homo sapiens
acttggggtttatga

SEQ ID NO: 516526 - DNA, 15 bp, Homo sapiens
cttggggtttatgaa

SEQ ID NO: 516527 - DNA, 15 bp, Homo sapiens
ttggggtttatgaat

SEQ ID NO: 516528 - DNA, 15 bp, Homo sapiens
tggggtttatgaata

SEQ ID NO: 516529 - DNA, 15 bp, Homo sapiens
ggggtttatgaatag

SEQ ID NO: 516530 - DNA, 15 bp, Homo sapiens
gggtttatgaatagt

SEQ ID NO: 516531 - DNA, 15 bp, Homo sapiens
ggtttatgaatagtc

SEQ ID NO: 516532 - DNA, 15 bp, Homo sapiens
gtttatgaatagtct

SEQ ID NO: 516533 - DNA, 15 bp, Homo sapiens
tttatgaatagtctt

SEQ ID NO: 516534 - DNA, 15 bp, Homo sapiens
ttatgaatagtcttt

SEQ ID NO: 516535 - DNA, 15 bp, Homo sapiens
tatgaatagtcttta

SEQ ID NO: 516536 - DNA, 15 bp, Homo sapiens
atgaatagtctttat

SEQ ID NO: 516537 - DNA, 15 bp, Homo sapiens
tgaatagtctttatg

SEQ ID NO: 516538 - DNA, 15 bp, Homo sapiens
gaatagtctttatga

SEQ ID NO: 516539 - DNA, 15 bp, Homo sapiens
aatagtctttatgaa

SEQ ID NO: 516540 - DNA, 15 bp, Homo sapiens
atagtctttatgaat

SEQ ID NO: 516541 - DNA, 15 bp, Homo sapiens
tagtctttatgaatt

SEQ ID NO: 516542 - DNA, 15 bp, Homo sapiens
agtctttatgaattt

SEQ ID NO: 516543 - DNA, 15 bp, Homo sapiens
gtctttatgaatttc

SEQ ID NO: 516544 - DNA, 15 bp, Homo sapiens
tctttatgaatttcc

SEQ ID NO: 516545 - DNA, 15 bp, Homo sapiens
ctttatgaatttcct

SEQ ID NO: 516546 - DNA, 15 bp, Homo sapiens
tttatgaatttccta

SEQ ID NO: 516547 - DNA, 15 bp, Homo sapiens
ttatgaatttcctag

SEQ ID NO: 516548 - DNA, 15 bp, Homo sapiens
tatgaatttcctaga

SEQ ID NO: 516549 - DNA, 15 bp, Homo sapiens
atgaatttcctagaa

SEQ ID NO: 516550 - DNA, 15 bp, Homo sapiens
tgaatttcctagaat

SEQ ID NO: 516551 - DNA, 15 bp, Homo sapiens
gaatttcctagaatt

SEQ ID NO: 516552 - DNA, 15 bp, Homo sapiens
aatttcctagaatta

SEQ ID NO: 516553 - DNA, 15 bp, Homo sapiens
atttcctagaattat

SEQ ID NO: 516554 - DNA, 15 bp, Homo sapiens
tttcctagaattata

SEQ ID NO: 516555 - DNA, 15 bp, Homo sapiens
ttcctagaattatat

SEQ ID NO: 516556 - DNA, 15 bp, Homo sapiens
tcctagaattatatt

SEQ ID NO: 516557 - DNA, 15 bp, Homo sapiens
cctagaattatattt

SEQ ID NO: 516558 - DNA, 15 bp, Homo sapiens
ctagaattatattta

SEQ ID NO: 516559 - DNA, 15 bp, Homo sapiens
tagaattatatttaa

SEQ ID NO: 516560 - DNA, 15 bp, Homo sapiens
agaattatatttaaa

SEQ ID NO: 516561 - DNA, 15 bp, Homo sapiens
gaattatatttaaat

SEQ ID NO: 516562 - DNA, 15 bp, Homo sapiens
aattatatttaaatt

SEQ ID NO: 516563 - DNA, 15 bp, Homo sapiens
attatatttaaattg

SEQ ID NO: 516564 - DNA, 15 bp, Homo sapiens
ttatatttaaattgt

SEQ ID NO: 516565 - DNA, 15 bp, Homo sapiens
tatatttaaattgta

SEQ ID NO: 516566 - DNA, 15 bp, Homo sapiens
atatttaaattgtat

SEQ ID NO: 516567 - DNA, 15 bp, Homo sapiens
tatttaaattgtatt

SEQ ID NO: 516568 - DNA, 15 bp, Homo sapiens
atttaaattgtattc

SEQ ID NO: 516569 - DNA, 15 bp, Homo sapiens
tttaaattgtattca

SEQ ID NO: 516570 - DNA, 15 bp, Homo sapiens
ttaaattgtattcaa

SEQ ID NO: 516571 - DNA, 15 bp, Homo sapiens
taaattgtattcaaa

SEQ ID NO: 516572 - DNA, 15 bp, Homo sapiens
aaattgtattcaaaa

SEQ ID NO: 516573 - DNA, 15 bp, Homo sapiens
aattgtattcaaaac

SEQ ID NO: 516574 - DNA, 15 bp, Homo sapiens
attgtattcaaaact

SEQ ID NO: 516575 - DNA, 15 bp, Homo sapiens
ttgtattcaaaacta

SEQ ID NO: 516576 - DNA, 15 bp, Homo sapiens
tgtattcaaaactat

SEQ ID NO: 516577 - DNA, 15 bp, Homo sapiens
gtattcaaaactatg

SEQ ID NO: 516578 - DNA, 15 bp, Homo sapiens
tattcaaaactatgg

SEQ ID NO: 516579 - DNA, 15 bp, Homo sapiens
attcaaaactatggc

SEQ ID NO: 516580 - DNA, 15 bp, Homo sapiens
ttcaaaactatggcc

SEQ ID NO: 516581 - DNA, 15 bp, Homo sapiens
tcaaaactatggcca

SEQ ID NO: 516582 - DNA, 15 bp, Homo sapiens
caaaactatggccat

SEQ ID NO: 516583 - DNA, 15 bp, Homo sapiens
aaaactatggccatg

SEQ ID NO: 516584 - DNA, 15 bp, Homo sapiens
aaactatggccatgt

SEQ ID NO: 516585 - DNA, 15 bp, Homo sapiens
aactatggccatgta

SEQ ID NO: 516586 - DNA, 15 bp, Homo sapiens
actatggccatgtac

SEQ ID NO: 516587 - DNA, 15 bp, Homo sapiens
ctatggccatgtaca

SEQ ID NO: 516588 - DNA, 15 bp, Homo sapiens
tatggccatgtacat

SEQ ID NO: 516589 - DNA, 15 bp, Homo sapiens
atggccatgtacatt

SEQ ID NO: 516590 - DNA, 15 bp, Homo sapiens
tggccatgtacattt

SEQ ID NO: 516591 - DNA, 15 bp, Homo sapiens
ggccatgtacatttt

SEQ ID NO: 516592 - DNA, 15 bp, Homo sapiens
gccatgtacattttt

SEQ ID NO: 516593 - DNA, 15 bp, Homo sapiens
ccatgtacatttttc

SEQ ID NO: 516594 - DNA, 15 bp, Homo sapiens
catgtacatttttct

SEQ ID NO: 516595 - DNA, 15 bp, Homo sapiens
atgtacatttttctg

SEQ ID NO: 516596 - DNA, 15 bp, Homo sapiens
tgtacatttttctgg

SEQ ID NO: 516597 - DNA, 15 bp, Homo sapiens
gtacatttttctggg

SEQ ID NO: 516598 - DNA, 15 bp, Homo sapiens
tacatttttctggga

SEQ ID NO: 516599 - DNA, 15 bp, Homo sapiens
acatttttctgggaa

SEQ ID NO: 516600 - DNA, 15 bp, Homo sapiens
catttttctgggaag

SEQ ID NO: 516601 - DNA, 15 bp, Homo sapiens
atttttctgggaaga

SEQ ID NO: 516602 - DNA, 15 bp, Homo sapiens
tttttctgggaagat

SEQ ID NO: 516603 - DNA, 15 bp, Homo sapiens
ttttctgggaagata

SEQ ID NO: 516604 - DNA, 15 bp, Homo sapiens
tttctgggaagatag

SEQ ID NO: 516605 - DNA, 15 bp, Homo sapiens
ttctgggaagatagt

SEQ ID NO: 516606 - DNA, 15 bp, Homo sapiens
tctgggaagatagtc

SEQ ID NO: 516607 - DNA, 15 bp, Homo sapiens
ctgggaagatagtcc

SEQ ID NO: 516608 - DNA, 15 bp, Homo sapiens
tgggaagatagtcca

SEQ ID NO: 516609 - DNA, 15 bp, Homo sapiens
gggaagatagtccat

SEQ ID NO: 516610 - DNA, 15 bp, Homo sapiens
ggaagatagtccata

SEQ ID NO: 516611 - DNA, 15 bp, Homo sapiens
gaagatagtccataa

SEQ ID NO: 516612 - DNA, 15 bp, Homo sapiens
aagatagtccataat

SEQ ID NO: 516613 - DNA, 15 bp, Homo sapiens
agatagtccataatt

SEQ ID NO: 516614 - DNA, 15 bp, Homo sapiens
gatagtccataattt

SEQ ID NO: 516615 - DNA, 15 bp, Homo sapiens
atagtccataatttt

SEQ ID NO: 516616 - DNA, 15 bp, Homo sapiens
tagtccataattttc

SEQ ID NO: 516617 - DNA, 15 bp, Homo sapiens
agtccataattttca

SEQ ID NO: 516618 - DNA, 15 bp, Homo sapiens
gtccataattttcat

SEQ ID NO: 516619 - DNA, 15 bp, Homo sapiens
tccataattttcatc

SEQ ID NO: 516620 - DNA, 15 bp, Homo sapiens
ccataattttcatct

SEQ ID NO: 516621 - DNA, 15 bp, Homo sapiens
cataattttcatctg

SEQ ID NO: 516622 - DNA, 15 bp, Homo sapiens
ataattttcatctga

SEQ ID NO: 516623 - DNA, 15 bp, Homo sapiens
taattttcatctgag

SEQ ID NO: 516624 - DNA, 15 bp, Homo sapiens
aattttcatctgagt

SEQ ID NO: 516625 - DNA, 15 bp, Homo sapiens
attttcatctgagtg

SEQ ID NO: 516626 - DNA, 15 bp, Homo sapiens
ttttcatctgagtga

SEQ ID NO: 516627 - DNA, 15 bp, Homo sapiens
tttcatctgagtgag

SEQ ID NO: 516628 - DNA, 15 bp, Homo sapiens
ttcatctgagtgagc

SEQ ID NO: 516629 - DNA, 15 bp, Homo sapiens
tcatctgagtgagct

SEQ ID NO: 516630 - DNA, 15 bp, Homo sapiens
catctgagtgagcta

SEQ ID NO: 516631 - DNA, 15 bp, Homo sapiens
atctgagtgagctaa

SEQ ID NO: 516632 - DNA, 15 bp, Homo sapiens
tctgagtgagctaag

SEQ ID NO: 516633 - DNA, 15 bp, Homo sapiens
ctgagtgagctaaga

SEQ ID NO: 516634 - DNA, 15 bp, Homo sapiens
tgagtgagctaagat

SEQ ID NO: 516635 - DNA, 15 bp, Homo sapiens
gagtgagctaagatc

SEQ ID NO: 516636 - DNA, 15 bp, Homo sapiens
agtgagctaagatca

SEQ ID NO: 516637 - DNA, 15 bp, Homo sapiens
gtgagctaagatcat

SEQ ID NO: 516638 - DNA, 15 bp, Homo sapiens
tgagctaagatcatg

SEQ ID NO: 516639 - DNA, 15 bp, Homo sapiens
gagctaagatcatgc

SEQ ID NO: 516640 - DNA, 15 bp, Homo sapiens
agctaagatcatgcc

SEQ ID NO: 516641 - DNA, 15 bp, Homo sapiens
gctaagatcatgcca

SEQ ID NO: 516642 - DNA, 15 bp, Homo sapiens
ctaagatcatgccac

SEQ ID NO: 516643 - DNA, 15 bp, Homo sapiens
taagatcatgccact

SEQ ID NO: 516644 - DNA, 15 bp, Homo sapiens
atcatgccactgcat

SEQ ID NO: 516645 - DNA, 15 bp, Homo sapiens
tcatgccactgcatt

SEQ ID NO: 516646 - DNA, 15 bp, Homo sapiens
catgccactgcattc

SEQ ID NO: 516647 - DNA, 15 bp, Homo sapiens
atgccactgcattcc

SEQ ID NO: 516648 - DNA, 15 bp, Homo sapiens
tgccactgcattcca

SEQ ID NO: 516649 - DNA, 15 bp, Homo sapiens
gccactgcattccag

SEQ ID NO: 516650 - DNA, 15 bp, Homo sapiens
ccactgcattccagc

SEQ ID NO: 516651 - DNA, 15 bp, Homo sapiens
cactgcattccagcc

SEQ ID NO: 516652 - DNA, 15 bp, Homo sapiens
actgcattccagcct

SEQ ID NO: 516653 - DNA, 15 bp, Homo sapiens
ctgcattccagcctg

SEQ ID NO: 516654 - DNA, 15 bp, Homo sapiens
tgcattccagcctgg

SEQ ID NO: 516655 - DNA, 15 bp, Homo sapiens
gcattccagcctggg

SEQ ID NO: 516656 - DNA, 15 bp, Homo sapiens
cattccagcctgggc

SEQ ID NO: 516657 - DNA, 15 bp, Homo sapiens
attccagcctgggcg

SEQ ID NO: 516658 - DNA, 15 bp, Homo sapiens
ttccagcctgggcga

SEQ ID NO: 516659 - DNA, 15 bp, Homo sapiens
cagcctgggcgacaa

SEQ ID NO: 516660 - DNA, 15 bp, Homo sapiens
agcctgggcgacaag

SEQ ID NO: 516661 - DNA, 15 bp, Homo sapiens
gcctgggcgacaaga

SEQ ID NO: 516662 - DNA, 15 bp, Homo sapiens
cctgggcgacaagag

SEQ ID NO: 516663 - DNA, 15 bp, Homo sapiens
ctgggcgacaagagg

SEQ ID NO: 516664 - DNA, 15 bp, Homo sapiens
tgggcgacaagaggg

SEQ ID NO: 516665 - DNA, 15 bp, Homo sapiens
gggcgacaagaggga

SEQ ID NO: 516666 - DNA, 15 bp, Homo sapiens
ggcgacaagagggag

SEQ ID NO: 516667 - DNA, 15 bp, Homo sapiens
gcgacaagagggaga

SEQ ID NO: 516668 - DNA, 15 bp, Homo sapiens
cgacaagagggagac

SEQ ID NO: 516669 - DNA, 15 bp, Homo sapiens
gacaagagggagact

SEQ ID NO: 516670 - DNA, 15 bp, Homo sapiens
acaagagggagactc

SEQ ID NO: 516671 - DNA, 15 bp, Homo sapiens
caagagggagactca

SEQ ID NO: 516672 - DNA, 15 bp, Homo sapiens
aagagggagactcaa

SEQ ID NO: 516673 - DNA, 15 bp, Homo sapiens
agagggagactcaaa

SEQ ID NO: 516674 - DNA, 15 bp, Homo sapiens
gagggagactcaaaa

SEQ ID NO: 516675 - DNA, 15 bp, Homo sapiens
agggagactcaaaaa

SEQ ID NO: 516676 - DNA, 15 bp, Homo sapiens
gggagactcaaaaaa

SEQ ID NO: 516677 - DNA, 15 bp, Homo sapiens
ggagactcaaaaaaa

SEQ ID NO: 516678 - DNA, 15 bp, Homo sapiens
gagactcaaaaaaaa

SEQ ID NO: 516679 - DNA, 15 bp, Homo sapiens
agactcaaaaaaaaa

SEQ ID NO: 516680 - DNA, 15 bp, Homo sapiens
gactcaaaaaaaaaa

SEQ ID NO: 516681 - DNA, 15 bp, Homo sapiens
actcaaaaaaaaaaa

SEQ ID NO: 516682 - DNA, 15 bp, Homo sapiens
aaaaaaaaaaaagtc

SEQ ID NO: 516683 - DNA, 15 bp, Homo sapiens
aaaaaaaaaaagtcc

SEQ ID NO: 516684 - DNA, 15 bp, Homo sapiens
aaaaaaaaaagtccc

SEQ ID NO: 516685 - DNA, 15 bp, Homo sapiens
aaaaaaaaagtccca

SEQ ID NO: 516686 - DNA, 15 bp, Homo sapiens
aaaaaaaagtcccag

SEQ ID NO: 516687 - DNA, 15 bp, Homo sapiens
aaaaaaagtcccagt

SEQ ID NO: 516688 - DNA, 15 bp, Homo sapiens
aaaaaagtcccagta

SEQ ID NO: 516689 - DNA, 15 bp, Homo sapiens
aaaaagtcccagtat

SEQ ID NO: 516690 - DNA, 15 bp, Homo sapiens
aaaagtcccagtatt

SEQ ID NO: 516691 - DNA, 15 bp, Homo sapiens
aaagtcccagtattt

SEQ ID NO: 516692 - DNA, 15 bp, Homo sapiens
aagtcccagtattta

SEQ ID NO: 516693 - DNA, 15 bp, Homo sapiens
agtcccagtatttac

SEQ ID NO: 516694 - DNA, 15 bp, Homo sapiens
gtcccagtatttact

SEQ ID NO: 516695 - DNA, 15 bp, Homo sapiens
tcccagtatttacta

SEQ ID NO: 516696 - DNA, 15 bp, Homo sapiens
cccagtatttactac

SEQ ID NO: 516697 - DNA, 15 bp, Homo sapiens
ccagtatttactaca

SEQ ID NO: 516698 - DNA, 15 bp, Homo sapiens
cagtatttactacag

SEQ ID NO: 516699 - DNA, 15 bp, Homo sapiens
agtatttactacaga

SEQ ID NO: 516700 - DNA, 15 bp, Homo sapiens
gtatttactacagag

SEQ ID NO: 516701 - DNA, 15 bp, Homo sapiens
tatttactacagaga

SEQ ID NO: 516702 - DNA, 15 bp, Homo sapiens
atttactacagagag

SEQ ID NO: 516703 - DNA, 15 bp, Homo sapiens
tttactacagagagc

SEQ ID NO: 516704 - DNA, 15 bp, Homo sapiens
ttactacagagagct

SEQ ID NO: 516705 - DNA, 15 bp, Homo sapiens
tactacagagagcta

SEQ ID NO: 516706 - DNA, 15 bp, Homo sapiens
actacagagagctaa

SEQ ID NO: 516707 - DNA, 15 bp, Homo sapiens
ctacagagagctaaa

SEQ ID NO: 516708 - DNA, 15 bp, Homo sapiens
tacagagagctaaag

SEQ ID NO: 516709 - DNA, 15 bp, Homo sapiens
acagagagctaaaga

SEQ ID NO: 516710 - DNA, 15 bp, Homo sapiens
cagagagctaaagat

SEQ ID NO: 516711 - DNA, 15 bp, Homo sapiens
agagagctaaagatt

SEQ ID NO: 516712 - DNA, 15 bp, Homo sapiens
gagagctaaagatta

SEQ ID NO: 516713 - DNA, 15 bp, Homo sapiens
agagctaaagattaa

SEQ ID NO: 516714 - DNA, 15 bp, Homo sapiens
gagctaaagattaac

SEQ ID NO: 516715 - DNA, 15 bp, Homo sapiens
agctaaagattaacc

SEQ ID NO: 516716 - DNA, 15 bp, Homo sapiens
gctaaagattaacct

SEQ ID NO: 516717 - DNA, 15 bp, Homo sapiens
ctaaagattaacctt

SEQ ID NO: 516718 - DNA, 15 bp, Homo sapiens
taaagattaaccttt

SEQ ID NO: 516719 - DNA, 15 bp, Homo sapiens
aaagattaaccttta

SEQ ID NO: 516720 - DNA, 15 bp, Homo sapiens
aagattaacctttaa

SEQ ID NO: 516721 - DNA, 15 bp, Homo sapiens
agattaacctttaaa

SEQ ID NO: 516722 - DNA, 15 bp, Homo sapiens
gattaacctttaaag

SEQ ID NO: 516723 - DNA, 15 bp, Homo sapiens
attaacctttaaagc

SEQ ID NO: 516724 - DNA, 15 bp, Homo sapiens
ttaacctttaaagcc

SEQ ID NO: 516725 - DNA, 15 bp, Homo sapiens
taacctttaaagccc

SEQ ID NO: 516726 - DNA, 15 bp, Homo sapiens
aacctttaaagccct

SEQ ID NO: 516727 - DNA, 15 bp, Homo sapiens
acctttaaagccctg

SEQ ID NO: 516728 - DNA, 15 bp, Homo sapiens
cctttaaagccctgg

SEQ ID NO: 516729 - DNA, 15 bp, Homo sapiens
ctttaaagccctggg

SEQ ID NO: 516730 - DNA, 15 bp, Homo sapiens
tttaaagccctgggg

SEQ ID NO: 516731 - DNA, 15 bp, Homo sapiens
ttaaagccctggggc

SEQ ID NO: 516732 - DNA, 15 bp, Homo sapiens
taaagccctggggct

SEQ ID NO: 516733 - DNA, 15 bp, Homo sapiens
aaagccctggggctt

SEQ ID NO: 516734 - DNA, 15 bp, Homo sapiens
aagccctggggcttt

SEQ ID NO: 516735 - DNA, 15 bp, Homo sapiens
agccctggggctttc

SEQ ID NO: 516736 - DNA, 15 bp, Homo sapiens
gccctggggctttca

SEQ ID NO: 516737 - DNA, 15 bp, Homo sapiens
ccctggggctttcaa

SEQ ID NO: 516738 - DNA, 15 bp, Homo sapiens
cctggggctttcaat

SEQ ID NO: 516739 - DNA, 15 bp, Homo sapiens
ctggggctttcaatt

SEQ ID NO: 516740 - DNA, 15 bp, Homo sapiens
tggggctttcaattt

SEQ ID NO: 516741 - DNA, 15 bp, Homo sapiens
ggggctttcaattta

SEQ ID NO: 516742 - DNA, 15 bp, Homo sapiens
gggctttcaatttat

SEQ ID NO: 516743 - DNA, 15 bp, Homo sapiens
ggctttcaatttatc

SEQ ID NO: 516744 - DNA, 15 bp, Homo sapiens
gctttcaatttatct

SEQ ID NO: 516745 - DNA, 15 bp, Homo sapiens
ctttcaatttatctg

SEQ ID NO: 516746 - DNA, 15 bp, Homo sapiens
tttcaatttatctgg

SEQ ID NO: 516747 - DNA, 15 bp, Homo sapiens
ttcaatttatctgga

SEQ ID NO: 516748 - DNA, 15 bp, Homo sapiens
tcaatttatctggat

SEQ ID NO: 516749 - DNA, 15 bp, Homo sapiens
caatttatctggatg

SEQ ID NO: 516750 - DNA, 15 bp, Homo sapiens
aatttatctggatga

SEQ ID NO: 516751 - DNA, 15 bp, Homo sapiens
atttatctggatgag

SEQ ID NO: 516752 - DNA, 15 bp, Homo sapiens
tttatctggatgaga

SEQ ID NO: 516753 - DNA, 15 bp, Homo sapiens
ttatctggatgagaa

SEQ ID NO: 516754 - DNA, 15 bp, Homo sapiens
tatctggatgagaat

SEQ ID NO: 516755 - DNA, 15 bp, Homo sapiens
atctggatgagaatc

SEQ ID NO: 516756 - DNA, 15 bp, Homo sapiens
tctggatgagaatct

SEQ ID NO: 516757 - DNA, 15 bp, Homo sapiens
ctggatgagaatctt

SEQ ID NO: 516758 - DNA, 15 bp, Homo sapiens
tggatgagaatcttt

SEQ ID NO: 516759 - DNA, 15 bp, Homo sapiens
ggatgagaatctttc

SEQ ID NO: 516760 - DNA, 15 bp, Homo sapiens
gatgagaatctttct

SEQ ID NO: 516761 - DNA, 15 bp, Homo sapiens
atgagaatctttctg

SEQ ID NO: 516762 - DNA, 15 bp, Homo sapiens
tgagaatctttctgg

SEQ ID NO: 516763 - DNA, 15 bp, Homo sapiens
gagaatctttctgga

SEQ ID NO: 516764 - DNA, 15 bp, Homo sapiens
agaatctttctggaa

SEQ ID NO: 516765 - DNA, 15 bp, Homo sapiens
gaatctttctggaat

SEQ ID NO: 516766 - DNA, 15 bp, Homo sapiens
aatctttctggaatg

SEQ ID NO: 516767 - DNA, 15 bp, Homo sapiens
atctttctggaatga

SEQ ID NO: 516768 - DNA, 15 bp, Homo sapiens
tctttctggaatgaa

SEQ ID NO: 516769 - DNA, 15 bp, Homo sapiens
ctttctggaatgaac

SEQ ID NO: 516770 - DNA, 15 bp, Homo sapiens
tttctggaatgaact

SEQ ID NO: 516771 - DNA, 15 bp, Homo sapiens
ttctggaatgaactg

SEQ ID NO: 516772 - DNA, 15 bp, Homo sapiens
tctggaatgaactgt

SEQ ID NO: 516773 - DNA, 15 bp, Homo sapiens
ctggaatgaactgta

SEQ ID NO: 516774 - DNA, 15 bp, Homo sapiens
tggaatgaactgtat

SEQ ID NO: 516775 - DNA, 15 bp, Homo sapiens
ggaatgaactgtatg

SEQ ID NO: 516776 - DNA, 15 bp, Homo sapiens
gaatgaactgtatgt

SEQ ID NO: 516777 - DNA, 15 bp, Homo sapiens
aatgaactgtatgtt

SEQ ID NO: 516778 - DNA, 15 bp, Homo sapiens
atgaactgtatgttt

SEQ ID NO: 516779 - DNA, 15 bp, Homo sapiens
tgaactgtatgtttt

SEQ ID NO: 516780 - DNA, 15 bp, Homo sapiens
gaactgtatgttttc

SEQ ID NO: 516781 - DNA, 15 bp, Homo sapiens
aactgtatgttttct

SEQ ID NO: 516782 - DNA, 15 bp, Homo sapiens
actgtatgttttctt

SEQ ID NO: 516783 - DNA, 15 bp, Homo sapiens
ctgtatgttttcttg

SEQ ID NO: 516784 - DNA, 15 bp, Homo sapiens
tgtatgttttcttgt

SEQ ID NO: 516785 - DNA, 15 bp, Homo sapiens
gtatgttttcttgtc

SEQ ID NO: 516786 - DNA, 15 bp, Homo sapiens
tatgttttcttgtca

SEQ ID NO: 516787 - DNA, 15 bp, Homo sapiens
atgttttcttgtcag

SEQ ID NO: 516788 - DNA, 15 bp, Homo sapiens
tgttttcttgtcagc

SEQ ID NO: 516789 - DNA, 15 bp, Homo sapiens
gttttcttgtcagct

SEQ ID NO: 516790 - DNA, 15 bp, Homo sapiens
ttttcttgtcagctt

SEQ ID NO: 516791 - DNA, 15 bp, Homo sapiens
tttcttgtcagcttg

SEQ ID NO: 516792 - DNA, 15 bp, Homo sapiens
ttcttgtcagcttga

SEQ ID NO: 516793 - DNA, 15 bp, Homo sapiens
tcttgtcagcttgag

SEQ ID NO: 516794 - DNA, 15 bp, Homo sapiens
cttgtcagcttgagt

SEQ ID NO: 516795 - DNA, 15 bp, Homo sapiens
ttgtcagcttgagta

SEQ ID NO: 516796 - DNA, 15 bp, Homo sapiens
tgtcagcttgagtaa

SEQ ID NO: 516797 - DNA, 15 bp, Homo sapiens
gtcagcttgagtaac

SEQ ID NO: 516798 - DNA, 15 bp, Homo sapiens
tcagcttgagtaaca

SEQ ID NO: 516799 - DNA, 15 bp, Homo sapiens
cagcttgagtaacaa

SEQ ID NO: 516800 - DNA, 15 bp, Homo sapiens
agcttgagtaacaaa

SEQ ID NO: 516801 - DNA, 15 bp, Homo sapiens
gcttgagtaacaaat

SEQ ID NO: 516802 - DNA, 15 bp, Homo sapiens
cttgagtaacaaatg

SEQ ID NO: 516803 - DNA, 15 bp, Homo sapiens
ttgagtaacaaatgc

SEQ ID NO: 516804 - DNA, 15 bp, Homo sapiens
tgagtaacaaatgct

SEQ ID NO: 516805 - DNA, 15 bp, Homo sapiens
gagtaacaaatgctg

SEQ ID NO: 516806 - DNA, 15 bp, Homo sapiens
agtaacaaatgctga

SEQ ID NO: 516807 - DNA, 15 bp, Homo sapiens
gtaacaaatgctgaa

SEQ ID NO: 516808 - DNA, 15 bp, Homo sapiens
taacaaatgctgaac

SEQ ID NO: 516809 - DNA, 15 bp, Homo sapiens
aacaaatgctgaaca

SEQ ID NO: 516810 - DNA, 15 bp, Homo sapiens
acaaatgctgaacat

SEQ ID NO: 516811 - DNA, 15 bp, Homo sapiens
caaatgctgaacata

SEQ ID NO: 516812 - DNA, 15 bp, Homo sapiens
aaatgctgaacatac

SEQ ID NO: 516813 - DNA, 15 bp, Homo sapiens
aatgctgaacatact

SEQ ID NO: 516814 - DNA, 15 bp, Homo sapiens
atgctgaacatacta

SEQ ID NO: 516815 - DNA, 15 bp, Homo sapiens
tgctgaacatactat

SEQ ID NO: 516816 - DNA, 15 bp, Homo sapiens
gctgaacatactata

SEQ ID NO: 516817 - DNA, 15 bp, Homo sapiens
ctgaacatactatac

SEQ ID NO: 516818 - DNA, 15 bp, Homo sapiens
tgaacatactatact

SEQ ID NO: 516819 - DNA, 15 bp, Homo sapiens
gaacatactatacta

SEQ ID NO: 516820 - DNA, 15 bp, Homo sapiens
aacatactatactat

SEQ ID NO: 516821 - DNA, 15 bp, Homo sapiens
acatactatactatt

SEQ ID NO: 516822 - DNA, 15 bp, Homo sapiens
catactatactatta

SEQ ID NO: 516823 - DNA, 15 bp, Homo sapiens
atactatactattat

SEQ ID NO: 516824 - DNA, 15 bp, Homo sapiens
tactatactattatt

SEQ ID NO: 516825 - DNA, 15 bp, Homo sapiens
actatactattatta

SEQ ID NO: 516826 - DNA, 15 bp, Homo sapiens
ctatactattattac

SEQ ID NO: 516827 - DNA, 15 bp, Homo sapiens
tatactattattaca

SEQ ID NO: 516828 - DNA, 15 bp, Homo sapiens
atactattattacag

SEQ ID NO: 516829 - DNA, 15 bp, Homo sapiens
tactattattacagg

SEQ ID NO: 516830 - DNA, 15 bp, Homo sapiens
actattattacaggg

SEQ ID NO: 516831 - DNA, 15 bp, Homo sapiens
ctattattacaggga

SEQ ID NO: 516832 - DNA, 15 bp, Homo sapiens
tattattacagggac

SEQ ID NO: 516833 - DNA, 15 bp, Homo sapiens
attattacagggact

SEQ ID NO: 516834 - DNA, 15 bp, Homo sapiens
ttattacagggactc

SEQ ID NO: 516835 - DNA, 15 bp, Homo sapiens
tattacagggactca

SEQ ID NO: 516836 - DNA, 15 bp, Homo sapiens
attacagggactcaa

SEQ ID NO: 516837 - DNA, 15 bp, Homo sapiens
ttacagggactcaag

SEQ ID NO: 516838 - DNA, 15 bp, Homo sapiens
tacagggactcaagg

SEQ ID NO: 516839 - DNA, 15 bp, Homo sapiens
acagggactcaaggg

SEQ ID NO: 516840 - DNA, 15 bp, Homo sapiens
cagggactcaagggc

SEQ ID NO: 516841 - DNA, 15 bp, Homo sapiens
agggactcaagggcc

SEQ ID NO: 516842 - DNA, 15 bp, Homo sapiens
gggactcaagggccc

SEQ ID NO: 516843 - DNA, 15 bp, Homo sapiens
ggactcaagggccca

SEQ ID NO: 516844 - DNA, 15 bp, Homo sapiens
gactcaagggcccag

SEQ ID NO: 516845 - DNA, 15 bp, Homo sapiens
actcaagggcccagt

SEQ ID NO: 516846 - DNA, 15 bp, Homo sapiens
ctcaagggcccagtg

SEQ ID NO: 516847 - DNA, 15 bp, Homo sapiens
tcaagggcccagtgt

SEQ ID NO: 516848 - DNA, 15 bp, Homo sapiens
caagggcccagtgtg

SEQ ID NO: 516849 - DNA, 15 bp, Homo sapiens
aagggcccagtgtgg

SEQ ID NO: 516850 - DNA, 15 bp, Homo sapiens
agggcccagtgtggt

SEQ ID NO: 516851 - DNA, 15 bp, Homo sapiens
gggcccagtgtggta

SEQ ID NO: 516852 - DNA, 15 bp, Homo sapiens
ggcccagtgtggtag

SEQ ID NO: 516853 - DNA, 15 bp, Homo sapiens
gcccagtgtggtagc

SEQ ID NO: 516854 - DNA, 15 bp, Homo sapiens
cccagtgtggtagct

SEQ ID NO: 516855 - DNA, 15 bp, Homo sapiens
ccagtgtggtagctc

SEQ ID NO: 516856 - DNA, 15 bp, Homo sapiens
cagtgtggtagctcc

SEQ ID NO: 516857 - DNA, 15 bp, Homo sapiens
agtgtggtagctcct

SEQ ID NO: 516858 - DNA, 15 bp, Homo sapiens
gtgtggtagctcctg

SEQ ID NO: 516859 - DNA, 15 bp, Homo sapiens
tgtggtagctcctgc

SEQ ID NO: 516860 - DNA, 15 bp, Homo sapiens
gtggtagctcctgcc

SEQ ID NO: 516861 - DNA, 15 bp, Homo sapiens
tggtagctcctgccc

SEQ ID NO: 516862 - DNA, 15 bp, Homo sapiens
ggtagctcctgccca

SEQ ID NO: 516863 - DNA, 15 bp, Homo sapiens
gtagctcctgcccat

SEQ ID NO: 516864 - DNA, 15 bp, Homo sapiens
tagctcctgcccata

SEQ ID NO: 516865 - DNA, 15 bp, Homo sapiens
agctcctgcccataa

SEQ ID NO: 516866 - DNA, 15 bp, Homo sapiens
gctcctgcccataac

SEQ ID NO: 516867 - DNA, 15 bp, Homo sapiens
ctcctgcccataacc

SEQ ID NO: 516868 - DNA, 15 bp, Homo sapiens
tcctgcccataaccc

SEQ ID NO: 516869 - DNA, 15 bp, Homo sapiens
cctgcccataacccc

SEQ ID NO: 516870 - DNA, 15 bp, Homo sapiens
ctgcccataacccca

SEQ ID NO: 516871 - DNA, 15 bp, Homo sapiens
tgcccataaccccag

SEQ ID NO: 516872 - DNA, 15 bp, Homo sapiens
gcccataaccccagc

SEQ ID NO: 516873 - DNA, 15 bp, Homo sapiens
cccataaccccagca

SEQ ID NO: 516874 - DNA, 15 bp, Homo sapiens
ccataaccccagcac

SEQ ID NO: 516875 - DNA, 15 bp, Homo sapiens
cataaccccagcact

SEQ ID NO: 516876 - DNA, 15 bp, Homo sapiens
ataaccccagcactt

SEQ ID NO: 516877 - DNA, 15 bp, Homo sapiens
taaccccagcacttt

SEQ ID NO: 516878 - DNA, 15 bp, Homo sapiens
aaccccagcactttg

SEQ ID NO: 516879 - DNA, 15 bp, Homo sapiens
accccagcactttgg

SEQ ID NO: 516880 - DNA, 15 bp, Homo sapiens
ccccagcactttggg

SEQ ID NO: 516881 - DNA, 15 bp, Homo sapiens
aggccaaggcaggaa

SEQ ID NO: 516882 - DNA, 15 bp, Homo sapiens
ggccaaggcaggaag

SEQ ID NO: 516883 - DNA, 15 bp, Homo sapiens
gccaaggcaggaaga

SEQ ID NO: 516884 - DNA, 15 bp, Homo sapiens
ccaaggcaggaagat

SEQ ID NO: 516885 - DNA, 15 bp, Homo sapiens
caaggcaggaagatc

SEQ ID NO: 516886 - DNA, 15 bp, Homo sapiens
aaggcaggaagatca

SEQ ID NO: 516887 - DNA, 15 bp, Homo sapiens
aggcaggaagatcac

SEQ ID NO: 516888 - DNA, 15 bp, Homo sapiens
ggcaggaagatcact

SEQ ID NO: 516889 - DNA, 15 bp, Homo sapiens
gcaggaagatcactt

SEQ ID NO: 516890 - DNA, 15 bp, Homo sapiens
caggaagatcactta

SEQ ID NO: 516891 - DNA, 15 bp, Homo sapiens
aggaagatcacttaa

SEQ ID NO: 516892 - DNA, 15 bp, Homo sapiens
ggaagatcacttaag

SEQ ID NO: 516893 - DNA, 15 bp, Homo sapiens
gaagatcacttaagg

SEQ ID NO: 516894 - DNA, 15 bp, Homo sapiens
aagatcacttaaggc

SEQ ID NO: 516895 - DNA, 15 bp, Homo sapiens
agatcacttaaggcc

SEQ ID NO: 516896 - DNA, 15 bp, Homo sapiens
gatcacttaaggcca

SEQ ID NO: 516897 - DNA, 15 bp, Homo sapiens
atcacttaaggccag

SEQ ID NO: 516898 - DNA, 15 bp, Homo sapiens
tcacttaaggccagg

SEQ ID NO: 516899 - DNA, 15 bp, Homo sapiens
cacttaaggccagga

SEQ ID NO: 516900 - DNA, 15 bp, Homo sapiens
acttaaggccaggag

SEQ ID NO: 516901 - DNA, 15 bp, Homo sapiens
cttaaggccaggagt

SEQ ID NO: 516902 - DNA, 15 bp, Homo sapiens
ttaaggccaggagtt

SEQ ID NO: 516903 - DNA, 15 bp, Homo sapiens
taaggccaggagttc

SEQ ID NO: 516904 - DNA, 15 bp, Homo sapiens
aaggccaggagttcg

SEQ ID NO: 516905 - DNA, 15 bp, Homo sapiens
aggccaggagttcga

SEQ ID NO: 516906 - DNA, 15 bp, Homo sapiens
ggccaggagttcgaa

SEQ ID NO: 516907 - DNA, 15 bp, Homo sapiens
gccaggagttcgaag

SEQ ID NO: 516908 - DNA, 15 bp, Homo sapiens
ccaggagttcgaagc

SEQ ID NO: 516909 - DNA, 15 bp, Homo sapiens
caggagttcgaagct

SEQ ID NO: 516910 - DNA, 15 bp, Homo sapiens
aggagttcgaagctg

SEQ ID NO: 516911 - DNA, 15 bp, Homo sapiens
ggagttcgaagctgt

SEQ ID NO: 516912 - DNA, 15 bp, Homo sapiens
gagttcgaagctgta

SEQ ID NO: 516913 - DNA, 15 bp, Homo sapiens
agttcgaagctgtag

SEQ ID NO: 516914 - DNA, 15 bp, Homo sapiens
gttcgaagctgtagt

SEQ ID NO: 516915 - DNA, 15 bp, Homo sapiens
ttcgaagctgtagtg

SEQ ID NO: 516916 - DNA, 15 bp, Homo sapiens
tcgaagctgtagtga

SEQ ID NO: 516917 - DNA, 15 bp, Homo sapiens
cgaagctgtagtgag

SEQ ID NO: 516918 - DNA, 15 bp, Homo sapiens
gaagctgtagtgagc

SEQ ID NO: 516919 - DNA, 15 bp, Homo sapiens
aagctgtagtgagct

SEQ ID NO: 516920 - DNA, 15 bp, Homo sapiens
agctgtagtgagcta

SEQ ID NO: 516921 - DNA, 15 bp, Homo sapiens
gctgtagtgagctat

SEQ ID NO: 516922 - DNA, 15 bp, Homo sapiens
ctgtagtgagctatg

SEQ ID NO: 516923 - DNA, 15 bp, Homo sapiens
tgtagtgagctatga

SEQ ID NO: 516924 - DNA, 15 bp, Homo sapiens
gtagtgagctatgat

SEQ ID NO: 516925 - DNA, 15 bp, Homo sapiens
tagtgagctatgatc

SEQ ID NO: 516926 - DNA, 15 bp, Homo sapiens
agtgagctatgatca

SEQ ID NO: 516927 - DNA, 15 bp, Homo sapiens
gtgagctatgatcac

SEQ ID NO: 516928 - DNA, 15 bp, Homo sapiens
tgagctatgatcaca

SEQ ID NO: 516929 - DNA, 15 bp, Homo sapiens
gagctatgatcacac

SEQ ID NO: 516930 - DNA, 15 bp, Homo sapiens
agctatgatcacacc

SEQ ID NO: 516931 - DNA, 15 bp, Homo sapiens
gctatgatcacacca

SEQ ID NO: 516932 - DNA, 15 bp, Homo sapiens
ctatgatcacaccac

SEQ ID NO: 516933 - DNA, 15 bp, Homo sapiens
tatgatcacaccact

SEQ ID NO: 516934 - DNA, 15 bp, Homo sapiens
atgatcacaccactg

SEQ ID NO: 516935 - DNA, 15 bp, Homo sapiens
tgatcacaccactgc

SEQ ID NO: 516936 - DNA, 15 bp, Homo sapiens
gatcacaccactgca

SEQ ID NO: 516937 - DNA, 15 bp, Homo sapiens
atcacaccactgcac

SEQ ID NO: 516938 - DNA, 15 bp, Homo sapiens
tcacaccactgcact

SEQ ID NO: 516939 - DNA, 15 bp, Homo sapiens
gcactccagcctaga

SEQ ID NO: 516940 - DNA, 15 bp, Homo sapiens
cactccagcctagat

SEQ ID NO: 516941 - DNA, 15 bp, Homo sapiens
actccagcctagatg

SEQ ID NO: 516942 - DNA, 15 bp, Homo sapiens
ctccagcctagatga

SEQ ID NO: 516943 - DNA, 15 bp, Homo sapiens
tccagcctagatgac

SEQ ID NO: 516944 - DNA, 15 bp, Homo sapiens
ccagcctagatgaca

SEQ ID NO: 516945 - DNA, 15 bp, Homo sapiens
cagcctagatgacag

SEQ ID NO: 516946 - DNA, 15 bp, Homo sapiens
agcctagatgacaga

SEQ ID NO: 516947 - DNA, 15 bp, Homo sapiens
gcctagatgacagag

SEQ ID NO: 516948 - DNA, 15 bp, Homo sapiens
cctagatgacagagt

SEQ ID NO: 516949 - DNA, 15 bp, Homo sapiens
ctagatgacagagtg

SEQ ID NO: 516950 - DNA, 15 bp, Homo sapiens
tagatgacagagtga

SEQ ID NO: 516951 - DNA, 15 bp, Homo sapiens
agatgacagagtgag

SEQ ID NO: 516952 - DNA, 15 bp, Homo sapiens
tgacagagtgagacc

SEQ ID NO: 516953 - DNA, 15 bp, Homo sapiens
gacagagtgagaccc

SEQ ID NO: 516954 - DNA, 15 bp, Homo sapiens
acagagtgagaccct

SEQ ID NO: 516955 - DNA, 15 bp, Homo sapiens
cagagtgagaccctg

SEQ ID NO: 516956 - DNA, 15 bp, Homo sapiens
agagtgagaccctgt

SEQ ID NO: 516957 - DNA, 15 bp, Homo sapiens
gagtgagaccctgtc

SEQ ID NO: 516958 - DNA, 15 bp, Homo sapiens
agtgagaccctgtct

SEQ ID NO: 516959 - DNA, 15 bp, Homo sapiens
gtgagaccctgtctt

SEQ ID NO: 516960 - DNA, 15 bp, Homo sapiens
tgagaccctgtcttt

SEQ ID NO: 516961 - DNA, 15 bp, Homo sapiens
gagaccctgtctttt

SEQ ID NO: 516962 - DNA, 15 bp, Homo sapiens
agaccctgtcttttt

SEQ ID NO: 516963 - DNA, 15 bp, Homo sapiens
gaccctgtctttttt

SEQ ID NO: 516964 - DNA, 15 bp, Homo sapiens
accctgtcttttttt

SEQ ID NO: 516965 - DNA, 15 bp, Homo sapiens
ccctgtctttttttt

SEQ ID NO: 516966 - DNA, 15 bp, Homo sapiens
cctgtcttttttttt

SEQ ID NO: 516967 - DNA, 15 bp, Homo sapiens
ctgtctttttttttt

SEQ ID NO: 516968 - DNA, 15 bp, Homo sapiens
tgtcttttttttttt

SEQ ID NO: 516969 - DNA, 15 bp, Homo sapiens
gtctttttttttttt

SEQ ID NO: 516970 - DNA, 15 bp, Homo sapiens
tttttttgagatggt

SEQ ID NO: 516971 - DNA, 15 bp, Homo sapiens
ttttttgagatggtg

SEQ ID NO: 516972 - DNA, 15 bp, Homo sapiens
tttttgagatggtgt

SEQ ID NO: 516973 - DNA, 15 bp, Homo sapiens
ttttgagatggtgtt

SEQ ID NO: 516974 - DNA, 15 bp, Homo sapiens
tttgagatggtgttt

SEQ ID NO: 516975 - DNA, 15 bp, Homo sapiens
ttgagatggtgtttc

SEQ ID NO: 516976 - DNA, 15 bp, Homo sapiens
tgagatggtgtttca

SEQ ID NO: 516977 - DNA, 15 bp, Homo sapiens
gagatggtgtttcac

SEQ ID NO: 516978 - DNA, 15 bp, Homo sapiens
agatggtgtttcact

SEQ ID NO: 516979 - DNA, 15 bp, Homo sapiens
gatggtgtttcactc

SEQ ID NO: 516980 - DNA, 15 bp, Homo sapiens
atggtgtttcactct

SEQ ID NO: 516981 - DNA, 15 bp, Homo sapiens
tggtgtttcactcta

SEQ ID NO: 516982 - DNA, 15 bp, Homo sapiens
ggtgtttcactctat

SEQ ID NO: 516983 - DNA, 15 bp, Homo sapiens
gtgtttcactctatt

SEQ ID NO: 516984 - DNA, 15 bp, Homo sapiens
tgtttcactctattg

SEQ ID NO: 516985 - DNA, 15 bp, Homo sapiens
gtttcactctattgc

SEQ ID NO: 516986 - DNA, 15 bp, Homo sapiens
tttcactctattgcc

SEQ ID NO: 516987 - DNA, 15 bp, Homo sapiens
ttcactctattgccc

SEQ ID NO: 516988 - DNA, 15 bp, Homo sapiens
tcactctattgccca

SEQ ID NO: 516989 - DNA, 15 bp, Homo sapiens
cactctattgcccag

SEQ ID NO: 516990 - DNA, 15 bp, Homo sapiens
actctattgcccagg

SEQ ID NO: 516991 - DNA, 15 bp, Homo sapiens
ctctattgcccaggc

SEQ ID NO: 516992 - DNA, 15 bp, Homo sapiens
tctattgcccaggct

SEQ ID NO: 516993 - DNA, 15 bp, Homo sapiens
ctattgcccaggctg

SEQ ID NO: 516994 - DNA, 15 bp, Homo sapiens
tattgcccaggctgg

SEQ ID NO: 516995 - DNA, 15 bp, Homo sapiens
attgcccaggctgga

SEQ ID NO: 516996 - DNA, 15 bp, Homo sapiens
ggagtgcagtggtgt

SEQ ID NO: 516997 - DNA, 15 bp, Homo sapiens
gagtgcagtggtgtg

SEQ ID NO: 516998 - DNA, 15 bp, Homo sapiens
agtgcagtggtgtga

SEQ ID NO: 516999 - DNA, 15 bp, Homo sapiens
gtgcagtggtgtgat

SEQ ID NO: 517000 - DNA, 15 bp, Homo sapiens
tgcagtggtgtgatc

SEQ ID NO: 517001 - DNA, 15 bp, Homo sapiens
gcagtggtgtgatct

SEQ ID NO: 517002 - DNA, 15 bp, Homo sapiens
cagtggtgtgatctc

SEQ ID NO: 517003 - DNA, 15 bp, Homo sapiens
agtggtgtgatctcg

SEQ ID NO: 517004 - DNA, 15 bp, Homo sapiens
gtggtgtgatctcgg

SEQ ID NO: 517005 - DNA, 15 bp, Homo sapiens
tggtgtgatctcggc

SEQ ID NO: 517006 - DNA, 15 bp, Homo sapiens
ggtgtgatctcggct

SEQ ID NO: 517007 - DNA, 15 bp, Homo sapiens
gtgtgatctcggctc

SEQ ID NO: 517008 - DNA, 15 bp, Homo sapiens
tgtgatctcggctca

SEQ ID NO: 517009 - DNA, 15 bp, Homo sapiens
gtgatctcggctcac

SEQ ID NO: 517010 - DNA, 15 bp, Homo sapiens
tgatctcggctcact

SEQ ID NO: 517011 - DNA, 15 bp, Homo sapiens
tcggctcactgcaac

SEQ ID NO: 517012 - DNA, 15 bp, Homo sapiens
cggctcactgcaacc

SEQ ID NO: 517013 - DNA, 15 bp, Homo sapiens
tcactgcaacctcca

SEQ ID NO: 517014 - DNA, 15 bp, Homo sapiens
cactgcaacctccac

SEQ ID NO: 517015 - DNA, 15 bp, Homo sapiens
actgcaacctccacc

SEQ ID NO: 517016 - DNA, 15 bp, Homo sapiens
caacctccacctcct

SEQ ID NO: 517017 - DNA, 15 bp, Homo sapiens
aacctccacctcctg

SEQ ID NO: 517018 - DNA, 15 bp, Homo sapiens
acctccacctcctgg

SEQ ID NO: 517019 - DNA, 15 bp, Homo sapiens
cctccacctcctggg

SEQ ID NO: 517020 - DNA, 15 bp, Homo sapiens
ctccacctcctgggt

SEQ ID NO: 517021 - DNA, 15 bp, Homo sapiens
tccacctcctgggtt

SEQ ID NO: 517022 - DNA, 15 bp, Homo sapiens
ccacctcctgggttc

SEQ ID NO: 517023 - DNA, 15 bp, Homo sapiens
cacctcctgggttca

SEQ ID NO: 517024 - DNA, 15 bp, Homo sapiens
acctcctgggttcaa

SEQ ID NO: 517025 - DNA, 15 bp, Homo sapiens
cctcctgggttcaag

SEQ ID NO: 517026 - DNA, 15 bp, Homo sapiens
ctcctgggttcaagc

SEQ ID NO: 517027 - DNA, 15 bp, Homo sapiens
tcctgggttcaagcg

SEQ ID NO: 517028 - DNA, 15 bp, Homo sapiens
cctgggttcaagcga

SEQ ID NO: 517029 - DNA, 15 bp, Homo sapiens
ctgggttcaagcgat

SEQ ID NO: 517030 - DNA, 15 bp, Homo sapiens
tgggttcaagcgatt

SEQ ID NO: 517031 - DNA, 15 bp, Homo sapiens
gggttcaagcgattc

SEQ ID NO: 517032 - DNA, 15 bp, Homo sapiens
cgattctcctgcctc

SEQ ID NO: 517033 - DNA, 15 bp, Homo sapiens
gattctcctgcctca

SEQ ID NO: 517034 - DNA, 15 bp, Homo sapiens
cctgcctcagcctct

SEQ ID NO: 517035 - DNA, 15 bp, Homo sapiens
ctgcctcagcctctt

SEQ ID NO: 517036 - DNA, 15 bp, Homo sapiens
tgcctcagcctcttg

SEQ ID NO: 517037 - DNA, 15 bp, Homo sapiens
gcctcagcctcttga

SEQ ID NO: 517038 - DNA, 15 bp, Homo sapiens
cctcagcctcttgag

SEQ ID NO: 517039 - DNA, 15 bp, Homo sapiens
ctcagcctcttgagt

SEQ ID NO: 517040 - DNA, 15 bp, Homo sapiens
tcagcctcttgagta

SEQ ID NO: 517041 - DNA, 15 bp, Homo sapiens
cagcctcttgagtag

SEQ ID NO: 517042 - DNA, 15 bp, Homo sapiens
agcctcttgagtagc

SEQ ID NO: 517043 - DNA, 15 bp, Homo sapiens
gcctcttgagtagct

SEQ ID NO: 517044 - DNA, 15 bp, Homo sapiens
cctcttgagtagctg

SEQ ID NO: 517045 - DNA, 15 bp, Homo sapiens
ctcttgagtagctgg

SEQ ID NO: 517046 - DNA, 15 bp, Homo sapiens
tcttgagtagctggg

SEQ ID NO: 517047 - DNA, 15 bp, Homo sapiens
cttgagtagctggga

SEQ ID NO: 517048 - DNA, 15 bp, Homo sapiens
ttgagtagctgggat

SEQ ID NO: 517049 - DNA, 15 bp, Homo sapiens
ctgggattacaggca

SEQ ID NO: 517050 - DNA, 15 bp, Homo sapiens
tgggattacaggcat

SEQ ID NO: 517051 - DNA, 15 bp, Homo sapiens
gggattacaggcatc

SEQ ID NO: 517052 - DNA, 15 bp, Homo sapiens
ggattacaggcatct

SEQ ID NO: 517053 - DNA, 15 bp, Homo sapiens
gattacaggcatctg

SEQ ID NO: 517054 - DNA, 15 bp, Homo sapiens
attacaggcatctgc

SEQ ID NO: 517055 - DNA, 15 bp, Homo sapiens
ttacaggcatctgcc

SEQ ID NO: 517056 - DNA, 15 bp, Homo sapiens
tacaggcatctgcca

SEQ ID NO: 517057 - DNA, 15 bp, Homo sapiens
acaggcatctgccac

SEQ ID NO: 517058 - DNA, 15 bp, Homo sapiens
caggcatctgccacc

SEQ ID NO: 517059 - DNA, 15 bp, Homo sapiens
aggcatctgccacca

SEQ ID NO: 517060 - DNA, 15 bp, Homo sapiens
ggcatctgccaccac

SEQ ID NO: 517061 - DNA, 15 bp, Homo sapiens
gcatctgccaccaca

SEQ ID NO: 517062 - DNA, 15 bp, Homo sapiens
catctgccaccacac

SEQ ID NO: 517063 - DNA, 15 bp, Homo sapiens
atctgccaccacacc

SEQ ID NO: 517064 - DNA, 15 bp, Homo sapiens
tctgccaccacaccc

SEQ ID NO: 517065 - DNA, 15 bp, Homo sapiens
ctgccaccacaccca

SEQ ID NO: 517066 - DNA, 15 bp, Homo sapiens
tgccaccacacccag

SEQ ID NO: 517067 - DNA, 15 bp, Homo sapiens
gccaccacacccagc

SEQ ID NO: 517068 - DNA, 15 bp, Homo sapiens
ccaccacacccagct

SEQ ID NO: 517069 - DNA, 15 bp, Homo sapiens
caccacacccagcta

SEQ ID NO: 517070 - DNA, 15 bp, Homo sapiens
accacacccagctaa

SEQ ID NO: 517071 - DNA, 15 bp, Homo sapiens
ccacacccagctaat

SEQ ID NO: 517072 - DNA, 15 bp, Homo sapiens
cacacccagctaatt

SEQ ID NO: 517073 - DNA, 15 bp, Homo sapiens
acacccagctaattt

SEQ ID NO: 517074 - DNA, 15 bp, Homo sapiens
cacccagctaatttt

SEQ ID NO: 517075 - DNA, 15 bp, Homo sapiens
acccagctaattttt

SEQ ID NO: 517076 - DNA, 15 bp, Homo sapiens
tttgtatttttagtc

SEQ ID NO: 517077 - DNA, 15 bp, Homo sapiens
ttgtatttttagtcg

SEQ ID NO: 517078 - DNA, 15 bp, Homo sapiens
tgtatttttagtcga

SEQ ID NO: 517079 - DNA, 15 bp, Homo sapiens
gtatttttagtcgag

SEQ ID NO: 517080 - DNA, 15 bp, Homo sapiens
tatttttagtcgaga

SEQ ID NO: 517081 - DNA, 15 bp, Homo sapiens
atttttagtcgagac

SEQ ID NO: 517082 - DNA, 15 bp, Homo sapiens
tttttagtcgagaca

SEQ ID NO: 517083 - DNA, 15 bp, Homo sapiens
ttttagtcgagacag

SEQ ID NO: 517084 - DNA, 15 bp, Homo sapiens
tttagtcgagacagg

SEQ ID NO: 517085 - DNA, 15 bp, Homo sapiens
ttagtcgagacaggg

SEQ ID NO: 517086 - DNA, 15 bp, Homo sapiens
tagtcgagacagggt

SEQ ID NO: 517087 - DNA, 15 bp, Homo sapiens
agtcgagacagggtt

SEQ ID NO: 517088 - DNA, 15 bp, Homo sapiens
gtcgagacagggttt

SEQ ID NO: 517089 - DNA, 15 bp, Homo sapiens
tcgagacagggtttt

SEQ ID NO: 517090 - DNA, 15 bp, Homo sapiens
cgagacagggttttc

SEQ ID NO: 517091 - DNA, 15 bp, Homo sapiens
gagacagggttttca

SEQ ID NO: 517092 - DNA, 15 bp, Homo sapiens
agacagggttttcac

SEQ ID NO: 517093 - DNA, 15 bp, Homo sapiens
gacagggttttcacc

SEQ ID NO: 517094 - DNA, 15 bp, Homo sapiens
acagggttttcacca

SEQ ID NO: 517095 - DNA, 15 bp, Homo sapiens
cagggttttcaccat

SEQ ID NO: 517096 - DNA, 15 bp, Homo sapiens
agggttttcaccatg

SEQ ID NO: 517097 - DNA, 15 bp, Homo sapiens
gggttttcaccatgt

SEQ ID NO: 517098 - DNA, 15 bp, Homo sapiens
ggttttcaccatgtt

SEQ ID NO: 517099 - DNA, 15 bp, Homo sapiens
gttttcaccatgttg

SEQ ID NO: 517100 - DNA, 15 bp, Homo sapiens
ttttcaccatgttgg

SEQ ID NO: 517101 - DNA, 15 bp, Homo sapiens
tttcaccatgttggc

SEQ ID NO: 517102 - DNA, 15 bp, Homo sapiens
ttcaccatgttggcc

SEQ ID NO: 517103 - DNA, 15 bp, Homo sapiens
tcaccatgttggcca

SEQ ID NO: 517104 - DNA, 15 bp, Homo sapiens
caccatgttggccag

SEQ ID NO: 517105 - DNA, 15 bp, Homo sapiens
accatgttggccagg

SEQ ID NO: 517106 - DNA, 15 bp, Homo sapiens
ccatgttggccaggc

SEQ ID NO: 517107 - DNA, 15 bp, Homo sapiens
catgttggccaggct

SEQ ID NO: 517108 - DNA, 15 bp, Homo sapiens
atgttggccaggctg

SEQ ID NO: 517109 - DNA, 15 bp, Homo sapiens
tgttggccaggctgc

SEQ ID NO: 517110 - DNA, 15 bp, Homo sapiens
gttggccaggctgct

SEQ ID NO: 517111 - DNA, 15 bp, Homo sapiens
ttggccaggctgctc

SEQ ID NO: 517112 - DNA, 15 bp, Homo sapiens
tggccaggctgctct

SEQ ID NO: 517113 - DNA, 15 bp, Homo sapiens
ggccaggctgctctc

SEQ ID NO: 517114 - DNA, 15 bp, Homo sapiens
gccaggctgctctca

SEQ ID NO: 517115 - DNA, 15 bp, Homo sapiens
ccaggctgctctcaa

SEQ ID NO: 517116 - DNA, 15 bp, Homo sapiens
caggctgctctcaaa

SEQ ID NO: 517117 - DNA, 15 bp, Homo sapiens
aggctgctctcaaac

SEQ ID NO: 517118 - DNA, 15 bp, Homo sapiens
ggctgctctcaaact

SEQ ID NO: 517119 - DNA, 15 bp, Homo sapiens
gctgctctcaaactc

SEQ ID NO: 517120 - DNA, 15 bp, Homo sapiens
ctgctctcaaactcc

SEQ ID NO: 517121 - DNA, 15 bp, Homo sapiens
tgctctcaaactcct

SEQ ID NO: 517122 - DNA, 15 bp, Homo sapiens
gctctcaaactcctg

SEQ ID NO: 517123 - DNA, 15 bp, Homo sapiens
ctctcaaactcctga

SEQ ID NO: 517124 - DNA, 15 bp, Homo sapiens
ctcaaactcctgact

SEQ ID NO: 517125 - DNA, 15 bp, Homo sapiens
tcaaactcctgactt

SEQ ID NO: 517126 - DNA, 15 bp, Homo sapiens
caaactcctgacttc

SEQ ID NO: 517127 - DNA, 15 bp, Homo sapiens
aaactcctgacttca

SEQ ID NO: 517128 - DNA, 15 bp, Homo sapiens
aactcctgacttcag

SEQ ID NO: 517129 - DNA, 15 bp, Homo sapiens
actcctgacttcagc

SEQ ID NO: 517130 - DNA, 15 bp, Homo sapiens
ctcctgacttcagct

SEQ ID NO: 517131 - DNA, 15 bp, Homo sapiens
tcctgacttcagcta

SEQ ID NO: 517132 - DNA, 15 bp, Homo sapiens
cctgacttcagctac

SEQ ID NO: 517133 - DNA, 15 bp, Homo sapiens
ctgacttcagctacc

SEQ ID NO: 517134 - DNA, 15 bp, Homo sapiens
tgacttcagctacct

SEQ ID NO: 517135 - DNA, 15 bp, Homo sapiens
gacttcagctacctt

SEQ ID NO: 517136 - DNA, 15 bp, Homo sapiens
acttcagctaccttg

SEQ ID NO: 517137 - DNA, 15 bp, Homo sapiens
cttcagctaccttgg

SEQ ID NO: 517138 - DNA, 15 bp, Homo sapiens
ttcagctaccttggc

SEQ ID NO: 517139 - DNA, 15 bp, Homo sapiens
tcagctaccttggcc

SEQ ID NO: 517140 - DNA, 15 bp, Homo sapiens
cagctaccttggcct

SEQ ID NO: 517141 - DNA, 15 bp, Homo sapiens
agctaccttggcctt

SEQ ID NO: 517142 - DNA, 15 bp, Homo sapiens
gctaccttggcctta

SEQ ID NO: 517143 - DNA, 15 bp, Homo sapiens
ctaccttggccttaa

SEQ ID NO: 517144 - DNA, 15 bp, Homo sapiens
taccttggccttaaa

SEQ ID NO: 517145 - DNA, 15 bp, Homo sapiens
accttggccttaaaa

SEQ ID NO: 517146 - DNA, 15 bp, Homo sapiens
ccttggccttaaaaa

SEQ ID NO: 517147 - DNA, 15 bp, Homo sapiens
cttggccttaaaaag

SEQ ID NO: 517148 - DNA, 15 bp, Homo sapiens
ttggccttaaaaagt

SEQ ID NO: 517149 - DNA, 15 bp, Homo sapiens
tggccttaaaaagtg

SEQ ID NO: 517150 - DNA, 15 bp, Homo sapiens
ggccttaaaaagtgt

SEQ ID NO: 517151 - DNA, 15 bp, Homo sapiens
gccttaaaaagtgtt

SEQ ID NO: 517152 - DNA, 15 bp, Homo sapiens
ccttaaaaagtgttg

SEQ ID NO: 517153 - DNA, 15 bp, Homo sapiens
cttaaaaagtgttgg

SEQ ID NO: 517154 - DNA, 15 bp, Homo sapiens
ttaaaaagtgttggg

SEQ ID NO: 517155 - DNA, 15 bp, Homo sapiens
taaaaagtgttggga

SEQ ID NO: 517156 - DNA, 15 bp, Homo sapiens
aaaaagtgttgggat

SEQ ID NO: 517157 - DNA, 15 bp, Homo sapiens
aaaagtgttgggatt

SEQ ID NO: 517158 - DNA, 15 bp, Homo sapiens
aaagtgttgggatta

SEQ ID NO: 517159 - DNA, 15 bp, Homo sapiens
aagtgttgggattac

SEQ ID NO: 517160 - DNA, 15 bp, Homo sapiens
agtgttgggattaca

SEQ ID NO: 517161 - DNA, 15 bp, Homo sapiens
gtgttgggattacag

SEQ ID NO: 517162 - DNA, 15 bp, Homo sapiens
tgttgggattacagg

SEQ ID NO: 517163 - DNA, 15 bp, Homo sapiens
gttgggattacaggt

SEQ ID NO: 517164 - DNA, 15 bp, Homo sapiens
ttgggattacaggtg

SEQ ID NO: 517165 - DNA, 15 bp, Homo sapiens
gggattacaggtgta

SEQ ID NO: 517166 - DNA, 15 bp, Homo sapiens
ggattacaggtgtaa

SEQ ID NO: 517167 - DNA, 15 bp, Homo sapiens
gattacaggtgtaag

SEQ ID NO: 517168 - DNA, 15 bp, Homo sapiens
attacaggtgtaagc

SEQ ID NO: 517169 - DNA, 15 bp, Homo sapiens
ttacaggtgtaagcc

SEQ ID NO: 517170 - DNA, 15 bp, Homo sapiens
tacaggtgtaagcca

SEQ ID NO: 517171 - DNA, 15 bp, Homo sapiens
acaggtgtaagccac

SEQ ID NO: 517172 - DNA, 15 bp, Homo sapiens
caggtgtaagccacc

SEQ ID NO: 517173 - DNA, 15 bp, Homo sapiens
aggtgtaagccaccg

SEQ ID NO: 517174 - DNA, 15 bp, Homo sapiens
ggtgtaagccaccgc

SEQ ID NO: 517175 - DNA, 15 bp, Homo sapiens
gtgtaagccaccgcg

SEQ ID NO: 517176 - DNA, 15 bp, Homo sapiens
tgtaagccaccgcgc

SEQ ID NO: 517177 - DNA, 15 bp, Homo sapiens
gtaagccaccgcgcc

SEQ ID NO: 517178 - DNA, 15 bp, Homo sapiens
taagccaccgcgcct

SEQ ID NO: 517179 - DNA, 15 bp, Homo sapiens
aagccaccgcgcctg

SEQ ID NO: 517180 - DNA, 15 bp, Homo sapiens
agccaccgcgcctgg

SEQ ID NO: 517181 - DNA, 15 bp, Homo sapiens
gccaccgcgcctggc

SEQ ID NO: 517182 - DNA, 15 bp, Homo sapiens
ccaccgcgcctggct

SEQ ID NO: 517183 - DNA, 15 bp, Homo sapiens
caccgcgcctggctg

SEQ ID NO: 517184 - DNA, 15 bp, Homo sapiens
accgcgcctggctga

SEQ ID NO: 517185 - DNA, 15 bp, Homo sapiens
ccgcgcctggctgac

SEQ ID NO: 517186 - DNA, 15 bp, Homo sapiens
cgcgcctggctgacc

SEQ ID NO: 517187 - DNA, 15 bp, Homo sapiens
gcgcctggctgaccc

SEQ ID NO: 517188 - DNA, 15 bp, Homo sapiens
cgcctggctgaccct

SEQ ID NO: 517189 - DNA, 15 bp, Homo sapiens
gcctggctgaccctg

SEQ ID NO: 517190 - DNA, 15 bp, Homo sapiens
cctggctgaccctgt

SEQ ID NO: 517191 - DNA, 15 bp, Homo sapiens
ctggctgaccctgtc

SEQ ID NO: 517192 - DNA, 15 bp, Homo sapiens
tggctgaccctgtct

SEQ ID NO: 517193 - DNA, 15 bp, Homo sapiens
ggctgaccctgtctc

SEQ ID NO: 517194 - DNA, 15 bp, Homo sapiens
gctgaccctgtctct

SEQ ID NO: 517195 - DNA, 15 bp, Homo sapiens
ctgaccctgtctctt

SEQ ID NO: 517196 - DNA, 15 bp, Homo sapiens
tgaccctgtctctta

SEQ ID NO: 517197 - DNA, 15 bp, Homo sapiens
gaccctgtctcttaa

SEQ ID NO: 517198 - DNA, 15 bp, Homo sapiens
accctgtctcttaac

SEQ ID NO: 517199 - DNA, 15 bp, Homo sapiens
ccctgtctcttaaca

SEQ ID NO: 517200 - DNA, 15 bp, Homo sapiens
cctgtctcttaacaa

SEQ ID NO: 517201 - DNA, 15 bp, Homo sapiens
ctgtctcttaacaaa

SEQ ID NO: 517202 - DNA, 15 bp, Homo sapiens
tgtctcttaacaaaa

SEQ ID NO: 517203 - DNA, 15 bp, Homo sapiens
gtctcttaacaaaaa

SEQ ID NO: 517204 - DNA, 15 bp, Homo sapiens
tctcttaacaaaaaa

SEQ ID NO: 517205 - DNA, 15 bp, Homo sapiens
ctcttaacaaaaaaa

SEQ ID NO: 517206 - DNA, 15 bp, Homo sapiens
tcttaacaaaaaaag

SEQ ID NO: 517207 - DNA, 15 bp, Homo sapiens
cttaacaaaaaaaga

SEQ ID NO: 517208 - DNA, 15 bp, Homo sapiens
ttaacaaaaaaagag

SEQ ID NO: 517209 - DNA, 15 bp, Homo sapiens
taacaaaaaaagaga

SEQ ID NO: 517210 - DNA, 15 bp, Homo sapiens
aacaaaaaaagagag

SEQ ID NO: 517211 - DNA, 15 bp, Homo sapiens
acaaaaaaagagaga

SEQ ID NO: 517212 - DNA, 15 bp, Homo sapiens
caaaaaaagagagat

SEQ ID NO: 517213 - DNA, 15 bp, Homo sapiens
aaaaaaagagagatt

SEQ ID NO: 517214 - DNA, 15 bp, Homo sapiens
aaaaaagagagatta

SEQ ID NO: 517215 - DNA, 15 bp, Homo sapiens
aaaaagagagattaa

SEQ ID NO: 517216 - DNA, 15 bp, Homo sapiens
aaaagagagattaag

SEQ ID NO: 517217 - DNA, 15 bp, Homo sapiens
aaagagagattaagt

SEQ ID NO: 517218 - DNA, 15 bp, Homo sapiens
aagagagattaagtt

SEQ ID NO: 517219 - DNA, 15 bp, Homo sapiens
agagagattaagtta

SEQ ID NO: 517220 - DNA, 15 bp, Homo sapiens
gagagattaagttat

SEQ ID NO: 517221 - DNA, 15 bp, Homo sapiens
agagattaagttatg

SEQ ID NO: 517222 - DNA, 15 bp, Homo sapiens
gagattaagttatga

SEQ ID NO: 517223 - DNA, 15 bp, Homo sapiens
agattaagttatgaa

SEQ ID NO: 517224 - DNA, 15 bp, Homo sapiens
gattaagttatgaat

SEQ ID NO: 517225 - DNA, 15 bp, Homo sapiens
attaagttatgaata

SEQ ID NO: 517226 - DNA, 15 bp, Homo sapiens
ttaagttatgaatat

SEQ ID NO: 517227 - DNA, 15 bp, Homo sapiens
taagttatgaatata

SEQ ID NO: 517228 - DNA, 15 bp, Homo sapiens
aagttatgaatatag

SEQ ID NO: 517229 - DNA, 15 bp, Homo sapiens
agttatgaatatagt

SEQ ID NO: 517230 - DNA, 15 bp, Homo sapiens
gttatgaatatagtt

SEQ ID NO: 517231 - DNA, 15 bp, Homo sapiens
ttatgaatatagttg

SEQ ID NO: 517232 - DNA, 15 bp, Homo sapiens
tatgaatatagttgc

SEQ ID NO: 517233 - DNA, 15 bp, Homo sapiens
atgaatatagttgct

SEQ ID NO: 517234 - DNA, 15 bp, Homo sapiens
tgaatatagttgctt

SEQ ID NO: 517235 - DNA, 15 bp, Homo sapiens
gaatatagttgcttt

SEQ ID NO: 517236 - DNA, 15 bp, Homo sapiens
aatatagttgctttg

SEQ ID NO: 517237 - DNA, 15 bp, Homo sapiens
atatagttgctttga

SEQ ID NO: 517238 - DNA, 15 bp, Homo sapiens
tatagttgctttgag

SEQ ID NO: 517239 - DNA, 15 bp, Homo sapiens
atagttgctttgaga

SEQ ID NO: 517240 - DNA, 15 bp, Homo sapiens
tagttgctttgagaa

SEQ ID NO: 517241 - DNA, 15 bp, Homo sapiens
agttgctttgagaac

SEQ ID NO: 517242 - DNA, 15 bp, Homo sapiens
gttgctttgagaact

SEQ ID NO: 517243 - DNA, 15 bp, Homo sapiens
ttgctttgagaactt

SEQ ID NO: 517244 - DNA, 15 bp, Homo sapiens
tgctttgagaacttg

SEQ ID NO: 517245 - DNA, 15 bp, Homo sapiens
gctttgagaacttgt

SEQ ID NO: 517246 - DNA, 15 bp, Homo sapiens
ctttgagaacttgtg

SEQ ID NO: 517247 - DNA, 15 bp, Homo sapiens
tttgagaacttgtgg

SEQ ID NO: 517248 - DNA, 15 bp, Homo sapiens
ttgagaacttgtgga

SEQ ID NO: 517249 - DNA, 15 bp, Homo sapiens
tgagaacttgtggaa

SEQ ID NO: 517250 - DNA, 15 bp, Homo sapiens
gagaacttgtggaag

SEQ ID NO: 517251 - DNA, 15 bp, Homo sapiens
agaacttgtggaaga

SEQ ID NO: 517252 - DNA, 15 bp, Homo sapiens
gaacttgtggaagaa

SEQ ID NO: 517253 - DNA, 15 bp, Homo sapiens
aacttgtggaagaag

SEQ ID NO: 517254 - DNA, 15 bp, Homo sapiens
acttgtggaagaagg

SEQ ID NO: 517255 - DNA, 15 bp, Homo sapiens
cttgtggaagaagga

SEQ ID NO: 517256 - DNA, 15 bp, Homo sapiens
ttgtggaagaaggaa

SEQ ID NO: 517257 - DNA, 15 bp, Homo sapiens
tgtggaagaaggaaa

SEQ ID NO: 517258 - DNA, 15 bp, Homo sapiens
gtggaagaaggaaat

SEQ ID NO: 517259 - DNA, 15 bp, Homo sapiens
tggaagaaggaaatt

SEQ ID NO: 517260 - DNA, 15 bp, Homo sapiens
ggaagaaggaaatta

SEQ ID NO: 517261 - DNA, 15 bp, Homo sapiens
cctgggcacggtggc

SEQ ID NO: 517262 - DNA, 15 bp, Homo sapiens
ctgggcacggtggct

SEQ ID NO: 517263 - DNA, 15 bp, Homo sapiens
tgggcacggtggctc

SEQ ID NO: 517264 - DNA, 15 bp, Homo sapiens
ggcacggtggctcat

SEQ ID NO: 517265 - DNA, 15 bp, Homo sapiens
gcacggtggctcatg

SEQ ID NO: 517266 - DNA, 15 bp, Homo sapiens
cacggtggctcatgc

SEQ ID NO: 517267 - DNA, 15 bp, Homo sapiens
acggtggctcatgcc

SEQ ID NO: 517268 - DNA, 15 bp, Homo sapiens
cggtggctcatgcct

SEQ ID NO: 517269 - DNA, 15 bp, Homo sapiens
gtaatcccagcactc

SEQ ID NO: 517270 - DNA, 15 bp, Homo sapiens
taatcccagcactct

SEQ ID NO: 517271 - DNA, 15 bp, Homo sapiens
aatcccagcactctg

SEQ ID NO: 517272 - DNA, 15 bp, Homo sapiens
atcccagcactctgg

SEQ ID NO: 517273 - DNA, 15 bp, Homo sapiens
tcccagcactctgga

SEQ ID NO: 517274 - DNA, 15 bp, Homo sapiens
cccagcactctggaa

SEQ ID NO: 517275 - DNA, 15 bp, Homo sapiens
ccagcactctggaag

SEQ ID NO: 517276 - DNA, 15 bp, Homo sapiens
cagcactctggaagg

SEQ ID NO: 517277 - DNA, 15 bp, Homo sapiens
agcactctggaaggc

SEQ ID NO: 517278 - DNA, 15 bp, Homo sapiens
gcactctggaaggcc

SEQ ID NO: 517279 - DNA, 15 bp, Homo sapiens
cactctggaaggcca

SEQ ID NO: 517280 - DNA, 15 bp, Homo sapiens
actctggaaggccaa

SEQ ID NO: 517281 - DNA, 15 bp, Homo sapiens
ctctggaaggccaag

SEQ ID NO: 517282 - DNA, 15 bp, Homo sapiens
tctggaaggccaagg

SEQ ID NO: 517283 - DNA, 15 bp, Homo sapiens
ctggaaggccaaggc

SEQ ID NO: 517284 - DNA, 15 bp, Homo sapiens
tggaaggccaaggca

SEQ ID NO: 517285 - DNA, 15 bp, Homo sapiens
ggaaggccaaggcag

SEQ ID NO: 517286 - DNA, 15 bp, Homo sapiens
gaaggccaaggcaga

SEQ ID NO: 517287 - DNA, 15 bp, Homo sapiens
aaggccaaggcagat

SEQ ID NO: 517288 - DNA, 15 bp, Homo sapiens
aggccaaggcagatg

SEQ ID NO: 517289 - DNA, 15 bp, Homo sapiens
ggccaaggcagatgg

SEQ ID NO: 517290 - DNA, 15 bp, Homo sapiens
gccaaggcagatgga

SEQ ID NO: 517291 - DNA, 15 bp, Homo sapiens
ccaaggcagatggat

SEQ ID NO: 517292 - DNA, 15 bp, Homo sapiens
caaggcagatggatc

SEQ ID NO: 517293 - DNA, 15 bp, Homo sapiens
aaggcagatggatca

SEQ ID NO: 517294 - DNA, 15 bp, Homo sapiens
aggcagatggatcaa

SEQ ID NO: 517295 - DNA, 15 bp, Homo sapiens
ggcagatggatcaat

SEQ ID NO: 517296 - DNA, 15 bp, Homo sapiens
gcagatggatcaatt

SEQ ID NO: 517297 - DNA, 15 bp, Homo sapiens
cagatggatcaattt

SEQ ID NO: 517298 - DNA, 15 bp, Homo sapiens
agatggatcaatttg

SEQ ID NO: 517299 - DNA, 15 bp, Homo sapiens
gatggatcaatttga

SEQ ID NO: 517300 - DNA, 15 bp, Homo sapiens
atggatcaatttgag

SEQ ID NO: 517301 - DNA, 15 bp, Homo sapiens
tggatcaatttgagg

SEQ ID NO: 517302 - DNA, 15 bp, Homo sapiens
ggatcaatttgaggc

SEQ ID NO: 517303 - DNA, 15 bp, Homo sapiens
gatcaatttgaggcc

SEQ ID NO: 517304 - DNA, 15 bp, Homo sapiens
atcaatttgaggcca

SEQ ID NO: 517305 - DNA, 15 bp, Homo sapiens
tcaatttgaggccag

SEQ ID NO: 517306 - DNA, 15 bp, Homo sapiens
caatttgaggccagg

SEQ ID NO: 517307 - DNA, 15 bp, Homo sapiens
aatttgaggccagga

SEQ ID NO: 517308 - DNA, 15 bp, Homo sapiens
atttgaggccaggag

SEQ ID NO: 517309 - DNA, 15 bp, Homo sapiens
tttgaggccaggagt

SEQ ID NO: 517310 - DNA, 15 bp, Homo sapiens
ggccaggagttcaag

SEQ ID NO: 517311 - DNA, 15 bp, Homo sapiens
gccaggagttcaaga

SEQ ID NO: 517312 - DNA, 15 bp, Homo sapiens
ccaggagttcaagac

SEQ ID NO: 517313 - DNA, 15 bp, Homo sapiens
caggagttcaagact

SEQ ID NO: 517314 - DNA, 15 bp, Homo sapiens
aggagttcaagacta

SEQ ID NO: 517315 - DNA, 15 bp, Homo sapiens
ggagttcaagactag

SEQ ID NO: 517316 - DNA, 15 bp, Homo sapiens
gagttcaagactagc

SEQ ID NO: 517317 - DNA, 15 bp, Homo sapiens
agttcaagactagcc

SEQ ID NO: 517318 - DNA, 15 bp, Homo sapiens
gttcaagactagcca

SEQ ID NO: 517319 - DNA, 15 bp, Homo sapiens
ttcaagactagccaa

SEQ ID NO: 517320 - DNA, 15 bp, Homo sapiens
tcaagactagccaac

SEQ ID NO: 517321 - DNA, 15 bp, Homo sapiens
caagactagccaaca

SEQ ID NO: 517322 - DNA, 15 bp, Homo sapiens
aagactagccaacat

SEQ ID NO: 517323 - DNA, 15 bp, Homo sapiens
agactagccaacatg

SEQ ID NO: 517324 - DNA, 15 bp, Homo sapiens
gactagccaacatgg

SEQ ID NO: 517325 - DNA, 15 bp, Homo sapiens
actagccaacatggt

SEQ ID NO: 517326 - DNA, 15 bp, Homo sapiens
aacatggtgaaacta

SEQ ID NO: 517327 - DNA, 15 bp, Homo sapiens
acatggtgaaactaa

SEQ ID NO: 517328 - DNA, 15 bp, Homo sapiens
catggtgaaactaaa

SEQ ID NO: 517329 - DNA, 15 bp, Homo sapiens
atggtgaaactaaaa

SEQ ID NO: 517330 - DNA, 15 bp, Homo sapiens
tggtgaaactaaaaa

SEQ ID NO: 517331 - DNA, 15 bp, Homo sapiens
ggtgaaactaaaaat

SEQ ID NO: 517332 - DNA, 15 bp, Homo sapiens
gtgaaactaaaaata

SEQ ID NO: 517333 - DNA, 15 bp, Homo sapiens
tgaaactaaaaatac

SEQ ID NO: 517334 - DNA, 15 bp, Homo sapiens
gaaactaaaaataca

SEQ ID NO: 517335 - DNA, 15 bp, Homo sapiens
aaactaaaaatacaa

SEQ ID NO: 517336 - DNA, 15 bp, Homo sapiens
aactaaaaatacaaa

SEQ ID NO: 517337 - DNA, 15 bp, Homo sapiens
taaaaatacaaaaaa

SEQ ID NO: 517338 - DNA, 15 bp, Homo sapiens
aaaaatacaaaaaat

SEQ ID NO: 517339 - DNA, 15 bp, Homo sapiens
aaaatacaaaaaatt

SEQ ID NO: 517340 - DNA, 15 bp, Homo sapiens
aaatacaaaaaatta

SEQ ID NO: 517341 - DNA, 15 bp, Homo sapiens
aatacaaaaaattag

SEQ ID NO: 517342 - DNA, 15 bp, Homo sapiens
atacaaaaaattagc

SEQ ID NO: 517343 - DNA, 15 bp, Homo sapiens
tacaaaaaattagct

SEQ ID NO: 517344 - DNA, 15 bp, Homo sapiens
ttagctgggtatggt

SEQ ID NO: 517345 - DNA, 15 bp, Homo sapiens
tagctgggtatggtg

SEQ ID NO: 517346 - DNA, 15 bp, Homo sapiens
agctgggtatggtgg

SEQ ID NO: 517347 - DNA, 15 bp, Homo sapiens
gctgggtatggtggt

SEQ ID NO: 517348 - DNA, 15 bp, Homo sapiens
ctgggtatggtggtg

SEQ ID NO: 517349 - DNA, 15 bp, Homo sapiens
tgggtatggtggtgc

SEQ ID NO: 517350 - DNA, 15 bp, Homo sapiens
gggtatggtggtgca

SEQ ID NO: 517351 - DNA, 15 bp, Homo sapiens
ggtatggtggtgcat

SEQ ID NO: 517352 - DNA, 15 bp, Homo sapiens
gtatggtggtgcatg

SEQ ID NO: 517353 - DNA, 15 bp, Homo sapiens
tatggtggtgcatgt

SEQ ID NO: 517354 - DNA, 15 bp, Homo sapiens
atggtggtgcatgtc

SEQ ID NO: 517355 - DNA, 15 bp, Homo sapiens
tggtggtgcatgtct

SEQ ID NO: 517356 - DNA, 15 bp, Homo sapiens
ggtggtgcatgtctg

SEQ ID NO: 517357 - DNA, 15 bp, Homo sapiens
gtggtgcatgtctgt

SEQ ID NO: 517358 - DNA, 15 bp, Homo sapiens
tggtgcatgtctgta

SEQ ID NO: 517359 - DNA, 15 bp, Homo sapiens
ggtgcatgtctgtaa

SEQ ID NO: 517360 - DNA, 15 bp, Homo sapiens
gtgcatgtctgtaat

SEQ ID NO: 517361 - DNA, 15 bp, Homo sapiens
tgcatgtctgtaatc

SEQ ID NO: 517362 - DNA, 15 bp, Homo sapiens
gcatgtctgtaatcc

SEQ ID NO: 517363 - DNA, 15 bp, Homo sapiens
gtctgtaatcccagc

SEQ ID NO: 517364 - DNA, 15 bp, Homo sapiens
tctgtaatcccagct

SEQ ID NO: 517365 - DNA, 15 bp, Homo sapiens
aatcccagctactcg

SEQ ID NO: 517366 - DNA, 15 bp, Homo sapiens
atcccagctactcgg

SEQ ID NO: 517367 - DNA, 15 bp, Homo sapiens
ggaggctgaggcacg

SEQ ID NO: 517368 - DNA, 15 bp, Homo sapiens
gaggctgaggcacga

SEQ ID NO: 517369 - DNA, 15 bp, Homo sapiens
aggctgaggcacgag

SEQ ID NO: 517370 - DNA, 15 bp, Homo sapiens
ggctgaggcacgaga

SEQ ID NO: 517371 - DNA, 15 bp, Homo sapiens
gctgaggcacgagaa

SEQ ID NO: 517372 - DNA, 15 bp, Homo sapiens
ctgaggcacgagaat

SEQ ID NO: 517373 - DNA, 15 bp, Homo sapiens
tgaggcacgagaatt

SEQ ID NO: 517374 - DNA, 15 bp, Homo sapiens
gaggcacgagaattg

SEQ ID NO: 517375 - DNA, 15 bp, Homo sapiens
aggcacgagaattgc

SEQ ID NO: 517376 - DNA, 15 bp, Homo sapiens
ggcacgagaattgct

SEQ ID NO: 517377 - DNA, 15 bp, Homo sapiens
gcacgagaattgctt

SEQ ID NO: 517378 - DNA, 15 bp, Homo sapiens
cacgagaattgcttg

SEQ ID NO: 517379 - DNA, 15 bp, Homo sapiens
acgagaattgcttga

SEQ ID NO: 517380 - DNA, 15 bp, Homo sapiens
cgagaattgcttgag

SEQ ID NO: 517381 - DNA, 15 bp, Homo sapiens
gagaattgcttgagc

SEQ ID NO: 517382 - DNA, 15 bp, Homo sapiens
agaattgcttgagcc

SEQ ID NO: 517383 - DNA, 15 bp, Homo sapiens
gaattgcttgagcct

SEQ ID NO: 517384 - DNA, 15 bp, Homo sapiens
aattgcttgagccta

SEQ ID NO: 517385 - DNA, 15 bp, Homo sapiens
attgcttgagcctag

SEQ ID NO: 517386 - DNA, 15 bp, Homo sapiens
ttgcttgagcctagg

SEQ ID NO: 517387 - DNA, 15 bp, Homo sapiens
tgcttgagcctagga

SEQ ID NO: 517388 - DNA, 15 bp, Homo sapiens
gcttgagcctaggag

SEQ ID NO: 517389 - DNA, 15 bp, Homo sapiens
cttgagcctaggagg

SEQ ID NO: 517390 - DNA, 15 bp, Homo sapiens
ttgagcctaggaggt

SEQ ID NO: 517391 - DNA, 15 bp, Homo sapiens
tgagcctaggaggtg

SEQ ID NO: 517392 - DNA, 15 bp, Homo sapiens
gagcctaggaggtgg

SEQ ID NO: 517393 - DNA, 15 bp, Homo sapiens
agcctaggaggtgga

SEQ ID NO: 517394 - DNA, 15 bp, Homo sapiens
gcctaggaggtggag

SEQ ID NO: 517395 - DNA, 15 bp, Homo sapiens
cctaggaggtggagg

SEQ ID NO: 517396 - DNA, 15 bp, Homo sapiens
ctaggaggtggaggt

SEQ ID NO: 517397 - DNA, 15 bp, Homo sapiens
taggaggtggaggtt

SEQ ID NO: 517398 - DNA, 15 bp, Homo sapiens
aggaggtggaggttg

SEQ ID NO: 517399 - DNA, 15 bp, Homo sapiens
ggaggtggaggttgt

SEQ ID NO: 517400 - DNA, 15 bp, Homo sapiens
gaggtggaggttgta

SEQ ID NO: 517401 - DNA, 15 bp, Homo sapiens
aggtggaggttgtag

SEQ ID NO: 517402 - DNA, 15 bp, Homo sapiens
ggtggaggttgtagt

SEQ ID NO: 517403 - DNA, 15 bp, Homo sapiens
gtggaggttgtagtg

SEQ ID NO: 517404 - DNA, 15 bp, Homo sapiens
tggaggttgtagtga

SEQ ID NO: 517405 - DNA, 15 bp, Homo sapiens
ggaggttgtagtgag

SEQ ID NO: 517406 - DNA, 15 bp, Homo sapiens
gaggttgtagtgagc

SEQ ID NO: 517407 - DNA, 15 bp, Homo sapiens
aggttgtagtgagct

SEQ ID NO: 517408 - DNA, 15 bp, Homo sapiens
ggttgtagtgagctg

SEQ ID NO: 517409 - DNA, 15 bp, Homo sapiens
gttgtagtgagctga

SEQ ID NO: 517410 - DNA, 15 bp, Homo sapiens
ttgtagtgagctgag

SEQ ID NO: 517411 - DNA, 15 bp, Homo sapiens
tgtagtgagctgaga

SEQ ID NO: 517412 - DNA, 15 bp, Homo sapiens
gtagtgagctgagat

SEQ ID NO: 517413 - DNA, 15 bp, Homo sapiens
tagtgagctgagatt

SEQ ID NO: 517414 - DNA, 15 bp, Homo sapiens
gtgagctgagattgt

SEQ ID NO: 517415 - DNA, 15 bp, Homo sapiens
tgagctgagattgtg

SEQ ID NO: 517416 - DNA, 15 bp, Homo sapiens
gagctgagattgtgt

SEQ ID NO: 517417 - DNA, 15 bp, Homo sapiens
agctgagattgtgtc

SEQ ID NO: 517418 - DNA, 15 bp, Homo sapiens
gctgagattgtgtca

SEQ ID NO: 517419 - DNA, 15 bp, Homo sapiens
ctgagattgtgtcac

SEQ ID NO: 517420 - DNA, 15 bp, Homo sapiens
tgagattgtgtcact

SEQ ID NO: 517421 - DNA, 15 bp, Homo sapiens
gagattgtgtcacta

SEQ ID NO: 517422 - DNA, 15 bp, Homo sapiens
agattgtgtcactac

SEQ ID NO: 517423 - DNA, 15 bp, Homo sapiens
gattgtgtcactacc

SEQ ID NO: 517424 - DNA, 15 bp, Homo sapiens
attgtgtcactaccc

SEQ ID NO: 517425 - DNA, 15 bp, Homo sapiens
ttgtgtcactaccct

SEQ ID NO: 517426 - DNA, 15 bp, Homo sapiens
tgtgtcactaccctc

SEQ ID NO: 517427 - DNA, 15 bp, Homo sapiens
gtgtcactaccctcc

SEQ ID NO: 517428 - DNA, 15 bp, Homo sapiens
tgtcactaccctcca

SEQ ID NO: 517429 - DNA, 15 bp, Homo sapiens
gtcactaccctccag

SEQ ID NO: 517430 - DNA, 15 bp, Homo sapiens
tcactaccctccagc

SEQ ID NO: 517431 - DNA, 15 bp, Homo sapiens
cactaccctccagcc

SEQ ID NO: 517432 - DNA, 15 bp, Homo sapiens
actaccctccagcct

SEQ ID NO: 517433 - DNA, 15 bp, Homo sapiens
ctaccctccagcctg

SEQ ID NO: 517434 - DNA, 15 bp, Homo sapiens
taccctccagcctgg

SEQ ID NO: 517435 - DNA, 15 bp, Homo sapiens
accctccagcctggg

SEQ ID NO: 517436 - DNA, 15 bp, Homo sapiens
ccctccagcctgggt

SEQ ID NO: 517437 - DNA, 15 bp, Homo sapiens
cctccagcctgggtg

SEQ ID NO: 517438 - DNA, 15 bp, Homo sapiens
ctccagcctgggtga

SEQ ID NO: 517439 - DNA, 15 bp, Homo sapiens
tccagcctgggtgat

SEQ ID NO: 517440 - DNA, 15 bp, Homo sapiens
ccagcctgggtgata

SEQ ID NO: 517441 - DNA, 15 bp, Homo sapiens
cagcctgggtgatag

SEQ ID NO: 517442 - DNA, 15 bp, Homo sapiens
agcctgggtgataga

SEQ ID NO: 517443 - DNA, 15 bp, Homo sapiens
cctgggtgatagagt

SEQ ID NO: 517444 - DNA, 15 bp, Homo sapiens
ctgggtgatagagtg

SEQ ID NO: 517445 - DNA, 15 bp, Homo sapiens
tgggtgatagagtga

SEQ ID NO: 517446 - DNA, 15 bp, Homo sapiens
gggtgatagagtgag

SEQ ID NO: 517447 - DNA, 15 bp, Homo sapiens
ggtgatagagtgagt

SEQ ID NO: 517448 - DNA, 15 bp, Homo sapiens
gtgatagagtgagtc

SEQ ID NO: 517449 - DNA, 15 bp, Homo sapiens
tgatagagtgagtct

SEQ ID NO: 517450 - DNA, 15 bp, Homo sapiens
gatagagtgagtctg

SEQ ID NO: 517451 - DNA, 15 bp, Homo sapiens
atagagtgagtctgt

SEQ ID NO: 517452 - DNA, 15 bp, Homo sapiens
tagagtgagtctgtc

SEQ ID NO: 517453 - DNA, 15 bp, Homo sapiens
agagtgagtctgtct

SEQ ID NO: 517454 - DNA, 15 bp, Homo sapiens
gagtgagtctgtctc

SEQ ID NO: 517455 - DNA, 15 bp, Homo sapiens
agtgagtctgtctca

SEQ ID NO: 517456 - DNA, 15 bp, Homo sapiens
gtgagtctgtctcaa

SEQ ID NO: 517457 - DNA, 15 bp, Homo sapiens
tgagtctgtctcaaa

SEQ ID NO: 517458 - DNA, 15 bp, Homo sapiens
gagtctgtctcaaaa

SEQ ID NO: 517459 - DNA, 15 bp, Homo sapiens
agtctgtctcaaaaa

SEQ ID NO: 517460 - DNA, 15 bp, Homo sapiens
gtctgtctcaaaaaa

SEQ ID NO: 517461 - DNA, 15 bp, Homo sapiens
tctgtctcaaaaaaa

SEQ ID NO: 517462 - DNA, 15 bp, Homo sapiens
aaaaaaaaaaaaaat

SEQ ID NO: 517463 - DNA, 15 bp, Homo sapiens
aaaaaaaaaaaaatt

SEQ ID NO: 517464 - DNA, 15 bp, Homo sapiens
aaaaaaaaaaaatta

SEQ ID NO: 517465 - DNA, 15 bp, Homo sapiens
aaaaaaaaaaattaa

SEQ ID NO: 517466 - DNA, 15 bp, Homo sapiens
aaaaaaaaaattaag

SEQ ID NO: 517467 - DNA, 15 bp, Homo sapiens
aaaaaaaaattaaga

SEQ ID NO: 517468 - DNA, 15 bp, Homo sapiens
aaaaaaaattaagaa

SEQ ID NO: 517469 - DNA, 15 bp, Homo sapiens
aaaaaaattaagaaa

SEQ ID NO: 517470 - DNA, 15 bp, Homo sapiens
aaaaaattaagaaaa

SEQ ID NO: 517471 - DNA, 15 bp, Homo sapiens
aaaaattaagaaaat

SEQ ID NO: 517472 - DNA, 15 bp, Homo sapiens
aaaattaagaaaata

SEQ ID NO: 517473 - DNA, 15 bp, Homo sapiens
aaattaagaaaataa

SEQ ID NO: 517474 - DNA, 15 bp, Homo sapiens
aattaagaaaataaa

SEQ ID NO: 517475 - DNA, 15 bp, Homo sapiens
attaagaaaataaaa

SEQ ID NO: 517476 - DNA, 15 bp, Homo sapiens
ttaagaaaataaaaa

SEQ ID NO: 517477 - DNA, 15 bp, Homo sapiens
taagaaaataaaaat

SEQ ID NO: 517478 - DNA, 15 bp, Homo sapiens
aagaaaataaaaatc

SEQ ID NO: 517479 - DNA, 15 bp, Homo sapiens
agaaaataaaaatcg

SEQ ID NO: 517480 - DNA, 15 bp, Homo sapiens
gaaaataaaaatcgt

SEQ ID NO: 517481 - DNA, 15 bp, Homo sapiens
aaaataaaaatcgtc

SEQ ID NO: 517482 - DNA, 15 bp, Homo sapiens
aaataaaaatcgtcg

SEQ ID NO: 517483 - DNA, 15 bp, Homo sapiens
aataaaaatcgtcgg

SEQ ID NO: 517484 - DNA, 15 bp, Homo sapiens
ataaaaatcgtcggc

SEQ ID NO: 517485 - DNA, 15 bp, Homo sapiens
taaaaatcgtcggcc

SEQ ID NO: 517486 - DNA, 15 bp, Homo sapiens
aaaaatcgtcggcca

SEQ ID NO: 517487 - DNA, 15 bp, Homo sapiens
aaaatcgtcggccag

SEQ ID NO: 517488 - DNA, 15 bp, Homo sapiens
aaatcgtcggccagg

SEQ ID NO: 517489 - DNA, 15 bp, Homo sapiens
aatcgtcggccaggc

SEQ ID NO: 517490 - DNA, 15 bp, Homo sapiens
atcgtcggccaggca

SEQ ID NO: 517491 - DNA, 15 bp, Homo sapiens
tcgtcggccaggcat

SEQ ID NO: 517492 - DNA, 15 bp, Homo sapiens
cgtcggccaggcatg

SEQ ID NO: 517493 - DNA, 15 bp, Homo sapiens
gtcggccaggcatgg

SEQ ID NO: 517494 - DNA, 15 bp, Homo sapiens
tcggccaggcatggt

SEQ ID NO: 517495 - DNA, 15 bp, Homo sapiens
cggccaggcatggtg

SEQ ID NO: 517496 - DNA, 15 bp, Homo sapiens
ggccaggcatggtgg

SEQ ID NO: 517497 - DNA, 15 bp, Homo sapiens
gccaggcatggtggc

SEQ ID NO: 517498 - DNA, 15 bp, Homo sapiens
ccaggcatggtggct

SEQ ID NO: 517499 - DNA, 15 bp, Homo sapiens
caggcatggtggctc

SEQ ID NO: 517500 - DNA, 15 bp, Homo sapiens
aggcatggtggctca

SEQ ID NO: 517501 - DNA, 15 bp, Homo sapiens
gcactttgggaggca

SEQ ID NO: 517502 - DNA, 15 bp, Homo sapiens
cactttgggaggcag

SEQ ID NO: 517503 - DNA, 15 bp, Homo sapiens
actttgggaggcaga

SEQ ID NO: 517504 - DNA, 15 bp, Homo sapiens
ctttgggaggcagag

SEQ ID NO: 517505 - DNA, 15 bp, Homo sapiens
tttgggaggcagagg

SEQ ID NO: 517506 - DNA, 15 bp, Homo sapiens
ttgggaggcagaggc

SEQ ID NO: 517507 - DNA, 15 bp, Homo sapiens
tgggaggcagaggcg

SEQ ID NO: 517508 - DNA, 15 bp, Homo sapiens
gggaggcagaggcgg

SEQ ID NO: 517509 - DNA, 15 bp, Homo sapiens
ggaggcagaggcggg

SEQ ID NO: 517510 - DNA, 15 bp, Homo sapiens
gaggcagaggcgggc

SEQ ID NO: 517511 - DNA, 15 bp, Homo sapiens
aggcagaggcgggca

SEQ ID NO: 517512 - DNA, 15 bp, Homo sapiens
ggcagaggcgggcag

SEQ ID NO: 517513 - DNA, 15 bp, Homo sapiens
gcagaggcgggcaga

SEQ ID NO: 517514 - DNA, 15 bp, Homo sapiens
cagaggcgggcagat

SEQ ID NO: 517515 - DNA, 15 bp, Homo sapiens
agaggcgggcagatc

SEQ ID NO: 517516 - DNA, 15 bp, Homo sapiens
gaggcgggcagatca

SEQ ID NO: 517517 - DNA, 15 bp, Homo sapiens
aggcgggcagatcac

SEQ ID NO: 517518 - DNA, 15 bp, Homo sapiens
ggcgggcagatcacg

SEQ ID NO: 517519 - DNA, 15 bp, Homo sapiens
gcgggcagatcacga

SEQ ID NO: 517520 - DNA, 15 bp, Homo sapiens
cgggcagatcacgag

SEQ ID NO: 517521 - DNA, 15 bp, Homo sapiens
gggcagatcacgagg

SEQ ID NO: 517522 - DNA, 15 bp, Homo sapiens
cgaggtcaggagatg

SEQ ID NO: 517523 - DNA, 15 bp, Homo sapiens
gaggtcaggagatgg

SEQ ID NO: 517524 - DNA, 15 bp, Homo sapiens
aggtcaggagatgga

SEQ ID NO: 517525 - DNA, 15 bp, Homo sapiens
ggtcaggagatggag

SEQ ID NO: 517526 - DNA, 15 bp, Homo sapiens
gtcaggagatggaga

SEQ ID NO: 517527 - DNA, 15 bp, Homo sapiens
tcaggagatggagac

SEQ ID NO: 517528 - DNA, 15 bp, Homo sapiens
caggagatggagacc

SEQ ID NO: 517529 - DNA, 15 bp, Homo sapiens
aggagatggagacca

SEQ ID NO: 517530 - DNA, 15 bp, Homo sapiens
ggagatggagaccat

SEQ ID NO: 517531 - DNA, 15 bp, Homo sapiens
gagatggagaccatc

SEQ ID NO: 517532 - DNA, 15 bp, Homo sapiens
agatggagaccatcc

SEQ ID NO: 517533 - DNA, 15 bp, Homo sapiens
gatggagaccatcct

SEQ ID NO: 517534 - DNA, 15 bp, Homo sapiens
atggagaccatcctg

SEQ ID NO: 517535 - DNA, 15 bp, Homo sapiens
tggagaccatcctgg

SEQ ID NO: 517536 - DNA, 15 bp, Homo sapiens
ggagaccatcctggc

SEQ ID NO: 517537 - DNA, 15 bp, Homo sapiens
atggtgaaaccccgt

SEQ ID NO: 517538 - DNA, 15 bp, Homo sapiens
tggtgaaaccccgtc

SEQ ID NO: 517539 - DNA, 15 bp, Homo sapiens
ggtgaaaccccgtct

SEQ ID NO: 517540 - DNA, 15 bp, Homo sapiens
ctctactaaaaataa

SEQ ID NO: 517541 - DNA, 15 bp, Homo sapiens
tctactaaaaataaa

SEQ ID NO: 517542 - DNA, 15 bp, Homo sapiens
ctactaaaaataaaa

SEQ ID NO: 517543 - DNA, 15 bp, Homo sapiens
tactaaaaataaaaa

SEQ ID NO: 517544 - DNA, 15 bp, Homo sapiens
actaaaaataaaaaa

SEQ ID NO: 517545 - DNA, 15 bp, Homo sapiens
ctaaaaataaaaaaa

SEQ ID NO: 517546 - DNA, 15 bp, Homo sapiens
taaaaataaaaaaat

SEQ ID NO: 517547 - DNA, 15 bp, Homo sapiens
aaaaataaaaaaatt

SEQ ID NO: 517548 - DNA, 15 bp, Homo sapiens
aaaataaaaaaatta

SEQ ID NO: 517549 - DNA, 15 bp, Homo sapiens
aaataaaaaaattag

SEQ ID NO: 517550 - DNA, 15 bp, Homo sapiens
aataaaaaaattagc

SEQ ID NO: 517551 - DNA, 15 bp, Homo sapiens
ataaaaaaattagcc

SEQ ID NO: 517552 - DNA, 15 bp, Homo sapiens
taaaaaaattagccg

SEQ ID NO: 517553 - DNA, 15 bp, Homo sapiens
aaaattagccgggca

SEQ ID NO: 517554 - DNA, 15 bp, Homo sapiens
aaattagccgggcat

SEQ ID NO: 517555 - DNA, 15 bp, Homo sapiens
aattagccgggcatg

SEQ ID NO: 517556 - DNA, 15 bp, Homo sapiens
attagccgggcatgg

SEQ ID NO: 517557 - DNA, 15 bp, Homo sapiens
ttagccgggcatggt

SEQ ID NO: 517558 - DNA, 15 bp, Homo sapiens
tagccgggcatggtg

SEQ ID NO: 517559 - DNA, 15 bp, Homo sapiens
agccgggcatggtgc

SEQ ID NO: 517560 - DNA, 15 bp, Homo sapiens
gccgggcatggtgct

SEQ ID NO: 517561 - DNA, 15 bp, Homo sapiens
ccgggcatggtgctg

SEQ ID NO: 517562 - DNA, 15 bp, Homo sapiens
cgggcatggtgctgg

SEQ ID NO: 517563 - DNA, 15 bp, Homo sapiens
gggcatggtgctggg

SEQ ID NO: 517564 - DNA, 15 bp, Homo sapiens
ggcatggtgctgggc

SEQ ID NO: 517565 - DNA, 15 bp, Homo sapiens
gcatggtgctgggcg

SEQ ID NO: 517566 - DNA, 15 bp, Homo sapiens
catggtgctgggcgc

SEQ ID NO: 517567 - DNA, 15 bp, Homo sapiens
atggtgctgggcgcc

SEQ ID NO: 517568 - DNA, 15 bp, Homo sapiens
tggtgctgggcgcct

SEQ ID NO: 517569 - DNA, 15 bp, Homo sapiens
ggtgctgggcgcctg

SEQ ID NO: 517570 - DNA, 15 bp, Homo sapiens
gtgctgggcgcctgt

SEQ ID NO: 517571 - DNA, 15 bp, Homo sapiens
tgctgggcgcctgta

SEQ ID NO: 517572 - DNA, 15 bp, Homo sapiens
gctgggcgcctgtag

SEQ ID NO: 517573 - DNA, 15 bp, Homo sapiens
ctgggcgcctgtagt

SEQ ID NO: 517574 - DNA, 15 bp, Homo sapiens
ggcgcctgtagtccc

SEQ ID NO: 517575 - DNA, 15 bp, Homo sapiens
ctgtagtcccagctg

SEQ ID NO: 517576 - DNA, 15 bp, Homo sapiens
tgtagtcccagctgc

SEQ ID NO: 517577 - DNA, 15 bp, Homo sapiens
gtagtcccagctgct

SEQ ID NO: 517578 - DNA, 15 bp, Homo sapiens
tagtcccagctgctc

SEQ ID NO: 517579 - DNA, 15 bp, Homo sapiens
agtcccagctgctcg

SEQ ID NO: 517580 - DNA, 15 bp, Homo sapiens
gtcccagctgctcgg

SEQ ID NO: 517581 - DNA, 15 bp, Homo sapiens
tcccagctgctcggg

SEQ ID NO: 517582 - DNA, 15 bp, Homo sapiens
cccagctgctcggga

SEQ ID NO: 517583 - DNA, 15 bp, Homo sapiens
ccagctgctcgggag

SEQ ID NO: 517584 - DNA, 15 bp, Homo sapiens
cagctgctcgggagg

SEQ ID NO: 517585 - DNA, 15 bp, Homo sapiens
agctgctcgggaggc

SEQ ID NO: 517586 - DNA, 15 bp, Homo sapiens
gctgctcgggaggct

SEQ ID NO: 517587 - DNA, 15 bp, Homo sapiens
ctgctcgggaggctg

SEQ ID NO: 517588 - DNA, 15 bp, Homo sapiens
tgctcgggaggctga

SEQ ID NO: 517589 - DNA, 15 bp, Homo sapiens
gctcgggaggctgag

SEQ ID NO: 517590 - DNA, 15 bp, Homo sapiens
gtgaacccaggaggt

SEQ ID NO: 517591 - DNA, 15 bp, Homo sapiens
tgaacccaggaggtg

SEQ ID NO: 517592 - DNA, 15 bp, Homo sapiens
gaacccaggaggtgg

SEQ ID NO: 517593 - DNA, 15 bp, Homo sapiens
aacccaggaggtgga

SEQ ID NO: 517594 - DNA, 15 bp, Homo sapiens
acccaggaggtggag

SEQ ID NO: 517595 - DNA, 15 bp, Homo sapiens
cccaggaggtggagc

SEQ ID NO: 517596 - DNA, 15 bp, Homo sapiens
ccaggaggtggagct

SEQ ID NO: 517597 - DNA, 15 bp, Homo sapiens
caggaggtggagctt

SEQ ID NO: 517598 - DNA, 15 bp, Homo sapiens
aggaggtggagcttg

SEQ ID NO: 517599 - DNA, 15 bp, Homo sapiens
ggaggtggagcttgc

SEQ ID NO: 517600 - DNA, 15 bp, Homo sapiens
gaggtggagcttgca

SEQ ID NO: 517601 - DNA, 15 bp, Homo sapiens
aggtggagcttgcag

SEQ ID NO: 517602 - DNA, 15 bp, Homo sapiens
ggtggagcttgcagt

SEQ ID NO: 517603 - DNA, 15 bp, Homo sapiens
gtggagcttgcagtg

SEQ ID NO: 517604 - DNA, 15 bp, Homo sapiens
tggagcttgcagtga

SEQ ID NO: 517605 - DNA, 15 bp, Homo sapiens
gcttgcagtgagccg

SEQ ID NO: 517606 - DNA, 15 bp, Homo sapiens
cttgcagtgagccga

SEQ ID NO: 517607 - DNA, 15 bp, Homo sapiens
gtgagccgagatcgt

SEQ ID NO: 517608 - DNA, 15 bp, Homo sapiens
tgagccgagatcgtg

SEQ ID NO: 517609 - DNA, 15 bp, Homo sapiens
gagccgagatcgtgc

SEQ ID NO: 517610 - DNA, 15 bp, Homo sapiens
agccgagatcgtgcc

SEQ ID NO: 517611 - DNA, 15 bp, Homo sapiens
gccgagatcgtgcca

SEQ ID NO: 517612 - DNA, 15 bp, Homo sapiens
ccgagatcgtgccac

SEQ ID NO: 517613 - DNA, 15 bp, Homo sapiens
cgagatcgtgccact

SEQ ID NO: 517614 - DNA, 15 bp, Homo sapiens
agatcgtgccactgc

SEQ ID NO: 517615 - DNA, 15 bp, Homo sapiens
cgtgccactgcactc

SEQ ID NO: 517616 - DNA, 15 bp, Homo sapiens
cactccagcctggga

SEQ ID NO: 517617 - DNA, 15 bp, Homo sapiens
actccagcctgggag

SEQ ID NO: 517618 - DNA, 15 bp, Homo sapiens
ctccagcctgggaga

SEQ ID NO: 517619 - DNA, 15 bp, Homo sapiens
tccagcctgggagac

SEQ ID NO: 517620 - DNA, 15 bp, Homo sapiens
ccagcctgggagaca

SEQ ID NO: 517621 - DNA, 15 bp, Homo sapiens
cagcctgggagacag

SEQ ID NO: 517622 - DNA, 15 bp, Homo sapiens
agcctgggagacaga

SEQ ID NO: 517623 - DNA, 15 bp, Homo sapiens
gcctgggagacagag

SEQ ID NO: 517624 - DNA, 15 bp, Homo sapiens
cctgggagacagagc

SEQ ID NO: 517625 - DNA, 15 bp, Homo sapiens
ctgggagacagagcg

SEQ ID NO: 517626 - DNA, 15 bp, Homo sapiens
tgggagacagagcga

SEQ ID NO: 517627 - DNA, 15 bp, Homo sapiens
gggagacagagcgag

SEQ ID NO: 517628 - DNA, 15 bp, Homo sapiens
ggagacagagcgaga

SEQ ID NO: 517629 - DNA, 15 bp, Homo sapiens
gcgagactccgtctc

SEQ ID NO: 517630 - DNA, 15 bp, Homo sapiens
cgagactccgtctca

SEQ ID NO: 517631 - DNA, 15 bp, Homo sapiens
gagactccgtctcaa

SEQ ID NO: 517632 - DNA, 15 bp, Homo sapiens
agactccgtctcaaa

SEQ ID NO: 517633 - DNA, 15 bp, Homo sapiens
gactccgtctcaaaa

SEQ ID NO: 517634 - DNA, 15 bp, Homo sapiens
actccgtctcaaaaa

SEQ ID NO: 517635 - DNA, 15 bp, Homo sapiens
ctccgtctcaaaaaa

SEQ ID NO: 517636 - DNA, 15 bp, Homo sapiens
aaaaaaaaaaaattg

SEQ ID NO: 517637 - DNA, 15 bp, Homo sapiens
aaaaaaaaaaattgt

SEQ ID NO: 517638 - DNA, 15 bp, Homo sapiens
aaaaaaaaaattgtc

SEQ ID NO: 517639 - DNA, 15 bp, Homo sapiens
aaaaaaaaattgtct

SEQ ID NO: 517640 - DNA, 15 bp, Homo sapiens
aaaaaaaattgtctt

SEQ ID NO: 517641 - DNA, 15 bp, Homo sapiens
aaaaaaattgtcttg

SEQ ID NO: 517642 - DNA, 15 bp, Homo sapiens
aaaaaattgtcttgg

SEQ ID NO: 517643 - DNA, 15 bp, Homo sapiens
aaaaattgtcttggt

SEQ ID NO: 517644 - DNA, 15 bp, Homo sapiens
aaaattgtcttggta

SEQ ID NO: 517645 - DNA, 15 bp, Homo sapiens
aaattgtcttggtat

SEQ ID NO: 517646 - DNA, 15 bp, Homo sapiens
aattgtcttggtatt

SEQ ID NO: 517647 - DNA, 15 bp, Homo sapiens
attgtcttggtattt

SEQ ID NO: 517648 - DNA, 15 bp, Homo sapiens
ttgtcttggtattta

SEQ ID NO: 517649 - DNA, 15 bp, Homo sapiens
tgtcttggtatttat

SEQ ID NO: 517650 - DNA, 15 bp, Homo sapiens
gtcttggtatttatt

SEQ ID NO: 517651 - DNA, 15 bp, Homo sapiens
tcttggtatttatta

SEQ ID NO: 517652 - DNA, 15 bp, Homo sapiens
cttggtatttattat

SEQ ID NO: 517653 - DNA, 15 bp, Homo sapiens
ttggtatttattatt

SEQ ID NO: 517654 - DNA, 15 bp, Homo sapiens
tggtatttattattg

SEQ ID NO: 517655 - DNA, 15 bp, Homo sapiens
ggtatttattattgt

SEQ ID NO: 517656 - DNA, 15 bp, Homo sapiens
gtatttattattgtt

SEQ ID NO: 517657 - DNA, 15 bp, Homo sapiens
tatttattattgttg

SEQ ID NO: 517658 - DNA, 15 bp, Homo sapiens
atttattattgttga

SEQ ID NO: 517659 - DNA, 15 bp, Homo sapiens
tttattattgttgaa

SEQ ID NO: 517660 - DNA, 15 bp, Homo sapiens
ttattattgttgaaa

SEQ ID NO: 517661 - DNA, 15 bp, Homo sapiens
tattattgttgaaaa

SEQ ID NO: 517662 - DNA, 15 bp, Homo sapiens
attattgttgaaaat

SEQ ID NO: 517663 - DNA, 15 bp, Homo sapiens
ttattgttgaaaatc

SEQ ID NO: 517664 - DNA, 15 bp, Homo sapiens
tattgttgaaaatcg

SEQ ID NO: 517665 - DNA, 15 bp, Homo sapiens
attgttgaaaatcgc

SEQ ID NO: 517666 - DNA, 15 bp, Homo sapiens
ttgttgaaaatcgct

SEQ ID NO: 517667 - DNA, 15 bp, Homo sapiens
tgttgaaaatcgctt

SEQ ID NO: 517668 - DNA, 15 bp, Homo sapiens
gttgaaaatcgcttg

SEQ ID NO: 517669 - DNA, 15 bp, Homo sapiens
ttgaaaatcgcttga

SEQ ID NO: 517670 - DNA, 15 bp, Homo sapiens
tgaaaatcgcttgat

SEQ ID NO: 517671 - DNA, 15 bp, Homo sapiens
gaaaatcgcttgatc

SEQ ID NO: 517672 - DNA, 15 bp, Homo sapiens
aaaatcgcttgatca

SEQ ID NO: 517673 - DNA, 15 bp, Homo sapiens
aaatcgcttgatcac

SEQ ID NO: 517674 - DNA, 15 bp, Homo sapiens
aatcgcttgatcaca

SEQ ID NO: 517675 - DNA, 15 bp, Homo sapiens
atcgcttgatcacag

SEQ ID NO: 517676 - DNA, 15 bp, Homo sapiens
tcgcttgatcacaga

SEQ ID NO: 517677 - DNA, 15 bp, Homo sapiens
cgcttgatcacagat

SEQ ID NO: 517678 - DNA, 15 bp, Homo sapiens
gcttgatcacagatg

SEQ ID NO: 517679 - DNA, 15 bp, Homo sapiens
cttgatcacagatgt

SEQ ID NO: 517680 - DNA, 15 bp, Homo sapiens
ttgatcacagatgta

SEQ ID NO: 517681 - DNA, 15 bp, Homo sapiens
tgatcacagatgtat

SEQ ID NO: 517682 - DNA, 15 bp, Homo sapiens
gatcacagatgtatg

SEQ ID NO: 517683 - DNA, 15 bp, Homo sapiens
atcacagatgtatgt

SEQ ID NO: 517684 - DNA, 15 bp, Homo sapiens
tcacagatgtatgta

SEQ ID NO: 517685 - DNA, 15 bp, Homo sapiens
cacagatgtatgtat

SEQ ID NO: 517686 - DNA, 15 bp, Homo sapiens
acagatgtatgtatg

SEQ ID NO: 517687 - DNA, 15 bp, Homo sapiens
cagatgtatgtatga

SEQ ID NO: 517688 - DNA, 15 bp, Homo sapiens
agatgtatgtatgag

SEQ ID NO: 517689 - DNA, 15 bp, Homo sapiens
gatgtatgtatgagt

SEQ ID NO: 517690 - DNA, 15 bp, Homo sapiens
atgtatgtatgagtt

SEQ ID NO: 517691 - DNA, 15 bp, Homo sapiens
tgtatgtatgagttt

SEQ ID NO: 517692 - DNA, 15 bp, Homo sapiens
gtatgtatgagttta

SEQ ID NO: 517693 - DNA, 15 bp, Homo sapiens
tatgtatgagtttat

SEQ ID NO: 517694 - DNA, 15 bp, Homo sapiens
atgtatgagtttatt

SEQ ID NO: 517695 - DNA, 15 bp, Homo sapiens
tgtatgagtttattt

SEQ ID NO: 517696 - DNA, 15 bp, Homo sapiens
gtatgagtttatttc

SEQ ID NO: 517697 - DNA, 15 bp, Homo sapiens
tatgagtttatttct

SEQ ID NO: 517698 - DNA, 15 bp, Homo sapiens
atgagtttatttctg

SEQ ID NO: 517699 - DNA, 15 bp, Homo sapiens
tgagtttatttctgt

SEQ ID NO: 517700 - DNA, 15 bp, Homo sapiens
gagtttatttctgta

SEQ ID NO: 517701 - DNA, 15 bp, Homo sapiens
agtttatttctgtac

SEQ ID NO: 517702 - DNA, 15 bp, Homo sapiens
gtttatttctgtact

SEQ ID NO: 517703 - DNA, 15 bp, Homo sapiens
tttatttctgtactg

SEQ ID NO: 517704 - DNA, 15 bp, Homo sapiens
ttatttctgtactgt

SEQ ID NO: 517705 - DNA, 15 bp, Homo sapiens
tatttctgtactgtc

SEQ ID NO: 517706 - DNA, 15 bp, Homo sapiens
atttctgtactgtca

SEQ ID NO: 517707 - DNA, 15 bp, Homo sapiens
tttctgtactgtcaa

SEQ ID NO: 517708 - DNA, 15 bp, Homo sapiens
ttctgtactgtcaat

SEQ ID NO: 517709 - DNA, 15 bp, Homo sapiens
tctgtactgtcaatt

SEQ ID NO: 517710 - DNA, 15 bp, Homo sapiens
ctgtactgtcaattc

SEQ ID NO: 517711 - DNA, 15 bp, Homo sapiens
tgtactgtcaattcc

SEQ ID NO: 517712 - DNA, 15 bp, Homo sapiens
gtactgtcaattcca

SEQ ID NO: 517713 - DNA, 15 bp, Homo sapiens
tactgtcaattccat

SEQ ID NO: 517714 - DNA, 15 bp, Homo sapiens
actgtcaattccatt

SEQ ID NO: 517715 - DNA, 15 bp, Homo sapiens
ctgtcaattccattt

SEQ ID NO: 517716 - DNA, 15 bp, Homo sapiens
tgtcaattccatttt

SEQ ID NO: 517717 - DNA, 15 bp, Homo sapiens
gtcaattccatttta

SEQ ID NO: 517718 - DNA, 15 bp, Homo sapiens
tcaattccattttat

SEQ ID NO: 517719 - DNA, 15 bp, Homo sapiens
caattccattttatt

SEQ ID NO: 517720 - DNA, 15 bp, Homo sapiens
aattccattttattg

SEQ ID NO: 517721 - DNA, 15 bp, Homo sapiens
attccattttattga

SEQ ID NO: 517722 - DNA, 15 bp, Homo sapiens
ttccattttattgat

SEQ ID NO: 517723 - DNA, 15 bp, Homo sapiens
tccattttattgatg

SEQ ID NO: 517724 - DNA, 15 bp, Homo sapiens
ccattttattgatgt

SEQ ID NO: 517725 - DNA, 15 bp, Homo sapiens
cattttattgatgta

SEQ ID NO: 517726 - DNA, 15 bp, Homo sapiens
attttattgatgtat

SEQ ID NO: 517727 - DNA, 15 bp, Homo sapiens
ttttattgatgtatg

SEQ ID NO: 517728 - DNA, 15 bp, Homo sapiens
tttattgatgtatgt

SEQ ID NO: 517729 - DNA, 15 bp, Homo sapiens
ttattgatgtatgtg

SEQ ID NO: 517730 - DNA, 15 bp, Homo sapiens
tattgatgtatgtgt

SEQ ID NO: 517731 - DNA, 15 bp, Homo sapiens
attgatgtatgtgtc

SEQ ID NO: 517732 - DNA, 15 bp, Homo sapiens
ttgatgtatgtgtct

SEQ ID NO: 517733 - DNA, 15 bp, Homo sapiens
tgatgtatgtgtcta

SEQ ID NO: 517734 - DNA, 15 bp, Homo sapiens
gatgtatgtgtctat

SEQ ID NO: 517735 - DNA, 15 bp, Homo sapiens
atgtatgtgtctatt

SEQ ID NO: 517736 - DNA, 15 bp, Homo sapiens
tgtatgtgtctattc

SEQ ID NO: 517737 - DNA, 15 bp, Homo sapiens
gtatgtgtctattct

SEQ ID NO: 517738 - DNA, 15 bp, Homo sapiens
tatgtgtctattctt

SEQ ID NO: 517739 - DNA, 15 bp, Homo sapiens
atgtgtctattctta

SEQ ID NO: 517740 - DNA, 15 bp, Homo sapiens
tgtgtctattcttat

SEQ ID NO: 517741 - DNA, 15 bp, Homo sapiens
gtgtctattcttatg

SEQ ID NO: 517742 - DNA, 15 bp, Homo sapiens
tgtctattcttatgc

SEQ ID NO: 517743 - DNA, 15 bp, Homo sapiens
gtctattcttatgct

SEQ ID NO: 517744 - DNA, 15 bp, Homo sapiens
tctattcttatgcta

SEQ ID NO: 517745 - DNA, 15 bp, Homo sapiens
ctattcttatgctat

SEQ ID NO: 517746 - DNA, 15 bp, Homo sapiens
tattcttatgctatt

SEQ ID NO: 517747 - DNA, 15 bp, Homo sapiens
attcttatgctatta

SEQ ID NO: 517748 - DNA, 15 bp, Homo sapiens
ttcttatgctattac

SEQ ID NO: 517749 - DNA, 15 bp, Homo sapiens
tcttatgctattacc

SEQ ID NO: 517750 - DNA, 15 bp, Homo sapiens
cttatgctattacca

SEQ ID NO: 517751 - DNA, 15 bp, Homo sapiens
ttatgctattaccac

SEQ ID NO: 517752 - DNA, 15 bp, Homo sapiens
tatgctattaccaca

SEQ ID NO: 517753 - DNA, 15 bp, Homo sapiens
atgctattaccacac

SEQ ID NO: 517754 - DNA, 15 bp, Homo sapiens
tgctattaccacact

SEQ ID NO: 517755 - DNA, 15 bp, Homo sapiens
gctattaccacactt

SEQ ID NO: 517756 - DNA, 15 bp, Homo sapiens
ctattaccacacttt

SEQ ID NO: 517757 - DNA, 15 bp, Homo sapiens
tattaccacactttc

SEQ ID NO: 517758 - DNA, 15 bp, Homo sapiens
attaccacactttct

SEQ ID NO: 517759 - DNA, 15 bp, Homo sapiens
ttaccacactttctt

SEQ ID NO: 517760 - DNA, 15 bp, Homo sapiens
taccacactttcttg

SEQ ID NO: 517761 - DNA, 15 bp, Homo sapiens
accacactttcttga

SEQ ID NO: 517762 - DNA, 15 bp, Homo sapiens
ccacactttcttgat

SEQ ID NO: 517763 - DNA, 15 bp, Homo sapiens
cacactttcttgatt

SEQ ID NO: 517764 - DNA, 15 bp, Homo sapiens
acactttcttgatta

SEQ ID NO: 517765 - DNA, 15 bp, Homo sapiens
cactttcttgattac

SEQ ID NO: 517766 - DNA, 15 bp, Homo sapiens
actttcttgattact

SEQ ID NO: 517767 - DNA, 15 bp, Homo sapiens
ctttcttgattacta

SEQ ID NO: 517768 - DNA, 15 bp, Homo sapiens
tttcttgattactat

SEQ ID NO: 517769 - DNA, 15 bp, Homo sapiens
ttcttgattactata

SEQ ID NO: 517770 - DNA, 15 bp, Homo sapiens
tcttgattactatag

SEQ ID NO: 517771 - DNA, 15 bp, Homo sapiens
cttgattactatagc

SEQ ID NO: 517772 - DNA, 15 bp, Homo sapiens
ttgattactatagct

SEQ ID NO: 517773 - DNA, 15 bp, Homo sapiens
tgattactatagctt

SEQ ID NO: 517774 - DNA, 15 bp, Homo sapiens
gattactatagcttt

SEQ ID NO: 517775 - DNA, 15 bp, Homo sapiens
attactatagctttg

SEQ ID NO: 517776 - DNA, 15 bp, Homo sapiens
ttactatagctttgt

SEQ ID NO: 517777 - DNA, 15 bp, Homo sapiens
tactatagctttgtg

SEQ ID NO: 517778 - DNA, 15 bp, Homo sapiens
actatagctttgtgg

SEQ ID NO: 517779 - DNA, 15 bp, Homo sapiens
ctatagctttgtggt

SEQ ID NO: 517780 - DNA, 15 bp, Homo sapiens
tatagctttgtggtg

SEQ ID NO: 517781 - DNA, 15 bp, Homo sapiens
atagctttgtggtga

SEQ ID NO: 517782 - DNA, 15 bp, Homo sapiens
tagctttgtggtgag

SEQ ID NO: 517783 - DNA, 15 bp, Homo sapiens
agctttgtggtgagg

SEQ ID NO: 517784 - DNA, 15 bp, Homo sapiens
gctttgtggtgaggt

SEQ ID NO: 517785 - DNA, 15 bp, Homo sapiens
ctttgtggtgaggtg

SEQ ID NO: 517786 - DNA, 15 bp, Homo sapiens
tttgtggtgaggtgt

SEQ ID NO: 517787 - DNA, 15 bp, Homo sapiens
ttgtggtgaggtgtt

SEQ ID NO: 517788 - DNA, 15 bp, Homo sapiens
tgtggtgaggtgttg

SEQ ID NO: 517789 - DNA, 15 bp, Homo sapiens
gtggtgaggtgttga

SEQ ID NO: 517790 - DNA, 15 bp, Homo sapiens
tggtgaggtgttgag

SEQ ID NO: 517791 - DNA, 15 bp, Homo sapiens
ggtgaggtgttgaga

SEQ ID NO: 517792 - DNA, 15 bp, Homo sapiens
gtgaggtgttgagat

SEQ ID NO: 517793 - DNA, 15 bp, Homo sapiens
tgaggtgttgagatt

SEQ ID NO: 517794 - DNA, 15 bp, Homo sapiens
gaggtgttgagattt

SEQ ID NO: 517795 - DNA, 15 bp, Homo sapiens
aggtgttgagatttt

SEQ ID NO: 517796 - DNA, 15 bp, Homo sapiens
ggtgttgagatttta

SEQ ID NO: 517797 - DNA, 15 bp, Homo sapiens
gtgttgagattttaa

SEQ ID NO: 517798 - DNA, 15 bp, Homo sapiens
tgttgagattttaaa

SEQ ID NO: 517799 - DNA, 15 bp, Homo sapiens
gttgagattttaaac

SEQ ID NO: 517800 - DNA, 15 bp, Homo sapiens
ttgagattttaaact

SEQ ID NO: 517801 - DNA, 15 bp, Homo sapiens
tgagattttaaacta

SEQ ID NO: 517802 - DNA, 15 bp, Homo sapiens
gagattttaaactaa

SEQ ID NO: 517803 - DNA, 15 bp, Homo sapiens
agattttaaactaat

SEQ ID NO: 517804 - DNA, 15 bp, Homo sapiens
gattttaaactaatt

SEQ ID NO: 517805 - DNA, 15 bp, Homo sapiens
attttaaactaatta

SEQ ID NO: 517806 - DNA, 15 bp, Homo sapiens
ttttaaactaattat

SEQ ID NO: 517807 - DNA, 15 bp, Homo sapiens
tttaaactaattata

SEQ ID NO: 517808 - DNA, 15 bp, Homo sapiens
ttaaactaattataa

SEQ ID NO: 517809 - DNA, 15 bp, Homo sapiens
taaactaattataag

SEQ ID NO: 517810 - DNA, 15 bp, Homo sapiens
aaactaattataagc

SEQ ID NO: 517811 - DNA, 15 bp, Homo sapiens
aactaattataagca

SEQ ID NO: 517812 - DNA, 15 bp, Homo sapiens
actaattataagcat

SEQ ID NO: 517813 - DNA, 15 bp, Homo sapiens
ctaattataagcatc

SEQ ID NO: 517814 - DNA, 15 bp, Homo sapiens
taattataagcatct

SEQ ID NO: 517815 - DNA, 15 bp, Homo sapiens
aattataagcatctt

SEQ ID NO: 517816 - DNA, 15 bp, Homo sapiens
attataagcatctta

SEQ ID NO: 517817 - DNA, 15 bp, Homo sapiens
ttataagcatcttac

SEQ ID NO: 517818 - DNA, 15 bp, Homo sapiens
tataagcatcttaca

SEQ ID NO: 517819 - DNA, 15 bp, Homo sapiens
ataagcatcttacat

SEQ ID NO: 517820 - DNA, 15 bp, Homo sapiens
taagcatcttacatg

SEQ ID NO: 517821 - DNA, 15 bp, Homo sapiens
aagcatcttacatga

SEQ ID NO: 517822 - DNA, 15 bp, Homo sapiens
agcatcttacatgaa

SEQ ID NO: 517823 - DNA, 15 bp, Homo sapiens
gcatcttacatgaac

SEQ ID NO: 517824 - DNA, 15 bp, Homo sapiens
catcttacatgaact

SEQ ID NO: 517825 - DNA, 15 bp, Homo sapiens
atcttacatgaacta

SEQ ID NO: 517826 - DNA, 15 bp, Homo sapiens
tcttacatgaactac

SEQ ID NO: 517827 - DNA, 15 bp, Homo sapiens
cttacatgaactact

SEQ ID NO: 517828 - DNA, 15 bp, Homo sapiens
ttacatgaactactt

SEQ ID NO: 517829 - DNA, 15 bp, Homo sapiens
tacatgaactactta

SEQ ID NO: 517830 - DNA, 15 bp, Homo sapiens
acatgaactacttac

SEQ ID NO: 517831 - DNA, 15 bp, Homo sapiens
catgaactacttacc

SEQ ID NO: 517832 - DNA, 15 bp, Homo sapiens
atgaactacttaccg

SEQ ID NO: 517833 - DNA, 15 bp, Homo sapiens
tgaactacttaccgt

SEQ ID NO: 517834 - DNA, 15 bp, Homo sapiens
gaactacttaccgtt

SEQ ID NO: 517835 - DNA, 15 bp, Homo sapiens
aactacttaccgttt

SEQ ID NO: 517836 - DNA, 15 bp, Homo sapiens
actacttaccgttta

SEQ ID NO: 517837 - DNA, 15 bp, Homo sapiens
ctacttaccgtttat

SEQ ID NO: 517838 - DNA, 15 bp, Homo sapiens
tacttaccgtttata

SEQ ID NO: 517839 - DNA, 15 bp, Homo sapiens
acttaccgtttatat

SEQ ID NO: 517840 - DNA, 15 bp, Homo sapiens
cttaccgtttatatt

SEQ ID NO: 517841 - DNA, 15 bp, Homo sapiens
ttaccgtttatattt

SEQ ID NO: 517842 - DNA, 15 bp, Homo sapiens
taccgtttatatttg

SEQ ID NO: 517843 - DNA, 15 bp, Homo sapiens
accgtttatatttga

SEQ ID NO: 517844 - DNA, 15 bp, Homo sapiens
ccgtttatatttgat

SEQ ID NO: 517845 - DNA, 15 bp, Homo sapiens
cgtttatatttgatt

SEQ ID NO: 517846 - DNA, 15 bp, Homo sapiens
gtttatatttgatta

SEQ ID NO: 517847 - DNA, 15 bp, Homo sapiens
tttatatttgattat

SEQ ID NO: 517848 - DNA, 15 bp, Homo sapiens
ttatatttgattatg

SEQ ID NO: 517849 - DNA, 15 bp, Homo sapiens
tatatttgattatgc

SEQ ID NO: 517850 - DNA, 15 bp, Homo sapiens
atatttgattatgca

SEQ ID NO: 517851 - DNA, 15 bp, Homo sapiens
tatttgattatgcag

SEQ ID NO: 517852 - DNA, 15 bp, Homo sapiens
atttgattatgcagc

SEQ ID NO: 517853 - DNA, 15 bp, Homo sapiens
tttgattatgcagca

SEQ ID NO: 517854 - DNA, 15 bp, Homo sapiens
ttgattatgcagcat

SEQ ID NO: 517855 - DNA, 15 bp, Homo sapiens
tgattatgcagcatg

SEQ ID NO: 517856 - DNA, 15 bp, Homo sapiens
gattatgcagcatga

SEQ ID NO: 517857 - DNA, 15 bp, Homo sapiens
attatgcagcatgaa

SEQ ID NO: 517858 - DNA, 15 bp, Homo sapiens
ttatgcagcatgaaa

SEQ ID NO: 517859 - DNA, 15 bp, Homo sapiens
tatgcagcatgaaat

SEQ ID NO: 517860 - DNA, 15 bp, Homo sapiens
atgcagcatgaaata

SEQ ID NO: 517861 - DNA, 15 bp, Homo sapiens
tgcagcatgaaataa

SEQ ID NO: 517862 - DNA, 15 bp, Homo sapiens
gcagcatgaaataat

SEQ ID NO: 517863 - DNA, 15 bp, Homo sapiens
cagcatgaaataatt

SEQ ID NO: 517864 - DNA, 15 bp, Homo sapiens
agcatgaaataatta

SEQ ID NO: 517865 - DNA, 15 bp, Homo sapiens
gcatgaaataattat

SEQ ID NO: 517866 - DNA, 15 bp, Homo sapiens
catgaaataattatg

SEQ ID NO: 517867 - DNA, 15 bp, Homo sapiens
atgaaataattatga

SEQ ID NO: 517868 - DNA, 15 bp, Homo sapiens
tgaaataattatgaa

SEQ ID NO: 517869 - DNA, 15 bp, Homo sapiens
gaaataattatgaat

SEQ ID NO: 517870 - DNA, 15 bp, Homo sapiens
aaataattatgaata

SEQ ID NO: 517871 - DNA, 15 bp, Homo sapiens
aataattatgaatat

SEQ ID NO: 517872 - DNA, 15 bp, Homo sapiens
ataattatgaatata

SEQ ID NO: 517873 - DNA, 15 bp, Homo sapiens
taattatgaatatat

SEQ ID NO: 517874 - DNA, 15 bp, Homo sapiens
aattatgaatatatc

SEQ ID NO: 517875 - DNA, 15 bp, Homo sapiens
attatgaatatatca

SEQ ID NO: 517876 - DNA, 15 bp, Homo sapiens
ttatgaatatatcat

SEQ ID NO: 517877 - DNA, 15 bp, Homo sapiens
tatgaatatatcatt

SEQ ID NO: 517878 - DNA, 15 bp, Homo sapiens
atgaatatatcatta

SEQ ID NO: 517879 - DNA, 15 bp, Homo sapiens
tgaatatatcattaa

SEQ ID NO: 517880 - DNA, 15 bp, Homo sapiens
gaatatatcattaaa

SEQ ID NO: 517881 - DNA, 15 bp, Homo sapiens
aatatatcattaaat

SEQ ID NO: 517882 - DNA, 15 bp, Homo sapiens
atatatcattaaata

SEQ ID NO: 517883 - DNA, 15 bp, Homo sapiens
tatatcattaaatat

SEQ ID NO: 517884 - DNA, 15 bp, Homo sapiens
atatcattaaatatg

SEQ ID NO: 517885 - DNA, 15 bp, Homo sapiens
tatcattaaatatgc

SEQ ID NO: 517886 - DNA, 15 bp, Homo sapiens
atcattaaatatgcc

SEQ ID NO: 517887 - DNA, 15 bp, Homo sapiens
tcattaaatatgcca

SEQ ID NO: 517888 - DNA, 15 bp, Homo sapiens
cattaaatatgccat

SEQ ID NO: 517889 - DNA, 15 bp, Homo sapiens
attaaatatgccata

SEQ ID NO: 517890 - DNA, 15 bp, Homo sapiens
ttaaatatgccatat

SEQ ID NO: 517891 - DNA, 15 bp, Homo sapiens
taaatatgccatatt

SEQ ID NO: 517892 - DNA, 15 bp, Homo sapiens
aaatatgccatatta

SEQ ID NO: 517893 - DNA, 15 bp, Homo sapiens
aatatgccatattaa

SEQ ID NO: 517894 - DNA, 15 bp, Homo sapiens
atatgccatattaac

SEQ ID NO: 517895 - DNA, 15 bp, Homo sapiens
tatgccatattaact

SEQ ID NO: 517896 - DNA, 15 bp, Homo sapiens
atgccatattaactt

SEQ ID NO: 517897 - DNA, 15 bp, Homo sapiens
tgccatattaacttt

SEQ ID NO: 517898 - DNA, 15 bp, Homo sapiens
gccatattaactttt

SEQ ID NO: 517899 - DNA, 15 bp, Homo sapiens
ccatattaactttta

SEQ ID NO: 517900 - DNA, 15 bp, Homo sapiens
catattaacttttat

SEQ ID NO: 517901 - DNA, 15 bp, Homo sapiens
atattaacttttatt

SEQ ID NO: 517902 - DNA, 15 bp, Homo sapiens
tattaacttttatta

SEQ ID NO: 517903 - DNA, 15 bp, Homo sapiens
attaacttttattaa

SEQ ID NO: 517904 - DNA, 15 bp, Homo sapiens
ttaacttttattaag

SEQ ID NO: 517905 - DNA, 15 bp, Homo sapiens
taacttttattaagt

SEQ ID NO: 517906 - DNA, 15 bp, Homo sapiens
aacttttattaagtt

SEQ ID NO: 517907 - DNA, 15 bp, Homo sapiens
acttttattaagttt

SEQ ID NO: 517908 - DNA, 15 bp, Homo sapiens
cttttattaagtttt

SEQ ID NO: 517909 - DNA, 15 bp, Homo sapiens
ttttattaagtttta

SEQ ID NO: 517910 - DNA, 15 bp, Homo sapiens
tttattaagttttat

SEQ ID NO: 517911 - DNA, 15 bp, Homo sapiens
ttattaagttttatg

SEQ ID NO: 517912 - DNA, 15 bp, Homo sapiens
tattaagttttatgt

SEQ ID NO: 517913 - DNA, 15 bp, Homo sapiens
attaagttttatgtg

SEQ ID NO: 517914 - DNA, 15 bp, Homo sapiens
ttaagttttatgtga

SEQ ID NO: 517915 - DNA, 15 bp, Homo sapiens
taagttttatgtgat

SEQ ID NO: 517916 - DNA, 15 bp, Homo sapiens
aagttttatgtgatc

SEQ ID NO: 517917 - DNA, 15 bp, Homo sapiens
agttttatgtgatca

SEQ ID NO: 517918 - DNA, 15 bp, Homo sapiens
gttttatgtgatcat

SEQ ID NO: 517919 - DNA, 15 bp, Homo sapiens
ttttatgtgatcata

SEQ ID NO: 517920 - DNA, 15 bp, Homo sapiens
tttatgtgatcataa

SEQ ID NO: 517921 - DNA, 15 bp, Homo sapiens
ttatgtgatcataac

SEQ ID NO: 517922 - DNA, 15 bp, Homo sapiens
tatgtgatcataaca

SEQ ID NO: 517923 - DNA, 15 bp, Homo sapiens
atgtgatcataacag

SEQ ID NO: 517924 - DNA, 15 bp, Homo sapiens
tgtgatcataacagt

SEQ ID NO: 517925 - DNA, 15 bp, Homo sapiens
gtgatcataacagta

SEQ ID NO: 517926 - DNA, 15 bp, Homo sapiens
tgatcataacagtaa

SEQ ID NO: 517927 - DNA, 15 bp, Homo sapiens
gatcataacagtaag

SEQ ID NO: 517928 - DNA, 15 bp, Homo sapiens
atcataacagtaagc

SEQ ID NO: 517929 - DNA, 15 bp, Homo sapiens
tcataacagtaagcc

SEQ ID NO: 517930 - DNA, 15 bp, Homo sapiens
cataacagtaagcca

SEQ ID NO: 517931 - DNA, 15 bp, Homo sapiens
ataacagtaagccat

SEQ ID NO: 517932 - DNA, 15 bp, Homo sapiens
taacagtaagccata

SEQ ID NO: 517933 - DNA, 15 bp, Homo sapiens
aacagtaagccatat

SEQ ID NO: 517934 - DNA, 15 bp, Homo sapiens
acagtaagccatatg

SEQ ID NO: 517935 - DNA, 15 bp, Homo sapiens
cagtaagccatatgc

SEQ ID NO: 517936 - DNA, 15 bp, Homo sapiens
agtaagccatatgca

SEQ ID NO: 517937 - DNA, 15 bp, Homo sapiens
gtaagccatatgcat

SEQ ID NO: 517938 - DNA, 15 bp, Homo sapiens
taagccatatgcatg

SEQ ID NO: 517939 - DNA, 15 bp, Homo sapiens
aagccatatgcatgt

SEQ ID NO: 517940 - DNA, 15 bp, Homo sapiens
agccatatgcatgta

SEQ ID NO: 517941 - DNA, 15 bp, Homo sapiens
gccatatgcatgtaa

SEQ ID NO: 517942 - DNA, 15 bp, Homo sapiens
ccatatgcatgtaag

SEQ ID NO: 517943 - DNA, 15 bp, Homo sapiens
catatgcatgtaagt

SEQ ID NO: 517944 - DNA, 15 bp, Homo sapiens
atatgcatgtaagtt

SEQ ID NO: 517945 - DNA, 15 bp, Homo sapiens
tatgcatgtaagttc

SEQ ID NO: 517946 - DNA, 15 bp, Homo sapiens
atgcatgtaagttca

SEQ ID NO: 517947 - DNA, 15 bp, Homo sapiens
tgcatgtaagttcag

SEQ ID NO: 517948 - DNA, 15 bp, Homo sapiens
gcatgtaagttcagt

SEQ ID NO: 517949 - DNA, 15 bp, Homo sapiens
catgtaagttcagtt

SEQ ID NO: 517950 - DNA, 15 bp, Homo sapiens
atgtaagttcagttt

SEQ ID NO: 517951 - DNA, 15 bp, Homo sapiens
tgtaagttcagtttt

SEQ ID NO: 517952 - DNA, 15 bp, Homo sapiens
gtaagttcagttttc

SEQ ID NO: 517953 - DNA, 15 bp, Homo sapiens
taagttcagttttca

SEQ ID NO: 517954 - DNA, 15 bp, Homo sapiens
aagttcagttttcat

SEQ ID NO: 517955 - DNA, 15 bp, Homo sapiens
agttcagttttcata

SEQ ID NO: 517956 - DNA, 15 bp, Homo sapiens
gttcagttttcatag

SEQ ID NO: 517957 - DNA, 15 bp, Homo sapiens
ttcagttttcataga

SEQ ID NO: 517958 - DNA, 15 bp, Homo sapiens
tcagttttcatagat

SEQ ID NO: 517959 - DNA, 15 bp, Homo sapiens
cagttttcatagatc

SEQ ID NO: 517960 - DNA, 15 bp, Homo sapiens
agttttcatagatca

SEQ ID NO: 517961 - DNA, 15 bp, Homo sapiens
gttttcatagatcat

SEQ ID NO: 517962 - DNA, 15 bp, Homo sapiens
ttttcatagatcatt

SEQ ID NO: 517963 - DNA, 15 bp, Homo sapiens
tttcatagatcattg

SEQ ID NO: 517964 - DNA, 15 bp, Homo sapiens
ttcatagatcattgc

SEQ ID NO: 517965 - DNA, 15 bp, Homo sapiens
tcatagatcattgct

SEQ ID NO: 517966 - DNA, 15 bp, Homo sapiens
catagatcattgctt

SEQ ID NO: 517967 - DNA, 15 bp, Homo sapiens
atagatcattgctta

SEQ ID NO: 517968 - DNA, 15 bp, Homo sapiens
tagatcattgcttat

SEQ ID NO: 517969 - DNA, 15 bp, Homo sapiens
agatcattgcttatg

SEQ ID NO: 517970 - DNA, 15 bp, Homo sapiens
gatcattgcttatgt

SEQ ID NO: 517971 - DNA, 15 bp, Homo sapiens
atcattgcttatgta

SEQ ID NO: 517972 - DNA, 15 bp, Homo sapiens
tcattgcttatgtag

SEQ ID NO: 517973 - DNA, 15 bp, Homo sapiens
cattgcttatgtagt

SEQ ID NO: 517974 - DNA, 15 bp, Homo sapiens
attgcttatgtagtt

SEQ ID NO: 517975 - DNA, 15 bp, Homo sapiens
ttgcttatgtagttt

SEQ ID NO: 517976 - DNA, 15 bp, Homo sapiens
tgcttatgtagttta

SEQ ID NO: 517977 - DNA, 15 bp, Homo sapiens
gcttatgtagtttag

SEQ ID NO: 517978 - DNA, 15 bp, Homo sapiens
cttatgtagtttagg

SEQ ID NO: 517979 - DNA, 15 bp, Homo sapiens
ttatgtagtttaggt

SEQ ID NO: 517980 - DNA, 15 bp, Homo sapiens
tatgtagtttaggtt

SEQ ID NO: 517981 - DNA, 15 bp, Homo sapiens
atgtagtttaggttt

SEQ ID NO: 517982 - DNA, 15 bp, Homo sapiens
tgtagtttaggtttt

SEQ ID NO: 517983 - DNA, 15 bp, Homo sapiens
gtagtttaggttttt

SEQ ID NO: 517984 - DNA, 15 bp, Homo sapiens
tagtttaggtttttg

SEQ ID NO: 517985 - DNA, 15 bp, Homo sapiens
agtttaggtttttgc

SEQ ID NO: 517986 - DNA, 15 bp, Homo sapiens
gtttaggtttttgct

SEQ ID NO: 517987 - DNA, 15 bp, Homo sapiens
tttaggtttttgctt

SEQ ID NO: 517988 - DNA, 15 bp, Homo sapiens
ttaggtttttgctta

SEQ ID NO: 517989 - DNA, 15 bp, Homo sapiens
taggtttttgcttat

SEQ ID NO: 517990 - DNA, 15 bp, Homo sapiens
aggtttttgcttatg

SEQ ID NO: 517991 - DNA, 15 bp, Homo sapiens
ggtttttgcttatgc

SEQ ID NO: 517992 - DNA, 15 bp, Homo sapiens
gtttttgcttatgca

SEQ ID NO: 517993 - DNA, 15 bp, Homo sapiens
tttttgcttatgcag

SEQ ID NO: 517994 - DNA, 15 bp, Homo sapiens
ttttgcttatgcagc

SEQ ID NO: 517995 - DNA, 15 bp, Homo sapiens
tttgcttatgcagca

SEQ ID NO: 517996 - DNA, 15 bp, Homo sapiens
ttgcttatgcagcat

SEQ ID NO: 517997 - DNA, 15 bp, Homo sapiens
tgcttatgcagcatc

SEQ ID NO: 517998 - DNA, 15 bp, Homo sapiens
gcttatgcagcatcc

SEQ ID NO: 517999 - DNA, 15 bp, Homo sapiens
cttatgcagcatcca

SEQ ID NO: 518000 - DNA, 15 bp, Homo sapiens
ttatgcagcatccaa

SEQ ID NO: 518001 - DNA, 15 bp, Homo sapiens
tatgcagcatccaaa

SEQ ID NO: 518002 - DNA, 15 bp, Homo sapiens
atgcagcatccaaaa

SEQ ID NO: 518003 - DNA, 15 bp, Homo sapiens
tgcagcatccaaaaa

SEQ ID NO: 518004 - DNA, 15 bp, Homo sapiens
gcagcatccaaaaac

SEQ ID NO: 518005 - DNA, 15 bp, Homo sapiens
cagcatccaaaaaca

SEQ ID NO: 518006 - DNA, 15 bp, Homo sapiens
agcatccaaaaacaa

SEQ ID NO: 518007 - DNA, 15 bp, Homo sapiens
gcatccaaaaacaat

SEQ ID NO: 518008 - DNA, 15 bp, Homo sapiens
catccaaaaacaatt

SEQ ID NO: 518009 - DNA, 15 bp, Homo sapiens
atccaaaaacaatta

SEQ ID NO: 518010 - DNA, 15 bp, Homo sapiens
tccaaaaacaattag

SEQ ID NO: 518011 - DNA, 15 bp, Homo sapiens
ccaaaaacaattagg

SEQ ID NO: 518012 - DNA, 15 bp, Homo sapiens
caaaaacaattagga

SEQ ID NO: 518013 - DNA, 15 bp, Homo sapiens
aaaaacaattaggaa

SEQ ID NO: 518014 - DNA, 15 bp, Homo sapiens
aaaacaattaggaaa

SEQ ID NO: 518015 - DNA, 15 bp, Homo sapiens
aaacaattaggaaac

SEQ ID NO: 518016 - DNA, 15 bp, Homo sapiens
aacaattaggaaact

SEQ ID NO: 518017 - DNA, 15 bp, Homo sapiens
acaattaggaaacta

SEQ ID NO: 518018 - DNA, 15 bp, Homo sapiens
caattaggaaactat

SEQ ID NO: 518019 - DNA, 15 bp, Homo sapiens
aattaggaaactatt

SEQ ID NO: 518020 - DNA, 15 bp, Homo sapiens
attaggaaactattg

SEQ ID NO: 518021 - DNA, 15 bp, Homo sapiens
ttaggaaactattgc

SEQ ID NO: 518022 - DNA, 15 bp, Homo sapiens
taggaaactattgct

SEQ ID NO: 518023 - DNA, 15 bp, Homo sapiens
aggaaactattgctt

SEQ ID NO: 518024 - DNA, 15 bp, Homo sapiens
ggaaactattgcttg

SEQ ID NO: 518025 - DNA, 15 bp, Homo sapiens
gaaactattgcttgt

SEQ ID NO: 518026 - DNA, 15 bp, Homo sapiens
aaactattgcttgta

SEQ ID NO: 518027 - DNA, 15 bp, Homo sapiens
aactattgcttgtaa

SEQ ID NO: 518028 - DNA, 15 bp, Homo sapiens
actattgcttgtaat

SEQ ID NO: 518029 - DNA, 15 bp, Homo sapiens
ctattgcttgtaatt

SEQ ID NO: 518030 - DNA, 15 bp, Homo sapiens
tattgcttgtaattc

SEQ ID NO: 518031 - DNA, 15 bp, Homo sapiens
attgcttgtaattca

SEQ ID NO: 518032 - DNA, 15 bp, Homo sapiens
ttgcttgtaattcac

SEQ ID NO: 518033 - DNA, 15 bp, Homo sapiens
tgcttgtaattcacc

SEQ ID NO: 518034 - DNA, 15 bp, Homo sapiens
gcttgtaattcacct

SEQ ID NO: 518035 - DNA, 15 bp, Homo sapiens
cttgtaattcacctg

SEQ ID NO: 518036 - DNA, 15 bp, Homo sapiens
ttgtaattcacctgc

SEQ ID NO: 518037 - DNA, 15 bp, Homo sapiens
tgtaattcacctgcc

SEQ ID NO: 518038 - DNA, 15 bp, Homo sapiens
gtaattcacctgcca

SEQ ID NO: 518039 - DNA, 15 bp, Homo sapiens
taattcacctgccat

SEQ ID NO: 518040 - DNA, 15 bp, Homo sapiens
aattcacctgccatt

SEQ ID NO: 518041 - DNA, 15 bp, Homo sapiens
attcacctgccatta

SEQ ID NO: 518042 - DNA, 15 bp, Homo sapiens
ttcacctgccattac

SEQ ID NO: 518043 - DNA, 15 bp, Homo sapiens
tcacctgccattact

SEQ ID NO: 518044 - DNA, 15 bp, Homo sapiens
cacctgccattactt

SEQ ID NO: 518045 - DNA, 15 bp, Homo sapiens
acctgccattacttt

SEQ ID NO: 518046 - DNA, 15 bp, Homo sapiens
cctgccattactttt

SEQ ID NO: 518047 - DNA, 15 bp, Homo sapiens
ctgccattacttttt

SEQ ID NO: 518048 - DNA, 15 bp, Homo sapiens
tgccattacttttta

SEQ ID NO: 518049 - DNA, 15 bp, Homo sapiens
gccattactttttaa

SEQ ID NO: 518050 - DNA, 15 bp, Homo sapiens
ccattactttttaaa

SEQ ID NO: 518051 - DNA, 15 bp, Homo sapiens
cattactttttaaat

SEQ ID NO: 518052 - DNA, 15 bp, Homo sapiens
attactttttaaatg

SEQ ID NO: 518053 - DNA, 15 bp, Homo sapiens
ttactttttaaatgg

SEQ ID NO: 518054 - DNA, 15 bp, Homo sapiens
tactttttaaatggc

SEQ ID NO: 518055 - DNA, 15 bp, Homo sapiens
actttttaaatggct

SEQ ID NO: 518056 - DNA, 15 bp, Homo sapiens
ctttttaaatggctc

SEQ ID NO: 518057 - DNA, 15 bp, Homo sapiens
tttttaaatggctct

SEQ ID NO: 518058 - DNA, 15 bp, Homo sapiens
ttttaaatggctctt

SEQ ID NO: 518059 - DNA, 15 bp, Homo sapiens
tttaaatggctctta

SEQ ID NO: 518060 - DNA, 15 bp, Homo sapiens
ttaaatggctcttaa

SEQ ID NO: 518061 - DNA, 15 bp, Homo sapiens
taaatggctcttaag

SEQ ID NO: 518062 - DNA, 15 bp, Homo sapiens
aaatggctcttaagg

SEQ ID NO: 518063 - DNA, 15 bp, Homo sapiens
aatggctcttaaggg

SEQ ID NO: 518064 - DNA, 15 bp, Homo sapiens
atggctcttaagggc

SEQ ID NO: 518065 - DNA, 15 bp, Homo sapiens
tggctcttaagggca

SEQ ID NO: 518066 - DNA, 15 bp, Homo sapiens
ggctcttaagggcag

SEQ ID NO: 518067 - DNA, 15 bp, Homo sapiens
gctcttaagggcagt

SEQ ID NO: 518068 - DNA, 15 bp, Homo sapiens
ctcttaagggcagtt

SEQ ID NO: 518069 - DNA, 15 bp, Homo sapiens
tcttaagggcagttg

SEQ ID NO: 518070 - DNA, 15 bp, Homo sapiens
cttaagggcagttgt

SEQ ID NO: 518071 - DNA, 15 bp, Homo sapiens
ttaagggcagttgtg

SEQ ID NO: 518072 - DNA, 15 bp, Homo sapiens
taagggcagttgtga

SEQ ID NO: 518073 - DNA, 15 bp, Homo sapiens
aagggcagttgtgag

SEQ ID NO: 518074 - DNA, 15 bp, Homo sapiens
agggcagttgtgaga

SEQ ID NO: 518075 - DNA, 15 bp, Homo sapiens
gggcagttgtgagat

SEQ ID NO: 518076 - DNA, 15 bp, Homo sapiens
ggcagttgtgagatt

SEQ ID NO: 518077 - DNA, 15 bp, Homo sapiens
gcagttgtgagatta

SEQ ID NO: 518078 - DNA, 15 bp, Homo sapiens
cagttgtgagattat

SEQ ID NO: 518079 - DNA, 15 bp, Homo sapiens
agttgtgagattatc

SEQ ID NO: 518080 - DNA, 15 bp, Homo sapiens
gttgtgagattatct

SEQ ID NO: 518081 - DNA, 15 bp, Homo sapiens
ttgtgagattatctt

SEQ ID NO: 518082 - DNA, 15 bp, Homo sapiens
tgtgagattatcttt

SEQ ID NO: 518083 - DNA, 15 bp, Homo sapiens
gtgagattatctttt

SEQ ID NO: 518084 - DNA, 15 bp, Homo sapiens
tgagattatcttttc

SEQ ID NO: 518085 - DNA, 15 bp, Homo sapiens
gagattatcttttca

SEQ ID NO: 518086 - DNA, 15 bp, Homo sapiens
agattatcttttcat

SEQ ID NO: 518087 - DNA, 15 bp, Homo sapiens
gattatcttttcatg

SEQ ID NO: 518088 - DNA, 15 bp, Homo sapiens
attatcttttcatgg

SEQ ID NO: 518089 - DNA, 15 bp, Homo sapiens
ttatcttttcatggc

SEQ ID NO: 518090 - DNA, 15 bp, Homo sapiens
tatcttttcatggct

SEQ ID NO: 518091 - DNA, 15 bp, Homo sapiens
atcttttcatggcta

SEQ ID NO: 518092 - DNA, 15 bp, Homo sapiens
tcttttcatggctat

SEQ ID NO: 518093 - DNA, 15 bp, Homo sapiens
cttttcatggctatt

SEQ ID NO: 518094 - DNA, 15 bp, Homo sapiens
ttttcatggctattt

SEQ ID NO: 518095 - DNA, 15 bp, Homo sapiens
tttcatggctatttg

SEQ ID NO: 518096 - DNA, 15 bp, Homo sapiens
ttcatggctatttgc

SEQ ID NO: 518097 - DNA, 15 bp, Homo sapiens
tcatggctatttgcc

SEQ ID NO: 518098 - DNA, 15 bp, Homo sapiens
catggctatttgcct

SEQ ID NO: 518099 - DNA, 15 bp, Homo sapiens
atggctatttgcctt

SEQ ID NO: 518100 - DNA, 15 bp, Homo sapiens
tggctatttgccttt

SEQ ID NO: 518101 - DNA, 15 bp, Homo sapiens
ggctatttgcctttt

SEQ ID NO: 518102 - DNA, 15 bp, Homo sapiens
gctatttgccttttg

SEQ ID NO: 518103 - DNA, 15 bp, Homo sapiens
ctatttgccttttga

SEQ ID NO: 518104 - DNA, 15 bp, Homo sapiens
tatttgccttttgag

SEQ ID NO: 518105 - DNA, 15 bp, Homo sapiens
atttgccttttgagt

SEQ ID NO: 518106 - DNA, 15 bp, Homo sapiens
tttgccttttgagta

SEQ ID NO: 518107 - DNA, 15 bp, Homo sapiens
ttgccttttgagtat

SEQ ID NO: 518108 - DNA, 15 bp, Homo sapiens
tgccttttgagtatt

SEQ ID NO: 518109 - DNA, 15 bp, Homo sapiens
gccttttgagtattc

SEQ ID NO: 518110 - DNA, 15 bp, Homo sapiens
ccttttgagtattct

SEQ ID NO: 518111 - DNA, 15 bp, Homo sapiens
cttttgagtattctt

SEQ ID NO: 518112 - DNA, 15 bp, Homo sapiens
ttttgagtattcttt

SEQ ID NO: 518113 - DNA, 15 bp, Homo sapiens
tttgagtattctttc

SEQ ID NO: 518114 - DNA, 15 bp, Homo sapiens
ttgagtattctttct

SEQ ID NO: 518115 - DNA, 15 bp, Homo sapiens
tgagtattctttcta

SEQ ID NO: 518116 - DNA, 15 bp, Homo sapiens
gagtattctttctac

SEQ ID NO: 518117 - DNA, 15 bp, Homo sapiens
agtattctttctaca

SEQ ID NO: 518118 - DNA, 15 bp, Homo sapiens
gtattctttctacaa

SEQ ID NO: 518119 - DNA, 15 bp, Homo sapiens
tattctttctacaaa

SEQ ID NO: 518120 - DNA, 15 bp, Homo sapiens
attctttctacaaaa

SEQ ID NO: 518121 - DNA, 15 bp, Homo sapiens
ttctttctacaaaag

SEQ ID NO: 518122 - DNA, 15 bp, Homo sapiens
tctttctacaaaagg

SEQ ID NO: 518123 - DNA, 15 bp, Homo sapiens
ctttctacaaaagga

SEQ ID NO: 518124 - DNA, 15 bp, Homo sapiens
tttctacaaaaggaa

SEQ ID NO: 518125 - DNA, 15 bp, Homo sapiens
ttctacaaaaggaag

SEQ ID NO: 518126 - DNA, 15 bp, Homo sapiens
tctacaaaaggaagt

SEQ ID NO: 518127 - DNA, 15 bp, Homo sapiens
ctacaaaaggaagta

SEQ ID NO: 518128 - DNA, 15 bp, Homo sapiens
tacaaaaggaagtaa

SEQ ID NO: 518129 - DNA, 15 bp, Homo sapiens
acaaaaggaagtaaa

SEQ ID NO: 518130 - DNA, 15 bp, Homo sapiens
caaaaggaagtaaat

SEQ ID NO: 518131 - DNA, 15 bp, Homo sapiens
aaaaggaagtaaatt

SEQ ID NO: 518132 - DNA, 15 bp, Homo sapiens
aaaggaagtaaatta

SEQ ID NO: 518133 - DNA, 15 bp, Homo sapiens
aaggaagtaaattaa

SEQ ID NO: 518134 - DNA, 15 bp, Homo sapiens
aggaagtaaattaaa

SEQ ID NO: 518135 - DNA, 15 bp, Homo sapiens
ggaagtaaattaaat

SEQ ID NO: 518136 - DNA, 15 bp, Homo sapiens
gaagtaaattaaatt

SEQ ID NO: 518137 - DNA, 15 bp, Homo sapiens
aagtaaattaaattg

SEQ ID NO: 518138 - DNA, 15 bp, Homo sapiens
agtaaattaaattgt

SEQ ID NO: 518139 - DNA, 15 bp, Homo sapiens
gtaaattaaattgtt

SEQ ID NO: 518140 - DNA, 15 bp, Homo sapiens
taaattaaattgttc

SEQ ID NO: 518141 - DNA, 15 bp, Homo sapiens
aaattaaattgttct

SEQ ID NO: 518142 - DNA, 15 bp, Homo sapiens
aattaaattgttctt

SEQ ID NO: 518143 - DNA, 15 bp, Homo sapiens
attaaattgttcttt

SEQ ID NO: 518144 - DNA, 15 bp, Homo sapiens
ttaaattgttctttc

SEQ ID NO: 518145 - DNA, 15 bp, Homo sapiens
taaattgttctttct

SEQ ID NO: 518146 - DNA, 15 bp, Homo sapiens
aaattgttctttctt

SEQ ID NO: 518147 - DNA, 15 bp, Homo sapiens
aattgttctttcttt

SEQ ID NO: 518148 - DNA, 15 bp, Homo sapiens
attgttctttctttc

SEQ ID NO: 518149 - DNA, 15 bp, Homo sapiens
ttgttctttctttct

SEQ ID NO: 518150 - DNA, 15 bp, Homo sapiens
tgttctttctttctt

SEQ ID NO: 518151 - DNA, 15 bp, Homo sapiens
gttctttctttcttt

SEQ ID NO: 518152 - DNA, 15 bp, Homo sapiens
ttctttctttcttta

SEQ ID NO: 518153 - DNA, 15 bp, Homo sapiens
tctttctttctttat

SEQ ID NO: 518154 - DNA, 15 bp, Homo sapiens
ctttctttctttata

SEQ ID NO: 518155 - DNA, 15 bp, Homo sapiens
tttctttctttataa

SEQ ID NO: 518156 - DNA, 15 bp, Homo sapiens
ttctttctttataat

SEQ ID NO: 518157 - DNA, 15 bp, Homo sapiens
tctttctttataatt

SEQ ID NO: 518158 - DNA, 15 bp, Homo sapiens
ctttctttataattt

SEQ ID NO: 518159 - DNA, 15 bp, Homo sapiens
tttctttataattta

SEQ ID NO: 518160 - DNA, 15 bp, Homo sapiens
ttctttataatttat

SEQ ID NO: 518161 - DNA, 15 bp, Homo sapiens
tctttataatttata

SEQ ID NO: 518162 - DNA, 15 bp, Homo sapiens
ctttataatttatag

SEQ ID NO: 518163 - DNA, 15 bp, Homo sapiens
tttataatttataga

SEQ ID NO: 518164 - DNA, 15 bp, Homo sapiens
ttataatttatagat

SEQ ID NO: 518165 - DNA, 15 bp, Homo sapiens
tataatttatagatt

SEQ ID NO: 518166 - DNA, 15 bp, Homo sapiens
ataatttatagattt

SEQ ID NO: 518167 - DNA, 15 bp, Homo sapiens
taatttatagatttt

SEQ ID NO: 518168 - DNA, 15 bp, Homo sapiens
aatttatagattttg

SEQ ID NO: 518169 - DNA, 15 bp, Homo sapiens
atttatagattttgc

SEQ ID NO: 518170 - DNA, 15 bp, Homo sapiens
tttatagattttgca

SEQ ID NO: 518171 - DNA, 15 bp, Homo sapiens
ttatagattttgcat

SEQ ID NO: 518172 - DNA, 15 bp, Homo sapiens
tatagattttgcatg

SEQ ID NO: 518173 - DNA, 15 bp, Homo sapiens
atagattttgcatgc

SEQ ID NO: 518174 - DNA, 15 bp, Homo sapiens
tagattttgcatgct

SEQ ID NO: 518175 - DNA, 15 bp, Homo sapiens
agattttgcatgctg

SEQ ID NO: 518176 - DNA, 15 bp, Homo sapiens
gattttgcatgctga

SEQ ID NO: 518177 - DNA, 15 bp, Homo sapiens
attttgcatgctgaa

SEQ ID NO: 518178 - DNA, 15 bp, Homo sapiens
ttttgcatgctgaaa

SEQ ID NO: 518179 - DNA, 15 bp, Homo sapiens
tttgcatgctgaaac

SEQ ID NO: 518180 - DNA, 15 bp, Homo sapiens
ttgcatgctgaaact

SEQ ID NO: 518181 - DNA, 15 bp, Homo sapiens
tgcatgctgaaactt

SEQ ID NO: 518182 - DNA, 15 bp, Homo sapiens
gcatgctgaaacttc

SEQ ID NO: 518183 - DNA, 15 bp, Homo sapiens
catgctgaaacttct

SEQ ID NO: 518184 - DNA, 15 bp, Homo sapiens
atgctgaaacttctc

SEQ ID NO: 518185 - DNA, 15 bp, Homo sapiens
tgctgaaacttctca

SEQ ID NO: 518186 - DNA, 15 bp, Homo sapiens
gctgaaacttctcaa

SEQ ID NO: 518187 - DNA, 15 bp, Homo sapiens
ctgaaacttctcaac

SEQ ID NO: 518188 - DNA, 15 bp, Homo sapiens
tgaaacttctcaacc

SEQ ID NO: 518189 - DNA, 15 bp, Homo sapiens
gaaacttctcaacca

SEQ ID NO: 518190 - DNA, 15 bp, Homo sapiens
aaacttctcaaccag

SEQ ID NO: 518191 - DNA, 15 bp, Homo sapiens
aacttctcaaccaga

SEQ ID NO: 518192 - DNA, 15 bp, Homo sapiens
acttctcaaccagaa

SEQ ID NO: 518193 - DNA, 15 bp, Homo sapiens
cttctcaaccagaag

SEQ ID NO: 518194 - DNA, 15 bp, Homo sapiens
ttctcaaccagaaga

SEQ ID NO: 518195 - DNA, 15 bp, Homo sapiens
tctcaaccagaagaa

SEQ ID NO: 518196 - DNA, 15 bp, Homo sapiens
ctcaaccagaagaaa

SEQ ID NO: 518197 - DNA, 15 bp, Homo sapiens
tcaaccagaagaaag

SEQ ID NO: 518198 - DNA, 15 bp, Homo sapiens
caaccagaagaaagg

SEQ ID NO: 518199 - DNA, 15 bp, Homo sapiens
aaccagaagaaaggg

SEQ ID NO: 518200 - DNA, 15 bp, Homo sapiens
accagaagaaagggc

SEQ ID NO: 518201 - DNA, 15 bp, Homo sapiens
ccagaagaaagggcc

SEQ ID NO: 518202 - DNA, 15 bp, Homo sapiens
cagaagaaagggcct

SEQ ID NO: 518203 - DNA, 15 bp, Homo sapiens
agaagaaagggcctt

SEQ ID NO: 518204 - DNA, 15 bp, Homo sapiens
gaagaaagggccttc

SEQ ID NO: 518205 - DNA, 15 bp, Homo sapiens
aagaaagggccttca

SEQ ID NO: 518206 - DNA, 15 bp, Homo sapiens
agaaagggccttcac

SEQ ID NO: 518207 - DNA, 15 bp, Homo sapiens
gaaagggccttcaca

SEQ ID NO: 518208 - DNA, 15 bp, Homo sapiens
aaagggccttcacag

SEQ ID NO: 518209 - DNA, 15 bp, Homo sapiens
aagggccttcacagt

SEQ ID NO: 518210 - DNA, 15 bp, Homo sapiens
agggccttcacagtg

SEQ ID NO: 518211 - DNA, 15 bp, Homo sapiens
gggccttcacagtgt

SEQ ID NO: 518212 - DNA, 15 bp, Homo sapiens
ggccttcacagtgtc

SEQ ID NO: 518213 - DNA, 15 bp, Homo sapiens
gccttcacagtgtcc

SEQ ID NO: 518214 - DNA, 15 bp, Homo sapiens
ccttcacagtgtcct

SEQ ID NO: 518215 - DNA, 15 bp, Homo sapiens
cttcacagtgtcctt

SEQ ID NO: 518216 - DNA, 15 bp, Homo sapiens
ttcacagtgtccttt

SEQ ID NO: 518217 - DNA, 15 bp, Homo sapiens
tcacagtgtccttta

SEQ ID NO: 518218 - DNA, 15 bp, Homo sapiens
cacagtgtcctttat

SEQ ID NO: 518219 - DNA, 15 bp, Homo sapiens
acagtgtcctttatg

SEQ ID NO: 518220 - DNA, 15 bp, Homo sapiens
cagtgtcctttatgt

SEQ ID NO: 518221 - DNA, 15 bp, Homo sapiens
agtgtcctttatgta

SEQ ID NO: 518222 - DNA, 15 bp, Homo sapiens
gtgtcctttatgtaa

SEQ ID NO: 518223 - DNA, 15 bp, Homo sapiens
tgtcctttatgtaag

SEQ ID NO: 518224 - DNA, 15 bp, Homo sapiens
gtcctttatgtaaga

SEQ ID NO: 518225 - DNA, 15 bp, Homo sapiens
tcctttatgtaagaa

SEQ ID NO: 518226 - DNA, 15 bp, Homo sapiens
cctttatgtaagaat

SEQ ID NO: 518227 - DNA, 15 bp, Homo sapiens
ctttatgtaagaatg

SEQ ID NO: 518228 - DNA, 15 bp, Homo sapiens
tttatgtaagaatga

SEQ ID NO: 518229 - DNA, 15 bp, Homo sapiens
ttatgtaagaatgat

SEQ ID NO: 518230 - DNA, 15 bp, Homo sapiens
tatgtaagaatgata

SEQ ID NO: 518231 - DNA, 15 bp, Homo sapiens
atgtaagaatgatat

SEQ ID NO: 518232 - DNA, 15 bp, Homo sapiens
tgtaagaatgatata

SEQ ID NO: 518233 - DNA, 15 bp, Homo sapiens
gtaagaatgatataa

SEQ ID NO: 518234 - DNA, 15 bp, Homo sapiens
taagaatgatataac

SEQ ID NO: 518235 - DNA, 15 bp, Homo sapiens
aagaatgatataacc

SEQ ID NO: 518236 - DNA, 15 bp, Homo sapiens
agaatgatataacca

SEQ ID NO: 518237 - DNA, 15 bp, Homo sapiens
gaatgatataaccaa

SEQ ID NO: 518238 - DNA, 15 bp, Homo sapiens
aatgatataaccaaa

SEQ ID NO: 518239 - DNA, 15 bp, Homo sapiens
atgatataaccaaaa

SEQ ID NO: 518240 - DNA, 15 bp, Homo sapiens
tgatataaccaaaag

SEQ ID NO: 518241 - DNA, 15 bp, Homo sapiens
gatataaccaaaagg

SEQ ID NO: 518242 - DNA, 15 bp, Homo sapiens
atataaccaaaaggt

SEQ ID NO: 518243 - DNA, 15 bp, Homo sapiens
tataaccaaaaggta

SEQ ID NO: 518244 - DNA, 15 bp, Homo sapiens
ataaccaaaaggtat

SEQ ID NO: 518245 - DNA, 15 bp, Homo sapiens
taaccaaaaggtata

SEQ ID NO: 518246 - DNA, 15 bp, Homo sapiens
aaccaaaaggtatat

SEQ ID NO: 518247 - DNA, 15 bp, Homo sapiens
accaaaaggtatata

SEQ ID NO: 518248 - DNA, 15 bp, Homo sapiens
ccaaaaggtatataa

SEQ ID NO: 518249 - DNA, 15 bp, Homo sapiens
caaaaggtatataat

SEQ ID NO: 518250 - DNA, 15 bp, Homo sapiens
aaaaggtatataatt

SEQ ID NO: 518251 - DNA, 15 bp, Homo sapiens
aaaggtatataattt

SEQ ID NO: 518252 - DNA, 15 bp, Homo sapiens
aaggtatataatttg

SEQ ID NO: 518253 - DNA, 15 bp, Homo sapiens
aggtatataatttgg

SEQ ID NO: 518254 - DNA, 15 bp, Homo sapiens
ggtatataatttggt

SEQ ID NO: 518255 - DNA, 15 bp, Homo sapiens
gtatataatttggta

SEQ ID NO: 518256 - DNA, 15 bp, Homo sapiens
tatataatttggtaa

SEQ ID NO: 518257 - DNA, 15 bp, Homo sapiens
atataatttggtaat

SEQ ID NO: 518258 - DNA, 15 bp, Homo sapiens
tataatttggtaatg

SEQ ID NO: 518259 - DNA, 15 bp, Homo sapiens
ataatttggtaatga

SEQ ID NO: 518260 - DNA, 15 bp, Homo sapiens
taatttggtaatgat

SEQ ID NO: 518261 - DNA, 15 bp, Homo sapiens
aatttggtaatgatg

SEQ ID NO: 518262 - DNA, 15 bp, Homo sapiens
atttggtaatgatgc

SEQ ID NO: 518263 - DNA, 15 bp, Homo sapiens
tttggtaatgatgct

SEQ ID NO: 518264 - DNA, 15 bp, Homo sapiens
ttggtaatgatgcta

SEQ ID NO: 518265 - DNA, 15 bp, Homo sapiens
tggtaatgatgctag

SEQ ID NO: 518266 - DNA, 15 bp, Homo sapiens
ggtaatgatgctagg

SEQ ID NO: 518267 - DNA, 15 bp, Homo sapiens
gtaatgatgctaggt

SEQ ID NO: 518268 - DNA, 15 bp, Homo sapiens
taatgatgctaggtt

SEQ ID NO: 518269 - DNA, 15 bp, Homo sapiens
aatgatgctaggttg

SEQ ID NO: 518270 - DNA, 15 bp, Homo sapiens
atgatgctaggttgg

SEQ ID NO: 518271 - DNA, 15 bp, Homo sapiens
tgatgctaggttgga

SEQ ID NO: 518272 - DNA, 15 bp, Homo sapiens
gatgctaggttggaa

SEQ ID NO: 518273 - DNA, 15 bp, Homo sapiens
atgctaggttggaag

SEQ ID NO: 518274 - DNA, 15 bp, Homo sapiens
tgctaggttggaagc

SEQ ID NO: 518275 - DNA, 15 bp, Homo sapiens
gctaggttggaagca

SEQ ID NO: 518276 - DNA, 15 bp, Homo sapiens
ctaggttggaagcaa

SEQ ID NO: 518277 - DNA, 15 bp, Homo sapiens
taggttggaagcaac

SEQ ID NO: 518278 - DNA, 15 bp, Homo sapiens
aggttggaagcaacc

SEQ ID NO: 518279 - DNA, 15 bp, Homo sapiens
ggttggaagcaacca

SEQ ID NO: 518280 - DNA, 15 bp, Homo sapiens
gttggaagcaaccac

SEQ ID NO: 518281 - DNA, 15 bp, Homo sapiens
ttggaagcaaccaca

SEQ ID NO: 518282 - DNA, 15 bp, Homo sapiens
tggaagcaaccacag

SEQ ID NO: 518283 - DNA, 15 bp, Homo sapiens
ggaagcaaccacagt

SEQ ID NO: 518284 - DNA, 15 bp, Homo sapiens
gaagcaaccacagta

SEQ ID NO: 518285 - DNA, 15 bp, Homo sapiens
aagcaaccacagtag

SEQ ID NO: 518286 - DNA, 15 bp, Homo sapiens
agcaaccacagtagg

SEQ ID NO: 518287 - DNA, 15 bp, Homo sapiens
gcaaccacagtagga

SEQ ID NO: 518288 - DNA, 15 bp, Homo sapiens
caaccacagtaggaa

SEQ ID NO: 518289 - DNA, 15 bp, Homo sapiens
aaccacagtaggaaa

SEQ ID NO: 518290 - DNA, 15 bp, Homo sapiens
accacagtaggaaaa

SEQ ID NO: 518291 - DNA, 15 bp, Homo sapiens
ccacagtaggaaaaa

SEQ ID NO: 518292 - DNA, 15 bp, Homo sapiens
cacagtaggaaaaag

SEQ ID NO: 518293 - DNA, 15 bp, Homo sapiens
acagtaggaaaaagt

SEQ ID NO: 518294 - DNA, 15 bp, Homo sapiens
cagtaggaaaaagta

SEQ ID NO: 518295 - DNA, 15 bp, Homo sapiens
agtaggaaaaagtag

SEQ ID NO: 518296 - DNA, 15 bp, Homo sapiens
gtaggaaaaagtaga

SEQ ID NO: 518297 - DNA, 15 bp, Homo sapiens
taggaaaaagtagaa

SEQ ID NO: 518298 - DNA, 15 bp, Homo sapiens
aggaaaaagtagaaa

SEQ ID NO: 518299 - DNA, 15 bp, Homo sapiens
ggaaaaagtagaaat

SEQ ID NO: 518300 - DNA, 15 bp, Homo sapiens
gaaaaagtagaaatt

SEQ ID NO: 518301 - DNA, 15 bp, Homo sapiens
aaaaagtagaaatta

SEQ ID NO: 518302 - DNA, 15 bp, Homo sapiens
aaaagtagaaattat

SEQ ID NO: 518303 - DNA, 15 bp, Homo sapiens
aaagtagaaattatt

SEQ ID NO: 518304 - DNA, 15 bp, Homo sapiens
aagtagaaattattt

SEQ ID NO: 518305 - DNA, 15 bp, Homo sapiens
agtagaaattattta

SEQ ID NO: 518306 - DNA, 15 bp, Homo sapiens
gtagaaattatttaa

SEQ ID NO: 518307 - DNA, 15 bp, Homo sapiens
tagaaattatttaat

SEQ ID NO: 518308 - DNA, 15 bp, Homo sapiens
agaaattatttaata

SEQ ID NO: 518309 - DNA, 15 bp, Homo sapiens
gaaattatttaataa

SEQ ID NO: 518310 - DNA, 15 bp, Homo sapiens
aaattatttaataac

SEQ ID NO: 518311 - DNA, 15 bp, Homo sapiens
aattatttaataaca

SEQ ID NO: 518312 - DNA, 15 bp, Homo sapiens
attatttaataacat

SEQ ID NO: 518313 - DNA, 15 bp, Homo sapiens
ttatttaataacata

SEQ ID NO: 518314 - DNA, 15 bp, Homo sapiens
tatttaataacatag

SEQ ID NO: 518315 - DNA, 15 bp, Homo sapiens
atttaataacatagc

SEQ ID NO: 518316 - DNA, 15 bp, Homo sapiens
tttaataacatagcg

SEQ ID NO: 518317 - DNA, 15 bp, Homo sapiens
ttaataacatagcgt

SEQ ID NO: 518318 - DNA, 15 bp, Homo sapiens
taataacatagcgtt

SEQ ID NO: 518319 - DNA, 15 bp, Homo sapiens
aataacatagcgttc

SEQ ID NO: 518320 - DNA, 15 bp, Homo sapiens
ataacatagcgttcc

SEQ ID NO: 518321 - DNA, 15 bp, Homo sapiens
taacatagcgttcct

SEQ ID NO: 518322 - DNA, 15 bp, Homo sapiens
aacatagcgttccta

SEQ ID NO: 518323 - DNA, 15 bp, Homo sapiens
acatagcgttcctat

SEQ ID NO: 518324 - DNA, 15 bp, Homo sapiens
catagcgttcctata

SEQ ID NO: 518325 - DNA, 15 bp, Homo sapiens
atagcgttcctataa

SEQ ID NO: 518326 - DNA, 15 bp, Homo sapiens
tagcgttcctataaa

SEQ ID NO: 518327 - DNA, 15 bp, Homo sapiens
agcgttcctataaaa

SEQ ID NO: 518328 - DNA, 15 bp, Homo sapiens
gcgttcctataaaac

SEQ ID NO: 518329 - DNA, 15 bp, Homo sapiens
cgttcctataaaacc

SEQ ID NO: 518330 - DNA, 15 bp, Homo sapiens
gttcctataaaacca

SEQ ID NO: 518331 - DNA, 15 bp, Homo sapiens
ttcctataaaaccat

SEQ ID NO: 518332 - DNA, 15 bp, Homo sapiens
tcctataaaaccatt

SEQ ID NO: 518333 - DNA, 15 bp, Homo sapiens
cctataaaaccattc

SEQ ID NO: 518334 - DNA, 15 bp, Homo sapiens
ctataaaaccattca

SEQ ID NO: 518335 - DNA, 15 bp, Homo sapiens
tataaaaccattcat

SEQ ID NO: 518336 - DNA, 15 bp, Homo sapiens
ataaaaccattcatc

SEQ ID NO: 518337 - DNA, 15 bp, Homo sapiens
taaaaccattcatca

SEQ ID NO: 518338 - DNA, 15 bp, Homo sapiens
aaaaccattcatcag

SEQ ID NO: 518339 - DNA, 15 bp, Homo sapiens
aaaccattcatcaga

SEQ ID NO: 518340 - DNA, 15 bp, Homo sapiens
aaccattcatcagaa

SEQ ID NO: 518341 - DNA, 15 bp, Homo sapiens
accattcatcagaaa

SEQ ID NO: 518342 - DNA, 15 bp, Homo sapiens
ccattcatcagaaaa

SEQ ID NO: 518343 - DNA, 15 bp, Homo sapiens
cattcatcagaaaaa

SEQ ID NO: 518344 - DNA, 15 bp, Homo sapiens
attcatcagaaaaat

SEQ ID NO: 518345 - DNA, 15 bp, Homo sapiens
ttcatcagaaaaatt

SEQ ID NO: 518346 - DNA, 15 bp, Homo sapiens
tcatcagaaaaattt

SEQ ID NO: 518347 - DNA, 15 bp, Homo sapiens
catcagaaaaattta

SEQ ID NO: 518348 - DNA, 15 bp, Homo sapiens
atcagaaaaatttat

SEQ ID NO: 518349 - DNA, 15 bp, Homo sapiens
tcagaaaaatttata

SEQ ID NO: 518350 - DNA, 15 bp, Homo sapiens
cagaaaaatttataa

SEQ ID NO: 518351 - DNA, 15 bp, Homo sapiens
agaaaaatttataaa

SEQ ID NO: 518352 - DNA, 15 bp, Homo sapiens
gaaaaatttataaaa

SEQ ID NO: 518353 - DNA, 15 bp, Homo sapiens
aaaaatttataaaag

SEQ ID NO: 518354 - DNA, 15 bp, Homo sapiens
aaaatttataaaaga

SEQ ID NO: 518355 - DNA, 15 bp, Homo sapiens
aaatttataaaagag

SEQ ID NO: 518356 - DNA, 15 bp, Homo sapiens
aatttataaaagagt

SEQ ID NO: 518357 - DNA, 15 bp, Homo sapiens
atttataaaagagtt

SEQ ID NO: 518358 - DNA, 15 bp, Homo sapiens
tttataaaagagttt

SEQ ID NO: 518359 - DNA, 15 bp, Homo sapiens
ttataaaagagtttt

SEQ ID NO: 518360 - DNA, 15 bp, Homo sapiens
tataaaagagttttt

SEQ ID NO: 518361 - DNA, 15 bp, Homo sapiens
ataaaagagttttta

SEQ ID NO: 518362 - DNA, 15 bp, Homo sapiens
taaaagagtttttag

SEQ ID NO: 518363 - DNA, 15 bp, Homo sapiens
aaaagagtttttagc

SEQ ID NO: 518364 - DNA, 15 bp, Homo sapiens
aaagagtttttagca

SEQ ID NO: 518365 - DNA, 15 bp, Homo sapiens
aagagtttttagcac

SEQ ID NO: 518366 - DNA, 15 bp, Homo sapiens
agagtttttagcaca

SEQ ID NO: 518367 - DNA, 15 bp, Homo sapiens
gagtttttagcacac

SEQ ID NO: 518368 - DNA, 15 bp, Homo sapiens
agtttttagcacaca

SEQ ID NO: 518369 - DNA, 15 bp, Homo sapiens
gtttttagcacacag

SEQ ID NO: 518370 - DNA, 15 bp, Homo sapiens
tttttagcacacagt

SEQ ID NO: 518371 - DNA, 15 bp, Homo sapiens
ttttagcacacagta

SEQ ID NO: 518372 - DNA, 15 bp, Homo sapiens
tttagcacacagtaa

SEQ ID NO: 518373 - DNA, 15 bp, Homo sapiens
ttagcacacagtaaa

SEQ ID NO: 518374 - DNA, 15 bp, Homo sapiens
tagcacacagtaaat

SEQ ID NO: 518375 - DNA, 15 bp, Homo sapiens
agcacacagtaaatt

SEQ ID NO: 518376 - DNA, 15 bp, Homo sapiens
gcacacagtaaatta

SEQ ID NO: 518377 - DNA, 15 bp, Homo sapiens
cacacagtaaattat

SEQ ID NO: 518378 - DNA, 15 bp, Homo sapiens
acacagtaaattatt

SEQ ID NO: 518379 - DNA, 15 bp, Homo sapiens
cacagtaaattattt

SEQ ID NO: 518380 - DNA, 15 bp, Homo sapiens
acagtaaattatttc

SEQ ID NO: 518381 - DNA, 15 bp, Homo sapiens
cagtaaattatttcc

SEQ ID NO: 518382 - DNA, 15 bp, Homo sapiens
agtaaattatttcca

SEQ ID NO: 518383 - DNA, 15 bp, Homo sapiens
gtaaattatttccaa

SEQ ID NO: 518384 - DNA, 15 bp, Homo sapiens
taaattatttccaaa

SEQ ID NO: 518385 - DNA, 15 bp, Homo sapiens
aaattatttccaaag

SEQ ID NO: 518386 - DNA, 15 bp, Homo sapiens
aattatttccaaagt

SEQ ID NO: 518387 - DNA, 15 bp, Homo sapiens
attatttccaaagtt

SEQ ID NO: 518388 - DNA, 15 bp, Homo sapiens
ttatttccaaagtta

SEQ ID NO: 518389 - DNA, 15 bp, Homo sapiens
tatttccaaagttat

SEQ ID NO: 518390 - DNA, 15 bp, Homo sapiens
atttccaaagttatt

SEQ ID NO: 518391 - DNA, 15 bp, Homo sapiens
tttccaaagttattt

SEQ ID NO: 518392 - DNA, 15 bp, Homo sapiens
ttccaaagttatttt

SEQ ID NO: 518393 - DNA, 15 bp, Homo sapiens
tccaaagttattttc

SEQ ID NO: 518394 - DNA, 15 bp, Homo sapiens
ccaaagttattttcc

SEQ ID NO: 518395 - DNA, 15 bp, Homo sapiens
caaagttattttcct

SEQ ID NO: 518396 - DNA, 15 bp, Homo sapiens
aaagttattttcctg

SEQ ID NO: 518397 - DNA, 15 bp, Homo sapiens
aagttattttcctga

SEQ ID NO: 518398 - DNA, 15 bp, Homo sapiens
agttattttcctgaa

SEQ ID NO: 518399 - DNA, 15 bp, Homo sapiens
gttattttcctgaaa

SEQ ID NO: 518400 - DNA, 15 bp, Homo sapiens
ttattttcctgaaag

SEQ ID NO: 518401 - DNA, 15 bp, Homo sapiens
tattttcctgaaagt

SEQ ID NO: 518402 - DNA, 15 bp, Homo sapiens
attttcctgaaagtt

SEQ ID NO: 518403 - DNA, 15 bp, Homo sapiens
ttttcctgaaagttt

SEQ ID NO: 518404 - DNA, 15 bp, Homo sapiens
tttcctgaaagtttt

SEQ ID NO: 518405 - DNA, 15 bp, Homo sapiens
ttcctgaaagtttta

SEQ ID NO: 518406 - DNA, 15 bp, Homo sapiens
tcctgaaagttttat

SEQ ID NO: 518407 - DNA, 15 bp, Homo sapiens
cctgaaagttttatg

SEQ ID NO: 518408 - DNA, 15 bp, Homo sapiens
ctgaaagttttatgg

SEQ ID NO: 518409 - DNA, 15 bp, Homo sapiens
tgaaagttttatggg

SEQ ID NO: 518410 - DNA, 15 bp, Homo sapiens
gaaagttttatggga

SEQ ID NO: 518411 - DNA, 15 bp, Homo sapiens
aaagttttatgggac

SEQ ID NO: 518412 - DNA, 15 bp, Homo sapiens
aagttttatgggaca

SEQ ID NO: 518413 - DNA, 15 bp, Homo sapiens
agttttatgggacat

SEQ ID NO: 518414 - DNA, 15 bp, Homo sapiens
gttttatgggacatc

SEQ ID NO: 518415 - DNA, 15 bp, Homo sapiens
ttttatgggacatct

SEQ ID NO: 518416 - DNA, 15 bp, Homo sapiens
tttatgggacatctg

SEQ ID NO: 518417 - DNA, 15 bp, Homo sapiens
ttatgggacatctgc

SEQ ID NO: 518418 - DNA, 15 bp, Homo sapiens
tatgggacatctgcc

SEQ ID NO: 518419 - DNA, 15 bp, Homo sapiens
atgggacatctgcct

SEQ ID NO: 518420 - DNA, 15 bp, Homo sapiens
tgggacatctgcctt

SEQ ID NO: 518421 - DNA, 15 bp, Homo sapiens
gggacatctgcctta

SEQ ID NO: 518422 - DNA, 15 bp, Homo sapiens
ggacatctgccttat

SEQ ID NO: 518423 - DNA, 15 bp, Homo sapiens
gacatctgccttata

SEQ ID NO: 518424 - DNA, 15 bp, Homo sapiens
acatctgccttatac

SEQ ID NO: 518425 - DNA, 15 bp, Homo sapiens
catctgccttataca

SEQ ID NO: 518426 - DNA, 15 bp, Homo sapiens
atctgccttatacag

SEQ ID NO: 518427 - DNA, 15 bp, Homo sapiens
tctgccttatacagg

SEQ ID NO: 518428 - DNA, 15 bp, Homo sapiens
ctgccttatacaggt

SEQ ID NO: 518429 - DNA, 15 bp, Homo sapiens
tgccttatacaggta

SEQ ID NO: 518430 - DNA, 15 bp, Homo sapiens
gccttatacaggtat

SEQ ID NO: 518431 - DNA, 15 bp, Homo sapiens
ccttatacaggtatt

SEQ ID NO: 518432 - DNA, 15 bp, Homo sapiens
cttatacaggtatta

SEQ ID NO: 518433 - DNA, 15 bp, Homo sapiens
ttatacaggtattag

SEQ ID NO: 518434 - DNA, 15 bp, Homo sapiens
tatacaggtattaga

SEQ ID NO: 518435 - DNA, 15 bp, Homo sapiens
atacaggtattagaa

SEQ ID NO: 518436 - DNA, 15 bp, Homo sapiens
tacaggtattagaaa

SEQ ID NO: 518437 - DNA, 15 bp, Homo sapiens
acaggtattagaaac

SEQ ID NO: 518438 - DNA, 15 bp, Homo sapiens
caggtattagaaact

SEQ ID NO: 518439 - DNA, 15 bp, Homo sapiens
aggtattagaaactt

SEQ ID NO: 518440 - DNA, 15 bp, Homo sapiens
ggtattagaaactta

SEQ ID NO: 518441 - DNA, 15 bp, Homo sapiens
gtattagaaacttac

SEQ ID NO: 518442 - DNA, 15 bp, Homo sapiens
tattagaaacttact

SEQ ID NO: 518443 - DNA, 15 bp, Homo sapiens
attagaaacttactg

SEQ ID NO: 518444 - DNA, 15 bp, Homo sapiens
ttagaaacttactgc

SEQ ID NO: 518445 - DNA, 15 bp, Homo sapiens
tagaaacttactgcc

SEQ ID NO: 518446 - DNA, 15 bp, Homo sapiens
agaaacttactgcct

SEQ ID NO: 518447 - DNA, 15 bp, Homo sapiens
gaaacttactgcctt

SEQ ID NO: 518448 - DNA, 15 bp, Homo sapiens
aaacttactgccttt

SEQ ID NO: 518449 - DNA, 15 bp, Homo sapiens
aacttactgcctttc

SEQ ID NO: 518450 - DNA, 15 bp, Homo sapiens
acttactgcctttct

SEQ ID NO: 518451 - DNA, 15 bp, Homo sapiens
cttactgcctttctc

SEQ ID NO: 518452 - DNA, 15 bp, Homo sapiens
ttactgcctttctct

SEQ ID NO: 518453 - DNA, 15 bp, Homo sapiens
tactgcctttctcta

SEQ ID NO: 518454 - DNA, 15 bp, Homo sapiens
actgcctttctctaa

SEQ ID NO: 518455 - DNA, 15 bp, Homo sapiens
ctgcctttctctaat

SEQ ID NO: 518456 - DNA, 15 bp, Homo sapiens
tgcctttctctaatg

SEQ ID NO: 518457 - DNA, 15 bp, Homo sapiens
gcctttctctaatgc

SEQ ID NO: 518458 - DNA, 15 bp, Homo sapiens
cctttctctaatgct

SEQ ID NO: 518459 - DNA, 15 bp, Homo sapiens
ctttctctaatgctt

SEQ ID NO: 518460 - DNA, 15 bp, Homo sapiens
tttctctaatgcttc

SEQ ID NO: 518461 - DNA, 15 bp, Homo sapiens
ttctctaatgcttct

SEQ ID NO: 518462 - DNA, 15 bp, Homo sapiens
tctctaatgcttcta

SEQ ID NO: 518463 - DNA, 15 bp, Homo sapiens
ctctaatgcttctag

SEQ ID NO: 518464 - DNA, 15 bp, Homo sapiens
tctaatgcttctagt

SEQ ID NO: 518465 - DNA, 15 bp, Homo sapiens
ctaatgcttctagtg

SEQ ID NO: 518466 - DNA, 15 bp, Homo sapiens
taatgcttctagtgt

SEQ ID NO: 518467 - DNA, 15 bp, Homo sapiens
aatgcttctagtgta

SEQ ID NO: 518468 - DNA, 15 bp, Homo sapiens
atgcttctagtgtaa

SEQ ID NO: 518469 - DNA, 15 bp, Homo sapiens
tgcttctagtgtaaa

SEQ ID NO: 518470 - DNA, 15 bp, Homo sapiens
gcttctagtgtaaaa

SEQ ID NO: 518471 - DNA, 15 bp, Homo sapiens
cttctagtgtaaaaa

SEQ ID NO: 518472 - DNA, 15 bp, Homo sapiens
ttctagtgtaaaaac

SEQ ID NO: 518473 - DNA, 15 bp, Homo sapiens
tctagtgtaaaaact

SEQ ID NO: 518474 - DNA, 15 bp, Homo sapiens
ctagtgtaaaaactt

SEQ ID NO: 518475 - DNA, 15 bp, Homo sapiens
tagtgtaaaaacttg

SEQ ID NO: 518476 - DNA, 15 bp, Homo sapiens
agtgtaaaaacttgc

SEQ ID NO: 518477 - DNA, 15 bp, Homo sapiens
gtgtaaaaacttgca

SEQ ID NO: 518478 - DNA, 15 bp, Homo sapiens
tgtaaaaacttgcag

SEQ ID NO: 518479 - DNA, 15 bp, Homo sapiens
gtaaaaacttgcaga

SEQ ID NO: 518480 - DNA, 15 bp, Homo sapiens
taaaaacttgcagac

SEQ ID NO: 518481 - DNA, 15 bp, Homo sapiens
aaaaacttgcagact

SEQ ID NO: 518482 - DNA, 15 bp, Homo sapiens
aaaacttgcagactt

SEQ ID NO: 518483 - DNA, 15 bp, Homo sapiens
aaacttgcagactta

SEQ ID NO: 518484 - DNA, 15 bp, Homo sapiens
aacttgcagacttat

SEQ ID NO: 518485 - DNA, 15 bp, Homo sapiens
acttgcagacttatg

SEQ ID NO: 518486 - DNA, 15 bp, Homo sapiens
cttgcagacttatgt

SEQ ID NO: 518487 - DNA, 15 bp, Homo sapiens
ttgcagacttatgta

SEQ ID NO: 518488 - DNA, 15 bp, Homo sapiens
tgcagacttatgtaa

SEQ ID NO: 518489 - DNA, 15 bp, Homo sapiens
gcagacttatgtaaa

SEQ ID NO: 518490 - DNA, 15 bp, Homo sapiens
cagacttatgtaaag

SEQ ID NO: 518491 - DNA, 15 bp, Homo sapiens
agacttatgtaaagt

SEQ ID NO: 518492 - DNA, 15 bp, Homo sapiens
gacttatgtaaagta

SEQ ID NO: 518493 - DNA, 15 bp, Homo sapiens
acttatgtaaagtag

SEQ ID NO: 518494 - DNA, 15 bp, Homo sapiens
cttatgtaaagtagg

SEQ ID NO: 518495 - DNA, 15 bp, Homo sapiens
ttatgtaaagtaggg

SEQ ID NO: 518496 - DNA, 15 bp, Homo sapiens
tatgtaaagtagggc

SEQ ID NO: 518497 - DNA, 15 bp, Homo sapiens
atgtaaagtagggct

SEQ ID NO: 518498 - DNA, 15 bp, Homo sapiens
tgtaaagtagggctg

SEQ ID NO: 518499 - DNA, 15 bp, Homo sapiens
gtaaagtagggctgt

SEQ ID NO: 518500 - DNA, 15 bp, Homo sapiens
taaagtagggctgta

SEQ ID NO: 518501 - DNA, 15 bp, Homo sapiens
aaagtagggctgtat

SEQ ID NO: 518502 - DNA, 15 bp, Homo sapiens
aagtagggctgtatc

SEQ ID NO: 518503 - DNA, 15 bp, Homo sapiens
agtagggctgtatcg

SEQ ID NO: 518504 - DNA, 15 bp, Homo sapiens
gtagggctgtatcgc

SEQ ID NO: 518505 - DNA, 15 bp, Homo sapiens
tagggctgtatcgcc

SEQ ID NO: 518506 - DNA, 15 bp, Homo sapiens
agggctgtatcgccg

SEQ ID NO: 518507 - DNA, 15 bp, Homo sapiens
gggctgtatcgccgt

SEQ ID NO: 518508 - DNA, 15 bp, Homo sapiens
ggctgtatcgccgtg

SEQ ID NO: 518509 - DNA, 15 bp, Homo sapiens
gctgtatcgccgtgc

SEQ ID NO: 518510 - DNA, 15 bp, Homo sapiens
ctgtatcgccgtgcc

SEQ ID NO: 518511 - DNA, 15 bp, Homo sapiens
tgtatcgccgtgccc

SEQ ID NO: 518512 - DNA, 15 bp, Homo sapiens
gtatcgccgtgcccc

SEQ ID NO: 518513 - DNA, 15 bp, Homo sapiens
tatcgccgtgccccc

SEQ ID NO: 518514 - DNA, 15 bp, Homo sapiens
atcgccgtgccccca

SEQ ID NO: 518515 - DNA, 15 bp, Homo sapiens
tcgccgtgcccccat

SEQ ID NO: 518516 - DNA, 15 bp, Homo sapiens
cgccgtgcccccatt

SEQ ID NO: 518517 - DNA, 15 bp, Homo sapiens
gccgtgcccccattg

SEQ ID NO: 518518 - DNA, 15 bp, Homo sapiens
ccgtgcccccattgt

SEQ ID NO: 518519 - DNA, 15 bp, Homo sapiens
cgtgcccccattgtc

SEQ ID NO: 518520 - DNA, 15 bp, Homo sapiens
gtgcccccattgtct

SEQ ID NO: 518521 - DNA, 15 bp, Homo sapiens
tgcccccattgtctg

SEQ ID NO: 518522 - DNA, 15 bp, Homo sapiens
gcccccattgtctgt

SEQ ID NO: 518523 - DNA, 15 bp, Homo sapiens
cccccattgtctgtt

SEQ ID NO: 518524 - DNA, 15 bp, Homo sapiens
ccccattgtctgtta

SEQ ID NO: 518525 - DNA, 15 bp, Homo sapiens
cccattgtctgttaa

SEQ ID NO: 518526 - DNA, 15 bp, Homo sapiens
ccattgtctgttaat

SEQ ID NO: 518527 - DNA, 15 bp, Homo sapiens
cattgtctgttaatc

SEQ ID NO: 518528 - DNA, 15 bp, Homo sapiens
attgtctgttaatct

SEQ ID NO: 518529 - DNA, 15 bp, Homo sapiens
ttgtctgttaatctt

SEQ ID NO: 518530 - DNA, 15 bp, Homo sapiens
tgtctgttaatcttg

SEQ ID NO: 518531 - DNA, 15 bp, Homo sapiens
gtctgttaatcttgt

SEQ ID NO: 518532 - DNA, 15 bp, Homo sapiens
tctgttaatcttgtt

SEQ ID NO: 518533 - DNA, 15 bp, Homo sapiens
ctgttaatcttgttt

SEQ ID NO: 518534 - DNA, 15 bp, Homo sapiens
tgttaatcttgtttt

SEQ ID NO: 518535 - DNA, 15 bp, Homo sapiens
gttaatcttgttttt

SEQ ID NO: 518536 - DNA, 15 bp, Homo sapiens
ttaatcttgttttta

SEQ ID NO: 518537 - DNA, 15 bp, Homo sapiens
taatcttgtttttat

SEQ ID NO: 518538 - DNA, 15 bp, Homo sapiens
aatcttgtttttata

SEQ ID NO: 518539 - DNA, 15 bp, Homo sapiens
atcttgtttttatat

SEQ ID NO: 518540 - DNA, 15 bp, Homo sapiens
tcttgtttttatatt

SEQ ID NO: 518541 - DNA, 15 bp, Homo sapiens
cttgtttttatattt

SEQ ID NO: 518542 - DNA, 15 bp, Homo sapiens
ttgtttttatatttt

SEQ ID NO: 518543 - DNA, 15 bp, Homo sapiens
tgtttttatattttt

SEQ ID NO: 518544 - DNA, 15 bp, Homo sapiens
gtttttatatttttg

SEQ ID NO: 518545 - DNA, 15 bp, Homo sapiens
tttttatatttttga

SEQ ID NO: 518546 - DNA, 15 bp, Homo sapiens
ttttatatttttgat

SEQ ID NO: 518547 - DNA, 15 bp, Homo sapiens
tttatatttttgatt

SEQ ID NO: 518548 - DNA, 15 bp, Homo sapiens
ttatatttttgattg

SEQ ID NO: 518549 - DNA, 15 bp, Homo sapiens
tatatttttgattgt

SEQ ID NO: 518550 - DNA, 15 bp, Homo sapiens
atatttttgattgtg

SEQ ID NO: 518551 - DNA, 15 bp, Homo sapiens
tatttttgattgtgt

SEQ ID NO: 518552 - DNA, 15 bp, Homo sapiens
atttttgattgtgtt

SEQ ID NO: 518553 - DNA, 15 bp, Homo sapiens
tttttgattgtgttt

SEQ ID NO: 518554 - DNA, 15 bp, Homo sapiens
ttttgattgtgtttc

SEQ ID NO: 518555 - DNA, 15 bp, Homo sapiens
tttgattgtgtttcc

SEQ ID NO: 518556 - DNA, 15 bp, Homo sapiens
ttgattgtgtttcct

SEQ ID NO: 518557 - DNA, 15 bp, Homo sapiens
tgattgtgtttcctt

SEQ ID NO: 518558 - DNA, 15 bp, Homo sapiens
gattgtgtttccttt

SEQ ID NO: 518559 - DNA, 15 bp, Homo sapiens
attgtgtttcctttt

SEQ ID NO: 518560 - DNA, 15 bp, Homo sapiens
ttgtgtttccttttc

SEQ ID NO: 518561 - DNA, 15 bp, Homo sapiens
tgtgtttccttttct

SEQ ID NO: 518562 - DNA, 15 bp, Homo sapiens
gtgtttccttttctt

SEQ ID NO: 518563 - DNA, 15 bp, Homo sapiens
tgtttccttttcttt

SEQ ID NO: 518564 - DNA, 15 bp, Homo sapiens
gtttccttttctttt

SEQ ID NO: 518565 - DNA, 15 bp, Homo sapiens
tttccttttcttttt

SEQ ID NO: 518566 - DNA, 15 bp, Homo sapiens
ttccttttctttttt

SEQ ID NO: 518567 - DNA, 15 bp, Homo sapiens
tttttttttttttta

SEQ ID NO: 518568 - DNA, 15 bp, Homo sapiens
tttttttttttttaa

SEQ ID NO: 518569 - DNA, 15 bp, Homo sapiens
ttttttttttttaag

SEQ ID NO: 518570 - DNA, 15 bp, Homo sapiens
tttttttttttaaga

SEQ ID NO: 518571 - DNA, 15 bp, Homo sapiens
ttttttttttaagac

SEQ ID NO: 518572 - DNA, 15 bp, Homo sapiens
tttttttttaagaca

SEQ ID NO: 518573 - DNA, 15 bp, Homo sapiens
ttttttttaagacag

SEQ ID NO: 518574 - DNA, 15 bp, Homo sapiens
tttttttaagacagg

SEQ ID NO: 518575 - DNA, 15 bp, Homo sapiens
ttttttaagacaggg

SEQ ID NO: 518576 - DNA, 15 bp, Homo sapiens
tttttaagacagggt

SEQ ID NO: 518577 - DNA, 15 bp, Homo sapiens
ttttaagacagggtc

SEQ ID NO: 518578 - DNA, 15 bp, Homo sapiens
tttaagacagggtcc

SEQ ID NO: 518579 - DNA, 15 bp, Homo sapiens
ttaagacagggtcct

SEQ ID NO: 518580 - DNA, 15 bp, Homo sapiens
taagacagggtcctg

SEQ ID NO: 518581 - DNA, 15 bp, Homo sapiens
aagacagggtcctgc

SEQ ID NO: 518582 - DNA, 15 bp, Homo sapiens
agacagggtcctgct

SEQ ID NO: 518583 - DNA, 15 bp, Homo sapiens
gacagggtcctgctc

SEQ ID NO: 518584 - DNA, 15 bp, Homo sapiens
acagggtcctgctct

SEQ ID NO: 518585 - DNA, 15 bp, Homo sapiens
cagggtcctgctctg

SEQ ID NO: 518586 - DNA, 15 bp, Homo sapiens
agggtcctgctctgt

SEQ ID NO: 518587 - DNA, 15 bp, Homo sapiens
gggtcctgctctgtc

SEQ ID NO: 518588 - DNA, 15 bp, Homo sapiens
ggtcctgctctgtca

SEQ ID NO: 518589 - DNA, 15 bp, Homo sapiens
gtcctgctctgtcac

SEQ ID NO: 518590 - DNA, 15 bp, Homo sapiens
tcctgctctgtcact

SEQ ID NO: 518591 - DNA, 15 bp, Homo sapiens
cctgctctgtcactg

SEQ ID NO: 518592 - DNA, 15 bp, Homo sapiens
ctgctctgtcactga

SEQ ID NO: 518593 - DNA, 15 bp, Homo sapiens
tgctctgtcactgag

SEQ ID NO: 518594 - DNA, 15 bp, Homo sapiens
gctctgtcactgagg

SEQ ID NO: 518595 - DNA, 15 bp, Homo sapiens
ctctgtcactgaggc

SEQ ID NO: 518596 - DNA, 15 bp, Homo sapiens
tctgtcactgaggct

SEQ ID NO: 518597 - DNA, 15 bp, Homo sapiens
ctgtcactgaggctg

SEQ ID NO: 518598 - DNA, 15 bp, Homo sapiens
tgtcactgaggctgg

SEQ ID NO: 518599 - DNA, 15 bp, Homo sapiens
gtcactgaggctgga

SEQ ID NO: 518600 - DNA, 15 bp, Homo sapiens
tcactgaggctggag

SEQ ID NO: 518601 - DNA, 15 bp, Homo sapiens
cactgaggctggagt

SEQ ID NO: 518602 - DNA, 15 bp, Homo sapiens
actgaggctggagtg

SEQ ID NO: 518603 - DNA, 15 bp, Homo sapiens
ctgaggctggagtgc

SEQ ID NO: 518604 - DNA, 15 bp, Homo sapiens
tgaggctggagtgca

SEQ ID NO: 518605 - DNA, 15 bp, Homo sapiens
ggagtgcagtggcgt

SEQ ID NO: 518606 - DNA, 15 bp, Homo sapiens
gagtgcagtggcgtg

SEQ ID NO: 518607 - DNA, 15 bp, Homo sapiens
agtgcagtggcgtga

SEQ ID NO: 518608 - DNA, 15 bp, Homo sapiens
gtgcagtggcgtgat

SEQ ID NO: 518609 - DNA, 15 bp, Homo sapiens
tgcagtggcgtgatc

SEQ ID NO: 518610 - DNA, 15 bp, Homo sapiens
gcagtggcgtgatct

SEQ ID NO: 518611 - DNA, 15 bp, Homo sapiens
cagtggcgtgatctc

SEQ ID NO: 518612 - DNA, 15 bp, Homo sapiens
agtggcgtgatctcg

SEQ ID NO: 518613 - DNA, 15 bp, Homo sapiens
gtggcgtgatctcgg

SEQ ID NO: 518614 - DNA, 15 bp, Homo sapiens
tggcgtgatctcggc

SEQ ID NO: 518615 - DNA, 15 bp, Homo sapiens
ggcgtgatctcggct

SEQ ID NO: 518616 - DNA, 15 bp, Homo sapiens
gcgtgatctcggctc

SEQ ID NO: 518617 - DNA, 15 bp, Homo sapiens
cgtgatctcggctca

SEQ ID NO: 518618 - DNA, 15 bp, Homo sapiens
atctcggctcactgt

SEQ ID NO: 518619 - DNA, 15 bp, Homo sapiens
tctcggctcactgta

SEQ ID NO: 518620 - DNA, 15 bp, Homo sapiens
ctcggctcactgtag

SEQ ID NO: 518621 - DNA, 15 bp, Homo sapiens
tcggctcactgtagc

SEQ ID NO: 518622 - DNA, 15 bp, Homo sapiens
cggctcactgtagcc

SEQ ID NO: 518623 - DNA, 15 bp, Homo sapiens
ggctcactgtagcct

SEQ ID NO: 518624 - DNA, 15 bp, Homo sapiens
gctcactgtagcctc

SEQ ID NO: 518625 - DNA, 15 bp, Homo sapiens
ctcactgtagcctct

SEQ ID NO: 518626 - DNA, 15 bp, Homo sapiens
tcactgtagcctctg

SEQ ID NO: 518627 - DNA, 15 bp, Homo sapiens
cactgtagcctctgt

SEQ ID NO: 518628 - DNA, 15 bp, Homo sapiens
actgtagcctctgtc

SEQ ID NO: 518629 - DNA, 15 bp, Homo sapiens
ctgtagcctctgtct

SEQ ID NO: 518630 - DNA, 15 bp, Homo sapiens
tgtagcctctgtctc

SEQ ID NO: 518631 - DNA, 15 bp, Homo sapiens
gtagcctctgtctcc

SEQ ID NO: 518632 - DNA, 15 bp, Homo sapiens
tagcctctgtctccc

SEQ ID NO: 518633 - DNA, 15 bp, Homo sapiens
agcctctgtctccca

SEQ ID NO: 518634 - DNA, 15 bp, Homo sapiens
gcctctgtctcccag

SEQ ID NO: 518635 - DNA, 15 bp, Homo sapiens
cctctgtctcccagc

SEQ ID NO: 518636 - DNA, 15 bp, Homo sapiens
ctctgtctcccagcc

SEQ ID NO: 518637 - DNA, 15 bp, Homo sapiens
tctgtctcccagcct

SEQ ID NO: 518638 - DNA, 15 bp, Homo sapiens
ctgtctcccagcctc

SEQ ID NO: 518639 - DNA, 15 bp, Homo sapiens
tgtctcccagcctct

SEQ ID NO: 518640 - DNA, 15 bp, Homo sapiens
gtctcccagcctctt

SEQ ID NO: 518641 - DNA, 15 bp, Homo sapiens
tctcccagcctcttc

SEQ ID NO: 518642 - DNA, 15 bp, Homo sapiens
ctcccagcctcttcc

SEQ ID NO: 518643 - DNA, 15 bp, Homo sapiens
tcccagcctcttcct

SEQ ID NO: 518644 - DNA, 15 bp, Homo sapiens
cccagcctcttcctg

SEQ ID NO: 518645 - DNA, 15 bp, Homo sapiens
ccagcctcttcctgc

SEQ ID NO: 518646 - DNA, 15 bp, Homo sapiens
cagcctcttcctgcc

SEQ ID NO: 518647 - DNA, 15 bp, Homo sapiens
agcctcttcctgcct

SEQ ID NO: 518648 - DNA, 15 bp, Homo sapiens
gcctcttcctgcctt

SEQ ID NO: 518649 - DNA, 15 bp, Homo sapiens
cctcttcctgcctta

SEQ ID NO: 518650 - DNA, 15 bp, Homo sapiens
ctcttcctgccttag

SEQ ID NO: 518651 - DNA, 15 bp, Homo sapiens
tcttcctgccttagc

SEQ ID NO: 518652 - DNA, 15 bp, Homo sapiens
cttcctgccttagcc

SEQ ID NO: 518653 - DNA, 15 bp, Homo sapiens
ttcctgccttagcct

SEQ ID NO: 518654 - DNA, 15 bp, Homo sapiens
ccttagcctcccaaa

SEQ ID NO: 518655 - DNA, 15 bp, Homo sapiens
cttagcctcccaaat

SEQ ID NO: 518656 - DNA, 15 bp, Homo sapiens
ttagcctcccaaata

SEQ ID NO: 518657 - DNA, 15 bp, Homo sapiens
tagcctcccaaatag

SEQ ID NO: 518658 - DNA, 15 bp, Homo sapiens
agcctcccaaatagc

SEQ ID NO: 518659 - DNA, 15 bp, Homo sapiens
gcctcccaaatagct

SEQ ID NO: 518660 - DNA, 15 bp, Homo sapiens
cctcccaaatagctg

SEQ ID NO: 518661 - DNA, 15 bp, Homo sapiens
ctcccaaatagctgg

SEQ ID NO: 518662 - DNA, 15 bp, Homo sapiens
tcccaaatagctggg

SEQ ID NO: 518663 - DNA, 15 bp, Homo sapiens
cccaaatagctggga

SEQ ID NO: 518664 - DNA, 15 bp, Homo sapiens
ccaaatagctgggac

SEQ ID NO: 518665 - DNA, 15 bp, Homo sapiens
caaatagctgggact

SEQ ID NO: 518666 - DNA, 15 bp, Homo sapiens
aaatagctgggacta

SEQ ID NO: 518667 - DNA, 15 bp, Homo sapiens
gggactacaggcaca

SEQ ID NO: 518668 - DNA, 15 bp, Homo sapiens
ggactacaggcacac

SEQ ID NO: 518669 - DNA, 15 bp, Homo sapiens
gactacaggcacacg

SEQ ID NO: 518670 - DNA, 15 bp, Homo sapiens
actacaggcacacgc

SEQ ID NO: 518671 - DNA, 15 bp, Homo sapiens
ctacaggcacacgct

SEQ ID NO: 518672 - DNA, 15 bp, Homo sapiens
tacaggcacacgcta

SEQ ID NO: 518673 - DNA, 15 bp, Homo sapiens
acaggcacacgctac

SEQ ID NO: 518674 - DNA, 15 bp, Homo sapiens
caggcacacgctacc

SEQ ID NO: 518675 - DNA, 15 bp, Homo sapiens
aggcacacgctacca

SEQ ID NO: 518676 - DNA, 15 bp, Homo sapiens
ggcacacgctaccat

SEQ ID NO: 518677 - DNA, 15 bp, Homo sapiens
gcacacgctaccatg

SEQ ID NO: 518678 - DNA, 15 bp, Homo sapiens
cacacgctaccatgc

SEQ ID NO: 518679 - DNA, 15 bp, Homo sapiens
acacgctaccatgcc

SEQ ID NO: 518680 - DNA, 15 bp, Homo sapiens
cacgctaccatgccc

SEQ ID NO: 518681 - DNA, 15 bp, Homo sapiens
acgctaccatgcccg

SEQ ID NO: 518682 - DNA, 15 bp, Homo sapiens
cgctaccatgcccgg

SEQ ID NO: 518683 - DNA, 15 bp, Homo sapiens
gctaccatgcccggc

SEQ ID NO: 518684 - DNA, 15 bp, Homo sapiens
ctaccatgcccggcc

SEQ ID NO: 518685 - DNA, 15 bp, Homo sapiens
taccatgcccggcca

SEQ ID NO: 518686 - DNA, 15 bp, Homo sapiens
accatgcccggccaa

SEQ ID NO: 518687 - DNA, 15 bp, Homo sapiens
ccatgcccggccaat

SEQ ID NO: 518688 - DNA, 15 bp, Homo sapiens
catgcccggccaatt

SEQ ID NO: 518689 - DNA, 15 bp, Homo sapiens
atgcccggccaattt

SEQ ID NO: 518690 - DNA, 15 bp, Homo sapiens
tgcccggccaatttt

SEQ ID NO: 518691 - DNA, 15 bp, Homo sapiens
gcccggccaattttt

SEQ ID NO: 518692 - DNA, 15 bp, Homo sapiens
cccggccaatttttg

SEQ ID NO: 518693 - DNA, 15 bp, Homo sapiens
ccggccaatttttgt

SEQ ID NO: 518694 - DNA, 15 bp, Homo sapiens
cggccaatttttgta

SEQ ID NO: 518695 - DNA, 15 bp, Homo sapiens
ggccaatttttgtat

SEQ ID NO: 518696 - DNA, 15 bp, Homo sapiens
gccaatttttgtatt

SEQ ID NO: 518697 - DNA, 15 bp, Homo sapiens
ccaatttttgtattt

SEQ ID NO: 518698 - DNA, 15 bp, Homo sapiens
caatttttgtatttt

SEQ ID NO: 518699 - DNA, 15 bp, Homo sapiens
tttttgtattttttg

SEQ ID NO: 518700 - DNA, 15 bp, Homo sapiens
tttgtattttttgta

SEQ ID NO: 518701 - DNA, 15 bp, Homo sapiens
ttgtattttttgtag

SEQ ID NO: 518702 - DNA, 15 bp, Homo sapiens
tgtattttttgtaga

SEQ ID NO: 518703 - DNA, 15 bp, Homo sapiens
gtattttttgtagag

SEQ ID NO: 518704 - DNA, 15 bp, Homo sapiens
tattttttgtagaga

SEQ ID NO: 518705 - DNA, 15 bp, Homo sapiens
attttttgtagagat

SEQ ID NO: 518706 - DNA, 15 bp, Homo sapiens
ttttttgtagagatg

SEQ ID NO: 518707 - DNA, 15 bp, Homo sapiens
tttttgtagagatga

SEQ ID NO: 518708 - DNA, 15 bp, Homo sapiens
ttttgtagagatgag

SEQ ID NO: 518709 - DNA, 15 bp, Homo sapiens
tttgtagagatgagg

SEQ ID NO: 518710 - DNA, 15 bp, Homo sapiens
ttgtagagatgaggt

SEQ ID NO: 518711 - DNA, 15 bp, Homo sapiens
tgtagagatgaggtt

SEQ ID NO: 518712 - DNA, 15 bp, Homo sapiens
gtagagatgaggttt

SEQ ID NO: 518713 - DNA, 15 bp, Homo sapiens
tagagatgaggtttt

SEQ ID NO: 518714 - DNA, 15 bp, Homo sapiens
agagatgaggtttta

SEQ ID NO: 518715 - DNA, 15 bp, Homo sapiens
gagatgaggttttac

SEQ ID NO: 518716 - DNA, 15 bp, Homo sapiens
agatgaggttttacc

SEQ ID NO: 518717 - DNA, 15 bp, Homo sapiens
gatgaggttttacca

SEQ ID NO: 518718 - DNA, 15 bp, Homo sapiens
atgaggttttaccat

SEQ ID NO: 518719 - DNA, 15 bp, Homo sapiens
tgaggttttaccatg

SEQ ID NO: 518720 - DNA, 15 bp, Homo sapiens
gaggttttaccatgt

SEQ ID NO: 518721 - DNA, 15 bp, Homo sapiens
aggttttaccatgtt

SEQ ID NO: 518722 - DNA, 15 bp, Homo sapiens
ggttttaccatgttg

SEQ ID NO: 518723 - DNA, 15 bp, Homo sapiens
gttttaccatgttgc

SEQ ID NO: 518724 - DNA, 15 bp, Homo sapiens
ttttaccatgttgcc

SEQ ID NO: 518725 - DNA, 15 bp, Homo sapiens
tttaccatgttgccc

SEQ ID NO: 518726 - DNA, 15 bp, Homo sapiens
ttaccatgttgccca

SEQ ID NO: 518727 - DNA, 15 bp, Homo sapiens
taccatgttgcccag

SEQ ID NO: 518728 - DNA, 15 bp, Homo sapiens
accatgttgcccagg

SEQ ID NO: 518729 - DNA, 15 bp, Homo sapiens
ccatgttgcccaggc

SEQ ID NO: 518730 - DNA, 15 bp, Homo sapiens
catgttgcccaggct

SEQ ID NO: 518731 - DNA, 15 bp, Homo sapiens
atgttgcccaggctg

SEQ ID NO: 518732 - DNA, 15 bp, Homo sapiens
ttgcccaggctggta

SEQ ID NO: 518733 - DNA, 15 bp, Homo sapiens
tgcccaggctggtaa

SEQ ID NO: 518734 - DNA, 15 bp, Homo sapiens
gcccaggctggtaac

SEQ ID NO: 518735 - DNA, 15 bp, Homo sapiens
cccaggctggtaact

SEQ ID NO: 518736 - DNA, 15 bp, Homo sapiens
ccaggctggtaactc

SEQ ID NO: 518737 - DNA, 15 bp, Homo sapiens
caggctggtaactcc

SEQ ID NO: 518738 - DNA, 15 bp, Homo sapiens
aggctggtaactcct

SEQ ID NO: 518739 - DNA, 15 bp, Homo sapiens
ggctggtaactcctg

SEQ ID NO: 518740 - DNA, 15 bp, Homo sapiens
gctggtaactcctga

SEQ ID NO: 518741 - DNA, 15 bp, Homo sapiens
ctggtaactcctgag

SEQ ID NO: 518742 - DNA, 15 bp, Homo sapiens
tggtaactcctgagc

SEQ ID NO: 518743 - DNA, 15 bp, Homo sapiens
ggtaactcctgagct

SEQ ID NO: 518744 - DNA, 15 bp, Homo sapiens
gtaactcctgagctc

SEQ ID NO: 518745 - DNA, 15 bp, Homo sapiens
taactcctgagctca

SEQ ID NO: 518746 - DNA, 15 bp, Homo sapiens
gagctcaggtgatct

SEQ ID NO: 518747 - DNA, 15 bp, Homo sapiens
agctcaggtgatctg

SEQ ID NO: 518748 - DNA, 15 bp, Homo sapiens
gctcaggtgatctgc

SEQ ID NO: 518749 - DNA, 15 bp, Homo sapiens
ctcaggtgatctgcc

SEQ ID NO: 518750 - DNA, 15 bp, Homo sapiens
tcaggtgatctgccc

SEQ ID NO: 518751 - DNA, 15 bp, Homo sapiens
caggtgatctgccca

SEQ ID NO: 518752 - DNA, 15 bp, Homo sapiens
aggtgatctgcccac

SEQ ID NO: 518753 - DNA, 15 bp, Homo sapiens
ggtgatctgcccacc

SEQ ID NO: 518754 - DNA, 15 bp, Homo sapiens
gtgatctgcccacct

SEQ ID NO: 518755 - DNA, 15 bp, Homo sapiens
tgatctgcccacctc

SEQ ID NO: 518756 - DNA, 15 bp, Homo sapiens
gatctgcccacctcg

SEQ ID NO: 518757 - DNA, 15 bp, Homo sapiens
atctgcccacctcgg

SEQ ID NO: 518758 - DNA, 15 bp, Homo sapiens
tctgcccacctcggc

SEQ ID NO: 518759 - DNA, 15 bp, Homo sapiens
ctgcccacctcggcc

SEQ ID NO: 518760 - DNA, 15 bp, Homo sapiens
tgcccacctcggcct

SEQ ID NO: 518761 - DNA, 15 bp, Homo sapiens
cccaaagtgctgggg

SEQ ID NO: 518762 - DNA, 15 bp, Homo sapiens
ccaaagtgctggggt

SEQ ID NO: 518763 - DNA, 15 bp, Homo sapiens
caaagtgctggggtt

SEQ ID NO: 518764 - DNA, 15 bp, Homo sapiens
aaagtgctggggttc

SEQ ID NO: 518765 - DNA, 15 bp, Homo sapiens
aagtgctggggttca

SEQ ID NO: 518766 - DNA, 15 bp, Homo sapiens
agtgctggggttcac

SEQ ID NO: 518767 - DNA, 15 bp, Homo sapiens
gtgctggggttcaca

SEQ ID NO: 518768 - DNA, 15 bp, Homo sapiens
tgctggggttcacag

SEQ ID NO: 518769 - DNA, 15 bp, Homo sapiens
gctggggttcacagg

SEQ ID NO: 518770 - DNA, 15 bp, Homo sapiens
ctggggttcacaggt

SEQ ID NO: 518771 - DNA, 15 bp, Homo sapiens
tggggttcacaggtg

SEQ ID NO: 518772 - DNA, 15 bp, Homo sapiens
ggggttcacaggtgt

SEQ ID NO: 518773 - DNA, 15 bp, Homo sapiens
gggttcacaggtgtg

SEQ ID NO: 518774 - DNA, 15 bp, Homo sapiens
ggttcacaggtgtgt

SEQ ID NO: 518775 - DNA, 15 bp, Homo sapiens
gttcacaggtgtgtg

SEQ ID NO: 518776 - DNA, 15 bp, Homo sapiens
ttcacaggtgtgtgt

SEQ ID NO: 518777 - DNA, 15 bp, Homo sapiens
tcacaggtgtgtgtt

SEQ ID NO: 518778 - DNA, 15 bp, Homo sapiens
cacaggtgtgtgttt

SEQ ID NO: 518779 - DNA, 15 bp, Homo sapiens
acaggtgtgtgttta

SEQ ID NO: 518780 - DNA, 15 bp, Homo sapiens
caggtgtgtgtttat

SEQ ID NO: 518781 - DNA, 15 bp, Homo sapiens
aggtgtgtgtttatt

SEQ ID NO: 518782 - DNA, 15 bp, Homo sapiens
ggtgtgtgtttattt

SEQ ID NO: 518783 - DNA, 15 bp, Homo sapiens
gtgtgtgtttatttc

SEQ ID NO: 518784 - DNA, 15 bp, Homo sapiens
tgtgtgtttatttct

SEQ ID NO: 518785 - DNA, 15 bp, Homo sapiens
gtgtgtttatttcta

SEQ ID NO: 518786 - DNA, 15 bp, Homo sapiens
tgtgtttatttctat

SEQ ID NO: 518787 - DNA, 15 bp, Homo sapiens
gtgtttatttctatc

SEQ ID NO: 518788 - DNA, 15 bp, Homo sapiens
tgtttatttctatct

SEQ ID NO: 518789 - DNA, 15 bp, Homo sapiens
gtttatttctatcta

SEQ ID NO: 518790 - DNA, 15 bp, Homo sapiens
tttatttctatctaa

SEQ ID NO: 518791 - DNA, 15 bp, Homo sapiens
ttatttctatctaat

SEQ ID NO: 518792 - DNA, 15 bp, Homo sapiens
tatttctatctaatt

SEQ ID NO: 518793 - DNA, 15 bp, Homo sapiens
atttctatctaatta

SEQ ID NO: 518794 - DNA, 15 bp, Homo sapiens
tttctatctaattat

SEQ ID NO: 518795 - DNA, 15 bp, Homo sapiens
ttctatctaattatt

SEQ ID NO: 518796 - DNA, 15 bp, Homo sapiens
tctatctaattattt

SEQ ID NO: 518797 - DNA, 15 bp, Homo sapiens
ctatctaattattta

SEQ ID NO: 518798 - DNA, 15 bp, Homo sapiens
tatctaattatttac

SEQ ID NO: 518799 - DNA, 15 bp, Homo sapiens
atctaattatttaca

SEQ ID NO: 518800 - DNA, 15 bp, Homo sapiens
tctaattatttacac

SEQ ID NO: 518801 - DNA, 15 bp, Homo sapiens
ctaattatttacaca

SEQ ID NO: 518802 - DNA, 15 bp, Homo sapiens
taattatttacacaa

SEQ ID NO: 518803 - DNA, 15 bp, Homo sapiens
aattatttacacaaa

SEQ ID NO: 518804 - DNA, 15 bp, Homo sapiens
attatttacacaaac

SEQ ID NO: 518805 - DNA, 15 bp, Homo sapiens
ttatttacacaaaca

SEQ ID NO: 518806 - DNA, 15 bp, Homo sapiens
tatttacacaaacac

SEQ ID NO: 518807 - DNA, 15 bp, Homo sapiens
atttacacaaacaca

SEQ ID NO: 518808 - DNA, 15 bp, Homo sapiens
tttacacaaacacaa

SEQ ID NO: 518809 - DNA, 15 bp, Homo sapiens
ttacacaaacacaat

SEQ ID NO: 518810 - DNA, 15 bp, Homo sapiens
tacacaaacacaatg

SEQ ID NO: 518811 - DNA, 15 bp, Homo sapiens
acacaaacacaatgt

SEQ ID NO: 518812 - DNA, 15 bp, Homo sapiens
cacaaacacaatgta

SEQ ID NO: 518813 - DNA, 15 bp, Homo sapiens
acaaacacaatgtat

SEQ ID NO: 518814 - DNA, 15 bp, Homo sapiens
caaacacaatgtatt

SEQ ID NO: 518815 - DNA, 15 bp, Homo sapiens
aaacacaatgtattt

SEQ ID NO: 518816 - DNA, 15 bp, Homo sapiens
aacacaatgtattta

SEQ ID NO: 518817 - DNA, 15 bp, Homo sapiens
acacaatgtatttat

SEQ ID NO: 518818 - DNA, 15 bp, Homo sapiens
cacaatgtatttata

SEQ ID NO: 518819 - DNA, 15 bp, Homo sapiens
acaatgtatttatat

SEQ ID NO: 518820 - DNA, 15 bp, Homo sapiens
caatgtatttatata

SEQ ID NO: 518821 - DNA, 15 bp, Homo sapiens
aatgtatttatatat

SEQ ID NO: 518822 - DNA, 15 bp, Homo sapiens
atgtatttatatatt

SEQ ID NO: 518823 - DNA, 15 bp, Homo sapiens
tgtatttatatattg

SEQ ID NO: 518824 - DNA, 15 bp, Homo sapiens
gtatttatatattgt

SEQ ID NO: 518825 - DNA, 15 bp, Homo sapiens
tatttatatattgtg

SEQ ID NO: 518826 - DNA, 15 bp, Homo sapiens
atttatatattgtgt

SEQ ID NO: 518827 - DNA, 15 bp, Homo sapiens
tttatatattgtgta

SEQ ID NO: 518828 - DNA, 15 bp, Homo sapiens
ttatatattgtgtat

SEQ ID NO: 518829 - DNA, 15 bp, Homo sapiens
tatatattgtgtatc

SEQ ID NO: 518830 - DNA, 15 bp, Homo sapiens
atatattgtgtatct

SEQ ID NO: 518831 - DNA, 15 bp, Homo sapiens
tatattgtgtatctc

SEQ ID NO: 518832 - DNA, 15 bp, Homo sapiens
atattgtgtatctct

SEQ ID NO: 518833 - DNA, 15 bp, Homo sapiens
tattgtgtatctctt

SEQ ID NO: 518834 - DNA, 15 bp, Homo sapiens
attgtgtatctcttc

SEQ ID NO: 518835 - DNA, 15 bp, Homo sapiens
ttgtgtatctcttct

SEQ ID NO: 518836 - DNA, 15 bp, Homo sapiens
tgtgtatctcttctg

SEQ ID NO: 518837 - DNA, 15 bp, Homo sapiens
gtgtatctcttctgc

SEQ ID NO: 518838 - DNA, 15 bp, Homo sapiens
tgtatctcttctgct

SEQ ID NO: 518839 - DNA, 15 bp, Homo sapiens
gtatctcttctgcta

SEQ ID NO: 518840 - DNA, 15 bp, Homo sapiens
tatctcttctgctac

SEQ ID NO: 518841 - DNA, 15 bp, Homo sapiens
atctcttctgctaca

SEQ ID NO: 518842 - DNA, 15 bp, Homo sapiens
tctcttctgctacaa

SEQ ID NO: 518843 - DNA, 15 bp, Homo sapiens
ctcttctgctacaat

SEQ ID NO: 518844 - DNA, 15 bp, Homo sapiens
tcttctgctacaatg

SEQ ID NO: 518845 - DNA, 15 bp, Homo sapiens
cttctgctacaatgt

SEQ ID NO: 518846 - DNA, 15 bp, Homo sapiens
ttctgctacaatgta

SEQ ID NO: 518847 - DNA, 15 bp, Homo sapiens
tctgctacaatgtaa

SEQ ID NO: 518848 - DNA, 15 bp, Homo sapiens
ctgctacaatgtaaa

SEQ ID NO: 518849 - DNA, 15 bp, Homo sapiens
tgctacaatgtaaat

SEQ ID NO: 518850 - DNA, 15 bp, Homo sapiens
gctacaatgtaaatt

SEQ ID NO: 518851 - DNA, 15 bp, Homo sapiens
ctacaatgtaaattc

SEQ ID NO: 518852 - DNA, 15 bp, Homo sapiens
tacaatgtaaattct

SEQ ID NO: 518853 - DNA, 15 bp, Homo sapiens
acaatgtaaattcta

SEQ ID NO: 518854 - DNA, 15 bp, Homo sapiens
caatgtaaattctat

SEQ ID NO: 518855 - DNA, 15 bp, Homo sapiens
aatgtaaattctatg

SEQ ID NO: 518856 - DNA, 15 bp, Homo sapiens
atgtaaattctatga

SEQ ID NO: 518857 - DNA, 15 bp, Homo sapiens
tgtaaattctatgag

SEQ ID NO: 518858 - DNA, 15 bp, Homo sapiens
gtaaattctatgaga

SEQ ID NO: 518859 - DNA, 15 bp, Homo sapiens
taaattctatgagag

SEQ ID NO: 518860 - DNA, 15 bp, Homo sapiens
aaattctatgagagt

SEQ ID NO: 518861 - DNA, 15 bp, Homo sapiens
aattctatgagagta

SEQ ID NO: 518862 - DNA, 15 bp, Homo sapiens
attctatgagagtag

SEQ ID NO: 518863 - DNA, 15 bp, Homo sapiens
ttctatgagagtagt

SEQ ID NO: 518864 - DNA, 15 bp, Homo sapiens
tctatgagagtagta

SEQ ID NO: 518865 - DNA, 15 bp, Homo sapiens
ctatgagagtagtaa

SEQ ID NO: 518866 - DNA, 15 bp, Homo sapiens
tatgagagtagtaat

SEQ ID NO: 518867 - DNA, 15 bp, Homo sapiens
atgagagtagtaatt

SEQ ID NO: 518868 - DNA, 15 bp, Homo sapiens
tgagagtagtaattt

SEQ ID NO: 518869 - DNA, 15 bp, Homo sapiens
gagagtagtaatttt

SEQ ID NO: 518870 - DNA, 15 bp, Homo sapiens
agagtagtaattttg

SEQ ID NO: 518871 - DNA, 15 bp, Homo sapiens
gagtagtaattttgt

SEQ ID NO: 518872 - DNA, 15 bp, Homo sapiens
agtagtaattttgtc

SEQ ID NO: 518873 - DNA, 15 bp, Homo sapiens
gtagtaattttgtct

SEQ ID NO: 518874 - DNA, 15 bp, Homo sapiens
tagtaattttgtctg

SEQ ID NO: 518875 - DNA, 15 bp, Homo sapiens
agtaattttgtctgt

SEQ ID NO: 518876 - DNA, 15 bp, Homo sapiens
gtaattttgtctgtc

SEQ ID NO: 518877 - DNA, 15 bp, Homo sapiens
taattttgtctgtct

SEQ ID NO: 518878 - DNA, 15 bp, Homo sapiens
aattttgtctgtctc

SEQ ID NO: 518879 - DNA, 15 bp, Homo sapiens
attttgtctgtctca

SEQ ID NO: 518880 - DNA, 15 bp, Homo sapiens
ttttgtctgtctcaa

SEQ ID NO: 518881 - DNA, 15 bp, Homo sapiens
tttgtctgtctcaac

SEQ ID NO: 518882 - DNA, 15 bp, Homo sapiens
ttgtctgtctcaaca

SEQ ID NO: 518883 - DNA, 15 bp, Homo sapiens
tgtctgtctcaacac

SEQ ID NO: 518884 - DNA, 15 bp, Homo sapiens
gtctgtctcaacact

SEQ ID NO: 518885 - DNA, 15 bp, Homo sapiens
tctgtctcaacactg

SEQ ID NO: 518886 - DNA, 15 bp, Homo sapiens
ctgtctcaacactgt

SEQ ID NO: 518887 - DNA, 15 bp, Homo sapiens
tctcaacactgtttt

SEQ ID NO: 518888 - DNA, 15 bp, Homo sapiens
ctcaacactgttttt

SEQ ID NO: 518889 - DNA, 15 bp, Homo sapiens
tcaacactgtttttc

SEQ ID NO: 518890 - DNA, 15 bp, Homo sapiens
caacactgtttttcc

SEQ ID NO: 518891 - DNA, 15 bp, Homo sapiens
aacactgtttttcct

SEQ ID NO: 518892 - DNA, 15 bp, Homo sapiens
acactgtttttccta

SEQ ID NO: 518893 - DNA, 15 bp, Homo sapiens
cactgtttttcctaa

SEQ ID NO: 518894 - DNA, 15 bp, Homo sapiens
actgtttttcctaag

SEQ ID NO: 518895 - DNA, 15 bp, Homo sapiens
ctgtttttcctaagt

SEQ ID NO: 518896 - DNA, 15 bp, Homo sapiens
tgtttttcctaagtt

SEQ ID NO: 518897 - DNA, 15 bp, Homo sapiens
gtttttcctaagttt

SEQ ID NO: 518898 - DNA, 15 bp, Homo sapiens
tttttcctaagtttg

SEQ ID NO: 518899 - DNA, 15 bp, Homo sapiens
ttttcctaagtttgg

SEQ ID NO: 518900 - DNA, 15 bp, Homo sapiens
tttcctaagtttggt

SEQ ID NO: 518901 - DNA, 15 bp, Homo sapiens
ttcctaagtttggta

SEQ ID NO: 518902 - DNA, 15 bp, Homo sapiens
tcctaagtttggtac

SEQ ID NO: 518903 - DNA, 15 bp, Homo sapiens
cctaagtttggtaca

SEQ ID NO: 518904 - DNA, 15 bp, Homo sapiens
ctaagtttggtacat

SEQ ID NO: 518905 - DNA, 15 bp, Homo sapiens
taagtttggtacata

SEQ ID NO: 518906 - DNA, 15 bp, Homo sapiens
aagtttggtacatag

SEQ ID NO: 518907 - DNA, 15 bp, Homo sapiens
agtttggtacatagt

SEQ ID NO: 518908 - DNA, 15 bp, Homo sapiens
gtttggtacatagta

SEQ ID NO: 518909 - DNA, 15 bp, Homo sapiens
tttggtacatagtag

SEQ ID NO: 518910 - DNA, 15 bp, Homo sapiens
ttggtacatagtagg

SEQ ID NO: 518911 - DNA, 15 bp, Homo sapiens
tggtacatagtaggc

SEQ ID NO: 518912 - DNA, 15 bp, Homo sapiens
ggtacatagtaggca

SEQ ID NO: 518913 - DNA, 15 bp, Homo sapiens
gtacatagtaggcac

SEQ ID NO: 518914 - DNA, 15 bp, Homo sapiens
tacatagtaggcact

SEQ ID NO: 518915 - DNA, 15 bp, Homo sapiens
acatagtaggcactc

SEQ ID NO: 518916 - DNA, 15 bp, Homo sapiens
catagtaggcactca

SEQ ID NO: 518917 - DNA, 15 bp, Homo sapiens
atagtaggcactcag

SEQ ID NO: 518918 - DNA, 15 bp, Homo sapiens
tagtaggcactcaga

SEQ ID NO: 518919 - DNA, 15 bp, Homo sapiens
agtaggcactcagat

SEQ ID NO: 518920 - DNA, 15 bp, Homo sapiens
gtaggcactcagatg

SEQ ID NO: 518921 - DNA, 15 bp, Homo sapiens
taggcactcagatgc

SEQ ID NO: 518922 - DNA, 15 bp, Homo sapiens
aggcactcagatgct

SEQ ID NO: 518923 - DNA, 15 bp, Homo sapiens
ggcactcagatgctt

SEQ ID NO: 518924 - DNA, 15 bp, Homo sapiens
gcactcagatgctta

SEQ ID NO: 518925 - DNA, 15 bp, Homo sapiens
cactcagatgcttaa

SEQ ID NO: 518926 - DNA, 15 bp, Homo sapiens
actcagatgcttaaa

SEQ ID NO: 518927 - DNA, 15 bp, Homo sapiens
ctcagatgcttaaag

SEQ ID NO: 518928 - DNA, 15 bp, Homo sapiens
tcagatgcttaaagg

SEQ ID NO: 518929 - DNA, 15 bp, Homo sapiens
cagatgcttaaagga

SEQ ID NO: 518930 - DNA, 15 bp, Homo sapiens
agatgcttaaaggaa

SEQ ID NO: 518931 - DNA, 15 bp, Homo sapiens
gatgcttaaaggaat

SEQ ID NO: 518932 - DNA, 15 bp, Homo sapiens
atgcttaaaggaatg

SEQ ID NO: 518933 - DNA, 15 bp, Homo sapiens
tgcttaaaggaatga

SEQ ID NO: 518934 - DNA, 15 bp, Homo sapiens
gcttaaaggaatgaa

SEQ ID NO: 518935 - DNA, 15 bp, Homo sapiens
cttaaaggaatgaat

SEQ ID NO: 518936 - DNA, 15 bp, Homo sapiens
ttaaaggaatgaatg

SEQ ID NO: 518937 - DNA, 15 bp, Homo sapiens
taaaggaatgaatga

SEQ ID NO: 518938 - DNA, 15 bp, Homo sapiens
aaaggaatgaatgaa

SEQ ID NO: 518939 - DNA, 15 bp, Homo sapiens
aaggaatgaatgaat

SEQ ID NO: 518940 - DNA, 15 bp, Homo sapiens
aggaatgaatgaatt

SEQ ID NO: 518941 - DNA, 15 bp, Homo sapiens
ggaatgaatgaattg

SEQ ID NO: 518942 - DNA, 15 bp, Homo sapiens
gaatgaatgaattgt

SEQ ID NO: 518943 - DNA, 15 bp, Homo sapiens
aatgaatgaattgtg

SEQ ID NO: 518944 - DNA, 15 bp, Homo sapiens
atgaatgaattgtgc

SEQ ID NO: 518945 - DNA, 15 bp, Homo sapiens
tgaatgaattgtgct

SEQ ID NO: 518946 - DNA, 15 bp, Homo sapiens
gaatgaattgtgctt

SEQ ID NO: 518947 - DNA, 15 bp, Homo sapiens
aatgaattgtgcttt

SEQ ID NO: 518948 - DNA, 15 bp, Homo sapiens
atgaattgtgcttta

SEQ ID NO: 518949 - DNA, 15 bp, Homo sapiens
tgaattgtgctttaa

SEQ ID NO: 518950 - DNA, 15 bp, Homo sapiens
gaattgtgctttaat

SEQ ID NO: 518951 - DNA, 15 bp, Homo sapiens
aattgtgctttaatt

SEQ ID NO: 518952 - DNA, 15 bp, Homo sapiens
attgtgctttaattc

SEQ ID NO: 518953 - DNA, 15 bp, Homo sapiens
ttgtgctttaattcc

SEQ ID NO: 518954 - DNA, 15 bp, Homo sapiens
tgtgctttaattcca

SEQ ID NO: 518955 - DNA, 15 bp, Homo sapiens
gtgctttaattccac

SEQ ID NO: 518956 - DNA, 15 bp, Homo sapiens
tgctttaattccact

SEQ ID NO: 518957 - DNA, 15 bp, Homo sapiens
gctttaattccactt

SEQ ID NO: 518958 - DNA, 15 bp, Homo sapiens
ctttaattccacttt

SEQ ID NO: 518959 - DNA, 15 bp, Homo sapiens
tttaattccacttta

SEQ ID NO: 518960 - DNA, 15 bp, Homo sapiens
ttaattccactttac

SEQ ID NO: 518961 - DNA, 15 bp, Homo sapiens
taattccactttact

SEQ ID NO: 518962 - DNA, 15 bp, Homo sapiens
aattccactttacta

SEQ ID NO: 518963 - DNA, 15 bp, Homo sapiens
attccactttactaa

SEQ ID NO: 518964 - DNA, 15 bp, Homo sapiens
ttccactttactaaa

SEQ ID NO: 518965 - DNA, 15 bp, Homo sapiens
tccactttactaaac

SEQ ID NO: 518966 - DNA, 15 bp, Homo sapiens
ccactttactaaacc

SEQ ID NO: 518967 - DNA, 15 bp, Homo sapiens
cactttactaaaccc

SEQ ID NO: 518968 - DNA, 15 bp, Homo sapiens
actttactaaaccca

SEQ ID NO: 518969 - DNA, 15 bp, Homo sapiens
ctttactaaacccaa

SEQ ID NO: 518970 - DNA, 15 bp, Homo sapiens
tttactaaacccaaa

SEQ ID NO: 518971 - DNA, 15 bp, Homo sapiens
ttactaaacccaaat

SEQ ID NO: 518972 - DNA, 15 bp, Homo sapiens
tactaaacccaaatc

SEQ ID NO: 518973 - DNA, 15 bp, Homo sapiens
actaaacccaaatct

SEQ ID NO: 518974 - DNA, 15 bp, Homo sapiens
ctaaacccaaatctc

SEQ ID NO: 518975 - DNA, 15 bp, Homo sapiens
taaacccaaatctcc

SEQ ID NO: 518976 - DNA, 15 bp, Homo sapiens
aaacccaaatctccc

SEQ ID NO: 518977 - DNA, 15 bp, Homo sapiens
aacccaaatctccct

SEQ ID NO: 518978 - DNA, 15 bp, Homo sapiens
acccaaatctccctt

SEQ ID NO: 518979 - DNA, 15 bp, Homo sapiens
cccaaatctcccttt

SEQ ID NO: 518980 - DNA, 15 bp, Homo sapiens
ccaaatctccctttg

SEQ ID NO: 518981 - DNA, 15 bp, Homo sapiens
caaatctccctttgg

SEQ ID NO: 518982 - DNA, 15 bp, Homo sapiens
aaatctccctttgga

SEQ ID NO: 518983 - DNA, 15 bp, Homo sapiens
aatctccctttggac

SEQ ID NO: 518984 - DNA, 15 bp, Homo sapiens
atctccctttggaca

SEQ ID NO: 518985 - DNA, 15 bp, Homo sapiens
tctccctttggacat

SEQ ID NO: 518986 - DNA, 15 bp, Homo sapiens
ctccctttggacatt

SEQ ID NO: 518987 - DNA, 15 bp, Homo sapiens
tccctttggacattg

SEQ ID NO: 518988 - DNA, 15 bp, Homo sapiens
ccctttggacattgt

SEQ ID NO: 518989 - DNA, 15 bp, Homo sapiens
cctttggacattgtt

SEQ ID NO: 518990 - DNA, 15 bp, Homo sapiens
ctttggacattgtta

SEQ ID NO: 518991 - DNA, 15 bp, Homo sapiens
tttggacattgttat

SEQ ID NO: 518992 - DNA, 15 bp, Homo sapiens
ttggacattgttatc

SEQ ID NO: 518993 - DNA, 15 bp, Homo sapiens
tggacattgttatct

SEQ ID NO: 518994 - DNA, 15 bp, Homo sapiens
ggacattgttatcta

SEQ ID NO: 518995 - DNA, 15 bp, Homo sapiens
gacattgttatctat

SEQ ID NO: 518996 - DNA, 15 bp, Homo sapiens
acattgttatctatg

SEQ ID NO: 518997 - DNA, 15 bp, Homo sapiens
cattgttatctatgt

SEQ ID NO: 518998 - DNA, 15 bp, Homo sapiens
attgttatctatgtg

SEQ ID NO: 518999 - DNA, 15 bp, Homo sapiens
ttgttatctatgtgt

SEQ ID NO: 519000 - DNA, 15 bp, Homo sapiens
tgttatctatgtgtt

SEQ ID NO: 519001 - DNA, 15 bp, Homo sapiens
gttatctatgtgttt

SEQ ID NO: 519002 - DNA, 15 bp, Homo sapiens
ttatctatgtgtttt

SEQ ID NO: 519003 - DNA, 15 bp, Homo sapiens
tatctatgtgttttc

SEQ ID NO: 519004 - DNA, 15 bp, Homo sapiens
atctatgtgttttca

SEQ ID NO: 519005 - DNA, 15 bp, Homo sapiens
tctatgtgttttcaa

SEQ ID NO: 519006 - DNA, 15 bp, Homo sapiens
ctatgtgttttcaaa

SEQ ID NO: 519007 - DNA, 15 bp, Homo sapiens
tatgtgttttcaaag

SEQ ID NO: 519008 - DNA, 15 bp, Homo sapiens
atgtgttttcaaaga

SEQ ID NO: 519009 - DNA, 15 bp, Homo sapiens
tgtgttttcaaagaa

SEQ ID NO: 519010 - DNA, 15 bp, Homo sapiens
gtgttttcaaagaag

SEQ ID NO: 519011 - DNA, 15 bp, Homo sapiens
tgttttcaaagaagt

SEQ ID NO: 519012 - DNA, 15 bp, Homo sapiens
gttttcaaagaagta

SEQ ID NO: 519013 - DNA, 15 bp, Homo sapiens
ttttcaaagaagtat

SEQ ID NO: 519014 - DNA, 15 bp, Homo sapiens
tttcaaagaagtata

SEQ ID NO: 519015 - DNA, 15 bp, Homo sapiens
ttcaaagaagtataa

SEQ ID NO: 519016 - DNA, 15 bp, Homo sapiens
tcaaagaagtataat

SEQ ID NO: 519017 - DNA, 15 bp, Homo sapiens
caaagaagtataatc

SEQ ID NO: 519018 - DNA, 15 bp, Homo sapiens
aaagaagtataatca

SEQ ID NO: 519019 - DNA, 15 bp, Homo sapiens
aagaagtataatcat

SEQ ID NO: 519020 - DNA, 15 bp, Homo sapiens
agaagtataatcata

SEQ ID NO: 519021 - DNA, 15 bp, Homo sapiens
gaagtataatcataa

SEQ ID NO: 519022 - DNA, 15 bp, Homo sapiens
aagtataatcataat

SEQ ID NO: 519023 - DNA, 15 bp, Homo sapiens
agtataatcataatt

SEQ ID NO: 519024 - DNA, 15 bp, Homo sapiens
gtataatcataattt

SEQ ID NO: 519025 - DNA, 15 bp, Homo sapiens
tataatcataatttg

SEQ ID NO: 519026 - DNA, 15 bp, Homo sapiens
ataatcataatttga

SEQ ID NO: 519027 - DNA, 15 bp, Homo sapiens
taatcataatttgac

SEQ ID NO: 519028 - DNA, 15 bp, Homo sapiens
aatcataatttgaca

SEQ ID NO: 519029 - DNA, 15 bp, Homo sapiens
atcataatttgacag

SEQ ID NO: 519030 - DNA, 15 bp, Homo sapiens
tcataatttgacaga

SEQ ID NO: 519031 - DNA, 15 bp, Homo sapiens
cataatttgacagaa

SEQ ID NO: 519032 - DNA, 15 bp, Homo sapiens
ataatttgacagaaa

SEQ ID NO: 519033 - DNA, 15 bp, Homo sapiens
taatttgacagaaat

SEQ ID NO: 519034 - DNA, 15 bp, Homo sapiens
aatttgacagaaatc

SEQ ID NO: 519035 - DNA, 15 bp, Homo sapiens
atttgacagaaatcc

SEQ ID NO: 519036 - DNA, 15 bp, Homo sapiens
tttgacagaaatcct

SEQ ID NO: 519037 - DNA, 15 bp, Homo sapiens
ttgacagaaatcctt

SEQ ID NO: 519038 - DNA, 15 bp, Homo sapiens
tgacagaaatccttg

SEQ ID NO: 519039 - DNA, 15 bp, Homo sapiens
gacagaaatccttga

SEQ ID NO: 519040 - DNA, 15 bp, Homo sapiens
acagaaatccttgag

SEQ ID NO: 519041 - DNA, 15 bp, Homo sapiens
cagaaatccttgaga

SEQ ID NO: 519042 - DNA, 15 bp, Homo sapiens
agaaatccttgagag

SEQ ID NO: 519043 - DNA, 15 bp, Homo sapiens
gaaatccttgagagg

SEQ ID NO: 519044 - DNA, 15 bp, Homo sapiens
aaatccttgagaggc

SEQ ID NO: 519045 - DNA, 15 bp, Homo sapiens
aatccttgagaggca

SEQ ID NO: 519046 - DNA, 15 bp, Homo sapiens
atccttgagaggcag

SEQ ID NO: 519047 - DNA, 15 bp, Homo sapiens
tccttgagaggcaga

SEQ ID NO: 519048 - DNA, 15 bp, Homo sapiens
ccttgagaggcagaa

SEQ ID NO: 519049 - DNA, 15 bp, Homo sapiens
cttgagaggcagaac

SEQ ID NO: 519050 - DNA, 15 bp, Homo sapiens
ttgagaggcagaact

SEQ ID NO: 519051 - DNA, 15 bp, Homo sapiens
tgagaggcagaacta

SEQ ID NO: 519052 - DNA, 15 bp, Homo sapiens
gagaggcagaactaa

SEQ ID NO: 519053 - DNA, 15 bp, Homo sapiens
agaggcagaactaag

SEQ ID NO: 519054 - DNA, 15 bp, Homo sapiens
gaggcagaactaagt

SEQ ID NO: 519055 - DNA, 15 bp, Homo sapiens
aggcagaactaagtg

SEQ ID NO: 519056 - DNA, 15 bp, Homo sapiens
ggcagaactaagtga

SEQ ID NO: 519057 - DNA, 15 bp, Homo sapiens
gcagaactaagtgag

SEQ ID NO: 519058 - DNA, 15 bp, Homo sapiens
cagaactaagtgagg

SEQ ID NO: 519059 - DNA, 15 bp, Homo sapiens
agaactaagtgaggg

SEQ ID NO: 519060 - DNA, 15 bp, Homo sapiens
gaactaagtgaggga

SEQ ID NO: 519061 - DNA, 15 bp, Homo sapiens
aactaagtgagggat

SEQ ID NO: 519062 - DNA, 15 bp, Homo sapiens
actaagtgagggatt

SEQ ID NO: 519063 - DNA, 15 bp, Homo sapiens
ctaagtgagggattg

SEQ ID NO: 519064 - DNA, 15 bp, Homo sapiens
taagtgagggattgg

SEQ ID NO: 519065 - DNA, 15 bp, Homo sapiens
aagtgagggattggg

SEQ ID NO: 519066 - DNA, 15 bp, Homo sapiens
agtgagggattgggc

SEQ ID NO: 519067 - DNA, 15 bp, Homo sapiens
gtgagggattgggca

SEQ ID NO: 519068 - DNA, 15 bp, Homo sapiens
tgagggattgggcag

SEQ ID NO: 519069 - DNA, 15 bp, Homo sapiens
gagggattgggcagg

SEQ ID NO: 519070 - DNA, 15 bp, Homo sapiens
agggattgggcaggg

SEQ ID NO: 519071 - DNA, 15 bp, Homo sapiens
gggattgggcagggt

SEQ ID NO: 519072 - DNA, 15 bp, Homo sapiens
ggattgggcagggtt

SEQ ID NO: 519073 - DNA, 15 bp, Homo sapiens
gattgggcagggttc

SEQ ID NO: 519074 - DNA, 15 bp, Homo sapiens
attgggcagggttca

SEQ ID NO: 519075 - DNA, 15 bp, Homo sapiens
ttgggcagggttcag

SEQ ID NO: 519076 - DNA, 15 bp, Homo sapiens
tgggcagggttcaga

SEQ ID NO: 519077 - DNA, 15 bp, Homo sapiens
gggcagggttcagat

SEQ ID NO: 519078 - DNA, 15 bp, Homo sapiens
ggcagggttcagatg

SEQ ID NO: 519079 - DNA, 15 bp, Homo sapiens
gcagggttcagatgt

SEQ ID NO: 519080 - DNA, 15 bp, Homo sapiens
cagggttcagatgtt

SEQ ID NO: 519081 - DNA, 15 bp, Homo sapiens
agggttcagatgtta

SEQ ID NO: 519082 - DNA, 15 bp, Homo sapiens
gggttcagatgttaa

SEQ ID NO: 519083 - DNA, 15 bp, Homo sapiens
ggttcagatgttaag

SEQ ID NO: 519084 - DNA, 15 bp, Homo sapiens
gttcagatgttaaga

SEQ ID NO: 519085 - DNA, 15 bp, Homo sapiens
ttcagatgttaagaa

SEQ ID NO: 519086 - DNA, 15 bp, Homo sapiens
tcagatgttaagaac

SEQ ID NO: 519087 - DNA, 15 bp, Homo sapiens
cagatgttaagaaca

SEQ ID NO: 519088 - DNA, 15 bp, Homo sapiens
agatgttaagaacag

SEQ ID NO: 519089 - DNA, 15 bp, Homo sapiens
gatgttaagaacagt

SEQ ID NO: 519090 - DNA, 15 bp, Homo sapiens
atgttaagaacagta

SEQ ID NO: 519091 - DNA, 15 bp, Homo sapiens
tgttaagaacagtaa

SEQ ID NO: 519092 - DNA, 15 bp, Homo sapiens
gttaagaacagtaag

SEQ ID NO: 519093 - DNA, 15 bp, Homo sapiens
ttaagaacagtaagc

SEQ ID NO: 519094 - DNA, 15 bp, Homo sapiens
taagaacagtaagct

SEQ ID NO: 519095 - DNA, 15 bp, Homo sapiens
aagaacagtaagctc

SEQ ID NO: 519096 - DNA, 15 bp, Homo sapiens
agaacagtaagctca

SEQ ID NO: 519097 - DNA, 15 bp, Homo sapiens
gaacagtaagctcag

SEQ ID NO: 519098 - DNA, 15 bp, Homo sapiens
aacagtaagctcagc

SEQ ID NO: 519099 - DNA, 15 bp, Homo sapiens
acagtaagctcagca

SEQ ID NO: 519100 - DNA, 15 bp, Homo sapiens
cagtaagctcagcag

SEQ ID NO: 519101 - DNA, 15 bp, Homo sapiens
agtaagctcagcagg

SEQ ID NO: 519102 - DNA, 15 bp, Homo sapiens
gtaagctcagcaggg

SEQ ID NO: 519103 - DNA, 15 bp, Homo sapiens
taagctcagcagggt

SEQ ID NO: 519104 - DNA, 15 bp, Homo sapiens
aagctcagcagggtg

SEQ ID NO: 519105 - DNA, 15 bp, Homo sapiens
agctcagcagggtgt

SEQ ID NO: 519106 - DNA, 15 bp, Homo sapiens
gctcagcagggtgtg

SEQ ID NO: 519107 - DNA, 15 bp, Homo sapiens
ctcagcagggtgtga

SEQ ID NO: 519108 - DNA, 15 bp, Homo sapiens
tcagcagggtgtgat

SEQ ID NO: 519109 - DNA, 15 bp, Homo sapiens
cagcagggtgtgatt

SEQ ID NO: 519110 - DNA, 15 bp, Homo sapiens
agcagggtgtgattg

SEQ ID NO: 519111 - DNA, 15 bp, Homo sapiens
gcagggtgtgattgc

SEQ ID NO: 519112 - DNA, 15 bp, Homo sapiens
cagggtgtgattgct

SEQ ID NO: 519113 - DNA, 15 bp, Homo sapiens
agggtgtgattgctc

SEQ ID NO: 519114 - DNA, 15 bp, Homo sapiens
gggtgtgattgctca

SEQ ID NO: 519115 - DNA, 15 bp, Homo sapiens
ggtgtgattgctcat

SEQ ID NO: 519116 - DNA, 15 bp, Homo sapiens
gtgtgattgctcatg

SEQ ID NO: 519117 - DNA, 15 bp, Homo sapiens
tgtgattgctcatgc

SEQ ID NO: 519118 - DNA, 15 bp, Homo sapiens
gtgattgctcatgcc

SEQ ID NO: 519119 - DNA, 15 bp, Homo sapiens
tgattgctcatgcct

SEQ ID NO: 519120 - DNA, 15 bp, Homo sapiens
gattgctcatgccta

SEQ ID NO: 519121 - DNA, 15 bp, Homo sapiens
attgctcatgcctat

SEQ ID NO: 519122 - DNA, 15 bp, Homo sapiens
ttgctcatgcctata

SEQ ID NO: 519123 - DNA, 15 bp, Homo sapiens
tgctcatgcctataa

SEQ ID NO: 519124 - DNA, 15 bp, Homo sapiens
gctcatgcctataac

SEQ ID NO: 519125 - DNA, 15 bp, Homo sapiens
ctcatgcctataacc

SEQ ID NO: 519126 - DNA, 15 bp, Homo sapiens
tcatgcctataaccc

SEQ ID NO: 519127 - DNA, 15 bp, Homo sapiens
catgcctataaccct

SEQ ID NO: 519128 - DNA, 15 bp, Homo sapiens
atgcctataacccta

SEQ ID NO: 519129 - DNA, 15 bp, Homo sapiens
tgcctataaccctag

SEQ ID NO: 519130 - DNA, 15 bp, Homo sapiens
gcctataaccctagc

SEQ ID NO: 519131 - DNA, 15 bp, Homo sapiens
cctataaccctagca

SEQ ID NO: 519132 - DNA, 15 bp, Homo sapiens
ctataaccctagcac

SEQ ID NO: 519133 - DNA, 15 bp, Homo sapiens
tataaccctagcact

SEQ ID NO: 519134 - DNA, 15 bp, Homo sapiens
ataaccctagcactc

SEQ ID NO: 519135 - DNA, 15 bp, Homo sapiens
taaccctagcactct

SEQ ID NO: 519136 - DNA, 15 bp, Homo sapiens
aaccctagcactcta

SEQ ID NO: 519137 - DNA, 15 bp, Homo sapiens
accctagcactctag

SEQ ID NO: 519138 - DNA, 15 bp, Homo sapiens
ccctagcactctagg

SEQ ID NO: 519139 - DNA, 15 bp, Homo sapiens
cctagcactctagga

SEQ ID NO: 519140 - DNA, 15 bp, Homo sapiens
ctagcactctaggag

SEQ ID NO: 519141 - DNA, 15 bp, Homo sapiens
tagcactctaggagg

SEQ ID NO: 519142 - DNA, 15 bp, Homo sapiens
agcactctaggaggc

SEQ ID NO: 519143 - DNA, 15 bp, Homo sapiens
gcactctaggaggct

SEQ ID NO: 519144 - DNA, 15 bp, Homo sapiens
cactctaggaggctg

SEQ ID NO: 519145 - DNA, 15 bp, Homo sapiens
actctaggaggctga

SEQ ID NO: 519146 - DNA, 15 bp, Homo sapiens
ctctaggaggctgag

SEQ ID NO: 519147 - DNA, 15 bp, Homo sapiens
tctaggaggctgagg

SEQ ID NO: 519148 - DNA, 15 bp, Homo sapiens
ctaggaggctgaggt

SEQ ID NO: 519149 - DNA, 15 bp, Homo sapiens
taggaggctgaggtg

SEQ ID NO: 519150 - DNA, 15 bp, Homo sapiens
aggaggctgaggtgg

SEQ ID NO: 519151 - DNA, 15 bp, Homo sapiens
gaggctgaggtggga

SEQ ID NO: 519152 - DNA, 15 bp, Homo sapiens
aggctgaggtgggat

SEQ ID NO: 519153 - DNA, 15 bp, Homo sapiens
ggctgaggtgggatg

SEQ ID NO: 519154 - DNA, 15 bp, Homo sapiens
gctgaggtgggatga

SEQ ID NO: 519155 - DNA, 15 bp, Homo sapiens
ctgaggtgggatgat

SEQ ID NO: 519156 - DNA, 15 bp, Homo sapiens
tgaggtgggatgatt

SEQ ID NO: 519157 - DNA, 15 bp, Homo sapiens
gaggtgggatgattg

SEQ ID NO: 519158 - DNA, 15 bp, Homo sapiens
aggtgggatgattgc

SEQ ID NO: 519159 - DNA, 15 bp, Homo sapiens
ggtgggatgattgct

SEQ ID NO: 519160 - DNA, 15 bp, Homo sapiens
gtgggatgattgctt

SEQ ID NO: 519161 - DNA, 15 bp, Homo sapiens
tgggatgattgcttg

SEQ ID NO: 519162 - DNA, 15 bp, Homo sapiens
gggatgattgcttga

SEQ ID NO: 519163 - DNA, 15 bp, Homo sapiens
ggatgattgcttgag

SEQ ID NO: 519164 - DNA, 15 bp, Homo sapiens
gatgattgcttgagg

SEQ ID NO: 519165 - DNA, 15 bp, Homo sapiens
atgattgcttgaggc

SEQ ID NO: 519166 - DNA, 15 bp, Homo sapiens
tgattgcttgaggcc

SEQ ID NO: 519167 - DNA, 15 bp, Homo sapiens
tgaggccaggagttt

SEQ ID NO: 519168 - DNA, 15 bp, Homo sapiens
gaggccaggagtttg

SEQ ID NO: 519169 - DNA, 15 bp, Homo sapiens
aggccaggagtttga

SEQ ID NO: 519170 - DNA, 15 bp, Homo sapiens
ggccaggagtttgaa

SEQ ID NO: 519171 - DNA, 15 bp, Homo sapiens
gccaggagtttgaaa

SEQ ID NO: 519172 - DNA, 15 bp, Homo sapiens
ccaggagtttgaaat

SEQ ID NO: 519173 - DNA, 15 bp, Homo sapiens
caggagtttgaaatc

SEQ ID NO: 519174 - DNA, 15 bp, Homo sapiens
aggagtttgaaatca

SEQ ID NO: 519175 - DNA, 15 bp, Homo sapiens
ggagtttgaaatcag

SEQ ID NO: 519176 - DNA, 15 bp, Homo sapiens
gagtttgaaatcagc

SEQ ID NO: 519177 - DNA, 15 bp, Homo sapiens
agtttgaaatcagcc

SEQ ID NO: 519178 - DNA, 15 bp, Homo sapiens
gtttgaaatcagcct

SEQ ID NO: 519179 - DNA, 15 bp, Homo sapiens
tttgaaatcagcctg

SEQ ID NO: 519180 - DNA, 15 bp, Homo sapiens
ttgaaatcagcctgg

SEQ ID NO: 519181 - DNA, 15 bp, Homo sapiens
tgaaatcagcctggg

SEQ ID NO: 519182 - DNA, 15 bp, Homo sapiens
gaaatcagcctgggc

SEQ ID NO: 519183 - DNA, 15 bp, Homo sapiens
aaatcagcctgggca

SEQ ID NO: 519184 - DNA, 15 bp, Homo sapiens
aatcagcctgggcaa

SEQ ID NO: 519185 - DNA, 15 bp, Homo sapiens
atcagcctgggcaac

SEQ ID NO: 519186 - DNA, 15 bp, Homo sapiens
tcagcctgggcaaca

SEQ ID NO: 519187 - DNA, 15 bp, Homo sapiens
cagcctgggcaacat

SEQ ID NO: 519188 - DNA, 15 bp, Homo sapiens
agcctgggcaacata

SEQ ID NO: 519189 - DNA, 15 bp, Homo sapiens
gcctgggcaacatag

SEQ ID NO: 519190 - DNA, 15 bp, Homo sapiens
cctgggcaacatagt

SEQ ID NO: 519191 - DNA, 15 bp, Homo sapiens
ctgggcaacatagtg

SEQ ID NO: 519192 - DNA, 15 bp, Homo sapiens
tgggcaacatagtga

SEQ ID NO: 519193 - DNA, 15 bp, Homo sapiens
gggcaacatagtgag

SEQ ID NO: 519194 - DNA, 15 bp, Homo sapiens
ggcaacatagtgaga

SEQ ID NO: 519195 - DNA, 15 bp, Homo sapiens
gcaacatagtgagac

SEQ ID NO: 519196 - DNA, 15 bp, Homo sapiens
caacatagtgagacc

SEQ ID NO: 519197 - DNA, 15 bp, Homo sapiens
aacatagtgagaccc

SEQ ID NO: 519198 - DNA, 15 bp, Homo sapiens
acatagtgagacccc

SEQ ID NO: 519199 - DNA, 15 bp, Homo sapiens
catagtgagacccca

SEQ ID NO: 519200 - DNA, 15 bp, Homo sapiens
atagtgagaccccat

SEQ ID NO: 519201 - DNA, 15 bp, Homo sapiens
tagtgagaccccatc

SEQ ID NO: 519202 - DNA, 15 bp, Homo sapiens
agtgagaccccatca

SEQ ID NO: 519203 - DNA, 15 bp, Homo sapiens
gtgagaccccatcac

SEQ ID NO: 519204 - DNA, 15 bp, Homo sapiens
tgagaccccatcact

SEQ ID NO: 519205 - DNA, 15 bp, Homo sapiens
gagaccccatcacta

SEQ ID NO: 519206 - DNA, 15 bp, Homo sapiens
agaccccatcactac

SEQ ID NO: 519207 - DNA, 15 bp, Homo sapiens
gaccccatcactacc

SEQ ID NO: 519208 - DNA, 15 bp, Homo sapiens
accccatcactacca

SEQ ID NO: 519209 - DNA, 15 bp, Homo sapiens
ccccatcactaccaa

SEQ ID NO: 519210 - DNA, 15 bp, Homo sapiens
cccatcactaccaac

SEQ ID NO: 519211 - DNA, 15 bp, Homo sapiens
ccatcactaccaaca

SEQ ID NO: 519212 - DNA, 15 bp, Homo sapiens
catcactaccaacaa

SEQ ID NO: 519213 - DNA, 15 bp, Homo sapiens
atcactaccaacaaa

SEQ ID NO: 519214 - DNA, 15 bp, Homo sapiens
tcactaccaacaaaa

SEQ ID NO: 519215 - DNA, 15 bp, Homo sapiens
cactaccaacaaaat

SEQ ID NO: 519216 - DNA, 15 bp, Homo sapiens
actaccaacaaaata

SEQ ID NO: 519217 - DNA, 15 bp, Homo sapiens
ctaccaacaaaataa

SEQ ID NO: 519218 - DNA, 15 bp, Homo sapiens
taccaacaaaataaa

SEQ ID NO: 519219 - DNA, 15 bp, Homo sapiens
accaacaaaataaat

SEQ ID NO: 519220 - DNA, 15 bp, Homo sapiens
ccaacaaaataaata

SEQ ID NO: 519221 - DNA, 15 bp, Homo sapiens
caacaaaataaataa

SEQ ID NO: 519222 - DNA, 15 bp, Homo sapiens
aacaaaataaataaa

SEQ ID NO: 519223 - DNA, 15 bp, Homo sapiens
acaaaataaataaat

SEQ ID NO: 519224 - DNA, 15 bp, Homo sapiens
caaaataaataaata

SEQ ID NO: 519225 - DNA, 15 bp, Homo sapiens
aaaataaataaataa

SEQ ID NO: 519226 - DNA, 15 bp, Homo sapiens
aaataaataaataaa

SEQ ID NO: 519227 - DNA, 15 bp, Homo sapiens
aataaataaataaat

SEQ ID NO: 519228 - DNA, 15 bp, Homo sapiens
ataaataaataaatg

SEQ ID NO: 519229 - DNA, 15 bp, Homo sapiens
taaataaataaatgt

SEQ ID NO: 519230 - DNA, 15 bp, Homo sapiens
aaataaataaatgta

SEQ ID NO: 519231 - DNA, 15 bp, Homo sapiens
aataaataaatgtac

SEQ ID NO: 519232 - DNA, 15 bp, Homo sapiens
ataaataaatgtaca

SEQ ID NO: 519233 - DNA, 15 bp, Homo sapiens
taaataaatgtacat

SEQ ID NO: 519234 - DNA, 15 bp, Homo sapiens
aaataaatgtacatg

SEQ ID NO: 519235 - DNA, 15 bp, Homo sapiens
aataaatgtacatgg

SEQ ID NO: 519236 - DNA, 15 bp, Homo sapiens
ataaatgtacatggt

SEQ ID NO: 519237 - DNA, 15 bp, Homo sapiens
taaatgtacatggtg

SEQ ID NO: 519238 - DNA, 15 bp, Homo sapiens
aaatgtacatggtgg

SEQ ID NO: 519239 - DNA, 15 bp, Homo sapiens
aatgtacatggtggc

SEQ ID NO: 519240 - DNA, 15 bp, Homo sapiens
atgtacatggtggca

SEQ ID NO: 519241 - DNA, 15 bp, Homo sapiens
tgtacatggtggcat

SEQ ID NO: 519242 - DNA, 15 bp, Homo sapiens
gtacatggtggcata

SEQ ID NO: 519243 - DNA, 15 bp, Homo sapiens
tacatggtggcatat

SEQ ID NO: 519244 - DNA, 15 bp, Homo sapiens
acatggtggcatatg

SEQ ID NO: 519245 - DNA, 15 bp, Homo sapiens
catggtggcatatgc

SEQ ID NO: 519246 - DNA, 15 bp, Homo sapiens
atggtggcatatgcc

SEQ ID NO: 519247 - DNA, 15 bp, Homo sapiens
tggtggcatatgccc

SEQ ID NO: 519248 - DNA, 15 bp, Homo sapiens
ggtggcatatgccca

SEQ ID NO: 519249 - DNA, 15 bp, Homo sapiens
gtggcatatgcccat

SEQ ID NO: 519250 - DNA, 15 bp, Homo sapiens
tggcatatgcccata

SEQ ID NO: 519251 - DNA, 15 bp, Homo sapiens
ggcatatgcccatag

SEQ ID NO: 519252 - DNA, 15 bp, Homo sapiens
gcatatgcccatagt

SEQ ID NO: 519253 - DNA, 15 bp, Homo sapiens
catatgcccatagtc

SEQ ID NO: 519254 - DNA, 15 bp, Homo sapiens
atatgcccatagtcc

SEQ ID NO: 519255 - DNA, 15 bp, Homo sapiens
tatgcccatagtcct

SEQ ID NO: 519256 - DNA, 15 bp, Homo sapiens
atgcccatagtccta

SEQ ID NO: 519257 - DNA, 15 bp, Homo sapiens
tgcccatagtcctag

SEQ ID NO: 519258 - DNA, 15 bp, Homo sapiens
gcccatagtcctagc

SEQ ID NO: 519259 - DNA, 15 bp, Homo sapiens
cccatagtcctagct

SEQ ID NO: 519260 - DNA, 15 bp, Homo sapiens
ccatagtcctagcta

SEQ ID NO: 519261 - DNA, 15 bp, Homo sapiens
catagtcctagctac

SEQ ID NO: 519262 - DNA, 15 bp, Homo sapiens
atagtcctagctact

SEQ ID NO: 519263 - DNA, 15 bp, Homo sapiens
tagtcctagctactt

SEQ ID NO: 519264 - DNA, 15 bp, Homo sapiens
agtcctagctacttg

SEQ ID NO: 519265 - DNA, 15 bp, Homo sapiens
gtcctagctacttgg

SEQ ID NO: 519266 - DNA, 15 bp, Homo sapiens
tcctagctacttggg

SEQ ID NO: 519267 - DNA, 15 bp, Homo sapiens
cctagctacttggga

SEQ ID NO: 519268 - DNA, 15 bp, Homo sapiens
ctagctacttgggag

SEQ ID NO: 519269 - DNA, 15 bp, Homo sapiens
tagctacttgggagg

SEQ ID NO: 519270 - DNA, 15 bp, Homo sapiens
ctacttgggaggcta

SEQ ID NO: 519271 - DNA, 15 bp, Homo sapiens
tacttgggaggctat

SEQ ID NO: 519272 - DNA, 15 bp, Homo sapiens
acttgggaggctata

SEQ ID NO: 519273 - DNA, 15 bp, Homo sapiens
cttgggaggctatag

SEQ ID NO: 519274 - DNA, 15 bp, Homo sapiens
ttgggaggctatagt

SEQ ID NO: 519275 - DNA, 15 bp, Homo sapiens
tgggaggctatagtg

SEQ ID NO: 519276 - DNA, 15 bp, Homo sapiens
gggaggctatagtgg

SEQ ID NO: 519277 - DNA, 15 bp, Homo sapiens
ggaggctatagtggg

SEQ ID NO: 519278 - DNA, 15 bp, Homo sapiens
gaggctatagtggga

SEQ ID NO: 519279 - DNA, 15 bp, Homo sapiens
aggctatagtgggag

SEQ ID NO: 519280 - DNA, 15 bp, Homo sapiens
ggctatagtgggagg

SEQ ID NO: 519281 - DNA, 15 bp, Homo sapiens
gctatagtgggagga

SEQ ID NO: 519282 - DNA, 15 bp, Homo sapiens
ctatagtgggaggat

SEQ ID NO: 519283 - DNA, 15 bp, Homo sapiens
tatagtgggaggata

SEQ ID NO: 519284 - DNA, 15 bp, Homo sapiens
atagtgggaggatag

SEQ ID NO: 519285 - DNA, 15 bp, Homo sapiens
tagtgggaggatagc

SEQ ID NO: 519286 - DNA, 15 bp, Homo sapiens
agtgggaggatagct

SEQ ID NO: 519287 - DNA, 15 bp, Homo sapiens
gtgggaggatagctt

SEQ ID NO: 519288 - DNA, 15 bp, Homo sapiens
tgggaggatagcttg

SEQ ID NO: 519289 - DNA, 15 bp, Homo sapiens
gggaggatagcttga

SEQ ID NO: 519290 - DNA, 15 bp, Homo sapiens
ggaggatagcttgag

SEQ ID NO: 519291 - DNA, 15 bp, Homo sapiens
gaggatagcttgagt

SEQ ID NO: 519292 - DNA, 15 bp, Homo sapiens
aggatagcttgagta

SEQ ID NO: 519293 - DNA, 15 bp, Homo sapiens
ggatagcttgagtac

SEQ ID NO: 519294 - DNA, 15 bp, Homo sapiens
gatagcttgagtaca

SEQ ID NO: 519295 - DNA, 15 bp, Homo sapiens
atagcttgagtacag

SEQ ID NO: 519296 - DNA, 15 bp, Homo sapiens
tagcttgagtacaga

SEQ ID NO: 519297 - DNA, 15 bp, Homo sapiens
agcttgagtacagaa

SEQ ID NO: 519298 - DNA, 15 bp, Homo sapiens
gcttgagtacagaag

SEQ ID NO: 519299 - DNA, 15 bp, Homo sapiens
cttgagtacagaagt

SEQ ID NO: 519300 - DNA, 15 bp, Homo sapiens
ttgagtacagaagtc

SEQ ID NO: 519301 - DNA, 15 bp, Homo sapiens
tgagtacagaagtct

SEQ ID NO: 519302 - DNA, 15 bp, Homo sapiens
gagtacagaagtctg

SEQ ID NO: 519303 - DNA, 15 bp, Homo sapiens
agtacagaagtctga

SEQ ID NO: 519304 - DNA, 15 bp, Homo sapiens
gtacagaagtctgag

SEQ ID NO: 519305 - DNA, 15 bp, Homo sapiens
tacagaagtctgagg

SEQ ID NO: 519306 - DNA, 15 bp, Homo sapiens
acagaagtctgaggc

SEQ ID NO: 519307 - DNA, 15 bp, Homo sapiens
cagaagtctgaggct

SEQ ID NO: 519308 - DNA, 15 bp, Homo sapiens
agaagtctgaggctg

SEQ ID NO: 519309 - DNA, 15 bp, Homo sapiens
gaagtctgaggctgc

SEQ ID NO: 519310 - DNA, 15 bp, Homo sapiens
aagtctgaggctgca

SEQ ID NO: 519311 - DNA, 15 bp, Homo sapiens
agtctgaggctgcag

SEQ ID NO: 519312 - DNA, 15 bp, Homo sapiens
gtctgaggctgcagt

SEQ ID NO: 519313 - DNA, 15 bp, Homo sapiens
tctgaggctgcagtg

SEQ ID NO: 519314 - DNA, 15 bp, Homo sapiens
ctgaggctgcagtga

SEQ ID NO: 519315 - DNA, 15 bp, Homo sapiens
tgaggctgcagtgag

SEQ ID NO: 519316 - DNA, 15 bp, Homo sapiens
gaggctgcagtgagc

SEQ ID NO: 519317 - DNA, 15 bp, Homo sapiens
aggctgcagtgagct

SEQ ID NO: 519318 - DNA, 15 bp, Homo sapiens
ggctgcagtgagcta

SEQ ID NO: 519319 - DNA, 15 bp, Homo sapiens
gctgcagtgagctat

SEQ ID NO: 519320 - DNA, 15 bp, Homo sapiens
ctgcagtgagctatg

SEQ ID NO: 519321 - DNA, 15 bp, Homo sapiens
tgcagtgagctatga

SEQ ID NO: 519322 - DNA, 15 bp, Homo sapiens
gcagtgagctatgat

SEQ ID NO: 519323 - DNA, 15 bp, Homo sapiens
cagtgagctatgatt

SEQ ID NO: 519324 - DNA, 15 bp, Homo sapiens
agtgagctatgattg

SEQ ID NO: 519325 - DNA, 15 bp, Homo sapiens
gtgagctatgattgt

SEQ ID NO: 519326 - DNA, 15 bp, Homo sapiens
tgagctatgattgtg

SEQ ID NO: 519327 - DNA, 15 bp, Homo sapiens
gagctatgattgtgg

SEQ ID NO: 519328 - DNA, 15 bp, Homo sapiens
agctatgattgtggc

SEQ ID NO: 519329 - DNA, 15 bp, Homo sapiens
gctatgattgtggca

SEQ ID NO: 519330 - DNA, 15 bp, Homo sapiens
ctatgattgtggcac

SEQ ID NO: 519331 - DNA, 15 bp, Homo sapiens
tatgattgtggcact

SEQ ID NO: 519332 - DNA, 15 bp, Homo sapiens
atgattgtggcactg

SEQ ID NO: 519333 - DNA, 15 bp, Homo sapiens
tgattgtggcactgc

SEQ ID NO: 519334 - DNA, 15 bp, Homo sapiens
gattgtggcactgca

SEQ ID NO: 519335 - DNA, 15 bp, Homo sapiens
attgtggcactgcat

SEQ ID NO: 519336 - DNA, 15 bp, Homo sapiens
ttgtggcactgcatg

SEQ ID NO: 519337 - DNA, 15 bp, Homo sapiens
tgtggcactgcatgc

SEQ ID NO: 519338 - DNA, 15 bp, Homo sapiens
gtggcactgcatgct

SEQ ID NO: 519339 - DNA, 15 bp, Homo sapiens
tggcactgcatgcta

SEQ ID NO: 519340 - DNA, 15 bp, Homo sapiens
ggcactgcatgctag

SEQ ID NO: 519341 - DNA, 15 bp, Homo sapiens
gcactgcatgctagc

SEQ ID NO: 519342 - DNA, 15 bp, Homo sapiens
cactgcatgctagcc

SEQ ID NO: 519343 - DNA, 15 bp, Homo sapiens
actgcatgctagcct

SEQ ID NO: 519344 - DNA, 15 bp, Homo sapiens
ctgcatgctagcctg

SEQ ID NO: 519345 - DNA, 15 bp, Homo sapiens
tgcatgctagcctgg

SEQ ID NO: 519346 - DNA, 15 bp, Homo sapiens
gcatgctagcctggg

SEQ ID NO: 519347 - DNA, 15 bp, Homo sapiens
catgctagcctgggc

SEQ ID NO: 519348 - DNA, 15 bp, Homo sapiens
atgctagcctgggca

SEQ ID NO: 519349 - DNA, 15 bp, Homo sapiens
tgctagcctgggcaa

SEQ ID NO: 519350 - DNA, 15 bp, Homo sapiens
gctagcctgggcaat

SEQ ID NO: 519351 - DNA, 15 bp, Homo sapiens
ctagcctgggcaata

SEQ ID NO: 519352 - DNA, 15 bp, Homo sapiens
tagcctgggcaatag

SEQ ID NO: 519353 - DNA, 15 bp, Homo sapiens
agcctgggcaataga

SEQ ID NO: 519354 - DNA, 15 bp, Homo sapiens
gcctgggcaatagag

SEQ ID NO: 519355 - DNA, 15 bp, Homo sapiens
cctgggcaatagagc

SEQ ID NO: 519356 - DNA, 15 bp, Homo sapiens
ctgggcaatagagca

SEQ ID NO: 519357 - DNA, 15 bp, Homo sapiens
tgggcaatagagcaa

SEQ ID NO: 519358 - DNA, 15 bp, Homo sapiens
gggcaatagagcaag

SEQ ID NO: 519359 - DNA, 15 bp, Homo sapiens
ggcaatagagcaaga

SEQ ID NO: 519360 - DNA, 15 bp, Homo sapiens
gcaatagagcaagac

SEQ ID NO: 519361 - DNA, 15 bp, Homo sapiens
caatagagcaagacc

SEQ ID NO: 519362 - DNA, 15 bp, Homo sapiens
aatagagcaagaccc

SEQ ID NO: 519363 - DNA, 15 bp, Homo sapiens
atagagcaagaccct

SEQ ID NO: 519364 - DNA, 15 bp, Homo sapiens
tagagcaagaccctg

SEQ ID NO: 519365 - DNA, 15 bp, Homo sapiens
agagcaagaccctgt

SEQ ID NO: 519366 - DNA, 15 bp, Homo sapiens
gagcaagaccctgtc

SEQ ID NO: 519367 - DNA, 15 bp, Homo sapiens
agcaagaccctgtct

SEQ ID NO: 519368 - DNA, 15 bp, Homo sapiens
gcaagaccctgtctc

SEQ ID NO: 519369 - DNA, 15 bp, Homo sapiens
caagaccctgtctct

SEQ ID NO: 519370 - DNA, 15 bp, Homo sapiens
aagaccctgtctcta

SEQ ID NO: 519371 - DNA, 15 bp, Homo sapiens
agaccctgtctctaa

SEQ ID NO: 519372 - DNA, 15 bp, Homo sapiens
gaccctgtctctaaa

SEQ ID NO: 519373 - DNA, 15 bp, Homo sapiens
accctgtctctaaat

SEQ ID NO: 519374 - DNA, 15 bp, Homo sapiens
ccctgtctctaaatt

SEQ ID NO: 519375 - DNA, 15 bp, Homo sapiens
cctgtctctaaatta

SEQ ID NO: 519376 - DNA, 15 bp, Homo sapiens
ctgtctctaaattaa

SEQ ID NO: 519377 - DNA, 15 bp, Homo sapiens
tgtctctaaattaaa

SEQ ID NO: 519378 - DNA, 15 bp, Homo sapiens
gtctctaaattaaac

SEQ ID NO: 519379 - DNA, 15 bp, Homo sapiens
tctctaaattaaaca

SEQ ID NO: 519380 - DNA, 15 bp, Homo sapiens
ctctaaattaaacaa

SEQ ID NO: 519381 - DNA, 15 bp, Homo sapiens
tctaaattaaacaaa

SEQ ID NO: 519382 - DNA, 15 bp, Homo sapiens
ctaaattaaacaaaa

SEQ ID NO: 519383 - DNA, 15 bp, Homo sapiens
taaattaaacaaaaa

SEQ ID NO: 519384 - DNA, 15 bp, Homo sapiens
aaattaaacaaaaaa

SEQ ID NO: 519385 - DNA, 15 bp, Homo sapiens
aattaaacaaaaaaa

SEQ ID NO: 519386 - DNA, 15 bp, Homo sapiens
attaaacaaaaaaaa

SEQ ID NO: 519387 - DNA, 15 bp, Homo sapiens
ttaaacaaaaaaaaa

SEQ ID NO: 519388 - DNA, 15 bp, Homo sapiens
taaacaaaaaaaaaa

SEQ ID NO: 519389 - DNA, 15 bp, Homo sapiens
aaacaaaaaaaaaag

SEQ ID NO: 519390 - DNA, 15 bp, Homo sapiens
aacaaaaaaaaaagt

SEQ ID NO: 519391 - DNA, 15 bp, Homo sapiens
acaaaaaaaaaagta

SEQ ID NO: 519392 - DNA, 15 bp, Homo sapiens
caaaaaaaaaagtac

SEQ ID NO: 519393 - DNA, 15 bp, Homo sapiens
aaaaaaaaaagtact

SEQ ID NO: 519394 - DNA, 15 bp, Homo sapiens
aaaaaaaaagtactc

SEQ ID NO: 519395 - DNA, 15 bp, Homo sapiens
aaaaaaaagtactct

SEQ ID NO: 519396 - DNA, 15 bp, Homo sapiens
aaaaaaagtactcta

SEQ ID NO: 519397 - DNA, 15 bp, Homo sapiens
aaaaaagtactctag

SEQ ID NO: 519398 - DNA, 15 bp, Homo sapiens
aaaaagtactctagt

SEQ ID NO: 519399 - DNA, 15 bp, Homo sapiens
aaaagtactctagtt

SEQ ID NO: 519400 - DNA, 15 bp, Homo sapiens
aaagtactctagttt

SEQ ID NO: 519401 - DNA, 15 bp, Homo sapiens
aagtactctagtttt

SEQ ID NO: 519402 - DNA, 15 bp, Homo sapiens
agtactctagttttc

SEQ ID NO: 519403 - DNA, 15 bp, Homo sapiens
gtactctagttttct

SEQ ID NO: 519404 - DNA, 15 bp, Homo sapiens
tactctagttttcta

SEQ ID NO: 519405 - DNA, 15 bp, Homo sapiens
actctagttttctat

SEQ ID NO: 519406 - DNA, 15 bp, Homo sapiens
ctctagttttctatg

SEQ ID NO: 519407 - DNA, 15 bp, Homo sapiens
tctagttttctatgc

SEQ ID NO: 519408 - DNA, 15 bp, Homo sapiens
ctagttttctatgca

SEQ ID NO: 519409 - DNA, 15 bp, Homo sapiens
tagttttctatgcaa

SEQ ID NO: 519410 - DNA, 15 bp, Homo sapiens
agttttctatgcaat

SEQ ID NO: 519411 - DNA, 15 bp, Homo sapiens
gttttctatgcaatg

SEQ ID NO: 519412 - DNA, 15 bp, Homo sapiens
ttttctatgcaatgc

SEQ ID NO: 519413 - DNA, 15 bp, Homo sapiens
tttctatgcaatgca

SEQ ID NO: 519414 - DNA, 15 bp, Homo sapiens
ttctatgcaatgcat

SEQ ID NO: 519415 - DNA, 15 bp, Homo sapiens
tctatgcaatgcatt

SEQ ID NO: 519416 - DNA, 15 bp, Homo sapiens
ctatgcaatgcatta

SEQ ID NO: 519417 - DNA, 15 bp, Homo sapiens
tatgcaatgcattat

SEQ ID NO: 519418 - DNA, 15 bp, Homo sapiens
atgcaatgcattata

SEQ ID NO: 519419 - DNA, 15 bp, Homo sapiens
tgcaatgcattatat

SEQ ID NO: 519420 - DNA, 15 bp, Homo sapiens
gcaatgcattatatc

SEQ ID NO: 519421 - DNA, 15 bp, Homo sapiens
caatgcattatatct

SEQ ID NO: 519422 - DNA, 15 bp, Homo sapiens
aatgcattatatctg

SEQ ID NO: 519423 - DNA, 15 bp, Homo sapiens
atgcattatatctgc

SEQ ID NO: 519424 - DNA, 15 bp, Homo sapiens
tgcattatatctgct

SEQ ID NO: 519425 - DNA, 15 bp, Homo sapiens
gcattatatctgctg

SEQ ID NO: 519426 - DNA, 15 bp, Homo sapiens
cattatatctgctgt

SEQ ID NO: 519427 - DNA, 15 bp, Homo sapiens
attatatctgctgtg

SEQ ID NO: 519428 - DNA, 15 bp, Homo sapiens
ttatatctgctgtgg

SEQ ID NO: 519429 - DNA, 15 bp, Homo sapiens
tatatctgctgtgga

SEQ ID NO: 519430 - DNA, 15 bp, Homo sapiens
atatctgctgtggat

SEQ ID NO: 519431 - DNA, 15 bp, Homo sapiens
tatctgctgtggatt

SEQ ID NO: 519432 - DNA, 15 bp, Homo sapiens
atctgctgtggattt

SEQ ID NO: 519433 - DNA, 15 bp, Homo sapiens
tctgctgtggattta

SEQ ID NO: 519434 - DNA, 15 bp, Homo sapiens
ctgctgtggatttag

SEQ ID NO: 519435 - DNA, 15 bp, Homo sapiens
tgctgtggatttagg

SEQ ID NO: 519436 - DNA, 15 bp, Homo sapiens
gctgtggatttaggg

SEQ ID NO: 519437 - DNA, 15 bp, Homo sapiens
ctgtggatttagggc

SEQ ID NO: 519438 - DNA, 15 bp, Homo sapiens
tgtggatttagggca

SEQ ID NO: 519439 - DNA, 15 bp, Homo sapiens
gtggatttagggcag

SEQ ID NO: 519440 - DNA, 15 bp, Homo sapiens
tggatttagggcagt

SEQ ID NO: 519441 - DNA, 15 bp, Homo sapiens
ggatttagggcagta

SEQ ID NO: 519442 - DNA, 15 bp, Homo sapiens
gatttagggcagtat

SEQ ID NO: 519443 - DNA, 15 bp, Homo sapiens
atttagggcagtatt

SEQ ID NO: 519444 - DNA, 15 bp, Homo sapiens
tttagggcagtatta

SEQ ID NO: 519445 - DNA, 15 bp, Homo sapiens
ttagggcagtattat

SEQ ID NO: 519446 - DNA, 15 bp, Homo sapiens
tagggcagtattata

SEQ ID NO: 519447 - DNA, 15 bp, Homo sapiens
agggcagtattatat

SEQ ID NO: 519448 - DNA, 15 bp, Homo sapiens
gggcagtattatatc

SEQ ID NO: 519449 - DNA, 15 bp, Homo sapiens
ggcagtattatatca

SEQ ID NO: 519450 - DNA, 15 bp, Homo sapiens
gcagtattatatcag

SEQ ID NO: 519451 - DNA, 15 bp, Homo sapiens
cagtattatatcaga

SEQ ID NO: 519452 - DNA, 15 bp, Homo sapiens
agtattatatcagat

SEQ ID NO: 519453 - DNA, 15 bp, Homo sapiens
gtattatatcagata

SEQ ID NO: 519454 - DNA, 15 bp, Homo sapiens
tattatatcagataa

SEQ ID NO: 519455 - DNA, 15 bp, Homo sapiens
attatatcagataat

SEQ ID NO: 519456 - DNA, 15 bp, Homo sapiens
ttatatcagataatt

SEQ ID NO: 519457 - DNA, 15 bp, Homo sapiens
tatatcagataattt

SEQ ID NO: 519458 - DNA, 15 bp, Homo sapiens
atatcagataatttt

SEQ ID NO: 519459 - DNA, 15 bp, Homo sapiens
tatcagataatttta

SEQ ID NO: 519460 - DNA, 15 bp, Homo sapiens
atcagataattttag

SEQ ID NO: 519461 - DNA, 15 bp, Homo sapiens
tcagataattttagg

SEQ ID NO: 519462 - DNA, 15 bp, Homo sapiens
cagataattttaggc

SEQ ID NO: 519463 - DNA, 15 bp, Homo sapiens
agataattttaggca

SEQ ID NO: 519464 - DNA, 15 bp, Homo sapiens
gataattttaggcat

SEQ ID NO: 519465 - DNA, 15 bp, Homo sapiens
ataattttaggcatt

SEQ ID NO: 519466 - DNA, 15 bp, Homo sapiens
taattttaggcattt

SEQ ID NO: 519467 - DNA, 15 bp, Homo sapiens
aattttaggcatttg

SEQ ID NO: 519468 - DNA, 15 bp, Homo sapiens
attttaggcatttgg

SEQ ID NO: 519469 - DNA, 15 bp, Homo sapiens
ttttaggcatttggt

SEQ ID NO: 519470 - DNA, 15 bp, Homo sapiens
tttaggcatttggta

SEQ ID NO: 519471 - DNA, 15 bp, Homo sapiens
ttaggcatttggtag

SEQ ID NO: 519472 - DNA, 15 bp, Homo sapiens
taggcatttggtagg

SEQ ID NO: 519473 - DNA, 15 bp, Homo sapiens
aggcatttggtaggc

SEQ ID NO: 519474 - DNA, 15 bp, Homo sapiens
ggcatttggtaggct

SEQ ID NO: 519475 - DNA, 15 bp, Homo sapiens
gcatttggtaggctt

SEQ ID NO: 519476 - DNA, 15 bp, Homo sapiens
catttggtaggctta

SEQ ID NO: 519477 - DNA, 15 bp, Homo sapiens
atttggtaggcttaa

SEQ ID NO: 519478 - DNA, 15 bp, Homo sapiens
tttggtaggcttaaa

SEQ ID NO: 519479 - DNA, 15 bp, Homo sapiens
ttggtaggcttaaat

SEQ ID NO: 519480 - DNA, 15 bp, Homo sapiens
tggtaggcttaaatg

SEQ ID NO: 519481 - DNA, 15 bp, Homo sapiens
ggtaggcttaaatga

SEQ ID NO: 519482 - DNA, 15 bp, Homo sapiens
gtaggcttaaatgaa

SEQ ID NO: 519483 - DNA, 15 bp, Homo sapiens
taggcttaaatgaat

SEQ ID NO: 519484 - DNA, 15 bp, Homo sapiens
aggcttaaatgaatg

SEQ ID NO: 519485 - DNA, 15 bp, Homo sapiens
ggcttaaatgaatga

SEQ ID NO: 519486 - DNA, 15 bp, Homo sapiens
gcttaaatgaatgac

SEQ ID NO: 519487 - DNA, 15 bp, Homo sapiens
cttaaatgaatgaca

SEQ ID NO: 519488 - DNA, 15 bp, Homo sapiens
ttaaatgaatgacaa

SEQ ID NO: 519489 - DNA, 15 bp, Homo sapiens
taaatgaatgacaaa

SEQ ID NO: 519490 - DNA, 15 bp, Homo sapiens
aaatgaatgacaaaa

SEQ ID NO: 519491 - DNA, 15 bp, Homo sapiens
aatgaatgacaaaaa

SEQ ID NO: 519492 - DNA, 15 bp, Homo sapiens
atgaatgacaaaaag

SEQ ID NO: 519493 - DNA, 15 bp, Homo sapiens
tgaatgacaaaaagt

SEQ ID NO: 519494 - DNA, 15 bp, Homo sapiens
gaatgacaaaaagtt

SEQ ID NO: 519495 - DNA, 15 bp, Homo sapiens
aatgacaaaaagtta

SEQ ID NO: 519496 - DNA, 15 bp, Homo sapiens
atgacaaaaagttac

SEQ ID NO: 519497 - DNA, 15 bp, Homo sapiens
tgacaaaaagttact

SEQ ID NO: 519498 - DNA, 15 bp, Homo sapiens
gacaaaaagttacta

SEQ ID NO: 519499 - DNA, 15 bp, Homo sapiens
acaaaaagttactaa

SEQ ID NO: 519500 - DNA, 15 bp, Homo sapiens
caaaaagttactaaa

SEQ ID NO: 519501 - DNA, 15 bp, Homo sapiens
aaaaagttactaaat

SEQ ID NO: 519502 - DNA, 15 bp, Homo sapiens
aaaagttactaaatc

SEQ ID NO: 519503 - DNA, 15 bp, Homo sapiens
aaagttactaaatca

SEQ ID NO: 519504 - DNA, 15 bp, Homo sapiens
aagttactaaatcac

SEQ ID NO: 519505 - DNA, 15 bp, Homo sapiens
agttactaaatcact

SEQ ID NO: 519506 - DNA, 15 bp, Homo sapiens
gttactaaatcactg

SEQ ID NO: 519507 - DNA, 15 bp, Homo sapiens
ttactaaatcactgc

SEQ ID NO: 519508 - DNA, 15 bp, Homo sapiens
tactaaatcactgcc

SEQ ID NO: 519509 - DNA, 15 bp, Homo sapiens
actaaatcactgcca

SEQ ID NO: 519510 - DNA, 15 bp, Homo sapiens
ctaaatcactgccat

SEQ ID NO: 519511 - DNA, 15 bp, Homo sapiens
taaatcactgccatc

SEQ ID NO: 519512 - DNA, 15 bp, Homo sapiens
aaatcactgccatca

SEQ ID NO: 519513 - DNA, 15 bp, Homo sapiens
aatcactgccatcac

SEQ ID NO: 519514 - DNA, 15 bp, Homo sapiens
atcactgccatcaca

SEQ ID NO: 519515 - DNA, 15 bp, Homo sapiens
tcactgccatcacac

SEQ ID NO: 519516 - DNA, 15 bp, Homo sapiens
cactgccatcacacg

SEQ ID NO: 519517 - DNA, 15 bp, Homo sapiens
actgccatcacacgg

SEQ ID NO: 519518 - DNA, 15 bp, Homo sapiens
ctgccatcacacggt

SEQ ID NO: 519519 - DNA, 15 bp, Homo sapiens
tgccatcacacggtt

SEQ ID NO: 519520 - DNA, 15 bp, Homo sapiens
gccatcacacggttt

SEQ ID NO: 519521 - DNA, 15 bp, Homo sapiens
ccatcacacggttta

SEQ ID NO: 519522 - DNA, 15 bp, Homo sapiens
catcacacggtttat

SEQ ID NO: 519523 - DNA, 15 bp, Homo sapiens
atcacacggtttata

SEQ ID NO: 519524 - DNA, 15 bp, Homo sapiens
tcacacggtttatac

SEQ ID NO: 519525 - DNA, 15 bp, Homo sapiens
cacacggtttataca

SEQ ID NO: 519526 - DNA, 15 bp, Homo sapiens
acacggtttatacag

SEQ ID NO: 519527 - DNA, 15 bp, Homo sapiens
cacggtttatacaga

SEQ ID NO: 519528 - DNA, 15 bp, Homo sapiens
acggtttatacagat

SEQ ID NO: 519529 - DNA, 15 bp, Homo sapiens
cggtttatacagatg

SEQ ID NO: 519530 - DNA, 15 bp, Homo sapiens
ggtttatacagatgt

SEQ ID NO: 519531 - DNA, 15 bp, Homo sapiens
gtttatacagatgtc

SEQ ID NO: 519532 - DNA, 15 bp, Homo sapiens
tttatacagatgtca

SEQ ID NO: 519533 - DNA, 15 bp, Homo sapiens
ttatacagatgtcaa

SEQ ID NO: 519534 - DNA, 15 bp, Homo sapiens
tatacagatgtcaat

SEQ ID NO: 519535 - DNA, 15 bp, Homo sapiens
atacagatgtcaatg

SEQ ID NO: 519536 - DNA, 15 bp, Homo sapiens
tacagatgtcaatga

SEQ ID NO: 519537 - DNA, 15 bp, Homo sapiens
acagatgtcaatgat

SEQ ID NO: 519538 - DNA, 15 bp, Homo sapiens
cagatgtcaatgatg

SEQ ID NO: 519539 - DNA, 15 bp, Homo sapiens
agatgtcaatgatgt

SEQ ID NO: 519540 - DNA, 15 bp, Homo sapiens
gatgtcaatgatgta

SEQ ID NO: 519541 - DNA, 15 bp, Homo sapiens
atgtcaatgatgtat

SEQ ID NO: 519542 - DNA, 15 bp, Homo sapiens
tgtcaatgatgtatt

SEQ ID NO: 519543 - DNA, 15 bp, Homo sapiens
gtcaatgatgtattg

SEQ ID NO: 519544 - DNA, 15 bp, Homo sapiens
tcaatgatgtattga

SEQ ID NO: 519545 - DNA, 15 bp, Homo sapiens
caatgatgtattgat

SEQ ID NO: 519546 - DNA, 15 bp, Homo sapiens
aatgatgtattgatt

SEQ ID NO: 519547 - DNA, 15 bp, Homo sapiens
atgatgtattgatta

SEQ ID NO: 519548 - DNA, 15 bp, Homo sapiens
tgatgtattgattat

SEQ ID NO: 519549 - DNA, 15 bp, Homo sapiens
gatgtattgattata

SEQ ID NO: 519550 - DNA, 15 bp, Homo sapiens
atgtattgattatag

SEQ ID NO: 519551 - DNA, 15 bp, Homo sapiens
tgtattgattataga

SEQ ID NO: 519552 - DNA, 15 bp, Homo sapiens
gtattgattatagag

SEQ ID NO: 519553 - DNA, 15 bp, Homo sapiens
tattgattatagagg

SEQ ID NO: 519554 - DNA, 15 bp, Homo sapiens
attgattatagaggt

SEQ ID NO: 519555 - DNA, 15 bp, Homo sapiens
ttgattatagaggtt

SEQ ID NO: 519556 - DNA, 15 bp, Homo sapiens
tgattatagaggttt

SEQ ID NO: 519557 - DNA, 15 bp, Homo sapiens
gattatagaggtttt

SEQ ID NO: 519558 - DNA, 15 bp, Homo sapiens
attatagaggttttc

SEQ ID NO: 519559 - DNA, 15 bp, Homo sapiens
ttatagaggttttct

SEQ ID NO: 519560 - DNA, 15 bp, Homo sapiens
tatagaggttttcta

SEQ ID NO: 519561 - DNA, 15 bp, Homo sapiens
atagaggttttctac

SEQ ID NO: 519562 - DNA, 15 bp, Homo sapiens
tagaggttttctact

SEQ ID NO: 519563 - DNA, 15 bp, Homo sapiens
agaggttttctactg

SEQ ID NO: 519564 - DNA, 15 bp, Homo sapiens
gaggttttctactgt

SEQ ID NO: 519565 - DNA, 15 bp, Homo sapiens
aggttttctactgtt

SEQ ID NO: 519566 - DNA, 15 bp, Homo sapiens
ggttttctactgttg

SEQ ID NO: 519567 - DNA, 15 bp, Homo sapiens
gttttctactgttgc

SEQ ID NO: 519568 - DNA, 15 bp, Homo sapiens
ttttctactgttgct

SEQ ID NO: 519569 - DNA, 15 bp, Homo sapiens
tttctactgttgctg

SEQ ID NO: 519570 - DNA, 15 bp, Homo sapiens
ttctactgttgctgc

SEQ ID NO: 519571 - DNA, 15 bp, Homo sapiens
tctactgttgctgca

SEQ ID NO: 519572 - DNA, 15 bp, Homo sapiens
ctactgttgctgcat

SEQ ID NO: 519573 - DNA, 15 bp, Homo sapiens
tactgttgctgcatc

SEQ ID NO: 519574 - DNA, 15 bp, Homo sapiens
actgttgctgcatct

SEQ ID NO: 519575 - DNA, 15 bp, Homo sapiens
ctgttgctgcatctt

SEQ ID NO: 519576 - DNA, 15 bp, Homo sapiens
tgttgctgcatctta

SEQ ID NO: 519577 - DNA, 15 bp, Homo sapiens
gttgctgcatcttat

SEQ ID NO: 519578 - DNA, 15 bp, Homo sapiens
ttgctgcatcttatt

SEQ ID NO: 519579 - DNA, 15 bp, Homo sapiens
tgctgcatcttattt

SEQ ID NO: 519580 - DNA, 15 bp, Homo sapiens
gctgcatcttatttt

SEQ ID NO: 519581 - DNA, 15 bp, Homo sapiens
ctgcatcttattttt

SEQ ID NO: 519582 - DNA, 15 bp, Homo sapiens
tgcatcttattttta

SEQ ID NO: 519583 - DNA, 15 bp, Homo sapiens
gcatcttatttttat

SEQ ID NO: 519584 - DNA, 15 bp, Homo sapiens
catcttatttttatt

SEQ ID NO: 519585 - DNA, 15 bp, Homo sapiens
atcttatttttattt

SEQ ID NO: 519586 - DNA, 15 bp, Homo sapiens
tcttatttttatttg

SEQ ID NO: 519587 - DNA, 15 bp, Homo sapiens
cttatttttatttgt

SEQ ID NO: 519588 - DNA, 15 bp, Homo sapiens
ttatttttatttgtt

SEQ ID NO: 519589 - DNA, 15 bp, Homo sapiens
tatttttatttgttt

SEQ ID NO: 519590 - DNA, 15 bp, Homo sapiens
atttttatttgttta

SEQ ID NO: 519591 - DNA, 15 bp, Homo sapiens
tttttatttgtttac

SEQ ID NO: 519592 - DNA, 15 bp, Homo sapiens
ttttatttgtttaca

SEQ ID NO: 519593 - DNA, 15 bp, Homo sapiens
tttatttgtttacat

SEQ ID NO: 519594 - DNA, 15 bp, Homo sapiens
ttatttgtttacatg

SEQ ID NO: 519595 - DNA, 15 bp, Homo sapiens
tatttgtttacatgt

SEQ ID NO: 519596 - DNA, 15 bp, Homo sapiens
atttgtttacatgtc

SEQ ID NO: 519597 - DNA, 15 bp, Homo sapiens
tttgtttacatgtct

SEQ ID NO: 519598 - DNA, 15 bp, Homo sapiens
ttgtttacatgtctt

SEQ ID NO: 519599 - DNA, 15 bp, Homo sapiens
tgtttacatgtcttt

SEQ ID NO: 519600 - DNA, 15 bp, Homo sapiens
gtttacatgtctttt

SEQ ID NO: 519601 - DNA, 15 bp, Homo sapiens
tttacatgtcttttc

SEQ ID NO: 519602 - DNA, 15 bp, Homo sapiens
ttacatgtcttttct

SEQ ID NO: 519603 - DNA, 15 bp, Homo sapiens
tacatgtcttttctt

SEQ ID NO: 519604 - DNA, 15 bp, Homo sapiens
acatgtcttttctta

SEQ ID NO: 519605 - DNA, 15 bp, Homo sapiens
catgtcttttcttat

SEQ ID NO: 519606 - DNA, 15 bp, Homo sapiens
atgtcttttcttatt

SEQ ID NO: 519607 - DNA, 15 bp, Homo sapiens
tgtcttttcttattt

SEQ ID NO: 519608 - DNA, 15 bp, Homo sapiens
gtcttttcttatttt

SEQ ID NO: 519609 - DNA, 15 bp, Homo sapiens
tcttttcttatttta

SEQ ID NO: 519610 - DNA, 15 bp, Homo sapiens
cttttcttattttag

SEQ ID NO: 519611 - DNA, 15 bp, Homo sapiens
ttttcttattttagt

SEQ ID NO: 519612 - DNA, 15 bp, Homo sapiens
tttcttattttagtg

SEQ ID NO: 519613 - DNA, 15 bp, Homo sapiens
ttcttattttagtgt

SEQ ID NO: 519614 - DNA, 15 bp, Homo sapiens
tcttattttagtgtc

SEQ ID NO: 519615 - DNA, 15 bp, Homo sapiens
cttattttagtgtcc

SEQ ID NO: 519616 - DNA, 15 bp, Homo sapiens
ttattttagtgtcct

SEQ ID NO: 519617 - DNA, 15 bp, Homo sapiens
tattttagtgtcctt

SEQ ID NO: 519618 - DNA, 15 bp, Homo sapiens
attttagtgtcctta

SEQ ID NO: 519619 - DNA, 15 bp, Homo sapiens
ttttagtgtccttaa

SEQ ID NO: 519620 - DNA, 15 bp, Homo sapiens
tttagtgtccttaaa

SEQ ID NO: 519621 - DNA, 15 bp, Homo sapiens
ttagtgtccttaaaa

SEQ ID NO: 519622 - DNA, 15 bp, Homo sapiens
tagtgtccttaaaag

SEQ ID NO: 519623 - DNA, 15 bp, Homo sapiens
agtgtccttaaaagg

SEQ ID NO: 519624 - DNA, 15 bp, Homo sapiens
gtgtccttaaaaggt

SEQ ID NO: 519625 - DNA, 15 bp, Homo sapiens
tgtccttaaaaggtt

SEQ ID NO: 519626 - DNA, 15 bp, Homo sapiens
gtccttaaaaggttg

SEQ ID NO: 519627 - DNA, 15 bp, Homo sapiens
tccttaaaaggttga

SEQ ID NO: 519628 - DNA, 15 bp, Homo sapiens
ccttaaaaggttgat

SEQ ID NO: 519629 - DNA, 15 bp, Homo sapiens
cttaaaaggttgata

SEQ ID NO: 519630 - DNA, 15 bp, Homo sapiens
ttaaaaggttgataa

SEQ ID NO: 519631 - DNA, 15 bp, Homo sapiens
taaaaggttgataat

SEQ ID NO: 519632 - DNA, 15 bp, Homo sapiens
aaaaggttgataatc

SEQ ID NO: 519633 - DNA, 15 bp, Homo sapiens
aaaggttgataatca

SEQ ID NO: 519634 - DNA, 15 bp, Homo sapiens
aaggttgataatcac

SEQ ID NO: 519635 - DNA, 15 bp, Homo sapiens
aggttgataatcact

SEQ ID NO: 519636 - DNA, 15 bp, Homo sapiens
ggttgataatcactt

SEQ ID NO: 519637 - DNA, 15 bp, Homo sapiens
gttgataatcacttg

SEQ ID NO: 519638 - DNA, 15 bp, Homo sapiens
ttgataatcacttgc

SEQ ID NO: 519639 - DNA, 15 bp, Homo sapiens
tgataatcacttgct

SEQ ID NO: 519640 - DNA, 15 bp, Homo sapiens
gataatcacttgctg

SEQ ID NO: 519641 - DNA, 15 bp, Homo sapiens
ataatcacttgctga

SEQ ID NO: 519642 - DNA, 15 bp, Homo sapiens
taatcacttgctgag

SEQ ID NO: 519643 - DNA, 15 bp, Homo sapiens
aatcacttgctgagt

SEQ ID NO: 519644 - DNA, 15 bp, Homo sapiens
atcacttgctgagtg

SEQ ID NO: 519645 - DNA, 15 bp, Homo sapiens
tcacttgctgagtgt

SEQ ID NO: 519646 - DNA, 15 bp, Homo sapiens
cacttgctgagtgtg

SEQ ID NO: 519647 - DNA, 15 bp, Homo sapiens
acttgctgagtgtgt

SEQ ID NO: 519648 - DNA, 15 bp, Homo sapiens
cttgctgagtgtgtt

SEQ ID NO: 519649 - DNA, 15 bp, Homo sapiens
ttgctgagtgtgttt

SEQ ID NO: 519650 - DNA, 15 bp, Homo sapiens
tgctgagtgtgtttc

SEQ ID NO: 519651 - DNA, 15 bp, Homo sapiens
gctgagtgtgtttct

SEQ ID NO: 519652 - DNA, 15 bp, Homo sapiens
ctgagtgtgtttctc

SEQ ID NO: 519653 - DNA, 15 bp, Homo sapiens
tgagtgtgtttctca

SEQ ID NO: 519654 - DNA, 15 bp, Homo sapiens
gagtgtgtttctcaa

SEQ ID NO: 519655 - DNA, 15 bp, Homo sapiens
agtgtgtttctcaaa

SEQ ID NO: 519656 - DNA, 15 bp, Homo sapiens
gtgtgtttctcaaac

SEQ ID NO: 519657 - DNA, 15 bp, Homo sapiens
tgtgtttctcaaaca

SEQ ID NO: 519658 - DNA, 15 bp, Homo sapiens
gtgtttctcaaacaa

SEQ ID NO: 519659 - DNA, 15 bp, Homo sapiens
tgtttctcaaacaat

SEQ ID NO: 519660 - DNA, 15 bp, Homo sapiens
gtttctcaaacaatt

SEQ ID NO: 519661 - DNA, 15 bp, Homo sapiens
tttctcaaacaattt

SEQ ID NO: 519662 - DNA, 15 bp, Homo sapiens
ttctcaaacaattta

SEQ ID NO: 519663 - DNA, 15 bp, Homo sapiens
tctcaaacaatttaa

SEQ ID NO: 519664 - DNA, 15 bp, Homo sapiens
ctcaaacaatttaat

SEQ ID NO: 519665 - DNA, 15 bp, Homo sapiens
tcaaacaatttaatt

SEQ ID NO: 519666 - DNA, 15 bp, Homo sapiens
caaacaatttaattt

SEQ ID NO: 519667 - DNA, 15 bp, Homo sapiens
aaacaatttaatttc

SEQ ID NO: 519668 - DNA, 15 bp, Homo sapiens
aacaatttaatttca

SEQ ID NO: 519669 - DNA, 15 bp, Homo sapiens
acaatttaatttcag

SEQ ID NO: 519670 - DNA, 15 bp, Homo sapiens
caatttaatttcagg

SEQ ID NO: 519671 - DNA, 15 bp, Homo sapiens
aatttaatttcagga

SEQ ID NO: 519672 - DNA, 15 bp, Homo sapiens
atttaatttcaggag

SEQ ID NO: 519673 - DNA, 15 bp, Homo sapiens
tttaatttcaggagc

SEQ ID NO: 519674 - DNA, 15 bp, Homo sapiens
ttaatttcaggagcc

SEQ ID NO: 519675 - DNA, 15 bp, Homo sapiens
taatttcaggagcct

SEQ ID NO: 519676 - DNA, 15 bp, Homo sapiens
aatttcaggagccta

SEQ ID NO: 519677 - DNA, 15 bp, Homo sapiens
atttcaggagcctac

SEQ ID NO: 519678 - DNA, 15 bp, Homo sapiens
tttcaggagcctaca

SEQ ID NO: 519679 - DNA, 15 bp, Homo sapiens
ttcaggagcctacaa

SEQ ID NO: 519680 - DNA, 15 bp, Homo sapiens
tcaggagcctacaag

SEQ ID NO: 519681 - DNA, 15 bp, Homo sapiens
caggagcctacaaga

SEQ ID NO: 519682 - DNA, 15 bp, Homo sapiens
aggagcctacaagaa

SEQ ID NO: 519683 - DNA, 15 bp, Homo sapiens
ggagcctacaagaaa

SEQ ID NO: 519684 - DNA, 15 bp, Homo sapiens
gagcctacaagaaag

SEQ ID NO: 519685 - DNA, 15 bp, Homo sapiens
agcctacaagaaagt

SEQ ID NO: 519686 - DNA, 15 bp, Homo sapiens
gcctacaagaaagta

SEQ ID NO: 519687 - DNA, 15 bp, Homo sapiens
cctacaagaaagtac

SEQ ID NO: 519688 - DNA, 15 bp, Homo sapiens
ctacaagaaagtacg

SEQ ID NO: 519689 - DNA, 15 bp, Homo sapiens
tacaagaaagtacga

SEQ ID NO: 519690 - DNA, 15 bp, Homo sapiens
acaagaaagtacgag

SEQ ID NO: 519691 - DNA, 15 bp, Homo sapiens
caagaaagtacgaga

SEQ ID NO: 519692 - DNA, 15 bp, Homo sapiens
aagaaagtacgagat

SEQ ID NO: 519693 - DNA, 15 bp, Homo sapiens
agaaagtacgagatt

SEQ ID NO: 519694 - DNA, 15 bp, Homo sapiens
gaaagtacgagattt

SEQ ID NO: 519695 - DNA, 15 bp, Homo sapiens
aaagtacgagattta

SEQ ID NO: 519696 - DNA, 15 bp, Homo sapiens
aagtacgagatttag

SEQ ID NO: 519697 - DNA, 15 bp, Homo sapiens
agtacgagatttagt

SEQ ID NO: 519698 - DNA, 15 bp, Homo sapiens
gtacgagatttagtc

SEQ ID NO: 519699 - DNA, 15 bp, Homo sapiens
tacgagatttagtca

SEQ ID NO: 519700 - DNA, 15 bp, Homo sapiens
acgagatttagtcaa

SEQ ID NO: 519701 - DNA, 15 bp, Homo sapiens
cgagatttagtcaac

SEQ ID NO: 519702 - DNA, 15 bp, Homo sapiens
gagatttagtcaact

SEQ ID NO: 519703 - DNA, 15 bp, Homo sapiens
agatttagtcaactt

SEQ ID NO: 519704 - DNA, 15 bp, Homo sapiens
gatttagtcaacttg

SEQ ID NO: 519705 - DNA, 15 bp, Homo sapiens
atttagtcaacttgt

SEQ ID NO: 519706 - DNA, 15 bp, Homo sapiens
gaggtcgggagttcg

SEQ ID NO: 519707 - DNA, 15 bp, Homo sapiens
aggtcgggagttcga

SEQ ID NO: 519708 - DNA, 15 bp, Homo sapiens
ggtcgggagttcgag

SEQ ID NO: 519709 - DNA, 15 bp, Homo sapiens
gtcgggagttcgaga

SEQ ID NO: 519710 - DNA, 15 bp, Homo sapiens
tcgggagttcgagac

SEQ ID NO: 519711 - DNA, 15 bp, Homo sapiens
cgggagttcgagacc

SEQ ID NO: 519712 - DNA, 15 bp, Homo sapiens
gggagttcgagacca

SEQ ID NO: 519713 - DNA, 15 bp, Homo sapiens
cctagccaacatgga

SEQ ID NO: 519714 - DNA, 15 bp, Homo sapiens
ctagccaacatggag

SEQ ID NO: 519715 - DNA, 15 bp, Homo sapiens
tagccaacatggaga

SEQ ID NO: 519716 - DNA, 15 bp, Homo sapiens
agccaacatggagaa

SEQ ID NO: 519717 - DNA, 15 bp, Homo sapiens
gccaacatggagaaa

SEQ ID NO: 519718 - DNA, 15 bp, Homo sapiens
ccaacatggagaaac

SEQ ID NO: 519719 - DNA, 15 bp, Homo sapiens
caacatggagaaact

SEQ ID NO: 519720 - DNA, 15 bp, Homo sapiens
aacatggagaaactc

SEQ ID NO: 519721 - DNA, 15 bp, Homo sapiens
acatggagaaactct

SEQ ID NO: 519722 - DNA, 15 bp, Homo sapiens
catggagaaactctg

SEQ ID NO: 519723 - DNA, 15 bp, Homo sapiens
atggagaaactctgt

SEQ ID NO: 519724 - DNA, 15 bp, Homo sapiens
tggagaaactctgtc

SEQ ID NO: 519725 - DNA, 15 bp, Homo sapiens
ggagaaactctgtct

SEQ ID NO: 519726 - DNA, 15 bp, Homo sapiens
gagaaactctgtctg

SEQ ID NO: 519727 - DNA, 15 bp, Homo sapiens
agaaactctgtctgt

SEQ ID NO: 519728 - DNA, 15 bp, Homo sapiens
gaaactctgtctgta

SEQ ID NO: 519729 - DNA, 15 bp, Homo sapiens
aaactctgtctgtac

SEQ ID NO: 519730 - DNA, 15 bp, Homo sapiens
aactctgtctgtacc

SEQ ID NO: 519731 - DNA, 15 bp, Homo sapiens
actctgtctgtacca

SEQ ID NO: 519732 - DNA, 15 bp, Homo sapiens
ctctgtctgtaccaa

SEQ ID NO: 519733 - DNA, 15 bp, Homo sapiens
tctgtctgtaccaaa

SEQ ID NO: 519734 - DNA, 15 bp, Homo sapiens
ctgtctgtaccaaaa

SEQ ID NO: 519735 - DNA, 15 bp, Homo sapiens
tgtctgtaccaaaaa

SEQ ID NO: 519736 - DNA, 15 bp, Homo sapiens
gtctgtaccaaaaaa

SEQ ID NO: 519737 - DNA, 15 bp, Homo sapiens
tctgtaccaaaaaat

SEQ ID NO: 519738 - DNA, 15 bp, Homo sapiens
ctgtaccaaaaaata

SEQ ID NO: 519739 - DNA, 15 bp, Homo sapiens
tgtaccaaaaaataa

SEQ ID NO: 519740 - DNA, 15 bp, Homo sapiens
gtaccaaaaaataaa

SEQ ID NO: 519741 - DNA, 15 bp, Homo sapiens
taccaaaaaataaaa

SEQ ID NO: 519742 - DNA, 15 bp, Homo sapiens
accaaaaaataaaaa

SEQ ID NO: 519743 - DNA, 15 bp, Homo sapiens
ccaaaaaataaaaaa

SEQ ID NO: 519744 - DNA, 15 bp, Homo sapiens
caaaaaataaaaaat

SEQ ID NO: 519745 - DNA, 15 bp, Homo sapiens
aaaaaataaaaaatt

SEQ ID NO: 519746 - DNA, 15 bp, Homo sapiens
aaaaataaaaaatta

SEQ ID NO: 519747 - DNA, 15 bp, Homo sapiens
aaaataaaaaattag

SEQ ID NO: 519748 - DNA, 15 bp, Homo sapiens
aaataaaaaattagc

SEQ ID NO: 519749 - DNA, 15 bp, Homo sapiens
aataaaaaattagcc

SEQ ID NO: 519750 - DNA, 15 bp, Homo sapiens
ataaaaaattagcca

SEQ ID NO: 519751 - DNA, 15 bp, Homo sapiens
taaaaaattagccag

SEQ ID NO: 519752 - DNA, 15 bp, Homo sapiens
aaaaaattagccagg

SEQ ID NO: 519753 - DNA, 15 bp, Homo sapiens
aaaaattagccaggt

SEQ ID NO: 519754 - DNA, 15 bp, Homo sapiens
aaaattagccaggtg

SEQ ID NO: 519755 - DNA, 15 bp, Homo sapiens
aaattagccaggtgt

SEQ ID NO: 519756 - DNA, 15 bp, Homo sapiens
aattagccaggtgtg

SEQ ID NO: 519757 - DNA, 15 bp, Homo sapiens
attagccaggtgtgg

SEQ ID NO: 519758 - DNA, 15 bp, Homo sapiens
ttagccaggtgtggt

SEQ ID NO: 519759 - DNA, 15 bp, Homo sapiens
tagccaggtgtggtg

SEQ ID NO: 519760 - DNA, 15 bp, Homo sapiens
agccaggtgtggtgg

SEQ ID NO: 519761 - DNA, 15 bp, Homo sapiens
gccaggtgtggtggc

SEQ ID NO: 519762 - DNA, 15 bp, Homo sapiens
ccaggtgtggtggca

SEQ ID NO: 519763 - DNA, 15 bp, Homo sapiens
caggtgtggtggcac

SEQ ID NO: 519764 - DNA, 15 bp, Homo sapiens
aggtgtggtggcaca

SEQ ID NO: 519765 - DNA, 15 bp, Homo sapiens
ggtgtggtggcacat

SEQ ID NO: 519766 - DNA, 15 bp, Homo sapiens
gtgtggtggcacata

SEQ ID NO: 519767 - DNA, 15 bp, Homo sapiens
tgtggtggcacataa

SEQ ID NO: 519768 - DNA, 15 bp, Homo sapiens
gtggtggcacataac

SEQ ID NO: 519769 - DNA, 15 bp, Homo sapiens
tggtggcacataact

SEQ ID NO: 519770 - DNA, 15 bp, Homo sapiens
ggtggcacataactg

SEQ ID NO: 519771 - DNA, 15 bp, Homo sapiens
gtggcacataactgt

SEQ ID NO: 519772 - DNA, 15 bp, Homo sapiens
tggcacataactgta

SEQ ID NO: 519773 - DNA, 15 bp, Homo sapiens
ggcacataactgtaa

SEQ ID NO: 519774 - DNA, 15 bp, Homo sapiens
gcacataactgtaat

SEQ ID NO: 519775 - DNA, 15 bp, Homo sapiens
cacataactgtaatc

SEQ ID NO: 519776 - DNA, 15 bp, Homo sapiens
acataactgtaatcc

SEQ ID NO: 519777 - DNA, 15 bp, Homo sapiens
cataactgtaatccc

SEQ ID NO: 519778 - DNA, 15 bp, Homo sapiens
ataactgtaatccca

SEQ ID NO: 519779 - DNA, 15 bp, Homo sapiens
taactgtaatcccag

SEQ ID NO: 519780 - DNA, 15 bp, Homo sapiens
aactgtaatcccagc

SEQ ID NO: 519781 - DNA, 15 bp, Homo sapiens
actgtaatcccagct

SEQ ID NO: 519782 - DNA, 15 bp, Homo sapiens
gaatcacttgaaccc

SEQ ID NO: 519783 - DNA, 15 bp, Homo sapiens
aatcacttgaacccg

SEQ ID NO: 519784 - DNA, 15 bp, Homo sapiens
atcacttgaacccgg

SEQ ID NO: 519785 - DNA, 15 bp, Homo sapiens
tcacttgaacccggg

SEQ ID NO: 519786 - DNA, 15 bp, Homo sapiens
cacttgaacccggga

SEQ ID NO: 519787 - DNA, 15 bp, Homo sapiens
acttgaacccgggag

SEQ ID NO: 519788 - DNA, 15 bp, Homo sapiens
ttgaacccgggaggt

SEQ ID NO: 519789 - DNA, 15 bp, Homo sapiens
cccgggaggtggagg

SEQ ID NO: 519790 - DNA, 15 bp, Homo sapiens
ccgggaggtggaggt

SEQ ID NO: 519791 - DNA, 15 bp, Homo sapiens
cgggaggtggaggtt

SEQ ID NO: 519792 - DNA, 15 bp, Homo sapiens
gaggtggaggttgcg

SEQ ID NO: 519793 - DNA, 15 bp, Homo sapiens
aggtggaggttgcgg

SEQ ID NO: 519794 - DNA, 15 bp, Homo sapiens
ggtggaggttgcggt

SEQ ID NO: 519795 - DNA, 15 bp, Homo sapiens
gtggaggttgcggtg

SEQ ID NO: 519796 - DNA, 15 bp, Homo sapiens
tggaggttgcggtga

SEQ ID NO: 519797 - DNA, 15 bp, Homo sapiens
ggaggttgcggtgaa

SEQ ID NO: 519798 - DNA, 15 bp, Homo sapiens
gaggttgcggtgaac

SEQ ID NO: 519799 - DNA, 15 bp, Homo sapiens
aggttgcggtgaacc

SEQ ID NO: 519800 - DNA, 15 bp, Homo sapiens
ggttgcggtgaaccg

SEQ ID NO: 519801 - DNA, 15 bp, Homo sapiens
gttgcggtgaaccga

SEQ ID NO: 519802 - DNA, 15 bp, Homo sapiens
ttgcggtgaaccgag

SEQ ID NO: 519803 - DNA, 15 bp, Homo sapiens
tgcggtgaaccgaga

SEQ ID NO: 519804 - DNA, 15 bp, Homo sapiens
gcggtgaaccgagat

SEQ ID NO: 519805 - DNA, 15 bp, Homo sapiens
cggtgaaccgagatc

SEQ ID NO: 519806 - DNA, 15 bp, Homo sapiens
ggtgaaccgagatcg

SEQ ID NO: 519807 - DNA, 15 bp, Homo sapiens
gtgaaccgagatcgc

SEQ ID NO: 519808 - DNA, 15 bp, Homo sapiens
tgaaccgagatcgca

SEQ ID NO: 519809 - DNA, 15 bp, Homo sapiens
gaaccgagatcgcac

SEQ ID NO: 519810 - DNA, 15 bp, Homo sapiens
aaccgagatcgcacc

SEQ ID NO: 519811 - DNA, 15 bp, Homo sapiens
accgagatcgcacca

SEQ ID NO: 519812 - DNA, 15 bp, Homo sapiens
atcgcaccattgcac

SEQ ID NO: 519813 - DNA, 15 bp, Homo sapiens
tcgcaccattgcact

SEQ ID NO: 519814 - DNA, 15 bp, Homo sapiens
cgcaccattgcactc

SEQ ID NO: 519815 - DNA, 15 bp, Homo sapiens
gcaccattgcactcc

SEQ ID NO: 519816 - DNA, 15 bp, Homo sapiens
caccattgcactcca

SEQ ID NO: 519817 - DNA, 15 bp, Homo sapiens
accattgcactccag

SEQ ID NO: 519818 - DNA, 15 bp, Homo sapiens
actccagcctgggca

SEQ ID NO: 519819 - DNA, 15 bp, Homo sapiens
tccagcctgggcaaa

SEQ ID NO: 519820 - DNA, 15 bp, Homo sapiens
ccagcctgggcaaaa

SEQ ID NO: 519821 - DNA, 15 bp, Homo sapiens
cagcctgggcaaaaa

SEQ ID NO: 519822 - DNA, 15 bp, Homo sapiens
agcctgggcaaaaat

SEQ ID NO: 519823 - DNA, 15 bp, Homo sapiens
gcctgggcaaaaata

SEQ ID NO: 519824 - DNA, 15 bp, Homo sapiens
cctgggcaaaaatag

SEQ ID NO: 519825 - DNA, 15 bp, Homo sapiens
ctgggcaaaaatagc

SEQ ID NO: 519826 - DNA, 15 bp, Homo sapiens
tgggcaaaaatagcg

SEQ ID NO: 519827 - DNA, 15 bp, Homo sapiens
gggcaaaaatagcga

SEQ ID NO: 519828 - DNA, 15 bp, Homo sapiens
ggcaaaaatagcgaa

SEQ ID NO: 519829 - DNA, 15 bp, Homo sapiens
gcaaaaatagcgaaa

SEQ ID NO: 519830 - DNA, 15 bp, Homo sapiens
caaaaatagcgaaac

SEQ ID NO: 519831 - DNA, 15 bp, Homo sapiens
aaaaatagcgaaact

SEQ ID NO: 519832 - DNA, 15 bp, Homo sapiens
aaaatagcgaaactc

SEQ ID NO: 519833 - DNA, 15 bp, Homo sapiens
aaatagcgaaactcc

SEQ ID NO: 519834 - DNA, 15 bp, Homo sapiens
aatagcgaaactcca

SEQ ID NO: 519835 - DNA, 15 bp, Homo sapiens
atagcgaaactccat

SEQ ID NO: 519836 - DNA, 15 bp, Homo sapiens
tagcgaaactccatc

SEQ ID NO: 519837 - DNA, 15 bp, Homo sapiens
agcgaaactccatct

SEQ ID NO: 519838 - DNA, 15 bp, Homo sapiens
gcgaaactccatcta

SEQ ID NO: 519839 - DNA, 15 bp, Homo sapiens
cgaaactccatctaa

SEQ ID NO: 519840 - DNA, 15 bp, Homo sapiens
gaaactccatctaaa

SEQ ID NO: 519841 - DNA, 15 bp, Homo sapiens
aaactccatctaaaa

SEQ ID NO: 519842 - DNA, 15 bp, Homo sapiens
aactccatctaaaaa

SEQ ID NO: 519843 - DNA, 15 bp, Homo sapiens
actccatctaaaaaa

SEQ ID NO: 519844 - DNA, 15 bp, Homo sapiens
ctccatctaaaaaaa

SEQ ID NO: 519845 - DNA, 15 bp, Homo sapiens
tccatctaaaaaaaa

SEQ ID NO: 519846 - DNA, 15 bp, Homo sapiens
ccatctaaaaaaaaa

SEQ ID NO: 519847 - DNA, 15 bp, Homo sapiens
catctaaaaaaaaaa

SEQ ID NO: 519848 - DNA, 15 bp, Homo sapiens
atctaaaaaaaaaaa

SEQ ID NO: 519849 - DNA, 15 bp, Homo sapiens
ctaaaaaaaaaaaag

SEQ ID NO: 519850 - DNA, 15 bp, Homo sapiens
taaaaaaaaaaaaga

SEQ ID NO: 519851 - DNA, 15 bp, Homo sapiens
aaaaaaaaaaagaga

SEQ ID NO: 519852 - DNA, 15 bp, Homo sapiens
aaaaaaaaaagagag

SEQ ID NO: 519853 - DNA, 15 bp, Homo sapiens
aaaaaaaaagagagc

SEQ ID NO: 519854 - DNA, 15 bp, Homo sapiens
aaaaaaaagagagca

SEQ ID NO: 519855 - DNA, 15 bp, Homo sapiens
aaaaaaagagagcaa

SEQ ID NO: 519856 - DNA, 15 bp, Homo sapiens
aaaaaagagagcaaa

SEQ ID NO: 519857 - DNA, 15 bp, Homo sapiens
aaaaagagagcaaaa

SEQ ID NO: 519858 - DNA, 15 bp, Homo sapiens
aaaagagagcaaaag

SEQ ID NO: 519859 - DNA, 15 bp, Homo sapiens
aaagagagcaaaaga

SEQ ID NO: 519860 - DNA, 15 bp, Homo sapiens
aagagagcaaaagaa

SEQ ID NO: 519861 - DNA, 15 bp, Homo sapiens
agagagcaaaagaaa

SEQ ID NO: 519862 - DNA, 15 bp, Homo sapiens
gagagcaaaagaaag

SEQ ID NO: 519863 - DNA, 15 bp, Homo sapiens
agagcaaaagaaaga

SEQ ID NO: 519864 - DNA, 15 bp, Homo sapiens
gagcaaaagaaagaa

SEQ ID NO: 519865 - DNA, 15 bp, Homo sapiens
agcaaaagaaagaat

SEQ ID NO: 519866 - DNA, 15 bp, Homo sapiens
gcaaaagaaagaata

SEQ ID NO: 519867 - DNA, 15 bp, Homo sapiens
caaaagaaagaatat

SEQ ID NO: 519868 - DNA, 15 bp, Homo sapiens
aaaagaaagaatatc

SEQ ID NO: 519869 - DNA, 15 bp, Homo sapiens
aaagaaagaatatct

SEQ ID NO: 519870 - DNA, 15 bp, Homo sapiens
aagaaagaatatctg

SEQ ID NO: 519871 - DNA, 15 bp, Homo sapiens
agaaagaatatctgg

SEQ ID NO: 519872 - DNA, 15 bp, Homo sapiens
gaaagaatatctggt

SEQ ID NO: 519873 - DNA, 15 bp, Homo sapiens
aaagaatatctggtt

SEQ ID NO: 519874 - DNA, 15 bp, Homo sapiens
aagaatatctggttt

SEQ ID NO: 519875 - DNA, 15 bp, Homo sapiens
agaatatctggtttt

SEQ ID NO: 519876 - DNA, 15 bp, Homo sapiens
gaatatctggtttta

SEQ ID NO: 519877 - DNA, 15 bp, Homo sapiens
aatatctggttttaa

SEQ ID NO: 519878 - DNA, 15 bp, Homo sapiens
atatctggttttaaa

SEQ ID NO: 519879 - DNA, 15 bp, Homo sapiens
tatctggttttaaat

SEQ ID NO: 519880 - DNA, 15 bp, Homo sapiens
atctggttttaaata

SEQ ID NO: 519881 - DNA, 15 bp, Homo sapiens
tctggttttaaatat

SEQ ID NO: 519882 - DNA, 15 bp, Homo sapiens
ctggttttaaatatg

SEQ ID NO: 519883 - DNA, 15 bp, Homo sapiens
tggttttaaatatgt

SEQ ID NO: 519884 - DNA, 15 bp, Homo sapiens
ggttttaaatatgtg

SEQ ID NO: 519885 - DNA, 15 bp, Homo sapiens
gttttaaatatgtgt

SEQ ID NO: 519886 - DNA, 15 bp, Homo sapiens
ttttaaatatgtgta

SEQ ID NO: 519887 - DNA, 15 bp, Homo sapiens
tttaaatatgtgtaa

SEQ ID NO: 519888 - DNA, 15 bp, Homo sapiens
ttaaatatgtgtaaa

SEQ ID NO: 519889 - DNA, 15 bp, Homo sapiens
taaatatgtgtaaat

SEQ ID NO: 519890 - DNA, 15 bp, Homo sapiens
aaatatgtgtaaata

SEQ ID NO: 519891 - DNA, 15 bp, Homo sapiens
aatatgtgtaaatat

SEQ ID NO: 519892 - DNA, 15 bp, Homo sapiens
atatgtgtaaatatg

SEQ ID NO: 519893 - DNA, 15 bp, Homo sapiens
tatgtgtaaatatgt

SEQ ID NO: 519894 - DNA, 15 bp, Homo sapiens
atgtgtaaatatgtt

SEQ ID NO: 519895 - DNA, 15 bp, Homo sapiens
tgtgtaaatatgttt

SEQ ID NO: 519896 - DNA, 15 bp, Homo sapiens
gtgtaaatatgtttt

SEQ ID NO: 519897 - DNA, 15 bp, Homo sapiens
tgtaaatatgttttg

SEQ ID NO: 519898 - DNA, 15 bp, Homo sapiens
gtaaatatgttttgg

SEQ ID NO: 519899 - DNA, 15 bp, Homo sapiens
taaatatgttttgga

SEQ ID NO: 519900 - DNA, 15 bp, Homo sapiens
aaatatgttttggaa

SEQ ID NO: 519901 - DNA, 15 bp, Homo sapiens
aatatgttttggaaa

SEQ ID NO: 519902 - DNA, 15 bp, Homo sapiens
atatgttttggaaag

SEQ ID NO: 519903 - DNA, 15 bp, Homo sapiens
tatgttttggaaaga

SEQ ID NO: 519904 - DNA, 15 bp, Homo sapiens
atgttttggaaagat

SEQ ID NO: 519905 - DNA, 15 bp, Homo sapiens
tgttttggaaagatg

SEQ ID NO: 519906 - DNA, 15 bp, Homo sapiens
gttttggaaagatgg

SEQ ID NO: 519907 - DNA, 15 bp, Homo sapiens
ttttggaaagatgga

SEQ ID NO: 519908 - DNA, 15 bp, Homo sapiens
tttggaaagatggag

SEQ ID NO: 519909 - DNA, 15 bp, Homo sapiens
ttggaaagatggaga

SEQ ID NO: 519910 - DNA, 15 bp, Homo sapiens
tggaaagatggagag

SEQ ID NO: 519911 - DNA, 15 bp, Homo sapiens
ggaaagatggagagt

SEQ ID NO: 519912 - DNA, 15 bp, Homo sapiens
gaaagatggagagta

SEQ ID NO: 519913 - DNA, 15 bp, Homo sapiens
aaagatggagagtag

SEQ ID NO: 519914 - DNA, 15 bp, Homo sapiens
aagatggagagtagc

SEQ ID NO: 519915 - DNA, 15 bp, Homo sapiens
agatggagagtagca

SEQ ID NO: 519916 - DNA, 15 bp, Homo sapiens
gatggagagtagcaa

SEQ ID NO: 519917 - DNA, 15 bp, Homo sapiens
atggagagtagcaat

SEQ ID NO: 519918 - DNA, 15 bp, Homo sapiens
tggagagtagcaata

SEQ ID NO: 519919 - DNA, 15 bp, Homo sapiens
ggagagtagcaataa

SEQ ID NO: 519920 - DNA, 15 bp, Homo sapiens
gagagtagcaataag

SEQ ID NO: 519921 - DNA, 15 bp, Homo sapiens
agagtagcaataaga

SEQ ID NO: 519922 - DNA, 15 bp, Homo sapiens
gagtagcaataagaa

SEQ ID NO: 519923 - DNA, 15 bp, Homo sapiens
agtagcaataagaaa

SEQ ID NO: 519924 - DNA, 15 bp, Homo sapiens
gtagcaataagaaaa

SEQ ID NO: 519925 - DNA, 15 bp, Homo sapiens
tagcaataagaaaaa

SEQ ID NO: 519926 - DNA, 15 bp, Homo sapiens
agcaataagaaaaaa

SEQ ID NO: 519927 - DNA, 15 bp, Homo sapiens
gcaataagaaaaaac

SEQ ID NO: 519928 - DNA, 15 bp, Homo sapiens
caataagaaaaaaca

SEQ ID NO: 519929 - DNA, 15 bp, Homo sapiens
aataagaaaaaacat

SEQ ID NO: 519930 - DNA, 15 bp, Homo sapiens
ataagaaaaaacatg

SEQ ID NO: 519931 - DNA, 15 bp, Homo sapiens
taagaaaaaacatga

SEQ ID NO: 519932 - DNA, 15 bp, Homo sapiens
aagaaaaaacatgat

SEQ ID NO: 519933 - DNA, 15 bp, Homo sapiens
agaaaaaacatgatg

SEQ ID NO: 519934 - DNA, 15 bp, Homo sapiens
gaaaaaacatgatgg

SEQ ID NO: 519935 - DNA, 15 bp, Homo sapiens
aaaaaacatgatgga

SEQ ID NO: 519936 - DNA, 15 bp, Homo sapiens
aaaaacatgatggat

SEQ ID NO: 519937 - DNA, 15 bp, Homo sapiens
aaaacatgatggatt

SEQ ID NO: 519938 - DNA, 15 bp, Homo sapiens
aaacatgatggattg

SEQ ID NO: 519939 - DNA, 15 bp, Homo sapiens
aacatgatggattgc

SEQ ID NO: 519940 - DNA, 15 bp, Homo sapiens
acatgatggattgct

SEQ ID NO: 519941 - DNA, 15 bp, Homo sapiens
catgatggattgcta

SEQ ID NO: 519942 - DNA, 15 bp, Homo sapiens
atgatggattgctac

SEQ ID NO: 519943 - DNA, 15 bp, Homo sapiens
tgatggattgctaca

SEQ ID NO: 519944 - DNA, 15 bp, Homo sapiens
gatggattgctacag

SEQ ID NO: 519945 - DNA, 15 bp, Homo sapiens
atggattgctacagt

SEQ ID NO: 519946 - DNA, 15 bp, Homo sapiens
tggattgctacagta

SEQ ID NO: 519947 - DNA, 15 bp, Homo sapiens
ggattgctacagtat

SEQ ID NO: 519948 - DNA, 15 bp, Homo sapiens
gattgctacagtatt

SEQ ID NO: 519949 - DNA, 15 bp, Homo sapiens
attgctacagtattt

SEQ ID NO: 519950 - DNA, 15 bp, Homo sapiens
ttgctacagtattta

SEQ ID NO: 519951 - DNA, 15 bp, Homo sapiens
tgctacagtatttag

SEQ ID NO: 519952 - DNA, 15 bp, Homo sapiens
gctacagtatttagt

SEQ ID NO: 519953 - DNA, 15 bp, Homo sapiens
ctacagtatttagtt

SEQ ID NO: 519954 - DNA, 15 bp, Homo sapiens
tacagtatttagttc

SEQ ID NO: 519955 - DNA, 15 bp, Homo sapiens
acagtatttagttcc

SEQ ID NO: 519956 - DNA, 15 bp, Homo sapiens
cagtatttagttcca

SEQ ID NO: 519957 - DNA, 15 bp, Homo sapiens
agtatttagttccaa

SEQ ID NO: 519958 - DNA, 15 bp, Homo sapiens
gtatttagttccaag

SEQ ID NO: 519959 - DNA, 15 bp, Homo sapiens
tatttagttccaaga

SEQ ID NO: 519960 - DNA, 15 bp, Homo sapiens
atttagttccaagat

SEQ ID NO: 519961 - DNA, 15 bp, Homo sapiens
tttagttccaagata

SEQ ID NO: 519962 - DNA, 15 bp, Homo sapiens
ttagttccaagataa

SEQ ID NO: 519963 - DNA, 15 bp, Homo sapiens
tagttccaagataaa

SEQ ID NO: 519964 - DNA, 15 bp, Homo sapiens
agttccaagataaat

SEQ ID NO: 519965 - DNA, 15 bp, Homo sapiens
gttccaagataaatt

SEQ ID NO: 519966 - DNA, 15 bp, Homo sapiens
ttccaagataaattg

SEQ ID NO: 519967 - DNA, 15 bp, Homo sapiens
tccaagataaattgt

SEQ ID NO: 519968 - DNA, 15 bp, Homo sapiens
ccaagataaattgta

SEQ ID NO: 519969 - DNA, 15 bp, Homo sapiens
caagataaattgtac

SEQ ID NO: 519970 - DNA, 15 bp, Homo sapiens
aagataaattgtact

SEQ ID NO: 519971 - DNA, 15 bp, Homo sapiens
agataaattgtacta

SEQ ID NO: 519972 - DNA, 15 bp, Homo sapiens
gataaattgtactag

SEQ ID NO: 519973 - DNA, 15 bp, Homo sapiens
ataaattgtactaga

SEQ ID NO: 519974 - DNA, 15 bp, Homo sapiens
taaattgtactagat

SEQ ID NO: 519975 - DNA, 15 bp, Homo sapiens
aaattgtactagatg

SEQ ID NO: 519976 - DNA, 15 bp, Homo sapiens
aattgtactagatga

SEQ ID NO: 519977 - DNA, 15 bp, Homo sapiens
attgtactagatgag

SEQ ID NO: 519978 - DNA, 15 bp, Homo sapiens
ttgtactagatgagg

SEQ ID NO: 519979 - DNA, 15 bp, Homo sapiens
tgtactagatgagga

SEQ ID NO: 519980 - DNA, 15 bp, Homo sapiens
gtactagatgaggaa

SEQ ID NO: 519981 - DNA, 15 bp, Homo sapiens
tactagatgaggaag

SEQ ID NO: 519982 - DNA, 15 bp, Homo sapiens
actagatgaggaagc

SEQ ID NO: 519983 - DNA, 15 bp, Homo sapiens
ctagatgaggaagcc

SEQ ID NO: 519984 - DNA, 15 bp, Homo sapiens
tagatgaggaagcct

SEQ ID NO: 519985 - DNA, 15 bp, Homo sapiens
agatgaggaagcctt

SEQ ID NO: 519986 - DNA, 15 bp, Homo sapiens
gatgaggaagccttt

SEQ ID NO: 519987 - DNA, 15 bp, Homo sapiens
atgaggaagcctttt

SEQ ID NO: 519988 - DNA, 15 bp, Homo sapiens
tgaggaagcctttta

SEQ ID NO: 519989 - DNA, 15 bp, Homo sapiens
gaggaagccttttaa

SEQ ID NO: 519990 - DNA, 15 bp, Homo sapiens
aggaagccttttaag

SEQ ID NO: 519991 - DNA, 15 bp, Homo sapiens
ggaagccttttaaga

SEQ ID NO: 519992 - DNA, 15 bp, Homo sapiens
gaagccttttaagaa

SEQ ID NO: 519993 - DNA, 15 bp, Homo sapiens
aagccttttaagaag

SEQ ID NO: 519994 - DNA, 15 bp, Homo sapiens
agccttttaagaaga

SEQ ID NO: 519995 - DNA, 15 bp, Homo sapiens
gccttttaagaagag

SEQ ID NO: 519996 - DNA, 15 bp, Homo sapiens
ccttttaagaagagc

SEQ ID NO: 519997 - DNA, 15 bp, Homo sapiens
cttttaagaagagct

SEQ ID NO: 519998 - DNA, 15 bp, Homo sapiens
ttttaagaagagctg

SEQ ID NO: 519999 - DNA, 15 bp, Homo sapiens
tttaagaagagctga

SEQ ID NO: 520000 - DNA, 15 bp, Homo sapiens
ttaagaagagctgaa

SEQ ID NO: 520001 - DNA, 15 bp, Homo sapiens
taagaagagctgaat

SEQ ID NO: 520002 - DNA, 15 bp, Homo sapiens
aagaagagctgaatt

SEQ ID NO: 520003 - DNA, 15 bp, Homo sapiens
agaagagctgaattg

SEQ ID NO: 520004 - DNA, 15 bp, Homo sapiens
gaagagctgaattgc

SEQ ID NO: 520005 - DNA, 15 bp, Homo sapiens
aagagctgaattgcc

SEQ ID NO: 520006 - DNA, 15 bp, Homo sapiens
agagctgaattgcca

SEQ ID NO: 520007 - DNA, 15 bp, Homo sapiens
gagctgaattgccag

SEQ ID NO: 520008 - DNA, 15 bp, Homo sapiens
agctgaattgccagg

SEQ ID NO: 520009 - DNA, 15 bp, Homo sapiens
gctgaattgccaggc

SEQ ID NO: 520010 - DNA, 15 bp, Homo sapiens
ctgaattgccaggcg

SEQ ID NO: 520011 - DNA, 15 bp, Homo sapiens
tgaattgccaggcgc

SEQ ID NO: 520012 - DNA, 15 bp, Homo sapiens
gaattgccaggcgca

SEQ ID NO: 520013 - DNA, 15 bp, Homo sapiens
aattgccaggcgcag

SEQ ID NO: 520014 - DNA, 15 bp, Homo sapiens
attgccaggcgcagt

SEQ ID NO: 520015 - DNA, 15 bp, Homo sapiens
ttgccaggcgcagtg

SEQ ID NO: 520016 - DNA, 15 bp, Homo sapiens
tgccaggcgcagtgg

SEQ ID NO: 520017 - DNA, 15 bp, Homo sapiens
gccaggcgcagtggc

SEQ ID NO: 520018 - DNA, 15 bp, Homo sapiens
ccaggcgcagtggct

SEQ ID NO: 520019 - DNA, 15 bp, Homo sapiens
caggcgcagtggctc

SEQ ID NO: 520020 - DNA, 15 bp, Homo sapiens
aggcgcagtggctca

SEQ ID NO: 520021 - DNA, 15 bp, Homo sapiens
ggcgcagtggctcac

SEQ ID NO: 520022 - DNA, 15 bp, Homo sapiens
gcgcagtggctcacg

SEQ ID NO: 520023 - DNA, 15 bp, Homo sapiens
cgcagtggctcacgc

SEQ ID NO: 520024 - DNA, 15 bp, Homo sapiens
gcagtggctcacgcc

SEQ ID NO: 520025 - DNA, 15 bp, Homo sapiens
cagtggctcacgcct

SEQ ID NO: 520026 - DNA, 15 bp, Homo sapiens
ttgggaggccgaggt

SEQ ID NO: 520027 - DNA, 15 bp, Homo sapiens
tgggaggccgaggtg

SEQ ID NO: 520028 - DNA, 15 bp, Homo sapiens
gggaggccgaggtgg

SEQ ID NO: 520029 - DNA, 15 bp, Homo sapiens
ggaggccgaggtggg

SEQ ID NO: 520030 - DNA, 15 bp, Homo sapiens
gaggccgaggtgggc

SEQ ID NO: 520031 - DNA, 15 bp, Homo sapiens
aggccgaggtgggcg

SEQ ID NO: 520032 - DNA, 15 bp, Homo sapiens
ggccgaggtgggcgg

SEQ ID NO: 520033 - DNA, 15 bp, Homo sapiens
gccgaggtgggcgga

SEQ ID NO: 520034 - DNA, 15 bp, Homo sapiens
ccgaggtgggcggat

SEQ ID NO: 520035 - DNA, 15 bp, Homo sapiens
ggtgggcggatcacc

SEQ ID NO: 520036 - DNA, 15 bp, Homo sapiens
gtgggcggatcacct

SEQ ID NO: 520037 - DNA, 15 bp, Homo sapiens
tgggcggatcacctg

SEQ ID NO: 520038 - DNA, 15 bp, Homo sapiens
gggcggatcacctga

SEQ ID NO: 520039 - DNA, 15 bp, Homo sapiens
cgggagttcaagacc

SEQ ID NO: 520040 - DNA, 15 bp, Homo sapiens
gggagttcaagacca

SEQ ID NO: 520041 - DNA, 15 bp, Homo sapiens
agcctgaccaacatg

SEQ ID NO: 520042 - DNA, 15 bp, Homo sapiens
gcctgaccaacatgg

SEQ ID NO: 520043 - DNA, 15 bp, Homo sapiens
cctgaccaacatgga

SEQ ID NO: 520044 - DNA, 15 bp, Homo sapiens
ctgaccaacatggag

SEQ ID NO: 520045 - DNA, 15 bp, Homo sapiens
tgaccaacatggaga

SEQ ID NO: 520046 - DNA, 15 bp, Homo sapiens
gaccaacatggagaa

SEQ ID NO: 520047 - DNA, 15 bp, Homo sapiens
accaacatggagaaa

SEQ ID NO: 520048 - DNA, 15 bp, Homo sapiens
caacatggagaaacc

SEQ ID NO: 520049 - DNA, 15 bp, Homo sapiens
aacatggagaaaccc

SEQ ID NO: 520050 - DNA, 15 bp, Homo sapiens
acatggagaaacccc

SEQ ID NO: 520051 - DNA, 15 bp, Homo sapiens
catggagaaacccca

SEQ ID NO: 520052 - DNA, 15 bp, Homo sapiens
atggagaaaccccat

SEQ ID NO: 520053 - DNA, 15 bp, Homo sapiens
tggagaaaccccatc

SEQ ID NO: 520054 - DNA, 15 bp, Homo sapiens
ggagaaaccccatct

SEQ ID NO: 520055 - DNA, 15 bp, Homo sapiens
atctctactaaaaaa

SEQ ID NO: 520056 - DNA, 15 bp, Homo sapiens
tctctactaaaaaaa

SEQ ID NO: 520057 - DNA, 15 bp, Homo sapiens
ctctactaaaaaaaa

SEQ ID NO: 520058 - DNA, 15 bp, Homo sapiens
tctactaaaaaaaaa

SEQ ID NO: 520059 - DNA, 15 bp, Homo sapiens
ctactaaaaaaaaaa

SEQ ID NO: 520060 - DNA, 15 bp, Homo sapiens
tactaaaaaaaaaaa

SEQ ID NO: 520061 - DNA, 15 bp, Homo sapiens
actaaaaaaaaaaaa

SEQ ID NO: 520062 - DNA, 15 bp, Homo sapiens
aaaaaaaaattagcc

SEQ ID NO: 520063 - DNA, 15 bp, Homo sapiens
aaaaaaaattagccg

SEQ ID NO: 520064 - DNA, 15 bp, Homo sapiens
aaaaattagccgggg

SEQ ID NO: 520065 - DNA, 15 bp, Homo sapiens
aaaattagccggggt

SEQ ID NO: 520066 - DNA, 15 bp, Homo sapiens
aaattagccggggtg

SEQ ID NO: 520067 - DNA, 15 bp, Homo sapiens
aattagccggggtgg

SEQ ID NO: 520068 - DNA, 15 bp, Homo sapiens
attagccggggtggt

SEQ ID NO: 520069 - DNA, 15 bp, Homo sapiens
ttagccggggtggtg

SEQ ID NO: 520070 - DNA, 15 bp, Homo sapiens
tagccggggtggtgg

SEQ ID NO: 520071 - DNA, 15 bp, Homo sapiens
agccggggtggtggc

SEQ ID NO: 520072 - DNA, 15 bp, Homo sapiens
gccggggtggtggct

SEQ ID NO: 520073 - DNA, 15 bp, Homo sapiens
ccggggtggtggctt

SEQ ID NO: 520074 - DNA, 15 bp, Homo sapiens
cggggtggtggctta

SEQ ID NO: 520075 - DNA, 15 bp, Homo sapiens
ggggtggtggcttat

SEQ ID NO: 520076 - DNA, 15 bp, Homo sapiens
gggtggtggcttatg

SEQ ID NO: 520077 - DNA, 15 bp, Homo sapiens
ggtggtggcttatgc

SEQ ID NO: 520078 - DNA, 15 bp, Homo sapiens
gtggtggcttatgcc

SEQ ID NO: 520079 - DNA, 15 bp, Homo sapiens
tggtggcttatgcct

SEQ ID NO: 520080 - DNA, 15 bp, Homo sapiens
gcaggagaatcgctt

SEQ ID NO: 520081 - DNA, 15 bp, Homo sapiens
caggagaatcgcttg

SEQ ID NO: 520082 - DNA, 15 bp, Homo sapiens
aggagaatcgcttga

SEQ ID NO: 520083 - DNA, 15 bp, Homo sapiens
ggagaatcgcttgaa

SEQ ID NO: 520084 - DNA, 15 bp, Homo sapiens
gagaatcgcttgaac

SEQ ID NO: 520085 - DNA, 15 bp, Homo sapiens
agaatcgcttgaacc

SEQ ID NO: 520086 - DNA, 15 bp, Homo sapiens
gaatcgcttgaaccc

SEQ ID NO: 520087 - DNA, 15 bp, Homo sapiens
aatcgcttgaaccca

SEQ ID NO: 520088 - DNA, 15 bp, Homo sapiens
atcgcttgaacccag

SEQ ID NO: 520089 - DNA, 15 bp, Homo sapiens
tcgcttgaacccagg

SEQ ID NO: 520090 - DNA, 15 bp, Homo sapiens
cgcttgaacccagga

SEQ ID NO: 520091 - DNA, 15 bp, Homo sapiens
gcttgaacccaggaa

SEQ ID NO: 520092 - DNA, 15 bp, Homo sapiens
cttgaacccaggaag

SEQ ID NO: 520093 - DNA, 15 bp, Homo sapiens
ttgaacccaggaagc

SEQ ID NO: 520094 - DNA, 15 bp, Homo sapiens
tgaacccaggaagca

SEQ ID NO: 520095 - DNA, 15 bp, Homo sapiens
gaacccaggaagcag

SEQ ID NO: 520096 - DNA, 15 bp, Homo sapiens
tgagccaagatcgca

SEQ ID NO: 520097 - DNA, 15 bp, Homo sapiens
gagccaagatcgcac

SEQ ID NO: 520098 - DNA, 15 bp, Homo sapiens
agccaagatcgcacc

SEQ ID NO: 520099 - DNA, 15 bp, Homo sapiens
gccaagatcgcacca

SEQ ID NO: 520100 - DNA, 15 bp, Homo sapiens
ccaagatcgcaccat

SEQ ID NO: 520101 - DNA, 15 bp, Homo sapiens
caagatcgcaccatt

SEQ ID NO: 520102 - DNA, 15 bp, Homo sapiens
aagatcgcaccattg

SEQ ID NO: 520103 - DNA, 15 bp, Homo sapiens
ttgcactccagccta

SEQ ID NO: 520104 - DNA, 15 bp, Homo sapiens
cactccagcctaggc

SEQ ID NO: 520105 - DNA, 15 bp, Homo sapiens
actccagcctaggca

SEQ ID NO: 520106 - DNA, 15 bp, Homo sapiens
ctccagcctaggcaa

SEQ ID NO: 520107 - DNA, 15 bp, Homo sapiens
tccagcctaggcaac

SEQ ID NO: 520108 - DNA, 15 bp, Homo sapiens
ccagcctaggcaaca

SEQ ID NO: 520109 - DNA, 15 bp, Homo sapiens
cagcctaggcaacaa

SEQ ID NO: 520110 - DNA, 15 bp, Homo sapiens
agcctaggcaacaag

SEQ ID NO: 520111 - DNA, 15 bp, Homo sapiens
gcctaggcaacaaga

SEQ ID NO: 520112 - DNA, 15 bp, Homo sapiens
cctaggcaacaagag

SEQ ID NO: 520113 - DNA, 15 bp, Homo sapiens
ctaggcaacaagagt

SEQ ID NO: 520114 - DNA, 15 bp, Homo sapiens
taggcaacaagagtg

SEQ ID NO: 520115 - DNA, 15 bp, Homo sapiens
aggcaacaagagtga

SEQ ID NO: 520116 - DNA, 15 bp, Homo sapiens
ggcaacaagagtgaa

SEQ ID NO: 520117 - DNA, 15 bp, Homo sapiens
gcaacaagagtgaaa

SEQ ID NO: 520118 - DNA, 15 bp, Homo sapiens
caacaagagtgaaac

SEQ ID NO: 520119 - DNA, 15 bp, Homo sapiens
aacaagagtgaaact

SEQ ID NO: 520120 - DNA, 15 bp, Homo sapiens
acaagagtgaaactc

SEQ ID NO: 520121 - DNA, 15 bp, Homo sapiens
caagagtgaaactcc

SEQ ID NO: 520122 - DNA, 15 bp, Homo sapiens
aagagtgaaactcca

SEQ ID NO: 520123 - DNA, 15 bp, Homo sapiens
agagtgaaactccat

SEQ ID NO: 520124 - DNA, 15 bp, Homo sapiens
gagtgaaactccatc

SEQ ID NO: 520125 - DNA, 15 bp, Homo sapiens
agtgaaactccatct

SEQ ID NO: 520126 - DNA, 15 bp, Homo sapiens
gtgaaactccatctc

SEQ ID NO: 520127 - DNA, 15 bp, Homo sapiens
tgaaactccatctca

SEQ ID NO: 520128 - DNA, 15 bp, Homo sapiens
gaaactccatctcaa

SEQ ID NO: 520129 - DNA, 15 bp, Homo sapiens
aaaaaaaaaaagagc

SEQ ID NO: 520130 - DNA, 15 bp, Homo sapiens
aaaaaaaaaagagct

SEQ ID NO: 520131 - DNA, 15 bp, Homo sapiens
aaaaaaaaagagctg

SEQ ID NO: 520132 - DNA, 15 bp, Homo sapiens
aaaaaaaagagctga

SEQ ID NO: 520133 - DNA, 15 bp, Homo sapiens
aaaaaaagagctgaa

SEQ ID NO: 520134 - DNA, 15 bp, Homo sapiens
aaaaaagagctgaat

SEQ ID NO: 520135 - DNA, 15 bp, Homo sapiens
aaaaagagctgaatc

SEQ ID NO: 520136 - DNA, 15 bp, Homo sapiens
aaaagagctgaatct

SEQ ID NO: 520137 - DNA, 15 bp, Homo sapiens
aaagagctgaatctt

SEQ ID NO: 520138 - DNA, 15 bp, Homo sapiens
aagagctgaatcttg

SEQ ID NO: 520139 - DNA, 15 bp, Homo sapiens
agagctgaatcttgg

SEQ ID NO: 520140 - DNA, 15 bp, Homo sapiens
gagctgaatcttggc

SEQ ID NO: 520141 - DNA, 15 bp, Homo sapiens
agctgaatcttggct

SEQ ID NO: 520142 - DNA, 15 bp, Homo sapiens
gctgaatcttggctg

SEQ ID NO: 520143 - DNA, 15 bp, Homo sapiens
ctgaatcttggctgg

SEQ ID NO: 520144 - DNA, 15 bp, Homo sapiens
tgaatcttggctggg

SEQ ID NO: 520145 - DNA, 15 bp, Homo sapiens
gaatcttggctgggc

SEQ ID NO: 520146 - DNA, 15 bp, Homo sapiens
aatcttggctgggca

SEQ ID NO: 520147 - DNA, 15 bp, Homo sapiens
atcttggctgggcag

SEQ ID NO: 520148 - DNA, 15 bp, Homo sapiens
tcttggctgggcagg

SEQ ID NO: 520149 - DNA, 15 bp, Homo sapiens
cttggctgggcagga

SEQ ID NO: 520150 - DNA, 15 bp, Homo sapiens
ttggctgggcaggat

SEQ ID NO: 520151 - DNA, 15 bp, Homo sapiens
tggctgggcaggatg

SEQ ID NO: 520152 - DNA, 15 bp, Homo sapiens
ggctgggcaggatgg

SEQ ID NO: 520153 - DNA, 15 bp, Homo sapiens
gctgggcaggatggc

SEQ ID NO: 520154 - DNA, 15 bp, Homo sapiens
ctgggcaggatggct

SEQ ID NO: 520155 - DNA, 15 bp, Homo sapiens
tgggcaggatggctc

SEQ ID NO: 520156 - DNA, 15 bp, Homo sapiens
gggcaggatggctcg

SEQ ID NO: 520157 - DNA, 15 bp, Homo sapiens
ggcaggatggctcgt

SEQ ID NO: 520158 - DNA, 15 bp, Homo sapiens
gcaggatggctcgtg

SEQ ID NO: 520159 - DNA, 15 bp, Homo sapiens
caggatggctcgtgc

SEQ ID NO: 520160 - DNA, 15 bp, Homo sapiens
aggatggctcgtgcc

SEQ ID NO: 520161 - DNA, 15 bp, Homo sapiens
ggatggctcgtgcct

SEQ ID NO: 520162 - DNA, 15 bp, Homo sapiens
gatggctcgtgcctg

SEQ ID NO: 520163 - DNA, 15 bp, Homo sapiens
atggctcgtgcctgt

SEQ ID NO: 520164 - DNA, 15 bp, Homo sapiens
tggctcgtgcctgta

SEQ ID NO: 520165 - DNA, 15 bp, Homo sapiens
ggctcgtgcctgtaa

SEQ ID NO: 520166 - DNA, 15 bp, Homo sapiens
gctcgtgcctgtaat

SEQ ID NO: 520167 - DNA, 15 bp, Homo sapiens
ctcgtgcctgtaatc

SEQ ID NO: 520168 - DNA, 15 bp, Homo sapiens
tcgtgcctgtaatcc

SEQ ID NO: 520169 - DNA, 15 bp, Homo sapiens
cgtgcctgtaatcct

SEQ ID NO: 520170 - DNA, 15 bp, Homo sapiens
gtgcctgtaatccta

SEQ ID NO: 520171 - DNA, 15 bp, Homo sapiens
tgcctgtaatcctaa

SEQ ID NO: 520172 - DNA, 15 bp, Homo sapiens
gcctgtaatcctaac

SEQ ID NO: 520173 - DNA, 15 bp, Homo sapiens
cctgtaatcctaacg

SEQ ID NO: 520174 - DNA, 15 bp, Homo sapiens
ctgtaatcctaacgc

SEQ ID NO: 520175 - DNA, 15 bp, Homo sapiens
tgtaatcctaacgct

SEQ ID NO: 520176 - DNA, 15 bp, Homo sapiens
gtaatcctaacgctt

SEQ ID NO: 520177 - DNA, 15 bp, Homo sapiens
taatcctaacgcttt

SEQ ID NO: 520178 - DNA, 15 bp, Homo sapiens
aatcctaacgctttg

SEQ ID NO: 520179 - DNA, 15 bp, Homo sapiens
atcctaacgctttgg

SEQ ID NO: 520180 - DNA, 15 bp, Homo sapiens
tcctaacgctttgga

SEQ ID NO: 520181 - DNA, 15 bp, Homo sapiens
cctaacgctttggaa

SEQ ID NO: 520182 - DNA, 15 bp, Homo sapiens
ctaacgctttggaag

SEQ ID NO: 520183 - DNA, 15 bp, Homo sapiens
taacgctttggaaga

SEQ ID NO: 520184 - DNA, 15 bp, Homo sapiens
aacgctttggaagac

SEQ ID NO: 520185 - DNA, 15 bp, Homo sapiens
acgctttggaagacc

SEQ ID NO: 520186 - DNA, 15 bp, Homo sapiens
cgctttggaagaccg

SEQ ID NO: 520187 - DNA, 15 bp, Homo sapiens
gctttggaagaccga

SEQ ID NO: 520188 - DNA, 15 bp, Homo sapiens
ctttggaagaccgag

SEQ ID NO: 520189 - DNA, 15 bp, Homo sapiens
tttggaagaccgagg

SEQ ID NO: 520190 - DNA, 15 bp, Homo sapiens
ttggaagaccgaggc

SEQ ID NO: 520191 - DNA, 15 bp, Homo sapiens
tggaagaccgaggca

SEQ ID NO: 520192 - DNA, 15 bp, Homo sapiens
ggaagaccgaggcag

SEQ ID NO: 520193 - DNA, 15 bp, Homo sapiens
gaagaccgaggcaga

SEQ ID NO: 520194 - DNA, 15 bp, Homo sapiens
aagaccgaggcagaa

SEQ ID NO: 520195 - DNA, 15 bp, Homo sapiens
agaccgaggcagaag

SEQ ID NO: 520196 - DNA, 15 bp, Homo sapiens
gaccgaggcagaagg

SEQ ID NO: 520197 - DNA, 15 bp, Homo sapiens
accgaggcagaagga

SEQ ID NO: 520198 - DNA, 15 bp, Homo sapiens
ccgaggcagaaggat

SEQ ID NO: 520199 - DNA, 15 bp, Homo sapiens
cgaggcagaaggatt

SEQ ID NO: 520200 - DNA, 15 bp, Homo sapiens
gaggcagaaggattg

SEQ ID NO: 520201 - DNA, 15 bp, Homo sapiens
aggcagaaggattgg

SEQ ID NO: 520202 - DNA, 15 bp, Homo sapiens
ggcagaaggattggt

SEQ ID NO: 520203 - DNA, 15 bp, Homo sapiens
gcagaaggattggtt

SEQ ID NO: 520204 - DNA, 15 bp, Homo sapiens
cagaaggattggttg

SEQ ID NO: 520205 - DNA, 15 bp, Homo sapiens
agaaggattggttga

SEQ ID NO: 520206 - DNA, 15 bp, Homo sapiens
gaaggattggttgag

SEQ ID NO: 520207 - DNA, 15 bp, Homo sapiens
aaggattggttgagt

SEQ ID NO: 520208 - DNA, 15 bp, Homo sapiens
aggattggttgagtc

SEQ ID NO: 520209 - DNA, 15 bp, Homo sapiens
ggattggttgagtcc

SEQ ID NO: 520210 - DNA, 15 bp, Homo sapiens
gattggttgagtcca

SEQ ID NO: 520211 - DNA, 15 bp, Homo sapiens
attggttgagtccac

SEQ ID NO: 520212 - DNA, 15 bp, Homo sapiens
ttggttgagtccacg

SEQ ID NO: 520213 - DNA, 15 bp, Homo sapiens
tggttgagtccacga

SEQ ID NO: 520214 - DNA, 15 bp, Homo sapiens
ggttgagtccacgag

SEQ ID NO: 520215 - DNA, 15 bp, Homo sapiens
gttgagtccacgagt

SEQ ID NO: 520216 - DNA, 15 bp, Homo sapiens
ttgagtccacgagtt

SEQ ID NO: 520217 - DNA, 15 bp, Homo sapiens
tgagtccacgagttt

SEQ ID NO: 520218 - DNA, 15 bp, Homo sapiens
gagtccacgagttta

SEQ ID NO: 520219 - DNA, 15 bp, Homo sapiens
agtccacgagtttaa

SEQ ID NO: 520220 - DNA, 15 bp, Homo sapiens
gtccacgagtttaag

SEQ ID NO: 520221 - DNA, 15 bp, Homo sapiens
tccacgagtttaaga

SEQ ID NO: 520222 - DNA, 15 bp, Homo sapiens
ccacgagtttaagac

SEQ ID NO: 520223 - DNA, 15 bp, Homo sapiens
cacgagtttaagacc

SEQ ID NO: 520224 - DNA, 15 bp, Homo sapiens
acgagtttaagacca

SEQ ID NO: 520225 - DNA, 15 bp, Homo sapiens
cgagtttaagaccag

SEQ ID NO: 520226 - DNA, 15 bp, Homo sapiens
gagtttaagaccagc

SEQ ID NO: 520227 - DNA, 15 bp, Homo sapiens
agtttaagaccagcc

SEQ ID NO: 520228 - DNA, 15 bp, Homo sapiens
gtttaagaccagcct

SEQ ID NO: 520229 - DNA, 15 bp, Homo sapiens
tttaagaccagcctg

SEQ ID NO: 520230 - DNA, 15 bp, Homo sapiens
ttaagaccagcctgg

SEQ ID NO: 520231 - DNA, 15 bp, Homo sapiens
taagaccagcctggc

SEQ ID NO: 520232 - DNA, 15 bp, Homo sapiens
aagaccagcctggcc

SEQ ID NO: 520233 - DNA, 15 bp, Homo sapiens
agcctggccaacata

SEQ ID NO: 520234 - DNA, 15 bp, Homo sapiens
gcctggccaacatag

SEQ ID NO: 520235 - DNA, 15 bp, Homo sapiens
cctggccaacatagg

SEQ ID NO: 520236 - DNA, 15 bp, Homo sapiens
ctggccaacataggg

SEQ ID NO: 520237 - DNA, 15 bp, Homo sapiens
tggccaacatagggg

SEQ ID NO: 520238 - DNA, 15 bp, Homo sapiens
ggccaacatagggga

SEQ ID NO: 520239 - DNA, 15 bp, Homo sapiens
gccaacataggggaa

SEQ ID NO: 520240 - DNA, 15 bp, Homo sapiens
ccaacataggggaac

SEQ ID NO: 520241 - DNA, 15 bp, Homo sapiens
caacataggggaacc

SEQ ID NO: 520242 - DNA, 15 bp, Homo sapiens
aacataggggaaccc

SEQ ID NO: 520243 - DNA, 15 bp, Homo sapiens
acataggggaaccct

SEQ ID NO: 520244 - DNA, 15 bp, Homo sapiens
cataggggaaccctg

SEQ ID NO: 520245 - DNA, 15 bp, Homo sapiens
ataggggaaccctgt

SEQ ID NO: 520246 - DNA, 15 bp, Homo sapiens
taggggaaccctgtc

SEQ ID NO: 520247 - DNA, 15 bp, Homo sapiens
aggggaaccctgtct

SEQ ID NO: 520248 - DNA, 15 bp, Homo sapiens
ggggaaccctgtctc

SEQ ID NO: 520249 - DNA, 15 bp, Homo sapiens
gggaaccctgtctct

SEQ ID NO: 520250 - DNA, 15 bp, Homo sapiens
ggaaccctgtctcta

SEQ ID NO: 520251 - DNA, 15 bp, Homo sapiens
gaaccctgtctctat

SEQ ID NO: 520252 - DNA, 15 bp, Homo sapiens
aaccctgtctctatt

SEQ ID NO: 520253 - DNA, 15 bp, Homo sapiens
accctgtctctattt

SEQ ID NO: 520254 - DNA, 15 bp, Homo sapiens
ccctgtctctatttt

SEQ ID NO: 520255 - DNA, 15 bp, Homo sapiens
cctgtctctattttt

SEQ ID NO: 520256 - DNA, 15 bp, Homo sapiens
ctgtctctattttta

SEQ ID NO: 520257 - DNA, 15 bp, Homo sapiens
tgtctctatttttaa

SEQ ID NO: 520258 - DNA, 15 bp, Homo sapiens
gtctctatttttaaa

SEQ ID NO: 520259 - DNA, 15 bp, Homo sapiens
tctctatttttaaaa

SEQ ID NO: 520260 - DNA, 15 bp, Homo sapiens
ctctatttttaaaat

SEQ ID NO: 520261 - DNA, 15 bp, Homo sapiens
tctatttttaaaata

SEQ ID NO: 520262 - DNA, 15 bp, Homo sapiens
ctatttttaaaataa

SEQ ID NO: 520263 - DNA, 15 bp, Homo sapiens
tatttttaaaataat

SEQ ID NO: 520264 - DNA, 15 bp, Homo sapiens
atttttaaaataata

SEQ ID NO: 520265 - DNA, 15 bp, Homo sapiens
tttttaaaataataa

SEQ ID NO: 520266 - DNA, 15 bp, Homo sapiens
ttttaaaataataat

SEQ ID NO: 520267 - DNA, 15 bp, Homo sapiens
tttaaaataataata

SEQ ID NO: 520268 - DNA, 15 bp, Homo sapiens
ttaaaataataatac

SEQ ID NO: 520269 - DNA, 15 bp, Homo sapiens
taaaataataataca

SEQ ID NO: 520270 - DNA, 15 bp, Homo sapiens
aaaataataatacat

SEQ ID NO: 520271 - DNA, 15 bp, Homo sapiens
aaataataatacatt

SEQ ID NO: 520272 - DNA, 15 bp, Homo sapiens
aataataatacattt

SEQ ID NO: 520273 - DNA, 15 bp, Homo sapiens
ataataatacatttt

SEQ ID NO: 520274 - DNA, 15 bp, Homo sapiens
taataatacattttt

SEQ ID NO: 520275 - DNA, 15 bp, Homo sapiens
aataatacatttttg

SEQ ID NO: 520276 - DNA, 15 bp, Homo sapiens
ataatacatttttgg

SEQ ID NO: 520277 - DNA, 15 bp, Homo sapiens
taatacatttttggc

SEQ ID NO: 520278 - DNA, 15 bp, Homo sapiens
aatacatttttggcc

SEQ ID NO: 520279 - DNA, 15 bp, Homo sapiens
atacatttttggccg

SEQ ID NO: 520280 - DNA, 15 bp, Homo sapiens
tacatttttggccgg

SEQ ID NO: 520281 - DNA, 15 bp, Homo sapiens
acatttttggccggt

SEQ ID NO: 520282 - DNA, 15 bp, Homo sapiens
catttttggccggtg

SEQ ID NO: 520283 - DNA, 15 bp, Homo sapiens
atttttggccggtgc

SEQ ID NO: 520284 - DNA, 15 bp, Homo sapiens
tttttggccggtgcg

SEQ ID NO: 520285 - DNA, 15 bp, Homo sapiens
ttttggccggtgcgg

SEQ ID NO: 520286 - DNA, 15 bp, Homo sapiens
tttggccggtgcggt

SEQ ID NO: 520287 - DNA, 15 bp, Homo sapiens
ttggccggtgcggtg

SEQ ID NO: 520288 - DNA, 15 bp, Homo sapiens
tggccggtgcggtgg

SEQ ID NO: 520289 - DNA, 15 bp, Homo sapiens
ggccggtgcggtggc

SEQ ID NO: 520290 - DNA, 15 bp, Homo sapiens
gccggtgcggtggct

SEQ ID NO: 520291 - DNA, 15 bp, Homo sapiens
ccggtgcggtggctc

SEQ ID NO: 520292 - DNA, 15 bp, Homo sapiens
cggtgcggtggctca

SEQ ID NO: 520293 - DNA, 15 bp, Homo sapiens
ggtgcggtggctcat

SEQ ID NO: 520294 - DNA, 15 bp, Homo sapiens
gtgcggtggctcatg

SEQ ID NO: 520295 - DNA, 15 bp, Homo sapiens
tgcggtggctcatgc

SEQ ID NO: 520296 - DNA, 15 bp, Homo sapiens
gcggtggctcatgcc

SEQ ID NO: 520297 - DNA, 15 bp, Homo sapiens
tgcctgtaatcccaa

SEQ ID NO: 520298 - DNA, 15 bp, Homo sapiens
gcctgtaatcccaat

SEQ ID NO: 520299 - DNA, 15 bp, Homo sapiens
cctgtaatcccaata

SEQ ID NO: 520300 - DNA, 15 bp, Homo sapiens
ctgtaatcccaatac

SEQ ID NO: 520301 - DNA, 15 bp, Homo sapiens
tgtaatcccaatact

SEQ ID NO: 520302 - DNA, 15 bp, Homo sapiens
gtaatcccaatactt

SEQ ID NO: 520303 - DNA, 15 bp, Homo sapiens
taatcccaatacttt

SEQ ID NO: 520304 - DNA, 15 bp, Homo sapiens
aatcccaatactttg

SEQ ID NO: 520305 - DNA, 15 bp, Homo sapiens
atcccaatactttgg

SEQ ID NO: 520306 - DNA, 15 bp, Homo sapiens
tcccaatactttggg

SEQ ID NO: 520307 - DNA, 15 bp, Homo sapiens
cccaatactttggga

SEQ ID NO: 520308 - DNA, 15 bp, Homo sapiens
ccaatactttgggag

SEQ ID NO: 520309 - DNA, 15 bp, Homo sapiens
caatactttgggagg

SEQ ID NO: 520310 - DNA, 15 bp, Homo sapiens
aatactttgggaggc

SEQ ID NO: 520311 - DNA, 15 bp, Homo sapiens
atactttgggaggct

SEQ ID NO: 520312 - DNA, 15 bp, Homo sapiens
tactttgggaggctg

SEQ ID NO: 520313 - DNA, 15 bp, Homo sapiens
gaggctgaggcaggt

SEQ ID NO: 520314 - DNA, 15 bp, Homo sapiens
aggctgaggcaggta

SEQ ID NO: 520315 - DNA, 15 bp, Homo sapiens
ggctgaggcaggtag

SEQ ID NO: 520316 - DNA, 15 bp, Homo sapiens
gctgaggcaggtaga

SEQ ID NO: 520317 - DNA, 15 bp, Homo sapiens
ctgaggcaggtagat

SEQ ID NO: 520318 - DNA, 15 bp, Homo sapiens
tgaggcaggtagatc

SEQ ID NO: 520319 - DNA, 15 bp, Homo sapiens
gaggcaggtagatca

SEQ ID NO: 520320 - DNA, 15 bp, Homo sapiens
aggcaggtagatcac

SEQ ID NO: 520321 - DNA, 15 bp, Homo sapiens
ggcaggtagatcacc

SEQ ID NO: 520322 - DNA, 15 bp, Homo sapiens
gcaggtagatcacct

SEQ ID NO: 520323 - DNA, 15 bp, Homo sapiens
caggtagatcacctg

SEQ ID NO: 520324 - DNA, 15 bp, Homo sapiens
aggtagatcacctga

SEQ ID NO: 520325 - DNA, 15 bp, Homo sapiens
ggtagatcacctgag

SEQ ID NO: 520326 - DNA, 15 bp, Homo sapiens
gtagatcacctgagg

SEQ ID NO: 520327 - DNA, 15 bp, Homo sapiens
tagatcacctgaggt

SEQ ID NO: 520328 - DNA, 15 bp, Homo sapiens
tcacctgaggtcaga

SEQ ID NO: 520329 - DNA, 15 bp, Homo sapiens
cacctgaggtcagag

SEQ ID NO: 520330 - DNA, 15 bp, Homo sapiens
acctgaggtcagagt

SEQ ID NO: 520331 - DNA, 15 bp, Homo sapiens
cctgaggtcagagtt

SEQ ID NO: 520332 - DNA, 15 bp, Homo sapiens
ctgaggtcagagttc

SEQ ID NO: 520333 - DNA, 15 bp, Homo sapiens
tgaggtcagagttcg

SEQ ID NO: 520334 - DNA, 15 bp, Homo sapiens
gaggtcagagttcga

SEQ ID NO: 520335 - DNA, 15 bp, Homo sapiens
aggtcagagttcgag

SEQ ID NO: 520336 - DNA, 15 bp, Homo sapiens
ggtcagagttcgaga

SEQ ID NO: 520337 - DNA, 15 bp, Homo sapiens
gtcagagttcgagac

SEQ ID NO: 520338 - DNA, 15 bp, Homo sapiens
tcagagttcgagacc

SEQ ID NO: 520339 - DNA, 15 bp, Homo sapiens
cagagttcgagacca

SEQ ID NO: 520340 - DNA, 15 bp, Homo sapiens
agagttcgagaccag

SEQ ID NO: 520341 - DNA, 15 bp, Homo sapiens
cgagaccagcctgga

SEQ ID NO: 520342 - DNA, 15 bp, Homo sapiens
gagaccagcctggat

SEQ ID NO: 520343 - DNA, 15 bp, Homo sapiens
agaccagcctggata

SEQ ID NO: 520344 - DNA, 15 bp, Homo sapiens
gaccagcctggataa

SEQ ID NO: 520345 - DNA, 15 bp, Homo sapiens
accagcctggataac

SEQ ID NO: 520346 - DNA, 15 bp, Homo sapiens
ccagcctggataacc

SEQ ID NO: 520347 - DNA, 15 bp, Homo sapiens
cagcctggataacct

SEQ ID NO: 520348 - DNA, 15 bp, Homo sapiens
agcctggataacctg

SEQ ID NO: 520349 - DNA, 15 bp, Homo sapiens
gcctggataacctgg

SEQ ID NO: 520350 - DNA, 15 bp, Homo sapiens
cctggataacctggt

SEQ ID NO: 520351 - DNA, 15 bp, Homo sapiens
ctggataacctggtg

SEQ ID NO: 520352 - DNA, 15 bp, Homo sapiens
tggataacctggtga

SEQ ID NO: 520353 - DNA, 15 bp, Homo sapiens
ggataacctggtgaa

SEQ ID NO: 520354 - DNA, 15 bp, Homo sapiens
gataacctggtgaaa

SEQ ID NO: 520355 - DNA, 15 bp, Homo sapiens
ataacctggtgaaac

SEQ ID NO: 520356 - DNA, 15 bp, Homo sapiens
taacctggtgaaacc

SEQ ID NO: 520357 - DNA, 15 bp, Homo sapiens
aacctggtgaaaccc

SEQ ID NO: 520358 - DNA, 15 bp, Homo sapiens
acctggtgaaacccc

SEQ ID NO: 520359 - DNA, 15 bp, Homo sapiens
cctggtgaaacccct

SEQ ID NO: 520360 - DNA, 15 bp, Homo sapiens
ctggtgaaacccctc

SEQ ID NO: 520361 - DNA, 15 bp, Homo sapiens
tggtgaaacccctct

SEQ ID NO: 520362 - DNA, 15 bp, Homo sapiens
ggtgaaacccctctt

SEQ ID NO: 520363 - DNA, 15 bp, Homo sapiens
gtgaaacccctcttt

SEQ ID NO: 520364 - DNA, 15 bp, Homo sapiens
tgaaacccctcttta

SEQ ID NO: 520365 - DNA, 15 bp, Homo sapiens
gaaacccctctttac

SEQ ID NO: 520366 - DNA, 15 bp, Homo sapiens
aaacccctctttact

SEQ ID NO: 520367 - DNA, 15 bp, Homo sapiens
aacccctctttacta

SEQ ID NO: 520368 - DNA, 15 bp, Homo sapiens
acccctctttactaa

SEQ ID NO: 520369 - DNA, 15 bp, Homo sapiens
cccctctttactaaa

SEQ ID NO: 520370 - DNA, 15 bp, Homo sapiens
ccctctttactaaaa

SEQ ID NO: 520371 - DNA, 15 bp, Homo sapiens
cctctttactaaaaa

SEQ ID NO: 520372 - DNA, 15 bp, Homo sapiens
ctctttactaaaaat

SEQ ID NO: 520373 - DNA, 15 bp, Homo sapiens
tctttactaaaaata

SEQ ID NO: 520374 - DNA, 15 bp, Homo sapiens
ctttactaaaaatac

SEQ ID NO: 520375 - DNA, 15 bp, Homo sapiens
tttactaaaaataca

SEQ ID NO: 520376 - DNA, 15 bp, Homo sapiens
ttactaaaaatacaa

SEQ ID NO: 520377 - DNA, 15 bp, Homo sapiens
aaaatacaaaaaaaa

SEQ ID NO: 520378 - DNA, 15 bp, Homo sapiens
aaatacaaaaaaaaa

SEQ ID NO: 520379 - DNA, 15 bp, Homo sapiens
aatacaaaaaaaaaa

SEQ ID NO: 520380 - DNA, 15 bp, Homo sapiens
atacaaaaaaaaaaa

SEQ ID NO: 520381 - DNA, 15 bp, Homo sapiens
tacaaaaaaaaaaaa

SEQ ID NO: 520382 - DNA, 15 bp, Homo sapiens
acaaaaaaaaaaaaa

SEQ ID NO: 520383 - DNA, 15 bp, Homo sapiens
tagctgggtgtggta

SEQ ID NO: 520384 - DNA, 15 bp, Homo sapiens
agctgggtgtggtag

SEQ ID NO: 520385 - DNA, 15 bp, Homo sapiens
gctgggtgtggtagc

SEQ ID NO: 520386 - DNA, 15 bp, Homo sapiens
ctgggtgtggtagca

SEQ ID NO: 520387 - DNA, 15 bp, Homo sapiens
tgggtgtggtagcac

SEQ ID NO: 520388 - DNA, 15 bp, Homo sapiens
gggtgtggtagcaca

SEQ ID NO: 520389 - DNA, 15 bp, Homo sapiens
ggtgtggtagcacat

SEQ ID NO: 520390 - DNA, 15 bp, Homo sapiens
gtgtggtagcacatg

SEQ ID NO: 520391 - DNA, 15 bp, Homo sapiens
tgtggtagcacatgc

SEQ ID NO: 520392 - DNA, 15 bp, Homo sapiens
gtggtagcacatgct

SEQ ID NO: 520393 - DNA, 15 bp, Homo sapiens
tggtagcacatgctt

SEQ ID NO: 520394 - DNA, 15 bp, Homo sapiens
ggtagcacatgcttg

SEQ ID NO: 520395 - DNA, 15 bp, Homo sapiens
gtagcacatgcttgt

SEQ ID NO: 520396 - DNA, 15 bp, Homo sapiens
tagcacatgcttgta

SEQ ID NO: 520397 - DNA, 15 bp, Homo sapiens
agcacatgcttgtaa

SEQ ID NO: 520398 - DNA, 15 bp, Homo sapiens
gcacatgcttgtaat

SEQ ID NO: 520399 - DNA, 15 bp, Homo sapiens
cacatgcttgtaatc

SEQ ID NO: 520400 - DNA, 15 bp, Homo sapiens
acatgcttgtaatcc

SEQ ID NO: 520401 - DNA, 15 bp, Homo sapiens
catgcttgtaatccc

SEQ ID NO: 520402 - DNA, 15 bp, Homo sapiens
atgcttgtaatccca

SEQ ID NO: 520403 - DNA, 15 bp, Homo sapiens
tgcttgtaatcccag

SEQ ID NO: 520404 - DNA, 15 bp, Homo sapiens
gcttgtaatcccagc

SEQ ID NO: 520405 - DNA, 15 bp, Homo sapiens
cttgtaatcccagct

SEQ ID NO: 520406 - DNA, 15 bp, Homo sapiens
ttgtaatcccagcta

SEQ ID NO: 520407 - DNA, 15 bp, Homo sapiens
aatcccagctacttg

SEQ ID NO: 520408 - DNA, 15 bp, Homo sapiens
atcccagctacttgg

SEQ ID NO: 520409 - DNA, 15 bp, Homo sapiens
gaatcgcttgaacca

SEQ ID NO: 520410 - DNA, 15 bp, Homo sapiens
aatcgcttgaaccag

SEQ ID NO: 520411 - DNA, 15 bp, Homo sapiens
atcgcttgaaccagg

SEQ ID NO: 520412 - DNA, 15 bp, Homo sapiens
tcgcttgaaccaggg

SEQ ID NO: 520413 - DNA, 15 bp, Homo sapiens
cgcttgaaccaggga

SEQ ID NO: 520414 - DNA, 15 bp, Homo sapiens
gcttgaaccagggag

SEQ ID NO: 520415 - DNA, 15 bp, Homo sapiens
cttgaaccagggagg

SEQ ID NO: 520416 - DNA, 15 bp, Homo sapiens
ttgaaccagggaggc

SEQ ID NO: 520417 - DNA, 15 bp, Homo sapiens
tgaaccagggaggcg

SEQ ID NO: 520418 - DNA, 15 bp, Homo sapiens
gaaccagggaggcgg

SEQ ID NO: 520419 - DNA, 15 bp, Homo sapiens
aaccagggaggcgga

SEQ ID NO: 520420 - DNA, 15 bp, Homo sapiens
accagggaggcggag

SEQ ID NO: 520421 - DNA, 15 bp, Homo sapiens
ccagggaggcggagg

SEQ ID NO: 520422 - DNA, 15 bp, Homo sapiens
cagggaggcggaggt

SEQ ID NO: 520423 - DNA, 15 bp, Homo sapiens
agggaggcggaggtt

SEQ ID NO: 520424 - DNA, 15 bp, Homo sapiens
gggaggcggaggtta

SEQ ID NO: 520425 - DNA, 15 bp, Homo sapiens
aggcggaggttacaa

SEQ ID NO: 520426 - DNA, 15 bp, Homo sapiens
ggcggaggttacaat

SEQ ID NO: 520427 - DNA, 15 bp, Homo sapiens
gcggaggttacaatg

SEQ ID NO: 520428 - DNA, 15 bp, Homo sapiens
cggaggttacaatga

SEQ ID NO: 520429 - DNA, 15 bp, Homo sapiens
ggaggttacaatgag

SEQ ID NO: 520430 - DNA, 15 bp, Homo sapiens
gaggttacaatgagc

SEQ ID NO: 520431 - DNA, 15 bp, Homo sapiens
aggttacaatgagcc

SEQ ID NO: 520432 - DNA, 15 bp, Homo sapiens
ggttacaatgagcca

SEQ ID NO: 520433 - DNA, 15 bp, Homo sapiens
gttacaatgagccaa

SEQ ID NO: 520434 - DNA, 15 bp, Homo sapiens
ttacaatgagccaac

SEQ ID NO: 520435 - DNA, 15 bp, Homo sapiens
tacaatgagccaaca

SEQ ID NO: 520436 - DNA, 15 bp, Homo sapiens
acaatgagccaacac

SEQ ID NO: 520437 - DNA, 15 bp, Homo sapiens
caatgagccaacact

SEQ ID NO: 520438 - DNA, 15 bp, Homo sapiens
aatgagccaacacta

SEQ ID NO: 520439 - DNA, 15 bp, Homo sapiens
atgagccaacactac

SEQ ID NO: 520440 - DNA, 15 bp, Homo sapiens
tgagccaacactaca

SEQ ID NO: 520441 - DNA, 15 bp, Homo sapiens
gagccaacactacac

SEQ ID NO: 520442 - DNA, 15 bp, Homo sapiens
agccaacactacacc

SEQ ID NO: 520443 - DNA, 15 bp, Homo sapiens
gccaacactacacca

SEQ ID NO: 520444 - DNA, 15 bp, Homo sapiens
ccaacactacaccac

SEQ ID NO: 520445 - DNA, 15 bp, Homo sapiens
caacactacaccact

SEQ ID NO: 520446 - DNA, 15 bp, Homo sapiens
aacactacaccactg

SEQ ID NO: 520447 - DNA, 15 bp, Homo sapiens
acactacaccactgc

SEQ ID NO: 520448 - DNA, 15 bp, Homo sapiens
cactacaccactgca

SEQ ID NO: 520449 - DNA, 15 bp, Homo sapiens
actacaccactgcac

SEQ ID NO: 520450 - DNA, 15 bp, Homo sapiens
ctacaccactgcact

SEQ ID NO: 520451 - DNA, 15 bp, Homo sapiens
tacaccactgcactc

SEQ ID NO: 520452 - DNA, 15 bp, Homo sapiens
tccagcctgggcaat

SEQ ID NO: 520453 - DNA, 15 bp, Homo sapiens
cagcctgggcaatag

SEQ ID NO: 520454 - DNA, 15 bp, Homo sapiens
cctgggcaatagagt

SEQ ID NO: 520455 - DNA, 15 bp, Homo sapiens
ctgggcaatagagtg

SEQ ID NO: 520456 - DNA, 15 bp, Homo sapiens
tgggcaatagagtga

SEQ ID NO: 520457 - DNA, 15 bp, Homo sapiens
gggcaatagagtgag

SEQ ID NO: 520458 - DNA, 15 bp, Homo sapiens
ggcaatagagtgaga

SEQ ID NO: 520459 - DNA, 15 bp, Homo sapiens
gcaatagagtgagac

SEQ ID NO: 520460 - DNA, 15 bp, Homo sapiens
caatagagtgagact

SEQ ID NO: 520461 - DNA, 15 bp, Homo sapiens
aatagagtgagactg

SEQ ID NO: 520462 - DNA, 15 bp, Homo sapiens
atagagtgagactgc

SEQ ID NO: 520463 - DNA, 15 bp, Homo sapiens
tagagtgagactgca

SEQ ID NO: 520464 - DNA, 15 bp, Homo sapiens
agagtgagactgcat

SEQ ID NO: 520465 - DNA, 15 bp, Homo sapiens
gagtgagactgcatc

SEQ ID NO: 520466 - DNA, 15 bp, Homo sapiens
agtgagactgcatct

SEQ ID NO: 520467 - DNA, 15 bp, Homo sapiens
gtgagactgcatctc

SEQ ID NO: 520468 - DNA, 15 bp, Homo sapiens
tgagactgcatctca

SEQ ID NO: 520469 - DNA, 15 bp, Homo sapiens
gagactgcatctcaa

SEQ ID NO: 520470 - DNA, 15 bp, Homo sapiens
agactgcatctcaaa

SEQ ID NO: 520471 - DNA, 15 bp, Homo sapiens
gactgcatctcaaaa

SEQ ID NO: 520472 - DNA, 15 bp, Homo sapiens
actgcatctcaaaaa

SEQ ID NO: 520473 - DNA, 15 bp, Homo sapiens
ctgcatctcaaaaaa

SEQ ID NO: 520474 - DNA, 15 bp, Homo sapiens
tgcatctcaaaaaaa

SEQ ID NO: 520475 - DNA, 15 bp, Homo sapiens
gcatctcaaaaaaat

SEQ ID NO: 520476 - DNA, 15 bp, Homo sapiens
catctcaaaaaaata

SEQ ID NO: 520477 - DNA, 15 bp, Homo sapiens
atctcaaaaaaataa

SEQ ID NO: 520478 - DNA, 15 bp, Homo sapiens
tctcaaaaaaataat

SEQ ID NO: 520479 - DNA, 15 bp, Homo sapiens
ctcaaaaaaataata

SEQ ID NO: 520480 - DNA, 15 bp, Homo sapiens
tcaaaaaaataataa

SEQ ID NO: 520481 - DNA, 15 bp, Homo sapiens
caaaaaaataataat

SEQ ID NO: 520482 - DNA, 15 bp, Homo sapiens
aaaaaaataataatt

SEQ ID NO: 520483 - DNA, 15 bp, Homo sapiens
aaaaaataataattt

SEQ ID NO: 520484 - DNA, 15 bp, Homo sapiens
aaaaataataatttt

SEQ ID NO: 520485 - DNA, 15 bp, Homo sapiens
aaaataataattttt

SEQ ID NO: 520486 - DNA, 15 bp, Homo sapiens
aaataataattttta

SEQ ID NO: 520487 - DNA, 15 bp, Homo sapiens
aataataatttttaa

SEQ ID NO: 520488 - DNA, 15 bp, Homo sapiens
ataataatttttaaa

SEQ ID NO: 520489 - DNA, 15 bp, Homo sapiens
taataatttttaaaa

SEQ ID NO: 520490 - DNA, 15 bp, Homo sapiens
aataatttttaaaaa

SEQ ID NO: 520491 - DNA, 15 bp, Homo sapiens
ataatttttaaaaat

SEQ ID NO: 520492 - DNA, 15 bp, Homo sapiens
taatttttaaaaata

SEQ ID NO: 520493 - DNA, 15 bp, Homo sapiens
aatttttaaaaataa

SEQ ID NO: 520494 - DNA, 15 bp, Homo sapiens
ttaaaaataataaat

SEQ ID NO: 520495 - DNA, 15 bp, Homo sapiens
taaaaataataaatt

SEQ ID NO: 520496 - DNA, 15 bp, Homo sapiens
aaaaataataaattt

SEQ ID NO: 520497 - DNA, 15 bp, Homo sapiens
aaaataataaatttt

SEQ ID NO: 520498 - DNA, 15 bp, Homo sapiens
aaataataaattttt

SEQ ID NO: 520499 - DNA, 15 bp, Homo sapiens
aataataaatttttt

SEQ ID NO: 520500 - DNA, 15 bp, Homo sapiens
ataataaattttttt

SEQ ID NO: 520501 - DNA, 15 bp, Homo sapiens
taataaattttttta

SEQ ID NO: 520502 - DNA, 15 bp, Homo sapiens
aataaatttttttaa

SEQ ID NO: 520503 - DNA, 15 bp, Homo sapiens
ataaatttttttaag

SEQ ID NO: 520504 - DNA, 15 bp, Homo sapiens
taaatttttttaagc

SEQ ID NO: 520505 - DNA, 15 bp, Homo sapiens
aaatttttttaagct

SEQ ID NO: 520506 - DNA, 15 bp, Homo sapiens
aatttttttaagctt

SEQ ID NO: 520507 - DNA, 15 bp, Homo sapiens
atttttttaagctta

SEQ ID NO: 520508 - DNA, 15 bp, Homo sapiens
tttttttaagcttat

SEQ ID NO: 520509 - DNA, 15 bp, Homo sapiens
ttttttaagcttata

SEQ ID NO: 520510 - DNA, 15 bp, Homo sapiens
tttttaagcttataa

SEQ ID NO: 520511 - DNA, 15 bp, Homo sapiens
ttttaagcttataaa

SEQ ID NO: 520512 - DNA, 15 bp, Homo sapiens
tttaagcttataaaa

SEQ ID NO: 520513 - DNA, 15 bp, Homo sapiens
ttaagcttataaaaa

SEQ ID NO: 520514 - DNA, 15 bp, Homo sapiens
taagcttataaaaag

SEQ ID NO: 520515 - DNA, 15 bp, Homo sapiens
aagcttataaaaaga

SEQ ID NO: 520516 - DNA, 15 bp, Homo sapiens
agcttataaaaagaa

SEQ ID NO: 520517 - DNA, 15 bp, Homo sapiens
gcttataaaaagaaa

SEQ ID NO: 520518 - DNA, 15 bp, Homo sapiens
cttataaaaagaaaa

SEQ ID NO: 520519 - DNA, 15 bp, Homo sapiens
ttataaaaagaaaag

SEQ ID NO: 520520 - DNA, 15 bp, Homo sapiens
tataaaaagaaaagt

SEQ ID NO: 520521 - DNA, 15 bp, Homo sapiens
ataaaaagaaaagtt

SEQ ID NO: 520522 - DNA, 15 bp, Homo sapiens
taaaaagaaaagttg

SEQ ID NO: 520523 - DNA, 15 bp, Homo sapiens
aaaaagaaaagttga

SEQ ID NO: 520524 - DNA, 15 bp, Homo sapiens
aaaagaaaagttgag

SEQ ID NO: 520525 - DNA, 15 bp, Homo sapiens
aaagaaaagttgagg

SEQ ID NO: 520526 - DNA, 15 bp, Homo sapiens
aagaaaagttgaggc

SEQ ID NO: 520527 - DNA, 15 bp, Homo sapiens
agaaaagttgaggcc

SEQ ID NO: 520528 - DNA, 15 bp, Homo sapiens
gaaaagttgaggcca

SEQ ID NO: 520529 - DNA, 15 bp, Homo sapiens
aaaagttgaggccag

SEQ ID NO: 520530 - DNA, 15 bp, Homo sapiens
aaagttgaggccagc

SEQ ID NO: 520531 - DNA, 15 bp, Homo sapiens
aagttgaggccagca

SEQ ID NO: 520532 - DNA, 15 bp, Homo sapiens
agttgaggccagcat

SEQ ID NO: 520533 - DNA, 15 bp, Homo sapiens
gttgaggccagcata

SEQ ID NO: 520534 - DNA, 15 bp, Homo sapiens
ttgaggccagcatag

SEQ ID NO: 520535 - DNA, 15 bp, Homo sapiens
tgaggccagcatagt

SEQ ID NO: 520536 - DNA, 15 bp, Homo sapiens
gaggccagcatagta

SEQ ID NO: 520537 - DNA, 15 bp, Homo sapiens
aggccagcatagtag

SEQ ID NO: 520538 - DNA, 15 bp, Homo sapiens
ggccagcatagtagc

SEQ ID NO: 520539 - DNA, 15 bp, Homo sapiens
gccagcatagtagct

SEQ ID NO: 520540 - DNA, 15 bp, Homo sapiens
ccagcatagtagctc

SEQ ID NO: 520541 - DNA, 15 bp, Homo sapiens
cagcatagtagctca

SEQ ID NO: 520542 - DNA, 15 bp, Homo sapiens
agcatagtagctcac

SEQ ID NO: 520543 - DNA, 15 bp, Homo sapiens
gcatagtagctcaca

SEQ ID NO: 520544 - DNA, 15 bp, Homo sapiens
catagtagctcacat

SEQ ID NO: 520545 - DNA, 15 bp, Homo sapiens
atagtagctcacatc

SEQ ID NO: 520546 - DNA, 15 bp, Homo sapiens
tagtagctcacatct

SEQ ID NO: 520547 - DNA, 15 bp, Homo sapiens
agtagctcacatctg

SEQ ID NO: 520548 - DNA, 15 bp, Homo sapiens
gtagctcacatctgt

SEQ ID NO: 520549 - DNA, 15 bp, Homo sapiens
tagctcacatctgta

SEQ ID NO: 520550 - DNA, 15 bp, Homo sapiens
agctcacatctgtaa

SEQ ID NO: 520551 - DNA, 15 bp, Homo sapiens
gctcacatctgtaat

SEQ ID NO: 520552 - DNA, 15 bp, Homo sapiens
ctcacatctgtaatc

SEQ ID NO: 520553 - DNA, 15 bp, Homo sapiens
tcacatctgtaatct

SEQ ID NO: 520554 - DNA, 15 bp, Homo sapiens
cacatctgtaatctc

SEQ ID NO: 520555 - DNA, 15 bp, Homo sapiens
acatctgtaatctca

SEQ ID NO: 520556 - DNA, 15 bp, Homo sapiens
catctgtaatctcag

SEQ ID NO: 520557 - DNA, 15 bp, Homo sapiens
atctgtaatctcagc

SEQ ID NO: 520558 - DNA, 15 bp, Homo sapiens
tctgtaatctcagca

SEQ ID NO: 520559 - DNA, 15 bp, Homo sapiens
ctgtaatctcagcag

SEQ ID NO: 520560 - DNA, 15 bp, Homo sapiens
tgtaatctcagcagt

SEQ ID NO: 520561 - DNA, 15 bp, Homo sapiens
gtaatctcagcagtg

SEQ ID NO: 520562 - DNA, 15 bp, Homo sapiens
taatctcagcagtgg

SEQ ID NO: 520563 - DNA, 15 bp, Homo sapiens
aatctcagcagtggc

SEQ ID NO: 520564 - DNA, 15 bp, Homo sapiens
atctcagcagtggca

SEQ ID NO: 520565 - DNA, 15 bp, Homo sapiens
tctcagcagtggcag

SEQ ID NO: 520566 - DNA, 15 bp, Homo sapiens
ctcagcagtggcaga

SEQ ID NO: 520567 - DNA, 15 bp, Homo sapiens
tcagcagtggcagag

SEQ ID NO: 520568 - DNA, 15 bp, Homo sapiens
cagcagtggcagagg

SEQ ID NO: 520569 - DNA, 15 bp, Homo sapiens
agcagtggcagagga

SEQ ID NO: 520570 - DNA, 15 bp, Homo sapiens
gcagtggcagaggat

SEQ ID NO: 520571 - DNA, 15 bp, Homo sapiens
cagtggcagaggatt

SEQ ID NO: 520572 - DNA, 15 bp, Homo sapiens
agtggcagaggattg

SEQ ID NO: 520573 - DNA, 15 bp, Homo sapiens
gtggcagaggattgc

SEQ ID NO: 520574 - DNA, 15 bp, Homo sapiens
tggcagaggattgct

SEQ ID NO: 520575 - DNA, 15 bp, Homo sapiens
ggcagaggattgctt

SEQ ID NO: 520576 - DNA, 15 bp, Homo sapiens
gcagaggattgcttg

SEQ ID NO: 520577 - DNA, 15 bp, Homo sapiens
cagaggattgcttga

SEQ ID NO: 520578 - DNA, 15 bp, Homo sapiens
agaggattgcttgaa

SEQ ID NO: 520579 - DNA, 15 bp, Homo sapiens
gaggattgcttgaag

SEQ ID NO: 520580 - DNA, 15 bp, Homo sapiens
aggattgcttgaagc

SEQ ID NO: 520581 - DNA, 15 bp, Homo sapiens
ggattgcttgaagcc

SEQ ID NO: 520582 - DNA, 15 bp, Homo sapiens
gattgcttgaagcca

SEQ ID NO: 520583 - DNA, 15 bp, Homo sapiens
attgcttgaagccag

SEQ ID NO: 520584 - DNA, 15 bp, Homo sapiens
ttgcttgaagccagg

SEQ ID NO: 520585 - DNA, 15 bp, Homo sapiens
tgcttgaagccagga

SEQ ID NO: 520586 - DNA, 15 bp, Homo sapiens
gcttgaagccaggag

SEQ ID NO: 520587 - DNA, 15 bp, Homo sapiens
cttgaagccaggagt

SEQ ID NO: 520588 - DNA, 15 bp, Homo sapiens
ttgaagccaggagtt

SEQ ID NO: 520589 - DNA, 15 bp, Homo sapiens
tgaagccaggagttt

SEQ ID NO: 520590 - DNA, 15 bp, Homo sapiens
gaagccaggagtttg

SEQ ID NO: 520591 - DNA, 15 bp, Homo sapiens
aagccaggagtttga

SEQ ID NO: 520592 - DNA, 15 bp, Homo sapiens
agccaggagtttgag

SEQ ID NO: 520593 - DNA, 15 bp, Homo sapiens
gccaggagtttgaga

SEQ ID NO: 520594 - DNA, 15 bp, Homo sapiens
ccaggagtttgagac

SEQ ID NO: 520595 - DNA, 15 bp, Homo sapiens
tgagaccagcctggg

SEQ ID NO: 520596 - DNA, 15 bp, Homo sapiens
gagaccagcctgggc

SEQ ID NO: 520597 - DNA, 15 bp, Homo sapiens
cctgggcaacatagc

SEQ ID NO: 520598 - DNA, 15 bp, Homo sapiens
ctgggcaacatagca

SEQ ID NO: 520599 - DNA, 15 bp, Homo sapiens
gcaacatagcaagac

SEQ ID NO: 520600 - DNA, 15 bp, Homo sapiens
caacatagcaagacc

SEQ ID NO: 520601 - DNA, 15 bp, Homo sapiens
aacatagcaagacct

SEQ ID NO: 520602 - DNA, 15 bp, Homo sapiens
acatagcaagacctc

SEQ ID NO: 520603 - DNA, 15 bp, Homo sapiens
catagcaagacctca

SEQ ID NO: 520604 - DNA, 15 bp, Homo sapiens
atagcaagacctcat

SEQ ID NO: 520605 - DNA, 15 bp, Homo sapiens
tagcaagacctcatc

SEQ ID NO: 520606 - DNA, 15 bp, Homo sapiens
agcaagacctcatct

SEQ ID NO: 520607 - DNA, 15 bp, Homo sapiens
gcaagacctcatctc

SEQ ID NO: 520608 - DNA, 15 bp, Homo sapiens
caagacctcatctct

SEQ ID NO: 520609 - DNA, 15 bp, Homo sapiens
aagacctcatctcta

SEQ ID NO: 520610 - DNA, 15 bp, Homo sapiens
agacctcatctctac

SEQ ID NO: 520611 - DNA, 15 bp, Homo sapiens
gacctcatctctaca

SEQ ID NO: 520612 - DNA, 15 bp, Homo sapiens
acctcatctctacaa

SEQ ID NO: 520613 - DNA, 15 bp, Homo sapiens
cctcatctctacaaa

SEQ ID NO: 520614 - DNA, 15 bp, Homo sapiens
ctcatctctacaaaa

SEQ ID NO: 520615 - DNA, 15 bp, Homo sapiens
tcatctctacaaaaa

SEQ ID NO: 520616 - DNA, 15 bp, Homo sapiens
catctctacaaaaaa

SEQ ID NO: 520617 - DNA, 15 bp, Homo sapiens
atctctacaaaaaaa

SEQ ID NO: 520618 - DNA, 15 bp, Homo sapiens
tctctacaaaaaaat

SEQ ID NO: 520619 - DNA, 15 bp, Homo sapiens
ctctacaaaaaaatt

SEQ ID NO: 520620 - DNA, 15 bp, Homo sapiens
tctacaaaaaaattt

SEQ ID NO: 520621 - DNA, 15 bp, Homo sapiens
ctacaaaaaaatttc

SEQ ID NO: 520622 - DNA, 15 bp, Homo sapiens
tacaaaaaaatttct

SEQ ID NO: 520623 - DNA, 15 bp, Homo sapiens
acaaaaaaatttctt

SEQ ID NO: 520624 - DNA, 15 bp, Homo sapiens
caaaaaaatttcttt

SEQ ID NO: 520625 - DNA, 15 bp, Homo sapiens
aaaaaaatttctttt

SEQ ID NO: 520626 - DNA, 15 bp, Homo sapiens
aaaaaatttcttttt

SEQ ID NO: 520627 - DNA, 15 bp, Homo sapiens
aaaaatttctttttt

SEQ ID NO: 520628 - DNA, 15 bp, Homo sapiens
aaaatttctttttta

SEQ ID NO: 520629 - DNA, 15 bp, Homo sapiens
aaatttcttttttaa

SEQ ID NO: 520630 - DNA, 15 bp, Homo sapiens
aatttcttttttaaa

SEQ ID NO: 520631 - DNA, 15 bp, Homo sapiens
atttcttttttaaat

SEQ ID NO: 520632 - DNA, 15 bp, Homo sapiens
tttcttttttaaatt

SEQ ID NO: 520633 - DNA, 15 bp, Homo sapiens
ttcttttttaaatta

SEQ ID NO: 520634 - DNA, 15 bp, Homo sapiens
tcttttttaaattag

SEQ ID NO: 520635 - DNA, 15 bp, Homo sapiens
cttttttaaattagc

SEQ ID NO: 520636 - DNA, 15 bp, Homo sapiens
ttttttaaattagct

SEQ ID NO: 520637 - DNA, 15 bp, Homo sapiens
tttttaaattagctg

SEQ ID NO: 520638 - DNA, 15 bp, Homo sapiens
ttttaaattagctgg

SEQ ID NO: 520639 - DNA, 15 bp, Homo sapiens
tttaaattagctggg

SEQ ID NO: 520640 - DNA, 15 bp, Homo sapiens
ttaaattagctgggt

SEQ ID NO: 520641 - DNA, 15 bp, Homo sapiens
taaattagctgggtg

SEQ ID NO: 520642 - DNA, 15 bp, Homo sapiens
gtgtggtggtgtgca

SEQ ID NO: 520643 - DNA, 15 bp, Homo sapiens
tgtggtggtgtgcat

SEQ ID NO: 520644 - DNA, 15 bp, Homo sapiens
gtggtggtgtgcatc

SEQ ID NO: 520645 - DNA, 15 bp, Homo sapiens
tggtggtgtgcatct

SEQ ID NO: 520646 - DNA, 15 bp, Homo sapiens
ggtggtgtgcatctg

SEQ ID NO: 520647 - DNA, 15 bp, Homo sapiens
gtggtgtgcatctgt

SEQ ID NO: 520648 - DNA, 15 bp, Homo sapiens
tggtgtgcatctgta

SEQ ID NO: 520649 - DNA, 15 bp, Homo sapiens
ggtgtgcatctgtag

SEQ ID NO: 520650 - DNA, 15 bp, Homo sapiens
gtgtgcatctgtagt

SEQ ID NO: 520651 - DNA, 15 bp, Homo sapiens
tgtgcatctgtagtc

SEQ ID NO: 520652 - DNA, 15 bp, Homo sapiens
gtgcatctgtagtcc

SEQ ID NO: 520653 - DNA, 15 bp, Homo sapiens
tgcatctgtagtccc

SEQ ID NO: 520654 - DNA, 15 bp, Homo sapiens
gcatctgtagtccca

SEQ ID NO: 520655 - DNA, 15 bp, Homo sapiens
catctgtagtcccag

SEQ ID NO: 520656 - DNA, 15 bp, Homo sapiens
atctgtagtcccagc

SEQ ID NO: 520657 - DNA, 15 bp, Homo sapiens
tctgtagtcccagct

SEQ ID NO: 520658 - DNA, 15 bp, Homo sapiens
gctactcaggaggca

SEQ ID NO: 520659 - DNA, 15 bp, Homo sapiens
ctactcaggaggcag

SEQ ID NO: 520660 - DNA, 15 bp, Homo sapiens
tactcaggaggcaga

SEQ ID NO: 520661 - DNA, 15 bp, Homo sapiens
actcaggaggcagag

SEQ ID NO: 520662 - DNA, 15 bp, Homo sapiens
ctcaggaggcagagg

SEQ ID NO: 520663 - DNA, 15 bp, Homo sapiens
tcaggaggcagaggt

SEQ ID NO: 520664 - DNA, 15 bp, Homo sapiens
caggaggcagaggtg

SEQ ID NO: 520665 - DNA, 15 bp, Homo sapiens
aggaggcagaggtga

SEQ ID NO: 520666 - DNA, 15 bp, Homo sapiens
ggaggcagaggtgag

SEQ ID NO: 520667 - DNA, 15 bp, Homo sapiens
gaggcagaggtgagt

SEQ ID NO: 520668 - DNA, 15 bp, Homo sapiens
aggcagaggtgagtg

SEQ ID NO: 520669 - DNA, 15 bp, Homo sapiens
ggcagaggtgagtgg

SEQ ID NO: 520670 - DNA, 15 bp, Homo sapiens
gcagaggtgagtgga

SEQ ID NO: 520671 - DNA, 15 bp, Homo sapiens
cagaggtgagtggat

SEQ ID NO: 520672 - DNA, 15 bp, Homo sapiens
agaggtgagtggata

SEQ ID NO: 520673 - DNA, 15 bp, Homo sapiens
gaggtgagtggatac

SEQ ID NO: 520674 - DNA, 15 bp, Homo sapiens
aggtgagtggataca

SEQ ID NO: 520675 - DNA, 15 bp, Homo sapiens
ggtgagtggatacat

SEQ ID NO: 520676 - DNA, 15 bp, Homo sapiens
gtgagtggatacatt

SEQ ID NO: 520677 - DNA, 15 bp, Homo sapiens
tgagtggatacattg

SEQ ID NO: 520678 - DNA, 15 bp, Homo sapiens
gagtggatacattga

SEQ ID NO: 520679 - DNA, 15 bp, Homo sapiens
agtggatacattgaa

SEQ ID NO: 520680 - DNA, 15 bp, Homo sapiens
gtggatacattgaac

SEQ ID NO: 520681 - DNA, 15 bp, Homo sapiens
tggatacattgaacc

SEQ ID NO: 520682 - DNA, 15 bp, Homo sapiens
ggatacattgaaccc

SEQ ID NO: 520683 - DNA, 15 bp, Homo sapiens
gatacattgaaccca

SEQ ID NO: 520684 - DNA, 15 bp, Homo sapiens
atacattgaacccag

SEQ ID NO: 520685 - DNA, 15 bp, Homo sapiens
tacattgaacccagg

SEQ ID NO: 520686 - DNA, 15 bp, Homo sapiens
acattgaacccagga

SEQ ID NO: 520687 - DNA, 15 bp, Homo sapiens
cattgaacccaggag

SEQ ID NO: 520688 - DNA, 15 bp, Homo sapiens
attgaacccaggagt

SEQ ID NO: 520689 - DNA, 15 bp, Homo sapiens
ttgaacccaggagtt

SEQ ID NO: 520690 - DNA, 15 bp, Homo sapiens
tgaacccaggagttt

SEQ ID NO: 520691 - DNA, 15 bp, Homo sapiens
gaacccaggagtttg

SEQ ID NO: 520692 - DNA, 15 bp, Homo sapiens
aacccaggagtttga

SEQ ID NO: 520693 - DNA, 15 bp, Homo sapiens
acccaggagtttgag

SEQ ID NO: 520694 - DNA, 15 bp, Homo sapiens
cccaggagtttgagg

SEQ ID NO: 520695 - DNA, 15 bp, Homo sapiens
ccaggagtttgaggc

SEQ ID NO: 520696 - DNA, 15 bp, Homo sapiens
caggagtttgaggct

SEQ ID NO: 520697 - DNA, 15 bp, Homo sapiens
aggagtttgaggctg

SEQ ID NO: 520698 - DNA, 15 bp, Homo sapiens
ggagtttgaggctgt

SEQ ID NO: 520699 - DNA, 15 bp, Homo sapiens
gagtttgaggctgta

SEQ ID NO: 520700 - DNA, 15 bp, Homo sapiens
agtttgaggctgtag

SEQ ID NO: 520701 - DNA, 15 bp, Homo sapiens
gtttgaggctgtagt

SEQ ID NO: 520702 - DNA, 15 bp, Homo sapiens
tttgaggctgtagtg

SEQ ID NO: 520703 - DNA, 15 bp, Homo sapiens
ttgaggctgtagtga

SEQ ID NO: 520704 - DNA, 15 bp, Homo sapiens
tgaggctgtagtgag

SEQ ID NO: 520705 - DNA, 15 bp, Homo sapiens
gaggctgtagtgagc

SEQ ID NO: 520706 - DNA, 15 bp, Homo sapiens
aggctgtagtgagct

SEQ ID NO: 520707 - DNA, 15 bp, Homo sapiens
ggctgtagtgagcta

SEQ ID NO: 520708 - DNA, 15 bp, Homo sapiens
gtgagctatgatcat

SEQ ID NO: 520709 - DNA, 15 bp, Homo sapiens
tgagctatgatcatg

SEQ ID NO: 520710 - DNA, 15 bp, Homo sapiens
gagctatgatcatgc

SEQ ID NO: 520711 - DNA, 15 bp, Homo sapiens
agctatgatcatgcc

SEQ ID NO: 520712 - DNA, 15 bp, Homo sapiens
gctatgatcatgcca

SEQ ID NO: 520713 - DNA, 15 bp, Homo sapiens
ctatgatcatgccac

SEQ ID NO: 520714 - DNA, 15 bp, Homo sapiens
tatgatcatgccact

SEQ ID NO: 520715 - DNA, 15 bp, Homo sapiens
atgatcatgccactg

SEQ ID NO: 520716 - DNA, 15 bp, Homo sapiens
tgatcatgccactgc

SEQ ID NO: 520717 - DNA, 15 bp, Homo sapiens
gccactgcactccaa

SEQ ID NO: 520718 - DNA, 15 bp, Homo sapiens
ccactgcactccaac

SEQ ID NO: 520719 - DNA, 15 bp, Homo sapiens
cactgcactccaacc

SEQ ID NO: 520720 - DNA, 15 bp, Homo sapiens
actgcactccaacct

SEQ ID NO: 520721 - DNA, 15 bp, Homo sapiens
ctgcactccaacctg

SEQ ID NO: 520722 - DNA, 15 bp, Homo sapiens
tgcactccaacctgg

SEQ ID NO: 520723 - DNA, 15 bp, Homo sapiens
gcactccaacctggg

SEQ ID NO: 520724 - DNA, 15 bp, Homo sapiens
cactccaacctgggt

SEQ ID NO: 520725 - DNA, 15 bp, Homo sapiens
actccaacctgggtg

SEQ ID NO: 520726 - DNA, 15 bp, Homo sapiens
ctccaacctgggtga

SEQ ID NO: 520727 - DNA, 15 bp, Homo sapiens
tccaacctgggtgac

SEQ ID NO: 520728 - DNA, 15 bp, Homo sapiens
ccaacctgggtgaca

SEQ ID NO: 520729 - DNA, 15 bp, Homo sapiens
caacctgggtgacag

SEQ ID NO: 520730 - DNA, 15 bp, Homo sapiens
aacctgggtgacaga

SEQ ID NO: 520731 - DNA, 15 bp, Homo sapiens
acctgggtgacagag

SEQ ID NO: 520732 - DNA, 15 bp, Homo sapiens
tgggtgacagagcaa

SEQ ID NO: 520733 - DNA, 15 bp, Homo sapiens
gggtgacagagcaag

SEQ ID NO: 520734 - DNA, 15 bp, Homo sapiens
ggtgacagagcaaga

SEQ ID NO: 520735 - DNA, 15 bp, Homo sapiens
gtgacagagcaagac

SEQ ID NO: 520736 - DNA, 15 bp, Homo sapiens
tgacagagcaagacc

SEQ ID NO: 520737 - DNA, 15 bp, Homo sapiens
gacagagcaagacct

SEQ ID NO: 520738 - DNA, 15 bp, Homo sapiens
acagagcaagacctc

SEQ ID NO: 520739 - DNA, 15 bp, Homo sapiens
cagagcaagacctcc

SEQ ID NO: 520740 - DNA, 15 bp, Homo sapiens
agagcaagacctcca

SEQ ID NO: 520741 - DNA, 15 bp, Homo sapiens
gagcaagacctccaa

SEQ ID NO: 520742 - DNA, 15 bp, Homo sapiens
agcaagacctccaaa

SEQ ID NO: 520743 - DNA, 15 bp, Homo sapiens
gcaagacctccaaaa

SEQ ID NO: 520744 - DNA, 15 bp, Homo sapiens
caagacctccaaaaa

SEQ ID NO: 520745 - DNA, 15 bp, Homo sapiens
aagacctccaaaaaa

SEQ ID NO: 520746 - DNA, 15 bp, Homo sapiens
agacctccaaaaaaa

SEQ ID NO: 520747 - DNA, 15 bp, Homo sapiens
gacctccaaaaaaaa

SEQ ID NO: 520748 - DNA, 15 bp, Homo sapiens
acctccaaaaaaaaa

SEQ ID NO: 520749 - DNA, 15 bp, Homo sapiens
cctccaaaaaaaaaa

SEQ ID NO: 520750 - DNA, 15 bp, Homo sapiens
aaaaaaaagagctgc

SEQ ID NO: 520751 - DNA, 15 bp, Homo sapiens
aaaaaaagagctgct

SEQ ID NO: 520752 - DNA, 15 bp, Homo sapiens
aaaaaagagctgctg

SEQ ID NO: 520753 - DNA, 15 bp, Homo sapiens
aaaaagagctgctga

SEQ ID NO: 520754 - DNA, 15 bp, Homo sapiens
aaaagagctgctgag

SEQ ID NO: 520755 - DNA, 15 bp, Homo sapiens
aaagagctgctgagc

SEQ ID NO: 520756 - DNA, 15 bp, Homo sapiens
aagagctgctgagct

SEQ ID NO: 520757 - DNA, 15 bp, Homo sapiens
agagctgctgagctc

SEQ ID NO: 520758 - DNA, 15 bp, Homo sapiens
gagctgctgagctca

SEQ ID NO: 520759 - DNA, 15 bp, Homo sapiens
agctgctgagctcag

SEQ ID NO: 520760 - DNA, 15 bp, Homo sapiens
gctgctgagctcaga

SEQ ID NO: 520761 - DNA, 15 bp, Homo sapiens
ctgctgagctcagaa

SEQ ID NO: 520762 - DNA, 15 bp, Homo sapiens
tgctgagctcagaat

SEQ ID NO: 520763 - DNA, 15 bp, Homo sapiens
gctgagctcagaatt

SEQ ID NO: 520764 - DNA, 15 bp, Homo sapiens
ctgagctcagaattc

SEQ ID NO: 520765 - DNA, 15 bp, Homo sapiens
tgagctcagaattca

SEQ ID NO: 520766 - DNA, 15 bp, Homo sapiens
gagctcagaattcaa

SEQ ID NO: 520767 - DNA, 15 bp, Homo sapiens
agctcagaattcaaa

SEQ ID NO: 520768 - DNA, 15 bp, Homo sapiens
gctcagaattcaaac

SEQ ID NO: 520769 - DNA, 15 bp, Homo sapiens
ctcagaattcaaact

SEQ ID NO: 520770 - DNA, 15 bp, Homo sapiens
tcagaattcaaactg

SEQ ID NO: 520771 - DNA, 15 bp, Homo sapiens
cagaattcaaactgg

SEQ ID NO: 520772 - DNA, 15 bp, Homo sapiens
agaattcaaactggg

SEQ ID NO: 520773 - DNA, 15 bp, Homo sapiens
gaattcaaactgggc

SEQ ID NO: 520774 - DNA, 15 bp, Homo sapiens
aattcaaactgggct

SEQ ID NO: 520775 - DNA, 15 bp, Homo sapiens
attcaaactgggctc

SEQ ID NO: 520776 - DNA, 15 bp, Homo sapiens
ttcaaactgggctct

SEQ ID NO: 520777 - DNA, 15 bp, Homo sapiens
tcaaactgggctctc

SEQ ID NO: 520778 - DNA, 15 bp, Homo sapiens
caaactgggctctca

SEQ ID NO: 520779 - DNA, 15 bp, Homo sapiens
aaactgggctctcaa

SEQ ID NO: 520780 - DNA, 15 bp, Homo sapiens
aactgggctctcaaa

SEQ ID NO: 520781 - DNA, 15 bp, Homo sapiens
actgggctctcaaat

SEQ ID NO: 520782 - DNA, 15 bp, Homo sapiens
ctgggctctcaaatt

SEQ ID NO: 520783 - DNA, 15 bp, Homo sapiens
tgggctctcaaattg

SEQ ID NO: 520784 - DNA, 15 bp, Homo sapiens
gggctctcaaattgg

SEQ ID NO: 520785 - DNA, 15 bp, Homo sapiens
ggctctcaaattgga

SEQ ID NO: 520786 - DNA, 15 bp, Homo sapiens
gctctcaaattggat

SEQ ID NO: 520787 - DNA, 15 bp, Homo sapiens
ctctcaaattggatt

SEQ ID NO: 520788 - DNA, 15 bp, Homo sapiens
tctcaaattggattt

SEQ ID NO: 520789 - DNA, 15 bp, Homo sapiens
ctcaaattggatttt

SEQ ID NO: 520790 - DNA, 15 bp, Homo sapiens
tcaaattggattttc

SEQ ID NO: 520791 - DNA, 15 bp, Homo sapiens
caaattggattttct

SEQ ID NO: 520792 - DNA, 15 bp, Homo sapiens
aaattggattttctt

SEQ ID NO: 520793 - DNA, 15 bp, Homo sapiens
aattggattttcttt

SEQ ID NO: 520794 - DNA, 15 bp, Homo sapiens
attggattttctttt

SEQ ID NO: 520795 - DNA, 15 bp, Homo sapiens
ttggattttctttta

SEQ ID NO: 520796 - DNA, 15 bp, Homo sapiens
tggattttcttttag

SEQ ID NO: 520797 - DNA, 15 bp, Homo sapiens
ggattttcttttaga

SEQ ID NO: 520798 - DNA, 15 bp, Homo sapiens
gattttcttttagaa

SEQ ID NO: 520799 - DNA, 15 bp, Homo sapiens
attttcttttagaat

SEQ ID NO: 520800 - DNA, 15 bp, Homo sapiens
ttttcttttagaata

SEQ ID NO: 520801 - DNA, 15 bp, Homo sapiens
tttcttttagaatat

SEQ ID NO: 520802 - DNA, 15 bp, Homo sapiens
ttcttttagaatata

SEQ ID NO: 520803 - DNA, 15 bp, Homo sapiens
tcttttagaatatat

SEQ ID NO: 520804 - DNA, 15 bp, Homo sapiens
cttttagaatatatt

SEQ ID NO: 520805 - DNA, 15 bp, Homo sapiens
ttttagaatatattt

SEQ ID NO: 520806 - DNA, 15 bp, Homo sapiens
tttagaatatattta

SEQ ID NO: 520807 - DNA, 15 bp, Homo sapiens
ttagaatatatttat

SEQ ID NO: 520808 - DNA, 15 bp, Homo sapiens
tagaatatatttata

SEQ ID NO: 520809 - DNA, 15 bp, Homo sapiens
agaatatatttataa

SEQ ID NO: 520810 - DNA, 15 bp, Homo sapiens
gaatatatttataat

SEQ ID NO: 520811 - DNA, 15 bp, Homo sapiens
aatatatttataatt

SEQ ID NO: 520812 - DNA, 15 bp, Homo sapiens
atatatttataatta

SEQ ID NO: 520813 - DNA, 15 bp, Homo sapiens
tatatttataattaa

SEQ ID NO: 520814 - DNA, 15 bp, Homo sapiens
atatttataattaaa

SEQ ID NO: 520815 - DNA, 15 bp, Homo sapiens
tatttataattaaaa

SEQ ID NO: 520816 - DNA, 15 bp, Homo sapiens
atttataattaaaaa

SEQ ID NO: 520817 - DNA, 15 bp, Homo sapiens
tttataattaaaaag

SEQ ID NO: 520818 - DNA, 15 bp, Homo sapiens
ttataattaaaaagg

SEQ ID NO: 520819 - DNA, 15 bp, Homo sapiens
tataattaaaaagga

SEQ ID NO: 520820 - DNA, 15 bp, Homo sapiens
ataattaaaaaggat

SEQ ID NO: 520821 - DNA, 15 bp, Homo sapiens
taattaaaaaggata

SEQ ID NO: 520822 - DNA, 15 bp, Homo sapiens
aattaaaaaggatag

SEQ ID NO: 520823 - DNA, 15 bp, Homo sapiens
attaaaaaggatagc

SEQ ID NO: 520824 - DNA, 15 bp, Homo sapiens
ttaaaaaggatagcc

SEQ ID NO: 520825 - DNA, 15 bp, Homo sapiens
taaaaaggatagcca

SEQ ID NO: 520826 - DNA, 15 bp, Homo sapiens
aaaaaggatagccat

SEQ ID NO: 520827 - DNA, 15 bp, Homo sapiens
aaaaggatagccatc

SEQ ID NO: 520828 - DNA, 15 bp, Homo sapiens
aaaggatagccatct

SEQ ID NO: 520829 - DNA, 15 bp, Homo sapiens
aaggatagccatctt

SEQ ID NO: 520830 - DNA, 15 bp, Homo sapiens
aggatagccatcttt

SEQ ID NO: 520831 - DNA, 15 bp, Homo sapiens
ggatagccatctttt

SEQ ID NO: 520832 - DNA, 15 bp, Homo sapiens
gatagccatcttttg

SEQ ID NO: 520833 - DNA, 15 bp, Homo sapiens
atagccatcttttga

SEQ ID NO: 520834 - DNA, 15 bp, Homo sapiens
tagccatcttttgag

SEQ ID NO: 520835 - DNA, 15 bp, Homo sapiens
agccatcttttgagc

SEQ ID NO: 520836 - DNA, 15 bp, Homo sapiens
gccatcttttgagct

SEQ ID NO: 520837 - DNA, 15 bp, Homo sapiens
ccatcttttgagctc

SEQ ID NO: 520838 - DNA, 15 bp, Homo sapiens
catcttttgagctcc

SEQ ID NO: 520839 - DNA, 15 bp, Homo sapiens
atcttttgagctccc

SEQ ID NO: 520840 - DNA, 15 bp, Homo sapiens
tcttttgagctccca

SEQ ID NO: 520841 - DNA, 15 bp, Homo sapiens
cttttgagctcccag

SEQ ID NO: 520842 - DNA, 15 bp, Homo sapiens
ttttgagctcccagg

SEQ ID NO: 520843 - DNA, 15 bp, Homo sapiens
tttgagctcccaggc

SEQ ID NO: 520844 - DNA, 15 bp, Homo sapiens
ttgagctcccaggca

SEQ ID NO: 520845 - DNA, 15 bp, Homo sapiens
tgagctcccaggcac

SEQ ID NO: 520846 - DNA, 15 bp, Homo sapiens
gagctcccaggcacc

SEQ ID NO: 520847 - DNA, 15 bp, Homo sapiens
agctcccaggcacca

SEQ ID NO: 520848 - DNA, 15 bp, Homo sapiens
gctcccaggcaccac

SEQ ID NO: 520849 - DNA, 15 bp, Homo sapiens
ctcccaggcaccacc

SEQ ID NO: 520850 - DNA, 15 bp, Homo sapiens
tcccaggcaccacca

SEQ ID NO: 520851 - DNA, 15 bp, Homo sapiens
cccaggcaccaccat

SEQ ID NO: 520852 - DNA, 15 bp, Homo sapiens
ccaggcaccaccatc

SEQ ID NO: 520853 - DNA, 15 bp, Homo sapiens
caggcaccaccatct

SEQ ID NO: 520854 - DNA, 15 bp, Homo sapiens
aggcaccaccatcta

SEQ ID NO: 520855 - DNA, 15 bp, Homo sapiens
ggcaccaccatctat

SEQ ID NO: 520856 - DNA, 15 bp, Homo sapiens
gcaccaccatctatt

SEQ ID NO: 520857 - DNA, 15 bp, Homo sapiens
caccaccatctattt

SEQ ID NO: 520858 - DNA, 15 bp, Homo sapiens
accaccatctattta

SEQ ID NO: 520859 - DNA, 15 bp, Homo sapiens
ccaccatctatttat

SEQ ID NO: 520860 - DNA, 15 bp, Homo sapiens
caccatctatttatc

SEQ ID NO: 520861 - DNA, 15 bp, Homo sapiens
accatctatttatca

SEQ ID NO: 520862 - DNA, 15 bp, Homo sapiens
ccatctatttatcat

SEQ ID NO: 520863 - DNA, 15 bp, Homo sapiens
catctatttatcata

SEQ ID NO: 520864 - DNA, 15 bp, Homo sapiens
atctatttatcataa

SEQ ID NO: 520865 - DNA, 15 bp, Homo sapiens
tctatttatcataac

SEQ ID NO: 520866 - DNA, 15 bp, Homo sapiens
ctatttatcataaca

SEQ ID NO: 520867 - DNA, 15 bp, Homo sapiens
tatttatcataacac

SEQ ID NO: 520868 - DNA, 15 bp, Homo sapiens
atttatcataacact

SEQ ID NO: 520869 - DNA, 15 bp, Homo sapiens
tttatcataacactt

SEQ ID NO: 520870 - DNA, 15 bp, Homo sapiens
ttatcataacactta

SEQ ID NO: 520871 - DNA, 15 bp, Homo sapiens
tatcataacacttac

SEQ ID NO: 520872 - DNA, 15 bp, Homo sapiens
atcataacacttact

SEQ ID NO: 520873 - DNA, 15 bp, Homo sapiens
tcataacacttactg

SEQ ID NO: 520874 - DNA, 15 bp, Homo sapiens
cataacacttactgt

SEQ ID NO: 520875 - DNA, 15 bp, Homo sapiens
ataacacttactgtt

SEQ ID NO: 520876 - DNA, 15 bp, Homo sapiens
taacacttactgttt

SEQ ID NO: 520877 - DNA, 15 bp, Homo sapiens
aacacttactgtttt

SEQ ID NO: 520878 - DNA, 15 bp, Homo sapiens
acacttactgttttc

SEQ ID NO: 520879 - DNA, 15 bp, Homo sapiens
cacttactgttttcc

SEQ ID NO: 520880 - DNA, 15 bp, Homo sapiens
acttactgttttccc

SEQ ID NO: 520881 - DNA, 15 bp, Homo sapiens
cttactgttttcccc

SEQ ID NO: 520882 - DNA, 15 bp, Homo sapiens
ttactgttttccccc

SEQ ID NO: 520883 - DNA, 15 bp, Homo sapiens
tactgttttcccccc

SEQ ID NO: 520884 - DNA, 15 bp, Homo sapiens
actgttttcccccct

SEQ ID NO: 520885 - DNA, 15 bp, Homo sapiens
ctgttttcccccctt

SEQ ID NO: 520886 - DNA, 15 bp, Homo sapiens
tgttttcccccctta

SEQ ID NO: 520887 - DNA, 15 bp, Homo sapiens
gttttccccccttat

SEQ ID NO: 520888 - DNA, 15 bp, Homo sapiens
ttttccccccttatg

SEQ ID NO: 520889 - DNA, 15 bp, Homo sapiens
tttccccccttatga

SEQ ID NO: 520890 - DNA, 15 bp, Homo sapiens
ttccccccttatgat

SEQ ID NO: 520891 - DNA, 15 bp, Homo sapiens
tccccccttatgatc

SEQ ID NO: 520892 - DNA, 15 bp, Homo sapiens
ccccccttatgatca

SEQ ID NO: 520893 - DNA, 15 bp, Homo sapiens
cccccttatgatcat

SEQ ID NO: 520894 - DNA, 15 bp, Homo sapiens
ccccttatgatcata

SEQ ID NO: 520895 - DNA, 15 bp, Homo sapiens
cccttatgatcataa

SEQ ID NO: 520896 - DNA, 15 bp, Homo sapiens
ccttatgatcataaa

SEQ ID NO: 520897 - DNA, 15 bp, Homo sapiens
cttatgatcataaat

SEQ ID NO: 520898 - DNA, 15 bp, Homo sapiens
ttatgatcataaatt

SEQ ID NO: 520899 - DNA, 15 bp, Homo sapiens
tatgatcataaattc

SEQ ID NO: 520900 - DNA, 15 bp, Homo sapiens
atgatcataaattcc

SEQ ID NO: 520901 - DNA, 15 bp, Homo sapiens
tgatcataaattcct

SEQ ID NO: 520902 - DNA, 15 bp, Homo sapiens
gatcataaattccta

SEQ ID NO: 520903 - DNA, 15 bp, Homo sapiens
atcataaattcctag

SEQ ID NO: 520904 - DNA, 15 bp, Homo sapiens
tcataaattcctaga

SEQ ID NO: 520905 - DNA, 15 bp, Homo sapiens
cataaattcctagac

SEQ ID NO: 520906 - DNA, 15 bp, Homo sapiens
ataaattcctagaca

SEQ ID NO: 520907 - DNA, 15 bp, Homo sapiens
taaattcctagacaa

SEQ ID NO: 520908 - DNA, 15 bp, Homo sapiens
aaattcctagacaac

SEQ ID NO: 520909 - DNA, 15 bp, Homo sapiens
aattcctagacaaca

SEQ ID NO: 520910 - DNA, 15 bp, Homo sapiens
attcctagacaacag

SEQ ID NO: 520911 - DNA, 15 bp, Homo sapiens
ttcctagacaacagg

SEQ ID NO: 520912 - DNA, 15 bp, Homo sapiens
tcctagacaacaggc

SEQ ID NO: 520913 - DNA, 15 bp, Homo sapiens
cctagacaacaggca

SEQ ID NO: 520914 - DNA, 15 bp, Homo sapiens
ctagacaacaggcat

SEQ ID NO: 520915 - DNA, 15 bp, Homo sapiens
tagacaacaggcatt

SEQ ID NO: 520916 - DNA, 15 bp, Homo sapiens
agacaacaggcattg

SEQ ID NO: 520917 - DNA, 15 bp, Homo sapiens
gacaacaggcattgt

SEQ ID NO: 520918 - DNA, 15 bp, Homo sapiens
acaacaggcattgta

SEQ ID NO: 520919 - DNA, 15 bp, Homo sapiens
caacaggcattgtaa

SEQ ID NO: 520920 - DNA, 15 bp, Homo sapiens
aacaggcattgtaaa

SEQ ID NO: 520921 - DNA, 15 bp, Homo sapiens
acaggcattgtaaaa

SEQ ID NO: 520922 - DNA, 15 bp, Homo sapiens
caggcattgtaaaaa

SEQ ID NO: 520923 - DNA, 15 bp, Homo sapiens
aggcattgtaaaaat

SEQ ID NO: 520924 - DNA, 15 bp, Homo sapiens
ggcattgtaaaaata

SEQ ID NO: 520925 - DNA, 15 bp, Homo sapiens
gcattgtaaaaatag

SEQ ID NO: 520926 - DNA, 15 bp, Homo sapiens
cattgtaaaaatagt

SEQ ID NO: 520927 - DNA, 15 bp, Homo sapiens
attgtaaaaatagtt

SEQ ID NO: 520928 - DNA, 15 bp, Homo sapiens
ttgtaaaaatagtta

SEQ ID NO: 520929 - DNA, 15 bp, Homo sapiens
tgtaaaaatagttat

SEQ ID NO: 520930 - DNA, 15 bp, Homo sapiens
gtaaaaatagttata

SEQ ID NO: 520931 - DNA, 15 bp, Homo sapiens
taaaaatagttatag

SEQ ID NO: 520932 - DNA, 15 bp, Homo sapiens
aaaaatagttatagt

SEQ ID NO: 520933 - DNA, 15 bp, Homo sapiens
aaaatagttatagta

SEQ ID NO: 520934 - DNA, 15 bp, Homo sapiens
aaatagttatagtag

SEQ ID NO: 520935 - DNA, 15 bp, Homo sapiens
aatagttatagtagt

SEQ ID NO: 520936 - DNA, 15 bp, Homo sapiens
atagttatagtagtt

SEQ ID NO: 520937 - DNA, 15 bp, Homo sapiens
tagttatagtagttg

SEQ ID NO: 520938 - DNA, 15 bp, Homo sapiens
agttatagtagttga

SEQ ID NO: 520939 - DNA, 15 bp, Homo sapiens
gttatagtagttgat

SEQ ID NO: 520940 - DNA, 15 bp, Homo sapiens
ttatagtagttgata

SEQ ID NO: 520941 - DNA, 15 bp, Homo sapiens
tatagtagttgatat

SEQ ID NO: 520942 - DNA, 15 bp, Homo sapiens
atagtagttgatatt

SEQ ID NO: 520943 - DNA, 15 bp, Homo sapiens
tagtagttgatattt

SEQ ID NO: 520944 - DNA, 15 bp, Homo sapiens
agtagttgatattta

SEQ ID NO: 520945 - DNA, 15 bp, Homo sapiens
gtagttgatatttag

SEQ ID NO: 520946 - DNA, 15 bp, Homo sapiens
tagttgatatttagg

SEQ ID NO: 520947 - DNA, 15 bp, Homo sapiens
agttgatatttagga

SEQ ID NO: 520948 - DNA, 15 bp, Homo sapiens
gttgatatttaggag

SEQ ID NO: 520949 - DNA, 15 bp, Homo sapiens
ttgatatttaggagc

SEQ ID NO: 520950 - DNA, 15 bp, Homo sapiens
tgatatttaggagca

SEQ ID NO: 520951 - DNA, 15 bp, Homo sapiens
gatatttaggagcac

SEQ ID NO: 520952 - DNA, 15 bp, Homo sapiens
atatttaggagcact

SEQ ID NO: 520953 - DNA, 15 bp, Homo sapiens
tatttaggagcactt

SEQ ID NO: 520954 - DNA, 15 bp, Homo sapiens
atttaggagcactta

SEQ ID NO: 520955 - DNA, 15 bp, Homo sapiens
tttaggagcacttaa

SEQ ID NO: 520956 - DNA, 15 bp, Homo sapiens
ttaggagcacttaac

SEQ ID NO: 520957 - DNA, 15 bp, Homo sapiens
taggagcacttaact

SEQ ID NO: 520958 - DNA, 15 bp, Homo sapiens
aggagcacttaacta

SEQ ID NO: 520959 - DNA, 15 bp, Homo sapiens
ggagcacttaactat

SEQ ID NO: 520960 - DNA, 15 bp, Homo sapiens
gagcacttaactata

SEQ ID NO: 520961 - DNA, 15 bp, Homo sapiens
agcacttaactatat

SEQ ID NO: 520962 - DNA, 15 bp, Homo sapiens
gcacttaactatatt

SEQ ID NO: 520963 - DNA, 15 bp, Homo sapiens
cacttaactatattc

SEQ ID NO: 520964 - DNA, 15 bp, Homo sapiens
acttaactatattcc

SEQ ID NO: 520965 - DNA, 15 bp, Homo sapiens
cttaactatattcca

SEQ ID NO: 520966 - DNA, 15 bp, Homo sapiens
ttaactatattccag

SEQ ID NO: 520967 - DNA, 15 bp, Homo sapiens
taactatattccagg

SEQ ID NO: 520968 - DNA, 15 bp, Homo sapiens
aactatattccaggc

SEQ ID NO: 520969 - DNA, 15 bp, Homo sapiens
actatattccaggca

SEQ ID NO: 520970 - DNA, 15 bp, Homo sapiens
ctatattccaggcac

SEQ ID NO: 520971 - DNA, 15 bp, Homo sapiens
tatattccaggcact

SEQ ID NO: 520972 - DNA, 15 bp, Homo sapiens
atattccaggcacta

SEQ ID NO: 520973 - DNA, 15 bp, Homo sapiens
tattccaggcactat

SEQ ID NO: 520974 - DNA, 15 bp, Homo sapiens
attccaggcactatt

SEQ ID NO: 520975 - DNA, 15 bp, Homo sapiens
ttccaggcactattg

SEQ ID NO: 520976 - DNA, 15 bp, Homo sapiens
tccaggcactattgt

SEQ ID NO: 520977 - DNA, 15 bp, Homo sapiens
ccaggcactattgtg

SEQ ID NO: 520978 - DNA, 15 bp, Homo sapiens
caggcactattgtgc

SEQ ID NO: 520979 - DNA, 15 bp, Homo sapiens
aggcactattgtgct

SEQ ID NO: 520980 - DNA, 15 bp, Homo sapiens
ggcactattgtgctt

SEQ ID NO: 520981 - DNA, 15 bp, Homo sapiens
gcactattgtgcttt

SEQ ID NO: 520982 - DNA, 15 bp, Homo sapiens
cactattgtgctttt

SEQ ID NO: 520983 - DNA, 15 bp, Homo sapiens
actattgtgcttttc

SEQ ID NO: 520984 - DNA, 15 bp, Homo sapiens
ctattgtgcttttct

SEQ ID NO: 520985 - DNA, 15 bp, Homo sapiens
tattgtgcttttctt

SEQ ID NO: 520986 - DNA, 15 bp, Homo sapiens
attgtgcttttcttg

SEQ ID NO: 520987 - DNA, 15 bp, Homo sapiens
ttgtgcttttcttgt

SEQ ID NO: 520988 - DNA, 15 bp, Homo sapiens
tgtgcttttcttgta

SEQ ID NO: 520989 - DNA, 15 bp, Homo sapiens
gtgcttttcttgtat

SEQ ID NO: 520990 - DNA, 15 bp, Homo sapiens
tgcttttcttgtata

SEQ ID NO: 520991 - DNA, 15 bp, Homo sapiens
gcttttcttgtataa

SEQ ID NO: 520992 - DNA, 15 bp, Homo sapiens
cttttcttgtataac

SEQ ID NO: 520993 - DNA, 15 bp, Homo sapiens
ttttcttgtataact

SEQ ID NO: 520994 - DNA, 15 bp, Homo sapiens
tttcttgtataactc

SEQ ID NO: 520995 - DNA, 15 bp, Homo sapiens
ttcttgtataactca

SEQ ID NO: 520996 - DNA, 15 bp, Homo sapiens
tcttgtataactcat

SEQ ID NO: 520997 - DNA, 15 bp, Homo sapiens
cttgtataactcatt

SEQ ID NO: 520998 - DNA, 15 bp, Homo sapiens
ttgtataactcatta

SEQ ID NO: 520999 - DNA, 15 bp, Homo sapiens
tgtataactcattag

SEQ ID NO: 521000 - DNA, 15 bp, Homo sapiens
gtataactcattaga

SEQ ID NO: 521001 - DNA, 15 bp, Homo sapiens
tataactcattagat

SEQ ID NO: 521002 - DNA, 15 bp, Homo sapiens
ataactcattagatg

SEQ ID NO: 521003 - DNA, 15 bp, Homo sapiens
taactcattagatgc

SEQ ID NO: 521004 - DNA, 15 bp, Homo sapiens
aactcattagatgct

SEQ ID NO: 521005 - DNA, 15 bp, Homo sapiens
actcattagatgctt

SEQ ID NO: 521006 - DNA, 15 bp, Homo sapiens
ctcattagatgcttg

SEQ ID NO: 521007 - DNA, 15 bp, Homo sapiens
tcattagatgcttgt

SEQ ID NO: 521008 - DNA, 15 bp, Homo sapiens
cattagatgcttgtc

SEQ ID NO: 521009 - DNA, 15 bp, Homo sapiens
attagatgcttgtca

SEQ ID NO: 521010 - DNA, 15 bp, Homo sapiens
ttagatgcttgtcag

SEQ ID NO: 521011 - DNA, 15 bp, Homo sapiens
tagatgcttgtcaga

SEQ ID NO: 521012 - DNA, 15 bp, Homo sapiens
agatgcttgtcagac

SEQ ID NO: 521013 - DNA, 15 bp, Homo sapiens
gatgcttgtcagacc

SEQ ID NO: 521014 - DNA, 15 bp, Homo sapiens
atgcttgtcagacct

SEQ ID NO: 521015 - DNA, 15 bp, Homo sapiens
tgcttgtcagacctc

SEQ ID NO: 521016 - DNA, 15 bp, Homo sapiens
gcttgtcagacctct

SEQ ID NO: 521017 - DNA, 15 bp, Homo sapiens
cttgtcagacctctg

SEQ ID NO: 521018 - DNA, 15 bp, Homo sapiens
ttgtcagacctctga

SEQ ID NO: 521019 - DNA, 15 bp, Homo sapiens
tgtcagacctctgag

SEQ ID NO: 521020 - DNA, 15 bp, Homo sapiens
gtcagacctctgaga

SEQ ID NO: 521021 - DNA, 15 bp, Homo sapiens
tcagacctctgagat

SEQ ID NO: 521022 - DNA, 15 bp, Homo sapiens
cagacctctgagatt

SEQ ID NO: 521023 - DNA, 15 bp, Homo sapiens
agacctctgagattg

SEQ ID NO: 521024 - DNA, 15 bp, Homo sapiens
gacctctgagattgt

SEQ ID NO: 521025 - DNA, 15 bp, Homo sapiens
acctctgagattgtt

SEQ ID NO: 521026 - DNA, 15 bp, Homo sapiens
cctctgagattgttc

SEQ ID NO: 521027 - DNA, 15 bp, Homo sapiens
ctctgagattgttcc

SEQ ID NO: 521028 - DNA, 15 bp, Homo sapiens
tctgagattgttcct

SEQ ID NO: 521029 - DNA, 15 bp, Homo sapiens
ctgagattgttccta

SEQ ID NO: 521030 - DNA, 15 bp, Homo sapiens
tgagattgttcctat

SEQ ID NO: 521031 - DNA, 15 bp, Homo sapiens
gagattgttcctatt

SEQ ID NO: 521032 - DNA, 15 bp, Homo sapiens
agattgttcctatta

SEQ ID NO: 521033 - DNA, 15 bp, Homo sapiens
gattgttcctattat

SEQ ID NO: 521034 - DNA, 15 bp, Homo sapiens
attgttcctattata

SEQ ID NO: 521035 - DNA, 15 bp, Homo sapiens
ttgttcctattatac

SEQ ID NO: 521036 - DNA, 15 bp, Homo sapiens
tgttcctattatact

SEQ ID NO: 521037 - DNA, 15 bp, Homo sapiens
gttcctattatactt

SEQ ID NO: 521038 - DNA, 15 bp, Homo sapiens
ttcctattatactta

SEQ ID NO: 521039 - DNA, 15 bp, Homo sapiens
tcctattatacttat

SEQ ID NO: 521040 - DNA, 15 bp, Homo sapiens
cctattatacttatt

SEQ ID NO: 521041 - DNA, 15 bp, Homo sapiens
ctattatacttattt

SEQ ID NO: 521042 - DNA, 15 bp, Homo sapiens
tattatacttatttt

SEQ ID NO: 521043 - DNA, 15 bp, Homo sapiens
attatacttatttta

SEQ ID NO: 521044 - DNA, 15 bp, Homo sapiens
ttatacttattttac

SEQ ID NO: 521045 - DNA, 15 bp, Homo sapiens
tatacttattttaca

SEQ ID NO: 521046 - DNA, 15 bp, Homo sapiens
atacttattttacag

SEQ ID NO: 521047 - DNA, 15 bp, Homo sapiens
tacttattttacaga

SEQ ID NO: 521048 - DNA, 15 bp, Homo sapiens
acttattttacagat

SEQ ID NO: 521049 - DNA, 15 bp, Homo sapiens
cttattttacagatg

SEQ ID NO: 521050 - DNA, 15 bp, Homo sapiens
ttattttacagatga

SEQ ID NO: 521051 - DNA, 15 bp, Homo sapiens
tattttacagatgag

SEQ ID NO: 521052 - DNA, 15 bp, Homo sapiens
attttacagatgaga

SEQ ID NO: 521053 - DNA, 15 bp, Homo sapiens
ttttacagatgagaa

SEQ ID NO: 521054 - DNA, 15 bp, Homo sapiens
tttacagatgagaaa

SEQ ID NO: 521055 - DNA, 15 bp, Homo sapiens
ttacagatgagaaaa

SEQ ID NO: 521056 - DNA, 15 bp, Homo sapiens
tacagatgagaaaat

SEQ ID NO: 521057 - DNA, 15 bp, Homo sapiens
acagatgagaaaatt

SEQ ID NO: 521058 - DNA, 15 bp, Homo sapiens
cagatgagaaaatta

SEQ ID NO: 521059 - DNA, 15 bp, Homo sapiens
agatgagaaaattaa

SEQ ID NO: 521060 - DNA, 15 bp, Homo sapiens
gatgagaaaattaag

SEQ ID NO: 521061 - DNA, 15 bp, Homo sapiens
atgagaaaattaagg

SEQ ID NO: 521062 - DNA, 15 bp, Homo sapiens
tgagaaaattaaggc

SEQ ID NO: 521063 - DNA, 15 bp, Homo sapiens
gagaaaattaaggca

SEQ ID NO: 521064 - DNA, 15 bp, Homo sapiens
agaaaattaaggcac

SEQ ID NO: 521065 - DNA, 15 bp, Homo sapiens
gaaaattaaggcaca

SEQ ID NO: 521066 - DNA, 15 bp, Homo sapiens
aaaattaaggcacag

SEQ ID NO: 521067 - DNA, 15 bp, Homo sapiens
aaattaaggcacaga

SEQ ID NO: 521068 - DNA, 15 bp, Homo sapiens
aattaaggcacagag

SEQ ID NO: 521069 - DNA, 15 bp, Homo sapiens
attaaggcacagaga

SEQ ID NO: 521070 - DNA, 15 bp, Homo sapiens
ttaaggcacagagaa

SEQ ID NO: 521071 - DNA, 15 bp, Homo sapiens
taaggcacagagaag

SEQ ID NO: 521072 - DNA, 15 bp, Homo sapiens
aaggcacagagaagt

SEQ ID NO: 521073 - DNA, 15 bp, Homo sapiens
aggcacagagaagtt

SEQ ID NO: 521074 - DNA, 15 bp, Homo sapiens
ggcacagagaagtta

SEQ ID NO: 521075 - DNA, 15 bp, Homo sapiens
gcacagagaagttat

SEQ ID NO: 521076 - DNA, 15 bp, Homo sapiens
cacagagaagttatg

SEQ ID NO: 521077 - DNA, 15 bp, Homo sapiens
acagagaagttatga

SEQ ID NO: 521078 - DNA, 15 bp, Homo sapiens
cagagaagttatgaa

SEQ ID NO: 521079 - DNA, 15 bp, Homo sapiens
agagaagttatgaaa

SEQ ID NO: 521080 - DNA, 15 bp, Homo sapiens
gagaagttatgaaat

SEQ ID NO: 521081 - DNA, 15 bp, Homo sapiens
agaagttatgaaatt

SEQ ID NO: 521082 - DNA, 15 bp, Homo sapiens
gaagttatgaaattt

SEQ ID NO: 521083 - DNA, 15 bp, Homo sapiens
aagttatgaaatttt

SEQ ID NO: 521084 - DNA, 15 bp, Homo sapiens
agttatgaaattttt

SEQ ID NO: 521085 - DNA, 15 bp, Homo sapiens
gttatgaaatttttc

SEQ ID NO: 521086 - DNA, 15 bp, Homo sapiens
ttatgaaatttttcc

SEQ ID NO: 521087 - DNA, 15 bp, Homo sapiens
tatgaaatttttcca

SEQ ID NO: 521088 - DNA, 15 bp, Homo sapiens
atgaaatttttccaa

SEQ ID NO: 521089 - DNA, 15 bp, Homo sapiens
tgaaatttttccaag

SEQ ID NO: 521090 - DNA, 15 bp, Homo sapiens
gaaatttttccaagg

SEQ ID NO: 521091 - DNA, 15 bp, Homo sapiens
aaatttttccaaggt

SEQ ID NO: 521092 - DNA, 15 bp, Homo sapiens
aatttttccaaggta

SEQ ID NO: 521093 - DNA, 15 bp, Homo sapiens
atttttccaaggtat

SEQ ID NO: 521094 - DNA, 15 bp, Homo sapiens
tttttccaaggtatt

SEQ ID NO: 521095 - DNA, 15 bp, Homo sapiens
ttttccaaggtatta

SEQ ID NO: 521096 - DNA, 15 bp, Homo sapiens
tttccaaggtattaa

SEQ ID NO: 521097 - DNA, 15 bp, Homo sapiens
ttccaaggtattaaa

SEQ ID NO: 521098 - DNA, 15 bp, Homo sapiens
tccaaggtattaaac

SEQ ID NO: 521099 - DNA, 15 bp, Homo sapiens
ccaaggtattaaacc

SEQ ID NO: 521100 - DNA, 15 bp, Homo sapiens
caaggtattaaacct

SEQ ID NO: 521101 - DNA, 15 bp, Homo sapiens
aaggtattaaaccta

SEQ ID NO: 521102 - DNA, 15 bp, Homo sapiens
aggtattaaacctag

SEQ ID NO: 521103 - DNA, 15 bp, Homo sapiens
ggtattaaacctagt

SEQ ID NO: 521104 - DNA, 15 bp, Homo sapiens
gtattaaacctagta

SEQ ID NO: 521105 - DNA, 15 bp, Homo sapiens
tattaaacctagtaa

SEQ ID NO: 521106 - DNA, 15 bp, Homo sapiens
attaaacctagtaag

SEQ ID NO: 521107 - DNA, 15 bp, Homo sapiens
ttaaacctagtaagt

SEQ ID NO: 521108 - DNA, 15 bp, Homo sapiens
taaacctagtaagtg

SEQ ID NO: 521109 - DNA, 15 bp, Homo sapiens
aaacctagtaagtgg

SEQ ID NO: 521110 - DNA, 15 bp, Homo sapiens
aacctagtaagtggc

SEQ ID NO: 521111 - DNA, 15 bp, Homo sapiens
acctagtaagtggct

SEQ ID NO: 521112 - DNA, 15 bp, Homo sapiens
cctagtaagtggctg

SEQ ID NO: 521113 - DNA, 15 bp, Homo sapiens
ctagtaagtggctga

SEQ ID NO: 521114 - DNA, 15 bp, Homo sapiens
tagtaagtggctgag

SEQ ID NO: 521115 - DNA, 15 bp, Homo sapiens
agtaagtggctgagc

SEQ ID NO: 521116 - DNA, 15 bp, Homo sapiens
gtaagtggctgagcc

SEQ ID NO: 521117 - DNA, 15 bp, Homo sapiens
taagtggctgagcca

SEQ ID NO: 521118 - DNA, 15 bp, Homo sapiens
aagtggctgagccat

SEQ ID NO: 521119 - DNA, 15 bp, Homo sapiens
agtggctgagccatg

SEQ ID NO: 521120 - DNA, 15 bp, Homo sapiens
gtggctgagccatga

SEQ ID NO: 521121 - DNA, 15 bp, Homo sapiens
tggctgagccatgat

SEQ ID NO: 521122 - DNA, 15 bp, Homo sapiens
ggctgagccatgatt

SEQ ID NO: 521123 - DNA, 15 bp, Homo sapiens
gctgagccatgattc

SEQ ID NO: 521124 - DNA, 15 bp, Homo sapiens
ctgagccatgattca

SEQ ID NO: 521125 - DNA, 15 bp, Homo sapiens
tgagccatgattcaa

SEQ ID NO: 521126 - DNA, 15 bp, Homo sapiens
gagccatgattcaaa

SEQ ID NO: 521127 - DNA, 15 bp, Homo sapiens
agccatgattcaaac

SEQ ID NO: 521128 - DNA, 15 bp, Homo sapiens
gccatgattcaaacc

SEQ ID NO: 521129 - DNA, 15 bp, Homo sapiens
ccatgattcaaacct

SEQ ID NO: 521130 - DNA, 15 bp, Homo sapiens
catgattcaaaccta

SEQ ID NO: 521131 - DNA, 15 bp, Homo sapiens
atgattcaaacctag

SEQ ID NO: 521132 - DNA, 15 bp, Homo sapiens
tgattcaaacctagg

SEQ ID NO: 521133 - DNA, 15 bp, Homo sapiens
gattcaaacctagga

SEQ ID NO: 521134 - DNA, 15 bp, Homo sapiens
attcaaacctaggaa

SEQ ID NO: 521135 - DNA, 15 bp, Homo sapiens
ttcaaacctaggaag

SEQ ID NO: 521136 - DNA, 15 bp, Homo sapiens
tcaaacctaggaagt

SEQ ID NO: 521137 - DNA, 15 bp, Homo sapiens
caaacctaggaagtt

SEQ ID NO: 521138 - DNA, 15 bp, Homo sapiens
aaacctaggaagtta

SEQ ID NO: 521139 - DNA, 15 bp, Homo sapiens
aacctaggaagttag

SEQ ID NO: 521140 - DNA, 15 bp, Homo sapiens
acctaggaagttaga

SEQ ID NO: 521141 - DNA, 15 bp, Homo sapiens
cctaggaagttagat

SEQ ID NO: 521142 - DNA, 15 bp, Homo sapiens
ctaggaagttagatg

SEQ ID NO: 521143 - DNA, 15 bp, Homo sapiens
taggaagttagatgt

SEQ ID NO: 521144 - DNA, 15 bp, Homo sapiens
aggaagttagatgtc

SEQ ID NO: 521145 - DNA, 15 bp, Homo sapiens
ggaagttagatgtca

SEQ ID NO: 521146 - DNA, 15 bp, Homo sapiens
gaagttagatgtcag

SEQ ID NO: 521147 - DNA, 15 bp, Homo sapiens
aagttagatgtcaga

SEQ ID NO: 521148 - DNA, 15 bp, Homo sapiens
agttagatgtcagag

SEQ ID NO: 521149 - DNA, 15 bp, Homo sapiens
gttagatgtcagagc

SEQ ID NO: 521150 - DNA, 15 bp, Homo sapiens
ttagatgtcagagcc

SEQ ID NO: 521151 - DNA, 15 bp, Homo sapiens
tagatgtcagagcct

SEQ ID NO: 521152 - DNA, 15 bp, Homo sapiens
agatgtcagagcctg

SEQ ID NO: 521153 - DNA, 15 bp, Homo sapiens
gatgtcagagcctgt

SEQ ID NO: 521154 - DNA, 15 bp, Homo sapiens
atgtcagagcctgtg

SEQ ID NO: 521155 - DNA, 15 bp, Homo sapiens
tgtcagagcctgtgc

SEQ ID NO: 521156 - DNA, 15 bp, Homo sapiens
gtcagagcctgtgct

SEQ ID NO: 521157 - DNA, 15 bp, Homo sapiens
tcagagcctgtgctt

SEQ ID NO: 521158 - DNA, 15 bp, Homo sapiens
cagagcctgtgcttt

SEQ ID NO: 521159 - DNA, 15 bp, Homo sapiens
agagcctgtgctttt

SEQ ID NO: 521160 - DNA, 15 bp, Homo sapiens
gagcctgtgcttttt

SEQ ID NO: 521161 - DNA, 15 bp, Homo sapiens
agcctgtgctttttt

SEQ ID NO: 521162 - DNA, 15 bp, Homo sapiens
gcctgtgcttttttt

SEQ ID NO: 521163 - DNA, 15 bp, Homo sapiens
cctgtgctttttttt

SEQ ID NO: 521164 - DNA, 15 bp, Homo sapiens
ctgtgcttttttttt

SEQ ID NO: 521165 - DNA, 15 bp, Homo sapiens
tgtgctttttttttg

SEQ ID NO: 521166 - DNA, 15 bp, Homo sapiens
gtgctttttttttgt

SEQ ID NO: 521167 - DNA, 15 bp, Homo sapiens
tgctttttttttgtt

SEQ ID NO: 521168 - DNA, 15 bp, Homo sapiens
gctttttttttgttt

SEQ ID NO: 521169 - DNA, 15 bp, Homo sapiens
ctttttttttgtttt

SEQ ID NO: 521170 - DNA, 15 bp, Homo sapiens
tttttttttgttttt

SEQ ID NO: 521171 - DNA, 15 bp, Homo sapiens
ttttttttgtttttg

SEQ ID NO: 521172 - DNA, 15 bp, Homo sapiens
tttttttgtttttgt

SEQ ID NO: 521173 - DNA, 15 bp, Homo sapiens
ttttttgtttttgtt

SEQ ID NO: 521174 - DNA, 15 bp, Homo sapiens
tttttgtttttgttt

SEQ ID NO: 521175 - DNA, 15 bp, Homo sapiens
ttttgtttttgtttt

SEQ ID NO: 521176 - DNA, 15 bp, Homo sapiens
tttgtttttgttttt

SEQ ID NO: 521177 - DNA, 15 bp, Homo sapiens
ttgtttttgtttttg

SEQ ID NO: 521178 - DNA, 15 bp, Homo sapiens
tgtttttgtttttgt

SEQ ID NO: 521179 - DNA, 15 bp, Homo sapiens
gtttttgtttttgtt

SEQ ID NO: 521180 - DNA, 15 bp, Homo sapiens
tttgtttttgttttc

SEQ ID NO: 521181 - DNA, 15 bp, Homo sapiens
ttgtttttgttttca

SEQ ID NO: 521182 - DNA, 15 bp, Homo sapiens
tgtttttgttttcag

SEQ ID NO: 521183 - DNA, 15 bp, Homo sapiens
gtttttgttttcagt

SEQ ID NO: 521184 - DNA, 15 bp, Homo sapiens
tttttgttttcagta

SEQ ID NO: 521185 - DNA, 15 bp, Homo sapiens
ttttgttttcagtag

SEQ ID NO: 521186 - DNA, 15 bp, Homo sapiens
tttgttttcagtaga

SEQ ID NO: 521187 - DNA, 15 bp, Homo sapiens
ttgttttcagtagaa

SEQ ID NO: 521188 - DNA, 15 bp, Homo sapiens
tgttttcagtagaaa

SEQ ID NO: 521189 - DNA, 15 bp, Homo sapiens
gttttcagtagaaac

SEQ ID NO: 521190 - DNA, 15 bp, Homo sapiens
ttttcagtagaaacg

SEQ ID NO: 521191 - DNA, 15 bp, Homo sapiens
tttcagtagaaacgg

SEQ ID NO: 521192 - DNA, 15 bp, Homo sapiens
ttcagtagaaacggg

SEQ ID NO: 521193 - DNA, 15 bp, Homo sapiens
tcagtagaaacgggg

SEQ ID NO: 521194 - DNA, 15 bp, Homo sapiens
cagtagaaacggggg

SEQ ID NO: 521195 - DNA, 15 bp, Homo sapiens
agtagaaacgggggt

SEQ ID NO: 521196 - DNA, 15 bp, Homo sapiens
gtagaaacgggggtc

SEQ ID NO: 521197 - DNA, 15 bp, Homo sapiens
tagaaacgggggtct

SEQ ID NO: 521198 - DNA, 15 bp, Homo sapiens
agaaacgggggtctc

SEQ ID NO: 521199 - DNA, 15 bp, Homo sapiens
gaaacgggggtctca

SEQ ID NO: 521200 - DNA, 15 bp, Homo sapiens
aaacgggggtctcac

SEQ ID NO: 521201 - DNA, 15 bp, Homo sapiens
aacgggggtctcact

SEQ ID NO: 521202 - DNA, 15 bp, Homo sapiens
acgggggtctcactt

SEQ ID NO: 521203 - DNA, 15 bp, Homo sapiens
cgggggtctcacttt

SEQ ID NO: 521204 - DNA, 15 bp, Homo sapiens
gggggtctcactttg

SEQ ID NO: 521205 - DNA, 15 bp, Homo sapiens
ggggtctcactttgt

SEQ ID NO: 521206 - DNA, 15 bp, Homo sapiens
gggtctcactttgtt

SEQ ID NO: 521207 - DNA, 15 bp, Homo sapiens
ggtctcactttgttg

SEQ ID NO: 521208 - DNA, 15 bp, Homo sapiens
gtctcactttgttgg

SEQ ID NO: 521209 - DNA, 15 bp, Homo sapiens
tctcactttgttggc

SEQ ID NO: 521210 - DNA, 15 bp, Homo sapiens
ctcactttgttggcc

SEQ ID NO: 521211 - DNA, 15 bp, Homo sapiens
tcactttgttggcca

SEQ ID NO: 521212 - DNA, 15 bp, Homo sapiens
cactttgttggccag

SEQ ID NO: 521213 - DNA, 15 bp, Homo sapiens
actttgttggccagg

SEQ ID NO: 521214 - DNA, 15 bp, Homo sapiens
ctttgttggccaggc

SEQ ID NO: 521215 - DNA, 15 bp, Homo sapiens
tttgttggccaggct

SEQ ID NO: 521216 - DNA, 15 bp, Homo sapiens
ttgttggccaggctg

SEQ ID NO: 521217 - DNA, 15 bp, Homo sapiens
ggtcttgaactccta

SEQ ID NO: 521218 - DNA, 15 bp, Homo sapiens
gtcttgaactcctaa

SEQ ID NO: 521219 - DNA, 15 bp, Homo sapiens
tcttgaactcctaac

SEQ ID NO: 521220 - DNA, 15 bp, Homo sapiens
cttgaactcctaacc

SEQ ID NO: 521221 - DNA, 15 bp, Homo sapiens
ttgaactcctaacct

SEQ ID NO: 521222 - DNA, 15 bp, Homo sapiens
tgaactcctaacctc

SEQ ID NO: 521223 - DNA, 15 bp, Homo sapiens
aactcctaacctcaa

SEQ ID NO: 521224 - DNA, 15 bp, Homo sapiens
actcctaacctcaaa

SEQ ID NO: 521225 - DNA, 15 bp, Homo sapiens
ctcctaacctcaaat

SEQ ID NO: 521226 - DNA, 15 bp, Homo sapiens
tcctaacctcaaata

SEQ ID NO: 521227 - DNA, 15 bp, Homo sapiens
cctaacctcaaataa

SEQ ID NO: 521228 - DNA, 15 bp, Homo sapiens
ctaacctcaaataat

SEQ ID NO: 521229 - DNA, 15 bp, Homo sapiens
taacctcaaataatc

SEQ ID NO: 521230 - DNA, 15 bp, Homo sapiens
aacctcaaataatcc

SEQ ID NO: 521231 - DNA, 15 bp, Homo sapiens
acctcaaataatcca

SEQ ID NO: 521232 - DNA, 15 bp, Homo sapiens
cctcaaataatccac

SEQ ID NO: 521233 - DNA, 15 bp, Homo sapiens
ctcaaataatccacc

SEQ ID NO: 521234 - DNA, 15 bp, Homo sapiens
tcaaataatccaccc

SEQ ID NO: 521235 - DNA, 15 bp, Homo sapiens
caaataatccaccca

SEQ ID NO: 521236 - DNA, 15 bp, Homo sapiens
aaataatccacccat

SEQ ID NO: 521237 - DNA, 15 bp, Homo sapiens
aataatccacccatc

SEQ ID NO: 521238 - DNA, 15 bp, Homo sapiens
ataatccacccatct

SEQ ID NO: 521239 - DNA, 15 bp, Homo sapiens
taatccacccatctc

SEQ ID NO: 521240 - DNA, 15 bp, Homo sapiens
aatccacccatctcg

SEQ ID NO: 521241 - DNA, 15 bp, Homo sapiens
atccacccatctcgg

SEQ ID NO: 521242 - DNA, 15 bp, Homo sapiens
tccacccatctcggc

SEQ ID NO: 521243 - DNA, 15 bp, Homo sapiens
ccacccatctcggcc

SEQ ID NO: 521244 - DNA, 15 bp, Homo sapiens
cacccatctcggcct

SEQ ID NO: 521245 - DNA, 15 bp, Homo sapiens
acccatctcggcctc

SEQ ID NO: 521246 - DNA, 15 bp, Homo sapiens
cccatctcggcctcc

SEQ ID NO: 521247 - DNA, 15 bp, Homo sapiens
ccatctcggcctcct

SEQ ID NO: 521248 - DNA, 15 bp, Homo sapiens
catctcggcctcctc

SEQ ID NO: 521249 - DNA, 15 bp, Homo sapiens
atctcggcctcctca

SEQ ID NO: 521250 - DNA, 15 bp, Homo sapiens
tctcggcctcctcaa

SEQ ID NO: 521251 - DNA, 15 bp, Homo sapiens
ctcggcctcctcaag

SEQ ID NO: 521252 - DNA, 15 bp, Homo sapiens
tcggcctcctcaagt

SEQ ID NO: 521253 - DNA, 15 bp, Homo sapiens
cggcctcctcaagtg

SEQ ID NO: 521254 - DNA, 15 bp, Homo sapiens
ggcctcctcaagtgc

SEQ ID NO: 521255 - DNA, 15 bp, Homo sapiens
gcctcctcaagtgct

SEQ ID NO: 521256 - DNA, 15 bp, Homo sapiens
cctcctcaagtgctg

SEQ ID NO: 521257 - DNA, 15 bp, Homo sapiens
ctcctcaagtgctgg

SEQ ID NO: 521258 - DNA, 15 bp, Homo sapiens
tcctcaagtgctggg

SEQ ID NO: 521259 - DNA, 15 bp, Homo sapiens
cctcaagtgctggga

SEQ ID NO: 521260 - DNA, 15 bp, Homo sapiens
ctcaagtgctgggat

SEQ ID NO: 521261 - DNA, 15 bp, Homo sapiens
tcaagtgctgggatt

SEQ ID NO: 521262 - DNA, 15 bp, Homo sapiens
tgggattacaggtga

SEQ ID NO: 521263 - DNA, 15 bp, Homo sapiens
gggattacaggtgag

SEQ ID NO: 521264 - DNA, 15 bp, Homo sapiens
ggattacaggtgaga

SEQ ID NO: 521265 - DNA, 15 bp, Homo sapiens
gattacaggtgagag

SEQ ID NO: 521266 - DNA, 15 bp, Homo sapiens
attacaggtgagagc

SEQ ID NO: 521267 - DNA, 15 bp, Homo sapiens
ttacaggtgagagcc

SEQ ID NO: 521268 - DNA, 15 bp, Homo sapiens
tacaggtgagagcca

SEQ ID NO: 521269 - DNA, 15 bp, Homo sapiens
acaggtgagagccac

SEQ ID NO: 521270 - DNA, 15 bp, Homo sapiens
caggtgagagccact

SEQ ID NO: 521271 - DNA, 15 bp, Homo sapiens
aggtgagagccactg

SEQ ID NO: 521272 - DNA, 15 bp, Homo sapiens
ggtgagagccactgt

SEQ ID NO: 521273 - DNA, 15 bp, Homo sapiens
gtgagagccactgtg

SEQ ID NO: 521274 - DNA, 15 bp, Homo sapiens
tgagagccactgtgc

SEQ ID NO: 521275 - DNA, 15 bp, Homo sapiens
gagagccactgtgcc

SEQ ID NO: 521276 - DNA, 15 bp, Homo sapiens
agagccactgtgcct

SEQ ID NO: 521277 - DNA, 15 bp, Homo sapiens
gagccactgtgcctg

SEQ ID NO: 521278 - DNA, 15 bp, Homo sapiens
agccactgtgcctgg

SEQ ID NO: 521279 - DNA, 15 bp, Homo sapiens
gccactgtgcctggc

SEQ ID NO: 521280 - DNA, 15 bp, Homo sapiens
ccactgtgcctggcg

SEQ ID NO: 521281 - DNA, 15 bp, Homo sapiens
cactgtgcctggcga

SEQ ID NO: 521282 - DNA, 15 bp, Homo sapiens
actgtgcctggcgaa

SEQ ID NO: 521283 - DNA, 15 bp, Homo sapiens
ctgtgcctggcgaag

SEQ ID NO: 521284 - DNA, 15 bp, Homo sapiens
tgtgcctggcgaagc

SEQ ID NO: 521285 - DNA, 15 bp, Homo sapiens
gtgcctggcgaagcc

SEQ ID NO: 521286 - DNA, 15 bp, Homo sapiens
tgcctggcgaagccc

SEQ ID NO: 521287 - DNA, 15 bp, Homo sapiens
gcctggcgaagccca

SEQ ID NO: 521288 - DNA, 15 bp, Homo sapiens
cctggcgaagcccat

SEQ ID NO: 521289 - DNA, 15 bp, Homo sapiens
ctggcgaagcccatg

SEQ ID NO: 521290 - DNA, 15 bp, Homo sapiens
tggcgaagcccatgc

SEQ ID NO: 521291 - DNA, 15 bp, Homo sapiens
ggcgaagcccatgcc

SEQ ID NO: 521292 - DNA, 15 bp, Homo sapiens
gcgaagcccatgcct

SEQ ID NO: 521293 - DNA, 15 bp, Homo sapiens
cgaagcccatgcctt

SEQ ID NO: 521294 - DNA, 15 bp, Homo sapiens
gaagcccatgccttt

SEQ ID NO: 521295 - DNA, 15 bp, Homo sapiens
aagcccatgccttta

SEQ ID NO: 521296 - DNA, 15 bp, Homo sapiens
agcccatgcctttaa

SEQ ID NO: 521297 - DNA, 15 bp, Homo sapiens
gcccatgcctttaac

SEQ ID NO: 521298 - DNA, 15 bp, Homo sapiens
cccatgcctttaacc

SEQ ID NO: 521299 - DNA, 15 bp, Homo sapiens
ccatgcctttaacca

SEQ ID NO: 521300 - DNA, 15 bp, Homo sapiens
catgcctttaaccac

SEQ ID NO: 521301 - DNA, 15 bp, Homo sapiens
atgcctttaaccact

SEQ ID NO: 521302 - DNA, 15 bp, Homo sapiens
tgcctttaaccactt

SEQ ID NO: 521303 - DNA, 15 bp, Homo sapiens
gcctttaaccacttc

SEQ ID NO: 521304 - DNA, 15 bp, Homo sapiens
cctttaaccacttct

SEQ ID NO: 521305 - DNA, 15 bp, Homo sapiens
ctttaaccacttctc

SEQ ID NO: 521306 - DNA, 15 bp, Homo sapiens
tttaaccacttctct

SEQ ID NO: 521307 - DNA, 15 bp, Homo sapiens
ttaaccacttctctg

SEQ ID NO: 521308 - DNA, 15 bp, Homo sapiens
taaccacttctctgt

SEQ ID NO: 521309 - DNA, 15 bp, Homo sapiens
aaccacttctctgta

SEQ ID NO: 521310 - DNA, 15 bp, Homo sapiens
accacttctctgtat

SEQ ID NO: 521311 - DNA, 15 bp, Homo sapiens
ccacttctctgtatt

SEQ ID NO: 521312 - DNA, 15 bp, Homo sapiens
cacttctctgtatta

SEQ ID NO: 521313 - DNA, 15 bp, Homo sapiens
acttctctgtattac

SEQ ID NO: 521314 - DNA, 15 bp, Homo sapiens
cttctctgtattaca

SEQ ID NO: 521315 - DNA, 15 bp, Homo sapiens
ttctctgtattacat

SEQ ID NO: 521316 - DNA, 15 bp, Homo sapiens
tctctgtattacata

SEQ ID NO: 521317 - DNA, 15 bp, Homo sapiens
ctctgtattacatac

SEQ ID NO: 521318 - DNA, 15 bp, Homo sapiens
tctgtattacatact

SEQ ID NO: 521319 - DNA, 15 bp, Homo sapiens
ctgtattacatacta

SEQ ID NO: 521320 - DNA, 15 bp, Homo sapiens
tgtattacatactag

SEQ ID NO: 521321 - DNA, 15 bp, Homo sapiens
gtattacatactagc

SEQ ID NO: 521322 - DNA, 15 bp, Homo sapiens
tattacatactagct

SEQ ID NO: 521323 - DNA, 15 bp, Homo sapiens
attacatactagctt

SEQ ID NO: 521324 - DNA, 15 bp, Homo sapiens
ttacatactagctta

SEQ ID NO: 521325 - DNA, 15 bp, Homo sapiens
tacatactagcttaa

SEQ ID NO: 521326 - DNA, 15 bp, Homo sapiens
acatactagcttaac

SEQ ID NO: 521327 - DNA, 15 bp, Homo sapiens
catactagcttaact

SEQ ID NO: 521328 - DNA, 15 bp, Homo sapiens
atactagcttaacta

SEQ ID NO: 521329 - DNA, 15 bp, Homo sapiens
tactagcttaactag

SEQ ID NO: 521330 - DNA, 15 bp, Homo sapiens
actagcttaactagc

SEQ ID NO: 521331 - DNA, 15 bp, Homo sapiens
ctagcttaactagca

SEQ ID NO: 521332 - DNA, 15 bp, Homo sapiens
tagcttaactagcat

SEQ ID NO: 521333 - DNA, 15 bp, Homo sapiens
agcttaactagcatt

SEQ ID NO: 521334 - DNA, 15 bp, Homo sapiens
gcttaactagcattg

SEQ ID NO: 521335 - DNA, 15 bp, Homo sapiens
cttaactagcattgt

SEQ ID NO: 521336 - DNA, 15 bp, Homo sapiens
ttaactagcattgta

SEQ ID NO: 521337 - DNA, 15 bp, Homo sapiens
taactagcattgtac

SEQ ID NO: 521338 - DNA, 15 bp, Homo sapiens
aactagcattgtacc

SEQ ID NO: 521339 - DNA, 15 bp, Homo sapiens
actagcattgtacct

SEQ ID NO: 521340 - DNA, 15 bp, Homo sapiens
ctagcattgtacctg

SEQ ID NO: 521341 - DNA, 15 bp, Homo sapiens
tagcattgtacctgc

SEQ ID NO: 521342 - DNA, 15 bp, Homo sapiens
agcattgtacctgcc

SEQ ID NO: 521343 - DNA, 15 bp, Homo sapiens
gcattgtacctgcca

SEQ ID NO: 521344 - DNA, 15 bp, Homo sapiens
cattgtacctgccac

SEQ ID NO: 521345 - DNA, 15 bp, Homo sapiens
attgtacctgccaca

SEQ ID NO: 521346 - DNA, 15 bp, Homo sapiens
ttgtacctgccacag

SEQ ID NO: 521347 - DNA, 15 bp, Homo sapiens
tgtacctgccacagt

SEQ ID NO: 521348 - DNA, 15 bp, Homo sapiens
gtacctgccacagta

SEQ ID NO: 521349 - DNA, 15 bp, Homo sapiens
tacctgccacagtag

SEQ ID NO: 521350 - DNA, 15 bp, Homo sapiens
acctgccacagtaga

SEQ ID NO: 521351 - DNA, 15 bp, Homo sapiens
cctgccacagtagat

SEQ ID NO: 521352 - DNA, 15 bp, Homo sapiens
ctgccacagtagatg

SEQ ID NO: 521353 - DNA, 15 bp, Homo sapiens
tgccacagtagatgc

SEQ ID NO: 521354 - DNA, 15 bp, Homo sapiens
gccacagtagatgct

SEQ ID NO: 521355 - DNA, 15 bp, Homo sapiens
ccacagtagatgctc

SEQ ID NO: 521356 - DNA, 15 bp, Homo sapiens
cacagtagatgctca

SEQ ID NO: 521357 - DNA, 15 bp, Homo sapiens
acagtagatgctcag

SEQ ID NO: 521358 - DNA, 15 bp, Homo sapiens
cagtagatgctcagt

SEQ ID NO: 521359 - DNA, 15 bp, Homo sapiens
agtagatgctcagta

SEQ ID NO: 521360 - DNA, 15 bp, Homo sapiens
gtagatgctcagtaa

SEQ ID NO: 521361 - DNA, 15 bp, Homo sapiens
tagatgctcagtaaa

SEQ ID NO: 521362 - DNA, 15 bp, Homo sapiens
agatgctcagtaaat

SEQ ID NO: 521363 - DNA, 15 bp, Homo sapiens
gatgctcagtaaata

SEQ ID NO: 521364 - DNA, 15 bp, Homo sapiens
atgctcagtaaatat

SEQ ID NO: 521365 - DNA, 15 bp, Homo sapiens
tgctcagtaaatatt

SEQ ID NO: 521366 - DNA, 15 bp, Homo sapiens
gctcagtaaatattt

SEQ ID NO: 521367 - DNA, 15 bp, Homo sapiens
ctcagtaaatatttc

SEQ ID NO: 521368 - DNA, 15 bp, Homo sapiens
tcagtaaatatttct

SEQ ID NO: 521369 - DNA, 15 bp, Homo sapiens
cagtaaatatttcta

SEQ ID NO: 521370 - DNA, 15 bp, Homo sapiens
agtaaatatttctag

SEQ ID NO: 521371 - DNA, 15 bp, Homo sapiens
gtaaatatttctagt

SEQ ID NO: 521372 - DNA, 15 bp, Homo sapiens
taaatatttctagtt

SEQ ID NO: 521373 - DNA, 15 bp, Homo sapiens
aaatatttctagttg

SEQ ID NO: 521374 - DNA, 15 bp, Homo sapiens
aatatttctagttga

SEQ ID NO: 521375 - DNA, 15 bp, Homo sapiens
atatttctagttgaa

SEQ ID NO: 521376 - DNA, 15 bp, Homo sapiens
tatttctagttgaat

SEQ ID NO: 521377 - DNA, 15 bp, Homo sapiens
atttctagttgaata

SEQ ID NO: 521378 - DNA, 15 bp, Homo sapiens
tttctagttgaatat

SEQ ID NO: 521379 - DNA, 15 bp, Homo sapiens
ttctagttgaatatc

SEQ ID NO: 521380 - DNA, 15 bp, Homo sapiens
tctagttgaatatct

SEQ ID NO: 521381 - DNA, 15 bp, Homo sapiens
ctagttgaatatctg

SEQ ID NO: 521382 - DNA, 15 bp, Homo sapiens
tagttgaatatctgt

SEQ ID NO: 521383 - DNA, 15 bp, Homo sapiens
agttgaatatctgtt

SEQ ID NO: 521384 - DNA, 15 bp, Homo sapiens
gttgaatatctgttt

SEQ ID NO: 521385 - DNA, 15 bp, Homo sapiens
ttgaatatctgtttt

SEQ ID NO: 521386 - DNA, 15 bp, Homo sapiens
tgaatatctgttttt

SEQ ID NO: 521387 - DNA, 15 bp, Homo sapiens
gaatatctgtttttc

SEQ ID NO: 521388 - DNA, 15 bp, Homo sapiens
aatatctgtttttca

SEQ ID NO: 521389 - DNA, 15 bp, Homo sapiens
atatctgtttttcaa

SEQ ID NO: 521390 - DNA, 15 bp, Homo sapiens
tatctgtttttcaac

SEQ ID NO: 521391 - DNA, 15 bp, Homo sapiens
atctgtttttcaaca

SEQ ID NO: 521392 - DNA, 15 bp, Homo sapiens
tctgtttttcaacaa

SEQ ID NO: 521393 - DNA, 15 bp, Homo sapiens
ctgtttttcaacaag

SEQ ID NO: 521394 - DNA, 15 bp, Homo sapiens
tgtttttcaacaagt

SEQ ID NO: 521395 - DNA, 15 bp, Homo sapiens
gtttttcaacaagta

SEQ ID NO: 521396 - DNA, 15 bp, Homo sapiens
tttttcaacaagtac

SEQ ID NO: 521397 - DNA, 15 bp, Homo sapiens
ttttcaacaagtaca

SEQ ID NO: 521398 - DNA, 15 bp, Homo sapiens
tttcaacaagtacat

SEQ ID NO: 521399 - DNA, 15 bp, Homo sapiens
ttcaacaagtacatt

SEQ ID NO: 521400 - DNA, 15 bp, Homo sapiens
tcaacaagtacattt

SEQ ID NO: 521401 - DNA, 15 bp, Homo sapiens
caacaagtacatttt

SEQ ID NO: 521402 - DNA, 15 bp, Homo sapiens
aacaagtacattttt

SEQ ID NO: 521403 - DNA, 15 bp, Homo sapiens
acaagtacatttttt

SEQ ID NO: 521404 - DNA, 15 bp, Homo sapiens
caagtacattttttt

SEQ ID NO: 521405 - DNA, 15 bp, Homo sapiens
aagtacattttttta

SEQ ID NO: 521406 - DNA, 15 bp, Homo sapiens
agtacatttttttaa

SEQ ID NO: 521407 - DNA, 15 bp, Homo sapiens
gtacatttttttaac

SEQ ID NO: 521408 - DNA, 15 bp, Homo sapiens
tacatttttttaacc

SEQ ID NO: 521409 - DNA, 15 bp, Homo sapiens
acatttttttaaccc

SEQ ID NO: 521410 - DNA, 15 bp, Homo sapiens
catttttttaaccct

SEQ ID NO: 521411 - DNA, 15 bp, Homo sapiens
atttttttaaccctt

SEQ ID NO: 521412 - DNA, 15 bp, Homo sapiens
tttttttaacccttt

SEQ ID NO: 521413 - DNA, 15 bp, Homo sapiens
ttttttaaccctttt

SEQ ID NO: 521414 - DNA, 15 bp, Homo sapiens
tttttaaccctttta

SEQ ID NO: 521415 - DNA, 15 bp, Homo sapiens
ttttaacccttttaa

SEQ ID NO: 521416 - DNA, 15 bp, Homo sapiens
tttaacccttttaat

SEQ ID NO: 521417 - DNA, 15 bp, Homo sapiens
ttaacccttttaatt

SEQ ID NO: 521418 - DNA, 15 bp, Homo sapiens
taacccttttaatta

SEQ ID NO: 521419 - DNA, 15 bp, Homo sapiens
aacccttttaattaa

SEQ ID NO: 521420 - DNA, 15 bp, Homo sapiens
acccttttaattaag

SEQ ID NO: 521421 - DNA, 15 bp, Homo sapiens
cccttttaattaaga

SEQ ID NO: 521422 - DNA, 15 bp, Homo sapiens
ccttttaattaagaa

SEQ ID NO: 521423 - DNA, 15 bp, Homo sapiens
cttttaattaagaaa

SEQ ID NO: 521424 - DNA, 15 bp, Homo sapiens
ttttaattaagaaaa

SEQ ID NO: 521425 - DNA, 15 bp, Homo sapiens
tttaattaagaaaac

SEQ ID NO: 521426 - DNA, 15 bp, Homo sapiens
ttaattaagaaaact

SEQ ID NO: 521427 - DNA, 15 bp, Homo sapiens
taattaagaaaactt

SEQ ID NO: 521428 - DNA, 15 bp, Homo sapiens
aattaagaaaacttt

SEQ ID NO: 521429 - DNA, 15 bp, Homo sapiens
attaagaaaactttt

SEQ ID NO: 521430 - DNA, 15 bp, Homo sapiens
ttaagaaaactttta

SEQ ID NO: 521431 - DNA, 15 bp, Homo sapiens
taagaaaacttttat

SEQ ID NO: 521432 - DNA, 15 bp, Homo sapiens
aagaaaacttttatt

SEQ ID NO: 521433 - DNA, 15 bp, Homo sapiens
agaaaacttttattg

SEQ ID NO: 521434 - DNA, 15 bp, Homo sapiens
gaaaacttttattga

SEQ ID NO: 521435 - DNA, 15 bp, Homo sapiens
aaaacttttattgat

SEQ ID NO: 521436 - DNA, 15 bp, Homo sapiens
aaacttttattgatt

SEQ ID NO: 521437 - DNA, 15 bp, Homo sapiens
aacttttattgattt

SEQ ID NO: 521438 - DNA, 15 bp, Homo sapiens
acttttattgattta

SEQ ID NO: 521439 - DNA, 15 bp, Homo sapiens
cttttattgatttat

SEQ ID NO: 521440 - DNA, 15 bp, Homo sapiens
ttttattgatttatt

SEQ ID NO: 521441 - DNA, 15 bp, Homo sapiens
tttattgatttattt

SEQ ID NO: 521442 - DNA, 15 bp, Homo sapiens
ttattgatttatttt

SEQ ID NO: 521443 - DNA, 15 bp, Homo sapiens
tattgatttattttt

SEQ ID NO: 521444 - DNA, 15 bp, Homo sapiens
attgatttatttttt

SEQ ID NO: 521445 - DNA, 15 bp, Homo sapiens
ttgatttattttttg

SEQ ID NO: 521446 - DNA, 15 bp, Homo sapiens
tgatttattttttgg

SEQ ID NO: 521447 - DNA, 15 bp, Homo sapiens
gatttattttttggg

SEQ ID NO: 521448 - DNA, 15 bp, Homo sapiens
atttattttttgggg

SEQ ID NO: 521449 - DNA, 15 bp, Homo sapiens
tttattttttggggg

SEQ ID NO: 521450 - DNA, 15 bp, Homo sapiens
ttattttttgggggg

SEQ ID NO: 521451 - DNA, 15 bp, Homo sapiens
tattttttgggggga

SEQ ID NO: 521452 - DNA, 15 bp, Homo sapiens
attttttggggggaa

SEQ ID NO: 521453 - DNA, 15 bp, Homo sapiens
ttttttggggggaaa

SEQ ID NO: 521454 - DNA, 15 bp, Homo sapiens
tttttggggggaaat

SEQ ID NO: 521455 - DNA, 15 bp, Homo sapiens
ttttggggggaaatt

SEQ ID NO: 521456 - DNA, 15 bp, Homo sapiens
tttggggggaaattt

SEQ ID NO: 521457 - DNA, 15 bp, Homo sapiens
ttggggggaaatttt

SEQ ID NO: 521458 - DNA, 15 bp, Homo sapiens
tggggggaaattttt

SEQ ID NO: 521459 - DNA, 15 bp, Homo sapiens
ggggggaaatttttt

SEQ ID NO: 521460 - DNA, 15 bp, Homo sapiens
gggggaaatttttta

SEQ ID NO: 521461 - DNA, 15 bp, Homo sapiens
ggggaaattttttag

SEQ ID NO: 521462 - DNA, 15 bp, Homo sapiens
gggaaattttttagg

SEQ ID NO: 521463 - DNA, 15 bp, Homo sapiens
ggaaattttttagga

SEQ ID NO: 521464 - DNA, 15 bp, Homo sapiens
gaaattttttaggat

SEQ ID NO: 521465 - DNA, 15 bp, Homo sapiens
aaattttttaggatc

SEQ ID NO: 521466 - DNA, 15 bp, Homo sapiens
aattttttaggatct

SEQ ID NO: 521467 - DNA, 15 bp, Homo sapiens
attttttaggatctg

SEQ ID NO: 521468 - DNA, 15 bp, Homo sapiens
ttttttaggatctga

SEQ ID NO: 521469 - DNA, 15 bp, Homo sapiens
tttttaggatctgat

SEQ ID NO: 521470 - DNA, 15 bp, Homo sapiens
ttttaggatctgatt

SEQ ID NO: 521471 - DNA, 15 bp, Homo sapiens
tttaggatctgattc

SEQ ID NO: 521472 - DNA, 15 bp, Homo sapiens
ttaggatctgattct

SEQ ID NO: 521473 - DNA, 15 bp, Homo sapiens
taggatctgattctt

SEQ ID NO: 521474 - DNA, 15 bp, Homo sapiens
aggatctgattcttc

SEQ ID NO: 521475 - DNA, 15 bp, Homo sapiens
ggatctgattcttct

SEQ ID NO: 521476 - DNA, 15 bp, Homo sapiens
gatctgattcttctg

SEQ ID NO: 521477 - DNA, 15 bp, Homo sapiens
atctgattcttctga

SEQ ID NO: 521478 - DNA, 15 bp, Homo sapiens
tctgattcttctgaa

SEQ ID NO: 521479 - DNA, 15 bp, Homo sapiens
ctgattcttctgaag

SEQ ID NO: 521480 - DNA, 15 bp, Homo sapiens
tgattcttctgaaga

SEQ ID NO: 521481 - DNA, 15 bp, Homo sapiens
gattcttctgaagat

SEQ ID NO: 521482 - DNA, 15 bp, Homo sapiens
attcttctgaagata

SEQ ID NO: 521483 - DNA, 15 bp, Homo sapiens
ttcttctgaagatac

SEQ ID NO: 521484 - DNA, 15 bp, Homo sapiens
tcttctgaagatacc

SEQ ID NO: 521485 - DNA, 15 bp, Homo sapiens
cttctgaagataccg

SEQ ID NO: 521486 - DNA, 15 bp, Homo sapiens
ttctgaagataccgt

SEQ ID NO: 521487 - DNA, 15 bp, Homo sapiens
tctgaagataccgtt

SEQ ID NO: 521488 - DNA, 15 bp, Homo sapiens
ctgaagataccgtta

SEQ ID NO: 521489 - DNA, 15 bp, Homo sapiens
tgaagataccgttaa

SEQ ID NO: 521490 - DNA, 15 bp, Homo sapiens
gaagataccgttaat

SEQ ID NO: 521491 - DNA, 15 bp, Homo sapiens
aagataccgttaata

SEQ ID NO: 521492 - DNA, 15 bp, Homo sapiens
agataccgttaataa

SEQ ID NO: 521493 - DNA, 15 bp, Homo sapiens
gataccgttaataag

SEQ ID NO: 521494 - DNA, 15 bp, Homo sapiens
ataccgttaataagg

SEQ ID NO: 521495 - DNA, 15 bp, Homo sapiens
taccgttaataaggc

SEQ ID NO: 521496 - DNA, 15 bp, Homo sapiens
accgttaataaggca

SEQ ID NO: 521497 - DNA, 15 bp, Homo sapiens
ccgttaataaggcaa

SEQ ID NO: 521498 - DNA, 15 bp, Homo sapiens
cgttaataaggcaac

SEQ ID NO: 521499 - DNA, 15 bp, Homo sapiens
gttaataaggcaact

SEQ ID NO: 521500 - DNA, 15 bp, Homo sapiens
ttaataaggcaactt

SEQ ID NO: 521501 - DNA, 15 bp, Homo sapiens
taataaggcaactta

SEQ ID NO: 521502 - DNA, 15 bp, Homo sapiens
aataaggcaacttat

SEQ ID NO: 521503 - DNA, 15 bp, Homo sapiens
ataaggcaacttatt

SEQ ID NO: 521504 - DNA, 15 bp, Homo sapiens
taaggcaacttattg

SEQ ID NO: 521505 - DNA, 15 bp, Homo sapiens
aaggcaacttattgc

SEQ ID NO: 521506 - DNA, 15 bp, Homo sapiens
aggcaacttattgca

SEQ ID NO: 521507 - DNA, 15 bp, Homo sapiens
ggcaacttattgcag

SEQ ID NO: 521508 - DNA, 15 bp, Homo sapiens
gcaacttattgcagg

SEQ ID NO: 521509 - DNA, 15 bp, Homo sapiens
caacttattgcaggt

SEQ ID NO: 521510 - DNA, 15 bp, Homo sapiens
aacttattgcaggtg

SEQ ID NO: 521511 - DNA, 15 bp, Homo sapiens
acttattgcaggtga

SEQ ID NO: 521512 - DNA, 15 bp, Homo sapiens
cttattgcaggtgag

SEQ ID NO: 521513 - DNA, 15 bp, Homo sapiens
ttattgcaggtgagt

SEQ ID NO: 521514 - DNA, 15 bp, Homo sapiens
tattgcaggtgagtc

SEQ ID NO: 521515 - DNA, 15 bp, Homo sapiens
attgcaggtgagtca

SEQ ID NO: 521516 - DNA, 15 bp, Homo sapiens
ttgcaggtgagtcaa

SEQ ID NO: 521517 - DNA, 15 bp, Homo sapiens
tgcaggtgagtcaaa

SEQ ID NO: 521518 - DNA, 15 bp, Homo sapiens
gcaggtgagtcaaag

SEQ ID NO: 521519 - DNA, 15 bp, Homo sapiens
caggtgagtcaaaga

SEQ ID NO: 521520 - DNA, 15 bp, Homo sapiens
aggtgagtcaaagag

SEQ ID NO: 521521 - DNA, 15 bp, Homo sapiens
ggtgagtcaaagaga

SEQ ID NO: 521522 - DNA, 15 bp, Homo sapiens
gtgagtcaaagagaa

SEQ ID NO: 521523 - DNA, 15 bp, Homo sapiens
tgagtcaaagagaac

SEQ ID NO: 521524 - DNA, 15 bp, Homo sapiens
gagtcaaagagaacc

SEQ ID NO: 521525 - DNA, 15 bp, Homo sapiens
agtcaaagagaacct

SEQ ID NO: 521526 - DNA, 15 bp, Homo sapiens
gtcaaagagaacctt

SEQ ID NO: 521527 - DNA, 15 bp, Homo sapiens
tcaaagagaaccttt

SEQ ID NO: 521528 - DNA, 15 bp, Homo sapiens
caaagagaacctttg

SEQ ID NO: 521529 - DNA, 15 bp, Homo sapiens
aaagagaacctttgt

SEQ ID NO: 521530 - DNA, 15 bp, Homo sapiens
aagagaacctttgtc

SEQ ID NO: 521531 - DNA, 15 bp, Homo sapiens
agagaacctttgtct

SEQ ID NO: 521532 - DNA, 15 bp, Homo sapiens
gagaacctttgtcta

SEQ ID NO: 521533 - DNA, 15 bp, Homo sapiens
agaacctttgtctat

SEQ ID NO: 521534 - DNA, 15 bp, Homo sapiens
gaacctttgtctatg

SEQ ID NO: 521535 - DNA, 15 bp, Homo sapiens
aacctttgtctatga

SEQ ID NO: 521536 - DNA, 15 bp, Homo sapiens
acctttgtctatgaa

SEQ ID NO: 521537 - DNA, 15 bp, Homo sapiens
cctttgtctatgaag

SEQ ID NO: 521538 - DNA, 15 bp, Homo sapiens
ctttgtctatgaagc

SEQ ID NO: 521539 - DNA, 15 bp, Homo sapiens
tttgtctatgaagct

SEQ ID NO: 521540 - DNA, 15 bp, Homo sapiens
ttgtctatgaagctg

SEQ ID NO: 521541 - DNA, 15 bp, Homo sapiens
tgtctatgaagctgg

SEQ ID NO: 521542 - DNA, 15 bp, Homo sapiens
gtctatgaagctggt

SEQ ID NO: 521543 - DNA, 15 bp, Homo sapiens
tctatgaagctggta

SEQ ID NO: 521544 - DNA, 15 bp, Homo sapiens
ctatgaagctggtat

SEQ ID NO: 521545 - DNA, 15 bp, Homo sapiens
tatgaagctggtatt

SEQ ID NO: 521546 - DNA, 15 bp, Homo sapiens
atgaagctggtattt

SEQ ID NO: 521547 - DNA, 15 bp, Homo sapiens
tgaagctggtatttt

SEQ ID NO: 521548 - DNA, 15 bp, Homo sapiens
gaagctggtattttc

SEQ ID NO: 521549 - DNA, 15 bp, Homo sapiens
aagctggtattttcc

SEQ ID NO: 521550 - DNA, 15 bp, Homo sapiens
agctggtattttcct

SEQ ID NO: 521551 - DNA, 15 bp, Homo sapiens
gctggtattttccta

SEQ ID NO: 521552 - DNA, 15 bp, Homo sapiens
ctggtattttcctat

SEQ ID NO: 521553 - DNA, 15 bp, Homo sapiens
tggtattttcctatt

SEQ ID NO: 521554 - DNA, 15 bp, Homo sapiens
ggtattttcctattt

SEQ ID NO: 521555 - DNA, 15 bp, Homo sapiens
gtattttcctattta

SEQ ID NO: 521556 - DNA, 15 bp, Homo sapiens
tattttcctatttag

SEQ ID NO: 521557 - DNA, 15 bp, Homo sapiens
attttcctatttagt

SEQ ID NO: 521558 - DNA, 15 bp, Homo sapiens
ttttcctatttagtt

SEQ ID NO: 521559 - DNA, 15 bp, Homo sapiens
tttcctatttagtta

SEQ ID NO: 521560 - DNA, 15 bp, Homo sapiens
ttcctatttagttaa

SEQ ID NO: 521561 - DNA, 15 bp, Homo sapiens
tcctatttagttaat

SEQ ID NO: 521562 - DNA, 15 bp, Homo sapiens
cctatttagttaata

SEQ ID NO: 521563 - DNA, 15 bp, Homo sapiens
ctatttagttaatat

SEQ ID NO: 521564 - DNA, 15 bp, Homo sapiens
tatttagttaatatt

SEQ ID NO: 521565 - DNA, 15 bp, Homo sapiens
atttagttaatatta

SEQ ID NO: 521566 - DNA, 15 bp, Homo sapiens
tttagttaatattaa

SEQ ID NO: 521567 - DNA, 15 bp, Homo sapiens
ttagttaatattaag

SEQ ID NO: 521568 - DNA, 15 bp, Homo sapiens
tagttaatattaagg

SEQ ID NO: 521569 - DNA, 15 bp, Homo sapiens
agttaatattaagga

SEQ ID NO: 521570 - DNA, 15 bp, Homo sapiens
gttaatattaaggat

SEQ ID NO: 521571 - DNA, 15 bp, Homo sapiens
ttaatattaaggatt

SEQ ID NO: 521572 - DNA, 15 bp, Homo sapiens
taatattaaggattg

SEQ ID NO: 521573 - DNA, 15 bp, Homo sapiens
aatattaaggattga

SEQ ID NO: 521574 - DNA, 15 bp, Homo sapiens
atattaaggattgat

SEQ ID NO: 521575 - DNA, 15 bp, Homo sapiens
tattaaggattgatg

SEQ ID NO: 521576 - DNA, 15 bp, Homo sapiens
attaaggattgatgt

SEQ ID NO: 521577 - DNA, 15 bp, Homo sapiens
ttaaggattgatgtt

SEQ ID NO: 521578 - DNA, 15 bp, Homo sapiens
taaggattgatgttt

SEQ ID NO: 521579 - DNA, 15 bp, Homo sapiens
aaggattgatgtttc

SEQ ID NO: 521580 - DNA, 15 bp, Homo sapiens
aggattgatgtttct

SEQ ID NO: 521581 - DNA, 15 bp, Homo sapiens
ggattgatgtttctc

SEQ ID NO: 521582 - DNA, 15 bp, Homo sapiens
gattgatgtttctct

SEQ ID NO: 521583 - DNA, 15 bp, Homo sapiens
attgatgtttctctc

SEQ ID NO: 521584 - DNA, 15 bp, Homo sapiens
ttgatgtttctctct

SEQ ID NO: 521585 - DNA, 15 bp, Homo sapiens
tgatgtttctctctt

SEQ ID NO: 521586 - DNA, 15 bp, Homo sapiens
gatgtttctctcttt

SEQ ID NO: 521587 - DNA, 15 bp, Homo sapiens
atgtttctctctttt

SEQ ID NO: 521588 - DNA, 15 bp, Homo sapiens
tgtttctctcttttt

SEQ ID NO: 521589 - DNA, 15 bp, Homo sapiens
gtttctctcttttta

SEQ ID NO: 521590 - DNA, 15 bp, Homo sapiens
tttctctctttttaa

SEQ ID NO: 521591 - DNA, 15 bp, Homo sapiens
ttctctctttttaaa

SEQ ID NO: 521592 - DNA, 15 bp, Homo sapiens
tctctctttttaaaa

SEQ ID NO: 521593 - DNA, 15 bp, Homo sapiens
ctctctttttaaaaa

SEQ ID NO: 521594 - DNA, 15 bp, Homo sapiens
tctctttttaaaaat

SEQ ID NO: 521595 - DNA, 15 bp, Homo sapiens
ctctttttaaaaata

SEQ ID NO: 521596 - DNA, 15 bp, Homo sapiens
tctttttaaaaatat

SEQ ID NO: 521597 - DNA, 15 bp, Homo sapiens
ctttttaaaaatatt

SEQ ID NO: 521598 - DNA, 15 bp, Homo sapiens
tttttaaaaatattt

SEQ ID NO: 521599 - DNA, 15 bp, Homo sapiens
ttttaaaaatatttt

SEQ ID NO: 521600 - DNA, 15 bp, Homo sapiens
tttaaaaatatttta

SEQ ID NO: 521601 - DNA, 15 bp, Homo sapiens
ttaaaaatattttaa

SEQ ID NO: 521602 - DNA, 15 bp, Homo sapiens
taaaaatattttaac

SEQ ID NO: 521603 - DNA, 15 bp, Homo sapiens
aaaaatattttaact

SEQ ID NO: 521604 - DNA, 15 bp, Homo sapiens
aaaatattttaactt

SEQ ID NO: 521605 - DNA, 15 bp, Homo sapiens
aaatattttaacttt

SEQ ID NO: 521606 - DNA, 15 bp, Homo sapiens
aatattttaactttt

SEQ ID NO: 521607 - DNA, 15 bp, Homo sapiens
atattttaactttta

SEQ ID NO: 521608 - DNA, 15 bp, Homo sapiens
tattttaacttttat

SEQ ID NO: 521609 - DNA, 15 bp, Homo sapiens
attttaacttttatt

SEQ ID NO: 521610 - DNA, 15 bp, Homo sapiens
ttttaacttttattt

SEQ ID NO: 521611 - DNA, 15 bp, Homo sapiens
tttaacttttatttt

SEQ ID NO: 521612 - DNA, 15 bp, Homo sapiens
ttaacttttatttta

SEQ ID NO: 521613 - DNA, 15 bp, Homo sapiens
taacttttattttag

SEQ ID NO: 521614 - DNA, 15 bp, Homo sapiens
aacttttattttagg

SEQ ID NO: 521615 - DNA, 15 bp, Homo sapiens
acttttattttaggt

SEQ ID NO: 521616 - DNA, 15 bp, Homo sapiens
cttttattttaggtt

SEQ ID NO: 521617 - DNA, 15 bp, Homo sapiens
ttttattttaggttc

SEQ ID NO: 521618 - DNA, 15 bp, Homo sapiens
tttattttaggttca

SEQ ID NO: 521619 - DNA, 15 bp, Homo sapiens
ttattttaggttcag

SEQ ID NO: 521620 - DNA, 15 bp, Homo sapiens
tattttaggttcagg

SEQ ID NO: 521621 - DNA, 15 bp, Homo sapiens
attttaggttcaggg

SEQ ID NO: 521622 - DNA, 15 bp, Homo sapiens
ttttaggttcaggga

SEQ ID NO: 521623 - DNA, 15 bp, Homo sapiens
tttaggttcagggat

SEQ ID NO: 521624 - DNA, 15 bp, Homo sapiens
ttaggttcagggatg

SEQ ID NO: 521625 - DNA, 15 bp, Homo sapiens
taggttcagggatgt

SEQ ID NO: 521626 - DNA, 15 bp, Homo sapiens
aggttcagggatgta

SEQ ID NO: 521627 - DNA, 15 bp, Homo sapiens
ggttcagggatgtat

SEQ ID NO: 521628 - DNA, 15 bp, Homo sapiens
gttcagggatgtatg

SEQ ID NO: 521629 - DNA, 15 bp, Homo sapiens
ttcagggatgtatgt

SEQ ID NO: 521630 - DNA, 15 bp, Homo sapiens
tcagggatgtatgtg

SEQ ID NO: 521631 - DNA, 15 bp, Homo sapiens
cagggatgtatgtgc

SEQ ID NO: 521632 - DNA, 15 bp, Homo sapiens
cctacatcaggcctt

SEQ ID NO: 521633 - DNA, 15 bp, Homo sapiens
ctacatcaggccttc

SEQ ID NO: 521634 - DNA, 15 bp, Homo sapiens
tacatcaggccttca

SEQ ID NO: 521635 - DNA, 15 bp, Homo sapiens
acatcaggccttcat

SEQ ID NO: 521636 - DNA, 15 bp, Homo sapiens
catcaggccttcatc

SEQ ID NO: 521637 - DNA, 15 bp, Homo sapiens
atcaggccttcatcc

SEQ ID NO: 521638 - DNA, 15 bp, Homo sapiens
tcaggccttcatcct

SEQ ID NO: 521639 - DNA, 15 bp, Homo sapiens
caggccttcatcctg

SEQ ID NO: 521640 - DNA, 15 bp, Homo sapiens
aggccttcatcctga

SEQ ID NO: 521641 - DNA, 15 bp, Homo sapiens
ggccttcatcctgag

SEQ ID NO: 521642 - DNA, 15 bp, Homo sapiens
gccttcatcctgagg

SEQ ID NO: 521643 - DNA, 15 bp, Homo sapiens
ccttcatcctgagga

SEQ ID NO: 521644 - DNA, 15 bp, Homo sapiens
cttcatcctgaggat

SEQ ID NO: 521645 - DNA, 15 bp, Homo sapiens
ttcatcctgaggatt

SEQ ID NO: 521646 - DNA, 15 bp, Homo sapiens
tcatcctgaggattt

SEQ ID NO: 521647 - DNA, 15 bp, Homo sapiens
catcctgaggatttt

SEQ ID NO: 521648 - DNA, 15 bp, Homo sapiens
atcctgaggatttta

SEQ ID NO: 521649 - DNA, 15 bp, Homo sapiens
tcctgaggattttat

SEQ ID NO: 521650 - DNA, 15 bp, Homo sapiens
cctgaggattttatc

SEQ ID NO: 521651 - DNA, 15 bp, Homo sapiens
ctgaggattttatca

SEQ ID NO: 521652 - DNA, 15 bp, Homo sapiens
tgaggattttatcaa

SEQ ID NO: 521653 - DNA, 15 bp, Homo sapiens
gaggattttatcaag

SEQ ID NO: 521654 - DNA, 15 bp, Homo sapiens
aggattttatcaaga

SEQ ID NO: 521655 - DNA, 15 bp, Homo sapiens
ggattttatcaagaa

SEQ ID NO: 521656 - DNA, 15 bp, Homo sapiens
gattttatcaagaaa

SEQ ID NO: 521657 - DNA, 15 bp, Homo sapiens
attttatcaagaaag

SEQ ID NO: 521658 - DNA, 15 bp, Homo sapiens
ttttatcaagaaagc

SEQ ID NO: 521659 - DNA, 15 bp, Homo sapiens
tttatcaagaaagca

SEQ ID NO: 521660 - DNA, 15 bp, Homo sapiens
ttatcaagaaagcag

SEQ ID NO: 521661 - DNA, 15 bp, Homo sapiens
tatcaagaaagcaga

SEQ ID NO: 521662 - DNA, 15 bp, Homo sapiens
atcaagaaagcagat

SEQ ID NO: 521663 - DNA, 15 bp, Homo sapiens
tcaagaaagcagatt

SEQ ID NO: 521664 - DNA, 15 bp, Homo sapiens
caagaaagcagattt

SEQ ID NO: 521665 - DNA, 15 bp, Homo sapiens
aagaaagcagatttg

SEQ ID NO: 521666 - DNA, 15 bp, Homo sapiens
agaaagcagatttgg

SEQ ID NO: 521667 - DNA, 15 bp, Homo sapiens
gaaagcagatttggc

SEQ ID NO: 521668 - DNA, 15 bp, Homo sapiens
aaagcagatttggca

SEQ ID NO: 521669 - DNA, 15 bp, Homo sapiens
aagcagatttggcag

SEQ ID NO: 521670 - DNA, 15 bp, Homo sapiens
agcagatttggcagt

SEQ ID NO: 521671 - DNA, 15 bp, Homo sapiens
gcagatttggcagtt

SEQ ID NO: 521672 - DNA, 15 bp, Homo sapiens
cagatttggcagttc

SEQ ID NO: 521673 - DNA, 15 bp, Homo sapiens
agatttggcagttca

SEQ ID NO: 521674 - DNA, 15 bp, Homo sapiens
gatttggcagttcaa

SEQ ID NO: 521675 - DNA, 15 bp, Homo sapiens
atttggcagttcaaa

SEQ ID NO: 521676 - DNA, 15 bp, Homo sapiens
tttggcagttcaaaa

SEQ ID NO: 521677 - DNA, 15 bp, Homo sapiens
ttggcagttcaaaag

SEQ ID NO: 521678 - DNA, 15 bp, Homo sapiens
tggcagttcaaaaga

SEQ ID NO: 521679 - DNA, 15 bp, Homo sapiens
ggcagttcaaaagac

SEQ ID NO: 521680 - DNA, 15 bp, Homo sapiens
gcagttcaaaagact

SEQ ID NO: 521681 - DNA, 15 bp, Homo sapiens
cagttcaaaagactc

SEQ ID NO: 521682 - DNA, 15 bp, Homo sapiens
agttcaaaagactcc

SEQ ID NO: 521683 - DNA, 15 bp, Homo sapiens
gttcaaaagactcct

SEQ ID NO: 521684 - DNA, 15 bp, Homo sapiens
ttcaaaagactcctg

SEQ ID NO: 521685 - DNA, 15 bp, Homo sapiens
tcaaaagactcctga

SEQ ID NO: 521686 - DNA, 15 bp, Homo sapiens
caaaagactcctgaa

SEQ ID NO: 521687 - DNA, 15 bp, Homo sapiens
aaaagactcctgaaa

SEQ ID NO: 521688 - DNA, 15 bp, Homo sapiens
aaagactcctgaaat

SEQ ID NO: 521689 - DNA, 15 bp, Homo sapiens
aagactcctgaaatg

SEQ ID NO: 521690 - DNA, 15 bp, Homo sapiens
agactcctgaaatga

SEQ ID NO: 521691 - DNA, 15 bp, Homo sapiens
gactcctgaaatgat

SEQ ID NO: 521692 - DNA, 15 bp, Homo sapiens
actcctgaaatgata

SEQ ID NO: 521693 - DNA, 15 bp, Homo sapiens
ctcctgaaatgataa

SEQ ID NO: 521694 - DNA, 15 bp, Homo sapiens
tcctgaaatgataaa

SEQ ID NO: 521695 - DNA, 15 bp, Homo sapiens
cctgaaatgataaat

SEQ ID NO: 521696 - DNA, 15 bp, Homo sapiens
ctgaaatgataaatc

SEQ ID NO: 521697 - DNA, 15 bp, Homo sapiens
tgaaatgataaatca

SEQ ID NO: 521698 - DNA, 15 bp, Homo sapiens
gaaatgataaatcag

SEQ ID NO: 521699 - DNA, 15 bp, Homo sapiens
aaatgataaatcagg

SEQ ID NO: 521700 - DNA, 15 bp, Homo sapiens
aatgataaatcaggg

SEQ ID NO: 521701 - DNA, 15 bp, Homo sapiens
atgataaatcaggga

SEQ ID NO: 521702 - DNA, 15 bp, Homo sapiens
tgataaatcagggaa

SEQ ID NO: 521703 - DNA, 15 bp, Homo sapiens
gataaatcagggaac

SEQ ID NO: 521704 - DNA, 15 bp, Homo sapiens
ataaatcagggaact

SEQ ID NO: 521705 - DNA, 15 bp, Homo sapiens
taaatcagggaacta

SEQ ID NO: 521706 - DNA, 15 bp, Homo sapiens
aaatcagggaactaa

SEQ ID NO: 521707 - DNA, 15 bp, Homo sapiens
aatcagggaactaac

SEQ ID NO: 521708 - DNA, 15 bp, Homo sapiens
atcagggaactaacc

SEQ ID NO: 521709 - DNA, 15 bp, Homo sapiens
tcagggaactaacca

SEQ ID NO: 521710 - DNA, 15 bp, Homo sapiens
cagggaactaaccaa

SEQ ID NO: 521711 - DNA, 15 bp, Homo sapiens
agggaactaaccaaa

SEQ ID NO: 521712 - DNA, 15 bp, Homo sapiens
gggaactaaccaaac

SEQ ID NO: 521713 - DNA, 15 bp, Homo sapiens
ggaactaaccaaacg

SEQ ID NO: 521714 - DNA, 15 bp, Homo sapiens
gaactaaccaaacgg

SEQ ID NO: 521715 - DNA, 15 bp, Homo sapiens
aactaaccaaacgga

SEQ ID NO: 521716 - DNA, 15 bp, Homo sapiens
actaaccaaacggag

SEQ ID NO: 521717 - DNA, 15 bp, Homo sapiens
ctaaccaaacggagc

SEQ ID NO: 521718 - DNA, 15 bp, Homo sapiens
taaccaaacggagca

SEQ ID NO: 521719 - DNA, 15 bp, Homo sapiens
aaccaaacggagcag

SEQ ID NO: 521720 - DNA, 15 bp, Homo sapiens
accaaacggagcaga

SEQ ID NO: 521721 - DNA, 15 bp, Homo sapiens
ccaaacggagcagaa

SEQ ID NO: 521722 - DNA, 15 bp, Homo sapiens
caaacggagcagaat

SEQ ID NO: 521723 - DNA, 15 bp, Homo sapiens
aaacggagcagaatg

SEQ ID NO: 521724 - DNA, 15 bp, Homo sapiens
aacggagcagaatgg

SEQ ID NO: 521725 - DNA, 15 bp, Homo sapiens
acggagcagaatggt

SEQ ID NO: 521726 - DNA, 15 bp, Homo sapiens
cggagcagaatggtc

SEQ ID NO: 521727 - DNA, 15 bp, Homo sapiens
ggagcagaatggtca

SEQ ID NO: 521728 - DNA, 15 bp, Homo sapiens
gagcagaatggtcaa

SEQ ID NO: 521729 - DNA, 15 bp, Homo sapiens
agcagaatggtcaag

SEQ ID NO: 521730 - DNA, 15 bp, Homo sapiens
gcagaatggtcaagt

SEQ ID NO: 521731 - DNA, 15 bp, Homo sapiens
cagaatggtcaagtg

SEQ ID NO: 521732 - DNA, 15 bp, Homo sapiens
agaatggtcaagtga

SEQ ID NO: 521733 - DNA, 15 bp, Homo sapiens
gaatggtcaagtgat

SEQ ID NO: 521734 - DNA, 15 bp, Homo sapiens
aatggtcaagtgatg

SEQ ID NO: 521735 - DNA, 15 bp, Homo sapiens
ctattcagaatgaga

SEQ ID NO: 521736 - DNA, 15 bp, Homo sapiens
tattcagaatgagaa

SEQ ID NO: 521737 - DNA, 15 bp, Homo sapiens
attcagaatgagaaa

SEQ ID NO: 521738 - DNA, 15 bp, Homo sapiens
ttcagaatgagaaaa

SEQ ID NO: 521739 - DNA, 15 bp, Homo sapiens
tcagaatgagaaaaa

SEQ ID NO: 521740 - DNA, 15 bp, Homo sapiens
cagaatgagaaaaat

SEQ ID NO: 521741 - DNA, 15 bp, Homo sapiens
agaatgagaaaaatc

SEQ ID NO: 521742 - DNA, 15 bp, Homo sapiens
gaatgagaaaaatcc

SEQ ID NO: 521743 - DNA, 15 bp, Homo sapiens
aatgagaaaaatcct

SEQ ID NO: 521744 - DNA, 15 bp, Homo sapiens
atgagaaaaatccta

SEQ ID NO: 521745 - DNA, 15 bp, Homo sapiens
tgagaaaaatcctaa

SEQ ID NO: 521746 - DNA, 15 bp, Homo sapiens
gagaaaaatcctaac

SEQ ID NO: 521747 - DNA, 15 bp, Homo sapiens
agaaaaatcctaacc

SEQ ID NO: 521748 - DNA, 15 bp, Homo sapiens
gaaaaatcctaaccc

SEQ ID NO: 521749 - DNA, 15 bp, Homo sapiens
aaaaatcctaaccca

SEQ ID NO: 521750 - DNA, 15 bp, Homo sapiens
aaaatcctaacccaa

SEQ ID NO: 521751 - DNA, 15 bp, Homo sapiens
aaatcctaacccaat

SEQ ID NO: 521752 - DNA, 15 bp, Homo sapiens
aatcctaacccaata

SEQ ID NO: 521753 - DNA, 15 bp, Homo sapiens
atcctaacccaatag

SEQ ID NO: 521754 - DNA, 15 bp, Homo sapiens
tcctaacccaataga

SEQ ID NO: 521755 - DNA, 15 bp, Homo sapiens
cctaacccaatagaa

SEQ ID NO: 521756 - DNA, 15 bp, Homo sapiens
ctaacccaatagaat

SEQ ID NO: 521757 - DNA, 15 bp, Homo sapiens
taacccaatagaatc

SEQ ID NO: 521758 - DNA, 15 bp, Homo sapiens
aacccaatagaatca

SEQ ID NO: 521759 - DNA, 15 bp, Homo sapiens
acccaatagaatcac

SEQ ID NO: 521760 - DNA, 15 bp, Homo sapiens
cccaatagaatcact

SEQ ID NO: 521761 - DNA, 15 bp, Homo sapiens
ccaatagaatcactc

SEQ ID NO: 521762 - DNA, 15 bp, Homo sapiens
caatagaatcactcg

SEQ ID NO: 521763 - DNA, 15 bp, Homo sapiens
aatagaatcactcga

SEQ ID NO: 521764 - DNA, 15 bp, Homo sapiens
atagaatcactcgaa

SEQ ID NO: 521765 - DNA, 15 bp, Homo sapiens
tagaatcactcgaaa

SEQ ID NO: 521766 - DNA, 15 bp, Homo sapiens
agaatcactcgaaaa

SEQ ID NO: 521767 - DNA, 15 bp, Homo sapiens
gaatcactcgaaaaa

SEQ ID NO: 521768 - DNA, 15 bp, Homo sapiens
aatcactcgaaaaag

SEQ ID NO: 521769 - DNA, 15 bp, Homo sapiens
atcactcgaaaaaga

SEQ ID NO: 521770 - DNA, 15 bp, Homo sapiens
tcactcgaaaaagaa

SEQ ID NO: 521771 - DNA, 15 bp, Homo sapiens
cactcgaaaaagaat

SEQ ID NO: 521772 - DNA, 15 bp, Homo sapiens
actcgaaaaagaatc

SEQ ID NO: 521773 - DNA, 15 bp, Homo sapiens
ctcgaaaaagaatct

SEQ ID NO: 521774 - DNA, 15 bp, Homo sapiens
tcgaaaaagaatctg

SEQ ID NO: 521775 - DNA, 15 bp, Homo sapiens
cgaaaaagaatctgc

SEQ ID NO: 521776 - DNA, 15 bp, Homo sapiens
gaaaaagaatctgct

SEQ ID NO: 521777 - DNA, 15 bp, Homo sapiens
aaaaagaatctgctt

SEQ ID NO: 521778 - DNA, 15 bp, Homo sapiens
aaaagaatctgcttt

SEQ ID NO: 521779 - DNA, 15 bp, Homo sapiens
aaagaatctgctttc

SEQ ID NO: 521780 - DNA, 15 bp, Homo sapiens
aagaatctgctttca

SEQ ID NO: 521781 - DNA, 15 bp, Homo sapiens
agaatctgctttcaa

SEQ ID NO: 521782 - DNA, 15 bp, Homo sapiens
gaatctgctttcaaa

SEQ ID NO: 521783 - DNA, 15 bp, Homo sapiens
aatctgctttcaaaa

SEQ ID NO: 521784 - DNA, 15 bp, Homo sapiens
atctgctttcaaaac

SEQ ID NO: 521785 - DNA, 15 bp, Homo sapiens
tctgctttcaaaacg

SEQ ID NO: 521786 - DNA, 15 bp, Homo sapiens
ctgctttcaaaacga

SEQ ID NO: 521787 - DNA, 15 bp, Homo sapiens
tgctttcaaaacgaa

SEQ ID NO: 521788 - DNA, 15 bp, Homo sapiens
gctttcaaaacgaaa

SEQ ID NO: 521789 - DNA, 15 bp, Homo sapiens
ctttcaaaacgaaag

SEQ ID NO: 521790 - DNA, 15 bp, Homo sapiens
tttcaaaacgaaagc

SEQ ID NO: 521791 - DNA, 15 bp, Homo sapiens
ttcaaaacgaaagct

SEQ ID NO: 521792 - DNA, 15 bp, Homo sapiens
tcaaaacgaaagctg

SEQ ID NO: 521793 - DNA, 15 bp, Homo sapiens
caaaacgaaagctga

SEQ ID NO: 521794 - DNA, 15 bp, Homo sapiens
aaaacgaaagctgaa

SEQ ID NO: 521795 - DNA, 15 bp, Homo sapiens
aaacgaaagctgaac

SEQ ID NO: 521796 - DNA, 15 bp, Homo sapiens
aacgaaagctgaacc

SEQ ID NO: 521797 - DNA, 15 bp, Homo sapiens
acgaaagctgaacct

SEQ ID NO: 521798 - DNA, 15 bp, Homo sapiens
cgaaagctgaaccta

SEQ ID NO: 521799 - DNA, 15 bp, Homo sapiens
gaaagctgaacctat

SEQ ID NO: 521800 - DNA, 15 bp, Homo sapiens
aaagctgaacctata

SEQ ID NO: 521801 - DNA, 15 bp, Homo sapiens
aagctgaacctataa

SEQ ID NO: 521802 - DNA, 15 bp, Homo sapiens
agctgaacctataag

SEQ ID NO: 521803 - DNA, 15 bp, Homo sapiens
gctgaacctataagc

SEQ ID NO: 521804 - DNA, 15 bp, Homo sapiens
ctgaacctataagca

SEQ ID NO: 521805 - DNA, 15 bp, Homo sapiens
tgaacctataagcag

SEQ ID NO: 521806 - DNA, 15 bp, Homo sapiens
gaacctataagcagc

SEQ ID NO: 521807 - DNA, 15 bp, Homo sapiens
aacctataagcagca

SEQ ID NO: 521808 - DNA, 15 bp, Homo sapiens
acctataagcagcag

SEQ ID NO: 521809 - DNA, 15 bp, Homo sapiens
cctataagcagcagt

SEQ ID NO: 521810 - DNA, 15 bp, Homo sapiens
ctataagcagcagta

SEQ ID NO: 521811 - DNA, 15 bp, Homo sapiens
tataagcagcagtat

SEQ ID NO: 521812 - DNA, 15 bp, Homo sapiens
ataagcagcagtata

SEQ ID NO: 521813 - DNA, 15 bp, Homo sapiens
taagcagcagtataa

SEQ ID NO: 521814 - DNA, 15 bp, Homo sapiens
aagcagcagtataag

SEQ ID NO: 521815 - DNA, 15 bp, Homo sapiens
ctaattgtactgaat

SEQ ID NO: 521816 - DNA, 15 bp, Homo sapiens
taattgtactgaatt

SEQ ID NO: 521817 - DNA, 15 bp, Homo sapiens
aattgtactgaattg

SEQ ID NO: 521818 - DNA, 15 bp, Homo sapiens
attgtactgaattgc

SEQ ID NO: 521819 - DNA, 15 bp, Homo sapiens
ttgtactgaattgca

SEQ ID NO: 521820 - DNA, 15 bp, Homo sapiens
tgtactgaattgcaa

SEQ ID NO: 521821 - DNA, 15 bp, Homo sapiens
gtactgaattgcaaa

SEQ ID NO: 521822 - DNA, 15 bp, Homo sapiens
tactgaattgcaaat

SEQ ID NO: 521823 - DNA, 15 bp, Homo sapiens
actgaattgcaaatt

SEQ ID NO: 521824 - DNA, 15 bp, Homo sapiens
ctgaattgcaaattg

SEQ ID NO: 521825 - DNA, 15 bp, Homo sapiens
tgaattgcaaattga

SEQ ID NO: 521826 - DNA, 15 bp, Homo sapiens
gaattgcaaattgat

SEQ ID NO: 521827 - DNA, 15 bp, Homo sapiens
aattgcaaattgata

SEQ ID NO: 521828 - DNA, 15 bp, Homo sapiens
attgcaaattgatag

SEQ ID NO: 521829 - DNA, 15 bp, Homo sapiens
ttgcaaattgatagt

SEQ ID NO: 521830 - DNA, 15 bp, Homo sapiens
tgcaaattgatagtt

SEQ ID NO: 521831 - DNA, 15 bp, Homo sapiens
gcaaattgatagttg

SEQ ID NO: 521832 - DNA, 15 bp, Homo sapiens
caaattgatagttgt

SEQ ID NO: 521833 - DNA, 15 bp, Homo sapiens
aaattgatagttgtt

SEQ ID NO: 521834 - DNA, 15 bp, Homo sapiens
aattgatagttgttc

SEQ ID NO: 521835 - DNA, 15 bp, Homo sapiens
attgatagttgttct

SEQ ID NO: 521836 - DNA, 15 bp, Homo sapiens
ttgatagttgttcta

SEQ ID NO: 521837 - DNA, 15 bp, Homo sapiens
tgatagttgttctag

SEQ ID NO: 521838 - DNA, 15 bp, Homo sapiens
gatagttgttctagc

SEQ ID NO: 521839 - DNA, 15 bp, Homo sapiens
atagttgttctagca

SEQ ID NO: 521840 - DNA, 15 bp, Homo sapiens
tagttgttctagcag

SEQ ID NO: 521841 - DNA, 15 bp, Homo sapiens
agttgttctagcagt

SEQ ID NO: 521842 - DNA, 15 bp, Homo sapiens
gttgttctagcagtg

SEQ ID NO: 521843 - DNA, 15 bp, Homo sapiens
ttgttctagcagtga

SEQ ID NO: 521844 - DNA, 15 bp, Homo sapiens
tgttctagcagtgaa

SEQ ID NO: 521845 - DNA, 15 bp, Homo sapiens
gttctagcagtgaag

SEQ ID NO: 521846 - DNA, 15 bp, Homo sapiens
ttctagcagtgaaga

SEQ ID NO: 521847 - DNA, 15 bp, Homo sapiens
tctagcagtgaagag

SEQ ID NO: 521848 - DNA, 15 bp, Homo sapiens
ctagcagtgaagaga

SEQ ID NO: 521849 - DNA, 15 bp, Homo sapiens
tagcagtgaagagat

SEQ ID NO: 521850 - DNA, 15 bp, Homo sapiens
agcagtgaagagata

SEQ ID NO: 521851 - DNA, 15 bp, Homo sapiens
gcagtgaagagataa

SEQ ID NO: 521852 - DNA, 15 bp, Homo sapiens
cagtgaagagataaa

SEQ ID NO: 521853 - DNA, 15 bp, Homo sapiens
agtgaagagataaag

SEQ ID NO: 521854 - DNA, 15 bp, Homo sapiens
gtgaagagataaaga

SEQ ID NO: 521855 - DNA, 15 bp, Homo sapiens
tgaagagataaagaa

SEQ ID NO: 521856 - DNA, 15 bp, Homo sapiens
gaagagataaagaaa

SEQ ID NO: 521857 - DNA, 15 bp, Homo sapiens
aagagataaagaaaa

SEQ ID NO: 521858 - DNA, 15 bp, Homo sapiens
agagataaagaaaaa

SEQ ID NO: 521859 - DNA, 15 bp, Homo sapiens
gagataaagaaaaaa

SEQ ID NO: 521860 - DNA, 15 bp, Homo sapiens
agataaagaaaaaaa

SEQ ID NO: 521861 - DNA, 15 bp, Homo sapiens
gataaagaaaaaaaa

SEQ ID NO: 521862 - DNA, 15 bp, Homo sapiens
ataaagaaaaaaaag

SEQ ID NO: 521863 - DNA, 15 bp, Homo sapiens
taaagaaaaaaaagt

SEQ ID NO: 521864 - DNA, 15 bp, Homo sapiens
aagaaaaaaaagtac

SEQ ID NO: 521865 - DNA, 15 bp, Homo sapiens
agaaaaaaaagtaca

SEQ ID NO: 521866 - DNA, 15 bp, Homo sapiens
gaaaaaaaagtacaa

SEQ ID NO: 521867 - DNA, 15 bp, Homo sapiens
aaaaaaaagtacaac

SEQ ID NO: 521868 - DNA, 15 bp, Homo sapiens
aaaaaaagtacaacc

SEQ ID NO: 521869 - DNA, 15 bp, Homo sapiens
aaaaaagtacaacca

SEQ ID NO: 521870 - DNA, 15 bp, Homo sapiens
aaaaagtacaaccaa

SEQ ID NO: 521871 - DNA, 15 bp, Homo sapiens
aaaagtacaaccaaa

SEQ ID NO: 521872 - DNA, 15 bp, Homo sapiens
aaagtacaaccaaat

SEQ ID NO: 521873 - DNA, 15 bp, Homo sapiens
aagtacaaccaaatg

SEQ ID NO: 521874 - DNA, 15 bp, Homo sapiens
agtacaaccaaatgc

SEQ ID NO: 521875 - DNA, 15 bp, Homo sapiens
gtacaaccaaatgcc

SEQ ID NO: 521876 - DNA, 15 bp, Homo sapiens
tacaaccaaatgcca

SEQ ID NO: 521877 - DNA, 15 bp, Homo sapiens
acaaccaaatgccag

SEQ ID NO: 521878 - DNA, 15 bp, Homo sapiens
caaccaaatgccagt

SEQ ID NO: 521879 - DNA, 15 bp, Homo sapiens
aaccaaatgccagtc

SEQ ID NO: 521880 - DNA, 15 bp, Homo sapiens
accaaatgccagtca

SEQ ID NO: 521881 - DNA, 15 bp, Homo sapiens
ccaaatgccagtcag

SEQ ID NO: 521882 - DNA, 15 bp, Homo sapiens
caaatgccagtcagg

SEQ ID NO: 521883 - DNA, 15 bp, Homo sapiens
aaatgccagtcaggc

SEQ ID NO: 521884 - DNA, 15 bp, Homo sapiens
aatgccagtcaggca

SEQ ID NO: 521885 - DNA, 15 bp, Homo sapiens
atgccagtcaggcac

SEQ ID NO: 521886 - DNA, 15 bp, Homo sapiens
tgccagtcaggcaca

SEQ ID NO: 521887 - DNA, 15 bp, Homo sapiens
gccagtcaggcacag

SEQ ID NO: 521888 - DNA, 15 bp, Homo sapiens
ccagtcaggcacagc

SEQ ID NO: 521889 - DNA, 15 bp, Homo sapiens
cagtcaggcacagca

SEQ ID NO: 521890 - DNA, 15 bp, Homo sapiens
agtcaggcacagcag

SEQ ID NO: 521891 - DNA, 15 bp, Homo sapiens
gtcaggcacagcaga

SEQ ID NO: 521892 - DNA, 15 bp, Homo sapiens
tcaggcacagcagaa

SEQ ID NO: 521893 - DNA, 15 bp, Homo sapiens
caggcacagcagaaa

SEQ ID NO: 521894 - DNA, 15 bp, Homo sapiens
aggcacagcagaaac

SEQ ID NO: 521895 - DNA, 15 bp, Homo sapiens
ggcacagcagaaacc

SEQ ID NO: 521896 - DNA, 15 bp, Homo sapiens
gcacagcagaaacct

SEQ ID NO: 521897 - DNA, 15 bp, Homo sapiens
cacagcagaaaccta

SEQ ID NO: 521898 - DNA, 15 bp, Homo sapiens
acagcagaaacctac

SEQ ID NO: 521899 - DNA, 15 bp, Homo sapiens
cagcagaaacctaca

SEQ ID NO: 521900 - DNA, 15 bp, Homo sapiens
agcagaaacctacaa

SEQ ID NO: 521901 - DNA, 15 bp, Homo sapiens
gcagaaacctacaac

SEQ ID NO: 521902 - DNA, 15 bp, Homo sapiens
cagaaacctacaact

SEQ ID NO: 521903 - DNA, 15 bp, Homo sapiens
agaaacctacaactc

SEQ ID NO: 521904 - DNA, 15 bp, Homo sapiens
gaaacctacaactca

SEQ ID NO: 521905 - DNA, 15 bp, Homo sapiens
aaacctacaactcat

SEQ ID NO: 521906 - DNA, 15 bp, Homo sapiens
aacctacaactcatg

SEQ ID NO: 521907 - DNA, 15 bp, Homo sapiens
acctacaactcatgg

SEQ ID NO: 521908 - DNA, 15 bp, Homo sapiens
cctacaactcatgga

SEQ ID NO: 521909 - DNA, 15 bp, Homo sapiens
ctacaactcatggaa

SEQ ID NO: 521910 - DNA, 15 bp, Homo sapiens
tacaactcatggaag

SEQ ID NO: 521911 - DNA, 15 bp, Homo sapiens
acaactcatggaagg

SEQ ID NO: 521912 - DNA, 15 bp, Homo sapiens
caactcatggaaggt

SEQ ID NO: 521913 - DNA, 15 bp, Homo sapiens
aactcatggaaggta

SEQ ID NO: 521914 - DNA, 15 bp, Homo sapiens
actcatggaaggtaa

SEQ ID NO: 521915 - DNA, 15 bp, Homo sapiens
ctcatggaaggtaaa

SEQ ID NO: 521916 - DNA, 15 bp, Homo sapiens
tcatggaaggtaaag

SEQ ID NO: 521917 - DNA, 15 bp, Homo sapiens
catggaaggtaaaga

SEQ ID NO: 521918 - DNA, 15 bp, Homo sapiens
atggaaggtaaagaa

SEQ ID NO: 521919 - DNA, 15 bp, Homo sapiens
tggaaggtaaagaac

SEQ ID NO: 521920 - DNA, 15 bp, Homo sapiens
ggaaggtaaagaacc

SEQ ID NO: 521921 - DNA, 15 bp, Homo sapiens
gaaggtaaagaacct

SEQ ID NO: 521922 - DNA, 15 bp, Homo sapiens
aaggtaaagaacctg

SEQ ID NO: 521923 - DNA, 15 bp, Homo sapiens
aggtaaagaacctgc

SEQ ID NO: 521924 - DNA, 15 bp, Homo sapiens
ggtaaagaacctgca

SEQ ID NO: 521925 - DNA, 15 bp, Homo sapiens
gtaaagaacctgcaa

SEQ ID NO: 521926 - DNA, 15 bp, Homo sapiens
taaagaacctgcaac

SEQ ID NO: 521927 - DNA, 15 bp, Homo sapiens
aaagaacctgcaact

SEQ ID NO: 521928 - DNA, 15 bp, Homo sapiens
aagaacctgcaactg

SEQ ID NO: 521929 - DNA, 15 bp, Homo sapiens
agaacctgcaactgg

SEQ ID NO: 521930 - DNA, 15 bp, Homo sapiens
gaacctgcaactgga

SEQ ID NO: 521931 - DNA, 15 bp, Homo sapiens
aacctgcaactggag

SEQ ID NO: 521932 - DNA, 15 bp, Homo sapiens
acctgcaactggagc

SEQ ID NO: 521933 - DNA, 15 bp, Homo sapiens
cctgcaactggagcc

SEQ ID NO: 521934 - DNA, 15 bp, Homo sapiens
ctgcaactggagcca

SEQ ID NO: 521935 - DNA, 15 bp, Homo sapiens
tgcaactggagccaa

SEQ ID NO: 521936 - DNA, 15 bp, Homo sapiens
gcaactggagccaag

SEQ ID NO: 521937 - DNA, 15 bp, Homo sapiens
caactggagccaaga

SEQ ID NO: 521938 - DNA, 15 bp, Homo sapiens
aactggagccaagaa

SEQ ID NO: 521939 - DNA, 15 bp, Homo sapiens
actggagccaagaag

SEQ ID NO: 521940 - DNA, 15 bp, Homo sapiens
ctggagccaagaaga

SEQ ID NO: 521941 - DNA, 15 bp, Homo sapiens
tggagccaagaagag

SEQ ID NO: 521942 - DNA, 15 bp, Homo sapiens
ggagccaagaagagt

SEQ ID NO: 521943 - DNA, 15 bp, Homo sapiens
gagccaagaagagta

SEQ ID NO: 521944 - DNA, 15 bp, Homo sapiens
agccaagaagagtaa

SEQ ID NO: 521945 - DNA, 15 bp, Homo sapiens
gccaagaagagtaac

SEQ ID NO: 521946 - DNA, 15 bp, Homo sapiens
ccaagaagagtaaca

SEQ ID NO: 521947 - DNA, 15 bp, Homo sapiens
caagaagagtaacaa

SEQ ID NO: 521948 - DNA, 15 bp, Homo sapiens
aagaagagtaacaag

SEQ ID NO: 521949 - DNA, 15 bp, Homo sapiens
agaagagtaacaagc

SEQ ID NO: 521950 - DNA, 15 bp, Homo sapiens
gaagagtaacaagcc

SEQ ID NO: 521951 - DNA, 15 bp, Homo sapiens
aagagtaacaagcca

SEQ ID NO: 521952 - DNA, 15 bp, Homo sapiens
agagtaacaagccaa

SEQ ID NO: 521953 - DNA, 15 bp, Homo sapiens
gagtaacaagccaaa

SEQ ID NO: 521954 - DNA, 15 bp, Homo sapiens
agtaacaagccaaat

SEQ ID NO: 521955 - DNA, 15 bp, Homo sapiens
gtaacaagccaaatg

SEQ ID NO: 521956 - DNA, 15 bp, Homo sapiens
taacaagccaaatga

SEQ ID NO: 521957 - DNA, 15 bp, Homo sapiens
aacaagccaaatgaa

SEQ ID NO: 521958 - DNA, 15 bp, Homo sapiens
acaagccaaatgaac

SEQ ID NO: 521959 - DNA, 15 bp, Homo sapiens
caagccaaatgaaca

SEQ ID NO: 521960 - DNA, 15 bp, Homo sapiens
aagccaaatgaacag

SEQ ID NO: 521961 - DNA, 15 bp, Homo sapiens
agccaaatgaacaga

SEQ ID NO: 521962 - DNA, 15 bp, Homo sapiens
gccaaatgaacagac

SEQ ID NO: 521963 - DNA, 15 bp, Homo sapiens
ccaaatgaacagaca

SEQ ID NO: 521964 - DNA, 15 bp, Homo sapiens
caaatgaacagacaa

SEQ ID NO: 521965 - DNA, 15 bp, Homo sapiens
aaatgaacagacaag

SEQ ID NO: 521966 - DNA, 15 bp, Homo sapiens
aatgaacagacaagt

SEQ ID NO: 521967 - DNA, 15 bp, Homo sapiens
atgaacagacaagta

SEQ ID NO: 521968 - DNA, 15 bp, Homo sapiens
tgaacagacaagtaa

SEQ ID NO: 521969 - DNA, 15 bp, Homo sapiens
gaacagacaagtaaa

SEQ ID NO: 521970 - DNA, 15 bp, Homo sapiens
aacagacaagtaaaa

SEQ ID NO: 521971 - DNA, 15 bp, Homo sapiens
acagacaagtaaaag

SEQ ID NO: 521972 - DNA, 15 bp, Homo sapiens
cagacaagtaaaaga

SEQ ID NO: 521973 - DNA, 15 bp, Homo sapiens
agacaagtaaaagac

SEQ ID NO: 521974 - DNA, 15 bp, Homo sapiens
gacaagtaaaagaca

SEQ ID NO: 521975 - DNA, 15 bp, Homo sapiens
acaagtaaaagacat

SEQ ID NO: 521976 - DNA, 15 bp, Homo sapiens
caagtaaaagacatg

SEQ ID NO: 521977 - DNA, 15 bp, Homo sapiens
aagtaaaagacatga

SEQ ID NO: 521978 - DNA, 15 bp, Homo sapiens
agtaaaagacatgac

SEQ ID NO: 521979 - DNA, 15 bp, Homo sapiens
gtaaaagacatgaca

SEQ ID NO: 521980 - DNA, 15 bp, Homo sapiens
taaaagacatgacag

SEQ ID NO: 521981 - DNA, 15 bp, Homo sapiens
aaaagacatgacagc

SEQ ID NO: 521982 - DNA, 15 bp, Homo sapiens
aaagacatgacagcg

SEQ ID NO: 521983 - DNA, 15 bp, Homo sapiens
aagacatgacagcga

SEQ ID NO: 521984 - DNA, 15 bp, Homo sapiens
agacatgacagcgat

SEQ ID NO: 521985 - DNA, 15 bp, Homo sapiens
gacatgacagcgata

SEQ ID NO: 521986 - DNA, 15 bp, Homo sapiens
acatgacagcgatac

SEQ ID NO: 521987 - DNA, 15 bp, Homo sapiens
catgacagcgatact

SEQ ID NO: 521988 - DNA, 15 bp, Homo sapiens
atgacagcgatactt

SEQ ID NO: 521989 - DNA, 15 bp, Homo sapiens
tgacagcgatacttt

SEQ ID NO: 521990 - DNA, 15 bp, Homo sapiens
gacagcgatactttc

SEQ ID NO: 521991 - DNA, 15 bp, Homo sapiens
acagcgatactttcc

SEQ ID NO: 521992 - DNA, 15 bp, Homo sapiens
cagcgatactttccc

SEQ ID NO: 521993 - DNA, 15 bp, Homo sapiens
agcgatactttccca

SEQ ID NO: 521994 - DNA, 15 bp, Homo sapiens
gcgatactttcccag

SEQ ID NO: 521995 - DNA, 15 bp, Homo sapiens
cgatactttcccaga

SEQ ID NO: 521996 - DNA, 15 bp, Homo sapiens
gatactttcccagag

SEQ ID NO: 521997 - DNA, 15 bp, Homo sapiens
atactttcccagagc

SEQ ID NO: 521998 - DNA, 15 bp, Homo sapiens
tactttcccagagct

SEQ ID NO: 521999 - DNA, 15 bp, Homo sapiens
actttcccagagctg

SEQ ID NO: 522000 - DNA, 15 bp, Homo sapiens
ctttcccagagctga

SEQ ID NO: 522001 - DNA, 15 bp, Homo sapiens
tttcccagagctgaa

SEQ ID NO: 522002 - DNA, 15 bp, Homo sapiens
ttcccagagctgaag

SEQ ID NO: 522003 - DNA, 15 bp, Homo sapiens
tcccagagctgaagt

SEQ ID NO: 522004 - DNA, 15 bp, Homo sapiens
cccagagctgaagtt

SEQ ID NO: 522005 - DNA, 15 bp, Homo sapiens
ccagagctgaagtta

SEQ ID NO: 522006 - DNA, 15 bp, Homo sapiens
cagagctgaagttaa

SEQ ID NO: 522007 - DNA, 15 bp, Homo sapiens
agagctgaagttaac

SEQ ID NO: 522008 - DNA, 15 bp, Homo sapiens
gagctgaagttaaca

SEQ ID NO: 522009 - DNA, 15 bp, Homo sapiens
agctgaagttaacaa

SEQ ID NO: 522010 - DNA, 15 bp, Homo sapiens
gctgaagttaacaaa

SEQ ID NO: 522011 - DNA, 15 bp, Homo sapiens
ctgaagttaacaaat

SEQ ID NO: 522012 - DNA, 15 bp, Homo sapiens
gatttcagataactt

SEQ ID NO: 522013 - DNA, 15 bp, Homo sapiens
atttcagataactta

SEQ ID NO: 522014 - DNA, 15 bp, Homo sapiens
tttcagataacttag

SEQ ID NO: 522015 - DNA, 15 bp, Homo sapiens
ttcagataacttaga

SEQ ID NO: 522016 - DNA, 15 bp, Homo sapiens
tcagataacttagaa

SEQ ID NO: 522017 - DNA, 15 bp, Homo sapiens
cagataacttagaac

SEQ ID NO: 522018 - DNA, 15 bp, Homo sapiens
agataacttagaaca

SEQ ID NO: 522019 - DNA, 15 bp, Homo sapiens
gataacttagaacag

SEQ ID NO: 522020 - DNA, 15 bp, Homo sapiens
ataacttagaacagc

SEQ ID NO: 522021 - DNA, 15 bp, Homo sapiens
taacttagaacagcc

SEQ ID NO: 522022 - DNA, 15 bp, Homo sapiens
aacttagaacagcct

SEQ ID NO: 522023 - DNA, 15 bp, Homo sapiens
acttagaacagccta

SEQ ID NO: 522024 - DNA, 15 bp, Homo sapiens
cttagaacagcctat

SEQ ID NO: 522025 - DNA, 15 bp, Homo sapiens
ttagaacagcctatg

SEQ ID NO: 522026 - DNA, 15 bp, Homo sapiens
tagaacagcctatgg

SEQ ID NO: 522027 - DNA, 15 bp, Homo sapiens
agaacagcctatggg

SEQ ID NO: 522028 - DNA, 15 bp, Homo sapiens
gaacagcctatggga

SEQ ID NO: 522029 - DNA, 15 bp, Homo sapiens
aacagcctatgggaa

SEQ ID NO: 522030 - DNA, 15 bp, Homo sapiens
acagcctatgggaag

SEQ ID NO: 522031 - DNA, 15 bp, Homo sapiens
cagcctatgggaagt

SEQ ID NO: 522032 - DNA, 15 bp, Homo sapiens
agcctatgggaagta

SEQ ID NO: 522033 - DNA, 15 bp, Homo sapiens
gcctatgggaagtag

SEQ ID NO: 522034 - DNA, 15 bp, Homo sapiens
cctatgggaagtagt

SEQ ID NO: 522035 - DNA, 15 bp, Homo sapiens
ctatgggaagtagtc

SEQ ID NO: 522036 - DNA, 15 bp, Homo sapiens
tatgggaagtagtca

SEQ ID NO: 522037 - DNA, 15 bp, Homo sapiens
atgggaagtagtcat

SEQ ID NO: 522038 - DNA, 15 bp, Homo sapiens
tgggaagtagtcatg

SEQ ID NO: 522039 - DNA, 15 bp, Homo sapiens
gggaagtagtcatgc

SEQ ID NO: 522040 - DNA, 15 bp, Homo sapiens
ggaagtagtcatgca

SEQ ID NO: 522041 - DNA, 15 bp, Homo sapiens
gaagtagtcatgcat

SEQ ID NO: 522042 - DNA, 15 bp, Homo sapiens
aagtagtcatgcatc

SEQ ID NO: 522043 - DNA, 15 bp, Homo sapiens
agtagtcatgcatct

SEQ ID NO: 522044 - DNA, 15 bp, Homo sapiens
gtagtcatgcatctc

SEQ ID NO: 522045 - DNA, 15 bp, Homo sapiens
tagtcatgcatctca

SEQ ID NO: 522046 - DNA, 15 bp, Homo sapiens
agtcatgcatctcag

SEQ ID NO: 522047 - DNA, 15 bp, Homo sapiens
gtcatgcatctcagg

SEQ ID NO: 522048 - DNA, 15 bp, Homo sapiens
tcatgcatctcaggt

SEQ ID NO: 522049 - DNA, 15 bp, Homo sapiens
catgcatctcaggtt

SEQ ID NO: 522050 - DNA, 15 bp, Homo sapiens
atgcatctcaggttt

SEQ ID NO: 522051 - DNA, 15 bp, Homo sapiens
tgcatctcaggtttg

SEQ ID NO: 522052 - DNA, 15 bp, Homo sapiens
gcatctcaggtttgt

SEQ ID NO: 522053 - DNA, 15 bp, Homo sapiens
catctcaggtttgtt

SEQ ID NO: 522054 - DNA, 15 bp, Homo sapiens
atctcaggtttgttc

SEQ ID NO: 522055 - DNA, 15 bp, Homo sapiens
tctcaggtttgttct

SEQ ID NO: 522056 - DNA, 15 bp, Homo sapiens
ctcaggtttgttctg

SEQ ID NO: 522057 - DNA, 15 bp, Homo sapiens
tcaggtttgttctga

SEQ ID NO: 522058 - DNA, 15 bp, Homo sapiens
caggtttgttctgag

SEQ ID NO: 522059 - DNA, 15 bp, Homo sapiens
aggtttgttctgaga

SEQ ID NO: 522060 - DNA, 15 bp, Homo sapiens
ggtttgttctgagac

SEQ ID NO: 522061 - DNA, 15 bp, Homo sapiens
gtttgttctgagaca

SEQ ID NO: 522062 - DNA, 15 bp, Homo sapiens
tttgttctgagacac

SEQ ID NO: 522063 - DNA, 15 bp, Homo sapiens
ttgttctgagacacc

SEQ ID NO: 522064 - DNA, 15 bp, Homo sapiens
tgttctgagacacct

SEQ ID NO: 522065 - DNA, 15 bp, Homo sapiens
gttctgagacacctg

SEQ ID NO: 522066 - DNA, 15 bp, Homo sapiens
ttctgagacacctga

SEQ ID NO: 522067 - DNA, 15 bp, Homo sapiens
tctgagacacctgat

SEQ ID NO: 522068 - DNA, 15 bp, Homo sapiens
ctgagacacctgatg

SEQ ID NO: 522069 - DNA, 15 bp, Homo sapiens
tgagacacctgatga

SEQ ID NO: 522070 - DNA, 15 bp, Homo sapiens
gagacacctgatgac

SEQ ID NO: 522071 - DNA, 15 bp, Homo sapiens
agacacctgatgacc

SEQ ID NO: 522072 - DNA, 15 bp, Homo sapiens
gacacctgatgacct

SEQ ID NO: 522073 - DNA, 15 bp, Homo sapiens
acacctgatgacctg

SEQ ID NO: 522074 - DNA, 15 bp, Homo sapiens
cacctgatgacctgt

SEQ ID NO: 522075 - DNA, 15 bp, Homo sapiens
acctgatgacctgtt

SEQ ID NO: 522076 - DNA, 15 bp, Homo sapiens
cctgatgacctgtta

SEQ ID NO: 522077 - DNA, 15 bp, Homo sapiens
ctgatgacctgttag

SEQ ID NO: 522078 - DNA, 15 bp, Homo sapiens
tgatgacctgttaga

SEQ ID NO: 522079 - DNA, 15 bp, Homo sapiens
gatgacctgttagat

SEQ ID NO: 522080 - DNA, 15 bp, Homo sapiens
atgacctgttagatg

SEQ ID NO: 522081 - DNA, 15 bp, Homo sapiens
tgacctgttagatga

SEQ ID NO: 522082 - DNA, 15 bp, Homo sapiens
gacctgttagatgat

SEQ ID NO: 522083 - DNA, 15 bp, Homo sapiens
acctgttagatgatg

SEQ ID NO: 522084 - DNA, 15 bp, Homo sapiens
cctgttagatgatgg

SEQ ID NO: 522085 - DNA, 15 bp, Homo sapiens
ctgttagatgatggt

SEQ ID NO: 522086 - DNA, 15 bp, Homo sapiens
tgttagatgatggtg

SEQ ID NO: 522087 - DNA, 15 bp, Homo sapiens
gttagatgatggtga

SEQ ID NO: 522088 - DNA, 15 bp, Homo sapiens
ttagatgatggtgaa

SEQ ID NO: 522089 - DNA, 15 bp, Homo sapiens
tagatgatggtgaaa

SEQ ID NO: 522090 - DNA, 15 bp, Homo sapiens
agatgatggtgaaat

SEQ ID NO: 522091 - DNA, 15 bp, Homo sapiens
gatgatggtgaaata

SEQ ID NO: 522092 - DNA, 15 bp, Homo sapiens
atgatggtgaaataa

SEQ ID NO: 522093 - DNA, 15 bp, Homo sapiens
tgatggtgaaataaa

SEQ ID NO: 522094 - DNA, 15 bp, Homo sapiens
gatggtgaaataaag

SEQ ID NO: 522095 - DNA, 15 bp, Homo sapiens
atggtgaaataaagg

SEQ ID NO: 522096 - DNA, 15 bp, Homo sapiens
tggtgaaataaagga

SEQ ID NO: 522097 - DNA, 15 bp, Homo sapiens
ggtgaaataaaggaa

SEQ ID NO: 522098 - DNA, 15 bp, Homo sapiens
gtgaaataaaggaag

SEQ ID NO: 522099 - DNA, 15 bp, Homo sapiens
tgaaataaaggaaga

SEQ ID NO: 522100 - DNA, 15 bp, Homo sapiens
gaaataaaggaagat

SEQ ID NO: 522101 - DNA, 15 bp, Homo sapiens
aaataaaggaagata

SEQ ID NO: 522102 - DNA, 15 bp, Homo sapiens
aataaaggaagatac

SEQ ID NO: 522103 - DNA, 15 bp, Homo sapiens
ataaaggaagatact

SEQ ID NO: 522104 - DNA, 15 bp, Homo sapiens
taaaggaagatacta

SEQ ID NO: 522105 - DNA, 15 bp, Homo sapiens
aaaggaagatactag

SEQ ID NO: 522106 - DNA, 15 bp, Homo sapiens
aaggaagatactagt

SEQ ID NO: 522107 - DNA, 15 bp, Homo sapiens
aggaagatactagtt

SEQ ID NO: 522108 - DNA, 15 bp, Homo sapiens
ggaagatactagttt

SEQ ID NO: 522109 - DNA, 15 bp, Homo sapiens
gaagatactagtttt

SEQ ID NO: 522110 - DNA, 15 bp, Homo sapiens
aagatactagttttg

SEQ ID NO: 522111 - DNA, 15 bp, Homo sapiens
agatactagttttgc

SEQ ID NO: 522112 - DNA, 15 bp, Homo sapiens
gatactagttttgct

SEQ ID NO: 522113 - DNA, 15 bp, Homo sapiens
atactagttttgctg

SEQ ID NO: 522114 - DNA, 15 bp, Homo sapiens
tactagttttgctga

SEQ ID NO: 522115 - DNA, 15 bp, Homo sapiens
actagttttgctgaa

SEQ ID NO: 522116 - DNA, 15 bp, Homo sapiens
ctagttttgctgaaa

SEQ ID NO: 522117 - DNA, 15 bp, Homo sapiens
tagttttgctgaaaa

SEQ ID NO: 522118 - DNA, 15 bp, Homo sapiens
agttttgctgaaaat

SEQ ID NO: 522119 - DNA, 15 bp, Homo sapiens
gttttgctgaaaatg

SEQ ID NO: 522120 - DNA, 15 bp, Homo sapiens
ttttgctgaaaatga

SEQ ID NO: 522121 - DNA, 15 bp, Homo sapiens
tttgctgaaaatgac

SEQ ID NO: 522122 - DNA, 15 bp, Homo sapiens
ttgctgaaaatgaca

SEQ ID NO: 522123 - DNA, 15 bp, Homo sapiens
tgctgaaaatgacat

SEQ ID NO: 522124 - DNA, 15 bp, Homo sapiens
gctgaaaatgacatt

SEQ ID NO: 522125 - DNA, 15 bp, Homo sapiens
ctgaaaatgacatta

SEQ ID NO: 522126 - DNA, 15 bp, Homo sapiens
tgaaaatgacattaa

SEQ ID NO: 522127 - DNA, 15 bp, Homo sapiens
gaaaatgacattaag

SEQ ID NO: 522128 - DNA, 15 bp, Homo sapiens
aaaatgacattaagg

SEQ ID NO: 522129 - DNA, 15 bp, Homo sapiens
aaatgacattaagga

SEQ ID NO: 522130 - DNA, 15 bp, Homo sapiens
aatgacattaaggaa

SEQ ID NO: 522131 - DNA, 15 bp, Homo sapiens
atgacattaaggaaa

SEQ ID NO: 522132 - DNA, 15 bp, Homo sapiens
tgacattaaggaaag

SEQ ID NO: 522133 - DNA, 15 bp, Homo sapiens
gacattaaggaaagt

SEQ ID NO: 522134 - DNA, 15 bp, Homo sapiens
acattaaggaaagtt

SEQ ID NO: 522135 - DNA, 15 bp, Homo sapiens
cattaaggaaagttc

SEQ ID NO: 522136 - DNA, 15 bp, Homo sapiens
attaaggaaagttct

SEQ ID NO: 522137 - DNA, 15 bp, Homo sapiens
ttaaggaaagttctg

SEQ ID NO: 522138 - DNA, 15 bp, Homo sapiens
taaggaaagttctgc

SEQ ID NO: 522139 - DNA, 15 bp, Homo sapiens
aaggaaagttctgct

SEQ ID NO: 522140 - DNA, 15 bp, Homo sapiens
aggaaagttctgctg

SEQ ID NO: 522141 - DNA, 15 bp, Homo sapiens
ggaaagttctgctgt

SEQ ID NO: 522142 - DNA, 15 bp, Homo sapiens
gaaagttctgctgtt

SEQ ID NO: 522143 - DNA, 15 bp, Homo sapiens
aaagttctgctgttt

SEQ ID NO: 522144 - DNA, 15 bp, Homo sapiens
aagttctgctgtttt

SEQ ID NO: 522145 - DNA, 15 bp, Homo sapiens
agttctgctgttttt

SEQ ID NO: 522146 - DNA, 15 bp, Homo sapiens
gttctgctgttttta

SEQ ID NO: 522147 - DNA, 15 bp, Homo sapiens
ttctgctgtttttag

SEQ ID NO: 522148 - DNA, 15 bp, Homo sapiens
tctgctgtttttagc

SEQ ID NO: 522149 - DNA, 15 bp, Homo sapiens
ctgctgtttttagca

SEQ ID NO: 522150 - DNA, 15 bp, Homo sapiens
tgctgtttttagcaa

SEQ ID NO: 522151 - DNA, 15 bp, Homo sapiens
gctgtttttagcaaa

SEQ ID NO: 522152 - DNA, 15 bp, Homo sapiens
ctgtttttagcaaaa

SEQ ID NO: 522153 - DNA, 15 bp, Homo sapiens
tgtttttagcaaaag

SEQ ID NO: 522154 - DNA, 15 bp, Homo sapiens
gtttttagcaaaagc

SEQ ID NO: 522155 - DNA, 15 bp, Homo sapiens
tttttagcaaaagcg

SEQ ID NO: 522156 - DNA, 15 bp, Homo sapiens
ttttagcaaaagcgt

SEQ ID NO: 522157 - DNA, 15 bp, Homo sapiens
tttagcaaaagcgtc

SEQ ID NO: 522158 - DNA, 15 bp, Homo sapiens
ttagcaaaagcgtcc

SEQ ID NO: 522159 - DNA, 15 bp, Homo sapiens
tagcaaaagcgtcca

SEQ ID NO: 522160 - DNA, 15 bp, Homo sapiens
agcaaaagcgtccag

SEQ ID NO: 522161 - DNA, 15 bp, Homo sapiens
gcaaaagcgtccaga

SEQ ID NO: 522162 - DNA, 15 bp, Homo sapiens
caaaagcgtccagaa

SEQ ID NO: 522163 - DNA, 15 bp, Homo sapiens
aaaagcgtccagaaa

SEQ ID NO: 522164 - DNA, 15 bp, Homo sapiens
aaagcgtccagaaag

SEQ ID NO: 522165 - DNA, 15 bp, Homo sapiens
aagcgtccagaaagg

SEQ ID NO: 522166 - DNA, 15 bp, Homo sapiens
agcgtccagaaagga

SEQ ID NO: 522167 - DNA, 15 bp, Homo sapiens
gcgtccagaaaggag

SEQ ID NO: 522168 - DNA, 15 bp, Homo sapiens
cgtccagaaaggaga

SEQ ID NO: 522169 - DNA, 15 bp, Homo sapiens
gtccagaaaggagag

SEQ ID NO: 522170 - DNA, 15 bp, Homo sapiens
tccagaaaggagagc

SEQ ID NO: 522171 - DNA, 15 bp, Homo sapiens
ccagaaaggagagct

SEQ ID NO: 522172 - DNA, 15 bp, Homo sapiens
cagaaaggagagctt

SEQ ID NO: 522173 - DNA, 15 bp, Homo sapiens
agaaaggagagctta

SEQ ID NO: 522174 - DNA, 15 bp, Homo sapiens
gaaaggagagcttag

SEQ ID NO: 522175 - DNA, 15 bp, Homo sapiens
aaaggagagcttagc

SEQ ID NO: 522176 - DNA, 15 bp, Homo sapiens
aaggagagcttagca

SEQ ID NO: 522177 - DNA, 15 bp, Homo sapiens
aggagagcttagcag

SEQ ID NO: 522178 - DNA, 15 bp, Homo sapiens
ggagagcttagcagg

SEQ ID NO: 522179 - DNA, 15 bp, Homo sapiens
gagagcttagcagga

SEQ ID NO: 522180 - DNA, 15 bp, Homo sapiens
agagcttagcaggag

SEQ ID NO: 522181 - DNA, 15 bp, Homo sapiens
gagcttagcaggagt

SEQ ID NO: 522182 - DNA, 15 bp, Homo sapiens
agcttagcaggagtc

SEQ ID NO: 522183 - DNA, 15 bp, Homo sapiens
gcttagcaggagtcc

SEQ ID NO: 522184 - DNA, 15 bp, Homo sapiens
cttagcaggagtcct

SEQ ID NO: 522185 - DNA, 15 bp, Homo sapiens
ttagcaggagtccta

SEQ ID NO: 522186 - DNA, 15 bp, Homo sapiens
tagcaggagtcctag

SEQ ID NO: 522187 - DNA, 15 bp, Homo sapiens
agcaggagtcctagc

SEQ ID NO: 522188 - DNA, 15 bp, Homo sapiens
gcaggagtcctagcc

SEQ ID NO: 522189 - DNA, 15 bp, Homo sapiens
caggagtcctagccc

SEQ ID NO: 522190 - DNA, 15 bp, Homo sapiens
aggagtcctagccct

SEQ ID NO: 522191 - DNA, 15 bp, Homo sapiens
ggagtcctagccctt

SEQ ID NO: 522192 - DNA, 15 bp, Homo sapiens
gagtcctagcccttt

SEQ ID NO: 522193 - DNA, 15 bp, Homo sapiens
agtcctagccctttc

SEQ ID NO: 522194 - DNA, 15 bp, Homo sapiens
gtcctagccctttca

SEQ ID NO: 522195 - DNA, 15 bp, Homo sapiens
tcctagccctttcac

SEQ ID NO: 522196 - DNA, 15 bp, Homo sapiens
cctagccctttcacc

SEQ ID NO: 522197 - DNA, 15 bp, Homo sapiens
tcagaagagaactta

SEQ ID NO: 522198 - DNA, 15 bp, Homo sapiens
cagaagagaacttat

SEQ ID NO: 522199 - DNA, 15 bp, Homo sapiens
agaagagaacttatc

SEQ ID NO: 522200 - DNA, 15 bp, Homo sapiens
gaagagaacttatct

SEQ ID NO: 522201 - DNA, 15 bp, Homo sapiens
aagagaacttatcta

SEQ ID NO: 522202 - DNA, 15 bp, Homo sapiens
agagaacttatctag

SEQ ID NO: 522203 - DNA, 15 bp, Homo sapiens
gagaacttatctagt

SEQ ID NO: 522204 - DNA, 15 bp, Homo sapiens
agaacttatctagtg

SEQ ID NO: 522205 - DNA, 15 bp, Homo sapiens
gaacttatctagtga

SEQ ID NO: 522206 - DNA, 15 bp, Homo sapiens
aacttatctagtgag

SEQ ID NO: 522207 - DNA, 15 bp, Homo sapiens
acttatctagtgagg

SEQ ID NO: 522208 - DNA, 15 bp, Homo sapiens
cttatctagtgagga

SEQ ID NO: 522209 - DNA, 15 bp, Homo sapiens
ttatctagtgaggat

SEQ ID NO: 522210 - DNA, 15 bp, Homo sapiens
tatctagtgaggatg

SEQ ID NO: 522211 - DNA, 15 bp, Homo sapiens
atctagtgaggatga

SEQ ID NO: 522212 - DNA, 15 bp, Homo sapiens
tctagtgaggatgaa

SEQ ID NO: 522213 - DNA, 15 bp, Homo sapiens
ctagtgaggatgaag

SEQ ID NO: 522214 - DNA, 15 bp, Homo sapiens
tagtgaggatgaaga

SEQ ID NO: 522215 - DNA, 15 bp, Homo sapiens
agtgaggatgaagag

SEQ ID NO: 522216 - DNA, 15 bp, Homo sapiens
gtgaggatgaagagc

SEQ ID NO: 522217 - DNA, 15 bp, Homo sapiens
tgaggatgaagagct

SEQ ID NO: 522218 - DNA, 15 bp, Homo sapiens
gaggatgaagagctt

SEQ ID NO: 522219 - DNA, 15 bp, Homo sapiens
aggatgaagagcttc

SEQ ID NO: 522220 - DNA, 15 bp, Homo sapiens
ggatgaagagcttcc

SEQ ID NO: 522221 - DNA, 15 bp, Homo sapiens
gatgaagagcttccc

SEQ ID NO: 522222 - DNA, 15 bp, Homo sapiens
atgaagagcttccct

SEQ ID NO: 522223 - DNA, 15 bp, Homo sapiens
tgaagagcttccctg

SEQ ID NO: 522224 - DNA, 15 bp, Homo sapiens
gaagagcttccctgc

SEQ ID NO: 522225 - DNA, 15 bp, Homo sapiens
aagagcttccctgct

SEQ ID NO: 522226 - DNA, 15 bp, Homo sapiens
agagcttccctgctt

SEQ ID NO: 522227 - DNA, 15 bp, Homo sapiens
gagcttccctgcttc

SEQ ID NO: 522228 - DNA, 15 bp, Homo sapiens
agcttccctgcttcc

SEQ ID NO: 522229 - DNA, 15 bp, Homo sapiens
gcttccctgcttcca

SEQ ID NO: 522230 - DNA, 15 bp, Homo sapiens
cttccctgcttccaa

SEQ ID NO: 522231 - DNA, 15 bp, Homo sapiens
ttccctgcttccaac

SEQ ID NO: 522232 - DNA, 15 bp, Homo sapiens
tccctgcttccaaca

SEQ ID NO: 522233 - DNA, 15 bp, Homo sapiens
ccctgcttccaacac

SEQ ID NO: 522234 - DNA, 15 bp, Homo sapiens
cctgcttccaacact

SEQ ID NO: 522235 - DNA, 15 bp, Homo sapiens
ctgcttccaacactt

SEQ ID NO: 522236 - DNA, 15 bp, Homo sapiens
tgcttccaacacttg

SEQ ID NO: 522237 - DNA, 15 bp, Homo sapiens
gcttccaacacttgt

SEQ ID NO: 522238 - DNA, 15 bp, Homo sapiens
cttccaacacttgtt

SEQ ID NO: 522239 - DNA, 15 bp, Homo sapiens
ttccaacacttgtta

SEQ ID NO: 522240 - DNA, 15 bp, Homo sapiens
tccaacacttgttat

SEQ ID NO: 522241 - DNA, 15 bp, Homo sapiens
ccaacacttgttatt

SEQ ID NO: 522242 - DNA, 15 bp, Homo sapiens
caacacttgttattt

SEQ ID NO: 522243 - DNA, 15 bp, Homo sapiens
aacacttgttatttg

SEQ ID NO: 522244 - DNA, 15 bp, Homo sapiens
acacttgttatttgg

SEQ ID NO: 522245 - DNA, 15 bp, Homo sapiens
cacttgttatttggt

SEQ ID NO: 522246 - DNA, 15 bp, Homo sapiens
acttgttatttggta

SEQ ID NO: 522247 - DNA, 15 bp, Homo sapiens
cttgttatttggtaa

SEQ ID NO: 522248 - DNA, 15 bp, Homo sapiens
ttgttatttggtaaa

SEQ ID NO: 522249 - DNA, 15 bp, Homo sapiens
tgttatttggtaaag

SEQ ID NO: 522250 - DNA, 15 bp, Homo sapiens
gttatttggtaaagt

SEQ ID NO: 522251 - DNA, 15 bp, Homo sapiens
ttatttggtaaagta

SEQ ID NO: 522252 - DNA, 15 bp, Homo sapiens
tatttggtaaagtaa

SEQ ID NO: 522253 - DNA, 15 bp, Homo sapiens
atttggtaaagtaaa

SEQ ID NO: 522254 - DNA, 15 bp, Homo sapiens
tttggtaaagtaaac

SEQ ID NO: 522255 - DNA, 15 bp, Homo sapiens
ttggtaaagtaaaca

SEQ ID NO: 522256 - DNA, 15 bp, Homo sapiens
tggtaaagtaaacaa

SEQ ID NO: 522257 - DNA, 15 bp, Homo sapiens
ggtaaagtaaacaat

SEQ ID NO: 522258 - DNA, 15 bp, Homo sapiens
gtaaagtaaacaata

SEQ ID NO: 522259 - DNA, 15 bp, Homo sapiens
taaagtaaacaatat

SEQ ID NO: 522260 - DNA, 15 bp, Homo sapiens
aaagtaaacaatata

SEQ ID NO: 522261 - DNA, 15 bp, Homo sapiens
aagtaaacaatatac

SEQ ID NO: 522262 - DNA, 15 bp, Homo sapiens
agtaaacaatatacc

SEQ ID NO: 522263 - DNA, 15 bp, Homo sapiens
gtaaacaatatacct

SEQ ID NO: 522264 - DNA, 15 bp, Homo sapiens
taaacaatatacctt

SEQ ID NO: 522265 - DNA, 15 bp, Homo sapiens
aaacaatataccttc

SEQ ID NO: 522266 - DNA, 15 bp, Homo sapiens
aacaatataccttct

SEQ ID NO: 522267 - DNA, 15 bp, Homo sapiens
acaatataccttctc

SEQ ID NO: 522268 - DNA, 15 bp, Homo sapiens
caatataccttctca

SEQ ID NO: 522269 - DNA, 15 bp, Homo sapiens
aatataccttctcag

SEQ ID NO: 522270 - DNA, 15 bp, Homo sapiens
atataccttctcagt

SEQ ID NO: 522271 - DNA, 15 bp, Homo sapiens
tataccttctcagtc

SEQ ID NO: 522272 - DNA, 15 bp, Homo sapiens
ataccttctcagtct

SEQ ID NO: 522273 - DNA, 15 bp, Homo sapiens
taccttctcagtcta

SEQ ID NO: 522274 - DNA, 15 bp, Homo sapiens
accttctcagtctac

SEQ ID NO: 522275 - DNA, 15 bp, Homo sapiens
ccttctcagtctact

SEQ ID NO: 522276 - DNA, 15 bp, Homo sapiens
cttctcagtctacta

SEQ ID NO: 522277 - DNA, 15 bp, Homo sapiens
ttctcagtctactag

SEQ ID NO: 522278 - DNA, 15 bp, Homo sapiens
tctcagtctactagg

SEQ ID NO: 522279 - DNA, 15 bp, Homo sapiens
ctcagtctactaggc

SEQ ID NO: 522280 - DNA, 15 bp, Homo sapiens
tcagtctactaggca

SEQ ID NO: 522281 - DNA, 15 bp, Homo sapiens
cagtctactaggcat

SEQ ID NO: 522282 - DNA, 15 bp, Homo sapiens
agtctactaggcata

SEQ ID NO: 522283 - DNA, 15 bp, Homo sapiens
gtctactaggcatag

SEQ ID NO: 522284 - DNA, 15 bp, Homo sapiens
tctactaggcatagc

SEQ ID NO: 522285 - DNA, 15 bp, Homo sapiens
ctactaggcatagca

SEQ ID NO: 522286 - DNA, 15 bp, Homo sapiens
tactaggcatagcac

SEQ ID NO: 522287 - DNA, 15 bp, Homo sapiens
actaggcatagcacc

SEQ ID NO: 522288 - DNA, 15 bp, Homo sapiens
ctaggcatagcaccg

SEQ ID NO: 522289 - DNA, 15 bp, Homo sapiens
taggcatagcaccgt

SEQ ID NO: 522290 - DNA, 15 bp, Homo sapiens
aggcatagcaccgtt

SEQ ID NO: 522291 - DNA, 15 bp, Homo sapiens
ggcatagcaccgttg

SEQ ID NO: 522292 - DNA, 15 bp, Homo sapiens
gcatagcaccgttgc

SEQ ID NO: 522293 - DNA, 15 bp, Homo sapiens
catagcaccgttgct

SEQ ID NO: 522294 - DNA, 15 bp, Homo sapiens
atagcaccgttgcta

SEQ ID NO: 522295 - DNA, 15 bp, Homo sapiens
tagcaccgttgctac

SEQ ID NO: 522296 - DNA, 15 bp, Homo sapiens
agcaccgttgctacc

SEQ ID NO: 522297 - DNA, 15 bp, Homo sapiens
gcaccgttgctaccg

SEQ ID NO: 522298 - DNA, 15 bp, Homo sapiens
caccgttgctaccga

SEQ ID NO: 522299 - DNA, 15 bp, Homo sapiens
accgttgctaccgag

SEQ ID NO: 522300 - DNA, 15 bp, Homo sapiens
ccgttgctaccgagt

SEQ ID NO: 522301 - DNA, 15 bp, Homo sapiens
cgttgctaccgagtg

SEQ ID NO: 522302 - DNA, 15 bp, Homo sapiens
gttgctaccgagtgt

SEQ ID NO: 522303 - DNA, 15 bp, Homo sapiens
ttgctaccgagtgtc

SEQ ID NO: 522304 - DNA, 15 bp, Homo sapiens
tgctaccgagtgtct

SEQ ID NO: 522305 - DNA, 15 bp, Homo sapiens
gctaccgagtgtctg

SEQ ID NO: 522306 - DNA, 15 bp, Homo sapiens
ctaccgagtgtctgt

SEQ ID NO: 522307 - DNA, 15 bp, Homo sapiens
taccgagtgtctgtc

SEQ ID NO: 522308 - DNA, 15 bp, Homo sapiens
accgagtgtctgtct

SEQ ID NO: 522309 - DNA, 15 bp, Homo sapiens
ccgagtgtctgtcta

SEQ ID NO: 522310 - DNA, 15 bp, Homo sapiens
cgagtgtctgtctaa

SEQ ID NO: 522311 - DNA, 15 bp, Homo sapiens
gagtgtctgtctaag

SEQ ID NO: 522312 - DNA, 15 bp, Homo sapiens
agtgtctgtctaaga

SEQ ID NO: 522313 - DNA, 15 bp, Homo sapiens
gtgtctgtctaagaa

SEQ ID NO: 522314 - DNA, 15 bp, Homo sapiens
tgtctgtctaagaac

SEQ ID NO: 522315 - DNA, 15 bp, Homo sapiens
gtctgtctaagaaca

SEQ ID NO: 522316 - DNA, 15 bp, Homo sapiens
tctgtctaagaacac

SEQ ID NO: 522317 - DNA, 15 bp, Homo sapiens
ctgtctaagaacaca

SEQ ID NO: 522318 - DNA, 15 bp, Homo sapiens
tgtctaagaacacag

SEQ ID NO: 522319 - DNA, 15 bp, Homo sapiens
gtctaagaacacaga

SEQ ID NO: 522320 - DNA, 15 bp, Homo sapiens
tctaagaacacagag

SEQ ID NO: 522321 - DNA, 15 bp, Homo sapiens
ctaagaacacagagg

SEQ ID NO: 522322 - DNA, 15 bp, Homo sapiens
taagaacacagagga

SEQ ID NO: 522323 - DNA, 15 bp, Homo sapiens
aagaacacagaggag

SEQ ID NO: 522324 - DNA, 15 bp, Homo sapiens
agaacacagaggaga

SEQ ID NO: 522325 - DNA, 15 bp, Homo sapiens
gaacacagaggagaa

SEQ ID NO: 522326 - DNA, 15 bp, Homo sapiens
aacacagaggagaat

SEQ ID NO: 522327 - DNA, 15 bp, Homo sapiens
acacagaggagaatt

SEQ ID NO: 522328 - DNA, 15 bp, Homo sapiens
cacagaggagaattt

SEQ ID NO: 522329 - DNA, 15 bp, Homo sapiens
acagaggagaattta

SEQ ID NO: 522330 - DNA, 15 bp, Homo sapiens
cagaggagaatttat

SEQ ID NO: 522331 - DNA, 15 bp, Homo sapiens
agaggagaatttatt

SEQ ID NO: 522332 - DNA, 15 bp, Homo sapiens
gaggagaatttatta

SEQ ID NO: 522333 - DNA, 15 bp, Homo sapiens
aggagaatttattat

SEQ ID NO: 522334 - DNA, 15 bp, Homo sapiens
ggagaatttattatc

SEQ ID NO: 522335 - DNA, 15 bp, Homo sapiens
gagaatttattatca

SEQ ID NO: 522336 - DNA, 15 bp, Homo sapiens
agaatttattatcat

SEQ ID NO: 522337 - DNA, 15 bp, Homo sapiens
gaatttattatcatt

SEQ ID NO: 522338 - DNA, 15 bp, Homo sapiens
aatttattatcattg

SEQ ID NO: 522339 - DNA, 15 bp, Homo sapiens
atttattatcattga

SEQ ID NO: 522340 - DNA, 15 bp, Homo sapiens
tttattatcattgaa

SEQ ID NO: 522341 - DNA, 15 bp, Homo sapiens
ttattatcattgaag

SEQ ID NO: 522342 - DNA, 15 bp, Homo sapiens
tattatcattgaaga

SEQ ID NO: 522343 - DNA, 15 bp, Homo sapiens
attatcattgaagaa

SEQ ID NO: 522344 - DNA, 15 bp, Homo sapiens
ttatcattgaagaat

SEQ ID NO: 522345 - DNA, 15 bp, Homo sapiens
tatcattgaagaata

SEQ ID NO: 522346 - DNA, 15 bp, Homo sapiens
atcattgaagaatag

SEQ ID NO: 522347 - DNA, 15 bp, Homo sapiens
tcattgaagaatagc

SEQ ID NO: 522348 - DNA, 15 bp, Homo sapiens
cattgaagaatagct

SEQ ID NO: 522349 - DNA, 15 bp, Homo sapiens
attgaagaatagctt

SEQ ID NO: 522350 - DNA, 15 bp, Homo sapiens
ttgaagaatagctta

SEQ ID NO: 522351 - DNA, 15 bp, Homo sapiens
tgaagaatagcttaa

SEQ ID NO: 522352 - DNA, 15 bp, Homo sapiens
gaagaatagcttaaa

SEQ ID NO: 522353 - DNA, 15 bp, Homo sapiens
aagaatagcttaaat

SEQ ID NO: 522354 - DNA, 15 bp, Homo sapiens
agaatagcttaaatg

SEQ ID NO: 522355 - DNA, 15 bp, Homo sapiens
gaatagcttaaatga

SEQ ID NO: 522356 - DNA, 15 bp, Homo sapiens
aatagcttaaatgac

SEQ ID NO: 522357 - DNA, 15 bp, Homo sapiens
atagcttaaatgact

SEQ ID NO: 522358 - DNA, 15 bp, Homo sapiens
tagcttaaatgactg

SEQ ID NO: 522359 - DNA, 15 bp, Homo sapiens
agcttaaatgactgc

SEQ ID NO: 522360 - DNA, 15 bp, Homo sapiens
gcttaaatgactgca

SEQ ID NO: 522361 - DNA, 15 bp, Homo sapiens
cttaaatgactgcag

SEQ ID NO: 522362 - DNA, 15 bp, Homo sapiens
ttaaatgactgcagt

SEQ ID NO: 522363 - DNA, 15 bp, Homo sapiens
taaatgactgcagta

SEQ ID NO: 522364 - DNA, 15 bp, Homo sapiens
aaatgactgcagtaa

SEQ ID NO: 522365 - DNA, 15 bp, Homo sapiens
aatgactgcagtaac

SEQ ID NO: 522366 - DNA, 15 bp, Homo sapiens
atgactgcagtaacc

SEQ ID NO: 522367 - DNA, 15 bp, Homo sapiens
tgactgcagtaacca

SEQ ID NO: 522368 - DNA, 15 bp, Homo sapiens
gactgcagtaaccag

SEQ ID NO: 522369 - DNA, 15 bp, Homo sapiens
actgcagtaaccagg

SEQ ID NO: 522370 - DNA, 15 bp, Homo sapiens
ctgcagtaaccaggt

SEQ ID NO: 522371 - DNA, 15 bp, Homo sapiens
tgcagtaaccaggta

SEQ ID NO: 522372 - DNA, 15 bp, Homo sapiens
gcagtaaccaggtaa

SEQ ID NO: 522373 - DNA, 15 bp, Homo sapiens
cagtaaccaggtaat

SEQ ID NO: 522374 - DNA, 15 bp, Homo sapiens
agtaaccaggtaata

SEQ ID NO: 522375 - DNA, 15 bp, Homo sapiens
gtaaccaggtaatat

SEQ ID NO: 522376 - DNA, 15 bp, Homo sapiens
taaccaggtaatatt

SEQ ID NO: 522377 - DNA, 15 bp, Homo sapiens
aaccaggtaatattg

SEQ ID NO: 522378 - DNA, 15 bp, Homo sapiens
accaggtaatattgg

SEQ ID NO: 522379 - DNA, 15 bp, Homo sapiens
ccaggtaatattggc

SEQ ID NO: 522380 - DNA, 15 bp, Homo sapiens
caggtaatattggca

SEQ ID NO: 522381 - DNA, 15 bp, Homo sapiens
aggtaatattggcaa

SEQ ID NO: 522382 - DNA, 15 bp, Homo sapiens
ggtaatattggcaaa

SEQ ID NO: 522383 - DNA, 15 bp, Homo sapiens
gtaatattggcaaag

SEQ ID NO: 522384 - DNA, 15 bp, Homo sapiens
taatattggcaaagg

SEQ ID NO: 522385 - DNA, 15 bp, Homo sapiens
aatattggcaaaggc

SEQ ID NO: 522386 - DNA, 15 bp, Homo sapiens
atattggcaaaggca

SEQ ID NO: 522387 - DNA, 15 bp, Homo sapiens
tattggcaaaggcat

SEQ ID NO: 522388 - DNA, 15 bp, Homo sapiens
attggcaaaggcatc

SEQ ID NO: 522389 - DNA, 15 bp, Homo sapiens
ttggcaaaggcatct

SEQ ID NO: 522390 - DNA, 15 bp, Homo sapiens
tggcaaaggcatctc

SEQ ID NO: 522391 - DNA, 15 bp, Homo sapiens
ggcaaaggcatctca

SEQ ID NO: 522392 - DNA, 15 bp, Homo sapiens
gcaaaggcatctcag

SEQ ID NO: 522393 - DNA, 15 bp, Homo sapiens
caaaggcatctcagg

SEQ ID NO: 522394 - DNA, 15 bp, Homo sapiens
aaaggcatctcagga

SEQ ID NO: 522395 - DNA, 15 bp, Homo sapiens
aaggcatctcaggaa

SEQ ID NO: 522396 - DNA, 15 bp, Homo sapiens
aggcatctcaggaac

SEQ ID NO: 522397 - DNA, 15 bp, Homo sapiens
ggcatctcaggaaca

SEQ ID NO: 522398 - DNA, 15 bp, Homo sapiens
gcatctcaggaacat

SEQ ID NO: 522399 - DNA, 15 bp, Homo sapiens
catctcaggaacatc

SEQ ID NO: 522400 - DNA, 15 bp, Homo sapiens
atctcaggaacatca

SEQ ID NO: 522401 - DNA, 15 bp, Homo sapiens
tctcaggaacatcac

SEQ ID NO: 522402 - DNA, 15 bp, Homo sapiens
ctcaggaacatcacc

SEQ ID NO: 522403 - DNA, 15 bp, Homo sapiens
tcaggaacatcacct

SEQ ID NO: 522404 - DNA, 15 bp, Homo sapiens
caggaacatcacctt

SEQ ID NO: 522405 - DNA, 15 bp, Homo sapiens
aggaacatcacctta

SEQ ID NO: 522406 - DNA, 15 bp, Homo sapiens
ggaacatcaccttag

SEQ ID NO: 522407 - DNA, 15 bp, Homo sapiens
gaacatcaccttagt

SEQ ID NO: 522408 - DNA, 15 bp, Homo sapiens
aacatcaccttagtg

SEQ ID NO: 522409 - DNA, 15 bp, Homo sapiens
acatcaccttagtga

SEQ ID NO: 522410 - DNA, 15 bp, Homo sapiens
catcaccttagtgag

SEQ ID NO: 522411 - DNA, 15 bp, Homo sapiens
atcaccttagtgagg

SEQ ID NO: 522412 - DNA, 15 bp, Homo sapiens
tcaccttagtgagga

SEQ ID NO: 522413 - DNA, 15 bp, Homo sapiens
caccttagtgaggaa

SEQ ID NO: 522414 - DNA, 15 bp, Homo sapiens
accttagtgaggaaa

SEQ ID NO: 522415 - DNA, 15 bp, Homo sapiens
ccttagtgaggaaac

SEQ ID NO: 522416 - DNA, 15 bp, Homo sapiens
cttagtgaggaaaca

SEQ ID NO: 522417 - DNA, 15 bp, Homo sapiens
ttagtgaggaaacaa

SEQ ID NO: 522418 - DNA, 15 bp, Homo sapiens
tagtgaggaaacaaa

SEQ ID NO: 522419 - DNA, 15 bp, Homo sapiens
agtgaggaaacaaaa

SEQ ID NO: 522420 - DNA, 15 bp, Homo sapiens
gtgaggaaacaaaat

SEQ ID NO: 522421 - DNA, 15 bp, Homo sapiens
tgaggaaacaaaatg

SEQ ID NO: 522422 - DNA, 15 bp, Homo sapiens
gaggaaacaaaatgt

SEQ ID NO: 522423 - DNA, 15 bp, Homo sapiens
aggaaacaaaatgtt

SEQ ID NO: 522424 - DNA, 15 bp, Homo sapiens
cagatttcagtttgg

SEQ ID NO: 522425 - DNA, 15 bp, Homo sapiens
agatttcagtttggg

SEQ ID NO: 522426 - DNA, 15 bp, Homo sapiens
gatttcagtttggga

SEQ ID NO: 522427 - DNA, 15 bp, Homo sapiens
atttcagtttgggat

SEQ ID NO: 522428 - DNA, 15 bp, Homo sapiens
tttcagtttgggatg

SEQ ID NO: 522429 - DNA, 15 bp, Homo sapiens
ttcagtttgggatga

SEQ ID NO: 522430 - DNA, 15 bp, Homo sapiens
tcagtttgggatgat

SEQ ID NO: 522431 - DNA, 15 bp, Homo sapiens
cagtttgggatgatg

SEQ ID NO: 522432 - DNA, 15 bp, Homo sapiens
agtttgggatgatga

SEQ ID NO: 522433 - DNA, 15 bp, Homo sapiens
gtttgggatgatgaa

SEQ ID NO: 522434 - DNA, 15 bp, Homo sapiens
tttgggatgatgaaa

SEQ ID NO: 522435 - DNA, 15 bp, Homo sapiens
ttgggatgatgaaaa

SEQ ID NO: 522436 - DNA, 15 bp, Homo sapiens
tgggatgatgaaaaa

SEQ ID NO: 522437 - DNA, 15 bp, Homo sapiens
gggatgatgaaaaag

SEQ ID NO: 522438 - DNA, 15 bp, Homo sapiens
ggatgatgaaaaagt

SEQ ID NO: 522439 - DNA, 15 bp, Homo sapiens
gatgatgaaaaagtt

SEQ ID NO: 522440 - DNA, 15 bp, Homo sapiens
atgatgaaaaagttc

SEQ ID NO: 522441 - DNA, 15 bp, Homo sapiens
tgatgaaaaagttct

SEQ ID NO: 522442 - DNA, 15 bp, Homo sapiens
gatgaaaaagttctg

SEQ ID NO: 522443 - DNA, 15 bp, Homo sapiens
atgaaaaagttctgg

SEQ ID NO: 522444 - DNA, 15 bp, Homo sapiens
tgaaaaagttctgga

SEQ ID NO: 522445 - DNA, 15 bp, Homo sapiens
gaaaaagttctggag

SEQ ID NO: 522446 - DNA, 15 bp, Homo sapiens
aaaaagttctggaga

SEQ ID NO: 522447 - DNA, 15 bp, Homo sapiens
aaaagttctggagat

SEQ ID NO: 522448 - DNA, 15 bp, Homo sapiens
aaagttctggagata

SEQ ID NO: 522449 - DNA, 15 bp, Homo sapiens
aagttctggagatag

SEQ ID NO: 522450 - DNA, 15 bp, Homo sapiens
agttctggagataga

SEQ ID NO: 522451 - DNA, 15 bp, Homo sapiens
gttctggagatagat

SEQ ID NO: 522452 - DNA, 15 bp, Homo sapiens
ttctggagatagata

SEQ ID NO: 522453 - DNA, 15 bp, Homo sapiens
tctggagatagatag

SEQ ID NO: 522454 - DNA, 15 bp, Homo sapiens
ctggagatagatagt

SEQ ID NO: 522455 - DNA, 15 bp, Homo sapiens
tggagatagatagtg

SEQ ID NO: 522456 - DNA, 15 bp, Homo sapiens
ggagatagatagtgg

SEQ ID NO: 522457 - DNA, 15 bp, Homo sapiens
gagatagatagtggc

SEQ ID NO: 522458 - DNA, 15 bp, Homo sapiens
agatagatagtggca

SEQ ID NO: 522459 - DNA, 15 bp, Homo sapiens
gatagatagtggcaa

SEQ ID NO: 522460 - DNA, 15 bp, Homo sapiens
atagatagtggcaat

SEQ ID NO: 522461 - DNA, 15 bp, Homo sapiens
tagatagtggcaatg

SEQ ID NO: 522462 - DNA, 15 bp, Homo sapiens
agatagtggcaatgg

SEQ ID NO: 522463 - DNA, 15 bp, Homo sapiens
gatagtggcaatggt

SEQ ID NO: 522464 - DNA, 15 bp, Homo sapiens
atagtggcaatggta

SEQ ID NO: 522465 - DNA, 15 bp, Homo sapiens
tagtggcaatggtaa

SEQ ID NO: 522466 - DNA, 15 bp, Homo sapiens
agtggcaatggtaac

SEQ ID NO: 522467 - DNA, 15 bp, Homo sapiens
gtggcaatggtaaca

SEQ ID NO: 522468 - DNA, 15 bp, Homo sapiens
tggcaatggtaacac

SEQ ID NO: 522469 - DNA, 15 bp, Homo sapiens
ggcaatggtaacaca

SEQ ID NO: 522470 - DNA, 15 bp, Homo sapiens
gcaatggtaacacaa

SEQ ID NO: 522471 - DNA, 15 bp, Homo sapiens
caatggtaacacaac

SEQ ID NO: 522472 - DNA, 15 bp, Homo sapiens
aatggtaacacaaca

SEQ ID NO: 522473 - DNA, 15 bp, Homo sapiens
atggtaacacaacag

SEQ ID NO: 522474 - DNA, 15 bp, Homo sapiens
tggtaacacaacagt

SEQ ID NO: 522475 - DNA, 15 bp, Homo sapiens
ggtaacacaacagtg

SEQ ID NO: 522476 - DNA, 15 bp, Homo sapiens
gtaacacaacagtgt

SEQ ID NO: 522477 - DNA, 15 bp, Homo sapiens
taacacaacagtgtg

SEQ ID NO: 522478 - DNA, 15 bp, Homo sapiens
aacacaacagtgtga

SEQ ID NO: 522479 - DNA, 15 bp, Homo sapiens
acacaacagtgtgaa

SEQ ID NO: 522480 - DNA, 15 bp, Homo sapiens
cacaacagtgtgaaa

SEQ ID NO: 522481 - DNA, 15 bp, Homo sapiens
acaacagtgtgaaaa

SEQ ID NO: 522482 - DNA, 15 bp, Homo sapiens
caacagtgtgaaaat

SEQ ID NO: 522483 - DNA, 15 bp, Homo sapiens
aacagtgtgaaaata

SEQ ID NO: 522484 - DNA, 15 bp, Homo sapiens
acagtgtgaaaataa

SEQ ID NO: 522485 - DNA, 15 bp, Homo sapiens
cagtgtgaaaataat

SEQ ID NO: 522486 - DNA, 15 bp, Homo sapiens
agtgtgaaaataatg

SEQ ID NO: 522487 - DNA, 15 bp, Homo sapiens
gtgtgaaaataatgc

SEQ ID NO: 522488 - DNA, 15 bp, Homo sapiens
tgtgaaaataatgcc

SEQ ID NO: 522489 - DNA, 15 bp, Homo sapiens
gtgaaaataatgcca

SEQ ID NO: 522490 - DNA, 15 bp, Homo sapiens
tgaaaataatgccac

SEQ ID NO: 522491 - DNA, 15 bp, Homo sapiens
gaaaataatgccact

SEQ ID NO: 522492 - DNA, 15 bp, Homo sapiens
aaaataatgccactg

SEQ ID NO: 522493 - DNA, 15 bp, Homo sapiens
aaataatgccactga

SEQ ID NO: 522494 - DNA, 15 bp, Homo sapiens
aataatgccactgaa

SEQ ID NO: 522495 - DNA, 15 bp, Homo sapiens
ataatgccactgaac

SEQ ID NO: 522496 - DNA, 15 bp, Homo sapiens
taatgccactgaact

SEQ ID NO: 522497 - DNA, 15 bp, Homo sapiens
aatgccactgaactg

SEQ ID NO: 522498 - DNA, 15 bp, Homo sapiens
atgccactgaactgt

SEQ ID NO: 522499 - DNA, 15 bp, Homo sapiens
tgccactgaactgta

SEQ ID NO: 522500 - DNA, 15 bp, Homo sapiens
gccactgaactgtac

SEQ ID NO: 522501 - DNA, 15 bp, Homo sapiens
ccactgaactgtaca

SEQ ID NO: 522502 - DNA, 15 bp, Homo sapiens
cactgaactgtacac

SEQ ID NO: 522503 - DNA, 15 bp, Homo sapiens
actgaactgtacact

SEQ ID NO: 522504 - DNA, 15 bp, Homo sapiens
ctgaactgtacactt

SEQ ID NO: 522505 - DNA, 15 bp, Homo sapiens
tgaactgtacactta

SEQ ID NO: 522506 - DNA, 15 bp, Homo sapiens
gaactgtacacttaa

SEQ ID NO: 522507 - DNA, 15 bp, Homo sapiens
aactgtacacttaaa

SEQ ID NO: 522508 - DNA, 15 bp, Homo sapiens
actgtacacttaaaa

SEQ ID NO: 522509 - DNA, 15 bp, Homo sapiens
ctgtacacttaaaat

SEQ ID NO: 522510 - DNA, 15 bp, Homo sapiens
tgtacacttaaaatg

SEQ ID NO: 522511 - DNA, 15 bp, Homo sapiens
gtacacttaaaatga

SEQ ID NO: 522512 - DNA, 15 bp, Homo sapiens
tacacttaaaatgat

SEQ ID NO: 522513 - DNA, 15 bp, Homo sapiens
acacttaaaatgatt

SEQ ID NO: 522514 - DNA, 15 bp, Homo sapiens
cacttaaaatgatta

SEQ ID NO: 522515 - DNA, 15 bp, Homo sapiens
acttaaaatgattaa

SEQ ID NO: 522516 - DNA, 15 bp, Homo sapiens
cttaaaatgattaaa

SEQ ID NO: 522517 - DNA, 15 bp, Homo sapiens
ttaaaatgattaaaa

SEQ ID NO: 522518 - DNA, 15 bp, Homo sapiens
taaaatgattaaaat

SEQ ID NO: 522519 - DNA, 15 bp, Homo sapiens
aaaatgattaaaatg

SEQ ID NO: 522520 - DNA, 15 bp, Homo sapiens
aaatgattaaaatga

SEQ ID NO: 522521 - DNA, 15 bp, Homo sapiens
aatgattaaaatgat

SEQ ID NO: 522522 - DNA, 15 bp, Homo sapiens
atgattaaaatgata

SEQ ID NO: 522523 - DNA, 15 bp, Homo sapiens
tgattaaaatgataa

SEQ ID NO: 522524 - DNA, 15 bp, Homo sapiens
gattaaaatgataag

SEQ ID NO: 522525 - DNA, 15 bp, Homo sapiens
attaaaatgataagt

SEQ ID NO: 522526 - DNA, 15 bp, Homo sapiens
ttaaaatgataagtt

SEQ ID NO: 522527 - DNA, 15 bp, Homo sapiens
taaaatgataagtta

SEQ ID NO: 522528 - DNA, 15 bp, Homo sapiens
aaaatgataagttaa

SEQ ID NO: 522529 - DNA, 15 bp, Homo sapiens
aaatgataagttaat

SEQ ID NO: 522530 - DNA, 15 bp, Homo sapiens
aatgataagttaatt

SEQ ID NO: 522531 - DNA, 15 bp, Homo sapiens
atgataagttaattg

SEQ ID NO: 522532 - DNA, 15 bp, Homo sapiens
tgataagttaattgt

SEQ ID NO: 522533 - DNA, 15 bp, Homo sapiens
gataagttaattgta

SEQ ID NO: 522534 - DNA, 15 bp, Homo sapiens
ataagttaattgtaa

SEQ ID NO: 522535 - DNA, 15 bp, Homo sapiens
taagttaattgtaat

SEQ ID NO: 522536 - DNA, 15 bp, Homo sapiens
aagttaattgtaatt

SEQ ID NO: 522537 - DNA, 15 bp, Homo sapiens
agttaattgtaattt

SEQ ID NO: 522538 - DNA, 15 bp, Homo sapiens
gttaattgtaatttg

SEQ ID NO: 522539 - DNA, 15 bp, Homo sapiens
ttaattgtaatttgt

SEQ ID NO: 522540 - DNA, 15 bp, Homo sapiens
taattgtaatttgtg

SEQ ID NO: 522541 - DNA, 15 bp, Homo sapiens
aattgtaatttgtgt

SEQ ID NO: 522542 - DNA, 15 bp, Homo sapiens
attgtaatttgtgtt

SEQ ID NO: 522543 - DNA, 15 bp, Homo sapiens
ttgtaatttgtgtta

SEQ ID NO: 522544 - DNA, 15 bp, Homo sapiens
tgtaatttgtgttat

SEQ ID NO: 522545 - DNA, 15 bp, Homo sapiens
gtaatttgtgttatc

SEQ ID NO: 522546 - DNA, 15 bp, Homo sapiens
taatttgtgttatcc

SEQ ID NO: 522547 - DNA, 15 bp, Homo sapiens
aatttgtgttatcca

SEQ ID NO: 522548 - DNA, 15 bp, Homo sapiens
atttgtgttatccag

SEQ ID NO: 522549 - DNA, 15 bp, Homo sapiens
tttgtgttatccaga

SEQ ID NO: 522550 - DNA, 15 bp, Homo sapiens
ttgtgttatccagaa

SEQ ID NO: 522551 - DNA, 15 bp, Homo sapiens
tgtgttatccagaaa

SEQ ID NO: 522552 - DNA, 15 bp, Homo sapiens
gtgttatccagaaat

SEQ ID NO: 522553 - DNA, 15 bp, Homo sapiens
tgttatccagaaatg

SEQ ID NO: 522554 - DNA, 15 bp, Homo sapiens
gttatccagaaatgg

SEQ ID NO: 522555 - DNA, 15 bp, Homo sapiens
ttatccagaaatggt

SEQ ID NO: 522556 - DNA, 15 bp, Homo sapiens
tatccagaaatggtt

SEQ ID NO: 522557 - DNA, 15 bp, Homo sapiens
atccagaaatggtta

SEQ ID NO: 522558 - DNA, 15 bp, Homo sapiens
tccagaaatggttag

SEQ ID NO: 522559 - DNA, 15 bp, Homo sapiens
ccagaaatggttagc

SEQ ID NO: 522560 - DNA, 15 bp, Homo sapiens
cagaaatggttagca

SEQ ID NO: 522561 - DNA, 15 bp, Homo sapiens
agaaatggttagcaa

SEQ ID NO: 522562 - DNA, 15 bp, Homo sapiens
gaaatggttagcaat

SEQ ID NO: 522563 - DNA, 15 bp, Homo sapiens
aaatggttagcaatt

SEQ ID NO: 522564 - DNA, 15 bp, Homo sapiens
aatggttagcaattt

SEQ ID NO: 522565 - DNA, 15 bp, Homo sapiens
atggttagcaattta

SEQ ID NO: 522566 - DNA, 15 bp, Homo sapiens
tggttagcaatttat

SEQ ID NO: 522567 - DNA, 15 bp, Homo sapiens
ggttagcaatttatt

SEQ ID NO: 522568 - DNA, 15 bp, Homo sapiens
gttagcaatttattg

SEQ ID NO: 522569 - DNA, 15 bp, Homo sapiens
ttagcaatttattgg

SEQ ID NO: 522570 - DNA, 15 bp, Homo sapiens
tagcaatttattggt

SEQ ID NO: 522571 - DNA, 15 bp, Homo sapiens
agcaatttattggtg

SEQ ID NO: 522572 - DNA, 15 bp, Homo sapiens
gcaatttattggtgt

SEQ ID NO: 522573 - DNA, 15 bp, Homo sapiens
caatttattggtgta

SEQ ID NO: 522574 - DNA, 15 bp, Homo sapiens
aatttattggtgtat

SEQ ID NO: 522575 - DNA, 15 bp, Homo sapiens
atttattggtgtata

SEQ ID NO: 522576 - DNA, 15 bp, Homo sapiens
tttattggtgtatat

SEQ ID NO: 522577 - DNA, 15 bp, Homo sapiens
ttattggtgtatatt

SEQ ID NO: 522578 - DNA, 15 bp, Homo sapiens
tattggtgtatattc

SEQ ID NO: 522579 - DNA, 15 bp, Homo sapiens
attggtgtatattct

SEQ ID NO: 522580 - DNA, 15 bp, Homo sapiens
ttggtgtatattctt

SEQ ID NO: 522581 - DNA, 15 bp, Homo sapiens
tggtgtatattcttt

SEQ ID NO: 522582 - DNA, 15 bp, Homo sapiens
ggtgtatattctttt

SEQ ID NO: 522583 - DNA, 15 bp, Homo sapiens
gtgtatattctttta

SEQ ID NO: 522584 - DNA, 15 bp, Homo sapiens
tgtatattcttttag

SEQ ID NO: 522585 - DNA, 15 bp, Homo sapiens
gtatattcttttagt

SEQ ID NO: 522586 - DNA, 15 bp, Homo sapiens
tatattcttttagta

SEQ ID NO: 522587 - DNA, 15 bp, Homo sapiens
atattcttttagtat

SEQ ID NO: 522588 - DNA, 15 bp, Homo sapiens
tattcttttagtatt

SEQ ID NO: 522589 - DNA, 15 bp, Homo sapiens
attcttttagtattc

SEQ ID NO: 522590 - DNA, 15 bp, Homo sapiens
ttcttttagtattcc

SEQ ID NO: 522591 - DNA, 15 bp, Homo sapiens
tcttttagtattcct

SEQ ID NO: 522592 - DNA, 15 bp, Homo sapiens
cttttagtattcctg

SEQ ID NO: 522593 - DNA, 15 bp, Homo sapiens
ttttagtattcctgt

SEQ ID NO: 522594 - DNA, 15 bp, Homo sapiens
tttagtattcctgtg

SEQ ID NO: 522595 - DNA, 15 bp, Homo sapiens
ttagtattcctgtgt

SEQ ID NO: 522596 - DNA, 15 bp, Homo sapiens
tagtattcctgtgtg

SEQ ID NO: 522597 - DNA, 15 bp, Homo sapiens
agtattcctgtgtgt

SEQ ID NO: 522598 - DNA, 15 bp, Homo sapiens
gtattcctgtgtgtg

SEQ ID NO: 522599 - DNA, 15 bp, Homo sapiens
tattcctgtgtgtgc

SEQ ID NO: 522600 - DNA, 15 bp, Homo sapiens
attcctgtgtgtgca

SEQ ID NO: 522601 - DNA, 15 bp, Homo sapiens
ttcctgtgtgtgcac

SEQ ID NO: 522602 - DNA, 15 bp, Homo sapiens
tcctgtgtgtgcaca

SEQ ID NO: 522603 - DNA, 15 bp, Homo sapiens
cctgtgtgtgcacag

SEQ ID NO: 522604 - DNA, 15 bp, Homo sapiens
ctgtgtgtgcacagg

SEQ ID NO: 522605 - DNA, 15 bp, Homo sapiens
tgtgtgtgcacaggg

SEQ ID NO: 522606 - DNA, 15 bp, Homo sapiens
gtgtgtgcacagggg

SEQ ID NO: 522607 - DNA, 15 bp, Homo sapiens
tgtgtgcacaggggt

SEQ ID NO: 522608 - DNA, 15 bp, Homo sapiens
gtgtgcacaggggtg

SEQ ID NO: 522609 - DNA, 15 bp, Homo sapiens
tgtgcacaggggtgc

SEQ ID NO: 522610 - DNA, 15 bp, Homo sapiens
gtgcacaggggtgct

SEQ ID NO: 522611 - DNA, 15 bp, Homo sapiens
tgcacaggggtgctt

SEQ ID NO: 522612 - DNA, 15 bp, Homo sapiens
gcacaggggtgcttg

SEQ ID NO: 522613 - DNA, 15 bp, Homo sapiens
cacaggggtgcttgt

SEQ ID NO: 522614 - DNA, 15 bp, Homo sapiens
acaggggtgcttgta

SEQ ID NO: 522615 - DNA, 15 bp, Homo sapiens
caggggtgcttgtat

SEQ ID NO: 522616 - DNA, 15 bp, Homo sapiens
aggggtgcttgtata

SEQ ID NO: 522617 - DNA, 15 bp, Homo sapiens
ggggtgcttgtatat

SEQ ID NO: 522618 - DNA, 15 bp, Homo sapiens
gggtgcttgtatata

SEQ ID NO: 522619 - DNA, 15 bp, Homo sapiens
ggtgcttgtatatac

SEQ ID NO: 522620 - DNA, 15 bp, Homo sapiens
gtgcttgtatatact

SEQ ID NO: 522621 - DNA, 15 bp, Homo sapiens
tgcttgtatatactt

SEQ ID NO: 522622 - DNA, 15 bp, Homo sapiens
gcttgtatatacttt

SEQ ID NO: 522623 - DNA, 15 bp, Homo sapiens
cttgtatatacttta

SEQ ID NO: 522624 - DNA, 15 bp, Homo sapiens
ttgtatatactttat

SEQ ID NO: 522625 - DNA, 15 bp, Homo sapiens
tgtatatactttatc

SEQ ID NO: 522626 - DNA, 15 bp, Homo sapiens
gtatatactttatct

SEQ ID NO: 522627 - DNA, 15 bp, Homo sapiens
tatatactttatctt

SEQ ID NO: 522628 - DNA, 15 bp, Homo sapiens
atatactttatcttt

SEQ ID NO: 522629 - DNA, 15 bp, Homo sapiens
tatactttatcttta

SEQ ID NO: 522630 - DNA, 15 bp, Homo sapiens
atactttatctttaa

SEQ ID NO: 522631 - DNA, 15 bp, Homo sapiens
tactttatctttaaa

SEQ ID NO: 522632 - DNA, 15 bp, Homo sapiens
actttatctttaaaa

SEQ ID NO: 522633 - DNA, 15 bp, Homo sapiens
ctttatctttaaaat

SEQ ID NO: 522634 - DNA, 15 bp, Homo sapiens
tttatctttaaaata

SEQ ID NO: 522635 - DNA, 15 bp, Homo sapiens
ttatctttaaaatat

SEQ ID NO: 522636 - DNA, 15 bp, Homo sapiens
tatctttaaaatata

SEQ ID NO: 522637 - DNA, 15 bp, Homo sapiens
atctttaaaatatat

SEQ ID NO: 522638 - DNA, 15 bp, Homo sapiens
tctttaaaatatatc

SEQ ID NO: 522639 - DNA, 15 bp, Homo sapiens
ctttaaaatatatcc

SEQ ID NO: 522640 - DNA, 15 bp, Homo sapiens
tttaaaatatatcca

SEQ ID NO: 522641 - DNA, 15 bp, Homo sapiens
ttaaaatatatccag

SEQ ID NO: 522642 - DNA, 15 bp, Homo sapiens
taaaatatatccagg

SEQ ID NO: 522643 - DNA, 15 bp, Homo sapiens
aaaatatatccagga

SEQ ID NO: 522644 - DNA, 15 bp, Homo sapiens
aaatatatccaggaa

SEQ ID NO: 522645 - DNA, 15 bp, Homo sapiens
aatatatccaggaag

SEQ ID NO: 522646 - DNA, 15 bp, Homo sapiens
atatatccaggaagc

SEQ ID NO: 522647 - DNA, 15 bp, Homo sapiens
tatatccaggaagct

SEQ ID NO: 522648 - DNA, 15 bp, Homo sapiens
atatccaggaagcta

SEQ ID NO: 522649 - DNA, 15 bp, Homo sapiens
tatccaggaagctag

SEQ ID NO: 522650 - DNA, 15 bp, Homo sapiens
atccaggaagctagg

SEQ ID NO: 522651 - DNA, 15 bp, Homo sapiens
tccaggaagctaggc

SEQ ID NO: 522652 - DNA, 15 bp, Homo sapiens
ccaggaagctaggca

SEQ ID NO: 522653 - DNA, 15 bp, Homo sapiens
caggaagctaggcac

SEQ ID NO: 522654 - DNA, 15 bp, Homo sapiens
aggaagctaggcaca

SEQ ID NO: 522655 - DNA, 15 bp, Homo sapiens
ggaagctaggcacag

SEQ ID NO: 522656 - DNA, 15 bp, Homo sapiens
gaagctaggcacagt

SEQ ID NO: 522657 - DNA, 15 bp, Homo sapiens
aagctaggcacagtg

SEQ ID NO: 522658 - DNA, 15 bp, Homo sapiens
agctaggcacagtgg

SEQ ID NO: 522659 - DNA, 15 bp, Homo sapiens
gctaggcacagtggc

SEQ ID NO: 522660 - DNA, 15 bp, Homo sapiens
ctaggcacagtggct

SEQ ID NO: 522661 - DNA, 15 bp, Homo sapiens
taggcacagtggctt

SEQ ID NO: 522662 - DNA, 15 bp, Homo sapiens
aggcacagtggctta

SEQ ID NO: 522663 - DNA, 15 bp, Homo sapiens
ggcacagtggcttac

SEQ ID NO: 522664 - DNA, 15 bp, Homo sapiens
gcacagtggcttaca

SEQ ID NO: 522665 - DNA, 15 bp, Homo sapiens
cacagtggcttacac

SEQ ID NO: 522666 - DNA, 15 bp, Homo sapiens
acagtggcttacacc

SEQ ID NO: 522667 - DNA, 15 bp, Homo sapiens
cagtggcttacacct

SEQ ID NO: 522668 - DNA, 15 bp, Homo sapiens
agtggcttacacctg

SEQ ID NO: 522669 - DNA, 15 bp, Homo sapiens
gtggcttacacctgt

SEQ ID NO: 522670 - DNA, 15 bp, Homo sapiens
tggcttacacctgta

SEQ ID NO: 522671 - DNA, 15 bp, Homo sapiens
ggcttacacctgtaa

SEQ ID NO: 522672 - DNA, 15 bp, Homo sapiens
gcttacacctgtaat

SEQ ID NO: 522673 - DNA, 15 bp, Homo sapiens
cttacacctgtaatc

SEQ ID NO: 522674 - DNA, 15 bp, Homo sapiens
ttacacctgtaatcc

SEQ ID NO: 522675 - DNA, 15 bp, Homo sapiens
tacacctgtaatccc

SEQ ID NO: 522676 - DNA, 15 bp, Homo sapiens
agcactttgggaggg

SEQ ID NO: 522677 - DNA, 15 bp, Homo sapiens
gcactttgggagggt

SEQ ID NO: 522678 - DNA, 15 bp, Homo sapiens
cactttgggagggtg

SEQ ID NO: 522679 - DNA, 15 bp, Homo sapiens
actttgggagggtga

SEQ ID NO: 522680 - DNA, 15 bp, Homo sapiens
ctttgggagggtgag

SEQ ID NO: 522681 - DNA, 15 bp, Homo sapiens
tttgggagggtgagg

SEQ ID NO: 522682 - DNA, 15 bp, Homo sapiens
ttgggagggtgaggc

SEQ ID NO: 522683 - DNA, 15 bp, Homo sapiens
tgggagggtgaggca

SEQ ID NO: 522684 - DNA, 15 bp, Homo sapiens
gggagggtgaggcag

SEQ ID NO: 522685 - DNA, 15 bp, Homo sapiens
ggagggtgaggcagg

SEQ ID NO: 522686 - DNA, 15 bp, Homo sapiens
gagggtgaggcagga

SEQ ID NO: 522687 - DNA, 15 bp, Homo sapiens
agggtgaggcaggaa

SEQ ID NO: 522688 - DNA, 15 bp, Homo sapiens
gggtgaggcaggaag

SEQ ID NO: 522689 - DNA, 15 bp, Homo sapiens
ggtgaggcaggaaga

SEQ ID NO: 522690 - DNA, 15 bp, Homo sapiens
gtgaggcaggaagat

SEQ ID NO: 522691 - DNA, 15 bp, Homo sapiens
tgaggcaggaagatt

SEQ ID NO: 522692 - DNA, 15 bp, Homo sapiens
gaggcaggaagattg

SEQ ID NO: 522693 - DNA, 15 bp, Homo sapiens
aggcaggaagattgc

SEQ ID NO: 522694 - DNA, 15 bp, Homo sapiens
ggcaggaagattgcc

SEQ ID NO: 522695 - DNA, 15 bp, Homo sapiens
gcaggaagattgcct

SEQ ID NO: 522696 - DNA, 15 bp, Homo sapiens
caggaagattgcctg

SEQ ID NO: 522697 - DNA, 15 bp, Homo sapiens
aggaagattgcctga

SEQ ID NO: 522698 - DNA, 15 bp, Homo sapiens
ggaagattgcctgag

SEQ ID NO: 522699 - DNA, 15 bp, Homo sapiens
gaagattgcctgagc

SEQ ID NO: 522700 - DNA, 15 bp, Homo sapiens
aagattgcctgagcc

SEQ ID NO: 522701 - DNA, 15 bp, Homo sapiens
agattgcctgagccc

SEQ ID NO: 522702 - DNA, 15 bp, Homo sapiens
gattgcctgagcccc

SEQ ID NO: 522703 - DNA, 15 bp, Homo sapiens
attgcctgagccccg

SEQ ID NO: 522704 - DNA, 15 bp, Homo sapiens
ttgcctgagccccgg

SEQ ID NO: 522705 - DNA, 15 bp, Homo sapiens
tgcctgagccccgga

SEQ ID NO: 522706 - DNA, 15 bp, Homo sapiens
gcctgagccccggag

SEQ ID NO: 522707 - DNA, 15 bp, Homo sapiens
cctgagccccggagg

SEQ ID NO: 522708 - DNA, 15 bp, Homo sapiens
ctgagccccggaggt

SEQ ID NO: 522709 - DNA, 15 bp, Homo sapiens
tgagccccggaggtc

SEQ ID NO: 522710 - DNA, 15 bp, Homo sapiens
gagccccggaggtca

SEQ ID NO: 522711 - DNA, 15 bp, Homo sapiens
agccccggaggtcaa

SEQ ID NO: 522712 - DNA, 15 bp, Homo sapiens
gccccggaggtcaag

SEQ ID NO: 522713 - DNA, 15 bp, Homo sapiens
ccccggaggtcaagg

SEQ ID NO: 522714 - DNA, 15 bp, Homo sapiens
cccggaggtcaaggc

SEQ ID NO: 522715 - DNA, 15 bp, Homo sapiens
ccggaggtcaaggct

SEQ ID NO: 522716 - DNA, 15 bp, Homo sapiens
cggaggtcaaggctg

SEQ ID NO: 522717 - DNA, 15 bp, Homo sapiens
ggaggtcaaggctgc

SEQ ID NO: 522718 - DNA, 15 bp, Homo sapiens
gaggtcaaggctgca

SEQ ID NO: 522719 - DNA, 15 bp, Homo sapiens
aggtcaaggctgcag

SEQ ID NO: 522720 - DNA, 15 bp, Homo sapiens
ggtcaaggctgcagt

SEQ ID NO: 522721 - DNA, 15 bp, Homo sapiens
gtcaaggctgcagtg

SEQ ID NO: 522722 - DNA, 15 bp, Homo sapiens
aaggctgcagtgagt

SEQ ID NO: 522723 - DNA, 15 bp, Homo sapiens
gctgcagtgagttgt

SEQ ID NO: 522724 - DNA, 15 bp, Homo sapiens
ctgcagtgagttgtg

SEQ ID NO: 522725 - DNA, 15 bp, Homo sapiens
tgcagtgagttgtga

SEQ ID NO: 522726 - DNA, 15 bp, Homo sapiens
gcagtgagttgtgat

SEQ ID NO: 522727 - DNA, 15 bp, Homo sapiens
cagtgagttgtgatc

SEQ ID NO: 522728 - DNA, 15 bp, Homo sapiens
agtgagttgtgatca

SEQ ID NO: 522729 - DNA, 15 bp, Homo sapiens
gtgagttgtgatcac

SEQ ID NO: 522730 - DNA, 15 bp, Homo sapiens
tgagttgtgatcacg

SEQ ID NO: 522731 - DNA, 15 bp, Homo sapiens
gagttgtgatcacgc

SEQ ID NO: 522732 - DNA, 15 bp, Homo sapiens
agttgtgatcacgct

SEQ ID NO: 522733 - DNA, 15 bp, Homo sapiens
gttgtgatcacgcta

SEQ ID NO: 522734 - DNA, 15 bp, Homo sapiens
ttgtgatcacgctac

SEQ ID NO: 522735 - DNA, 15 bp, Homo sapiens
tgtgatcacgctact

SEQ ID NO: 522736 - DNA, 15 bp, Homo sapiens
gtgatcacgctactg

SEQ ID NO: 522737 - DNA, 15 bp, Homo sapiens
tgatcacgctactgc

SEQ ID NO: 522738 - DNA, 15 bp, Homo sapiens
gatcacgctactgca

SEQ ID NO: 522739 - DNA, 15 bp, Homo sapiens
atcacgctactgcac

SEQ ID NO: 522740 - DNA, 15 bp, Homo sapiens
tcacgctactgcact

SEQ ID NO: 522741 - DNA, 15 bp, Homo sapiens
cacgctactgcactc

SEQ ID NO: 522742 - DNA, 15 bp, Homo sapiens
acgctactgcactct

SEQ ID NO: 522743 - DNA, 15 bp, Homo sapiens
cgctactgcactctg

SEQ ID NO: 522744 - DNA, 15 bp, Homo sapiens
gctactgcactctgt

SEQ ID NO: 522745 - DNA, 15 bp, Homo sapiens
ctactgcactctgtt

SEQ ID NO: 522746 - DNA, 15 bp, Homo sapiens
tactgcactctgttc

SEQ ID NO: 522747 - DNA, 15 bp, Homo sapiens
actgcactctgttct

SEQ ID NO: 522748 - DNA, 15 bp, Homo sapiens
ctgcactctgttctg

SEQ ID NO: 522749 - DNA, 15 bp, Homo sapiens
tgcactctgttctgg

SEQ ID NO: 522750 - DNA, 15 bp, Homo sapiens
gcactctgttctggg

SEQ ID NO: 522751 - DNA, 15 bp, Homo sapiens
cactctgttctgggc

SEQ ID NO: 522752 - DNA, 15 bp, Homo sapiens
actctgttctgggca

SEQ ID NO: 522753 - DNA, 15 bp, Homo sapiens
ctctgttctgggcaa

SEQ ID NO: 522754 - DNA, 15 bp, Homo sapiens
tctgttctgggcaac

SEQ ID NO: 522755 - DNA, 15 bp, Homo sapiens
ctgttctgggcaacc

SEQ ID NO: 522756 - DNA, 15 bp, Homo sapiens
tgttctgggcaaccc

SEQ ID NO: 522757 - DNA, 15 bp, Homo sapiens
gttctgggcaacccc

SEQ ID NO: 522758 - DNA, 15 bp, Homo sapiens
ttctgggcaacccct

SEQ ID NO: 522759 - DNA, 15 bp, Homo sapiens
tctgggcaacccctg

SEQ ID NO: 522760 - DNA, 15 bp, Homo sapiens
ctgggcaacccctgt

SEQ ID NO: 522761 - DNA, 15 bp, Homo sapiens
tgggcaacccctgtc

SEQ ID NO: 522762 - DNA, 15 bp, Homo sapiens
gggcaacccctgtct

SEQ ID NO: 522763 - DNA, 15 bp, Homo sapiens
ggcaacccctgtctg

SEQ ID NO: 522764 - DNA, 15 bp, Homo sapiens
gcaacccctgtctgg

SEQ ID NO: 522765 - DNA, 15 bp, Homo sapiens
caacccctgtctggg

SEQ ID NO: 522766 - DNA, 15 bp, Homo sapiens
aacccctgtctggga

SEQ ID NO: 522767 - DNA, 15 bp, Homo sapiens
acccctgtctgggaa

SEQ ID NO: 522768 - DNA, 15 bp, Homo sapiens
cccctgtctgggaaa

SEQ ID NO: 522769 - DNA, 15 bp, Homo sapiens
ccctgtctgggaaaa

SEQ ID NO: 522770 - DNA, 15 bp, Homo sapiens
cctgtctgggaaaaa

SEQ ID NO: 522771 - DNA, 15 bp, Homo sapiens
ctgtctgggaaaaaa

SEQ ID NO: 522772 - DNA, 15 bp, Homo sapiens
tgtctgggaaaaaaa

SEQ ID NO: 522773 - DNA, 15 bp, Homo sapiens
gtctgggaaaaaaaa

SEQ ID NO: 522774 - DNA, 15 bp, Homo sapiens
tctgggaaaaaaaaa

SEQ ID NO: 522775 - DNA, 15 bp, Homo sapiens
ctgggaaaaaaaaaa

SEQ ID NO: 522776 - DNA, 15 bp, Homo sapiens
tgggaaaaaaaaaaa

SEQ ID NO: 522777 - DNA, 15 bp, Homo sapiens
gggaaaaaaaaaaaa

SEQ ID NO: 522778 - DNA, 15 bp, Homo sapiens
gaaaaaaaaaaaaat

SEQ ID NO: 522779 - DNA, 15 bp, Homo sapiens
aaaaaaaaaattagt

SEQ ID NO: 522780 - DNA, 15 bp, Homo sapiens
aaaaaaaaattagtg

SEQ ID NO: 522781 - DNA, 15 bp, Homo sapiens
aaaaaaaattagtga

SEQ ID NO: 522782 - DNA, 15 bp, Homo sapiens
aaaaaaattagtgag

SEQ ID NO: 522783 - DNA, 15 bp, Homo sapiens
aaaaaattagtgagg

SEQ ID NO: 522784 - DNA, 15 bp, Homo sapiens
aaaaattagtgaggc

SEQ ID NO: 522785 - DNA, 15 bp, Homo sapiens
aaaattagtgaggct

SEQ ID NO: 522786 - DNA, 15 bp, Homo sapiens
aaattagtgaggctt

SEQ ID NO: 522787 - DNA, 15 bp, Homo sapiens
aattagtgaggctta

SEQ ID NO: 522788 - DNA, 15 bp, Homo sapiens
attagtgaggcttag

SEQ ID NO: 522789 - DNA, 15 bp, Homo sapiens
ttagtgaggcttagt

SEQ ID NO: 522790 - DNA, 15 bp, Homo sapiens
tagtgaggcttagtg

SEQ ID NO: 522791 - DNA, 15 bp, Homo sapiens
agtgaggcttagtgg

SEQ ID NO: 522792 - DNA, 15 bp, Homo sapiens
gtgaggcttagtggt

SEQ ID NO: 522793 - DNA, 15 bp, Homo sapiens
tgaggcttagtggtg

SEQ ID NO: 522794 - DNA, 15 bp, Homo sapiens
gaggcttagtggtgc

SEQ ID NO: 522795 - DNA, 15 bp, Homo sapiens
aggcttagtggtgca

SEQ ID NO: 522796 - DNA, 15 bp, Homo sapiens
ggcttagtggtgcac

SEQ ID NO: 522797 - DNA, 15 bp, Homo sapiens
gcttagtggtgcaca

SEQ ID NO: 522798 - DNA, 15 bp, Homo sapiens
cttagtggtgcacac

SEQ ID NO: 522799 - DNA, 15 bp, Homo sapiens
ttagtggtgcacacc

SEQ ID NO: 522800 - DNA, 15 bp, Homo sapiens
tagtggtgcacacct

SEQ ID NO: 522801 - DNA, 15 bp, Homo sapiens
agtggtgcacacctg

SEQ ID NO: 522802 - DNA, 15 bp, Homo sapiens
gtggtgcacacctgt

SEQ ID NO: 522803 - DNA, 15 bp, Homo sapiens
tggtgcacacctgta

SEQ ID NO: 522804 - DNA, 15 bp, Homo sapiens
ggtgcacacctgtag

SEQ ID NO: 522805 - DNA, 15 bp, Homo sapiens
gtgcacacctgtagt

SEQ ID NO: 522806 - DNA, 15 bp, Homo sapiens
tgcacacctgtagtc

SEQ ID NO: 522807 - DNA, 15 bp, Homo sapiens
gcacacctgtagtct

SEQ ID NO: 522808 - DNA, 15 bp, Homo sapiens
cacacctgtagtctc

SEQ ID NO: 522809 - DNA, 15 bp, Homo sapiens
acacctgtagtctca

SEQ ID NO: 522810 - DNA, 15 bp, Homo sapiens
cacctgtagtctcag

SEQ ID NO: 522811 - DNA, 15 bp, Homo sapiens
acctgtagtctcagc

SEQ ID NO: 522812 - DNA, 15 bp, Homo sapiens
cctgtagtctcagct

SEQ ID NO: 522813 - DNA, 15 bp, Homo sapiens
ctgtagtctcagcta

SEQ ID NO: 522814 - DNA, 15 bp, Homo sapiens
tgtagtctcagctac

SEQ ID NO: 522815 - DNA, 15 bp, Homo sapiens
gtagtctcagctact

SEQ ID NO: 522816 - DNA, 15 bp, Homo sapiens
tagtctcagctactt

SEQ ID NO: 522817 - DNA, 15 bp, Homo sapiens
agtctcagctacttg

SEQ ID NO: 522818 - DNA, 15 bp, Homo sapiens
gtctcagctacttga

SEQ ID NO: 522819 - DNA, 15 bp, Homo sapiens
tctcagctacttgag

SEQ ID NO: 522820 - DNA, 15 bp, Homo sapiens
ctcagctacttgagt

SEQ ID NO: 522821 - DNA, 15 bp, Homo sapiens
tcagctacttgagtg

SEQ ID NO: 522822 - DNA, 15 bp, Homo sapiens
cagctacttgagtgg

SEQ ID NO: 522823 - DNA, 15 bp, Homo sapiens
agctacttgagtggc

SEQ ID NO: 522824 - DNA, 15 bp, Homo sapiens
gctacttgagtggct

SEQ ID NO: 522825 - DNA, 15 bp, Homo sapiens
ctacttgagtggctg

SEQ ID NO: 522826 - DNA, 15 bp, Homo sapiens
tacttgagtggctgg

SEQ ID NO: 522827 - DNA, 15 bp, Homo sapiens
acttgagtggctggg

SEQ ID NO: 522828 - DNA, 15 bp, Homo sapiens
cttgagtggctgggg

SEQ ID NO: 522829 - DNA, 15 bp, Homo sapiens
ttgagtggctggggt

SEQ ID NO: 522830 - DNA, 15 bp, Homo sapiens
tgagtggctggggta

SEQ ID NO: 522831 - DNA, 15 bp, Homo sapiens
gagtggctggggtag

SEQ ID NO: 522832 - DNA, 15 bp, Homo sapiens
agtggctggggtagg

SEQ ID NO: 522833 - DNA, 15 bp, Homo sapiens
gtggctggggtagga

SEQ ID NO: 522834 - DNA, 15 bp, Homo sapiens
tggctggggtaggat

SEQ ID NO: 522835 - DNA, 15 bp, Homo sapiens
ggctggggtaggatt

SEQ ID NO: 522836 - DNA, 15 bp, Homo sapiens
gctggggtaggattg

SEQ ID NO: 522837 - DNA, 15 bp, Homo sapiens
ctggggtaggattgc

SEQ ID NO: 522838 - DNA, 15 bp, Homo sapiens
tggggtaggattgct

SEQ ID NO: 522839 - DNA, 15 bp, Homo sapiens
ggggtaggattgctt

SEQ ID NO: 522840 - DNA, 15 bp, Homo sapiens
gggtaggattgcttg

SEQ ID NO: 522841 - DNA, 15 bp, Homo sapiens
ggtaggattgcttga

SEQ ID NO: 522842 - DNA, 15 bp, Homo sapiens
gtaggattgcttgat

SEQ ID NO: 522843 - DNA, 15 bp, Homo sapiens
taggattgcttgatc

SEQ ID NO: 522844 - DNA, 15 bp, Homo sapiens
aggattgcttgatcc

SEQ ID NO: 522845 - DNA, 15 bp, Homo sapiens
ggattgcttgatccc

SEQ ID NO: 522846 - DNA, 15 bp, Homo sapiens
gattgcttgatccca

SEQ ID NO: 522847 - DNA, 15 bp, Homo sapiens
attgcttgatcccag

SEQ ID NO: 522848 - DNA, 15 bp, Homo sapiens
ttgcttgatcccagc

SEQ ID NO: 522849 - DNA, 15 bp, Homo sapiens
tgcttgatcccagca

SEQ ID NO: 522850 - DNA, 15 bp, Homo sapiens
gcttgatcccagcaa

SEQ ID NO: 522851 - DNA, 15 bp, Homo sapiens
cttgatcccagcaag

SEQ ID NO: 522852 - DNA, 15 bp, Homo sapiens
ttgatcccagcaagt

SEQ ID NO: 522853 - DNA, 15 bp, Homo sapiens
tgatcccagcaagtt

SEQ ID NO: 522854 - DNA, 15 bp, Homo sapiens
gatcccagcaagttg

SEQ ID NO: 522855 - DNA, 15 bp, Homo sapiens
atcccagcaagttga

SEQ ID NO: 522856 - DNA, 15 bp, Homo sapiens
tcccagcaagttgag

SEQ ID NO: 522857 - DNA, 15 bp, Homo sapiens
cccagcaagttgagg

SEQ ID NO: 522858 - DNA, 15 bp, Homo sapiens
ccagcaagttgaggc

SEQ ID NO: 522859 - DNA, 15 bp, Homo sapiens
cagcaagttgaggcc

SEQ ID NO: 522860 - DNA, 15 bp, Homo sapiens
agcaagttgaggccg

SEQ ID NO: 522861 - DNA, 15 bp, Homo sapiens
gcaagttgaggccgt

SEQ ID NO: 522862 - DNA, 15 bp, Homo sapiens
caagttgaggccgtg

SEQ ID NO: 522863 - DNA, 15 bp, Homo sapiens
aagttgaggccgtgg

SEQ ID NO: 522864 - DNA, 15 bp, Homo sapiens
agttgaggccgtggt

SEQ ID NO: 522865 - DNA, 15 bp, Homo sapiens
gttgaggccgtggtg

SEQ ID NO: 522866 - DNA, 15 bp, Homo sapiens
ttgaggccgtggtga

SEQ ID NO: 522867 - DNA, 15 bp, Homo sapiens
tgaggccgtggtgag

SEQ ID NO: 522868 - DNA, 15 bp, Homo sapiens
gaggccgtggtgagc

SEQ ID NO: 522869 - DNA, 15 bp, Homo sapiens
aggccgtggtgagcc

SEQ ID NO: 522870 - DNA, 15 bp, Homo sapiens
ggccgtggtgagcca

SEQ ID NO: 522871 - DNA, 15 bp, Homo sapiens
gccgtggtgagccat

SEQ ID NO: 522872 - DNA, 15 bp, Homo sapiens
ccgtggtgagccatg

SEQ ID NO: 522873 - DNA, 15 bp, Homo sapiens
cgtggtgagccatga

SEQ ID NO: 522874 - DNA, 15 bp, Homo sapiens
gtggtgagccatgat

SEQ ID NO: 522875 - DNA, 15 bp, Homo sapiens
tggtgagccatgatg

SEQ ID NO: 522876 - DNA, 15 bp, Homo sapiens
ggtgagccatgatgg

SEQ ID NO: 522877 - DNA, 15 bp, Homo sapiens
gtgagccatgatggt

SEQ ID NO: 522878 - DNA, 15 bp, Homo sapiens
tgagccatgatggtg

SEQ ID NO: 522879 - DNA, 15 bp, Homo sapiens
gagccatgatggtgc

SEQ ID NO: 522880 - DNA, 15 bp, Homo sapiens
agccatgatggtgcc

SEQ ID NO: 522881 - DNA, 15 bp, Homo sapiens
gccatgatggtgcca

SEQ ID NO: 522882 - DNA, 15 bp, Homo sapiens
ccatgatggtgccac

SEQ ID NO: 522883 - DNA, 15 bp, Homo sapiens
catgatggtgccact

SEQ ID NO: 522884 - DNA, 15 bp, Homo sapiens
atgatggtgccactg

SEQ ID NO: 522885 - DNA, 15 bp, Homo sapiens
tgatggtgccactgc

SEQ ID NO: 522886 - DNA, 15 bp, Homo sapiens
gccactgcactccat

SEQ ID NO: 522887 - DNA, 15 bp, Homo sapiens
ccactgcactccatc

SEQ ID NO: 522888 - DNA, 15 bp, Homo sapiens
cactgcactccatcc

SEQ ID NO: 522889 - DNA, 15 bp, Homo sapiens
actgcactccatcct

SEQ ID NO: 522890 - DNA, 15 bp, Homo sapiens
ctgcactccatcctg

SEQ ID NO: 522891 - DNA, 15 bp, Homo sapiens
tgcactccatcctgg

SEQ ID NO: 522892 - DNA, 15 bp, Homo sapiens
gcactccatcctggg

SEQ ID NO: 522893 - DNA, 15 bp, Homo sapiens
cactccatcctgggt

SEQ ID NO: 522894 - DNA, 15 bp, Homo sapiens
actccatcctgggtg

SEQ ID NO: 522895 - DNA, 15 bp, Homo sapiens
ctccatcctgggtga

SEQ ID NO: 522896 - DNA, 15 bp, Homo sapiens
tccatcctgggtgat

SEQ ID NO: 522897 - DNA, 15 bp, Homo sapiens
ccatcctgggtgata

SEQ ID NO: 522898 - DNA, 15 bp, Homo sapiens
catcctgggtgatat

SEQ ID NO: 522899 - DNA, 15 bp, Homo sapiens
atcctgggtgatatg

SEQ ID NO: 522900 - DNA, 15 bp, Homo sapiens
tcctgggtgatatgg

SEQ ID NO: 522901 - DNA, 15 bp, Homo sapiens
cctgggtgatatggt

SEQ ID NO: 522902 - DNA, 15 bp, Homo sapiens
ctgggtgatatggtg

SEQ ID NO: 522903 - DNA, 15 bp, Homo sapiens
tgggtgatatggtga

SEQ ID NO: 522904 - DNA, 15 bp, Homo sapiens
gggtgatatggtgag

SEQ ID NO: 522905 - DNA, 15 bp, Homo sapiens
ggtgatatggtgaga

SEQ ID NO: 522906 - DNA, 15 bp, Homo sapiens
gtgatatggtgagac

SEQ ID NO: 522907 - DNA, 15 bp, Homo sapiens
tgatatggtgagacc

SEQ ID NO: 522908 - DNA, 15 bp, Homo sapiens
gatatggtgagaccc

SEQ ID NO: 522909 - DNA, 15 bp, Homo sapiens
atatggtgagaccct

SEQ ID NO: 522910 - DNA, 15 bp, Homo sapiens
tatggtgagaccctg

SEQ ID NO: 522911 - DNA, 15 bp, Homo sapiens
atggtgagaccctgt

SEQ ID NO: 522912 - DNA, 15 bp, Homo sapiens
tggtgagaccctgtc

SEQ ID NO: 522913 - DNA, 15 bp, Homo sapiens
ggtgagaccctgtct

SEQ ID NO: 522914 - DNA, 15 bp, Homo sapiens
gtgagaccctgtctc

SEQ ID NO: 522915 - DNA, 15 bp, Homo sapiens
tgagaccctgtctca

SEQ ID NO: 522916 - DNA, 15 bp, Homo sapiens
gagaccctgtctcaa

SEQ ID NO: 522917 - DNA, 15 bp, Homo sapiens
agaccctgtctcaaa

SEQ ID NO: 522918 - DNA, 15 bp, Homo sapiens
gaccctgtctcaaaa

SEQ ID NO: 522919 - DNA, 15 bp, Homo sapiens
accctgtctcaaaaa

SEQ ID NO: 522920 - DNA, 15 bp, Homo sapiens
ccctgtctcaaaaac

SEQ ID NO: 522921 - DNA, 15 bp, Homo sapiens
cctgtctcaaaaaca

SEQ ID NO: 522922 - DNA, 15 bp, Homo sapiens
ctgtctcaaaaacaa

SEQ ID NO: 522923 - DNA, 15 bp, Homo sapiens
tgtctcaaaaacaag

SEQ ID NO: 522924 - DNA, 15 bp, Homo sapiens
gtctcaaaaacaaga

SEQ ID NO: 522925 - DNA, 15 bp, Homo sapiens
tctcaaaaacaagaa

SEQ ID NO: 522926 - DNA, 15 bp, Homo sapiens
ctcaaaaacaagaaa

SEQ ID NO: 522927 - DNA, 15 bp, Homo sapiens
tcaaaaacaagaaat

SEQ ID NO: 522928 - DNA, 15 bp, Homo sapiens
caaaaacaagaaatc

SEQ ID NO: 522929 - DNA, 15 bp, Homo sapiens
aaaaacaagaaatcc

SEQ ID NO: 522930 - DNA, 15 bp, Homo sapiens
aaaacaagaaatcca

SEQ ID NO: 522931 - DNA, 15 bp, Homo sapiens
aaacaagaaatccag

SEQ ID NO: 522932 - DNA, 15 bp, Homo sapiens
aacaagaaatccaga

SEQ ID NO: 522933 - DNA, 15 bp, Homo sapiens
acaagaaatccagat

SEQ ID NO: 522934 - DNA, 15 bp, Homo sapiens
caagaaatccagata

SEQ ID NO: 522935 - DNA, 15 bp, Homo sapiens
aagaaatccagataa

SEQ ID NO: 522936 - DNA, 15 bp, Homo sapiens
agaaatccagataat

SEQ ID NO: 522937 - DNA, 15 bp, Homo sapiens
gaaatccagataatt

SEQ ID NO: 522938 - DNA, 15 bp, Homo sapiens
aaatccagataattc

SEQ ID NO: 522939 - DNA, 15 bp, Homo sapiens
aatccagataattct

SEQ ID NO: 522940 - DNA, 15 bp, Homo sapiens
atccagataattctg

SEQ ID NO: 522941 - DNA, 15 bp, Homo sapiens
tccagataattctgt

SEQ ID NO: 522942 - DNA, 15 bp, Homo sapiens
ccagataattctgtg

SEQ ID NO: 522943 - DNA, 15 bp, Homo sapiens
cagataattctgtgc

SEQ ID NO: 522944 - DNA, 15 bp, Homo sapiens
agataattctgtgca

SEQ ID NO: 522945 - DNA, 15 bp, Homo sapiens
gataattctgtgcat

SEQ ID NO: 522946 - DNA, 15 bp, Homo sapiens
ataattctgtgcatt

SEQ ID NO: 522947 - DNA, 15 bp, Homo sapiens
taattctgtgcatta

SEQ ID NO: 522948 - DNA, 15 bp, Homo sapiens
aattctgtgcattat

SEQ ID NO: 522949 - DNA, 15 bp, Homo sapiens
attctgtgcattata

SEQ ID NO: 522950 - DNA, 15 bp, Homo sapiens
ttctgtgcattataa

SEQ ID NO: 522951 - DNA, 15 bp, Homo sapiens
tctgtgcattataat

SEQ ID NO: 522952 - DNA, 15 bp, Homo sapiens
ctgtgcattataatc

SEQ ID NO: 522953 - DNA, 15 bp, Homo sapiens
tgtgcattataatct

SEQ ID NO: 522954 - DNA, 15 bp, Homo sapiens
gtgcattataatcta

SEQ ID NO: 522955 - DNA, 15 bp, Homo sapiens
tgcattataatctag

SEQ ID NO: 522956 - DNA, 15 bp, Homo sapiens
gcattataatctagc

SEQ ID NO: 522957 - DNA, 15 bp, Homo sapiens
cattataatctagct

SEQ ID NO: 522958 - DNA, 15 bp, Homo sapiens
attataatctagctt

SEQ ID NO: 522959 - DNA, 15 bp, Homo sapiens
ttataatctagcttt

SEQ ID NO: 522960 - DNA, 15 bp, Homo sapiens
tataatctagctttt

SEQ ID NO: 522961 - DNA, 15 bp, Homo sapiens
ataatctagctttta

SEQ ID NO: 522962 - DNA, 15 bp, Homo sapiens
taatctagcttttac

SEQ ID NO: 522963 - DNA, 15 bp, Homo sapiens
aatctagcttttact

SEQ ID NO: 522964 - DNA, 15 bp, Homo sapiens
atctagcttttactg

SEQ ID NO: 522965 - DNA, 15 bp, Homo sapiens
tctagcttttactgg

SEQ ID NO: 522966 - DNA, 15 bp, Homo sapiens
ctagcttttactgga

SEQ ID NO: 522967 - DNA, 15 bp, Homo sapiens
tagcttttactggat

SEQ ID NO: 522968 - DNA, 15 bp, Homo sapiens
agcttttactggatc

SEQ ID NO: 522969 - DNA, 15 bp, Homo sapiens
gcttttactggatca

SEQ ID NO: 522970 - DNA, 15 bp, Homo sapiens
cttttactggatcat

SEQ ID NO: 522971 - DNA, 15 bp, Homo sapiens
ttttactggatcatt

SEQ ID NO: 522972 - DNA, 15 bp, Homo sapiens
tttactggatcatta

SEQ ID NO: 522973 - DNA, 15 bp, Homo sapiens
ttactggatcattaa

SEQ ID NO: 522974 - DNA, 15 bp, Homo sapiens
tactggatcattaaa

SEQ ID NO: 522975 - DNA, 15 bp, Homo sapiens
actggatcattaaaa

SEQ ID NO: 522976 - DNA, 15 bp, Homo sapiens
ctggatcattaaaat

SEQ ID NO: 522977 - DNA, 15 bp, Homo sapiens
tggatcattaaaatt

SEQ ID NO: 522978 - DNA, 15 bp, Homo sapiens
ggatcattaaaattc

SEQ ID NO: 522979 - DNA, 15 bp, Homo sapiens
gatcattaaaattct

SEQ ID NO: 522980 - DNA, 15 bp, Homo sapiens
atcattaaaattctt

SEQ ID NO: 522981 - DNA, 15 bp, Homo sapiens
tcattaaaattcttt

SEQ ID NO: 522982 - DNA, 15 bp, Homo sapiens
cattaaaattctttt

SEQ ID NO: 522983 - DNA, 15 bp, Homo sapiens
attaaaattcttttt

SEQ ID NO: 522984 - DNA, 15 bp, Homo sapiens
ttaaaattctttttt

SEQ ID NO: 522985 - DNA, 15 bp, Homo sapiens
taaaattcttttttc

SEQ ID NO: 522986 - DNA, 15 bp, Homo sapiens
aaaattcttttttct

SEQ ID NO: 522987 - DNA, 15 bp, Homo sapiens
aaattcttttttctt

SEQ ID NO: 522988 - DNA, 15 bp, Homo sapiens
aattcttttttcttt

SEQ ID NO: 522989 - DNA, 15 bp, Homo sapiens
attcttttttctttt

SEQ ID NO: 522990 - DNA, 15 bp, Homo sapiens
ttcttttttcttttt

SEQ ID NO: 522991 - DNA, 15 bp, Homo sapiens
tcttttttctttttt

SEQ ID NO: 522992 - DNA, 15 bp, Homo sapiens
cttttttcttttttt

SEQ ID NO: 522993 - DNA, 15 bp, Homo sapiens
ttttttttttttttc

SEQ ID NO: 522994 - DNA, 15 bp, Homo sapiens
tttttttttttttct

SEQ ID NO: 522995 - DNA, 15 bp, Homo sapiens
ttttttttttttctg

SEQ ID NO: 522996 - DNA, 15 bp, Homo sapiens
tttttttttttctga

SEQ ID NO: 522997 - DNA, 15 bp, Homo sapiens
ttttttttttctgag

SEQ ID NO: 522998 - DNA, 15 bp, Homo sapiens
tttttttttctgaga

SEQ ID NO: 522999 - DNA, 15 bp, Homo sapiens
ttttttttctgagat

SEQ ID NO: 523000 - DNA, 15 bp, Homo sapiens
tttttttctgagatg

SEQ ID NO: 523001 - DNA, 15 bp, Homo sapiens
ttttttctgagatgg

SEQ ID NO: 523002 - DNA, 15 bp, Homo sapiens
tttttctgagatgga

SEQ ID NO: 523003 - DNA, 15 bp, Homo sapiens
ttttctgagatggag

SEQ ID NO: 523004 - DNA, 15 bp, Homo sapiens
tttctgagatggagt

SEQ ID NO: 523005 - DNA, 15 bp, Homo sapiens
ttctgagatggagtt

SEQ ID NO: 523006 - DNA, 15 bp, Homo sapiens
tctgagatggagttt

SEQ ID NO: 523007 - DNA, 15 bp, Homo sapiens
ctgagatggagtttc

SEQ ID NO: 523008 - DNA, 15 bp, Homo sapiens
tgagatggagtttca

SEQ ID NO: 523009 - DNA, 15 bp, Homo sapiens
gagatggagtttcac

SEQ ID NO: 523010 - DNA, 15 bp, Homo sapiens
agatggagtttcact

SEQ ID NO: 523011 - DNA, 15 bp, Homo sapiens
gatggagtttcactc

SEQ ID NO: 523012 - DNA, 15 bp, Homo sapiens
atggagtttcactct

SEQ ID NO: 523013 - DNA, 15 bp, Homo sapiens
tggagtttcactctt

SEQ ID NO: 523014 - DNA, 15 bp, Homo sapiens
ggagtttcactcttg

SEQ ID NO: 523015 - DNA, 15 bp, Homo sapiens
gagtttcactcttgt

SEQ ID NO: 523016 - DNA, 15 bp, Homo sapiens
agtttcactcttgtt

SEQ ID NO: 523017 - DNA, 15 bp, Homo sapiens
gtttcactcttgttg

SEQ ID NO: 523018 - DNA, 15 bp, Homo sapiens
tttcactcttgttgc

SEQ ID NO: 523019 - DNA, 15 bp, Homo sapiens
ttcactcttgttgcc

SEQ ID NO: 523020 - DNA, 15 bp, Homo sapiens
tcactcttgttgccc

SEQ ID NO: 523021 - DNA, 15 bp, Homo sapiens
cactcttgttgccca

SEQ ID NO: 523022 - DNA, 15 bp, Homo sapiens
actcttgttgcccag

SEQ ID NO: 523023 - DNA, 15 bp, Homo sapiens
gtgcagtggtgtgac

SEQ ID NO: 523024 - DNA, 15 bp, Homo sapiens
tgcagtggtgtgacc

SEQ ID NO: 523025 - DNA, 15 bp, Homo sapiens
gcagtggtgtgacct

SEQ ID NO: 523026 - DNA, 15 bp, Homo sapiens
cagtggtgtgacctt

SEQ ID NO: 523027 - DNA, 15 bp, Homo sapiens
agtggtgtgaccttg

SEQ ID NO: 523028 - DNA, 15 bp, Homo sapiens
gtggtgtgaccttgg

SEQ ID NO: 523029 - DNA, 15 bp, Homo sapiens
tggtgtgaccttggc

SEQ ID NO: 523030 - DNA, 15 bp, Homo sapiens
ggtgtgaccttggct

SEQ ID NO: 523031 - DNA, 15 bp, Homo sapiens
gtgtgaccttggctc

SEQ ID NO: 523032 - DNA, 15 bp, Homo sapiens
tgtgaccttggctca

SEQ ID NO: 523033 - DNA, 15 bp, Homo sapiens
gtgaccttggctcac

SEQ ID NO: 523034 - DNA, 15 bp, Homo sapiens
tgaccttggctcacc

SEQ ID NO: 523035 - DNA, 15 bp, Homo sapiens
gaccttggctcaccg

SEQ ID NO: 523036 - DNA, 15 bp, Homo sapiens
accttggctcaccgc

SEQ ID NO: 523037 - DNA, 15 bp, Homo sapiens
ccttggctcaccgca

SEQ ID NO: 523038 - DNA, 15 bp, Homo sapiens
cttggctcaccgcat

SEQ ID NO: 523039 - DNA, 15 bp, Homo sapiens
ttggctcaccgcatc

SEQ ID NO: 523040 - DNA, 15 bp, Homo sapiens
tggctcaccgcatcc

SEQ ID NO: 523041 - DNA, 15 bp, Homo sapiens
ggctcaccgcatcct

SEQ ID NO: 523042 - DNA, 15 bp, Homo sapiens
gctcaccgcatcctc

SEQ ID NO: 523043 - DNA, 15 bp, Homo sapiens
ctcaccgcatcctct

SEQ ID NO: 523044 - DNA, 15 bp, Homo sapiens
tcaccgcatcctctg

SEQ ID NO: 523045 - DNA, 15 bp, Homo sapiens
caccgcatcctctgc

SEQ ID NO: 523046 - DNA, 15 bp, Homo sapiens
accgcatcctctgcc

SEQ ID NO: 523047 - DNA, 15 bp, Homo sapiens
ccgcatcctctgcct

SEQ ID NO: 523048 - DNA, 15 bp, Homo sapiens
cgcatcctctgcctc

SEQ ID NO: 523049 - DNA, 15 bp, Homo sapiens
gcatcctctgcctcc

SEQ ID NO: 523050 - DNA, 15 bp, Homo sapiens
catcctctgcctccc

SEQ ID NO: 523051 - DNA, 15 bp, Homo sapiens
atcctctgcctcccg

SEQ ID NO: 523052 - DNA, 15 bp, Homo sapiens
tcctctgcctcccgg

SEQ ID NO: 523053 - DNA, 15 bp, Homo sapiens
cctctgcctcccggg

SEQ ID NO: 523054 - DNA, 15 bp, Homo sapiens
tcccgggttcatgcg

SEQ ID NO: 523055 - DNA, 15 bp, Homo sapiens
cccgggttcatgcga

SEQ ID NO: 523056 - DNA, 15 bp, Homo sapiens
ccgggttcatgcgat

SEQ ID NO: 523057 - DNA, 15 bp, Homo sapiens
cgggttcatgcgatt

SEQ ID NO: 523058 - DNA, 15 bp, Homo sapiens
gggttcatgcgattc

SEQ ID NO: 523059 - DNA, 15 bp, Homo sapiens
ggttcatgcgattct

SEQ ID NO: 523060 - DNA, 15 bp, Homo sapiens
gttcatgcgattctc

SEQ ID NO: 523061 - DNA, 15 bp, Homo sapiens
ttcatgcgattctcc

SEQ ID NO: 523062 - DNA, 15 bp, Homo sapiens
tcatgcgattctcct

SEQ ID NO: 523063 - DNA, 15 bp, Homo sapiens
catgcgattctcctg

SEQ ID NO: 523064 - DNA, 15 bp, Homo sapiens
atgcgattctcctgc

SEQ ID NO: 523065 - DNA, 15 bp, Homo sapiens
tgcgattctcctgcc

SEQ ID NO: 523066 - DNA, 15 bp, Homo sapiens
ccgagtagctgggat

SEQ ID NO: 523067 - DNA, 15 bp, Homo sapiens
cgagtagctgggatt

SEQ ID NO: 523068 - DNA, 15 bp, Homo sapiens
gggattacaggcatg

SEQ ID NO: 523069 - DNA, 15 bp, Homo sapiens
ggattacaggcatgt

SEQ ID NO: 523070 - DNA, 15 bp, Homo sapiens
gattacaggcatgtg

SEQ ID NO: 523071 - DNA, 15 bp, Homo sapiens
attacaggcatgtgc

SEQ ID NO: 523072 - DNA, 15 bp, Homo sapiens
ttacaggcatgtgcc

SEQ ID NO: 523073 - DNA, 15 bp, Homo sapiens
ggcatgtgccaccat

SEQ ID NO: 523074 - DNA, 15 bp, Homo sapiens
gcatgtgccaccatg

SEQ ID NO: 523075 - DNA, 15 bp, Homo sapiens
catgtgccaccatgc

SEQ ID NO: 523076 - DNA, 15 bp, Homo sapiens
atgtgccaccatgcc

SEQ ID NO: 523077 - DNA, 15 bp, Homo sapiens
tgtgccaccatgccc

SEQ ID NO: 523078 - DNA, 15 bp, Homo sapiens
gtgccaccatgccca

SEQ ID NO: 523079 - DNA, 15 bp, Homo sapiens
gccaccatgcccagc

SEQ ID NO: 523080 - DNA, 15 bp, Homo sapiens
ccatgcccagctaac

SEQ ID NO: 523081 - DNA, 15 bp, Homo sapiens
catgcccagctaact

SEQ ID NO: 523082 - DNA, 15 bp, Homo sapiens
atgcccagctaactt

SEQ ID NO: 523083 - DNA, 15 bp, Homo sapiens
tgcccagctaacttt

SEQ ID NO: 523084 - DNA, 15 bp, Homo sapiens
gcccagctaactttg

SEQ ID NO: 523085 - DNA, 15 bp, Homo sapiens
cccagctaactttgt

SEQ ID NO: 523086 - DNA, 15 bp, Homo sapiens
ccagctaactttgta

SEQ ID NO: 523087 - DNA, 15 bp, Homo sapiens
cagctaactttgtat

SEQ ID NO: 523088 - DNA, 15 bp, Homo sapiens
agctaactttgtatt

SEQ ID NO: 523089 - DNA, 15 bp, Homo sapiens
gctaactttgtattt

SEQ ID NO: 523090 - DNA, 15 bp, Homo sapiens
ctaactttgtatttt

SEQ ID NO: 523091 - DNA, 15 bp, Homo sapiens
taactttgtattttt

SEQ ID NO: 523092 - DNA, 15 bp, Homo sapiens
aactttgtattttta

SEQ ID NO: 523093 - DNA, 15 bp, Homo sapiens
actttgtatttttag

SEQ ID NO: 523094 - DNA, 15 bp, Homo sapiens
ctttgtatttttagt

SEQ ID NO: 523095 - DNA, 15 bp, Homo sapiens
cagggtttctccatg

SEQ ID NO: 523096 - DNA, 15 bp, Homo sapiens
agggtttctccatgt

SEQ ID NO: 523097 - DNA, 15 bp, Homo sapiens
gggtttctccatgtt

SEQ ID NO: 523098 - DNA, 15 bp, Homo sapiens
ggtttctccatgttg

SEQ ID NO: 523099 - DNA, 15 bp, Homo sapiens
gtttctccatgttga

SEQ ID NO: 523100 - DNA, 15 bp, Homo sapiens
tttctccatgttgac

SEQ ID NO: 523101 - DNA, 15 bp, Homo sapiens
ttctccatgttgacc

SEQ ID NO: 523102 - DNA, 15 bp, Homo sapiens
tctccatgttgacca

SEQ ID NO: 523103 - DNA, 15 bp, Homo sapiens
ctccatgttgaccag

SEQ ID NO: 523104 - DNA, 15 bp, Homo sapiens
tccatgttgaccagg

SEQ ID NO: 523105 - DNA, 15 bp, Homo sapiens
ccatgttgaccaggc

SEQ ID NO: 523106 - DNA, 15 bp, Homo sapiens
catgttgaccaggct

SEQ ID NO: 523107 - DNA, 15 bp, Homo sapiens
atgttgaccaggctg

SEQ ID NO: 523108 - DNA, 15 bp, Homo sapiens
tgttgaccaggctgg

SEQ ID NO: 523109 - DNA, 15 bp, Homo sapiens
gttgaccaggctggt

SEQ ID NO: 523110 - DNA, 15 bp, Homo sapiens
ttgaccaggctggtc

SEQ ID NO: 523111 - DNA, 15 bp, Homo sapiens
tgaccaggctggtct

SEQ ID NO: 523112 - DNA, 15 bp, Homo sapiens
gaccaggctggtctc

SEQ ID NO: 523113 - DNA, 15 bp, Homo sapiens
accaggctggtctca

SEQ ID NO: 523114 - DNA, 15 bp, Homo sapiens
tctcaaactcctggc

SEQ ID NO: 523115 - DNA, 15 bp, Homo sapiens
ctcaaactcctggcc

SEQ ID NO: 523116 - DNA, 15 bp, Homo sapiens
tcaaactcctggcct

SEQ ID NO: 523117 - DNA, 15 bp, Homo sapiens
caaactcctggcctc

SEQ ID NO: 523118 - DNA, 15 bp, Homo sapiens
aaactcctggcctca

SEQ ID NO: 523119 - DNA, 15 bp, Homo sapiens
tggcctcaagtgatc

SEQ ID NO: 523120 - DNA, 15 bp, Homo sapiens
ggcctcaagtgatcc

SEQ ID NO: 523121 - DNA, 15 bp, Homo sapiens
gcctcaagtgatcca

SEQ ID NO: 523122 - DNA, 15 bp, Homo sapiens
cctcaagtgatccac

SEQ ID NO: 523123 - DNA, 15 bp, Homo sapiens
ctcaagtgatccacc

SEQ ID NO: 523124 - DNA, 15 bp, Homo sapiens
tcaagtgatccaccc

SEQ ID NO: 523125 - DNA, 15 bp, Homo sapiens
caagtgatccaccca

SEQ ID NO: 523126 - DNA, 15 bp, Homo sapiens
aagtgatccacccac

SEQ ID NO: 523127 - DNA, 15 bp, Homo sapiens
agtgatccacccacc

SEQ ID NO: 523128 - DNA, 15 bp, Homo sapiens
ccacccacctcggcc

SEQ ID NO: 523129 - DNA, 15 bp, Homo sapiens
cacccacctcggcct

SEQ ID NO: 523130 - DNA, 15 bp, Homo sapiens
acccacctcggcctc

SEQ ID NO: 523131 - DNA, 15 bp, Homo sapiens
aaagtgctggggtta

SEQ ID NO: 523132 - DNA, 15 bp, Homo sapiens
aagtgctggggttac

SEQ ID NO: 523133 - DNA, 15 bp, Homo sapiens
agtgctggggttaca

SEQ ID NO: 523134 - DNA, 15 bp, Homo sapiens
gtgctggggttacag

SEQ ID NO: 523135 - DNA, 15 bp, Homo sapiens
tgctggggttacagg

SEQ ID NO: 523136 - DNA, 15 bp, Homo sapiens
gctggggttacaggc

SEQ ID NO: 523137 - DNA, 15 bp, Homo sapiens
ctggggttacaggcg

SEQ ID NO: 523138 - DNA, 15 bp, Homo sapiens
tggggttacaggcgt

SEQ ID NO: 523139 - DNA, 15 bp, Homo sapiens
ggggttacaggcgtg

SEQ ID NO: 523140 - DNA, 15 bp, Homo sapiens
gggttacaggcgtga

SEQ ID NO: 523141 - DNA, 15 bp, Homo sapiens
ggttacaggcgtgag

SEQ ID NO: 523142 - DNA, 15 bp, Homo sapiens
gttacaggcgtgagc

SEQ ID NO: 523143 - DNA, 15 bp, Homo sapiens
gtgagccaccgcact

SEQ ID NO: 523144 - DNA, 15 bp, Homo sapiens
tgagccaccgcactc

SEQ ID NO: 523145 - DNA, 15 bp, Homo sapiens
gagccaccgcactca

SEQ ID NO: 523146 - DNA, 15 bp, Homo sapiens
agccaccgcactcag

SEQ ID NO: 523147 - DNA, 15 bp, Homo sapiens
gccaccgcactcagc

SEQ ID NO: 523148 - DNA, 15 bp, Homo sapiens
ccaccgcactcagcc

SEQ ID NO: 523149 - DNA, 15 bp, Homo sapiens
caccgcactcagcct

SEQ ID NO: 523150 - DNA, 15 bp, Homo sapiens
accgcactcagcctg

SEQ ID NO: 523151 - DNA, 15 bp, Homo sapiens
ccgcactcagcctgg

SEQ ID NO: 523152 - DNA, 15 bp, Homo sapiens
cgcactcagcctggg

SEQ ID NO: 523153 - DNA, 15 bp, Homo sapiens
gcactcagcctgggt

SEQ ID NO: 523154 - DNA, 15 bp, Homo sapiens
cactcagcctgggtc

SEQ ID NO: 523155 - DNA, 15 bp, Homo sapiens
actcagcctgggtcg

SEQ ID NO: 523156 - DNA, 15 bp, Homo sapiens
ctcagcctgggtcgt

SEQ ID NO: 523157 - DNA, 15 bp, Homo sapiens
tcagcctgggtcgtt

SEQ ID NO: 523158 - DNA, 15 bp, Homo sapiens
cagcctgggtcgtta

SEQ ID NO: 523159 - DNA, 15 bp, Homo sapiens
agcctgggtcgttaa

SEQ ID NO: 523160 - DNA, 15 bp, Homo sapiens
gcctgggtcgttaaa

SEQ ID NO: 523161 - DNA, 15 bp, Homo sapiens
cctgggtcgttaaaa

SEQ ID NO: 523162 - DNA, 15 bp, Homo sapiens
ctgggtcgttaaaat

SEQ ID NO: 523163 - DNA, 15 bp, Homo sapiens
tgggtcgttaaaatt

SEQ ID NO: 523164 - DNA, 15 bp, Homo sapiens
gggtcgttaaaattc

SEQ ID NO: 523165 - DNA, 15 bp, Homo sapiens
ggtcgttaaaattct

SEQ ID NO: 523166 - DNA, 15 bp, Homo sapiens
gtcgttaaaattctt

SEQ ID NO: 523167 - DNA, 15 bp, Homo sapiens
tcgttaaaattctta

SEQ ID NO: 523168 - DNA, 15 bp, Homo sapiens
cgttaaaattcttaa

SEQ ID NO: 523169 - DNA, 15 bp, Homo sapiens
gttaaaattcttaag

SEQ ID NO: 523170 - DNA, 15 bp, Homo sapiens
ttaaaattcttaagt

SEQ ID NO: 523171 - DNA, 15 bp, Homo sapiens
taaaattcttaagtg

SEQ ID NO: 523172 - DNA, 15 bp, Homo sapiens
aaaattcttaagtga

SEQ ID NO: 523173 - DNA, 15 bp, Homo sapiens
aaattcttaagtgac

SEQ ID NO: 523174 - DNA, 15 bp, Homo sapiens
aattcttaagtgact

SEQ ID NO: 523175 - DNA, 15 bp, Homo sapiens
attcttaagtgactt

SEQ ID NO: 523176 - DNA, 15 bp, Homo sapiens
ttcttaagtgacttc

SEQ ID NO: 523177 - DNA, 15 bp, Homo sapiens
tcttaagtgacttca

SEQ ID NO: 523178 - DNA, 15 bp, Homo sapiens
cttaagtgacttcat

SEQ ID NO: 523179 - DNA, 15 bp, Homo sapiens
ttaagtgacttcatt

SEQ ID NO: 523180 - DNA, 15 bp, Homo sapiens
taagtgacttcattt

SEQ ID NO: 523181 - DNA, 15 bp, Homo sapiens
aagtgacttcatttt

SEQ ID NO: 523182 - DNA, 15 bp, Homo sapiens
agtgacttcattttt

SEQ ID NO: 523183 - DNA, 15 bp, Homo sapiens
gtgacttcattttta

SEQ ID NO: 523184 - DNA, 15 bp, Homo sapiens
tgacttcatttttaa

SEQ ID NO: 523185 - DNA, 15 bp, Homo sapiens
gacttcatttttaat

SEQ ID NO: 523186 - DNA, 15 bp, Homo sapiens
acttcatttttaatt

SEQ ID NO: 523187 - DNA, 15 bp, Homo sapiens
cttcatttttaatta

SEQ ID NO: 523188 - DNA, 15 bp, Homo sapiens
ttcatttttaattac

SEQ ID NO: 523189 - DNA, 15 bp, Homo sapiens
tcatttttaattact

SEQ ID NO: 523190 - DNA, 15 bp, Homo sapiens
catttttaattacta

SEQ ID NO: 523191 - DNA, 15 bp, Homo sapiens
atttttaattactat

SEQ ID NO: 523192 - DNA, 15 bp, Homo sapiens
tttttaattactata

SEQ ID NO: 523193 - DNA, 15 bp, Homo sapiens
ttttaattactatat

SEQ ID NO: 523194 - DNA, 15 bp, Homo sapiens
tttaattactatatg

SEQ ID NO: 523195 - DNA, 15 bp, Homo sapiens
ttaattactatatgg

SEQ ID NO: 523196 - DNA, 15 bp, Homo sapiens
taattactatatggg

SEQ ID NO: 523197 - DNA, 15 bp, Homo sapiens
aattactatatggga

SEQ ID NO: 523198 - DNA, 15 bp, Homo sapiens
attactatatgggat

SEQ ID NO: 523199 - DNA, 15 bp, Homo sapiens
ttactatatgggatt

SEQ ID NO: 523200 - DNA, 15 bp, Homo sapiens
tactatatgggattc

SEQ ID NO: 523201 - DNA, 15 bp, Homo sapiens
actatatgggattct

SEQ ID NO: 523202 - DNA, 15 bp, Homo sapiens
ctatatgggattcta

SEQ ID NO: 523203 - DNA, 15 bp, Homo sapiens
tatatgggattctat

SEQ ID NO: 523204 - DNA, 15 bp, Homo sapiens
atatgggattctatc

SEQ ID NO: 523205 - DNA, 15 bp, Homo sapiens
tatgggattctatct

SEQ ID NO: 523206 - DNA, 15 bp, Homo sapiens
atgggattctatctt

SEQ ID NO: 523207 - DNA, 15 bp, Homo sapiens
tgggattctatcttt

SEQ ID NO: 523208 - DNA, 15 bp, Homo sapiens
gggattctatctttc

SEQ ID NO: 523209 - DNA, 15 bp, Homo sapiens
ggattctatctttcc

SEQ ID NO: 523210 - DNA, 15 bp, Homo sapiens
gattctatctttcca

SEQ ID NO: 523211 - DNA, 15 bp, Homo sapiens
attctatctttccag

SEQ ID NO: 523212 - DNA, 15 bp, Homo sapiens
ttctatctttccagt

SEQ ID NO: 523213 - DNA, 15 bp, Homo sapiens
tctatctttccagtg

SEQ ID NO: 523214 - DNA, 15 bp, Homo sapiens
ctatctttccagtgt

SEQ ID NO: 523215 - DNA, 15 bp, Homo sapiens
tatctttccagtgta

SEQ ID NO: 523216 - DNA, 15 bp, Homo sapiens
atctttccagtgtat

SEQ ID NO: 523217 - DNA, 15 bp, Homo sapiens
tctttccagtgtatc

SEQ ID NO: 523218 - DNA, 15 bp, Homo sapiens
ctttccagtgtatca

SEQ ID NO: 523219 - DNA, 15 bp, Homo sapiens
tttccagtgtatcat

SEQ ID NO: 523220 - DNA, 15 bp, Homo sapiens
ttccagtgtatcatg

SEQ ID NO: 523221 - DNA, 15 bp, Homo sapiens
tccagtgtatcatga

SEQ ID NO: 523222 - DNA, 15 bp, Homo sapiens
ccagtgtatcatgat

SEQ ID NO: 523223 - DNA, 15 bp, Homo sapiens
cagtgtatcatgatt

SEQ ID NO: 523224 - DNA, 15 bp, Homo sapiens
agtgtatcatgattt

SEQ ID NO: 523225 - DNA, 15 bp, Homo sapiens
gtgtatcatgattta

SEQ ID NO: 523226 - DNA, 15 bp, Homo sapiens
tgtatcatgatttat

SEQ ID NO: 523227 - DNA, 15 bp, Homo sapiens
gtatcatgatttatt

SEQ ID NO: 523228 - DNA, 15 bp, Homo sapiens
tatcatgatttattt

SEQ ID NO: 523229 - DNA, 15 bp, Homo sapiens
atcatgatttatttg

SEQ ID NO: 523230 - DNA, 15 bp, Homo sapiens
tcatgatttatttga

SEQ ID NO: 523231 - DNA, 15 bp, Homo sapiens
catgatttatttgac

SEQ ID NO: 523232 - DNA, 15 bp, Homo sapiens
atgatttatttgacc

SEQ ID NO: 523233 - DNA, 15 bp, Homo sapiens
tgatttatttgacct

SEQ ID NO: 523234 - DNA, 15 bp, Homo sapiens
gatttatttgaccta

SEQ ID NO: 523235 - DNA, 15 bp, Homo sapiens
atttatttgacctat

SEQ ID NO: 523236 - DNA, 15 bp, Homo sapiens
tttatttgacctatt

SEQ ID NO: 523237 - DNA, 15 bp, Homo sapiens
ttatttgacctattg

SEQ ID NO: 523238 - DNA, 15 bp, Homo sapiens
tatttgacctattgc

SEQ ID NO: 523239 - DNA, 15 bp, Homo sapiens
atttgacctattgct

SEQ ID NO: 523240 - DNA, 15 bp, Homo sapiens
tttgacctattgctg

SEQ ID NO: 523241 - DNA, 15 bp, Homo sapiens
ttgacctattgctga

SEQ ID NO: 523242 - DNA, 15 bp, Homo sapiens
tgacctattgctgaa

SEQ ID NO: 523243 - DNA, 15 bp, Homo sapiens
gacctattgctgaat

SEQ ID NO: 523244 - DNA, 15 bp, Homo sapiens
acctattgctgaatg

SEQ ID NO: 523245 - DNA, 15 bp, Homo sapiens
cctattgctgaatgt

SEQ ID NO: 523246 - DNA, 15 bp, Homo sapiens
ctattgctgaatgtt

SEQ ID NO: 523247 - DNA, 15 bp, Homo sapiens
tattgctgaatgttg

SEQ ID NO: 523248 - DNA, 15 bp, Homo sapiens
attgctgaatgttgg

SEQ ID NO: 523249 - DNA, 15 bp, Homo sapiens
ttgctgaatgttgga

SEQ ID NO: 523250 - DNA, 15 bp, Homo sapiens
tgctgaatgttggag

SEQ ID NO: 523251 - DNA, 15 bp, Homo sapiens
gctgaatgttggagg

SEQ ID NO: 523252 - DNA, 15 bp, Homo sapiens
ctgaatgttggaggt

SEQ ID NO: 523253 - DNA, 15 bp, Homo sapiens
tgaatgttggaggtt

SEQ ID NO: 523254 - DNA, 15 bp, Homo sapiens
gaatgttggaggttt

SEQ ID NO: 523255 - DNA, 15 bp, Homo sapiens
aatgttggaggtttc

SEQ ID NO: 523256 - DNA, 15 bp, Homo sapiens
atgttggaggtttca

SEQ ID NO: 523257 - DNA, 15 bp, Homo sapiens
tgttggaggtttcag

SEQ ID NO: 523258 - DNA, 15 bp, Homo sapiens
gttggaggtttcagg

SEQ ID NO: 523259 - DNA, 15 bp, Homo sapiens
ttggaggtttcaggg

SEQ ID NO: 523260 - DNA, 15 bp, Homo sapiens
tggaggtttcagggt

SEQ ID NO: 523261 - DNA, 15 bp, Homo sapiens
ggaggtttcagggta

SEQ ID NO: 523262 - DNA, 15 bp, Homo sapiens
gaggtttcagggtaa

SEQ ID NO: 523263 - DNA, 15 bp, Homo sapiens
aggtttcagggtaag

SEQ ID NO: 523264 - DNA, 15 bp, Homo sapiens
ggtttcagggtaaga

SEQ ID NO: 523265 - DNA, 15 bp, Homo sapiens
gtttcagggtaagag

SEQ ID NO: 523266 - DNA, 15 bp, Homo sapiens
tttcagggtaagagg

SEQ ID NO: 523267 - DNA, 15 bp, Homo sapiens
ttcagggtaagaggc

SEQ ID NO: 523268 - DNA, 15 bp, Homo sapiens
tcagggtaagaggca

SEQ ID NO: 523269 - DNA, 15 bp, Homo sapiens
cagggtaagaggcac

SEQ ID NO: 523270 - DNA, 15 bp, Homo sapiens
agggtaagaggcaca

SEQ ID NO: 523271 - DNA, 15 bp, Homo sapiens
gggtaagaggcacag

SEQ ID NO: 523272 - DNA, 15 bp, Homo sapiens
ggtaagaggcacagt

SEQ ID NO: 523273 - DNA, 15 bp, Homo sapiens
gtaagaggcacagtt

SEQ ID NO: 523274 - DNA, 15 bp, Homo sapiens
taagaggcacagttt

SEQ ID NO: 523275 - DNA, 15 bp, Homo sapiens
aagaggcacagtttg

SEQ ID NO: 523276 - DNA, 15 bp, Homo sapiens
agaggcacagtttgc

SEQ ID NO: 523277 - DNA, 15 bp, Homo sapiens
gaggcacagtttgct

SEQ ID NO: 523278 - DNA, 15 bp, Homo sapiens
aggcacagtttgcta

SEQ ID NO: 523279 - DNA, 15 bp, Homo sapiens
ggcacagtttgctat

SEQ ID NO: 523280 - DNA, 15 bp, Homo sapiens
gcacagtttgctatt

SEQ ID NO: 523281 - DNA, 15 bp, Homo sapiens
cacagtttgctatta

SEQ ID NO: 523282 - DNA, 15 bp, Homo sapiens
acagtttgctattat

SEQ ID NO: 523283 - DNA, 15 bp, Homo sapiens
cagtttgctattatg

SEQ ID NO: 523284 - DNA, 15 bp, Homo sapiens
agtttgctattatgt

SEQ ID NO: 523285 - DNA, 15 bp, Homo sapiens
gtttgctattatgta

SEQ ID NO: 523286 - DNA, 15 bp, Homo sapiens
tttgctattatgtac

SEQ ID NO: 523287 - DNA, 15 bp, Homo sapiens
ttgctattatgtaca

SEQ ID NO: 523288 - DNA, 15 bp, Homo sapiens
tgctattatgtacat

SEQ ID NO: 523289 - DNA, 15 bp, Homo sapiens
gctattatgtacatc

SEQ ID NO: 523290 - DNA, 15 bp, Homo sapiens
ctattatgtacatca

SEQ ID NO: 523291 - DNA, 15 bp, Homo sapiens
tattatgtacatcac

SEQ ID NO: 523292 - DNA, 15 bp, Homo sapiens
attatgtacatcact

SEQ ID NO: 523293 - DNA, 15 bp, Homo sapiens
ttatgtacatcacta

SEQ ID NO: 523294 - DNA, 15 bp, Homo sapiens
tatgtacatcactat

SEQ ID NO: 523295 - DNA, 15 bp, Homo sapiens
atgtacatcactata

SEQ ID NO: 523296 - DNA, 15 bp, Homo sapiens
tgtacatcactatag

SEQ ID NO: 523297 - DNA, 15 bp, Homo sapiens
gtacatcactatagt

SEQ ID NO: 523298 - DNA, 15 bp, Homo sapiens
tacatcactatagtg

SEQ ID NO: 523299 - DNA, 15 bp, Homo sapiens
acatcactatagtgg

SEQ ID NO: 523300 - DNA, 15 bp, Homo sapiens
catcactatagtggc

SEQ ID NO: 523301 - DNA, 15 bp, Homo sapiens
atcactatagtggca

SEQ ID NO: 523302 - DNA, 15 bp, Homo sapiens
tcactatagtggcat

SEQ ID NO: 523303 - DNA, 15 bp, Homo sapiens
cactatagtggcatc

SEQ ID NO: 523304 - DNA, 15 bp, Homo sapiens
actatagtggcatcc

SEQ ID NO: 523305 - DNA, 15 bp, Homo sapiens
ctatagtggcatcct

SEQ ID NO: 523306 - DNA, 15 bp, Homo sapiens
tatagtggcatcctg

SEQ ID NO: 523307 - DNA, 15 bp, Homo sapiens
atagtggcatcctga

SEQ ID NO: 523308 - DNA, 15 bp, Homo sapiens
tagtggcatcctgat

SEQ ID NO: 523309 - DNA, 15 bp, Homo sapiens
agtggcatcctgata

SEQ ID NO: 523310 - DNA, 15 bp, Homo sapiens
gtggcatcctgatag

SEQ ID NO: 523311 - DNA, 15 bp, Homo sapiens
tggcatcctgatagc

SEQ ID NO: 523312 - DNA, 15 bp, Homo sapiens
ggcatcctgatagct

SEQ ID NO: 523313 - DNA, 15 bp, Homo sapiens
gcatcctgatagcta

SEQ ID NO: 523314 - DNA, 15 bp, Homo sapiens
catcctgatagctaa

SEQ ID NO: 523315 - DNA, 15 bp, Homo sapiens
atcctgatagctaaa

SEQ ID NO: 523316 - DNA, 15 bp, Homo sapiens
tcctgatagctaaat

SEQ ID NO: 523317 - DNA, 15 bp, Homo sapiens
cctgatagctaaata

SEQ ID NO: 523318 - DNA, 15 bp, Homo sapiens
ctgatagctaaatat

SEQ ID NO: 523319 - DNA, 15 bp, Homo sapiens
tgatagctaaatatt

SEQ ID NO: 523320 - DNA, 15 bp, Homo sapiens
gatagctaaatattt

SEQ ID NO: 523321 - DNA, 15 bp, Homo sapiens
atagctaaatatttg

SEQ ID NO: 523322 - DNA, 15 bp, Homo sapiens
tagctaaatatttgc

SEQ ID NO: 523323 - DNA, 15 bp, Homo sapiens
agctaaatatttgcc

SEQ ID NO: 523324 - DNA, 15 bp, Homo sapiens
gctaaatatttgcct

SEQ ID NO: 523325 - DNA, 15 bp, Homo sapiens
ctaaatatttgccta

SEQ ID NO: 523326 - DNA, 15 bp, Homo sapiens
taaatatttgcctac

SEQ ID NO: 523327 - DNA, 15 bp, Homo sapiens
aaatatttgcctaca

SEQ ID NO: 523328 - DNA, 15 bp, Homo sapiens
aatatttgcctacat

SEQ ID NO: 523329 - DNA, 15 bp, Homo sapiens
atatttgcctacatc

SEQ ID NO: 523330 - DNA, 15 bp, Homo sapiens
tatttgcctacatcc

SEQ ID NO: 523331 - DNA, 15 bp, Homo sapiens
atttgcctacatccc

SEQ ID NO: 523332 - DNA, 15 bp, Homo sapiens
tttgcctacatccct

SEQ ID NO: 523333 - DNA, 15 bp, Homo sapiens
ttgcctacatccctg

SEQ ID NO: 523334 - DNA, 15 bp, Homo sapiens
tgcctacatccctga

SEQ ID NO: 523335 - DNA, 15 bp, Homo sapiens
gcctacatccctgat

SEQ ID NO: 523336 - DNA, 15 bp, Homo sapiens
cctacatccctgatt

SEQ ID NO: 523337 - DNA, 15 bp, Homo sapiens
ctacatccctgatta

SEQ ID NO: 523338 - DNA, 15 bp, Homo sapiens
tacatccctgattat

SEQ ID NO: 523339 - DNA, 15 bp, Homo sapiens
acatccctgattatt

SEQ ID NO: 523340 - DNA, 15 bp, Homo sapiens
catccctgattattt

SEQ ID NO: 523341 - DNA, 15 bp, Homo sapiens
atccctgattatttc

SEQ ID NO: 523342 - DNA, 15 bp, Homo sapiens
tccctgattatttcc

SEQ ID NO: 523343 - DNA, 15 bp, Homo sapiens
ccctgattatttcct

SEQ ID NO: 523344 - DNA, 15 bp, Homo sapiens
cctgattatttcctt

SEQ ID NO: 523345 - DNA, 15 bp, Homo sapiens
ctgattatttcctta

SEQ ID NO: 523346 - DNA, 15 bp, Homo sapiens
tgattatttccttag

SEQ ID NO: 523347 - DNA, 15 bp, Homo sapiens
gattatttccttagt

SEQ ID NO: 523348 - DNA, 15 bp, Homo sapiens
attatttccttagtc

SEQ ID NO: 523349 - DNA, 15 bp, Homo sapiens
ttatttccttagtct

SEQ ID NO: 523350 - DNA, 15 bp, Homo sapiens
tatttccttagtcta

SEQ ID NO: 523351 - DNA, 15 bp, Homo sapiens
atttccttagtctaa

SEQ ID NO: 523352 - DNA, 15 bp, Homo sapiens
tttccttagtctaaa

SEQ ID NO: 523353 - DNA, 15 bp, Homo sapiens
ttccttagtctaaat

SEQ ID NO: 523354 - DNA, 15 bp, Homo sapiens
tccttagtctaaatt

SEQ ID NO: 523355 - DNA, 15 bp, Homo sapiens
ccttagtctaaatta

SEQ ID NO: 523356 - DNA, 15 bp, Homo sapiens
cttagtctaaattac

SEQ ID NO: 523357 - DNA, 15 bp, Homo sapiens
ttagtctaaattact

SEQ ID NO: 523358 - DNA, 15 bp, Homo sapiens
tagtctaaattactg

SEQ ID NO: 523359 - DNA, 15 bp, Homo sapiens
agtctaaattactgg

SEQ ID NO: 523360 - DNA, 15 bp, Homo sapiens
gtctaaattactggg

SEQ ID NO: 523361 - DNA, 15 bp, Homo sapiens
tctaaattactggga

SEQ ID NO: 523362 - DNA, 15 bp, Homo sapiens
ctaaattactgggac

SEQ ID NO: 523363 - DNA, 15 bp, Homo sapiens
taaattactgggact

SEQ ID NO: 523364 - DNA, 15 bp, Homo sapiens
aaattactgggacta

SEQ ID NO: 523365 - DNA, 15 bp, Homo sapiens
aattactgggactag

SEQ ID NO: 523366 - DNA, 15 bp, Homo sapiens
attactgggactagg

SEQ ID NO: 523367 - DNA, 15 bp, Homo sapiens
ttactgggactagga

SEQ ID NO: 523368 - DNA, 15 bp, Homo sapiens
tactgggactaggat

SEQ ID NO: 523369 - DNA, 15 bp, Homo sapiens
actgggactaggatt

SEQ ID NO: 523370 - DNA, 15 bp, Homo sapiens
ctgggactaggattt

SEQ ID NO: 523371 - DNA, 15 bp, Homo sapiens
tgggactaggatttt

SEQ ID NO: 523372 - DNA, 15 bp, Homo sapiens
gggactaggattttg

SEQ ID NO: 523373 - DNA, 15 bp, Homo sapiens
ggactaggattttgg

SEQ ID NO: 523374 - DNA, 15 bp, Homo sapiens
gactaggattttggt

SEQ ID NO: 523375 - DNA, 15 bp, Homo sapiens
actaggattttggtg

SEQ ID NO: 523376 - DNA, 15 bp, Homo sapiens
ctaggattttggtgt

SEQ ID NO: 523377 - DNA, 15 bp, Homo sapiens
taggattttggtgtt

SEQ ID NO: 523378 - DNA, 15 bp, Homo sapiens
aggattttggtgttt

SEQ ID NO: 523379 - DNA, 15 bp, Homo sapiens
ggattttggtgtttg

SEQ ID NO: 523380 - DNA, 15 bp, Homo sapiens
gattttggtgtttga

SEQ ID NO: 523381 - DNA, 15 bp, Homo sapiens
attttggtgtttgat

SEQ ID NO: 523382 - DNA, 15 bp, Homo sapiens
ttttggtgtttgata

SEQ ID NO: 523383 - DNA, 15 bp, Homo sapiens
tttggtgtttgatac

SEQ ID NO: 523384 - DNA, 15 bp, Homo sapiens
ttggtgtttgataca

SEQ ID NO: 523385 - DNA, 15 bp, Homo sapiens
tggtgtttgatacat

SEQ ID NO: 523386 - DNA, 15 bp, Homo sapiens
ggtgtttgatacatg

SEQ ID NO: 523387 - DNA, 15 bp, Homo sapiens
gtgtttgatacatgt

SEQ ID NO: 523388 - DNA, 15 bp, Homo sapiens
tgtttgatacatgtt

SEQ ID NO: 523389 - DNA, 15 bp, Homo sapiens
gtttgatacatgtta

SEQ ID NO: 523390 - DNA, 15 bp, Homo sapiens
tttgatacatgttac

SEQ ID NO: 523391 - DNA, 15 bp, Homo sapiens
ttgatacatgttact

SEQ ID NO: 523392 - DNA, 15 bp, Homo sapiens
tgatacatgttacta

SEQ ID NO: 523393 - DNA, 15 bp, Homo sapiens
gatacatgttactaa

SEQ ID NO: 523394 - DNA, 15 bp, Homo sapiens
atacatgttactaaa

SEQ ID NO: 523395 - DNA, 15 bp, Homo sapiens
tacatgttactaaat

SEQ ID NO: 523396 - DNA, 15 bp, Homo sapiens
acatgttactaaatt

SEQ ID NO: 523397 - DNA, 15 bp, Homo sapiens
catgttactaaattg

SEQ ID NO: 523398 - DNA, 15 bp, Homo sapiens
atgttactaaattgt

SEQ ID NO: 523399 - DNA, 15 bp, Homo sapiens
tgttactaaattgtt

SEQ ID NO: 523400 - DNA, 15 bp, Homo sapiens
gttactaaattgttt

SEQ ID NO: 523401 - DNA, 15 bp, Homo sapiens
ttactaaattgtttt

SEQ ID NO: 523402 - DNA, 15 bp, Homo sapiens
tactaaattgttttt

SEQ ID NO: 523403 - DNA, 15 bp, Homo sapiens
actaaattgtttttt

SEQ ID NO: 523404 - DNA, 15 bp, Homo sapiens
ctaaattgtttttta

SEQ ID NO: 523405 - DNA, 15 bp, Homo sapiens
taaattgttttttag

SEQ ID NO: 523406 - DNA, 15 bp, Homo sapiens
aaattgttttttaga

SEQ ID NO: 523407 - DNA, 15 bp, Homo sapiens
aattgttttttagaa

SEQ ID NO: 523408 - DNA, 15 bp, Homo sapiens
attgttttttagaaa

SEQ ID NO: 523409 - DNA, 15 bp, Homo sapiens
ttgttttttagaaag

SEQ ID NO: 523410 - DNA, 15 bp, Homo sapiens
tgttttttagaaaga

SEQ ID NO: 523411 - DNA, 15 bp, Homo sapiens
gttttttagaaagat

SEQ ID NO: 523412 - DNA, 15 bp, Homo sapiens
ttttttagaaagatt

SEQ ID NO: 523413 - DNA, 15 bp, Homo sapiens
tttttagaaagatta

SEQ ID NO: 523414 - DNA, 15 bp, Homo sapiens
ttttagaaagattaa

SEQ ID NO: 523415 - DNA, 15 bp, Homo sapiens
tttagaaagattaaa

SEQ ID NO: 523416 - DNA, 15 bp, Homo sapiens
ttagaaagattaaac

SEQ ID NO: 523417 - DNA, 15 bp, Homo sapiens
tagaaagattaaacc

SEQ ID NO: 523418 - DNA, 15 bp, Homo sapiens
agaaagattaaacca

SEQ ID NO: 523419 - DNA, 15 bp, Homo sapiens
gaaagattaaaccag

SEQ ID NO: 523420 - DNA, 15 bp, Homo sapiens
aaagattaaaccagt

SEQ ID NO: 523421 - DNA, 15 bp, Homo sapiens
aagattaaaccagtt

SEQ ID NO: 523422 - DNA, 15 bp, Homo sapiens
agattaaaccagttt

SEQ ID NO: 523423 - DNA, 15 bp, Homo sapiens
gattaaaccagttta

SEQ ID NO: 523424 - DNA, 15 bp, Homo sapiens
attaaaccagtttat

SEQ ID NO: 523425 - DNA, 15 bp, Homo sapiens
ttaaaccagtttatg

SEQ ID NO: 523426 - DNA, 15 bp, Homo sapiens
taaaccagtttatgc

SEQ ID NO: 523427 - DNA, 15 bp, Homo sapiens
aaaccagtttatgct

SEQ ID NO: 523428 - DNA, 15 bp, Homo sapiens
aaccagtttatgctc

SEQ ID NO: 523429 - DNA, 15 bp, Homo sapiens
accagtttatgctct

SEQ ID NO: 523430 - DNA, 15 bp, Homo sapiens
ccagtttatgctctt

SEQ ID NO: 523431 - DNA, 15 bp, Homo sapiens
cagtttatgctcttc

SEQ ID NO: 523432 - DNA, 15 bp, Homo sapiens
agtttatgctcttcc

SEQ ID NO: 523433 - DNA, 15 bp, Homo sapiens
gtttatgctcttcca

SEQ ID NO: 523434 - DNA, 15 bp, Homo sapiens
tttatgctcttccag

SEQ ID NO: 523435 - DNA, 15 bp, Homo sapiens
ttatgctcttccagc

SEQ ID NO: 523436 - DNA, 15 bp, Homo sapiens
tatgctcttccagcc

SEQ ID NO: 523437 - DNA, 15 bp, Homo sapiens
atgctcttccagccc

SEQ ID NO: 523438 - DNA, 15 bp, Homo sapiens
tgctcttccagcccc

SEQ ID NO: 523439 - DNA, 15 bp, Homo sapiens
gctcttccagcccct

SEQ ID NO: 523440 - DNA, 15 bp, Homo sapiens
ctcttccagcccctg

SEQ ID NO: 523441 - DNA, 15 bp, Homo sapiens
tcttccagcccctgt

SEQ ID NO: 523442 - DNA, 15 bp, Homo sapiens
cttccagcccctgtg

SEQ ID NO: 523443 - DNA, 15 bp, Homo sapiens
ttccagcccctgtgg

SEQ ID NO: 523444 - DNA, 15 bp, Homo sapiens
tccagcccctgtggt

SEQ ID NO: 523445 - DNA, 15 bp, Homo sapiens
ccagcccctgtggta

SEQ ID NO: 523446 - DNA, 15 bp, Homo sapiens
cagcccctgtggtat

SEQ ID NO: 523447 - DNA, 15 bp, Homo sapiens
agcccctgtggtata

SEQ ID NO: 523448 - DNA, 15 bp, Homo sapiens
gcccctgtggtatat

SEQ ID NO: 523449 - DNA, 15 bp, Homo sapiens
cccctgtggtatatg

SEQ ID NO: 523450 - DNA, 15 bp, Homo sapiens
ccctgtggtatatga

SEQ ID NO: 523451 - DNA, 15 bp, Homo sapiens
cctgtggtatatgat

SEQ ID NO: 523452 - DNA, 15 bp, Homo sapiens
ctgtggtatatgata

SEQ ID NO: 523453 - DNA, 15 bp, Homo sapiens
tgtggtatatgatag

SEQ ID NO: 523454 - DNA, 15 bp, Homo sapiens
gtggtatatgatagt

SEQ ID NO: 523455 - DNA, 15 bp, Homo sapiens
tggtatatgatagtt

SEQ ID NO: 523456 - DNA, 15 bp, Homo sapiens
ggtatatgatagttc

SEQ ID NO: 523457 - DNA, 15 bp, Homo sapiens
gtatatgatagttcc

SEQ ID NO: 523458 - DNA, 15 bp, Homo sapiens
tatatgatagttccc

SEQ ID NO: 523459 - DNA, 15 bp, Homo sapiens
atatgatagttccca

SEQ ID NO: 523460 - DNA, 15 bp, Homo sapiens
tatgatagttcccat

SEQ ID NO: 523461 - DNA, 15 bp, Homo sapiens
atgatagttcccatt

SEQ ID NO: 523462 - DNA, 15 bp, Homo sapiens
tgatagttcccattt

SEQ ID NO: 523463 - DNA, 15 bp, Homo sapiens
gatagttcccatttt

SEQ ID NO: 523464 - DNA, 15 bp, Homo sapiens
atagttcccattttc

SEQ ID NO: 523465 - DNA, 15 bp, Homo sapiens
tagttcccattttcc

SEQ ID NO: 523466 - DNA, 15 bp, Homo sapiens
agttcccattttcct

SEQ ID NO: 523467 - DNA, 15 bp, Homo sapiens
gttcccattttcctg

SEQ ID NO: 523468 - DNA, 15 bp, Homo sapiens
ttcccattttcctgt

SEQ ID NO: 523469 - DNA, 15 bp, Homo sapiens
tcccattttcctgta

SEQ ID NO: 523470 - DNA, 15 bp, Homo sapiens
cccattttcctgtac

SEQ ID NO: 523471 - DNA, 15 bp, Homo sapiens
ccattttcctgtacc

SEQ ID NO: 523472 - DNA, 15 bp, Homo sapiens
cattttcctgtacct

SEQ ID NO: 523473 - DNA, 15 bp, Homo sapiens
attttcctgtacctt

SEQ ID NO: 523474 - DNA, 15 bp, Homo sapiens
ttttcctgtaccttg

SEQ ID NO: 523475 - DNA, 15 bp, Homo sapiens
tttcctgtaccttgc

SEQ ID NO: 523476 - DNA, 15 bp, Homo sapiens
ttcctgtaccttgcc

SEQ ID NO: 523477 - DNA, 15 bp, Homo sapiens
tcctgtaccttgcca

SEQ ID NO: 523478 - DNA, 15 bp, Homo sapiens
cctgtaccttgccaa

SEQ ID NO: 523479 - DNA, 15 bp, Homo sapiens
ctgtaccttgccaac

SEQ ID NO: 523480 - DNA, 15 bp, Homo sapiens
tgtaccttgccaaca

SEQ ID NO: 523481 - DNA, 15 bp, Homo sapiens
gtaccttgccaacac

SEQ ID NO: 523482 - DNA, 15 bp, Homo sapiens
taccttgccaacact

SEQ ID NO: 523483 - DNA, 15 bp, Homo sapiens
accttgccaacactg

SEQ ID NO: 523484 - DNA, 15 bp, Homo sapiens
ccttgccaacactgg

SEQ ID NO: 523485 - DNA, 15 bp, Homo sapiens
cttgccaacactggg

SEQ ID NO: 523486 - DNA, 15 bp, Homo sapiens
ttgccaacactgggt

SEQ ID NO: 523487 - DNA, 15 bp, Homo sapiens
tgccaacactgggtg

SEQ ID NO: 523488 - DNA, 15 bp, Homo sapiens
gccaacactgggtga

SEQ ID NO: 523489 - DNA, 15 bp, Homo sapiens
ccaacactgggtgat

SEQ ID NO: 523490 - DNA, 15 bp, Homo sapiens
caacactgggtgata

SEQ ID NO: 523491 - DNA, 15 bp, Homo sapiens
aacactgggtgatat

SEQ ID NO: 523492 - DNA, 15 bp, Homo sapiens
acactgggtgatatc

SEQ ID NO: 523493 - DNA, 15 bp, Homo sapiens
cactgggtgatatcc

SEQ ID NO: 523494 - DNA, 15 bp, Homo sapiens
actgggtgatatcca

SEQ ID NO: 523495 - DNA, 15 bp, Homo sapiens
ctgggtgatatccag

SEQ ID NO: 523496 - DNA, 15 bp, Homo sapiens
tgggtgatatccagt

SEQ ID NO: 523497 - DNA, 15 bp, Homo sapiens
gggtgatatccagtt

SEQ ID NO: 523498 - DNA, 15 bp, Homo sapiens
ggtgatatccagttt

SEQ ID NO: 523499 - DNA, 15 bp, Homo sapiens
gtgatatccagtttt

SEQ ID NO: 523500 - DNA, 15 bp, Homo sapiens
tgatatccagtttta

SEQ ID NO: 523501 - DNA, 15 bp, Homo sapiens
gatatccagttttaa

SEQ ID NO: 523502 - DNA, 15 bp, Homo sapiens
atatccagttttaaa

SEQ ID NO: 523503 - DNA, 15 bp, Homo sapiens
tatccagttttaaaa

SEQ ID NO: 523504 - DNA, 15 bp, Homo sapiens
atccagttttaaaat

SEQ ID NO: 523505 - DNA, 15 bp, Homo sapiens
tccagttttaaaatc

SEQ ID NO: 523506 - DNA, 15 bp, Homo sapiens
ccagttttaaaatct

SEQ ID NO: 523507 - DNA, 15 bp, Homo sapiens
cagttttaaaatcta

SEQ ID NO: 523508 - DNA, 15 bp, Homo sapiens
agttttaaaatctaa

SEQ ID NO: 523509 - DNA, 15 bp, Homo sapiens
gttttaaaatctaaa

SEQ ID NO: 523510 - DNA, 15 bp, Homo sapiens
ttttaaaatctaaat

SEQ ID NO: 523511 - DNA, 15 bp, Homo sapiens
tttaaaatctaaatc

SEQ ID NO: 523512 - DNA, 15 bp, Homo sapiens
ttaaaatctaaatct

SEQ ID NO: 523513 - DNA, 15 bp, Homo sapiens
taaaatctaaatctt

SEQ ID NO: 523514 - DNA, 15 bp, Homo sapiens
aaaatctaaatcttg

SEQ ID NO: 523515 - DNA, 15 bp, Homo sapiens
aaatctaaatcttgc

SEQ ID NO: 523516 - DNA, 15 bp, Homo sapiens
aatctaaatcttgca

SEQ ID NO: 523517 - DNA, 15 bp, Homo sapiens
atctaaatcttgcat

SEQ ID NO: 523518 - DNA, 15 bp, Homo sapiens
tctaaatcttgcatt

SEQ ID NO: 523519 - DNA, 15 bp, Homo sapiens
ctaaatcttgcattg

SEQ ID NO: 523520 - DNA, 15 bp, Homo sapiens
taaatcttgcattgc

SEQ ID NO: 523521 - DNA, 15 bp, Homo sapiens
aaatcttgcattgct

SEQ ID NO: 523522 - DNA, 15 bp, Homo sapiens
aatcttgcattgcta

SEQ ID NO: 523523 - DNA, 15 bp, Homo sapiens
atcttgcattgctat

SEQ ID NO: 523524 - DNA, 15 bp, Homo sapiens
tcttgcattgctatg

SEQ ID NO: 523525 - DNA, 15 bp, Homo sapiens
cttgcattgctatga

SEQ ID NO: 523526 - DNA, 15 bp, Homo sapiens
ttgcattgctatgag

SEQ ID NO: 523527 - DNA, 15 bp, Homo sapiens
tgcattgctatgaga

SEQ ID NO: 523528 - DNA, 15 bp, Homo sapiens
gcattgctatgagaa

SEQ ID NO: 523529 - DNA, 15 bp, Homo sapiens
cattgctatgagaac

SEQ ID NO: 523530 - DNA, 15 bp, Homo sapiens
attgctatgagaact

SEQ ID NO: 523531 - DNA, 15 bp, Homo sapiens
ttgctatgagaacta

SEQ ID NO: 523532 - DNA, 15 bp, Homo sapiens
tgctatgagaactac

SEQ ID NO: 523533 - DNA, 15 bp, Homo sapiens
gctatgagaactaca

SEQ ID NO: 523534 - DNA, 15 bp, Homo sapiens
ctatgagaactacaa

SEQ ID NO: 523535 - DNA, 15 bp, Homo sapiens
tatgagaactacaat

SEQ ID NO: 523536 - DNA, 15 bp, Homo sapiens
atgagaactacaatt

SEQ ID NO: 523537 - DNA, 15 bp, Homo sapiens
tgagaactacaatta

SEQ ID NO: 523538 - DNA, 15 bp, Homo sapiens
gagaactacaattag

SEQ ID NO: 523539 - DNA, 15 bp, Homo sapiens
agaactacaattaga

SEQ ID NO: 523540 - DNA, 15 bp, Homo sapiens
gaactacaattagag

SEQ ID NO: 523541 - DNA, 15 bp, Homo sapiens
aactacaattagaga

SEQ ID NO: 523542 - DNA, 15 bp, Homo sapiens
actacaattagagaa

SEQ ID NO: 523543 - DNA, 15 bp, Homo sapiens
ctacaattagagaag

SEQ ID NO: 523544 - DNA, 15 bp, Homo sapiens
tacaattagagaagg

SEQ ID NO: 523545 - DNA, 15 bp, Homo sapiens
acaattagagaaggc

SEQ ID NO: 523546 - DNA, 15 bp, Homo sapiens
caattagagaaggct

SEQ ID NO: 523547 - DNA, 15 bp, Homo sapiens
aattagagaaggctt

SEQ ID NO: 523548 - DNA, 15 bp, Homo sapiens
attagagaaggctta

SEQ ID NO: 523549 - DNA, 15 bp, Homo sapiens
ttagagaaggcttat

SEQ ID NO: 523550 - DNA, 15 bp, Homo sapiens
tagagaaggcttatc

SEQ ID NO: 523551 - DNA, 15 bp, Homo sapiens
agagaaggcttatct

SEQ ID NO: 523552 - DNA, 15 bp, Homo sapiens
gagaaggcttatctt

SEQ ID NO: 523553 - DNA, 15 bp, Homo sapiens
agaaggcttatcttc

SEQ ID NO: 523554 - DNA, 15 bp, Homo sapiens
gaaggcttatcttct

SEQ ID NO: 523555 - DNA, 15 bp, Homo sapiens
aaggcttatcttcta

SEQ ID NO: 523556 - DNA, 15 bp, Homo sapiens
aggcttatcttctac

SEQ ID NO: 523557 - DNA, 15 bp, Homo sapiens
ggcttatcttctact

SEQ ID NO: 523558 - DNA, 15 bp, Homo sapiens
gcttatcttctactg

SEQ ID NO: 523559 - DNA, 15 bp, Homo sapiens
cttatcttctactgc

SEQ ID NO: 523560 - DNA, 15 bp, Homo sapiens
ttatcttctactgcc

SEQ ID NO: 523561 - DNA, 15 bp, Homo sapiens
tatcttctactgccc

SEQ ID NO: 523562 - DNA, 15 bp, Homo sapiens
atcttctactgccca

SEQ ID NO: 523563 - DNA, 15 bp, Homo sapiens
tcttctactgcccat

SEQ ID NO: 523564 - DNA, 15 bp, Homo sapiens
cttctactgcccatt

SEQ ID NO: 523565 - DNA, 15 bp, Homo sapiens
ttctactgcccattc

SEQ ID NO: 523566 - DNA, 15 bp, Homo sapiens
tctactgcccattct

SEQ ID NO: 523567 - DNA, 15 bp, Homo sapiens
ctactgcccattctc

SEQ ID NO: 523568 - DNA, 15 bp, Homo sapiens
tactgcccattctct

SEQ ID NO: 523569 - DNA, 15 bp, Homo sapiens
actgcccattctctg

SEQ ID NO: 523570 - DNA, 15 bp, Homo sapiens
ctgcccattctctgt

SEQ ID NO: 523571 - DNA, 15 bp, Homo sapiens
tgcccattctctgta

SEQ ID NO: 523572 - DNA, 15 bp, Homo sapiens
gcccattctctgtac

SEQ ID NO: 523573 - DNA, 15 bp, Homo sapiens
cccattctctgtaca

SEQ ID NO: 523574 - DNA, 15 bp, Homo sapiens
ccattctctgtacag

SEQ ID NO: 523575 - DNA, 15 bp, Homo sapiens
cattctctgtacaga

SEQ ID NO: 523576 - DNA, 15 bp, Homo sapiens
attctctgtacagag

SEQ ID NO: 523577 - DNA, 15 bp, Homo sapiens
ttctctgtacagagc

SEQ ID NO: 523578 - DNA, 15 bp, Homo sapiens
tctctgtacagagca

SEQ ID NO: 523579 - DNA, 15 bp, Homo sapiens
ctctgtacagagcaa

SEQ ID NO: 523580 - DNA, 15 bp, Homo sapiens
tctgtacagagcaaa

SEQ ID NO: 523581 - DNA, 15 bp, Homo sapiens
ctgtacagagcaaat

SEQ ID NO: 523582 - DNA, 15 bp, Homo sapiens
tgtacagagcaaatc

SEQ ID NO: 523583 - DNA, 15 bp, Homo sapiens
gtacagagcaaatcc

SEQ ID NO: 523584 - DNA, 15 bp, Homo sapiens
tacagagcaaatccc

SEQ ID NO: 523585 - DNA, 15 bp, Homo sapiens
acagagcaaatccct

SEQ ID NO: 523586 - DNA, 15 bp, Homo sapiens
cagagcaaatccctc

SEQ ID NO: 523587 - DNA, 15 bp, Homo sapiens
agagcaaatccctct

SEQ ID NO: 523588 - DNA, 15 bp, Homo sapiens
gagcaaatccctcta

SEQ ID NO: 523589 - DNA, 15 bp, Homo sapiens
agcaaatccctctag

SEQ ID NO: 523590 - DNA, 15 bp, Homo sapiens
gcaaatccctctaga

SEQ ID NO: 523591 - DNA, 15 bp, Homo sapiens
caaatccctctagac

SEQ ID NO: 523592 - DNA, 15 bp, Homo sapiens
aaatccctctagacc

SEQ ID NO: 523593 - DNA, 15 bp, Homo sapiens
aatccctctagacct

SEQ ID NO: 523594 - DNA, 15 bp, Homo sapiens
atccctctagacctg

SEQ ID NO: 523595 - DNA, 15 bp, Homo sapiens
tccctctagacctga

SEQ ID NO: 523596 - DNA, 15 bp, Homo sapiens
ccctctagacctgaa

SEQ ID NO: 523597 - DNA, 15 bp, Homo sapiens
cctctagacctgaag

SEQ ID NO: 523598 - DNA, 15 bp, Homo sapiens
ctctagacctgaagc

SEQ ID NO: 523599 - DNA, 15 bp, Homo sapiens
tctagacctgaagcc

SEQ ID NO: 523600 - DNA, 15 bp, Homo sapiens
ctagacctgaagccc

SEQ ID NO: 523601 - DNA, 15 bp, Homo sapiens
tagacctgaagcccc

SEQ ID NO: 523602 - DNA, 15 bp, Homo sapiens
agacctgaagcccct

SEQ ID NO: 523603 - DNA, 15 bp, Homo sapiens
gacctgaagcccctt

SEQ ID NO: 523604 - DNA, 15 bp, Homo sapiens
acctgaagccccttg

SEQ ID NO: 523605 - DNA, 15 bp, Homo sapiens
cctgaagccccttgg

SEQ ID NO: 523606 - DNA, 15 bp, Homo sapiens
ctgaagccccttgga

SEQ ID NO: 523607 - DNA, 15 bp, Homo sapiens
tgaagccccttggag

SEQ ID NO: 523608 - DNA, 15 bp, Homo sapiens
gaagccccttggagt

SEQ ID NO: 523609 - DNA, 15 bp, Homo sapiens
aagccccttggagtt

SEQ ID NO: 523610 - DNA, 15 bp, Homo sapiens
agccccttggagttg

SEQ ID NO: 523611 - DNA, 15 bp, Homo sapiens
gccccttggagttgt

SEQ ID NO: 523612 - DNA, 15 bp, Homo sapiens
ccccttggagttgtc

SEQ ID NO: 523613 - DNA, 15 bp, Homo sapiens
cccttggagttgtca

SEQ ID NO: 523614 - DNA, 15 bp, Homo sapiens
ccttggagttgtcaa

SEQ ID NO: 523615 - DNA, 15 bp, Homo sapiens
cttggagttgtcaag

SEQ ID NO: 523616 - DNA, 15 bp, Homo sapiens
ttggagttgtcaaga

SEQ ID NO: 523617 - DNA, 15 bp, Homo sapiens
tggagttgtcaagaa

SEQ ID NO: 523618 - DNA, 15 bp, Homo sapiens
ggagttgtcaagaaa

SEQ ID NO: 523619 - DNA, 15 bp, Homo sapiens
gagttgtcaagaaac

SEQ ID NO: 523620 - DNA, 15 bp, Homo sapiens
agttgtcaagaaacc

SEQ ID NO: 523621 - DNA, 15 bp, Homo sapiens
gttgtcaagaaacct

SEQ ID NO: 523622 - DNA, 15 bp, Homo sapiens
ttgtcaagaaacctt

SEQ ID NO: 523623 - DNA, 15 bp, Homo sapiens
tgtcaagaaaccttt

SEQ ID NO: 523624 - DNA, 15 bp, Homo sapiens
gtcaagaaacctttg

SEQ ID NO: 523625 - DNA, 15 bp, Homo sapiens
tcaagaaacctttga

SEQ ID NO: 523626 - DNA, 15 bp, Homo sapiens
caagaaacctttgag

SEQ ID NO: 523627 - DNA, 15 bp, Homo sapiens
aagaaacctttgaga

SEQ ID NO: 523628 - DNA, 15 bp, Homo sapiens
agaaacctttgagat

SEQ ID NO: 523629 - DNA, 15 bp, Homo sapiens
gaaacctttgagatg

SEQ ID NO: 523630 - DNA, 15 bp, Homo sapiens
aaacctttgagatga

SEQ ID NO: 523631 - DNA, 15 bp, Homo sapiens
aacctttgagatgac

SEQ ID NO: 523632 - DNA, 15 bp, Homo sapiens
acctttgagatgact

SEQ ID NO: 523633 - DNA, 15 bp, Homo sapiens
cctttgagatgactc

SEQ ID NO: 523634 - DNA, 15 bp, Homo sapiens
ctttgagatgactcc

SEQ ID NO: 523635 - DNA, 15 bp, Homo sapiens
tttgagatgactccc

SEQ ID NO: 523636 - DNA, 15 bp, Homo sapiens
ttgagatgactcccc

SEQ ID NO: 523637 - DNA, 15 bp, Homo sapiens
tgagatgactcccca

SEQ ID NO: 523638 - DNA, 15 bp, Homo sapiens
gagatgactccccac

SEQ ID NO: 523639 - DNA, 15 bp, Homo sapiens
agatgactccccact

SEQ ID NO: 523640 - DNA, 15 bp, Homo sapiens
gatgactccccactc

SEQ ID NO: 523641 - DNA, 15 bp, Homo sapiens
atgactccccactct

SEQ ID NO: 523642 - DNA, 15 bp, Homo sapiens
tgactccccactctg

SEQ ID NO: 523643 - DNA, 15 bp, Homo sapiens
gactccccactctgt

SEQ ID NO: 523644 - DNA, 15 bp, Homo sapiens
actccccactctgta

SEQ ID NO: 523645 - DNA, 15 bp, Homo sapiens
ctccccactctgtat

SEQ ID NO: 523646 - DNA, 15 bp, Homo sapiens
tccccactctgtatc

SEQ ID NO: 523647 - DNA, 15 bp, Homo sapiens
ccccactctgtatct

SEQ ID NO: 523648 - DNA, 15 bp, Homo sapiens
cccactctgtatctg

SEQ ID NO: 523649 - DNA, 15 bp, Homo sapiens
ccactctgtatctga

SEQ ID NO: 523650 - DNA, 15 bp, Homo sapiens
cactctgtatctgag

SEQ ID NO: 523651 - DNA, 15 bp, Homo sapiens
actctgtatctgagc

SEQ ID NO: 523652 - DNA, 15 bp, Homo sapiens
ctctgtatctgagct

SEQ ID NO: 523653 - DNA, 15 bp, Homo sapiens
tctgtatctgagctg

SEQ ID NO: 523654 - DNA, 15 bp, Homo sapiens
ctgtatctgagctgt

SEQ ID NO: 523655 - DNA, 15 bp, Homo sapiens
tgtatctgagctgtc

SEQ ID NO: 523656 - DNA, 15 bp, Homo sapiens
gtatctgagctgtca

SEQ ID NO: 523657 - DNA, 15 bp, Homo sapiens
tatctgagctgtcac

SEQ ID NO: 523658 - DNA, 15 bp, Homo sapiens
atctgagctgtcacc

SEQ ID NO: 523659 - DNA, 15 bp, Homo sapiens
tctgagctgtcacca

SEQ ID NO: 523660 - DNA, 15 bp, Homo sapiens
ctgagctgtcaccag

SEQ ID NO: 523661 - DNA, 15 bp, Homo sapiens
tgagctgtcaccagt

SEQ ID NO: 523662 - DNA, 15 bp, Homo sapiens
gagctgtcaccagta

SEQ ID NO: 523663 - DNA, 15 bp, Homo sapiens
agctgtcaccagtat

SEQ ID NO: 523664 - DNA, 15 bp, Homo sapiens
gctgtcaccagtatt

SEQ ID NO: 523665 - DNA, 15 bp, Homo sapiens
ctgtcaccagtattc

SEQ ID NO: 523666 - DNA, 15 bp, Homo sapiens
tgtcaccagtattct

SEQ ID NO: 523667 - DNA, 15 bp, Homo sapiens
gtcaccagtattctc

SEQ ID NO: 523668 - DNA, 15 bp, Homo sapiens
tcaccagtattctcc

SEQ ID NO: 523669 - DNA, 15 bp, Homo sapiens
caccagtattctcca

SEQ ID NO: 523670 - DNA, 15 bp, Homo sapiens
accagtattctccac

SEQ ID NO: 523671 - DNA, 15 bp, Homo sapiens
ccagtattctccact

SEQ ID NO: 523672 - DNA, 15 bp, Homo sapiens
cagtattctccactt

SEQ ID NO: 523673 - DNA, 15 bp, Homo sapiens
agtattctccacttc

SEQ ID NO: 523674 - DNA, 15 bp, Homo sapiens
gtattctccacttct

SEQ ID NO: 523675 - DNA, 15 bp, Homo sapiens
tattctccacttctt

SEQ ID NO: 523676 - DNA, 15 bp, Homo sapiens
attctccacttcttc

SEQ ID NO: 523677 - DNA, 15 bp, Homo sapiens
ttctccacttcttca

SEQ ID NO: 523678 - DNA, 15 bp, Homo sapiens
tctccacttcttcag

SEQ ID NO: 523679 - DNA, 15 bp, Homo sapiens
ctccacttcttcagg

SEQ ID NO: 523680 - DNA, 15 bp, Homo sapiens
tccacttcttcagga

SEQ ID NO: 523681 - DNA, 15 bp, Homo sapiens
ccacttcttcaggat

SEQ ID NO: 523682 - DNA, 15 bp, Homo sapiens
cacttcttcaggatt

SEQ ID NO: 523683 - DNA, 15 bp, Homo sapiens
acttcttcaggattg

SEQ ID NO: 523684 - DNA, 15 bp, Homo sapiens
cttcttcaggattgc

SEQ ID NO: 523685 - DNA, 15 bp, Homo sapiens
ttcttcaggattgcc

SEQ ID NO: 523686 - DNA, 15 bp, Homo sapiens
tcttcaggattgcca

SEQ ID NO: 523687 - DNA, 15 bp, Homo sapiens
cttcaggattgccat

SEQ ID NO: 523688 - DNA, 15 bp, Homo sapiens
ttcaggattgccatg

SEQ ID NO: 523689 - DNA, 15 bp, Homo sapiens
tcaggattgccatgg

SEQ ID NO: 523690 - DNA, 15 bp, Homo sapiens
caggattgccatggc

SEQ ID NO: 523691 - DNA, 15 bp, Homo sapiens
aggattgccatggca

SEQ ID NO: 523692 - DNA, 15 bp, Homo sapiens
ggattgccatggcaa

SEQ ID NO: 523693 - DNA, 15 bp, Homo sapiens
gattgccatggcaac

SEQ ID NO: 523694 - DNA, 15 bp, Homo sapiens
attgccatggcaact

SEQ ID NO: 523695 - DNA, 15 bp, Homo sapiens
ttgccatggcaacta

SEQ ID NO: 523696 - DNA, 15 bp, Homo sapiens
tgccatggcaactaa

SEQ ID NO: 523697 - DNA, 15 bp, Homo sapiens
gccatggcaactaaa

SEQ ID NO: 523698 - DNA, 15 bp, Homo sapiens
ccatggcaactaaat

SEQ ID NO: 523699 - DNA, 15 bp, Homo sapiens
catggcaactaaatt

SEQ ID NO: 523700 - DNA, 15 bp, Homo sapiens
atggcaactaaattg

SEQ ID NO: 523701 - DNA, 15 bp, Homo sapiens
tggcaactaaattga

SEQ ID NO: 523702 - DNA, 15 bp, Homo sapiens
ggcaactaaattgat

SEQ ID NO: 523703 - DNA, 15 bp, Homo sapiens
gcaactaaattgatg

SEQ ID NO: 523704 - DNA, 15 bp, Homo sapiens
caactaaattgatga

SEQ ID NO: 523705 - DNA, 15 bp, Homo sapiens
aactaaattgatgaa

SEQ ID NO: 523706 - DNA, 15 bp, Homo sapiens
actaaattgatgaaa

SEQ ID NO: 523707 - DNA, 15 bp, Homo sapiens
ctaaattgatgaaaa

SEQ ID NO: 523708 - DNA, 15 bp, Homo sapiens
taaattgatgaaaag

SEQ ID NO: 523709 - DNA, 15 bp, Homo sapiens
aaattgatgaaaaga

SEQ ID NO: 523710 - DNA, 15 bp, Homo sapiens
aattgatgaaaagat

SEQ ID NO: 523711 - DNA, 15 bp, Homo sapiens
attgatgaaaagatt

SEQ ID NO: 523712 - DNA, 15 bp, Homo sapiens
ttgatgaaaagattt

SEQ ID NO: 523713 - DNA, 15 bp, Homo sapiens
tgatgaaaagattta

SEQ ID NO: 523714 - DNA, 15 bp, Homo sapiens
gatgaaaagatttag

SEQ ID NO: 523715 - DNA, 15 bp, Homo sapiens
atgaaaagatttagg

SEQ ID NO: 523716 - DNA, 15 bp, Homo sapiens
tgaaaagatttagga

SEQ ID NO: 523717 - DNA, 15 bp, Homo sapiens
gaaaagatttaggag

SEQ ID NO: 523718 - DNA, 15 bp, Homo sapiens
aaaagatttaggagg

SEQ ID NO: 523719 - DNA, 15 bp, Homo sapiens
aaagatttaggaggc

SEQ ID NO: 523720 - DNA, 15 bp, Homo sapiens
aagatttaggaggcc

SEQ ID NO: 523721 - DNA, 15 bp, Homo sapiens
agatttaggaggcct

SEQ ID NO: 523722 - DNA, 15 bp, Homo sapiens
gatttaggaggcctt

SEQ ID NO: 523723 - DNA, 15 bp, Homo sapiens
atttaggaggccttt

SEQ ID NO: 523724 - DNA, 15 bp, Homo sapiens
tttaggaggcctttt

SEQ ID NO: 523725 - DNA, 15 bp, Homo sapiens
ttaggaggccttttc

SEQ ID NO: 523726 - DNA, 15 bp, Homo sapiens
taggaggccttttct

SEQ ID NO: 523727 - DNA, 15 bp, Homo sapiens
aggaggccttttctc

SEQ ID NO: 523728 - DNA, 15 bp, Homo sapiens
ggaggccttttctct

SEQ ID NO: 523729 - DNA, 15 bp, Homo sapiens
gaggccttttctctc

SEQ ID NO: 523730 - DNA, 15 bp, Homo sapiens
aggccttttctctct

SEQ ID NO: 523731 - DNA, 15 bp, Homo sapiens
ggccttttctctctt

SEQ ID NO: 523732 - DNA, 15 bp, Homo sapiens
gccttttctctcttt

SEQ ID NO: 523733 - DNA, 15 bp, Homo sapiens
ccttttctctctttg

SEQ ID NO: 523734 - DNA, 15 bp, Homo sapiens
cttttctctctttgc

SEQ ID NO: 523735 - DNA, 15 bp, Homo sapiens
ttttctctctttgca

SEQ ID NO: 523736 - DNA, 15 bp, Homo sapiens
tttctctctttgcaa

SEQ ID NO: 523737 - DNA, 15 bp, Homo sapiens
ttctctctttgcaat

SEQ ID NO: 523738 - DNA, 15 bp, Homo sapiens
tctctctttgcaatt

SEQ ID NO: 523739 - DNA, 15 bp, Homo sapiens
ctctctttgcaattc

SEQ ID NO: 523740 - DNA, 15 bp, Homo sapiens
tctctttgcaattcc

SEQ ID NO: 523741 - DNA, 15 bp, Homo sapiens
ctctttgcaattcct

SEQ ID NO: 523742 - DNA, 15 bp, Homo sapiens
tctttgcaattccta

SEQ ID NO: 523743 - DNA, 15 bp, Homo sapiens
ctttgcaattcctat

SEQ ID NO: 523744 - DNA, 15 bp, Homo sapiens
tttgcaattcctatg

SEQ ID NO: 523745 - DNA, 15 bp, Homo sapiens
ttgcaattcctatga

SEQ ID NO: 523746 - DNA, 15 bp, Homo sapiens
tgcaattcctatgat

SEQ ID NO: 523747 - DNA, 15 bp, Homo sapiens
gcaattcctatgatc

SEQ ID NO: 523748 - DNA, 15 bp, Homo sapiens
caattcctatgatcc

SEQ ID NO: 523749 - DNA, 15 bp, Homo sapiens
aattcctatgatcct

SEQ ID NO: 523750 - DNA, 15 bp, Homo sapiens
attcctatgatcctt

SEQ ID NO: 523751 - DNA, 15 bp, Homo sapiens
ttcctatgatccttt

SEQ ID NO: 523752 - DNA, 15 bp, Homo sapiens
tcctatgatcctttt

SEQ ID NO: 523753 - DNA, 15 bp, Homo sapiens
cctatgatccttttt

SEQ ID NO: 523754 - DNA, 15 bp, Homo sapiens
ctatgatcctttttg

SEQ ID NO: 523755 - DNA, 15 bp, Homo sapiens
tatgatcctttttga

SEQ ID NO: 523756 - DNA, 15 bp, Homo sapiens
atgatcctttttgaa

SEQ ID NO: 523757 - DNA, 15 bp, Homo sapiens
tgatcctttttgaat

SEQ ID NO: 523758 - DNA, 15 bp, Homo sapiens
gatcctttttgaatg

SEQ ID NO: 523759 - DNA, 15 bp, Homo sapiens
atcctttttgaatgt

SEQ ID NO: 523760 - DNA, 15 bp, Homo sapiens
tcctttttgaatgtg

SEQ ID NO: 523761 - DNA, 15 bp, Homo sapiens
cctttttgaatgtgg

SEQ ID NO: 523762 - DNA, 15 bp, Homo sapiens
ctttttgaatgtggg

SEQ ID NO: 523763 - DNA, 15 bp, Homo sapiens
tttttgaatgtgggt

SEQ ID NO: 523764 - DNA, 15 bp, Homo sapiens
ttttgaatgtgggtt

SEQ ID NO: 523765 - DNA, 15 bp, Homo sapiens
tttgaatgtgggttt

SEQ ID NO: 523766 - DNA, 15 bp, Homo sapiens
ttgaatgtgggtttg

SEQ ID NO: 523767 - DNA, 15 bp, Homo sapiens
tgaatgtgggtttgg

SEQ ID NO: 523768 - DNA, 15 bp, Homo sapiens
gaatgtgggtttggg

SEQ ID NO: 523769 - DNA, 15 bp, Homo sapiens
aatgtgggtttggga

SEQ ID NO: 523770 - DNA, 15 bp, Homo sapiens
atgtgggtttgggac

SEQ ID NO: 523771 - DNA, 15 bp, Homo sapiens
tgtgggtttgggact

SEQ ID NO: 523772 - DNA, 15 bp, Homo sapiens
gtgggtttgggactc

SEQ ID NO: 523773 - DNA, 15 bp, Homo sapiens
tgggtttgggactct

SEQ ID NO: 523774 - DNA, 15 bp, Homo sapiens
gggtttgggactctg

SEQ ID NO: 523775 - DNA, 15 bp, Homo sapiens
ggtttgggactctgt

SEQ ID NO: 523776 - DNA, 15 bp, Homo sapiens
gtttgggactctgtc

SEQ ID NO: 523777 - DNA, 15 bp, Homo sapiens
tttgggactctgtca

SEQ ID NO: 523778 - DNA, 15 bp, Homo sapiens
ttgggactctgtcaa

SEQ ID NO: 523779 - DNA, 15 bp, Homo sapiens
tgggactctgtcaat

SEQ ID NO: 523780 - DNA, 15 bp, Homo sapiens
gggactctgtcaata

SEQ ID NO: 523781 - DNA, 15 bp, Homo sapiens
ggactctgtcaatat

SEQ ID NO: 523782 - DNA, 15 bp, Homo sapiens
gactctgtcaatata

SEQ ID NO: 523783 - DNA, 15 bp, Homo sapiens
actctgtcaatatac

SEQ ID NO: 523784 - DNA, 15 bp, Homo sapiens
ctctgtcaatatacc

SEQ ID NO: 523785 - DNA, 15 bp, Homo sapiens
tctgtcaatataccc

SEQ ID NO: 523786 - DNA, 15 bp, Homo sapiens
ctgtcaatataccca

SEQ ID NO: 523787 - DNA, 15 bp, Homo sapiens
tgtcaatatacccat

SEQ ID NO: 523788 - DNA, 15 bp, Homo sapiens
gtcaatatacccatc

SEQ ID NO: 523789 - DNA, 15 bp, Homo sapiens
tcaatatacccatca

SEQ ID NO: 523790 - DNA, 15 bp, Homo sapiens
caatatacccatcat

SEQ ID NO: 523791 - DNA, 15 bp, Homo sapiens
aatatacccatcatc

SEQ ID NO: 523792 - DNA, 15 bp, Homo sapiens
atatacccatcatct

SEQ ID NO: 523793 - DNA, 15 bp, Homo sapiens
tatacccatcatcta

SEQ ID NO: 523794 - DNA, 15 bp, Homo sapiens
atacccatcatctaa

SEQ ID NO: 523795 - DNA, 15 bp, Homo sapiens
tacccatcatctaat

SEQ ID NO: 523796 - DNA, 15 bp, Homo sapiens
acccatcatctaatt

SEQ ID NO: 523797 - DNA, 15 bp, Homo sapiens
cccatcatctaattc

SEQ ID NO: 523798 - DNA, 15 bp, Homo sapiens
ccatcatctaattct

SEQ ID NO: 523799 - DNA, 15 bp, Homo sapiens
catcatctaattctg

SEQ ID NO: 523800 - DNA, 15 bp, Homo sapiens
atcatctaattctgt

SEQ ID NO: 523801 - DNA, 15 bp, Homo sapiens
tcatctaattctgtc

SEQ ID NO: 523802 - DNA, 15 bp, Homo sapiens
catctaattctgtcc

SEQ ID NO: 523803 - DNA, 15 bp, Homo sapiens
atctaattctgtcca

SEQ ID NO: 523804 - DNA, 15 bp, Homo sapiens
tctaattctgtccat

SEQ ID NO: 523805 - DNA, 15 bp, Homo sapiens
ctaattctgtccatt

SEQ ID NO: 523806 - DNA, 15 bp, Homo sapiens
taattctgtccattg

SEQ ID NO: 523807 - DNA, 15 bp, Homo sapiens
aattctgtccattgt

SEQ ID NO: 523808 - DNA, 15 bp, Homo sapiens
attctgtccattgtg

SEQ ID NO: 523809 - DNA, 15 bp, Homo sapiens
ttctgtccattgtgt

SEQ ID NO: 523810 - DNA, 15 bp, Homo sapiens
tctgtccattgtgtt

SEQ ID NO: 523811 - DNA, 15 bp, Homo sapiens
ctgtccattgtgttt

SEQ ID NO: 523812 - DNA, 15 bp, Homo sapiens
tgtccattgtgtttt

SEQ ID NO: 523813 - DNA, 15 bp, Homo sapiens
gtccattgtgtttta

SEQ ID NO: 523814 - DNA, 15 bp, Homo sapiens
tccattgtgttttaa

SEQ ID NO: 523815 - DNA, 15 bp, Homo sapiens
ccattgtgttttaaa

SEQ ID NO: 523816 - DNA, 15 bp, Homo sapiens
cattgtgttttaaag

SEQ ID NO: 523817 - DNA, 15 bp, Homo sapiens
attgtgttttaaagt

SEQ ID NO: 523818 - DNA, 15 bp, Homo sapiens
ttgtgttttaaagtt

SEQ ID NO: 523819 - DNA, 15 bp, Homo sapiens
tgtgttttaaagttt

SEQ ID NO: 523820 - DNA, 15 bp, Homo sapiens
gtgttttaaagttta

SEQ ID NO: 523821 - DNA, 15 bp, Homo sapiens
tgttttaaagtttaa

SEQ ID NO: 523822 - DNA, 15 bp, Homo sapiens
gttttaaagtttaag

SEQ ID NO: 523823 - DNA, 15 bp, Homo sapiens
ttttaaagtttaagg

SEQ ID NO: 523824 - DNA, 15 bp, Homo sapiens
tttaaagtttaaggt

SEQ ID NO: 523825 - DNA, 15 bp, Homo sapiens
ttaaagtttaaggtt

SEQ ID NO: 523826 - DNA, 15 bp, Homo sapiens
taaagtttaaggttg

SEQ ID NO: 523827 - DNA, 15 bp, Homo sapiens
aaagtttaaggttgc

SEQ ID NO: 523828 - DNA, 15 bp, Homo sapiens
aagtttaaggttgca

SEQ ID NO: 523829 - DNA, 15 bp, Homo sapiens
agtttaaggttgcaa

SEQ ID NO: 523830 - DNA, 15 bp, Homo sapiens
gtttaaggttgcaat

SEQ ID NO: 523831 - DNA, 15 bp, Homo sapiens
tttaaggttgcaatt

SEQ ID NO: 523832 - DNA, 15 bp, Homo sapiens
ttaaggttgcaattt

SEQ ID NO: 523833 - DNA, 15 bp, Homo sapiens
taaggttgcaatttc

SEQ ID NO: 523834 - DNA, 15 bp, Homo sapiens
aaggttgcaatttct

SEQ ID NO: 523835 - DNA, 15 bp, Homo sapiens
aggttgcaatttctg

SEQ ID NO: 523836 - DNA, 15 bp, Homo sapiens
ggttgcaatttctga

SEQ ID NO: 523837 - DNA, 15 bp, Homo sapiens
gttgcaatttctgat

SEQ ID NO: 523838 - DNA, 15 bp, Homo sapiens
ttgcaatttctgatt

SEQ ID NO: 523839 - DNA, 15 bp, Homo sapiens
tgcaatttctgatta

SEQ ID NO: 523840 - DNA, 15 bp, Homo sapiens
gcaatttctgattac

SEQ ID NO: 523841 - DNA, 15 bp, Homo sapiens
caatttctgattaca

SEQ ID NO: 523842 - DNA, 15 bp, Homo sapiens
aatttctgattacat

SEQ ID NO: 523843 - DNA, 15 bp, Homo sapiens
atttctgattacatc

SEQ ID NO: 523844 - DNA, 15 bp, Homo sapiens
tttctgattacatct

SEQ ID NO: 523845 - DNA, 15 bp, Homo sapiens
ttctgattacatctg

SEQ ID NO: 523846 - DNA, 15 bp, Homo sapiens
tctgattacatctgc

SEQ ID NO: 523847 - DNA, 15 bp, Homo sapiens
ctgattacatctgcc

SEQ ID NO: 523848 - DNA, 15 bp, Homo sapiens
tgattacatctgcct

SEQ ID NO: 523849 - DNA, 15 bp, Homo sapiens
gattacatctgcctt

SEQ ID NO: 523850 - DNA, 15 bp, Homo sapiens
attacatctgcctta

SEQ ID NO: 523851 - DNA, 15 bp, Homo sapiens
ttacatctgccttag

SEQ ID NO: 523852 - DNA, 15 bp, Homo sapiens
tacatctgccttagc

SEQ ID NO: 523853 - DNA, 15 bp, Homo sapiens
acatctgccttagcc

SEQ ID NO: 523854 - DNA, 15 bp, Homo sapiens
catctgccttagcca

SEQ ID NO: 523855 - DNA, 15 bp, Homo sapiens
atctgccttagccat

SEQ ID NO: 523856 - DNA, 15 bp, Homo sapiens
tctgccttagccata

SEQ ID NO: 523857 - DNA, 15 bp, Homo sapiens
ctgccttagccatac

SEQ ID NO: 523858 - DNA, 15 bp, Homo sapiens
tgccttagccatact

SEQ ID NO: 523859 - DNA, 15 bp, Homo sapiens
gccttagccatactg

SEQ ID NO: 523860 - DNA, 15 bp, Homo sapiens
ccttagccatactgt

SEQ ID NO: 523861 - DNA, 15 bp, Homo sapiens
cttagccatactgta

SEQ ID NO: 523862 - DNA, 15 bp, Homo sapiens
ttagccatactgtat

SEQ ID NO: 523863 - DNA, 15 bp, Homo sapiens
tagccatactgtatt

SEQ ID NO: 523864 - DNA, 15 bp, Homo sapiens
agccatactgtatta

SEQ ID NO: 523865 - DNA, 15 bp, Homo sapiens
gccatactgtattat

SEQ ID NO: 523866 - DNA, 15 bp, Homo sapiens
ccatactgtattata

SEQ ID NO: 523867 - DNA, 15 bp, Homo sapiens
catactgtattatat

SEQ ID NO: 523868 - DNA, 15 bp, Homo sapiens
atactgtattatatt

SEQ ID NO: 523869 - DNA, 15 bp, Homo sapiens
tactgtattatattt

SEQ ID NO: 523870 - DNA, 15 bp, Homo sapiens
actgtattatatttg

SEQ ID NO: 523871 - DNA, 15 bp, Homo sapiens
ctgtattatatttga

SEQ ID NO: 523872 - DNA, 15 bp, Homo sapiens
tgtattatatttgac

SEQ ID NO: 523873 - DNA, 15 bp, Homo sapiens
gtattatatttgaca

SEQ ID NO: 523874 - DNA, 15 bp, Homo sapiens
tattatatttgacat

SEQ ID NO: 523875 - DNA, 15 bp, Homo sapiens
attatatttgacatt

SEQ ID NO: 523876 - DNA, 15 bp, Homo sapiens
ttatatttgacattc

SEQ ID NO: 523877 - DNA, 15 bp, Homo sapiens
tatatttgacattca

SEQ ID NO: 523878 - DNA, 15 bp, Homo sapiens
atatttgacattcaa

SEQ ID NO: 523879 - DNA, 15 bp, Homo sapiens
tatttgacattcaat

SEQ ID NO: 523880 - DNA, 15 bp, Homo sapiens
atttgacattcaata

SEQ ID NO: 523881 - DNA, 15 bp, Homo sapiens
tttgacattcaatat

SEQ ID NO: 523882 - DNA, 15 bp, Homo sapiens
ttgacattcaatata

SEQ ID NO: 523883 - DNA, 15 bp, Homo sapiens
tgacattcaatatac

SEQ ID NO: 523884 - DNA, 15 bp, Homo sapiens
gacattcaatataca

SEQ ID NO: 523885 - DNA, 15 bp, Homo sapiens
acattcaatatacaa

SEQ ID NO: 523886 - DNA, 15 bp, Homo sapiens
cattcaatatacaat

SEQ ID NO: 523887 - DNA, 15 bp, Homo sapiens
attcaatatacaatg

SEQ ID NO: 523888 - DNA, 15 bp, Homo sapiens
ttcaatatacaatgt

SEQ ID NO: 523889 - DNA, 15 bp, Homo sapiens
tcaatatacaatgtc

SEQ ID NO: 523890 - DNA, 15 bp, Homo sapiens
caatatacaatgtcc

SEQ ID NO: 523891 - DNA, 15 bp, Homo sapiens
aatatacaatgtcct

SEQ ID NO: 523892 - DNA, 15 bp, Homo sapiens
atatacaatgtcctt

SEQ ID NO: 523893 - DNA, 15 bp, Homo sapiens
tatacaatgtccttg

SEQ ID NO: 523894 - DNA, 15 bp, Homo sapiens
atacaatgtccttgt

SEQ ID NO: 523895 - DNA, 15 bp, Homo sapiens
tacaatgtccttgtt

SEQ ID NO: 523896 - DNA, 15 bp, Homo sapiens
acaatgtccttgttt

SEQ ID NO: 523897 - DNA, 15 bp, Homo sapiens
caatgtccttgtttt

SEQ ID NO: 523898 - DNA, 15 bp, Homo sapiens
aatgtccttgttttt

SEQ ID NO: 523899 - DNA, 15 bp, Homo sapiens
atgtccttgtttttc

SEQ ID NO: 523900 - DNA, 15 bp, Homo sapiens
tgtccttgtttttct

SEQ ID NO: 523901 - DNA, 15 bp, Homo sapiens
gtccttgtttttctg

SEQ ID NO: 523902 - DNA, 15 bp, Homo sapiens
tccttgtttttctgt

SEQ ID NO: 523903 - DNA, 15 bp, Homo sapiens
ccttgtttttctgta

SEQ ID NO: 523904 - DNA, 15 bp, Homo sapiens
cttgtttttctgtat

SEQ ID NO: 523905 - DNA, 15 bp, Homo sapiens
ttgtttttctgtatt

SEQ ID NO: 523906 - DNA, 15 bp, Homo sapiens
tgtttttctgtattt

SEQ ID NO: 523907 - DNA, 15 bp, Homo sapiens
gtttttctgtatttc

SEQ ID NO: 523908 - DNA, 15 bp, Homo sapiens
tttttctgtatttct

SEQ ID NO: 523909 - DNA, 15 bp, Homo sapiens
ttttctgtatttcta

SEQ ID NO: 523910 - DNA, 15 bp, Homo sapiens
tttctgtatttctaa

SEQ ID NO: 523911 - DNA, 15 bp, Homo sapiens
ttctgtatttctaat

SEQ ID NO: 523912 - DNA, 15 bp, Homo sapiens
tctgtatttctaatc

SEQ ID NO: 523913 - DNA, 15 bp, Homo sapiens
ctgtatttctaatct

SEQ ID NO: 523914 - DNA, 15 bp, Homo sapiens
tgtatttctaatctt

SEQ ID NO: 523915 - DNA, 15 bp, Homo sapiens
gtatttctaatctta

SEQ ID NO: 523916 - DNA, 15 bp, Homo sapiens
tatttctaatcttat

SEQ ID NO: 523917 - DNA, 15 bp, Homo sapiens
atttctaatcttatt

SEQ ID NO: 523918 - DNA, 15 bp, Homo sapiens
tttctaatcttattc

SEQ ID NO: 523919 - DNA, 15 bp, Homo sapiens
ttctaatcttattcc

SEQ ID NO: 523920 - DNA, 15 bp, Homo sapiens
tctaatcttattccc

SEQ ID NO: 523921 - DNA, 15 bp, Homo sapiens
ctaatcttattccca

SEQ ID NO: 523922 - DNA, 15 bp, Homo sapiens
taatcttattcccag

SEQ ID NO: 523923 - DNA, 15 bp, Homo sapiens
aatcttattcccaga

SEQ ID NO: 523924 - DNA, 15 bp, Homo sapiens
atcttattcccagag

SEQ ID NO: 523925 - DNA, 15 bp, Homo sapiens
tcttattcccagaga

SEQ ID NO: 523926 - DNA, 15 bp, Homo sapiens
cttattcccagagat

SEQ ID NO: 523927 - DNA, 15 bp, Homo sapiens
ttattcccagagatg

SEQ ID NO: 523928 - DNA, 15 bp, Homo sapiens
tattcccagagatgt

SEQ ID NO: 523929 - DNA, 15 bp, Homo sapiens
attcccagagatgtg

SEQ ID NO: 523930 - DNA, 15 bp, Homo sapiens
ttcccagagatgtgt

SEQ ID NO: 523931 - DNA, 15 bp, Homo sapiens
tcccagagatgtgtc

SEQ ID NO: 523932 - DNA, 15 bp, Homo sapiens
cccagagatgtgtct

SEQ ID NO: 523933 - DNA, 15 bp, Homo sapiens
ccagagatgtgtcta

SEQ ID NO: 523934 - DNA, 15 bp, Homo sapiens
cagagatgtgtctat

SEQ ID NO: 523935 - DNA, 15 bp, Homo sapiens
agagatgtgtctatt

SEQ ID NO: 523936 - DNA, 15 bp, Homo sapiens
gagatgtgtctattt

SEQ ID NO: 523937 - DNA, 15 bp, Homo sapiens
agatgtgtctatttg

SEQ ID NO: 523938 - DNA, 15 bp, Homo sapiens
gatgtgtctatttgt

SEQ ID NO: 523939 - DNA, 15 bp, Homo sapiens
atgtgtctatttgtt

SEQ ID NO: 523940 - DNA, 15 bp, Homo sapiens
tgtgtctatttgttc

SEQ ID NO: 523941 - DNA, 15 bp, Homo sapiens
gtgtctatttgttca

SEQ ID NO: 523942 - DNA, 15 bp, Homo sapiens
tgtctatttgttcag

SEQ ID NO: 523943 - DNA, 15 bp, Homo sapiens
gtctatttgttcagg

SEQ ID NO: 523944 - DNA, 15 bp, Homo sapiens
tctatttgttcagga

SEQ ID NO: 523945 - DNA, 15 bp, Homo sapiens
ctatttgttcaggat

SEQ ID NO: 523946 - DNA, 15 bp, Homo sapiens
tatttgttcaggatt

SEQ ID NO: 523947 - DNA, 15 bp, Homo sapiens
atttgttcaggattc

SEQ ID NO: 523948 - DNA, 15 bp, Homo sapiens
tttgttcaggattca

SEQ ID NO: 523949 - DNA, 15 bp, Homo sapiens
ttgttcaggattcat

SEQ ID NO: 523950 - DNA, 15 bp, Homo sapiens
tgttcaggattcatt

SEQ ID NO: 523951 - DNA, 15 bp, Homo sapiens
gttcaggattcattt

SEQ ID NO: 523952 - DNA, 15 bp, Homo sapiens
ttcaggattcatttt

SEQ ID NO: 523953 - DNA, 15 bp, Homo sapiens
tcaggattcattttg

SEQ ID NO: 523954 - DNA, 15 bp, Homo sapiens
caggattcattttgc

SEQ ID NO: 523955 - DNA, 15 bp, Homo sapiens
aggattcattttgca

SEQ ID NO: 523956 - DNA, 15 bp, Homo sapiens
ggattcattttgcaa

SEQ ID NO: 523957 - DNA, 15 bp, Homo sapiens
gattcattttgcaac

SEQ ID NO: 523958 - DNA, 15 bp, Homo sapiens
attcattttgcaacg

SEQ ID NO: 523959 - DNA, 15 bp, Homo sapiens
ttcattttgcaacgt

SEQ ID NO: 523960 - DNA, 15 bp, Homo sapiens
tcattttgcaacgtg

SEQ ID NO: 523961 - DNA, 15 bp, Homo sapiens
cattttgcaacgtgt

SEQ ID NO: 523962 - DNA, 15 bp, Homo sapiens
attttgcaacgtgtt

SEQ ID NO: 523963 - DNA, 15 bp, Homo sapiens
ttttgcaacgtgttt

SEQ ID NO: 523964 - DNA, 15 bp, Homo sapiens
tttgcaacgtgtttt

SEQ ID NO: 523965 - DNA, 15 bp, Homo sapiens
ttgcaacgtgttttt

SEQ ID NO: 523966 - DNA, 15 bp, Homo sapiens
tgcaacgtgttttta

SEQ ID NO: 523967 - DNA, 15 bp, Homo sapiens
gcaacgtgtttttac

SEQ ID NO: 523968 - DNA, 15 bp, Homo sapiens
caacgtgtttttact

SEQ ID NO: 523969 - DNA, 15 bp, Homo sapiens
aacgtgtttttacta

SEQ ID NO: 523970 - DNA, 15 bp, Homo sapiens
acgtgtttttactaa

SEQ ID NO: 523971 - DNA, 15 bp, Homo sapiens
cgtgtttttactaag

SEQ ID NO: 523972 - DNA, 15 bp, Homo sapiens
gtgtttttactaagc

SEQ ID NO: 523973 - DNA, 15 bp, Homo sapiens
tgtttttactaagca

SEQ ID NO: 523974 - DNA, 15 bp, Homo sapiens
gtttttactaagcat

SEQ ID NO: 523975 - DNA, 15 bp, Homo sapiens
tttttactaagcatc

SEQ ID NO: 523976 - DNA, 15 bp, Homo sapiens
ttttactaagcatct

SEQ ID NO: 523977 - DNA, 15 bp, Homo sapiens
tttactaagcatcta

SEQ ID NO: 523978 - DNA, 15 bp, Homo sapiens
ttactaagcatctac

SEQ ID NO: 523979 - DNA, 15 bp, Homo sapiens
tactaagcatctacc

SEQ ID NO: 523980 - DNA, 15 bp, Homo sapiens
actaagcatctaccc

SEQ ID NO: 523981 - DNA, 15 bp, Homo sapiens
ctaagcatctaccca

SEQ ID NO: 523982 - DNA, 15 bp, Homo sapiens
taagcatctacccaa

SEQ ID NO: 523983 - DNA, 15 bp, Homo sapiens
aagcatctacccaaa

SEQ ID NO: 523984 - DNA, 15 bp, Homo sapiens
agcatctacccaaaa

SEQ ID NO: 523985 - DNA, 15 bp, Homo sapiens
gcatctacccaaaac

SEQ ID NO: 523986 - DNA, 15 bp, Homo sapiens
catctacccaaaacc

SEQ ID NO: 523987 - DNA, 15 bp, Homo sapiens
atctacccaaaaccg

SEQ ID NO: 523988 - DNA, 15 bp, Homo sapiens
tctacccaaaaccgt

SEQ ID NO: 523989 - DNA, 15 bp, Homo sapiens
ctacccaaaaccgtt

SEQ ID NO: 523990 - DNA, 15 bp, Homo sapiens
tacccaaaaccgttg

SEQ ID NO: 523991 - DNA, 15 bp, Homo sapiens
acccaaaaccgttga

SEQ ID NO: 523992 - DNA, 15 bp, Homo sapiens
cccaaaaccgttgaa

SEQ ID NO: 523993 - DNA, 15 bp, Homo sapiens
ccaaaaccgttgaag

SEQ ID NO: 523994 - DNA, 15 bp, Homo sapiens
caaaaccgttgaagt

SEQ ID NO: 523995 - DNA, 15 bp, Homo sapiens
aaaaccgttgaagtc

SEQ ID NO: 523996 - DNA, 15 bp, Homo sapiens
aaaccgttgaagtca

SEQ ID NO: 523997 - DNA, 15 bp, Homo sapiens
aaccgttgaagtcag

SEQ ID NO: 523998 - DNA, 15 bp, Homo sapiens
accgttgaagtcaga

SEQ ID NO: 523999 - DNA, 15 bp, Homo sapiens
ccgttgaagtcagat

SEQ ID NO: 524000 - DNA, 15 bp, Homo sapiens
cgttgaagtcagatt

SEQ ID NO: 524001 - DNA, 15 bp, Homo sapiens
gttgaagtcagattt

SEQ ID NO: 524002 - DNA, 15 bp, Homo sapiens
ttgaagtcagatttc

SEQ ID NO: 524003 - DNA, 15 bp, Homo sapiens
tgaagtcagatttca

SEQ ID NO: 524004 - DNA, 15 bp, Homo sapiens
gaagtcagatttcag

SEQ ID NO: 524005 - DNA, 15 bp, Homo sapiens
aagtcagatttcagg

SEQ ID NO: 524006 - DNA, 15 bp, Homo sapiens
agtcagatttcaggc

SEQ ID NO: 524007 - DNA, 15 bp, Homo sapiens
gtcagatttcaggct

SEQ ID NO: 524008 - DNA, 15 bp, Homo sapiens
tcagatttcaggctg

SEQ ID NO: 524009 - DNA, 15 bp, Homo sapiens
cagatttcaggctgt

SEQ ID NO: 524010 - DNA, 15 bp, Homo sapiens
agatttcaggctgtc

SEQ ID NO: 524011 - DNA, 15 bp, Homo sapiens
gatttcaggctgtct

SEQ ID NO: 524012 - DNA, 15 bp, Homo sapiens
atttcaggctgtctt

SEQ ID NO: 524013 - DNA, 15 bp, Homo sapiens
tttcaggctgtctta

SEQ ID NO: 524014 - DNA, 15 bp, Homo sapiens
ttcaggctgtcttac

SEQ ID NO: 524015 - DNA, 15 bp, Homo sapiens
tcaggctgtcttacg

SEQ ID NO: 524016 - DNA, 15 bp, Homo sapiens
caggctgtcttacgt

SEQ ID NO: 524017 - DNA, 15 bp, Homo sapiens
aggctgtcttacgtc

SEQ ID NO: 524018 - DNA, 15 bp, Homo sapiens
ggctgtcttacgtct

SEQ ID NO: 524019 - DNA, 15 bp, Homo sapiens
gctgtcttacgtcta

SEQ ID NO: 524020 - DNA, 15 bp, Homo sapiens
ctgtcttacgtctaa

SEQ ID NO: 524021 - DNA, 15 bp, Homo sapiens
tgtcttacgtctaaa

SEQ ID NO: 524022 - DNA, 15 bp, Homo sapiens
gtcttacgtctaaag

SEQ ID NO: 524023 - DNA, 15 bp, Homo sapiens
tcttacgtctaaagt

SEQ ID NO: 524024 - DNA, 15 bp, Homo sapiens
cttacgtctaaagta

SEQ ID NO: 524025 - DNA, 15 bp, Homo sapiens
ttacgtctaaagtag

SEQ ID NO: 524026 - DNA, 15 bp, Homo sapiens
tacgtctaaagtagc

SEQ ID NO: 524027 - DNA, 15 bp, Homo sapiens
acgtctaaagtagca

SEQ ID NO: 524028 - DNA, 15 bp, Homo sapiens
cgtctaaagtagcac

SEQ ID NO: 524029 - DNA, 15 bp, Homo sapiens
gtctaaagtagcaca

SEQ ID NO: 524030 - DNA, 15 bp, Homo sapiens
tctaaagtagcacag

SEQ ID NO: 524031 - DNA, 15 bp, Homo sapiens
ctaaagtagcacagg

SEQ ID NO: 524032 - DNA, 15 bp, Homo sapiens
taaagtagcacaggc

SEQ ID NO: 524033 - DNA, 15 bp, Homo sapiens
aaagtagcacaggca

SEQ ID NO: 524034 - DNA, 15 bp, Homo sapiens
aagtagcacaggcag

SEQ ID NO: 524035 - DNA, 15 bp, Homo sapiens
agtagcacaggcagg

SEQ ID NO: 524036 - DNA, 15 bp, Homo sapiens
gtagcacaggcagga

SEQ ID NO: 524037 - DNA, 15 bp, Homo sapiens
tagcacaggcaggaa

SEQ ID NO: 524038 - DNA, 15 bp, Homo sapiens
agcacaggcaggaaa

SEQ ID NO: 524039 - DNA, 15 bp, Homo sapiens
gcacaggcaggaaaa

SEQ ID NO: 524040 - DNA, 15 bp, Homo sapiens
cacaggcaggaaaaa

SEQ ID NO: 524041 - DNA, 15 bp, Homo sapiens
acaggcaggaaaaac

SEQ ID NO: 524042 - DNA, 15 bp, Homo sapiens
caggcaggaaaaact

SEQ ID NO: 524043 - DNA, 15 bp, Homo sapiens
aggcaggaaaaacta

SEQ ID NO: 524044 - DNA, 15 bp, Homo sapiens
ggcaggaaaaactat

SEQ ID NO: 524045 - DNA, 15 bp, Homo sapiens
gcaggaaaaactatt

SEQ ID NO: 524046 - DNA, 15 bp, Homo sapiens
caggaaaaactattg

SEQ ID NO: 524047 - DNA, 15 bp, Homo sapiens
aggaaaaactattga

SEQ ID NO: 524048 - DNA, 15 bp, Homo sapiens
ggaaaaactattgaa

SEQ ID NO: 524049 - DNA, 15 bp, Homo sapiens
gaaaaactattgaag

SEQ ID NO: 524050 - DNA, 15 bp, Homo sapiens
aaaaactattgaagt

SEQ ID NO: 524051 - DNA, 15 bp, Homo sapiens
aaaactattgaagtg

SEQ ID NO: 524052 - DNA, 15 bp, Homo sapiens
aaactattgaagtgg

SEQ ID NO: 524053 - DNA, 15 bp, Homo sapiens
aactattgaagtggg

SEQ ID NO: 524054 - DNA, 15 bp, Homo sapiens
actattgaagtggga

SEQ ID NO: 524055 - DNA, 15 bp, Homo sapiens
ctattgaagtgggat

SEQ ID NO: 524056 - DNA, 15 bp, Homo sapiens
tattgaagtgggatt

SEQ ID NO: 524057 - DNA, 15 bp, Homo sapiens
attgaagtgggattt

SEQ ID NO: 524058 - DNA, 15 bp, Homo sapiens
ttgaagtgggatttt

SEQ ID NO: 524059 - DNA, 15 bp, Homo sapiens
tgaagtgggattttt

SEQ ID NO: 524060 - DNA, 15 bp, Homo sapiens
gaagtgggatttttt

SEQ ID NO: 524061 - DNA, 15 bp, Homo sapiens
aagtgggattttttt

SEQ ID NO: 524062 - DNA, 15 bp, Homo sapiens
agtgggatttttttt

SEQ ID NO: 524063 - DNA, 15 bp, Homo sapiens
gtgggattttttttt

SEQ ID NO: 524064 - DNA, 15 bp, Homo sapiens
tgggatttttttttc

SEQ ID NO: 524065 - DNA, 15 bp, Homo sapiens
gggatttttttttcc

SEQ ID NO: 524066 - DNA, 15 bp, Homo sapiens
ggatttttttttccc

SEQ ID NO: 524067 - DNA, 15 bp, Homo sapiens
gatttttttttccct

SEQ ID NO: 524068 - DNA, 15 bp, Homo sapiens
atttttttttccctt

SEQ ID NO: 524069 - DNA, 15 bp, Homo sapiens
tttttttcccttttt

SEQ ID NO: 524070 - DNA, 15 bp, Homo sapiens
ttttttccctttttg

SEQ ID NO: 524071 - DNA, 15 bp, Homo sapiens
tttttccctttttgt

SEQ ID NO: 524072 - DNA, 15 bp, Homo sapiens
ttttccctttttgta

SEQ ID NO: 524073 - DNA, 15 bp, Homo sapiens
tttccctttttgtac

SEQ ID NO: 524074 - DNA, 15 bp, Homo sapiens
ttccctttttgtact

SEQ ID NO: 524075 - DNA, 15 bp, Homo sapiens
tccctttttgtactg

SEQ ID NO: 524076 - DNA, 15 bp, Homo sapiens
ccctttttgtactga

SEQ ID NO: 524077 - DNA, 15 bp, Homo sapiens
cctttttgtactgaa

SEQ ID NO: 524078 - DNA, 15 bp, Homo sapiens
ctttttgtactgaac

SEQ ID NO: 524079 - DNA, 15 bp, Homo sapiens
tttttgtactgaacc

SEQ ID NO: 524080 - DNA, 15 bp, Homo sapiens
ttttgtactgaaccg

SEQ ID NO: 524081 - DNA, 15 bp, Homo sapiens
tttgtactgaaccga

SEQ ID NO: 524082 - DNA, 15 bp, Homo sapiens
ttgtactgaaccgag

SEQ ID NO: 524083 - DNA, 15 bp, Homo sapiens
tgtactgaaccgaga

SEQ ID NO: 524084 - DNA, 15 bp, Homo sapiens
gtactgaaccgagaa

SEQ ID NO: 524085 - DNA, 15 bp, Homo sapiens
tactgaaccgagaaa

SEQ ID NO: 524086 - DNA, 15 bp, Homo sapiens
actgaaccgagaaaa

SEQ ID NO: 524087 - DNA, 15 bp, Homo sapiens
ctgaaccgagaaaaa

SEQ ID NO: 524088 - DNA, 15 bp, Homo sapiens
tgaaccgagaaaaag

SEQ ID NO: 524089 - DNA, 15 bp, Homo sapiens
gaaccgagaaaaagt

SEQ ID NO: 524090 - DNA, 15 bp, Homo sapiens
aaccgagaaaaagta

SEQ ID NO: 524091 - DNA, 15 bp, Homo sapiens
accgagaaaaagtat

SEQ ID NO: 524092 - DNA, 15 bp, Homo sapiens
ccgagaaaaagtata

SEQ ID NO: 524093 - DNA, 15 bp, Homo sapiens
cgagaaaaagtatat

SEQ ID NO: 524094 - DNA, 15 bp, Homo sapiens
gagaaaaagtatata

SEQ ID NO: 524095 - DNA, 15 bp, Homo sapiens
agaaaaagtatatag

SEQ ID NO: 524096 - DNA, 15 bp, Homo sapiens
gaaaaagtatataga

SEQ ID NO: 524097 - DNA, 15 bp, Homo sapiens
aaaaagtatatagat

SEQ ID NO: 524098 - DNA, 15 bp, Homo sapiens
aaaagtatatagatg

SEQ ID NO: 524099 - DNA, 15 bp, Homo sapiens
aaagtatatagatga

SEQ ID NO: 524100 - DNA, 15 bp, Homo sapiens
aagtatatagatgat

SEQ ID NO: 524101 - DNA, 15 bp, Homo sapiens
agtatatagatgata

SEQ ID NO: 524102 - DNA, 15 bp, Homo sapiens
gtatatagatgatag

SEQ ID NO: 524103 - DNA, 15 bp, Homo sapiens
tatatagatgataga

SEQ ID NO: 524104 - DNA, 15 bp, Homo sapiens
atatagatgatagag

SEQ ID NO: 524105 - DNA, 15 bp, Homo sapiens
tatagatgatagaga

SEQ ID NO: 524106 - DNA, 15 bp, Homo sapiens
atagatgatagagaa

SEQ ID NO: 524107 - DNA, 15 bp, Homo sapiens
tagatgatagagaat

SEQ ID NO: 524108 - DNA, 15 bp, Homo sapiens
agatgatagagaatt

SEQ ID NO: 524109 - DNA, 15 bp, Homo sapiens
gatgatagagaattc

SEQ ID NO: 524110 - DNA, 15 bp, Homo sapiens
atgatagagaattcc

SEQ ID NO: 524111 - DNA, 15 bp, Homo sapiens
tgatagagaattcct

SEQ ID NO: 524112 - DNA, 15 bp, Homo sapiens
gatagagaattccta

SEQ ID NO: 524113 - DNA, 15 bp, Homo sapiens
atagagaattcctaa

SEQ ID NO: 524114 - DNA, 15 bp, Homo sapiens
tagagaattcctaat

SEQ ID NO: 524115 - DNA, 15 bp, Homo sapiens
agagaattcctaatt

SEQ ID NO: 524116 - DNA, 15 bp, Homo sapiens
gagaattcctaattt

SEQ ID NO: 524117 - DNA, 15 bp, Homo sapiens
agaattcctaatttg

SEQ ID NO: 524118 - DNA, 15 bp, Homo sapiens
gaattcctaatttgg

SEQ ID NO: 524119 - DNA, 15 bp, Homo sapiens
aattcctaatttggt

SEQ ID NO: 524120 - DNA, 15 bp, Homo sapiens
attcctaatttggta

SEQ ID NO: 524121 - DNA, 15 bp, Homo sapiens
ttcctaatttggtat

SEQ ID NO: 524122 - DNA, 15 bp, Homo sapiens
tcctaatttggtatc

SEQ ID NO: 524123 - DNA, 15 bp, Homo sapiens
cctaatttggtatca

SEQ ID NO: 524124 - DNA, 15 bp, Homo sapiens
ctaatttggtatcat

SEQ ID NO: 524125 - DNA, 15 bp, Homo sapiens
taatttggtatcatt

SEQ ID NO: 524126 - DNA, 15 bp, Homo sapiens
aatttggtatcattg

SEQ ID NO: 524127 - DNA, 15 bp, Homo sapiens
atttggtatcattga

SEQ ID NO: 524128 - DNA, 15 bp, Homo sapiens
tttggtatcattgat

SEQ ID NO: 524129 - DNA, 15 bp, Homo sapiens
ttggtatcattgata

SEQ ID NO: 524130 - DNA, 15 bp, Homo sapiens
tggtatcattgatat

SEQ ID NO: 524131 - DNA, 15 bp, Homo sapiens
ggtatcattgatatc

SEQ ID NO: 524132 - DNA, 15 bp, Homo sapiens
gtatcattgatatct

SEQ ID NO: 524133 - DNA, 15 bp, Homo sapiens
tatcattgatatctg

SEQ ID NO: 524134 - DNA, 15 bp, Homo sapiens
atcattgatatctgg

SEQ ID NO: 524135 - DNA, 15 bp, Homo sapiens
tcattgatatctggg

SEQ ID NO: 524136 - DNA, 15 bp, Homo sapiens
cattgatatctgggt

SEQ ID NO: 524137 - DNA, 15 bp, Homo sapiens
attgatatctgggtt

SEQ ID NO: 524138 - DNA, 15 bp, Homo sapiens
ttgatatctgggttt

SEQ ID NO: 524139 - DNA, 15 bp, Homo sapiens
tgatatctgggtttt

SEQ ID NO: 524140 - DNA, 15 bp, Homo sapiens
gatatctgggttttt

SEQ ID NO: 524141 - DNA, 15 bp, Homo sapiens
atatctgggtttttg

SEQ ID NO: 524142 - DNA, 15 bp, Homo sapiens
tatctgggtttttgt

SEQ ID NO: 524143 - DNA, 15 bp, Homo sapiens
atctgggtttttgtt

SEQ ID NO: 524144 - DNA, 15 bp, Homo sapiens
tctgggtttttgttt

SEQ ID NO: 524145 - DNA, 15 bp, Homo sapiens
ctgggtttttgtttg

SEQ ID NO: 524146 - DNA, 15 bp, Homo sapiens
tgggtttttgtttgt

SEQ ID NO: 524147 - DNA, 15 bp, Homo sapiens
gggtttttgtttgtt

SEQ ID NO: 524148 - DNA, 15 bp, Homo sapiens
ggtttttgtttgttt

SEQ ID NO: 524149 - DNA, 15 bp, Homo sapiens
tttttgtttgttttt

SEQ ID NO: 524150 - DNA, 15 bp, Homo sapiens
ttttgtttgttttta

SEQ ID NO: 524151 - DNA, 15 bp, Homo sapiens
tttgtttgtttttac

SEQ ID NO: 524152 - DNA, 15 bp, Homo sapiens
ttgtttgtttttaca

SEQ ID NO: 524153 - DNA, 15 bp, Homo sapiens
tgtttgtttttacag

SEQ ID NO: 524154 - DNA, 15 bp, Homo sapiens
gtttgtttttacaga

SEQ ID NO: 524155 - DNA, 15 bp, Homo sapiens
tttgtttttacagaa

SEQ ID NO: 524156 - DNA, 15 bp, Homo sapiens
ttgtttttacagaag

SEQ ID NO: 524157 - DNA, 15 bp, Homo sapiens
tgtttttacagaaga

SEQ ID NO: 524158 - DNA, 15 bp, Homo sapiens
gtttttacagaagac

SEQ ID NO: 524159 - DNA, 15 bp, Homo sapiens
tttttacagaagact

SEQ ID NO: 524160 - DNA, 15 bp, Homo sapiens
ttttacagaagactg

SEQ ID NO: 524161 - DNA, 15 bp, Homo sapiens
tttacagaagactga

SEQ ID NO: 524162 - DNA, 15 bp, Homo sapiens
ttacagaagactgat

SEQ ID NO: 524163 - DNA, 15 bp, Homo sapiens
tacagaagactgatt

SEQ ID NO: 524164 - DNA, 15 bp, Homo sapiens
acagaagactgatta

SEQ ID NO: 524165 - DNA, 15 bp, Homo sapiens
cagaagactgattaa

SEQ ID NO: 524166 - DNA, 15 bp, Homo sapiens
agaagactgattaac

SEQ ID NO: 524167 - DNA, 15 bp, Homo sapiens
gaagactgattaact

SEQ ID NO: 524168 - DNA, 15 bp, Homo sapiens
aagactgattaacta

SEQ ID NO: 524169 - DNA, 15 bp, Homo sapiens
agactgattaactat

SEQ ID NO: 524170 - DNA, 15 bp, Homo sapiens
gactgattaactata

SEQ ID NO: 524171 - DNA, 15 bp, Homo sapiens
actgattaactatac

SEQ ID NO: 524172 - DNA, 15 bp, Homo sapiens
ctgattaactatact

SEQ ID NO: 524173 - DNA, 15 bp, Homo sapiens
tgattaactatactt

SEQ ID NO: 524174 - DNA, 15 bp, Homo sapiens
gattaactatactta

SEQ ID NO: 524175 - DNA, 15 bp, Homo sapiens
attaactatacttat

SEQ ID NO: 524176 - DNA, 15 bp, Homo sapiens
ttaactatacttatt

SEQ ID NO: 524177 - DNA, 15 bp, Homo sapiens
taactatacttattt

SEQ ID NO: 524178 - DNA, 15 bp, Homo sapiens
aactatacttattta

SEQ ID NO: 524179 - DNA, 15 bp, Homo sapiens
actatacttatttat

SEQ ID NO: 524180 - DNA, 15 bp, Homo sapiens
ctatacttatttatt

SEQ ID NO: 524181 - DNA, 15 bp, Homo sapiens
tatacttatttatta

SEQ ID NO: 524182 - DNA, 15 bp, Homo sapiens
atacttatttattaa

SEQ ID NO: 524183 - DNA, 15 bp, Homo sapiens
tacttatttattaat

SEQ ID NO: 524184 - DNA, 15 bp, Homo sapiens
acttatttattaatt

SEQ ID NO: 524185 - DNA, 15 bp, Homo sapiens
cttatttattaattt

SEQ ID NO: 524186 - DNA, 15 bp, Homo sapiens
ttatttattaattta

SEQ ID NO: 524187 - DNA, 15 bp, Homo sapiens
tatttattaatttat

SEQ ID NO: 524188 - DNA, 15 bp, Homo sapiens
atttattaatttatc

SEQ ID NO: 524189 - DNA, 15 bp, Homo sapiens
tttattaatttatct

SEQ ID NO: 524190 - DNA, 15 bp, Homo sapiens
ttattaatttatctt

SEQ ID NO: 524191 - DNA, 15 bp, Homo sapiens
tattaatttatcttc

SEQ ID NO: 524192 - DNA, 15 bp, Homo sapiens
attaatttatcttct

SEQ ID NO: 524193 - DNA, 15 bp, Homo sapiens
ttaatttatcttctc

SEQ ID NO: 524194 - DNA, 15 bp, Homo sapiens
taatttatcttctca

SEQ ID NO: 524195 - DNA, 15 bp, Homo sapiens
aatttatcttctcat

SEQ ID NO: 524196 - DNA, 15 bp, Homo sapiens
atttatcttctcatt

SEQ ID NO: 524197 - DNA, 15 bp, Homo sapiens
tttatcttctcatta

SEQ ID NO: 524198 - DNA, 15 bp, Homo sapiens
ttatcttctcattaa

SEQ ID NO: 524199 - DNA, 15 bp, Homo sapiens
tatcttctcattaat

SEQ ID NO: 524200 - DNA, 15 bp, Homo sapiens
atcttctcattaata

SEQ ID NO: 524201 - DNA, 15 bp, Homo sapiens
tcttctcattaataa

SEQ ID NO: 524202 - DNA, 15 bp, Homo sapiens
cttctcattaataaa

SEQ ID NO: 524203 - DNA, 15 bp, Homo sapiens
ttctcattaataaac

SEQ ID NO: 524204 - DNA, 15 bp, Homo sapiens
tctcattaataaaca

SEQ ID NO: 524205 - DNA, 15 bp, Homo sapiens
ctcattaataaacac

SEQ ID NO: 524206 - DNA, 15 bp, Homo sapiens
tcattaataaacact

SEQ ID NO: 524207 - DNA, 15 bp, Homo sapiens
cattaataaacactt

SEQ ID NO: 524208 - DNA, 15 bp, Homo sapiens
attaataaacacttg

SEQ ID NO: 524209 - DNA, 15 bp, Homo sapiens
ttaataaacacttgc

SEQ ID NO: 524210 - DNA, 15 bp, Homo sapiens
taataaacacttgct

SEQ ID NO: 524211 - DNA, 15 bp, Homo sapiens
aataaacacttgctg

SEQ ID NO: 524212 - DNA, 15 bp, Homo sapiens
ataaacacttgctga

SEQ ID NO: 524213 - DNA, 15 bp, Homo sapiens
taaacacttgctgag

SEQ ID NO: 524214 - DNA, 15 bp, Homo sapiens
aaacacttgctgagt

SEQ ID NO: 524215 - DNA, 15 bp, Homo sapiens
aacacttgctgagtg

SEQ ID NO: 524216 - DNA, 15 bp, Homo sapiens
acacttgctgagtgc

SEQ ID NO: 524217 - DNA, 15 bp, Homo sapiens
cacttgctgagtgct

SEQ ID NO: 524218 - DNA, 15 bp, Homo sapiens
acttgctgagtgctt

SEQ ID NO: 524219 - DNA, 15 bp, Homo sapiens
cttgctgagtgctta

SEQ ID NO: 524220 - DNA, 15 bp, Homo sapiens
ttgctgagtgcttac

SEQ ID NO: 524221 - DNA, 15 bp, Homo sapiens
tgctgagtgcttact

SEQ ID NO: 524222 - DNA, 15 bp, Homo sapiens
gctgagtgcttactg

SEQ ID NO: 524223 - DNA, 15 bp, Homo sapiens
ctgagtgcttactgt

SEQ ID NO: 524224 - DNA, 15 bp, Homo sapiens
tgagtgcttactgtc

SEQ ID NO: 524225 - DNA, 15 bp, Homo sapiens
gagtgcttactgtct

SEQ ID NO: 524226 - DNA, 15 bp, Homo sapiens
agtgcttactgtctg

SEQ ID NO: 524227 - DNA, 15 bp, Homo sapiens
gtgcttactgtctgc

SEQ ID NO: 524228 - DNA, 15 bp, Homo sapiens
tgcttactgtctgct

SEQ ID NO: 524229 - DNA, 15 bp, Homo sapiens
gcttactgtctgcta

SEQ ID NO: 524230 - DNA, 15 bp, Homo sapiens
cttactgtctgctag

SEQ ID NO: 524231 - DNA, 15 bp, Homo sapiens
ttactgtctgctagg

SEQ ID NO: 524232 - DNA, 15 bp, Homo sapiens
tactgtctgctaggc

SEQ ID NO: 524233 - DNA, 15 bp, Homo sapiens
actgtctgctaggca

SEQ ID NO: 524234 - DNA, 15 bp, Homo sapiens
ctgtctgctaggcat

SEQ ID NO: 524235 - DNA, 15 bp, Homo sapiens
tgtctgctaggcatt

SEQ ID NO: 524236 - DNA, 15 bp, Homo sapiens
gtctgctaggcatta

SEQ ID NO: 524237 - DNA, 15 bp, Homo sapiens
tctgctaggcattag

SEQ ID NO: 524238 - DNA, 15 bp, Homo sapiens
ctgctaggcattagg

SEQ ID NO: 524239 - DNA, 15 bp, Homo sapiens
tgctaggcattaggg

SEQ ID NO: 524240 - DNA, 15 bp, Homo sapiens
gctaggcattaggga

SEQ ID NO: 524241 - DNA, 15 bp, Homo sapiens
ctaggcattagggag

SEQ ID NO: 524242 - DNA, 15 bp, Homo sapiens
taggcattagggaga

SEQ ID NO: 524243 - DNA, 15 bp, Homo sapiens
aggcattagggagac

SEQ ID NO: 524244 - DNA, 15 bp, Homo sapiens
ggcattagggagaca

SEQ ID NO: 524245 - DNA, 15 bp, Homo sapiens
gcattagggagacaa

SEQ ID NO: 524246 - DNA, 15 bp, Homo sapiens
cattagggagacaaa

SEQ ID NO: 524247 - DNA, 15 bp, Homo sapiens
attagggagacaaat

SEQ ID NO: 524248 - DNA, 15 bp, Homo sapiens
ttagggagacaaata

SEQ ID NO: 524249 - DNA, 15 bp, Homo sapiens
tagggagacaaatat

SEQ ID NO: 524250 - DNA, 15 bp, Homo sapiens
agggagacaaatatg

SEQ ID NO: 524251 - DNA, 15 bp, Homo sapiens
gggagacaaatatga

SEQ ID NO: 524252 - DNA, 15 bp, Homo sapiens
ggagacaaatatgat

SEQ ID NO: 524253 - DNA, 15 bp, Homo sapiens
gagacaaatatgatt

SEQ ID NO: 524254 - DNA, 15 bp, Homo sapiens
agacaaatatgatta

SEQ ID NO: 524255 - DNA, 15 bp, Homo sapiens
gacaaatatgattaa

SEQ ID NO: 524256 - DNA, 15 bp, Homo sapiens
acaaatatgattaag

SEQ ID NO: 524257 - DNA, 15 bp, Homo sapiens
caaatatgattaagg

SEQ ID NO: 524258 - DNA, 15 bp, Homo sapiens
aaatatgattaaggg

SEQ ID NO: 524259 - DNA, 15 bp, Homo sapiens
aatatgattaaggga

SEQ ID NO: 524260 - DNA, 15 bp, Homo sapiens
atatgattaagggaa

SEQ ID NO: 524261 - DNA, 15 bp, Homo sapiens
tatgattaagggaag

SEQ ID NO: 524262 - DNA, 15 bp, Homo sapiens
atgattaagggaagc

SEQ ID NO: 524263 - DNA, 15 bp, Homo sapiens
tgattaagggaagct

SEQ ID NO: 524264 - DNA, 15 bp, Homo sapiens
gattaagggaagctt

SEQ ID NO: 524265 - DNA, 15 bp, Homo sapiens
attaagggaagcttc

SEQ ID NO: 524266 - DNA, 15 bp, Homo sapiens
ttaagggaagcttcc

SEQ ID NO: 524267 - DNA, 15 bp, Homo sapiens
taagggaagcttcct

SEQ ID NO: 524268 - DNA, 15 bp, Homo sapiens
aagggaagcttcctc

SEQ ID NO: 524269 - DNA, 15 bp, Homo sapiens
agggaagcttcctcc

SEQ ID NO: 524270 - DNA, 15 bp, Homo sapiens
gggaagcttcctcct

SEQ ID NO: 524271 - DNA, 15 bp, Homo sapiens
ggaagcttcctccta

SEQ ID NO: 524272 - DNA, 15 bp, Homo sapiens
gaagcttcctcctat

SEQ ID NO: 524273 - DNA, 15 bp, Homo sapiens
aagcttcctcctatc

SEQ ID NO: 524274 - DNA, 15 bp, Homo sapiens
agcttcctcctatca

SEQ ID NO: 524275 - DNA, 15 bp, Homo sapiens
gcttcctcctatcaa

SEQ ID NO: 524276 - DNA, 15 bp, Homo sapiens
cttcctcctatcaag

SEQ ID NO: 524277 - DNA, 15 bp, Homo sapiens
ttcctcctatcaagg

SEQ ID NO: 524278 - DNA, 15 bp, Homo sapiens
tcctcctatcaaggt

SEQ ID NO: 524279 - DNA, 15 bp, Homo sapiens
cctcctatcaaggtc

SEQ ID NO: 524280 - DNA, 15 bp, Homo sapiens
ctcctatcaaggtca

SEQ ID NO: 524281 - DNA, 15 bp, Homo sapiens
tcctatcaaggtcat

SEQ ID NO: 524282 - DNA, 15 bp, Homo sapiens
cctatcaaggtcatg

SEQ ID NO: 524283 - DNA, 15 bp, Homo sapiens
ctatcaaggtcatgt

SEQ ID NO: 524284 - DNA, 15 bp, Homo sapiens
tatcaaggtcatgtg

SEQ ID NO: 524285 - DNA, 15 bp, Homo sapiens
atcaaggtcatgtgt

SEQ ID NO: 524286 - DNA, 15 bp, Homo sapiens
tcaaggtcatgtgtt

SEQ ID NO: 524287 - DNA, 15 bp, Homo sapiens
caaggtcatgtgttc

SEQ ID NO: 524288 - DNA, 15 bp, Homo sapiens
aaggtcatgtgttcc

SEQ ID NO: 524289 - DNA, 15 bp, Homo sapiens
aggtcatgtgttcca

SEQ ID NO: 524290 - DNA, 15 bp, Homo sapiens
ggtcatgtgttccat

SEQ ID NO: 524291 - DNA, 15 bp, Homo sapiens
gtcatgtgttccatt

SEQ ID NO: 524292 - DNA, 15 bp, Homo sapiens
tcatgtgttccattt

SEQ ID NO: 524293 - DNA, 15 bp, Homo sapiens
catgtgttccatttg

SEQ ID NO: 524294 - DNA, 15 bp, Homo sapiens
atgtgttccatttgg

SEQ ID NO: 524295 - DNA, 15 bp, Homo sapiens
tgtgttccatttggg

SEQ ID NO: 524296 - DNA, 15 bp, Homo sapiens
gtgttccatttgggt

SEQ ID NO: 524297 - DNA, 15 bp, Homo sapiens
tgttccatttgggta

SEQ ID NO: 524298 - DNA, 15 bp, Homo sapiens
gttccatttgggtat

SEQ ID NO: 524299 - DNA, 15 bp, Homo sapiens
ttccatttgggtata

SEQ ID NO: 524300 - DNA, 15 bp, Homo sapiens
tccatttgggtatac

SEQ ID NO: 524301 - DNA, 15 bp, Homo sapiens
ccatttgggtatact

SEQ ID NO: 524302 - DNA, 15 bp, Homo sapiens
catttgggtatacta

SEQ ID NO: 524303 - DNA, 15 bp, Homo sapiens
atttgggtatactaa

SEQ ID NO: 524304 - DNA, 15 bp, Homo sapiens
tttgggtatactaat

SEQ ID NO: 524305 - DNA, 15 bp, Homo sapiens
ttgggtatactaatg

SEQ ID NO: 524306 - DNA, 15 bp, Homo sapiens
tgggtatactaatgc

SEQ ID NO: 524307 - DNA, 15 bp, Homo sapiens
gggtatactaatgca

SEQ ID NO: 524308 - DNA, 15 bp, Homo sapiens
ggtatactaatgcat

SEQ ID NO: 524309 - DNA, 15 bp, Homo sapiens
gtatactaatgcatt

SEQ ID NO: 524310 - DNA, 15 bp, Homo sapiens
tatactaatgcatta

SEQ ID NO: 524311 - DNA, 15 bp, Homo sapiens
atactaatgcattag

SEQ ID NO: 524312 - DNA, 15 bp, Homo sapiens
tactaatgcattagc

SEQ ID NO: 524313 - DNA, 15 bp, Homo sapiens
actaatgcattagca

SEQ ID NO: 524314 - DNA, 15 bp, Homo sapiens
ctaatgcattagcaa

SEQ ID NO: 524315 - DNA, 15 bp, Homo sapiens
taatgcattagcaat

SEQ ID NO: 524316 - DNA, 15 bp, Homo sapiens
aatgcattagcaatg

SEQ ID NO: 524317 - DNA, 15 bp, Homo sapiens
atgcattagcaatgt

SEQ ID NO: 524318 - DNA, 15 bp, Homo sapiens
tgcattagcaatgta

SEQ ID NO: 524319 - DNA, 15 bp, Homo sapiens
gcattagcaatgtaa

SEQ ID NO: 524320 - DNA, 15 bp, Homo sapiens
cattagcaatgtaaa

SEQ ID NO: 524321 - DNA, 15 bp, Homo sapiens
attagcaatgtaaat

SEQ ID NO: 524322 - DNA, 15 bp, Homo sapiens
ttagcaatgtaaatc

SEQ ID NO: 524323 - DNA, 15 bp, Homo sapiens
tagcaatgtaaatca

SEQ ID NO: 524324 - DNA, 15 bp, Homo sapiens
agcaatgtaaatcaa

SEQ ID NO: 524325 - DNA, 15 bp, Homo sapiens
gcaatgtaaatcaag

SEQ ID NO: 524326 - DNA, 15 bp, Homo sapiens
caatgtaaatcaagt

SEQ ID NO: 524327 - DNA, 15 bp, Homo sapiens
aatgtaaatcaagta

SEQ ID NO: 524328 - DNA, 15 bp, Homo sapiens
atgtaaatcaagtag

SEQ ID NO: 524329 - DNA, 15 bp, Homo sapiens
tgtaaatcaagtagt

SEQ ID NO: 524330 - DNA, 15 bp, Homo sapiens
gtaaatcaagtagtg

SEQ ID NO: 524331 - DNA, 15 bp, Homo sapiens
taaatcaagtagtga

SEQ ID NO: 524332 - DNA, 15 bp, Homo sapiens
aaatcaagtagtgag

SEQ ID NO: 524333 - DNA, 15 bp, Homo sapiens
aatcaagtagtgaga

SEQ ID NO: 524334 - DNA, 15 bp, Homo sapiens
atcaagtagtgagag

SEQ ID NO: 524335 - DNA, 15 bp, Homo sapiens
tcaagtagtgagaga

SEQ ID NO: 524336 - DNA, 15 bp, Homo sapiens
caagtagtgagagat

SEQ ID NO: 524337 - DNA, 15 bp, Homo sapiens
aagtagtgagagatc

SEQ ID NO: 524338 - DNA, 15 bp, Homo sapiens
agtagtgagagatca

SEQ ID NO: 524339 - DNA, 15 bp, Homo sapiens
gtagtgagagatcat

SEQ ID NO: 524340 - DNA, 15 bp, Homo sapiens
tagtgagagatcatc

SEQ ID NO: 524341 - DNA, 15 bp, Homo sapiens
agtgagagatcatct

SEQ ID NO: 524342 - DNA, 15 bp, Homo sapiens
gtgagagatcatctg

SEQ ID NO: 524343 - DNA, 15 bp, Homo sapiens
tgagagatcatctgt

SEQ ID NO: 524344 - DNA, 15 bp, Homo sapiens
gagagatcatctgtt

SEQ ID NO: 524345 - DNA, 15 bp, Homo sapiens
agagatcatctgttc

SEQ ID NO: 524346 - DNA, 15 bp, Homo sapiens
gagatcatctgttcc

SEQ ID NO: 524347 - DNA, 15 bp, Homo sapiens
agatcatctgttccc

SEQ ID NO: 524348 - DNA, 15 bp, Homo sapiens
gatcatctgttcccg

SEQ ID NO: 524349 - DNA, 15 bp, Homo sapiens
atcatctgttcccga

SEQ ID NO: 524350 - DNA, 15 bp, Homo sapiens
tcatctgttcccgat

SEQ ID NO: 524351 - DNA, 15 bp, Homo sapiens
catctgttcccgata

SEQ ID NO: 524352 - DNA, 15 bp, Homo sapiens
atctgttcccgatag

SEQ ID NO: 524353 - DNA, 15 bp, Homo sapiens
tctgttcccgatagg

SEQ ID NO: 524354 - DNA, 15 bp, Homo sapiens
ctgttcccgatagga

SEQ ID NO: 524355 - DNA, 15 bp, Homo sapiens
tgttcccgataggag

SEQ ID NO: 524356 - DNA, 15 bp, Homo sapiens
gttcccgataggaga

SEQ ID NO: 524357 - DNA, 15 bp, Homo sapiens
ttcccgataggagat

SEQ ID NO: 524358 - DNA, 15 bp, Homo sapiens
tcccgataggagatg

SEQ ID NO: 524359 - DNA, 15 bp, Homo sapiens
cccgataggagatgg

SEQ ID NO: 524360 - DNA, 15 bp, Homo sapiens
ccgataggagatgga

SEQ ID NO: 524361 - DNA, 15 bp, Homo sapiens
cgataggagatggat

SEQ ID NO: 524362 - DNA, 15 bp, Homo sapiens
gataggagatggatt

SEQ ID NO: 524363 - DNA, 15 bp, Homo sapiens
ataggagatggatta

SEQ ID NO: 524364 - DNA, 15 bp, Homo sapiens
taggagatggattat

SEQ ID NO: 524365 - DNA, 15 bp, Homo sapiens
aggagatggattatt

SEQ ID NO: 524366 - DNA, 15 bp, Homo sapiens
ggagatggattattg

SEQ ID NO: 524367 - DNA, 15 bp, Homo sapiens
gagatggattattgg

SEQ ID NO: 524368 - DNA, 15 bp, Homo sapiens
agatggattattggt

SEQ ID NO: 524369 - DNA, 15 bp, Homo sapiens
gatggattattggtg

SEQ ID NO: 524370 - DNA, 15 bp, Homo sapiens
atggattattggtgg

SEQ ID NO: 524371 - DNA, 15 bp, Homo sapiens
tggattattggtggg

SEQ ID NO: 524372 - DNA, 15 bp, Homo sapiens
ggattattggtgggg

SEQ ID NO: 524373 - DNA, 15 bp, Homo sapiens
gattattggtgggga

SEQ ID NO: 524374 - DNA, 15 bp, Homo sapiens
attattggtggggac

SEQ ID NO: 524375 - DNA, 15 bp, Homo sapiens
ttattggtggggact

SEQ ID NO: 524376 - DNA, 15 bp, Homo sapiens
tattggtggggactt

SEQ ID NO: 524377 - DNA, 15 bp, Homo sapiens
attggtggggacttc

SEQ ID NO: 524378 - DNA, 15 bp, Homo sapiens
ttggtggggacttct

SEQ ID NO: 524379 - DNA, 15 bp, Homo sapiens
tggtggggacttctg

SEQ ID NO: 524380 - DNA, 15 bp, Homo sapiens
ggtggggacttctgt

SEQ ID NO: 524381 - DNA, 15 bp, Homo sapiens
gtggggacttctgtg

SEQ ID NO: 524382 - DNA, 15 bp, Homo sapiens
tggggacttctgtgt

SEQ ID NO: 524383 - DNA, 15 bp, Homo sapiens
ggggacttctgtgtg

SEQ ID NO: 524384 - DNA, 15 bp, Homo sapiens
gggacttctgtgtgt

SEQ ID NO: 524385 - DNA, 15 bp, Homo sapiens
ggacttctgtgtgtg

SEQ ID NO: 524386 - DNA, 15 bp, Homo sapiens
gacttctgtgtgtgt

SEQ ID NO: 524387 - DNA, 15 bp, Homo sapiens
acttctgtgtgtgtg

SEQ ID NO: 524388 - DNA, 15 bp, Homo sapiens
cttctgtgtgtgtgt

SEQ ID NO: 524389 - DNA, 15 bp, Homo sapiens
ttctgtgtgtgtgtg

SEQ ID NO: 524390 - DNA, 15 bp, Homo sapiens
tctgtgtgtgtgtgt

SEQ ID NO: 524391 - DNA, 15 bp, Homo sapiens
ctgtgtgtgtgtgtg

SEQ ID NO: 524392 - DNA, 15 bp, Homo sapiens
tgtgtgtgtgtgtgt

SEQ ID NO: 524393 - DNA, 15 bp, Homo sapiens
gtgtgtgtgtgtgtg

SEQ ID NO: 524394 - DNA, 15 bp, Homo sapiens
gtgtgtgtgtgtgta

SEQ ID NO: 524395 - DNA, 15 bp, Homo sapiens
tgtgtgtgtgtgtat

SEQ ID NO: 524396 - DNA, 15 bp, Homo sapiens
gtgtgtgtgtgtatg

SEQ ID NO: 524397 - DNA, 15 bp, Homo sapiens
tgtgtgtgtgtatgt

SEQ ID NO: 524398 - DNA, 15 bp, Homo sapiens
gtgtgtgtgtatgta

SEQ ID NO: 524399 - DNA, 15 bp, Homo sapiens
tgtgtgtgtatgtat

SEQ ID NO: 524400 - DNA, 15 bp, Homo sapiens
gtgtgtgtatgtatg

SEQ ID NO: 524401 - DNA, 15 bp, Homo sapiens
tgtgtgtatgtatgt

SEQ ID NO: 524402 - DNA, 15 bp, Homo sapiens
gtgtgtatgtatgtg

SEQ ID NO: 524403 - DNA, 15 bp, Homo sapiens
tgtgtatgtatgtga

SEQ ID NO: 524404 - DNA, 15 bp, Homo sapiens
gtgtatgtatgtgat

SEQ ID NO: 524405 - DNA, 15 bp, Homo sapiens
tgtatgtatgtgata

SEQ ID NO: 524406 - DNA, 15 bp, Homo sapiens
gtatgtatgtgataa

SEQ ID NO: 524407 - DNA, 15 bp, Homo sapiens
tatgtatgtgataaa

SEQ ID NO: 524408 - DNA, 15 bp, Homo sapiens
atgtatgtgataaaa

SEQ ID NO: 524409 - DNA, 15 bp, Homo sapiens
tgtatgtgataaaat

SEQ ID NO: 524410 - DNA, 15 bp, Homo sapiens
gtatgtgataaaata

SEQ ID NO: 524411 - DNA, 15 bp, Homo sapiens
tatgtgataaaataa

SEQ ID NO: 524412 - DNA, 15 bp, Homo sapiens
atgtgataaaataaa

SEQ ID NO: 524413 - DNA, 15 bp, Homo sapiens
tgtgataaaataaat

SEQ ID NO: 524414 - DNA, 15 bp, Homo sapiens
gtgataaaataaata

SEQ ID NO: 524415 - DNA, 15 bp, Homo sapiens
tgataaaataaatat

SEQ ID NO: 524416 - DNA, 15 bp, Homo sapiens
gataaaataaatata

SEQ ID NO: 524417 - DNA, 15 bp, Homo sapiens
ataaaataaatatag

SEQ ID NO: 524418 - DNA, 15 bp, Homo sapiens
taaaataaatatagg

SEQ ID NO: 524419 - DNA, 15 bp, Homo sapiens
aaaataaatatagga

SEQ ID NO: 524420 - DNA, 15 bp, Homo sapiens
aaataaatataggaa

SEQ ID NO: 524421 - DNA, 15 bp, Homo sapiens
aataaatataggaaa

SEQ ID NO: 524422 - DNA, 15 bp, Homo sapiens
ataaatataggaaat

SEQ ID NO: 524423 - DNA, 15 bp, Homo sapiens
taaatataggaaatg

SEQ ID NO: 524424 - DNA, 15 bp, Homo sapiens
aaatataggaaatgt

SEQ ID NO: 524425 - DNA, 15 bp, Homo sapiens
aatataggaaatgtt

SEQ ID NO: 524426 - DNA, 15 bp, Homo sapiens
atataggaaatgtta

SEQ ID NO: 524427 - DNA, 15 bp, Homo sapiens
tataggaaatgttaa

SEQ ID NO: 524428 - DNA, 15 bp, Homo sapiens
ataggaaatgttaat

SEQ ID NO: 524429 - DNA, 15 bp, Homo sapiens
taggaaatgttaatt

SEQ ID NO: 524430 - DNA, 15 bp, Homo sapiens
aggaaatgttaatta

SEQ ID NO: 524431 - DNA, 15 bp, Homo sapiens
ggaaatgttaattat

SEQ ID NO: 524432 - DNA, 15 bp, Homo sapiens
gaaatgttaattata

SEQ ID NO: 524433 - DNA, 15 bp, Homo sapiens
aaatgttaattatag

SEQ ID NO: 524434 - DNA, 15 bp, Homo sapiens
aatgttaattataga

SEQ ID NO: 524435 - DNA, 15 bp, Homo sapiens
atgttaattatagat

SEQ ID NO: 524436 - DNA, 15 bp, Homo sapiens
tgttaattatagatt

SEQ ID NO: 524437 - DNA, 15 bp, Homo sapiens
gttaattatagattc

SEQ ID NO: 524438 - DNA, 15 bp, Homo sapiens
ttaattatagattct

SEQ ID NO: 524439 - DNA, 15 bp, Homo sapiens
taattatagattcta

SEQ ID NO: 524440 - DNA, 15 bp, Homo sapiens
aattatagattctaa

SEQ ID NO: 524441 - DNA, 15 bp, Homo sapiens
attatagattctaag

SEQ ID NO: 524442 - DNA, 15 bp, Homo sapiens
ttatagattctaagt

SEQ ID NO: 524443 - DNA, 15 bp, Homo sapiens
tatagattctaagta

SEQ ID NO: 524444 - DNA, 15 bp, Homo sapiens
atagattctaagtag

SEQ ID NO: 524445 - DNA, 15 bp, Homo sapiens
tagattctaagtagt

SEQ ID NO: 524446 - DNA, 15 bp, Homo sapiens
agattctaagtagta

SEQ ID NO: 524447 - DNA, 15 bp, Homo sapiens
gattctaagtagtag

SEQ ID NO: 524448 - DNA, 15 bp, Homo sapiens
attctaagtagtaga

SEQ ID NO: 524449 - DNA, 15 bp, Homo sapiens
ttctaagtagtagat

SEQ ID NO: 524450 - DNA, 15 bp, Homo sapiens
tctaagtagtagata

SEQ ID NO: 524451 - DNA, 15 bp, Homo sapiens
ctaagtagtagatat

SEQ ID NO: 524452 - DNA, 15 bp, Homo sapiens
taagtagtagatata

SEQ ID NO: 524453 - DNA, 15 bp, Homo sapiens
aagtagtagatatat

SEQ ID NO: 524454 - DNA, 15 bp, Homo sapiens
agtagtagatatata

SEQ ID NO: 524455 - DNA, 15 bp, Homo sapiens
gtagtagatatataa

SEQ ID NO: 524456 - DNA, 15 bp, Homo sapiens
tagtagatatataaa

SEQ ID NO: 524457 - DNA, 15 bp, Homo sapiens
agtagatatataaac

SEQ ID NO: 524458 - DNA, 15 bp, Homo sapiens
gtagatatataaaca

SEQ ID NO: 524459 - DNA, 15 bp, Homo sapiens
tagatatataaacac

SEQ ID NO: 524460 - DNA, 15 bp, Homo sapiens
agatatataaacact

SEQ ID NO: 524461 - DNA, 15 bp, Homo sapiens
gatatataaacactc

SEQ ID NO: 524462 - DNA, 15 bp, Homo sapiens
atatataaacactca

SEQ ID NO: 524463 - DNA, 15 bp, Homo sapiens
tatataaacactcat

SEQ ID NO: 524464 - DNA, 15 bp, Homo sapiens
atataaacactcatt

SEQ ID NO: 524465 - DNA, 15 bp, Homo sapiens
tataaacactcattg

SEQ ID NO: 524466 - DNA, 15 bp, Homo sapiens
ataaacactcattgc

SEQ ID NO: 524467 - DNA, 15 bp, Homo sapiens
taaacactcattgca

SEQ ID NO: 524468 - DNA, 15 bp, Homo sapiens
aaacactcattgcaa

SEQ ID NO: 524469 - DNA, 15 bp, Homo sapiens
aacactcattgcaaa

SEQ ID NO: 524470 - DNA, 15 bp, Homo sapiens
acactcattgcaaag

SEQ ID NO: 524471 - DNA, 15 bp, Homo sapiens
cactcattgcaaagt

SEQ ID NO: 524472 - DNA, 15 bp, Homo sapiens
actcattgcaaagtt

SEQ ID NO: 524473 - DNA, 15 bp, Homo sapiens
ctcattgcaaagttg

SEQ ID NO: 524474 - DNA, 15 bp, Homo sapiens
tcattgcaaagttgc

SEQ ID NO: 524475 - DNA, 15 bp, Homo sapiens
cattgcaaagttgct

SEQ ID NO: 524476 - DNA, 15 bp, Homo sapiens
attgcaaagttgctt

SEQ ID NO: 524477 - DNA, 15 bp, Homo sapiens
ttgcaaagttgcttc

SEQ ID NO: 524478 - DNA, 15 bp, Homo sapiens
tgcaaagttgcttca

SEQ ID NO: 524479 - DNA, 15 bp, Homo sapiens
gcaaagttgcttcaa

SEQ ID NO: 524480 - DNA, 15 bp, Homo sapiens
caaagttgcttcaag

SEQ ID NO: 524481 - DNA, 15 bp, Homo sapiens
aaagttgcttcaagt

SEQ ID NO: 524482 - DNA, 15 bp, Homo sapiens
aagttgcttcaagtt

SEQ ID NO: 524483 - DNA, 15 bp, Homo sapiens
agttgcttcaagttt

SEQ ID NO: 524484 - DNA, 15 bp, Homo sapiens
gttgcttcaagtttt

SEQ ID NO: 524485 - DNA, 15 bp, Homo sapiens
ttgcttcaagttttc

SEQ ID NO: 524486 - DNA, 15 bp, Homo sapiens
tgcttcaagttttct

SEQ ID NO: 524487 - DNA, 15 bp, Homo sapiens
gcttcaagttttctg

SEQ ID NO: 524488 - DNA, 15 bp, Homo sapiens
cttcaagttttctgt

SEQ ID NO: 524489 - DNA, 15 bp, Homo sapiens
ttcaagttttctgta

SEQ ID NO: 524490 - DNA, 15 bp, Homo sapiens
tcaagttttctgtat

SEQ ID NO: 524491 - DNA, 15 bp, Homo sapiens
caagttttctgtata

SEQ ID NO: 524492 - DNA, 15 bp, Homo sapiens
aagttttctgtatat

SEQ ID NO: 524493 - DNA, 15 bp, Homo sapiens
agttttctgtatatt

SEQ ID NO: 524494 - DNA, 15 bp, Homo sapiens
gttttctgtatattt

SEQ ID NO: 524495 - DNA, 15 bp, Homo sapiens
ttttctgtatatttg

SEQ ID NO: 524496 - DNA, 15 bp, Homo sapiens
tttctgtatatttga

SEQ ID NO: 524497 - DNA, 15 bp, Homo sapiens
ttctgtatatttgaa

SEQ ID NO: 524498 - DNA, 15 bp, Homo sapiens
tctgtatatttgaaa

SEQ ID NO: 524499 - DNA, 15 bp, Homo sapiens
ctgtatatttgaaaa

SEQ ID NO: 524500 - DNA, 15 bp, Homo sapiens
tgtatatttgaaaat

SEQ ID NO: 524501 - DNA, 15 bp, Homo sapiens
gtatatttgaaaata

SEQ ID NO: 524502 - DNA, 15 bp, Homo sapiens
tatatttgaaaatat

SEQ ID NO: 524503 - DNA, 15 bp, Homo sapiens
atatttgaaaatatt

SEQ ID NO: 524504 - DNA, 15 bp, Homo sapiens
tatttgaaaatattc

SEQ ID NO: 524505 - DNA, 15 bp, Homo sapiens
atttgaaaatattca

SEQ ID NO: 524506 - DNA, 15 bp, Homo sapiens
tttgaaaatattcac

SEQ ID NO: 524507 - DNA, 15 bp, Homo sapiens
ttgaaaatattcaca

SEQ ID NO: 524508 - DNA, 15 bp, Homo sapiens
tgaaaatattcacaa

SEQ ID NO: 524509 - DNA, 15 bp, Homo sapiens
gaaaatattcacaac

SEQ ID NO: 524510 - DNA, 15 bp, Homo sapiens
aaaatattcacaaca

SEQ ID NO: 524511 - DNA, 15 bp, Homo sapiens
aaatattcacaacat

SEQ ID NO: 524512 - DNA, 15 bp, Homo sapiens
aatattcacaacatg

SEQ ID NO: 524513 - DNA, 15 bp, Homo sapiens
atattcacaacatgt

SEQ ID NO: 524514 - DNA, 15 bp, Homo sapiens
tattcacaacatgtc

SEQ ID NO: 524515 - DNA, 15 bp, Homo sapiens
attcacaacatgtcg

SEQ ID NO: 524516 - DNA, 15 bp, Homo sapiens
ttcacaacatgtcga

SEQ ID NO: 524517 - DNA, 15 bp, Homo sapiens
tcacaacatgtcgac

SEQ ID NO: 524518 - DNA, 15 bp, Homo sapiens
cacaacatgtcgaca

SEQ ID NO: 524519 - DNA, 15 bp, Homo sapiens
acaacatgtcgacaa

SEQ ID NO: 524520 - DNA, 15 bp, Homo sapiens
caacatgtcgacaaa

SEQ ID NO: 524521 - DNA, 15 bp, Homo sapiens
aacatgtcgacaaaa

SEQ ID NO: 524522 - DNA, 15 bp, Homo sapiens
acatgtcgacaaaac

SEQ ID NO: 524523 - DNA, 15 bp, Homo sapiens
catgtcgacaaaact

SEQ ID NO: 524524 - DNA, 15 bp, Homo sapiens
atgtcgacaaaacta

SEQ ID NO: 524525 - DNA, 15 bp, Homo sapiens
tgtcgacaaaactag

SEQ ID NO: 524526 - DNA, 15 bp, Homo sapiens
gtcgacaaaactagc

SEQ ID NO: 524527 - DNA, 15 bp, Homo sapiens
tcgacaaaactagca

SEQ ID NO: 524528 - DNA, 15 bp, Homo sapiens
cgacaaaactagcat

SEQ ID NO: 524529 - DNA, 15 bp, Homo sapiens
gacaaaactagcatg

SEQ ID NO: 524530 - DNA, 15 bp, Homo sapiens
acaaaactagcatga

SEQ ID NO: 524531 - DNA, 15 bp, Homo sapiens
caaaactagcatgat

SEQ ID NO: 524532 - DNA, 15 bp, Homo sapiens
aaaactagcatgata

SEQ ID NO: 524533 - DNA, 15 bp, Homo sapiens
aaactagcatgataa

SEQ ID NO: 524534 - DNA, 15 bp, Homo sapiens
aactagcatgataaa

SEQ ID NO: 524535 - DNA, 15 bp, Homo sapiens
actagcatgataaag

SEQ ID NO: 524536 - DNA, 15 bp, Homo sapiens
ctagcatgataaagc

SEQ ID NO: 524537 - DNA, 15 bp, Homo sapiens
tagcatgataaagcc

SEQ ID NO: 524538 - DNA, 15 bp, Homo sapiens
agcatgataaagcca

SEQ ID NO: 524539 - DNA, 15 bp, Homo sapiens
gcatgataaagccac

SEQ ID NO: 524540 - DNA, 15 bp, Homo sapiens
catgataaagccact

SEQ ID NO: 524541 - DNA, 15 bp, Homo sapiens
atgataaagccacta

SEQ ID NO: 524542 - DNA, 15 bp, Homo sapiens
tgataaagccactat

SEQ ID NO: 524543 - DNA, 15 bp, Homo sapiens
gataaagccactatt

SEQ ID NO: 524544 - DNA, 15 bp, Homo sapiens
ataaagccactattt

SEQ ID NO: 524545 - DNA, 15 bp, Homo sapiens
taaagccactatttg

SEQ ID NO: 524546 - DNA, 15 bp, Homo sapiens
aaagccactatttgt

SEQ ID NO: 524547 - DNA, 15 bp, Homo sapiens
aagccactatttgtg

SEQ ID NO: 524548 - DNA, 15 bp, Homo sapiens
agccactatttgtgc

SEQ ID NO: 524549 - DNA, 15 bp, Homo sapiens
gccactatttgtgct

SEQ ID NO: 524550 - DNA, 15 bp, Homo sapiens
ccactatttgtgcta

SEQ ID NO: 524551 - DNA, 15 bp, Homo sapiens
cactatttgtgctaa

SEQ ID NO: 524552 - DNA, 15 bp, Homo sapiens
actatttgtgctaag

SEQ ID NO: 524553 - DNA, 15 bp, Homo sapiens
ctatttgtgctaaga

SEQ ID NO: 524554 - DNA, 15 bp, Homo sapiens
tatttgtgctaagac

SEQ ID NO: 524555 - DNA, 15 bp, Homo sapiens
atttgtgctaagact

SEQ ID NO: 524556 - DNA, 15 bp, Homo sapiens
tttgtgctaagactt

SEQ ID NO: 524557 - DNA, 15 bp, Homo sapiens
ttgtgctaagacttc

SEQ ID NO: 524558 - DNA, 15 bp, Homo sapiens
tgtgctaagacttca

SEQ ID NO: 524559 - DNA, 15 bp, Homo sapiens
gtgctaagacttcag

SEQ ID NO: 524560 - DNA, 15 bp, Homo sapiens
tgctaagacttcagc

SEQ ID NO: 524561 - DNA, 15 bp, Homo sapiens
gctaagacttcagct

SEQ ID NO: 524562 - DNA, 15 bp, Homo sapiens
ctaagacttcagctt

SEQ ID NO: 524563 - DNA, 15 bp, Homo sapiens
taagacttcagcttg

SEQ ID NO: 524564 - DNA, 15 bp, Homo sapiens
aagacttcagcttgt

SEQ ID NO: 524565 - DNA, 15 bp, Homo sapiens
agacttcagcttgta

SEQ ID NO: 524566 - DNA, 15 bp, Homo sapiens
gacttcagcttgtat

SEQ ID NO: 524567 - DNA, 15 bp, Homo sapiens
acttcagcttgtatc

SEQ ID NO: 524568 - DNA, 15 bp, Homo sapiens
cttcagcttgtatct

SEQ ID NO: 524569 - DNA, 15 bp, Homo sapiens
ttcagcttgtatctg

SEQ ID NO: 524570 - DNA, 15 bp, Homo sapiens
tcagcttgtatctgg

SEQ ID NO: 524571 - DNA, 15 bp, Homo sapiens
cagcttgtatctgga

SEQ ID NO: 524572 - DNA, 15 bp, Homo sapiens
agcttgtatctggat

SEQ ID NO: 524573 - DNA, 15 bp, Homo sapiens
gcttgtatctggatt

SEQ ID NO: 524574 - DNA, 15 bp, Homo sapiens
cttgtatctggatta

SEQ ID NO: 524575 - DNA, 15 bp, Homo sapiens
ttgtatctggattag

SEQ ID NO: 524576 - DNA, 15 bp, Homo sapiens
tgtatctggattagg

SEQ ID NO: 524577 - DNA, 15 bp, Homo sapiens
gtatctggattaggc

SEQ ID NO: 524578 - DNA, 15 bp, Homo sapiens
tatctggattaggct

SEQ ID NO: 524579 - DNA, 15 bp, Homo sapiens
atctggattaggctt

SEQ ID NO: 524580 - DNA, 15 bp, Homo sapiens
tctggattaggctta

SEQ ID NO: 524581 - DNA, 15 bp, Homo sapiens
ctggattaggcttat

SEQ ID NO: 524582 - DNA, 15 bp, Homo sapiens
tggattaggcttatt

SEQ ID NO: 524583 - DNA, 15 bp, Homo sapiens
ggattaggcttatta

SEQ ID NO: 524584 - DNA, 15 bp, Homo sapiens
gattaggcttattat

SEQ ID NO: 524585 - DNA, 15 bp, Homo sapiens
attaggcttattatg

SEQ ID NO: 524586 - DNA, 15 bp, Homo sapiens
ttaggcttattatgt

SEQ ID NO: 524587 - DNA, 15 bp, Homo sapiens
taggcttattatgta

SEQ ID NO: 524588 - DNA, 15 bp, Homo sapiens
aggcttattatgtag

SEQ ID NO: 524589 - DNA, 15 bp, Homo sapiens
ggcttattatgtagt

SEQ ID NO: 524590 - DNA, 15 bp, Homo sapiens
gcttattatgtagta

SEQ ID NO: 524591 - DNA, 15 bp, Homo sapiens
cttattatgtagtag

SEQ ID NO: 524592 - DNA, 15 bp, Homo sapiens
ttattatgtagtagt

SEQ ID NO: 524593 - DNA, 15 bp, Homo sapiens
tattatgtagtagta

SEQ ID NO: 524594 - DNA, 15 bp, Homo sapiens
attatgtagtagtag

SEQ ID NO: 524595 - DNA, 15 bp, Homo sapiens
ttatgtagtagtagg

SEQ ID NO: 524596 - DNA, 15 bp, Homo sapiens
tatgtagtagtagga

SEQ ID NO: 524597 - DNA, 15 bp, Homo sapiens
atgtagtagtaggaa

SEQ ID NO: 524598 - DNA, 15 bp, Homo sapiens
tgtagtagtaggaac

SEQ ID NO: 524599 - DNA, 15 bp, Homo sapiens
gtagtagtaggaaca

SEQ ID NO: 524600 - DNA, 15 bp, Homo sapiens
tagtagtaggaacat

SEQ ID NO: 524601 - DNA, 15 bp, Homo sapiens
agtagtaggaacatt

SEQ ID NO: 524602 - DNA, 15 bp, Homo sapiens
gtagtaggaacatta

SEQ ID NO: 524603 - DNA, 15 bp, Homo sapiens
tagtaggaacattag

SEQ ID NO: 524604 - DNA, 15 bp, Homo sapiens
agtaggaacattaga

SEQ ID NO: 524605 - DNA, 15 bp, Homo sapiens
gtaggaacattagaa

SEQ ID NO: 524606 - DNA, 15 bp, Homo sapiens
taggaacattagaaa

SEQ ID NO: 524607 - DNA, 15 bp, Homo sapiens
aggaacattagaaat

SEQ ID NO: 524608 - DNA, 15 bp, Homo sapiens
ggaacattagaaata

SEQ ID NO: 524609 - DNA, 15 bp, Homo sapiens
gaacattagaaatag

SEQ ID NO: 524610 - DNA, 15 bp, Homo sapiens
aacattagaaatagt

SEQ ID NO: 524611 - DNA, 15 bp, Homo sapiens
acattagaaatagtt

SEQ ID NO: 524612 - DNA, 15 bp, Homo sapiens
cattagaaatagttt

SEQ ID NO: 524613 - DNA, 15 bp, Homo sapiens
attagaaatagtttt

SEQ ID NO: 524614 - DNA, 15 bp, Homo sapiens
ttagaaatagtttta

SEQ ID NO: 524615 - DNA, 15 bp, Homo sapiens
tagaaatagttttaa

SEQ ID NO: 524616 - DNA, 15 bp, Homo sapiens
agaaatagttttaac

SEQ ID NO: 524617 - DNA, 15 bp, Homo sapiens
gaaatagttttaact

SEQ ID NO: 524618 - DNA, 15 bp, Homo sapiens
aaatagttttaactc

SEQ ID NO: 524619 - DNA, 15 bp, Homo sapiens
aatagttttaactca

SEQ ID NO: 524620 - DNA, 15 bp, Homo sapiens
atagttttaactcat

SEQ ID NO: 524621 - DNA, 15 bp, Homo sapiens
tagttttaactcatt

SEQ ID NO: 524622 - DNA, 15 bp, Homo sapiens
agttttaactcatta

SEQ ID NO: 524623 - DNA, 15 bp, Homo sapiens
gttttaactcattaa

SEQ ID NO: 524624 - DNA, 15 bp, Homo sapiens
ttttaactcattaaa

SEQ ID NO: 524625 - DNA, 15 bp, Homo sapiens
tttaactcattaaat

SEQ ID NO: 524626 - DNA, 15 bp, Homo sapiens
ttaactcattaaata

SEQ ID NO: 524627 - DNA, 15 bp, Homo sapiens
taactcattaaatac

SEQ ID NO: 524628 - DNA, 15 bp, Homo sapiens
aactcattaaataca

SEQ ID NO: 524629 - DNA, 15 bp, Homo sapiens
actcattaaatacac

SEQ ID NO: 524630 - DNA, 15 bp, Homo sapiens
ctcattaaatacaca

SEQ ID NO: 524631 - DNA, 15 bp, Homo sapiens
tcattaaatacacat

SEQ ID NO: 524632 - DNA, 15 bp, Homo sapiens
cattaaatacacatg

SEQ ID NO: 524633 - DNA, 15 bp, Homo sapiens
attaaatacacatgt

SEQ ID NO: 524634 - DNA, 15 bp, Homo sapiens
ttaaatacacatgtt

SEQ ID NO: 524635 - DNA, 15 bp, Homo sapiens
taaatacacatgttt

SEQ ID NO: 524636 - DNA, 15 bp, Homo sapiens
aaatacacatgtttt

SEQ ID NO: 524637 - DNA, 15 bp, Homo sapiens
aatacacatgtttta

SEQ ID NO: 524638 - DNA, 15 bp, Homo sapiens
atacacatgttttat

SEQ ID NO: 524639 - DNA, 15 bp, Homo sapiens
tacacatgttttatg

SEQ ID NO: 524640 - DNA, 15 bp, Homo sapiens
acacatgttttatgg

SEQ ID NO: 524641 - DNA, 15 bp, Homo sapiens
cacatgttttatggg

SEQ ID NO: 524642 - DNA, 15 bp, Homo sapiens
acatgttttatggga

SEQ ID NO: 524643 - DNA, 15 bp, Homo sapiens
catgttttatgggaa

SEQ ID NO: 524644 - DNA, 15 bp, Homo sapiens
atgttttatgggaag

SEQ ID NO: 524645 - DNA, 15 bp, Homo sapiens
tgttttatgggaagg

SEQ ID NO: 524646 - DNA, 15 bp, Homo sapiens
gttttatgggaaggt

SEQ ID NO: 524647 - DNA, 15 bp, Homo sapiens
ttttatgggaaggtt

SEQ ID NO: 524648 - DNA, 15 bp, Homo sapiens
tttatgggaaggttt

SEQ ID NO: 524649 - DNA, 15 bp, Homo sapiens
ttatgggaaggtttt

SEQ ID NO: 524650 - DNA, 15 bp, Homo sapiens
tatgggaaggtttta

SEQ ID NO: 524651 - DNA, 15 bp, Homo sapiens
atgggaaggttttat

SEQ ID NO: 524652 - DNA, 15 bp, Homo sapiens
tgggaaggttttata

SEQ ID NO: 524653 - DNA, 15 bp, Homo sapiens
gggaaggttttatat

SEQ ID NO: 524654 - DNA, 15 bp, Homo sapiens
ggaaggttttatata

SEQ ID NO: 524655 - DNA, 15 bp, Homo sapiens
gaaggttttatatat

SEQ ID NO: 524656 - DNA, 15 bp, Homo sapiens
aaggttttatatata

SEQ ID NO: 524657 - DNA, 15 bp, Homo sapiens
aggttttatatatat

SEQ ID NO: 524658 - DNA, 15 bp, Homo sapiens
ggttttatatatata

SEQ ID NO: 524659 - DNA, 15 bp, Homo sapiens
gttttatatatatat

SEQ ID NO: 524660 - DNA, 15 bp, Homo sapiens
ttttatatatatatt

SEQ ID NO: 524661 - DNA, 15 bp, Homo sapiens
tttatatatatattt

SEQ ID NO: 524662 - DNA, 15 bp, Homo sapiens
ttatatatatattta

SEQ ID NO: 524663 - DNA, 15 bp, Homo sapiens
tatatatatatttat

SEQ ID NO: 524664 - DNA, 15 bp, Homo sapiens
atatatatatttata

SEQ ID NO: 524665 - DNA, 15 bp, Homo sapiens
tatatatatttatat

SEQ ID NO: 524666 - DNA, 15 bp, Homo sapiens
atatatatttatatg

SEQ ID NO: 524667 - DNA, 15 bp, Homo sapiens
tatatatttatatgt

SEQ ID NO: 524668 - DNA, 15 bp, Homo sapiens
atatatttatatgta

SEQ ID NO: 524669 - DNA, 15 bp, Homo sapiens
tatatttatatgtaa

SEQ ID NO: 524670 - DNA, 15 bp, Homo sapiens
atatttatatgtaat

SEQ ID NO: 524671 - DNA, 15 bp, Homo sapiens
tatttatatgtaatg

SEQ ID NO: 524672 - DNA, 15 bp, Homo sapiens
atttatatgtaatga

SEQ ID NO: 524673 - DNA, 15 bp, Homo sapiens
tttatatgtaatgaa

SEQ ID NO: 524674 - DNA, 15 bp, Homo sapiens
ttatatgtaatgaat

SEQ ID NO: 524675 - DNA, 15 bp, Homo sapiens
tatatgtaatgaatg

SEQ ID NO: 524676 - DNA, 15 bp, Homo sapiens
atatgtaatgaatgt

SEQ ID NO: 524677 - DNA, 15 bp, Homo sapiens
tatgtaatgaatgtg

SEQ ID NO: 524678 - DNA, 15 bp, Homo sapiens
atgtaatgaatgtga

SEQ ID NO: 524679 - DNA, 15 bp, Homo sapiens
tgtaatgaatgtgaa

SEQ ID NO: 524680 - DNA, 15 bp, Homo sapiens
gtaatgaatgtgaac

SEQ ID NO: 524681 - DNA, 15 bp, Homo sapiens
taatgaatgtgaaca

SEQ ID NO: 524682 - DNA, 15 bp, Homo sapiens
aatgaatgtgaacaa

SEQ ID NO: 524683 - DNA, 15 bp, Homo sapiens
atgaatgtgaacaaa

SEQ ID NO: 524684 - DNA, 15 bp, Homo sapiens
tgaatgtgaacaaac

SEQ ID NO: 524685 - DNA, 15 bp, Homo sapiens
gaatgtgaacaaaca

SEQ ID NO: 524686 - DNA, 15 bp, Homo sapiens
aatgtgaacaaacaa

SEQ ID NO: 524687 - DNA, 15 bp, Homo sapiens
atgtgaacaaacaag

SEQ ID NO: 524688 - DNA, 15 bp, Homo sapiens
tgtgaacaaacaagg

SEQ ID NO: 524689 - DNA, 15 bp, Homo sapiens
gtgaacaaacaaggg

SEQ ID NO: 524690 - DNA, 15 bp, Homo sapiens
tgaacaaacaagggt

SEQ ID NO: 524691 - DNA, 15 bp, Homo sapiens
gaacaaacaagggtc

SEQ ID NO: 524692 - DNA, 15 bp, Homo sapiens
aacaaacaagggtca

SEQ ID NO: 524693 - DNA, 15 bp, Homo sapiens
acaaacaagggtcag

SEQ ID NO: 524694 - DNA, 15 bp, Homo sapiens
caaacaagggtcaga

SEQ ID NO: 524695 - DNA, 15 bp, Homo sapiens
aaacaagggtcagat

SEQ ID NO: 524696 - DNA, 15 bp, Homo sapiens
aacaagggtcagata

SEQ ID NO: 524697 - DNA, 15 bp, Homo sapiens
acaagggtcagatat

SEQ ID NO: 524698 - DNA, 15 bp, Homo sapiens
caagggtcagatata

SEQ ID NO: 524699 - DNA, 15 bp, Homo sapiens
aagggtcagatatac

SEQ ID NO: 524700 - DNA, 15 bp, Homo sapiens
agggtcagatataca

SEQ ID NO: 524701 - DNA, 15 bp, Homo sapiens
gggtcagatatacac

SEQ ID NO: 524702 - DNA, 15 bp, Homo sapiens
ggtcagatatacact

SEQ ID NO: 524703 - DNA, 15 bp, Homo sapiens
gtcagatatacactc

SEQ ID NO: 524704 - DNA, 15 bp, Homo sapiens
tcagatatacactct

SEQ ID NO: 524705 - DNA, 15 bp, Homo sapiens
cagatatacactctg

SEQ ID NO: 524706 - DNA, 15 bp, Homo sapiens
agatatacactctgc

SEQ ID NO: 524707 - DNA, 15 bp, Homo sapiens
gatatacactctgct

SEQ ID NO: 524708 - DNA, 15 bp, Homo sapiens
atatacactctgctt

SEQ ID NO: 524709 - DNA, 15 bp, Homo sapiens
tatacactctgcttc

SEQ ID NO: 524710 - DNA, 15 bp, Homo sapiens
atacactctgcttcc

SEQ ID NO: 524711 - DNA, 15 bp, Homo sapiens
tacactctgcttccc

SEQ ID NO: 524712 - DNA, 15 bp, Homo sapiens
acactctgcttccct

SEQ ID NO: 524713 - DNA, 15 bp, Homo sapiens
cactctgcttccctc

SEQ ID NO: 524714 - DNA, 15 bp, Homo sapiens
actctgcttccctcc

SEQ ID NO: 524715 - DNA, 15 bp, Homo sapiens
ctctgcttccctcca

SEQ ID NO: 524716 - DNA, 15 bp, Homo sapiens
tctgcttccctccag

SEQ ID NO: 524717 - DNA, 15 bp, Homo sapiens
ctgcttccctccaga

SEQ ID NO: 524718 - DNA, 15 bp, Homo sapiens
tgcttccctccagac

SEQ ID NO: 524719 - DNA, 15 bp, Homo sapiens
gcttccctccagacc

SEQ ID NO: 524720 - DNA, 15 bp, Homo sapiens
cttccctccagacca

SEQ ID NO: 524721 - DNA, 15 bp, Homo sapiens
ttccctccagaccag

SEQ ID NO: 524722 - DNA, 15 bp, Homo sapiens
tccctccagaccagt

SEQ ID NO: 524723 - DNA, 15 bp, Homo sapiens
ccctccagaccagtt

SEQ ID NO: 524724 - DNA, 15 bp, Homo sapiens
cctccagaccagttc

SEQ ID NO: 524725 - DNA, 15 bp, Homo sapiens
ctccagaccagttcc

SEQ ID NO: 524726 - DNA, 15 bp, Homo sapiens
tccagaccagttccg

SEQ ID NO: 524727 - DNA, 15 bp, Homo sapiens
ccagaccagttccgg

SEQ ID NO: 524728 - DNA, 15 bp, Homo sapiens
cagaccagttccggc

SEQ ID NO: 524729 - DNA, 15 bp, Homo sapiens
agaccagttccggct

SEQ ID NO: 524730 - DNA, 15 bp, Homo sapiens
gaccagttccggctg

SEQ ID NO: 524731 - DNA, 15 bp, Homo sapiens
accagttccggctgc

SEQ ID NO: 524732 - DNA, 15 bp, Homo sapiens
ccagttccggctgct

SEQ ID NO: 524733 - DNA, 15 bp, Homo sapiens
cagttccggctgctc

SEQ ID NO: 524734 - DNA, 15 bp, Homo sapiens
agttccggctgctct

SEQ ID NO: 524735 - DNA, 15 bp, Homo sapiens
gttccggctgctctg

SEQ ID NO: 524736 - DNA, 15 bp, Homo sapiens
ttccggctgctctgc

SEQ ID NO: 524737 - DNA, 15 bp, Homo sapiens
tccggctgctctgct

SEQ ID NO: 524738 - DNA, 15 bp, Homo sapiens
ccggctgctctgctg

SEQ ID NO: 524739 - DNA, 15 bp, Homo sapiens
cggctgctctgctgc

SEQ ID NO: 524740 - DNA, 15 bp, Homo sapiens
ggctgctctgctgca

SEQ ID NO: 524741 - DNA, 15 bp, Homo sapiens
gctgctctgctgcac

SEQ ID NO: 524742 - DNA, 15 bp, Homo sapiens
ctgctctgctgcaca

SEQ ID NO: 524743 - DNA, 15 bp, Homo sapiens
tgctctgctgcacat

SEQ ID NO: 524744 - DNA, 15 bp, Homo sapiens
gctctgctgcacatt

SEQ ID NO: 524745 - DNA, 15 bp, Homo sapiens
ctctgctgcacattt

SEQ ID NO: 524746 - DNA, 15 bp, Homo sapiens
tctgctgcacatttc

SEQ ID NO: 524747 - DNA, 15 bp, Homo sapiens
ctgctgcacatttca

SEQ ID NO: 524748 - DNA, 15 bp, Homo sapiens
tgctgcacatttcag

SEQ ID NO: 524749 - DNA, 15 bp, Homo sapiens
gctgcacatttcagg

SEQ ID NO: 524750 - DNA, 15 bp, Homo sapiens
ctgcacatttcagga

SEQ ID NO: 524751 - DNA, 15 bp, Homo sapiens
tgcacatttcaggag

SEQ ID NO: 524752 - DNA, 15 bp, Homo sapiens
gcacatttcaggagt

SEQ ID NO: 524753 - DNA, 15 bp, Homo sapiens
cacatttcaggagtc

SEQ ID NO: 524754 - DNA, 15 bp, Homo sapiens
acatttcaggagtct

SEQ ID NO: 524755 - DNA, 15 bp, Homo sapiens
catttcaggagtctt

SEQ ID NO: 524756 - DNA, 15 bp, Homo sapiens
atttcaggagtctta

SEQ ID NO: 524757 - DNA, 15 bp, Homo sapiens
tttcaggagtcttat

SEQ ID NO: 524758 - DNA, 15 bp, Homo sapiens
ttcaggagtcttatt

SEQ ID NO: 524759 - DNA, 15 bp, Homo sapiens
tcaggagtcttatta

SEQ ID NO: 524760 - DNA, 15 bp, Homo sapiens
caggagtcttattag

SEQ ID NO: 524761 - DNA, 15 bp, Homo sapiens
aggagtcttattaga

SEQ ID NO: 524762 - DNA, 15 bp, Homo sapiens
ggagtcttattagaa

SEQ ID NO: 524763 - DNA, 15 bp, Homo sapiens
gagtcttattagaat

SEQ ID NO: 524764 - DNA, 15 bp, Homo sapiens
agtcttattagaatt

SEQ ID NO: 524765 - DNA, 15 bp, Homo sapiens
gtcttattagaatta

SEQ ID NO: 524766 - DNA, 15 bp, Homo sapiens
tcttattagaattag

SEQ ID NO: 524767 - DNA, 15 bp, Homo sapiens
cttattagaattagc

SEQ ID NO: 524768 - DNA, 15 bp, Homo sapiens
ttattagaattagcc

SEQ ID NO: 524769 - DNA, 15 bp, Homo sapiens
tattagaattagcca

SEQ ID NO: 524770 - DNA, 15 bp, Homo sapiens
attagaattagccac

SEQ ID NO: 524771 - DNA, 15 bp, Homo sapiens
ttagaattagccaca

SEQ ID NO: 524772 - DNA, 15 bp, Homo sapiens
tagaattagccacat

SEQ ID NO: 524773 - DNA, 15 bp, Homo sapiens
agaattagccacatt

SEQ ID NO: 524774 - DNA, 15 bp, Homo sapiens
gaattagccacattc

SEQ ID NO: 524775 - DNA, 15 bp, Homo sapiens
aattagccacattct

SEQ ID NO: 524776 - DNA, 15 bp, Homo sapiens
attagccacattctg

SEQ ID NO: 524777 - DNA, 15 bp, Homo sapiens
ttagccacattctgc

SEQ ID NO: 524778 - DNA, 15 bp, Homo sapiens
tagccacattctgcc

SEQ ID NO: 524779 - DNA, 15 bp, Homo sapiens
agccacattctgccc

SEQ ID NO: 524780 - DNA, 15 bp, Homo sapiens
gccacattctgccca

SEQ ID NO: 524781 - DNA, 15 bp, Homo sapiens
ccacattctgcccac

SEQ ID NO: 524782 - DNA, 15 bp, Homo sapiens
cacattctgcccact

SEQ ID NO: 524783 - DNA, 15 bp, Homo sapiens
acattctgcccactt

SEQ ID NO: 524784 - DNA, 15 bp, Homo sapiens
cattctgcccacttg

SEQ ID NO: 524785 - DNA, 15 bp, Homo sapiens
attctgcccacttgc

SEQ ID NO: 524786 - DNA, 15 bp, Homo sapiens
ttctgcccacttgcc

SEQ ID NO: 524787 - DNA, 15 bp, Homo sapiens
tctgcccacttgccc

SEQ ID NO: 524788 - DNA, 15 bp, Homo sapiens
ctgcccacttgccct

SEQ ID NO: 524789 - DNA, 15 bp, Homo sapiens
tgcccacttgccctt

SEQ ID NO: 524790 - DNA, 15 bp, Homo sapiens
gcccacttgccctta

SEQ ID NO: 524791 - DNA, 15 bp, Homo sapiens
cccacttgcccttac

SEQ ID NO: 524792 - DNA, 15 bp, Homo sapiens
ccacttgcccttact

SEQ ID NO: 524793 - DNA, 15 bp, Homo sapiens
cacttgcccttactt

SEQ ID NO: 524794 - DNA, 15 bp, Homo sapiens
acttgcccttacttc

SEQ ID NO: 524795 - DNA, 15 bp, Homo sapiens
cttgcccttacttct

SEQ ID NO: 524796 - DNA, 15 bp, Homo sapiens
ttgcccttacttctc

SEQ ID NO: 524797 - DNA, 15 bp, Homo sapiens
tgcccttacttctca

SEQ ID NO: 524798 - DNA, 15 bp, Homo sapiens
gcccttacttctcat

SEQ ID NO: 524799 - DNA, 15 bp, Homo sapiens
cccttacttctcata

SEQ ID NO: 524800 - DNA, 15 bp, Homo sapiens
ccttacttctcatat

SEQ ID NO: 524801 - DNA, 15 bp, Homo sapiens
cttacttctcatatt

SEQ ID NO: 524802 - DNA, 15 bp, Homo sapiens
ttacttctcatattt

SEQ ID NO: 524803 - DNA, 15 bp, Homo sapiens
tacttctcatatttc

SEQ ID NO: 524804 - DNA, 15 bp, Homo sapiens
acttctcatatttca

SEQ ID NO: 524805 - DNA, 15 bp, Homo sapiens
cttctcatatttcac

SEQ ID NO: 524806 - DNA, 15 bp, Homo sapiens
ttctcatatttcaca

SEQ ID NO: 524807 - DNA, 15 bp, Homo sapiens
tctcatatttcacaa

SEQ ID NO: 524808 - DNA, 15 bp, Homo sapiens
ctcatatttcacaac

SEQ ID NO: 524809 - DNA, 15 bp, Homo sapiens
tcatatttcacaact

SEQ ID NO: 524810 - DNA, 15 bp, Homo sapiens
catatttcacaactc

SEQ ID NO: 524811 - DNA, 15 bp, Homo sapiens
atatttcacaactcc

SEQ ID NO: 524812 - DNA, 15 bp, Homo sapiens
tatttcacaactcct

SEQ ID NO: 524813 - DNA, 15 bp, Homo sapiens
atttcacaactcctc

SEQ ID NO: 524814 - DNA, 15 bp, Homo sapiens
tttcacaactcctcc

SEQ ID NO: 524815 - DNA, 15 bp, Homo sapiens
ttcacaactcctcct

SEQ ID NO: 524816 - DNA, 15 bp, Homo sapiens
tcacaactcctcctg

SEQ ID NO: 524817 - DNA, 15 bp, Homo sapiens
cacaactcctcctgg

SEQ ID NO: 524818 - DNA, 15 bp, Homo sapiens
acaactcctcctggt

SEQ ID NO: 524819 - DNA, 15 bp, Homo sapiens
caactcctcctggtg

SEQ ID NO: 524820 - DNA, 15 bp, Homo sapiens
aactcctcctggtgg

SEQ ID NO: 524821 - DNA, 15 bp, Homo sapiens
actcctcctggtggg

SEQ ID NO: 524822 - DNA, 15 bp, Homo sapiens
ctcctcctggtgggg

SEQ ID NO: 524823 - DNA, 15 bp, Homo sapiens
tcctcctggtgggga

SEQ ID NO: 524824 - DNA, 15 bp, Homo sapiens
cctcctggtggggac

SEQ ID NO: 524825 - DNA, 15 bp, Homo sapiens
ctcctggtggggact

SEQ ID NO: 524826 - DNA, 15 bp, Homo sapiens
tcctggtggggactt

SEQ ID NO: 524827 - DNA, 15 bp, Homo sapiens
cctggtggggactta

SEQ ID NO: 524828 - DNA, 15 bp, Homo sapiens
ctggtggggacttaa

SEQ ID NO: 524829 - DNA, 15 bp, Homo sapiens
tggtggggacttaag

SEQ ID NO: 524830 - DNA, 15 bp, Homo sapiens
ggtggggacttaagg

SEQ ID NO: 524831 - DNA, 15 bp, Homo sapiens
gtggggacttaagga

SEQ ID NO: 524832 - DNA, 15 bp, Homo sapiens
tggggacttaaggag

SEQ ID NO: 524833 - DNA, 15 bp, Homo sapiens
ggggacttaaggaga

SEQ ID NO: 524834 - DNA, 15 bp, Homo sapiens
gggacttaaggagac

SEQ ID NO: 524835 - DNA, 15 bp, Homo sapiens
ggacttaaggagaca

SEQ ID NO: 524836 - DNA, 15 bp, Homo sapiens
gacttaaggagacat

SEQ ID NO: 524837 - DNA, 15 bp, Homo sapiens
acttaaggagacatt

SEQ ID NO: 524838 - DNA, 15 bp, Homo sapiens
cttaaggagacattc

SEQ ID NO: 524839 - DNA, 15 bp, Homo sapiens
ttaaggagacattca

SEQ ID NO: 524840 - DNA, 15 bp, Homo sapiens
taaggagacattcaa

SEQ ID NO: 524841 - DNA, 15 bp, Homo sapiens
aaggagacattcaaa

SEQ ID NO: 524842 - DNA, 15 bp, Homo sapiens
aggagacattcaaac

SEQ ID NO: 524843 - DNA, 15 bp, Homo sapiens
ggagacattcaaact

SEQ ID NO: 524844 - DNA, 15 bp, Homo sapiens
gagacattcaaacta

SEQ ID NO: 524845 - DNA, 15 bp, Homo sapiens
agacattcaaactag

SEQ ID NO: 524846 - DNA, 15 bp, Homo sapiens
gacattcaaactagg

SEQ ID NO: 524847 - DNA, 15 bp, Homo sapiens
acattcaaactaggc

SEQ ID NO: 524848 - DNA, 15 bp, Homo sapiens
cattcaaactaggcc

SEQ ID NO: 524849 - DNA, 15 bp, Homo sapiens
attcaaactaggcct

SEQ ID NO: 524850 - DNA, 15 bp, Homo sapiens
ttcaaactaggcctt

SEQ ID NO: 524851 - DNA, 15 bp, Homo sapiens
tcaaactaggccttg

SEQ ID NO: 524852 - DNA, 15 bp, Homo sapiens
caaactaggccttga

SEQ ID NO: 524853 - DNA, 15 bp, Homo sapiens
aaactaggccttgaa

SEQ ID NO: 524854 - DNA, 15 bp, Homo sapiens
aactaggccttgaaa

SEQ ID NO: 524855 - DNA, 15 bp, Homo sapiens
actaggccttgaaag

SEQ ID NO: 524856 - DNA, 15 bp, Homo sapiens
ctaggccttgaaaga

SEQ ID NO: 524857 - DNA, 15 bp, Homo sapiens
taggccttgaaagat

SEQ ID NO: 524858 - DNA, 15 bp, Homo sapiens
aggccttgaaagatg

SEQ ID NO: 524859 - DNA, 15 bp, Homo sapiens
ggccttgaaagatga

SEQ ID NO: 524860 - DNA, 15 bp, Homo sapiens
gccttgaaagatgag

SEQ ID NO: 524861 - DNA, 15 bp, Homo sapiens
ccttgaaagatgaga

SEQ ID NO: 524862 - DNA, 15 bp, Homo sapiens
cttgaaagatgagaa

SEQ ID NO: 524863 - DNA, 15 bp, Homo sapiens
ttgaaagatgagaat

SEQ ID NO: 524864 - DNA, 15 bp, Homo sapiens
tgaaagatgagaatt

SEQ ID NO: 524865 - DNA, 15 bp, Homo sapiens
gaaagatgagaattt

SEQ ID NO: 524866 - DNA, 15 bp, Homo sapiens
aaagatgagaatttt

SEQ ID NO: 524867 - DNA, 15 bp, Homo sapiens
aagatgagaattttt

SEQ ID NO: 524868 - DNA, 15 bp, Homo sapiens
agatgagaatttttc

SEQ ID NO: 524869 - DNA, 15 bp, Homo sapiens
gatgagaatttttcc

SEQ ID NO: 524870 - DNA, 15 bp, Homo sapiens
atgagaatttttcca

SEQ ID NO: 524871 - DNA, 15 bp, Homo sapiens
tgagaatttttccaa

SEQ ID NO: 524872 - DNA, 15 bp, Homo sapiens
gagaatttttccaag

SEQ ID NO: 524873 - DNA, 15 bp, Homo sapiens
agaatttttccaagt

SEQ ID NO: 524874 - DNA, 15 bp, Homo sapiens
gaatttttccaagtg

SEQ ID NO: 524875 - DNA, 15 bp, Homo sapiens
aatttttccaagtgg

SEQ ID NO: 524876 - DNA, 15 bp, Homo sapiens
atttttccaagtgga

SEQ ID NO: 524877 - DNA, 15 bp, Homo sapiens
tttttccaagtggaa

SEQ ID NO: 524878 - DNA, 15 bp, Homo sapiens
ttttccaagtggaaa

SEQ ID NO: 524879 - DNA, 15 bp, Homo sapiens
tttccaagtggaaaa

SEQ ID NO: 524880 - DNA, 15 bp, Homo sapiens
ttccaagtggaaaaa

SEQ ID NO: 524881 - DNA, 15 bp, Homo sapiens
tccaagtggaaaaag

SEQ ID NO: 524882 - DNA, 15 bp, Homo sapiens
ccaagtggaaaaaga

SEQ ID NO: 524883 - DNA, 15 bp, Homo sapiens
caagtggaaaaagag

SEQ ID NO: 524884 - DNA, 15 bp, Homo sapiens
aagtggaaaaagagg

SEQ ID NO: 524885 - DNA, 15 bp, Homo sapiens
agtggaaaaagagga

SEQ ID NO: 524886 - DNA, 15 bp, Homo sapiens
gtggaaaaagaggag

SEQ ID NO: 524887 - DNA, 15 bp, Homo sapiens
tggaaaaagaggagt

SEQ ID NO: 524888 - DNA, 15 bp, Homo sapiens
ggaaaaagaggagtg

SEQ ID NO: 524889 - DNA, 15 bp, Homo sapiens
gaaaaagaggagtgg

SEQ ID NO: 524890 - DNA, 15 bp, Homo sapiens
aaaaagaggagtggc

SEQ ID NO: 524891 - DNA, 15 bp, Homo sapiens
aaaagaggagtggca

SEQ ID NO: 524892 - DNA, 15 bp, Homo sapiens
aaagaggagtggcag

SEQ ID NO: 524893 - DNA, 15 bp, Homo sapiens
aagaggagtggcagc

SEQ ID NO: 524894 - DNA, 15 bp, Homo sapiens
agaggagtggcagca

SEQ ID NO: 524895 - DNA, 15 bp, Homo sapiens
gaggagtggcagcaa

SEQ ID NO: 524896 - DNA, 15 bp, Homo sapiens
aggagtggcagcaag

SEQ ID NO: 524897 - DNA, 15 bp, Homo sapiens
ggagtggcagcaagt

SEQ ID NO: 524898 - DNA, 15 bp, Homo sapiens
gagtggcagcaagta

SEQ ID NO: 524899 - DNA, 15 bp, Homo sapiens
agtggcagcaagtaa

SEQ ID NO: 524900 - DNA, 15 bp, Homo sapiens
gtggcagcaagtaag

SEQ ID NO: 524901 - DNA, 15 bp, Homo sapiens
tggcagcaagtaagg

SEQ ID NO: 524902 - DNA, 15 bp, Homo sapiens
ggcagcaagtaaggt

SEQ ID NO: 524903 - DNA, 15 bp, Homo sapiens
gcagcaagtaaggta

SEQ ID NO: 524904 - DNA, 15 bp, Homo sapiens
cagcaagtaaggtaa

SEQ ID NO: 524905 - DNA, 15 bp, Homo sapiens
agcaagtaaggtaaa

SEQ ID NO: 524906 - DNA, 15 bp, Homo sapiens
gcaagtaaggtaaag

SEQ ID NO: 524907 - DNA, 15 bp, Homo sapiens
caagtaaggtaaagg

SEQ ID NO: 524908 - DNA, 15 bp, Homo sapiens
aagtaaggtaaaggt

SEQ ID NO: 524909 - DNA, 15 bp, Homo sapiens
agtaaggtaaaggta

SEQ ID NO: 524910 - DNA, 15 bp, Homo sapiens
gtaaggtaaaggtac

SEQ ID NO: 524911 - DNA, 15 bp, Homo sapiens
taaggtaaaggtaca

SEQ ID NO: 524912 - DNA, 15 bp, Homo sapiens
aaggtaaaggtacag

SEQ ID NO: 524913 - DNA, 15 bp, Homo sapiens
aggtaaaggtacaga

SEQ ID NO: 524914 - DNA, 15 bp, Homo sapiens
ggtaaaggtacagag

SEQ ID NO: 524915 - DNA, 15 bp, Homo sapiens
gtaaaggtacagagt

SEQ ID NO: 524916 - DNA, 15 bp, Homo sapiens
taaaggtacagagtc

SEQ ID NO: 524917 - DNA, 15 bp, Homo sapiens
aaaggtacagagtca

SEQ ID NO: 524918 - DNA, 15 bp, Homo sapiens
aaggtacagagtcat

SEQ ID NO: 524919 - DNA, 15 bp, Homo sapiens
aggtacagagtcatg

SEQ ID NO: 524920 - DNA, 15 bp, Homo sapiens
ggtacagagtcatgg

SEQ ID NO: 524921 - DNA, 15 bp, Homo sapiens
gtacagagtcatgga

SEQ ID NO: 524922 - DNA, 15 bp, Homo sapiens
tacagagtcatggaa

SEQ ID NO: 524923 - DNA, 15 bp, Homo sapiens
acagagtcatggaat

SEQ ID NO: 524924 - DNA, 15 bp, Homo sapiens
cagagtcatggaatt

SEQ ID NO: 524925 - DNA, 15 bp, Homo sapiens
agagtcatggaattc

SEQ ID NO: 524926 - DNA, 15 bp, Homo sapiens
gagtcatggaattcc

SEQ ID NO: 524927 - DNA, 15 bp, Homo sapiens
agtcatggaattccc

SEQ ID NO: 524928 - DNA, 15 bp, Homo sapiens
gtcatggaattccca

SEQ ID NO: 524929 - DNA, 15 bp, Homo sapiens
tcatggaattcccag

SEQ ID NO: 524930 - DNA, 15 bp, Homo sapiens
catggaattcccagg

SEQ ID NO: 524931 - DNA, 15 bp, Homo sapiens
atggaattcccagga

SEQ ID NO: 524932 - DNA, 15 bp, Homo sapiens
tggaattcccaggaa

SEQ ID NO: 524933 - DNA, 15 bp, Homo sapiens
ggaattcccaggaaa

SEQ ID NO: 524934 - DNA, 15 bp, Homo sapiens
gaattcccaggaaac

SEQ ID NO: 524935 - DNA, 15 bp, Homo sapiens
aattcccaggaaacg

SEQ ID NO: 524936 - DNA, 15 bp, Homo sapiens
attcccaggaaacgt

SEQ ID NO: 524937 - DNA, 15 bp, Homo sapiens
ttcccaggaaacgta

SEQ ID NO: 524938 - DNA, 15 bp, Homo sapiens
tcccaggaaacgtaa

SEQ ID NO: 524939 - DNA, 15 bp, Homo sapiens
cccaggaaacgtaaa

SEQ ID NO: 524940 - DNA, 15 bp, Homo sapiens
ccaggaaacgtaaag

SEQ ID NO: 524941 - DNA, 15 bp, Homo sapiens
caggaaacgtaaagt

SEQ ID NO: 524942 - DNA, 15 bp, Homo sapiens
aggaaacgtaaagtt

SEQ ID NO: 524943 - DNA, 15 bp, Homo sapiens
ggaaacgtaaagttg

SEQ ID NO: 524944 - DNA, 15 bp, Homo sapiens
gaaacgtaaagttgt

SEQ ID NO: 524945 - DNA, 15 bp, Homo sapiens
aaacgtaaagttgtc

SEQ ID NO: 524946 - DNA, 15 bp, Homo sapiens
aacgtaaagttgtca

SEQ ID NO: 524947 - DNA, 15 bp, Homo sapiens
acgtaaagttgtcat

SEQ ID NO: 524948 - DNA, 15 bp, Homo sapiens
cgtaaagttgtcatg

SEQ ID NO: 524949 - DNA, 15 bp, Homo sapiens
gtaaagttgtcatgt

SEQ ID NO: 524950 - DNA, 15 bp, Homo sapiens
taaagttgtcatgtg

SEQ ID NO: 524951 - DNA, 15 bp, Homo sapiens
aaagttgtcatgtgt

SEQ ID NO: 524952 - DNA, 15 bp, Homo sapiens
aagttgtcatgtgtt

SEQ ID NO: 524953 - DNA, 15 bp, Homo sapiens
agttgtcatgtgtta

SEQ ID NO: 524954 - DNA, 15 bp, Homo sapiens
gttgtcatgtgttat

SEQ ID NO: 524955 - DNA, 15 bp, Homo sapiens
ttgtcatgtgttata

SEQ ID NO: 524956 - DNA, 15 bp, Homo sapiens
tgtcatgtgttatag

SEQ ID NO: 524957 - DNA, 15 bp, Homo sapiens
gtcatgtgttatagg

SEQ ID NO: 524958 - DNA, 15 bp, Homo sapiens
tcatgtgttatagga

SEQ ID NO: 524959 - DNA, 15 bp, Homo sapiens
catgtgttataggaa

SEQ ID NO: 524960 - DNA, 15 bp, Homo sapiens
atgtgttataggaaa

SEQ ID NO: 524961 - DNA, 15 bp, Homo sapiens
tgtgttataggaaaa

SEQ ID NO: 524962 - DNA, 15 bp, Homo sapiens
gtgttataggaaaac

SEQ ID NO: 524963 - DNA, 15 bp, Homo sapiens
tgttataggaaaaca

SEQ ID NO: 524964 - DNA, 15 bp, Homo sapiens
gttataggaaaacaa

SEQ ID NO: 524965 - DNA, 15 bp, Homo sapiens
ttataggaaaacaac

SEQ ID NO: 524966 - DNA, 15 bp, Homo sapiens
tataggaaaacaact

SEQ ID NO: 524967 - DNA, 15 bp, Homo sapiens
ataggaaaacaactt

SEQ ID NO: 524968 - DNA, 15 bp, Homo sapiens
taggaaaacaacttg

SEQ ID NO: 524969 - DNA, 15 bp, Homo sapiens
aggaaaacaacttgt

SEQ ID NO: 524970 - DNA, 15 bp, Homo sapiens
ggaaaacaacttgtg

SEQ ID NO: 524971 - DNA, 15 bp, Homo sapiens
gaaaacaacttgtgt

SEQ ID NO: 524972 - DNA, 15 bp, Homo sapiens
aaaacaacttgtgtg

SEQ ID NO: 524973 - DNA, 15 bp, Homo sapiens
aaacaacttgtgtga

SEQ ID NO: 524974 - DNA, 15 bp, Homo sapiens
aacaacttgtgtgag

SEQ ID NO: 524975 - DNA, 15 bp, Homo sapiens
acaacttgtgtgagg

SEQ ID NO: 524976 - DNA, 15 bp, Homo sapiens
caacttgtgtgaggg

SEQ ID NO: 524977 - DNA, 15 bp, Homo sapiens
aacttgtgtgagggg

SEQ ID NO: 524978 - DNA, 15 bp, Homo sapiens
acttgtgtgaggggt

SEQ ID NO: 524979 - DNA, 15 bp, Homo sapiens
cttgtgtgaggggtg

SEQ ID NO: 524980 - DNA, 15 bp, Homo sapiens
ttgtgtgaggggtgt

SEQ ID NO: 524981 - DNA, 15 bp, Homo sapiens
tgtgtgaggggtgtt

SEQ ID NO: 524982 - DNA, 15 bp, Homo sapiens
gtgtgaggggtgttg

SEQ ID NO: 524983 - DNA, 15 bp, Homo sapiens
tgtgaggggtgttgg

SEQ ID NO: 524984 - DNA, 15 bp, Homo sapiens
gtgaggggtgttggg

SEQ ID NO: 524985 - DNA, 15 bp, Homo sapiens
tgaggggtgttggga

SEQ ID NO: 524986 - DNA, 15 bp, Homo sapiens
gaggggtgttgggag

SEQ ID NO: 524987 - DNA, 15 bp, Homo sapiens
aggggtgttgggaga

SEQ ID NO: 524988 - DNA, 15 bp, Homo sapiens
ggggtgttgggagaa

SEQ ID NO: 524989 - DNA, 15 bp, Homo sapiens
gggtgttgggagaaa

SEQ ID NO: 524990 - DNA, 15 bp, Homo sapiens
ggtgttgggagaaat

SEQ ID NO: 524991 - DNA, 15 bp, Homo sapiens
gtgttgggagaaatg

SEQ ID NO: 524992 - DNA, 15 bp, Homo sapiens
tgttgggagaaatga

SEQ ID NO: 524993 - DNA, 15 bp, Homo sapiens
gttgggagaaatgag

SEQ ID NO: 524994 - DNA, 15 bp, Homo sapiens
ttgggagaaatgaga

SEQ ID NO: 524995 - DNA, 15 bp, Homo sapiens
tgggagaaatgagag

SEQ ID NO: 524996 - DNA, 15 bp, Homo sapiens
gggagaaatgagaga

SEQ ID NO: 524997 - DNA, 15 bp, Homo sapiens
ggagaaatgagagat

SEQ ID NO: 524998 - DNA, 15 bp, Homo sapiens
gagaaatgagagata

SEQ ID NO: 524999 - DNA, 15 bp, Homo sapiens
agaaatgagagataa

SEQ ID NO: 525000 - DNA, 15 bp, Homo sapiens
gaaatgagagataat

SEQ ID NO: 525001 - DNA, 15 bp, Homo sapiens
aaatgagagataata

SEQ ID NO: 525002 - DNA, 15 bp, Homo sapiens
aatgagagataatac

SEQ ID NO: 525003 - DNA, 15 bp, Homo sapiens
atgagagataatacc

SEQ ID NO: 525004 - DNA, 15 bp, Homo sapiens
tgagagataatacca

SEQ ID NO: 525005 - DNA, 15 bp, Homo sapiens
gagagataataccag

SEQ ID NO: 525006 - DNA, 15 bp, Homo sapiens
agagataataccagg

SEQ ID NO: 525007 - DNA, 15 bp, Homo sapiens
gagataataccaggg

SEQ ID NO: 525008 - DNA, 15 bp, Homo sapiens
agataataccagggt

SEQ ID NO: 525009 - DNA, 15 bp, Homo sapiens
gataataccagggta

SEQ ID NO: 525010 - DNA, 15 bp, Homo sapiens
ataataccagggtat

SEQ ID NO: 525011 - DNA, 15 bp, Homo sapiens
taataccagggtata

SEQ ID NO: 525012 - DNA, 15 bp, Homo sapiens
aataccagggtataa

SEQ ID NO: 525013 - DNA, 15 bp, Homo sapiens
ataccagggtataaa

SEQ ID NO: 525014 - DNA, 15 bp, Homo sapiens
taccagggtataaag

SEQ ID NO: 525015 - DNA, 15 bp, Homo sapiens
accagggtataaagg

SEQ ID NO: 525016 - DNA, 15 bp, Homo sapiens
ccagggtataaaggg

SEQ ID NO: 525017 - DNA, 15 bp, Homo sapiens
cagggtataaagggc

SEQ ID NO: 525018 - DNA, 15 bp, Homo sapiens
agggtataaagggcc

SEQ ID NO: 525019 - DNA, 15 bp, Homo sapiens
gggtataaagggcct

SEQ ID NO: 525020 - DNA, 15 bp, Homo sapiens
ggtataaagggcctt

SEQ ID NO: 525021 - DNA, 15 bp, Homo sapiens
gtataaagggccttt

SEQ ID NO: 525022 - DNA, 15 bp, Homo sapiens
tataaagggcctttt

SEQ ID NO: 525023 - DNA, 15 bp, Homo sapiens
ataaagggccttttg

SEQ ID NO: 525024 - DNA, 15 bp, Homo sapiens
taaagggccttttga

SEQ ID NO: 525025 - DNA, 15 bp, Homo sapiens
aaagggccttttgaa

SEQ ID NO: 525026 - DNA, 15 bp, Homo sapiens
aagggccttttgaat

SEQ ID NO: 525027 - DNA, 15 bp, Homo sapiens
agggccttttgaatg

SEQ ID NO: 525028 - DNA, 15 bp, Homo sapiens
gggccttttgaatgc

SEQ ID NO: 525029 - DNA, 15 bp, Homo sapiens
ggccttttgaatgct

SEQ ID NO: 525030 - DNA, 15 bp, Homo sapiens
gccttttgaatgcta

SEQ ID NO: 525031 - DNA, 15 bp, Homo sapiens
ccttttgaatgctat

SEQ ID NO: 525032 - DNA, 15 bp, Homo sapiens
cttttgaatgctatg

SEQ ID NO: 525033 - DNA, 15 bp, Homo sapiens
ttttgaatgctatgt

SEQ ID NO: 525034 - DNA, 15 bp, Homo sapiens
tttgaatgctatgtt

SEQ ID NO: 525035 - DNA, 15 bp, Homo sapiens
ttgaatgctatgttg

SEQ ID NO: 525036 - DNA, 15 bp, Homo sapiens
tgaatgctatgttga

SEQ ID NO: 525037 - DNA, 15 bp, Homo sapiens
gaatgctatgttgag

SEQ ID NO: 525038 - DNA, 15 bp, Homo sapiens
aatgctatgttgagg

SEQ ID NO: 525039 - DNA, 15 bp, Homo sapiens
atgctatgttgagga

SEQ ID NO: 525040 - DNA, 15 bp, Homo sapiens
tgctatgttgaggaa

SEQ ID NO: 525041 - DNA, 15 bp, Homo sapiens
gctatgttgaggaat

SEQ ID NO: 525042 - DNA, 15 bp, Homo sapiens
ctatgttgaggaatt

SEQ ID NO: 525043 - DNA, 15 bp, Homo sapiens
tatgttgaggaattt

SEQ ID NO: 525044 - DNA, 15 bp, Homo sapiens
atgttgaggaatttt

SEQ ID NO: 525045 - DNA, 15 bp, Homo sapiens
tgttgaggaatttta

SEQ ID NO: 525046 - DNA, 15 bp, Homo sapiens
gttgaggaattttat

SEQ ID NO: 525047 - DNA, 15 bp, Homo sapiens
ttgaggaattttatc

SEQ ID NO: 525048 - DNA, 15 bp, Homo sapiens
tgaggaattttatcc

SEQ ID NO: 525049 - DNA, 15 bp, Homo sapiens
gaggaattttatcct

SEQ ID NO: 525050 - DNA, 15 bp, Homo sapiens
aggaattttatccta

SEQ ID NO: 525051 - DNA, 15 bp, Homo sapiens
ggaattttatcctaa

SEQ ID NO: 525052 - DNA, 15 bp, Homo sapiens
gaattttatcctaat

SEQ ID NO: 525053 - DNA, 15 bp, Homo sapiens
aattttatcctaatg

SEQ ID NO: 525054 - DNA, 15 bp, Homo sapiens
attttatcctaatgg

SEQ ID NO: 525055 - DNA, 15 bp, Homo sapiens
ttttatcctaatggc

SEQ ID NO: 525056 - DNA, 15 bp, Homo sapiens
tttatcctaatggca

SEQ ID NO: 525057 - DNA, 15 bp, Homo sapiens
ttatcctaatggcag

SEQ ID NO: 525058 - DNA, 15 bp, Homo sapiens
tatcctaatggcagt

SEQ ID NO: 525059 - DNA, 15 bp, Homo sapiens
atcctaatggcagta

SEQ ID NO: 525060 - DNA, 15 bp, Homo sapiens
tcctaatggcagtaa

SEQ ID NO: 525061 - DNA, 15 bp, Homo sapiens
cctaatggcagtaat

SEQ ID NO: 525062 - DNA, 15 bp, Homo sapiens
ctaatggcagtaatg

SEQ ID NO: 525063 - DNA, 15 bp, Homo sapiens
taatggcagtaatga

SEQ ID NO: 525064 - DNA, 15 bp, Homo sapiens
aatggcagtaatgac

SEQ ID NO: 525065 - DNA, 15 bp, Homo sapiens
atggcagtaatgact

SEQ ID NO: 525066 - DNA, 15 bp, Homo sapiens
tggcagtaatgacta

SEQ ID NO: 525067 - DNA, 15 bp, Homo sapiens
ggcagtaatgactaa

SEQ ID NO: 525068 - DNA, 15 bp, Homo sapiens
gcagtaatgactaac

SEQ ID NO: 525069 - DNA, 15 bp, Homo sapiens
cagtaatgactaaca

SEQ ID NO: 525070 - DNA, 15 bp, Homo sapiens
agtaatgactaacaa

SEQ ID NO: 525071 - DNA, 15 bp, Homo sapiens
gtaatgactaacaat

SEQ ID NO: 525072 - DNA, 15 bp, Homo sapiens
taatgactaacaatt

SEQ ID NO: 525073 - DNA, 15 bp, Homo sapiens
aatgactaacaatta

SEQ ID NO: 525074 - DNA, 15 bp, Homo sapiens
atgactaacaattat

SEQ ID NO: 525075 - DNA, 15 bp, Homo sapiens
tgactaacaattata

SEQ ID NO: 525076 - DNA, 15 bp, Homo sapiens
gactaacaattatat

SEQ ID NO: 525077 - DNA, 15 bp, Homo sapiens
actaacaattatata

SEQ ID NO: 525078 - DNA, 15 bp, Homo sapiens
ctaacaattatatag

SEQ ID NO: 525079 - DNA, 15 bp, Homo sapiens
taacaattatatagt

SEQ ID NO: 525080 - DNA, 15 bp, Homo sapiens
aacaattatatagtg

SEQ ID NO: 525081 - DNA, 15 bp, Homo sapiens
acaattatatagtgt

SEQ ID NO: 525082 - DNA, 15 bp, Homo sapiens
caattatatagtgtt

SEQ ID NO: 525083 - DNA, 15 bp, Homo sapiens
aattatatagtgttc

SEQ ID NO: 525084 - DNA, 15 bp, Homo sapiens
attatatagtgttca

SEQ ID NO: 525085 - DNA, 15 bp, Homo sapiens
ttatatagtgttcaa

SEQ ID NO: 525086 - DNA, 15 bp, Homo sapiens
tatatagtgttcaaa

SEQ ID NO: 525087 - DNA, 15 bp, Homo sapiens
atatagtgttcaaaa

SEQ ID NO: 525088 - DNA, 15 bp, Homo sapiens
tatagtgttcaaaaa

SEQ ID NO: 525089 - DNA, 15 bp, Homo sapiens
atagtgttcaaaaag

SEQ ID NO: 525090 - DNA, 15 bp, Homo sapiens
tagtgttcaaaaagt

SEQ ID NO: 525091 - DNA, 15 bp, Homo sapiens
agtgttcaaaaagta

SEQ ID NO: 525092 - DNA, 15 bp, Homo sapiens
gtgttcaaaaagtat

SEQ ID NO: 525093 - DNA, 15 bp, Homo sapiens
tgttcaaaaagtata

SEQ ID NO: 525094 - DNA, 15 bp, Homo sapiens
gttcaaaaagtataa

SEQ ID NO: 525095 - DNA, 15 bp, Homo sapiens
ttcaaaaagtataaa

SEQ ID NO: 525096 - DNA, 15 bp, Homo sapiens
tcaaaaagtataaat

SEQ ID NO: 525097 - DNA, 15 bp, Homo sapiens
caaaaagtataaatc

SEQ ID NO: 525098 - DNA, 15 bp, Homo sapiens
aaaaagtataaatca

SEQ ID NO: 525099 - DNA, 15 bp, Homo sapiens
aaaagtataaatcag

SEQ ID NO: 525100 - DNA, 15 bp, Homo sapiens
aaagtataaatcagc

SEQ ID NO: 525101 - DNA, 15 bp, Homo sapiens
aagtataaatcagca

SEQ ID NO: 525102 - DNA, 15 bp, Homo sapiens
agtataaatcagcag

SEQ ID NO: 525103 - DNA, 15 bp, Homo sapiens
gtataaatcagcagt

SEQ ID NO: 525104 - DNA, 15 bp, Homo sapiens
tataaatcagcagtg

SEQ ID NO: 525105 - DNA, 15 bp, Homo sapiens
ataaatcagcagtgg

SEQ ID NO: 525106 - DNA, 15 bp, Homo sapiens
taaatcagcagtggt

SEQ ID NO: 525107 - DNA, 15 bp, Homo sapiens
aaatcagcagtggta

SEQ ID NO: 525108 - DNA, 15 bp, Homo sapiens
aatcagcagtggtat

SEQ ID NO: 525109 - DNA, 15 bp, Homo sapiens
atcagcagtggtata

SEQ ID NO: 525110 - DNA, 15 bp, Homo sapiens
tcagcagtggtatac

SEQ ID NO: 525111 - DNA, 15 bp, Homo sapiens
cagcagtggtatacc

SEQ ID NO: 525112 - DNA, 15 bp, Homo sapiens
agcagtggtatacca

SEQ ID NO: 525113 - DNA, 15 bp, Homo sapiens
gcagtggtataccac

SEQ ID NO: 525114 - DNA, 15 bp, Homo sapiens
cagtggtataccact

SEQ ID NO: 525115 - DNA, 15 bp, Homo sapiens
agtggtataccacta

SEQ ID NO: 525116 - DNA, 15 bp, Homo sapiens
gtggtataccactaa

SEQ ID NO: 525117 - DNA, 15 bp, Homo sapiens
tggtataccactaag

SEQ ID NO: 525118 - DNA, 15 bp, Homo sapiens
ggtataccactaagg

SEQ ID NO: 525119 - DNA, 15 bp, Homo sapiens
gtataccactaaggg

SEQ ID NO: 525120 - DNA, 15 bp, Homo sapiens
tataccactaagggt

SEQ ID NO: 525121 - DNA, 15 bp, Homo sapiens
ataccactaagggtt

SEQ ID NO: 525122 - DNA, 15 bp, Homo sapiens
taccactaagggttt

SEQ ID NO: 525123 - DNA, 15 bp, Homo sapiens
accactaagggtttt

SEQ ID NO: 525124 - DNA, 15 bp, Homo sapiens
ccactaagggttttt

SEQ ID NO: 525125 - DNA, 15 bp, Homo sapiens
cactaagggtttttt

SEQ ID NO: 525126 - DNA, 15 bp, Homo sapiens
actaagggttttttt

SEQ ID NO: 525127 - DNA, 15 bp, Homo sapiens
ctaagggtttttttc

SEQ ID NO: 525128 - DNA, 15 bp, Homo sapiens
taagggtttttttct

SEQ ID NO: 525129 - DNA, 15 bp, Homo sapiens
aagggtttttttctt

SEQ ID NO: 525130 - DNA, 15 bp, Homo sapiens
agggtttttttcttt

SEQ ID NO: 525131 - DNA, 15 bp, Homo sapiens
gggtttttttctttt

SEQ ID NO: 525132 - DNA, 15 bp, Homo sapiens
ggtttttttcttttc

SEQ ID NO: 525133 - DNA, 15 bp, Homo sapiens
gtttttttcttttct

SEQ ID NO: 525134 - DNA, 15 bp, Homo sapiens
tttttttcttttctt

SEQ ID NO: 525135 - DNA, 15 bp, Homo sapiens
ttttttcttttcttt

SEQ ID NO: 525136 - DNA, 15 bp, Homo sapiens
tttttcttttctttt

SEQ ID NO: 525137 - DNA, 15 bp, Homo sapiens
ttttcttttcttttt

SEQ ID NO: 525138 - DNA, 15 bp, Homo sapiens
tttcttttctttttt

SEQ ID NO: 525139 - DNA, 15 bp, Homo sapiens
ttctttttttttttg

SEQ ID NO: 525140 - DNA, 15 bp, Homo sapiens
tctttttttttttga

SEQ ID NO: 525141 - DNA, 15 bp, Homo sapiens
ctttttttttttgag

SEQ ID NO: 525142 - DNA, 15 bp, Homo sapiens
ttttgagacagagtt

SEQ ID NO: 525143 - DNA, 15 bp, Homo sapiens
tttgagacagagttt

SEQ ID NO: 525144 - DNA, 15 bp, Homo sapiens
ttgagacagagtttt

SEQ ID NO: 525145 - DNA, 15 bp, Homo sapiens
tgagacagagttttg

SEQ ID NO: 525146 - DNA, 15 bp, Homo sapiens
gagacagagttttgc

SEQ ID NO: 525147 - DNA, 15 bp, Homo sapiens
agacagagttttgct

SEQ ID NO: 525148 - DNA, 15 bp, Homo sapiens
gacagagttttgctc

SEQ ID NO: 525149 - DNA, 15 bp, Homo sapiens
acagagttttgctct

SEQ ID NO: 525150 - DNA, 15 bp, Homo sapiens
cagagttttgctctg

SEQ ID NO: 525151 - DNA, 15 bp, Homo sapiens
agagttttgctctgt

SEQ ID NO: 525152 - DNA, 15 bp, Homo sapiens
gagttttgctctgtt

SEQ ID NO: 525153 - DNA, 15 bp, Homo sapiens
agttttgctctgttg

SEQ ID NO: 525154 - DNA, 15 bp, Homo sapiens
gttttgctctgttgc

SEQ ID NO: 525155 - DNA, 15 bp, Homo sapiens
ttttgctctgttgcc

SEQ ID NO: 525156 - DNA, 15 bp, Homo sapiens
tttgctctgttgccc

SEQ ID NO: 525157 - DNA, 15 bp, Homo sapiens
ccaggctggagtgcc

SEQ ID NO: 525158 - DNA, 15 bp, Homo sapiens
caggctggagtgccg

SEQ ID NO: 525159 - DNA, 15 bp, Homo sapiens
aggctggagtgccgt

SEQ ID NO: 525160 - DNA, 15 bp, Homo sapiens
ggctggagtgccgtg

SEQ ID NO: 525161 - DNA, 15 bp, Homo sapiens
gctggagtgccgtgg

SEQ ID NO: 525162 - DNA, 15 bp, Homo sapiens
ctggagtgccgtggc

SEQ ID NO: 525163 - DNA, 15 bp, Homo sapiens
tggagtgccgtggca

SEQ ID NO: 525164 - DNA, 15 bp, Homo sapiens
ggagtgccgtggcac

SEQ ID NO: 525165 - DNA, 15 bp, Homo sapiens
gagtgccgtggcacg

SEQ ID NO: 525166 - DNA, 15 bp, Homo sapiens
agtgccgtggcacga

SEQ ID NO: 525167 - DNA, 15 bp, Homo sapiens
gtgccgtggcacgat

SEQ ID NO: 525168 - DNA, 15 bp, Homo sapiens
tgccgtggcacgatc

SEQ ID NO: 525169 - DNA, 15 bp, Homo sapiens
gccgtggcacgatct

SEQ ID NO: 525170 - DNA, 15 bp, Homo sapiens
ccgtggcacgatctc

SEQ ID NO: 525171 - DNA, 15 bp, Homo sapiens
cgtggcacgatctca

SEQ ID NO: 525172 - DNA, 15 bp, Homo sapiens
gtggcacgatctcag

SEQ ID NO: 525173 - DNA, 15 bp, Homo sapiens
tggcacgatctcagc

SEQ ID NO: 525174 - DNA, 15 bp, Homo sapiens
ggcacgatctcagct

SEQ ID NO: 525175 - DNA, 15 bp, Homo sapiens
gcacgatctcagctc

SEQ ID NO: 525176 - DNA, 15 bp, Homo sapiens
cacgatctcagctca

SEQ ID NO: 525177 - DNA, 15 bp, Homo sapiens
acgatctcagctcac

SEQ ID NO: 525178 - DNA, 15 bp, Homo sapiens
ctcagctcactgcac

SEQ ID NO: 525179 - DNA, 15 bp, Homo sapiens
tcagctcactgcact

SEQ ID NO: 525180 - DNA, 15 bp, Homo sapiens
cagctcactgcactt

SEQ ID NO: 525181 - DNA, 15 bp, Homo sapiens
agctcactgcacttc

SEQ ID NO: 525182 - DNA, 15 bp, Homo sapiens
gctcactgcacttcc

SEQ ID NO: 525183 - DNA, 15 bp, Homo sapiens
ctcactgcacttccg

SEQ ID NO: 525184 - DNA, 15 bp, Homo sapiens
tcactgcacttccgc

SEQ ID NO: 525185 - DNA, 15 bp, Homo sapiens
cactgcacttccgcc

SEQ ID NO: 525186 - DNA, 15 bp, Homo sapiens
actgcacttccgcca

SEQ ID NO: 525187 - DNA, 15 bp, Homo sapiens
ctgcacttccgccac

SEQ ID NO: 525188 - DNA, 15 bp, Homo sapiens
tgcacttccgccacc

SEQ ID NO: 525189 - DNA, 15 bp, Homo sapiens
gcacttccgccacct

SEQ ID NO: 525190 - DNA, 15 bp, Homo sapiens
cacttccgccacctg

SEQ ID NO: 525191 - DNA, 15 bp, Homo sapiens
acttccgccacctgg

SEQ ID NO: 525192 - DNA, 15 bp, Homo sapiens
cttccgccacctggg

SEQ ID NO: 525193 - DNA, 15 bp, Homo sapiens
ttccgccacctgggt

SEQ ID NO: 525194 - DNA, 15 bp, Homo sapiens
tccgccacctgggtt

SEQ ID NO: 525195 - DNA, 15 bp, Homo sapiens
ccgccacctgggttc

SEQ ID NO: 525196 - DNA, 15 bp, Homo sapiens
cgccacctgggttca

SEQ ID NO: 525197 - DNA, 15 bp, Homo sapiens
gccacctgggttcaa

SEQ ID NO: 525198 - DNA, 15 bp, Homo sapiens
ccacctgggttcaag

SEQ ID NO: 525199 - DNA, 15 bp, Homo sapiens
cacctgggttcaagt

SEQ ID NO: 525200 - DNA, 15 bp, Homo sapiens
acctgggttcaagtg

SEQ ID NO: 525201 - DNA, 15 bp, Homo sapiens
cctgggttcaagtga

SEQ ID NO: 525202 - DNA, 15 bp, Homo sapiens
ctgggttcaagtgat

SEQ ID NO: 525203 - DNA, 15 bp, Homo sapiens
tgggttcaagtgatt

SEQ ID NO: 525204 - DNA, 15 bp, Homo sapiens
gggttcaagtgattc

SEQ ID NO: 525205 - DNA, 15 bp, Homo sapiens
gttcaagtgattctt

SEQ ID NO: 525206 - DNA, 15 bp, Homo sapiens
ttcaagtgattcttc

SEQ ID NO: 525207 - DNA, 15 bp, Homo sapiens
tcaagtgattcttct

SEQ ID NO: 525208 - DNA, 15 bp, Homo sapiens
caagtgattcttctg

SEQ ID NO: 525209 - DNA, 15 bp, Homo sapiens
aagtgattcttctgc

SEQ ID NO: 525210 - DNA, 15 bp, Homo sapiens
agtgattcttctgcc

SEQ ID NO: 525211 - DNA, 15 bp, Homo sapiens
gtgattcttctgcct

SEQ ID NO: 525212 - DNA, 15 bp, Homo sapiens
tgattcttctgcctc

SEQ ID NO: 525213 - DNA, 15 bp, Homo sapiens
gattcttctgcctca

SEQ ID NO: 525214 - DNA, 15 bp, Homo sapiens
attcttctgcctcag

SEQ ID NO: 525215 - DNA, 15 bp, Homo sapiens
ttcttctgcctcagc

SEQ ID NO: 525216 - DNA, 15 bp, Homo sapiens
tcttctgcctcagcc

SEQ ID NO: 525217 - DNA, 15 bp, Homo sapiens
cttctgcctcagcca

SEQ ID NO: 525218 - DNA, 15 bp, Homo sapiens
ttctgcctcagccag

SEQ ID NO: 525219 - DNA, 15 bp, Homo sapiens
tctgcctcagccagt

SEQ ID NO: 525220 - DNA, 15 bp, Homo sapiens
ctgcctcagccagtg

SEQ ID NO: 525221 - DNA, 15 bp, Homo sapiens
tgcctcagccagtgt

SEQ ID NO: 525222 - DNA, 15 bp, Homo sapiens
gcctcagccagtgtt

SEQ ID NO: 525223 - DNA, 15 bp, Homo sapiens
cctcagccagtgttt

SEQ ID NO: 525224 - DNA, 15 bp, Homo sapiens
ctcagccagtgtttc

SEQ ID NO: 525225 - DNA, 15 bp, Homo sapiens
tcagccagtgtttca

SEQ ID NO: 525226 - DNA, 15 bp, Homo sapiens
cagccagtgtttcac

SEQ ID NO: 525227 - DNA, 15 bp, Homo sapiens
agccagtgtttcact

SEQ ID NO: 525228 - DNA, 15 bp, Homo sapiens
gccagtgtttcactg

SEQ ID NO: 525229 - DNA, 15 bp, Homo sapiens
ccagtgtttcactgt

SEQ ID NO: 525230 - DNA, 15 bp, Homo sapiens
cagtgtttcactgtg

SEQ ID NO: 525231 - DNA, 15 bp, Homo sapiens
agtgtttcactgtga

SEQ ID NO: 525232 - DNA, 15 bp, Homo sapiens
gtgtttcactgtgat

SEQ ID NO: 525233 - DNA, 15 bp, Homo sapiens
tgtttcactgtgatg

SEQ ID NO: 525234 - DNA, 15 bp, Homo sapiens
gtttcactgtgatgg

SEQ ID NO: 525235 - DNA, 15 bp, Homo sapiens
tttcactgtgatggc

SEQ ID NO: 525236 - DNA, 15 bp, Homo sapiens
ttcactgtgatggcc

SEQ ID NO: 525237 - DNA, 15 bp, Homo sapiens
tcactgtgatggcca

SEQ ID NO: 525238 - DNA, 15 bp, Homo sapiens
cactgtgatggccag

SEQ ID NO: 525239 - DNA, 15 bp, Homo sapiens
actgtgatggccagg

SEQ ID NO: 525240 - DNA, 15 bp, Homo sapiens
ctgtgatggccagga

SEQ ID NO: 525241 - DNA, 15 bp, Homo sapiens
tgtgatggccaggat

SEQ ID NO: 525242 - DNA, 15 bp, Homo sapiens
gtgatggccaggatg

SEQ ID NO: 525243 - DNA, 15 bp, Homo sapiens
tgatggccaggatgg

SEQ ID NO: 525244 - DNA, 15 bp, Homo sapiens
gatggccaggatgga

SEQ ID NO: 525245 - DNA, 15 bp, Homo sapiens
atggccaggatggag

SEQ ID NO: 525246 - DNA, 15 bp, Homo sapiens
tggccaggatggagc

SEQ ID NO: 525247 - DNA, 15 bp, Homo sapiens
ggccaggatggagca

SEQ ID NO: 525248 - DNA, 15 bp, Homo sapiens
gccaggatggagcac

SEQ ID NO: 525249 - DNA, 15 bp, Homo sapiens
ccaggatggagcact

SEQ ID NO: 525250 - DNA, 15 bp, Homo sapiens
caggatggagcacta

SEQ ID NO: 525251 - DNA, 15 bp, Homo sapiens
aggatggagcactaa

SEQ ID NO: 525252 - DNA, 15 bp, Homo sapiens
ggatggagcactaag

SEQ ID NO: 525253 - DNA, 15 bp, Homo sapiens
gatggagcactaagg

SEQ ID NO: 525254 - DNA, 15 bp, Homo sapiens
atggagcactaaggg

SEQ ID NO: 525255 - DNA, 15 bp, Homo sapiens
tggagcactaagggt

SEQ ID NO: 525256 - DNA, 15 bp, Homo sapiens
ggagcactaagggtc

SEQ ID NO: 525257 - DNA, 15 bp, Homo sapiens
gagcactaagggtct

SEQ ID NO: 525258 - DNA, 15 bp, Homo sapiens
agcactaagggtctt

SEQ ID NO: 525259 - DNA, 15 bp, Homo sapiens
gcactaagggtcttt

SEQ ID NO: 525260 - DNA, 15 bp, Homo sapiens
cactaagggtcttta

SEQ ID NO: 525261 - DNA, 15 bp, Homo sapiens
actaagggtctttat

SEQ ID NO: 525262 - DNA, 15 bp, Homo sapiens
ctaagggtctttatg

SEQ ID NO: 525263 - DNA, 15 bp, Homo sapiens
taagggtctttatgg

SEQ ID NO: 525264 - DNA, 15 bp, Homo sapiens
aagggtctttatgga

SEQ ID NO: 525265 - DNA, 15 bp, Homo sapiens
agggtctttatggaa

SEQ ID NO: 525266 - DNA, 15 bp, Homo sapiens
gggtctttatggaag

SEQ ID NO: 525267 - DNA, 15 bp, Homo sapiens
ggtctttatggaaga

SEQ ID NO: 525268 - DNA, 15 bp, Homo sapiens
gtctttatggaagaa

SEQ ID NO: 525269 - DNA, 15 bp, Homo sapiens
tctttatggaagaaa

SEQ ID NO: 525270 - DNA, 15 bp, Homo sapiens
ctttatggaagaaaa

SEQ ID NO: 525271 - DNA, 15 bp, Homo sapiens
tttatggaagaaaaa

SEQ ID NO: 525272 - DNA, 15 bp, Homo sapiens
ttatggaagaaaaag

SEQ ID NO: 525273 - DNA, 15 bp, Homo sapiens
tatggaagaaaaaga

SEQ ID NO: 525274 - DNA, 15 bp, Homo sapiens
atggaagaaaaagac

SEQ ID NO: 525275 - DNA, 15 bp, Homo sapiens
tggaagaaaaagaca

SEQ ID NO: 525276 - DNA, 15 bp, Homo sapiens
ggaagaaaaagacat

SEQ ID NO: 525277 - DNA, 15 bp, Homo sapiens
gaagaaaaagacatg

SEQ ID NO: 525278 - DNA, 15 bp, Homo sapiens
aagaaaaagacatga

SEQ ID NO: 525279 - DNA, 15 bp, Homo sapiens
agaaaaagacatgat

SEQ ID NO: 525280 - DNA, 15 bp, Homo sapiens
gaaaaagacatgata

SEQ ID NO: 525281 - DNA, 15 bp, Homo sapiens
aaaaagacatgataa

SEQ ID NO: 525282 - DNA, 15 bp, Homo sapiens
aaaagacatgataaa

SEQ ID NO: 525283 - DNA, 15 bp, Homo sapiens
aaagacatgataaac

SEQ ID NO: 525284 - DNA, 15 bp, Homo sapiens
aagacatgataaaca

SEQ ID NO: 525285 - DNA, 15 bp, Homo sapiens
agacatgataaacaa

SEQ ID NO: 525286 - DNA, 15 bp, Homo sapiens
gacatgataaacaag

SEQ ID NO: 525287 - DNA, 15 bp, Homo sapiens
acatgataaacaagg

SEQ ID NO: 525288 - DNA, 15 bp, Homo sapiens
catgataaacaaggc

SEQ ID NO: 525289 - DNA, 15 bp, Homo sapiens
atgataaacaaggct

SEQ ID NO: 525290 - DNA, 15 bp, Homo sapiens
tgataaacaaggctt

SEQ ID NO: 525291 - DNA, 15 bp, Homo sapiens
gataaacaaggcttt

SEQ ID NO: 525292 - DNA, 15 bp, Homo sapiens
ataaacaaggctttt

SEQ ID NO: 525293 - DNA, 15 bp, Homo sapiens
taaacaaggctttta

SEQ ID NO: 525294 - DNA, 15 bp, Homo sapiens
aaacaaggcttttag

SEQ ID NO: 525295 - DNA, 15 bp, Homo sapiens
aacaaggcttttagg

SEQ ID NO: 525296 - DNA, 15 bp, Homo sapiens
acaaggcttttaggg

SEQ ID NO: 525297 - DNA, 15 bp, Homo sapiens
caaggcttttaggga

SEQ ID NO: 525298 - DNA, 15 bp, Homo sapiens
aaggcttttagggaa

SEQ ID NO: 525299 - DNA, 15 bp, Homo sapiens
aggcttttagggaac

SEQ ID NO: 525300 - DNA, 15 bp, Homo sapiens
ggcttttagggaact

SEQ ID NO: 525301 - DNA, 15 bp, Homo sapiens
gcttttagggaactt

SEQ ID NO: 525302 - DNA, 15 bp, Homo sapiens
cttttagggaacttc

SEQ ID NO: 525303 - DNA, 15 bp, Homo sapiens
ttttagggaacttct

SEQ ID NO: 525304 - DNA, 15 bp, Homo sapiens
tttagggaacttcta

SEQ ID NO: 525305 - DNA, 15 bp, Homo sapiens
ttagggaacttctac

SEQ ID NO: 525306 - DNA, 15 bp, Homo sapiens
tagggaacttctaca

SEQ ID NO: 525307 - DNA, 15 bp, Homo sapiens
agggaacttctacag

SEQ ID NO: 525308 - DNA, 15 bp, Homo sapiens
gggaacttctacagt

SEQ ID NO: 525309 - DNA, 15 bp, Homo sapiens
ggaacttctacagta

SEQ ID NO: 525310 - DNA, 15 bp, Homo sapiens
gaacttctacagtaa

SEQ ID NO: 525311 - DNA, 15 bp, Homo sapiens
aacttctacagtaat

SEQ ID NO: 525312 - DNA, 15 bp, Homo sapiens
acttctacagtaatg

SEQ ID NO: 525313 - DNA, 15 bp, Homo sapiens
cttctacagtaatgt

SEQ ID NO: 525314 - DNA, 15 bp, Homo sapiens
ttctacagtaatgta

SEQ ID NO: 525315 - DNA, 15 bp, Homo sapiens
tctacagtaatgtag

SEQ ID NO: 525316 - DNA, 15 bp, Homo sapiens
ctacagtaatgtagc

SEQ ID NO: 525317 - DNA, 15 bp, Homo sapiens
tacagtaatgtagct

SEQ ID NO: 525318 - DNA, 15 bp, Homo sapiens
acagtaatgtagctg

SEQ ID NO: 525319 - DNA, 15 bp, Homo sapiens
cagtaatgtagctgt

SEQ ID NO: 525320 - DNA, 15 bp, Homo sapiens
agtaatgtagctgta

SEQ ID NO: 525321 - DNA, 15 bp, Homo sapiens
gtaatgtagctgtat

SEQ ID NO: 525322 - DNA, 15 bp, Homo sapiens
taatgtagctgtatt

SEQ ID NO: 525323 - DNA, 15 bp, Homo sapiens
aatgtagctgtatta

SEQ ID NO: 525324 - DNA, 15 bp, Homo sapiens
atgtagctgtattaa

SEQ ID NO: 525325 - DNA, 15 bp, Homo sapiens
tgtagctgtattaaa

SEQ ID NO: 525326 - DNA, 15 bp, Homo sapiens
gtagctgtattaaaa

SEQ ID NO: 525327 - DNA, 15 bp, Homo sapiens
tagctgtattaaaag

SEQ ID NO: 525328 - DNA, 15 bp, Homo sapiens
agctgtattaaaagt

SEQ ID NO: 525329 - DNA, 15 bp, Homo sapiens
gctgtattaaaagta

SEQ ID NO: 525330 - DNA, 15 bp, Homo sapiens
ctgtattaaaagtag

SEQ ID NO: 525331 - DNA, 15 bp, Homo sapiens
tgtattaaaagtaga

SEQ ID NO: 525332 - DNA, 15 bp, Homo sapiens
gtattaaaagtagag

SEQ ID NO: 525333 - DNA, 15 bp, Homo sapiens
tattaaaagtagaga

SEQ ID NO: 525334 - DNA, 15 bp, Homo sapiens
attaaaagtagagat

SEQ ID NO: 525335 - DNA, 15 bp, Homo sapiens
ttaaaagtagagatc

SEQ ID NO: 525336 - DNA, 15 bp, Homo sapiens
taaaagtagagatca

SEQ ID NO: 525337 - DNA, 15 bp, Homo sapiens
aaaagtagagatcag

SEQ ID NO: 525338 - DNA, 15 bp, Homo sapiens
aaagtagagatcaga

SEQ ID NO: 525339 - DNA, 15 bp, Homo sapiens
aagtagagatcagag

SEQ ID NO: 525340 - DNA, 15 bp, Homo sapiens
agtagagatcagagc

SEQ ID NO: 525341 - DNA, 15 bp, Homo sapiens
gtagagatcagagca

SEQ ID NO: 525342 - DNA, 15 bp, Homo sapiens
tagagatcagagcag

SEQ ID NO: 525343 - DNA, 15 bp, Homo sapiens
agagatcagagcagc

SEQ ID NO: 525344 - DNA, 15 bp, Homo sapiens
gagatcagagcagca

SEQ ID NO: 525345 - DNA, 15 bp, Homo sapiens
agatcagagcagcat

SEQ ID NO: 525346 - DNA, 15 bp, Homo sapiens
gatcagagcagcata

SEQ ID NO: 525347 - DNA, 15 bp, Homo sapiens
atcagagcagcatag

SEQ ID NO: 525348 - DNA, 15 bp, Homo sapiens
tcagagcagcatagt

SEQ ID NO: 525349 - DNA, 15 bp, Homo sapiens
cagagcagcatagta

SEQ ID NO: 525350 - DNA, 15 bp, Homo sapiens
agagcagcatagtag

SEQ ID NO: 525351 - DNA, 15 bp, Homo sapiens
gagcagcatagtaga

SEQ ID NO: 525352 - DNA, 15 bp, Homo sapiens
agcagcatagtagaa

SEQ ID NO: 525353 - DNA, 15 bp, Homo sapiens
gcagcatagtagaag

SEQ ID NO: 525354 - DNA, 15 bp, Homo sapiens
cagcatagtagaagt

SEQ ID NO: 525355 - DNA, 15 bp, Homo sapiens
agcatagtagaagta

SEQ ID NO: 525356 - DNA, 15 bp, Homo sapiens
gcatagtagaagtag

SEQ ID NO: 525357 - DNA, 15 bp, Homo sapiens
catagtagaagtaga

SEQ ID NO: 525358 - DNA, 15 bp, Homo sapiens
atagtagaagtagaa

SEQ ID NO: 525359 - DNA, 15 bp, Homo sapiens
tagtagaagtagaag

SEQ ID NO: 525360 - DNA, 15 bp, Homo sapiens
agtagaagtagaagg

SEQ ID NO: 525361 - DNA, 15 bp, Homo sapiens
gtagaagtagaaggc

SEQ ID NO: 525362 - DNA, 15 bp, Homo sapiens
tagaagtagaaggct

SEQ ID NO: 525363 - DNA, 15 bp, Homo sapiens
agaagtagaaggcta

SEQ ID NO: 525364 - DNA, 15 bp, Homo sapiens
gaagtagaaggctag

SEQ ID NO: 525365 - DNA, 15 bp, Homo sapiens
aagtagaaggctaga

SEQ ID NO: 525366 - DNA, 15 bp, Homo sapiens
agtagaaggctagag

SEQ ID NO: 525367 - DNA, 15 bp, Homo sapiens
gtagaaggctagagc

SEQ ID NO: 525368 - DNA, 15 bp, Homo sapiens
tagaaggctagagct

SEQ ID NO: 525369 - DNA, 15 bp, Homo sapiens
agaaggctagagcta

SEQ ID NO: 525370 - DNA, 15 bp, Homo sapiens
gaaggctagagctaa

SEQ ID NO: 525371 - DNA, 15 bp, Homo sapiens
aaggctagagctaat

SEQ ID NO: 525372 - DNA, 15 bp, Homo sapiens
aggctagagctaatt

SEQ ID NO: 525373 - DNA, 15 bp, Homo sapiens
ggctagagctaattg

SEQ ID NO: 525374 - DNA, 15 bp, Homo sapiens
gctagagctaattga

SEQ ID NO: 525375 - DNA, 15 bp, Homo sapiens
ctagagctaattgaa

SEQ ID NO: 525376 - DNA, 15 bp, Homo sapiens
tagagctaattgaag

SEQ ID NO: 525377 - DNA, 15 bp, Homo sapiens
agagctaattgaagg

SEQ ID NO: 525378 - DNA, 15 bp, Homo sapiens
gagctaattgaagga

SEQ ID NO: 525379 - DNA, 15 bp, Homo sapiens
agctaattgaaggag

SEQ ID NO: 525380 - DNA, 15 bp, Homo sapiens
gctaattgaaggagc

SEQ ID NO: 525381 - DNA, 15 bp, Homo sapiens
ctaattgaaggagca

SEQ ID NO: 525382 - DNA, 15 bp, Homo sapiens
taattgaaggagcac

SEQ ID NO: 525383 - DNA, 15 bp, Homo sapiens
aattgaaggagcact

SEQ ID NO: 525384 - DNA, 15 bp, Homo sapiens
attgaaggagcactt

SEQ ID NO: 525385 - DNA, 15 bp, Homo sapiens
ttgaaggagcacttc

SEQ ID NO: 525386 - DNA, 15 bp, Homo sapiens
tgaaggagcacttca

SEQ ID NO: 525387 - DNA, 15 bp, Homo sapiens
gaaggagcacttcag

SEQ ID NO: 525388 - DNA, 15 bp, Homo sapiens
aaggagcacttcaga

SEQ ID NO: 525389 - DNA, 15 bp, Homo sapiens
aggagcacttcagaa

SEQ ID NO: 525390 - DNA, 15 bp, Homo sapiens
ggagcacttcagaat

SEQ ID NO: 525391 - DNA, 15 bp, Homo sapiens
gagcacttcagaatt

SEQ ID NO: 525392 - DNA, 15 bp, Homo sapiens
agcacttcagaatta

SEQ ID NO: 525393 - DNA, 15 bp, Homo sapiens
gcacttcagaattag

SEQ ID NO: 525394 - DNA, 15 bp, Homo sapiens
cacttcagaattaga

SEQ ID NO: 525395 - DNA, 15 bp, Homo sapiens
acttcagaattagaa

SEQ ID NO: 525396 - DNA, 15 bp, Homo sapiens
cttcagaattagaat

SEQ ID NO: 525397 - DNA, 15 bp, Homo sapiens
ttcagaattagaatc

SEQ ID NO: 525398 - DNA, 15 bp, Homo sapiens
tcagaattagaatca

SEQ ID NO: 525399 - DNA, 15 bp, Homo sapiens
cagaattagaatcaa

SEQ ID NO: 525400 - DNA, 15 bp, Homo sapiens
agaattagaatcaag

SEQ ID NO: 525401 - DNA, 15 bp, Homo sapiens
gaattagaatcaaga

SEQ ID NO: 525402 - DNA, 15 bp, Homo sapiens
aattagaatcaagaa

SEQ ID NO: 525403 - DNA, 15 bp, Homo sapiens
attagaatcaagaag

SEQ ID NO: 525404 - DNA, 15 bp, Homo sapiens
ttagaatcaagaagt

SEQ ID NO: 525405 - DNA, 15 bp, Homo sapiens
tagaatcaagaagtc

SEQ ID NO: 525406 - DNA, 15 bp, Homo sapiens
agaatcaagaagtct

SEQ ID NO: 525407 - DNA, 15 bp, Homo sapiens
gaatcaagaagtctt

SEQ ID NO: 525408 - DNA, 15 bp, Homo sapiens
aatcaagaagtctta

SEQ ID NO: 525409 - DNA, 15 bp, Homo sapiens
atcaagaagtcttag

SEQ ID NO: 525410 - DNA, 15 bp, Homo sapiens
tcaagaagtcttaga

SEQ ID NO: 525411 - DNA, 15 bp, Homo sapiens
caagaagtcttagaa

SEQ ID NO: 525412 - DNA, 15 bp, Homo sapiens
aagaagtcttagaaa

SEQ ID NO: 525413 - DNA, 15 bp, Homo sapiens
agaagtcttagaaac

SEQ ID NO: 525414 - DNA, 15 bp, Homo sapiens
gaagtcttagaaacc

SEQ ID NO: 525415 - DNA, 15 bp, Homo sapiens
aagtcttagaaacct

SEQ ID NO: 525416 - DNA, 15 bp, Homo sapiens
agtcttagaaaccta

SEQ ID NO: 525417 - DNA, 15 bp, Homo sapiens
gtcttagaaacctat

SEQ ID NO: 525418 - DNA, 15 bp, Homo sapiens
tcttagaaacctatt

SEQ ID NO: 525419 - DNA, 15 bp, Homo sapiens
cttagaaacctattg

SEQ ID NO: 525420 - DNA, 15 bp, Homo sapiens
ttagaaacctattgg

SEQ ID NO: 525421 - DNA, 15 bp, Homo sapiens
tagaaacctattggt

SEQ ID NO: 525422 - DNA, 15 bp, Homo sapiens
agaaacctattggtt

SEQ ID NO: 525423 - DNA, 15 bp, Homo sapiens
gaaacctattggttt

SEQ ID NO: 525424 - DNA, 15 bp, Homo sapiens
aaacctattggtttt

SEQ ID NO: 525425 - DNA, 15 bp, Homo sapiens
aacctattggtttta

SEQ ID NO: 525426 - DNA, 15 bp, Homo sapiens
acctattggttttat

SEQ ID NO: 525427 - DNA, 15 bp, Homo sapiens
cctattggttttatt

SEQ ID NO: 525428 - DNA, 15 bp, Homo sapiens
ctattggttttattc

SEQ ID NO: 525429 - DNA, 15 bp, Homo sapiens
tattggttttattct

SEQ ID NO: 525430 - DNA, 15 bp, Homo sapiens
attggttttattctc

SEQ ID NO: 525431 - DNA, 15 bp, Homo sapiens
ttggttttattctcc

SEQ ID NO: 525432 - DNA, 15 bp, Homo sapiens
tggttttattctccc

SEQ ID NO: 525433 - DNA, 15 bp, Homo sapiens
ggttttattctccct

SEQ ID NO: 525434 - DNA, 15 bp, Homo sapiens
gttttattctcccta

SEQ ID NO: 525435 - DNA, 15 bp, Homo sapiens
ttttattctccctaa

SEQ ID NO: 525436 - DNA, 15 bp, Homo sapiens
tttattctccctaat

SEQ ID NO: 525437 - DNA, 15 bp, Homo sapiens
ttattctccctaatg

SEQ ID NO: 525438 - DNA, 15 bp, Homo sapiens
tattctccctaatgt

SEQ ID NO: 525439 - DNA, 15 bp, Homo sapiens
attctccctaatgta

SEQ ID NO: 525440 - DNA, 15 bp, Homo sapiens
ttctccctaatgtat

SEQ ID NO: 525441 - DNA, 15 bp, Homo sapiens
tctccctaatgtatt

SEQ ID NO: 525442 - DNA, 15 bp, Homo sapiens
ctccctaatgtattt

SEQ ID NO: 525443 - DNA, 15 bp, Homo sapiens
tccctaatgtatttg

SEQ ID NO: 525444 - DNA, 15 bp, Homo sapiens
ccctaatgtatttgg

SEQ ID NO: 525445 - DNA, 15 bp, Homo sapiens
cctaatgtatttggc

SEQ ID NO: 525446 - DNA, 15 bp, Homo sapiens
ctaatgtatttggcc

SEQ ID NO: 525447 - DNA, 15 bp, Homo sapiens
taatgtatttggcca

SEQ ID NO: 525448 - DNA, 15 bp, Homo sapiens
aatgtatttggccac

SEQ ID NO: 525449 - DNA, 15 bp, Homo sapiens
atgtatttggccact

SEQ ID NO: 525450 - DNA, 15 bp, Homo sapiens
tgtatttggccactt

SEQ ID NO: 525451 - DNA, 15 bp, Homo sapiens
gtatttggccactta

SEQ ID NO: 525452 - DNA, 15 bp, Homo sapiens
tatttggccacttac

SEQ ID NO: 525453 - DNA, 15 bp, Homo sapiens
atttggccacttacc

SEQ ID NO: 525454 - DNA, 15 bp, Homo sapiens
tttggccacttacct

SEQ ID NO: 525455 - DNA, 15 bp, Homo sapiens
ttggccacttacctg

SEQ ID NO: 525456 - DNA, 15 bp, Homo sapiens
tggccacttacctgc

SEQ ID NO: 525457 - DNA, 15 bp, Homo sapiens
ggccacttacctgct

SEQ ID NO: 525458 - DNA, 15 bp, Homo sapiens
gccacttacctgctg

SEQ ID NO: 525459 - DNA, 15 bp, Homo sapiens
ccacttacctgctgg

SEQ ID NO: 525460 - DNA, 15 bp, Homo sapiens
cacttacctgctggg

SEQ ID NO: 525461 - DNA, 15 bp, Homo sapiens
acttacctgctgggg

SEQ ID NO: 525462 - DNA, 15 bp, Homo sapiens
cttacctgctgggga

SEQ ID NO: 525463 - DNA, 15 bp, Homo sapiens
ttacctgctggggaa

SEQ ID NO: 525464 - DNA, 15 bp, Homo sapiens
tacctgctggggaat

SEQ ID NO: 525465 - DNA, 15 bp, Homo sapiens
acctgctggggaatt

SEQ ID NO: 525466 - DNA, 15 bp, Homo sapiens
cctgctggggaattt

SEQ ID NO: 525467 - DNA, 15 bp, Homo sapiens
ctgctggggaatttg

SEQ ID NO: 525468 - DNA, 15 bp, Homo sapiens
tgctggggaatttgt

SEQ ID NO: 525469 - DNA, 15 bp, Homo sapiens
gctggggaatttgtc

SEQ ID NO: 525470 - DNA, 15 bp, Homo sapiens
ctggggaatttgtct

SEQ ID NO: 525471 - DNA, 15 bp, Homo sapiens
tggggaatttgtcta

SEQ ID NO: 525472 - DNA, 15 bp, Homo sapiens
ggggaatttgtctaa

SEQ ID NO: 525473 - DNA, 15 bp, Homo sapiens
gggaatttgtctaag

SEQ ID NO: 525474 - DNA, 15 bp, Homo sapiens
ggaatttgtctaagt

SEQ ID NO: 525475 - DNA, 15 bp, Homo sapiens
gaatttgtctaagtt

SEQ ID NO: 525476 - DNA, 15 bp, Homo sapiens
aatttgtctaagtta

SEQ ID NO: 525477 - DNA, 15 bp, Homo sapiens
atttgtctaagttat

SEQ ID NO: 525478 - DNA, 15 bp, Homo sapiens
tttgtctaagttata

SEQ ID NO: 525479 - DNA, 15 bp, Homo sapiens
ttgtctaagttataa

SEQ ID NO: 525480 - DNA, 15 bp, Homo sapiens
tgtctaagttataaa

SEQ ID NO: 525481 - DNA, 15 bp, Homo sapiens
gtctaagttataaaa

SEQ ID NO: 525482 - DNA, 15 bp, Homo sapiens
tctaagttataaaaa

SEQ ID NO: 525483 - DNA, 15 bp, Homo sapiens
ctaagttataaaaaa

SEQ ID NO: 525484 - DNA, 15 bp, Homo sapiens
taagttataaaaaat

SEQ ID NO: 525485 - DNA, 15 bp, Homo sapiens
aagttataaaaaata

SEQ ID NO: 525486 - DNA, 15 bp, Homo sapiens
agttataaaaaataa

SEQ ID NO: 525487 - DNA, 15 bp, Homo sapiens
gttataaaaaataat

SEQ ID NO: 525488 - DNA, 15 bp, Homo sapiens
ttataaaaaataatt

SEQ ID NO: 525489 - DNA, 15 bp, Homo sapiens
tataaaaaataattc

SEQ ID NO: 525490 - DNA, 15 bp, Homo sapiens
ataaaaaataattcc

SEQ ID NO: 525491 - DNA, 15 bp, Homo sapiens
taaaaaataattcct

SEQ ID NO: 525492 - DNA, 15 bp, Homo sapiens
aaaaaataattcctt

SEQ ID NO: 525493 - DNA, 15 bp, Homo sapiens
aaaaataattccttt

SEQ ID NO: 525494 - DNA, 15 bp, Homo sapiens
aaaataattcctttg

SEQ ID NO: 525495 - DNA, 15 bp, Homo sapiens
aaataattcctttgg

SEQ ID NO: 525496 - DNA, 15 bp, Homo sapiens
aataattcctttggg

SEQ ID NO: 525497 - DNA, 15 bp, Homo sapiens
ataattcctttggga

SEQ ID NO: 525498 - DNA, 15 bp, Homo sapiens
taattcctttgggaa

SEQ ID NO: 525499 - DNA, 15 bp, Homo sapiens
aattcctttgggaaa

SEQ ID NO: 525500 - DNA, 15 bp, Homo sapiens
attcctttgggaaac

SEQ ID NO: 525501 - DNA, 15 bp, Homo sapiens
ttcctttgggaaacc

SEQ ID NO: 525502 - DNA, 15 bp, Homo sapiens
tcctttgggaaaccc

SEQ ID NO: 525503 - DNA, 15 bp, Homo sapiens
cctttgggaaaccca

SEQ ID NO: 525504 - DNA, 15 bp, Homo sapiens
ctttgggaaacccaa

SEQ ID NO: 525505 - DNA, 15 bp, Homo sapiens
tttgggaaacccaaa

SEQ ID NO: 525506 - DNA, 15 bp, Homo sapiens
ttgggaaacccaaag

SEQ ID NO: 525507 - DNA, 15 bp, Homo sapiens
tgggaaacccaaagg

SEQ ID NO: 525508 - DNA, 15 bp, Homo sapiens
gggaaacccaaagga

SEQ ID NO: 525509 - DNA, 15 bp, Homo sapiens
ggaaacccaaaggaa

SEQ ID NO: 525510 - DNA, 15 bp, Homo sapiens
gaaacccaaaggaaa

SEQ ID NO: 525511 - DNA, 15 bp, Homo sapiens
aaacccaaaggaaag

SEQ ID NO: 525512 - DNA, 15 bp, Homo sapiens
aacccaaaggaaagt

SEQ ID NO: 525513 - DNA, 15 bp, Homo sapiens
acccaaaggaaagtt

SEQ ID NO: 525514 - DNA, 15 bp, Homo sapiens
cccaaaggaaagtta

SEQ ID NO: 525515 - DNA, 15 bp, Homo sapiens
ccaaaggaaagttat

SEQ ID NO: 525516 - DNA, 15 bp, Homo sapiens
caaaggaaagttatc

SEQ ID NO: 525517 - DNA, 15 bp, Homo sapiens
aaaggaaagttatct

SEQ ID NO: 525518 - DNA, 15 bp, Homo sapiens
aaggaaagttatcta

SEQ ID NO: 525519 - DNA, 15 bp, Homo sapiens
aggaaagttatctat

SEQ ID NO: 525520 - DNA, 15 bp, Homo sapiens
ggaaagttatctatt

SEQ ID NO: 525521 - DNA, 15 bp, Homo sapiens
gaaagttatctatta

SEQ ID NO: 525522 - DNA, 15 bp, Homo sapiens
aaagttatctattaa

SEQ ID NO: 525523 - DNA, 15 bp, Homo sapiens
aagttatctattaat

SEQ ID NO: 525524 - DNA, 15 bp, Homo sapiens
agttatctattaata

SEQ ID NO: 525525 - DNA, 15 bp, Homo sapiens
gttatctattaataa

SEQ ID NO: 525526 - DNA, 15 bp, Homo sapiens
ttatctattaataat

SEQ ID NO: 525527 - DNA, 15 bp, Homo sapiens
tatctattaataatt

SEQ ID NO: 525528 - DNA, 15 bp, Homo sapiens
atctattaataatta

SEQ ID NO: 525529 - DNA, 15 bp, Homo sapiens
tctattaataattac

SEQ ID NO: 525530 - DNA, 15 bp, Homo sapiens
ctattaataattacc

SEQ ID NO: 525531 - DNA, 15 bp, Homo sapiens
tattaataattaccc

SEQ ID NO: 525532 - DNA, 15 bp, Homo sapiens
attaataattacccc

SEQ ID NO: 525533 - DNA, 15 bp, Homo sapiens
ttaataattacccca

SEQ ID NO: 525534 - DNA, 15 bp, Homo sapiens
taataattaccccac

SEQ ID NO: 525535 - DNA, 15 bp, Homo sapiens
aataattaccccact

SEQ ID NO: 525536 - DNA, 15 bp, Homo sapiens
ataattaccccacta

SEQ ID NO: 525537 - DNA, 15 bp, Homo sapiens
taattaccccactac

SEQ ID NO: 525538 - DNA, 15 bp, Homo sapiens
aattaccccactact

SEQ ID NO: 525539 - DNA, 15 bp, Homo sapiens
attaccccactactt

SEQ ID NO: 525540 - DNA, 15 bp, Homo sapiens
ttaccccactacttt

SEQ ID NO: 525541 - DNA, 15 bp, Homo sapiens
taccccactactttt

SEQ ID NO: 525542 - DNA, 15 bp, Homo sapiens
accccactacttttt

SEQ ID NO: 525543 - DNA, 15 bp, Homo sapiens
ccccactactttttc

SEQ ID NO: 525544 - DNA, 15 bp, Homo sapiens
cccactactttttct

SEQ ID NO: 525545 - DNA, 15 bp, Homo sapiens
ccactactttttctg

SEQ ID NO: 525546 - DNA, 15 bp, Homo sapiens
cactactttttctga

SEQ ID NO: 525547 - DNA, 15 bp, Homo sapiens
actactttttctgat

SEQ ID NO: 525548 - DNA, 15 bp, Homo sapiens
ctactttttctgatt

SEQ ID NO: 525549 - DNA, 15 bp, Homo sapiens
tactttttctgattt

SEQ ID NO: 525550 - DNA, 15 bp, Homo sapiens
actttttctgattta

SEQ ID NO: 525551 - DNA, 15 bp, Homo sapiens
ctttttctgatttat

SEQ ID NO: 525552 - DNA, 15 bp, Homo sapiens
tttttctgatttatg

SEQ ID NO: 525553 - DNA, 15 bp, Homo sapiens
ttttctgatttatgt

SEQ ID NO: 525554 - DNA, 15 bp, Homo sapiens
tttctgatttatgta

SEQ ID NO: 525555 - DNA, 15 bp, Homo sapiens
ttctgatttatgtaa

SEQ ID NO: 525556 - DNA, 15 bp, Homo sapiens
tctgatttatgtaat

SEQ ID NO: 525557 - DNA, 15 bp, Homo sapiens
ctgatttatgtaatg

SEQ ID NO: 525558 - DNA, 15 bp, Homo sapiens
tgatttatgtaatgg

SEQ ID NO: 525559 - DNA, 15 bp, Homo sapiens
gatttatgtaatggc

SEQ ID NO: 525560 - DNA, 15 bp, Homo sapiens
atttatgtaatggcc

SEQ ID NO: 525561 - DNA, 15 bp, Homo sapiens
tttatgtaatggcca

SEQ ID NO: 525562 - DNA, 15 bp, Homo sapiens
ttatgtaatggccac

SEQ ID NO: 525563 - DNA, 15 bp, Homo sapiens
tatgtaatggccacg

SEQ ID NO: 525564 - DNA, 15 bp, Homo sapiens
atgtaatggccacgt

SEQ ID NO: 525565 - DNA, 15 bp, Homo sapiens
tgtaatggccacgta

SEQ ID NO: 525566 - DNA, 15 bp, Homo sapiens
gtaatggccacgtag

SEQ ID NO: 525567 - DNA, 15 bp, Homo sapiens
taatggccacgtaga

SEQ ID NO: 525568 - DNA, 15 bp, Homo sapiens
aatggccacgtagag

SEQ ID NO: 525569 - DNA, 15 bp, Homo sapiens
atggccacgtagagg

SEQ ID NO: 525570 - DNA, 15 bp, Homo sapiens
tggccacgtagaggt

SEQ ID NO: 525571 - DNA, 15 bp, Homo sapiens
ggccacgtagaggtt

SEQ ID NO: 525572 - DNA, 15 bp, Homo sapiens
gccacgtagaggtta

SEQ ID NO: 525573 - DNA, 15 bp, Homo sapiens
ccacgtagaggttag

SEQ ID NO: 525574 - DNA, 15 bp, Homo sapiens
cacgtagaggttaga

SEQ ID NO: 525575 - DNA, 15 bp, Homo sapiens
acgtagaggttagat

SEQ ID NO: 525576 - DNA, 15 bp, Homo sapiens
cgtagaggttagatg

SEQ ID NO: 525577 - DNA, 15 bp, Homo sapiens
gtagaggttagatgt

SEQ ID NO: 525578 - DNA, 15 bp, Homo sapiens
tagaggttagatgtg

SEQ ID NO: 525579 - DNA, 15 bp, Homo sapiens
agaggttagatgtga

SEQ ID NO: 525580 - DNA, 15 bp, Homo sapiens
gaggttagatgtgat

SEQ ID NO: 525581 - DNA, 15 bp, Homo sapiens
aggttagatgtgatg

SEQ ID NO: 525582 - DNA, 15 bp, Homo sapiens
ggttagatgtgatgg

SEQ ID NO: 525583 - DNA, 15 bp, Homo sapiens
gttagatgtgatggt

SEQ ID NO: 525584 - DNA, 15 bp, Homo sapiens
ttagatgtgatggtt

SEQ ID NO: 525585 - DNA, 15 bp, Homo sapiens
tagatgtgatggttg

SEQ ID NO: 525586 - DNA, 15 bp, Homo sapiens
agatgtgatggttgt

SEQ ID NO: 525587 - DNA, 15 bp, Homo sapiens
gatgtgatggttgtg

SEQ ID NO: 525588 - DNA, 15 bp, Homo sapiens
atgtgatggttgtga

SEQ ID NO: 525589 - DNA, 15 bp, Homo sapiens
tgtgatggttgtgac

SEQ ID NO: 525590 - DNA, 15 bp, Homo sapiens
gtgatggttgtgaca

SEQ ID NO: 525591 - DNA, 15 bp, Homo sapiens
tgatggttgtgacag

SEQ ID NO: 525592 - DNA, 15 bp, Homo sapiens
gatggttgtgacagt

SEQ ID NO: 525593 - DNA, 15 bp, Homo sapiens
atggttgtgacagta

SEQ ID NO: 525594 - DNA, 15 bp, Homo sapiens
tggttgtgacagtag

SEQ ID NO: 525595 - DNA, 15 bp, Homo sapiens
ggttgtgacagtagt

SEQ ID NO: 525596 - DNA, 15 bp, Homo sapiens
gttgtgacagtagtg

SEQ ID NO: 525597 - DNA, 15 bp, Homo sapiens
ttgtgacagtagtga

SEQ ID NO: 525598 - DNA, 15 bp, Homo sapiens
tgtgacagtagtgac

SEQ ID NO: 525599 - DNA, 15 bp, Homo sapiens
gtgacagtagtgact

SEQ ID NO: 525600 - DNA, 15 bp, Homo sapiens
tgacagtagtgacta

SEQ ID NO: 525601 - DNA, 15 bp, Homo sapiens
gacagtagtgactaa

SEQ ID NO: 525602 - DNA, 15 bp, Homo sapiens
acagtagtgactaat

SEQ ID NO: 525603 - DNA, 15 bp, Homo sapiens
cagtagtgactaata

SEQ ID NO: 525604 - DNA, 15 bp, Homo sapiens
agtagtgactaatac

SEQ ID NO: 525605 - DNA, 15 bp, Homo sapiens
gtagtgactaataca

SEQ ID NO: 525606 - DNA, 15 bp, Homo sapiens
tagtgactaatacag

SEQ ID NO: 525607 - DNA, 15 bp, Homo sapiens
agtgactaatacagc

SEQ ID NO: 525608 - DNA, 15 bp, Homo sapiens
gtgactaatacagcc

SEQ ID NO: 525609 - DNA, 15 bp, Homo sapiens
tgactaatacagcct

SEQ ID NO: 525610 - DNA, 15 bp, Homo sapiens
gactaatacagcctg

SEQ ID NO: 525611 - DNA, 15 bp, Homo sapiens
actaatacagcctgt

SEQ ID NO: 525612 - DNA, 15 bp, Homo sapiens
ctaatacagcctgtg

SEQ ID NO: 525613 - DNA, 15 bp, Homo sapiens
taatacagcctgtga

SEQ ID NO: 525614 - DNA, 15 bp, Homo sapiens
aatacagcctgtgaa

SEQ ID NO: 525615 - DNA, 15 bp, Homo sapiens
atacagcctgtgaag

SEQ ID NO: 525616 - DNA, 15 bp, Homo sapiens
tacagcctgtgaagc

SEQ ID NO: 525617 - DNA, 15 bp, Homo sapiens
acagcctgtgaagca

SEQ ID NO: 525618 - DNA, 15 bp, Homo sapiens
cagcctgtgaagcat

SEQ ID NO: 525619 - DNA, 15 bp, Homo sapiens
agcctgtgaagcatt

SEQ ID NO: 525620 - DNA, 15 bp, Homo sapiens
gcctgtgaagcattt

SEQ ID NO: 525621 - DNA, 15 bp, Homo sapiens
cctgtgaagcatttt

SEQ ID NO: 525622 - DNA, 15 bp, Homo sapiens
ctgtgaagcattttg

SEQ ID NO: 525623 - DNA, 15 bp, Homo sapiens
tgtgaagcattttgg

SEQ ID NO: 525624 - DNA, 15 bp, Homo sapiens
gtgaagcattttggt

SEQ ID NO: 525625 - DNA, 15 bp, Homo sapiens
tgaagcattttggtc

SEQ ID NO: 525626 - DNA, 15 bp, Homo sapiens
gaagcattttggtca

SEQ ID NO: 525627 - DNA, 15 bp, Homo sapiens
aagcattttggtcag

SEQ ID NO: 525628 - DNA, 15 bp, Homo sapiens
agcattttggtcaga

SEQ ID NO: 525629 - DNA, 15 bp, Homo sapiens
gcattttggtcagat

SEQ ID NO: 525630 - DNA, 15 bp, Homo sapiens
cattttggtcagata

SEQ ID NO: 525631 - DNA, 15 bp, Homo sapiens
attttggtcagatat

SEQ ID NO: 525632 - DNA, 15 bp, Homo sapiens
ttttggtcagatatc

SEQ ID NO: 525633 - DNA, 15 bp, Homo sapiens
tttggtcagatatct

SEQ ID NO: 525634 - DNA, 15 bp, Homo sapiens
ttggtcagatatcta

SEQ ID NO: 525635 - DNA, 15 bp, Homo sapiens
tggtcagatatctat

SEQ ID NO: 525636 - DNA, 15 bp, Homo sapiens
ggtcagatatctatg

SEQ ID NO: 525637 - DNA, 15 bp, Homo sapiens
gtcagatatctatgt

SEQ ID NO: 525638 - DNA, 15 bp, Homo sapiens
tcagatatctatgtg

SEQ ID NO: 525639 - DNA, 15 bp, Homo sapiens
cagatatctatgtgc

SEQ ID NO: 525640 - DNA, 15 bp, Homo sapiens
agatatctatgtgct

SEQ ID NO: 525641 - DNA, 15 bp, Homo sapiens
gatatctatgtgctt

SEQ ID NO: 525642 - DNA, 15 bp, Homo sapiens
atatctatgtgcttt

SEQ ID NO: 525643 - DNA, 15 bp, Homo sapiens
tatctatgtgctttc

SEQ ID NO: 525644 - DNA, 15 bp, Homo sapiens
atctatgtgctttca

SEQ ID NO: 525645 - DNA, 15 bp, Homo sapiens
tctatgtgctttcat

SEQ ID NO: 525646 - DNA, 15 bp, Homo sapiens
ctatgtgctttcatt

SEQ ID NO: 525647 - DNA, 15 bp, Homo sapiens
tatgtgctttcattc

SEQ ID NO: 525648 - DNA, 15 bp, Homo sapiens
atgtgctttcattcc

SEQ ID NO: 525649 - DNA, 15 bp, Homo sapiens
tgtgctttcattcca

SEQ ID NO: 525650 - DNA, 15 bp, Homo sapiens
gtgctttcattccag

SEQ ID NO: 525651 - DNA, 15 bp, Homo sapiens
tgctttcattccagg

SEQ ID NO: 525652 - DNA, 15 bp, Homo sapiens
gctttcattccaggt

SEQ ID NO: 525653 - DNA, 15 bp, Homo sapiens
ctttcattccaggtt

SEQ ID NO: 525654 - DNA, 15 bp, Homo sapiens
tttcattccaggttg

SEQ ID NO: 525655 - DNA, 15 bp, Homo sapiens
ttcattccaggttga

SEQ ID NO: 525656 - DNA, 15 bp, Homo sapiens
tcattccaggttgac

SEQ ID NO: 525657 - DNA, 15 bp, Homo sapiens
cattccaggttgact

SEQ ID NO: 525658 - DNA, 15 bp, Homo sapiens
attccaggttgactg

SEQ ID NO: 525659 - DNA, 15 bp, Homo sapiens
ttccaggttgactga

SEQ ID NO: 525660 - DNA, 15 bp, Homo sapiens
tccaggttgactgag

SEQ ID NO: 525661 - DNA, 15 bp, Homo sapiens
ccaggttgactgagg

SEQ ID NO: 525662 - DNA, 15 bp, Homo sapiens
caggttgactgaggc

SEQ ID NO: 525663 - DNA, 15 bp, Homo sapiens
aggttgactgaggca

SEQ ID NO: 525664 - DNA, 15 bp, Homo sapiens
ggttgactgaggcaa

SEQ ID NO: 525665 - DNA, 15 bp, Homo sapiens
gttgactgaggcaag

SEQ ID NO: 525666 - DNA, 15 bp, Homo sapiens
ttgactgaggcaaga

SEQ ID NO: 525667 - DNA, 15 bp, Homo sapiens
tgactgaggcaagac

SEQ ID NO: 525668 - DNA, 15 bp, Homo sapiens
gactgaggcaagact

SEQ ID NO: 525669 - DNA, 15 bp, Homo sapiens
actgaggcaagactt

SEQ ID NO: 525670 - DNA, 15 bp, Homo sapiens
ctgaggcaagacttt

SEQ ID NO: 525671 - DNA, 15 bp, Homo sapiens
tgaggcaagactttg

SEQ ID NO: 525672 - DNA, 15 bp, Homo sapiens
gaggcaagactttgg

SEQ ID NO: 525673 - DNA, 15 bp, Homo sapiens
aggcaagactttggc

SEQ ID NO: 525674 - DNA, 15 bp, Homo sapiens
ggcaagactttggct

SEQ ID NO: 525675 - DNA, 15 bp, Homo sapiens
gcaagactttggcta

SEQ ID NO: 525676 - DNA, 15 bp, Homo sapiens
caagactttggctag

SEQ ID NO: 525677 - DNA, 15 bp, Homo sapiens
aagactttggctagg

SEQ ID NO: 525678 - DNA, 15 bp, Homo sapiens
agactttggctaggg

SEQ ID NO: 525679 - DNA, 15 bp, Homo sapiens
gactttggctagggt

SEQ ID NO: 525680 - DNA, 15 bp, Homo sapiens
actttggctagggtt

SEQ ID NO: 525681 - DNA, 15 bp, Homo sapiens
ctttggctagggttt

SEQ ID NO: 525682 - DNA, 15 bp, Homo sapiens
tttggctagggtttg

SEQ ID NO: 525683 - DNA, 15 bp, Homo sapiens
ttggctagggtttga

SEQ ID NO: 525684 - DNA, 15 bp, Homo sapiens
tggctagggtttgat

SEQ ID NO: 525685 - DNA, 15 bp, Homo sapiens
ggctagggtttgatc

SEQ ID NO: 525686 - DNA, 15 bp, Homo sapiens
gctagggtttgatca

SEQ ID NO: 525687 - DNA, 15 bp, Homo sapiens
ctagggtttgatcag

SEQ ID NO: 525688 - DNA, 15 bp, Homo sapiens
tagggtttgatcagt

SEQ ID NO: 525689 - DNA, 15 bp, Homo sapiens
agggtttgatcagtg

SEQ ID NO: 525690 - DNA, 15 bp, Homo sapiens
gggtttgatcagtga

SEQ ID NO: 525691 - DNA, 15 bp, Homo sapiens
ggtttgatcagtgat

SEQ ID NO: 525692 - DNA, 15 bp, Homo sapiens
gtttgatcagtgatg

SEQ ID NO: 525693 - DNA, 15 bp, Homo sapiens
tttgatcagtgatgt

SEQ ID NO: 525694 - DNA, 15 bp, Homo sapiens
ttgatcagtgatgta

SEQ ID NO: 525695 - DNA, 15 bp, Homo sapiens
tgatcagtgatgtaa

SEQ ID NO: 525696 - DNA, 15 bp, Homo sapiens
gatcagtgatgtaac

SEQ ID NO: 525697 - DNA, 15 bp, Homo sapiens
atcagtgatgtaact

SEQ ID NO: 525698 - DNA, 15 bp, Homo sapiens
tcagtgatgtaacta

SEQ ID NO: 525699 - DNA, 15 bp, Homo sapiens
cagtgatgtaactac

SEQ ID NO: 525700 - DNA, 15 bp, Homo sapiens
agtgatgtaactact

SEQ ID NO: 525701 - DNA, 15 bp, Homo sapiens
gtgatgtaactactc

SEQ ID NO: 525702 - DNA, 15 bp, Homo sapiens
tgatgtaactactca

SEQ ID NO: 525703 - DNA, 15 bp, Homo sapiens
gatgtaactactcac

SEQ ID NO: 525704 - DNA, 15 bp, Homo sapiens
atgtaactactcacg

SEQ ID NO: 525705 - DNA, 15 bp, Homo sapiens
tgtaactactcacga

SEQ ID NO: 525706 - DNA, 15 bp, Homo sapiens
gtaactactcacgag

SEQ ID NO: 525707 - DNA, 15 bp, Homo sapiens
taactactcacgagt

SEQ ID NO: 525708 - DNA, 15 bp, Homo sapiens
aactactcacgagta

SEQ ID NO: 525709 - DNA, 15 bp, Homo sapiens
actactcacgagtac

SEQ ID NO: 525710 - DNA, 15 bp, Homo sapiens
ctactcacgagtacc

SEQ ID NO: 525711 - DNA, 15 bp, Homo sapiens
tactcacgagtacca

SEQ ID NO: 525712 - DNA, 15 bp, Homo sapiens
actcacgagtaccac

SEQ ID NO: 525713 - DNA, 15 bp, Homo sapiens
ctcacgagtaccacg

SEQ ID NO: 525714 - DNA, 15 bp, Homo sapiens
tcacgagtaccacgt

SEQ ID NO: 525715 - DNA, 15 bp, Homo sapiens
cacgagtaccacgtg

SEQ ID NO: 525716 - DNA, 15 bp, Homo sapiens
acgagtaccacgtgg

SEQ ID NO: 525717 - DNA, 15 bp, Homo sapiens
cgagtaccacgtggt

SEQ ID NO: 525718 - DNA, 15 bp, Homo sapiens
gagtaccacgtggtg

SEQ ID NO: 525719 - DNA, 15 bp, Homo sapiens
agtaccacgtggtgg

SEQ ID NO: 525720 - DNA, 15 bp, Homo sapiens
gtaccacgtggtggc

SEQ ID NO: 525721 - DNA, 15 bp, Homo sapiens
taccacgtggtggca

SEQ ID NO: 525722 - DNA, 15 bp, Homo sapiens
accacgtggtggcaa

SEQ ID NO: 525723 - DNA, 15 bp, Homo sapiens
ccacgtggtggcaat

SEQ ID NO: 525724 - DNA, 15 bp, Homo sapiens
cacgtggtggcaatg

SEQ ID NO: 525725 - DNA, 15 bp, Homo sapiens
acgtggtggcaatgg

SEQ ID NO: 525726 - DNA, 15 bp, Homo sapiens
cgtggtggcaatggc

SEQ ID NO: 525727 - DNA, 15 bp, Homo sapiens
gtggtggcaatggca

SEQ ID NO: 525728 - DNA, 15 bp, Homo sapiens
tggtggcaatggcat

SEQ ID NO: 525729 - DNA, 15 bp, Homo sapiens
ggtggcaatggcatt

SEQ ID NO: 525730 - DNA, 15 bp, Homo sapiens
gtggcaatggcattg

SEQ ID NO: 525731 - DNA, 15 bp, Homo sapiens
tggcaatggcattgc

SEQ ID NO: 525732 - DNA, 15 bp, Homo sapiens
ggcaatggcattgct

SEQ ID NO: 525733 - DNA, 15 bp, Homo sapiens
gcaatggcattgctg

SEQ ID NO: 525734 - DNA, 15 bp, Homo sapiens
caatggcattgctgc

SEQ ID NO: 525735 - DNA, 15 bp, Homo sapiens
aatggcattgctgca

SEQ ID NO: 525736 - DNA, 15 bp, Homo sapiens
atggcattgctgcag

SEQ ID NO: 525737 - DNA, 15 bp, Homo sapiens
tggcattgctgcaga

SEQ ID NO: 525738 - DNA, 15 bp, Homo sapiens
ggcattgctgcagac

SEQ ID NO: 525739 - DNA, 15 bp, Homo sapiens
gcattgctgcagacc

SEQ ID NO: 525740 - DNA, 15 bp, Homo sapiens
cattgctgcagacct

SEQ ID NO: 525741 - DNA, 15 bp, Homo sapiens
attgctgcagacctt

SEQ ID NO: 525742 - DNA, 15 bp, Homo sapiens
ttgctgcagaccttg

SEQ ID NO: 525743 - DNA, 15 bp, Homo sapiens
tgctgcagaccttgg

SEQ ID NO: 525744 - DNA, 15 bp, Homo sapiens
gctgcagaccttggc

SEQ ID NO: 525745 - DNA, 15 bp, Homo sapiens
ctgcagaccttggca

SEQ ID NO: 525746 - DNA, 15 bp, Homo sapiens
tgcagaccttggcag

SEQ ID NO: 525747 - DNA, 15 bp, Homo sapiens
gcagaccttggcagc

SEQ ID NO: 525748 - DNA, 15 bp, Homo sapiens
cagaccttggcagca

SEQ ID NO: 525749 - DNA, 15 bp, Homo sapiens
agaccttggcagcaa

SEQ ID NO: 525750 - DNA, 15 bp, Homo sapiens
gaccttggcagcaaa

SEQ ID NO: 525751 - DNA, 15 bp, Homo sapiens
accttggcagcaaag

SEQ ID NO: 525752 - DNA, 15 bp, Homo sapiens
ccttggcagcaaagc

SEQ ID NO: 525753 - DNA, 15 bp, Homo sapiens
cttggcagcaaagca

SEQ ID NO: 525754 - DNA, 15 bp, Homo sapiens
ttggcagcaaagcag

SEQ ID NO: 525755 - DNA, 15 bp, Homo sapiens
tggcagcaaagcagt

SEQ ID NO: 525756 - DNA, 15 bp, Homo sapiens
ggcagcaaagcagtg

SEQ ID NO: 525757 - DNA, 15 bp, Homo sapiens
gcagcaaagcagtgt

SEQ ID NO: 525758 - DNA, 15 bp, Homo sapiens
cagcaaagcagtgtt

SEQ ID NO: 525759 - DNA, 15 bp, Homo sapiens
agcaaagcagtgtta

SEQ ID NO: 525760 - DNA, 15 bp, Homo sapiens
gcaaagcagtgttag

SEQ ID NO: 525761 - DNA, 15 bp, Homo sapiens
caaagcagtgttaga

SEQ ID NO: 525762 - DNA, 15 bp, Homo sapiens
aaagcagtgttagag

SEQ ID NO: 525763 - DNA, 15 bp, Homo sapiens
aagcagtgttagagt

SEQ ID NO: 525764 - DNA, 15 bp, Homo sapiens
agcagtgttagagta

SEQ ID NO: 525765 - DNA, 15 bp, Homo sapiens
gcagtgttagagtag

SEQ ID NO: 525766 - DNA, 15 bp, Homo sapiens
cagtgttagagtagc

SEQ ID NO: 525767 - DNA, 15 bp, Homo sapiens
agtgttagagtagca

SEQ ID NO: 525768 - DNA, 15 bp, Homo sapiens
gtgttagagtagcag

SEQ ID NO: 525769 - DNA, 15 bp, Homo sapiens
tgttagagtagcagt

SEQ ID NO: 525770 - DNA, 15 bp, Homo sapiens
gttagagtagcagta

SEQ ID NO: 525771 - DNA, 15 bp, Homo sapiens
ttagagtagcagtag

SEQ ID NO: 525772 - DNA, 15 bp, Homo sapiens
tagagtagcagtaga

SEQ ID NO: 525773 - DNA, 15 bp, Homo sapiens
agagtagcagtagaa

SEQ ID NO: 525774 - DNA, 15 bp, Homo sapiens
gagtagcagtagaaa

SEQ ID NO: 525775 - DNA, 15 bp, Homo sapiens
agtagcagtagaaac

SEQ ID NO: 525776 - DNA, 15 bp, Homo sapiens
gtagcagtagaaacc

SEQ ID NO: 525777 - DNA, 15 bp, Homo sapiens
tagcagtagaaacct

SEQ ID NO: 525778 - DNA, 15 bp, Homo sapiens
agcagtagaaacctt

SEQ ID NO: 525779 - DNA, 15 bp, Homo sapiens
gcagtagaaaccttt

SEQ ID NO: 525780 - DNA, 15 bp, Homo sapiens
cagtagaaacctttg

SEQ ID NO: 525781 - DNA, 15 bp, Homo sapiens
agtagaaacctttgt

SEQ ID NO: 525782 - DNA, 15 bp, Homo sapiens
gtagaaacctttgtg

SEQ ID NO: 525783 - DNA, 15 bp, Homo sapiens
tagaaacctttgtga

SEQ ID NO: 525784 - DNA, 15 bp, Homo sapiens
agaaacctttgtgaa

SEQ ID NO: 525785 - DNA, 15 bp, Homo sapiens
gaaacctttgtgaag

SEQ ID NO: 525786 - DNA, 15 bp, Homo sapiens
aaacctttgtgaagc

SEQ ID NO: 525787 - DNA, 15 bp, Homo sapiens
aacctttgtgaagct

SEQ ID NO: 525788 - DNA, 15 bp, Homo sapiens
acctttgtgaagcta

SEQ ID NO: 525789 - DNA, 15 bp, Homo sapiens
cctttgtgaagctag

SEQ ID NO: 525790 - DNA, 15 bp, Homo sapiens
ctttgtgaagctagg

SEQ ID NO: 525791 - DNA, 15 bp, Homo sapiens
tttgtgaagctagga

SEQ ID NO: 525792 - DNA, 15 bp, Homo sapiens
ttgtgaagctaggaa

SEQ ID NO: 525793 - DNA, 15 bp, Homo sapiens
tgtgaagctaggaat

SEQ ID NO: 525794 - DNA, 15 bp, Homo sapiens
gtgaagctaggaata

SEQ ID NO: 525795 - DNA, 15 bp, Homo sapiens
tgaagctaggaatac

SEQ ID NO: 525796 - DNA, 15 bp, Homo sapiens
gaagctaggaataca

SEQ ID NO: 525797 - DNA, 15 bp, Homo sapiens
aagctaggaatacat

SEQ ID NO: 525798 - DNA, 15 bp, Homo sapiens
agctaggaatacatt

SEQ ID NO: 525799 - DNA, 15 bp, Homo sapiens
gctaggaatacattt

SEQ ID NO: 525800 - DNA, 15 bp, Homo sapiens
ctaggaatacatttt

SEQ ID NO: 525801 - DNA, 15 bp, Homo sapiens
taggaatacattttc

SEQ ID NO: 525802 - DNA, 15 bp, Homo sapiens
aggaatacattttct

SEQ ID NO: 525803 - DNA, 15 bp, Homo sapiens
ggaatacattttctg

SEQ ID NO: 525804 - DNA, 15 bp, Homo sapiens
gaatacattttctgg

SEQ ID NO: 525805 - DNA, 15 bp, Homo sapiens
aatacattttctggt

SEQ ID NO: 525806 - DNA, 15 bp, Homo sapiens
atacattttctggtc

SEQ ID NO: 525807 - DNA, 15 bp, Homo sapiens
tacattttctggtca

SEQ ID NO: 525808 - DNA, 15 bp, Homo sapiens
acattttctggtcat

SEQ ID NO: 525809 - DNA, 15 bp, Homo sapiens
cattttctggtcata

SEQ ID NO: 525810 - DNA, 15 bp, Homo sapiens
attttctggtcataa

SEQ ID NO: 525811 - DNA, 15 bp, Homo sapiens
ttttctggtcataaa

SEQ ID NO: 525812 - DNA, 15 bp, Homo sapiens
tttctggtcataaaa

SEQ ID NO: 525813 - DNA, 15 bp, Homo sapiens
ttctggtcataaaaa

SEQ ID NO: 525814 - DNA, 15 bp, Homo sapiens
tctggtcataaaaac

SEQ ID NO: 525815 - DNA, 15 bp, Homo sapiens
ctggtcataaaaacc

SEQ ID NO: 525816 - DNA, 15 bp, Homo sapiens
tggtcataaaaacct

SEQ ID NO: 525817 - DNA, 15 bp, Homo sapiens
ggtcataaaaacctc

SEQ ID NO: 525818 - DNA, 15 bp, Homo sapiens
gtcataaaaacctcc

SEQ ID NO: 525819 - DNA, 15 bp, Homo sapiens
tcataaaaacctcct

SEQ ID NO: 525820 - DNA, 15 bp, Homo sapiens
cataaaaacctcctg

SEQ ID NO: 525821 - DNA, 15 bp, Homo sapiens
ataaaaacctcctga

SEQ ID NO: 525822 - DNA, 15 bp, Homo sapiens
taaaaacctcctgaa

SEQ ID NO: 525823 - DNA, 15 bp, Homo sapiens
aaaaacctcctgaaa

SEQ ID NO: 525824 - DNA, 15 bp, Homo sapiens
aaaacctcctgaaaa

SEQ ID NO: 525825 - DNA, 15 bp, Homo sapiens
aaacctcctgaaaat

SEQ ID NO: 525826 - DNA, 15 bp, Homo sapiens
aacctcctgaaaatt

SEQ ID NO: 525827 - DNA, 15 bp, Homo sapiens
acctcctgaaaattg

SEQ ID NO: 525828 - DNA, 15 bp, Homo sapiens
cctcctgaaaattgt

SEQ ID NO: 525829 - DNA, 15 bp, Homo sapiens
ctcctgaaaattgtg

SEQ ID NO: 525830 - DNA, 15 bp, Homo sapiens
tcctgaaaattgtga

SEQ ID NO: 525831 - DNA, 15 bp, Homo sapiens
cctgaaaattgtgaa

SEQ ID NO: 525832 - DNA, 15 bp, Homo sapiens
ctgaaaattgtgaac

SEQ ID NO: 525833 - DNA, 15 bp, Homo sapiens
tgaaaattgtgaact

SEQ ID NO: 525834 - DNA, 15 bp, Homo sapiens
gaaaattgtgaactc

SEQ ID NO: 525835 - DNA, 15 bp, Homo sapiens
aaaattgtgaactca

SEQ ID NO: 525836 - DNA, 15 bp, Homo sapiens
aaattgtgaactcag

SEQ ID NO: 525837 - DNA, 15 bp, Homo sapiens
aattgtgaactcagt

SEQ ID NO: 525838 - DNA, 15 bp, Homo sapiens
attgtgaactcagtg

SEQ ID NO: 525839 - DNA, 15 bp, Homo sapiens
ttgtgaactcagtgt

SEQ ID NO: 525840 - DNA, 15 bp, Homo sapiens
tgtgaactcagtgta

SEQ ID NO: 525841 - DNA, 15 bp, Homo sapiens
gtgaactcagtgtag

SEQ ID NO: 525842 - DNA, 15 bp, Homo sapiens
tgaactcagtgtagc

SEQ ID NO: 525843 - DNA, 15 bp, Homo sapiens
gaactcagtgtagca

SEQ ID NO: 525844 - DNA, 15 bp, Homo sapiens
aactcagtgtagcag

SEQ ID NO: 525845 - DNA, 15 bp, Homo sapiens
actcagtgtagcagg

SEQ ID NO: 525846 - DNA, 15 bp, Homo sapiens
ctcagtgtagcagga

SEQ ID NO: 525847 - DNA, 15 bp, Homo sapiens
tcagtgtagcaggag

SEQ ID NO: 525848 - DNA, 15 bp, Homo sapiens
cagtgtagcaggaga

SEQ ID NO: 525849 - DNA, 15 bp, Homo sapiens
agtgtagcaggagaa

SEQ ID NO: 525850 - DNA, 15 bp, Homo sapiens
gtgtagcaggagaaa

SEQ ID NO: 525851 - DNA, 15 bp, Homo sapiens
tgtagcaggagaaag

SEQ ID NO: 525852 - DNA, 15 bp, Homo sapiens
gtagcaggagaaaga

SEQ ID NO: 525853 - DNA, 15 bp, Homo sapiens
tagcaggagaaagaa

SEQ ID NO: 525854 - DNA, 15 bp, Homo sapiens
agcaggagaaagaag

SEQ ID NO: 525855 - DNA, 15 bp, Homo sapiens
gcaggagaaagaaga

SEQ ID NO: 525856 - DNA, 15 bp, Homo sapiens
caggagaaagaagat

SEQ ID NO: 525857 - DNA, 15 bp, Homo sapiens
aggagaaagaagatg

SEQ ID NO: 525858 - DNA, 15 bp, Homo sapiens
ggagaaagaagatgg

SEQ ID NO: 525859 - DNA, 15 bp, Homo sapiens
gagaaagaagatggc

SEQ ID NO: 525860 - DNA, 15 bp, Homo sapiens
agaaagaagatggct

SEQ ID NO: 525861 - DNA, 15 bp, Homo sapiens
gaaagaagatggctt

SEQ ID NO: 525862 - DNA, 15 bp, Homo sapiens
aaagaagatggcttg

SEQ ID NO: 525863 - DNA, 15 bp, Homo sapiens
aagaagatggcttgt

SEQ ID NO: 525864 - DNA, 15 bp, Homo sapiens
agaagatggcttgtt

SEQ ID NO: 525865 - DNA, 15 bp, Homo sapiens
gaagatggcttgttt

SEQ ID NO: 525866 - DNA, 15 bp, Homo sapiens
aagatggcttgtttt

SEQ ID NO: 525867 - DNA, 15 bp, Homo sapiens
agatggcttgttttt

SEQ ID NO: 525868 - DNA, 15 bp, Homo sapiens
gatggcttgttttta

SEQ ID NO: 525869 - DNA, 15 bp, Homo sapiens
atggcttgtttttag

SEQ ID NO: 525870 - DNA, 15 bp, Homo sapiens
tggcttgtttttagt

SEQ ID NO: 525871 - DNA, 15 bp, Homo sapiens
ggcttgtttttagta

SEQ ID NO: 525872 - DNA, 15 bp, Homo sapiens
gcttgtttttagtaa

SEQ ID NO: 525873 - DNA, 15 bp, Homo sapiens
cttgtttttagtaaa

SEQ ID NO: 525874 - DNA, 15 bp, Homo sapiens
ttgtttttagtaaag

SEQ ID NO: 525875 - DNA, 15 bp, Homo sapiens
tgtttttagtaaagg

SEQ ID NO: 525876 - DNA, 15 bp, Homo sapiens
gtttttagtaaaggg

SEQ ID NO: 525877 - DNA, 15 bp, Homo sapiens
tttttagtaaagggc

SEQ ID NO: 525878 - DNA, 15 bp, Homo sapiens
ttttagtaaagggca

SEQ ID NO: 525879 - DNA, 15 bp, Homo sapiens
tttagtaaagggcaa

SEQ ID NO: 525880 - DNA, 15 bp, Homo sapiens
ttagtaaagggcaaa

SEQ ID NO: 525881 - DNA, 15 bp, Homo sapiens
tagtaaagggcaaag

SEQ ID NO: 525882 - DNA, 15 bp, Homo sapiens
agtaaagggcaaagt

SEQ ID NO: 525883 - DNA, 15 bp, Homo sapiens
gtaaagggcaaagtc

SEQ ID NO: 525884 - DNA, 15 bp, Homo sapiens
taaagggcaaagtca

SEQ ID NO: 525885 - DNA, 15 bp, Homo sapiens
aaagggcaaagtcat

SEQ ID NO: 525886 - DNA, 15 bp, Homo sapiens
aagggcaaagtcatt

SEQ ID NO: 525887 - DNA, 15 bp, Homo sapiens
agggcaaagtcattt

SEQ ID NO: 525888 - DNA, 15 bp, Homo sapiens
gggcaaagtcatttt

SEQ ID NO: 525889 - DNA, 15 bp, Homo sapiens
ggcaaagtcattttt

SEQ ID NO: 525890 - DNA, 15 bp, Homo sapiens
gcaaagtcattttta

SEQ ID NO: 525891 - DNA, 15 bp, Homo sapiens
caaagtcatttttaa

SEQ ID NO: 525892 - DNA, 15 bp, Homo sapiens
aaagtcatttttaag

SEQ ID NO: 525893 - DNA, 15 bp, Homo sapiens
aagtcatttttaagg

SEQ ID NO: 525894 - DNA, 15 bp, Homo sapiens
agtcatttttaagga

SEQ ID NO: 525895 - DNA, 15 bp, Homo sapiens
gtcatttttaaggat

SEQ ID NO: 525896 - DNA, 15 bp, Homo sapiens
tcatttttaaggatc

SEQ ID NO: 525897 - DNA, 15 bp, Homo sapiens
catttttaaggatca

SEQ ID NO: 525898 - DNA, 15 bp, Homo sapiens
atttttaaggatcag

SEQ ID NO: 525899 - DNA, 15 bp, Homo sapiens
tttttaaggatcaga

SEQ ID NO: 525900 - DNA, 15 bp, Homo sapiens
ttttaaggatcagaa

SEQ ID NO: 525901 - DNA, 15 bp, Homo sapiens
tttaaggatcagaag

SEQ ID NO: 525902 - DNA, 15 bp, Homo sapiens
ttaaggatcagaaga

SEQ ID NO: 525903 - DNA, 15 bp, Homo sapiens
taaggatcagaagaa

SEQ ID NO: 525904 - DNA, 15 bp, Homo sapiens
aaggatcagaagaag

SEQ ID NO: 525905 - DNA, 15 bp, Homo sapiens
aggatcagaagaaga

SEQ ID NO: 525906 - DNA, 15 bp, Homo sapiens
ggatcagaagaagaa

SEQ ID NO: 525907 - DNA, 15 bp, Homo sapiens
gatcagaagaagaaa

SEQ ID NO: 525908 - DNA, 15 bp, Homo sapiens
atcagaagaagaaac

SEQ ID NO: 525909 - DNA, 15 bp, Homo sapiens
tcagaagaagaaacg

SEQ ID NO: 525910 - DNA, 15 bp, Homo sapiens
cagaagaagaaacgg

SEQ ID NO: 525911 - DNA, 15 bp, Homo sapiens
agaagaagaaacgga

SEQ ID NO: 525912 - DNA, 15 bp, Homo sapiens
gaagaagaaacggag

SEQ ID NO: 525913 - DNA, 15 bp, Homo sapiens
aagaagaaacggaga

SEQ ID NO: 525914 - DNA, 15 bp, Homo sapiens
agaagaaacggagag

SEQ ID NO: 525915 - DNA, 15 bp, Homo sapiens
gaagaaacggagagt

SEQ ID NO: 525916 - DNA, 15 bp, Homo sapiens
aagaaacggagagtg

SEQ ID NO: 525917 - DNA, 15 bp, Homo sapiens
agaaacggagagtga

SEQ ID NO: 525918 - DNA, 15 bp, Homo sapiens
gaaacggagagtgaa

SEQ ID NO: 525919 - DNA, 15 bp, Homo sapiens
aaacggagagtgaaa

SEQ ID NO: 525920 - DNA, 15 bp, Homo sapiens
aacggagagtgaaac

SEQ ID NO: 525921 - DNA, 15 bp, Homo sapiens
acggagagtgaaaca

SEQ ID NO: 525922 - DNA, 15 bp, Homo sapiens
cggagagtgaaacaa

SEQ ID NO: 525923 - DNA, 15 bp, Homo sapiens
ggagagtgaaacaat

SEQ ID NO: 525924 - DNA, 15 bp, Homo sapiens
atttcatacagtctt

SEQ ID NO: 525925 - DNA, 15 bp, Homo sapiens
tttcatacagtcttc

SEQ ID NO: 525926 - DNA, 15 bp, Homo sapiens
ttcatacagtcttca

SEQ ID NO: 525927 - DNA, 15 bp, Homo sapiens
tcatacagtcttcaa

SEQ ID NO: 525928 - DNA, 15 bp, Homo sapiens
catacagtcttcaat

SEQ ID NO: 525929 - DNA, 15 bp, Homo sapiens
atacagtcttcaatg

SEQ ID NO: 525930 - DNA, 15 bp, Homo sapiens
tacagtcttcaatgt

SEQ ID NO: 525931 - DNA, 15 bp, Homo sapiens
acagtcttcaatgtg

SEQ ID NO: 525932 - DNA, 15 bp, Homo sapiens
cagtcttcaatgtgg

SEQ ID NO: 525933 - DNA, 15 bp, Homo sapiens
agtcttcaatgtgga

SEQ ID NO: 525934 - DNA, 15 bp, Homo sapiens
gtcttcaatgtggag

SEQ ID NO: 525935 - DNA, 15 bp, Homo sapiens
tcttcaatgtggagg

SEQ ID NO: 525936 - DNA, 15 bp, Homo sapiens
cttcaatgtggaggc

SEQ ID NO: 525937 - DNA, 15 bp, Homo sapiens
ttcaatgtggaggca

SEQ ID NO: 525938 - DNA, 15 bp, Homo sapiens
tcaatgtggaggcag

SEQ ID NO: 525939 - DNA, 15 bp, Homo sapiens
caatgtggaggcagt

SEQ ID NO: 525940 - DNA, 15 bp, Homo sapiens
aatgtggaggcagta

SEQ ID NO: 525941 - DNA, 15 bp, Homo sapiens
atgtggaggcagtag

SEQ ID NO: 525942 - DNA, 15 bp, Homo sapiens
tgtggaggcagtagg

SEQ ID NO: 525943 - DNA, 15 bp, Homo sapiens
gtggaggcagtaggg

SEQ ID NO: 525944 - DNA, 15 bp, Homo sapiens
tggaggcagtaggga

SEQ ID NO: 525945 - DNA, 15 bp, Homo sapiens
ggaggcagtagggat

SEQ ID NO: 525946 - DNA, 15 bp, Homo sapiens
gaggcagtagggatg

SEQ ID NO: 525947 - DNA, 15 bp, Homo sapiens
aggcagtagggatgg

SEQ ID NO: 525948 - DNA, 15 bp, Homo sapiens
ggcagtagggatgga

SEQ ID NO: 525949 - DNA, 15 bp, Homo sapiens
gcagtagggatggag

SEQ ID NO: 525950 - DNA, 15 bp, Homo sapiens
cagtagggatggaga

SEQ ID NO: 525951 - DNA, 15 bp, Homo sapiens
agtagggatggagaa

SEQ ID NO: 525952 - DNA, 15 bp, Homo sapiens
gtagggatggagaaa

SEQ ID NO: 525953 - DNA, 15 bp, Homo sapiens
tagggatggagaaaa

SEQ ID NO: 525954 - DNA, 15 bp, Homo sapiens
agggatggagaaaat

SEQ ID NO: 525955 - DNA, 15 bp, Homo sapiens
gggatggagaaaata

SEQ ID NO: 525956 - DNA, 15 bp, Homo sapiens
ggatggagaaaataa

SEQ ID NO: 525957 - DNA, 15 bp, Homo sapiens
gatggagaaaataat

SEQ ID NO: 525958 - DNA, 15 bp, Homo sapiens
atggagaaaataatg

SEQ ID NO: 525959 - DNA, 15 bp, Homo sapiens
tggagaaaataatgt

SEQ ID NO: 525960 - DNA, 15 bp, Homo sapiens
ggagaaaataatgta

SEQ ID NO: 525961 - DNA, 15 bp, Homo sapiens
gagaaaataatgtac

SEQ ID NO: 525962 - DNA, 15 bp, Homo sapiens
agaaaataatgtact

SEQ ID NO: 525963 - DNA, 15 bp, Homo sapiens
gaaaataatgtactt

SEQ ID NO: 525964 - DNA, 15 bp, Homo sapiens
aaaataatgtacttt

SEQ ID NO: 525965 - DNA, 15 bp, Homo sapiens
aaataatgtactttg

SEQ ID NO: 525966 - DNA, 15 bp, Homo sapiens
aataatgtactttgt

SEQ ID NO: 525967 - DNA, 15 bp, Homo sapiens
ataatgtactttgtg

SEQ ID NO: 525968 - DNA, 15 bp, Homo sapiens
taatgtactttgtgc

SEQ ID NO: 525969 - DNA, 15 bp, Homo sapiens
aatgtactttgtgct

SEQ ID NO: 525970 - DNA, 15 bp, Homo sapiens
atgtactttgtgctc

SEQ ID NO: 525971 - DNA, 15 bp, Homo sapiens
tgtactttgtgctct

SEQ ID NO: 525972 - DNA, 15 bp, Homo sapiens
gtactttgtgctctc

SEQ ID NO: 525973 - DNA, 15 bp, Homo sapiens
tactttgtgctctcc

SEQ ID NO: 525974 - DNA, 15 bp, Homo sapiens
actttgtgctctccg

SEQ ID NO: 525975 - DNA, 15 bp, Homo sapiens
ctttgtgctctccgg

SEQ ID NO: 525976 - DNA, 15 bp, Homo sapiens
tttgtgctctccggt

SEQ ID NO: 525977 - DNA, 15 bp, Homo sapiens
ttgtgctctccggta

SEQ ID NO: 525978 - DNA, 15 bp, Homo sapiens
tgtgctctccggtac

SEQ ID NO: 525979 - DNA, 15 bp, Homo sapiens
gtgctctccggtact

SEQ ID NO: 525980 - DNA, 15 bp, Homo sapiens
tgctctccggtactc

SEQ ID NO: 525981 - DNA, 15 bp, Homo sapiens
gctctccggtactct

SEQ ID NO: 525982 - DNA, 15 bp, Homo sapiens
ctctccggtactctt

SEQ ID NO: 525983 - DNA, 15 bp, Homo sapiens
tctccggtactcttt

SEQ ID NO: 525984 - DNA, 15 bp, Homo sapiens
ctccggtactctttc

SEQ ID NO: 525985 - DNA, 15 bp, Homo sapiens
tccggtactctttct

SEQ ID NO: 525986 - DNA, 15 bp, Homo sapiens
ccggtactctttctt

SEQ ID NO: 525987 - DNA, 15 bp, Homo sapiens
cggtactctttcttt

SEQ ID NO: 525988 - DNA, 15 bp, Homo sapiens
ggtactctttctttc

SEQ ID NO: 525989 - DNA, 15 bp, Homo sapiens
gtactctttctttcc

SEQ ID NO: 525990 - DNA, 15 bp, Homo sapiens
tactctttctttcct

SEQ ID NO: 525991 - DNA, 15 bp, Homo sapiens
actctttctttccta

SEQ ID NO: 525992 - DNA, 15 bp, Homo sapiens
ctctttctttcctat

SEQ ID NO: 525993 - DNA, 15 bp, Homo sapiens
tctttctttcctatt

SEQ ID NO: 525994 - DNA, 15 bp, Homo sapiens
ctttctttcctattg

SEQ ID NO: 525995 - DNA, 15 bp, Homo sapiens
tttctttcctattgt

SEQ ID NO: 525996 - DNA, 15 bp, Homo sapiens
ttctttcctattgtc

SEQ ID NO: 525997 - DNA, 15 bp, Homo sapiens
tctttcctattgtct

SEQ ID NO: 525998 - DNA, 15 bp, Homo sapiens
ctttcctattgtctg

SEQ ID NO: 525999 - DNA, 15 bp, Homo sapiens
tttcctattgtctga

SEQ ID NO: 526000 - DNA, 15 bp, Homo sapiens
ttcctattgtctgag

SEQ ID NO: 526001 - DNA, 15 bp, Homo sapiens
tcctattgtctgagg

SEQ ID NO: 526002 - DNA, 15 bp, Homo sapiens
cctattgtctgaggg

SEQ ID NO: 526003 - DNA, 15 bp, Homo sapiens
ctattgtctgagggg

SEQ ID NO: 526004 - DNA, 15 bp, Homo sapiens
tattgtctgagggga

SEQ ID NO: 526005 - DNA, 15 bp, Homo sapiens
attgtctgaggggat

SEQ ID NO: 526006 - DNA, 15 bp, Homo sapiens
ttgtctgaggggatt

SEQ ID NO: 526007 - DNA, 15 bp, Homo sapiens
tgtctgaggggattt

SEQ ID NO: 526008 - DNA, 15 bp, Homo sapiens
gtctgaggggatttg

SEQ ID NO: 526009 - DNA, 15 bp, Homo sapiens
tctgaggggatttgg

SEQ ID NO: 526010 - DNA, 15 bp, Homo sapiens
ctgaggggatttggg

SEQ ID NO: 526011 - DNA, 15 bp, Homo sapiens
tgaggggatttgggc

SEQ ID NO: 526012 - DNA, 15 bp, Homo sapiens
gaggggatttgggca

SEQ ID NO: 526013 - DNA, 15 bp, Homo sapiens
aggggatttgggcat

SEQ ID NO: 526014 - DNA, 15 bp, Homo sapiens
ggggatttgggcata

SEQ ID NO: 526015 - DNA, 15 bp, Homo sapiens
gggatttgggcataa

SEQ ID NO: 526016 - DNA, 15 bp, Homo sapiens
ggatttgggcataat

SEQ ID NO: 526017 - DNA, 15 bp, Homo sapiens
gatttgggcataatt

SEQ ID NO: 526018 - DNA, 15 bp, Homo sapiens
atttgggcataattt

SEQ ID NO: 526019 - DNA, 15 bp, Homo sapiens
tttgggcataattta

SEQ ID NO: 526020 - DNA, 15 bp, Homo sapiens
ttgggcataatttat

SEQ ID NO: 526021 - DNA, 15 bp, Homo sapiens
tgggcataatttatt

SEQ ID NO: 526022 - DNA, 15 bp, Homo sapiens
gggcataatttattt

SEQ ID NO: 526023 - DNA, 15 bp, Homo sapiens
ggcataatttatttt

SEQ ID NO: 526024 - DNA, 15 bp, Homo sapiens
gcataatttattttg

SEQ ID NO: 526025 - DNA, 15 bp, Homo sapiens
cataatttattttgc

SEQ ID NO: 526026 - DNA, 15 bp, Homo sapiens
ataatttattttgct

SEQ ID NO: 526027 - DNA, 15 bp, Homo sapiens
taatttattttgctg

SEQ ID NO: 526028 - DNA, 15 bp, Homo sapiens
aatttattttgctgc

SEQ ID NO: 526029 - DNA, 15 bp, Homo sapiens
atttattttgctgca

SEQ ID NO: 526030 - DNA, 15 bp, Homo sapiens
tttattttgctgcag

SEQ ID NO: 526031 - DNA, 15 bp, Homo sapiens
ttattttgctgcaga

SEQ ID NO: 526032 - DNA, 15 bp, Homo sapiens
tattttgctgcagag

SEQ ID NO: 526033 - DNA, 15 bp, Homo sapiens
attttgctgcagaga

SEQ ID NO: 526034 - DNA, 15 bp, Homo sapiens
ttttgctgcagagat

SEQ ID NO: 526035 - DNA, 15 bp, Homo sapiens
tttgctgcagagata

SEQ ID NO: 526036 - DNA, 15 bp, Homo sapiens
ttgctgcagagataa

SEQ ID NO: 526037 - DNA, 15 bp, Homo sapiens
tgctgcagagataaa

SEQ ID NO: 526038 - DNA, 15 bp, Homo sapiens
gctgcagagataaaa

SEQ ID NO: 526039 - DNA, 15 bp, Homo sapiens
ctgcagagataaaaa

SEQ ID NO: 526040 - DNA, 15 bp, Homo sapiens
tgcagagataaaaat

SEQ ID NO: 526041 - DNA, 15 bp, Homo sapiens
gcagagataaaaatt

SEQ ID NO: 526042 - DNA, 15 bp, Homo sapiens
cagagataaaaattt

SEQ ID NO: 526043 - DNA, 15 bp, Homo sapiens
agagataaaaatttg

SEQ ID NO: 526044 - DNA, 15 bp, Homo sapiens
gagataaaaatttgt

SEQ ID NO: 526045 - DNA, 15 bp, Homo sapiens
agataaaaatttgtt

SEQ ID NO: 526046 - DNA, 15 bp, Homo sapiens
gataaaaatttgtta

SEQ ID NO: 526047 - DNA, 15 bp, Homo sapiens
ataaaaatttgttat

SEQ ID NO: 526048 - DNA, 15 bp, Homo sapiens
taaaaatttgttata

SEQ ID NO: 526049 - DNA, 15 bp, Homo sapiens
aaaaatttgttatat

SEQ ID NO: 526050 - DNA, 15 bp, Homo sapiens
aaaatttgttatata

SEQ ID NO: 526051 - DNA, 15 bp, Homo sapiens
aaatttgttatatat

SEQ ID NO: 526052 - DNA, 15 bp, Homo sapiens
aatttgttatatata

SEQ ID NO: 526053 - DNA, 15 bp, Homo sapiens
atttgttatatatat

SEQ ID NO: 526054 - DNA, 15 bp, Homo sapiens
tttgttatatatatt

SEQ ID NO: 526055 - DNA, 15 bp, Homo sapiens
ttgttatatatattt

SEQ ID NO: 526056 - DNA, 15 bp, Homo sapiens
tgttatatatatttt

SEQ ID NO: 526057 - DNA, 15 bp, Homo sapiens
gttatatatattttt

SEQ ID NO: 526058 - DNA, 15 bp, Homo sapiens
ttatatatatttttt

SEQ ID NO: 526059 - DNA, 15 bp, Homo sapiens
tatatatatttttta

SEQ ID NO: 526060 - DNA, 15 bp, Homo sapiens
atatatattttttat

SEQ ID NO: 526061 - DNA, 15 bp, Homo sapiens
tatatattttttatc

SEQ ID NO: 526062 - DNA, 15 bp, Homo sapiens
atatattttttatca

SEQ ID NO: 526063 - DNA, 15 bp, Homo sapiens
tatattttttatcat

SEQ ID NO: 526064 - DNA, 15 bp, Homo sapiens
atattttttatcatt

SEQ ID NO: 526065 - DNA, 15 bp, Homo sapiens
tattttttatcattc

SEQ ID NO: 526066 - DNA, 15 bp, Homo sapiens
attttttatcattca

SEQ ID NO: 526067 - DNA, 15 bp, Homo sapiens
ttttttatcattcag

SEQ ID NO: 526068 - DNA, 15 bp, Homo sapiens
tttttatcattcagg

SEQ ID NO: 526069 - DNA, 15 bp, Homo sapiens
ttttatcattcaggg

SEQ ID NO: 526070 - DNA, 15 bp, Homo sapiens
tttatcattcagggc

SEQ ID NO: 526071 - DNA, 15 bp, Homo sapiens
ttatcattcagggcc

SEQ ID NO: 526072 - DNA, 15 bp, Homo sapiens
tatcattcagggcca

SEQ ID NO: 526073 - DNA, 15 bp, Homo sapiens
atcattcagggccaa

SEQ ID NO: 526074 - DNA, 15 bp, Homo sapiens
tcattcagggccaag

SEQ ID NO: 526075 - DNA, 15 bp, Homo sapiens
cattcagggccaagg

SEQ ID NO: 526076 - DNA, 15 bp, Homo sapiens
attcagggccaagga

SEQ ID NO: 526077 - DNA, 15 bp, Homo sapiens
ttcagggccaaggaa

SEQ ID NO: 526078 - DNA, 15 bp, Homo sapiens
tcagggccaaggaat

SEQ ID NO: 526079 - DNA, 15 bp, Homo sapiens
cagggccaaggaata

SEQ ID NO: 526080 - DNA, 15 bp, Homo sapiens
agggccaaggaatat

SEQ ID NO: 526081 - DNA, 15 bp, Homo sapiens
gggccaaggaatata

SEQ ID NO: 526082 - DNA, 15 bp, Homo sapiens
ggccaaggaatatag

SEQ ID NO: 526083 - DNA, 15 bp, Homo sapiens
gccaaggaatataga

SEQ ID NO: 526084 - DNA, 15 bp, Homo sapiens
ccaaggaatatagat

SEQ ID NO: 526085 - DNA, 15 bp, Homo sapiens
caaggaatatagatt

SEQ ID NO: 526086 - DNA, 15 bp, Homo sapiens
aaggaatatagattt

SEQ ID NO: 526087 - DNA, 15 bp, Homo sapiens
aggaatatagatttt

SEQ ID NO: 526088 - DNA, 15 bp, Homo sapiens
ggaatatagattttt

SEQ ID NO: 526089 - DNA, 15 bp, Homo sapiens
gaatatagatttttt

SEQ ID NO: 526090 - DNA, 15 bp, Homo sapiens
aatatagattttttt

SEQ ID NO: 526091 - DNA, 15 bp, Homo sapiens
atatagatttttttt

SEQ ID NO: 526092 - DNA, 15 bp, Homo sapiens
tatagattttttttt

SEQ ID NO: 526093 - DNA, 15 bp, Homo sapiens
atagatttttttttt

SEQ ID NO: 526094 - DNA, 15 bp, Homo sapiens
tagattttttttttc

SEQ ID NO: 526095 - DNA, 15 bp, Homo sapiens
agattttttttttca

SEQ ID NO: 526096 - DNA, 15 bp, Homo sapiens
gattttttttttcag

SEQ ID NO: 526097 - DNA, 15 bp, Homo sapiens
attttttttttcagc

SEQ ID NO: 526098 - DNA, 15 bp, Homo sapiens
ttttttttttcagcc

SEQ ID NO: 526099 - DNA, 15 bp, Homo sapiens
tttttttttcagcct

SEQ ID NO: 526100 - DNA, 15 bp, Homo sapiens
ttttttttcagcctt

SEQ ID NO: 526101 - DNA, 15 bp, Homo sapiens
tttttttcagccttg

SEQ ID NO: 526102 - DNA, 15 bp, Homo sapiens
ttttttcagccttgt

SEQ ID NO: 526103 - DNA, 15 bp, Homo sapiens
tttttcagccttgtc

SEQ ID NO: 526104 - DNA, 15 bp, Homo sapiens
ttttcagccttgtct

SEQ ID NO: 526105 - DNA, 15 bp, Homo sapiens
tttcagccttgtctc

SEQ ID NO: 526106 - DNA, 15 bp, Homo sapiens
ttcagccttgtctca

SEQ ID NO: 526107 - DNA, 15 bp, Homo sapiens
tcagccttgtctcag

SEQ ID NO: 526108 - DNA, 15 bp, Homo sapiens
cagccttgtctcagc

SEQ ID NO: 526109 - DNA, 15 bp, Homo sapiens
agccttgtctcagct

SEQ ID NO: 526110 - DNA, 15 bp, Homo sapiens
gccttgtctcagctg

SEQ ID NO: 526111 - DNA, 15 bp, Homo sapiens
ccttgtctcagctgg

SEQ ID NO: 526112 - DNA, 15 bp, Homo sapiens
cttgtctcagctggg

SEQ ID NO: 526113 - DNA, 15 bp, Homo sapiens
ttgtctcagctgggt

SEQ ID NO: 526114 - DNA, 15 bp, Homo sapiens
tgtctcagctgggtg

SEQ ID NO: 526115 - DNA, 15 bp, Homo sapiens
gtctcagctgggtgt

SEQ ID NO: 526116 - DNA, 15 bp, Homo sapiens
tctcagctgggtgtc

SEQ ID NO: 526117 - DNA, 15 bp, Homo sapiens
ctcagctgggtgtct

SEQ ID NO: 526118 - DNA, 15 bp, Homo sapiens
tcagctgggtgtctt

SEQ ID NO: 526119 - DNA, 15 bp, Homo sapiens
cagctgggtgtcttt

SEQ ID NO: 526120 - DNA, 15 bp, Homo sapiens
agctgggtgtcttta

SEQ ID NO: 526121 - DNA, 15 bp, Homo sapiens
gctgggtgtctttat

SEQ ID NO: 526122 - DNA, 15 bp, Homo sapiens
ctgggtgtctttatt

SEQ ID NO: 526123 - DNA, 15 bp, Homo sapiens
tgggtgtctttattt

SEQ ID NO: 526124 - DNA, 15 bp, Homo sapiens
gggtgtctttattta

SEQ ID NO: 526125 - DNA, 15 bp, Homo sapiens
ggtgtctttatttac

SEQ ID NO: 526126 - DNA, 15 bp, Homo sapiens
gtgtctttatttact

SEQ ID NO: 526127 - DNA, 15 bp, Homo sapiens
tgtctttatttactc

SEQ ID NO: 526128 - DNA, 15 bp, Homo sapiens
gtctttatttactct

SEQ ID NO: 526129 - DNA, 15 bp, Homo sapiens
tctttatttactctg

SEQ ID NO: 526130 - DNA, 15 bp, Homo sapiens
ctttatttactctgt

SEQ ID NO: 526131 - DNA, 15 bp, Homo sapiens
tttatttactctgtc

SEQ ID NO: 526132 - DNA, 15 bp, Homo sapiens
ttatttactctgtct

SEQ ID NO: 526133 - DNA, 15 bp, Homo sapiens
tatttactctgtctt

SEQ ID NO: 526134 - DNA, 15 bp, Homo sapiens
atttactctgtctta

SEQ ID NO: 526135 - DNA, 15 bp, Homo sapiens
tttactctgtcttaa

SEQ ID NO: 526136 - DNA, 15 bp, Homo sapiens
ttactctgtcttaaa

SEQ ID NO: 526137 - DNA, 15 bp, Homo sapiens
tactctgtcttaaag

SEQ ID NO: 526138 - DNA, 15 bp, Homo sapiens
actctgtcttaaagt

SEQ ID NO: 526139 - DNA, 15 bp, Homo sapiens
ctctgtcttaaagtg

SEQ ID NO: 526140 - DNA, 15 bp, Homo sapiens
tctgtcttaaagtgt

SEQ ID NO: 526141 - DNA, 15 bp, Homo sapiens
ctgtcttaaagtgtt

SEQ ID NO: 526142 - DNA, 15 bp, Homo sapiens
tgtcttaaagtgttc

SEQ ID NO: 526143 - DNA, 15 bp, Homo sapiens
gtcttaaagtgttcc

SEQ ID NO: 526144 - DNA, 15 bp, Homo sapiens
tcttaaagtgttcct

SEQ ID NO: 526145 - DNA, 15 bp, Homo sapiens
cttaaagtgttcctt

SEQ ID NO: 526146 - DNA, 15 bp, Homo sapiens
ttaaagtgttccttt

SEQ ID NO: 526147 - DNA, 15 bp, Homo sapiens
taaagtgttcctttt

SEQ ID NO: 526148 - DNA, 15 bp, Homo sapiens
aaagtgttcctttta

SEQ ID NO: 526149 - DNA, 15 bp, Homo sapiens
aagtgttccttttat

SEQ ID NO: 526150 - DNA, 15 bp, Homo sapiens
agtgttccttttatt

SEQ ID NO: 526151 - DNA, 15 bp, Homo sapiens
gtgttccttttatta

SEQ ID NO: 526152 - DNA, 15 bp, Homo sapiens
tgttccttttattat

SEQ ID NO: 526153 - DNA, 15 bp, Homo sapiens
gttccttttattatc

SEQ ID NO: 526154 - DNA, 15 bp, Homo sapiens
ttccttttattatca

SEQ ID NO: 526155 - DNA, 15 bp, Homo sapiens
tccttttattatcat

SEQ ID NO: 526156 - DNA, 15 bp, Homo sapiens
ccttttattatcatt

SEQ ID NO: 526157 - DNA, 15 bp, Homo sapiens
cttttattatcatta

SEQ ID NO: 526158 - DNA, 15 bp, Homo sapiens
ttttattatcattat

SEQ ID NO: 526159 - DNA, 15 bp, Homo sapiens
tttattatcattatt

SEQ ID NO: 526160 - DNA, 15 bp, Homo sapiens
ttattatcattatta

SEQ ID NO: 526161 - DNA, 15 bp, Homo sapiens
tattatcattattat

SEQ ID NO: 526162 - DNA, 15 bp, Homo sapiens
attatcattattatt

SEQ ID NO: 526163 - DNA, 15 bp, Homo sapiens
ttatcattattattt

SEQ ID NO: 526164 - DNA, 15 bp, Homo sapiens
tatcattattatttt

SEQ ID NO: 526165 - DNA, 15 bp, Homo sapiens
atcattattattttt

SEQ ID NO: 526166 - DNA, 15 bp, Homo sapiens
tcattattatttttt

SEQ ID NO: 526167 - DNA, 15 bp, Homo sapiens
cattattatttttta

SEQ ID NO: 526168 - DNA, 15 bp, Homo sapiens
attattattttttaa

SEQ ID NO: 526169 - DNA, 15 bp, Homo sapiens
ttattattttttaat

SEQ ID NO: 526170 - DNA, 15 bp, Homo sapiens
tattattttttaatc

SEQ ID NO: 526171 - DNA, 15 bp, Homo sapiens
attattttttaatca

SEQ ID NO: 526172 - DNA, 15 bp, Homo sapiens
ttattttttaatcat

SEQ ID NO: 526173 - DNA, 15 bp, Homo sapiens
tattttttaatcatt

SEQ ID NO: 526174 - DNA, 15 bp, Homo sapiens
attttttaatcattg

SEQ ID NO: 526175 - DNA, 15 bp, Homo sapiens
ttttttaatcattga

SEQ ID NO: 526176 - DNA, 15 bp, Homo sapiens
tttttaatcattgaa

SEQ ID NO: 526177 - DNA, 15 bp, Homo sapiens
ttttaatcattgaat

SEQ ID NO: 526178 - DNA, 15 bp, Homo sapiens
tttaatcattgaatt

SEQ ID NO: 526179 - DNA, 15 bp, Homo sapiens
ttaatcattgaattc

SEQ ID NO: 526180 - DNA, 15 bp, Homo sapiens
taatcattgaattcc

SEQ ID NO: 526181 - DNA, 15 bp, Homo sapiens
aatcattgaattcca

SEQ ID NO: 526182 - DNA, 15 bp, Homo sapiens
atcattgaattccat

SEQ ID NO: 526183 - DNA, 15 bp, Homo sapiens
tcattgaattccatt

SEQ ID NO: 526184 - DNA, 15 bp, Homo sapiens
cattgaattccattt

SEQ ID NO: 526185 - DNA, 15 bp, Homo sapiens
aggcgggtggatcat

SEQ ID NO: 526186 - DNA, 15 bp, Homo sapiens
ggcgggtggatcatg

SEQ ID NO: 526187 - DNA, 15 bp, Homo sapiens
gcgggtggatcatga

SEQ ID NO: 526188 - DNA, 15 bp, Homo sapiens
cgggtggatcatgag

SEQ ID NO: 526189 - DNA, 15 bp, Homo sapiens
gggtggatcatgagg

SEQ ID NO: 526190 - DNA, 15 bp, Homo sapiens
ggtggatcatgaggt

SEQ ID NO: 526191 - DNA, 15 bp, Homo sapiens
ctggccaacatagtg

SEQ ID NO: 526192 - DNA, 15 bp, Homo sapiens
tggccaacatagtga

SEQ ID NO: 526193 - DNA, 15 bp, Homo sapiens
ggccaacatagtgaa

SEQ ID NO: 526194 - DNA, 15 bp, Homo sapiens
gccaacatagtgaaa

SEQ ID NO: 526195 - DNA, 15 bp, Homo sapiens
ccaacatagtgaaac

SEQ ID NO: 526196 - DNA, 15 bp, Homo sapiens
caacatagtgaaacc

SEQ ID NO: 526197 - DNA, 15 bp, Homo sapiens
aacatagtgaaaccc

SEQ ID NO: 526198 - DNA, 15 bp, Homo sapiens
acatagtgaaacccc

SEQ ID NO: 526199 - DNA, 15 bp, Homo sapiens
catagtgaaaccccg

SEQ ID NO: 526200 - DNA, 15 bp, Homo sapiens
atagtgaaaccccgt

SEQ ID NO: 526201 - DNA, 15 bp, Homo sapiens
tagtgaaaccccgtt

SEQ ID NO: 526202 - DNA, 15 bp, Homo sapiens
agtgaaaccccgttt

SEQ ID NO: 526203 - DNA, 15 bp, Homo sapiens
gtgaaaccccgtttc

SEQ ID NO: 526204 - DNA, 15 bp, Homo sapiens
tgaaaccccgtttct

SEQ ID NO: 526205 - DNA, 15 bp, Homo sapiens
ttagccgggtgtggt

SEQ ID NO: 526206 - DNA, 15 bp, Homo sapiens
tagccgggtgtggtg

SEQ ID NO: 526207 - DNA, 15 bp, Homo sapiens
gccgggtgtggtggt

SEQ ID NO: 526208 - DNA, 15 bp, Homo sapiens
ccgggtgtggtggtg

SEQ ID NO: 526209 - DNA, 15 bp, Homo sapiens
cgggtgtggtggtgt

SEQ ID NO: 526210 - DNA, 15 bp, Homo sapiens
tgtggtggtgtgcac

SEQ ID NO: 526211 - DNA, 15 bp, Homo sapiens
taatcccagctacta

SEQ ID NO: 526212 - DNA, 15 bp, Homo sapiens
aatcccagctactag

SEQ ID NO: 526213 - DNA, 15 bp, Homo sapiens
atcccagctactagg

SEQ ID NO: 526214 - DNA, 15 bp, Homo sapiens
tcccagctactaggg

SEQ ID NO: 526215 - DNA, 15 bp, Homo sapiens
cccagctactaggga

SEQ ID NO: 526216 - DNA, 15 bp, Homo sapiens
ccagctactagggag

SEQ ID NO: 526217 - DNA, 15 bp, Homo sapiens
cagctactagggagg

SEQ ID NO: 526218 - DNA, 15 bp, Homo sapiens
agctactagggaggc

SEQ ID NO: 526219 - DNA, 15 bp, Homo sapiens
gctactagggaggct

SEQ ID NO: 526220 - DNA, 15 bp, Homo sapiens
ctactagggaggctg

SEQ ID NO: 526221 - DNA, 15 bp, Homo sapiens
tactagggaggctga

SEQ ID NO: 526222 - DNA, 15 bp, Homo sapiens
actagggaggctgag

SEQ ID NO: 526223 - DNA, 15 bp, Homo sapiens
ctagggaggctgagg

SEQ ID NO: 526224 - DNA, 15 bp, Homo sapiens
tagggaggctgaggc

SEQ ID NO: 526225 - DNA, 15 bp, Homo sapiens
agggaggctgaggca

SEQ ID NO: 526226 - DNA, 15 bp, Homo sapiens
gtgagccgagatggc

SEQ ID NO: 526227 - DNA, 15 bp, Homo sapiens
tgagccgagatggca

SEQ ID NO: 526228 - DNA, 15 bp, Homo sapiens
gagccgagatggcac

SEQ ID NO: 526229 - DNA, 15 bp, Homo sapiens
agccgagatggcacc

SEQ ID NO: 526230 - DNA, 15 bp, Homo sapiens
gccgagatggcacca

SEQ ID NO: 526231 - DNA, 15 bp, Homo sapiens
ccgagatggcaccat

SEQ ID NO: 526232 - DNA, 15 bp, Homo sapiens
cgagatggcaccatt

SEQ ID NO: 526233 - DNA, 15 bp, Homo sapiens
gagatggcaccattg

SEQ ID NO: 526234 - DNA, 15 bp, Homo sapiens
agatggcaccattgc

SEQ ID NO: 526235 - DNA, 15 bp, Homo sapiens
gatggcaccattgca

SEQ ID NO: 526236 - DNA, 15 bp, Homo sapiens
atggcaccattgcac

SEQ ID NO: 526237 - DNA, 15 bp, Homo sapiens
tggcaccattgcact

SEQ ID NO: 526238 - DNA, 15 bp, Homo sapiens
ggcaccattgcactc

SEQ ID NO: 526239 - DNA, 15 bp, Homo sapiens
attgcactccagccc

SEQ ID NO: 526240 - DNA, 15 bp, Homo sapiens
ttgcactccagccca

SEQ ID NO: 526241 - DNA, 15 bp, Homo sapiens
tgcactccagcccag

SEQ ID NO: 526242 - DNA, 15 bp, Homo sapiens
gcactccagcccagg

SEQ ID NO: 526243 - DNA, 15 bp, Homo sapiens
cactccagcccaggc

SEQ ID NO: 526244 - DNA, 15 bp, Homo sapiens
actccagcccaggcg

SEQ ID NO: 526245 - DNA, 15 bp, Homo sapiens
ctccagcccaggcga

SEQ ID NO: 526246 - DNA, 15 bp, Homo sapiens
tccagcccaggcgac

SEQ ID NO: 526247 - DNA, 15 bp, Homo sapiens
ccagcccaggcgaca

SEQ ID NO: 526248 - DNA, 15 bp, Homo sapiens
cagcccaggcgacag

SEQ ID NO: 526249 - DNA, 15 bp, Homo sapiens
agcccaggcgacagt

SEQ ID NO: 526250 - DNA, 15 bp, Homo sapiens
gcccaggcgacagtg

SEQ ID NO: 526251 - DNA, 15 bp, Homo sapiens
cccaggcgacagtgc

SEQ ID NO: 526252 - DNA, 15 bp, Homo sapiens
ccaggcgacagtgca

SEQ ID NO: 526253 - DNA, 15 bp, Homo sapiens
caggcgacagtgcaa

SEQ ID NO: 526254 - DNA, 15 bp, Homo sapiens
aggcgacagtgcaag

SEQ ID NO: 526255 - DNA, 15 bp, Homo sapiens
ggcgacagtgcaaga

SEQ ID NO: 526256 - DNA, 15 bp, Homo sapiens
gcgacagtgcaagac

SEQ ID NO: 526257 - DNA, 15 bp, Homo sapiens
cgacagtgcaagact

SEQ ID NO: 526258 - DNA, 15 bp, Homo sapiens
gacagtgcaagactg

SEQ ID NO: 526259 - DNA, 15 bp, Homo sapiens
acagtgcaagactgc

SEQ ID NO: 526260 - DNA, 15 bp, Homo sapiens
cagtgcaagactgcg

SEQ ID NO: 526261 - DNA, 15 bp, Homo sapiens
agtgcaagactgcgt

SEQ ID NO: 526262 - DNA, 15 bp, Homo sapiens
gtgcaagactgcgtc

SEQ ID NO: 526263 - DNA, 15 bp, Homo sapiens
tgcaagactgcgtct

SEQ ID NO: 526264 - DNA, 15 bp, Homo sapiens
gcaagactgcgtctc

SEQ ID NO: 526265 - DNA, 15 bp, Homo sapiens
caagactgcgtctca

SEQ ID NO: 526266 - DNA, 15 bp, Homo sapiens
aagactgcgtctcaa

SEQ ID NO: 526267 - DNA, 15 bp, Homo sapiens
agactgcgtctcaaa

SEQ ID NO: 526268 - DNA, 15 bp, Homo sapiens
gactgcgtctcaaaa

SEQ ID NO: 526269 - DNA, 15 bp, Homo sapiens
actgcgtctcaaaaa

SEQ ID NO: 526270 - DNA, 15 bp, Homo sapiens
ctgcgtctcaaaaaa

SEQ ID NO: 526271 - DNA, 15 bp, Homo sapiens
tgcgtctcaaaaaaa

SEQ ID NO: 526272 - DNA, 15 bp, Homo sapiens
gcgtctcaaaaaaaa

SEQ ID NO: 526273 - DNA, 15 bp, Homo sapiens
aaaaaaaaaaaacac

SEQ ID NO: 526274 - DNA, 15 bp, Homo sapiens
aaaaaaaaaaacaca

SEQ ID NO: 526275 - DNA, 15 bp, Homo sapiens
aaaaaaaaaacacac

SEQ ID NO: 526276 - DNA, 15 bp, Homo sapiens
aaaaaaaaacacaca

SEQ ID NO: 526277 - DNA, 15 bp, Homo sapiens
aaaaaaaacacacag

SEQ ID NO: 526278 - DNA, 15 bp, Homo sapiens
aaaaaaacacacaga

SEQ ID NO: 526279 - DNA, 15 bp, Homo sapiens
aaaaaacacacagac

SEQ ID NO: 526280 - DNA, 15 bp, Homo sapiens
aaaaacacacagact

SEQ ID NO: 526281 - DNA, 15 bp, Homo sapiens
aaaacacacagactt

SEQ ID NO: 526282 - DNA, 15 bp, Homo sapiens
aaacacacagacttg

SEQ ID NO: 526283 - DNA, 15 bp, Homo sapiens
aacacacagacttgt

SEQ ID NO: 526284 - DNA, 15 bp, Homo sapiens
acacacagacttgtc

SEQ ID NO: 526285 - DNA, 15 bp, Homo sapiens
cacacagacttgtcc

SEQ ID NO: 526286 - DNA, 15 bp, Homo sapiens
acacagacttgtcct

SEQ ID NO: 526287 - DNA, 15 bp, Homo sapiens
cacagacttgtccta

SEQ ID NO: 526288 - DNA, 15 bp, Homo sapiens
acagacttgtcctac

SEQ ID NO: 526289 - DNA, 15 bp, Homo sapiens
cagacttgtcctact

SEQ ID NO: 526290 - DNA, 15 bp, Homo sapiens
agacttgtcctactg

SEQ ID NO: 526291 - DNA, 15 bp, Homo sapiens
gacttgtcctactgc

SEQ ID NO: 526292 - DNA, 15 bp, Homo sapiens
acttgtcctactgcc

SEQ ID NO: 526293 - DNA, 15 bp, Homo sapiens
cttgtcctactgcca

SEQ ID NO: 526294 - DNA, 15 bp, Homo sapiens
ttgtcctactgccat

SEQ ID NO: 526295 - DNA, 15 bp, Homo sapiens
tgtcctactgccatt

SEQ ID NO: 526296 - DNA, 15 bp, Homo sapiens
gtcctactgccattt

SEQ ID NO: 526297 - DNA, 15 bp, Homo sapiens
tcctactgccatttc

SEQ ID NO: 526298 - DNA, 15 bp, Homo sapiens
cctactgccatttct

SEQ ID NO: 526299 - DNA, 15 bp, Homo sapiens
ctactgccatttctt

SEQ ID NO: 526300 - DNA, 15 bp, Homo sapiens
tactgccatttcttt

SEQ ID NO: 526301 - DNA, 15 bp, Homo sapiens
actgccatttctttt

SEQ ID NO: 526302 - DNA, 15 bp, Homo sapiens
ctgccatttcttttc

SEQ ID NO: 526303 - DNA, 15 bp, Homo sapiens
tgccatttcttttca

SEQ ID NO: 526304 - DNA, 15 bp, Homo sapiens
gccatttcttttcac

SEQ ID NO: 526305 - DNA, 15 bp, Homo sapiens
ccatttcttttcact

SEQ ID NO: 526306 - DNA, 15 bp, Homo sapiens
catttcttttcactc

SEQ ID NO: 526307 - DNA, 15 bp, Homo sapiens
atttcttttcactct

SEQ ID NO: 526308 - DNA, 15 bp, Homo sapiens
tttcttttcactctg

SEQ ID NO: 526309 - DNA, 15 bp, Homo sapiens
ttcttttcactctgg

SEQ ID NO: 526310 - DNA, 15 bp, Homo sapiens
tcttttcactctggc

SEQ ID NO: 526311 - DNA, 15 bp, Homo sapiens
cttttcactctggcg

SEQ ID NO: 526312 - DNA, 15 bp, Homo sapiens
ttttcactctggcgg

SEQ ID NO: 526313 - DNA, 15 bp, Homo sapiens
tttcactctggcggt

SEQ ID NO: 526314 - DNA, 15 bp, Homo sapiens
ttcactctggcggta

SEQ ID NO: 526315 - DNA, 15 bp, Homo sapiens
tcactctggcggtaa

SEQ ID NO: 526316 - DNA, 15 bp, Homo sapiens
cactctggcggtaaa

SEQ ID NO: 526317 - DNA, 15 bp, Homo sapiens
actctggcggtaaag

SEQ ID NO: 526318 - DNA, 15 bp, Homo sapiens
ctctggcggtaaagt

SEQ ID NO: 526319 - DNA, 15 bp, Homo sapiens
tctggcggtaaagta

SEQ ID NO: 526320 - DNA, 15 bp, Homo sapiens
ctggcggtaaagtaa

SEQ ID NO: 526321 - DNA, 15 bp, Homo sapiens
tggcggtaaagtaag

SEQ ID NO: 526322 - DNA, 15 bp, Homo sapiens
ggcggtaaagtaaga

SEQ ID NO: 526323 - DNA, 15 bp, Homo sapiens
gcggtaaagtaagag

SEQ ID NO: 526324 - DNA, 15 bp, Homo sapiens
cggtaaagtaagaga

SEQ ID NO: 526325 - DNA, 15 bp, Homo sapiens
ggtaaagtaagagag

SEQ ID NO: 526326 - DNA, 15 bp, Homo sapiens
gtaaagtaagagagt

SEQ ID NO: 526327 - DNA, 15 bp, Homo sapiens
taaagtaagagagtg

SEQ ID NO: 526328 - DNA, 15 bp, Homo sapiens
aaagtaagagagtgt

SEQ ID NO: 526329 - DNA, 15 bp, Homo sapiens
aagtaagagagtgtg

SEQ ID NO: 526330 - DNA, 15 bp, Homo sapiens
agtaagagagtgtgt

SEQ ID NO: 526331 - DNA, 15 bp, Homo sapiens
gtaagagagtgtgtg

SEQ ID NO: 526332 - DNA, 15 bp, Homo sapiens
taagagagtgtgtgt

SEQ ID NO: 526333 - DNA, 15 bp, Homo sapiens
aagagagtgtgtgtg

SEQ ID NO: 526334 - DNA, 15 bp, Homo sapiens
agagagtgtgtgtgt

SEQ ID NO: 526335 - DNA, 15 bp, Homo sapiens
gagagtgtgtgtgtg

SEQ ID NO: 526336 - DNA, 15 bp, Homo sapiens
agagtgtgtgtgtgt

SEQ ID NO: 526337 - DNA, 15 bp, Homo sapiens
gagtgtgtgtgtgtg

SEQ ID NO: 526338 - DNA, 15 bp, Homo sapiens
agtgtgtgtgtgtgt

SEQ ID NO: 526339 - DNA, 15 bp, Homo sapiens
gtgtgtgtgtgtttc

SEQ ID NO: 526340 - DNA, 15 bp, Homo sapiens
tgtgtgtgtgtttct

SEQ ID NO: 526341 - DNA, 15 bp, Homo sapiens
gtgtgtgtgtttctg

SEQ ID NO: 526342 - DNA, 15 bp, Homo sapiens
tgtgtgtgtttctgt

SEQ ID NO: 526343 - DNA, 15 bp, Homo sapiens
gtgtgtgtttctgtc

SEQ ID NO: 526344 - DNA, 15 bp, Homo sapiens
tgtgtgtttctgtcc

SEQ ID NO: 526345 - DNA, 15 bp, Homo sapiens
gtgtgtttctgtccg

SEQ ID NO: 526346 - DNA, 15 bp, Homo sapiens
tgtgtttctgtccgt

SEQ ID NO: 526347 - DNA, 15 bp, Homo sapiens
gtgtttctgtccgtc

SEQ ID NO: 526348 - DNA, 15 bp, Homo sapiens
tgtttctgtccgtct

SEQ ID NO: 526349 - DNA, 15 bp, Homo sapiens
gtttctgtccgtctg

SEQ ID NO: 526350 - DNA, 15 bp, Homo sapiens
tttctgtccgtctgt

SEQ ID NO: 526351 - DNA, 15 bp, Homo sapiens
ttctgtccgtctgtc

SEQ ID NO: 526352 - DNA, 15 bp, Homo sapiens
tctgtccgtctgtct

SEQ ID NO: 526353 - DNA, 15 bp, Homo sapiens
ctgtccgtctgtctg

SEQ ID NO: 526354 - DNA, 15 bp, Homo sapiens
tgtccgtctgtctgt

SEQ ID NO: 526355 - DNA, 15 bp, Homo sapiens
gtccgtctgtctgtc

SEQ ID NO: 526356 - DNA, 15 bp, Homo sapiens
tccgtctgtctgtca

SEQ ID NO: 526357 - DNA, 15 bp, Homo sapiens
ccgtctgtctgtcaa

SEQ ID NO: 526358 - DNA, 15 bp, Homo sapiens
cgtctgtctgtcaag

SEQ ID NO: 526359 - DNA, 15 bp, Homo sapiens
gtctgtctgtcaagg

SEQ ID NO: 526360 - DNA, 15 bp, Homo sapiens
tctgtctgtcaaggg

SEQ ID NO: 526361 - DNA, 15 bp, Homo sapiens
ctgtctgtcaagggg

SEQ ID NO: 526362 - DNA, 15 bp, Homo sapiens
tgtctgtcaaggggg

SEQ ID NO: 526363 - DNA, 15 bp, Homo sapiens
gtctgtcaaggggga

SEQ ID NO: 526364 - DNA, 15 bp, Homo sapiens
tctgtcaagggggag

SEQ ID NO: 526365 - DNA, 15 bp, Homo sapiens
ctgtcaagggggagg

SEQ ID NO: 526366 - DNA, 15 bp, Homo sapiens
tgtcaagggggaggg

SEQ ID NO: 526367 - DNA, 15 bp, Homo sapiens
gtcaagggggagggt

SEQ ID NO: 526368 - DNA, 15 bp, Homo sapiens
tcaagggggagggtg

SEQ ID NO: 526369 - DNA, 15 bp, Homo sapiens
caagggggagggtga

SEQ ID NO: 526370 - DNA, 15 bp, Homo sapiens
aagggggagggtgac

SEQ ID NO: 526371 - DNA, 15 bp, Homo sapiens
agggggagggtgacc

SEQ ID NO: 526372 - DNA, 15 bp, Homo sapiens
gggggagggtgacca

SEQ ID NO: 526373 - DNA, 15 bp, Homo sapiens
ggggagggtgaccac

SEQ ID NO: 526374 - DNA, 15 bp, Homo sapiens
gggagggtgaccact

SEQ ID NO: 526375 - DNA, 15 bp, Homo sapiens
ggagggtgaccactt

SEQ ID NO: 526376 - DNA, 15 bp, Homo sapiens
gagggtgaccacttt

SEQ ID NO: 526377 - DNA, 15 bp, Homo sapiens
agggtgaccactttc

SEQ ID NO: 526378 - DNA, 15 bp, Homo sapiens
gggtgaccactttct

SEQ ID NO: 526379 - DNA, 15 bp, Homo sapiens
ggtgaccactttcta

SEQ ID NO: 526380 - DNA, 15 bp, Homo sapiens
gtgaccactttctaa

SEQ ID NO: 526381 - DNA, 15 bp, Homo sapiens
tgaccactttctaaa

SEQ ID NO: 526382 - DNA, 15 bp, Homo sapiens
gaccactttctaaaa

SEQ ID NO: 526383 - DNA, 15 bp, Homo sapiens
accactttctaaaag

SEQ ID NO: 526384 - DNA, 15 bp, Homo sapiens
ccactttctaaaagg

SEQ ID NO: 526385 - DNA, 15 bp, Homo sapiens
cactttctaaaaggc

SEQ ID NO: 526386 - DNA, 15 bp, Homo sapiens
actttctaaaaggcc

SEQ ID NO: 526387 - DNA, 15 bp, Homo sapiens
ctttctaaaaggcca

SEQ ID NO: 526388 - DNA, 15 bp, Homo sapiens
tttctaaaaggccat

SEQ ID NO: 526389 - DNA, 15 bp, Homo sapiens
ttctaaaaggccatc

SEQ ID NO: 526390 - DNA, 15 bp, Homo sapiens
tctaaaaggccatcc

SEQ ID NO: 526391 - DNA, 15 bp, Homo sapiens
ctaaaaggccatccg

SEQ ID NO: 526392 - DNA, 15 bp, Homo sapiens
taaaaggccatccgt

SEQ ID NO: 526393 - DNA, 15 bp, Homo sapiens
aaaaggccatccgtg

SEQ ID NO: 526394 - DNA, 15 bp, Homo sapiens
aaaggccatccgtgt

SEQ ID NO: 526395 - DNA, 15 bp, Homo sapiens
aaggccatccgtgta

SEQ ID NO: 526396 - DNA, 15 bp, Homo sapiens
aggccatccgtgtat

SEQ ID NO: 526397 - DNA, 15 bp, Homo sapiens
ggccatccgtgtatt

SEQ ID NO: 526398 - DNA, 15 bp, Homo sapiens
gccatccgtgtattt

SEQ ID NO: 526399 - DNA, 15 bp, Homo sapiens
ccatccgtgtatttt

SEQ ID NO: 526400 - DNA, 15 bp, Homo sapiens
catccgtgtattttt

SEQ ID NO: 526401 - DNA, 15 bp, Homo sapiens
atccgtgtattttta

SEQ ID NO: 526402 - DNA, 15 bp, Homo sapiens
tccgtgtatttttag

SEQ ID NO: 526403 - DNA, 15 bp, Homo sapiens
ccgtgtatttttagc

SEQ ID NO: 526404 - DNA, 15 bp, Homo sapiens
cgtgtatttttagct

SEQ ID NO: 526405 - DNA, 15 bp, Homo sapiens
gtgtatttttagctt

SEQ ID NO: 526406 - DNA, 15 bp, Homo sapiens
tgtatttttagcttc

SEQ ID NO: 526407 - DNA, 15 bp, Homo sapiens
gtatttttagcttcc

SEQ ID NO: 526408 - DNA, 15 bp, Homo sapiens
tatttttagcttcct

SEQ ID NO: 526409 - DNA, 15 bp, Homo sapiens
atttttagcttcctg

SEQ ID NO: 526410 - DNA, 15 bp, Homo sapiens
tttttagcttcctga

SEQ ID NO: 526411 - DNA, 15 bp, Homo sapiens
ttttagcttcctgat

SEQ ID NO: 526412 - DNA, 15 bp, Homo sapiens
tttagcttcctgatt

SEQ ID NO: 526413 - DNA, 15 bp, Homo sapiens
ttagcttcctgattt

SEQ ID NO: 526414 - DNA, 15 bp, Homo sapiens
tagcttcctgatttt

SEQ ID NO: 526415 - DNA, 15 bp, Homo sapiens
agcttcctgattttt

SEQ ID NO: 526416 - DNA, 15 bp, Homo sapiens
gcttcctgatttttt

SEQ ID NO: 526417 - DNA, 15 bp, Homo sapiens
cttcctgattttttt

SEQ ID NO: 526418 - DNA, 15 bp, Homo sapiens
ttcctgatttttttc

SEQ ID NO: 526419 - DNA, 15 bp, Homo sapiens
tcctgatttttttct

SEQ ID NO: 526420 - DNA, 15 bp, Homo sapiens
cctgatttttttctc

SEQ ID NO: 526421 - DNA, 15 bp, Homo sapiens
ctgatttttttctct

SEQ ID NO: 526422 - DNA, 15 bp, Homo sapiens
tgatttttttctcta

SEQ ID NO: 526423 - DNA, 15 bp, Homo sapiens
gatttttttctctat

SEQ ID NO: 526424 - DNA, 15 bp, Homo sapiens
atttttttctctatc

SEQ ID NO: 526425 - DNA, 15 bp, Homo sapiens
tttttttctctatcg

SEQ ID NO: 526426 - DNA, 15 bp, Homo sapiens
ttttttctctatcgc

SEQ ID NO: 526427 - DNA, 15 bp, Homo sapiens
tttttctctatcgca

SEQ ID NO: 526428 - DNA, 15 bp, Homo sapiens
ttttctctatcgcag

SEQ ID NO: 526429 - DNA, 15 bp, Homo sapiens
tttctctatcgcagt

SEQ ID NO: 526430 - DNA, 15 bp, Homo sapiens
ttctctatcgcagtc

SEQ ID NO: 526431 - DNA, 15 bp, Homo sapiens
tctctatcgcagtct

SEQ ID NO: 526432 - DNA, 15 bp, Homo sapiens
ctctatcgcagtctc

SEQ ID NO: 526433 - DNA, 15 bp, Homo sapiens
tctatcgcagtctct

SEQ ID NO: 526434 - DNA, 15 bp, Homo sapiens
ctatcgcagtctctt

SEQ ID NO: 526435 - DNA, 15 bp, Homo sapiens
tatcgcagtctcttt

SEQ ID NO: 526436 - DNA, 15 bp, Homo sapiens
atcgcagtctctttg

SEQ ID NO: 526437 - DNA, 15 bp, Homo sapiens
tcgcagtctctttga

SEQ ID NO: 526438 - DNA, 15 bp, Homo sapiens
cgcagtctctttgaa

SEQ ID NO: 526439 - DNA, 15 bp, Homo sapiens
gcagtctctttgaag

SEQ ID NO: 526440 - DNA, 15 bp, Homo sapiens
cagtctctttgaagc

SEQ ID NO: 526441 - DNA, 15 bp, Homo sapiens
agtctctttgaagcc

SEQ ID NO: 526442 - DNA, 15 bp, Homo sapiens
gtctctttgaagcca

SEQ ID NO: 526443 - DNA, 15 bp, Homo sapiens
tctctttgaagccag

SEQ ID NO: 526444 - DNA, 15 bp, Homo sapiens
ctctttgaagccagg

SEQ ID NO: 526445 - DNA, 15 bp, Homo sapiens
tctttgaagccaggt

SEQ ID NO: 526446 - DNA, 15 bp, Homo sapiens
ctttgaagccaggtg

SEQ ID NO: 526447 - DNA, 15 bp, Homo sapiens
tttgaagccaggtga

SEQ ID NO: 526448 - DNA, 15 bp, Homo sapiens
ttgaagccaggtgaa

SEQ ID NO: 526449 - DNA, 15 bp, Homo sapiens
tgaagccaggtgaat

SEQ ID NO: 526450 - DNA, 15 bp, Homo sapiens
gaagccaggtgaatt

SEQ ID NO: 526451 - DNA, 15 bp, Homo sapiens
aagccaggtgaattt

SEQ ID NO: 526452 - DNA, 15 bp, Homo sapiens
agccaggtgaatttt

SEQ ID NO: 526453 - DNA, 15 bp, Homo sapiens
gccaggtgaatttta

SEQ ID NO: 526454 - DNA, 15 bp, Homo sapiens
ccaggtgaattttag

SEQ ID NO: 526455 - DNA, 15 bp, Homo sapiens
caggtgaattttagg

SEQ ID NO: 526456 - DNA, 15 bp, Homo sapiens
aggtgaattttaggc

SEQ ID NO: 526457 - DNA, 15 bp, Homo sapiens
ggtgaattttaggcc

SEQ ID NO: 526458 - DNA, 15 bp, Homo sapiens
gtgaattttaggcct

SEQ ID NO: 526459 - DNA, 15 bp, Homo sapiens
tgaattttaggcctt

SEQ ID NO: 526460 - DNA, 15 bp, Homo sapiens
gaattttaggccttg

SEQ ID NO: 526461 - DNA, 15 bp, Homo sapiens
aattttaggccttgg

SEQ ID NO: 526462 - DNA, 15 bp, Homo sapiens
attttaggccttggc

SEQ ID NO: 526463 - DNA, 15 bp, Homo sapiens
ttttaggccttggca

SEQ ID NO: 526464 - DNA, 15 bp, Homo sapiens
tttaggccttggcaa

SEQ ID NO: 526465 - DNA, 15 bp, Homo sapiens
ttaggccttggcaat

SEQ ID NO: 526466 - DNA, 15 bp, Homo sapiens
taggccttggcaatt

SEQ ID NO: 526467 - DNA, 15 bp, Homo sapiens
aggccttggcaattt

SEQ ID NO: 526468 - DNA, 15 bp, Homo sapiens
ggccttggcaatttt

SEQ ID NO: 526469 - DNA, 15 bp, Homo sapiens
gccttggcaattttc

SEQ ID NO: 526470 - DNA, 15 bp, Homo sapiens
ccttggcaattttct

SEQ ID NO: 526471 - DNA, 15 bp, Homo sapiens
cttggcaattttctt

SEQ ID NO: 526472 - DNA, 15 bp, Homo sapiens
ttggcaattttcttt

SEQ ID NO: 526473 - DNA, 15 bp, Homo sapiens
tggcaattttctttt

SEQ ID NO: 526474 - DNA, 15 bp, Homo sapiens
ggcaattttcttttt

SEQ ID NO: 526475 - DNA, 15 bp, Homo sapiens
gcaattttcttttta

SEQ ID NO: 526476 - DNA, 15 bp, Homo sapiens
caattttctttttat

SEQ ID NO: 526477 - DNA, 15 bp, Homo sapiens
aattttctttttatt

SEQ ID NO: 526478 - DNA, 15 bp, Homo sapiens
attttctttttattg

SEQ ID NO: 526479 - DNA, 15 bp, Homo sapiens
ttttctttttattgc

SEQ ID NO: 526480 - DNA, 15 bp, Homo sapiens
tttctttttattgca

SEQ ID NO: 526481 - DNA, 15 bp, Homo sapiens
ttctttttattgcaa

SEQ ID NO: 526482 - DNA, 15 bp, Homo sapiens
tctttttattgcaat

SEQ ID NO: 526483 - DNA, 15 bp, Homo sapiens
ctttttattgcaatg

SEQ ID NO: 526484 - DNA, 15 bp, Homo sapiens
tttttattgcaatgg

SEQ ID NO: 526485 - DNA, 15 bp, Homo sapiens
ttttattgcaatggg

SEQ ID NO: 526486 - DNA, 15 bp, Homo sapiens
tttattgcaatggga

SEQ ID NO: 526487 - DNA, 15 bp, Homo sapiens
ttattgcaatgggaa

SEQ ID NO: 526488 - DNA, 15 bp, Homo sapiens
tattgcaatgggaag

SEQ ID NO: 526489 - DNA, 15 bp, Homo sapiens
attgcaatgggaagg

SEQ ID NO: 526490 - DNA, 15 bp, Homo sapiens
ttgcaatgggaaggt

SEQ ID NO: 526491 - DNA, 15 bp, Homo sapiens
tgcaatgggaaggtc

SEQ ID NO: 526492 - DNA, 15 bp, Homo sapiens
gcaatgggaaggtca

SEQ ID NO: 526493 - DNA, 15 bp, Homo sapiens
caatgggaaggtcaa

SEQ ID NO: 526494 - DNA, 15 bp, Homo sapiens
aatgggaaggtcaag

SEQ ID NO: 526495 - DNA, 15 bp, Homo sapiens
atgggaaggtcaaga

SEQ ID NO: 526496 - DNA, 15 bp, Homo sapiens
tgggaaggtcaagac

SEQ ID NO: 526497 - DNA, 15 bp, Homo sapiens
gggaaggtcaagaca

SEQ ID NO: 526498 - DNA, 15 bp, Homo sapiens
ggaaggtcaagacac

SEQ ID NO: 526499 - DNA, 15 bp, Homo sapiens
gaaggtcaagacact

SEQ ID NO: 526500 - DNA, 15 bp, Homo sapiens
aaggtcaagacactg

SEQ ID NO: 526501 - DNA, 15 bp, Homo sapiens
aggtcaagacactga

SEQ ID NO: 526502 - DNA, 15 bp, Homo sapiens
ggtcaagacactgag

SEQ ID NO: 526503 - DNA, 15 bp, Homo sapiens
gtcaagacactgaga

SEQ ID NO: 526504 - DNA, 15 bp, Homo sapiens
tcaagacactgagag

SEQ ID NO: 526505 - DNA, 15 bp, Homo sapiens
caagacactgagagt

SEQ ID NO: 526506 - DNA, 15 bp, Homo sapiens
aagacactgagagtc

SEQ ID NO: 526507 - DNA, 15 bp, Homo sapiens
agacactgagagtca

SEQ ID NO: 526508 - DNA, 15 bp, Homo sapiens
gacactgagagtcac

SEQ ID NO: 526509 - DNA, 15 bp, Homo sapiens
acactgagagtcacc

SEQ ID NO: 526510 - DNA, 15 bp, Homo sapiens
cactgagagtcaccc

SEQ ID NO: 526511 - DNA, 15 bp, Homo sapiens
actgagagtcaccca

SEQ ID NO: 526512 - DNA, 15 bp, Homo sapiens
ctgagagtcacccaa

SEQ ID NO: 526513 - DNA, 15 bp, Homo sapiens
tgagagtcacccaaa

SEQ ID NO: 526514 - DNA, 15 bp, Homo sapiens
gagagtcacccaaaa

SEQ ID NO: 526515 - DNA, 15 bp, Homo sapiens
agagtcacccaaaac

SEQ ID NO: 526516 - DNA, 15 bp, Homo sapiens
gagtcacccaaaaca

SEQ ID NO: 526517 - DNA, 15 bp, Homo sapiens
agtcacccaaaacat

SEQ ID NO: 526518 - DNA, 15 bp, Homo sapiens
gtcacccaaaacata

SEQ ID NO: 526519 - DNA, 15 bp, Homo sapiens
tcacccaaaacatat

SEQ ID NO: 526520 - DNA, 15 bp, Homo sapiens
cacccaaaacatatc

SEQ ID NO: 526521 - DNA, 15 bp, Homo sapiens
acccaaaacatatcc

SEQ ID NO: 526522 - DNA, 15 bp, Homo sapiens
cccaaaacatatcca

SEQ ID NO: 526523 - DNA, 15 bp, Homo sapiens
ccaaaacatatccat

SEQ ID NO: 526524 - DNA, 15 bp, Homo sapiens
caaaacatatccatc

SEQ ID NO: 526525 - DNA, 15 bp, Homo sapiens
aaaacatatccatcc

SEQ ID NO: 526526 - DNA, 15 bp, Homo sapiens
aaacatatccatcca

SEQ ID NO: 526527 - DNA, 15 bp, Homo sapiens
aacatatccatccaa

SEQ ID NO: 526528 - DNA, 15 bp, Homo sapiens
acatatccatccaaa

SEQ ID NO: 526529 - DNA, 15 bp, Homo sapiens
catatccatccaaaa

SEQ ID NO: 526530 - DNA, 15 bp, Homo sapiens
atatccatccaaaat

SEQ ID NO: 526531 - DNA, 15 bp, Homo sapiens
tatccatccaaaatg

SEQ ID NO: 526532 - DNA, 15 bp, Homo sapiens
atccatccaaaatga

SEQ ID NO: 526533 - DNA, 15 bp, Homo sapiens
tccatccaaaatgat

SEQ ID NO: 526534 - DNA, 15 bp, Homo sapiens
ccatccaaaatgata

SEQ ID NO: 526535 - DNA, 15 bp, Homo sapiens
catccaaaatgatac

SEQ ID NO: 526536 - DNA, 15 bp, Homo sapiens
atccaaaatgataca

SEQ ID NO: 526537 - DNA, 15 bp, Homo sapiens
tccaaaatgatacaa

SEQ ID NO: 526538 - DNA, 15 bp, Homo sapiens
ccaaaatgatacaat

SEQ ID NO: 526539 - DNA, 15 bp, Homo sapiens
caaaatgatacaatt

SEQ ID NO: 526540 - DNA, 15 bp, Homo sapiens
aaaatgatacaattt

SEQ ID NO: 526541 - DNA, 15 bp, Homo sapiens
aaatgatacaatttt

SEQ ID NO: 526542 - DNA, 15 bp, Homo sapiens
aatgatacaatttta

SEQ ID NO: 526543 - DNA, 15 bp, Homo sapiens
atgatacaattttag

SEQ ID NO: 526544 - DNA, 15 bp, Homo sapiens
tgatacaattttagg

SEQ ID NO: 526545 - DNA, 15 bp, Homo sapiens
gatacaattttaggg

SEQ ID NO: 526546 - DNA, 15 bp, Homo sapiens
atacaattttagggt

SEQ ID NO: 526547 - DNA, 15 bp, Homo sapiens
tacaattttagggtt

SEQ ID NO: 526548 - DNA, 15 bp, Homo sapiens
acaattttagggttt

SEQ ID NO: 526549 - DNA, 15 bp, Homo sapiens
caattttagggttta

SEQ ID NO: 526550 - DNA, 15 bp, Homo sapiens
aattttagggtttat

SEQ ID NO: 526551 - DNA, 15 bp, Homo sapiens
attttagggtttatt

SEQ ID NO: 526552 - DNA, 15 bp, Homo sapiens
ttttagggtttattt

SEQ ID NO: 526553 - DNA, 15 bp, Homo sapiens
tttagggtttatttt

SEQ ID NO: 526554 - DNA, 15 bp, Homo sapiens
ttagggtttattttt

SEQ ID NO: 526555 - DNA, 15 bp, Homo sapiens
tagggtttattttta

SEQ ID NO: 526556 - DNA, 15 bp, Homo sapiens
agggtttatttttaa

SEQ ID NO: 526557 - DNA, 15 bp, Homo sapiens
gggtttatttttaag

SEQ ID NO: 526558 - DNA, 15 bp, Homo sapiens
ggtttatttttaagt

SEQ ID NO: 526559 - DNA, 15 bp, Homo sapiens
gtttatttttaagtg

SEQ ID NO: 526560 - DNA, 15 bp, Homo sapiens
tttatttttaagtga

SEQ ID NO: 526561 - DNA, 15 bp, Homo sapiens
ttatttttaagtgat

SEQ ID NO: 526562 - DNA, 15 bp, Homo sapiens
tatttttaagtgata

SEQ ID NO: 526563 - DNA, 15 bp, Homo sapiens
atttttaagtgatac

SEQ ID NO: 526564 - DNA, 15 bp, Homo sapiens
tttttaagtgatacc

SEQ ID NO: 526565 - DNA, 15 bp, Homo sapiens
ttttaagtgataccc

SEQ ID NO: 526566 - DNA, 15 bp, Homo sapiens
tttaagtgataccca

SEQ ID NO: 526567 - DNA, 15 bp, Homo sapiens
ttaagtgatacccaa

SEQ ID NO: 526568 - DNA, 15 bp, Homo sapiens
taagtgatacccaag

SEQ ID NO: 526569 - DNA, 15 bp, Homo sapiens
aagtgatacccaagt

SEQ ID NO: 526570 - DNA, 15 bp, Homo sapiens
agtgatacccaagtt

SEQ ID NO: 526571 - DNA, 15 bp, Homo sapiens
gtgatacccaagtta

SEQ ID NO: 526572 - DNA, 15 bp, Homo sapiens
tgatacccaagttat

SEQ ID NO: 526573 - DNA, 15 bp, Homo sapiens
gatacccaagttatt

SEQ ID NO: 526574 - DNA, 15 bp, Homo sapiens
atacccaagttattt

SEQ ID NO: 526575 - DNA, 15 bp, Homo sapiens
tacccaagttatttg

SEQ ID NO: 526576 - DNA, 15 bp, Homo sapiens
acccaagttatttgc

SEQ ID NO: 526577 - DNA, 15 bp, Homo sapiens
cccaagttatttgct

SEQ ID NO: 526578 - DNA, 15 bp, Homo sapiens
ccaagttatttgcta

SEQ ID NO: 526579 - DNA, 15 bp, Homo sapiens
caagttatttgctaa

SEQ ID NO: 526580 - DNA, 15 bp, Homo sapiens
aagttatttgctaag

SEQ ID NO: 526581 - DNA, 15 bp, Homo sapiens
agttatttgctaaga

SEQ ID NO: 526582 - DNA, 15 bp, Homo sapiens
gttatttgctaagaa

SEQ ID NO: 526583 - DNA, 15 bp, Homo sapiens
ttatttgctaagaac

SEQ ID NO: 526584 - DNA, 15 bp, Homo sapiens
tatttgctaagaacc

SEQ ID NO: 526585 - DNA, 15 bp, Homo sapiens
atttgctaagaacct

SEQ ID NO: 526586 - DNA, 15 bp, Homo sapiens
tttgctaagaaccta

SEQ ID NO: 526587 - DNA, 15 bp, Homo sapiens
ttgctaagaacctat

SEQ ID NO: 526588 - DNA, 15 bp, Homo sapiens
tgctaagaacctatg

SEQ ID NO: 526589 - DNA, 15 bp, Homo sapiens
gctaagaacctatgc

SEQ ID NO: 526590 - DNA, 15 bp, Homo sapiens
ctaagaacctatgcc

SEQ ID NO: 526591 - DNA, 15 bp, Homo sapiens
taagaacctatgcca

SEQ ID NO: 526592 - DNA, 15 bp, Homo sapiens
aagaacctatgccag

SEQ ID NO: 526593 - DNA, 15 bp, Homo sapiens
agaacctatgccagt

SEQ ID NO: 526594 - DNA, 15 bp, Homo sapiens
gaacctatgccagtg

SEQ ID NO: 526595 - DNA, 15 bp, Homo sapiens
aacctatgccagtgt

SEQ ID NO: 526596 - DNA, 15 bp, Homo sapiens
acctatgccagtgtg

SEQ ID NO: 526597 - DNA, 15 bp, Homo sapiens
cctatgccagtgtgt

SEQ ID NO: 526598 - DNA, 15 bp, Homo sapiens
ctatgccagtgtgtt

SEQ ID NO: 526599 - DNA, 15 bp, Homo sapiens
tatgccagtgtgttt

SEQ ID NO: 526600 - DNA, 15 bp, Homo sapiens
atgccagtgtgttta

SEQ ID NO: 526601 - DNA, 15 bp, Homo sapiens
tgccagtgtgtttat

SEQ ID NO: 526602 - DNA, 15 bp, Homo sapiens
gccagtgtgtttatg

SEQ ID NO: 526603 - DNA, 15 bp, Homo sapiens
ccagtgtgtttatga

SEQ ID NO: 526604 - DNA, 15 bp, Homo sapiens
cagtgtgtttatgag

SEQ ID NO: 526605 - DNA, 15 bp, Homo sapiens
agtgtgtttatgaga

SEQ ID NO: 526606 - DNA, 15 bp, Homo sapiens
gtgtgtttatgagaa

SEQ ID NO: 526607 - DNA, 15 bp, Homo sapiens
tgtgtttatgagaat

SEQ ID NO: 526608 - DNA, 15 bp, Homo sapiens
gtgtttatgagaatt

SEQ ID NO: 526609 - DNA, 15 bp, Homo sapiens
tgtttatgagaattt

SEQ ID NO: 526610 - DNA, 15 bp, Homo sapiens
gtttatgagaatttg

SEQ ID NO: 526611 - DNA, 15 bp, Homo sapiens
tttatgagaatttgc

SEQ ID NO: 526612 - DNA, 15 bp, Homo sapiens
ttatgagaatttgca

SEQ ID NO: 526613 - DNA, 15 bp, Homo sapiens
tatgagaatttgcac

SEQ ID NO: 526614 - DNA, 15 bp, Homo sapiens
atgagaatttgcact

SEQ ID NO: 526615 - DNA, 15 bp, Homo sapiens
tgagaatttgcactg

SEQ ID NO: 526616 - DNA, 15 bp, Homo sapiens
gagaatttgcactgt

SEQ ID NO: 526617 - DNA, 15 bp, Homo sapiens
agaatttgcactgtc

SEQ ID NO: 526618 - DNA, 15 bp, Homo sapiens
gaatttgcactgtcc

SEQ ID NO: 526619 - DNA, 15 bp, Homo sapiens
aatttgcactgtccc

SEQ ID NO: 526620 - DNA, 15 bp, Homo sapiens
atttgcactgtccca

SEQ ID NO: 526621 - DNA, 15 bp, Homo sapiens
tttgcactgtcccac

SEQ ID NO: 526622 - DNA, 15 bp, Homo sapiens
ttgcactgtcccaca

SEQ ID NO: 526623 - DNA, 15 bp, Homo sapiens
tgcactgtcccacac

SEQ ID NO: 526624 - DNA, 15 bp, Homo sapiens
gcactgtcccacact

SEQ ID NO: 526625 - DNA, 15 bp, Homo sapiens
cactgtcccacactg

SEQ ID NO: 526626 - DNA, 15 bp, Homo sapiens
actgtcccacactgt

SEQ ID NO: 526627 - DNA, 15 bp, Homo sapiens
ctgtcccacactgtt

SEQ ID NO: 526628 - DNA, 15 bp, Homo sapiens
tgtcccacactgttg

SEQ ID NO: 526629 - DNA, 15 bp, Homo sapiens
gtcccacactgttgc

SEQ ID NO: 526630 - DNA, 15 bp, Homo sapiens
tcccacactgttgcc

SEQ ID NO: 526631 - DNA, 15 bp, Homo sapiens
cccacactgttgcca

SEQ ID NO: 526632 - DNA, 15 bp, Homo sapiens
ccacactgttgccac

SEQ ID NO: 526633 - DNA, 15 bp, Homo sapiens
cacactgttgccacc

SEQ ID NO: 526634 - DNA, 15 bp, Homo sapiens
acactgttgccacca

SEQ ID NO: 526635 - DNA, 15 bp, Homo sapiens
cactgttgccaccag

SEQ ID NO: 526636 - DNA, 15 bp, Homo sapiens
actgttgccaccagc

SEQ ID NO: 526637 - DNA, 15 bp, Homo sapiens
ctgttgccaccagcc

SEQ ID NO: 526638 - DNA, 15 bp, Homo sapiens
tgttgccaccagcca

SEQ ID NO: 526639 - DNA, 15 bp, Homo sapiens
gttgccaccagccac

SEQ ID NO: 526640 - DNA, 15 bp, Homo sapiens
ttgccaccagccaca

SEQ ID NO: 526641 - DNA, 15 bp, Homo sapiens
tgccaccagccacat

SEQ ID NO: 526642 - DNA, 15 bp, Homo sapiens
gccaccagccacatg

SEQ ID NO: 526643 - DNA, 15 bp, Homo sapiens
ccaccagccacatgg

SEQ ID NO: 526644 - DNA, 15 bp, Homo sapiens
caccagccacatggg

SEQ ID NO: 526645 - DNA, 15 bp, Homo sapiens
accagccacatggga

SEQ ID NO: 526646 - DNA, 15 bp, Homo sapiens
ccagccacatgggac

SEQ ID NO: 526647 - DNA, 15 bp, Homo sapiens
cagccacatgggact

SEQ ID NO: 526648 - DNA, 15 bp, Homo sapiens
agccacatgggactg

SEQ ID NO: 526649 - DNA, 15 bp, Homo sapiens
gccacatgggactgt

SEQ ID NO: 526650 - DNA, 15 bp, Homo sapiens
ccacatgggactgtt

SEQ ID NO: 526651 - DNA, 15 bp, Homo sapiens
cacatgggactgttt

SEQ ID NO: 526652 - DNA, 15 bp, Homo sapiens
acatgggactgttta

SEQ ID NO: 526653 - DNA, 15 bp, Homo sapiens
catgggactgtttaa

SEQ ID NO: 526654 - DNA, 15 bp, Homo sapiens
atgggactgtttaaa

SEQ ID NO: 526655 - DNA, 15 bp, Homo sapiens
tgggactgtttaaat

SEQ ID NO: 526656 - DNA, 15 bp, Homo sapiens
gggactgtttaaatt

SEQ ID NO: 526657 - DNA, 15 bp, Homo sapiens
ggactgtttaaattt

SEQ ID NO: 526658 - DNA, 15 bp, Homo sapiens
gactgtttaaattta

SEQ ID NO: 526659 - DNA, 15 bp, Homo sapiens
actgtttaaatttaa

SEQ ID NO: 526660 - DNA, 15 bp, Homo sapiens
ctgtttaaatttaaa

SEQ ID NO: 526661 - DNA, 15 bp, Homo sapiens
tgtttaaatttaaat

SEQ ID NO: 526662 - DNA, 15 bp, Homo sapiens
gtttaaatttaaatt

SEQ ID NO: 526663 - DNA, 15 bp, Homo sapiens
tttaaatttaaattt

SEQ ID NO: 526664 - DNA, 15 bp, Homo sapiens
ttaaatttaaatttt

SEQ ID NO: 526665 - DNA, 15 bp, Homo sapiens
taaatttaaatttta

SEQ ID NO: 526666 - DNA, 15 bp, Homo sapiens
aaatttaaattttac

SEQ ID NO: 526667 - DNA, 15 bp, Homo sapiens
aatttaaattttaca

SEQ ID NO: 526668 - DNA, 15 bp, Homo sapiens
atttaaattttacaa

SEQ ID NO: 526669 - DNA, 15 bp, Homo sapiens
tttaaattttacaaa

SEQ ID NO: 526670 - DNA, 15 bp, Homo sapiens
ttaaattttacaaat

SEQ ID NO: 526671 - DNA, 15 bp, Homo sapiens
taaattttacaaatt

SEQ ID NO: 526672 - DNA, 15 bp, Homo sapiens
aaattttacaaatta

SEQ ID NO: 526673 - DNA, 15 bp, Homo sapiens
aattttacaaattag

SEQ ID NO: 526674 - DNA, 15 bp, Homo sapiens
attttacaaattagc

SEQ ID NO: 526675 - DNA, 15 bp, Homo sapiens
ttttacaaattagcc

SEQ ID NO: 526676 - DNA, 15 bp, Homo sapiens
tttacaaattagcca

SEQ ID NO: 526677 - DNA, 15 bp, Homo sapiens
ttacaaattagccag

SEQ ID NO: 526678 - DNA, 15 bp, Homo sapiens
tacaaattagccagt

SEQ ID NO: 526679 - DNA, 15 bp, Homo sapiens
acaaattagccagtc

SEQ ID NO: 526680 - DNA, 15 bp, Homo sapiens
caaattagccagtca

SEQ ID NO: 526681 - DNA, 15 bp, Homo sapiens
aaattagccagtcat

SEQ ID NO: 526682 - DNA, 15 bp, Homo sapiens
aattagccagtcatg

SEQ ID NO: 526683 - DNA, 15 bp, Homo sapiens
attagccagtcatgg

SEQ ID NO: 526684 - DNA, 15 bp, Homo sapiens
ttagccagtcatggt

SEQ ID NO: 526685 - DNA, 15 bp, Homo sapiens
tagccagtcatggtg

SEQ ID NO: 526686 - DNA, 15 bp, Homo sapiens
agccagtcatggtgg

SEQ ID NO: 526687 - DNA, 15 bp, Homo sapiens
gccagtcatggtggt

SEQ ID NO: 526688 - DNA, 15 bp, Homo sapiens
ccagtcatggtggtg

SEQ ID NO: 526689 - DNA, 15 bp, Homo sapiens
cagtcatggtggtgt

SEQ ID NO: 526690 - DNA, 15 bp, Homo sapiens
agtcatggtggtgtg

SEQ ID NO: 526691 - DNA, 15 bp, Homo sapiens
gtcatggtggtgtgc

SEQ ID NO: 526692 - DNA, 15 bp, Homo sapiens
tcatggtggtgtgca

SEQ ID NO: 526693 - DNA, 15 bp, Homo sapiens
catggtggtgtgcac

SEQ ID NO: 526694 - DNA, 15 bp, Homo sapiens
atggtggtgtgcact

SEQ ID NO: 526695 - DNA, 15 bp, Homo sapiens
tggtggtgtgcactt

SEQ ID NO: 526696 - DNA, 15 bp, Homo sapiens
ggtggtgtgcacttg

SEQ ID NO: 526697 - DNA, 15 bp, Homo sapiens
gtggtgtgcacttgt

SEQ ID NO: 526698 - DNA, 15 bp, Homo sapiens
tggtgtgcacttgta

SEQ ID NO: 526699 - DNA, 15 bp, Homo sapiens
ggtgtgcacttgtag

SEQ ID NO: 526700 - DNA, 15 bp, Homo sapiens
gtgtgcacttgtagt

SEQ ID NO: 526701 - DNA, 15 bp, Homo sapiens
tgtgcacttgtagtc

SEQ ID NO: 526702 - DNA, 15 bp, Homo sapiens
gtgcacttgtagtcc

SEQ ID NO: 526703 - DNA, 15 bp, Homo sapiens
tgcacttgtagtccc

SEQ ID NO: 526704 - DNA, 15 bp, Homo sapiens
gcacttgtagtccca

SEQ ID NO: 526705 - DNA, 15 bp, Homo sapiens
cacttgtagtcccag

SEQ ID NO: 526706 - DNA, 15 bp, Homo sapiens
acttgtagtcccagc

SEQ ID NO: 526707 - DNA, 15 bp, Homo sapiens
cttgtagtcccagct

SEQ ID NO: 526708 - DNA, 15 bp, Homo sapiens
ttgtagtcccagcta

SEQ ID NO: 526709 - DNA, 15 bp, Homo sapiens
agtcccagctactta

SEQ ID NO: 526710 - DNA, 15 bp, Homo sapiens
gtcccagctacttag

SEQ ID NO: 526711 - DNA, 15 bp, Homo sapiens
acttaggaggctgag

SEQ ID NO: 526712 - DNA, 15 bp, Homo sapiens
cttaggaggctgagg

SEQ ID NO: 526713 - DNA, 15 bp, Homo sapiens
ttaggaggctgaggc

SEQ ID NO: 526714 - DNA, 15 bp, Homo sapiens
taggaggctgaggca

SEQ ID NO: 526715 - DNA, 15 bp, Homo sapiens
aggaggctgaggcaa

SEQ ID NO: 526716 - DNA, 15 bp, Homo sapiens
ggaggctgaggcaag

SEQ ID NO: 526717 - DNA, 15 bp, Homo sapiens
ggctgaggcaagagg

SEQ ID NO: 526718 - DNA, 15 bp, Homo sapiens
gctgaggcaagagga

SEQ ID NO: 526719 - DNA, 15 bp, Homo sapiens
ctgaggcaagaggat

SEQ ID NO: 526720 - DNA, 15 bp, Homo sapiens
tgaggcaagaggatt

SEQ ID NO: 526721 - DNA, 15 bp, Homo sapiens
gaggcaagaggattg

SEQ ID NO: 526722 - DNA, 15 bp, Homo sapiens
aggcaagaggattgc

SEQ ID NO: 526723 - DNA, 15 bp, Homo sapiens
ggcaagaggattgct

SEQ ID NO: 526724 - DNA, 15 bp, Homo sapiens
gcaagaggattgctt

SEQ ID NO: 526725 - DNA, 15 bp, Homo sapiens
caagaggattgcttg

SEQ ID NO: 526726 - DNA, 15 bp, Homo sapiens
aagaggattgcttga

SEQ ID NO: 526727 - DNA, 15 bp, Homo sapiens
agaggattgcttgag

SEQ ID NO: 526728 - DNA, 15 bp, Homo sapiens
ttgcttgagcccaga

SEQ ID NO: 526729 - DNA, 15 bp, Homo sapiens
tgcttgagcccagaa

SEQ ID NO: 526730 - DNA, 15 bp, Homo sapiens
gcttgagcccagaag

SEQ ID NO: 526731 - DNA, 15 bp, Homo sapiens
cttgagcccagaagt

SEQ ID NO: 526732 - DNA, 15 bp, Homo sapiens
ttgagcccagaagtt

SEQ ID NO: 526733 - DNA, 15 bp, Homo sapiens
tgagcccagaagttc

SEQ ID NO: 526734 - DNA, 15 bp, Homo sapiens
gagcccagaagttca

SEQ ID NO: 526735 - DNA, 15 bp, Homo sapiens
agcccagaagttcaa

SEQ ID NO: 526736 - DNA, 15 bp, Homo sapiens
gcccagaagttcaat

SEQ ID NO: 526737 - DNA, 15 bp, Homo sapiens
cccagaagttcaata

SEQ ID NO: 526738 - DNA, 15 bp, Homo sapiens
ccagaagttcaatac

SEQ ID NO: 526739 - DNA, 15 bp, Homo sapiens
cagaagttcaatact

SEQ ID NO: 526740 - DNA, 15 bp, Homo sapiens
agaagttcaatactg

SEQ ID NO: 526741 - DNA, 15 bp, Homo sapiens
gaagttcaatactgc

SEQ ID NO: 526742 - DNA, 15 bp, Homo sapiens
aagttcaatactgca

SEQ ID NO: 526743 - DNA, 15 bp, Homo sapiens
agttcaatactgcag

SEQ ID NO: 526744 - DNA, 15 bp, Homo sapiens
gttcaatactgcagc

SEQ ID NO: 526745 - DNA, 15 bp, Homo sapiens
ttcaatactgcagca

SEQ ID NO: 526746 - DNA, 15 bp, Homo sapiens
tcaatactgcagcaa

SEQ ID NO: 526747 - DNA, 15 bp, Homo sapiens
caatactgcagcaag

SEQ ID NO: 526748 - DNA, 15 bp, Homo sapiens
aatactgcagcaagc

SEQ ID NO: 526749 - DNA, 15 bp, Homo sapiens
atactgcagcaagct

SEQ ID NO: 526750 - DNA, 15 bp, Homo sapiens
tactgcagcaagcta

SEQ ID NO: 526751 - DNA, 15 bp, Homo sapiens
actgcagcaagctat

SEQ ID NO: 526752 - DNA, 15 bp, Homo sapiens
ctgcagcaagctatg

SEQ ID NO: 526753 - DNA, 15 bp, Homo sapiens
tgcagcaagctatga

SEQ ID NO: 526754 - DNA, 15 bp, Homo sapiens
gcagcaagctatgat

SEQ ID NO: 526755 - DNA, 15 bp, Homo sapiens
cagcaagctatgatc

SEQ ID NO: 526756 - DNA, 15 bp, Homo sapiens
agcaagctatgatcg

SEQ ID NO: 526757 - DNA, 15 bp, Homo sapiens
gcaagctatgatcgt

SEQ ID NO: 526758 - DNA, 15 bp, Homo sapiens
caagctatgatcgtg

SEQ ID NO: 526759 - DNA, 15 bp, Homo sapiens
aagctatgatcgtgc

SEQ ID NO: 526760 - DNA, 15 bp, Homo sapiens
agctatgatcgtgcc

SEQ ID NO: 526761 - DNA, 15 bp, Homo sapiens
gctatgatcgtgcca

SEQ ID NO: 526762 - DNA, 15 bp, Homo sapiens
ctatgatcgtgccac

SEQ ID NO: 526763 - DNA, 15 bp, Homo sapiens
tatgatcgtgccact

SEQ ID NO: 526764 - DNA, 15 bp, Homo sapiens
atgatcgtgccactg

SEQ ID NO: 526765 - DNA, 15 bp, Homo sapiens
tgatcgtgccactgt

SEQ ID NO: 526766 - DNA, 15 bp, Homo sapiens
gtgccactgtactcc

SEQ ID NO: 526767 - DNA, 15 bp, Homo sapiens
tgccactgtactcca

SEQ ID NO: 526768 - DNA, 15 bp, Homo sapiens
gccactgtactccag

SEQ ID NO: 526769 - DNA, 15 bp, Homo sapiens
ccactgtactccagc

SEQ ID NO: 526770 - DNA, 15 bp, Homo sapiens
cactgtactccagcc

SEQ ID NO: 526771 - DNA, 15 bp, Homo sapiens
actgtactccagcct

SEQ ID NO: 526772 - DNA, 15 bp, Homo sapiens
ctgtactccagcctg

SEQ ID NO: 526773 - DNA, 15 bp, Homo sapiens
tgtactccagcctga

SEQ ID NO: 526774 - DNA, 15 bp, Homo sapiens
gtactccagcctgag

SEQ ID NO: 526775 - DNA, 15 bp, Homo sapiens
tactccagcctgagt

SEQ ID NO: 526776 - DNA, 15 bp, Homo sapiens
actccagcctgagtg

SEQ ID NO: 526777 - DNA, 15 bp, Homo sapiens
ctccagcctgagtga

SEQ ID NO: 526778 - DNA, 15 bp, Homo sapiens
tccagcctgagtgac

SEQ ID NO: 526779 - DNA, 15 bp, Homo sapiens
ccagcctgagtgaca

SEQ ID NO: 526780 - DNA, 15 bp, Homo sapiens
cagcctgagtgacag

SEQ ID NO: 526781 - DNA, 15 bp, Homo sapiens
agcctgagtgacaga

SEQ ID NO: 526782 - DNA, 15 bp, Homo sapiens
gcctgagtgacagaa

SEQ ID NO: 526783 - DNA, 15 bp, Homo sapiens
cctgagtgacagaat

SEQ ID NO: 526784 - DNA, 15 bp, Homo sapiens
ctgagtgacagaatg

SEQ ID NO: 526785 - DNA, 15 bp, Homo sapiens
tgagtgacagaatga

SEQ ID NO: 526786 - DNA, 15 bp, Homo sapiens
gagtgacagaatgag

SEQ ID NO: 526787 - DNA, 15 bp, Homo sapiens
agtgacagaatgaga

SEQ ID NO: 526788 - DNA, 15 bp, Homo sapiens
gtgacagaatgagac

SEQ ID NO: 526789 - DNA, 15 bp, Homo sapiens
tgacagaatgagacc

SEQ ID NO: 526790 - DNA, 15 bp, Homo sapiens
gacagaatgagacct

SEQ ID NO: 526791 - DNA, 15 bp, Homo sapiens
acagaatgagacctc

SEQ ID NO: 526792 - DNA, 15 bp, Homo sapiens
cagaatgagacctca

SEQ ID NO: 526793 - DNA, 15 bp, Homo sapiens
agaatgagacctcat

SEQ ID NO: 526794 - DNA, 15 bp, Homo sapiens
gaatgagacctcatc

SEQ ID NO: 526795 - DNA, 15 bp, Homo sapiens
aatgagacctcatct

SEQ ID NO: 526796 - DNA, 15 bp, Homo sapiens
atgagacctcatctc

SEQ ID NO: 526797 - DNA, 15 bp, Homo sapiens
tgagacctcatctct

SEQ ID NO: 526798 - DNA, 15 bp, Homo sapiens
gagacctcatctctt

SEQ ID NO: 526799 - DNA, 15 bp, Homo sapiens
agacctcatctcttc

SEQ ID NO: 526800 - DNA, 15 bp, Homo sapiens
gacctcatctcttca

SEQ ID NO: 526801 - DNA, 15 bp, Homo sapiens
acctcatctcttcaa

SEQ ID NO: 526802 - DNA, 15 bp, Homo sapiens
cctcatctcttcaaa

SEQ ID NO: 526803 - DNA, 15 bp, Homo sapiens
ctcatctcttcaaaa

SEQ ID NO: 526804 - DNA, 15 bp, Homo sapiens
tcatctcttcaaaaa

SEQ ID NO: 526805 - DNA, 15 bp, Homo sapiens
catctcttcaaaaaa

SEQ ID NO: 526806 - DNA, 15 bp, Homo sapiens
atctcttcaaaaaaa

SEQ ID NO: 526807 - DNA, 15 bp, Homo sapiens
tctcttcaaaaaaaa

SEQ ID NO: 526808 - DNA, 15 bp, Homo sapiens
ctcttcaaaaaaaaa

SEQ ID NO: 526809 - DNA, 15 bp, Homo sapiens
tcttcaaaaaaaaag

SEQ ID NO: 526810 - DNA, 15 bp, Homo sapiens
cttcaaaaaaaaaga

SEQ ID NO: 526811 - DNA, 15 bp, Homo sapiens
ttcaaaaaaaaagaa

SEQ ID NO: 526812 - DNA, 15 bp, Homo sapiens
tcaaaaaaaaagaaa

SEQ ID NO: 526813 - DNA, 15 bp, Homo sapiens
caaaaaaaaagaaaa

SEQ ID NO: 526814 - DNA, 15 bp, Homo sapiens
aaaaaagaaaaaaat

SEQ ID NO: 526815 - DNA, 15 bp, Homo sapiens
aaaaagaaaaaaatt

SEQ ID NO: 526816 - DNA, 15 bp, Homo sapiens
aaaagaaaaaaatta

SEQ ID NO: 526817 - DNA, 15 bp, Homo sapiens
aaagaaaaaaattaa

SEQ ID NO: 526818 - DNA, 15 bp, Homo sapiens
aagaaaaaaattaaa

SEQ ID NO: 526819 - DNA, 15 bp, Homo sapiens
agaaaaaaattaaaa

SEQ ID NO: 526820 - DNA, 15 bp, Homo sapiens
gaaaaaaattaaaat

SEQ ID NO: 526821 - DNA, 15 bp, Homo sapiens
aaaaaaattaaaata

SEQ ID NO: 526822 - DNA, 15 bp, Homo sapiens
aaaaaattaaaatat

SEQ ID NO: 526823 - DNA, 15 bp, Homo sapiens
aaaaattaaaatatg

SEQ ID NO: 526824 - DNA, 15 bp, Homo sapiens
aaaattaaaatatga

SEQ ID NO: 526825 - DNA, 15 bp, Homo sapiens
aaattaaaatatgaa

SEQ ID NO: 526826 - DNA, 15 bp, Homo sapiens
aattaaaatatgaag

SEQ ID NO: 526827 - DNA, 15 bp, Homo sapiens
attaaaatatgaagt

SEQ ID NO: 526828 - DNA, 15 bp, Homo sapiens
ttaaaatatgaagtt

SEQ ID NO: 526829 - DNA, 15 bp, Homo sapiens
taaaatatgaagttt

SEQ ID NO: 526830 - DNA, 15 bp, Homo sapiens
aaaatatgaagttta

SEQ ID NO: 526831 - DNA, 15 bp, Homo sapiens
aaatatgaagtttag

SEQ ID NO: 526832 - DNA, 15 bp, Homo sapiens
aatatgaagtttagt

SEQ ID NO: 526833 - DNA, 15 bp, Homo sapiens
atatgaagtttagtt

SEQ ID NO: 526834 - DNA, 15 bp, Homo sapiens
tatgaagtttagttc

SEQ ID NO: 526835 - DNA, 15 bp, Homo sapiens
atgaagtttagttct

SEQ ID NO: 526836 - DNA, 15 bp, Homo sapiens
tgaagtttagttctt

SEQ ID NO: 526837 - DNA, 15 bp, Homo sapiens
gaagtttagttcttc

SEQ ID NO: 526838 - DNA, 15 bp, Homo sapiens
aagtttagttcttca

SEQ ID NO: 526839 - DNA, 15 bp, Homo sapiens
agtttagttcttcat

SEQ ID NO: 526840 - DNA, 15 bp, Homo sapiens
gtttagttcttcatt

SEQ ID NO: 526841 - DNA, 15 bp, Homo sapiens
tttagttcttcattc

SEQ ID NO: 526842 - DNA, 15 bp, Homo sapiens
ttagttcttcattca

SEQ ID NO: 526843 - DNA, 15 bp, Homo sapiens
tagttcttcattcac

SEQ ID NO: 526844 - DNA, 15 bp, Homo sapiens
agttcttcattcacc

SEQ ID NO: 526845 - DNA, 15 bp, Homo sapiens
gttcttcattcaccc

SEQ ID NO: 526846 - DNA, 15 bp, Homo sapiens
ttcttcattcaccct

SEQ ID NO: 526847 - DNA, 15 bp, Homo sapiens
tcttcattcacccta

SEQ ID NO: 526848 - DNA, 15 bp, Homo sapiens
cttcattcaccctaa

SEQ ID NO: 526849 - DNA, 15 bp, Homo sapiens
ttcattcaccctaac

SEQ ID NO: 526850 - DNA, 15 bp, Homo sapiens
tcattcaccctaacc

SEQ ID NO: 526851 - DNA, 15 bp, Homo sapiens
cattcaccctaacca

SEQ ID NO: 526852 - DNA, 15 bp, Homo sapiens
attcaccctaaccac

SEQ ID NO: 526853 - DNA, 15 bp, Homo sapiens
ttcaccctaaccaca

SEQ ID NO: 526854 - DNA, 15 bp, Homo sapiens
tcaccctaaccacat

SEQ ID NO: 526855 - DNA, 15 bp, Homo sapiens
caccctaaccacatc

SEQ ID NO: 526856 - DNA, 15 bp, Homo sapiens
accctaaccacatct

SEQ ID NO: 526857 - DNA, 15 bp, Homo sapiens
ccctaaccacatctc

SEQ ID NO: 526858 - DNA, 15 bp, Homo sapiens
cctaaccacatctcc

SEQ ID NO: 526859 - DNA, 15 bp, Homo sapiens
ctaaccacatctcca

SEQ ID NO: 526860 - DNA, 15 bp, Homo sapiens
taaccacatctccag

SEQ ID NO: 526861 - DNA, 15 bp, Homo sapiens
aaccacatctccagt

SEQ ID NO: 526862 - DNA, 15 bp, Homo sapiens
accacatctccagtg

SEQ ID NO: 526863 - DNA, 15 bp, Homo sapiens
ccacatctccagtgc

SEQ ID NO: 526864 - DNA, 15 bp, Homo sapiens
cacatctccagtgct

SEQ ID NO: 526865 - DNA, 15 bp, Homo sapiens
acatctccagtgctc

SEQ ID NO: 526866 - DNA, 15 bp, Homo sapiens
catctccagtgctca

SEQ ID NO: 526867 - DNA, 15 bp, Homo sapiens
atctccagtgctcaa

SEQ ID NO: 526868 - DNA, 15 bp, Homo sapiens
tctccagtgctcaat

SEQ ID NO: 526869 - DNA, 15 bp, Homo sapiens
ctccagtgctcaata

SEQ ID NO: 526870 - DNA, 15 bp, Homo sapiens
tccagtgctcaataa

SEQ ID NO: 526871 - DNA, 15 bp, Homo sapiens
ccagtgctcaataac

SEQ ID NO: 526872 - DNA, 15 bp, Homo sapiens
cagtgctcaataact

SEQ ID NO: 526873 - DNA, 15 bp, Homo sapiens
agtgctcaataacta

SEQ ID NO: 526874 - DNA, 15 bp, Homo sapiens
gtgctcaataactat

SEQ ID NO: 526875 - DNA, 15 bp, Homo sapiens
tgctcaataactata

SEQ ID NO: 526876 - DNA, 15 bp, Homo sapiens
gctcaataactatat

SEQ ID NO: 526877 - DNA, 15 bp, Homo sapiens
ctcaataactatatg

SEQ ID NO: 526878 - DNA, 15 bp, Homo sapiens
tcaataactatatgt

SEQ ID NO: 526879 - DNA, 15 bp, Homo sapiens
caataactatatgtg

SEQ ID NO: 526880 - DNA, 15 bp, Homo sapiens
aataactatatgtga

SEQ ID NO: 526881 - DNA, 15 bp, Homo sapiens
ataactatatgtgac

SEQ ID NO: 526882 - DNA, 15 bp, Homo sapiens
taactatatgtgact

SEQ ID NO: 526883 - DNA, 15 bp, Homo sapiens
aactatatgtgactc

SEQ ID NO: 526884 - DNA, 15 bp, Homo sapiens
actatatgtgactca

SEQ ID NO: 526885 - DNA, 15 bp, Homo sapiens
ctatatgtgactcat

SEQ ID NO: 526886 - DNA, 15 bp, Homo sapiens
tatatgtgactcatg

SEQ ID NO: 526887 - DNA, 15 bp, Homo sapiens
atatgtgactcatgg

SEQ ID NO: 526888 - DNA, 15 bp, Homo sapiens
tatgtgactcatggc

SEQ ID NO: 526889 - DNA, 15 bp, Homo sapiens
atgtgactcatggct

SEQ ID NO: 526890 - DNA, 15 bp, Homo sapiens
tgtgactcatggcta

SEQ ID NO: 526891 - DNA, 15 bp, Homo sapiens
gtgactcatggctac

SEQ ID NO: 526892 - DNA, 15 bp, Homo sapiens
tgactcatggctacc

SEQ ID NO: 526893 - DNA, 15 bp, Homo sapiens
gactcatggctacct

SEQ ID NO: 526894 - DNA, 15 bp, Homo sapiens
actcatggctacctt

SEQ ID NO: 526895 - DNA, 15 bp, Homo sapiens
ctcatggctacctta

SEQ ID NO: 526896 - DNA, 15 bp, Homo sapiens
tcatggctaccttat

SEQ ID NO: 526897 - DNA, 15 bp, Homo sapiens
catggctaccttatt

SEQ ID NO: 526898 - DNA, 15 bp, Homo sapiens
atggctaccttatta

SEQ ID NO: 526899 - DNA, 15 bp, Homo sapiens
tggctaccttattag

SEQ ID NO: 526900 - DNA, 15 bp, Homo sapiens
ggctaccttattagc

SEQ ID NO: 526901 - DNA, 15 bp, Homo sapiens
gctaccttattagca

SEQ ID NO: 526902 - DNA, 15 bp, Homo sapiens
ctaccttattagcat

SEQ ID NO: 526903 - DNA, 15 bp, Homo sapiens
taccttattagcata

SEQ ID NO: 526904 - DNA, 15 bp, Homo sapiens
accttattagcatag

SEQ ID NO: 526905 - DNA, 15 bp, Homo sapiens
ccttattagcataga

SEQ ID NO: 526906 - DNA, 15 bp, Homo sapiens
cttattagcatagat

SEQ ID NO: 526907 - DNA, 15 bp, Homo sapiens
ttattagcatagata

SEQ ID NO: 526908 - DNA, 15 bp, Homo sapiens
tattagcatagatat

SEQ ID NO: 526909 - DNA, 15 bp, Homo sapiens
attagcatagatata

SEQ ID NO: 526910 - DNA, 15 bp, Homo sapiens
ttagcatagatatag

SEQ ID NO: 526911 - DNA, 15 bp, Homo sapiens
tagcatagatataga

SEQ ID NO: 526912 - DNA, 15 bp, Homo sapiens
agcatagatatagaa

SEQ ID NO: 526913 - DNA, 15 bp, Homo sapiens
gcatagatatagaac

SEQ ID NO: 526914 - DNA, 15 bp, Homo sapiens
catagatatagaaca

SEQ ID NO: 526915 - DNA, 15 bp, Homo sapiens
atagatatagaacat

SEQ ID NO: 526916 - DNA, 15 bp, Homo sapiens
tagatatagaacatt

SEQ ID NO: 526917 - DNA, 15 bp, Homo sapiens
agatatagaacattg

SEQ ID NO: 526918 - DNA, 15 bp, Homo sapiens
gatatagaacattgt

SEQ ID NO: 526919 - DNA, 15 bp, Homo sapiens
atatagaacattgtg

SEQ ID NO: 526920 - DNA, 15 bp, Homo sapiens
tatagaacattgtga

SEQ ID NO: 526921 - DNA, 15 bp, Homo sapiens
atagaacattgtgac

SEQ ID NO: 526922 - DNA, 15 bp, Homo sapiens
tagaacattgtgact

SEQ ID NO: 526923 - DNA, 15 bp, Homo sapiens
agaacattgtgacta

SEQ ID NO: 526924 - DNA, 15 bp, Homo sapiens
gaacattgtgactat

SEQ ID NO: 526925 - DNA, 15 bp, Homo sapiens
aacattgtgactatc

SEQ ID NO: 526926 - DNA, 15 bp, Homo sapiens
acattgtgactatca

SEQ ID NO: 526927 - DNA, 15 bp, Homo sapiens
cattgtgactatcac

SEQ ID NO: 526928 - DNA, 15 bp, Homo sapiens
attgtgactatcaca

SEQ ID NO: 526929 - DNA, 15 bp, Homo sapiens
ttgtgactatcacag

SEQ ID NO: 526930 - DNA, 15 bp, Homo sapiens
tgtgactatcacaga

SEQ ID NO: 526931 - DNA, 15 bp, Homo sapiens
gtgactatcacagaa

SEQ ID NO: 526932 - DNA, 15 bp, Homo sapiens
tgactatcacagaaa

SEQ ID NO: 526933 - DNA, 15 bp, Homo sapiens
gactatcacagaaag

SEQ ID NO: 526934 - DNA, 15 bp, Homo sapiens
actatcacagaaagt

SEQ ID NO: 526935 - DNA, 15 bp, Homo sapiens
ctatcacagaaagtt

SEQ ID NO: 526936 - DNA, 15 bp, Homo sapiens
tatcacagaaagttg

SEQ ID NO: 526937 - DNA, 15 bp, Homo sapiens
atcacagaaagttgt

SEQ ID NO: 526938 - DNA, 15 bp, Homo sapiens
tcacagaaagttgtt

SEQ ID NO: 526939 - DNA, 15 bp, Homo sapiens
cacagaaagttgttt

SEQ ID NO: 526940 - DNA, 15 bp, Homo sapiens
acagaaagttgtttt

SEQ ID NO: 526941 - DNA, 15 bp, Homo sapiens
cagaaagttgttttg

SEQ ID NO: 526942 - DNA, 15 bp, Homo sapiens
agaaagttgttttga

SEQ ID NO: 526943 - DNA, 15 bp, Homo sapiens
gaaagttgttttgaa

SEQ ID NO: 526944 - DNA, 15 bp, Homo sapiens
aaagttgttttgaac

SEQ ID NO: 526945 - DNA, 15 bp, Homo sapiens
aagttgttttgaaca

SEQ ID NO: 526946 - DNA, 15 bp, Homo sapiens
agttgttttgaacag

SEQ ID NO: 526947 - DNA, 15 bp, Homo sapiens
gttgttttgaacagt

SEQ ID NO: 526948 - DNA, 15 bp, Homo sapiens
ttgttttgaacagtg

SEQ ID NO: 526949 - DNA, 15 bp, Homo sapiens
tgttttgaacagtgt

SEQ ID NO: 526950 - DNA, 15 bp, Homo sapiens
gttttgaacagtgtt

SEQ ID NO: 526951 - DNA, 15 bp, Homo sapiens
ttttgaacagtgttg

SEQ ID NO: 526952 - DNA, 15 bp, Homo sapiens
tttgaacagtgttgc

SEQ ID NO: 526953 - DNA, 15 bp, Homo sapiens
ttgaacagtgttgcc

SEQ ID NO: 526954 - DNA, 15 bp, Homo sapiens
tgaacagtgttgcca

SEQ ID NO: 526955 - DNA, 15 bp, Homo sapiens
gaacagtgttgccaa

SEQ ID NO: 526956 - DNA, 15 bp, Homo sapiens
aacagtgttgccaag

SEQ ID NO: 526957 - DNA, 15 bp, Homo sapiens
acagtgttgccaagc

SEQ ID NO: 526958 - DNA, 15 bp, Homo sapiens
cagtgttgccaagcc

SEQ ID NO: 526959 - DNA, 15 bp, Homo sapiens
agtgttgccaagccc

SEQ ID NO: 526960 - DNA, 15 bp, Homo sapiens
gtgttgccaagccct

SEQ ID NO: 526961 - DNA, 15 bp, Homo sapiens
tgttgccaagccctg

SEQ ID NO: 526962 - DNA, 15 bp, Homo sapiens
gttgccaagccctgt

SEQ ID NO: 526963 - DNA, 15 bp, Homo sapiens
ttgccaagccctgta

SEQ ID NO: 526964 - DNA, 15 bp, Homo sapiens
tgccaagccctgtaa

SEQ ID NO: 526965 - DNA, 15 bp, Homo sapiens
gccaagccctgtaag

SEQ ID NO: 526966 - DNA, 15 bp, Homo sapiens
ccaagccctgtaagt

SEQ ID NO: 526967 - DNA, 15 bp, Homo sapiens
caagccctgtaagtg

SEQ ID NO: 526968 - DNA, 15 bp, Homo sapiens
aagccctgtaagtgg

SEQ ID NO: 526969 - DNA, 15 bp, Homo sapiens
agccctgtaagtgga

SEQ ID NO: 526970 - DNA, 15 bp, Homo sapiens
gccctgtaagtggaa

SEQ ID NO: 526971 - DNA, 15 bp, Homo sapiens
ccctgtaagtggaag

SEQ ID NO: 526972 - DNA, 15 bp, Homo sapiens
cctgtaagtggaaga

SEQ ID NO: 526973 - DNA, 15 bp, Homo sapiens
ctgtaagtggaagag

SEQ ID NO: 526974 - DNA, 15 bp, Homo sapiens
tgtaagtggaagagg

SEQ ID NO: 526975 - DNA, 15 bp, Homo sapiens
gtaagtggaagaggc

SEQ ID NO: 526976 - DNA, 15 bp, Homo sapiens
taagtggaagaggca

SEQ ID NO: 526977 - DNA, 15 bp, Homo sapiens
aagtggaagaggcag

SEQ ID NO: 526978 - DNA, 15 bp, Homo sapiens
agtggaagaggcagt

SEQ ID NO: 526979 - DNA, 15 bp, Homo sapiens
gtggaagaggcagtg

SEQ ID NO: 526980 - DNA, 15 bp, Homo sapiens
tggaagaggcagtgc

SEQ ID NO: 526981 - DNA, 15 bp, Homo sapiens
ggaagaggcagtgca

SEQ ID NO: 526982 - DNA, 15 bp, Homo sapiens
gaagaggcagtgcag

SEQ ID NO: 526983 - DNA, 15 bp, Homo sapiens
aagaggcagtgcagt

SEQ ID NO: 526984 - DNA, 15 bp, Homo sapiens
agaggcagtgcagtg

SEQ ID NO: 526985 - DNA, 15 bp, Homo sapiens
gaggcagtgcagtgt

SEQ ID NO: 526986 - DNA, 15 bp, Homo sapiens
aggcagtgcagtgtg

SEQ ID NO: 526987 - DNA, 15 bp, Homo sapiens
ggcagtgcagtgtga

SEQ ID NO: 526988 - DNA, 15 bp, Homo sapiens
gcagtgcagtgtgat

SEQ ID NO: 526989 - DNA, 15 bp, Homo sapiens
cagtgcagtgtgatc

SEQ ID NO: 526990 - DNA, 15 bp, Homo sapiens
agtgcagtgtgatct

SEQ ID NO: 526991 - DNA, 15 bp, Homo sapiens
gtgcagtgtgatctg

SEQ ID NO: 526992 - DNA, 15 bp, Homo sapiens
tgcagtgtgatctgt

SEQ ID NO: 526993 - DNA, 15 bp, Homo sapiens
gcagtgtgatctgtg

SEQ ID NO: 526994 - DNA, 15 bp, Homo sapiens
cagtgtgatctgtgt

SEQ ID NO: 526995 - DNA, 15 bp, Homo sapiens
agtgtgatctgtgtc

SEQ ID NO: 526996 - DNA, 15 bp, Homo sapiens
gtgtgatctgtgtct

SEQ ID NO: 526997 - DNA, 15 bp, Homo sapiens
tgtgatctgtgtctt

SEQ ID NO: 526998 - DNA, 15 bp, Homo sapiens
gtgatctgtgtcttc

SEQ ID NO: 526999 - DNA, 15 bp, Homo sapiens
tgatctgtgtcttca

SEQ ID NO: 527000 - DNA, 15 bp, Homo sapiens
gatctgtgtcttcag

SEQ ID NO: 527001 - DNA, 15 bp, Homo sapiens
atctgtgtcttcagg

SEQ ID NO: 527002 - DNA, 15 bp, Homo sapiens
tctgtgtcttcagga

SEQ ID NO: 527003 - DNA, 15 bp, Homo sapiens
ctgtgtcttcaggaa

SEQ ID NO: 527004 - DNA, 15 bp, Homo sapiens
tgtgtcttcaggaaa

SEQ ID NO: 527005 - DNA, 15 bp, Homo sapiens
gtgtcttcaggaaac

SEQ ID NO: 527006 - DNA, 15 bp, Homo sapiens
tgtcttcaggaaacc

SEQ ID NO: 527007 - DNA, 15 bp, Homo sapiens
gtcttcaggaaacca

SEQ ID NO: 527008 - DNA, 15 bp, Homo sapiens
tcttcaggaaaccag

SEQ ID NO: 527009 - DNA, 15 bp, Homo sapiens
cttcaggaaaccagg

SEQ ID NO: 527010 - DNA, 15 bp, Homo sapiens
ttcaggaaaccaggt

SEQ ID NO: 527011 - DNA, 15 bp, Homo sapiens
tcaggaaaccaggta

SEQ ID NO: 527012 - DNA, 15 bp, Homo sapiens
caggaaaccaggtag

SEQ ID NO: 527013 - DNA, 15 bp, Homo sapiens
aggaaaccaggtagt

SEQ ID NO: 527014 - DNA, 15 bp, Homo sapiens
ggaaaccaggtagtc

SEQ ID NO: 527015 - DNA, 15 bp, Homo sapiens
gaaaccaggtagtca

SEQ ID NO: 527016 - DNA, 15 bp, Homo sapiens
aaaccaggtagtcag

SEQ ID NO: 527017 - DNA, 15 bp, Homo sapiens
aaccaggtagtcaga

SEQ ID NO: 527018 - DNA, 15 bp, Homo sapiens
accaggtagtcagac

SEQ ID NO: 527019 - DNA, 15 bp, Homo sapiens
ccaggtagtcagact

SEQ ID NO: 527020 - DNA, 15 bp, Homo sapiens
caggtagtcagacta

SEQ ID NO: 527021 - DNA, 15 bp, Homo sapiens
aggtagtcagactag

SEQ ID NO: 527022 - DNA, 15 bp, Homo sapiens
ggtagtcagactagt

SEQ ID NO: 527023 - DNA, 15 bp, Homo sapiens
gtagtcagactagtt

SEQ ID NO: 527024 - DNA, 15 bp, Homo sapiens
tagtcagactagttc

SEQ ID NO: 527025 - DNA, 15 bp, Homo sapiens
agtcagactagttca

SEQ ID NO: 527026 - DNA, 15 bp, Homo sapiens
gtcagactagttcaa

SEQ ID NO: 527027 - DNA, 15 bp, Homo sapiens
tcagactagttcaat

SEQ ID NO: 527028 - DNA, 15 bp, Homo sapiens
cagactagttcaatg

SEQ ID NO: 527029 - DNA, 15 bp, Homo sapiens
agactagttcaatga

SEQ ID NO: 527030 - DNA, 15 bp, Homo sapiens
gactagttcaatgag

SEQ ID NO: 527031 - DNA, 15 bp, Homo sapiens
actagttcaatgagg

SEQ ID NO: 527032 - DNA, 15 bp, Homo sapiens
ctagttcaatgagga

SEQ ID NO: 527033 - DNA, 15 bp, Homo sapiens
tagttcaatgaggag

SEQ ID NO: 527034 - DNA, 15 bp, Homo sapiens
agttcaatgaggaga

SEQ ID NO: 527035 - DNA, 15 bp, Homo sapiens
gttcaatgaggagag

SEQ ID NO: 527036 - DNA, 15 bp, Homo sapiens
ttcaatgaggagagg

SEQ ID NO: 527037 - DNA, 15 bp, Homo sapiens
tcaatgaggagaggc

SEQ ID NO: 527038 - DNA, 15 bp, Homo sapiens
caatgaggagaggca

SEQ ID NO: 527039 - DNA, 15 bp, Homo sapiens
aatgaggagaggcag

SEQ ID NO: 527040 - DNA, 15 bp, Homo sapiens
atgaggagaggcaga

SEQ ID NO: 527041 - DNA, 15 bp, Homo sapiens
tgaggagaggcagaa

SEQ ID NO: 527042 - DNA, 15 bp, Homo sapiens
gaggagaggcagaac

SEQ ID NO: 527043 - DNA, 15 bp, Homo sapiens
aggagaggcagaacc

SEQ ID NO: 527044 - DNA, 15 bp, Homo sapiens
ggagaggcagaacct

SEQ ID NO: 527045 - DNA, 15 bp, Homo sapiens
gagaggcagaacctg

SEQ ID NO: 527046 - DNA, 15 bp, Homo sapiens
agaggcagaacctgg

SEQ ID NO: 527047 - DNA, 15 bp, Homo sapiens
gaggcagaacctggc

SEQ ID NO: 527048 - DNA, 15 bp, Homo sapiens
aggcagaacctggct

SEQ ID NO: 527049 - DNA, 15 bp, Homo sapiens
ggcagaacctggctt

SEQ ID NO: 527050 - DNA, 15 bp, Homo sapiens
gcagaacctggcttc

SEQ ID NO: 527051 - DNA, 15 bp, Homo sapiens
cagaacctggcttca

SEQ ID NO: 527052 - DNA, 15 bp, Homo sapiens
agaacctggcttcac

SEQ ID NO: 527053 - DNA, 15 bp, Homo sapiens
gaacctggcttcact

SEQ ID NO: 527054 - DNA, 15 bp, Homo sapiens
aacctggcttcactt

SEQ ID NO: 527055 - DNA, 15 bp, Homo sapiens
acctggcttcacttc

SEQ ID NO: 527056 - DNA, 15 bp, Homo sapiens
cctggcttcacttct

SEQ ID NO: 527057 - DNA, 15 bp, Homo sapiens
ctggcttcacttcta

SEQ ID NO: 527058 - DNA, 15 bp, Homo sapiens
tggcttcacttctag

SEQ ID NO: 527059 - DNA, 15 bp, Homo sapiens
ggcttcacttctaga

SEQ ID NO: 527060 - DNA, 15 bp, Homo sapiens
gcttcacttctagat

SEQ ID NO: 527061 - DNA, 15 bp, Homo sapiens
cttcacttctagatt

SEQ ID NO: 527062 - DNA, 15 bp, Homo sapiens
ttcacttctagatta

SEQ ID NO: 527063 - DNA, 15 bp, Homo sapiens
tcacttctagattaa

SEQ ID NO: 527064 - DNA, 15 bp, Homo sapiens
cacttctagattaaa

SEQ ID NO: 527065 - DNA, 15 bp, Homo sapiens
acttctagattaaaa

SEQ ID NO: 527066 - DNA, 15 bp, Homo sapiens
cttctagattaaaaa

SEQ ID NO: 527067 - DNA, 15 bp, Homo sapiens
ttctagattaaaaac

SEQ ID NO: 527068 - DNA, 15 bp, Homo sapiens
tctagattaaaaact

SEQ ID NO: 527069 - DNA, 15 bp, Homo sapiens
ctagattaaaaactg

SEQ ID NO: 527070 - DNA, 15 bp, Homo sapiens
tagattaaaaactgc

SEQ ID NO: 527071 - DNA, 15 bp, Homo sapiens
agattaaaaactgct

SEQ ID NO: 527072 - DNA, 15 bp, Homo sapiens
gattaaaaactgctt

SEQ ID NO: 527073 - DNA, 15 bp, Homo sapiens
attaaaaactgctta

SEQ ID NO: 527074 - DNA, 15 bp, Homo sapiens
ttaaaaactgcttag

SEQ ID NO: 527075 - DNA, 15 bp, Homo sapiens
taaaaactgcttagg

SEQ ID NO: 527076 - DNA, 15 bp, Homo sapiens
aaaaactgcttaggt

SEQ ID NO: 527077 - DNA, 15 bp, Homo sapiens
aaaactgcttaggtg

SEQ ID NO: 527078 - DNA, 15 bp, Homo sapiens
aaactgcttaggtgg

SEQ ID NO: 527079 - DNA, 15 bp, Homo sapiens
aactgcttaggtggc

SEQ ID NO: 527080 - DNA, 15 bp, Homo sapiens
actgcttaggtggcc

SEQ ID NO: 527081 - DNA, 15 bp, Homo sapiens
ctgcttaggtggcct

SEQ ID NO: 527082 - DNA, 15 bp, Homo sapiens
tgcttaggtggccta

SEQ ID NO: 527083 - DNA, 15 bp, Homo sapiens
gcttaggtggcctaa

SEQ ID NO: 527084 - DNA, 15 bp, Homo sapiens
cttaggtggcctaaa

SEQ ID NO: 527085 - DNA, 15 bp, Homo sapiens
ttaggtggcctaaag

SEQ ID NO: 527086 - DNA, 15 bp, Homo sapiens
taggtggcctaaaga

SEQ ID NO: 527087 - DNA, 15 bp, Homo sapiens
aggtggcctaaagat

SEQ ID NO: 527088 - DNA, 15 bp, Homo sapiens
ggtggcctaaagata

SEQ ID NO: 527089 - DNA, 15 bp, Homo sapiens
gtggcctaaagatac

SEQ ID NO: 527090 - DNA, 15 bp, Homo sapiens
tggcctaaagataca

SEQ ID NO: 527091 - DNA, 15 bp, Homo sapiens
ggcctaaagatacaa

SEQ ID NO: 527092 - DNA, 15 bp, Homo sapiens
gcctaaagatacaat

SEQ ID NO: 527093 - DNA, 15 bp, Homo sapiens
cctaaagatacaatg

SEQ ID NO: 527094 - DNA, 15 bp, Homo sapiens
ctaaagatacaatgg

SEQ ID NO: 527095 - DNA, 15 bp, Homo sapiens
taaagatacaatggc

SEQ ID NO: 527096 - DNA, 15 bp, Homo sapiens
aaagatacaatggcc

SEQ ID NO: 527097 - DNA, 15 bp, Homo sapiens
aagatacaatggcca

SEQ ID NO: 527098 - DNA, 15 bp, Homo sapiens
agatacaatggccat

SEQ ID NO: 527099 - DNA, 15 bp, Homo sapiens
gatacaatggccatt

SEQ ID NO: 527100 - DNA, 15 bp, Homo sapiens
atacaatggccattc

SEQ ID NO: 527101 - DNA, 15 bp, Homo sapiens
tacaatggccattct

SEQ ID NO: 527102 - DNA, 15 bp, Homo sapiens
acaatggccattctc

SEQ ID NO: 527103 - DNA, 15 bp, Homo sapiens
caatggccattctca

SEQ ID NO: 527104 - DNA, 15 bp, Homo sapiens
aatggccattctcag

SEQ ID NO: 527105 - DNA, 15 bp, Homo sapiens
atggccattctcaga

SEQ ID NO: 527106 - DNA, 15 bp, Homo sapiens
tggccattctcagag

SEQ ID NO: 527107 - DNA, 15 bp, Homo sapiens
ggccattctcagagt

SEQ ID NO: 527108 - DNA, 15 bp, Homo sapiens
gccattctcagagta

SEQ ID NO: 527109 - DNA, 15 bp, Homo sapiens
ccattctcagagtag

SEQ ID NO: 527110 - DNA, 15 bp, Homo sapiens
cattctcagagtagt

SEQ ID NO: 527111 - DNA, 15 bp, Homo sapiens
attctcagagtagtg

SEQ ID NO: 527112 - DNA, 15 bp, Homo sapiens
ttctcagagtagtga

SEQ ID NO: 527113 - DNA, 15 bp, Homo sapiens
tctcagagtagtgag

SEQ ID NO: 527114 - DNA, 15 bp, Homo sapiens
ctcagagtagtgaga

SEQ ID NO: 527115 - DNA, 15 bp, Homo sapiens
tcagagtagtgagaa

SEQ ID NO: 527116 - DNA, 15 bp, Homo sapiens
cagagtagtgagaag

SEQ ID NO: 527117 - DNA, 15 bp, Homo sapiens
agagtagtgagaagg

SEQ ID NO: 527118 - DNA, 15 bp, Homo sapiens
gagtagtgagaagga

SEQ ID NO: 527119 - DNA, 15 bp, Homo sapiens
agtagtgagaaggaa

SEQ ID NO: 527120 - DNA, 15 bp, Homo sapiens
gtagtgagaaggaag

SEQ ID NO: 527121 - DNA, 15 bp, Homo sapiens
tagtgagaaggaagg

SEQ ID NO: 527122 - DNA, 15 bp, Homo sapiens
agtgagaaggaagga

SEQ ID NO: 527123 - DNA, 15 bp, Homo sapiens
gtgagaaggaaggaa

SEQ ID NO: 527124 - DNA, 15 bp, Homo sapiens
tgagaaggaaggaac

SEQ ID NO: 527125 - DNA, 15 bp, Homo sapiens
gagaaggaaggaaca

SEQ ID NO: 527126 - DNA, 15 bp, Homo sapiens
agaaggaaggaacag

SEQ ID NO: 527127 - DNA, 15 bp, Homo sapiens
gaaggaaggaacaga

SEQ ID NO: 527128 - DNA, 15 bp, Homo sapiens
aaggaaggaacagat

SEQ ID NO: 527129 - DNA, 15 bp, Homo sapiens
aggaaggaacagatg

SEQ ID NO: 527130 - DNA, 15 bp, Homo sapiens
ggaaggaacagatgt

SEQ ID NO: 527131 - DNA, 15 bp, Homo sapiens
gaaggaacagatgtt

SEQ ID NO: 527132 - DNA, 15 bp, Homo sapiens
aaggaacagatgttt

SEQ ID NO: 527133 - DNA, 15 bp, Homo sapiens
aggaacagatgttta

SEQ ID NO: 527134 - DNA, 15 bp, Homo sapiens
ggaacagatgtttag

SEQ ID NO: 527135 - DNA, 15 bp, Homo sapiens
gaacagatgtttagg

SEQ ID NO: 527136 - DNA, 15 bp, Homo sapiens
aacagatgtttaggg

SEQ ID NO: 527137 - DNA, 15 bp, Homo sapiens
acagatgtttagggg

SEQ ID NO: 527138 - DNA, 15 bp, Homo sapiens
cagatgtttaggggg

SEQ ID NO: 527139 - DNA, 15 bp, Homo sapiens
agatgtttagggggc

SEQ ID NO: 527140 - DNA, 15 bp, Homo sapiens
gatgtttagggggct

SEQ ID NO: 527141 - DNA, 15 bp, Homo sapiens
atgtttagggggcta

SEQ ID NO: 527142 - DNA, 15 bp, Homo sapiens
tgtttagggggctag

SEQ ID NO: 527143 - DNA, 15 bp, Homo sapiens
gtttagggggctaga

SEQ ID NO: 527144 - DNA, 15 bp, Homo sapiens
tttagggggctagaa

SEQ ID NO: 527145 - DNA, 15 bp, Homo sapiens
ttagggggctagaag

SEQ ID NO: 527146 - DNA, 15 bp, Homo sapiens
tagggggctagaaga

SEQ ID NO: 527147 - DNA, 15 bp, Homo sapiens
agggggctagaagaa

SEQ ID NO: 527148 - DNA, 15 bp, Homo sapiens
gggggctagaagaaa

SEQ ID NO: 527149 - DNA, 15 bp, Homo sapiens
ggggctagaagaaag

SEQ ID NO: 527150 - DNA, 15 bp, Homo sapiens
gggctagaagaaagt

SEQ ID NO: 527151 - DNA, 15 bp, Homo sapiens
ggctagaagaaagtc

SEQ ID NO: 527152 - DNA, 15 bp, Homo sapiens
gctagaagaaagtca

SEQ ID NO: 527153 - DNA, 15 bp, Homo sapiens
ctagaagaaagtcag

SEQ ID NO: 527154 - DNA, 15 bp, Homo sapiens
tagaagaaagtcaga

SEQ ID NO: 527155 - DNA, 15 bp, Homo sapiens
agaagaaagtcagag

SEQ ID NO: 527156 - DNA, 15 bp, Homo sapiens
gaagaaagtcagaga

SEQ ID NO: 527157 - DNA, 15 bp, Homo sapiens
aagaaagtcagagag

SEQ ID NO: 527158 - DNA, 15 bp, Homo sapiens
agaaagtcagagagg

SEQ ID NO: 527159 - DNA, 15 bp, Homo sapiens
gaaagtcagagaggg

SEQ ID NO: 527160 - DNA, 15 bp, Homo sapiens
aaagtcagagagggc

SEQ ID NO: 527161 - DNA, 15 bp, Homo sapiens
aagtcagagagggcc

SEQ ID NO: 527162 - DNA, 15 bp, Homo sapiens
agtcagagagggccg

SEQ ID NO: 527163 - DNA, 15 bp, Homo sapiens
gtcagagagggccgg

SEQ ID NO: 527164 - DNA, 15 bp, Homo sapiens
tcagagagggccggg

SEQ ID NO: 527165 - DNA, 15 bp, Homo sapiens
cagagagggccgggc

SEQ ID NO: 527166 - DNA, 15 bp, Homo sapiens
agagagggccgggcg

SEQ ID NO: 527167 - DNA, 15 bp, Homo sapiens
gagagggccgggcgc

SEQ ID NO: 527168 - DNA, 15 bp, Homo sapiens
agagggccgggcgca

SEQ ID NO: 527169 - DNA, 15 bp, Homo sapiens
gagggccgggcgcag

SEQ ID NO: 527170 - DNA, 15 bp, Homo sapiens
agggccgggcgcagt

SEQ ID NO: 527171 - DNA, 15 bp, Homo sapiens
gggccgggcgcagtg

SEQ ID NO: 527172 - DNA, 15 bp, Homo sapiens
ggccgggcgcagtgg

SEQ ID NO: 527173 - DNA, 15 bp, Homo sapiens
gccgggcgcagtggc

SEQ ID NO: 527174 - DNA, 15 bp, Homo sapiens
ccgggcgcagtggct

SEQ ID NO: 527175 - DNA, 15 bp, Homo sapiens
cgggcgcagtggctt

SEQ ID NO: 527176 - DNA, 15 bp, Homo sapiens
gggcgcagtggctta

SEQ ID NO: 527177 - DNA, 15 bp, Homo sapiens
ggcgcagtggcttat

SEQ ID NO: 527178 - DNA, 15 bp, Homo sapiens
gcgcagtggcttatg

SEQ ID NO: 527179 - DNA, 15 bp, Homo sapiens
cgcagtggcttatgc

SEQ ID NO: 527180 - DNA, 15 bp, Homo sapiens
gcagtggcttatgcc

SEQ ID NO: 527181 - DNA, 15 bp, Homo sapiens
cagtggcttatgcct

SEQ ID NO: 527182 - DNA, 15 bp, Homo sapiens
agtggcttatgcctg

SEQ ID NO: 527183 - DNA, 15 bp, Homo sapiens
tcccagcactttgga

SEQ ID NO: 527184 - DNA, 15 bp, Homo sapiens
cccagcactttggaa

SEQ ID NO: 527185 - DNA, 15 bp, Homo sapiens
ccagcactttggaag

SEQ ID NO: 527186 - DNA, 15 bp, Homo sapiens
cagcactttggaagg

SEQ ID NO: 527187 - DNA, 15 bp, Homo sapiens
agcactttggaaggc

SEQ ID NO: 527188 - DNA, 15 bp, Homo sapiens
gcactttggaaggcc

SEQ ID NO: 527189 - DNA, 15 bp, Homo sapiens
cactttggaaggcca

SEQ ID NO: 527190 - DNA, 15 bp, Homo sapiens
actttggaaggccaa

SEQ ID NO: 527191 - DNA, 15 bp, Homo sapiens
ctttggaaggccaag

SEQ ID NO: 527192 - DNA, 15 bp, Homo sapiens
tttggaaggccaaga

SEQ ID NO: 527193 - DNA, 15 bp, Homo sapiens
ttggaaggccaagac

SEQ ID NO: 527194 - DNA, 15 bp, Homo sapiens
tggaaggccaagaca

SEQ ID NO: 527195 - DNA, 15 bp, Homo sapiens
ggaaggccaagacag

SEQ ID NO: 527196 - DNA, 15 bp, Homo sapiens
gaaggccaagacagg

SEQ ID NO: 527197 - DNA, 15 bp, Homo sapiens
aaggccaagacaggc

SEQ ID NO: 527198 - DNA, 15 bp, Homo sapiens
caagacaggcagatc

SEQ ID NO: 527199 - DNA, 15 bp, Homo sapiens
aagacaggcagatca

SEQ ID NO: 527200 - DNA, 15 bp, Homo sapiens
agacaggcagatcac

SEQ ID NO: 527201 - DNA, 15 bp, Homo sapiens
gacaggcagatcacg

SEQ ID NO: 527202 - DNA, 15 bp, Homo sapiens
acaggcagatcacga

SEQ ID NO: 527203 - DNA, 15 bp, Homo sapiens
caggcagatcacgag

SEQ ID NO: 527204 - DNA, 15 bp, Homo sapiens
cctgaccaacatggt

SEQ ID NO: 527205 - DNA, 15 bp, Homo sapiens
ctgaccaacatggtg

SEQ ID NO: 527206 - DNA, 15 bp, Homo sapiens
tgaccaacatggtga

SEQ ID NO: 527207 - DNA, 15 bp, Homo sapiens
gaccaacatggtgaa

SEQ ID NO: 527208 - DNA, 15 bp, Homo sapiens
accaacatggtgaaa

SEQ ID NO: 527209 - DNA, 15 bp, Homo sapiens
gccgggcgtggtggt

SEQ ID NO: 527210 - DNA, 15 bp, Homo sapiens
ccgggcgtggtggtg

SEQ ID NO: 527211 - DNA, 15 bp, Homo sapiens
cgggcgtggtggtgc

SEQ ID NO: 527212 - DNA, 15 bp, Homo sapiens
gggcgtggtggtgcg

SEQ ID NO: 527213 - DNA, 15 bp, Homo sapiens
ggcgtggtggtgcgc

SEQ ID NO: 527214 - DNA, 15 bp, Homo sapiens
gcgtggtggtgcgcg

SEQ ID NO: 527215 - DNA, 15 bp, Homo sapiens
cgtggtggtgcgcgc

SEQ ID NO: 527216 - DNA, 15 bp, Homo sapiens
gtggtggtgcgcgcc

SEQ ID NO: 527217 - DNA, 15 bp, Homo sapiens
tggtggtgcgcgcct

SEQ ID NO: 527218 - DNA, 15 bp, Homo sapiens
ggtggtgcgcgcctg

SEQ ID NO: 527219 - DNA, 15 bp, Homo sapiens
gtggtgcgcgcctgt

SEQ ID NO: 527220 - DNA, 15 bp, Homo sapiens
tggtgcgcgcctgta

SEQ ID NO: 527221 - DNA, 15 bp, Homo sapiens
ggtgcgcgcctgtaa

SEQ ID NO: 527222 - DNA, 15 bp, Homo sapiens
gtgcgcgcctgtaat

SEQ ID NO: 527223 - DNA, 15 bp, Homo sapiens
tgcgcgcctgtaatc

SEQ ID NO: 527224 - DNA, 15 bp, Homo sapiens
gcgcgcctgtaatcc

SEQ ID NO: 527225 - DNA, 15 bp, Homo sapiens
cgcgcctgtaatccc

SEQ ID NO: 527226 - DNA, 15 bp, Homo sapiens
tcaggaggctaaggc

SEQ ID NO: 527227 - DNA, 15 bp, Homo sapiens
caggaggctaaggca

SEQ ID NO: 527228 - DNA, 15 bp, Homo sapiens
aggaggctaaggcag

SEQ ID NO: 527229 - DNA, 15 bp, Homo sapiens
aatcgcttgaaccct

SEQ ID NO: 527230 - DNA, 15 bp, Homo sapiens
atcgcttgaaccctg

SEQ ID NO: 527231 - DNA, 15 bp, Homo sapiens
tcgcttgaaccctgg

SEQ ID NO: 527232 - DNA, 15 bp, Homo sapiens
cgcttgaaccctgga

SEQ ID NO: 527233 - DNA, 15 bp, Homo sapiens
gcttgaaccctggag

SEQ ID NO: 527234 - DNA, 15 bp, Homo sapiens
cttgaaccctggagg

SEQ ID NO: 527235 - DNA, 15 bp, Homo sapiens
ttgaaccctggaggc

SEQ ID NO: 527236 - DNA, 15 bp, Homo sapiens
tgaaccctggaggca

SEQ ID NO: 527237 - DNA, 15 bp, Homo sapiens
gaaccctggaggcag

SEQ ID NO: 527238 - DNA, 15 bp, Homo sapiens
aaccctggaggcaga

SEQ ID NO: 527239 - DNA, 15 bp, Homo sapiens
accctggaggcagag

SEQ ID NO: 527240 - DNA, 15 bp, Homo sapiens
ccctggaggcagagg

SEQ ID NO: 527241 - DNA, 15 bp, Homo sapiens
ggttgcagtgagccc

SEQ ID NO: 527242 - DNA, 15 bp, Homo sapiens
gttgcagtgagccca

SEQ ID NO: 527243 - DNA, 15 bp, Homo sapiens
ttgcagtgagcccag

SEQ ID NO: 527244 - DNA, 15 bp, Homo sapiens
tgcagtgagcccaga

SEQ ID NO: 527245 - DNA, 15 bp, Homo sapiens
gcagtgagcccagat

SEQ ID NO: 527246 - DNA, 15 bp, Homo sapiens
cagtgagcccagatc

SEQ ID NO: 527247 - DNA, 15 bp, Homo sapiens
agtgagcccagatcg

SEQ ID NO: 527248 - DNA, 15 bp, Homo sapiens
gtgagcccagatcgc

SEQ ID NO: 527249 - DNA, 15 bp, Homo sapiens
tgagcccagatcgca

SEQ ID NO: 527250 - DNA, 15 bp, Homo sapiens
gagcccagatcgcac

SEQ ID NO: 527251 - DNA, 15 bp, Homo sapiens
agcccagatcgcacc

SEQ ID NO: 527252 - DNA, 15 bp, Homo sapiens
gcccagatcgcacca

SEQ ID NO: 527253 - DNA, 15 bp, Homo sapiens
cccagatcgcaccac

SEQ ID NO: 527254 - DNA, 15 bp, Homo sapiens
ccagatcgcaccact

SEQ ID NO: 527255 - DNA, 15 bp, Homo sapiens
cagatcgcaccacta

SEQ ID NO: 527256 - DNA, 15 bp, Homo sapiens
agatcgcaccactac

SEQ ID NO: 527257 - DNA, 15 bp, Homo sapiens
gatcgcaccactacg

SEQ ID NO: 527258 - DNA, 15 bp, Homo sapiens
atcgcaccactacgc

SEQ ID NO: 527259 - DNA, 15 bp, Homo sapiens
tcgcaccactacgct

SEQ ID NO: 527260 - DNA, 15 bp, Homo sapiens
cgcaccactacgctc

SEQ ID NO: 527261 - DNA, 15 bp, Homo sapiens
gcaccactacgctcc

SEQ ID NO: 527262 - DNA, 15 bp, Homo sapiens
caccactacgctcca

SEQ ID NO: 527263 - DNA, 15 bp, Homo sapiens
accactacgctccag

SEQ ID NO: 527264 - DNA, 15 bp, Homo sapiens
ccactacgctccagc

SEQ ID NO: 527265 - DNA, 15 bp, Homo sapiens
cactacgctccagcc

SEQ ID NO: 527266 - DNA, 15 bp, Homo sapiens
actacgctccagcct

SEQ ID NO: 527267 - DNA, 15 bp, Homo sapiens
ctacgctccagccta

SEQ ID NO: 527268 - DNA, 15 bp, Homo sapiens
tacgctccagcctag

SEQ ID NO: 527269 - DNA, 15 bp, Homo sapiens
acgctccagcctagg

SEQ ID NO: 527270 - DNA, 15 bp, Homo sapiens
cgctccagcctaggt

SEQ ID NO: 527271 - DNA, 15 bp, Homo sapiens
gctccagcctaggtg

SEQ ID NO: 527272 - DNA, 15 bp, Homo sapiens
cctaggtgacagaga

SEQ ID NO: 527273 - DNA, 15 bp, Homo sapiens
ctaggtgacagagag

SEQ ID NO: 527274 - DNA, 15 bp, Homo sapiens
taggtgacagagaga

SEQ ID NO: 527275 - DNA, 15 bp, Homo sapiens
aggtgacagagagag

SEQ ID NO: 527276 - DNA, 15 bp, Homo sapiens
ggtgacagagagaga

SEQ ID NO: 527277 - DNA, 15 bp, Homo sapiens
gtgacagagagagac

SEQ ID NO: 527278 - DNA, 15 bp, Homo sapiens
tgacagagagagact

SEQ ID NO: 527279 - DNA, 15 bp, Homo sapiens
gacagagagagactc

SEQ ID NO: 527280 - DNA, 15 bp, Homo sapiens
acagagagagactcc

SEQ ID NO: 527281 - DNA, 15 bp, Homo sapiens
cagagagagactccg

SEQ ID NO: 527282 - DNA, 15 bp, Homo sapiens
agagagagactccgt

SEQ ID NO: 527283 - DNA, 15 bp, Homo sapiens
gagagagactccgtc

SEQ ID NO: 527284 - DNA, 15 bp, Homo sapiens
agagagactccgtct

SEQ ID NO: 527285 - DNA, 15 bp, Homo sapiens
gagagactccgtctc

SEQ ID NO: 527286 - DNA, 15 bp, Homo sapiens
agagactccgtctca

SEQ ID NO: 527287 - DNA, 15 bp, Homo sapiens
aaaaaaaaaaagtca

SEQ ID NO: 527288 - DNA, 15 bp, Homo sapiens
aaaaaaaaaagtcag

SEQ ID NO: 527289 - DNA, 15 bp, Homo sapiens
aaaaaaaaagtcaga

SEQ ID NO: 527290 - DNA, 15 bp, Homo sapiens
aaaaaaaagtcagag

SEQ ID NO: 527291 - DNA, 15 bp, Homo sapiens
aaaaaaagtcagagg

SEQ ID NO: 527292 - DNA, 15 bp, Homo sapiens
aaaaaagtcagagga

SEQ ID NO: 527293 - DNA, 15 bp, Homo sapiens
aaaaagtcagaggag

SEQ ID NO: 527294 - DNA, 15 bp, Homo sapiens
aaaagtcagaggaga

SEQ ID NO: 527295 - DNA, 15 bp, Homo sapiens
aaagtcagaggagac

SEQ ID NO: 527296 - DNA, 15 bp, Homo sapiens
aagtcagaggagaca

SEQ ID NO: 527297 - DNA, 15 bp, Homo sapiens
agtcagaggagacaa

SEQ ID NO: 527298 - DNA, 15 bp, Homo sapiens
gtcagaggagacaag

SEQ ID NO: 527299 - DNA, 15 bp, Homo sapiens
tcagaggagacaagg

SEQ ID NO: 527300 - DNA, 15 bp, Homo sapiens
cagaggagacaagga

SEQ ID NO: 527301 - DNA, 15 bp, Homo sapiens
agaggagacaaggag

SEQ ID NO: 527302 - DNA, 15 bp, Homo sapiens
gaggagacaaggagc

SEQ ID NO: 527303 - DNA, 15 bp, Homo sapiens
aggagacaaggagca

SEQ ID NO: 527304 - DNA, 15 bp, Homo sapiens
ggagacaaggagcat

SEQ ID NO: 527305 - DNA, 15 bp, Homo sapiens
gagacaaggagcatg

SEQ ID NO: 527306 - DNA, 15 bp, Homo sapiens
agacaaggagcatgt

SEQ ID NO: 527307 - DNA, 15 bp, Homo sapiens
gacaaggagcatgta

SEQ ID NO: 527308 - DNA, 15 bp, Homo sapiens
acaaggagcatgtac

SEQ ID NO: 527309 - DNA, 15 bp, Homo sapiens
caaggagcatgtaca

SEQ ID NO: 527310 - DNA, 15 bp, Homo sapiens
aaggagcatgtacac

SEQ ID NO: 527311 - DNA, 15 bp, Homo sapiens
aggagcatgtacacc

SEQ ID NO: 527312 - DNA, 15 bp, Homo sapiens
ggagcatgtacacct

SEQ ID NO: 527313 - DNA, 15 bp, Homo sapiens
gagcatgtacaccta

SEQ ID NO: 527314 - DNA, 15 bp, Homo sapiens
agcatgtacacctaa

SEQ ID NO: 527315 - DNA, 15 bp, Homo sapiens
gcatgtacacctaaa

SEQ ID NO: 527316 - DNA, 15 bp, Homo sapiens
catgtacacctaaaa

SEQ ID NO: 527317 - DNA, 15 bp, Homo sapiens
atgtacacctaaaat

SEQ ID NO: 527318 - DNA, 15 bp, Homo sapiens
tgtacacctaaaatc

SEQ ID NO: 527319 - DNA, 15 bp, Homo sapiens
gtacacctaaaatca

SEQ ID NO: 527320 - DNA, 15 bp, Homo sapiens
tacacctaaaatcaa

SEQ ID NO: 527321 - DNA, 15 bp, Homo sapiens
acacctaaaatcaac

SEQ ID NO: 527322 - DNA, 15 bp, Homo sapiens
cacctaaaatcaaca

SEQ ID NO: 527323 - DNA, 15 bp, Homo sapiens
acctaaaatcaacat

SEQ ID NO: 527324 - DNA, 15 bp, Homo sapiens
cctaaaatcaacata

SEQ ID NO: 527325 - DNA, 15 bp, Homo sapiens
ctaaaatcaacatag

SEQ ID NO: 527326 - DNA, 15 bp, Homo sapiens
taaaatcaacataga

SEQ ID NO: 527327 - DNA, 15 bp, Homo sapiens
aaaatcaacatagac

SEQ ID NO: 527328 - DNA, 15 bp, Homo sapiens
aaatcaacatagacc

SEQ ID NO: 527329 - DNA, 15 bp, Homo sapiens
aatcaacatagaccc

SEQ ID NO: 527330 - DNA, 15 bp, Homo sapiens
atcaacatagacccc

SEQ ID NO: 527331 - DNA, 15 bp, Homo sapiens
tcaacatagacccct

SEQ ID NO: 527332 - DNA, 15 bp, Homo sapiens
caacatagacccctc

SEQ ID NO: 527333 - DNA, 15 bp, Homo sapiens
aacatagacccctct

SEQ ID NO: 527334 - DNA, 15 bp, Homo sapiens
acatagacccctctg

SEQ ID NO: 527335 - DNA, 15 bp, Homo sapiens
catagacccctctgt

SEQ ID NO: 527336 - DNA, 15 bp, Homo sapiens
atagacccctctgtt

SEQ ID NO: 527337 - DNA, 15 bp, Homo sapiens
tagacccctctgttg

SEQ ID NO: 527338 - DNA, 15 bp, Homo sapiens
agacccctctgttga

SEQ ID NO: 527339 - DNA, 15 bp, Homo sapiens
gacccctctgttgat

SEQ ID NO: 527340 - DNA, 15 bp, Homo sapiens
acccctctgttgatg

SEQ ID NO: 527341 - DNA, 15 bp, Homo sapiens
cccctctgttgatgg

SEQ ID NO: 527342 - DNA, 15 bp, Homo sapiens
ccctctgttgatggg

SEQ ID NO: 527343 - DNA, 15 bp, Homo sapiens
cctctgttgatgggg

SEQ ID NO: 527344 - DNA, 15 bp, Homo sapiens
ctctgttgatggggt

SEQ ID NO: 527345 - DNA, 15 bp, Homo sapiens
tctgttgatggggtc

SEQ ID NO: 527346 - DNA, 15 bp, Homo sapiens
ctgttgatggggtca

SEQ ID NO: 527347 - DNA, 15 bp, Homo sapiens
tgttgatggggtcat

SEQ ID NO: 527348 - DNA, 15 bp, Homo sapiens
gttgatggggtcata

SEQ ID NO: 527349 - DNA, 15 bp, Homo sapiens
ttgatggggtcatag

SEQ ID NO: 527350 - DNA, 15 bp, Homo sapiens
tgatggggtcatagt

SEQ ID NO: 527351 - DNA, 15 bp, Homo sapiens
gatggggtcatagtg

SEQ ID NO: 527352 - DNA, 15 bp, Homo sapiens
atggggtcatagtga

SEQ ID NO: 527353 - DNA, 15 bp, Homo sapiens
tggggtcatagtgag

SEQ ID NO: 527354 - DNA, 15 bp, Homo sapiens
ggggtcatagtgagt

SEQ ID NO: 527355 - DNA, 15 bp, Homo sapiens
gggtcatagtgagta

SEQ ID NO: 527356 - DNA, 15 bp, Homo sapiens
ggtcatagtgagtac

SEQ ID NO: 527357 - DNA, 15 bp, Homo sapiens
gtcatagtgagtact

SEQ ID NO: 527358 - DNA, 15 bp, Homo sapiens
tcatagtgagtactt

SEQ ID NO: 527359 - DNA, 15 bp, Homo sapiens
catagtgagtacttg

SEQ ID NO: 527360 - DNA, 15 bp, Homo sapiens
atagtgagtacttga

SEQ ID NO: 527361 - DNA, 15 bp, Homo sapiens
tagtgagtacttgag

SEQ ID NO: 527362 - DNA, 15 bp, Homo sapiens
agtgagtacttgagg

SEQ ID NO: 527363 - DNA, 15 bp, Homo sapiens
gtgagtacttgaggt

SEQ ID NO: 527364 - DNA, 15 bp, Homo sapiens
tgagtacttgaggta

SEQ ID NO: 527365 - DNA, 15 bp, Homo sapiens
gagtacttgaggtac

SEQ ID NO: 527366 - DNA, 15 bp, Homo sapiens
agtacttgaggtacc

SEQ ID NO: 527367 - DNA, 15 bp, Homo sapiens
gtacttgaggtacca

SEQ ID NO: 527368 - DNA, 15 bp, Homo sapiens
tacttgaggtaccaa

SEQ ID NO: 527369 - DNA, 15 bp, Homo sapiens
acttgaggtaccaag

SEQ ID NO: 527370 - DNA, 15 bp, Homo sapiens
cttgaggtaccaagt

SEQ ID NO: 527371 - DNA, 15 bp, Homo sapiens
ttgaggtaccaagtc

SEQ ID NO: 527372 - DNA, 15 bp, Homo sapiens
tgaggtaccaagtct

SEQ ID NO: 527373 - DNA, 15 bp, Homo sapiens
gaggtaccaagtctg

SEQ ID NO: 527374 - DNA, 15 bp, Homo sapiens
aggtaccaagtctgg

SEQ ID NO: 527375 - DNA, 15 bp, Homo sapiens
ggtaccaagtctgga

SEQ ID NO: 527376 - DNA, 15 bp, Homo sapiens
gtaccaagtctggat

SEQ ID NO: 527377 - DNA, 15 bp, Homo sapiens
taccaagtctggata

SEQ ID NO: 527378 - DNA, 15 bp, Homo sapiens
accaagtctggataa

SEQ ID NO: 527379 - DNA, 15 bp, Homo sapiens
ccaagtctggataaa

SEQ ID NO: 527380 - DNA, 15 bp, Homo sapiens
caagtctggataaac

SEQ ID NO: 527381 - DNA, 15 bp, Homo sapiens
aagtctggataaaca

SEQ ID NO: 527382 - DNA, 15 bp, Homo sapiens
agtctggataaacat

SEQ ID NO: 527383 - DNA, 15 bp, Homo sapiens
gtctggataaacatc

SEQ ID NO: 527384 - DNA, 15 bp, Homo sapiens
tctggataaacatca

SEQ ID NO: 527385 - DNA, 15 bp, Homo sapiens
ctggataaacatcaa

SEQ ID NO: 527386 - DNA, 15 bp, Homo sapiens
tggataaacatcaaa

SEQ ID NO: 527387 - DNA, 15 bp, Homo sapiens
ggataaacatcaaac

SEQ ID NO: 527388 - DNA, 15 bp, Homo sapiens
gataaacatcaaact

SEQ ID NO: 527389 - DNA, 15 bp, Homo sapiens
ataaacatcaaactt

SEQ ID NO: 527390 - DNA, 15 bp, Homo sapiens
taaacatcaaacttc

SEQ ID NO: 527391 - DNA, 15 bp, Homo sapiens
aaacatcaaacttca

SEQ ID NO: 527392 - DNA, 15 bp, Homo sapiens
aacatcaaacttcag

SEQ ID NO: 527393 - DNA, 15 bp, Homo sapiens
acatcaaacttcagc

SEQ ID NO: 527394 - DNA, 15 bp, Homo sapiens
catcaaacttcagcc

SEQ ID NO: 527395 - DNA, 15 bp, Homo sapiens
atcaaacttcagcca

SEQ ID NO: 527396 - DNA, 15 bp, Homo sapiens
tcaaacttcagccaa

SEQ ID NO: 527397 - DNA, 15 bp, Homo sapiens
caaacttcagccaat

SEQ ID NO: 527398 - DNA, 15 bp, Homo sapiens
aaacttcagccaata

SEQ ID NO: 527399 - DNA, 15 bp, Homo sapiens
aacttcagccaataa

SEQ ID NO: 527400 - DNA, 15 bp, Homo sapiens
acttcagccaataac

SEQ ID NO: 527401 - DNA, 15 bp, Homo sapiens
cttcagccaataact

SEQ ID NO: 527402 - DNA, 15 bp, Homo sapiens
ttcagccaataactt

SEQ ID NO: 527403 - DNA, 15 bp, Homo sapiens
tcagccaataacttt

SEQ ID NO: 527404 - DNA, 15 bp, Homo sapiens
cagccaataactttg

SEQ ID NO: 527405 - DNA, 15 bp, Homo sapiens
agccaataactttga

SEQ ID NO: 527406 - DNA, 15 bp, Homo sapiens
gccaataactttgag

SEQ ID NO: 527407 - DNA, 15 bp, Homo sapiens
ccaataactttgagt

SEQ ID NO: 527408 - DNA, 15 bp, Homo sapiens
caataactttgagtt

SEQ ID NO: 527409 - DNA, 15 bp, Homo sapiens
aataactttgagttt

SEQ ID NO: 527410 - DNA, 15 bp, Homo sapiens
ataactttgagtttc

SEQ ID NO: 527411 - DNA, 15 bp, Homo sapiens
taactttgagtttct

SEQ ID NO: 527412 - DNA, 15 bp, Homo sapiens
aactttgagtttcta

SEQ ID NO: 527413 - DNA, 15 bp, Homo sapiens
actttgagtttctag

SEQ ID NO: 527414 - DNA, 15 bp, Homo sapiens
ctttgagtttctagc

SEQ ID NO: 527415 - DNA, 15 bp, Homo sapiens
tttgagtttctagcc

SEQ ID NO: 527416 - DNA, 15 bp, Homo sapiens
ttgagtttctagcca

SEQ ID NO: 527417 - DNA, 15 bp, Homo sapiens
tgagtttctagccat

SEQ ID NO: 527418 - DNA, 15 bp, Homo sapiens
gagtttctagccatc

SEQ ID NO: 527419 - DNA, 15 bp, Homo sapiens
agtttctagccatcc

SEQ ID NO: 527420 - DNA, 15 bp, Homo sapiens
gtttctagccatcca

SEQ ID NO: 527421 - DNA, 15 bp, Homo sapiens
tttctagccatccaa

SEQ ID NO: 527422 - DNA, 15 bp, Homo sapiens
ttctagccatccaag

SEQ ID NO: 527423 - DNA, 15 bp, Homo sapiens
tctagccatccaagc

SEQ ID NO: 527424 - DNA, 15 bp, Homo sapiens
ctagccatccaagcc

SEQ ID NO: 527425 - DNA, 15 bp, Homo sapiens
tagccatccaagcct

SEQ ID NO: 527426 - DNA, 15 bp, Homo sapiens
agccatccaagcctc

SEQ ID NO: 527427 - DNA, 15 bp, Homo sapiens
gccatccaagcctct

SEQ ID NO: 527428 - DNA, 15 bp, Homo sapiens
ccatccaagcctctt

SEQ ID NO: 527429 - DNA, 15 bp, Homo sapiens
catccaagcctctta

SEQ ID NO: 527430 - DNA, 15 bp, Homo sapiens
atccaagcctcttat

SEQ ID NO: 527431 - DNA, 15 bp, Homo sapiens
tccaagcctcttatt

SEQ ID NO: 527432 - DNA, 15 bp, Homo sapiens
ccaagcctcttatta

SEQ ID NO: 527433 - DNA, 15 bp, Homo sapiens
caagcctcttattaa

SEQ ID NO: 527434 - DNA, 15 bp, Homo sapiens
aagcctcttattaaa

SEQ ID NO: 527435 - DNA, 15 bp, Homo sapiens
agcctcttattaaac

SEQ ID NO: 527436 - DNA, 15 bp, Homo sapiens
gcctcttattaaaca

SEQ ID NO: 527437 - DNA, 15 bp, Homo sapiens
cctcttattaaacat

SEQ ID NO: 527438 - DNA, 15 bp, Homo sapiens
ctcttattaaacata

SEQ ID NO: 527439 - DNA, 15 bp, Homo sapiens
tcttattaaacatac

SEQ ID NO: 527440 - DNA, 15 bp, Homo sapiens
cttattaaacataca

SEQ ID NO: 527441 - DNA, 15 bp, Homo sapiens
ttattaaacatacag

SEQ ID NO: 527442 - DNA, 15 bp, Homo sapiens
tattaaacatacaga

SEQ ID NO: 527443 - DNA, 15 bp, Homo sapiens
attaaacatacagaa

SEQ ID NO: 527444 - DNA, 15 bp, Homo sapiens
ttaaacatacagaag

SEQ ID NO: 527445 - DNA, 15 bp, Homo sapiens
taaacatacagaagg

SEQ ID NO: 527446 - DNA, 15 bp, Homo sapiens
aaacatacagaagga

SEQ ID NO: 527447 - DNA, 15 bp, Homo sapiens
aacatacagaaggac

SEQ ID NO: 527448 - DNA, 15 bp, Homo sapiens
acatacagaaggacc

SEQ ID NO: 527449 - DNA, 15 bp, Homo sapiens
catacagaaggacct

SEQ ID NO: 527450 - DNA, 15 bp, Homo sapiens
atacagaaggacctt

SEQ ID NO: 527451 - DNA, 15 bp, Homo sapiens
tacagaaggaccttt

SEQ ID NO: 527452 - DNA, 15 bp, Homo sapiens
acagaaggacctttt

SEQ ID NO: 527453 - DNA, 15 bp, Homo sapiens
cagaaggaccttttt

SEQ ID NO: 527454 - DNA, 15 bp, Homo sapiens
agaaggacctttttt

SEQ ID NO: 527455 - DNA, 15 bp, Homo sapiens
gaaggaccttttttc

SEQ ID NO: 527456 - DNA, 15 bp, Homo sapiens
aaggaccttttttcc

SEQ ID NO: 527457 - DNA, 15 bp, Homo sapiens
aggaccttttttccc

SEQ ID NO: 527458 - DNA, 15 bp, Homo sapiens
ggaccttttttccct

SEQ ID NO: 527459 - DNA, 15 bp, Homo sapiens
gaccttttttccctt

SEQ ID NO: 527460 - DNA, 15 bp, Homo sapiens
accttttttcccttg

SEQ ID NO: 527461 - DNA, 15 bp, Homo sapiens
ccttttttcccttgc

SEQ ID NO: 527462 - DNA, 15 bp, Homo sapiens
cttttttcccttgca

SEQ ID NO: 527463 - DNA, 15 bp, Homo sapiens
ttttttcccttgcat

SEQ ID NO: 527464 - DNA, 15 bp, Homo sapiens
tttttcccttgcatc

SEQ ID NO: 527465 - DNA, 15 bp, Homo sapiens
ttttcccttgcatct

SEQ ID NO: 527466 - DNA, 15 bp, Homo sapiens
tttcccttgcatcta

SEQ ID NO: 527467 - DNA, 15 bp, Homo sapiens
ttcccttgcatctaa

SEQ ID NO: 527468 - DNA, 15 bp, Homo sapiens
tcccttgcatctaac

SEQ ID NO: 527469 - DNA, 15 bp, Homo sapiens
cccttgcatctaaca

SEQ ID NO: 527470 - DNA, 15 bp, Homo sapiens
ccttgcatctaacaa

SEQ ID NO: 527471 - DNA, 15 bp, Homo sapiens
cttgcatctaacaag

SEQ ID NO: 527472 - DNA, 15 bp, Homo sapiens
ttgcatctaacaagt

SEQ ID NO: 527473 - DNA, 15 bp, Homo sapiens
tgcatctaacaagtt

SEQ ID NO: 527474 - DNA, 15 bp, Homo sapiens
gcatctaacaagtta

SEQ ID NO: 527475 - DNA, 15 bp, Homo sapiens
catctaacaagttaa

SEQ ID NO: 527476 - DNA, 15 bp, Homo sapiens
atctaacaagttaaa

SEQ ID NO: 527477 - DNA, 15 bp, Homo sapiens
tctaacaagttaaag

SEQ ID NO: 527478 - DNA, 15 bp, Homo sapiens
ctaacaagttaaagc

SEQ ID NO: 527479 - DNA, 15 bp, Homo sapiens
taacaagttaaagca

SEQ ID NO: 527480 - DNA, 15 bp, Homo sapiens
aacaagttaaagcac

SEQ ID NO: 527481 - DNA, 15 bp, Homo sapiens
acaagttaaagcacc

SEQ ID NO: 527482 - DNA, 15 bp, Homo sapiens
caagttaaagcacct

SEQ ID NO: 527483 - DNA, 15 bp, Homo sapiens
aagttaaagcacctg

SEQ ID NO: 527484 - DNA, 15 bp, Homo sapiens
agttaaagcacctgc

SEQ ID NO: 527485 - DNA, 15 bp, Homo sapiens
gttaaagcacctgca

SEQ ID NO: 527486 - DNA, 15 bp, Homo sapiens
ttaaagcacctgcag

SEQ ID NO: 527487 - DNA, 15 bp, Homo sapiens
taaagcacctgcaga

SEQ ID NO: 527488 - DNA, 15 bp, Homo sapiens
aaagcacctgcagag

SEQ ID NO: 527489 - DNA, 15 bp, Homo sapiens
aagcacctgcagaga

SEQ ID NO: 527490 - DNA, 15 bp, Homo sapiens
agcacctgcagagat

SEQ ID NO: 527491 - DNA, 15 bp, Homo sapiens
gcacctgcagagatc

SEQ ID NO: 527492 - DNA, 15 bp, Homo sapiens
cacctgcagagatca

SEQ ID NO: 527493 - DNA, 15 bp, Homo sapiens
acctgcagagatcat

SEQ ID NO: 527494 - DNA, 15 bp, Homo sapiens
cctgcagagatcatt

SEQ ID NO: 527495 - DNA, 15 bp, Homo sapiens
ctgcagagatcatta

SEQ ID NO: 527496 - DNA, 15 bp, Homo sapiens
tgcagagatcattag

SEQ ID NO: 527497 - DNA, 15 bp, Homo sapiens
gcagagatcattagg

SEQ ID NO: 527498 - DNA, 15 bp, Homo sapiens
cagagatcattaggg

SEQ ID NO: 527499 - DNA, 15 bp, Homo sapiens
agagatcattaggga

SEQ ID NO: 527500 - DNA, 15 bp, Homo sapiens
gagatcattagggag

SEQ ID NO: 527501 - DNA, 15 bp, Homo sapiens
agatcattagggagg

SEQ ID NO: 527502 - DNA, 15 bp, Homo sapiens
gatcattagggagga

SEQ ID NO: 527503 - DNA, 15 bp, Homo sapiens
atcattagggaggag

SEQ ID NO: 527504 - DNA, 15 bp, Homo sapiens
tcattagggaggagc

SEQ ID NO: 527505 - DNA, 15 bp, Homo sapiens
cattagggaggagcc

SEQ ID NO: 527506 - DNA, 15 bp, Homo sapiens
attagggaggagcct

SEQ ID NO: 527507 - DNA, 15 bp, Homo sapiens
ttagggaggagcctt

SEQ ID NO: 527508 - DNA, 15 bp, Homo sapiens
tagggaggagccttg

SEQ ID NO: 527509 - DNA, 15 bp, Homo sapiens
agggaggagccttgg

SEQ ID NO: 527510 - DNA, 15 bp, Homo sapiens
gggaggagccttggc

SEQ ID NO: 527511 - DNA, 15 bp, Homo sapiens
ggaggagccttggcc

SEQ ID NO: 527512 - DNA, 15 bp, Homo sapiens
gaggagccttggcct

SEQ ID NO: 527513 - DNA, 15 bp, Homo sapiens
aggagccttggcctg

SEQ ID NO: 527514 - DNA, 15 bp, Homo sapiens
ggagccttggcctga

SEQ ID NO: 527515 - DNA, 15 bp, Homo sapiens
gagccttggcctgat

SEQ ID NO: 527516 - DNA, 15 bp, Homo sapiens
agccttggcctgatt

SEQ ID NO: 527517 - DNA, 15 bp, Homo sapiens
gccttggcctgattg

SEQ ID NO: 527518 - DNA, 15 bp, Homo sapiens
ccttggcctgattgg

SEQ ID NO: 527519 - DNA, 15 bp, Homo sapiens
cttggcctgattggt

SEQ ID NO: 527520 - DNA, 15 bp, Homo sapiens
ttggcctgattggtg

SEQ ID NO: 527521 - DNA, 15 bp, Homo sapiens
tggcctgattggtga

SEQ ID NO: 527522 - DNA, 15 bp, Homo sapiens
ggcctgattggtgac

SEQ ID NO: 527523 - DNA, 15 bp, Homo sapiens
gcctgattggtgaca

SEQ ID NO: 527524 - DNA, 15 bp, Homo sapiens
cctgattggtgacaa

SEQ ID NO: 527525 - DNA, 15 bp, Homo sapiens
ctgattggtgacaaa

SEQ ID NO: 527526 - DNA, 15 bp, Homo sapiens
tgattggtgacaaaa

SEQ ID NO: 527527 - DNA, 15 bp, Homo sapiens
gattggtgacaaaag

SEQ ID NO: 527528 - DNA, 15 bp, Homo sapiens
attggtgacaaaagt

SEQ ID NO: 527529 - DNA, 15 bp, Homo sapiens
ttggtgacaaaagtg

SEQ ID NO: 527530 - DNA, 15 bp, Homo sapiens
tggtgacaaaagtga

SEQ ID NO: 527531 - DNA, 15 bp, Homo sapiens
ggtgacaaaagtgag

SEQ ID NO: 527532 - DNA, 15 bp, Homo sapiens
gtgacaaaagtgaga

SEQ ID NO: 527533 - DNA, 15 bp, Homo sapiens
tgacaaaagtgagat

SEQ ID NO: 527534 - DNA, 15 bp, Homo sapiens
gacaaaagtgagatg

SEQ ID NO: 527535 - DNA, 15 bp, Homo sapiens
acaaaagtgagatgc

SEQ ID NO: 527536 - DNA, 15 bp, Homo sapiens
caaaagtgagatgct

SEQ ID NO: 527537 - DNA, 15 bp, Homo sapiens
aaaagtgagatgctc

SEQ ID NO: 527538 - DNA, 15 bp, Homo sapiens
aaagtgagatgctca

SEQ ID NO: 527539 - DNA, 15 bp, Homo sapiens
aagtgagatgctcag

SEQ ID NO: 527540 - DNA, 15 bp, Homo sapiens
agtgagatgctcagt

SEQ ID NO: 527541 - DNA, 15 bp, Homo sapiens
gtgagatgctcagtc

SEQ ID NO: 527542 - DNA, 15 bp, Homo sapiens
tgagatgctcagtcc

SEQ ID NO: 527543 - DNA, 15 bp, Homo sapiens
gagatgctcagtcct

SEQ ID NO: 527544 - DNA, 15 bp, Homo sapiens
agatgctcagtcctt

SEQ ID NO: 527545 - DNA, 15 bp, Homo sapiens
gatgctcagtccttg

SEQ ID NO: 527546 - DNA, 15 bp, Homo sapiens
atgctcagtccttga

SEQ ID NO: 527547 - DNA, 15 bp, Homo sapiens
tgctcagtccttgaa

SEQ ID NO: 527548 - DNA, 15 bp, Homo sapiens
gctcagtccttgaat

SEQ ID NO: 527549 - DNA, 15 bp, Homo sapiens
ctcagtccttgaatg

SEQ ID NO: 527550 - DNA, 15 bp, Homo sapiens
tcagtccttgaatga

SEQ ID NO: 527551 - DNA, 15 bp, Homo sapiens
cagtccttgaatgac

SEQ ID NO: 527552 - DNA, 15 bp, Homo sapiens
agtccttgaatgaca

SEQ ID NO: 527553 - DNA, 15 bp, Homo sapiens
gtccttgaatgacaa

SEQ ID NO: 527554 - DNA, 15 bp, Homo sapiens
tccttgaatgacaaa

SEQ ID NO: 527555 - DNA, 15 bp, Homo sapiens
ccttgaatgacaaag

SEQ ID NO: 527556 - DNA, 15 bp, Homo sapiens
cttgaatgacaaaga

SEQ ID NO: 527557 - DNA, 15 bp, Homo sapiens
ttgaatgacaaagaa

SEQ ID NO: 527558 - DNA, 15 bp, Homo sapiens
tgaatgacaaagaat

SEQ ID NO: 527559 - DNA, 15 bp, Homo sapiens
gaatgacaaagaatg

SEQ ID NO: 527560 - DNA, 15 bp, Homo sapiens
aatgacaaagaatgc

SEQ ID NO: 527561 - DNA, 15 bp, Homo sapiens
atgacaaagaatgcc

SEQ ID NO: 527562 - DNA, 15 bp, Homo sapiens
tgacaaagaatgcct

SEQ ID NO: 527563 - DNA, 15 bp, Homo sapiens
gacaaagaatgcctg

SEQ ID NO: 527564 - DNA, 15 bp, Homo sapiens
acaaagaatgcctgt

SEQ ID NO: 527565 - DNA, 15 bp, Homo sapiens
caaagaatgcctgta

SEQ ID NO: 527566 - DNA, 15 bp, Homo sapiens
aaagaatgcctgtag

SEQ ID NO: 527567 - DNA, 15 bp, Homo sapiens
aagaatgcctgtaga

SEQ ID NO: 527568 - DNA, 15 bp, Homo sapiens
agaatgcctgtagag

SEQ ID NO: 527569 - DNA, 15 bp, Homo sapiens
gaatgcctgtagagt

SEQ ID NO: 527570 - DNA, 15 bp, Homo sapiens
aatgcctgtagagtg

SEQ ID NO: 527571 - DNA, 15 bp, Homo sapiens
atgcctgtagagtgc

SEQ ID NO: 527572 - DNA, 15 bp, Homo sapiens
tgcctgtagagtgca

SEQ ID NO: 527573 - DNA, 15 bp, Homo sapiens
gcctgtagagtgcag

SEQ ID NO: 527574 - DNA, 15 bp, Homo sapiens
cctgtagagtgcagg

SEQ ID NO: 527575 - DNA, 15 bp, Homo sapiens
ctgtagagtgcaggt

SEQ ID NO: 527576 - DNA, 15 bp, Homo sapiens
tgtagagtgcaggtc

SEQ ID NO: 527577 - DNA, 15 bp, Homo sapiens
gtagagtgcaggtca

SEQ ID NO: 527578 - DNA, 15 bp, Homo sapiens
tagagtgcaggtcaa

SEQ ID NO: 527579 - DNA, 15 bp, Homo sapiens
agagtgcaggtcaac

SEQ ID NO: 527580 - DNA, 15 bp, Homo sapiens
gagtgcaggtcaact

SEQ ID NO: 527581 - DNA, 15 bp, Homo sapiens
agtgcaggtcaacta

SEQ ID NO: 527582 - DNA, 15 bp, Homo sapiens
gtgcaggtcaactac

SEQ ID NO: 527583 - DNA, 15 bp, Homo sapiens
tgcaggtcaactaca

SEQ ID NO: 527584 - DNA, 15 bp, Homo sapiens
gcaggtcaactacat

SEQ ID NO: 527585 - DNA, 15 bp, Homo sapiens
caggtcaactacata

SEQ ID NO: 527586 - DNA, 15 bp, Homo sapiens
aggtcaactacatat

SEQ ID NO: 527587 - DNA, 15 bp, Homo sapiens
ggtcaactacatatg

SEQ ID NO: 527588 - DNA, 15 bp, Homo sapiens
gtcaactacatatgc

SEQ ID NO: 527589 - DNA, 15 bp, Homo sapiens
tcaactacatatgca

SEQ ID NO: 527590 - DNA, 15 bp, Homo sapiens
caactacatatgcac

SEQ ID NO: 527591 - DNA, 15 bp, Homo sapiens
aactacatatgcact

SEQ ID NO: 527592 - DNA, 15 bp, Homo sapiens
actacatatgcactt

SEQ ID NO: 527593 - DNA, 15 bp, Homo sapiens
ctacatatgcacttc

SEQ ID NO: 527594 - DNA, 15 bp, Homo sapiens
tacatatgcacttca

SEQ ID NO: 527595 - DNA, 15 bp, Homo sapiens
acatatgcacttcaa

SEQ ID NO: 527596 - DNA, 15 bp, Homo sapiens
catatgcacttcaag

SEQ ID NO: 527597 - DNA, 15 bp, Homo sapiens
atatgcacttcaaga

SEQ ID NO: 527598 - DNA, 15 bp, Homo sapiens
tatgcacttcaagaa

SEQ ID NO: 527599 - DNA, 15 bp, Homo sapiens
atgcacttcaagaag

SEQ ID NO: 527600 - DNA, 15 bp, Homo sapiens
tgcacttcaagaaga

SEQ ID NO: 527601 - DNA, 15 bp, Homo sapiens
gcacttcaagaagat

SEQ ID NO: 527602 - DNA, 15 bp, Homo sapiens
cacttcaagaagatc

SEQ ID NO: 527603 - DNA, 15 bp, Homo sapiens
acttcaagaagatct

SEQ ID NO: 527604 - DNA, 15 bp, Homo sapiens
cttcaagaagatctt

SEQ ID NO: 527605 - DNA, 15 bp, Homo sapiens
ttcaagaagatcttc

SEQ ID NO: 527606 - DNA, 15 bp, Homo sapiens
tcaagaagatcttct

SEQ ID NO: 527607 - DNA, 15 bp, Homo sapiens
caagaagatcttctg

SEQ ID NO: 527608 - DNA, 15 bp, Homo sapiens
aagaagatcttctga

SEQ ID NO: 527609 - DNA, 15 bp, Homo sapiens
agaagatcttctgaa

SEQ ID NO: 527610 - DNA, 15 bp, Homo sapiens
gaagatcttctgaaa

SEQ ID NO: 527611 - DNA, 15 bp, Homo sapiens
aagatcttctgaaat

SEQ ID NO: 527612 - DNA, 15 bp, Homo sapiens
agatcttctgaaatc

SEQ ID NO: 527613 - DNA, 15 bp, Homo sapiens
gatcttctgaaatcc

SEQ ID NO: 527614 - DNA, 15 bp, Homo sapiens
atcttctgaaatcca

SEQ ID NO: 527615 - DNA, 15 bp, Homo sapiens
tcttctgaaatccag

SEQ ID NO: 527616 - DNA, 15 bp, Homo sapiens
cttctgaaatccagt

SEQ ID NO: 527617 - DNA, 15 bp, Homo sapiens
ttctgaaatccagta

SEQ ID NO: 527618 - DNA, 15 bp, Homo sapiens
tctgaaatccagtag

SEQ ID NO: 527619 - DNA, 15 bp, Homo sapiens
ctgaaatccagtagt

SEQ ID NO: 527620 - DNA, 15 bp, Homo sapiens
tgaaatccagtagtg

SEQ ID NO: 527621 - DNA, 15 bp, Homo sapiens
gaaatccagtagtgt

SEQ ID NO: 527622 - DNA, 15 bp, Homo sapiens
aaatccagtagtgtt

SEQ ID NO: 527623 - DNA, 15 bp, Homo sapiens
aatccagtagtgttc

SEQ ID NO: 527624 - DNA, 15 bp, Homo sapiens
atccagtagtgttct

SEQ ID NO: 527625 - DNA, 15 bp, Homo sapiens
tccagtagtgttctg

SEQ ID NO: 527626 - DNA, 15 bp, Homo sapiens
ccagtagtgttctgg

SEQ ID NO: 527627 - DNA, 15 bp, Homo sapiens
cagtagtgttctgga

SEQ ID NO: 527628 - DNA, 15 bp, Homo sapiens
agtagtgttctggac

SEQ ID NO: 527629 - DNA, 15 bp, Homo sapiens
gtagtgttctggaca

SEQ ID NO: 527630 - DNA, 15 bp, Homo sapiens
tagtgttctggacat

SEQ ID NO: 527631 - DNA, 15 bp, Homo sapiens
agtgttctggacatt

SEQ ID NO: 527632 - DNA, 15 bp, Homo sapiens
gtgttctggacattg

SEQ ID NO: 527633 - DNA, 15 bp, Homo sapiens
tgttctggacattgg

SEQ ID NO: 527634 - DNA, 15 bp, Homo sapiens
gttctggacattgga

SEQ ID NO: 527635 - DNA, 15 bp, Homo sapiens
ttctggacattggac

SEQ ID NO: 527636 - DNA, 15 bp, Homo sapiens
tctggacattggact

SEQ ID NO: 527637 - DNA, 15 bp, Homo sapiens
ctggacattggactg

SEQ ID NO: 527638 - DNA, 15 bp, Homo sapiens
tggacattggactgc

SEQ ID NO: 527639 - DNA, 15 bp, Homo sapiens
ggacattggactgct

SEQ ID NO: 527640 - DNA, 15 bp, Homo sapiens
gacattggactgctt

SEQ ID NO: 527641 - DNA, 15 bp, Homo sapiens
acattggactgcttg

SEQ ID NO: 527642 - DNA, 15 bp, Homo sapiens
cattggactgcttgt

SEQ ID NO: 527643 - DNA, 15 bp, Homo sapiens
attggactgcttgtc

SEQ ID NO: 527644 - DNA, 15 bp, Homo sapiens
ttggactgcttgtcc

SEQ ID NO: 527645 - DNA, 15 bp, Homo sapiens
tggactgcttgtccc

SEQ ID NO: 527646 - DNA, 15 bp, Homo sapiens
ggactgcttgtccct

SEQ ID NO: 527647 - DNA, 15 bp, Homo sapiens
gactgcttgtccctg

SEQ ID NO: 527648 - DNA, 15 bp, Homo sapiens
actgcttgtccctgg

SEQ ID NO: 527649 - DNA, 15 bp, Homo sapiens
ctgcttgtccctggg

SEQ ID NO: 527650 - DNA, 15 bp, Homo sapiens
tgcttgtccctggga

SEQ ID NO: 527651 - DNA, 15 bp, Homo sapiens
gcttgtccctgggaa

SEQ ID NO: 527652 - DNA, 15 bp, Homo sapiens
cttgtccctgggaag

SEQ ID NO: 527653 - DNA, 15 bp, Homo sapiens
ttgtccctgggaagt

SEQ ID NO: 527654 - DNA, 15 bp, Homo sapiens
tgtccctgggaagta

SEQ ID NO: 527655 - DNA, 15 bp, Homo sapiens
gtccctgggaagtag

SEQ ID NO: 527656 - DNA, 15 bp, Homo sapiens
tccctgggaagtagc

SEQ ID NO: 527657 - DNA, 15 bp, Homo sapiens
ccctgggaagtagca

SEQ ID NO: 527658 - DNA, 15 bp, Homo sapiens
cctgggaagtagcag

SEQ ID NO: 527659 - DNA, 15 bp, Homo sapiens
ctgggaagtagcagc

SEQ ID NO: 527660 - DNA, 15 bp, Homo sapiens
tgggaagtagcagca

SEQ ID NO: 527661 - DNA, 15 bp, Homo sapiens
gggaagtagcagcag

SEQ ID NO: 527662 - DNA, 15 bp, Homo sapiens
ggaagtagcagcaga

SEQ ID NO: 527663 - DNA, 15 bp, Homo sapiens
gaagtagcagcagaa

SEQ ID NO: 527664 - DNA, 15 bp, Homo sapiens
aagtagcagcagaaa

SEQ ID NO: 527665 - DNA, 15 bp, Homo sapiens
agtagcagcagaaat

SEQ ID NO: 527666 - DNA, 15 bp, Homo sapiens
gtagcagcagaaatc

SEQ ID NO: 527667 - DNA, 15 bp, Homo sapiens
tagcagcagaaatca

SEQ ID NO: 527668 - DNA, 15 bp, Homo sapiens
agcagcagaaatcat

SEQ ID NO: 527669 - DNA, 15 bp, Homo sapiens
gcagcagaaatcatc

SEQ ID NO: 527670 - DNA, 15 bp, Homo sapiens
cagcagaaatcatca

SEQ ID NO: 527671 - DNA, 15 bp, Homo sapiens
agcagaaatcatcag

SEQ ID NO: 527672 - DNA, 15 bp, Homo sapiens
gcagaaatcatcagg

SEQ ID NO: 527673 - DNA, 15 bp, Homo sapiens
cagaaatcatcaggt

SEQ ID NO: 527674 - DNA, 15 bp, Homo sapiens
agaaatcatcaggtg

SEQ ID NO: 527675 - DNA, 15 bp, Homo sapiens
gaaatcatcaggtgg

SEQ ID NO: 527676 - DNA, 15 bp, Homo sapiens
aaatcatcaggtggt

SEQ ID NO: 527677 - DNA, 15 bp, Homo sapiens
aatcatcaggtggtg

SEQ ID NO: 527678 - DNA, 15 bp, Homo sapiens
atcatcaggtggtga

SEQ ID NO: 527679 - DNA, 15 bp, Homo sapiens
tcatcaggtggtgaa

SEQ ID NO: 527680 - DNA, 15 bp, Homo sapiens
catcaggtggtgaac

SEQ ID NO: 527681 - DNA, 15 bp, Homo sapiens
atcaggtggtgaaca

SEQ ID NO: 527682 - DNA, 15 bp, Homo sapiens
tcaggtggtgaacag

SEQ ID NO: 527683 - DNA, 15 bp, Homo sapiens
caggtggtgaacaga

SEQ ID NO: 527684 - DNA, 15 bp, Homo sapiens
aggtggtgaacagaa

SEQ ID NO: 527685 - DNA, 15 bp, Homo sapiens
ggtggtgaacagaag

SEQ ID NO: 527686 - DNA, 15 bp, Homo sapiens
gtggtgaacagaaga

SEQ ID NO: 527687 - DNA, 15 bp, Homo sapiens
tggtgaacagaagaa

SEQ ID NO: 527688 - DNA, 15 bp, Homo sapiens
ggtgaacagaagaaa

SEQ ID NO: 527689 - DNA, 15 bp, Homo sapiens
gtgaacagaagaaaa

SEQ ID NO: 527690 - DNA, 15 bp, Homo sapiens
tgaacagaagaaaaa

SEQ ID NO: 527691 - DNA, 15 bp, Homo sapiens
gaacagaagaaaaag

SEQ ID NO: 527692 - DNA, 15 bp, Homo sapiens
aacagaagaaaaaga

SEQ ID NO: 527693 - DNA, 15 bp, Homo sapiens
acagaagaaaaagaa

SEQ ID NO: 527694 - DNA, 15 bp, Homo sapiens
cagaagaaaaagaaa

SEQ ID NO: 527695 - DNA, 15 bp, Homo sapiens
agaagaaaaagaaaa

SEQ ID NO: 527696 - DNA, 15 bp, Homo sapiens
gaagaaaaagaaaag

SEQ ID NO: 527697 - DNA, 15 bp, Homo sapiens
aagaaaaagaaaagc

SEQ ID NO: 527698 - DNA, 15 bp, Homo sapiens
agaaaaagaaaagct

SEQ ID NO: 527699 - DNA, 15 bp, Homo sapiens
gaaaaagaaaagctc

SEQ ID NO: 527700 - DNA, 15 bp, Homo sapiens
aaaaagaaaagctct

SEQ ID NO: 527701 - DNA, 15 bp, Homo sapiens
aaaagaaaagctctt

SEQ ID NO: 527702 - DNA, 15 bp, Homo sapiens
aaagaaaagctcttc

SEQ ID NO: 527703 - DNA, 15 bp, Homo sapiens
aagaaaagctcttcc

SEQ ID NO: 527704 - DNA, 15 bp, Homo sapiens
agaaaagctcttcct

SEQ ID NO: 527705 - DNA, 15 bp, Homo sapiens
gaaaagctcttcctt

SEQ ID NO: 527706 - DNA, 15 bp, Homo sapiens
aaaagctcttccttt

SEQ ID NO: 527707 - DNA, 15 bp, Homo sapiens
aaagctcttcctttt

SEQ ID NO: 527708 - DNA, 15 bp, Homo sapiens
aagctcttccttttt

SEQ ID NO: 527709 - DNA, 15 bp, Homo sapiens
agctcttcctttttg

SEQ ID NO: 527710 - DNA, 15 bp, Homo sapiens
gctcttcctttttga

SEQ ID NO: 527711 - DNA, 15 bp, Homo sapiens
ctcttcctttttgaa

SEQ ID NO: 527712 - DNA, 15 bp, Homo sapiens
tcttcctttttgaaa

SEQ ID NO: 527713 - DNA, 15 bp, Homo sapiens
cttcctttttgaaag

SEQ ID NO: 527714 - DNA, 15 bp, Homo sapiens
ttcctttttgaaagt

SEQ ID NO: 527715 - DNA, 15 bp, Homo sapiens
tcctttttgaaagtc

SEQ ID NO: 527716 - DNA, 15 bp, Homo sapiens
cctttttgaaagtct

SEQ ID NO: 527717 - DNA, 15 bp, Homo sapiens
ctttttgaaagtctg

SEQ ID NO: 527718 - DNA, 15 bp, Homo sapiens
tttttgaaagtctgt

SEQ ID NO: 527719 - DNA, 15 bp, Homo sapiens
ttttgaaagtctgtt

SEQ ID NO: 527720 - DNA, 15 bp, Homo sapiens
tttgaaagtctgttt

SEQ ID NO: 527721 - DNA, 15 bp, Homo sapiens
ttgaaagtctgtttt

SEQ ID NO: 527722 - DNA, 15 bp, Homo sapiens
tgaaagtctgttttt

SEQ ID NO: 527723 - DNA, 15 bp, Homo sapiens
gaaagtctgtttttt

SEQ ID NO: 527724 - DNA, 15 bp, Homo sapiens
aaagtctgttttttg

SEQ ID NO: 527725 - DNA, 15 bp, Homo sapiens
aagtctgttttttga

SEQ ID NO: 527726 - DNA, 15 bp, Homo sapiens
agtctgttttttgaa

SEQ ID NO: 527727 - DNA, 15 bp, Homo sapiens
gtctgttttttgaat

SEQ ID NO: 527728 - DNA, 15 bp, Homo sapiens
tctgttttttgaata

SEQ ID NO: 527729 - DNA, 15 bp, Homo sapiens
ctgttttttgaataa

SEQ ID NO: 527730 - DNA, 15 bp, Homo sapiens
tgttttttgaataaa

SEQ ID NO: 527731 - DNA, 15 bp, Homo sapiens
gttttttgaataaaa

SEQ ID NO: 527732 - DNA, 15 bp, Homo sapiens
ttttttgaataaaag

SEQ ID NO: 527733 - DNA, 15 bp, Homo sapiens
tttttgaataaaagc

SEQ ID NO: 527734 - DNA, 15 bp, Homo sapiens
ttttgaataaaagcc

SEQ ID NO: 527735 - DNA, 15 bp, Homo sapiens
tttgaataaaagcca

SEQ ID NO: 527736 - DNA, 15 bp, Homo sapiens
ttgaataaaagccaa

SEQ ID NO: 527737 - DNA, 15 bp, Homo sapiens
tgaataaaagccaat

SEQ ID NO: 527738 - DNA, 15 bp, Homo sapiens
gaataaaagccaata

SEQ ID NO: 527739 - DNA, 15 bp, Homo sapiens
aataaaagccaatat

SEQ ID NO: 527740 - DNA, 15 bp, Homo sapiens
ataaaagccaatatt

SEQ ID NO: 527741 - DNA, 15 bp, Homo sapiens
taaaagccaatattc

SEQ ID NO: 527742 - DNA, 15 bp, Homo sapiens
aaaagccaatattct

SEQ ID NO: 527743 - DNA, 15 bp, Homo sapiens
aaagccaatattctt

SEQ ID NO: 527744 - DNA, 15 bp, Homo sapiens
aagccaatattcttt

SEQ ID NO: 527745 - DNA, 15 bp, Homo sapiens
agccaatattctttt

SEQ ID NO: 527746 - DNA, 15 bp, Homo sapiens
gccaatattctttta

SEQ ID NO: 527747 - DNA, 15 bp, Homo sapiens
ccaatattcttttat

SEQ ID NO: 527748 - DNA, 15 bp, Homo sapiens
caatattcttttata

SEQ ID NO: 527749 - DNA, 15 bp, Homo sapiens
aatattcttttataa

SEQ ID NO: 527750 - DNA, 15 bp, Homo sapiens
atattcttttataac

SEQ ID NO: 527751 - DNA, 15 bp, Homo sapiens
tattcttttataact

SEQ ID NO: 527752 - DNA, 15 bp, Homo sapiens
attcttttataacta

SEQ ID NO: 527753 - DNA, 15 bp, Homo sapiens
ttcttttataactag

SEQ ID NO: 527754 - DNA, 15 bp, Homo sapiens
tcttttataactaga

SEQ ID NO: 527755 - DNA, 15 bp, Homo sapiens
cttttataactagat

SEQ ID NO: 527756 - DNA, 15 bp, Homo sapiens
ttttataactagatt

SEQ ID NO: 527757 - DNA, 15 bp, Homo sapiens
tttataactagattt

SEQ ID NO: 527758 - DNA, 15 bp, Homo sapiens
ttataactagatttt

SEQ ID NO: 527759 - DNA, 15 bp, Homo sapiens
tataactagattttc

SEQ ID NO: 527760 - DNA, 15 bp, Homo sapiens
ataactagattttcc

SEQ ID NO: 527761 - DNA, 15 bp, Homo sapiens
taactagattttcct

SEQ ID NO: 527762 - DNA, 15 bp, Homo sapiens
aactagattttcctt

SEQ ID NO: 527763 - DNA, 15 bp, Homo sapiens
actagattttccttc

SEQ ID NO: 527764 - DNA, 15 bp, Homo sapiens
ctagattttccttct

SEQ ID NO: 527765 - DNA, 15 bp, Homo sapiens
tagattttccttctc

SEQ ID NO: 527766 - DNA, 15 bp, Homo sapiens
agattttccttctct

SEQ ID NO: 527767 - DNA, 15 bp, Homo sapiens
gattttccttctctc

SEQ ID NO: 527768 - DNA, 15 bp, Homo sapiens
attttccttctctcc

SEQ ID NO: 527769 - DNA, 15 bp, Homo sapiens
ttttccttctctcca

SEQ ID NO: 527770 - DNA, 15 bp, Homo sapiens
tttccttctctccat

SEQ ID NO: 527771 - DNA, 15 bp, Homo sapiens
ttccttctctccatt

SEQ ID NO: 527772 - DNA, 15 bp, Homo sapiens
tccttctctccattc

SEQ ID NO: 527773 - DNA, 15 bp, Homo sapiens
ccttctctccattcc

SEQ ID NO: 527774 - DNA, 15 bp, Homo sapiens
cttctctccattccc

SEQ ID NO: 527775 - DNA, 15 bp, Homo sapiens
ttctctccattcccc

SEQ ID NO: 527776 - DNA, 15 bp, Homo sapiens
tctctccattcccct

SEQ ID NO: 527777 - DNA, 15 bp, Homo sapiens
ctctccattcccctg

SEQ ID NO: 527778 - DNA, 15 bp, Homo sapiens
tctccattcccctgt

SEQ ID NO: 527779 - DNA, 15 bp, Homo sapiens
ctccattcccctgtc

SEQ ID NO: 527780 - DNA, 15 bp, Homo sapiens
tccattcccctgtcc

SEQ ID NO: 527781 - DNA, 15 bp, Homo sapiens
ccattcccctgtccc

SEQ ID NO: 527782 - DNA, 15 bp, Homo sapiens
cattcccctgtccct

SEQ ID NO: 527783 - DNA, 15 bp, Homo sapiens
attcccctgtccctc

SEQ ID NO: 527784 - DNA, 15 bp, Homo sapiens
ttcccctgtccctct

SEQ ID NO: 527785 - DNA, 15 bp, Homo sapiens
tcccctgtccctctc

SEQ ID NO: 527786 - DNA, 15 bp, Homo sapiens
cccctgtccctctct

SEQ ID NO: 527787 - DNA, 15 bp, Homo sapiens
ccctgtccctctctc

SEQ ID NO: 527788 - DNA, 15 bp, Homo sapiens
cctgtccctctctct

SEQ ID NO: 527789 - DNA, 15 bp, Homo sapiens
ctgtccctctctctt

SEQ ID NO: 527790 - DNA, 15 bp, Homo sapiens
tgtccctctctcttc

SEQ ID NO: 527791 - DNA, 15 bp, Homo sapiens
gtccctctctcttcc

SEQ ID NO: 527792 - DNA, 15 bp, Homo sapiens
tccctctctcttcct

SEQ ID NO: 527793 - DNA, 15 bp, Homo sapiens
ccctctctcttcctc

SEQ ID NO: 527794 - DNA, 15 bp, Homo sapiens
cctctctcttcctct

SEQ ID NO: 527795 - DNA, 15 bp, Homo sapiens
ctctctcttcctctc

SEQ ID NO: 527796 - DNA, 15 bp, Homo sapiens
tctctcttcctctct

SEQ ID NO: 527797 - DNA, 15 bp, Homo sapiens
ctctcttcctctctt

SEQ ID NO: 527798 - DNA, 15 bp, Homo sapiens
tctcttcctctcttc

SEQ ID NO: 527799 - DNA, 15 bp, Homo sapiens
ctcttcctctcttct

SEQ ID NO: 527800 - DNA, 15 bp, Homo sapiens
tcttcctctcttctt

SEQ ID NO: 527801 - DNA, 15 bp, Homo sapiens
cttcctctcttcttc

SEQ ID NO: 527802 - DNA, 15 bp, Homo sapiens
ttcctctcttcttcc

SEQ ID NO: 527803 - DNA, 15 bp, Homo sapiens
tcctctcttcttcca

SEQ ID NO: 527804 - DNA, 15 bp, Homo sapiens
cctctcttcttccag

SEQ ID NO: 527805 - DNA, 15 bp, Homo sapiens
ctctcttcttccaga

SEQ ID NO: 527806 - DNA, 15 bp, Homo sapiens
tctcttcttccagat

SEQ ID NO: 527807 - DNA, 15 bp, Homo sapiens
ctcttcttccagatc

SEQ ID NO: 527808 - DNA, 15 bp, Homo sapiens
tcttcttccagatct

SEQ ID NO: 527809 - DNA, 15 bp, Homo sapiens
cttcttccagatctt

SEQ ID NO: 527810 - DNA, 15 bp, Homo sapiens
ttcttccagatcttc

SEQ ID NO: 527811 - DNA, 15 bp, Homo sapiens
tcttccagatcttca

SEQ ID NO: 527812 - DNA, 15 bp, Homo sapiens
cttccagatcttcag

SEQ ID NO: 527813 - DNA, 15 bp, Homo sapiens
ttccagatcttcagg

SEQ ID NO: 527814 - DNA, 15 bp, Homo sapiens
tccagatcttcaggg

SEQ ID NO: 527815 - DNA, 15 bp, Homo sapiens
ccagatcttcagggg

SEQ ID NO: 527816 - DNA, 15 bp, Homo sapiens
cagatcttcaggggg

SEQ ID NO: 527817 - DNA, 15 bp, Homo sapiens
agatcttcagggggc

SEQ ID NO: 527818 - DNA, 15 bp, Homo sapiens
gatcttcagggggct

SEQ ID NO: 527819 - DNA, 15 bp, Homo sapiens
atcttcagggggcta

SEQ ID NO: 527820 - DNA, 15 bp, Homo sapiens
tcttcagggggctag

SEQ ID NO: 527821 - DNA, 15 bp, Homo sapiens
cttcagggggctaga

SEQ ID NO: 527822 - DNA, 15 bp, Homo sapiens
ttcagggggctagaa

SEQ ID NO: 527823 - DNA, 15 bp, Homo sapiens
tcagggggctagaaa

SEQ ID NO: 527824 - DNA, 15 bp, Homo sapiens
cagggggctagaaat

SEQ ID NO: 527825 - DNA, 15 bp, Homo sapiens
agggggctagaaatc

SEQ ID NO: 527826 - DNA, 15 bp, Homo sapiens
gggggctagaaatct

SEQ ID NO: 527827 - DNA, 15 bp, Homo sapiens
ggggctagaaatctg

SEQ ID NO: 527828 - DNA, 15 bp, Homo sapiens
gggctagaaatctgt

SEQ ID NO: 527829 - DNA, 15 bp, Homo sapiens
ggctagaaatctgtt

SEQ ID NO: 527830 - DNA, 15 bp, Homo sapiens
gctagaaatctgttg

SEQ ID NO: 527831 - DNA, 15 bp, Homo sapiens
ctagaaatctgttgc

SEQ ID NO: 527832 - DNA, 15 bp, Homo sapiens
tagaaatctgttgct

SEQ ID NO: 527833 - DNA, 15 bp, Homo sapiens
agaaatctgttgcta

SEQ ID NO: 527834 - DNA, 15 bp, Homo sapiens
gaaatctgttgctat

SEQ ID NO: 527835 - DNA, 15 bp, Homo sapiens
aaatctgttgctatg

SEQ ID NO: 527836 - DNA, 15 bp, Homo sapiens
aatctgttgctatgg

SEQ ID NO: 527837 - DNA, 15 bp, Homo sapiens
atctgttgctatggg

SEQ ID NO: 527838 - DNA, 15 bp, Homo sapiens
tctgttgctatgggc

SEQ ID NO: 527839 - DNA, 15 bp, Homo sapiens
ctgttgctatgggcc

SEQ ID NO: 527840 - DNA, 15 bp, Homo sapiens
tgttgctatgggccc

SEQ ID NO: 527841 - DNA, 15 bp, Homo sapiens
gttgctatgggccct

SEQ ID NO: 527842 - DNA, 15 bp, Homo sapiens
ttgctatgggccctt

SEQ ID NO: 527843 - DNA, 15 bp, Homo sapiens
tgctatgggcccttc

SEQ ID NO: 527844 - DNA, 15 bp, Homo sapiens
gctatgggcccttca

SEQ ID NO: 527845 - DNA, 15 bp, Homo sapiens
ctatgggcccttcac

SEQ ID NO: 527846 - DNA, 15 bp, Homo sapiens
tatgggcccttcacc

SEQ ID NO: 527847 - DNA, 15 bp, Homo sapiens
atgggcccttcacca

SEQ ID NO: 527848 - DNA, 15 bp, Homo sapiens
tgggcccttcaccaa

SEQ ID NO: 527849 - DNA, 15 bp, Homo sapiens
gggcccttcaccaac

SEQ ID NO: 527850 - DNA, 15 bp, Homo sapiens
ggcccttcaccaaca

SEQ ID NO: 527851 - DNA, 15 bp, Homo sapiens
gcccttcaccaacat

SEQ ID NO: 527852 - DNA, 15 bp, Homo sapiens
cccttcaccaacatg

SEQ ID NO: 527853 - DNA, 15 bp, Homo sapiens
ccttcaccaacatgc

SEQ ID NO: 527854 - DNA, 15 bp, Homo sapiens
cttcaccaacatgcc

SEQ ID NO: 527855 - DNA, 15 bp, Homo sapiens
ttcaccaacatgccc

SEQ ID NO: 527856 - DNA, 15 bp, Homo sapiens
tcaccaacatgccca

SEQ ID NO: 527857 - DNA, 15 bp, Homo sapiens
caccaacatgcccac

SEQ ID NO: 527858 - DNA, 15 bp, Homo sapiens
accaacatgcccaca

SEQ ID NO: 527859 - DNA, 15 bp, Homo sapiens
ccaacatgcccacag

SEQ ID NO: 527860 - DNA, 15 bp, Homo sapiens
caacatgcccacagg

SEQ ID NO: 527861 - DNA, 15 bp, Homo sapiens
aacatgcccacaggt

SEQ ID NO: 527862 - DNA, 15 bp, Homo sapiens
acatgcccacaggta

SEQ ID NO: 527863 - DNA, 15 bp, Homo sapiens
catgcccacaggtaa

SEQ ID NO: 527864 - DNA, 15 bp, Homo sapiens
atgcccacaggtaag

SEQ ID NO: 527865 - DNA, 15 bp, Homo sapiens
tgcccacaggtaaga

SEQ ID NO: 527866 - DNA, 15 bp, Homo sapiens
gcccacaggtaagag

SEQ ID NO: 527867 - DNA, 15 bp, Homo sapiens
cccacaggtaagagc

SEQ ID NO: 527868 - DNA, 15 bp, Homo sapiens
ccacaggtaagagcc

SEQ ID NO: 527869 - DNA, 15 bp, Homo sapiens
cacaggtaagagcct

SEQ ID NO: 527870 - DNA, 15 bp, Homo sapiens
acaggtaagagcctg

SEQ ID NO: 527871 - DNA, 15 bp, Homo sapiens
caggtaagagcctgg

SEQ ID NO: 527872 - DNA, 15 bp, Homo sapiens
aggtaagagcctggg

SEQ ID NO: 527873 - DNA, 15 bp, Homo sapiens
ggtaagagcctggga

SEQ ID NO: 527874 - DNA, 15 bp, Homo sapiens
gtaagagcctgggag

SEQ ID NO: 527875 - DNA, 15 bp, Homo sapiens
taagagcctgggaga

SEQ ID NO: 527876 - DNA, 15 bp, Homo sapiens
aagagcctgggagaa

SEQ ID NO: 527877 - DNA, 15 bp, Homo sapiens
agagcctgggagaac

SEQ ID NO: 527878 - DNA, 15 bp, Homo sapiens
gagcctgggagaacc

SEQ ID NO: 527879 - DNA, 15 bp, Homo sapiens
agcctgggagaaccc

SEQ ID NO: 527880 - DNA, 15 bp, Homo sapiens
gcctgggagaacccc

SEQ ID NO: 527881 - DNA, 15 bp, Homo sapiens
cctgggagaacccca

SEQ ID NO: 527882 - DNA, 15 bp, Homo sapiens
ctgggagaaccccag

SEQ ID NO: 527883 - DNA, 15 bp, Homo sapiens
tgggagaaccccaga

SEQ ID NO: 527884 - DNA, 15 bp, Homo sapiens
gggagaaccccagag

SEQ ID NO: 527885 - DNA, 15 bp, Homo sapiens
ggagaaccccagagt

SEQ ID NO: 527886 - DNA, 15 bp, Homo sapiens
gagaaccccagagtt

SEQ ID NO: 527887 - DNA, 15 bp, Homo sapiens
agaaccccagagttc

SEQ ID NO: 527888 - DNA, 15 bp, Homo sapiens
gaaccccagagttcc

SEQ ID NO: 527889 - DNA, 15 bp, Homo sapiens
aaccccagagttcca

SEQ ID NO: 527890 - DNA, 15 bp, Homo sapiens
agaggggcactgccc

SEQ ID NO: 527891 - DNA, 15 bp, Homo sapiens
gaggggcactgccca

SEQ ID NO: 527892 - DNA, 15 bp, Homo sapiens
aggggcactgcccag

SEQ ID NO: 527893 - DNA, 15 bp, Homo sapiens
ggggcactgcccaga

SEQ ID NO: 527894 - DNA, 15 bp, Homo sapiens
gggcactgcccagat

SEQ ID NO: 527895 - DNA, 15 bp, Homo sapiens
ggcactgcccagata

SEQ ID NO: 527896 - DNA, 15 bp, Homo sapiens
gcactgcccagatat

SEQ ID NO: 527897 - DNA, 15 bp, Homo sapiens
cactgcccagatatc

SEQ ID NO: 527898 - DNA, 15 bp, Homo sapiens
actgcccagatatct

SEQ ID NO: 527899 - DNA, 15 bp, Homo sapiens
ctgcccagatatctt

SEQ ID NO: 527900 - DNA, 15 bp, Homo sapiens
tgcccagatatcttc

SEQ ID NO: 527901 - DNA, 15 bp, Homo sapiens
gcccagatatcttct

SEQ ID NO: 527902 - DNA, 15 bp, Homo sapiens
cccagatatcttctc

SEQ ID NO: 527903 - DNA, 15 bp, Homo sapiens
ccagatatcttctcc

SEQ ID NO: 527904 - DNA, 15 bp, Homo sapiens
cagatatcttctcct

SEQ ID NO: 527905 - DNA, 15 bp, Homo sapiens
agatatcttctcctg

SEQ ID NO: 527906 - DNA, 15 bp, Homo sapiens
gatatcttctcctgc

SEQ ID NO: 527907 - DNA, 15 bp, Homo sapiens
atatcttctcctgct

SEQ ID NO: 527908 - DNA, 15 bp, Homo sapiens
tatcttctcctgctc

SEQ ID NO: 527909 - DNA, 15 bp, Homo sapiens
atcttctcctgctct

SEQ ID NO: 527910 - DNA, 15 bp, Homo sapiens
tcttctcctgctctc

SEQ ID NO: 527911 - DNA, 15 bp, Homo sapiens
cttctcctgctctcc

SEQ ID NO: 527912 - DNA, 15 bp, Homo sapiens
ttctcctgctctcct

SEQ ID NO: 527913 - DNA, 15 bp, Homo sapiens
tctcctgctctccta

SEQ ID NO: 527914 - DNA, 15 bp, Homo sapiens
ctcctgctctcctac

SEQ ID NO: 527915 - DNA, 15 bp, Homo sapiens
tcctgctctcctact

SEQ ID NO: 527916 - DNA, 15 bp, Homo sapiens
cctgctctcctactg

SEQ ID NO: 527917 - DNA, 15 bp, Homo sapiens
ctgctctcctactgg

SEQ ID NO: 527918 - DNA, 15 bp, Homo sapiens
tgctctcctactgga

SEQ ID NO: 527919 - DNA, 15 bp, Homo sapiens
gctctcctactggag

SEQ ID NO: 527920 - DNA, 15 bp, Homo sapiens
ctctcctactggagt

SEQ ID NO: 527921 - DNA, 15 bp, Homo sapiens
tctcctactggagtg

SEQ ID NO: 527922 - DNA, 15 bp, Homo sapiens
ctcctactggagtgc

SEQ ID NO: 527923 - DNA, 15 bp, Homo sapiens
tcctactggagtgcc

SEQ ID NO: 527924 - DNA, 15 bp, Homo sapiens
cctactggagtgccc

SEQ ID NO: 527925 - DNA, 15 bp, Homo sapiens
ctactggagtgccct

SEQ ID NO: 527926 - DNA, 15 bp, Homo sapiens
tactggagtgccctt

SEQ ID NO: 527927 - DNA, 15 bp, Homo sapiens
actggagtgcccttc

SEQ ID NO: 527928 - DNA, 15 bp, Homo sapiens
ctggagtgcccttct

SEQ ID NO: 527929 - DNA, 15 bp, Homo sapiens
tggagtgcccttctt

SEQ ID NO: 527930 - DNA, 15 bp, Homo sapiens
ggagtgcccttcttg

SEQ ID NO: 527931 - DNA, 15 bp, Homo sapiens
gagtgcccttcttgg

SEQ ID NO: 527932 - DNA, 15 bp, Homo sapiens
agtgcccttcttgga

SEQ ID NO: 527933 - DNA, 15 bp, Homo sapiens
gtgcccttcttggat

SEQ ID NO: 527934 - DNA, 15 bp, Homo sapiens
tgcccttcttggatt

SEQ ID NO: 527935 - DNA, 15 bp, Homo sapiens
gcccttcttggattc

SEQ ID NO: 527936 - DNA, 15 bp, Homo sapiens
cccttcttggattcc

SEQ ID NO: 527937 - DNA, 15 bp, Homo sapiens
ccttcttggattcca

SEQ ID NO: 527938 - DNA, 15 bp, Homo sapiens
cttcttggattccaa

SEQ ID NO: 527939 - DNA, 15 bp, Homo sapiens
ttcttggattccaat

SEQ ID NO: 527940 - DNA, 15 bp, Homo sapiens
tcttggattccaatc

SEQ ID NO: 527941 - DNA, 15 bp, Homo sapiens
cttggattccaatct

SEQ ID NO: 527942 - DNA, 15 bp, Homo sapiens
ttggattccaatctc

SEQ ID NO: 527943 - DNA, 15 bp, Homo sapiens
tggattccaatctct

SEQ ID NO: 527944 - DNA, 15 bp, Homo sapiens
ggattccaatctctt

SEQ ID NO: 527945 - DNA, 15 bp, Homo sapiens
gattccaatctcttg

SEQ ID NO: 527946 - DNA, 15 bp, Homo sapiens
attccaatctcttgc

SEQ ID NO: 527947 - DNA, 15 bp, Homo sapiens
ttccaatctcttgct

SEQ ID NO: 527948 - DNA, 15 bp, Homo sapiens
tccaatctcttgctg

SEQ ID NO: 527949 - DNA, 15 bp, Homo sapiens
ccaatctcttgctgc

SEQ ID NO: 527950 - DNA, 15 bp, Homo sapiens
caatctcttgctgct

SEQ ID NO: 527951 - DNA, 15 bp, Homo sapiens
aatctcttgctgctg

SEQ ID NO: 527952 - DNA, 15 bp, Homo sapiens
atctcttgctgctgt

SEQ ID NO: 527953 - DNA, 15 bp, Homo sapiens
tctcttgctgctgta

SEQ ID NO: 527954 - DNA, 15 bp, Homo sapiens
ctcttgctgctgtaa

SEQ ID NO: 527955 - DNA, 15 bp, Homo sapiens
tcttgctgctgtaac

SEQ ID NO: 527956 - DNA, 15 bp, Homo sapiens
cttgctgctgtaacc

SEQ ID NO: 527957 - DNA, 15 bp, Homo sapiens
ttgctgctgtaacct

SEQ ID NO: 527958 - DNA, 15 bp, Homo sapiens
tgctgctgtaacctc

SEQ ID NO: 527959 - DNA, 15 bp, Homo sapiens
gctgctgtaacctcc

SEQ ID NO: 527960 - DNA, 15 bp, Homo sapiens
ctgctgtaacctcca

SEQ ID NO: 527961 - DNA, 15 bp, Homo sapiens
tgctgtaacctccac

SEQ ID NO: 527962 - DNA, 15 bp, Homo sapiens
gctgtaacctccaca

SEQ ID NO: 527963 - DNA, 15 bp, Homo sapiens
ctgtaacctccacac

SEQ ID NO: 527964 - DNA, 15 bp, Homo sapiens
tgtaacctccacacg

SEQ ID NO: 527965 - DNA, 15 bp, Homo sapiens
gtaacctccacacga

SEQ ID NO: 527966 - DNA, 15 bp, Homo sapiens
taacctccacacgag

SEQ ID NO: 527967 - DNA, 15 bp, Homo sapiens
aacctccacacgaga

SEQ ID NO: 527968 - DNA, 15 bp, Homo sapiens
acctccacacgagag

SEQ ID NO: 527969 - DNA, 15 bp, Homo sapiens
cctccacacgagagt

SEQ ID NO: 527970 - DNA, 15 bp, Homo sapiens
ctccacacgagagtc

SEQ ID NO: 527971 - DNA, 15 bp, Homo sapiens
tccacacgagagtct

SEQ ID NO: 527972 - DNA, 15 bp, Homo sapiens
ccacacgagagtctc

SEQ ID NO: 527973 - DNA, 15 bp, Homo sapiens
cacacgagagtctct

SEQ ID NO: 527974 - DNA, 15 bp, Homo sapiens
acacgagagtctctt

SEQ ID NO: 527975 - DNA, 15 bp, Homo sapiens
cacgagagtctcttt

SEQ ID NO: 527976 - DNA, 15 bp, Homo sapiens
acgagagtctctttc

SEQ ID NO: 527977 - DNA, 15 bp, Homo sapiens
cgagagtctctttct

SEQ ID NO: 527978 - DNA, 15 bp, Homo sapiens
gagagtctctttcta

SEQ ID NO: 527979 - DNA, 15 bp, Homo sapiens
agagtctctttctac

SEQ ID NO: 527980 - DNA, 15 bp, Homo sapiens
gagtctctttctacc

SEQ ID NO: 527981 - DNA, 15 bp, Homo sapiens
agtctctttctaccc

SEQ ID NO: 527982 - DNA, 15 bp, Homo sapiens
gtctctttctaccca

SEQ ID NO: 527983 - DNA, 15 bp, Homo sapiens
tctctttctacccag

SEQ ID NO: 527984 - DNA, 15 bp, Homo sapiens
ctctttctacccagg

SEQ ID NO: 527985 - DNA, 15 bp, Homo sapiens
tctttctacccaggc

SEQ ID NO: 527986 - DNA, 15 bp, Homo sapiens
ctttctacccaggct

SEQ ID NO: 527987 - DNA, 15 bp, Homo sapiens
tttctacccaggctc

SEQ ID NO: 527988 - DNA, 15 bp, Homo sapiens
ttctacccaggctct

SEQ ID NO: 527989 - DNA, 15 bp, Homo sapiens
tctacccaggctctg

SEQ ID NO: 527990 - DNA, 15 bp, Homo sapiens
ctacccaggctctgc

SEQ ID NO: 527991 - DNA, 15 bp, Homo sapiens
tacccaggctctgca

SEQ ID NO: 527992 - DNA, 15 bp, Homo sapiens
acccaggctctgcat

SEQ ID NO: 527993 - DNA, 15 bp, Homo sapiens
cccaggctctgcatt

SEQ ID NO: 527994 - DNA, 15 bp, Homo sapiens
ccaggctctgcattg

SEQ ID NO: 527995 - DNA, 15 bp, Homo sapiens
caggctctgcattgc

SEQ ID NO: 527996 - DNA, 15 bp, Homo sapiens
aggctctgcattgca

SEQ ID NO: 527997 - DNA, 15 bp, Homo sapiens
ggctctgcattgcaa

SEQ ID NO: 527998 - DNA, 15 bp, Homo sapiens
gctctgcattgcaaa

SEQ ID NO: 527999 - DNA, 15 bp, Homo sapiens
ctctgcattgcaaat

SEQ ID NO: 528000 - DNA, 15 bp, Homo sapiens
tctgcattgcaaatc

SEQ ID NO: 528001 - DNA, 15 bp, Homo sapiens
ctgcattgcaaatct

SEQ ID NO: 528002 - DNA, 15 bp, Homo sapiens
tgcattgcaaatcta

SEQ ID NO: 528003 - DNA, 15 bp, Homo sapiens
gcattgcaaatctat

SEQ ID NO: 528004 - DNA, 15 bp, Homo sapiens
cattgcaaatctatg

SEQ ID NO: 528005 - DNA, 15 bp, Homo sapiens
attgcaaatctatgg

SEQ ID NO: 528006 - DNA, 15 bp, Homo sapiens
ttgcaaatctatggc

SEQ ID NO: 528007 - DNA, 15 bp, Homo sapiens
tgcaaatctatggcc

SEQ ID NO: 528008 - DNA, 15 bp, Homo sapiens
gcaaatctatggccc

SEQ ID NO: 528009 - DNA, 15 bp, Homo sapiens
caaatctatggccca

SEQ ID NO: 528010 - DNA, 15 bp, Homo sapiens
aaatctatggcccag

SEQ ID NO: 528011 - DNA, 15 bp, Homo sapiens
aatctatggcccagg

SEQ ID NO: 528012 - DNA, 15 bp, Homo sapiens
atctatggcccaggg

SEQ ID NO: 528013 - DNA, 15 bp, Homo sapiens
tctatggcccaggga

SEQ ID NO: 528014 - DNA, 15 bp, Homo sapiens
ctatggcccagggaa

SEQ ID NO: 528015 - DNA, 15 bp, Homo sapiens
tatggcccagggaag

SEQ ID NO: 528016 - DNA, 15 bp, Homo sapiens
atggcccagggaagc

SEQ ID NO: 528017 - DNA, 15 bp, Homo sapiens
tggcccagggaagca

SEQ ID NO: 528018 - DNA, 15 bp, Homo sapiens
ggcccagggaagcag

SEQ ID NO: 528019 - DNA, 15 bp, Homo sapiens
gcccagggaagcagc

SEQ ID NO: 528020 - DNA, 15 bp, Homo sapiens
cccagggaagcagct

SEQ ID NO: 528021 - DNA, 15 bp, Homo sapiens
ccagggaagcagctt

SEQ ID NO: 528022 - DNA, 15 bp, Homo sapiens
cagggaagcagcttg

SEQ ID NO: 528023 - DNA, 15 bp, Homo sapiens
agggaagcagcttgg

SEQ ID NO: 528024 - DNA, 15 bp, Homo sapiens
gggaagcagcttggt

SEQ ID NO: 528025 - DNA, 15 bp, Homo sapiens
ggaagcagcttggta

SEQ ID NO: 528026 - DNA, 15 bp, Homo sapiens
gaagcagcttggtat

SEQ ID NO: 528027 - DNA, 15 bp, Homo sapiens
aagcagcttggtata

SEQ ID NO: 528028 - DNA, 15 bp, Homo sapiens
agcagcttggtatag

SEQ ID NO: 528029 - DNA, 15 bp, Homo sapiens
gcagcttggtatagg

SEQ ID NO: 528030 - DNA, 15 bp, Homo sapiens
cagcttggtataggc

SEQ ID NO: 528031 - DNA, 15 bp, Homo sapiens
agcttggtataggct

SEQ ID NO: 528032 - DNA, 15 bp, Homo sapiens
gcttggtataggctg

SEQ ID NO: 528033 - DNA, 15 bp, Homo sapiens
cttggtataggctgg

SEQ ID NO: 528034 - DNA, 15 bp, Homo sapiens
ttggtataggctggc

SEQ ID NO: 528035 - DNA, 15 bp, Homo sapiens
tggtataggctggcg

SEQ ID NO: 528036 - DNA, 15 bp, Homo sapiens
ggtataggctggcga

SEQ ID NO: 528037 - DNA, 15 bp, Homo sapiens
gtataggctggcgag

SEQ ID NO: 528038 - DNA, 15 bp, Homo sapiens
tataggctggcgagg

SEQ ID NO: 528039 - DNA, 15 bp, Homo sapiens
ataggctggcgaggg

SEQ ID NO: 528040 - DNA, 15 bp, Homo sapiens
taggctggcgaggga

SEQ ID NO: 528041 - DNA, 15 bp, Homo sapiens
aggctggcgagggag

SEQ ID NO: 528042 - DNA, 15 bp, Homo sapiens
ggctggcgagggagc

SEQ ID NO: 528043 - DNA, 15 bp, Homo sapiens
gctggcgagggagca

SEQ ID NO: 528044 - DNA, 15 bp, Homo sapiens
ctggcgagggagcat

SEQ ID NO: 528045 - DNA, 15 bp, Homo sapiens
tggcgagggagcata

SEQ ID NO: 528046 - DNA, 15 bp, Homo sapiens
ggcgagggagcataa

SEQ ID NO: 528047 - DNA, 15 bp, Homo sapiens
gcgagggagcataac

SEQ ID NO: 528048 - DNA, 15 bp, Homo sapiens
cgagggagcataact

SEQ ID NO: 528049 - DNA, 15 bp, Homo sapiens
gagggagcataactg

SEQ ID NO: 528050 - DNA, 15 bp, Homo sapiens
agggagcataactgt

SEQ ID NO: 528051 - DNA, 15 bp, Homo sapiens
gggagcataactgtg

SEQ ID NO: 528052 - DNA, 15 bp, Homo sapiens
ggagcataactgtgg

SEQ ID NO: 528053 - DNA, 15 bp, Homo sapiens
gagcataactgtggg

SEQ ID NO: 528054 - DNA, 15 bp, Homo sapiens
agcataactgtgggg

SEQ ID NO: 528055 - DNA, 15 bp, Homo sapiens
gcataactgtggggc

SEQ ID NO: 528056 - DNA, 15 bp, Homo sapiens
cataactgtggggca

SEQ ID NO: 528057 - DNA, 15 bp, Homo sapiens
ataactgtggggcaa

SEQ ID NO: 528058 - DNA, 15 bp, Homo sapiens
taactgtggggcaag

SEQ ID NO: 528059 - DNA, 15 bp, Homo sapiens
aactgtggggcaaga

SEQ ID NO: 528060 - DNA, 15 bp, Homo sapiens
actgtggggcaagaa

SEQ ID NO: 528061 - DNA, 15 bp, Homo sapiens
ctgtggggcaagaac

SEQ ID NO: 528062 - DNA, 15 bp, Homo sapiens
tgtggggcaagaacc

SEQ ID NO: 528063 - DNA, 15 bp, Homo sapiens
gtggggcaagaaccc

SEQ ID NO: 528064 - DNA, 15 bp, Homo sapiens
tggggcaagaacccc

SEQ ID NO: 528065 - DNA, 15 bp, Homo sapiens
ggggcaagaaccccc

SEQ ID NO: 528066 - DNA, 15 bp, Homo sapiens
gggcaagaaccccct

SEQ ID NO: 528067 - DNA, 15 bp, Homo sapiens
ggcaagaaccccctc

SEQ ID NO: 528068 - DNA, 15 bp, Homo sapiens
gcaagaaccccctcc

SEQ ID NO: 528069 - DNA, 15 bp, Homo sapiens
caagaaccccctccc

SEQ ID NO: 528070 - DNA, 15 bp, Homo sapiens
aagaaccccctcccc

SEQ ID NO: 528071 - DNA, 15 bp, Homo sapiens
agaaccccctcccca

SEQ ID NO: 528072 - DNA, 15 bp, Homo sapiens
gaaccccctccccac

SEQ ID NO: 528073 - DNA, 15 bp, Homo sapiens
aaccccctccccacc

SEQ ID NO: 528074 - DNA, 15 bp, Homo sapiens
accccctccccaccc

SEQ ID NO: 528075 - DNA, 15 bp, Homo sapiens
ccccctccccacccc

SEQ ID NO: 528076 - DNA, 15 bp, Homo sapiens
cccctccccacccca

SEQ ID NO: 528077 - DNA, 15 bp, Homo sapiens
ccctccccaccccat

SEQ ID NO: 528078 - DNA, 15 bp, Homo sapiens
cctccccaccccatt

SEQ ID NO: 528079 - DNA, 15 bp, Homo sapiens
ctccccaccccattc

SEQ ID NO: 528080 - DNA, 15 bp, Homo sapiens
tccccaccccattct

SEQ ID NO: 528081 - DNA, 15 bp, Homo sapiens
ccccaccccattctc

SEQ ID NO: 528082 - DNA, 15 bp, Homo sapiens
cccaccccattctcc

SEQ ID NO: 528083 - DNA, 15 bp, Homo sapiens
ccaccccattctccc

SEQ ID NO: 528084 - DNA, 15 bp, Homo sapiens
caccccattctccct

SEQ ID NO: 528085 - DNA, 15 bp, Homo sapiens
accccattctccctt

SEQ ID NO: 528086 - DNA, 15 bp, Homo sapiens
ccccattctcccttt

SEQ ID NO: 528087 - DNA, 15 bp, Homo sapiens
cccattctccctttt

SEQ ID NO: 528088 - DNA, 15 bp, Homo sapiens
ccattctcccttttg

SEQ ID NO: 528089 - DNA, 15 bp, Homo sapiens
cattctcccttttga

SEQ ID NO: 528090 - DNA, 15 bp, Homo sapiens
attctcccttttgag

SEQ ID NO: 528091 - DNA, 15 bp, Homo sapiens
ttctcccttttgagg

SEQ ID NO: 528092 - DNA, 15 bp, Homo sapiens
tctcccttttgaggg

SEQ ID NO: 528093 - DNA, 15 bp, Homo sapiens
ctcccttttgagggg

SEQ ID NO: 528094 - DNA, 15 bp, Homo sapiens
tcccttttgaggggt

SEQ ID NO: 528095 - DNA, 15 bp, Homo sapiens
cccttttgaggggta

SEQ ID NO: 528096 - DNA, 15 bp, Homo sapiens
ccttttgaggggtaa

SEQ ID NO: 528097 - DNA, 15 bp, Homo sapiens
cttttgaggggtaag

SEQ ID NO: 528098 - DNA, 15 bp, Homo sapiens
ttttgaggggtaagt

SEQ ID NO: 528099 - DNA, 15 bp, Homo sapiens
tttgaggggtaagtt

SEQ ID NO: 528100 - DNA, 15 bp, Homo sapiens
ttgaggggtaagttg

SEQ ID NO: 528101 - DNA, 15 bp, Homo sapiens
tgaggggtaagttgg

SEQ ID NO: 528102 - DNA, 15 bp, Homo sapiens
gaggggtaagttggc

SEQ ID NO: 528103 - DNA, 15 bp, Homo sapiens
aggggtaagttggct

SEQ ID NO: 528104 - DNA, 15 bp, Homo sapiens
ggggtaagttggctt

SEQ ID NO: 528105 - DNA, 15 bp, Homo sapiens
gggtaagttggcttt

SEQ ID NO: 528106 - DNA, 15 bp, Homo sapiens
ggtaagttggcttta

SEQ ID NO: 528107 - DNA, 15 bp, Homo sapiens
gtaagttggctttaa

SEQ ID NO: 528108 - DNA, 15 bp, Homo sapiens
taagttggctttaat

SEQ ID NO: 528109 - DNA, 15 bp, Homo sapiens
aagttggctttaatg

SEQ ID NO: 528110 - DNA, 15 bp, Homo sapiens
agttggctttaatga

SEQ ID NO: 528111 - DNA, 15 bp, Homo sapiens
gttggctttaatgag

SEQ ID NO: 528112 - DNA, 15 bp, Homo sapiens
ttggctttaatgagt

SEQ ID NO: 528113 - DNA, 15 bp, Homo sapiens
tggctttaatgagtc

SEQ ID NO: 528114 - DNA, 15 bp, Homo sapiens
ggctttaatgagtcc

SEQ ID NO: 528115 - DNA, 15 bp, Homo sapiens
gctttaatgagtcct

SEQ ID NO: 528116 - DNA, 15 bp, Homo sapiens
ctttaatgagtcctc

SEQ ID NO: 528117 - DNA, 15 bp, Homo sapiens
tttaatgagtcctcc

SEQ ID NO: 528118 - DNA, 15 bp, Homo sapiens
ttaatgagtcctccc

SEQ ID NO: 528119 - DNA, 15 bp, Homo sapiens
taatgagtcctccct

SEQ ID NO: 528120 - DNA, 15 bp, Homo sapiens
aatgagtcctccctg

SEQ ID NO: 528121 - DNA, 15 bp, Homo sapiens
atgagtcctccctgc

SEQ ID NO: 528122 - DNA, 15 bp, Homo sapiens
tgagtcctccctgcc

SEQ ID NO: 528123 - DNA, 15 bp, Homo sapiens
gagtcctccctgccc

SEQ ID NO: 528124 - DNA, 15 bp, Homo sapiens
agtcctccctgcccc

SEQ ID NO: 528125 - DNA, 15 bp, Homo sapiens
gtcctccctgccccc

SEQ ID NO: 528126 - DNA, 15 bp, Homo sapiens
tcctccctgccccca

SEQ ID NO: 528127 - DNA, 15 bp, Homo sapiens
cctccctgcccccag

SEQ ID NO: 528128 - DNA, 15 bp, Homo sapiens
ctccctgcccccagc

SEQ ID NO: 528129 - DNA, 15 bp, Homo sapiens
tccctgcccccagct

SEQ ID NO: 528130 - DNA, 15 bp, Homo sapiens
ccctgcccccagctg

SEQ ID NO: 528131 - DNA, 15 bp, Homo sapiens
cctgcccccagctgc

SEQ ID NO: 528132 - DNA, 15 bp, Homo sapiens
ctgcccccagctgcc

SEQ ID NO: 528133 - DNA, 15 bp, Homo sapiens
tgcccccagctgcct

SEQ ID NO: 528134 - DNA, 15 bp, Homo sapiens
gcccccagctgcctc

SEQ ID NO: 528135 - DNA, 15 bp, Homo sapiens
cccccagctgcctct

SEQ ID NO: 528136 - DNA, 15 bp, Homo sapiens
ccccagctgcctctc

SEQ ID NO: 528137 - DNA, 15 bp, Homo sapiens
cccagctgcctctct

SEQ ID NO: 528138 - DNA, 15 bp, Homo sapiens
ccagctgcctctctc

SEQ ID NO: 528139 - DNA, 15 bp, Homo sapiens
cagctgcctctctct

SEQ ID NO: 528140 - DNA, 15 bp, Homo sapiens
agctgcctctctctt

SEQ ID NO: 528141 - DNA, 15 bp, Homo sapiens
gctgcctctctcttg

SEQ ID NO: 528142 - DNA, 15 bp, Homo sapiens
ctgcctctctcttgc

SEQ ID NO: 528143 - DNA, 15 bp, Homo sapiens
tgcctctctcttgct

SEQ ID NO: 528144 - DNA, 15 bp, Homo sapiens
gcctctctcttgctc

SEQ ID NO: 528145 - DNA, 15 bp, Homo sapiens
cctctctcttgctcc

SEQ ID NO: 528146 - DNA, 15 bp, Homo sapiens
ctctctcttgctcct

SEQ ID NO: 528147 - DNA, 15 bp, Homo sapiens
tctctcttgctcctg

SEQ ID NO: 528148 - DNA, 15 bp, Homo sapiens
ctctcttgctcctgt

SEQ ID NO: 528149 - DNA, 15 bp, Homo sapiens
tctcttgctcctgtt

SEQ ID NO: 528150 - DNA, 15 bp, Homo sapiens
ctcttgctcctgttt

SEQ ID NO: 528151 - DNA, 15 bp, Homo sapiens
tcttgctcctgtttc

SEQ ID NO: 528152 - DNA, 15 bp, Homo sapiens
cttgctcctgtttca

SEQ ID NO: 528153 - DNA, 15 bp, Homo sapiens
ttgctcctgtttcat

SEQ ID NO: 528154 - DNA, 15 bp, Homo sapiens
tgctcctgtttcatg

SEQ ID NO: 528155 - DNA, 15 bp, Homo sapiens
gctcctgtttcatgg

SEQ ID NO: 528156 - DNA, 15 bp, Homo sapiens
ctcctgtttcatggc

SEQ ID NO: 528157 - DNA, 15 bp, Homo sapiens
tcctgtttcatggca

SEQ ID NO: 528158 - DNA, 15 bp, Homo sapiens
cctgtttcatggcag

SEQ ID NO: 528159 - DNA, 15 bp, Homo sapiens
ctgtttcatggcagc

SEQ ID NO: 528160 - DNA, 15 bp, Homo sapiens
tgtttcatggcagct

SEQ ID NO: 528161 - DNA, 15 bp, Homo sapiens
gtttcatggcagctg

SEQ ID NO: 528162 - DNA, 15 bp, Homo sapiens
tttcatggcagctgt

SEQ ID NO: 528163 - DNA, 15 bp, Homo sapiens
ttcatggcagctgtt

SEQ ID NO: 528164 - DNA, 15 bp, Homo sapiens
tcatggcagctgttg

SEQ ID NO: 528165 - DNA, 15 bp, Homo sapiens
catggcagctgttgc

SEQ ID NO: 528166 - DNA, 15 bp, Homo sapiens
atggcagctgttgcc

SEQ ID NO: 528167 - DNA, 15 bp, Homo sapiens
tggcagctgttgcca

SEQ ID NO: 528168 - DNA, 15 bp, Homo sapiens
ggcagctgttgccaa

SEQ ID NO: 528169 - DNA, 15 bp, Homo sapiens
gcagctgttgccaat

SEQ ID NO: 528170 - DNA, 15 bp, Homo sapiens
cagctgttgccaatt

SEQ ID NO: 528171 - DNA, 15 bp, Homo sapiens
agctgttgccaattt

SEQ ID NO: 528172 - DNA, 15 bp, Homo sapiens
gctgttgccaatttc

SEQ ID NO: 528173 - DNA, 15 bp, Homo sapiens
ctgttgccaatttca

SEQ ID NO: 528174 - DNA, 15 bp, Homo sapiens
tgttgccaatttcag

SEQ ID NO: 528175 - DNA, 15 bp, Homo sapiens
gttgccaatttcagc

SEQ ID NO: 528176 - DNA, 15 bp, Homo sapiens
ttgccaatttcagca

SEQ ID NO: 528177 - DNA, 15 bp, Homo sapiens
tgccaatttcagcaa

SEQ ID NO: 528178 - DNA, 15 bp, Homo sapiens
gccaatttcagcaat

SEQ ID NO: 528179 - DNA, 15 bp, Homo sapiens
ccaatttcagcaatt

SEQ ID NO: 528180 - DNA, 15 bp, Homo sapiens
caatttcagcaattt

SEQ ID NO: 528181 - DNA, 15 bp, Homo sapiens
aatttcagcaatttt

SEQ ID NO: 528182 - DNA, 15 bp, Homo sapiens
atttcagcaattttc

SEQ ID NO: 528183 - DNA, 15 bp, Homo sapiens
tttcagcaattttct

SEQ ID NO: 528184 - DNA, 15 bp, Homo sapiens
ttcagcaattttctt

SEQ ID NO: 528185 - DNA, 15 bp, Homo sapiens
tcagcaattttcttc

SEQ ID NO: 528186 - DNA, 15 bp, Homo sapiens
cagcaattttcttcc

SEQ ID NO: 528187 - DNA, 15 bp, Homo sapiens
agcaattttcttccg

SEQ ID NO: 528188 - DNA, 15 bp, Homo sapiens
gcaattttcttccgg

SEQ ID NO: 528189 - DNA, 15 bp, Homo sapiens
caattttcttccggt

SEQ ID NO: 528190 - DNA, 15 bp, Homo sapiens
aattttcttccggtg

SEQ ID NO: 528191 - DNA, 15 bp, Homo sapiens
attttcttccggtga

SEQ ID NO: 528192 - DNA, 15 bp, Homo sapiens
ttttcttccggtgaa

SEQ ID NO: 528193 - DNA, 15 bp, Homo sapiens
tttcttccggtgaat

SEQ ID NO: 528194 - DNA, 15 bp, Homo sapiens
ttcttccggtgaatt

SEQ ID NO: 528195 - DNA, 15 bp, Homo sapiens
tcttccggtgaattg

SEQ ID NO: 528196 - DNA, 15 bp, Homo sapiens
cttccggtgaattga

SEQ ID NO: 528197 - DNA, 15 bp, Homo sapiens
ttccggtgaattgaa

SEQ ID NO: 528198 - DNA, 15 bp, Homo sapiens
tccggtgaattgaag

SEQ ID NO: 528199 - DNA, 15 bp, Homo sapiens
ccggtgaattgaagg

SEQ ID NO: 528200 - DNA, 15 bp, Homo sapiens
cggtgaattgaaggc

SEQ ID NO: 528201 - DNA, 15 bp, Homo sapiens
ggtgaattgaaggct

SEQ ID NO: 528202 - DNA, 15 bp, Homo sapiens
gtgaattgaaggctc

SEQ ID NO: 528203 - DNA, 15 bp, Homo sapiens
tgaattgaaggctcc

SEQ ID NO: 528204 - DNA, 15 bp, Homo sapiens
gaattgaaggctcca

SEQ ID NO: 528205 - DNA, 15 bp, Homo sapiens
aattgaaggctccag

SEQ ID NO: 528206 - DNA, 15 bp, Homo sapiens
attgaaggctccagg

SEQ ID NO: 528207 - DNA, 15 bp, Homo sapiens
ttgaaggctccaggt

SEQ ID NO: 528208 - DNA, 15 bp, Homo sapiens
tgaaggctccaggtg

SEQ ID NO: 528209 - DNA, 15 bp, Homo sapiens
gaaggctccaggtga

SEQ ID NO: 528210 - DNA, 15 bp, Homo sapiens
aaggctccaggtgac

SEQ ID NO: 528211 - DNA, 15 bp, Homo sapiens
aggctccaggtgaca

SEQ ID NO: 528212 - DNA, 15 bp, Homo sapiens
ggctccaggtgacaa

SEQ ID NO: 528213 - DNA, 15 bp, Homo sapiens
gctccaggtgacaaa

SEQ ID NO: 528214 - DNA, 15 bp, Homo sapiens
ctccaggtgacaaag

SEQ ID NO: 528215 - DNA, 15 bp, Homo sapiens
tccaggtgacaaagg

SEQ ID NO: 528216 - DNA, 15 bp, Homo sapiens
ccaggtgacaaaggg

SEQ ID NO: 528217 - DNA, 15 bp, Homo sapiens
caggtgacaaaggga

SEQ ID NO: 528218 - DNA, 15 bp, Homo sapiens
aggtgacaaagggag

SEQ ID NO: 528219 - DNA, 15 bp, Homo sapiens
ggtgacaaagggagt

SEQ ID NO: 528220 - DNA, 15 bp, Homo sapiens
gtgacaaagggagtt

SEQ ID NO: 528221 - DNA, 15 bp, Homo sapiens
tgacaaagggagttg

SEQ ID NO: 528222 - DNA, 15 bp, Homo sapiens
gacaaagggagttgg

SEQ ID NO: 528223 - DNA, 15 bp, Homo sapiens
acaaagggagttggc

SEQ ID NO: 528224 - DNA, 15 bp, Homo sapiens
caaagggagttggcc

SEQ ID NO: 528225 - DNA, 15 bp, Homo sapiens
aaagggagttggcca

SEQ ID NO: 528226 - DNA, 15 bp, Homo sapiens
aagggagttggccat

SEQ ID NO: 528227 - DNA, 15 bp, Homo sapiens
agggagttggccata

SEQ ID NO: 528228 - DNA, 15 bp, Homo sapiens
gggagttggccatat

SEQ ID NO: 528229 - DNA, 15 bp, Homo sapiens
ggagttggccatatc

SEQ ID NO: 528230 - DNA, 15 bp, Homo sapiens
gagttggccatatcc

SEQ ID NO: 528231 - DNA, 15 bp, Homo sapiens
agttggccatatcct

SEQ ID NO: 528232 - DNA, 15 bp, Homo sapiens
gttggccatatcctc

SEQ ID NO: 528233 - DNA, 15 bp, Homo sapiens
ttggccatatcctcc

SEQ ID NO: 528234 - DNA, 15 bp, Homo sapiens
tggccatatcctcct

SEQ ID NO: 528235 - DNA, 15 bp, Homo sapiens
ggccatatcctcctg

SEQ ID NO: 528236 - DNA, 15 bp, Homo sapiens
gccatatcctcctgg

SEQ ID NO: 528237 - DNA, 15 bp, Homo sapiens
ccatatcctcctgga

SEQ ID NO: 528238 - DNA, 15 bp, Homo sapiens
catatcctcctggaa

SEQ ID NO: 528239 - DNA, 15 bp, Homo sapiens
atatcctcctggaaa

SEQ ID NO: 528240 - DNA, 15 bp, Homo sapiens
tatcctcctggaaaa

SEQ ID NO: 528241 - DNA, 15 bp, Homo sapiens
atcctcctggaaaat

SEQ ID NO: 528242 - DNA, 15 bp, Homo sapiens
tcctcctggaaaata

SEQ ID NO: 528243 - DNA, 15 bp, Homo sapiens
cctcctggaaaataa

SEQ ID NO: 528244 - DNA, 15 bp, Homo sapiens
ctcctggaaaataag

SEQ ID NO: 528245 - DNA, 15 bp, Homo sapiens
tcctggaaaataaga

SEQ ID NO: 528246 - DNA, 15 bp, Homo sapiens
cctggaaaataagat

SEQ ID NO: 528247 - DNA, 15 bp, Homo sapiens
ctggaaaataagata

SEQ ID NO: 528248 - DNA, 15 bp, Homo sapiens
tggaaaataagatag

SEQ ID NO: 528249 - DNA, 15 bp, Homo sapiens
ggaaaataagatagc

SEQ ID NO: 528250 - DNA, 15 bp, Homo sapiens
gaaaataagatagcc

SEQ ID NO: 528251 - DNA, 15 bp, Homo sapiens
aaaataagatagcct

SEQ ID NO: 528252 - DNA, 15 bp, Homo sapiens
aaataagatagcctg

SEQ ID NO: 528253 - DNA, 15 bp, Homo sapiens
aataagatagcctgg

SEQ ID NO: 528254 - DNA, 15 bp, Homo sapiens
ataagatagcctggg

SEQ ID NO: 528255 - DNA, 15 bp, Homo sapiens
taagatagcctgggt

SEQ ID NO: 528256 - DNA, 15 bp, Homo sapiens
aagatagcctgggtt

SEQ ID NO: 528257 - DNA, 15 bp, Homo sapiens
agatagcctgggttc

SEQ ID NO: 528258 - DNA, 15 bp, Homo sapiens
gatagcctgggttcc

SEQ ID NO: 528259 - DNA, 15 bp, Homo sapiens
atagcctgggttcca

SEQ ID NO: 528260 - DNA, 15 bp, Homo sapiens
tagcctgggttccac

SEQ ID NO: 528261 - DNA, 15 bp, Homo sapiens
agcctgggttccact

SEQ ID NO: 528262 - DNA, 15 bp, Homo sapiens
gcctgggttccactc

SEQ ID NO: 528263 - DNA, 15 bp, Homo sapiens
cctgggttccactct

SEQ ID NO: 528264 - DNA, 15 bp, Homo sapiens
ctgggttccactctc

SEQ ID NO: 528265 - DNA, 15 bp, Homo sapiens
tgggttccactctca

SEQ ID NO: 528266 - DNA, 15 bp, Homo sapiens
gggttccactctcac

SEQ ID NO: 528267 - DNA, 15 bp, Homo sapiens
ggttccactctcacc

SEQ ID NO: 528268 - DNA, 15 bp, Homo sapiens
gttccactctcaccc

SEQ ID NO: 528269 - DNA, 15 bp, Homo sapiens
ttccactctcacccc

SEQ ID NO: 528270 - DNA, 15 bp, Homo sapiens
tccactctcacccca

SEQ ID NO: 528271 - DNA, 15 bp, Homo sapiens
ccactctcaccccac

SEQ ID NO: 528272 - DNA, 15 bp, Homo sapiens
cactctcaccccacc

SEQ ID NO: 528273 - DNA, 15 bp, Homo sapiens
actctcaccccaccc

SEQ ID NO: 528274 - DNA, 15 bp, Homo sapiens
ctctcaccccacccc

SEQ ID NO: 528275 - DNA, 15 bp, Homo sapiens
tctcaccccacccct

SEQ ID NO: 528276 - DNA, 15 bp, Homo sapiens
ctcaccccacccctg

SEQ ID NO: 528277 - DNA, 15 bp, Homo sapiens
tcaccccacccctga

SEQ ID NO: 528278 - DNA, 15 bp, Homo sapiens
caccccacccctgac

SEQ ID NO: 528279 - DNA, 15 bp, Homo sapiens
accccacccctgacc

SEQ ID NO: 528280 - DNA, 15 bp, Homo sapiens
ccccacccctgaccc

SEQ ID NO: 528281 - DNA, 15 bp, Homo sapiens
cccacccctgaccct

SEQ ID NO: 528282 - DNA, 15 bp, Homo sapiens
ccacccctgaccctg

SEQ ID NO: 528283 - DNA, 15 bp, Homo sapiens
cacccctgaccctgg

SEQ ID NO: 528284 - DNA, 15 bp, Homo sapiens
acccctgaccctgga

SEQ ID NO: 528285 - DNA, 15 bp, Homo sapiens
cccctgaccctggac

SEQ ID NO: 528286 - DNA, 15 bp, Homo sapiens
ccctgaccctggact

SEQ ID NO: 528287 - DNA, 15 bp, Homo sapiens
cctgaccctggactg

SEQ ID NO: 528288 - DNA, 15 bp, Homo sapiens
ctgaccctggactgg

SEQ ID NO: 528289 - DNA, 15 bp, Homo sapiens
tgaccctggactggg

SEQ ID NO: 528290 - DNA, 15 bp, Homo sapiens
gaccctggactgggt

SEQ ID NO: 528291 - DNA, 15 bp, Homo sapiens
accctggactgggtg

SEQ ID NO: 528292 - DNA, 15 bp, Homo sapiens
ccctggactgggtgg

SEQ ID NO: 528293 - DNA, 15 bp, Homo sapiens
cctggactgggtggc

SEQ ID NO: 528294 - DNA, 15 bp, Homo sapiens
ctggactgggtggct

SEQ ID NO: 528295 - DNA, 15 bp, Homo sapiens
tggactgggtggcta

SEQ ID NO: 528296 - DNA, 15 bp, Homo sapiens
ggactgggtggctag

SEQ ID NO: 528297 - DNA, 15 bp, Homo sapiens
gactgggtggctagg

SEQ ID NO: 528298 - DNA, 15 bp, Homo sapiens
actgggtggctaggg

SEQ ID NO: 528299 - DNA, 15 bp, Homo sapiens
ctgggtggctagggc

SEQ ID NO: 528300 - DNA, 15 bp, Homo sapiens
tgggtggctagggct

SEQ ID NO: 528301 - DNA, 15 bp, Homo sapiens
gggtggctagggctc

SEQ ID NO: 528302 - DNA, 15 bp, Homo sapiens
ggtggctagggctca

SEQ ID NO: 528303 - DNA, 15 bp, Homo sapiens
gtggctagggctcac

SEQ ID NO: 528304 - DNA, 15 bp, Homo sapiens
tggctagggctcact

SEQ ID NO: 528305 - DNA, 15 bp, Homo sapiens
ggctagggctcactt

SEQ ID NO: 528306 - DNA, 15 bp, Homo sapiens
gctagggctcacttt

SEQ ID NO: 528307 - DNA, 15 bp, Homo sapiens
ctagggctcactttc

SEQ ID NO: 528308 - DNA, 15 bp, Homo sapiens
tagggctcactttcc

SEQ ID NO: 528309 - DNA, 15 bp, Homo sapiens
agggctcactttccc

SEQ ID NO: 528310 - DNA, 15 bp, Homo sapiens
gggctcactttccca

SEQ ID NO: 528311 - DNA, 15 bp, Homo sapiens
ggctcactttcccag

SEQ ID NO: 528312 - DNA, 15 bp, Homo sapiens
gctcactttcccagt

SEQ ID NO: 528313 - DNA, 15 bp, Homo sapiens
ctcactttcccagtg

SEQ ID NO: 528314 - DNA, 15 bp, Homo sapiens
tcactttcccagtga

SEQ ID NO: 528315 - DNA, 15 bp, Homo sapiens
cactttcccagtgag

SEQ ID NO: 528316 - DNA, 15 bp, Homo sapiens
actttcccagtgagc

SEQ ID NO: 528317 - DNA, 15 bp, Homo sapiens
ctttcccagtgagca

SEQ ID NO: 528318 - DNA, 15 bp, Homo sapiens
tttcccagtgagcat

SEQ ID NO: 528319 - DNA, 15 bp, Homo sapiens
ttcccagtgagcatg

SEQ ID NO: 528320 - DNA, 15 bp, Homo sapiens
tcccagtgagcatgt

SEQ ID NO: 528321 - DNA, 15 bp, Homo sapiens
cccagtgagcatgtc

SEQ ID NO: 528322 - DNA, 15 bp, Homo sapiens
ccagtgagcatgtca

SEQ ID NO: 528323 - DNA, 15 bp, Homo sapiens
cagtgagcatgtcac

SEQ ID NO: 528324 - DNA, 15 bp, Homo sapiens
agtgagcatgtcaca

SEQ ID NO: 528325 - DNA, 15 bp, Homo sapiens
gtgagcatgtcacaa

SEQ ID NO: 528326 - DNA, 15 bp, Homo sapiens
tgagcatgtcacaac

SEQ ID NO: 528327 - DNA, 15 bp, Homo sapiens
gagcatgtcacaacc

SEQ ID NO: 528328 - DNA, 15 bp, Homo sapiens
agcatgtcacaaccc

SEQ ID NO: 528329 - DNA, 15 bp, Homo sapiens
gcatgtcacaaccct

SEQ ID NO: 528330 - DNA, 15 bp, Homo sapiens
catgtcacaaccctt

SEQ ID NO: 528331 - DNA, 15 bp, Homo sapiens
atgtcacaacccttc

SEQ ID NO: 528332 - DNA, 15 bp, Homo sapiens
tgtcacaacccttcc

SEQ ID NO: 528333 - DNA, 15 bp, Homo sapiens
gtcacaacccttccc

SEQ ID NO: 528334 - DNA, 15 bp, Homo sapiens
tcacaacccttccca

SEQ ID NO: 528335 - DNA, 15 bp, Homo sapiens
cacaacccttcccat

SEQ ID NO: 528336 - DNA, 15 bp, Homo sapiens
acaacccttcccatc

SEQ ID NO: 528337 - DNA, 15 bp, Homo sapiens
caacccttcccatca

SEQ ID NO: 528338 - DNA, 15 bp, Homo sapiens
aacccttcccatcac

SEQ ID NO: 528339 - DNA, 15 bp, Homo sapiens
acccttcccatcacc

SEQ ID NO: 528340 - DNA, 15 bp, Homo sapiens
cccttcccatcacca

SEQ ID NO: 528341 - DNA, 15 bp, Homo sapiens
ccttcccatcaccac

SEQ ID NO: 528342 - DNA, 15 bp, Homo sapiens
cttcccatcaccacc

SEQ ID NO: 528343 - DNA, 15 bp, Homo sapiens
ttcccatcaccaccc

SEQ ID NO: 528344 - DNA, 15 bp, Homo sapiens
tcccatcaccacccc

SEQ ID NO: 528345 - DNA, 15 bp, Homo sapiens
cccatcaccaccccc

SEQ ID NO: 528346 - DNA, 15 bp, Homo sapiens
ccatcaccacccccc

SEQ ID NO: 528347 - DNA, 15 bp, Homo sapiens
catcaccacccccca

SEQ ID NO: 528348 - DNA, 15 bp, Homo sapiens
atcaccaccccccac

SEQ ID NO: 528349 - DNA, 15 bp, Homo sapiens
tcaccaccccccacc

SEQ ID NO: 528350 - DNA, 15 bp, Homo sapiens
caccaccccccacca

SEQ ID NO: 528351 - DNA, 15 bp, Homo sapiens
accaccccccaccac

SEQ ID NO: 528352 - DNA, 15 bp, Homo sapiens
ccaccccccaccaca

SEQ ID NO: 528353 - DNA, 15 bp, Homo sapiens
caccccccaccacat

SEQ ID NO: 528354 - DNA, 15 bp, Homo sapiens
accccccaccacata

SEQ ID NO: 528355 - DNA, 15 bp, Homo sapiens
ccccccaccacatac

SEQ ID NO: 528356 - DNA, 15 bp, Homo sapiens
cccccaccacataca

SEQ ID NO: 528357 - DNA, 15 bp, Homo sapiens
ccccaccacatacac

SEQ ID NO: 528358 - DNA, 15 bp, Homo sapiens
cccaccacatacaca

SEQ ID NO: 528359 - DNA, 15 bp, Homo sapiens
ccaccacatacacac

SEQ ID NO: 528360 - DNA, 15 bp, Homo sapiens
caccacatacacaca

SEQ ID NO: 528361 - DNA, 15 bp, Homo sapiens
accacatacacacac

SEQ ID NO: 528362 - DNA, 15 bp, Homo sapiens
ccacatacacacaca

SEQ ID NO: 528363 - DNA, 15 bp, Homo sapiens
cacatacacacacac

SEQ ID NO: 528364 - DNA, 15 bp, Homo sapiens
acatacacacacaca

SEQ ID NO: 528365 - DNA, 15 bp, Homo sapiens
catacacacacacag

SEQ ID NO: 528366 - DNA, 15 bp, Homo sapiens
atacacacacacagc

SEQ ID NO: 528367 - DNA, 15 bp, Homo sapiens
tacacacacacagca

SEQ ID NO: 528368 - DNA, 15 bp, Homo sapiens
acacacacacagcag

SEQ ID NO: 528369 - DNA, 15 bp, Homo sapiens
cacacacacagcagg

SEQ ID NO: 528370 - DNA, 15 bp, Homo sapiens
acacacacagcaggc

SEQ ID NO: 528371 - DNA, 15 bp, Homo sapiens
cacacacagcaggct

SEQ ID NO: 528372 - DNA, 15 bp, Homo sapiens
acacacagcaggctt

SEQ ID NO: 528373 - DNA, 15 bp, Homo sapiens
cacacagcaggcttc

SEQ ID NO: 528374 - DNA, 15 bp, Homo sapiens
acacagcaggcttcc

SEQ ID NO: 528375 - DNA, 15 bp, Homo sapiens
cacagcaggcttcca

SEQ ID NO: 528376 - DNA, 15 bp, Homo sapiens
acagcaggcttccag

SEQ ID NO: 528377 - DNA, 15 bp, Homo sapiens
cagcaggcttccagg

SEQ ID NO: 528378 - DNA, 15 bp, Homo sapiens
agcaggcttccaggt

SEQ ID NO: 528379 - DNA, 15 bp, Homo sapiens
gcaggcttccaggtg

SEQ ID NO: 528380 - DNA, 15 bp, Homo sapiens
caggcttccaggtgt

SEQ ID NO: 528381 - DNA, 15 bp, Homo sapiens
aggcttccaggtgta

SEQ ID NO: 528382 - DNA, 15 bp, Homo sapiens
ggcttccaggtgtat

SEQ ID NO: 528383 - DNA, 15 bp, Homo sapiens
gcttccaggtgtatg

SEQ ID NO: 528384 - DNA, 15 bp, Homo sapiens
cttccaggtgtatgt

SEQ ID NO: 528385 - DNA, 15 bp, Homo sapiens
ttccaggtgtatgtc

SEQ ID NO: 528386 - DNA, 15 bp, Homo sapiens
tccaggtgtatgtcc

SEQ ID NO: 528387 - DNA, 15 bp, Homo sapiens
ccaggtgtatgtcca

SEQ ID NO: 528388 - DNA, 15 bp, Homo sapiens
caggtgtatgtccat

SEQ ID NO: 528389 - DNA, 15 bp, Homo sapiens
aggtgtatgtccatt

SEQ ID NO: 528390 - DNA, 15 bp, Homo sapiens
ggtgtatgtccattt

SEQ ID NO: 528391 - DNA, 15 bp, Homo sapiens
gtgtatgtccatttc

SEQ ID NO: 528392 - DNA, 15 bp, Homo sapiens
tgtatgtccatttct

SEQ ID NO: 528393 - DNA, 15 bp, Homo sapiens
gtatgtccatttctt

SEQ ID NO: 528394 - DNA, 15 bp, Homo sapiens
tatgtccatttctta

SEQ ID NO: 528395 - DNA, 15 bp, Homo sapiens
atgtccatttcttaa

SEQ ID NO: 528396 - DNA, 15 bp, Homo sapiens
tgtccatttcttaaa

SEQ ID NO: 528397 - DNA, 15 bp, Homo sapiens
gtccatttcttaaac

SEQ ID NO: 528398 - DNA, 15 bp, Homo sapiens
tccatttcttaaacc

SEQ ID NO: 528399 - DNA, 15 bp, Homo sapiens
ccatttcttaaaccc

SEQ ID NO: 528400 - DNA, 15 bp, Homo sapiens
catttcttaaaccct

SEQ ID NO: 528401 - DNA, 15 bp, Homo sapiens
atttcttaaaccctg

SEQ ID NO: 528402 - DNA, 15 bp, Homo sapiens
tttcttaaaccctgt

SEQ ID NO: 528403 - DNA, 15 bp, Homo sapiens
ttcttaaaccctgtt

SEQ ID NO: 528404 - DNA, 15 bp, Homo sapiens
tcttaaaccctgttt

SEQ ID NO: 528405 - DNA, 15 bp, Homo sapiens
cttaaaccctgtttg

SEQ ID NO: 528406 - DNA, 15 bp, Homo sapiens
ttaaaccctgtttga

SEQ ID NO: 528407 - DNA, 15 bp, Homo sapiens
taaaccctgtttgaa

SEQ ID NO: 528408 - DNA, 15 bp, Homo sapiens
aaaccctgtttgaaa

SEQ ID NO: 528409 - DNA, 15 bp, Homo sapiens
aaccctgtttgaaag

SEQ ID NO: 528410 - DNA, 15 bp, Homo sapiens
accctgtttgaaagg

SEQ ID NO: 528411 - DNA, 15 bp, Homo sapiens
ccctgtttgaaagga

SEQ ID NO: 528412 - DNA, 15 bp, Homo sapiens
cctgtttgaaaggaa

SEQ ID NO: 528413 - DNA, 15 bp, Homo sapiens
ctgtttgaaaggaac

SEQ ID NO: 528414 - DNA, 15 bp, Homo sapiens
tgtttgaaaggaact

SEQ ID NO: 528415 - DNA, 15 bp, Homo sapiens
gtttgaaaggaactt

SEQ ID NO: 528416 - DNA, 15 bp, Homo sapiens
tttgaaaggaacttc

SEQ ID NO: 528417 - DNA, 15 bp, Homo sapiens
ttgaaaggaacttca

SEQ ID NO: 528418 - DNA, 15 bp, Homo sapiens
tgaaaggaacttcag

SEQ ID NO: 528419 - DNA, 15 bp, Homo sapiens
gaaaggaacttcaga

SEQ ID NO: 528420 - DNA, 15 bp, Homo sapiens
aaaggaacttcagat

SEQ ID NO: 528421 - DNA, 15 bp, Homo sapiens
aaggaacttcagatt

SEQ ID NO: 528422 - DNA, 15 bp, Homo sapiens
aggaacttcagattc

SEQ ID NO: 528423 - DNA, 15 bp, Homo sapiens
ggaacttcagattct

SEQ ID NO: 528424 - DNA, 15 bp, Homo sapiens
gaacttcagattctt

SEQ ID NO: 528425 - DNA, 15 bp, Homo sapiens
aacttcagattcttc

SEQ ID NO: 528426 - DNA, 15 bp, Homo sapiens
acttcagattcttcc

SEQ ID NO: 528427 - DNA, 15 bp, Homo sapiens
cttcagattcttcct

SEQ ID NO: 528428 - DNA, 15 bp, Homo sapiens
ttcagattcttcctc

SEQ ID NO: 528429 - DNA, 15 bp, Homo sapiens
tcagattcttcctca

SEQ ID NO: 528430 - DNA, 15 bp, Homo sapiens
cagattcttcctcag

SEQ ID NO: 528431 - DNA, 15 bp, Homo sapiens
agattcttcctcagt

SEQ ID NO: 528432 - DNA, 15 bp, Homo sapiens
gattcttcctcagtt

SEQ ID NO: 528433 - DNA, 15 bp, Homo sapiens
attcttcctcagttc

SEQ ID NO: 528434 - DNA, 15 bp, Homo sapiens
ttcttcctcagttca

SEQ ID NO: 528435 - DNA, 15 bp, Homo sapiens
tcttcctcagttcat

SEQ ID NO: 528436 - DNA, 15 bp, Homo sapiens
cttcctcagttcatt

SEQ ID NO: 528437 - DNA, 15 bp, Homo sapiens
ttcctcagttcattc

SEQ ID NO: 528438 - DNA, 15 bp, Homo sapiens
tcctcagttcattct

SEQ ID NO: 528439 - DNA, 15 bp, Homo sapiens
cctcagttcattctc

SEQ ID NO: 528440 - DNA, 15 bp, Homo sapiens
ctcagttcattctca

SEQ ID NO: 528441 - DNA, 15 bp, Homo sapiens
tcagttcattctcag

SEQ ID NO: 528442 - DNA, 15 bp, Homo sapiens
cagttcattctcagc

SEQ ID NO: 528443 - DNA, 15 bp, Homo sapiens
agttcattctcagct

SEQ ID NO: 528444 - DNA, 15 bp, Homo sapiens
gttcattctcagctc

SEQ ID NO: 528445 - DNA, 15 bp, Homo sapiens
ttcattctcagctca

SEQ ID NO: 528446 - DNA, 15 bp, Homo sapiens
tcattctcagctcat

SEQ ID NO: 528447 - DNA, 15 bp, Homo sapiens
cattctcagctcatc

SEQ ID NO: 528448 - DNA, 15 bp, Homo sapiens
attctcagctcatct

SEQ ID NO: 528449 - DNA, 15 bp, Homo sapiens
ttctcagctcatctg

SEQ ID NO: 528450 - DNA, 15 bp, Homo sapiens
tctcagctcatctgt

SEQ ID NO: 528451 - DNA, 15 bp, Homo sapiens
ctcagctcatctgtt

SEQ ID NO: 528452 - DNA, 15 bp, Homo sapiens
tcagctcatctgttt

SEQ ID NO: 528453 - DNA, 15 bp, Homo sapiens
cagctcatctgtttt

SEQ ID NO: 528454 - DNA, 15 bp, Homo sapiens
agctcatctgttttc

SEQ ID NO: 528455 - DNA, 15 bp, Homo sapiens
gctcatctgttttcc

SEQ ID NO: 528456 - DNA, 15 bp, Homo sapiens
ctcatctgttttcct

SEQ ID NO: 528457 - DNA, 15 bp, Homo sapiens
tcatctgttttccta

SEQ ID NO: 528458 - DNA, 15 bp, Homo sapiens
catctgttttcctaa

SEQ ID NO: 528459 - DNA, 15 bp, Homo sapiens
atctgttttcctaag

SEQ ID NO: 528460 - DNA, 15 bp, Homo sapiens
tctgttttcctaaga

SEQ ID NO: 528461 - DNA, 15 bp, Homo sapiens
ctgttttcctaagac

SEQ ID NO: 528462 - DNA, 15 bp, Homo sapiens
tgttttcctaagacc

SEQ ID NO: 528463 - DNA, 15 bp, Homo sapiens
gttttcctaagacca

SEQ ID NO: 528464 - DNA, 15 bp, Homo sapiens
ttttcctaagaccac

SEQ ID NO: 528465 - DNA, 15 bp, Homo sapiens
tttcctaagaccacc

SEQ ID NO: 528466 - DNA, 15 bp, Homo sapiens
ttcctaagaccacca

SEQ ID NO: 528467 - DNA, 15 bp, Homo sapiens
tcctaagaccaccaa

SEQ ID NO: 528468 - DNA, 15 bp, Homo sapiens
cctaagaccaccaag

SEQ ID NO: 528469 - DNA, 15 bp, Homo sapiens
ctaagaccaccaaga

SEQ ID NO: 528470 - DNA, 15 bp, Homo sapiens
taagaccaccaagat

SEQ ID NO: 528471 - DNA, 15 bp, Homo sapiens
aagaccaccaagatt

SEQ ID NO: 528472 - DNA, 15 bp, Homo sapiens
agaccaccaagattt

SEQ ID NO: 528473 - DNA, 15 bp, Homo sapiens
gaccaccaagatttt

SEQ ID NO: 528474 - DNA, 15 bp, Homo sapiens
accaccaagattttg

SEQ ID NO: 528475 - DNA, 15 bp, Homo sapiens
ccaccaagattttga

SEQ ID NO: 528476 - DNA, 15 bp, Homo sapiens
caccaagattttgat

SEQ ID NO: 528477 - DNA, 15 bp, Homo sapiens
accaagattttgatc

SEQ ID NO: 528478 - DNA, 15 bp, Homo sapiens
ccaagattttgatca

SEQ ID NO: 528479 - DNA, 15 bp, Homo sapiens
caagattttgatcat

SEQ ID NO: 528480 - DNA, 15 bp, Homo sapiens
aagattttgatcatt

SEQ ID NO: 528481 - DNA, 15 bp, Homo sapiens
agattttgatcattt

SEQ ID NO: 528482 - DNA, 15 bp, Homo sapiens
gattttgatcatttg

SEQ ID NO: 528483 - DNA, 15 bp, Homo sapiens
attttgatcatttgc

SEQ ID NO: 528484 - DNA, 15 bp, Homo sapiens
ttttgatcatttgcc

SEQ ID NO: 528485 - DNA, 15 bp, Homo sapiens
tttgatcatttgcct

SEQ ID NO: 528486 - DNA, 15 bp, Homo sapiens
ttgatcatttgccta

SEQ ID NO: 528487 - DNA, 15 bp, Homo sapiens
tgatcatttgcctaa

SEQ ID NO: 528488 - DNA, 15 bp, Homo sapiens
gatcatttgcctaac

SEQ ID NO: 528489 - DNA, 15 bp, Homo sapiens
atcatttgcctaacc

SEQ ID NO: 528490 - DNA, 15 bp, Homo sapiens
tcatttgcctaaccc

SEQ ID NO: 528491 - DNA, 15 bp, Homo sapiens
catttgcctaaccct

SEQ ID NO: 528492 - DNA, 15 bp, Homo sapiens
atttgcctaaccctt

SEQ ID NO: 528493 - DNA, 15 bp, Homo sapiens
tttgcctaacccttg

SEQ ID NO: 528494 - DNA, 15 bp, Homo sapiens
ttgcctaacccttgg

SEQ ID NO: 528495 - DNA, 15 bp, Homo sapiens
tgcctaacccttgga

SEQ ID NO: 528496 - DNA, 15 bp, Homo sapiens
gcctaacccttggaa

SEQ ID NO: 528497 - DNA, 15 bp, Homo sapiens
cctaacccttggaat

SEQ ID NO: 528498 - DNA, 15 bp, Homo sapiens
ctaacccttggaatg

SEQ ID NO: 528499 - DNA, 15 bp, Homo sapiens
taacccttggaatga

SEQ ID NO: 528500 - DNA, 15 bp, Homo sapiens
aacccttggaatgag

SEQ ID NO: 528501 - DNA, 15 bp, Homo sapiens
acccttggaatgagc

SEQ ID NO: 528502 - DNA, 15 bp, Homo sapiens
cccttggaatgagca

SEQ ID NO: 528503 - DNA, 15 bp, Homo sapiens
ccttggaatgagcac

SEQ ID NO: 528504 - DNA, 15 bp, Homo sapiens
cttggaatgagcacc

SEQ ID NO: 528505 - DNA, 15 bp, Homo sapiens
ttggaatgagcaccc

SEQ ID NO: 528506 - DNA, 15 bp, Homo sapiens
tggaatgagcaccca

SEQ ID NO: 528507 - DNA, 15 bp, Homo sapiens
ggaatgagcacccat

SEQ ID NO: 528508 - DNA, 15 bp, Homo sapiens
gaatgagcacccatt

SEQ ID NO: 528509 - DNA, 15 bp, Homo sapiens
aatgagcacccattc

SEQ ID NO: 528510 - DNA, 15 bp, Homo sapiens
atgagcacccattct

SEQ ID NO: 528511 - DNA, 15 bp, Homo sapiens
tgagcacccattctg

SEQ ID NO: 528512 - DNA, 15 bp, Homo sapiens
gagcacccattctgg

SEQ ID NO: 528513 - DNA, 15 bp, Homo sapiens
agcacccattctggc

SEQ ID NO: 528514 - DNA, 15 bp, Homo sapiens
gcacccattctggct

SEQ ID NO: 528515 - DNA, 15 bp, Homo sapiens
cacccattctggctt

SEQ ID NO: 528516 - DNA, 15 bp, Homo sapiens
acccattctggcttc

SEQ ID NO: 528517 - DNA, 15 bp, Homo sapiens
cccattctggcttct

SEQ ID NO: 528518 - DNA, 15 bp, Homo sapiens
ccattctggcttcta

SEQ ID NO: 528519 - DNA, 15 bp, Homo sapiens
cattctggcttctaa

SEQ ID NO: 528520 - DNA, 15 bp, Homo sapiens
attctggcttctaaa

SEQ ID NO: 528521 - DNA, 15 bp, Homo sapiens
ttctggcttctaaaa

SEQ ID NO: 528522 - DNA, 15 bp, Homo sapiens
tctggcttctaaaat

SEQ ID NO: 528523 - DNA, 15 bp, Homo sapiens
ctggcttctaaaatc

SEQ ID NO: 528524 - DNA, 15 bp, Homo sapiens
tggcttctaaaatca

SEQ ID NO: 528525 - DNA, 15 bp, Homo sapiens
ggcttctaaaatcac

SEQ ID NO: 528526 - DNA, 15 bp, Homo sapiens
gcttctaaaatcaca

SEQ ID NO: 528527 - DNA, 15 bp, Homo sapiens
cttctaaaatcacag

SEQ ID NO: 528528 - DNA, 15 bp, Homo sapiens
ttctaaaatcacagg

SEQ ID NO: 528529 - DNA, 15 bp, Homo sapiens
tctaaaatcacagga

SEQ ID NO: 528530 - DNA, 15 bp, Homo sapiens
ctaaaatcacaggaa

SEQ ID NO: 528531 - DNA, 15 bp, Homo sapiens
taaaatcacaggaag

SEQ ID NO: 528532 - DNA, 15 bp, Homo sapiens
aaaatcacaggaaga

SEQ ID NO: 528533 - DNA, 15 bp, Homo sapiens
aaatcacaggaagaa

SEQ ID NO: 528534 - DNA, 15 bp, Homo sapiens
aatcacaggaagaat

SEQ ID NO: 528535 - DNA, 15 bp, Homo sapiens
atcacaggaagaatg

SEQ ID NO: 528536 - DNA, 15 bp, Homo sapiens
tcacaggaagaatgg

SEQ ID NO: 528537 - DNA, 15 bp, Homo sapiens
cacaggaagaatggg

SEQ ID NO: 528538 - DNA, 15 bp, Homo sapiens
acaggaagaatggga

SEQ ID NO: 528539 - DNA, 15 bp, Homo sapiens
caggaagaatgggaa

SEQ ID NO: 528540 - DNA, 15 bp, Homo sapiens
aggaagaatgggaaa

SEQ ID NO: 528541 - DNA, 15 bp, Homo sapiens
ggaagaatgggaaat

SEQ ID NO: 528542 - DNA, 15 bp, Homo sapiens
gaagaatgggaaata

SEQ ID NO: 528543 - DNA, 15 bp, Homo sapiens
aagaatgggaaatag

SEQ ID NO: 528544 - DNA, 15 bp, Homo sapiens
agaatgggaaatagg

SEQ ID NO: 528545 - DNA, 15 bp, Homo sapiens
gaatgggaaatagga

SEQ ID NO: 528546 - DNA, 15 bp, Homo sapiens
aatgggaaataggac

SEQ ID NO: 528547 - DNA, 15 bp, Homo sapiens
atgggaaataggaca

SEQ ID NO: 528548 - DNA, 15 bp, Homo sapiens
tgggaaataggacac

SEQ ID NO: 528549 - DNA, 15 bp, Homo sapiens
gggaaataggacaca

SEQ ID NO: 528550 - DNA, 15 bp, Homo sapiens
ggaaataggacacac

SEQ ID NO: 528551 - DNA, 15 bp, Homo sapiens
gaaataggacacaca

SEQ ID NO: 528552 - DNA, 15 bp, Homo sapiens
aaataggacacacac

SEQ ID NO: 528553 - DNA, 15 bp, Homo sapiens
aataggacacacaca

SEQ ID NO: 528554 - DNA, 15 bp, Homo sapiens
ataggacacacacac

SEQ ID NO: 528555 - DNA, 15 bp, Homo sapiens
taggacacacacaca

SEQ ID NO: 528556 - DNA, 15 bp, Homo sapiens
aggacacacacacac

SEQ ID NO: 528557 - DNA, 15 bp, Homo sapiens
ggacacacacacaca

SEQ ID NO: 528558 - DNA, 15 bp, Homo sapiens
gacacacacacacac

SEQ ID NO: 528559 - DNA, 15 bp, Homo sapiens
acacacacacacaca

SEQ ID NO: 528560 - DNA, 15 bp, Homo sapiens
cacacacacacacat

SEQ ID NO: 528561 - DNA, 15 bp, Homo sapiens
acacacacacacata

SEQ ID NO: 528562 - DNA, 15 bp, Homo sapiens
cacacacacacatac

SEQ ID NO: 528563 - DNA, 15 bp, Homo sapiens
acacacacacataca

SEQ ID NO: 528564 - DNA, 15 bp, Homo sapiens
cacacacacatacac

SEQ ID NO: 528565 - DNA, 15 bp, Homo sapiens
acacacacatacaca

SEQ ID NO: 528566 - DNA, 15 bp, Homo sapiens
cacacacatacacac

SEQ ID NO: 528567 - DNA, 15 bp, Homo sapiens
acacacatacacaca

SEQ ID NO: 528568 - DNA, 15 bp, Homo sapiens
cacacatacacacac

SEQ ID NO: 528569 - DNA, 15 bp, Homo sapiens
acacatacacacaca

SEQ ID NO: 528570 - DNA, 15 bp, Homo sapiens
catacacacacacac

SEQ ID NO: 528571 - DNA, 15 bp, Homo sapiens
atacacacacacaca

SEQ ID NO: 528572 - DNA, 15 bp, Homo sapiens
tacacacacacacac

SEQ ID NO: 528573 - DNA, 15 bp, Homo sapiens
cacacacacacacac

SEQ ID NO: 528574 - DNA, 15 bp, Homo sapiens
acacacacacacatg

SEQ ID NO: 528575 - DNA, 15 bp, Homo sapiens
cacacacacacatga

SEQ ID NO: 528576 - DNA, 15 bp, Homo sapiens
acacacacacatgag

SEQ ID NO: 528577 - DNA, 15 bp, Homo sapiens
cacacacacatgagt

SEQ ID NO: 528578 - DNA, 15 bp, Homo sapiens
acacacacatgagtt

SEQ ID NO: 528579 - DNA, 15 bp, Homo sapiens
cacacacatgagttt

SEQ ID NO: 528580 - DNA, 15 bp, Homo sapiens
acacacatgagtttc

SEQ ID NO: 528581 - DNA, 15 bp, Homo sapiens
cacacatgagtttcg

SEQ ID NO: 528582 - DNA, 15 bp, Homo sapiens
acacatgagtttcgt

SEQ ID NO: 528583 - DNA, 15 bp, Homo sapiens
cacatgagtttcgta

SEQ ID NO: 528584 - DNA, 15 bp, Homo sapiens
acatgagtttcgtac

SEQ ID NO: 528585 - DNA, 15 bp, Homo sapiens
catgagtttcgtaca

SEQ ID NO: 528586 - DNA, 15 bp, Homo sapiens
atgagtttcgtacaa

SEQ ID NO: 528587 - DNA, 15 bp, Homo sapiens
tgagtttcgtacaaa

SEQ ID NO: 528588 - DNA, 15 bp, Homo sapiens
gagtttcgtacaaag

SEQ ID NO: 528589 - DNA, 15 bp, Homo sapiens
agtttcgtacaaagc

SEQ ID NO: 528590 - DNA, 15 bp, Homo sapiens
gtttcgtacaaagcc

SEQ ID NO: 528591 - DNA, 15 bp, Homo sapiens
tttcgtacaaagcct

SEQ ID NO: 528592 - DNA, 15 bp, Homo sapiens
ttcgtacaaagccta

SEQ ID NO: 528593 - DNA, 15 bp, Homo sapiens
tcgtacaaagcctag

SEQ ID NO: 528594 - DNA, 15 bp, Homo sapiens
cgtacaaagcctagg

SEQ ID NO: 528595 - DNA, 15 bp, Homo sapiens
gtacaaagcctagga

SEQ ID NO: 528596 - DNA, 15 bp, Homo sapiens
tacaaagcctaggac

SEQ ID NO: 528597 - DNA, 15 bp, Homo sapiens
acaaagcctaggaca

SEQ ID NO: 528598 - DNA, 15 bp, Homo sapiens
caaagcctaggacac

SEQ ID NO: 528599 - DNA, 15 bp, Homo sapiens
aaagcctaggacact

SEQ ID NO: 528600 - DNA, 15 bp, Homo sapiens
aagcctaggacactg

SEQ ID NO: 528601 - DNA, 15 bp, Homo sapiens
agcctaggacactgg

SEQ ID NO: 528602 - DNA, 15 bp, Homo sapiens
gcctaggacactggc

SEQ ID NO: 528603 - DNA, 15 bp, Homo sapiens
cctaggacactggcc

SEQ ID NO: 528604 - DNA, 15 bp, Homo sapiens
ctaggacactggcct

SEQ ID NO: 528605 - DNA, 15 bp, Homo sapiens
taggacactggcctc

SEQ ID NO: 528606 - DNA, 15 bp, Homo sapiens
aggacactggcctct

SEQ ID NO: 528607 - DNA, 15 bp, Homo sapiens
ggacactggcctctc

SEQ ID NO: 528608 - DNA, 15 bp, Homo sapiens
gacactggcctctcc

SEQ ID NO: 528609 - DNA, 15 bp, Homo sapiens
acactggcctctcca

SEQ ID NO: 528610 - DNA, 15 bp, Homo sapiens
cactggcctctccat

SEQ ID NO: 528611 - DNA, 15 bp, Homo sapiens
actggcctctccatc

SEQ ID NO: 528612 - DNA, 15 bp, Homo sapiens
ctggcctctccatct

SEQ ID NO: 528613 - DNA, 15 bp, Homo sapiens
tggcctctccatctg

SEQ ID NO: 528614 - DNA, 15 bp, Homo sapiens
ggcctctccatctgt

SEQ ID NO: 528615 - DNA, 15 bp, Homo sapiens
gcctctccatctgtg

SEQ ID NO: 528616 - DNA, 15 bp, Homo sapiens
cctctccatctgtga

SEQ ID NO: 528617 - DNA, 15 bp, Homo sapiens
ctctccatctgtgac

SEQ ID NO: 528618 - DNA, 15 bp, Homo sapiens
tctccatctgtgacc

SEQ ID NO: 528619 - DNA, 15 bp, Homo sapiens
ctccatctgtgacca

SEQ ID NO: 528620 - DNA, 15 bp, Homo sapiens
tccatctgtgaccat

SEQ ID NO: 528621 - DNA, 15 bp, Homo sapiens
ccatctgtgaccatc

SEQ ID NO: 528622 - DNA, 15 bp, Homo sapiens
catctgtgaccatct

SEQ ID NO: 528623 - DNA, 15 bp, Homo sapiens
atctgtgaccatctc

SEQ ID NO: 528624 - DNA, 15 bp, Homo sapiens
tctgtgaccatctcc

SEQ ID NO: 528625 - DNA, 15 bp, Homo sapiens
ctgtgaccatctccc

SEQ ID NO: 528626 - DNA, 15 bp, Homo sapiens
tgtgaccatctccca

SEQ ID NO: 528627 - DNA, 15 bp, Homo sapiens
gtgaccatctcccag

SEQ ID NO: 528628 - DNA, 15 bp, Homo sapiens
tgaccatctcccagg

SEQ ID NO: 528629 - DNA, 15 bp, Homo sapiens
gaccatctcccaggg

SEQ ID NO: 528630 - DNA, 15 bp, Homo sapiens
accatctcccagggt

SEQ ID NO: 528631 - DNA, 15 bp, Homo sapiens
ccatctcccagggtg

SEQ ID NO: 528632 - DNA, 15 bp, Homo sapiens
catctcccagggtgc

SEQ ID NO: 528633 - DNA, 15 bp, Homo sapiens
atctcccagggtgct

SEQ ID NO: 528634 - DNA, 15 bp, Homo sapiens
tctcccagggtgctt

SEQ ID NO: 528635 - DNA, 15 bp, Homo sapiens
ctcccagggtgcttg

SEQ ID NO: 528636 - DNA, 15 bp, Homo sapiens
tcccagggtgcttgg

SEQ ID NO: 528637 - DNA, 15 bp, Homo sapiens
cccagggtgcttgga

SEQ ID NO: 528638 - DNA, 15 bp, Homo sapiens
ccagggtgcttggaa

SEQ ID NO: 528639 - DNA, 15 bp, Homo sapiens
cagggtgcttggaag

SEQ ID NO: 528640 - DNA, 15 bp, Homo sapiens
agggtgcttggaagg

SEQ ID NO: 528641 - DNA, 15 bp, Homo sapiens
gggtgcttggaaggg

SEQ ID NO: 528642 - DNA, 15 bp, Homo sapiens
ggtgcttggaagggg

SEQ ID NO: 528643 - DNA, 15 bp, Homo sapiens
gtgcttggaaggggc

SEQ ID NO: 528644 - DNA, 15 bp, Homo sapiens
tgcttggaaggggca

SEQ ID NO: 528645 - DNA, 15 bp, Homo sapiens
gcttggaaggggcat

SEQ ID NO: 528646 - DNA, 15 bp, Homo sapiens
cttggaaggggcatg

SEQ ID NO: 528647 - DNA, 15 bp, Homo sapiens
ttggaaggggcatga

SEQ ID NO: 528648 - DNA, 15 bp, Homo sapiens
tggaaggggcatgat

SEQ ID NO: 528649 - DNA, 15 bp, Homo sapiens
ggaaggggcatgatc

SEQ ID NO: 528650 - DNA, 15 bp, Homo sapiens
gaaggggcatgatct

SEQ ID NO: 528651 - DNA, 15 bp, Homo sapiens
aaggggcatgatctc

SEQ ID NO: 528652 - DNA, 15 bp, Homo sapiens
aggggcatgatctct

SEQ ID NO: 528653 - DNA, 15 bp, Homo sapiens
ggggcatgatctctc

SEQ ID NO: 528654 - DNA, 15 bp, Homo sapiens
gggcatgatctctct

SEQ ID NO: 528655 - DNA, 15 bp, Homo sapiens
ggcatgatctctcta

SEQ ID NO: 528656 - DNA, 15 bp, Homo sapiens
gcatgatctctctag

SEQ ID NO: 528657 - DNA, 15 bp, Homo sapiens
catgatctctctagt

SEQ ID NO: 528658 - DNA, 15 bp, Homo sapiens
atgatctctctagtt

SEQ ID NO: 528659 - DNA, 15 bp, Homo sapiens
tgatctctctagtta

SEQ ID NO: 528660 - DNA, 15 bp, Homo sapiens
gatctctctagttaa

SEQ ID NO: 528661 - DNA, 15 bp, Homo sapiens
atctctctagttaaa

SEQ ID NO: 528662 - DNA, 15 bp, Homo sapiens
tctctctagttaaac

SEQ ID NO: 528663 - DNA, 15 bp, Homo sapiens
ctctctagttaaacc

SEQ ID NO: 528664 - DNA, 15 bp, Homo sapiens
tctctagttaaacca

SEQ ID NO: 528665 - DNA, 15 bp, Homo sapiens
ctctagttaaaccat

SEQ ID NO: 528666 - DNA, 15 bp, Homo sapiens
tctagttaaaccatt

SEQ ID NO: 528667 - DNA, 15 bp, Homo sapiens
ctagttaaaccattt

SEQ ID NO: 528668 - DNA, 15 bp, Homo sapiens
tagttaaaccattta

SEQ ID NO: 528669 - DNA, 15 bp, Homo sapiens
agttaaaccatttat

SEQ ID NO: 528670 - DNA, 15 bp, Homo sapiens
gttaaaccatttatg

SEQ ID NO: 528671 - DNA, 15 bp, Homo sapiens
ttaaaccatttatgc

SEQ ID NO: 528672 - DNA, 15 bp, Homo sapiens
taaaccatttatgca

SEQ ID NO: 528673 - DNA, 15 bp, Homo sapiens
aaaccatttatgcac

SEQ ID NO: 528674 - DNA, 15 bp, Homo sapiens
aaccatttatgcaca

SEQ ID NO: 528675 - DNA, 15 bp, Homo sapiens
accatttatgcacaa

SEQ ID NO: 528676 - DNA, 15 bp, Homo sapiens
ccatttatgcacaaa

SEQ ID NO: 528677 - DNA, 15 bp, Homo sapiens
catttatgcacaaat

SEQ ID NO: 528678 - DNA, 15 bp, Homo sapiens
atttatgcacaaatg

SEQ ID NO: 528679 - DNA, 15 bp, Homo sapiens
tttatgcacaaatga

SEQ ID NO: 528680 - DNA, 15 bp, Homo sapiens
ttatgcacaaatgaa

SEQ ID NO: 528681 - DNA, 15 bp, Homo sapiens
tatgcacaaatgaag

SEQ ID NO: 528682 - DNA, 15 bp, Homo sapiens
atgcacaaatgaagc

SEQ ID NO: 528683 - DNA, 15 bp, Homo sapiens
tgcacaaatgaagca

SEQ ID NO: 528684 - DNA, 15 bp, Homo sapiens
gcacaaatgaagcag

SEQ ID NO: 528685 - DNA, 15 bp, Homo sapiens
cacaaatgaagcaga

SEQ ID NO: 528686 - DNA, 15 bp, Homo sapiens
acaaatgaagcagac

SEQ ID NO: 528687 - DNA, 15 bp, Homo sapiens
caaatgaagcagacc

SEQ ID NO: 528688 - DNA, 15 bp, Homo sapiens
aaatgaagcagaccc

SEQ ID NO: 528689 - DNA, 15 bp, Homo sapiens
aatgaagcagaccca

SEQ ID NO: 528690 - DNA, 15 bp, Homo sapiens
atgaagcagacccat

SEQ ID NO: 528691 - DNA, 15 bp, Homo sapiens
tgaagcagacccatg

SEQ ID NO: 528692 - DNA, 15 bp, Homo sapiens
gaagcagacccatga

SEQ ID NO: 528693 - DNA, 15 bp, Homo sapiens
aagcagacccatgag

SEQ ID NO: 528694 - DNA, 15 bp, Homo sapiens
agcagacccatgagc

SEQ ID NO: 528695 - DNA, 15 bp, Homo sapiens
gcagacccatgagca

SEQ ID NO: 528696 - DNA, 15 bp, Homo sapiens
cagacccatgagcac

SEQ ID NO: 528697 - DNA, 15 bp, Homo sapiens
agacccatgagcact

SEQ ID NO: 528698 - DNA, 15 bp, Homo sapiens
gacccatgagcactg

SEQ ID NO: 528699 - DNA, 15 bp, Homo sapiens
acccatgagcactga

SEQ ID NO: 528700 - DNA, 15 bp, Homo sapiens
cccatgagcactgat

SEQ ID NO: 528701 - DNA, 15 bp, Homo sapiens
ccatgagcactgatt

SEQ ID NO: 528702 - DNA, 15 bp, Homo sapiens
catgagcactgattt

SEQ ID NO: 528703 - DNA, 15 bp, Homo sapiens
atgagcactgatttt

SEQ ID NO: 528704 - DNA, 15 bp, Homo sapiens
tgagcactgatttta

SEQ ID NO: 528705 - DNA, 15 bp, Homo sapiens
gagcactgattttat

SEQ ID NO: 528706 - DNA, 15 bp, Homo sapiens
agcactgattttatg

SEQ ID NO: 528707 - DNA, 15 bp, Homo sapiens
gcactgattttatgt

SEQ ID NO: 528708 - DNA, 15 bp, Homo sapiens
cactgattttatgta

SEQ ID NO: 528709 - DNA, 15 bp, Homo sapiens
actgattttatgtaa

SEQ ID NO: 528710 - DNA, 15 bp, Homo sapiens
ctgattttatgtaac

SEQ ID NO: 528711 - DNA, 15 bp, Homo sapiens
tgattttatgtaacc

SEQ ID NO: 528712 - DNA, 15 bp, Homo sapiens
gattttatgtaaccc

SEQ ID NO: 528713 - DNA, 15 bp, Homo sapiens
attttatgtaaccct

SEQ ID NO: 528714 - DNA, 15 bp, Homo sapiens
ttttatgtaaccctc

SEQ ID NO: 528715 - DNA, 15 bp, Homo sapiens
tttatgtaaccctcc

SEQ ID NO: 528716 - DNA, 15 bp, Homo sapiens
ttatgtaaccctccc

SEQ ID NO: 528717 - DNA, 15 bp, Homo sapiens
tatgtaaccctccct

SEQ ID NO: 528718 - DNA, 15 bp, Homo sapiens
atgtaaccctccctg

SEQ ID NO: 528719 - DNA, 15 bp, Homo sapiens
tgtaaccctccctgc

SEQ ID NO: 528720 - DNA, 15 bp, Homo sapiens
gtaaccctccctgca

SEQ ID NO: 528721 - DNA, 15 bp, Homo sapiens
taaccctccctgcaa

SEQ ID NO: 528722 - DNA, 15 bp, Homo sapiens
aaccctccctgcaaa

SEQ ID NO: 528723 - DNA, 15 bp, Homo sapiens
accctccctgcaaag

SEQ ID NO: 528724 - DNA, 15 bp, Homo sapiens
ccctccctgcaaagc

SEQ ID NO: 528725 - DNA, 15 bp, Homo sapiens
cctccctgcaaagca

SEQ ID NO: 528726 - DNA, 15 bp, Homo sapiens
ctccctgcaaagcag

SEQ ID NO: 528727 - DNA, 15 bp, Homo sapiens
tccctgcaaagcaga

SEQ ID NO: 528728 - DNA, 15 bp, Homo sapiens
ccctgcaaagcagaa

SEQ ID NO: 528729 - DNA, 15 bp, Homo sapiens
cctgcaaagcagaaa

SEQ ID NO: 528730 - DNA, 15 bp, Homo sapiens
ctgcaaagcagaaaa

SEQ ID NO: 528731 - DNA, 15 bp, Homo sapiens
tgcaaagcagaaaat

SEQ ID NO: 528732 - DNA, 15 bp, Homo sapiens
gcaaagcagaaaatg

SEQ ID NO: 528733 - DNA, 15 bp, Homo sapiens
caaagcagaaaatga

SEQ ID NO: 528734 - DNA, 15 bp, Homo sapiens
aaagcagaaaatgaa

SEQ ID NO: 528735 - DNA, 15 bp, Homo sapiens
aagcagaaaatgaat

SEQ ID NO: 528736 - DNA, 15 bp, Homo sapiens
agcagaaaatgaatc

SEQ ID NO: 528737 - DNA, 15 bp, Homo sapiens
gcagaaaatgaatca

SEQ ID NO: 528738 - DNA, 15 bp, Homo sapiens
cagaaaatgaatcag

SEQ ID NO: 528739 - DNA, 15 bp, Homo sapiens
agaaaatgaatcagt

SEQ ID NO: 528740 - DNA, 15 bp, Homo sapiens
gaaaatgaatcagta

SEQ ID NO: 528741 - DNA, 15 bp, Homo sapiens
aaaatgaatcagtat

SEQ ID NO: 528742 - DNA, 15 bp, Homo sapiens
aaatgaatcagtatc

SEQ ID NO: 528743 - DNA, 15 bp, Homo sapiens
aatgaatcagtatca

SEQ ID NO: 528744 - DNA, 15 bp, Homo sapiens
atgaatcagtatcac

SEQ ID NO: 528745 - DNA, 15 bp, Homo sapiens
tgaatcagtatcact

SEQ ID NO: 528746 - DNA, 15 bp, Homo sapiens
gaatcagtatcactc

SEQ ID NO: 528747 - DNA, 15 bp, Homo sapiens
aatcagtatcactca

SEQ ID NO: 528748 - DNA, 15 bp, Homo sapiens
atcagtatcactcag

SEQ ID NO: 528749 - DNA, 15 bp, Homo sapiens
tcagtatcactcagg

SEQ ID NO: 528750 - DNA, 15 bp, Homo sapiens
cagtatcactcaggt

SEQ ID NO: 528751 - DNA, 15 bp, Homo sapiens
agtatcactcaggta

SEQ ID NO: 528752 - DNA, 15 bp, Homo sapiens
gtatcactcaggtaa

SEQ ID NO: 528753 - DNA, 15 bp, Homo sapiens
tatcactcaggtaaa

SEQ ID NO: 528754 - DNA, 15 bp, Homo sapiens
atcactcaggtaaaa

SEQ ID NO: 528755 - DNA, 15 bp, Homo sapiens
tcactcaggtaaaac

SEQ ID NO: 528756 - DNA, 15 bp, Homo sapiens
cactcaggtaaaact

SEQ ID NO: 528757 - DNA, 15 bp, Homo sapiens
actcaggtaaaactt

SEQ ID NO: 528758 - DNA, 15 bp, Homo sapiens
ctcaggtaaaacttt

SEQ ID NO: 528759 - DNA, 15 bp, Homo sapiens
tcaggtaaaactttc

SEQ ID NO: 528760 - DNA, 15 bp, Homo sapiens
caggtaaaactttcc

SEQ ID NO: 528761 - DNA, 15 bp, Homo sapiens
aggtaaaactttcct

SEQ ID NO: 528762 - DNA, 15 bp, Homo sapiens
ggtaaaactttcctg

SEQ ID NO: 528763 - DNA, 15 bp, Homo sapiens
gtaaaactttcctgt

SEQ ID NO: 528764 - DNA, 15 bp, Homo sapiens
taaaactttcctgtc

SEQ ID NO: 528765 - DNA, 15 bp, Homo sapiens
aaaactttcctgtca

SEQ ID NO: 528766 - DNA, 15 bp, Homo sapiens
aaactttcctgtcag

SEQ ID NO: 528767 - DNA, 15 bp, Homo sapiens
aactttcctgtcagt

SEQ ID NO: 528768 - DNA, 15 bp, Homo sapiens
actttcctgtcagtt

SEQ ID NO: 528769 - DNA, 15 bp, Homo sapiens
ctttcctgtcagttt

SEQ ID NO: 528770 - DNA, 15 bp, Homo sapiens
tttcctgtcagtttt

SEQ ID NO: 528771 - DNA, 15 bp, Homo sapiens
ttcctgtcagttttt

SEQ ID NO: 528772 - DNA, 15 bp, Homo sapiens
tcctgtcagtttttc

SEQ ID NO: 528773 - DNA, 15 bp, Homo sapiens
cctgtcagtttttcc

SEQ ID NO: 528774 - DNA, 15 bp, Homo sapiens
ctgtcagtttttcct

SEQ ID NO: 528775 - DNA, 15 bp, Homo sapiens
tgtcagtttttcctt

SEQ ID NO: 528776 - DNA, 15 bp, Homo sapiens
gtcagtttttcctta

SEQ ID NO: 528777 - DNA, 15 bp, Homo sapiens
tcagtttttccttaa

SEQ ID NO: 528778 - DNA, 15 bp, Homo sapiens
cagtttttccttaat

SEQ ID NO: 528779 - DNA, 15 bp, Homo sapiens
agtttttccttaata

SEQ ID NO: 528780 - DNA, 15 bp, Homo sapiens
gtttttccttaataa

SEQ ID NO: 528781 - DNA, 15 bp, Homo sapiens
tttttccttaataac

SEQ ID NO: 528782 - DNA, 15 bp, Homo sapiens
ttttccttaataaca

SEQ ID NO: 528783 - DNA, 15 bp, Homo sapiens
tttccttaataacaa

SEQ ID NO: 528784 - DNA, 15 bp, Homo sapiens
ttccttaataacaat

SEQ ID NO: 528785 - DNA, 15 bp, Homo sapiens
tccttaataacaatg

SEQ ID NO: 528786 - DNA, 15 bp, Homo sapiens
ccttaataacaatgt

SEQ ID NO: 528787 - DNA, 15 bp, Homo sapiens
cttaataacaatgtg

SEQ ID NO: 528788 - DNA, 15 bp, Homo sapiens
ttaataacaatgtga

SEQ ID NO: 528789 - DNA, 15 bp, Homo sapiens
taataacaatgtgac

SEQ ID NO: 528790 - DNA, 15 bp, Homo sapiens
aataacaatgtgaca

SEQ ID NO: 528791 - DNA, 15 bp, Homo sapiens
ataacaatgtgacac

SEQ ID NO: 528792 - DNA, 15 bp, Homo sapiens
taacaatgtgacact

SEQ ID NO: 528793 - DNA, 15 bp, Homo sapiens
aacaatgtgacactt

SEQ ID NO: 528794 - DNA, 15 bp, Homo sapiens
acaatgtgacacttt

SEQ ID NO: 528795 - DNA, 15 bp, Homo sapiens
caatgtgacactttt

SEQ ID NO: 528796 - DNA, 15 bp, Homo sapiens
aatgtgacacttttg

SEQ ID NO: 528797 - DNA, 15 bp, Homo sapiens
atgtgacacttttgt

SEQ ID NO: 528798 - DNA, 15 bp, Homo sapiens
tgtgacacttttgtt

SEQ ID NO: 528799 - DNA, 15 bp, Homo sapiens
gtgacacttttgttt

SEQ ID NO: 528800 - DNA, 15 bp, Homo sapiens
tgacacttttgtttt

SEQ ID NO: 528801 - DNA, 15 bp, Homo sapiens
gacacttttgttttg

SEQ ID NO: 528802 - DNA, 15 bp, Homo sapiens
acacttttgttttgt

SEQ ID NO: 528803 - DNA, 15 bp, Homo sapiens
cacttttgttttgtt

SEQ ID NO: 528804 - DNA, 15 bp, Homo sapiens
acttttgttttgttt

SEQ ID NO: 528805 - DNA, 15 bp, Homo sapiens
cttttgttttgtttg

SEQ ID NO: 528806 - DNA, 15 bp, Homo sapiens
ttttgttttgtttgt

SEQ ID NO: 528807 - DNA, 15 bp, Homo sapiens
tttgttttgtttgtt

SEQ ID NO: 528808 - DNA, 15 bp, Homo sapiens
ttgttttgtttgttt

SEQ ID NO: 528809 - DNA, 15 bp, Homo sapiens
tgttttgtttgtttt

SEQ ID NO: 528810 - DNA, 15 bp, Homo sapiens
gttttgtttgtttta

SEQ ID NO: 528811 - DNA, 15 bp, Homo sapiens
ttttgtttgttttat

SEQ ID NO: 528812 - DNA, 15 bp, Homo sapiens
tttgtttgttttata

SEQ ID NO: 528813 - DNA, 15 bp, Homo sapiens
ttgtttgttttatat

SEQ ID NO: 528814 - DNA, 15 bp, Homo sapiens
tgtttgttttatatt

SEQ ID NO: 528815 - DNA, 15 bp, Homo sapiens
gtttgttttatattt

SEQ ID NO: 528816 - DNA, 15 bp, Homo sapiens
tttgttttatatttc

SEQ ID NO: 528817 - DNA, 15 bp, Homo sapiens
ttgttttatatttct

SEQ ID NO: 528818 - DNA, 15 bp, Homo sapiens
tgttttatatttctg

SEQ ID NO: 528819 - DNA, 15 bp, Homo sapiens
gttttatatttctgt

SEQ ID NO: 528820 - DNA, 15 bp, Homo sapiens
ttttatatttctgtt

SEQ ID NO: 528821 - DNA, 15 bp, Homo sapiens
tttatatttctgtta

SEQ ID NO: 528822 - DNA, 15 bp, Homo sapiens
ttatatttctgttat

SEQ ID NO: 528823 - DNA, 15 bp, Homo sapiens
tatatttctgttatg

SEQ ID NO: 528824 - DNA, 15 bp, Homo sapiens
atatttctgttatga

SEQ ID NO: 528825 - DNA, 15 bp, Homo sapiens
tatttctgttatgag

SEQ ID NO: 528826 - DNA, 15 bp, Homo sapiens
atttctgttatgagt

SEQ ID NO: 528827 - DNA, 15 bp, Homo sapiens
tttctgttatgagtt

SEQ ID NO: 528828 - DNA, 15 bp, Homo sapiens
ttctgttatgagtta

SEQ ID NO: 528829 - DNA, 15 bp, Homo sapiens
tctgttatgagttat

SEQ ID NO: 528830 - DNA, 15 bp, Homo sapiens
ctgttatgagttatt

SEQ ID NO: 528831 - DNA, 15 bp, Homo sapiens
tgttatgagttattg

SEQ ID NO: 528832 - DNA, 15 bp, Homo sapiens
gttatgagttattgg

SEQ ID NO: 528833 - DNA, 15 bp, Homo sapiens
ttatgagttattggt

SEQ ID NO: 528834 - DNA, 15 bp, Homo sapiens
tatgagttattggtt

SEQ ID NO: 528835 - DNA, 15 bp, Homo sapiens
atgagttattggtta

SEQ ID NO: 528836 - DNA, 15 bp, Homo sapiens
tgagttattggttag

SEQ ID NO: 528837 - DNA, 15 bp, Homo sapiens
gagttattggttaga

SEQ ID NO: 528838 - DNA, 15 bp, Homo sapiens
agttattggttagac

SEQ ID NO: 528839 - DNA, 15 bp, Homo sapiens
gttattggttagaca

SEQ ID NO: 528840 - DNA, 15 bp, Homo sapiens
ttattggttagacag

SEQ ID NO: 528841 - DNA, 15 bp, Homo sapiens
tattggttagacaga

SEQ ID NO: 528842 - DNA, 15 bp, Homo sapiens
attggttagacagaa

SEQ ID NO: 528843 - DNA, 15 bp, Homo sapiens
ttggttagacagaag

SEQ ID NO: 528844 - DNA, 15 bp, Homo sapiens
tggttagacagaagg

SEQ ID NO: 528845 - DNA, 15 bp, Homo sapiens
ggttagacagaaggg

SEQ ID NO: 528846 - DNA, 15 bp, Homo sapiens
gttagacagaaggga

SEQ ID NO: 528847 - DNA, 15 bp, Homo sapiens
ttagacagaagggag

SEQ ID NO: 528848 - DNA, 15 bp, Homo sapiens
tagacagaagggagg

SEQ ID NO: 528849 - DNA, 15 bp, Homo sapiens
agacagaagggaggt

SEQ ID NO: 528850 - DNA, 15 bp, Homo sapiens
gacagaagggaggta

SEQ ID NO: 528851 - DNA, 15 bp, Homo sapiens
acagaagggaggtag

SEQ ID NO: 528852 - DNA, 15 bp, Homo sapiens
cagaagggaggtagc

SEQ ID NO: 528853 - DNA, 15 bp, Homo sapiens
agaagggaggtagct

SEQ ID NO: 528854 - DNA, 15 bp, Homo sapiens
gaagggaggtagctt

SEQ ID NO: 528855 - DNA, 15 bp, Homo sapiens
aagggaggtagctta

SEQ ID NO: 528856 - DNA, 15 bp, Homo sapiens
agggaggtagcttaa

SEQ ID NO: 528857 - DNA, 15 bp, Homo sapiens
gggaggtagcttaat

SEQ ID NO: 528858 - DNA, 15 bp, Homo sapiens
ggaggtagcttaata

SEQ ID NO: 528859 - DNA, 15 bp, Homo sapiens
gaggtagcttaatag

SEQ ID NO: 528860 - DNA, 15 bp, Homo sapiens
aggtagcttaatagt

SEQ ID NO: 528861 - DNA, 15 bp, Homo sapiens
ggtagcttaatagtt

SEQ ID NO: 528862 - DNA, 15 bp, Homo sapiens
gtagcttaatagttg

SEQ ID NO: 528863 - DNA, 15 bp, Homo sapiens
tagcttaatagttgt

SEQ ID NO: 528864 - DNA, 15 bp, Homo sapiens
agcttaatagttgtt

SEQ ID NO: 528865 - DNA, 15 bp, Homo sapiens
gcttaatagttgttc

SEQ ID NO: 528866 - DNA, 15 bp, Homo sapiens
cttaatagttgttcc

SEQ ID NO: 528867 - DNA, 15 bp, Homo sapiens
ttaatagttgttcca

SEQ ID NO: 528868 - DNA, 15 bp, Homo sapiens
taatagttgttccac

SEQ ID NO: 528869 - DNA, 15 bp, Homo sapiens
aatagttgttccact

SEQ ID NO: 528870 - DNA, 15 bp, Homo sapiens
atagttgttccactt

SEQ ID NO: 528871 - DNA, 15 bp, Homo sapiens
tagttgttccacttc

SEQ ID NO: 528872 - DNA, 15 bp, Homo sapiens
agttgttccacttct

SEQ ID NO: 528873 - DNA, 15 bp, Homo sapiens
gttgttccacttctc

SEQ ID NO: 528874 - DNA, 15 bp, Homo sapiens
ttgttccacttctct

SEQ ID NO: 528875 - DNA, 15 bp, Homo sapiens
tgttccacttctctg

SEQ ID NO: 528876 - DNA, 15 bp, Homo sapiens
gttccacttctctgc

SEQ ID NO: 528877 - DNA, 15 bp, Homo sapiens
ttccacttctctgcc

SEQ ID NO: 528878 - DNA, 15 bp, Homo sapiens
tccacttctctgcct

SEQ ID NO: 528879 - DNA, 15 bp, Homo sapiens
ccacttctctgccta

SEQ ID NO: 528880 - DNA, 15 bp, Homo sapiens
cacttctctgcctaa

SEQ ID NO: 528881 - DNA, 15 bp, Homo sapiens
acttctctgcctaag

SEQ ID NO: 528882 - DNA, 15 bp, Homo sapiens
cttctctgcctaagg

SEQ ID NO: 528883 - DNA, 15 bp, Homo sapiens
ttctctgcctaagga

SEQ ID NO: 528884 - DNA, 15 bp, Homo sapiens
tctctgcctaaggat

SEQ ID NO: 528885 - DNA, 15 bp, Homo sapiens
ctctgcctaaggata

SEQ ID NO: 528886 - DNA, 15 bp, Homo sapiens
tctgcctaaggatat

SEQ ID NO: 528887 - DNA, 15 bp, Homo sapiens
ctgcctaaggatatc

SEQ ID NO: 528888 - DNA, 15 bp, Homo sapiens
tgcctaaggatatca

SEQ ID NO: 528889 - DNA, 15 bp, Homo sapiens
gcctaaggatatcag

SEQ ID NO: 528890 - DNA, 15 bp, Homo sapiens
cctaaggatatcagt

SEQ ID NO: 528891 - DNA, 15 bp, Homo sapiens
ctaaggatatcagtg

SEQ ID NO: 528892 - DNA, 15 bp, Homo sapiens
taaggatatcagtgt

SEQ ID NO: 528893 - DNA, 15 bp, Homo sapiens
aaggatatcagtgtg

SEQ ID NO: 528894 - DNA, 15 bp, Homo sapiens
aggatatcagtgtga

SEQ ID NO: 528895 - DNA, 15 bp, Homo sapiens
ggatatcagtgtgaa

SEQ ID NO: 528896 - DNA, 15 bp, Homo sapiens
gatatcagtgtgaac

SEQ ID NO: 528897 - DNA, 15 bp, Homo sapiens
atatcagtgtgaacg

SEQ ID NO: 528898 - DNA, 15 bp, Homo sapiens
tatcagtgtgaacgt

SEQ ID NO: 528899 - DNA, 15 bp, Homo sapiens
atcagtgtgaacgtt

SEQ ID NO: 528900 - DNA, 15 bp, Homo sapiens
tcagtgtgaacgttg

SEQ ID NO: 528901 - DNA, 15 bp, Homo sapiens
cagtgtgaacgttgg

SEQ ID NO: 528902 - DNA, 15 bp, Homo sapiens
agtgtgaacgttggg

SEQ ID NO: 528903 - DNA, 15 bp, Homo sapiens
gtgtgaacgttgggt

SEQ ID NO: 528904 - DNA, 15 bp, Homo sapiens
tgtgaacgttgggtg

SEQ ID NO: 528905 - DNA, 15 bp, Homo sapiens
gtgaacgttgggtgt

SEQ ID NO: 528906 - DNA, 15 bp, Homo sapiens
tgaacgttgggtgtc

SEQ ID NO: 528907 - DNA, 15 bp, Homo sapiens
gaacgttgggtgtct

SEQ ID NO: 528908 - DNA, 15 bp, Homo sapiens
aacgttgggtgtcta

SEQ ID NO: 528909 - DNA, 15 bp, Homo sapiens
acgttgggtgtctag

SEQ ID NO: 528910 - DNA, 15 bp, Homo sapiens
cgttgggtgtctagc

SEQ ID NO: 528911 - DNA, 15 bp, Homo sapiens
gttgggtgtctagct

SEQ ID NO: 528912 - DNA, 15 bp, Homo sapiens
ttgggtgtctagctg

SEQ ID NO: 528913 - DNA, 15 bp, Homo sapiens
tgggtgtctagctgt

SEQ ID NO: 528914 - DNA, 15 bp, Homo sapiens
gggtgtctagctgtg

SEQ ID NO: 528915 - DNA, 15 bp, Homo sapiens
ggtgtctagctgtga

SEQ ID NO: 528916 - DNA, 15 bp, Homo sapiens
gtgtctagctgtgaa

SEQ ID NO: 528917 - DNA, 15 bp, Homo sapiens
tgtctagctgtgaac

SEQ ID NO: 528918 - DNA, 15 bp, Homo sapiens
gtctagctgtgaaca

SEQ ID NO: 528919 - DNA, 15 bp, Homo sapiens
tctagctgtgaacaa

SEQ ID NO: 528920 - DNA, 15 bp, Homo sapiens
ctagctgtgaacaaa

SEQ ID NO: 528921 - DNA, 15 bp, Homo sapiens
tagctgtgaacaaaa

SEQ ID NO: 528922 - DNA, 15 bp, Homo sapiens
agctgtgaacaaaac

SEQ ID NO: 528923 - DNA, 15 bp, Homo sapiens
gctgtgaacaaaaca

SEQ ID NO: 528924 - DNA, 15 bp, Homo sapiens
ctgtgaacaaaacaa

SEQ ID NO: 528925 - DNA, 15 bp, Homo sapiens
tgtgaacaaaacaag

SEQ ID NO: 528926 - DNA, 15 bp, Homo sapiens
gtgaacaaaacaagc

SEQ ID NO: 528927 - DNA, 15 bp, Homo sapiens
tgaacaaaacaagct

SEQ ID NO: 528928 - DNA, 15 bp, Homo sapiens
gaacaaaacaagctc

SEQ ID NO: 528929 - DNA, 15 bp, Homo sapiens
aacaaaacaagctca

SEQ ID NO: 528930 - DNA, 15 bp, Homo sapiens
acaaaacaagctcaa

SEQ ID NO: 528931 - DNA, 15 bp, Homo sapiens
caaaacaagctcaac

SEQ ID NO: 528932 - DNA, 15 bp, Homo sapiens
aaaacaagctcaact

SEQ ID NO: 528933 - DNA, 15 bp, Homo sapiens
aaacaagctcaactt

SEQ ID NO: 528934 - DNA, 15 bp, Homo sapiens
aacaagctcaacttt

SEQ ID NO: 528935 - DNA, 15 bp, Homo sapiens
acaagctcaactttt

SEQ ID NO: 528936 - DNA, 15 bp, Homo sapiens
caagctcaacttttg

SEQ ID NO: 528937 - DNA, 15 bp, Homo sapiens
aagctcaacttttgc

SEQ ID NO: 528938 - DNA, 15 bp, Homo sapiens
agctcaacttttgct

SEQ ID NO: 528939 - DNA, 15 bp, Homo sapiens
gctcaacttttgctt

SEQ ID NO: 528940 - DNA, 15 bp, Homo sapiens
ctcaacttttgcttt

SEQ ID NO: 528941 - DNA, 15 bp, Homo sapiens
tcaacttttgctttc

SEQ ID NO: 528942 - DNA, 15 bp, Homo sapiens
caacttttgctttca

SEQ ID NO: 528943 - DNA, 15 bp, Homo sapiens
aacttttgctttcag

SEQ ID NO: 528944 - DNA, 15 bp, Homo sapiens
acttttgctttcagg

SEQ ID NO: 528945 - DNA, 15 bp, Homo sapiens
cttttgctttcaggg

SEQ ID NO: 528946 - DNA, 15 bp, Homo sapiens
ttttgctttcaggga

SEQ ID NO: 528947 - DNA, 15 bp, Homo sapiens
tttgctttcagggag

SEQ ID NO: 528948 - DNA, 15 bp, Homo sapiens
ttgctttcagggagc

SEQ ID NO: 528949 - DNA, 15 bp, Homo sapiens
tgctttcagggagct

SEQ ID NO: 528950 - DNA, 15 bp, Homo sapiens
gctttcagggagctt

SEQ ID NO: 528951 - DNA, 15 bp, Homo sapiens
ctttcagggagctta

SEQ ID NO: 528952 - DNA, 15 bp, Homo sapiens
tttcagggagcttac

SEQ ID NO: 528953 - DNA, 15 bp, Homo sapiens
ttcagggagcttaca

SEQ ID NO: 528954 - DNA, 15 bp, Homo sapiens
tcagggagcttacaa

SEQ ID NO: 528955 - DNA, 15 bp, Homo sapiens
cagggagcttacaag

SEQ ID NO: 528956 - DNA, 15 bp, Homo sapiens
agggagcttacaagg

SEQ ID NO: 528957 - DNA, 15 bp, Homo sapiens
gggagcttacaaggt

SEQ ID NO: 528958 - DNA, 15 bp, Homo sapiens
ggagcttacaaggta

SEQ ID NO: 528959 - DNA, 15 bp, Homo sapiens
gagcttacaaggtat

SEQ ID NO: 528960 - DNA, 15 bp, Homo sapiens
agcttacaaggtatt

SEQ ID NO: 528961 - DNA, 15 bp, Homo sapiens
gcttacaaggtattg

SEQ ID NO: 528962 - DNA, 15 bp, Homo sapiens
cttacaaggtattgg

SEQ ID NO: 528963 - DNA, 15 bp, Homo sapiens
ttacaaggtattgga

SEQ ID NO: 528964 - DNA, 15 bp, Homo sapiens
tacaaggtattggaa

SEQ ID NO: 528965 - DNA, 15 bp, Homo sapiens
acaaggtattggaag

SEQ ID NO: 528966 - DNA, 15 bp, Homo sapiens
caaggtattggaagg

SEQ ID NO: 528967 - DNA, 15 bp, Homo sapiens
aaggtattggaagga

SEQ ID NO: 528968 - DNA, 15 bp, Homo sapiens
aggtattggaaggag

SEQ ID NO: 528969 - DNA, 15 bp, Homo sapiens
ggtattggaaggaga

SEQ ID NO: 528970 - DNA, 15 bp, Homo sapiens
gtattggaaggagac

SEQ ID NO: 528971 - DNA, 15 bp, Homo sapiens
tattggaaggagaca

SEQ ID NO: 528972 - DNA, 15 bp, Homo sapiens
attggaaggagacaa

SEQ ID NO: 528973 - DNA, 15 bp, Homo sapiens
ttggaaggagacaaa

SEQ ID NO: 528974 - DNA, 15 bp, Homo sapiens
tggaaggagacaaac

SEQ ID NO: 528975 - DNA, 15 bp, Homo sapiens
ggaaggagacaaaca

SEQ ID NO: 528976 - DNA, 15 bp, Homo sapiens
gaaggagacaaacat

SEQ ID NO: 528977 - DNA, 15 bp, Homo sapiens
aaggagacaaacatt

SEQ ID NO: 528978 - DNA, 15 bp, Homo sapiens
aggagacaaacatta

SEQ ID NO: 528979 - DNA, 15 bp, Homo sapiens
ggagacaaacattaa

SEQ ID NO: 528980 - DNA, 15 bp, Homo sapiens
gagacaaacattaaa

SEQ ID NO: 528981 - DNA, 15 bp, Homo sapiens
agacaaacattaaac

SEQ ID NO: 528982 - DNA, 15 bp, Homo sapiens
gacaaacattaaaca

SEQ ID NO: 528983 - DNA, 15 bp, Homo sapiens
acaaacattaaacag

SEQ ID NO: 528984 - DNA, 15 bp, Homo sapiens
caaacattaaacaga

SEQ ID NO: 528985 - DNA, 15 bp, Homo sapiens
aaacattaaacagat

SEQ ID NO: 528986 - DNA, 15 bp, Homo sapiens
aacattaaacagata

SEQ ID NO: 528987 - DNA, 15 bp, Homo sapiens
acattaaacagatac

SEQ ID NO: 528988 - DNA, 15 bp, Homo sapiens
cattaaacagataca

SEQ ID NO: 528989 - DNA, 15 bp, Homo sapiens
attaaacagatacat

SEQ ID NO: 528990 - DNA, 15 bp, Homo sapiens
ttaaacagatacatc

SEQ ID NO: 528991 - DNA, 15 bp, Homo sapiens
taaacagatacatct

SEQ ID NO: 528992 - DNA, 15 bp, Homo sapiens
aaacagatacatcta

SEQ ID NO: 528993 - DNA, 15 bp, Homo sapiens
aacagatacatctac

SEQ ID NO: 528994 - DNA, 15 bp, Homo sapiens
acagatacatctaca

SEQ ID NO: 528995 - DNA, 15 bp, Homo sapiens
cagatacatctacaa

SEQ ID NO: 528996 - DNA, 15 bp, Homo sapiens
agatacatctacaaa

SEQ ID NO: 528997 - DNA, 15 bp, Homo sapiens
gatacatctacaaat

SEQ ID NO: 528998 - DNA, 15 bp, Homo sapiens
atacatctacaaata

SEQ ID NO: 528999 - DNA, 15 bp, Homo sapiens
tacatctacaaataa

SEQ ID NO: 529000 - DNA, 15 bp, Homo sapiens
acatctacaaataag

SEQ ID NO: 529001 - DNA, 15 bp, Homo sapiens
catctacaaataagg

SEQ ID NO: 529002 - DNA, 15 bp, Homo sapiens
atctacaaataagga

SEQ ID NO: 529003 - DNA, 15 bp, Homo sapiens
tctacaaataaggat

SEQ ID NO: 529004 - DNA, 15 bp, Homo sapiens
ctacaaataaggatg

SEQ ID NO: 529005 - DNA, 15 bp, Homo sapiens
tacaaataaggatgc

SEQ ID NO: 529006 - DNA, 15 bp, Homo sapiens
acaaataaggatgca

SEQ ID NO: 529007 - DNA, 15 bp, Homo sapiens
caaataaggatgcaa

SEQ ID NO: 529008 - DNA, 15 bp, Homo sapiens
aaataaggatgcaat

SEQ ID NO: 529009 - DNA, 15 bp, Homo sapiens
aataaggatgcaata

SEQ ID NO: 529010 - DNA, 15 bp, Homo sapiens
ataaggatgcaataa

SEQ ID NO: 529011 - DNA, 15 bp, Homo sapiens
taaggatgcaataac

SEQ ID NO: 529012 - DNA, 15 bp, Homo sapiens
aaggatgcaataaca

SEQ ID NO: 529013 - DNA, 15 bp, Homo sapiens
aggatgcaataacaa

SEQ ID NO: 529014 - DNA, 15 bp, Homo sapiens
ggatgcaataacaac

SEQ ID NO: 529015 - DNA, 15 bp, Homo sapiens
gatgcaataacaact

SEQ ID NO: 529016 - DNA, 15 bp, Homo sapiens
atgcaataacaactg

SEQ ID NO: 529017 - DNA, 15 bp, Homo sapiens
tgcaataacaactgt

SEQ ID NO: 529018 - DNA, 15 bp, Homo sapiens
gcaataacaactgtg

SEQ ID NO: 529019 - DNA, 15 bp, Homo sapiens
caataacaactgtga

SEQ ID NO: 529020 - DNA, 15 bp, Homo sapiens
aataacaactgtgaa

SEQ ID NO: 529021 - DNA, 15 bp, Homo sapiens
ataacaactgtgaaa

SEQ ID NO: 529022 - DNA, 15 bp, Homo sapiens
taacaactgtgaaaa

SEQ ID NO: 529023 - DNA, 15 bp, Homo sapiens
aacaactgtgaaaat

SEQ ID NO: 529024 - DNA, 15 bp, Homo sapiens
acaactgtgaaaatg

SEQ ID NO: 529025 - DNA, 15 bp, Homo sapiens
caactgtgaaaatgt

SEQ ID NO: 529026 - DNA, 15 bp, Homo sapiens
aactgtgaaaatgtg

SEQ ID NO: 529027 - DNA, 15 bp, Homo sapiens
actgtgaaaatgtga

SEQ ID NO: 529028 - DNA, 15 bp, Homo sapiens
ctgtgaaaatgtgaa

SEQ ID NO: 529029 - DNA, 15 bp, Homo sapiens
tgtgaaaatgtgaag

SEQ ID NO: 529030 - DNA, 15 bp, Homo sapiens
gtgaaaatgtgaaga

SEQ ID NO: 529031 - DNA, 15 bp, Homo sapiens
tgaaaatgtgaagaa

SEQ ID NO: 529032 - DNA, 15 bp, Homo sapiens
gaaaatgtgaagaag

SEQ ID NO: 529033 - DNA, 15 bp, Homo sapiens
aaaatgtgaagaagg

SEQ ID NO: 529034 - DNA, 15 bp, Homo sapiens
aaatgtgaagaagga

SEQ ID NO: 529035 - DNA, 15 bp, Homo sapiens
aatgtgaagaaggaa

SEQ ID NO: 529036 - DNA, 15 bp, Homo sapiens
atgtgaagaaggaag

SEQ ID NO: 529037 - DNA, 15 bp, Homo sapiens
tgtgaagaaggaaga

SEQ ID NO: 529038 - DNA, 15 bp, Homo sapiens
gtgaagaaggaagag

SEQ ID NO: 529039 - DNA, 15 bp, Homo sapiens
tgaagaaggaagagc

SEQ ID NO: 529040 - DNA, 15 bp, Homo sapiens
gaagaaggaagagct

SEQ ID NO: 529041 - DNA, 15 bp, Homo sapiens
aagaaggaagagctt

SEQ ID NO: 529042 - DNA, 15 bp, Homo sapiens
agaaggaagagcttc

SEQ ID NO: 529043 - DNA, 15 bp, Homo sapiens
gaaggaagagcttca

SEQ ID NO: 529044 - DNA, 15 bp, Homo sapiens
aaggaagagcttcaa

SEQ ID NO: 529045 - DNA, 15 bp, Homo sapiens
aggaagagcttcaaa

SEQ ID NO: 529046 - DNA, 15 bp, Homo sapiens
ggaagagcttcaaat

SEQ ID NO: 529047 - DNA, 15 bp, Homo sapiens
gaagagcttcaaatc

SEQ ID NO: 529048 - DNA, 15 bp, Homo sapiens
aagagcttcaaatct

SEQ ID NO: 529049 - DNA, 15 bp, Homo sapiens
agagcttcaaatcta

SEQ ID NO: 529050 - DNA, 15 bp, Homo sapiens
gagcttcaaatctag

SEQ ID NO: 529051 - DNA, 15 bp, Homo sapiens
agcttcaaatctaga

SEQ ID NO: 529052 - DNA, 15 bp, Homo sapiens
gcttcaaatctagaa

SEQ ID NO: 529053 - DNA, 15 bp, Homo sapiens
cttcaaatctagaag

SEQ ID NO: 529054 - DNA, 15 bp, Homo sapiens
ttcaaatctagaagg

SEQ ID NO: 529055 - DNA, 15 bp, Homo sapiens
tcaaatctagaagga

SEQ ID NO: 529056 - DNA, 15 bp, Homo sapiens
caaatctagaaggat

SEQ ID NO: 529057 - DNA, 15 bp, Homo sapiens
aaatctagaaggatg

SEQ ID NO: 529058 - DNA, 15 bp, Homo sapiens
aatctagaaggatgt

SEQ ID NO: 529059 - DNA, 15 bp, Homo sapiens
atctagaaggatgta

SEQ ID NO: 529060 - DNA, 15 bp, Homo sapiens
tctagaaggatgtac

SEQ ID NO: 529061 - DNA, 15 bp, Homo sapiens
ctagaaggatgtacc

SEQ ID NO: 529062 - DNA, 15 bp, Homo sapiens
tagaaggatgtaccc

SEQ ID NO: 529063 - DNA, 15 bp, Homo sapiens
agaaggatgtaccca

SEQ ID NO: 529064 - DNA, 15 bp, Homo sapiens
gaaggatgtacccaa

SEQ ID NO: 529065 - DNA, 15 bp, Homo sapiens
aaggatgtacccaag

SEQ ID NO: 529066 - DNA, 15 bp, Homo sapiens
aggatgtacccaagt

SEQ ID NO: 529067 - DNA, 15 bp, Homo sapiens
ggatgtacccaagtg

SEQ ID NO: 529068 - DNA, 15 bp, Homo sapiens
gatgtacccaagtga

SEQ ID NO: 529069 - DNA, 15 bp, Homo sapiens
atgtacccaagtgat

SEQ ID NO: 529070 - DNA, 15 bp, Homo sapiens
tgtacccaagtgatc

SEQ ID NO: 529071 - DNA, 15 bp, Homo sapiens
gtacccaagtgatct

SEQ ID NO: 529072 - DNA, 15 bp, Homo sapiens
tacccaagtgatctc

SEQ ID NO: 529073 - DNA, 15 bp, Homo sapiens
acccaagtgatctct

SEQ ID NO: 529074 - DNA, 15 bp, Homo sapiens
cccaagtgatctctt

SEQ ID NO: 529075 - DNA, 15 bp, Homo sapiens
ccaagtgatctctta

SEQ ID NO: 529076 - DNA, 15 bp, Homo sapiens
caagtgatctcttag

SEQ ID NO: 529077 - DNA, 15 bp, Homo sapiens
aagtgatctcttaga

SEQ ID NO: 529078 - DNA, 15 bp, Homo sapiens
agtgatctcttagaa

SEQ ID NO: 529079 - DNA, 15 bp, Homo sapiens
gtgatctcttagaaa

SEQ ID NO: 529080 - DNA, 15 bp, Homo sapiens
tgatctcttagaaat

SEQ ID NO: 529081 - DNA, 15 bp, Homo sapiens
gatctcttagaaatc

SEQ ID NO: 529082 - DNA, 15 bp, Homo sapiens
atctcttagaaatct

SEQ ID NO: 529083 - DNA, 15 bp, Homo sapiens
tctcttagaaatctc

SEQ ID NO: 529084 - DNA, 15 bp, Homo sapiens
ctcttagaaatctct

SEQ ID NO: 529085 - DNA, 15 bp, Homo sapiens
tcttagaaatctctc

SEQ ID NO: 529086 - DNA, 15 bp, Homo sapiens
cttagaaatctctct

SEQ ID NO: 529087 - DNA, 15 bp, Homo sapiens
ttagaaatctctctc

SEQ ID NO: 529088 - DNA, 15 bp, Homo sapiens
tagaaatctctctca

SEQ ID NO: 529089 - DNA, 15 bp, Homo sapiens
agaaatctctctcag

SEQ ID NO: 529090 - DNA, 15 bp, Homo sapiens
gaaatctctctcagg

SEQ ID NO: 529091 - DNA, 15 bp, Homo sapiens
aaatctctctcagga

SEQ ID NO: 529092 - DNA, 15 bp, Homo sapiens
aatctctctcaggaa

SEQ ID NO: 529093 - DNA, 15 bp, Homo sapiens
atctctctcaggaaa

SEQ ID NO: 529094 - DNA, 15 bp, Homo sapiens
tctctctcaggaaaa

SEQ ID NO: 529095 - DNA, 15 bp, Homo sapiens
ctctctcaggaaaag

SEQ ID NO: 529096 - DNA, 15 bp, Homo sapiens
tctctcaggaaaaga

SEQ ID NO: 529097 - DNA, 15 bp, Homo sapiens
ctctcaggaaaagaa

SEQ ID NO: 529098 - DNA, 15 bp, Homo sapiens
tctcaggaaaagaag

SEQ ID NO: 529099 - DNA, 15 bp, Homo sapiens
ctcaggaaaagaagg

SEQ ID NO: 529100 - DNA, 15 bp, Homo sapiens
tcaggaaaagaagga

SEQ ID NO: 529101 - DNA, 15 bp, Homo sapiens
caggaaaagaaggaa

SEQ ID NO: 529102 - DNA, 15 bp, Homo sapiens
aggaaaagaaggaag

SEQ ID NO: 529103 - DNA, 15 bp, Homo sapiens
ggaaaagaaggaagg

SEQ ID NO: 529104 - DNA, 15 bp, Homo sapiens
gaaaagaaggaagga

SEQ ID NO: 529105 - DNA, 15 bp, Homo sapiens
aaaagaaggaaggaa

SEQ ID NO: 529106 - DNA, 15 bp, Homo sapiens
aaagaaggaaggaag

SEQ ID NO: 529107 - DNA, 15 bp, Homo sapiens
aagaaggaaggaagg

SEQ ID NO: 529108 - DNA, 15 bp, Homo sapiens
agaaggaaggaagga

SEQ ID NO: 529109 - DNA, 15 bp, Homo sapiens
gaaggaaggaaggaa

SEQ ID NO: 529110 - DNA, 15 bp, Homo sapiens
aaggaaggaaggaag

SEQ ID NO: 529111 - DNA, 15 bp, Homo sapiens
aggaaggaaggaagg

SEQ ID NO: 529112 - DNA, 15 bp, Homo sapiens
ggaaggaaggaagga

SEQ ID NO: 529113 - DNA, 15 bp, Homo sapiens
aaggaaggaaggaaa

SEQ ID NO: 529114 - DNA, 15 bp, Homo sapiens
aggaaggaaggaaag

SEQ ID NO: 529115 - DNA, 15 bp, Homo sapiens
ggaaggaaggaaaga

SEQ ID NO: 529116 - DNA, 15 bp, Homo sapiens
gaaggaaggaaagaa

SEQ ID NO: 529117 - DNA, 15 bp, Homo sapiens
aaggaaggaaagaag

SEQ ID NO: 529118 - DNA, 15 bp, Homo sapiens
aggaaggaaagaagg

SEQ ID NO: 529119 - DNA, 15 bp, Homo sapiens
ggaaggaaagaagga

SEQ ID NO: 529120 - DNA, 15 bp, Homo sapiens
gaaggaaagaaggag

SEQ ID NO: 529121 - DNA, 15 bp, Homo sapiens
aaggaaagaaggagg

SEQ ID NO: 529122 - DNA, 15 bp, Homo sapiens
aggaaagaaggaggg

SEQ ID NO: 529123 - DNA, 15 bp, Homo sapiens
ggaaagaaggaggga

SEQ ID NO: 529124 - DNA, 15 bp, Homo sapiens
gaaagaaggagggaa

SEQ ID NO: 529125 - DNA, 15 bp, Homo sapiens
aaagaaggagggaag

SEQ ID NO: 529126 - DNA, 15 bp, Homo sapiens
aagaaggagggaagg

SEQ ID NO: 529127 - DNA, 15 bp, Homo sapiens
agaaggagggaagga

SEQ ID NO: 529128 - DNA, 15 bp, Homo sapiens
gaaggagggaaggag

SEQ ID NO: 529129 - DNA, 15 bp, Homo sapiens
aaggagggaaggagg

SEQ ID NO: 529130 - DNA, 15 bp, Homo sapiens
aggagggaaggaggg

SEQ ID NO: 529131 - DNA, 15 bp, Homo sapiens
ggagggaaggaggga

SEQ ID NO: 529132 - DNA, 15 bp, Homo sapiens
gagggaaggagggaa

SEQ ID NO: 529133 - DNA, 15 bp, Homo sapiens
agggaaggagggaag

SEQ ID NO: 529134 - DNA, 15 bp, Homo sapiens
gggaaggagggaagg

SEQ ID NO: 529135 - DNA, 15 bp, Homo sapiens
ggaaggagggaagga

SEQ ID NO: 529136 - DNA, 15 bp, Homo sapiens
gggaaggagggaaga

SEQ ID NO: 529137 - DNA, 15 bp, Homo sapiens
ggaaggagggaagaa

SEQ ID NO: 529138 - DNA, 15 bp, Homo sapiens
gaaggagggaagaag

SEQ ID NO: 529139 - DNA, 15 bp, Homo sapiens
aaggagggaagaaga

SEQ ID NO: 529140 - DNA, 15 bp, Homo sapiens
aggagggaagaagaa

SEQ ID NO: 529141 - DNA, 15 bp, Homo sapiens
ggagggaagaagaaa

SEQ ID NO: 529142 - DNA, 15 bp, Homo sapiens
gagggaagaagaaaa

SEQ ID NO: 529143 - DNA, 15 bp, Homo sapiens
agggaagaagaaaag

SEQ ID NO: 529144 - DNA, 15 bp, Homo sapiens
gggaagaagaaaagg

SEQ ID NO: 529145 - DNA, 15 bp, Homo sapiens
ggaagaagaaaagga

SEQ ID NO: 529146 - DNA, 15 bp, Homo sapiens
gaagaagaaaaggag

SEQ ID NO: 529147 - DNA, 15 bp, Homo sapiens
aagaagaaaaggagg

SEQ ID NO: 529148 - DNA, 15 bp, Homo sapiens
agaagaaaaggaggg

SEQ ID NO: 529149 - DNA, 15 bp, Homo sapiens
gaagaaaaggaggga

SEQ ID NO: 529150 - DNA, 15 bp, Homo sapiens
aagaaaaggagggag

SEQ ID NO: 529151 - DNA, 15 bp, Homo sapiens
agaaaaggagggagg

SEQ ID NO: 529152 - DNA, 15 bp, Homo sapiens
gaaaaggagggaggg

SEQ ID NO: 529153 - DNA, 15 bp, Homo sapiens
aaaaggagggaggga

SEQ ID NO: 529154 - DNA, 15 bp, Homo sapiens
aaaggagggagggag

SEQ ID NO: 529155 - DNA, 15 bp, Homo sapiens
aaggagggagggagg

SEQ ID NO: 529156 - DNA, 15 bp, Homo sapiens
aggagggagggaggg

SEQ ID NO: 529157 - DNA, 15 bp, Homo sapiens
ggagggagggaggga

SEQ ID NO: 529158 - DNA, 15 bp, Homo sapiens
gagggagggagggag

SEQ ID NO: 529159 - DNA, 15 bp, Homo sapiens
agggagggagggagg

SEQ ID NO: 529160 - DNA, 15 bp, Homo sapiens
gggagggagggaggg

SEQ ID NO: 529161 - DNA, 15 bp, Homo sapiens
gagggagggagggaa

SEQ ID NO: 529162 - DNA, 15 bp, Homo sapiens
agggagggagggaag

SEQ ID NO: 529163 - DNA, 15 bp, Homo sapiens
gggagggagggaaga

SEQ ID NO: 529164 - DNA, 15 bp, Homo sapiens
ggagggagggaagaa

SEQ ID NO: 529165 - DNA, 15 bp, Homo sapiens
gagggagggaagaag

SEQ ID NO: 529166 - DNA, 15 bp, Homo sapiens
agggagggaagaagg

SEQ ID NO: 529167 - DNA, 15 bp, Homo sapiens
gggagggaagaaggg

SEQ ID NO: 529168 - DNA, 15 bp, Homo sapiens
ggagggaagaagggg

SEQ ID NO: 529169 - DNA, 15 bp, Homo sapiens
gagggaagaagggga

SEQ ID NO: 529170 - DNA, 15 bp, Homo sapiens
agggaagaaggggaa

SEQ ID NO: 529171 - DNA, 15 bp, Homo sapiens
gggaagaaggggaaa

SEQ ID NO: 529172 - DNA, 15 bp, Homo sapiens
ggaagaaggggaaaa

SEQ ID NO: 529173 - DNA, 15 bp, Homo sapiens
gaagaaggggaaaaa

SEQ ID NO: 529174 - DNA, 15 bp, Homo sapiens
aagaaggggaaaaac

SEQ ID NO: 529175 - DNA, 15 bp, Homo sapiens
agaaggggaaaaact

SEQ ID NO: 529176 - DNA, 15 bp, Homo sapiens
gaaggggaaaaactg

SEQ ID NO: 529177 - DNA, 15 bp, Homo sapiens
aaggggaaaaactga

SEQ ID NO: 529178 - DNA, 15 bp, Homo sapiens
aggggaaaaactgag

SEQ ID NO: 529179 - DNA, 15 bp, Homo sapiens
ggggaaaaactgagg

SEQ ID NO: 529180 - DNA, 15 bp, Homo sapiens
gggaaaaactgagga

SEQ ID NO: 529181 - DNA, 15 bp, Homo sapiens
ggaaaaactgaggat

SEQ ID NO: 529182 - DNA, 15 bp, Homo sapiens
gaaaaactgaggatg

SEQ ID NO: 529183 - DNA, 15 bp, Homo sapiens
aaaaactgaggatgg

SEQ ID NO: 529184 - DNA, 15 bp, Homo sapiens
aaaactgaggatggt

SEQ ID NO: 529185 - DNA, 15 bp, Homo sapiens
aaactgaggatggtg

SEQ ID NO: 529186 - DNA, 15 bp, Homo sapiens
aactgaggatggtga

SEQ ID NO: 529187 - DNA, 15 bp, Homo sapiens
actgaggatggtgag

SEQ ID NO: 529188 - DNA, 15 bp, Homo sapiens
ctgaggatggtgaga

SEQ ID NO: 529189 - DNA, 15 bp, Homo sapiens
tgaggatggtgagat

SEQ ID NO: 529190 - DNA, 15 bp, Homo sapiens
gaggatggtgagata

SEQ ID NO: 529191 - DNA, 15 bp, Homo sapiens
aggatggtgagatat

SEQ ID NO: 529192 - DNA, 15 bp, Homo sapiens
ggatggtgagatatt

SEQ ID NO: 529193 - DNA, 15 bp, Homo sapiens
gatggtgagatattc

SEQ ID NO: 529194 - DNA, 15 bp, Homo sapiens
atggtgagatattcg

SEQ ID NO: 529195 - DNA, 15 bp, Homo sapiens
tggtgagatattcga

SEQ ID NO: 529196 - DNA, 15 bp, Homo sapiens
ggtgagatattcgac

SEQ ID NO: 529197 - DNA, 15 bp, Homo sapiens
gtgagatattcgaca

SEQ ID NO: 529198 - DNA, 15 bp, Homo sapiens
tgagatattcgacaa

SEQ ID NO: 529199 - DNA, 15 bp, Homo sapiens
gagatattcgacaat

SEQ ID NO: 529200 - DNA, 15 bp, Homo sapiens
agatattcgacaatt

SEQ ID NO: 529201 - DNA, 15 bp, Homo sapiens
gatattcgacaattt

SEQ ID NO: 529202 - DNA, 15 bp, Homo sapiens
atattcgacaatttg

SEQ ID NO: 529203 - DNA, 15 bp, Homo sapiens
tattcgacaatttgt

SEQ ID NO: 529204 - DNA, 15 bp, Homo sapiens
attcgacaatttgtt

SEQ ID NO: 529205 - DNA, 15 bp, Homo sapiens
ttcgacaatttgttt

SEQ ID NO: 529206 - DNA, 15 bp, Homo sapiens
tcgacaatttgttta

SEQ ID NO: 529207 - DNA, 15 bp, Homo sapiens
cgacaatttgtttag

SEQ ID NO: 529208 - DNA, 15 bp, Homo sapiens
gacaatttgtttagt

SEQ ID NO: 529209 - DNA, 15 bp, Homo sapiens
acaatttgtttagtc

SEQ ID NO: 529210 - DNA, 15 bp, Homo sapiens
caatttgtttagtcc

SEQ ID NO: 529211 - DNA, 15 bp, Homo sapiens
aatttgtttagtcct

SEQ ID NO: 529212 - DNA, 15 bp, Homo sapiens
atttgtttagtcctc

SEQ ID NO: 529213 - DNA, 15 bp, Homo sapiens
tttgtttagtcctca

SEQ ID NO: 529214 - DNA, 15 bp, Homo sapiens
ttgtttagtcctcac

SEQ ID NO: 529215 - DNA, 15 bp, Homo sapiens
tgtttagtcctcact

SEQ ID NO: 529216 - DNA, 15 bp, Homo sapiens
gtttagtcctcactt

SEQ ID NO: 529217 - DNA, 15 bp, Homo sapiens
tttagtcctcacttt

SEQ ID NO: 529218 - DNA, 15 bp, Homo sapiens
ttagtcctcactttc

SEQ ID NO: 529219 - DNA, 15 bp, Homo sapiens
tagtcctcactttct

SEQ ID NO: 529220 - DNA, 15 bp, Homo sapiens
agtcctcactttctc

SEQ ID NO: 529221 - DNA, 15 bp, Homo sapiens
gtcctcactttctct

SEQ ID NO: 529222 - DNA, 15 bp, Homo sapiens
tcctcactttctcta

SEQ ID NO: 529223 - DNA, 15 bp, Homo sapiens
cctcactttctctaa

SEQ ID NO: 529224 - DNA, 15 bp, Homo sapiens
ctcactttctctaat

SEQ ID NO: 529225 - DNA, 15 bp, Homo sapiens
tcactttctctaata

SEQ ID NO: 529226 - DNA, 15 bp, Homo sapiens
cactttctctaatac

SEQ ID NO: 529227 - DNA, 15 bp, Homo sapiens
actttctctaataca

SEQ ID NO: 529228 - DNA, 15 bp, Homo sapiens
ctttctctaatacag

SEQ ID NO: 529229 - DNA, 15 bp, Homo sapiens
tttctctaatacagc

SEQ ID NO: 529230 - DNA, 15 bp, Homo sapiens
ttctctaatacagct

SEQ ID NO: 529231 - DNA, 15 bp, Homo sapiens
tctctaatacagctg

SEQ ID NO: 529232 - DNA, 15 bp, Homo sapiens
ctctaatacagctga

SEQ ID NO: 529233 - DNA, 15 bp, Homo sapiens
tctaatacagctgaa

SEQ ID NO: 529234 - DNA, 15 bp, Homo sapiens
ctaatacagctgaag

SEQ ID NO: 529235 - DNA, 15 bp, Homo sapiens
taatacagctgaagc

SEQ ID NO: 529236 - DNA, 15 bp, Homo sapiens
aatacagctgaagcc

SEQ ID NO: 529237 - DNA, 15 bp, Homo sapiens
atacagctgaagcct

SEQ ID NO: 529238 - DNA, 15 bp, Homo sapiens
tacagctgaagcctt

SEQ ID NO: 529239 - DNA, 15 bp, Homo sapiens
acagctgaagccttc

SEQ ID NO: 529240 - DNA, 15 bp, Homo sapiens
cagctgaagccttca

SEQ ID NO: 529241 - DNA, 15 bp, Homo sapiens
agctgaagccttcat

SEQ ID NO: 529242 - DNA, 15 bp, Homo sapiens
gctgaagccttcatt

SEQ ID NO: 529243 - DNA, 15 bp, Homo sapiens
ctgaagccttcattt

SEQ ID NO: 529244 - DNA, 15 bp, Homo sapiens
tgaagccttcatttt

SEQ ID NO: 529245 - DNA, 15 bp, Homo sapiens
gaagccttcattttc

SEQ ID NO: 529246 - DNA, 15 bp, Homo sapiens
aagccttcattttca

SEQ ID NO: 529247 - DNA, 15 bp, Homo sapiens
agccttcattttcaa

SEQ ID NO: 529248 - DNA, 15 bp, Homo sapiens
gccttcattttcaag

SEQ ID NO: 529249 - DNA, 15 bp, Homo sapiens
ccttcattttcaagt

SEQ ID NO: 529250 - DNA, 15 bp, Homo sapiens
cttcattttcaagtc

SEQ ID NO: 529251 - DNA, 15 bp, Homo sapiens
ttcattttcaagtct

SEQ ID NO: 529252 - DNA, 15 bp, Homo sapiens
tcattttcaagtctc

SEQ ID NO: 529253 - DNA, 15 bp, Homo sapiens
cattttcaagtctcc

SEQ ID NO: 529254 - DNA, 15 bp, Homo sapiens
attttcaagtctcca

SEQ ID NO: 529255 - DNA, 15 bp, Homo sapiens
ttttcaagtctccag

SEQ ID NO: 529256 - DNA, 15 bp, Homo sapiens
tttcaagtctccagg

SEQ ID NO: 529257 - DNA, 15 bp, Homo sapiens
ttcaagtctccaggt

SEQ ID NO: 529258 - DNA, 15 bp, Homo sapiens
tcaagtctccaggtt

SEQ ID NO: 529259 - DNA, 15 bp, Homo sapiens
caagtctccaggttt

SEQ ID NO: 529260 - DNA, 15 bp, Homo sapiens
aagtctccaggtttc

SEQ ID NO: 529261 - DNA, 15 bp, Homo sapiens
agtctccaggtttcc

SEQ ID NO: 529262 - DNA, 15 bp, Homo sapiens
gtctccaggtttcct

SEQ ID NO: 529263 - DNA, 15 bp, Homo sapiens
tctccaggtttccta

SEQ ID NO: 529264 - DNA, 15 bp, Homo sapiens
ctccaggtttcctaa

SEQ ID NO: 529265 - DNA, 15 bp, Homo sapiens
tccaggtttcctaaa

SEQ ID NO: 529266 - DNA, 15 bp, Homo sapiens
ccaggtttcctaaag

SEQ ID NO: 529267 - DNA, 15 bp, Homo sapiens
caggtttcctaaaga

SEQ ID NO: 529268 - DNA, 15 bp, Homo sapiens
aggtttcctaaagat

SEQ ID NO: 529269 - DNA, 15 bp, Homo sapiens
ggtttcctaaagata

SEQ ID NO: 529270 - DNA, 15 bp, Homo sapiens
gtttcctaaagataa

SEQ ID NO: 529271 - DNA, 15 bp, Homo sapiens
tttcctaaagataat

SEQ ID NO: 529272 - DNA, 15 bp, Homo sapiens
ttcctaaagataatc

SEQ ID NO: 529273 - DNA, 15 bp, Homo sapiens
tcctaaagataatct

SEQ ID NO: 529274 - DNA, 15 bp, Homo sapiens
cctaaagataatcta

SEQ ID NO: 529275 - DNA, 15 bp, Homo sapiens
ctaaagataatctat

SEQ ID NO: 529276 - DNA, 15 bp, Homo sapiens
taaagataatctatc

SEQ ID NO: 529277 - DNA, 15 bp, Homo sapiens
aaagataatctatct

SEQ ID NO: 529278 - DNA, 15 bp, Homo sapiens
aagataatctatctt

SEQ ID NO: 529279 - DNA, 15 bp, Homo sapiens
agataatctatcttc

SEQ ID NO: 529280 - DNA, 15 bp, Homo sapiens
gataatctatcttca

SEQ ID NO: 529281 - DNA, 15 bp, Homo sapiens
ataatctatcttcaa

SEQ ID NO: 529282 - DNA, 15 bp, Homo sapiens
taatctatcttcaaa

SEQ ID NO: 529283 - DNA, 15 bp, Homo sapiens
aatctatcttcaaaa

SEQ ID NO: 529284 - DNA, 15 bp, Homo sapiens
atctatcttcaaaat

SEQ ID NO: 529285 - DNA, 15 bp, Homo sapiens
tctatcttcaaaatg

SEQ ID NO: 529286 - DNA, 15 bp, Homo sapiens
ctatcttcaaaatgc

SEQ ID NO: 529287 - DNA, 15 bp, Homo sapiens
tatcttcaaaatgca

SEQ ID NO: 529288 - DNA, 15 bp, Homo sapiens
atcttcaaaatgcat

SEQ ID NO: 529289 - DNA, 15 bp, Homo sapiens
tcttcaaaatgcatg

SEQ ID NO: 529290 - DNA, 15 bp, Homo sapiens
cttcaaaatgcatga

SEQ ID NO: 529291 - DNA, 15 bp, Homo sapiens
ttcaaaatgcatgac

SEQ ID NO: 529292 - DNA, 15 bp, Homo sapiens
tcaaaatgcatgaca

SEQ ID NO: 529293 - DNA, 15 bp, Homo sapiens
caaaatgcatgacat

SEQ ID NO: 529294 - DNA, 15 bp, Homo sapiens
aaaatgcatgacatc

SEQ ID NO: 529295 - DNA, 15 bp, Homo sapiens
aaatgcatgacatca

SEQ ID NO: 529296 - DNA, 15 bp, Homo sapiens
aatgcatgacatcag

SEQ ID NO: 529297 - DNA, 15 bp, Homo sapiens
atgcatgacatcagg

SEQ ID NO: 529298 - DNA, 15 bp, Homo sapiens
tgcatgacatcaggg

SEQ ID NO: 529299 - DNA, 15 bp, Homo sapiens
gcatgacatcagggt

SEQ ID NO: 529300 - DNA, 15 bp, Homo sapiens
catgacatcagggta

SEQ ID NO: 529301 - DNA, 15 bp, Homo sapiens
atgacatcagggtag

SEQ ID NO: 529302 - DNA, 15 bp, Homo sapiens
tgacatcagggtagg

SEQ ID NO: 529303 - DNA, 15 bp, Homo sapiens
gacatcagggtagga

SEQ ID NO: 529304 - DNA, 15 bp, Homo sapiens
acatcagggtaggat

SEQ ID NO: 529305 - DNA, 15 bp, Homo sapiens
catcagggtaggatg

SEQ ID NO: 529306 - DNA, 15 bp, Homo sapiens
atcagggtaggatgc

SEQ ID NO: 529307 - DNA, 15 bp, Homo sapiens
tcagggtaggatgca

SEQ ID NO: 529308 - DNA, 15 bp, Homo sapiens
cagggtaggatgcat

SEQ ID NO: 529309 - DNA, 15 bp, Homo sapiens
agggtaggatgcatt

SEQ ID NO: 529310 - DNA, 15 bp, Homo sapiens
gggtaggatgcatta

SEQ ID NO: 529311 - DNA, 15 bp, Homo sapiens
ggtaggatgcattat

SEQ ID NO: 529312 - DNA, 15 bp, Homo sapiens
gtaggatgcattatc

SEQ ID NO: 529313 - DNA, 15 bp, Homo sapiens
taggatgcattatct

SEQ ID NO: 529314 - DNA, 15 bp, Homo sapiens
aggatgcattatctg

SEQ ID NO: 529315 - DNA, 15 bp, Homo sapiens
ggatgcattatctga

SEQ ID NO: 529316 - DNA, 15 bp, Homo sapiens
gatgcattatctgat

SEQ ID NO: 529317 - DNA, 15 bp, Homo sapiens
atgcattatctgata

SEQ ID NO: 529318 - DNA, 15 bp, Homo sapiens
tgcattatctgatat

SEQ ID NO: 529319 - DNA, 15 bp, Homo sapiens
gcattatctgatata

SEQ ID NO: 529320 - DNA, 15 bp, Homo sapiens
cattatctgatatag

SEQ ID NO: 529321 - DNA, 15 bp, Homo sapiens
attatctgatatagg

SEQ ID NO: 529322 - DNA, 15 bp, Homo sapiens
ttatctgatatagga

SEQ ID NO: 529323 - DNA, 15 bp, Homo sapiens
tatctgatataggag

SEQ ID NO: 529324 - DNA, 15 bp, Homo sapiens
atctgatataggagc

SEQ ID NO: 529325 - DNA, 15 bp, Homo sapiens
tctgatataggagca

SEQ ID NO: 529326 - DNA, 15 bp, Homo sapiens
ctgatataggagcat

SEQ ID NO: 529327 - DNA, 15 bp, Homo sapiens
tgatataggagcatc

SEQ ID NO: 529328 - DNA, 15 bp, Homo sapiens
gatataggagcatct

SEQ ID NO: 529329 - DNA, 15 bp, Homo sapiens
atataggagcatcta

SEQ ID NO: 529330 - DNA, 15 bp, Homo sapiens
tataggagcatctac

SEQ ID NO: 529331 - DNA, 15 bp, Homo sapiens
ataggagcatctact

SEQ ID NO: 529332 - DNA, 15 bp, Homo sapiens
taggagcatctactg

SEQ ID NO: 529333 - DNA, 15 bp, Homo sapiens
aggagcatctactgt

SEQ ID NO: 529334 - DNA, 15 bp, Homo sapiens
ggagcatctactgtt

SEQ ID NO: 529335 - DNA, 15 bp, Homo sapiens
gagcatctactgttt

SEQ ID NO: 529336 - DNA, 15 bp, Homo sapiens
agcatctactgtttt

SEQ ID NO: 529337 - DNA, 15 bp, Homo sapiens
gcatctactgtttta

SEQ ID NO: 529338 - DNA, 15 bp, Homo sapiens
catctactgttttat

SEQ ID NO: 529339 - DNA, 15 bp, Homo sapiens
atctactgttttatt

SEQ ID NO: 529340 - DNA, 15 bp, Homo sapiens
tctactgttttattt

SEQ ID NO: 529341 - DNA, 15 bp, Homo sapiens
ctactgttttatttg

SEQ ID NO: 529342 - DNA, 15 bp, Homo sapiens
tactgttttatttgc

SEQ ID NO: 529343 - DNA, 15 bp, Homo sapiens
actgttttatttgca

SEQ ID NO: 529344 - DNA, 15 bp, Homo sapiens
ctgttttatttgcag

SEQ ID NO: 529345 - DNA, 15 bp, Homo sapiens
tgttttatttgcagt

SEQ ID NO: 529346 - DNA, 15 bp, Homo sapiens
gttttatttgcagtt

SEQ ID NO: 529347 - DNA, 15 bp, Homo sapiens
ttttatttgcagttg

SEQ ID NO: 529348 - DNA, 15 bp, Homo sapiens
tttatttgcagttgt

SEQ ID NO: 529349 - DNA, 15 bp, Homo sapiens
ttatttgcagttgtt

SEQ ID NO: 529350 - DNA, 15 bp, Homo sapiens
tatttgcagttgttt

SEQ ID NO: 529351 - DNA, 15 bp, Homo sapiens
atttgcagttgtttg

SEQ ID NO: 529352 - DNA, 15 bp, Homo sapiens
tttgcagttgtttgg

SEQ ID NO: 529353 - DNA, 15 bp, Homo sapiens
ttgcagttgtttgga

SEQ ID NO: 529354 - DNA, 15 bp, Homo sapiens
tgcagttgtttggaa

SEQ ID NO: 529355 - DNA, 15 bp, Homo sapiens
gcagttgtttggaat

SEQ ID NO: 529356 - DNA, 15 bp, Homo sapiens
cagttgtttggaata

SEQ ID NO: 529357 - DNA, 15 bp, Homo sapiens
agttgtttggaatag

SEQ ID NO: 529358 - DNA, 15 bp, Homo sapiens
gttgtttggaatagc

SEQ ID NO: 529359 - DNA, 15 bp, Homo sapiens
ttgtttggaatagca

SEQ ID NO: 529360 - DNA, 15 bp, Homo sapiens
tgtttggaatagcat

SEQ ID NO: 529361 - DNA, 15 bp, Homo sapiens
gtttggaatagcatg

SEQ ID NO: 529362 - DNA, 15 bp, Homo sapiens
tttggaatagcatgc

SEQ ID NO: 529363 - DNA, 15 bp, Homo sapiens
ttggaatagcatgct

SEQ ID NO: 529364 - DNA, 15 bp, Homo sapiens
tggaatagcatgctt

SEQ ID NO: 529365 - DNA, 15 bp, Homo sapiens
ggaatagcatgcttg

SEQ ID NO: 529366 - DNA, 15 bp, Homo sapiens
gaatagcatgcttgt

SEQ ID NO: 529367 - DNA, 15 bp, Homo sapiens
aatagcatgcttgtt

SEQ ID NO: 529368 - DNA, 15 bp, Homo sapiens
atagcatgcttgttc

SEQ ID NO: 529369 - DNA, 15 bp, Homo sapiens
tagcatgcttgttcc

SEQ ID NO: 529370 - DNA, 15 bp, Homo sapiens
agcatgcttgttcct

SEQ ID NO: 529371 - DNA, 15 bp, Homo sapiens
gcatgcttgttcctt

SEQ ID NO: 529372 - DNA, 15 bp, Homo sapiens
catgcttgttccttt

SEQ ID NO: 529373 - DNA, 15 bp, Homo sapiens
atgcttgttcctttg

SEQ ID NO: 529374 - DNA, 15 bp, Homo sapiens
tgcttgttcctttgg

SEQ ID NO: 529375 - DNA, 15 bp, Homo sapiens
gcttgttcctttggg

SEQ ID NO: 529376 - DNA, 15 bp, Homo sapiens
cttgttcctttggga

SEQ ID NO: 529377 - DNA, 15 bp, Homo sapiens
ttgttcctttgggag

SEQ ID NO: 529378 - DNA, 15 bp, Homo sapiens
tgttcctttgggagg

SEQ ID NO: 529379 - DNA, 15 bp, Homo sapiens
gttcctttgggaggg

SEQ ID NO: 529380 - DNA, 15 bp, Homo sapiens
ttcctttgggaggga

SEQ ID NO: 529381 - DNA, 15 bp, Homo sapiens
tcctttgggagggaa

SEQ ID NO: 529382 - DNA, 15 bp, Homo sapiens
cctttgggagggaag

SEQ ID NO: 529383 - DNA, 15 bp, Homo sapiens
ctttgggagggaaga

SEQ ID NO: 529384 - DNA, 15 bp, Homo sapiens
tttgggagggaagat

SEQ ID NO: 529385 - DNA, 15 bp, Homo sapiens
ttgggagggaagatg

SEQ ID NO: 529386 - DNA, 15 bp, Homo sapiens
tgggagggaagatga

SEQ ID NO: 529387 - DNA, 15 bp, Homo sapiens
gggagggaagatgat

SEQ ID NO: 529388 - DNA, 15 bp, Homo sapiens
ggagggaagatgatc

SEQ ID NO: 529389 - DNA, 15 bp, Homo sapiens
gagggaagatgatct

SEQ ID NO: 529390 - DNA, 15 bp, Homo sapiens
agggaagatgatctc

SEQ ID NO: 529391 - DNA, 15 bp, Homo sapiens
gggaagatgatctcc

SEQ ID NO: 529392 - DNA, 15 bp, Homo sapiens
ggaagatgatctccc

SEQ ID NO: 529393 - DNA, 15 bp, Homo sapiens
gaagatgatctcccc

SEQ ID NO: 529394 - DNA, 15 bp, Homo sapiens
aagatgatctcccca

SEQ ID NO: 529395 - DNA, 15 bp, Homo sapiens
agatgatctccccaa

SEQ ID NO: 529396 - DNA, 15 bp, Homo sapiens
gatgatctccccaag

SEQ ID NO: 529397 - DNA, 15 bp, Homo sapiens
atgatctccccaaga

SEQ ID NO: 529398 - DNA, 15 bp, Homo sapiens
tgatctccccaagaa

SEQ ID NO: 529399 - DNA, 15 bp, Homo sapiens
gatctccccaagaat

SEQ ID NO: 529400 - DNA, 15 bp, Homo sapiens
atctccccaagaatc

SEQ ID NO: 529401 - DNA, 15 bp, Homo sapiens
tctccccaagaatcc

SEQ ID NO: 529402 - DNA, 15 bp, Homo sapiens
ctccccaagaatccc

SEQ ID NO: 529403 - DNA, 15 bp, Homo sapiens
tccccaagaatccca

SEQ ID NO: 529404 - DNA, 15 bp, Homo sapiens
ccccaagaatcccaa

SEQ ID NO: 529405 - DNA, 15 bp, Homo sapiens
cccaagaatcccaag

SEQ ID NO: 529406 - DNA, 15 bp, Homo sapiens
ccaagaatcccaaga

SEQ ID NO: 529407 - DNA, 15 bp, Homo sapiens
caagaatcccaagaa

SEQ ID NO: 529408 - DNA, 15 bp, Homo sapiens
aagaatcccaagaac

SEQ ID NO: 529409 - DNA, 15 bp, Homo sapiens
agaatcccaagaaca

SEQ ID NO: 529410 - DNA, 15 bp, Homo sapiens
gaatcccaagaacaa

SEQ ID NO: 529411 - DNA, 15 bp, Homo sapiens
aatcccaagaacaaa

SEQ ID NO: 529412 - DNA, 15 bp, Homo sapiens
atcccaagaacaaaa

SEQ ID NO: 529413 - DNA, 15 bp, Homo sapiens
tcccaagaacaaaaa

SEQ ID NO: 529414 - DNA, 15 bp, Homo sapiens
cccaagaacaaaaat

SEQ ID NO: 529415 - DNA, 15 bp, Homo sapiens
ccaagaacaaaaatc

SEQ ID NO: 529416 - DNA, 15 bp, Homo sapiens
caagaacaaaaatct

SEQ ID NO: 529417 - DNA, 15 bp, Homo sapiens
aagaacaaaaatctg

SEQ ID NO: 529418 - DNA, 15 bp, Homo sapiens
agaacaaaaatctgg

SEQ ID NO: 529419 - DNA, 15 bp, Homo sapiens
gaacaaaaatctggg

SEQ ID NO: 529420 - DNA, 15 bp, Homo sapiens
aacaaaaatctgggg

SEQ ID NO: 529421 - DNA, 15 bp, Homo sapiens
acaaaaatctggggc

SEQ ID NO: 529422 - DNA, 15 bp, Homo sapiens
caaaaatctggggca

SEQ ID NO: 529423 - DNA, 15 bp, Homo sapiens
aaaaatctggggcag

SEQ ID NO: 529424 - DNA, 15 bp, Homo sapiens
aaaatctggggcagt

SEQ ID NO: 529425 - DNA, 15 bp, Homo sapiens
aaatctggggcagtg

SEQ ID NO: 529426 - DNA, 15 bp, Homo sapiens
aatctggggcagtgg

SEQ ID NO: 529427 - DNA, 15 bp, Homo sapiens
atctggggcagtggc

SEQ ID NO: 529428 - DNA, 15 bp, Homo sapiens
tctggggcagtggct

SEQ ID NO: 529429 - DNA, 15 bp, Homo sapiens
ctggggcagtggctc

SEQ ID NO: 529430 - DNA, 15 bp, Homo sapiens
tggggcagtggctct

SEQ ID NO: 529431 - DNA, 15 bp, Homo sapiens
ggggcagtggctcta

SEQ ID NO: 529432 - DNA, 15 bp, Homo sapiens
gggcagtggctctag

SEQ ID NO: 529433 - DNA, 15 bp, Homo sapiens
ggcagtggctctagt

SEQ ID NO: 529434 - DNA, 15 bp, Homo sapiens
gcagtggctctagtc

SEQ ID NO: 529435 - DNA, 15 bp, Homo sapiens
cagtggctctagtcc

SEQ ID NO: 529436 - DNA, 15 bp, Homo sapiens
agtggctctagtcct

SEQ ID NO: 529437 - DNA, 15 bp, Homo sapiens
gtggctctagtcctt

SEQ ID NO: 529438 - DNA, 15 bp, Homo sapiens
tggctctagtccttc

SEQ ID NO: 529439 - DNA, 15 bp, Homo sapiens
ggctctagtccttca

SEQ ID NO: 529440 - DNA, 15 bp, Homo sapiens
gctctagtccttcag

SEQ ID NO: 529441 - DNA, 15 bp, Homo sapiens
ctctagtccttcagg

SEQ ID NO: 529442 - DNA, 15 bp, Homo sapiens
tctagtccttcaggc

SEQ ID NO: 529443 - DNA, 15 bp, Homo sapiens
ctagtccttcaggcc

SEQ ID NO: 529444 - DNA, 15 bp, Homo sapiens
tagtccttcaggccc

SEQ ID NO: 529445 - DNA, 15 bp, Homo sapiens
agtccttcaggcccc

SEQ ID NO: 529446 - DNA, 15 bp, Homo sapiens
gtccttcaggccccc

SEQ ID NO: 529447 - DNA, 15 bp, Homo sapiens
tccttcaggcccccc

SEQ ID NO: 529448 - DNA, 15 bp, Homo sapiens
ccttcaggccccccc

SEQ ID NO: 529449 - DNA, 15 bp, Homo sapiens
cttcaggcccccccc

SEQ ID NO: 529450 - DNA, 15 bp, Homo sapiens
ttcaggccccccccc

SEQ ID NO: 529451 - DNA, 15 bp, Homo sapiens
tcaggccccccccct

SEQ ID NO: 529452 - DNA, 15 bp, Homo sapiens
caggccccccccctc

SEQ ID NO: 529453 - DNA, 15 bp, Homo sapiens
aggccccccccctcc

SEQ ID NO: 529454 - DNA, 15 bp, Homo sapiens
ggccccccccctccc

SEQ ID NO: 529455 - DNA, 15 bp, Homo sapiens
gccccccccctcccc

SEQ ID NO: 529456 - DNA, 15 bp, Homo sapiens
ccccccccctcccca

SEQ ID NO: 529457 - DNA, 15 bp, Homo sapiens
cccccccctccccag

SEQ ID NO: 529458 - DNA, 15 bp, Homo sapiens
ccccccctccccagg

SEQ ID NO: 529459 - DNA, 15 bp, Homo sapiens
cccccctccccaggc

SEQ ID NO: 529460 - DNA, 15 bp, Homo sapiens
ccccctccccaggcc

SEQ ID NO: 529461 - DNA, 15 bp, Homo sapiens
cccctccccaggccc

SEQ ID NO: 529462 - DNA, 15 bp, Homo sapiens
ccctccccaggcccc

SEQ ID NO: 529463 - DNA, 15 bp, Homo sapiens
cctccccaggccccc

SEQ ID NO: 529464 - DNA, 15 bp, Homo sapiens
ctccccaggccccct

SEQ ID NO: 529465 - DNA, 15 bp, Homo sapiens
tccccaggccccctg

SEQ ID NO: 529466 - DNA, 15 bp, Homo sapiens
ccccaggccccctgt

SEQ ID NO: 529467 - DNA, 15 bp, Homo sapiens
cccaggccccctgtc

SEQ ID NO: 529468 - DNA, 15 bp, Homo sapiens
ccaggccccctgtct

SEQ ID NO: 529469 - DNA, 15 bp, Homo sapiens
caggccccctgtctt

SEQ ID NO: 529470 - DNA, 15 bp, Homo sapiens
aggccccctgtcttg

SEQ ID NO: 529471 - DNA, 15 bp, Homo sapiens
ggccccctgtcttgt

SEQ ID NO: 529472 - DNA, 15 bp, Homo sapiens
gccccctgtcttgtt

SEQ ID NO: 529473 - DNA, 15 bp, Homo sapiens
ccccctgtcttgttt

SEQ ID NO: 529474 - DNA, 15 bp, Homo sapiens
cccctgtcttgtttt

SEQ ID NO: 529475 - DNA, 15 bp, Homo sapiens
ccctgtcttgttttc

SEQ ID NO: 529476 - DNA, 15 bp, Homo sapiens
cctgtcttgttttcc

SEQ ID NO: 529477 - DNA, 15 bp, Homo sapiens
ctgtcttgttttcct

SEQ ID NO: 529478 - DNA, 15 bp, Homo sapiens
tgtcttgttttccta

SEQ ID NO: 529479 - DNA, 15 bp, Homo sapiens
gtcttgttttcctaa

SEQ ID NO: 529480 - DNA, 15 bp, Homo sapiens
tcttgttttcctaag

SEQ ID NO: 529481 - DNA, 15 bp, Homo sapiens
cttgttttcctaagc

SEQ ID NO: 529482 - DNA, 15 bp, Homo sapiens
ttgttttcctaagca

SEQ ID NO: 529483 - DNA, 15 bp, Homo sapiens
tgttttcctaagcaa

SEQ ID NO: 529484 - DNA, 15 bp, Homo sapiens
gttttcctaagcaat

SEQ ID NO: 529485 - DNA, 15 bp, Homo sapiens
ttttcctaagcaatg

SEQ ID NO: 529486 - DNA, 15 bp, Homo sapiens
tttcctaagcaatgg

SEQ ID NO: 529487 - DNA, 15 bp, Homo sapiens
ttcctaagcaatggt

SEQ ID NO: 529488 - DNA, 15 bp, Homo sapiens
tcctaagcaatggtc

SEQ ID NO: 529489 - DNA, 15 bp, Homo sapiens
cctaagcaatggtca

SEQ ID NO: 529490 - DNA, 15 bp, Homo sapiens
ctaagcaatggtcag

SEQ ID NO: 529491 - DNA, 15 bp, Homo sapiens
taagcaatggtcagg

SEQ ID NO: 529492 - DNA, 15 bp, Homo sapiens
aagcaatggtcagga

SEQ ID NO: 529493 - DNA, 15 bp, Homo sapiens
agcaatggtcaggaa

SEQ ID NO: 529494 - DNA, 15 bp, Homo sapiens
gcaatggtcaggaat

SEQ ID NO: 529495 - DNA, 15 bp, Homo sapiens
caatggtcaggaatg

SEQ ID NO: 529496 - DNA, 15 bp, Homo sapiens
aatggtcaggaatgt

SEQ ID NO: 529497 - DNA, 15 bp, Homo sapiens
atggtcaggaatgtg

SEQ ID NO: 529498 - DNA, 15 bp, Homo sapiens
tggtcaggaatgtgg

SEQ ID NO: 529499 - DNA, 15 bp, Homo sapiens
ggtcaggaatgtggg

SEQ ID NO: 529500 - DNA, 15 bp, Homo sapiens
gtcaggaatgtgggg

SEQ ID NO: 529501 - DNA, 15 bp, Homo sapiens
tcaggaatgtggggc

SEQ ID NO: 529502 - DNA, 15 bp, Homo sapiens
caggaatgtggggcg

SEQ ID NO: 529503 - DNA, 15 bp, Homo sapiens
aggaatgtggggcgg

SEQ ID NO: 529504 - DNA, 15 bp, Homo sapiens
ggaatgtggggcggg

SEQ ID NO: 529505 - DNA, 15 bp, Homo sapiens
gaatgtggggcgggg

SEQ ID NO: 529506 - DNA, 15 bp, Homo sapiens
aatgtggggcggggg

SEQ ID NO: 529507 - DNA, 15 bp, Homo sapiens
atgtggggcgggggg

SEQ ID NO: 529508 - DNA, 15 bp, Homo sapiens
tgtggggcggggggc

SEQ ID NO: 529509 - DNA, 15 bp, Homo sapiens
gtggggcggggggca

SEQ ID NO: 529510 - DNA, 15 bp, Homo sapiens
tggggcggggggcag

SEQ ID NO: 529511 - DNA, 15 bp, Homo sapiens
ggggcggggggcagc

SEQ ID NO: 529512 - DNA, 15 bp, Homo sapiens
gggcggggggcagcc

SEQ ID NO: 529513 - DNA, 15 bp, Homo sapiens
ggcggggggcagccc

SEQ ID NO: 529514 - DNA, 15 bp, Homo sapiens
gcggggggcagccca

SEQ ID NO: 529515 - DNA, 15 bp, Homo sapiens
cggggggcagcccag

SEQ ID NO: 529516 - DNA, 15 bp, Homo sapiens
ggggggcagcccagc

SEQ ID NO: 529517 - DNA, 15 bp, Homo sapiens
gggggcagcccagcc

SEQ ID NO: 529518 - DNA, 15 bp, Homo sapiens
ggggcagcccagccc

SEQ ID NO: 529519 - DNA, 15 bp, Homo sapiens
gggcagcccagccct

SEQ ID NO: 529520 - DNA, 15 bp, Homo sapiens
ggcagcccagccctc

SEQ ID NO: 529521 - DNA, 15 bp, Homo sapiens
gcagcccagccctct

SEQ ID NO: 529522 - DNA, 15 bp, Homo sapiens
cagcccagccctctg

SEQ ID NO: 529523 - DNA, 15 bp, Homo sapiens
agcccagccctctgt

SEQ ID NO: 529524 - DNA, 15 bp, Homo sapiens
gcccagccctctgtg

SEQ ID NO: 529525 - DNA, 15 bp, Homo sapiens
cccagccctctgtgc

SEQ ID NO: 529526 - DNA, 15 bp, Homo sapiens
ccagccctctgtgcc

SEQ ID NO: 529527 - DNA, 15 bp, Homo sapiens
cagccctctgtgccc

SEQ ID NO: 529528 - DNA, 15 bp, Homo sapiens
agccctctgtgccca

SEQ ID NO: 529529 - DNA, 15 bp, Homo sapiens
gccctctgtgcccag

SEQ ID NO: 529530 - DNA, 15 bp, Homo sapiens
ccctctgtgcccagc

SEQ ID NO: 529531 - DNA, 15 bp, Homo sapiens
cctctgtgcccagcc

SEQ ID NO: 529532 - DNA, 15 bp, Homo sapiens
ctctgtgcccagccc

SEQ ID NO: 529533 - DNA, 15 bp, Homo sapiens
tctgtgcccagccca

SEQ ID NO: 529534 - DNA, 15 bp, Homo sapiens
ctgtgcccagcccag

SEQ ID NO: 529535 - DNA, 15 bp, Homo sapiens
tgtgcccagcccagg

SEQ ID NO: 529536 - DNA, 15 bp, Homo sapiens
gtgcccagcccaggc

SEQ ID NO: 529537 - DNA, 15 bp, Homo sapiens
tgcccagcccaggca

SEQ ID NO: 529538 - DNA, 15 bp, Homo sapiens
gcccagcccaggcag

SEQ ID NO: 529539 - DNA, 15 bp, Homo sapiens
cccagcccaggcagc

SEQ ID NO: 529540 - DNA, 15 bp, Homo sapiens
ccagcccaggcagcc

SEQ ID NO: 529541 - DNA, 15 bp, Homo sapiens
cagcccaggcagccc

SEQ ID NO: 529542 - DNA, 15 bp, Homo sapiens
agcccaggcagcccc

SEQ ID NO: 529543 - DNA, 15 bp, Homo sapiens
gcccaggcagcccca

SEQ ID NO: 529544 - DNA, 15 bp, Homo sapiens
cccaggcagccccag

SEQ ID NO: 529545 - DNA, 15 bp, Homo sapiens
ccaggcagccccagt

SEQ ID NO: 529546 - DNA, 15 bp, Homo sapiens
caggcagccccagtc

SEQ ID NO: 529547 - DNA, 15 bp, Homo sapiens
aggcagccccagtca

SEQ ID NO: 529548 - DNA, 15 bp, Homo sapiens
ggcagccccagtcac

SEQ ID NO: 529549 - DNA, 15 bp, Homo sapiens
gcagccccagtcaca

SEQ ID NO: 529550 - DNA, 15 bp, Homo sapiens
cagccccagtcacag

SEQ ID NO: 529551 - DNA, 15 bp, Homo sapiens
agccccagtcacagt

SEQ ID NO: 529552 - DNA, 15 bp, Homo sapiens
gccccagtcacagtc

SEQ ID NO: 529553 - DNA, 15 bp, Homo sapiens
ccccagtcacagtcc

SEQ ID NO: 529554 - DNA, 15 bp, Homo sapiens
cccagtcacagtccc

SEQ ID NO: 529555 - DNA, 15 bp, Homo sapiens
ccagtcacagtccca

SEQ ID NO: 529556 - DNA, 15 bp, Homo sapiens
cagtcacagtcccag

SEQ ID NO: 529557 - DNA, 15 bp, Homo sapiens
agtcacagtcccagg

SEQ ID NO: 529558 - DNA, 15 bp, Homo sapiens
gtcacagtcccaggc

SEQ ID NO: 529559 - DNA, 15 bp, Homo sapiens
tcacagtcccaggct

SEQ ID NO: 529560 - DNA, 15 bp, Homo sapiens
cacagtcccaggctg

SEQ ID NO: 529561 - DNA, 15 bp, Homo sapiens
acagtcccaggctgg

SEQ ID NO: 529562 - DNA, 15 bp, Homo sapiens
cagtcccaggctggc

SEQ ID NO: 529563 - DNA, 15 bp, Homo sapiens
agtcccaggctggcc

SEQ ID NO: 529564 - DNA, 15 bp, Homo sapiens
gtcccaggctggcct

SEQ ID NO: 529565 - DNA, 15 bp, Homo sapiens
tcccaggctggcctt

SEQ ID NO: 529566 - DNA, 15 bp, Homo sapiens
cccaggctggccttt

SEQ ID NO: 529567 - DNA, 15 bp, Homo sapiens
ccaggctggcctttc

SEQ ID NO: 529568 - DNA, 15 bp, Homo sapiens
caggctggcctttca

SEQ ID NO: 529569 - DNA, 15 bp, Homo sapiens
aggctggcctttcac

SEQ ID NO: 529570 - DNA, 15 bp, Homo sapiens
ggctggcctttcacc

SEQ ID NO: 529571 - DNA, 15 bp, Homo sapiens
gctggcctttcacct

SEQ ID NO: 529572 - DNA, 15 bp, Homo sapiens
ctggcctttcacctc

SEQ ID NO: 529573 - DNA, 15 bp, Homo sapiens
tggcctttcacctca

SEQ ID NO: 529574 - DNA, 15 bp, Homo sapiens
ggcctttcacctcat

SEQ ID NO: 529575 - DNA, 15 bp, Homo sapiens
gcctttcacctcatt

SEQ ID NO: 529576 - DNA, 15 bp, Homo sapiens
cctttcacctcattg

SEQ ID NO: 529577 - DNA, 15 bp, Homo sapiens
ctttcacctcattgc

SEQ ID NO: 529578 - DNA, 15 bp, Homo sapiens
tttcacctcattgct

SEQ ID NO: 529579 - DNA, 15 bp, Homo sapiens
ttcacctcattgctc

SEQ ID NO: 529580 - DNA, 15 bp, Homo sapiens
tcacctcattgctct

SEQ ID NO: 529581 - DNA, 15 bp, Homo sapiens
cacctcattgctctc

SEQ ID NO: 529582 - DNA, 15 bp, Homo sapiens
acctcattgctctcc

SEQ ID NO: 529583 - DNA, 15 bp, Homo sapiens
cctcattgctctccc

SEQ ID NO: 529584 - DNA, 15 bp, Homo sapiens
ctcattgctctcccg

SEQ ID NO: 529585 - DNA, 15 bp, Homo sapiens
tcattgctctcccgg

SEQ ID NO: 529586 - DNA, 15 bp, Homo sapiens
cattgctctcccggc

SEQ ID NO: 529587 - DNA, 15 bp, Homo sapiens
attgctctcccggct

SEQ ID NO: 529588 - DNA, 15 bp, Homo sapiens
ttgctctcccggctg

SEQ ID NO: 529589 - DNA, 15 bp, Homo sapiens
tgctctcccggctgc

SEQ ID NO: 529590 - DNA, 15 bp, Homo sapiens
gctctcccggctgct

SEQ ID NO: 529591 - DNA, 15 bp, Homo sapiens
ctctcccggctgctc

SEQ ID NO: 529592 - DNA, 15 bp, Homo sapiens
tctcccggctgctct

SEQ ID NO: 529593 - DNA, 15 bp, Homo sapiens
ctcccggctgctctt

SEQ ID NO: 529594 - DNA, 15 bp, Homo sapiens
tcccggctgctctta

SEQ ID NO: 529595 - DNA, 15 bp, Homo sapiens
cccggctgctcttat

SEQ ID NO: 529596 - DNA, 15 bp, Homo sapiens
ccggctgctcttatt

SEQ ID NO: 529597 - DNA, 15 bp, Homo sapiens
cggctgctcttatta

SEQ ID NO: 529598 - DNA, 15 bp, Homo sapiens
ggctgctcttattaa

SEQ ID NO: 529599 - DNA, 15 bp, Homo sapiens
gctgctcttattaag

SEQ ID NO: 529600 - DNA, 15 bp, Homo sapiens
ctgctcttattaagc

SEQ ID NO: 529601 - DNA, 15 bp, Homo sapiens
tgctcttattaagca

SEQ ID NO: 529602 - DNA, 15 bp, Homo sapiens
gctcttattaagcag

SEQ ID NO: 529603 - DNA, 15 bp, Homo sapiens
ctcttattaagcagc

SEQ ID NO: 529604 - DNA, 15 bp, Homo sapiens
tcttattaagcagca

SEQ ID NO: 529605 - DNA, 15 bp, Homo sapiens
cttattaagcagcaa

SEQ ID NO: 529606 - DNA, 15 bp, Homo sapiens
ttattaagcagcaaa

SEQ ID NO: 529607 - DNA, 15 bp, Homo sapiens
tattaagcagcaaaa

SEQ ID NO: 529608 - DNA, 15 bp, Homo sapiens
attaagcagcaaaat

SEQ ID NO: 529609 - DNA, 15 bp, Homo sapiens
ttaagcagcaaaatg

SEQ ID NO: 529610 - DNA, 15 bp, Homo sapiens
taagcagcaaaatgt

SEQ ID NO: 529611 - DNA, 15 bp, Homo sapiens
aagcagcaaaatgtt

SEQ ID NO: 529612 - DNA, 15 bp, Homo sapiens
agcagcaaaatgttt

SEQ ID NO: 529613 - DNA, 15 bp, Homo sapiens
gcagcaaaatgtttc

SEQ ID NO: 529614 - DNA, 15 bp, Homo sapiens
cagcaaaatgtttca

SEQ ID NO: 529615 - DNA, 15 bp, Homo sapiens
agcaaaatgtttcaa

SEQ ID NO: 529616 - DNA, 15 bp, Homo sapiens
gcaaaatgtttcaat

SEQ ID NO: 529617 - DNA, 15 bp, Homo sapiens
caaaatgtttcaata

SEQ ID NO: 529618 - DNA, 15 bp, Homo sapiens
aaaatgtttcaatat

SEQ ID NO: 529619 - DNA, 15 bp, Homo sapiens
aaatgtttcaatatg

SEQ ID NO: 529620 - DNA, 15 bp, Homo sapiens
aatgtttcaatatgt

SEQ ID NO: 529621 - DNA, 15 bp, Homo sapiens
atgtttcaatatgtg

SEQ ID NO: 529622 - DNA, 15 bp, Homo sapiens
tgtttcaatatgtgg

SEQ ID NO: 529623 - DNA, 15 bp, Homo sapiens
gtttcaatatgtgga

SEQ ID NO: 529624 - DNA, 15 bp, Homo sapiens
tttcaatatgtggaa

SEQ ID NO: 529625 - DNA, 15 bp, Homo sapiens
ttcaatatgtggaac

SEQ ID NO: 529626 - DNA, 15 bp, Homo sapiens
tcaatatgtggaact

SEQ ID NO: 529627 - DNA, 15 bp, Homo sapiens
caatatgtggaactc

SEQ ID NO: 529628 - DNA, 15 bp, Homo sapiens
aatatgtggaactct

SEQ ID NO: 529629 - DNA, 15 bp, Homo sapiens
atatgtggaactctg

SEQ ID NO: 529630 - DNA, 15 bp, Homo sapiens
tatgtggaactctgg

SEQ ID NO: 529631 - DNA, 15 bp, Homo sapiens
atgtggaactctggg

SEQ ID NO: 529632 - DNA, 15 bp, Homo sapiens
tgtggaactctgggg

SEQ ID NO: 529633 - DNA, 15 bp, Homo sapiens
gtggaactctggggg

SEQ ID NO: 529634 - DNA, 15 bp, Homo sapiens
tggaactctggggga

SEQ ID NO: 529635 - DNA, 15 bp, Homo sapiens
ggaactctgggggag

SEQ ID NO: 529636 - DNA, 15 bp, Homo sapiens
gaactctgggggagg

SEQ ID NO: 529637 - DNA, 15 bp, Homo sapiens
aactctgggggaggg

SEQ ID NO: 529638 - DNA, 15 bp, Homo sapiens
actctgggggaggga

SEQ ID NO: 529639 - DNA, 15 bp, Homo sapiens
ctctgggggagggat

SEQ ID NO: 529640 - DNA, 15 bp, Homo sapiens
tctgggggagggatg

SEQ ID NO: 529641 - DNA, 15 bp, Homo sapiens
ctgggggagggatgg

SEQ ID NO: 529642 - DNA, 15 bp, Homo sapiens
tgggggagggatggg

SEQ ID NO: 529643 - DNA, 15 bp, Homo sapiens
gggggagggatggga

SEQ ID NO: 529644 - DNA, 15 bp, Homo sapiens
ggggagggatgggag

SEQ ID NO: 529645 - DNA, 15 bp, Homo sapiens
gggagggatgggaga

SEQ ID NO: 529646 - DNA, 15 bp, Homo sapiens
ggagggatgggagag

SEQ ID NO: 529647 - DNA, 15 bp, Homo sapiens
gagggatgggagaga

SEQ ID NO: 529648 - DNA, 15 bp, Homo sapiens
agggatgggagagaa

SEQ ID NO: 529649 - DNA, 15 bp, Homo sapiens
gggatgggagagaaa

SEQ ID NO: 529650 - DNA, 15 bp, Homo sapiens
ggatgggagagaaaa

SEQ ID NO: 529651 - DNA, 15 bp, Homo sapiens
gatgggagagaaaaa

SEQ ID NO: 529652 - DNA, 15 bp, Homo sapiens
atgggagagaaaaat

SEQ ID NO: 529653 - DNA, 15 bp, Homo sapiens
tgggagagaaaaatc

SEQ ID NO: 529654 - DNA, 15 bp, Homo sapiens
gggagagaaaaatcg

SEQ ID NO: 529655 - DNA, 15 bp, Homo sapiens
ggagagaaaaatcgg

SEQ ID NO: 529656 - DNA, 15 bp, Homo sapiens
gagagaaaaatcggg

SEQ ID NO: 529657 - DNA, 15 bp, Homo sapiens
agagaaaaatcggga

SEQ ID NO: 529658 - DNA, 15 bp, Homo sapiens
gagaaaaatcgggat

SEQ ID NO: 529659 - DNA, 15 bp, Homo sapiens
agaaaaatcgggata

SEQ ID NO: 529660 - DNA, 15 bp, Homo sapiens
gaaaaatcgggatat

SEQ ID NO: 529661 - DNA, 15 bp, Homo sapiens
aaaaatcgggatatt

SEQ ID NO: 529662 - DNA, 15 bp, Homo sapiens
aaaatcgggatattg

SEQ ID NO: 529663 - DNA, 15 bp, Homo sapiens
aaatcgggatattgt

SEQ ID NO: 529664 - DNA, 15 bp, Homo sapiens
aatcgggatattgtt

SEQ ID NO: 529665 - DNA, 15 bp, Homo sapiens
atcgggatattgttg

SEQ ID NO: 529666 - DNA, 15 bp, Homo sapiens
tcgggatattgttga

SEQ ID NO: 529667 - DNA, 15 bp, Homo sapiens
cgggatattgttgag

SEQ ID NO: 529668 - DNA, 15 bp, Homo sapiens
gggatattgttgaga

SEQ ID NO: 529669 - DNA, 15 bp, Homo sapiens
ggatattgttgagaa

SEQ ID NO: 529670 - DNA, 15 bp, Homo sapiens
gatattgttgagaag

SEQ ID NO: 529671 - DNA, 15 bp, Homo sapiens
atattgttgagaagg

SEQ ID NO: 529672 - DNA, 15 bp, Homo sapiens
tattgttgagaagga

SEQ ID NO: 529673 - DNA, 15 bp, Homo sapiens
attgttgagaaggaa

SEQ ID NO: 529674 - DNA, 15 bp, Homo sapiens
ttgttgagaaggaaa

SEQ ID NO: 529675 - DNA, 15 bp, Homo sapiens
tgttgagaaggaaat

SEQ ID NO: 529676 - DNA, 15 bp, Homo sapiens
gttgagaaggaaata

SEQ ID NO: 529677 - DNA, 15 bp, Homo sapiens
ttgagaaggaaataa

SEQ ID NO: 529678 - DNA, 15 bp, Homo sapiens
tgagaaggaaataac

SEQ ID NO: 529679 - DNA, 15 bp, Homo sapiens
gagaaggaaataacg

SEQ ID NO: 529680 - DNA, 15 bp, Homo sapiens
agaaggaaataacga

SEQ ID NO: 529681 - DNA, 15 bp, Homo sapiens
gaaggaaataacgaa

SEQ ID NO: 529682 - DNA, 15 bp, Homo sapiens
aaggaaataacgaat

SEQ ID NO: 529683 - DNA, 15 bp, Homo sapiens
aggaaataacgaata

SEQ ID NO: 529684 - DNA, 15 bp, Homo sapiens
ggaaataacgaataa

SEQ ID NO: 529685 - DNA, 15 bp, Homo sapiens
gaaataacgaataac

SEQ ID NO: 529686 - DNA, 15 bp, Homo sapiens
aaataacgaataacc

SEQ ID NO: 529687 - DNA, 15 bp, Homo sapiens
aataacgaataaccc

SEQ ID NO: 529688 - DNA, 15 bp, Homo sapiens
ataacgaataaccct

SEQ ID NO: 529689 - DNA, 15 bp, Homo sapiens
taacgaataaccctg

SEQ ID NO: 529690 - DNA, 15 bp, Homo sapiens
aacgaataaccctgc

SEQ ID NO: 529691 - DNA, 15 bp, Homo sapiens
acgaataaccctgcc

SEQ ID NO: 529692 - DNA, 15 bp, Homo sapiens
cgaataaccctgccg

SEQ ID NO: 529693 - DNA, 15 bp, Homo sapiens
gaataaccctgccgc

SEQ ID NO: 529694 - DNA, 15 bp, Homo sapiens
aataaccctgccgcc

SEQ ID NO: 529695 - DNA, 15 bp, Homo sapiens
ataaccctgccgcca

SEQ ID NO: 529696 - DNA, 15 bp, Homo sapiens
taaccctgccgccag

SEQ ID NO: 529697 - DNA, 15 bp, Homo sapiens
aaccctgccgccagc

SEQ ID NO: 529698 - DNA, 15 bp, Homo sapiens
accctgccgccagcc

SEQ ID NO: 529699 - DNA, 15 bp, Homo sapiens
ccctgccgccagccc

SEQ ID NO: 529700 - DNA, 15 bp, Homo sapiens
cctgccgccagccct

SEQ ID NO: 529701 - DNA, 15 bp, Homo sapiens
ctgccgccagccctc

SEQ ID NO: 529702 - DNA, 15 bp, Homo sapiens
tgccgccagccctca

SEQ ID NO: 529703 - DNA, 15 bp, Homo sapiens
gccgccagccctcat

SEQ ID NO: 529704 - DNA, 15 bp, Homo sapiens
ccgccagccctcata

SEQ ID NO: 529705 - DNA, 15 bp, Homo sapiens
cgccagccctcatac

SEQ ID NO: 529706 - DNA, 15 bp, Homo sapiens
gccagccctcatacc

SEQ ID NO: 529707 - DNA, 15 bp, Homo sapiens
ccagccctcataccc

SEQ ID NO: 529708 - DNA, 15 bp, Homo sapiens
cagccctcatacccc

SEQ ID NO: 529709 - DNA, 15 bp, Homo sapiens
agccctcataccccc

SEQ ID NO: 529710 - DNA, 15 bp, Homo sapiens
gccctcatacccccc

SEQ ID NO: 529711 - DNA, 15 bp, Homo sapiens
ccctcatacccccca

SEQ ID NO: 529712 - DNA, 15 bp, Homo sapiens
cctcataccccccac

SEQ ID NO: 529713 - DNA, 15 bp, Homo sapiens
ctcataccccccacg

SEQ ID NO: 529714 - DNA, 15 bp, Homo sapiens
tcataccccccacgt

SEQ ID NO: 529715 - DNA, 15 bp, Homo sapiens
cataccccccacgtg

SEQ ID NO: 529716 - DNA, 15 bp, Homo sapiens
ataccccccacgtgg

SEQ ID NO: 529717 - DNA, 15 bp, Homo sapiens
taccccccacgtggg

SEQ ID NO: 529718 - DNA, 15 bp, Homo sapiens
accccccacgtgggg

SEQ ID NO: 529719 - DNA, 15 bp, Homo sapiens
ccccccacgtgggga

SEQ ID NO: 529720 - DNA, 15 bp, Homo sapiens
cccccacgtggggag

SEQ ID NO: 529721 - DNA, 15 bp, Homo sapiens
ccccacgtggggaga

SEQ ID NO: 529722 - DNA, 15 bp, Homo sapiens
cccacgtggggagat

SEQ ID NO: 529723 - DNA, 15 bp, Homo sapiens
ccacgtggggagatc

SEQ ID NO: 529724 - DNA, 15 bp, Homo sapiens
cacgtggggagatct

SEQ ID NO: 529725 - DNA, 15 bp, Homo sapiens
acgtggggagatctg

SEQ ID NO: 529726 - DNA, 15 bp, Homo sapiens
cgtggggagatctgg

SEQ ID NO: 529727 - DNA, 15 bp, Homo sapiens
gtggggagatctgga

SEQ ID NO: 529728 - DNA, 15 bp, Homo sapiens
tggggagatctggat

SEQ ID NO: 529729 - DNA, 15 bp, Homo sapiens
ggggagatctggatg

SEQ ID NO: 529730 - DNA, 15 bp, Homo sapiens
gggagatctggatga

SEQ ID NO: 529731 - DNA, 15 bp, Homo sapiens
ggagatctggatgat

SEQ ID NO: 529732 - DNA, 15 bp, Homo sapiens
gagatctggatgata

SEQ ID NO: 529733 - DNA, 15 bp, Homo sapiens
agatctggatgatag

SEQ ID NO: 529734 - DNA, 15 bp, Homo sapiens
gatctggatgatagg

SEQ ID NO: 529735 - DNA, 15 bp, Homo sapiens
atctggatgataggt

SEQ ID NO: 529736 - DNA, 15 bp, Homo sapiens
tctggatgataggtg

SEQ ID NO: 529737 - DNA, 15 bp, Homo sapiens
ctggatgataggtgt

SEQ ID NO: 529738 - DNA, 15 bp, Homo sapiens
tggatgataggtgtg

SEQ ID NO: 529739 - DNA, 15 bp, Homo sapiens
ggatgataggtgtgt

SEQ ID NO: 529740 - DNA, 15 bp, Homo sapiens
gatgataggtgtgtt

SEQ ID NO: 529741 - DNA, 15 bp, Homo sapiens
atgataggtgtgttt

SEQ ID NO: 529742 - DNA, 15 bp, Homo sapiens
tgataggtgtgtttt

SEQ ID NO: 529743 - DNA, 15 bp, Homo sapiens
gataggtgtgttttc

SEQ ID NO: 529744 - DNA, 15 bp, Homo sapiens
ataggtgtgttttct

SEQ ID NO: 529745 - DNA, 15 bp, Homo sapiens
taggtgtgttttctc

SEQ ID NO: 529746 - DNA, 15 bp, Homo sapiens
aggtgtgttttctcc

SEQ ID NO: 529747 - DNA, 15 bp, Homo sapiens
ggtgtgttttctcct

SEQ ID NO: 529748 - DNA, 15 bp, Homo sapiens
gtgtgttttctcctg

SEQ ID NO: 529749 - DNA, 15 bp, Homo sapiens
tgtgttttctcctga

SEQ ID NO: 529750 - DNA, 15 bp, Homo sapiens
gtgttttctcctgaa

SEQ ID NO: 529751 - DNA, 15 bp, Homo sapiens
tgttttctcctgaaa

SEQ ID NO: 529752 - DNA, 15 bp, Homo sapiens
gttttctcctgaaat

SEQ ID NO: 529753 - DNA, 15 bp, Homo sapiens
ttttctcctgaaatg

SEQ ID NO: 529754 - DNA, 15 bp, Homo sapiens
tttctcctgaaatgg

SEQ ID NO: 529755 - DNA, 15 bp, Homo sapiens
ttctcctgaaatgga

SEQ ID NO: 529756 - DNA, 15 bp, Homo sapiens
tctcctgaaatggaa

SEQ ID NO: 529757 - DNA, 15 bp, Homo sapiens
ctcctgaaatggaat

SEQ ID NO: 529758 - DNA, 15 bp, Homo sapiens
tcctgaaatggaatc

SEQ ID NO: 529759 - DNA, 15 bp, Homo sapiens
cctgaaatggaatcc

SEQ ID NO: 529760 - DNA, 15 bp, Homo sapiens
ctgaaatggaatcct

SEQ ID NO: 529761 - DNA, 15 bp, Homo sapiens
tgaaatggaatccta

SEQ ID NO: 529762 - DNA, 15 bp, Homo sapiens
gaaatggaatcctac

SEQ ID NO: 529763 - DNA, 15 bp, Homo sapiens
aaatggaatcctact

SEQ ID NO: 529764 - DNA, 15 bp, Homo sapiens
aatggaatcctacta

SEQ ID NO: 529765 - DNA, 15 bp, Homo sapiens
atggaatcctactaa

SEQ ID NO: 529766 - DNA, 15 bp, Homo sapiens
tggaatcctactaat

SEQ ID NO: 529767 - DNA, 15 bp, Homo sapiens
ggaatcctactaatt

SEQ ID NO: 529768 - DNA, 15 bp, Homo sapiens
gaatcctactaattg

SEQ ID NO: 529769 - DNA, 15 bp, Homo sapiens
aatcctactaattgc

SEQ ID NO: 529770 - DNA, 15 bp, Homo sapiens
atcctactaattgcc

SEQ ID NO: 529771 - DNA, 15 bp, Homo sapiens
tcctactaattgcct

SEQ ID NO: 529772 - DNA, 15 bp, Homo sapiens
cctactaattgcctt

SEQ ID NO: 529773 - DNA, 15 bp, Homo sapiens
ctactaattgccttt

SEQ ID NO: 529774 - DNA, 15 bp, Homo sapiens
tactaattgcctttt

SEQ ID NO: 529775 - DNA, 15 bp, Homo sapiens
actaattgccttttg

SEQ ID NO: 529776 - DNA, 15 bp, Homo sapiens
ctaattgccttttgg

SEQ ID NO: 529777 - DNA, 15 bp, Homo sapiens
taattgccttttggt

SEQ ID NO: 529778 - DNA, 15 bp, Homo sapiens
aattgccttttggtc

SEQ ID NO: 529779 - DNA, 15 bp, Homo sapiens
attgccttttggtca

SEQ ID NO: 529780 - DNA, 15 bp, Homo sapiens
ttgccttttggtcag

SEQ ID NO: 529781 - DNA, 15 bp, Homo sapiens
tgccttttggtcaga

SEQ ID NO: 529782 - DNA, 15 bp, Homo sapiens
gccttttggtcagaa

SEQ ID NO: 529783 - DNA, 15 bp, Homo sapiens
ccttttggtcagaaa

SEQ ID NO: 529784 - DNA, 15 bp, Homo sapiens
cttttggtcagaaat

SEQ ID NO: 529785 - DNA, 15 bp, Homo sapiens
ttttggtcagaaatg

SEQ ID NO: 529786 - DNA, 15 bp, Homo sapiens
tttggtcagaaatgt

SEQ ID NO: 529787 - DNA, 15 bp, Homo sapiens
ttggtcagaaatgtc

SEQ ID NO: 529788 - DNA, 15 bp, Homo sapiens
tggtcagaaatgtcc

SEQ ID NO: 529789 - DNA, 15 bp, Homo sapiens
ggtcagaaatgtcca

SEQ ID NO: 529790 - DNA, 15 bp, Homo sapiens
gtcagaaatgtccag

SEQ ID NO: 529791 - DNA, 15 bp, Homo sapiens
tcagaaatgtccaga

SEQ ID NO: 529792 - DNA, 15 bp, Homo sapiens
cagaaatgtccagag

SEQ ID NO: 529793 - DNA, 15 bp, Homo sapiens
agaaatgtccagagc

SEQ ID NO: 529794 - DNA, 15 bp, Homo sapiens
gaaatgtccagagcc

SEQ ID NO: 529795 - DNA, 15 bp, Homo sapiens
aaatgtccagagcca

SEQ ID NO: 529796 - DNA, 15 bp, Homo sapiens
aatgtccagagccaa

SEQ ID NO: 529797 - DNA, 15 bp, Homo sapiens
atgtccagagccaat

SEQ ID NO: 529798 - DNA, 15 bp, Homo sapiens
tgtccagagccaatt

SEQ ID NO: 529799 - DNA, 15 bp, Homo sapiens
gtccagagccaattg

SEQ ID NO: 529800 - DNA, 15 bp, Homo sapiens
tccagagccaattgg

SEQ ID NO: 529801 - DNA, 15 bp, Homo sapiens
ccagagccaattggg

SEQ ID NO: 529802 - DNA, 15 bp, Homo sapiens
cagagccaattgggg

SEQ ID NO: 529803 - DNA, 15 bp, Homo sapiens
agagccaattgggga

SEQ ID NO: 529804 - DNA, 15 bp, Homo sapiens
gagccaattggggaa

SEQ ID NO: 529805 - DNA, 15 bp, Homo sapiens
agccaattggggaag

SEQ ID NO: 529806 - DNA, 15 bp, Homo sapiens
gccaattggggaagg

SEQ ID NO: 529807 - DNA, 15 bp, Homo sapiens
ccaattggggaaggg

SEQ ID NO: 529808 - DNA, 15 bp, Homo sapiens
caattggggaagggg

SEQ ID NO: 529809 - DNA, 15 bp, Homo sapiens
aattggggaaggggg

SEQ ID NO: 529810 - DNA, 15 bp, Homo sapiens
attggggaagggggt

SEQ ID NO: 529811 - DNA, 15 bp, Homo sapiens
ttggggaagggggta

SEQ ID NO: 529812 - DNA, 15 bp, Homo sapiens
tggggaagggggtag

SEQ ID NO: 529813 - DNA, 15 bp, Homo sapiens
ggggaagggggtagg

SEQ ID NO: 529814 - DNA, 15 bp, Homo sapiens
gggaagggggtaggg

SEQ ID NO: 529815 - DNA, 15 bp, Homo sapiens
ggaagggggtagggg

SEQ ID NO: 529816 - DNA, 15 bp, Homo sapiens
gaagggggtaggggg

SEQ ID NO: 529817 - DNA, 15 bp, Homo sapiens
aagggggtaggggga

SEQ ID NO: 529818 - DNA, 15 bp, Homo sapiens
agggggtagggggag

SEQ ID NO: 529819 - DNA, 15 bp, Homo sapiens
gggggtagggggagc

SEQ ID NO: 529820 - DNA, 15 bp, Homo sapiens
ggggtagggggagca

SEQ ID NO: 529821 - DNA, 15 bp, Homo sapiens
gggtagggggagcag

SEQ ID NO: 529822 - DNA, 15 bp, Homo sapiens
ggtagggggagcagg

SEQ ID NO: 529823 - DNA, 15 bp, Homo sapiens
gtagggggagcaggt

SEQ ID NO: 529824 - DNA, 15 bp, Homo sapiens
tagggggagcaggta

SEQ ID NO: 529825 - DNA, 15 bp, Homo sapiens
agggggagcaggtac

SEQ ID NO: 529826 - DNA, 15 bp, Homo sapiens
gggggagcaggtact

SEQ ID NO: 529827 - DNA, 15 bp, Homo sapiens
ggggagcaggtacta

SEQ ID NO: 529828 - DNA, 15 bp, Homo sapiens
gggagcaggtactaa

SEQ ID NO: 529829 - DNA, 15 bp, Homo sapiens
ggagcaggtactaaa

SEQ ID NO: 529830 - DNA, 15 bp, Homo sapiens
gagcaggtactaaat

SEQ ID NO: 529831 - DNA, 15 bp, Homo sapiens
agcaggtactaaata

SEQ ID NO: 529832 - DNA, 15 bp, Homo sapiens
gcaggtactaaataa

SEQ ID NO: 529833 - DNA, 15 bp, Homo sapiens
caggtactaaataaa

SEQ ID NO: 529834 - DNA, 15 bp, Homo sapiens
aggtactaaataaat

SEQ ID NO: 529835 - DNA, 15 bp, Homo sapiens
ggtactaaataaatt

SEQ ID NO: 529836 - DNA, 15 bp, Homo sapiens
gtactaaataaattt

SEQ ID NO: 529837 - DNA, 15 bp, Homo sapiens
tactaaataaatttt

SEQ ID NO: 529838 - DNA, 15 bp, Homo sapiens
actaaataaattttc

SEQ ID NO: 529839 - DNA, 15 bp, Homo sapiens
ctaaataaattttct

SEQ ID NO: 529840 - DNA, 15 bp, Homo sapiens
taaataaattttctc

SEQ ID NO: 529841 - DNA, 15 bp, Homo sapiens
aaataaattttctcg

SEQ ID NO: 529842 - DNA, 15 bp, Homo sapiens
aataaattttctcga

SEQ ID NO: 529843 - DNA, 15 bp, Homo sapiens
ataaattttctcgaa

SEQ ID NO: 529844 - DNA, 15 bp, Homo sapiens
taaattttctcgaag

SEQ ID NO: 529845 - DNA, 15 bp, Homo sapiens
aaattttctcgaagg

SEQ ID NO: 529846 - DNA, 15 bp, Homo sapiens
aattttctcgaaggt

SEQ ID NO: 529847 - DNA, 15 bp, Homo sapiens
attttctcgaaggtt

SEQ ID NO: 529848 - DNA, 15 bp, Homo sapiens
ttttctcgaaggttc

SEQ ID NO: 529849 - DNA, 15 bp, Homo sapiens
tttctcgaaggttcc

SEQ ID NO: 529850 - DNA, 15 bp, Homo sapiens
ttctcgaaggttcca

SEQ ID NO: 529851 - DNA, 15 bp, Homo sapiens
tctcgaaggttccag

SEQ ID NO: 529852 - DNA, 15 bp, Homo sapiens
ctcgaaggttccaga

SEQ ID NO: 529853 - DNA, 15 bp, Homo sapiens
tcgaaggttccagag

SEQ ID NO: 529854 - DNA, 15 bp, Homo sapiens
cgaaggttccagagc

SEQ ID NO: 529855 - DNA, 15 bp, Homo sapiens
gaaggttccagagca

SEQ ID NO: 529856 - DNA, 15 bp, Homo sapiens
aaggttccagagcaa

SEQ ID NO: 529857 - DNA, 15 bp, Homo sapiens
aggttccagagcaaa

SEQ ID NO: 529858 - DNA, 15 bp, Homo sapiens
ggttccagagcaaag

SEQ ID NO: 529859 - DNA, 15 bp, Homo sapiens
gttccagagcaaagc

SEQ ID NO: 529860 - DNA, 15 bp, Homo sapiens
ttccagagcaaagca

SEQ ID NO: 529861 - DNA, 15 bp, Homo sapiens
tccagagcaaagcag

SEQ ID NO: 529862 - DNA, 15 bp, Homo sapiens
ccagagcaaagcagt

SEQ ID NO: 529863 - DNA, 15 bp, Homo sapiens
cagagcaaagcagtc

SEQ ID NO: 529864 - DNA, 15 bp, Homo sapiens
agagcaaagcagtca

SEQ ID NO: 529865 - DNA, 15 bp, Homo sapiens
gagcaaagcagtcag

SEQ ID NO: 529866 - DNA, 15 bp, Homo sapiens
agcaaagcagtcagg

SEQ ID NO: 529867 - DNA, 15 bp, Homo sapiens
gcaaagcagtcaggg

SEQ ID NO: 529868 - DNA, 15 bp, Homo sapiens
caaagcagtcaggga

SEQ ID NO: 529869 - DNA, 15 bp, Homo sapiens
aaagcagtcagggat

SEQ ID NO: 529870 - DNA, 15 bp, Homo sapiens
aagcagtcagggatc

SEQ ID NO: 529871 - DNA, 15 bp, Homo sapiens
agcagtcagggatct

SEQ ID NO: 529872 - DNA, 15 bp, Homo sapiens
gcagtcagggatctg

SEQ ID NO: 529873 - DNA, 15 bp, Homo sapiens
cagtcagggatctgg

SEQ ID NO: 529874 - DNA, 15 bp, Homo sapiens
agtcagggatctggg

SEQ ID NO: 529875 - DNA, 15 bp, Homo sapiens
gtcagggatctgggt

SEQ ID NO: 529876 - DNA, 15 bp, Homo sapiens
tcagggatctgggta

SEQ ID NO: 529877 - DNA, 15 bp, Homo sapiens
cagggatctgggtac

SEQ ID NO: 529878 - DNA, 15 bp, Homo sapiens
agggatctgggtacc

SEQ ID NO: 529879 - DNA, 15 bp, Homo sapiens
gggatctgggtaccc

SEQ ID NO: 529880 - DNA, 15 bp, Homo sapiens
ggatctgggtaccca

SEQ ID NO: 529881 - DNA, 15 bp, Homo sapiens
gatctgggtacccaa

SEQ ID NO: 529882 - DNA, 15 bp, Homo sapiens
atctgggtacccaag

SEQ ID NO: 529883 - DNA, 15 bp, Homo sapiens
tctgggtacccaaga

SEQ ID NO: 529884 - DNA, 15 bp, Homo sapiens
ctgggtacccaagaa

SEQ ID NO: 529885 - DNA, 15 bp, Homo sapiens
tgggtacccaagaag

SEQ ID NO: 529886 - DNA, 15 bp, Homo sapiens
gggtacccaagaagg

SEQ ID NO: 529887 - DNA, 15 bp, Homo sapiens
ggtacccaagaagga

SEQ ID NO: 529888 - DNA, 15 bp, Homo sapiens
gtacccaagaaggaa

SEQ ID NO: 529889 - DNA, 15 bp, Homo sapiens
tacccaagaaggaag

SEQ ID NO: 529890 - DNA, 15 bp, Homo sapiens
acccaagaaggaagg

SEQ ID NO: 529891 - DNA, 15 bp, Homo sapiens
cccaagaaggaagga

SEQ ID NO: 529892 - DNA, 15 bp, Homo sapiens
ccaagaaggaaggaa

SEQ ID NO: 529893 - DNA, 15 bp, Homo sapiens
caagaaggaaggaag

SEQ ID NO: 529894 - DNA, 15 bp, Homo sapiens
aagaaggaaggaaga

SEQ ID NO: 529895 - DNA, 15 bp, Homo sapiens
agaaggaaggaagag

SEQ ID NO: 529896 - DNA, 15 bp, Homo sapiens
gaaggaaggaagaga

SEQ ID NO: 529897 - DNA, 15 bp, Homo sapiens
aaggaaggaagagaa

SEQ ID NO: 529898 - DNA, 15 bp, Homo sapiens
aggaaggaagagaac

SEQ ID NO: 529899 - DNA, 15 bp, Homo sapiens
ggaaggaagagaacg

SEQ ID NO: 529900 - DNA, 15 bp, Homo sapiens
gaaggaagagaacgc

SEQ ID NO: 529901 - DNA, 15 bp, Homo sapiens
aaggaagagaacgct

SEQ ID NO: 529902 - DNA, 15 bp, Homo sapiens
aggaagagaacgctt

SEQ ID NO: 529903 - DNA, 15 bp, Homo sapiens
ggaagagaacgcttg

SEQ ID NO: 529904 - DNA, 15 bp, Homo sapiens
gaagagaacgcttga

SEQ ID NO: 529905 - DNA, 15 bp, Homo sapiens
aagagaacgcttgag

SEQ ID NO: 529906 - DNA, 15 bp, Homo sapiens
agagaacgcttgaga

SEQ ID NO: 529907 - DNA, 15 bp, Homo sapiens
gagaacgcttgagaa

SEQ ID NO: 529908 - DNA, 15 bp, Homo sapiens
agaacgcttgagaaa

SEQ ID NO: 529909 - DNA, 15 bp, Homo sapiens
gaacgcttgagaaac

SEQ ID NO: 529910 - DNA, 15 bp, Homo sapiens
aacgcttgagaaaca

SEQ ID NO: 529911 - DNA, 15 bp, Homo sapiens
acgcttgagaaacag

SEQ ID NO: 529912 - DNA, 15 bp, Homo sapiens
cgcttgagaaacaga

SEQ ID NO: 529913 - DNA, 15 bp, Homo sapiens
gcttgagaaacagaa

SEQ ID NO: 529914 - DNA, 15 bp, Homo sapiens
cttgagaaacagaag

SEQ ID NO: 529915 - DNA, 15 bp, Homo sapiens
ttgagaaacagaagc

SEQ ID NO: 529916 - DNA, 15 bp, Homo sapiens
tgagaaacagaagcc

SEQ ID NO: 529917 - DNA, 15 bp, Homo sapiens
gagaaacagaagcca

SEQ ID NO: 529918 - DNA, 15 bp, Homo sapiens
agaaacagaagccaa

SEQ ID NO: 529919 - DNA, 15 bp, Homo sapiens
gaaacagaagccaac

SEQ ID NO: 529920 - DNA, 15 bp, Homo sapiens
aaacagaagccaact

SEQ ID NO: 529921 - DNA, 15 bp, Homo sapiens
aacagaagccaactc

SEQ ID NO: 529922 - DNA, 15 bp, Homo sapiens
acagaagccaactca

SEQ ID NO: 529923 - DNA, 15 bp, Homo sapiens
cagaagccaactcag

SEQ ID NO: 529924 - DNA, 15 bp, Homo sapiens
agaagccaactcaga

SEQ ID NO: 529925 - DNA, 15 bp, Homo sapiens
gaagccaactcagag

SEQ ID NO: 529926 - DNA, 15 bp, Homo sapiens
aagccaactcagagt

SEQ ID NO: 529927 - DNA, 15 bp, Homo sapiens
agccaactcagagtg

SEQ ID NO: 529928 - DNA, 15 bp, Homo sapiens
gccaactcagagtgg

SEQ ID NO: 529929 - DNA, 15 bp, Homo sapiens
ccaactcagagtggt

SEQ ID NO: 529930 - DNA, 15 bp, Homo sapiens
caactcagagtggtg

SEQ ID NO: 529931 - DNA, 15 bp, Homo sapiens
aactcagagtggtgc

SEQ ID NO: 529932 - DNA, 15 bp, Homo sapiens
actcagagtggtgca

SEQ ID NO: 529933 - DNA, 15 bp, Homo sapiens
ctcagagtggtgcag

SEQ ID NO: 529934 - DNA, 15 bp, Homo sapiens
tcagagtggtgcagg

SEQ ID NO: 529935 - DNA, 15 bp, Homo sapiens
cagagtggtgcagga

SEQ ID NO: 529936 - DNA, 15 bp, Homo sapiens
agagtggtgcaggaa

SEQ ID NO: 529937 - DNA, 15 bp, Homo sapiens
gagtggtgcaggaag

SEQ ID NO: 529938 - DNA, 15 bp, Homo sapiens
agtggtgcaggaagc

SEQ ID NO: 529939 - DNA, 15 bp, Homo sapiens
gtggtgcaggaagct

SEQ ID NO: 529940 - DNA, 15 bp, Homo sapiens
tggtgcaggaagctg

SEQ ID NO: 529941 - DNA, 15 bp, Homo sapiens
ggtgcaggaagctgt

SEQ ID NO: 529942 - DNA, 15 bp, Homo sapiens
gtgcaggaagctgtg

SEQ ID NO: 529943 - DNA, 15 bp, Homo sapiens
tgcaggaagctgtgg

SEQ ID NO: 529944 - DNA, 15 bp, Homo sapiens
gcaggaagctgtggg

SEQ ID NO: 529945 - DNA, 15 bp, Homo sapiens
caggaagctgtgggg

SEQ ID NO: 529946 - DNA, 15 bp, Homo sapiens
aggaagctgtggggt

SEQ ID NO: 529947 - DNA, 15 bp, Homo sapiens
ggaagctgtggggtt

SEQ ID NO: 529948 - DNA, 15 bp, Homo sapiens
gaagctgtggggttt

SEQ ID NO: 529949 - DNA, 15 bp, Homo sapiens
aagctgtggggtttg

SEQ ID NO: 529950 - DNA, 15 bp, Homo sapiens
agctgtggggtttgc

SEQ ID NO: 529951 - DNA, 15 bp, Homo sapiens
gctgtggggtttgct

SEQ ID NO: 529952 - DNA, 15 bp, Homo sapiens
ctgtggggtttgctt

SEQ ID NO: 529953 - DNA, 15 bp, Homo sapiens
tgtggggtttgcttt

SEQ ID NO: 529954 - DNA, 15 bp, Homo sapiens
gtggggtttgctttt

SEQ ID NO: 529955 - DNA, 15 bp, Homo sapiens
tggggtttgcttttg

SEQ ID NO: 529956 - DNA, 15 bp, Homo sapiens
ggggtttgcttttgc

SEQ ID NO: 529957 - DNA, 15 bp, Homo sapiens
gggtttgcttttgct

SEQ ID NO: 529958 - DNA, 15 bp, Homo sapiens
ggtttgcttttgcta

SEQ ID NO: 529959 - DNA, 15 bp, Homo sapiens
gtttgcttttgctaa

SEQ ID NO: 529960 - DNA, 15 bp, Homo sapiens
tttgcttttgctaac

SEQ ID NO: 529961 - DNA, 15 bp, Homo sapiens
ttgcttttgctaact

SEQ ID NO: 529962 - DNA, 15 bp, Homo sapiens
tgcttttgctaactg

SEQ ID NO: 529963 - DNA, 15 bp, Homo sapiens
gcttttgctaactga

SEQ ID NO: 529964 - DNA, 15 bp, Homo sapiens
cttttgctaactgac

SEQ ID NO: 529965 - DNA, 15 bp, Homo sapiens
ttttgctaactgaca

SEQ ID NO: 529966 - DNA, 15 bp, Homo sapiens
tttgctaactgacat

SEQ ID NO: 529967 - DNA, 15 bp, Homo sapiens
ttgctaactgacata

SEQ ID NO: 529968 - DNA, 15 bp, Homo sapiens
tgctaactgacatac

SEQ ID NO: 529969 - DNA, 15 bp, Homo sapiens
gctaactgacatact

SEQ ID NO: 529970 - DNA, 15 bp, Homo sapiens
ctaactgacatactc

SEQ ID NO: 529971 - DNA, 15 bp, Homo sapiens
taactgacatactcc

SEQ ID NO: 529972 - DNA, 15 bp, Homo sapiens
aactgacatactccc

SEQ ID NO: 529973 - DNA, 15 bp, Homo sapiens
actgacatactccca

SEQ ID NO: 529974 - DNA, 15 bp, Homo sapiens
ctgacatactcccat

SEQ ID NO: 529975 - DNA, 15 bp, Homo sapiens
tgacatactcccatc

SEQ ID NO: 529976 - DNA, 15 bp, Homo sapiens
gacatactcccatct

SEQ ID NO: 529977 - DNA, 15 bp, Homo sapiens
acatactcccatctc

SEQ ID NO: 529978 - DNA, 15 bp, Homo sapiens
catactcccatctcc

SEQ ID NO: 529979 - DNA, 15 bp, Homo sapiens
atactcccatctcca

SEQ ID NO: 529980 - DNA, 15 bp, Homo sapiens
tactcccatctccat

SEQ ID NO: 529981 - DNA, 15 bp, Homo sapiens
actcccatctccatc

SEQ ID NO: 529982 - DNA, 15 bp, Homo sapiens
ctcccatctccatcc

SEQ ID NO: 529983 - DNA, 15 bp, Homo sapiens
tcccatctccatcct

SEQ ID NO: 529984 - DNA, 15 bp, Homo sapiens
cccatctccatcctt

SEQ ID NO: 529985 - DNA, 15 bp, Homo sapiens
ccatctccatcctta

SEQ ID NO: 529986 - DNA, 15 bp, Homo sapiens
catctccatccttac

SEQ ID NO: 529987 - DNA, 15 bp, Homo sapiens
atctccatccttacc

SEQ ID NO: 529988 - DNA, 15 bp, Homo sapiens
tctccatccttacct

SEQ ID NO: 529989 - DNA, 15 bp, Homo sapiens
ctccatccttacctg

SEQ ID NO: 529990 - DNA, 15 bp, Homo sapiens
tccatccttacctgt

SEQ ID NO: 529991 - DNA, 15 bp, Homo sapiens
ccatccttacctgtc

SEQ ID NO: 529992 - DNA, 15 bp, Homo sapiens
catccttacctgtca

SEQ ID NO: 529993 - DNA, 15 bp, Homo sapiens
atccttacctgtcac

SEQ ID NO: 529994 - DNA, 15 bp, Homo sapiens
tccttacctgtcacc

SEQ ID NO: 529995 - DNA, 15 bp, Homo sapiens
ccttacctgtcacct

SEQ ID NO: 529996 - DNA, 15 bp, Homo sapiens
cttacctgtcacctc

SEQ ID NO: 529997 - DNA, 15 bp, Homo sapiens
ttacctgtcacctct

SEQ ID NO: 529998 - DNA, 15 bp, Homo sapiens
tacctgtcacctctc

SEQ ID NO: 529999 - DNA, 15 bp, Homo sapiens
acctgtcacctctcc

SEQ ID NO: 530000 - DNA, 15 bp, Homo sapiens
cctgtcacctctccc

SEQ ID NO: 530001 - DNA, 15 bp, Homo sapiens
ctgtcacctctcccc

SEQ ID NO: 530002 - DNA, 15 bp, Homo sapiens
tgtcacctctcccct

SEQ ID NO: 530003 - DNA, 15 bp, Homo sapiens
gtcacctctcccctg

SEQ ID NO: 530004 - DNA, 15 bp, Homo sapiens
tcacctctcccctgc

SEQ ID NO: 530005 - DNA, 15 bp, Homo sapiens
cacctctcccctgcc

SEQ ID NO: 530006 - DNA, 15 bp, Homo sapiens
acctctcccctgcca

SEQ ID NO: 530007 - DNA, 15 bp, Homo sapiens
cctctcccctgccac

SEQ ID NO: 530008 - DNA, 15 bp, Homo sapiens
ctctcccctgccacc

SEQ ID NO: 530009 - DNA, 15 bp, Homo sapiens
tctcccctgccaccc

SEQ ID NO: 530010 - DNA, 15 bp, Homo sapiens
ctcccctgccaccct

SEQ ID NO: 530011 - DNA, 15 bp, Homo sapiens
tcccctgccaccctg

SEQ ID NO: 530012 - DNA, 15 bp, Homo sapiens
cccctgccaccctgc

SEQ ID NO: 530013 - DNA, 15 bp, Homo sapiens
ccctgccaccctgcc

SEQ ID NO: 530014 - DNA, 15 bp, Homo sapiens
cctgccaccctgccc

SEQ ID NO: 530015 - DNA, 15 bp, Homo sapiens
ctgccaccctgcccc

SEQ ID NO: 530016 - DNA, 15 bp, Homo sapiens
tgccaccctgccccc

SEQ ID NO: 530017 - DNA, 15 bp, Homo sapiens
gccaccctgcccccc

SEQ ID NO: 530018 - DNA, 15 bp, Homo sapiens
ccaccctgccccccc

SEQ ID NO: 530019 - DNA, 15 bp, Homo sapiens
caccctgcccccccc

SEQ ID NO: 530020 - DNA, 15 bp, Homo sapiens
accctgccccccccc

SEQ ID NO: 530021 - DNA, 15 bp, Homo sapiens
ccctgcccccccccc

SEQ ID NO: 530022 - DNA, 15 bp, Homo sapiens
cctgccccccccccc

SEQ ID NO: 530023 - DNA, 15 bp, Homo sapiens
ctgccccccccccca

SEQ ID NO: 530024 - DNA, 15 bp, Homo sapiens
tgcccccccccccac

SEQ ID NO: 530025 - DNA, 15 bp, Homo sapiens
gcccccccccccaca

SEQ ID NO: 530026 - DNA, 15 bp, Homo sapiens
cccccccccccacac

SEQ ID NO: 530027 - DNA, 15 bp, Homo sapiens
ccccccccccacacc

SEQ ID NO: 530028 - DNA, 15 bp, Homo sapiens
cccccccccacaccc

SEQ ID NO: 530029 - DNA, 15 bp, Homo sapiens
ccccccccacaccca

SEQ ID NO: 530030 - DNA, 15 bp, Homo sapiens
cccccccacacccag

SEQ ID NO: 530031 - DNA, 15 bp, Homo sapiens
ccccccacacccagg

SEQ ID NO: 530032 - DNA, 15 bp, Homo sapiens
cccccacacccaggt

SEQ ID NO: 530033 - DNA, 15 bp, Homo sapiens
ccccacacccaggtt

SEQ ID NO: 530034 - DNA, 15 bp, Homo sapiens
cccacacccaggtta

SEQ ID NO: 530035 - DNA, 15 bp, Homo sapiens
ccacacccaggttag

SEQ ID NO: 530036 - DNA, 15 bp, Homo sapiens
cacacccaggttaga

SEQ ID NO: 530037 - DNA, 15 bp, Homo sapiens
acacccaggttagaa

SEQ ID NO: 530038 - DNA, 15 bp, Homo sapiens
cacccaggttagaaa

SEQ ID NO: 530039 - DNA, 15 bp, Homo sapiens
acccaggttagaaac

SEQ ID NO: 530040 - DNA, 15 bp, Homo sapiens
cccaggttagaaaca

SEQ ID NO: 530041 - DNA, 15 bp, Homo sapiens
ccaggttagaaacaa

SEQ ID NO: 530042 - DNA, 15 bp, Homo sapiens
caggttagaaacaac

SEQ ID NO: 530043 - DNA, 15 bp, Homo sapiens
aggttagaaacaact

SEQ ID NO: 530044 - DNA, 15 bp, Homo sapiens
ggttagaaacaactg

SEQ ID NO: 530045 - DNA, 15 bp, Homo sapiens
gttagaaacaactgt

SEQ ID NO: 530046 - DNA, 15 bp, Homo sapiens
ttagaaacaactgtg

SEQ ID NO: 530047 - DNA, 15 bp, Homo sapiens
tagaaacaactgtga

SEQ ID NO: 530048 - DNA, 15 bp, Homo sapiens
agaaacaactgtgaa

SEQ ID NO: 530049 - DNA, 15 bp, Homo sapiens
gaaacaactgtgaac

SEQ ID NO: 530050 - DNA, 15 bp, Homo sapiens
aaacaactgtgaaca

SEQ ID NO: 530051 - DNA, 15 bp, Homo sapiens
aacaactgtgaacaa

SEQ ID NO: 530052 - DNA, 15 bp, Homo sapiens
acaactgtgaacaac

SEQ ID NO: 530053 - DNA, 15 bp, Homo sapiens
caactgtgaacaact

SEQ ID NO: 530054 - DNA, 15 bp, Homo sapiens
aactgtgaacaactc

SEQ ID NO: 530055 - DNA, 15 bp, Homo sapiens
actgtgaacaactcc

SEQ ID NO: 530056 - DNA, 15 bp, Homo sapiens
ctgtgaacaactccc

SEQ ID NO: 530057 - DNA, 15 bp, Homo sapiens
tgtgaacaactccct

SEQ ID NO: 530058 - DNA, 15 bp, Homo sapiens
gtgaacaactccctg

SEQ ID NO: 530059 - DNA, 15 bp, Homo sapiens
tgaacaactccctgt

SEQ ID NO: 530060 - DNA, 15 bp, Homo sapiens
gaacaactccctgtt

SEQ ID NO: 530061 - DNA, 15 bp, Homo sapiens
aacaactccctgttg

SEQ ID NO: 530062 - DNA, 15 bp, Homo sapiens
acaactccctgttgc

SEQ ID NO: 530063 - DNA, 15 bp, Homo sapiens
caactccctgttgcc

SEQ ID NO: 530064 - DNA, 15 bp, Homo sapiens
aactccctgttgcca

SEQ ID NO: 530065 - DNA, 15 bp, Homo sapiens
actccctgttgccag

SEQ ID NO: 530066 - DNA, 15 bp, Homo sapiens
ctccctgttgccaga

SEQ ID NO: 530067 - DNA, 15 bp, Homo sapiens
tccctgttgccagag

SEQ ID NO: 530068 - DNA, 15 bp, Homo sapiens
ccctgttgccagaga

SEQ ID NO: 530069 - DNA, 15 bp, Homo sapiens
cctgttgccagagat

SEQ ID NO: 530070 - DNA, 15 bp, Homo sapiens
ctgttgccagagatc

SEQ ID NO: 530071 - DNA, 15 bp, Homo sapiens
tgttgccagagatcc

SEQ ID NO: 530072 - DNA, 15 bp, Homo sapiens
gttgccagagatcca

SEQ ID NO: 530073 - DNA, 15 bp, Homo sapiens
ttgccagagatccac

SEQ ID NO: 530074 - DNA, 15 bp, Homo sapiens
tgccagagatccaca

SEQ ID NO: 530075 - DNA, 15 bp, Homo sapiens
gccagagatccacag

SEQ ID NO: 530076 - DNA, 15 bp, Homo sapiens
ccagagatccacaga

SEQ ID NO: 530077 - DNA, 15 bp, Homo sapiens
cagagatccacagag

SEQ ID NO: 530078 - DNA, 15 bp, Homo sapiens
agagatccacagagg

SEQ ID NO: 530079 - DNA, 15 bp, Homo sapiens
gagatccacagagga

SEQ ID NO: 530080 - DNA, 15 bp, Homo sapiens
agatccacagaggag

SEQ ID NO: 530081 - DNA, 15 bp, Homo sapiens
gatccacagaggaga

SEQ ID NO: 530082 - DNA, 15 bp, Homo sapiens
atccacagaggagag

SEQ ID NO: 530083 - DNA, 15 bp, Homo sapiens
tccacagaggagagt

SEQ ID NO: 530084 - DNA, 15 bp, Homo sapiens
ccacagaggagagtg

SEQ ID NO: 530085 - DNA, 15 bp, Homo sapiens
cacagaggagagtga

SEQ ID NO: 530086 - DNA, 15 bp, Homo sapiens
acagaggagagtgag

SEQ ID NO: 530087 - DNA, 15 bp, Homo sapiens
cagaggagagtgagg

SEQ ID NO: 530088 - DNA, 15 bp, Homo sapiens
agaggagagtgaggg

SEQ ID NO: 530089 - DNA, 15 bp, Homo sapiens
gaggagagtgagggg

SEQ ID NO: 530090 - DNA, 15 bp, Homo sapiens
aggagagtgaggggt

SEQ ID NO: 530091 - DNA, 15 bp, Homo sapiens
ggagagtgaggggtg

SEQ ID NO: 530092 - DNA, 15 bp, Homo sapiens
gagagtgaggggtgg

SEQ ID NO: 530093 - DNA, 15 bp, Homo sapiens
agagtgaggggtggg

SEQ ID NO: 530094 - DNA, 15 bp, Homo sapiens
gagtgaggggtgggg

SEQ ID NO: 530095 - DNA, 15 bp, Homo sapiens
agtgaggggtggggt

SEQ ID NO: 530096 - DNA, 15 bp, Homo sapiens
gtgaggggtggggtg

SEQ ID NO: 530097 - DNA, 15 bp, Homo sapiens
tgaggggtggggtgc

SEQ ID NO: 530098 - DNA, 15 bp, Homo sapiens
gaggggtggggtgcc

SEQ ID NO: 530099 - DNA, 15 bp, Homo sapiens
aggggtggggtgccg

SEQ ID NO: 530100 - DNA, 15 bp, Homo sapiens
ggggtggggtgccgc

SEQ ID NO: 530101 - DNA, 15 bp, Homo sapiens
gggtggggtgccgcc

SEQ ID NO: 530102 - DNA, 15 bp, Homo sapiens
ggtggggtgccgccc

SEQ ID NO: 530103 - DNA, 15 bp, Homo sapiens
gtggggtgccgccca

SEQ ID NO: 530104 - DNA, 15 bp, Homo sapiens
tggggtgccgcccac

SEQ ID NO: 530105 - DNA, 15 bp, Homo sapiens
ggggtgccgcccacc

SEQ ID NO: 530106 - DNA, 15 bp, Homo sapiens
gggtgccgcccaccc

SEQ ID NO: 530107 - DNA, 15 bp, Homo sapiens
ggtgccgcccacccc

SEQ ID NO: 530108 - DNA, 15 bp, Homo sapiens
gtgccgcccacccca

SEQ ID NO: 530109 - DNA, 15 bp, Homo sapiens
tgccgcccaccccaa

SEQ ID NO: 530110 - DNA, 15 bp, Homo sapiens
gccgcccaccccaaa

SEQ ID NO: 530111 - DNA, 15 bp, Homo sapiens
ccgcccaccccaaag

SEQ ID NO: 530112 - DNA, 15 bp, Homo sapiens
cgcccaccccaaagc

SEQ ID NO: 530113 - DNA, 15 bp, Homo sapiens
gcccaccccaaagca

SEQ ID NO: 530114 - DNA, 15 bp, Homo sapiens
cccaccccaaagcac

SEQ ID NO: 530115 - DNA, 15 bp, Homo sapiens
ccaccccaaagcaca

SEQ ID NO: 530116 - DNA, 15 bp, Homo sapiens
caccccaaagcacaa

SEQ ID NO: 530117 - DNA, 15 bp, Homo sapiens
accccaaagcacaac

SEQ ID NO: 530118 - DNA, 15 bp, Homo sapiens
ccccaaagcacaacc

SEQ ID NO: 530119 - DNA, 15 bp, Homo sapiens
cccaaagcacaacca

SEQ ID NO: 530120 - DNA, 15 bp, Homo sapiens
ccaaagcacaaccaa

SEQ ID NO: 530121 - DNA, 15 bp, Homo sapiens
caaagcacaaccaac

SEQ ID NO: 530122 - DNA, 15 bp, Homo sapiens
aaagcacaaccaact

SEQ ID NO: 530123 - DNA, 15 bp, Homo sapiens
aagcacaaccaactc

SEQ ID NO: 530124 - DNA, 15 bp, Homo sapiens
agcacaaccaactca

SEQ ID NO: 530125 - DNA, 15 bp, Homo sapiens
gcacaaccaactcag

SEQ ID NO: 530126 - DNA, 15 bp, Homo sapiens
cacaaccaactcagc

SEQ ID NO: 530127 - DNA, 15 bp, Homo sapiens
acaaccaactcagca

SEQ ID NO: 530128 - DNA, 15 bp, Homo sapiens
caaccaactcagcaa

SEQ ID NO: 530129 - DNA, 15 bp, Homo sapiens
aaccaactcagcaat

SEQ ID NO: 530130 - DNA, 15 bp, Homo sapiens
accaactcagcaatg

SEQ ID NO: 530131 - DNA, 15 bp, Homo sapiens
ccaactcagcaatgc

SEQ ID NO: 530132 - DNA, 15 bp, Homo sapiens
caactcagcaatgca

SEQ ID NO: 530133 - DNA, 15 bp, Homo sapiens
aactcagcaatgcag

SEQ ID NO: 530134 - DNA, 15 bp, Homo sapiens
actcagcaatgcaga

SEQ ID NO: 530135 - DNA, 15 bp, Homo sapiens
ctcagcaatgcagat

SEQ ID NO: 530136 - DNA, 15 bp, Homo sapiens
tcagcaatgcagatt

SEQ ID NO: 530137 - DNA, 15 bp, Homo sapiens
cagcaatgcagattc

SEQ ID NO: 530138 - DNA, 15 bp, Homo sapiens
agcaatgcagattct

SEQ ID NO: 530139 - DNA, 15 bp, Homo sapiens
gcaatgcagattcta

SEQ ID NO: 530140 - DNA, 15 bp, Homo sapiens
caatgcagattctat

SEQ ID NO: 530141 - DNA, 15 bp, Homo sapiens
aatgcagattctatt

SEQ ID NO: 530142 - DNA, 15 bp, Homo sapiens
atgcagattctattt

SEQ ID NO: 530143 - DNA, 15 bp, Homo sapiens
tgcagattctatttt

SEQ ID NO: 530144 - DNA, 15 bp, Homo sapiens
gcagattctattttg

SEQ ID NO: 530145 - DNA, 15 bp, Homo sapiens
cagattctattttgt

SEQ ID NO: 530146 - DNA, 15 bp, Homo sapiens
agattctattttgtg

SEQ ID NO: 530147 - DNA, 15 bp, Homo sapiens
gattctattttgtgg

SEQ ID NO: 530148 - DNA, 15 bp, Homo sapiens
attctattttgtggg

SEQ ID NO: 530149 - DNA, 15 bp, Homo sapiens
ttctattttgtgggt

SEQ ID NO: 530150 - DNA, 15 bp, Homo sapiens
tctattttgtgggta

SEQ ID NO: 530151 - DNA, 15 bp, Homo sapiens
ctattttgtgggtaa

SEQ ID NO: 530152 - DNA, 15 bp, Homo sapiens
tattttgtgggtaat

SEQ ID NO: 530153 - DNA, 15 bp, Homo sapiens
attttgtgggtaatg

SEQ ID NO: 530154 - DNA, 15 bp, Homo sapiens
ttttgtgggtaatgg

SEQ ID NO: 530155 - DNA, 15 bp, Homo sapiens
tttgtgggtaatggc

SEQ ID NO: 530156 - DNA, 15 bp, Homo sapiens
ttgtgggtaatggcc

SEQ ID NO: 530157 - DNA, 15 bp, Homo sapiens
tgtgggtaatggccc

SEQ ID NO: 530158 - DNA, 15 bp, Homo sapiens
gtgggtaatggccct

SEQ ID NO: 530159 - DNA, 15 bp, Homo sapiens
tgggtaatggccctg

SEQ ID NO: 530160 - DNA, 15 bp, Homo sapiens
gggtaatggccctgg

SEQ ID NO: 530161 - DNA, 15 bp, Homo sapiens
ggtaatggccctggg

SEQ ID NO: 530162 - DNA, 15 bp, Homo sapiens
gtaatggccctggga

SEQ ID NO: 530163 - DNA, 15 bp, Homo sapiens
taatggccctgggat

SEQ ID NO: 530164 - DNA, 15 bp, Homo sapiens
aatggccctgggatt

SEQ ID NO: 530165 - DNA, 15 bp, Homo sapiens
atggccctgggattg

SEQ ID NO: 530166 - DNA, 15 bp, Homo sapiens
tggccctgggattgg

SEQ ID NO: 530167 - DNA, 15 bp, Homo sapiens
ggccctgggattggg

SEQ ID NO: 530168 - DNA, 15 bp, Homo sapiens
gccctgggattgggc

SEQ ID NO: 530169 - DNA, 15 bp, Homo sapiens
ccctgggattgggca

SEQ ID NO: 530170 - DNA, 15 bp, Homo sapiens
cctgggattgggcag

SEQ ID NO: 530171 - DNA, 15 bp, Homo sapiens
ctgggattgggcagt

SEQ ID NO: 530172 - DNA, 15 bp, Homo sapiens
tgggattgggcagtg

SEQ ID NO: 530173 - DNA, 15 bp, Homo sapiens
gggattgggcagtgg

SEQ ID NO: 530174 - DNA, 15 bp, Homo sapiens
ggattgggcagtgga

SEQ ID NO: 530175 - DNA, 15 bp, Homo sapiens
gattgggcagtggaa

SEQ ID NO: 530176 - DNA, 15 bp, Homo sapiens
attgggcagtggaaa

SEQ ID NO: 530177 - DNA, 15 bp, Homo sapiens
ttgggcagtggaaag

SEQ ID NO: 530178 - DNA, 15 bp, Homo sapiens
tgggcagtggaaagg

SEQ ID NO: 530179 - DNA, 15 bp, Homo sapiens
gggcagtggaaaggg

SEQ ID NO: 530180 - DNA, 15 bp, Homo sapiens
ggcagtggaaagggc

SEQ ID NO: 530181 - DNA, 15 bp, Homo sapiens
gcagtggaaagggcc

SEQ ID NO: 530182 - DNA, 15 bp, Homo sapiens
cagtggaaagggccc

SEQ ID NO: 530183 - DNA, 15 bp, Homo sapiens
agtggaaagggccca

SEQ ID NO: 530184 - DNA, 15 bp, Homo sapiens
gtggaaagggcccat

SEQ ID NO: 530185 - DNA, 15 bp, Homo sapiens
tggaaagggcccata

SEQ ID NO: 530186 - DNA, 15 bp, Homo sapiens
ggaaagggcccatat

SEQ ID NO: 530187 - DNA, 15 bp, Homo sapiens
gaaagggcccatatg

SEQ ID NO: 530188 - DNA, 15 bp, Homo sapiens
aaagggcccatatga

SEQ ID NO: 530189 - DNA, 15 bp, Homo sapiens
aagggcccatatgag

SEQ ID NO: 530190 - DNA, 15 bp, Homo sapiens
agggcccatatgagc

SEQ ID NO: 530191 - DNA, 15 bp, Homo sapiens
gggcccatatgagca

SEQ ID NO: 530192 - DNA, 15 bp, Homo sapiens
ggcccatatgagcat

SEQ ID NO: 530193 - DNA, 15 bp, Homo sapiens
gcccatatgagcatt

SEQ ID NO: 530194 - DNA, 15 bp, Homo sapiens
cccatatgagcattg

SEQ ID NO: 530195 - DNA, 15 bp, Homo sapiens
ccatatgagcattga

SEQ ID NO: 530196 - DNA, 15 bp, Homo sapiens
catatgagcattgac

SEQ ID NO: 530197 - DNA, 15 bp, Homo sapiens
atatgagcattgact

SEQ ID NO: 530198 - DNA, 15 bp, Homo sapiens
tatgagcattgactc

SEQ ID NO: 530199 - DNA, 15 bp, Homo sapiens
atgagcattgactca

SEQ ID NO: 530200 - DNA, 15 bp, Homo sapiens
tgagcattgactcag

SEQ ID NO: 530201 - DNA, 15 bp, Homo sapiens
gagcattgactcaga

SEQ ID NO: 530202 - DNA, 15 bp, Homo sapiens
agcattgactcagaa

SEQ ID NO: 530203 - DNA, 15 bp, Homo sapiens
gcattgactcagaaa

SEQ ID NO: 530204 - DNA, 15 bp, Homo sapiens
cattgactcagaaat

SEQ ID NO: 530205 - DNA, 15 bp, Homo sapiens
attgactcagaaatc

SEQ ID NO: 530206 - DNA, 15 bp, Homo sapiens
ttgactcagaaatct

SEQ ID NO: 530207 - DNA, 15 bp, Homo sapiens
tgactcagaaatctg

SEQ ID NO: 530208 - DNA, 15 bp, Homo sapiens
gactcagaaatctga

SEQ ID NO: 530209 - DNA, 15 bp, Homo sapiens
actcagaaatctgag

SEQ ID NO: 530210 - DNA, 15 bp, Homo sapiens
ctcagaaatctgagc

SEQ ID NO: 530211 - DNA, 15 bp, Homo sapiens
tcagaaatctgagcc

SEQ ID NO: 530212 - DNA, 15 bp, Homo sapiens
cagaaatctgagccc

SEQ ID NO: 530213 - DNA, 15 bp, Homo sapiens
agaaatctgagcccc

SEQ ID NO: 530214 - DNA, 15 bp, Homo sapiens
gaaatctgagcccca

SEQ ID NO: 530215 - DNA, 15 bp, Homo sapiens
aaatctgagccccat

SEQ ID NO: 530216 - DNA, 15 bp, Homo sapiens
aatctgagccccatt

SEQ ID NO: 530217 - DNA, 15 bp, Homo sapiens
atctgagccccattc

SEQ ID NO: 530218 - DNA, 15 bp, Homo sapiens
tctgagccccattcg

SEQ ID NO: 530219 - DNA, 15 bp, Homo sapiens
ctgagccccattcga

SEQ ID NO: 530220 - DNA, 15 bp, Homo sapiens
tgagccccattcgag

SEQ ID NO: 530221 - DNA, 15 bp, Homo sapiens
gagccccattcgagt

SEQ ID NO: 530222 - DNA, 15 bp, Homo sapiens
agccccattcgagtg

SEQ ID NO: 530223 - DNA, 15 bp, Homo sapiens
gccccattcgagtga

SEQ ID NO: 530224 - DNA, 15 bp, Homo sapiens
ccccattcgagtgaa

SEQ ID NO: 530225 - DNA, 15 bp, Homo sapiens
cccattcgagtgaaa

SEQ ID NO: 530226 - DNA, 15 bp, Homo sapiens
ccattcgagtgaaag

SEQ ID NO: 530227 - DNA, 15 bp, Homo sapiens
cattcgagtgaaaga

SEQ ID NO: 530228 - DNA, 15 bp, Homo sapiens
attcgagtgaaagaa

SEQ ID NO: 530229 - DNA, 15 bp, Homo sapiens
ttcgagtgaaagaat

SEQ ID NO: 530230 - DNA, 15 bp, Homo sapiens
tcgagtgaaagaatg

SEQ ID NO: 530231 - DNA, 15 bp, Homo sapiens
cgagtgaaagaatga

SEQ ID NO: 530232 - DNA, 15 bp, Homo sapiens
gagtgaaagaatgag

SEQ ID NO: 530233 - DNA, 15 bp, Homo sapiens
agtgaaagaatgagc

SEQ ID NO: 530234 - DNA, 15 bp, Homo sapiens
gtgaaagaatgagca

SEQ ID NO: 530235 - DNA, 15 bp, Homo sapiens
tgaaagaatgagcaa

SEQ ID NO: 530236 - DNA, 15 bp, Homo sapiens
gaaagaatgagcaac

SEQ ID NO: 530237 - DNA, 15 bp, Homo sapiens
aaagaatgagcaacg

SEQ ID NO: 530238 - DNA, 15 bp, Homo sapiens
aagaatgagcaacgt

SEQ ID NO: 530239 - DNA, 15 bp, Homo sapiens
agaatgagcaacgtt

SEQ ID NO: 530240 - DNA, 15 bp, Homo sapiens
gaatgagcaacgttc

SEQ ID NO: 530241 - DNA, 15 bp, Homo sapiens
aatgagcaacgttcc

SEQ ID NO: 530242 - DNA, 15 bp, Homo sapiens
atgagcaacgttcca

SEQ ID NO: 530243 - DNA, 15 bp, Homo sapiens
tgagcaacgttccaa

SEQ ID NO: 530244 - DNA, 15 bp, Homo sapiens
gagcaacgttccaaa

SEQ ID NO: 530245 - DNA, 15 bp, Homo sapiens
agcaacgttccaaat

SEQ ID NO: 530246 - DNA, 15 bp, Homo sapiens
gcaacgttccaaatt

SEQ ID NO: 530247 - DNA, 15 bp, Homo sapiens
caacgttccaaattt

SEQ ID NO: 530248 - DNA, 15 bp, Homo sapiens
aacgttccaaatttt

SEQ ID NO: 530249 - DNA, 15 bp, Homo sapiens
acgttccaaatttta

SEQ ID NO: 530250 - DNA, 15 bp, Homo sapiens
cgttccaaattttaa

SEQ ID NO: 530251 - DNA, 15 bp, Homo sapiens
gttccaaattttaag

SEQ ID NO: 530252 - DNA, 15 bp, Homo sapiens
ttccaaattttaaga

SEQ ID NO: 530253 - DNA, 15 bp, Homo sapiens
tccaaattttaagaa

SEQ ID NO: 530254 - DNA, 15 bp, Homo sapiens
ccaaattttaagaaa

SEQ ID NO: 530255 - DNA, 15 bp, Homo sapiens
caaattttaagaaaa

SEQ ID NO: 530256 - DNA, 15 bp, Homo sapiens
aaattttaagaaaac

SEQ ID NO: 530257 - DNA, 15 bp, Homo sapiens
aattttaagaaaaca

SEQ ID NO: 530258 - DNA, 15 bp, Homo sapiens
attttaagaaaacac

SEQ ID NO: 530259 - DNA, 15 bp, Homo sapiens
ttttaagaaaacaca

SEQ ID NO: 530260 - DNA, 15 bp, Homo sapiens
tttaagaaaacacaa

SEQ ID NO: 530261 - DNA, 15 bp, Homo sapiens
ttaagaaaacacaaa

SEQ ID NO: 530262 - DNA, 15 bp, Homo sapiens
taagaaaacacaaat

SEQ ID NO: 530263 - DNA, 15 bp, Homo sapiens
aagaaaacacaaatt

SEQ ID NO: 530264 - DNA, 15 bp, Homo sapiens
agaaaacacaaattt

SEQ ID NO: 530265 - DNA, 15 bp, Homo sapiens
gaaaacacaaatttg

SEQ ID NO: 530266 - DNA, 15 bp, Homo sapiens
aaaacacaaatttga

SEQ ID NO: 530267 - DNA, 15 bp, Homo sapiens
aaacacaaatttgac

SEQ ID NO: 530268 - DNA, 15 bp, Homo sapiens
aacacaaatttgaca

SEQ ID NO: 530269 - DNA, 15 bp, Homo sapiens
acacaaatttgacaa

SEQ ID NO: 530270 - DNA, 15 bp, Homo sapiens
cacaaatttgacaac

SEQ ID NO: 530271 - DNA, 15 bp, Homo sapiens
acaaatttgacaacc

SEQ ID NO: 530272 - DNA, 15 bp, Homo sapiens
caaatttgacaaccc

SEQ ID NO: 530273 - DNA, 15 bp, Homo sapiens
aaatttgacaaccca

SEQ ID NO: 530274 - DNA, 15 bp, Homo sapiens
aatttgacaacccag

SEQ ID NO: 530275 - DNA, 15 bp, Homo sapiens
atttgacaacccaga

SEQ ID NO: 530276 - DNA, 15 bp, Homo sapiens
tttgacaacccagaa

SEQ ID NO: 530277 - DNA, 15 bp, Homo sapiens
ttgacaacccagaaa

SEQ ID NO: 530278 - DNA, 15 bp, Homo sapiens
tgacaacccagaaac

SEQ ID NO: 530279 - DNA, 15 bp, Homo sapiens
gacaacccagaaaca

SEQ ID NO: 530280 - DNA, 15 bp, Homo sapiens
acaacccagaaacaa

SEQ ID NO: 530281 - DNA, 15 bp, Homo sapiens
caacccagaaacaac

SEQ ID NO: 530282 - DNA, 15 bp, Homo sapiens
aacccagaaacaact

SEQ ID NO: 530283 - DNA, 15 bp, Homo sapiens
acccagaaacaactc

SEQ ID NO: 530284 - DNA, 15 bp, Homo sapiens
cccagaaacaactcc

SEQ ID NO: 530285 - DNA, 15 bp, Homo sapiens
ccagaaacaactcct

SEQ ID NO: 530286 - DNA, 15 bp, Homo sapiens
cagaaacaactcctt

SEQ ID NO: 530287 - DNA, 15 bp, Homo sapiens
agaaacaactcctta

SEQ ID NO: 530288 - DNA, 15 bp, Homo sapiens
gaaacaactccttaa

SEQ ID NO: 530289 - DNA, 15 bp, Homo sapiens
aaacaactccttaac

SEQ ID NO: 530290 - DNA, 15 bp, Homo sapiens
aacaactccttaaca

SEQ ID NO: 530291 - DNA, 15 bp, Homo sapiens
acaactccttaacaa

SEQ ID NO: 530292 - DNA, 15 bp, Homo sapiens
caactccttaacaag

SEQ ID NO: 530293 - DNA, 15 bp, Homo sapiens
aactccttaacaaga

SEQ ID NO: 530294 - DNA, 15 bp, Homo sapiens
actccttaacaagaa

SEQ ID NO: 530295 - DNA, 15 bp, Homo sapiens
ctccttaacaagaat

SEQ ID NO: 530296 - DNA, 15 bp, Homo sapiens
tccttaacaagaatg

SEQ ID NO: 530297 - DNA, 15 bp, Homo sapiens
ccttaacaagaatgc

SEQ ID NO: 530298 - DNA, 15 bp, Homo sapiens
cttaacaagaatgct

SEQ ID NO: 530299 - DNA, 15 bp, Homo sapiens
ttaacaagaatgctt

SEQ ID NO: 530300 - DNA, 15 bp, Homo sapiens
taacaagaatgcttt

SEQ ID NO: 530301 - DNA, 15 bp, Homo sapiens
aacaagaatgctttt

SEQ ID NO: 530302 - DNA, 15 bp, Homo sapiens
acaagaatgctttta

SEQ ID NO: 530303 - DNA, 15 bp, Homo sapiens
caagaatgcttttaa

SEQ ID NO: 530304 - DNA, 15 bp, Homo sapiens
aagaatgcttttaaa

SEQ ID NO: 530305 - DNA, 15 bp, Homo sapiens
agaatgcttttaaat

SEQ ID NO: 530306 - DNA, 15 bp, Homo sapiens
gaatgcttttaaatg

SEQ ID NO: 530307 - DNA, 15 bp, Homo sapiens
aatgcttttaaatgt

SEQ ID NO: 530308 - DNA, 15 bp, Homo sapiens
atgcttttaaatgtt

SEQ ID NO: 530309 - DNA, 15 bp, Homo sapiens
tgcttttaaatgttt

SEQ ID NO: 530310 - DNA, 15 bp, Homo sapiens
gcttttaaatgtttg

SEQ ID NO: 530311 - DNA, 15 bp, Homo sapiens
cttttaaatgtttga

SEQ ID NO: 530312 - DNA, 15 bp, Homo sapiens
ttttaaatgtttgag

SEQ ID NO: 530313 - DNA, 15 bp, Homo sapiens
tttaaatgtttgagg

SEQ ID NO: 530314 - DNA, 15 bp, Homo sapiens
ttaaatgtttgaggt

SEQ ID NO: 530315 - DNA, 15 bp, Homo sapiens
taaatgtttgaggtt

SEQ ID NO: 530316 - DNA, 15 bp, Homo sapiens
aaatgtttgaggttt

SEQ ID NO: 530317 - DNA, 15 bp, Homo sapiens
aatgtttgaggtttt

SEQ ID NO: 530318 - DNA, 15 bp, Homo sapiens
atgtttgaggttttt

SEQ ID NO: 530319 - DNA, 15 bp, Homo sapiens
tgtttgaggtttttt

SEQ ID NO: 530320 - DNA, 15 bp, Homo sapiens
gtttgaggtttttta

SEQ ID NO: 530321 - DNA, 15 bp, Homo sapiens
tttgaggttttttaa

SEQ ID NO: 530322 - DNA, 15 bp, Homo sapiens
ttgaggttttttaaa

SEQ ID NO: 530323 - DNA, 15 bp, Homo sapiens
tgaggttttttaaat

SEQ ID NO: 530324 - DNA, 15 bp, Homo sapiens
gaggttttttaaatt

SEQ ID NO: 530325 - DNA, 15 bp, Homo sapiens
aggttttttaaatta

SEQ ID NO: 530326 - DNA, 15 bp, Homo sapiens
ggttttttaaattaa

SEQ ID NO: 530327 - DNA, 15 bp, Homo sapiens
gttttttaaattaaa

SEQ ID NO: 530328 - DNA, 15 bp, Homo sapiens
ttttttaaattaaaa

SEQ ID NO: 530329 - DNA, 15 bp, Homo sapiens
tttttaaattaaaac

SEQ ID NO: 530330 - DNA, 15 bp, Homo sapiens
ttttaaattaaaacc

SEQ ID NO: 530331 - DNA, 15 bp, Homo sapiens
tttaaattaaaacct

SEQ ID NO: 530332 - DNA, 15 bp, Homo sapiens
ttaaattaaaacctc

SEQ ID NO: 530333 - DNA, 15 bp, Homo sapiens
taaattaaaacctca

SEQ ID NO: 530334 - DNA, 15 bp, Homo sapiens
aaattaaaacctcat

SEQ ID NO: 530335 - DNA, 15 bp, Homo sapiens
aattaaaacctcata

SEQ ID NO: 530336 - DNA, 15 bp, Homo sapiens
attaaaacctcataa

SEQ ID NO: 530337 - DNA, 15 bp, Homo sapiens
ttaaaacctcataat

SEQ ID NO: 530338 - DNA, 15 bp, Homo sapiens
taaaacctcataata

SEQ ID NO: 530339 - DNA, 15 bp, Homo sapiens
aaaacctcataatat

SEQ ID NO: 530340 - DNA, 15 bp, Homo sapiens
aaacctcataatatg

SEQ ID NO: 530341 - DNA, 15 bp, Homo sapiens
aacctcataatatgg

SEQ ID NO: 530342 - DNA, 15 bp, Homo sapiens
acctcataatatggc

SEQ ID NO: 530343 - DNA, 15 bp, Homo sapiens
cctcataatatggct

SEQ ID NO: 530344 - DNA, 15 bp, Homo sapiens
ctcataatatggcta

SEQ ID NO: 530345 - DNA, 15 bp, Homo sapiens
tcataatatggctat

SEQ ID NO: 530346 - DNA, 15 bp, Homo sapiens
cataatatggctatt

SEQ ID NO: 530347 - DNA, 15 bp, Homo sapiens
ataatatggctattt

SEQ ID NO: 530348 - DNA, 15 bp, Homo sapiens
taatatggctatttc

SEQ ID NO: 530349 - DNA, 15 bp, Homo sapiens
aatatggctatttct

SEQ ID NO: 530350 - DNA, 15 bp, Homo sapiens
atatggctatttcta

SEQ ID NO: 530351 - DNA, 15 bp, Homo sapiens
tatggctatttctat

SEQ ID NO: 530352 - DNA, 15 bp, Homo sapiens
atggctatttctatg

SEQ ID NO: 530353 - DNA, 15 bp, Homo sapiens
tggctatttctatgg

SEQ ID NO: 530354 - DNA, 15 bp, Homo sapiens
ggctatttctatggc

SEQ ID NO: 530355 - DNA, 15 bp, Homo sapiens
gctatttctatggca

SEQ ID NO: 530356 - DNA, 15 bp, Homo sapiens
ctatttctatggcat

SEQ ID NO: 530357 - DNA, 15 bp, Homo sapiens
tatttctatggcatt

SEQ ID NO: 530358 - DNA, 15 bp, Homo sapiens
atttctatggcattt

SEQ ID NO: 530359 - DNA, 15 bp, Homo sapiens
tttctatggcatttg

SEQ ID NO: 530360 - DNA, 15 bp, Homo sapiens
ttctatggcatttgc

SEQ ID NO: 530361 - DNA, 15 bp, Homo sapiens
tctatggcatttgca

SEQ ID NO: 530362 - DNA, 15 bp, Homo sapiens
ctatggcatttgcaa

SEQ ID NO: 530363 - DNA, 15 bp, Homo sapiens
tatggcatttgcaat

SEQ ID NO: 530364 - DNA, 15 bp, Homo sapiens
atggcatttgcaatc

SEQ ID NO: 530365 - DNA, 15 bp, Homo sapiens
tggcatttgcaatcc

SEQ ID NO: 530366 - DNA, 15 bp, Homo sapiens
ggcatttgcaatcca

SEQ ID NO: 530367 - DNA, 15 bp, Homo sapiens
gcatttgcaatccac

SEQ ID NO: 530368 - DNA, 15 bp, Homo sapiens
catttgcaatccact

SEQ ID NO: 530369 - DNA, 15 bp, Homo sapiens
atttgcaatccactt

SEQ ID NO: 530370 - DNA, 15 bp, Homo sapiens
tttgcaatccacttt

SEQ ID NO: 530371 - DNA, 15 bp, Homo sapiens
ggcggcgaagggaat

SEQ ID NO: 530372 - DNA, 15 bp, Homo sapiens
gcggcgaagggaatc

SEQ ID NO: 530373 - DNA, 15 bp, Homo sapiens
cggcgaagggaatct

SEQ ID NO: 530374 - DNA, 15 bp, Homo sapiens
ggcgaagggaatctc

SEQ ID NO: 530375 - DNA, 15 bp, Homo sapiens
gcgaagggaatctct

SEQ ID NO: 530376 - DNA, 15 bp, Homo sapiens
cgaagggaatctctg

SEQ ID NO: 530377 - DNA, 15 bp, Homo sapiens
gaagggaatctctgg

SEQ ID NO: 530378 - DNA, 15 bp, Homo sapiens
aagggaatctctggg

SEQ ID NO: 530379 - DNA, 15 bp, Homo sapiens
agggaatctctgggc

SEQ ID NO: 530380 - DNA, 15 bp, Homo sapiens
gggaatctctgggcc

SEQ ID NO: 530381 - DNA, 15 bp, Homo sapiens
ggaatctctgggccc

SEQ ID NO: 530382 - DNA, 15 bp, Homo sapiens
gaatctctgggcccg

SEQ ID NO: 530383 - DNA, 15 bp, Homo sapiens
aatctctgggcccga

SEQ ID NO: 530384 - DNA, 15 bp, Homo sapiens
atctctgggcccgag

SEQ ID NO: 530385 - DNA, 15 bp, Homo sapiens
tctctgggcccgagg

SEQ ID NO: 530386 - DNA, 15 bp, Homo sapiens
ctctgggcccgagga

SEQ ID NO: 530387 - DNA, 15 bp, Homo sapiens
tctgggcccgaggaa

SEQ ID NO: 530388 - DNA, 15 bp, Homo sapiens
ctgggcccgaggaat

SEQ ID NO: 530389 - DNA, 15 bp, Homo sapiens
tgggcccgaggaata

SEQ ID NO: 530390 - DNA, 15 bp, Homo sapiens
gggcccgaggaatat

SEQ ID NO: 530391 - DNA, 15 bp, Homo sapiens
ggcccgaggaatata

SEQ ID NO: 530392 - DNA, 15 bp, Homo sapiens
gcccgaggaatatac

SEQ ID NO: 530393 - DNA, 15 bp, Homo sapiens
cccgaggaatatacc

SEQ ID NO: 530394 - DNA, 15 bp, Homo sapiens
ccgaggaatatacct

SEQ ID NO: 530395 - DNA, 15 bp, Homo sapiens
cgaggaatatacctt

SEQ ID NO: 530396 - DNA, 15 bp, Homo sapiens
gaggaatataccttg

SEQ ID NO: 530397 - DNA, 15 bp, Homo sapiens
aggaatataccttgt

SEQ ID NO: 530398 - DNA, 15 bp, Homo sapiens
ggaatataccttgtc

SEQ ID NO: 530399 - DNA, 15 bp, Homo sapiens
gaatataccttgtcc

SEQ ID NO: 530400 - DNA, 15 bp, Homo sapiens
aatataccttgtccc

SEQ ID NO: 530401 - DNA, 15 bp, Homo sapiens
atataccttgtccct

SEQ ID NO: 530402 - DNA, 15 bp, Homo sapiens
tataccttgtccctg

SEQ ID NO: 530403 - DNA, 15 bp, Homo sapiens
ataccttgtccctgc

SEQ ID NO: 530404 - DNA, 15 bp, Homo sapiens
taccttgtccctgca

SEQ ID NO: 530405 - DNA, 15 bp, Homo sapiens
accttgtccctgcac

SEQ ID NO: 530406 - DNA, 15 bp, Homo sapiens
ccttgtccctgcact

SEQ ID NO: 530407 - DNA, 15 bp, Homo sapiens
cttgtccctgcacta

SEQ ID NO: 530408 - DNA, 15 bp, Homo sapiens
ttgtccctgcactag

SEQ ID NO: 530409 - DNA, 15 bp, Homo sapiens
tgtccctgcactagt

SEQ ID NO: 530410 - DNA, 15 bp, Homo sapiens
gtccctgcactagtg

SEQ ID NO: 530411 - DNA, 15 bp, Homo sapiens
tccctgcactagtgt

SEQ ID NO: 530412 - DNA, 15 bp, Homo sapiens
ccctgcactagtgtg

SEQ ID NO: 530413 - DNA, 15 bp, Homo sapiens
cctgcactagtgtgt

SEQ ID NO: 530414 - DNA, 15 bp, Homo sapiens
ctgcactagtgtgtg

SEQ ID NO: 530415 - DNA, 15 bp, Homo sapiens
tgcactagtgtgtgt

SEQ ID NO: 530416 - DNA, 15 bp, Homo sapiens
gcactagtgtgtgtt

SEQ ID NO: 530417 - DNA, 15 bp, Homo sapiens
cactagtgtgtgttc

SEQ ID NO: 530418 - DNA, 15 bp, Homo sapiens
actagtgtgtgttct

SEQ ID NO: 530419 - DNA, 15 bp, Homo sapiens
ctagtgtgtgttctc

SEQ ID NO: 530420 - DNA, 15 bp, Homo sapiens
tagtgtgtgttctct

SEQ ID NO: 530421 - DNA, 15 bp, Homo sapiens
agtgtgtgttctctt

SEQ ID NO: 530422 - DNA, 15 bp, Homo sapiens
gtgtgtgttctcttg

SEQ ID NO: 530423 - DNA, 15 bp, Homo sapiens
tgtgtgttctcttgt

SEQ ID NO: 530424 - DNA, 15 bp, Homo sapiens
gtgtgttctcttgtg

SEQ ID NO: 530425 - DNA, 15 bp, Homo sapiens
tgtgttctcttgtgg

SEQ ID NO: 530426 - DNA, 15 bp, Homo sapiens
gtgttctcttgtggc

SEQ ID NO: 530427 - DNA, 15 bp, Homo sapiens
tgttctcttgtggct

SEQ ID NO: 530428 - DNA, 15 bp, Homo sapiens
gttctcttgtggctt

SEQ ID NO: 530429 - DNA, 15 bp, Homo sapiens
ttctcttgtggcttg

SEQ ID NO: 530430 - DNA, 15 bp, Homo sapiens
tctcttgtggcttga

SEQ ID NO: 530431 - DNA, 15 bp, Homo sapiens
ctcttgtggcttgag

SEQ ID NO: 530432 - DNA, 15 bp, Homo sapiens
tcttgtggcttgagg

SEQ ID NO: 530433 - DNA, 15 bp, Homo sapiens
cttgtggcttgagga

SEQ ID NO: 530434 - DNA, 15 bp, Homo sapiens
ttgtggcttgaggag

SEQ ID NO: 530435 - DNA, 15 bp, Homo sapiens
tgtggcttgaggagc

SEQ ID NO: 530436 - DNA, 15 bp, Homo sapiens
gtggcttgaggagcc

SEQ ID NO: 530437 - DNA, 15 bp, Homo sapiens
tggcttgaggagcca

SEQ ID NO: 530438 - DNA, 15 bp, Homo sapiens
ggcttgaggagccaa

SEQ ID NO: 530439 - DNA, 15 bp, Homo sapiens
gcttgaggagccaaa

SEQ ID NO: 530440 - DNA, 15 bp, Homo sapiens
cttgaggagccaaaa

SEQ ID NO: 530441 - DNA, 15 bp, Homo sapiens
ttgaggagccaaaaa

SEQ ID NO: 530442 - DNA, 15 bp, Homo sapiens
tgaggagccaaaaaa

SEQ ID NO: 530443 - DNA, 15 bp, Homo sapiens
gaggagccaaaaaaa

SEQ ID NO: 530444 - DNA, 15 bp, Homo sapiens
aggagccaaaaaaaa

SEQ ID NO: 530445 - DNA, 15 bp, Homo sapiens
ggagccaaaaaaaaa

SEQ ID NO: 530446 - DNA, 15 bp, Homo sapiens
gagccaaaaaaaaaa

SEQ ID NO: 530447 - DNA, 15 bp, Homo sapiens
agccaaaaaaaaaaa

SEQ ID NO: 530448 - DNA, 15 bp, Homo sapiens
gccaaaaaaaaaaaa

SEQ ID NO: 530449 - DNA, 15 bp, Homo sapiens
ccaaaaaaaaaaaaa

SEQ ID NO: 530450 - DNA, 15 bp, Homo sapiens
caaaaaaaaaaaaaa

SEQ ID NO: 530451 - DNA, 15 bp, Homo sapiens
aaaaaaaaaaaaaaa

SEQ ID NO: 530452 - DNA, 15 bp, Homo sapiens
aaaaaaaaaaaaaag

SEQ ID NO: 530453 - DNA, 15 bp, Homo sapiens
aaaaaaaaaaaaagc

SEQ ID NO: 530454 - DNA, 15 bp, Homo sapiens
aaaaaaaaaaaagct

SEQ ID NO: 530455 - DNA, 15 bp, Homo sapiens
aaaaaaaaaaagctg

SEQ ID NO: 530456 - DNA, 15 bp, Homo sapiens
aaaaaaaaaagctgg

SEQ ID NO: 530457 - DNA, 15 bp, Homo sapiens
aaaaaaaaagctgga

SEQ ID NO: 530458 - DNA, 15 bp, Homo sapiens
aaaaaaaagctggaa

SEQ ID NO: 530459 - DNA, 15 bp, Homo sapiens
aaaaaaagctggaat

SEQ ID NO: 530460 - DNA, 15 bp, Homo sapiens
aaaaaagctggaatt

SEQ ID NO: 530461 - DNA, 15 bp, Homo sapiens
aaaaagctggaattt

SEQ ID NO: 530462 - DNA, 15 bp, Homo sapiens
aaaagctggaatttg

SEQ ID NO: 530463 - DNA, 15 bp, Homo sapiens
aaagctggaatttgt

SEQ ID NO: 530464 - DNA, 15 bp, Homo sapiens
aagctggaatttgtt

SEQ ID NO: 530465 - DNA, 15 bp, Homo sapiens
agctggaatttgtta

SEQ ID NO: 530466 - DNA, 15 bp, Homo sapiens
gctggaatttgttag

SEQ ID NO: 530467 - DNA, 15 bp, Homo sapiens
ctggaatttgttagt

SEQ ID NO: 530468 - DNA, 15 bp, Homo sapiens
tggaatttgttagtg

SEQ ID NO: 530469 - DNA, 15 bp, Homo sapiens
ggaatttgttagtgg

SEQ ID NO: 530470 - DNA, 15 bp, Homo sapiens
gaatttgttagtggg

SEQ ID NO: 530471 - DNA, 15 bp, Homo sapiens
aatttgttagtgggg

SEQ ID NO: 530472 - DNA, 15 bp, Homo sapiens
atttgttagtgggga

SEQ ID NO: 530473 - DNA, 15 bp, Homo sapiens
tttgttagtggggag

SEQ ID NO: 530474 - DNA, 15 bp, Homo sapiens
ttgttagtggggaga

SEQ ID NO: 530475 - DNA, 15 bp, Homo sapiens
tgttagtggggagaa

SEQ ID NO: 530476 - DNA, 15 bp, Homo sapiens
gttagtggggagaaa

SEQ ID NO: 530477 - DNA, 15 bp, Homo sapiens
ttagtggggagaaaa

SEQ ID NO: 530478 - DNA, 15 bp, Homo sapiens
tagtggggagaaaag

SEQ ID NO: 530479 - DNA, 15 bp, Homo sapiens
agtggggagaaaagt

SEQ ID NO: 530480 - DNA, 15 bp, Homo sapiens
gtggggagaaaagtg

SEQ ID NO: 530481 - DNA, 15 bp, Homo sapiens
tggggagaaaagtgc

SEQ ID NO: 530482 - DNA, 15 bp, Homo sapiens
ggggagaaaagtgct

SEQ ID NO: 530483 - DNA, 15 bp, Homo sapiens
gggagaaaagtgctt

SEQ ID NO: 530484 - DNA, 15 bp, Homo sapiens
ggagaaaagtgcttt

SEQ ID NO: 530485 - DNA, 15 bp, Homo sapiens
gagaaaagtgcttta

SEQ ID NO: 530486 - DNA, 15 bp, Homo sapiens
agaaaagtgctttat

SEQ ID NO: 530487 - DNA, 15 bp, Homo sapiens
gaaaagtgctttatc

SEQ ID NO: 530488 - DNA, 15 bp, Homo sapiens
aaaagtgctttatca

SEQ ID NO: 530489 - DNA, 15 bp, Homo sapiens
aaagtgctttatcag

SEQ ID NO: 530490 - DNA, 15 bp, Homo sapiens
aagtgctttatcaga

SEQ ID NO: 530491 - DNA, 15 bp, Homo sapiens
agtgctttatcagaa

SEQ ID NO: 530492 - DNA, 15 bp, Homo sapiens
gtgctttatcagaaa

SEQ ID NO: 530493 - DNA, 15 bp, Homo sapiens
tgctttatcagaaac

SEQ ID NO: 530494 - DNA, 15 bp, Homo sapiens
gctttatcagaaaca

SEQ ID NO: 530495 - DNA, 15 bp, Homo sapiens
ctttatcagaaacac

SEQ ID NO: 530496 - DNA, 15 bp, Homo sapiens
tttatcagaaacaca

SEQ ID NO: 530497 - DNA, 15 bp, Homo sapiens
ttatcagaaacacat

SEQ ID NO: 530498 - DNA, 15 bp, Homo sapiens
tatcagaaacacatt

SEQ ID NO: 530499 - DNA, 15 bp, Homo sapiens
atcagaaacacattg

SEQ ID NO: 530500 - DNA, 15 bp, Homo sapiens
tcagaaacacattgg

SEQ ID NO: 530501 - DNA, 15 bp, Homo sapiens
cagaaacacattggc

SEQ ID NO: 530502 - DNA, 15 bp, Homo sapiens
agaaacacattggct

SEQ ID NO: 530503 - DNA, 15 bp, Homo sapiens
gaaacacattggctg

SEQ ID NO: 530504 - DNA, 15 bp, Homo sapiens
aaacacattggctgc

SEQ ID NO: 530505 - DNA, 15 bp, Homo sapiens
aacacattggctgcc

SEQ ID NO: 530506 - DNA, 15 bp, Homo sapiens
acacattggctgcca

SEQ ID NO: 530507 - DNA, 15 bp, Homo sapiens
cacattggctgccag

SEQ ID NO: 530508 - DNA, 15 bp, Homo sapiens
acattggctgccaga

SEQ ID NO: 530509 - DNA, 15 bp, Homo sapiens
cattggctgccagag

SEQ ID NO: 530510 - DNA, 15 bp, Homo sapiens
attggctgccagaga

SEQ ID NO: 530511 - DNA, 15 bp, Homo sapiens
ttggctgccagagaa

SEQ ID NO: 530512 - DNA, 15 bp, Homo sapiens
tggctgccagagaag

SEQ ID NO: 530513 - DNA, 15 bp, Homo sapiens
ggctgccagagaagc

SEQ ID NO: 530514 - DNA, 15 bp, Homo sapiens
gctgccagagaagct

SEQ ID NO: 530515 - DNA, 15 bp, Homo sapiens
ctgccagagaagctg

SEQ ID NO: 530516 - DNA, 15 bp, Homo sapiens
tgccagagaagctgt

SEQ ID NO: 530517 - DNA, 15 bp, Homo sapiens
gccagagaagctgtg

SEQ ID NO: 530518 - DNA, 15 bp, Homo sapiens
ccagagaagctgtga

SEQ ID NO: 530519 - DNA, 15 bp, Homo sapiens
cagagaagctgtgag

SEQ ID NO: 530520 - DNA, 15 bp, Homo sapiens
agagaagctgtgagc

SEQ ID NO: 530521 - DNA, 15 bp, Homo sapiens
gagaagctgtgagcc

SEQ ID NO: 530522 - DNA, 15 bp, Homo sapiens
agaagctgtgagccg

SEQ ID NO: 530523 - DNA, 15 bp, Homo sapiens
gaagctgtgagccgc

SEQ ID NO: 530524 - DNA, 15 bp, Homo sapiens
aagctgtgagccgcc

SEQ ID NO: 530525 - DNA, 15 bp, Homo sapiens
agctgtgagccgcca

SEQ ID NO: 530526 - DNA, 15 bp, Homo sapiens
gctgtgagccgccac

SEQ ID NO: 530527 - DNA, 15 bp, Homo sapiens
ctgtgagccgccacg

SEQ ID NO: 530528 - DNA, 15 bp, Homo sapiens
tgtgagccgccacgt

SEQ ID NO: 530529 - DNA, 15 bp, Homo sapiens
gtgagccgccacgtt

SEQ ID NO: 530530 - DNA, 15 bp, Homo sapiens
tgagccgccacgtta

SEQ ID NO: 530531 - DNA, 15 bp, Homo sapiens
gagccgccacgttaa

SEQ ID NO: 530532 - DNA, 15 bp, Homo sapiens
agccgccacgttaaa

SEQ ID NO: 530533 - DNA, 15 bp, Homo sapiens
gccgccacgttaaag

SEQ ID NO: 530534 - DNA, 15 bp, Homo sapiens
ccgccacgttaaaga

SEQ ID NO: 530535 - DNA, 15 bp, Homo sapiens
cgccacgttaaagat

SEQ ID NO: 530536 - DNA, 15 bp, Homo sapiens
gccacgttaaagatg

SEQ ID NO: 530537 - DNA, 15 bp, Homo sapiens
ccacgttaaagatgg

SEQ ID NO: 530538 - DNA, 15 bp, Homo sapiens
cacgttaaagatggt

SEQ ID NO: 530539 - DNA, 15 bp, Homo sapiens
acgttaaagatggtt

SEQ ID NO: 530540 - DNA, 15 bp, Homo sapiens
cgttaaagatggtta

SEQ ID NO: 530541 - DNA, 15 bp, Homo sapiens
gttaaagatggttaa

SEQ ID NO: 530542 - DNA, 15 bp, Homo sapiens
ttaaagatggttaag

SEQ ID NO: 530543 - DNA, 15 bp, Homo sapiens
taaagatggttaaga

SEQ ID NO: 530544 - DNA, 15 bp, Homo sapiens
aaagatggttaagag

SEQ ID NO: 530545 - DNA, 15 bp, Homo sapiens
aagatggttaagaga

SEQ ID NO: 530546 - DNA, 15 bp, Homo sapiens
agatggttaagagaa

SEQ ID NO: 530547 - DNA, 15 bp, Homo sapiens
gatggttaagagaag

SEQ ID NO: 530548 - DNA, 15 bp, Homo sapiens
atggttaagagaagg

SEQ ID NO: 530549 - DNA, 15 bp, Homo sapiens
tggttaagagaagga

SEQ ID NO: 530550 - DNA, 15 bp, Homo sapiens
ggttaagagaaggaa

SEQ ID NO: 530551 - DNA, 15 bp, Homo sapiens
gttaagagaaggaag

SEQ ID NO: 530552 - DNA, 15 bp, Homo sapiens
ttaagagaaggaagg

SEQ ID NO: 530553 - DNA, 15 bp, Homo sapiens
taagagaaggaagga

SEQ ID NO: 530554 - DNA, 15 bp, Homo sapiens
aagagaaggaaggaa

SEQ ID NO: 530555 - DNA, 15 bp, Homo sapiens
agagaaggaaggaaa

SEQ ID NO: 530556 - DNA, 15 bp, Homo sapiens
gagaaggaaggaaag

SEQ ID NO: 530557 - DNA, 15 bp, Homo sapiens
agaaggaaggaaagg

SEQ ID NO: 530558 - DNA, 15 bp, Homo sapiens
gaaggaaggaaagga

SEQ ID NO: 530559 - DNA, 15 bp, Homo sapiens
aaggaaggaaaggaa

SEQ ID NO: 530560 - DNA, 15 bp, Homo sapiens
aggaaggaaaggaag

SEQ ID NO: 530561 - DNA, 15 bp, Homo sapiens
ggaaggaaaggaaga

SEQ ID NO: 530562 - DNA, 15 bp, Homo sapiens
gaaggaaaggaagag

SEQ ID NO: 530563 - DNA, 15 bp, Homo sapiens
aaggaaaggaagagg

SEQ ID NO: 530564 - DNA, 15 bp, Homo sapiens
aggaaaggaagagga

SEQ ID NO: 530565 - DNA, 15 bp, Homo sapiens
ggaaaggaagaggag

SEQ ID NO: 530566 - DNA, 15 bp, Homo sapiens
gaaaggaagaggaga

SEQ ID NO: 530567 - DNA, 15 bp, Homo sapiens
aaaggaagaggagag

SEQ ID NO: 530568 - DNA, 15 bp, Homo sapiens
aaggaagaggagaga

SEQ ID NO: 530569 - DNA, 15 bp, Homo sapiens
aggaagaggagagat

SEQ ID NO: 530570 - DNA, 15 bp, Homo sapiens
ggaagaggagagata

SEQ ID NO: 530571 - DNA, 15 bp, Homo sapiens
gaagaggagagatac

SEQ ID NO: 530572 - DNA, 15 bp, Homo sapiens
aagaggagagatacg

SEQ ID NO: 530573 - DNA, 15 bp, Homo sapiens
agaggagagatacgg

SEQ ID NO: 530574 - DNA, 15 bp, Homo sapiens
gaggagagatacggc

SEQ ID NO: 530575 - DNA, 15 bp, Homo sapiens
aggagagatacggcc

SEQ ID NO: 530576 - DNA, 15 bp, Homo sapiens
ggagagatacggccg

SEQ ID NO: 530577 - DNA, 15 bp, Homo sapiens
gagagatacggccgc

SEQ ID NO: 530578 - DNA, 15 bp, Homo sapiens
agagatacggccgcc

SEQ ID NO: 530579 - DNA, 15 bp, Homo sapiens
gagatacggccgcca

SEQ ID NO: 530580 - DNA, 15 bp, Homo sapiens
agatacggccgccag

SEQ ID NO: 530581 - DNA, 15 bp, Homo sapiens
gatacggccgccaga

SEQ ID NO: 530582 - DNA, 15 bp, Homo sapiens
atacggccgccagac

SEQ ID NO: 530583 - DNA, 15 bp, Homo sapiens
tacggccgccagact

SEQ ID NO: 530584 - DNA, 15 bp, Homo sapiens
acggccgccagactg

SEQ ID NO: 530585 - DNA, 15 bp, Homo sapiens
cggccgccagactgg

SEQ ID NO: 530586 - DNA, 15 bp, Homo sapiens
ggccgccagactggg

SEQ ID NO: 530587 - DNA, 15 bp, Homo sapiens
gccgccagactgggc

SEQ ID NO: 530588 - DNA, 15 bp, Homo sapiens
ccgccagactgggct

SEQ ID NO: 530589 - DNA, 15 bp, Homo sapiens
cgccagactgggcta

SEQ ID NO: 530590 - DNA, 15 bp, Homo sapiens
gccagactgggctaa

SEQ ID NO: 530591 - DNA, 15 bp, Homo sapiens
ccagactgggctaag

SEQ ID NO: 530592 - DNA, 15 bp, Homo sapiens
cagactgggctaagt

SEQ ID NO: 530593 - DNA, 15 bp, Homo sapiens
agactgggctaagtc

SEQ ID NO: 530594 - DNA, 15 bp, Homo sapiens
gactgggctaagtca

SEQ ID NO: 530595 - DNA, 15 bp, Homo sapiens
actgggctaagtcag

SEQ ID NO: 530596 - DNA, 15 bp, Homo sapiens
ctgggctaagtcagg

SEQ ID NO: 530597 - DNA, 15 bp, Homo sapiens
tgggctaagtcaggg

SEQ ID NO: 530598 - DNA, 15 bp, Homo sapiens
gggctaagtcaggga

SEQ ID NO: 530599 - DNA, 15 bp, Homo sapiens
ggctaagtcagggag

SEQ ID NO: 530600 - DNA, 15 bp, Homo sapiens
gctaagtcagggaga

SEQ ID NO: 530601 - DNA, 15 bp, Homo sapiens
ctaagtcagggagag

SEQ ID NO: 530602 - DNA, 15 bp, Homo sapiens
taagtcagggagaga

SEQ ID NO: 530603 - DNA, 15 bp, Homo sapiens
aagtcagggagagac

SEQ ID NO: 530604 - DNA, 15 bp, Homo sapiens
agtcagggagagacc

SEQ ID NO: 530605 - DNA, 15 bp, Homo sapiens
gtcagggagagaccc

SEQ ID NO: 530606 - DNA, 15 bp, Homo sapiens
tcagggagagaccca

SEQ ID NO: 530607 - DNA, 15 bp, Homo sapiens
cagggagagacccac

SEQ ID NO: 530608 - DNA, 15 bp, Homo sapiens
agggagagacccact

SEQ ID NO: 530609 - DNA, 15 bp, Homo sapiens
gggagagacccactc

SEQ ID NO: 530610 - DNA, 15 bp, Homo sapiens
ggagagacccactca

SEQ ID NO: 530611 - DNA, 15 bp, Homo sapiens
gagagacccactcac

SEQ ID NO: 530612 - DNA, 15 bp, Homo sapiens
agagacccactcacg

SEQ ID NO: 530613 - DNA, 15 bp, Homo sapiens
gagacccactcacgc

SEQ ID NO: 530614 - DNA, 15 bp, Homo sapiens
agacccactcacgca

SEQ ID NO: 530615 - DNA, 15 bp, Homo sapiens
gacccactcacgcag

SEQ ID NO: 530616 - DNA, 15 bp, Homo sapiens
acccactcacgcaga

SEQ ID NO: 530617 - DNA, 15 bp, Homo sapiens
cccactcacgcagag

SEQ ID NO: 530618 - DNA, 15 bp, Homo sapiens
ccactcacgcagagg

SEQ ID NO: 530619 - DNA, 15 bp, Homo sapiens
cactcacgcagaggc

SEQ ID NO: 530620 - DNA, 15 bp, Homo sapiens
actcacgcagaggca

SEQ ID NO: 530621 - DNA, 15 bp, Homo sapiens
ctcacgcagaggcac

SEQ ID NO: 530622 - DNA, 15 bp, Homo sapiens
tcacgcagaggcacc

SEQ ID NO: 530623 - DNA, 15 bp, Homo sapiens
cacgcagaggcacct

SEQ ID NO: 530624 - DNA, 15 bp, Homo sapiens
acgcagaggcacctg

SEQ ID NO: 530625 - DNA, 15 bp, Homo sapiens
cgcagaggcacctgg

SEQ ID NO: 530626 - DNA, 15 bp, Homo sapiens
gcagaggcacctggc

SEQ ID NO: 530627 - DNA, 15 bp, Homo sapiens
cagaggcacctggca

SEQ ID NO: 530628 - DNA, 15 bp, Homo sapiens
agaggcacctggcaa

SEQ ID NO: 530629 - DNA, 15 bp, Homo sapiens
gaggcacctggcaac

SEQ ID NO: 530630 - DNA, 15 bp, Homo sapiens
aggcacctggcaacc

SEQ ID NO: 530631 - DNA, 15 bp, Homo sapiens
ggcacctggcaacct

SEQ ID NO: 530632 - DNA, 15 bp, Homo sapiens
gcacctggcaaccta

SEQ ID NO: 530633 - DNA, 15 bp, Homo sapiens
cacctggcaacctag

SEQ ID NO: 530634 - DNA, 15 bp, Homo sapiens
acctggcaacctagg

SEQ ID NO: 530635 - DNA, 15 bp, Homo sapiens
cctggcaacctaggg

SEQ ID NO: 530636 - DNA, 15 bp, Homo sapiens
ctggcaacctagggt

SEQ ID NO: 530637 - DNA, 15 bp, Homo sapiens
tggcaacctagggtg

SEQ ID NO: 530638 - DNA, 15 bp, Homo sapiens
ggcaacctagggtgg

SEQ ID NO: 530639 - DNA, 15 bp, Homo sapiens
gcaacctagggtggc

SEQ ID NO: 530640 - DNA, 15 bp, Homo sapiens
caacctagggtggct

SEQ ID NO: 530641 - DNA, 15 bp, Homo sapiens
aacctagggtggctt

SEQ ID NO: 530642 - DNA, 15 bp, Homo sapiens
acctagggtggcttt

SEQ ID NO: 530643 - DNA, 15 bp, Homo sapiens
cctagggtggctttt

SEQ ID NO: 530644 - DNA, 15 bp, Homo sapiens
ctagggtggcttttg

SEQ ID NO: 530645 - DNA, 15 bp, Homo sapiens
tagggtggcttttgc

SEQ ID NO: 530646 - DNA, 15 bp, Homo sapiens
agggtggcttttgcg

SEQ ID NO: 530647 - DNA, 15 bp, Homo sapiens
gggtggcttttgcgc

SEQ ID NO: 530648 - DNA, 15 bp, Homo sapiens
ggtggcttttgcgcc

SEQ ID NO: 530649 - DNA, 15 bp, Homo sapiens
gtggcttttgcgcct

SEQ ID NO: 530650 - DNA, 15 bp, Homo sapiens
tggcttttgcgcctt

SEQ ID NO: 530651 - DNA, 15 bp, Homo sapiens
ggcttttgcgccttc

SEQ ID NO: 530652 - DNA, 15 bp, Homo sapiens
gcttttgcgccttcc

SEQ ID NO: 530653 - DNA, 15 bp, Homo sapiens
cttttgcgccttcca

SEQ ID NO: 530654 - DNA, 15 bp, Homo sapiens
ttttgcgccttccag

SEQ ID NO: 530655 - DNA, 15 bp, Homo sapiens
tttgcgccttccagc

SEQ ID NO: 530656 - DNA, 15 bp, Homo sapiens
ttgcgccttccagcc

SEQ ID NO: 530657 - DNA, 15 bp, Homo sapiens
tgcgccttccagccc

SEQ ID NO: 530658 - DNA, 15 bp, Homo sapiens
gcgccttccagccca

SEQ ID NO: 530659 - DNA, 15 bp, Homo sapiens
cgccttccagcccaa

SEQ ID NO: 530660 - DNA, 15 bp, Homo sapiens
gccttccagcccaaa

SEQ ID NO: 530661 - DNA, 15 bp, Homo sapiens
ccttccagcccaaat

SEQ ID NO: 530662 - DNA, 15 bp, Homo sapiens
cttccagcccaaatt

SEQ ID NO: 530663 - DNA, 15 bp, Homo sapiens
ttccagcccaaatta

SEQ ID NO: 530664 - DNA, 15 bp, Homo sapiens
tccagcccaaattat

SEQ ID NO: 530665 - DNA, 15 bp, Homo sapiens
ccagcccaaattatc

SEQ ID NO: 530666 - DNA, 15 bp, Homo sapiens
cagcccaaattatca

SEQ ID NO: 530667 - DNA, 15 bp, Homo sapiens
agcccaaattatcag

SEQ ID NO: 530668 - DNA, 15 bp, Homo sapiens
gcccaaattatcaga

SEQ ID NO: 530669 - DNA, 15 bp, Homo sapiens
cccaaattatcagac

SEQ ID NO: 530670 - DNA, 15 bp, Homo sapiens
ccaaattatcagacc

SEQ ID NO: 530671 - DNA, 15 bp, Homo sapiens
caaattatcagacct

SEQ ID NO: 530672 - DNA, 15 bp, Homo sapiens
aaattatcagaccta

SEQ ID NO: 530673 - DNA, 15 bp, Homo sapiens
aattatcagacctaa

SEQ ID NO: 530674 - DNA, 15 bp, Homo sapiens
attatcagacctaag

SEQ ID NO: 530675 - DNA, 15 bp, Homo sapiens
ttatcagacctaagt

SEQ ID NO: 530676 - DNA, 15 bp, Homo sapiens
tatcagacctaagta

SEQ ID NO: 530677 - DNA, 15 bp, Homo sapiens
atcagacctaagtaa

SEQ ID NO: 530678 - DNA, 15 bp, Homo sapiens
tcagacctaagtaag

SEQ ID NO: 530679 - DNA, 15 bp, Homo sapiens
cagacctaagtaaga

SEQ ID NO: 530680 - DNA, 15 bp, Homo sapiens
agacctaagtaagac

SEQ ID NO: 530681 - DNA, 15 bp, Homo sapiens
gacctaagtaagact

SEQ ID NO: 530682 - DNA, 15 bp, Homo sapiens
acctaagtaagactc

SEQ ID NO: 530683 - DNA, 15 bp, Homo sapiens
cctaagtaagactct

SEQ ID NO: 530684 - DNA, 15 bp, Homo sapiens
ctaagtaagactctc

SEQ ID NO: 530685 - DNA, 15 bp, Homo sapiens
taagtaagactctcc

SEQ ID NO: 530686 - DNA, 15 bp, Homo sapiens
aagtaagactctcct

SEQ ID NO: 530687 - DNA, 15 bp, Homo sapiens
agtaagactctcctg

SEQ ID NO: 530688 - DNA, 15 bp, Homo sapiens
gtaagactctcctgc

SEQ ID NO: 530689 - DNA, 15 bp, Homo sapiens
taagactctcctgcc

SEQ ID NO: 530690 - DNA, 15 bp, Homo sapiens
aagactctcctgcca

SEQ ID NO: 530691 - DNA, 15 bp, Homo sapiens
agactctcctgccac

SEQ ID NO: 530692 - DNA, 15 bp, Homo sapiens
gactctcctgccact

SEQ ID NO: 530693 - DNA, 15 bp, Homo sapiens
actctcctgccacta

SEQ ID NO: 530694 - DNA, 15 bp, Homo sapiens
ctctcctgccactaa

SEQ ID NO: 530695 - DNA, 15 bp, Homo sapiens
tctcctgccactaaa

SEQ ID NO: 530696 - DNA, 15 bp, Homo sapiens
ctcctgccactaaaa

SEQ ID NO: 530697 - DNA, 15 bp, Homo sapiens
tcctgccactaaaaa

SEQ ID NO: 530698 - DNA, 15 bp, Homo sapiens
cctgccactaaaaat

SEQ ID NO: 530699 - DNA, 15 bp, Homo sapiens
ctgccactaaaaatg

SEQ ID NO: 530700 - DNA, 15 bp, Homo sapiens
tgccactaaaaatga

SEQ ID NO: 530701 - DNA, 15 bp, Homo sapiens
gccactaaaaatgag

SEQ ID NO: 530702 - DNA, 15 bp, Homo sapiens
ccactaaaaatgagg

SEQ ID NO: 530703 - DNA, 15 bp, Homo sapiens
cactaaaaatgagga

SEQ ID NO: 530704 - DNA, 15 bp, Homo sapiens
actaaaaatgaggac

SEQ ID NO: 530705 - DNA, 15 bp, Homo sapiens
ctaaaaatgaggacc

SEQ ID NO: 530706 - DNA, 15 bp, Homo sapiens
taaaaatgaggacct

SEQ ID NO: 530707 - DNA, 15 bp, Homo sapiens
aaaaatgaggacctg

SEQ ID NO: 530708 - DNA, 15 bp, Homo sapiens
aaaatgaggacctga

SEQ ID NO: 530709 - DNA, 15 bp, Homo sapiens
aaatgaggacctgac

SEQ ID NO: 530710 - DNA, 15 bp, Homo sapiens
aatgaggacctgaca

SEQ ID NO: 530711 - DNA, 15 bp, Homo sapiens
atgaggacctgacag

SEQ ID NO: 530712 - DNA, 15 bp, Homo sapiens
tgaggacctgacagt

SEQ ID NO: 530713 - DNA, 15 bp, Homo sapiens
gaggacctgacagtc

SEQ ID NO: 530714 - DNA, 15 bp, Homo sapiens
aggacctgacagtca

SEQ ID NO: 530715 - DNA, 15 bp, Homo sapiens
ggacctgacagtcat

SEQ ID NO: 530716 - DNA, 15 bp, Homo sapiens
gacctgacagtcatt

SEQ ID NO: 530717 - DNA, 15 bp, Homo sapiens
acctgacagtcattg

SEQ ID NO: 530718 - DNA, 15 bp, Homo sapiens
cctgacagtcattgt

SEQ ID NO: 530719 - DNA, 15 bp, Homo sapiens
ctgacagtcattgta

SEQ ID NO: 530720 - DNA, 15 bp, Homo sapiens
tgacagtcattgtag

SEQ ID NO: 530721 - DNA, 15 bp, Homo sapiens
gacagtcattgtagc

SEQ ID NO: 530722 - DNA, 15 bp, Homo sapiens
acagtcattgtagca

SEQ ID NO: 530723 - DNA, 15 bp, Homo sapiens
cagtcattgtagcag

SEQ ID NO: 530724 - DNA, 15 bp, Homo sapiens
agtcattgtagcagt

SEQ ID NO: 530725 - DNA, 15 bp, Homo sapiens
gtcattgtagcagtc

SEQ ID NO: 530726 - DNA, 15 bp, Homo sapiens
tcattgtagcagtct

SEQ ID NO: 530727 - DNA, 15 bp, Homo sapiens
cattgtagcagtctc

SEQ ID NO: 530728 - DNA, 15 bp, Homo sapiens
attgtagcagtctct

SEQ ID NO: 530729 - DNA, 15 bp, Homo sapiens
ttgtagcagtctctt

SEQ ID NO: 530730 - DNA, 15 bp, Homo sapiens
tgtagcagtctcttc

SEQ ID NO: 530731 - DNA, 15 bp, Homo sapiens
gtagcagtctcttcc

SEQ ID NO: 530732 - DNA, 15 bp, Homo sapiens
tagcagtctcttccc

SEQ ID NO: 530733 - DNA, 15 bp, Homo sapiens
agcagtctcttccca

SEQ ID NO: 530734 - DNA, 15 bp, Homo sapiens
gcagtctcttcccaa

SEQ ID NO: 530735 - DNA, 15 bp, Homo sapiens
cagtctcttcccaaa

SEQ ID NO: 530736 - DNA, 15 bp, Homo sapiens
agtctcttcccaaaa

SEQ ID NO: 530737 - DNA, 15 bp, Homo sapiens
gtctcttcccaaaaa

SEQ ID NO: 530738 - DNA, 15 bp, Homo sapiens
tctcttcccaaaaac

SEQ ID NO: 530739 - DNA, 15 bp, Homo sapiens
ctcttcccaaaaacc

SEQ ID NO: 530740 - DNA, 15 bp, Homo sapiens
tcttcccaaaaacct

SEQ ID NO: 530741 - DNA, 15 bp, Homo sapiens
cttcccaaaaaccta

SEQ ID NO: 530742 - DNA, 15 bp, Homo sapiens
ttcccaaaaacctat

SEQ ID NO: 530743 - DNA, 15 bp, Homo sapiens
tcccaaaaacctatt

SEQ ID NO: 530744 - DNA, 15 bp, Homo sapiens
cccaaaaacctattt

SEQ ID NO: 530745 - DNA, 15 bp, Homo sapiens
ccaaaaacctatttt

SEQ ID NO: 530746 - DNA, 15 bp, Homo sapiens
caaaaacctattttc

SEQ ID NO: 530747 - DNA, 15 bp, Homo sapiens
aaaaacctattttct

SEQ ID NO: 530748 - DNA, 15 bp, Homo sapiens
aaaacctattttcta

SEQ ID NO: 530749 - DNA, 15 bp, Homo sapiens
aaacctattttctaa

SEQ ID NO: 530750 - DNA, 15 bp, Homo sapiens
aacctattttctaag

SEQ ID NO: 530751 - DNA, 15 bp, Homo sapiens
acctattttctaagg

SEQ ID NO: 530752 - DNA, 15 bp, Homo sapiens
cctattttctaaggg

SEQ ID NO: 530753 - DNA, 15 bp, Homo sapiens
ctattttctaagggg

SEQ ID NO: 530754 - DNA, 15 bp, Homo sapiens
tattttctaaggggc

SEQ ID NO: 530755 - DNA, 15 bp, Homo sapiens
attttctaaggggcc

SEQ ID NO: 530756 - DNA, 15 bp, Homo sapiens
ttttctaaggggcct

SEQ ID NO: 530757 - DNA, 15 bp, Homo sapiens
tttctaaggggcctc

SEQ ID NO: 530758 - DNA, 15 bp, Homo sapiens
ttctaaggggcctcc

SEQ ID NO: 530759 - DNA, 15 bp, Homo sapiens
tctaaggggcctcca

SEQ ID NO: 530760 - DNA, 15 bp, Homo sapiens
ctaaggggcctccac

SEQ ID NO: 530761 - DNA, 15 bp, Homo sapiens
taaggggcctccaca

SEQ ID NO: 530762 - DNA, 15 bp, Homo sapiens
aaggggcctccacag

SEQ ID NO: 530763 - DNA, 15 bp, Homo sapiens
aggggcctccacaga

SEQ ID NO: 530764 - DNA, 15 bp, Homo sapiens
ggggcctccacagac

SEQ ID NO: 530765 - DNA, 15 bp, Homo sapiens
gggcctccacagacc

SEQ ID NO: 530766 - DNA, 15 bp, Homo sapiens
ggcctccacagacct

SEQ ID NO: 530767 - DNA, 15 bp, Homo sapiens
gcctccacagacctc

SEQ ID NO: 530768 - DNA, 15 bp, Homo sapiens
cctccacagacctcc

SEQ ID NO: 530769 - DNA, 15 bp, Homo sapiens
ctccacagacctccc

SEQ ID NO: 530770 - DNA, 15 bp, Homo sapiens
tccacagacctccct

SEQ ID NO: 530771 - DNA, 15 bp, Homo sapiens
ccacagacctcccta

SEQ ID NO: 530772 - DNA, 15 bp, Homo sapiens
cacagacctccctaa

SEQ ID NO: 530773 - DNA, 15 bp, Homo sapiens
acagacctccctaac

SEQ ID NO: 530774 - DNA, 15 bp, Homo sapiens
cagacctccctaacc

SEQ ID NO: 530775 - DNA, 15 bp, Homo sapiens
agacctccctaacct

SEQ ID NO: 530776 - DNA, 15 bp, Homo sapiens
gacctccctaacctt

SEQ ID NO: 530777 - DNA, 15 bp, Homo sapiens
acctccctaaccttg

SEQ ID NO: 530778 - DNA, 15 bp, Homo sapiens
cctccctaaccttgc

SEQ ID NO: 530779 - DNA, 15 bp, Homo sapiens
ctccctaaccttgcg

SEQ ID NO: 530780 - DNA, 15 bp, Homo sapiens
tccctaaccttgcgt

SEQ ID NO: 530781 - DNA, 15 bp, Homo sapiens
ccctaaccttgcgtt

SEQ ID NO: 530782 - DNA, 15 bp, Homo sapiens
cctaaccttgcgtta

SEQ ID NO: 530783 - DNA, 15 bp, Homo sapiens
ctaaccttgcgttag

SEQ ID NO: 530784 - DNA, 15 bp, Homo sapiens
taaccttgcgttagt

SEQ ID NO: 530785 - DNA, 15 bp, Homo sapiens
aaccttgcgttagtc

SEQ ID NO: 530786 - DNA, 15 bp, Homo sapiens
accttgcgttagtct

SEQ ID NO: 530787 - DNA, 15 bp, Homo sapiens
ccttgcgttagtctt

SEQ ID NO: 530788 - DNA, 15 bp, Homo sapiens
cttgcgttagtcttc

SEQ ID NO: 530789 - DNA, 15 bp, Homo sapiens
ttgcgttagtcttcc

SEQ ID NO: 530790 - DNA, 15 bp, Homo sapiens
tgcgttagtcttcct

SEQ ID NO: 530791 - DNA, 15 bp, Homo sapiens
gcgttagtcttcctc

SEQ ID NO: 530792 - DNA, 15 bp, Homo sapiens
cgttagtcttcctcc

SEQ ID NO: 530793 - DNA, 15 bp, Homo sapiens
gttagtcttcctccg

SEQ ID NO: 530794 - DNA, 15 bp, Homo sapiens
ttagtcttcctccgt

SEQ ID NO: 530795 - DNA, 15 bp, Homo sapiens
tagtcttcctccgtc

SEQ ID NO: 530796 - DNA, 15 bp, Homo sapiens
agtcttcctccgtcc

SEQ ID NO: 530797 - DNA, 15 bp, Homo sapiens
gtcttcctccgtccc

SEQ ID NO: 530798 - DNA, 15 bp, Homo sapiens
tcttcctccgtcccc

SEQ ID NO: 530799 - DNA, 15 bp, Homo sapiens
cttcctccgtccccg

SEQ ID NO: 530800 - DNA, 15 bp, Homo sapiens
ttcctccgtccccgg

SEQ ID NO: 530801 - DNA, 15 bp, Homo sapiens
tcctccgtccccggg

SEQ ID NO: 530802 - DNA, 15 bp, Homo sapiens
cctccgtccccgggc

SEQ ID NO: 530803 - DNA, 15 bp, Homo sapiens
ctccgtccccgggcc

SEQ ID NO: 530804 - DNA, 15 bp, Homo sapiens
tccgtccccgggcca

SEQ ID NO: 530805 - DNA, 15 bp, Homo sapiens
ccgtccccgggccac

SEQ ID NO: 530806 - DNA, 15 bp, Homo sapiens
cgtccccgggccacc

SEQ ID NO: 530807 - DNA, 15 bp, Homo sapiens
gtccccgggccacca

SEQ ID NO: 530808 - DNA, 15 bp, Homo sapiens
tccccgggccaccag

SEQ ID NO: 530809 - DNA, 15 bp, Homo sapiens
ccccgggccaccagc

SEQ ID NO: 530810 - DNA, 15 bp, Homo sapiens
cccgggccaccagca

SEQ ID NO: 530811 - DNA, 15 bp, Homo sapiens
ccgggccaccagcag

SEQ ID NO: 530812 - DNA, 15 bp, Homo sapiens
cgggccaccagcagg

SEQ ID NO: 530813 - DNA, 15 bp, Homo sapiens
gggccaccagcaggg

SEQ ID NO: 530814 - DNA, 15 bp, Homo sapiens
ggccaccagcaggga

SEQ ID NO: 530815 - DNA, 15 bp, Homo sapiens
gccaccagcagggaa

SEQ ID NO: 530816 - DNA, 15 bp, Homo sapiens
ccaccagcagggaag

SEQ ID NO: 530817 - DNA, 15 bp, Homo sapiens
caccagcagggaaga

SEQ ID NO: 530818 - DNA, 15 bp, Homo sapiens
accagcagggaagag

SEQ ID NO: 530819 - DNA, 15 bp, Homo sapiens
ccagcagggaagagc

SEQ ID NO: 530820 - DNA, 15 bp, Homo sapiens
cagcagggaagagca

SEQ ID NO: 530821 - DNA, 15 bp, Homo sapiens
agcagggaagagcag

SEQ ID NO: 530822 - DNA, 15 bp, Homo sapiens
gcagggaagagcagc

SEQ ID NO: 530823 - DNA, 15 bp, Homo sapiens
cagggaagagcagcg

SEQ ID NO: 530824 - DNA, 15 bp, Homo sapiens
agggaagagcagcgc

SEQ ID NO: 530825 - DNA, 15 bp, Homo sapiens
gggaagagcagcgca

SEQ ID NO: 530826 - DNA, 15 bp, Homo sapiens
ggaagagcagcgcag

SEQ ID NO: 530827 - DNA, 15 bp, Homo sapiens
gaagagcagcgcagc

SEQ ID NO: 530828 - DNA, 15 bp, Homo sapiens
aagagcagcgcagct

SEQ ID NO: 530829 - DNA, 15 bp, Homo sapiens
agagcagcgcagctg

SEQ ID NO: 530830 - DNA, 15 bp, Homo sapiens
gagcagcgcagctgg

SEQ ID NO: 530831 - DNA, 15 bp, Homo sapiens
agcagcgcagctgga

SEQ ID NO: 530832 - DNA, 15 bp, Homo sapiens
gcagcgcagctggat

SEQ ID NO: 530833 - DNA, 15 bp, Homo sapiens
cagcgcagctggatg

SEQ ID NO: 530834 - DNA, 15 bp, Homo sapiens
agcgcagctggatgc

SEQ ID NO: 530835 - DNA, 15 bp, Homo sapiens
gcgcagctggatgct

SEQ ID NO: 530836 - DNA, 15 bp, Homo sapiens
cgcagctggatgctg

SEQ ID NO: 530837 - DNA, 15 bp, Homo sapiens
gcagctggatgctgg

SEQ ID NO: 530838 - DNA, 15 bp, Homo sapiens
cagctggatgctggc

SEQ ID NO: 530839 - DNA, 15 bp, Homo sapiens
agctggatgctggca

SEQ ID NO: 530840 - DNA, 15 bp, Homo sapiens
gctggatgctggcag

SEQ ID NO: 530841 - DNA, 15 bp, Homo sapiens
ctggatgctggcaga

SEQ ID NO: 530842 - DNA, 15 bp, Homo sapiens
tggatgctggcagag

SEQ ID NO: 530843 - DNA, 15 bp, Homo sapiens
ggatgctggcagaga

SEQ ID NO: 530844 - DNA, 15 bp, Homo sapiens
gatgctggcagagaa

SEQ ID NO: 530845 - DNA, 15 bp, Homo sapiens
atgctggcagagaaa

SEQ ID NO: 530846 - DNA, 15 bp, Homo sapiens
tgctggcagagaaag

SEQ ID NO: 530847 - DNA, 15 bp, Homo sapiens
gctggcagagaaagg

SEQ ID NO: 530848 - DNA, 15 bp, Homo sapiens
ctggcagagaaaggg

SEQ ID NO: 530849 - DNA, 15 bp, Homo sapiens
tggcagagaaagggt

SEQ ID NO: 530850 - DNA, 15 bp, Homo sapiens
ggcagagaaagggtg

SEQ ID NO: 530851 - DNA, 15 bp, Homo sapiens
gcagagaaagggtgg

SEQ ID NO: 530852 - DNA, 15 bp, Homo sapiens
cagagaaagggtggt

SEQ ID NO: 530853 - DNA, 15 bp, Homo sapiens
agagaaagggtggtg

SEQ ID NO: 530854 - DNA, 15 bp, Homo sapiens
gagaaagggtggtga

SEQ ID NO: 530855 - DNA, 15 bp, Homo sapiens
agaaagggtggtgag

SEQ ID NO: 530856 - DNA, 15 bp, Homo sapiens
gaaagggtggtgagg

SEQ ID NO: 530857 - DNA, 15 bp, Homo sapiens
aaagggtggtgagga

SEQ ID NO: 530858 - DNA, 15 bp, Homo sapiens
aagggtggtgaggaa

SEQ ID NO: 530859 - DNA, 15 bp, Homo sapiens
agggtggtgaggaag

SEQ ID NO: 530860 - DNA, 15 bp, Homo sapiens
gggtggtgaggaagt

SEQ ID NO: 530861 - DNA, 15 bp, Homo sapiens
ggtggtgaggaagtc

SEQ ID NO: 530862 - DNA, 15 bp, Homo sapiens
gtggtgaggaagtca

SEQ ID NO: 530863 - DNA, 15 bp, Homo sapiens
tggtgaggaagtcaa

SEQ ID NO: 530864 - DNA, 15 bp, Homo sapiens
ggtgaggaagtcaag

SEQ ID NO: 530865 - DNA, 15 bp, Homo sapiens
gtgaggaagtcaagc

SEQ ID NO: 530866 - DNA, 15 bp, Homo sapiens
tgaggaagtcaagca

SEQ ID NO: 530867 - DNA, 15 bp, Homo sapiens
gaggaagtcaagcag

SEQ ID NO: 530868 - DNA, 15 bp, Homo sapiens
aggaagtcaagcagg

SEQ ID NO: 530869 - DNA, 15 bp, Homo sapiens
ggaagtcaagcaggt

SEQ ID NO: 530870 - DNA, 15 bp, Homo sapiens
gaagtcaagcaggtc

SEQ ID NO: 530871 - DNA, 15 bp, Homo sapiens
aagtcaagcaggtct

SEQ ID NO: 530872 - DNA, 15 bp, Homo sapiens
agtcaagcaggtctg

SEQ ID NO: 530873 - DNA, 15 bp, Homo sapiens
gtcaagcaggtctgt

SEQ ID NO: 530874 - DNA, 15 bp, Homo sapiens
tcaagcaggtctgtg

SEQ ID NO: 530875 - DNA, 15 bp, Homo sapiens
caagcaggtctgtgc

SEQ ID NO: 530876 - DNA, 15 bp, Homo sapiens
aagcaggtctgtgca

SEQ ID NO: 530877 - DNA, 15 bp, Homo sapiens
agcaggtctgtgcac

SEQ ID NO: 530878 - DNA, 15 bp, Homo sapiens
gcaggtctgtgcact

SEQ ID NO: 530879 - DNA, 15 bp, Homo sapiens
caggtctgtgcactg

SEQ ID NO: 530880 - DNA, 15 bp, Homo sapiens
aggtctgtgcactga

SEQ ID NO: 530881 - DNA, 15 bp, Homo sapiens
ggtctgtgcactgag

SEQ ID NO: 530882 - DNA, 15 bp, Homo sapiens
gtctgtgcactgagg

SEQ ID NO: 530883 - DNA, 15 bp, Homo sapiens
tctgtgcactgaggg

SEQ ID NO: 530884 - DNA, 15 bp, Homo sapiens
ctgtgcactgagggg

SEQ ID NO: 530885 - DNA, 15 bp, Homo sapiens
tgtgcactgaggggc

SEQ ID NO: 530886 - DNA, 15 bp, Homo sapiens
gtgcactgaggggcg

SEQ ID NO: 530887 - DNA, 15 bp, Homo sapiens
tgcactgaggggcga

SEQ ID NO: 530888 - DNA, 15 bp, Homo sapiens
gcactgaggggcgag

SEQ ID NO: 530889 - DNA, 15 bp, Homo sapiens
cactgaggggcgagt

SEQ ID NO: 530890 - DNA, 15 bp, Homo sapiens
actgaggggcgagtg

SEQ ID NO: 530891 - DNA, 15 bp, Homo sapiens
ctgaggggcgagtgt

SEQ ID NO: 530892 - DNA, 15 bp, Homo sapiens
tgaggggcgagtgtt

SEQ ID NO: 530893 - DNA, 15 bp, Homo sapiens
gaggggcgagtgttg

SEQ ID NO: 530894 - DNA, 15 bp, Homo sapiens
aggggcgagtgttgg

SEQ ID NO: 530895 - DNA, 15 bp, Homo sapiens
ggggcgagtgttggc

SEQ ID NO: 530896 - DNA, 15 bp, Homo sapiens
gggcgagtgttggca

SEQ ID NO: 530897 - DNA, 15 bp, Homo sapiens
ggcgagtgttggcag

SEQ ID NO: 530898 - DNA, 15 bp, Homo sapiens
gcgagtgttggcagc

SEQ ID NO: 530899 - DNA, 15 bp, Homo sapiens
cgagtgttggcagct

SEQ ID NO: 530900 - DNA, 15 bp, Homo sapiens
gagtgttggcagctc

SEQ ID NO: 530901 - DNA, 15 bp, Homo sapiens
agtgttggcagctct

SEQ ID NO: 530902 - DNA, 15 bp, Homo sapiens
gtgttggcagctctg

SEQ ID NO: 530903 - DNA, 15 bp, Homo sapiens
tgttggcagctctgt

SEQ ID NO: 530904 - DNA, 15 bp, Homo sapiens
gttggcagctctgta

SEQ ID NO: 530905 - DNA, 15 bp, Homo sapiens
ttggcagctctgtaa

SEQ ID NO: 530906 - DNA, 15 bp, Homo sapiens
tggcagctctgtaag

SEQ ID NO: 530907 - DNA, 15 bp, Homo sapiens
ggcagctctgtaagc

SEQ ID NO: 530908 - DNA, 15 bp, Homo sapiens
gcagctctgtaagct

SEQ ID NO: 530909 - DNA, 15 bp, Homo sapiens
cagctctgtaagctt

SEQ ID NO: 530910 - DNA, 15 bp, Homo sapiens
agctctgtaagcttc

SEQ ID NO: 530911 - DNA, 15 bp, Homo sapiens
gctctgtaagcttct

SEQ ID NO: 530912 - DNA, 15 bp, Homo sapiens
ctctgtaagcttctg

SEQ ID NO: 530913 - DNA, 15 bp, Homo sapiens
tctgtaagcttctgc

SEQ ID NO: 530914 - DNA, 15 bp, Homo sapiens
ctgtaagcttctgct

SEQ ID NO: 530915 - DNA, 15 bp, Homo sapiens
tgtaagcttctgctc

SEQ ID NO: 530916 - DNA, 15 bp, Homo sapiens
gtaagcttctgctcc

SEQ ID NO: 530917 - DNA, 15 bp, Homo sapiens
taagcttctgctcct

SEQ ID NO: 530918 - DNA, 15 bp, Homo sapiens
aagcttctgctcctc

SEQ ID NO: 530919 - DNA, 15 bp, Homo sapiens
agcttctgctcctca

SEQ ID NO: 530920 - DNA, 15 bp, Homo sapiens
gcttctgctcctcag

SEQ ID NO: 530921 - DNA, 15 bp, Homo sapiens
cttctgctcctcagc

SEQ ID NO: 530922 - DNA, 15 bp, Homo sapiens
ttctgctcctcagcc

SEQ ID NO: 530923 - DNA, 15 bp, Homo sapiens
tctgctcctcagcct

SEQ ID NO: 530924 - DNA, 15 bp, Homo sapiens
ctgctcctcagcctg

SEQ ID NO: 530925 - DNA, 15 bp, Homo sapiens
tgctcctcagcctgc

SEQ ID NO: 530926 - DNA, 15 bp, Homo sapiens
gctcctcagcctgca

SEQ ID NO: 530927 - DNA, 15 bp, Homo sapiens
ctcctcagcctgcaa

SEQ ID NO: 530928 - DNA, 15 bp, Homo sapiens
tcctcagcctgcaag

SEQ ID NO: 530929 - DNA, 15 bp, Homo sapiens
cctcagcctgcaaga

SEQ ID NO: 530930 - DNA, 15 bp, Homo sapiens
ctcagcctgcaagaa

SEQ ID NO: 530931 - DNA, 15 bp, Homo sapiens
tcagcctgcaagaaa

SEQ ID NO: 530932 - DNA, 15 bp, Homo sapiens
cagcctgcaagaaag

SEQ ID NO: 530933 - DNA, 15 bp, Homo sapiens
agcctgcaagaaagg

SEQ ID NO: 530934 - DNA, 15 bp, Homo sapiens
gcctgcaagaaaggg

SEQ ID NO: 530935 - DNA, 15 bp, Homo sapiens
cctgcaagaaagggg

SEQ ID NO: 530936 - DNA, 15 bp, Homo sapiens
ctgcaagaaagggga

SEQ ID NO: 530937 - DNA, 15 bp, Homo sapiens
tgcaagaaaggggag

SEQ ID NO: 530938 - DNA, 15 bp, Homo sapiens
gcaagaaaggggagt

SEQ ID NO: 530939 - DNA, 15 bp, Homo sapiens
caagaaaggggagtc

SEQ ID NO: 530940 - DNA, 15 bp, Homo sapiens
aagaaaggggagtcc

SEQ ID NO: 530941 - DNA, 15 bp, Homo sapiens
agaaaggggagtcct

SEQ ID NO: 530942 - DNA, 15 bp, Homo sapiens
gaaaggggagtccta

SEQ ID NO: 530943 - DNA, 15 bp, Homo sapiens
aaaggggagtcctac

SEQ ID NO: 530944 - DNA, 15 bp, Homo sapiens
aaggggagtcctacc

SEQ ID NO: 530945 - DNA, 15 bp, Homo sapiens
aggggagtcctacct

SEQ ID NO: 530946 - DNA, 15 bp, Homo sapiens
ggggagtcctacctc

SEQ ID NO: 530947 - DNA, 15 bp, Homo sapiens
gggagtcctacctct

SEQ ID NO: 530948 - DNA, 15 bp, Homo sapiens
ggagtcctacctctg

SEQ ID NO: 530949 - DNA, 15 bp, Homo sapiens
gagtcctacctctgt

SEQ ID NO: 530950 - DNA, 15 bp, Homo sapiens
agtcctacctctgtc

SEQ ID NO: 530951 - DNA, 15 bp, Homo sapiens
gtcctacctctgtcc

SEQ ID NO: 530952 - DNA, 15 bp, Homo sapiens
tcctacctctgtcct

SEQ ID NO: 530953 - DNA, 15 bp, Homo sapiens
cctacctctgtcctg

SEQ ID NO: 530954 - DNA, 15 bp, Homo sapiens
ctacctctgtcctgg

SEQ ID NO: 530955 - DNA, 15 bp, Homo sapiens
tacctctgtcctggt

SEQ ID NO: 530956 - DNA, 15 bp, Homo sapiens
acctctgtcctggtc

SEQ ID NO: 530957 - DNA, 15 bp, Homo sapiens
cctctgtcctggtcg

SEQ ID NO: 530958 - DNA, 15 bp, Homo sapiens
ctctgtcctggtcgc

SEQ ID NO: 530959 - DNA, 15 bp, Homo sapiens
tctgtcctggtcgcg

SEQ ID NO: 530960 - DNA, 15 bp, Homo sapiens
ctgtcctggtcgcgt

SEQ ID NO: 530961 - DNA, 15 bp, Homo sapiens
tgtcctggtcgcgtt

SEQ ID NO: 530962 - DNA, 15 bp, Homo sapiens
gtcctggtcgcgttc

SEQ ID NO: 530963 - DNA, 15 bp, Homo sapiens
tcctggtcgcgttct

SEQ ID NO: 530964 - DNA, 15 bp, Homo sapiens
cctggtcgcgttctc

SEQ ID NO: 530965 - DNA, 15 bp, Homo sapiens
ctggtcgcgttctct

SEQ ID NO: 530966 - DNA, 15 bp, Homo sapiens
tggtcgcgttctctc

SEQ ID NO: 530967 - DNA, 15 bp, Homo sapiens
ggtcgcgttctctcc

SEQ ID NO: 530968 - DNA, 15 bp, Homo sapiens
gtcgcgttctctcct

SEQ ID NO: 530969 - DNA, 15 bp, Homo sapiens
tcgcgttctctcctc

SEQ ID NO: 530970 - DNA, 15 bp, Homo sapiens
cgcgttctctcctca

SEQ ID NO: 530971 - DNA, 15 bp, Homo sapiens
gcgttctctcctcaa

SEQ ID NO: 530972 - DNA, 15 bp, Homo sapiens
cgttctctcctcaac

SEQ ID NO: 530973 - DNA, 15 bp, Homo sapiens
gttctctcctcaaca

SEQ ID NO: 530974 - DNA, 15 bp, Homo sapiens
ttctctcctcaacac

SEQ ID NO: 530975 - DNA, 15 bp, Homo sapiens
tctctcctcaacacg

SEQ ID NO: 530976 - DNA, 15 bp, Homo sapiens
ctctcctcaacacgc

SEQ ID NO: 530977 - DNA, 15 bp, Homo sapiens
tctcctcaacacgca

SEQ ID NO: 530978 - DNA, 15 bp, Homo sapiens
ctcctcaacacgcac

SEQ ID NO: 530979 - DNA, 15 bp, Homo sapiens
tcctcaacacgcacc

SEQ ID NO: 530980 - DNA, 15 bp, Homo sapiens
cctcaacacgcacca

SEQ ID NO: 530981 - DNA, 15 bp, Homo sapiens
ctcaacacgcaccaa

SEQ ID NO: 530982 - DNA, 15 bp, Homo sapiens
tcaacacgcaccaag

SEQ ID NO: 530983 - DNA, 15 bp, Homo sapiens
caacacgcaccaaga

SEQ ID NO: 530984 - DNA, 15 bp, Homo sapiens
aacacgcaccaagaa

SEQ ID NO: 530985 - DNA, 15 bp, Homo sapiens
acacgcaccaagaac

SEQ ID NO: 530986 - DNA, 15 bp, Homo sapiens
cacgcaccaagaact

SEQ ID NO: 530987 - DNA, 15 bp, Homo sapiens
acgcaccaagaacta

SEQ ID NO: 530988 - DNA, 15 bp, Homo sapiens
cgcaccaagaactag

SEQ ID NO: 530989 - DNA, 15 bp, Homo sapiens
gcaccaagaactaga

SEQ ID NO: 530990 - DNA, 15 bp, Homo sapiens
caccaagaactagaa

SEQ ID NO: 530991 - DNA, 15 bp, Homo sapiens
accaagaactagaac

SEQ ID NO: 530992 - DNA, 15 bp, Homo sapiens
ccaagaactagaaca

SEQ ID NO: 530993 - DNA, 15 bp, Homo sapiens
caagaactagaacat

SEQ ID NO: 530994 - DNA, 15 bp, Homo sapiens
aagaactagaacatc

SEQ ID NO: 530995 - DNA, 15 bp, Homo sapiens
agaactagaacatcc

SEQ ID NO: 530996 - DNA, 15 bp, Homo sapiens
gaactagaacatcct

SEQ ID NO: 530997 - DNA, 15 bp, Homo sapiens
aactagaacatcctg

SEQ ID NO: 530998 - DNA, 15 bp, Homo sapiens
actagaacatcctgg

SEQ ID NO: 530999 - DNA, 15 bp, Homo sapiens
ctagaacatcctggt

SEQ ID NO: 531000 - DNA, 15 bp, Homo sapiens
tagaacatcctggtt

SEQ ID NO: 531001 - DNA, 15 bp, Homo sapiens
agaacatcctggttt

SEQ ID NO: 531002 - DNA, 15 bp, Homo sapiens
gaacatcctggtttc

SEQ ID NO: 531003 - DNA, 15 bp, Homo sapiens
aacatcctggtttcc

SEQ ID NO: 531004 - DNA, 15 bp, Homo sapiens
acatcctggtttcca

SEQ ID NO: 531005 - DNA, 15 bp, Homo sapiens
catcctggtttccag

SEQ ID NO: 531006 - DNA, 15 bp, Homo sapiens
atcctggtttccaga

SEQ ID NO: 531007 - DNA, 15 bp, Homo sapiens
tcctggtttccagaa

SEQ ID NO: 531008 - DNA, 15 bp, Homo sapiens
cctggtttccagaac

SEQ ID NO: 531009 - DNA, 15 bp, Homo sapiens
ctggtttccagaaca

SEQ ID NO: 531010 - DNA, 15 bp, Homo sapiens
tggtttccagaacaa

SEQ ID NO: 531011 - DNA, 15 bp, Homo sapiens
ggtttccagaacaag

SEQ ID NO: 531012 - DNA, 15 bp, Homo sapiens
gtttccagaacaagc

SEQ ID NO: 531013 - DNA, 15 bp, Homo sapiens
tttccagaacaagct

SEQ ID NO: 531014 - DNA, 15 bp, Homo sapiens
ttccagaacaagctg

SEQ ID NO: 531015 - DNA, 15 bp, Homo sapiens
tccagaacaagctgc

SEQ ID NO: 531016 - DNA, 15 bp, Homo sapiens
ccagaacaagctgcg

SEQ ID NO: 531017 - DNA, 15 bp, Homo sapiens
cagaacaagctgcgg

SEQ ID NO: 531018 - DNA, 15 bp, Homo sapiens
agaacaagctgcggg

SEQ ID NO: 531019 - DNA, 15 bp, Homo sapiens
gaacaagctgcgggc

SEQ ID NO: 531020 - DNA, 15 bp, Homo sapiens
aacaagctgcgggca

SEQ ID NO: 531021 - DNA, 15 bp, Homo sapiens
acaagctgcgggcat

SEQ ID NO: 531022 - DNA, 15 bp, Homo sapiens
caagctgcgggcatc

SEQ ID NO: 531023 - DNA, 15 bp, Homo sapiens
aagctgcgggcatcc

SEQ ID NO: 531024 - DNA, 15 bp, Homo sapiens
agctgcgggcatccc

SEQ ID NO: 531025 - DNA, 15 bp, Homo sapiens
gctgcgggcatcccc

SEQ ID NO: 531026 - DNA, 15 bp, Homo sapiens
ctgcgggcatcccca

SEQ ID NO: 531027 - DNA, 15 bp, Homo sapiens
tgcgggcatccccag

SEQ ID NO: 531028 - DNA, 15 bp, Homo sapiens
gcgggcatccccagt

SEQ ID NO: 531029 - DNA, 15 bp, Homo sapiens
cgggcatccccagtt

SEQ ID NO: 531030 - DNA, 15 bp, Homo sapiens
gggcatccccagttc

SEQ ID NO: 531031 - DNA, 15 bp, Homo sapiens
ggcatccccagttcg

SEQ ID NO: 531032 - DNA, 15 bp, Homo sapiens
gcatccccagttcga

SEQ ID NO: 531033 - DNA, 15 bp, Homo sapiens
catccccagttcgaa

SEQ ID NO: 531034 - DNA, 15 bp, Homo sapiens
atccccagttcgaaa

SEQ ID NO: 531035 - DNA, 15 bp, Homo sapiens
tccccagttcgaaac

SEQ ID NO: 531036 - DNA, 15 bp, Homo sapiens
ccccagttcgaaact

SEQ ID NO: 531037 - DNA, 15 bp, Homo sapiens
cccagttcgaaactg

SEQ ID NO: 531038 - DNA, 15 bp, Homo sapiens
ccagttcgaaactgc

SEQ ID NO: 531039 - DNA, 15 bp, Homo sapiens
cagttcgaaactgcc

SEQ ID NO: 531040 - DNA, 15 bp, Homo sapiens
agttcgaaactgccc

SEQ ID NO: 531041 - DNA, 15 bp, Homo sapiens
gttcgaaactgccca

SEQ ID NO: 531042 - DNA, 15 bp, Homo sapiens
ttcgaaactgcccag

SEQ ID NO: 531043 - DNA, 15 bp, Homo sapiens
tcgaaactgcccagg

SEQ ID NO: 531044 - DNA, 15 bp, Homo sapiens
cgaaactgcccaggc

SEQ ID NO: 531045 - DNA, 15 bp, Homo sapiens
gaaactgcccaggcc

SEQ ID NO: 531046 - DNA, 15 bp, Homo sapiens
aaactgcccaggccc

SEQ ID NO: 531047 - DNA, 15 bp, Homo sapiens
aactgcccaggccct

SEQ ID NO: 531048 - DNA, 15 bp, Homo sapiens
actgcccaggccctg

SEQ ID NO: 531049 - DNA, 15 bp, Homo sapiens
ctgcccaggccctgg

SEQ ID NO: 531050 - DNA, 15 bp, Homo sapiens
tgcccaggccctggg

SEQ ID NO: 531051 - DNA, 15 bp, Homo sapiens
gcccaggccctgggg

SEQ ID NO: 531052 - DNA, 15 bp, Homo sapiens
cccaggccctggggg

SEQ ID NO: 531053 - DNA, 15 bp, Homo sapiens
ccaggccctggggga

SEQ ID NO: 531054 - DNA, 15 bp, Homo sapiens
caggccctgggggag

SEQ ID NO: 531055 - DNA, 15 bp, Homo sapiens
aggccctgggggagg

SEQ ID NO: 531056 - DNA, 15 bp, Homo sapiens
ggccctgggggaggc

SEQ ID NO: 531057 - DNA, 15 bp, Homo sapiens
gccctgggggaggcg

SEQ ID NO: 531058 - DNA, 15 bp, Homo sapiens
ccctgggggaggcgg

SEQ ID NO: 531059 - DNA, 15 bp, Homo sapiens
cctgggggaggcggc

SEQ ID NO: 531060 - DNA, 15 bp, Homo sapiens
ctgggggaggcggca

SEQ ID NO: 531061 - DNA, 15 bp, Homo sapiens
tgggggaggcggcag

SEQ ID NO: 531062 - DNA, 15 bp, Homo sapiens
gggggaggcggcagt

SEQ ID NO: 531063 - DNA, 15 bp, Homo sapiens
ggggaggcggcagtc

SEQ ID NO: 531064 - DNA, 15 bp, Homo sapiens
gggaggcggcagtct

SEQ ID NO: 531065 - DNA, 15 bp, Homo sapiens
ggaggcggcagtctg

SEQ ID NO: 531066 - DNA, 15 bp, Homo sapiens
gaggcggcagtctga

SEQ ID NO: 531067 - DNA, 15 bp, Homo sapiens
aggcggcagtctgat

SEQ ID NO: 531068 - DNA, 15 bp, Homo sapiens
ggcggcagtctgatt

SEQ ID NO: 531069 - DNA, 15 bp, Homo sapiens
gcggcagtctgattt

SEQ ID NO: 531070 - DNA, 15 bp, Homo sapiens
cggcagtctgatttc

SEQ ID NO: 531071 - DNA, 15 bp, Homo sapiens
ggcagtctgatttcg

SEQ ID NO: 531072 - DNA, 15 bp, Homo sapiens
gcagtctgatttcgg

SEQ ID NO: 531073 - DNA, 15 bp, Homo sapiens
cagtctgatttcggg

SEQ ID NO: 531074 - DNA, 15 bp, Homo sapiens
agtctgatttcgggc

SEQ ID NO: 531075 - DNA, 15 bp, Homo sapiens
gtctgatttcgggca

SEQ ID NO: 531076 - DNA, 15 bp, Homo sapiens
tctgatttcgggcag

SEQ ID NO: 531077 - DNA, 15 bp, Homo sapiens
ctgatttcgggcagg

SEQ ID NO: 531078 - DNA, 15 bp, Homo sapiens
tgatttcgggcaggg

SEQ ID NO: 531079 - DNA, 15 bp, Homo sapiens
gatttcgggcagggg

SEQ ID NO: 531080 - DNA, 15 bp, Homo sapiens
atttcgggcagggga

SEQ ID NO: 531081 - DNA, 15 bp, Homo sapiens
tttcgggcaggggag

SEQ ID NO: 531082 - DNA, 15 bp, Homo sapiens
ttcgggcaggggaga

SEQ ID NO: 531083 - DNA, 15 bp, Homo sapiens
tcgggcaggggagag

SEQ ID NO: 531084 - DNA, 15 bp, Homo sapiens
cgggcaggggagagt

SEQ ID NO: 531085 - DNA, 15 bp, Homo sapiens
gggcaggggagagta

SEQ ID NO: 531086 - DNA, 15 bp, Homo sapiens
ggcaggggagagtaa

SEQ ID NO: 531087 - DNA, 15 bp, Homo sapiens
gcaggggagagtaaa

SEQ ID NO: 531088 - DNA, 15 bp, Homo sapiens
caggggagagtaaaa

SEQ ID NO: 531089 - DNA, 15 bp, Homo sapiens
aggggagagtaaaag

SEQ ID NO: 531090 - DNA, 15 bp, Homo sapiens
ggggagagtaaaagg

SEQ ID NO: 531091 - DNA, 15 bp, Homo sapiens
gggagagtaaaagga

SEQ ID NO: 531092 - DNA, 15 bp, Homo sapiens
ggagagtaaaaggac

SEQ ID NO: 531093 - DNA, 15 bp, Homo sapiens
gagagtaaaaggact

SEQ ID NO: 531094 - DNA, 15 bp, Homo sapiens
agagtaaaaggactg

SEQ ID NO: 531095 - DNA, 15 bp, Homo sapiens
gagtaaaaggactgt

SEQ ID NO: 531096 - DNA, 15 bp, Homo sapiens
agtaaaaggactgta

SEQ ID NO: 531097 - DNA, 15 bp, Homo sapiens
gtaaaaggactgtag

SEQ ID NO: 531098 - DNA, 15 bp, Homo sapiens
taaaaggactgtagg

SEQ ID NO: 531099 - DNA, 15 bp, Homo sapiens
aaaaggactgtaggg

SEQ ID NO: 531100 - DNA, 15 bp, Homo sapiens
aaaggactgtaggga

SEQ ID NO: 531101 - DNA, 15 bp, Homo sapiens
aaggactgtagggag

SEQ ID NO: 531102 - DNA, 15 bp, Homo sapiens
aggactgtagggagg

SEQ ID NO: 531103 - DNA, 15 bp, Homo sapiens
ggactgtagggagga

SEQ ID NO: 531104 - DNA, 15 bp, Homo sapiens
gactgtagggaggag

SEQ ID NO: 531105 - DNA, 15 bp, Homo sapiens
actgtagggaggaga

SEQ ID NO: 531106 - DNA, 15 bp, Homo sapiens
ctgtagggaggagac

SEQ ID NO: 531107 - DNA, 15 bp, Homo sapiens
tgtagggaggagacc

SEQ ID NO: 531108 - DNA, 15 bp, Homo sapiens
gtagggaggagaccc

SEQ ID NO: 531109 - DNA, 15 bp, Homo sapiens
tagggaggagaccca

SEQ ID NO: 531110 - DNA, 15 bp, Homo sapiens
agggaggagacccaa

SEQ ID NO: 531111 - DNA, 15 bp, Homo sapiens
gggaggagacccaat

SEQ ID NO: 531112 - DNA, 15 bp, Homo sapiens
ggaggagacccaatg

SEQ ID NO: 531113 - DNA, 15 bp, Homo sapiens
gaggagacccaatgg

SEQ ID NO: 531114 - DNA, 15 bp, Homo sapiens
aggagacccaatggt

SEQ ID NO: 531115 - DNA, 15 bp, Homo sapiens
ggagacccaatggtg

SEQ ID NO: 531116 - DNA, 15 bp, Homo sapiens
gagacccaatggtgt

SEQ ID NO: 531117 - DNA, 15 bp, Homo sapiens
agacccaatggtgtg

SEQ ID NO: 531118 - DNA, 15 bp, Homo sapiens
gacccaatggtgtga

SEQ ID NO: 531119 - DNA, 15 bp, Homo sapiens
acccaatggtgtgag

SEQ ID NO: 531120 - DNA, 15 bp, Homo sapiens
cccaatggtgtgagg

SEQ ID NO: 531121 - DNA, 15 bp, Homo sapiens
ccaatggtgtgaggt

SEQ ID NO: 531122 - DNA, 15 bp, Homo sapiens
caatggtgtgaggtg

SEQ ID NO: 531123 - DNA, 15 bp, Homo sapiens
aatggtgtgaggtgg

SEQ ID NO: 531124 - DNA, 15 bp, Homo sapiens
atggtgtgaggtggc

SEQ ID NO: 531125 - DNA, 15 bp, Homo sapiens
tggtgtgaggtggct

SEQ ID NO: 531126 - DNA, 15 bp, Homo sapiens
ggtgtgaggtggctc

SEQ ID NO: 531127 - DNA, 15 bp, Homo sapiens
gtgtgaggtggctct

SEQ ID NO: 531128 - DNA, 15 bp, Homo sapiens
tgtgaggtggctctc

SEQ ID NO: 531129 - DNA, 15 bp, Homo sapiens
gtgaggtggctctca

SEQ ID NO: 531130 - DNA, 15 bp, Homo sapiens
tgaggtggctctcag

SEQ ID NO: 531131 - DNA, 15 bp, Homo sapiens
gaggtggctctcagt

SEQ ID NO: 531132 - DNA, 15 bp, Homo sapiens
aggtggctctcagtt

SEQ ID NO: 531133 - DNA, 15 bp, Homo sapiens
ggtggctctcagttc

SEQ ID NO: 531134 - DNA, 15 bp, Homo sapiens
gtggctctcagttct

SEQ ID NO: 531135 - DNA, 15 bp, Homo sapiens
tggctctcagttctc

SEQ ID NO: 531136 - DNA, 15 bp, Homo sapiens
ggctctcagttctca

SEQ ID NO: 531137 - DNA, 15 bp, Homo sapiens
gctctcagttctcac

SEQ ID NO: 531138 - DNA, 15 bp, Homo sapiens
ctctcagttctcacc

SEQ ID NO: 531139 - DNA, 15 bp, Homo sapiens
tctcagttctcaccg

SEQ ID NO: 531140 - DNA, 15 bp, Homo sapiens
ctcagttctcaccgt

SEQ ID NO: 531141 - DNA, 15 bp, Homo sapiens
tcagttctcaccgtc

SEQ ID NO: 531142 - DNA, 15 bp, Homo sapiens
cagttctcaccgtcc

SEQ ID NO: 531143 - DNA, 15 bp, Homo sapiens
agttctcaccgtccc

SEQ ID NO: 531144 - DNA, 15 bp, Homo sapiens
gttctcaccgtcccc

SEQ ID NO: 531145 - DNA, 15 bp, Homo sapiens
ttctcaccgtcccct

SEQ ID NO: 531146 - DNA, 15 bp, Homo sapiens
tctcaccgtcccctg

SEQ ID NO: 531147 - DNA, 15 bp, Homo sapiens
ctcaccgtcccctgg

SEQ ID NO: 531148 - DNA, 15 bp, Homo sapiens
tcaccgtcccctggc

SEQ ID NO: 531149 - DNA, 15 bp, Homo sapiens
caccgtcccctggcc

SEQ ID NO: 531150 - DNA, 15 bp, Homo sapiens
accgtcccctggcct

SEQ ID NO: 531151 - DNA, 15 bp, Homo sapiens
ccgtcccctggcctg

SEQ ID NO: 531152 - DNA, 15 bp, Homo sapiens
cgtcccctggcctga

SEQ ID NO: 531153 - DNA, 15 bp, Homo sapiens
gtcccctggcctgaa

SEQ ID NO: 531154 - DNA, 15 bp, Homo sapiens
tcccctggcctgaag

SEQ ID NO: 531155 - DNA, 15 bp, Homo sapiens
cccctggcctgaagc

SEQ ID NO: 531156 - DNA, 15 bp, Homo sapiens
ccctggcctgaagcc

SEQ ID NO: 531157 - DNA, 15 bp, Homo sapiens
cctggcctgaagccc

SEQ ID NO: 531158 - DNA, 15 bp, Homo sapiens
ctggcctgaagcccg

SEQ ID NO: 531159 - DNA, 15 bp, Homo sapiens
tggcctgaagcccgg

SEQ ID NO: 531160 - DNA, 15 bp, Homo sapiens
ggcctgaagcccggg

SEQ ID NO: 531161 - DNA, 15 bp, Homo sapiens
gcctgaagcccgggg

SEQ ID NO: 531162 - DNA, 15 bp, Homo sapiens
cctgaagcccgggga

SEQ ID NO: 531163 - DNA, 15 bp, Homo sapiens
ctgaagcccggggac

SEQ ID NO: 531164 - DNA, 15 bp, Homo sapiens
tgaagcccggggacg

SEQ ID NO: 531165 - DNA, 15 bp, Homo sapiens
gaagcccggggacgg

SEQ ID NO: 531166 - DNA, 15 bp, Homo sapiens
aagcccggggacggg

SEQ ID NO: 531167 - DNA, 15 bp, Homo sapiens
agcccggggacggga

SEQ ID NO: 531168 - DNA, 15 bp, Homo sapiens
gcccggggacgggac

SEQ ID NO: 531169 - DNA, 15 bp, Homo sapiens
cccggggacgggact

SEQ ID NO: 531170 - DNA, 15 bp, Homo sapiens
ccggggacgggactg

SEQ ID NO: 531171 - DNA, 15 bp, Homo sapiens
cggggacgggactga

SEQ ID NO: 531172 - DNA, 15 bp, Homo sapiens
ggggacgggactgag

SEQ ID NO: 531173 - DNA, 15 bp, Homo sapiens
gggacgggactgagg

SEQ ID NO: 531174 - DNA, 15 bp, Homo sapiens
ggacgggactgaggc

SEQ ID NO: 531175 - DNA, 15 bp, Homo sapiens
gacgggactgaggcg

SEQ ID NO: 531176 - DNA, 15 bp, Homo sapiens
acgggactgaggcgt

SEQ ID NO: 531177 - DNA, 15 bp, Homo sapiens
cgggactgaggcgta

SEQ ID NO: 531178 - DNA, 15 bp, Homo sapiens
gggactgaggcgtag

SEQ ID NO: 531179 - DNA, 15 bp, Homo sapiens
ggactgaggcgtagg

SEQ ID NO: 531180 - DNA, 15 bp, Homo sapiens
gactgaggcgtaggg

SEQ ID NO: 531181 - DNA, 15 bp, Homo sapiens
actgaggcgtaggga

SEQ ID NO: 531182 - DNA, 15 bp, Homo sapiens
ctgaggcgtagggag

SEQ ID NO: 531183 - DNA, 15 bp, Homo sapiens
tgaggcgtagggaga

SEQ ID NO: 531184 - DNA, 15 bp, Homo sapiens
gaggcgtagggagag

SEQ ID NO: 531185 - DNA, 15 bp, Homo sapiens
aggcgtagggagagt

SEQ ID NO: 531186 - DNA, 15 bp, Homo sapiens
ggcgtagggagagtg

SEQ ID NO: 531187 - DNA, 15 bp, Homo sapiens
gcgtagggagagtgc

SEQ ID NO: 531188 - DNA, 15 bp, Homo sapiens
cgtagggagagtgct

SEQ ID NO: 531189 - DNA, 15 bp, Homo sapiens
gtagggagagtgctc

SEQ ID NO: 531190 - DNA, 15 bp, Homo sapiens
tagggagagtgctca

SEQ ID NO: 531191 - DNA, 15 bp, Homo sapiens
agggagagtgctcaa

SEQ ID NO: 531192 - DNA, 15 bp, Homo sapiens
gggagagtgctcaac

SEQ ID NO: 531193 - DNA, 15 bp, Homo sapiens
ggagagtgctcaaca

SEQ ID NO: 531194 - DNA, 15 bp, Homo sapiens
gagagtgctcaacac

SEQ ID NO: 531195 - DNA, 15 bp, Homo sapiens
agagtgctcaacacc

SEQ ID NO: 531196 - DNA, 15 bp, Homo sapiens
gagtgctcaacaccc

SEQ ID NO: 531197 - DNA, 15 bp, Homo sapiens
agtgctcaacaccca

SEQ ID NO: 531198 - DNA, 15 bp, Homo sapiens
gtgctcaacacccaa

SEQ ID NO: 531199 - DNA, 15 bp, Homo sapiens
tgctcaacacccaac

SEQ ID NO: 531200 - DNA, 15 bp, Homo sapiens
gctcaacacccaacc

SEQ ID NO: 531201 - DNA, 15 bp, Homo sapiens
ctcaacacccaacca

SEQ ID NO: 531202 - DNA, 15 bp, Homo sapiens
tcaacacccaaccac

SEQ ID NO: 531203 - DNA, 15 bp, Homo sapiens
caacacccaaccact

SEQ ID NO: 531204 - DNA, 15 bp, Homo sapiens
aacacccaaccactc

SEQ ID NO: 531205 - DNA, 15 bp, Homo sapiens
acacccaaccactcg

SEQ ID NO: 531206 - DNA, 15 bp, Homo sapiens
cacccaaccactcgg

SEQ ID NO: 531207 - DNA, 15 bp, Homo sapiens
acccaaccactcgga

SEQ ID NO: 531208 - DNA, 15 bp, Homo sapiens
cccaaccactcggac

SEQ ID NO: 531209 - DNA, 15 bp, Homo sapiens
ccaaccactcggacc

SEQ ID NO: 531210 - DNA, 15 bp, Homo sapiens
caaccactcggaccc

SEQ ID NO: 531211 - DNA, 15 bp, Homo sapiens
aaccactcggaccct

SEQ ID NO: 531212 - DNA, 15 bp, Homo sapiens
accactcggaccctc

SEQ ID NO: 531213 - DNA, 15 bp, Homo sapiens
ccactcggaccctcc

SEQ ID NO: 531214 - DNA, 15 bp, Homo sapiens
cactcggaccctccc

SEQ ID NO: 531215 - DNA, 15 bp, Homo sapiens
actcggaccctccct

SEQ ID NO: 531216 - DNA, 15 bp, Homo sapiens
ctcggaccctccctc

SEQ ID NO: 531217 - DNA, 15 bp, Homo sapiens
tcggaccctccctcg

SEQ ID NO: 531218 - DNA, 15 bp, Homo sapiens
cggaccctccctcgc

SEQ ID NO: 531219 - DNA, 15 bp, Homo sapiens
ggaccctccctcgcc

SEQ ID NO: 531220 - DNA, 15 bp, Homo sapiens
gaccctccctcgccg

SEQ ID NO: 531221 - DNA, 15 bp, Homo sapiens
accctccctcgccgg

SEQ ID NO: 531222 - DNA, 15 bp, Homo sapiens
ccctccctcgccgga

SEQ ID NO: 531223 - DNA, 15 bp, Homo sapiens
cctccctcgccggac

SEQ ID NO: 531224 - DNA, 15 bp, Homo sapiens
ctccctcgccggact

SEQ ID NO: 531225 - DNA, 15 bp, Homo sapiens
tccctcgccggacta

SEQ ID NO: 531226 - DNA, 15 bp, Homo sapiens
ccctcgccggactag

SEQ ID NO: 531227 - DNA, 15 bp, Homo sapiens
cctcgccggactagg

SEQ ID NO: 531228 - DNA, 15 bp, Homo sapiens
ctcgccggactaggc

SEQ ID NO: 531229 - DNA, 15 bp, Homo sapiens
tcgccggactaggcg

SEQ ID NO: 531230 - DNA, 15 bp, Homo sapiens
cgccggactaggcgg

SEQ ID NO: 531231 - DNA, 15 bp, Homo sapiens
gccggactaggcgga

SEQ ID NO: 531232 - DNA, 15 bp, Homo sapiens
ccggactaggcggat

SEQ ID NO: 531233 - DNA, 15 bp, Homo sapiens
cggactaggcggatc

SEQ ID NO: 531234 - DNA, 15 bp, Homo sapiens
ggactaggcggatct

SEQ ID NO: 531235 - DNA, 15 bp, Homo sapiens
gactaggcggatctg

SEQ ID NO: 531236 - DNA, 15 bp, Homo sapiens
actaggcggatctga

SEQ ID NO: 531237 - DNA, 15 bp, Homo sapiens
ctaggcggatctgag

SEQ ID NO: 531238 - DNA, 15 bp, Homo sapiens
taggcggatctgagc

SEQ ID NO: 531239 - DNA, 15 bp, Homo sapiens
aggcggatctgagct

SEQ ID NO: 531240 - DNA, 15 bp, Homo sapiens
ggcggatctgagctt

SEQ ID NO: 531241 - DNA, 15 bp, Homo sapiens
gcggatctgagcttc

SEQ ID NO: 531242 - DNA, 15 bp, Homo sapiens
cggatctgagcttcc

SEQ ID NO: 531243 - DNA, 15 bp, Homo sapiens
ggatctgagcttccc

SEQ ID NO: 531244 - DNA, 15 bp, Homo sapiens
gatctgagcttccca

SEQ ID NO: 531245 - DNA, 15 bp, Homo sapiens
atctgagcttcccaa

SEQ ID NO: 531246 - DNA, 15 bp, Homo sapiens
tctgagcttcccaaa

SEQ ID NO: 531247 - DNA, 15 bp, Homo sapiens
ctgagcttcccaaac

SEQ ID NO: 531248 - DNA, 15 bp, Homo sapiens
tgagcttcccaaacc

SEQ ID NO: 531249 - DNA, 15 bp, Homo sapiens
gagcttcccaaaccc

SEQ ID NO: 531250 - DNA, 15 bp, Homo sapiens
agcttcccaaacccc

SEQ ID NO: 531251 - DNA, 15 bp, Homo sapiens
gcttcccaaacccct

SEQ ID NO: 531252 - DNA, 15 bp, Homo sapiens
cttcccaaaccccta

SEQ ID NO: 531253 - DNA, 15 bp, Homo sapiens
ttcccaaacccctac

SEQ ID NO: 531254 - DNA, 15 bp, Homo sapiens
tcccaaacccctaca

SEQ ID NO: 531255 - DNA, 15 bp, Homo sapiens
cccaaacccctacag

SEQ ID NO: 531256 - DNA, 15 bp, Homo sapiens
ccaaacccctacagt

SEQ ID NO: 531257 - DNA, 15 bp, Homo sapiens
caaacccctacagtc

SEQ ID NO: 531258 - DNA, 15 bp, Homo sapiens
aaacccctacagtct

SEQ ID NO: 531259 - DNA, 15 bp, Homo sapiens
aacccctacagtctc

SEQ ID NO: 531260 - DNA, 15 bp, Homo sapiens
acccctacagtctct

SEQ ID NO: 531261 - DNA, 15 bp, Homo sapiens
cccctacagtctctc

SEQ ID NO: 531262 - DNA, 15 bp, Homo sapiens
ccctacagtctctcc

SEQ ID NO: 531263 - DNA, 15 bp, Homo sapiens
cctacagtctctcca

SEQ ID NO: 531264 - DNA, 15 bp, Homo sapiens
ctacagtctctccat

SEQ ID NO: 531265 - DNA, 15 bp, Homo sapiens
tacagtctctccatc

SEQ ID NO: 531266 - DNA, 15 bp, Homo sapiens
acagtctctccatct

SEQ ID NO: 531267 - DNA, 15 bp, Homo sapiens
cagtctctccatctg

SEQ ID NO: 531268 - DNA, 15 bp, Homo sapiens
agtctctccatctgc

SEQ ID NO: 531269 - DNA, 15 bp, Homo sapiens
gtctctccatctgca

SEQ ID NO: 531270 - DNA, 15 bp, Homo sapiens
tctctccatctgcat

SEQ ID NO: 531271 - DNA, 15 bp, Homo sapiens
ctctccatctgcatc

SEQ ID NO: 531272 - DNA, 15 bp, Homo sapiens
tctccatctgcatcc

SEQ ID NO: 531273 - DNA, 15 bp, Homo sapiens
ctccatctgcatccc

SEQ ID NO: 531274 - DNA, 15 bp, Homo sapiens
tccatctgcatcccc

SEQ ID NO: 531275 - DNA, 15 bp, Homo sapiens
ccatctgcatcccca

SEQ ID NO: 531276 - DNA, 15 bp, Homo sapiens
catctgcatccccac

SEQ ID NO: 531277 - DNA, 15 bp, Homo sapiens
atctgcatccccact

SEQ ID NO: 531278 - DNA, 15 bp, Homo sapiens
tctgcatccccactt

SEQ ID NO: 531279 - DNA, 15 bp, Homo sapiens
ctgcatccccacttc

SEQ ID NO: 531280 - DNA, 15 bp, Homo sapiens
tgcatccccacttca

SEQ ID NO: 531281 - DNA, 15 bp, Homo sapiens
gcatccccacttcat

SEQ ID NO: 531282 - DNA, 15 bp, Homo sapiens
catccccacttcatc

SEQ ID NO: 531283 - DNA, 15 bp, Homo sapiens
atccccacttcatca

SEQ ID NO: 531284 - DNA, 15 bp, Homo sapiens
tccccacttcatcac

SEQ ID NO: 531285 - DNA, 15 bp, Homo sapiens
ccccacttcatcacc

SEQ ID NO: 531286 - DNA, 15 bp, Homo sapiens
cccacttcatcacca

SEQ ID NO: 531287 - DNA, 15 bp, Homo sapiens
ccacttcatcaccat

SEQ ID NO: 531288 - DNA, 15 bp, Homo sapiens
cacttcatcaccatc

SEQ ID NO: 531289 - DNA, 15 bp, Homo sapiens
acttcatcaccatcc

SEQ ID NO: 531290 - DNA, 15 bp, Homo sapiens
cttcatcaccatccc

SEQ ID NO: 531291 - DNA, 15 bp, Homo sapiens
ttcatcaccatccca

SEQ ID NO: 531292 - DNA, 15 bp, Homo sapiens
tcatcaccatcccac

SEQ ID NO: 531293 - DNA, 15 bp, Homo sapiens
catcaccatcccacc

SEQ ID NO: 531294 - DNA, 15 bp, Homo sapiens
atcaccatcccaccg

SEQ ID NO: 531295 - DNA, 15 bp, Homo sapiens
tcaccatcccaccgt

SEQ ID NO: 531296 - DNA, 15 bp, Homo sapiens
caccatcccaccgtc

SEQ ID NO: 531297 - DNA, 15 bp, Homo sapiens
accatcccaccgtct

SEQ ID NO: 531298 - DNA, 15 bp, Homo sapiens
ccatcccaccgtctc

SEQ ID NO: 531299 - DNA, 15 bp, Homo sapiens
catcccaccgtctct

SEQ ID NO: 531300 - DNA, 15 bp, Homo sapiens
atcccaccgtctctc

SEQ ID NO: 531301 - DNA, 15 bp, Homo sapiens
tcccaccgtctctcc

SEQ ID NO: 531302 - DNA, 15 bp, Homo sapiens
cccaccgtctctccc

SEQ ID NO: 531303 - DNA, 15 bp, Homo sapiens
ccaccgtctctccct

SEQ ID NO: 531304 - DNA, 15 bp, Homo sapiens
caccgtctctccctc

SEQ ID NO: 531305 - DNA, 15 bp, Homo sapiens
accgtctctccctcg

SEQ ID NO: 531306 - DNA, 15 bp, Homo sapiens
ccgtctctccctcgc

SEQ ID NO: 531307 - DNA, 15 bp, Homo sapiens
cgtctctccctcgct

SEQ ID NO: 531308 - DNA, 15 bp, Homo sapiens
gtctctccctcgctc

SEQ ID NO: 531309 - DNA, 15 bp, Homo sapiens
tctctccctcgctcc

SEQ ID NO: 531310 - DNA, 15 bp, Homo sapiens
ctctccctcgctcca

SEQ ID NO: 531311 - DNA, 15 bp, Homo sapiens
tctccctcgctccac

SEQ ID NO: 531312 - DNA, 15 bp, Homo sapiens
ctccctcgctccact

SEQ ID NO: 531313 - DNA, 15 bp, Homo sapiens
tccctcgctccactc

SEQ ID NO: 531314 - DNA, 15 bp, Homo sapiens
ccctcgctccactcg

SEQ ID NO: 531315 - DNA, 15 bp, Homo sapiens
cctcgctccactcgc

SEQ ID NO: 531316 - DNA, 15 bp, Homo sapiens
ctcgctccactcgcg

SEQ ID NO: 531317 - DNA, 15 bp, Homo sapiens
tcgctccactcgcgg

SEQ ID NO: 531318 - DNA, 15 bp, Homo sapiens
cgctccactcgcggg

SEQ ID NO: 531319 - DNA, 15 bp, Homo sapiens
gctccactcgcgggt

SEQ ID NO: 531320 - DNA, 15 bp, Homo sapiens
ctccactcgcgggta

SEQ ID NO: 531321 - DNA, 15 bp, Homo sapiens
tccactcgcgggtaa

SEQ ID NO: 531322 - DNA, 15 bp, Homo sapiens
ccactcgcgggtaac

SEQ ID NO: 531323 - DNA, 15 bp, Homo sapiens
cactcgcgggtaacc

SEQ ID NO: 531324 - DNA, 15 bp, Homo sapiens
actcgcgggtaaccg

SEQ ID NO: 531325 - DNA, 15 bp, Homo sapiens
ctcgcgggtaaccga

SEQ ID NO: 531326 - DNA, 15 bp, Homo sapiens
tcgcgggtaaccgag

SEQ ID NO: 531327 - DNA, 15 bp, Homo sapiens
cgcgggtaaccgagg

SEQ ID NO: 531328 - DNA, 15 bp, Homo sapiens
gcgggtaaccgaggc

SEQ ID NO: 531329 - DNA, 15 bp, Homo sapiens
cgggtaaccgaggct

SEQ ID NO: 531330 - DNA, 15 bp, Homo sapiens
gggtaaccgaggctt

SEQ ID NO: 531331 - DNA, 15 bp, Homo sapiens
ggtaaccgaggcttc

SEQ ID NO: 531332 - DNA, 15 bp, Homo sapiens
gtaaccgaggcttct

SEQ ID NO: 531333 - DNA, 15 bp, Homo sapiens
taaccgaggcttctc

SEQ ID NO: 531334 - DNA, 15 bp, Homo sapiens
aaccgaggcttctcc

SEQ ID NO: 531335 - DNA, 15 bp, Homo sapiens
accgaggcttctccc

SEQ ID NO: 531336 - DNA, 15 bp, Homo sapiens
ccgaggcttctccct

SEQ ID NO: 531337 - DNA, 15 bp, Homo sapiens
cgaggcttctccctc

SEQ ID NO: 531338 - DNA, 15 bp, Homo sapiens
gaggcttctccctcc

SEQ ID NO: 531339 - DNA, 15 bp, Homo sapiens
aggcttctccctccc

SEQ ID NO: 531340 - DNA, 15 bp, Homo sapiens
ggcttctccctccca

SEQ ID NO: 531341 - DNA, 15 bp, Homo sapiens
gcttctccctcccag

SEQ ID NO: 531342 - DNA, 15 bp, Homo sapiens
cttctccctcccagg

SEQ ID NO: 531343 - DNA, 15 bp, Homo sapiens
ttctccctcccaggc

SEQ ID NO: 531344 - DNA, 15 bp, Homo sapiens
tctccctcccaggct

SEQ ID NO: 531345 - DNA, 15 bp, Homo sapiens
ctccctcccaggctg

SEQ ID NO: 531346 - DNA, 15 bp, Homo sapiens
tccctcccaggctgg

SEQ ID NO: 531347 - DNA, 15 bp, Homo sapiens
ccctcccaggctggt

SEQ ID NO: 531348 - DNA, 15 bp, Homo sapiens
cctcccaggctggtt

SEQ ID NO: 531349 - DNA, 15 bp, Homo sapiens
ctcccaggctggttc

SEQ ID NO: 531350 - DNA, 15 bp, Homo sapiens
tcccaggctggttct

SEQ ID NO: 531351 - DNA, 15 bp, Homo sapiens
cccaggctggttctt

SEQ ID NO: 531352 - DNA, 15 bp, Homo sapiens
ccaggctggttcttg

SEQ ID NO: 531353 - DNA, 15 bp, Homo sapiens
caggctggttcttgg

SEQ ID NO: 531354 - DNA, 15 bp, Homo sapiens
aggctggttcttggg

SEQ ID NO: 531355 - DNA, 15 bp, Homo sapiens
ggctggttcttgggc

SEQ ID NO: 531356 - DNA, 15 bp, Homo sapiens
gctggttcttgggcg

SEQ ID NO: 531357 - DNA, 15 bp, Homo sapiens
ctggttcttgggcgt

SEQ ID NO: 531358 - DNA, 15 bp, Homo sapiens
tggttcttgggcgtt

SEQ ID NO: 531359 - DNA, 15 bp, Homo sapiens
ggttcttgggcgttc

SEQ ID NO: 531360 - DNA, 15 bp, Homo sapiens
gttcttgggcgttcc

SEQ ID NO: 531361 - DNA, 15 bp, Homo sapiens
ttcttgggcgttccc

SEQ ID NO: 531362 - DNA, 15 bp, Homo sapiens
tcttgggcgttcccg

SEQ ID NO: 531363 - DNA, 15 bp, Homo sapiens
cttgggcgttcccga

SEQ ID NO: 531364 - DNA, 15 bp, Homo sapiens
ttgggcgttcccgac

SEQ ID NO: 531365 - DNA, 15 bp, Homo sapiens
tgggcgttcccgacc

SEQ ID NO: 531366 - DNA, 15 bp, Homo sapiens
gggcgttcccgaccc

SEQ ID NO: 531367 - DNA, 15 bp, Homo sapiens
ggcgttcccgaccct

SEQ ID NO: 531368 - DNA, 15 bp, Homo sapiens
gcgttcccgaccctt

SEQ ID NO: 531369 - DNA, 15 bp, Homo sapiens
cgttcccgaccctta

SEQ ID NO: 531370 - DNA, 15 bp, Homo sapiens
gttcccgacccttag

SEQ ID NO: 531371 - DNA, 15 bp, Homo sapiens
ttcccgacccttagc

SEQ ID NO: 531372 - DNA, 15 bp, Homo sapiens
tcccgacccttagct

SEQ ID NO: 531373 - DNA, 15 bp, Homo sapiens
cccgacccttagcta

SEQ ID NO: 531374 - DNA, 15 bp, Homo sapiens
ccgacccttagctac

SEQ ID NO: 531375 - DNA, 15 bp, Homo sapiens
cgacccttagctacc

SEQ ID NO: 531376 - DNA, 15 bp, Homo sapiens
gacccttagctaccc

SEQ ID NO: 531377 - DNA, 15 bp, Homo sapiens
acccttagctaccca

SEQ ID NO: 531378 - DNA, 15 bp, Homo sapiens
cccttagctacccac

SEQ ID NO: 531379 - DNA, 15 bp, Homo sapiens
ccttagctacccacg

SEQ ID NO: 531380 - DNA, 15 bp, Homo sapiens
cttagctacccacga

SEQ ID NO: 531381 - DNA, 15 bp, Homo sapiens
ttagctacccacgat

SEQ ID NO: 531382 - DNA, 15 bp, Homo sapiens
tagctacccacgatg

SEQ ID NO: 531383 - DNA, 15 bp, Homo sapiens
agctacccacgatgt

SEQ ID NO: 531384 - DNA, 15 bp, Homo sapiens
gctacccacgatgtt

SEQ ID NO: 531385 - DNA, 15 bp, Homo sapiens
ctacccacgatgttt

SEQ ID NO: 531386 - DNA, 15 bp, Homo sapiens
tacccacgatgtttc

SEQ ID NO: 531387 - DNA, 15 bp, Homo sapiens
acccacgatgtttca

SEQ ID NO: 531388 - DNA, 15 bp, Homo sapiens
cccacgatgtttcag

SEQ ID NO: 531389 - DNA, 15 bp, Homo sapiens
ccacgatgtttcaga

SEQ ID NO: 531390 - DNA, 15 bp, Homo sapiens
cacgatgtttcagac

SEQ ID NO: 531391 - DNA, 15 bp, Homo sapiens
acgatgtttcagaca

SEQ ID NO: 531392 - DNA, 15 bp, Homo sapiens
cgatgtttcagacag

SEQ ID NO: 531393 - DNA, 15 bp, Homo sapiens
gatgtttcagacagt

SEQ ID NO: 531394 - DNA, 15 bp, Homo sapiens
atgtttcagacagtc

SEQ ID NO: 531395 - DNA, 15 bp, Homo sapiens
tgtttcagacagtcc

SEQ ID NO: 531396 - DNA, 15 bp, Homo sapiens
gtttcagacagtccc

SEQ ID NO: 531397 - DNA, 15 bp, Homo sapiens
tttcagacagtcccc

SEQ ID NO: 531398 - DNA, 15 bp, Homo sapiens
ttcagacagtccccg

SEQ ID NO: 531399 - DNA, 15 bp, Homo sapiens
tcagacagtccccga

SEQ ID NO: 531400 - DNA, 15 bp, Homo sapiens
cagacagtccccgac

SEQ ID NO: 531401 - DNA, 15 bp, Homo sapiens
agacagtccccgaca

SEQ ID NO: 531402 - DNA, 15 bp, Homo sapiens
gacagtccccgacac

SEQ ID NO: 531403 - DNA, 15 bp, Homo sapiens
acagtccccgacacg

SEQ ID NO: 531404 - DNA, 15 bp, Homo sapiens
cagtccccgacacgt

SEQ ID NO: 531405 - DNA, 15 bp, Homo sapiens
agtccccgacacgtc

SEQ ID NO: 531406 - DNA, 15 bp, Homo sapiens
gtccccgacacgtcg

SEQ ID NO: 531407 - DNA, 15 bp, Homo sapiens
tccccgacacgtcgt

SEQ ID NO: 531408 - DNA, 15 bp, Homo sapiens
ccccgacacgtcgtc

SEQ ID NO: 531409 - DNA, 15 bp, Homo sapiens
cccgacacgtcgtct

SEQ ID NO: 531410 - DNA, 15 bp, Homo sapiens
ccgacacgtcgtctt

SEQ ID NO: 531411 - DNA, 15 bp, Homo sapiens
cgacacgtcgtctta

SEQ ID NO: 531412 - DNA, 15 bp, Homo sapiens
gacacgtcgtcttac

SEQ ID NO: 531413 - DNA, 15 bp, Homo sapiens
acacgtcgtcttaca

SEQ ID NO: 531414 - DNA, 15 bp, Homo sapiens
cacgtcgtcttacat

SEQ ID NO: 531415 - DNA, 15 bp, Homo sapiens
acgtcgtcttacatc

SEQ ID NO: 531416 - DNA, 15 bp, Homo sapiens
cgtcgtcttacatca

SEQ ID NO: 531417 - DNA, 15 bp, Homo sapiens
gtcgtcttacatcaa

SEQ ID NO: 531418 - DNA, 15 bp, Homo sapiens
tcgtcttacatcaag

SEQ ID NO: 531419 - DNA, 15 bp, Homo sapiens
cgtcttacatcaagg

SEQ ID NO: 531420 - DNA, 15 bp, Homo sapiens
gtcttacatcaaggt

SEQ ID NO: 531421 - DNA, 15 bp, Homo sapiens
tcttacatcaaggta

SEQ ID NO: 531422 - DNA, 15 bp, Homo sapiens
cttacatcaaggtaa

SEQ ID NO: 531423 - DNA, 15 bp, Homo sapiens
ttacatcaaggtaag

SEQ ID NO: 531424 - DNA, 15 bp, Homo sapiens
tacatcaaggtaaga

SEQ ID NO: 531425 - DNA, 15 bp, Homo sapiens
acatcaaggtaagac

SEQ ID NO: 531426 - DNA, 15 bp, Homo sapiens
catcaaggtaagaca

SEQ ID NO: 531427 - DNA, 15 bp, Homo sapiens
atcaaggtaagacat

SEQ ID NO: 531428 - DNA, 15 bp, Homo sapiens
tcaaggtaagacatg

SEQ ID NO: 531429 - DNA, 15 bp, Homo sapiens
caaggtaagacatgg

SEQ ID NO: 531430 - DNA, 15 bp, Homo sapiens
aaggtaagacatggc

SEQ ID NO: 531431 - DNA, 15 bp, Homo sapiens
aggtaagacatggca

SEQ ID NO: 531432 - DNA, 15 bp, Homo sapiens
ggtaagacatggcag

SEQ ID NO: 531433 - DNA, 15 bp, Homo sapiens
gtaagacatggcagc

SEQ ID NO: 531434 - DNA, 15 bp, Homo sapiens
taagacatggcagcg

SEQ ID NO: 531435 - DNA, 15 bp, Homo sapiens
aagacatggcagcgt

SEQ ID NO: 531436 - DNA, 15 bp, Homo sapiens
agacatggcagcgtc

SEQ ID NO: 531437 - DNA, 15 bp, Homo sapiens
gacatggcagcgtct

SEQ ID NO: 531438 - DNA, 15 bp, Homo sapiens
acatggcagcgtctt

SEQ ID NO: 531439 - DNA, 15 bp, Homo sapiens
catggcagcgtcttt

SEQ ID NO: 531440 - DNA, 15 bp, Homo sapiens
atggcagcgtcttta

SEQ ID NO: 531441 - DNA, 15 bp, Homo sapiens
tggcagcgtctttaa

SEQ ID NO: 531442 - DNA, 15 bp, Homo sapiens
ggcagcgtctttaaa

SEQ ID NO: 531443 - DNA, 15 bp, Homo sapiens
gcagcgtctttaaac

SEQ ID NO: 531444 - DNA, 15 bp, Homo sapiens
cagcgtctttaaaca

SEQ ID NO: 531445 - DNA, 15 bp, Homo sapiens
agcgtctttaaacag

SEQ ID NO: 531446 - DNA, 15 bp, Homo sapiens
gcgtctttaaacagg

SEQ ID NO: 531447 - DNA, 15 bp, Homo sapiens
cgtctttaaacaggt

SEQ ID NO: 531448 - DNA, 15 bp, Homo sapiens
gtctttaaacaggtg

SEQ ID NO: 531449 - DNA, 15 bp, Homo sapiens
tctttaaacaggtga

SEQ ID NO: 531450 - DNA, 15 bp, Homo sapiens
ctttaaacaggtgat

SEQ ID NO: 531451 - DNA, 15 bp, Homo sapiens
tttaaacaggtgatg

SEQ ID NO: 531452 - DNA, 15 bp, Homo sapiens
ttaaacaggtgatga

SEQ ID NO: 531453 - DNA, 15 bp, Homo sapiens
taaacaggtgatgac

SEQ ID NO: 531454 - DNA, 15 bp, Homo sapiens
aaacaggtgatgacc

SEQ ID NO: 531455 - DNA, 15 bp, Homo sapiens
aacaggtgatgaccc

SEQ ID NO: 531456 - DNA, 15 bp, Homo sapiens
acaggtgatgacccc

SEQ ID NO: 531457 - DNA, 15 bp, Homo sapiens
caggtgatgaccccc

SEQ ID NO: 531458 - DNA, 15 bp, Homo sapiens
aggtgatgaccccca

SEQ ID NO: 531459 - DNA, 15 bp, Homo sapiens
ggtgatgacccccag

SEQ ID NO: 531460 - DNA, 15 bp, Homo sapiens
gtgatgacccccagc

SEQ ID NO: 531461 - DNA, 15 bp, Homo sapiens
tgatgacccccagct

SEQ ID NO: 531462 - DNA, 15 bp, Homo sapiens
gatgacccccagctt

SEQ ID NO: 531463 - DNA, 15 bp, Homo sapiens
atgacccccagcttc

SEQ ID NO: 531464 - DNA, 15 bp, Homo sapiens
tgacccccagcttct

SEQ ID NO: 531465 - DNA, 15 bp, Homo sapiens
gacccccagcttcta

SEQ ID NO: 531466 - DNA, 15 bp, Homo sapiens
acccccagcttctac

SEQ ID NO: 531467 - DNA, 15 bp, Homo sapiens
cccccagcttctacc

SEQ ID NO: 531468 - DNA, 15 bp, Homo sapiens
ccccagcttctaccc

SEQ ID NO: 531469 - DNA, 15 bp, Homo sapiens
cccagcttctacccc

SEQ ID NO: 531470 - DNA, 15 bp, Homo sapiens
ccagcttctacccca

SEQ ID NO: 531471 - DNA, 15 bp, Homo sapiens
cagcttctaccccac

SEQ ID NO: 531472 - DNA, 15 bp, Homo sapiens
agcttctaccccacc

SEQ ID NO: 531473 - DNA, 15 bp, Homo sapiens
gcttctaccccaccc

SEQ ID NO: 531474 - DNA, 15 bp, Homo sapiens
cttctaccccacccg

SEQ ID NO: 531475 - DNA, 15 bp, Homo sapiens
ttctaccccacccgg

SEQ ID NO: 531476 - DNA, 15 bp, Homo sapiens
tctaccccacccggg

SEQ ID NO: 531477 - DNA, 15 bp, Homo sapiens
ctaccccacccgggc

SEQ ID NO: 531478 - DNA, 15 bp, Homo sapiens
taccccacccgggcc

SEQ ID NO: 531479 - DNA, 15 bp, Homo sapiens
accccacccgggcct

SEQ ID NO: 531480 - DNA, 15 bp, Homo sapiens
ccccacccgggccta

SEQ ID NO: 531481 - DNA, 15 bp, Homo sapiens
cccacccgggcctat

SEQ ID NO: 531482 - DNA, 15 bp, Homo sapiens
ccacccgggcctatg

SEQ ID NO: 531483 - DNA, 15 bp, Homo sapiens
cacccgggcctatgg

SEQ ID NO: 531484 - DNA, 15 bp, Homo sapiens
acccgggcctatggt

SEQ ID NO: 531485 - DNA, 15 bp, Homo sapiens
cccgggcctatggtc

SEQ ID NO: 531486 - DNA, 15 bp, Homo sapiens
ccgggcctatggtcc

SEQ ID NO: 531487 - DNA, 15 bp, Homo sapiens
cgggcctatggtccc

SEQ ID NO: 531488 - DNA, 15 bp, Homo sapiens
gggcctatggtccct

SEQ ID NO: 531489 - DNA, 15 bp, Homo sapiens
ggcctatggtccctt

SEQ ID NO: 531490 - DNA, 15 bp, Homo sapiens
gcctatggtcccttt

SEQ ID NO: 531491 - DNA, 15 bp, Homo sapiens
cctatggtccctttt

SEQ ID NO: 531492 - DNA, 15 bp, Homo sapiens
ctatggtcccttttc

SEQ ID NO: 531493 - DNA, 15 bp, Homo sapiens
tatggtcccttttcc

SEQ ID NO: 531494 - DNA, 15 bp, Homo sapiens
atggtcccttttccc

SEQ ID NO: 531495 - DNA, 15 bp, Homo sapiens
tggtcccttttccct

SEQ ID NO: 531496 - DNA, 15 bp, Homo sapiens
ggtcccttttccctt

SEQ ID NO: 531497 - DNA, 15 bp, Homo sapiens
gtcccttttcccttt

SEQ ID NO: 531498 - DNA, 15 bp, Homo sapiens
tcccttttccctttc

SEQ ID NO: 531499 - DNA, 15 bp, Homo sapiens
cccttttccctttcc

SEQ ID NO: 531500 - DNA, 15 bp, Homo sapiens
ccttttccctttccc

SEQ ID NO: 531501 - DNA, 15 bp, Homo sapiens
cttttccctttcccc

SEQ ID NO: 531502 - DNA, 15 bp, Homo sapiens
ttttccctttccccg

SEQ ID NO: 531503 - DNA, 15 bp, Homo sapiens
tttccctttccccgg

SEQ ID NO: 531504 - DNA, 15 bp, Homo sapiens
ttccctttccccggg

SEQ ID NO: 531505 - DNA, 15 bp, Homo sapiens
tccctttccccggga

SEQ ID NO: 531506 - DNA, 15 bp, Homo sapiens
ccctttccccgggaa

SEQ ID NO: 531507 - DNA, 15 bp, Homo sapiens
cctttccccgggaaa

SEQ ID NO: 531508 - DNA, 15 bp, Homo sapiens
ctttccccgggaaaa

SEQ ID NO: 531509 - DNA, 15 bp, Homo sapiens
tttccccgggaaaaa

SEQ ID NO: 531510 - DNA, 15 bp, Homo sapiens
ttccccgggaaaaag

SEQ ID NO: 531511 - DNA, 15 bp, Homo sapiens
tccccgggaaaaagg

SEQ ID NO: 531512 - DNA, 15 bp, Homo sapiens
ccccgggaaaaaggg

SEQ ID NO: 531513 - DNA, 15 bp, Homo sapiens
cccgggaaaaagggg

SEQ ID NO: 531514 - DNA, 15 bp, Homo sapiens
ccgggaaaaaggggt

SEQ ID NO: 531515 - DNA, 15 bp, Homo sapiens
cgggaaaaaggggta

SEQ ID NO: 531516 - DNA, 15 bp, Homo sapiens
gggaaaaaggggtag

SEQ ID NO: 531517 - DNA, 15 bp, Homo sapiens
ggaaaaaggggtagg

SEQ ID NO: 531518 - DNA, 15 bp, Homo sapiens
gaaaaaggggtaggg

SEQ ID NO: 531519 - DNA, 15 bp, Homo sapiens
aaaaaggggtagggg

SEQ ID NO: 531520 - DNA, 15 bp, Homo sapiens
aaaaggggtaggggt

SEQ ID NO: 531521 - DNA, 15 bp, Homo sapiens
aaaggggtaggggtg

SEQ ID NO: 531522 - DNA, 15 bp, Homo sapiens
aaggggtaggggtgg

SEQ ID NO: 531523 - DNA, 15 bp, Homo sapiens
aggggtaggggtgga

SEQ ID NO: 531524 - DNA, 15 bp, Homo sapiens
ggggtaggggtggaa

SEQ ID NO: 531525 - DNA, 15 bp, Homo sapiens
gggtaggggtggaag

SEQ ID NO: 531526 - DNA, 15 bp, Homo sapiens
ggtaggggtggaagt

SEQ ID NO: 531527 - DNA, 15 bp, Homo sapiens
gtaggggtggaagtg

SEQ ID NO: 531528 - DNA, 15 bp, Homo sapiens
taggggtggaagtgg

SEQ ID NO: 531529 - DNA, 15 bp, Homo sapiens
aggggtggaagtggg

SEQ ID NO: 531530 - DNA, 15 bp, Homo sapiens
ggggtggaagtgggc

SEQ ID NO: 531531 - DNA, 15 bp, Homo sapiens
gggtggaagtgggcc

SEQ ID NO: 531532 - DNA, 15 bp, Homo sapiens
ggtggaagtgggccc

SEQ ID NO: 531533 - DNA, 15 bp, Homo sapiens
gtggaagtgggccct

SEQ ID NO: 531534 - DNA, 15 bp, Homo sapiens
tggaagtgggcccta

SEQ ID NO: 531535 - DNA, 15 bp, Homo sapiens
ggaagtgggccctac

SEQ ID NO: 531536 - DNA, 15 bp, Homo sapiens
gaagtgggccctact

SEQ ID NO: 531537 - DNA, 15 bp, Homo sapiens
aagtgggccctactc

SEQ ID NO: 531538 - DNA, 15 bp, Homo sapiens
agtgggccctactct

SEQ ID NO: 531539 - DNA, 15 bp, Homo sapiens
gtgggccctactctc

SEQ ID NO: 531540 - DNA, 15 bp, Homo sapiens
tgggccctactctcg

SEQ ID NO: 531541 - DNA, 15 bp, Homo sapiens
gggccctactctcgg

SEQ ID NO: 531542 - DNA, 15 bp, Homo sapiens
ggccctactctcggc

SEQ ID NO: 531543 - DNA, 15 bp, Homo sapiens
gccctactctcggct

SEQ ID NO: 531544 - DNA, 15 bp, Homo sapiens
ccctactctcggctc

SEQ ID NO: 531545 - DNA, 15 bp, Homo sapiens
cctactctcggctcg

SEQ ID NO: 531546 - DNA, 15 bp, Homo sapiens
ctactctcggctcgt

SEQ ID NO: 531547 - DNA, 15 bp, Homo sapiens
tactctcggctcgtg

SEQ ID NO: 531548 - DNA, 15 bp, Homo sapiens
actctcggctcgtgg

SEQ ID NO: 531549 - DNA, 15 bp, Homo sapiens
ctctcggctcgtgga

SEQ ID NO: 531550 - DNA, 15 bp, Homo sapiens
tctcggctcgtggat

SEQ ID NO: 531551 - DNA, 15 bp, Homo sapiens
ctcggctcgtggatc

SEQ ID NO: 531552 - DNA, 15 bp, Homo sapiens
tcggctcgtggatct

SEQ ID NO: 531553 - DNA, 15 bp, Homo sapiens
cggctcgtggatctc

SEQ ID NO: 531554 - DNA, 15 bp, Homo sapiens
ggctcgtggatctca

SEQ ID NO: 531555 - DNA, 15 bp, Homo sapiens
gctcgtggatctcaa

SEQ ID NO: 531556 - DNA, 15 bp, Homo sapiens
ctcgtggatctcaag

SEQ ID NO: 531557 - DNA, 15 bp, Homo sapiens
tcgtggatctcaagc

SEQ ID NO: 531558 - DNA, 15 bp, Homo sapiens
cgtggatctcaagct

SEQ ID NO: 531559 - DNA, 15 bp, Homo sapiens
gtggatctcaagcta

SEQ ID NO: 531560 - DNA, 15 bp, Homo sapiens
tggatctcaagctag

SEQ ID NO: 531561 - DNA, 15 bp, Homo sapiens
ggatctcaagctagg

SEQ ID NO: 531562 - DNA, 15 bp, Homo sapiens
gatctcaagctaggg

SEQ ID NO: 531563 - DNA, 15 bp, Homo sapiens
atctcaagctagggc

SEQ ID NO: 531564 - DNA, 15 bp, Homo sapiens
tctcaagctagggcg

SEQ ID NO: 531565 - DNA, 15 bp, Homo sapiens
ctcaagctagggcgc

SEQ ID NO: 531566 - DNA, 15 bp, Homo sapiens
tcaagctagggcgct

SEQ ID NO: 531567 - DNA, 15 bp, Homo sapiens
caagctagggcgctc

SEQ ID NO: 531568 - DNA, 15 bp, Homo sapiens
aagctagggcgctcc

SEQ ID NO: 531569 - DNA, 15 bp, Homo sapiens
agctagggcgctcct

SEQ ID NO: 531570 - DNA, 15 bp, Homo sapiens
gctagggcgctcctg

SEQ ID NO: 531571 - DNA, 15 bp, Homo sapiens
ctagggcgctcctgg

SEQ ID NO: 531572 - DNA, 15 bp, Homo sapiens
tagggcgctcctggc

SEQ ID NO: 531573 - DNA, 15 bp, Homo sapiens
agggcgctcctggcc

SEQ ID NO: 531574 - DNA, 15 bp, Homo sapiens
gggcgctcctggcca

SEQ ID NO: 531575 - DNA, 15 bp, Homo sapiens
ggcgctcctggccag

SEQ ID NO: 531576 - DNA, 15 bp, Homo sapiens
gcgctcctggccaga

SEQ ID NO: 531577 - DNA, 15 bp, Homo sapiens
cgctcctggccagat

SEQ ID NO: 531578 - DNA, 15 bp, Homo sapiens
gctcctggccagatg

SEQ ID NO: 531579 - DNA, 15 bp, Homo sapiens
ctcctggccagatga

SEQ ID NO: 531580 - DNA, 15 bp, Homo sapiens
tcctggccagatgag

SEQ ID NO: 531581 - DNA, 15 bp, Homo sapiens
cctggccagatgaga

SEQ ID NO: 531582 - DNA, 15 bp, Homo sapiens
ctggccagatgagag

SEQ ID NO: 531583 - DNA, 15 bp, Homo sapiens
tggccagatgagagt

SEQ ID NO: 531584 - DNA, 15 bp, Homo sapiens
ggccagatgagagtg

SEQ ID NO: 531585 - DNA, 15 bp, Homo sapiens
gccagatgagagtgg

SEQ ID NO: 531586 - DNA, 15 bp, Homo sapiens
ccagatgagagtggc

SEQ ID NO: 531587 - DNA, 15 bp, Homo sapiens
cagatgagagtggca

SEQ ID NO: 531588 - DNA, 15 bp, Homo sapiens
agatgagagtggcac

SEQ ID NO: 531589 - DNA, 15 bp, Homo sapiens
gatgagagtggcaca

SEQ ID NO: 531590 - DNA, 15 bp, Homo sapiens
atgagagtggcacag

SEQ ID NO: 531591 - DNA, 15 bp, Homo sapiens
tgagagtggcacaga

SEQ ID NO: 531592 - DNA, 15 bp, Homo sapiens
gagagtggcacagac

SEQ ID NO: 531593 - DNA, 15 bp, Homo sapiens
agagtggcacagacc

SEQ ID NO: 531594 - DNA, 15 bp, Homo sapiens
gagtggcacagaccc

SEQ ID NO: 531595 - DNA, 15 bp, Homo sapiens
agtggcacagaccct

SEQ ID NO: 531596 - DNA, 15 bp, Homo sapiens
gtggcacagaccctc

SEQ ID NO: 531597 - DNA, 15 bp, Homo sapiens
tggcacagaccctcg

SEQ ID NO: 531598 - DNA, 15 bp, Homo sapiens
ggcacagaccctcgg

SEQ ID NO: 531599 - DNA, 15 bp, Homo sapiens
gcacagaccctcggg

SEQ ID NO: 531600 - DNA, 15 bp, Homo sapiens
cacagaccctcggga

SEQ ID NO: 531601 - DNA, 15 bp, Homo sapiens
acagaccctcgggaa

SEQ ID NO: 531602 - DNA, 15 bp, Homo sapiens
cagaccctcgggaat

SEQ ID NO: 531603 - DNA, 15 bp, Homo sapiens
agaccctcgggaatc

SEQ ID NO: 531604 - DNA, 15 bp, Homo sapiens
gaccctcgggaatcc

SEQ ID NO: 531605 - DNA, 15 bp, Homo sapiens
accctcgggaatcct

SEQ ID NO: 531606 - DNA, 15 bp, Homo sapiens
ccctcgggaatccta

SEQ ID NO: 531607 - DNA, 15 bp, Homo sapiens
cctcgggaatcctag

SEQ ID NO: 531608 - DNA, 15 bp, Homo sapiens
ctcgggaatcctagg

SEQ ID NO: 531609 - DNA, 15 bp, Homo sapiens
tcgggaatcctaggt

SEQ ID NO: 531610 - DNA, 15 bp, Homo sapiens
cgggaatcctaggtt

SEQ ID NO: 531611 - DNA, 15 bp, Homo sapiens
gggaatcctaggttg

SEQ ID NO: 531612 - DNA, 15 bp, Homo sapiens
ggaatcctaggttga

SEQ ID NO: 531613 - DNA, 15 bp, Homo sapiens
gaatcctaggttgag

SEQ ID NO: 531614 - DNA, 15 bp, Homo sapiens
aatcctaggttgaga

SEQ ID NO: 531615 - DNA, 15 bp, Homo sapiens
atcctaggttgagaa

SEQ ID NO: 531616 - DNA, 15 bp, Homo sapiens
tcctaggttgagaag

SEQ ID NO: 531617 - DNA, 15 bp, Homo sapiens
cctaggttgagaagc

SEQ ID NO: 531618 - DNA, 15 bp, Homo sapiens
ctaggttgagaagca

SEQ ID NO: 531619 - DNA, 15 bp, Homo sapiens
taggttgagaagcaa

SEQ ID NO: 531620 - DNA, 15 bp, Homo sapiens
aggttgagaagcaac

SEQ ID NO: 531621 - DNA, 15 bp, Homo sapiens
ggttgagaagcaacg

SEQ ID NO: 531622 - DNA, 15 bp, Homo sapiens
gttgagaagcaacgc

SEQ ID NO: 531623 - DNA, 15 bp, Homo sapiens
ttgagaagcaacgct

SEQ ID NO: 531624 - DNA, 15 bp, Homo sapiens
tgagaagcaacgctc

SEQ ID NO: 531625 - DNA, 15 bp, Homo sapiens
gagaagcaacgctcc

SEQ ID NO: 531626 - DNA, 15 bp, Homo sapiens
agaagcaacgctcct

SEQ ID NO: 531627 - DNA, 15 bp, Homo sapiens
gaagcaacgctcctg

SEQ ID NO: 531628 - DNA, 15 bp, Homo sapiens
aagcaacgctcctgg

SEQ ID NO: 531629 - DNA, 15 bp, Homo sapiens
agcaacgctcctggc

SEQ ID NO: 531630 - DNA, 15 bp, Homo sapiens
gcaacgctcctggcg

SEQ ID NO: 531631 - DNA, 15 bp, Homo sapiens
caacgctcctggcgg

SEQ ID NO: 531632 - DNA, 15 bp, Homo sapiens
aacgctcctggcggc

SEQ ID NO: 531633 - DNA, 15 bp, Homo sapiens
acgctcctggcggct

SEQ ID NO: 531634 - DNA, 15 bp, Homo sapiens
cgctcctggcggcta

SEQ ID NO: 531635 - DNA, 15 bp, Homo sapiens
gctcctggcggctag

SEQ ID NO: 531636 - DNA, 15 bp, Homo sapiens
ctcctggcggctagt

SEQ ID NO: 531637 - DNA, 15 bp, Homo sapiens
tcctggcggctagtg

SEQ ID NO: 531638 - DNA, 15 bp, Homo sapiens
cctggcggctagtgt

SEQ ID NO: 531639 - DNA, 15 bp, Homo sapiens
ctggcggctagtgtt

SEQ ID NO: 531640 - DNA, 15 bp, Homo sapiens
tggcggctagtgttt

SEQ ID NO: 531641 - DNA, 15 bp, Homo sapiens
ggcggctagtgtttg

SEQ ID NO: 531642 - DNA, 15 bp, Homo sapiens
gcggctagtgtttgg

SEQ ID NO: 531643 - DNA, 15 bp, Homo sapiens
cggctagtgtttggg

SEQ ID NO: 531644 - DNA, 15 bp, Homo sapiens
ggctagtgtttggga

SEQ ID NO: 531645 - DNA, 15 bp, Homo sapiens
gctagtgtttgggaa

SEQ ID NO: 531646 - DNA, 15 bp, Homo sapiens
ctagtgtttgggaaa

SEQ ID NO: 531647 - DNA, 15 bp, Homo sapiens
tagtgtttgggaaac

SEQ ID NO: 531648 - DNA, 15 bp, Homo sapiens
agtgtttgggaaact

SEQ ID NO: 531649 - DNA, 15 bp, Homo sapiens
gtgtttgggaaactt

SEQ ID NO: 531650 - DNA, 15 bp, Homo sapiens
tgtttgggaaacttg

SEQ ID NO: 531651 - DNA, 15 bp, Homo sapiens
gtttgggaaacttgg

SEQ ID NO: 531652 - DNA, 15 bp, Homo sapiens
tttgggaaacttgga

SEQ ID NO: 531653 - DNA, 15 bp, Homo sapiens
ttgggaaacttggag

SEQ ID NO: 531654 - DNA, 15 bp, Homo sapiens
tgggaaacttggagc

SEQ ID NO: 531655 - DNA, 15 bp, Homo sapiens
gggaaacttggagca

SEQ ID NO: 531656 - DNA, 15 bp, Homo sapiens
ggaaacttggagcag

SEQ ID NO: 531657 - DNA, 15 bp, Homo sapiens
gaaacttggagcagg

SEQ ID NO: 531658 - DNA, 15 bp, Homo sapiens
aaacttggagcagga

SEQ ID NO: 531659 - DNA, 15 bp, Homo sapiens
aacttggagcaggag

SEQ ID NO: 531660 - DNA, 15 bp, Homo sapiens
acttggagcaggaga

SEQ ID NO: 531661 - DNA, 15 bp, Homo sapiens
cttggagcaggagag

SEQ ID NO: 531662 - DNA, 15 bp, Homo sapiens
ttggagcaggagagc

SEQ ID NO: 531663 - DNA, 15 bp, Homo sapiens
tggagcaggagagcc

SEQ ID NO: 531664 - DNA, 15 bp, Homo sapiens
ggagcaggagagcct

SEQ ID NO: 531665 - DNA, 15 bp, Homo sapiens
gagcaggagagcctg

SEQ ID NO: 531666 - DNA, 15 bp, Homo sapiens
agcaggagagcctgg

SEQ ID NO: 531667 - DNA, 15 bp, Homo sapiens
gcaggagagcctggc

SEQ ID NO: 531668 - DNA, 15 bp, Homo sapiens
caggagagcctggcg

SEQ ID NO: 531669 - DNA, 15 bp, Homo sapiens
aggagagcctggcga

SEQ ID NO: 531670 - DNA, 15 bp, Homo sapiens
ggagagcctggcgaa

SEQ ID NO: 531671 - DNA, 15 bp, Homo sapiens
gagagcctggcgaag

SEQ ID NO: 531672 - DNA, 15 bp, Homo sapiens
agagcctggcgaagc

SEQ ID NO: 531673 - DNA, 15 bp, Homo sapiens
gagcctggcgaagcc

SEQ ID NO: 531674 - DNA, 15 bp, Homo sapiens
agcctggcgaagcct

SEQ ID NO: 531675 - DNA, 15 bp, Homo sapiens
gcctggcgaagcctg

SEQ ID NO: 531676 - DNA, 15 bp, Homo sapiens
cctggcgaagcctgt

SEQ ID NO: 531677 - DNA, 15 bp, Homo sapiens
ctggcgaagcctgtg

SEQ ID NO: 531678 - DNA, 15 bp, Homo sapiens
tggcgaagcctgtgc

SEQ ID NO: 531679 - DNA, 15 bp, Homo sapiens
ggcgaagcctgtgca

SEQ ID NO: 531680 - DNA, 15 bp, Homo sapiens
gcgaagcctgtgcag

SEQ ID NO: 531681 - DNA, 15 bp, Homo sapiens
cgaagcctgtgcagg

SEQ ID NO: 531682 - DNA, 15 bp, Homo sapiens
gaagcctgtgcagga

SEQ ID NO: 531683 - DNA, 15 bp, Homo sapiens
aagcctgtgcaggaa

SEQ ID NO: 531684 - DNA, 15 bp, Homo sapiens
agcctgtgcaggaag

SEQ ID NO: 531685 - DNA, 15 bp, Homo sapiens
gcctgtgcaggaaga

SEQ ID NO: 531686 - DNA, 15 bp, Homo sapiens
cctgtgcaggaagac

SEQ ID NO: 531687 - DNA, 15 bp, Homo sapiens
ctgtgcaggaagacc

SEQ ID NO: 531688 - DNA, 15 bp, Homo sapiens
tgtgcaggaagaccg

SEQ ID NO: 531689 - DNA, 15 bp, Homo sapiens
gtgcaggaagaccga

SEQ ID NO: 531690 - DNA, 15 bp, Homo sapiens
tgcaggaagaccgag

SEQ ID NO: 531691 - DNA, 15 bp, Homo sapiens
gcaggaagaccgagc

SEQ ID NO: 531692 - DNA, 15 bp, Homo sapiens
caggaagaccgagca

SEQ ID NO: 531693 - DNA, 15 bp, Homo sapiens
aggaagaccgagcag

SEQ ID NO: 531694 - DNA, 15 bp, Homo sapiens
ggaagaccgagcagc

SEQ ID NO: 531695 - DNA, 15 bp, Homo sapiens
gaagaccgagcagct

SEQ ID NO: 531696 - DNA, 15 bp, Homo sapiens
aagaccgagcagctc

SEQ ID NO: 531697 - DNA, 15 bp, Homo sapiens
agaccgagcagctcg

SEQ ID NO: 531698 - DNA, 15 bp, Homo sapiens
gaccgagcagctcgc

SEQ ID NO: 531699 - DNA, 15 bp, Homo sapiens
accgagcagctcgcc

SEQ ID NO: 531700 - DNA, 15 bp, Homo sapiens
ccgagcagctcgccg

SEQ ID NO: 531701 - DNA, 15 bp, Homo sapiens
cgagcagctcgccgc

SEQ ID NO: 531702 - DNA, 15 bp, Homo sapiens
gagcagctcgccgcg

SEQ ID NO: 531703 - DNA, 15 bp, Homo sapiens
agcagctcgccgcgt

SEQ ID NO: 531704 - DNA, 15 bp, Homo sapiens
gcagctcgccgcgtc

SEQ ID NO: 531705 - DNA, 15 bp, Homo sapiens
cagctcgccgcgtca

SEQ ID NO: 531706 - DNA, 15 bp, Homo sapiens
agctcgccgcgtcag

SEQ ID NO: 531707 - DNA, 15 bp, Homo sapiens
gctcgccgcgtcagg

SEQ ID NO: 531708 - DNA, 15 bp, Homo sapiens
ctcgccgcgtcaggt

SEQ ID NO: 531709 - DNA, 15 bp, Homo sapiens
tcgccgcgtcaggtc

SEQ ID NO: 531710 - DNA, 15 bp, Homo sapiens
cgccgcgtcaggtcc

SEQ ID NO: 531711 - DNA, 15 bp, Homo sapiens
gccgcgtcaggtccc

SEQ ID NO: 531712 - DNA, 15 bp, Homo sapiens
ccgcgtcaggtccca

SEQ ID NO: 531713 - DNA, 15 bp, Homo sapiens
cgcgtcaggtcccaa

SEQ ID NO: 531714 - DNA, 15 bp, Homo sapiens
gcgtcaggtcccaac

SEQ ID NO: 531715 - DNA, 15 bp, Homo sapiens
cgtcaggtcccaacg

SEQ ID NO: 531716 - DNA, 15 bp, Homo sapiens
gtcaggtcccaacgg

SEQ ID NO: 531717 - DNA, 15 bp, Homo sapiens
tcaggtcccaacggg

SEQ ID NO: 531718 - DNA, 15 bp, Homo sapiens
caggtcccaacgggt

SEQ ID NO: 531719 - DNA, 15 bp, Homo sapiens
aggtcccaacgggtg

SEQ ID NO: 531720 - DNA, 15 bp, Homo sapiens
ggtcccaacgggtgg

SEQ ID NO: 531721 - DNA, 15 bp, Homo sapiens
gtcccaacgggtggg

SEQ ID NO: 531722 - DNA, 15 bp, Homo sapiens
tcccaacgggtgggg

SEQ ID NO: 531723 - DNA, 15 bp, Homo sapiens
cccaacgggtggggt

SEQ ID NO: 531724 - DNA, 15 bp, Homo sapiens
ccaacgggtggggtg

SEQ ID NO: 531725 - DNA, 15 bp, Homo sapiens
caacgggtggggtgc

SEQ ID NO: 531726 - DNA, 15 bp, Homo sapiens
aacgggtggggtgct

SEQ ID NO: 531727 - DNA, 15 bp, Homo sapiens
acgggtggggtgctc

SEQ ID NO: 531728 - DNA, 15 bp, Homo sapiens
cgggtggggtgctct

SEQ ID NO: 531729 - DNA, 15 bp, Homo sapiens
gggtggggtgctctg

SEQ ID NO: 531730 - DNA, 15 bp, Homo sapiens
ggtggggtgctctga

SEQ ID NO: 531731 - DNA, 15 bp, Homo sapiens
gtggggtgctctgag

SEQ ID NO: 531732 - DNA, 15 bp, Homo sapiens
tggggtgctctgagc

SEQ ID NO: 531733 - DNA, 15 bp, Homo sapiens
ggggtgctctgagcg

SEQ ID NO: 531734 - DNA, 15 bp, Homo sapiens
gggtgctctgagcgg

SEQ ID NO: 531735 - DNA, 15 bp, Homo sapiens
ggtgctctgagcggc

SEQ ID NO: 531736 - DNA, 15 bp, Homo sapiens
gtgctctgagcggct

SEQ ID NO: 531737 - DNA, 15 bp, Homo sapiens
tgctctgagcggctg

SEQ ID NO: 531738 - DNA, 15 bp, Homo sapiens
gctctgagcggctgg

SEQ ID NO: 531739 - DNA, 15 bp, Homo sapiens
ctctgagcggctggc

SEQ ID NO: 531740 - DNA, 15 bp, Homo sapiens
tctgagcggctggcg

SEQ ID NO: 531741 - DNA, 15 bp, Homo sapiens
ctgagcggctggcgc

SEQ ID NO: 531742 - DNA, 15 bp, Homo sapiens
tgagcggctggcgca

SEQ ID NO: 531743 - DNA, 15 bp, Homo sapiens
gagcggctggcgcac

SEQ ID NO: 531744 - DNA, 15 bp, Homo sapiens
agcggctggcgcaca

SEQ ID NO: 531745 - DNA, 15 bp, Homo sapiens
gcggctggcgcacag

SEQ ID NO: 531746 - DNA, 15 bp, Homo sapiens
cggctggcgcacagc

SEQ ID NO: 531747 - DNA, 15 bp, Homo sapiens
ggctggcgcacagcg

SEQ ID NO: 531748 - DNA, 15 bp, Homo sapiens
gctggcgcacagcgt

SEQ ID NO: 531749 - DNA, 15 bp, Homo sapiens
ctggcgcacagcgtg

SEQ ID NO: 531750 - DNA, 15 bp, Homo sapiens
tggcgcacagcgtgt

SEQ ID NO: 531751 - DNA, 15 bp, Homo sapiens
ggcgcacagcgtgtt

SEQ ID NO: 531752 - DNA, 15 bp, Homo sapiens
gcgcacagcgtgttc

SEQ ID NO: 531753 - DNA, 15 bp, Homo sapiens
cgcacagcgtgttcc

SEQ ID NO: 531754 - DNA, 15 bp, Homo sapiens
gcacagcgtgttccc

SEQ ID NO: 531755 - DNA, 15 bp, Homo sapiens
cacagcgtgttccct

SEQ ID NO: 531756 - DNA, 15 bp, Homo sapiens
acagcgtgttccctg

SEQ ID NO: 531757 - DNA, 15 bp, Homo sapiens
cagcgtgttccctgc

SEQ ID NO: 531758 - DNA, 15 bp, Homo sapiens
agcgtgttccctgca

SEQ ID NO: 531759 - DNA, 15 bp, Homo sapiens
gcgtgttccctgcat

SEQ ID NO: 531760 - DNA, 15 bp, Homo sapiens
cgtgttccctgcatt

SEQ ID NO: 531761 - DNA, 15 bp, Homo sapiens
gtgttccctgcatta

SEQ ID NO: 531762 - DNA, 15 bp, Homo sapiens
tgttccctgcattaa

SEQ ID NO: 531763 - DNA, 15 bp, Homo sapiens
gttccctgcattaag

SEQ ID NO: 531764 - DNA, 15 bp, Homo sapiens
ttccctgcattaagc

SEQ ID NO: 531765 - DNA, 15 bp, Homo sapiens
tccctgcattaagcg

SEQ ID NO: 531766 - DNA, 15 bp, Homo sapiens
ccctgcattaagcgc

SEQ ID NO: 531767 - DNA, 15 bp, Homo sapiens
cctgcattaagcgcg

SEQ ID NO: 531768 - DNA, 15 bp, Homo sapiens
ctgcattaagcgcgt

SEQ ID NO: 531769 - DNA, 15 bp, Homo sapiens
tgcattaagcgcgtg

SEQ ID NO: 531770 - DNA, 15 bp, Homo sapiens
gcattaagcgcgtgc

SEQ ID NO: 531771 - DNA, 15 bp, Homo sapiens
cattaagcgcgtgcg

SEQ ID NO: 531772 - DNA, 15 bp, Homo sapiens
attaagcgcgtgcgc

SEQ ID NO: 531773 - DNA, 15 bp, Homo sapiens
ttaagcgcgtgcgcg

SEQ ID NO: 531774 - DNA, 15 bp, Homo sapiens
taagcgcgtgcgcgc

SEQ ID NO: 531775 - DNA, 15 bp, Homo sapiens
aagcgcgtgcgcgcg

SEQ ID NO: 531776 - DNA, 15 bp, Homo sapiens
agcgcgtgcgcgcgc

SEQ ID NO: 531777 - DNA, 15 bp, Homo sapiens
gcgcgtgcgcgcgct

SEQ ID NO: 531778 - DNA, 15 bp, Homo sapiens
cgcgtgcgcgcgctt

SEQ ID NO: 531779 - DNA, 15 bp, Homo sapiens
gcgtgcgcgcgcttg

SEQ ID NO: 531780 - DNA, 15 bp, Homo sapiens
cgtgcgcgcgcttgt

SEQ ID NO: 531781 - DNA, 15 bp, Homo sapiens
gtgcgcgcgcttgtg

SEQ ID NO: 531782 - DNA, 15 bp, Homo sapiens
tgcgcgcgcttgtgt

SEQ ID NO: 531783 - DNA, 15 bp, Homo sapiens
gcgcgcgcttgtgtg

SEQ ID NO: 531784 - DNA, 15 bp, Homo sapiens
cgcgcgcttgtgtgt

SEQ ID NO: 531785 - DNA, 15 bp, Homo sapiens
gcgcgcttgtgtgtg

SEQ ID NO: 531786 - DNA, 15 bp, Homo sapiens
cgcgcttgtgtgtga

SEQ ID NO: 531787 - DNA, 15 bp, Homo sapiens
gcgcttgtgtgtgag

SEQ ID NO: 531788 - DNA, 15 bp, Homo sapiens
cgcttgtgtgtgagc

SEQ ID NO: 531789 - DNA, 15 bp, Homo sapiens
gcttgtgtgtgagcg

SEQ ID NO: 531790 - DNA, 15 bp, Homo sapiens
cttgtgtgtgagcgc

SEQ ID NO: 531791 - DNA, 15 bp, Homo sapiens
ttgtgtgtgagcgcg

SEQ ID NO: 531792 - DNA, 15 bp, Homo sapiens
tgtgtgtgagcgcgt

SEQ ID NO: 531793 - DNA, 15 bp, Homo sapiens
gtgtgtgagcgcgtc

SEQ ID NO: 531794 - DNA, 15 bp, Homo sapiens
tgtgtgagcgcgtct

SEQ ID NO: 531795 - DNA, 15 bp, Homo sapiens
gtgtgagcgcgtctg

SEQ ID NO: 531796 - DNA, 15 bp, Homo sapiens
tgtgagcgcgtctgt

SEQ ID NO: 531797 - DNA, 15 bp, Homo sapiens
gtgagcgcgtctgtg

SEQ ID NO: 531798 - DNA, 15 bp, Homo sapiens
tgagcgcgtctgtgc

SEQ ID NO: 531799 - DNA, 15 bp, Homo sapiens
gagcgcgtctgtgca

SEQ ID NO: 531800 - DNA, 15 bp, Homo sapiens
agcgcgtctgtgcat

SEQ ID NO: 531801 - DNA, 15 bp, Homo sapiens
gcgcgtctgtgcatg

SEQ ID NO: 531802 - DNA, 15 bp, Homo sapiens
cgcgtctgtgcatgt

SEQ ID NO: 531803 - DNA, 15 bp, Homo sapiens
gcgtctgtgcatgtg

SEQ ID NO: 531804 - DNA, 15 bp, Homo sapiens
cgtctgtgcatgtgt

SEQ ID NO: 531805 - DNA, 15 bp, Homo sapiens
gtctgtgcatgtgtg

SEQ ID NO: 531806 - DNA, 15 bp, Homo sapiens
tctgtgcatgtgtgc

SEQ ID NO: 531807 - DNA, 15 bp, Homo sapiens
ctgtgcatgtgtgca

SEQ ID NO: 531808 - DNA, 15 bp, Homo sapiens
tgtgcatgtgtgcat

SEQ ID NO: 531809 - DNA, 15 bp, Homo sapiens
gtgcatgtgtgcatg

SEQ ID NO: 531810 - DNA, 15 bp, Homo sapiens
tgcatgtgtgcatgc

SEQ ID NO: 531811 - DNA, 15 bp, Homo sapiens
gcatgtgtgcatgcg

SEQ ID NO: 531812 - DNA, 15 bp, Homo sapiens
catgtgtgcatgcgt

SEQ ID NO: 531813 - DNA, 15 bp, Homo sapiens
atgtgtgcatgcgtg

SEQ ID NO: 531814 - DNA, 15 bp, Homo sapiens
tgtgtgcatgcgtgc

SEQ ID NO: 531815 - DNA, 15 bp, Homo sapiens
gagagagagagagat

SEQ ID NO: 531816 - DNA, 15 bp, Homo sapiens
agagagagagagata

SEQ ID NO: 531817 - DNA, 15 bp, Homo sapiens
gagagagagagatag

SEQ ID NO: 531818 - DNA, 15 bp, Homo sapiens
agagagagagatagg

SEQ ID NO: 531819 - DNA, 15 bp, Homo sapiens
gagagagagatagga

SEQ ID NO: 531820 - DNA, 15 bp, Homo sapiens
agagagagataggac

SEQ ID NO: 531821 - DNA, 15 bp, Homo sapiens
gagagagataggact

SEQ ID NO: 531822 - DNA, 15 bp, Homo sapiens
agagagataggactt

SEQ ID NO: 531823 - DNA, 15 bp, Homo sapiens
gagagataggacttc

SEQ ID NO: 531824 - DNA, 15 bp, Homo sapiens
agagataggacttcc

SEQ ID NO: 531825 - DNA, 15 bp, Homo sapiens
gagataggacttcct

SEQ ID NO: 531826 - DNA, 15 bp, Homo sapiens
agataggacttcctc

SEQ ID NO: 531827 - DNA, 15 bp, Homo sapiens
gataggacttcctcc

SEQ ID NO: 531828 - DNA, 15 bp, Homo sapiens
ataggacttcctccc

SEQ ID NO: 531829 - DNA, 15 bp, Homo sapiens
taggacttcctcccc

SEQ ID NO: 531830 - DNA, 15 bp, Homo sapiens
aggacttcctccccg

SEQ ID NO: 531831 - DNA, 15 bp, Homo sapiens
ggacttcctccccga

SEQ ID NO: 531832 - DNA, 15 bp, Homo sapiens
gacttcctccccgat

SEQ ID NO: 531833 - DNA, 15 bp, Homo sapiens
acttcctccccgatt

SEQ ID NO: 531834 - DNA, 15 bp, Homo sapiens
cttcctccccgattc

SEQ ID NO: 531835 - DNA, 15 bp, Homo sapiens
ttcctccccgattcg

SEQ ID NO: 531836 - DNA, 15 bp, Homo sapiens
tcctccccgattcgc

SEQ ID NO: 531837 - DNA, 15 bp, Homo sapiens
cctccccgattcgca

SEQ ID NO: 531838 - DNA, 15 bp, Homo sapiens
ctccccgattcgcaa

SEQ ID NO: 531839 - DNA, 15 bp, Homo sapiens
tccccgattcgcaaa

SEQ ID NO: 531840 - DNA, 15 bp, Homo sapiens
ccccgattcgcaaag

SEQ ID NO: 531841 - DNA, 15 bp, Homo sapiens
cccgattcgcaaagt

SEQ ID NO: 531842 - DNA, 15 bp, Homo sapiens
ccgattcgcaaagtg

SEQ ID NO: 531843 - DNA, 15 bp, Homo sapiens
cgattcgcaaagtga

SEQ ID NO: 531844 - DNA, 15 bp, Homo sapiens
gattcgcaaagtgaa

SEQ ID NO: 531845 - DNA, 15 bp, Homo sapiens
attcgcaaagtgaag

SEQ ID NO: 531846 - DNA, 15 bp, Homo sapiens
ttcgcaaagtgaagt

SEQ ID NO: 531847 - DNA, 15 bp, Homo sapiens
tcgcaaagtgaagtc

SEQ ID NO: 531848 - DNA, 15 bp, Homo sapiens
cgcaaagtgaagtca

SEQ ID NO: 531849 - DNA, 15 bp, Homo sapiens
gcaaagtgaagtcac

SEQ ID NO: 531850 - DNA, 15 bp, Homo sapiens
caaagtgaagtcact

SEQ ID NO: 531851 - DNA, 15 bp, Homo sapiens
aaagtgaagtcactt

SEQ ID NO: 531852 - DNA, 15 bp, Homo sapiens
aagtgaagtcacttc

SEQ ID NO: 531853 - DNA, 15 bp, Homo sapiens
agtgaagtcacttcc

SEQ ID NO: 531854 - DNA, 15 bp, Homo sapiens
gtgaagtcacttccc

SEQ ID NO: 531855 - DNA, 15 bp, Homo sapiens
tgaagtcacttccca

SEQ ID NO: 531856 - DNA, 15 bp, Homo sapiens
gaagtcacttcccaa

SEQ ID NO: 531857 - DNA, 15 bp, Homo sapiens
aagtcacttcccaaa

SEQ ID NO: 531858 - DNA, 15 bp, Homo sapiens
agtcacttcccaaaa

SEQ ID NO: 531859 - DNA, 15 bp, Homo sapiens
gtcacttcccaaaat

SEQ ID NO: 531860 - DNA, 15 bp, Homo sapiens
tcacttcccaaaatt

SEQ ID NO: 531861 - DNA, 15 bp, Homo sapiens
cacttcccaaaatta

SEQ ID NO: 531862 - DNA, 15 bp, Homo sapiens
acttcccaaaattag

SEQ ID NO: 531863 - DNA, 15 bp, Homo sapiens
cttcccaaaattagc

SEQ ID NO: 531864 - DNA, 15 bp, Homo sapiens
ttcccaaaattagct

SEQ ID NO: 531865 - DNA, 15 bp, Homo sapiens
tcccaaaattagctg

SEQ ID NO: 531866 - DNA, 15 bp, Homo sapiens
cccaaaattagctga

SEQ ID NO: 531867 - DNA, 15 bp, Homo sapiens
ccaaaattagctgaa

SEQ ID NO: 531868 - DNA, 15 bp, Homo sapiens
caaaattagctgaaa

SEQ ID NO: 531869 - DNA, 15 bp, Homo sapiens
aaaattagctgaaaa

SEQ ID NO: 531870 - DNA, 15 bp, Homo sapiens
aaattagctgaaaaa

SEQ ID NO: 531871 - DNA, 15 bp, Homo sapiens
aattagctgaaaaaa

SEQ ID NO: 531872 - DNA, 15 bp, Homo sapiens
attagctgaaaaaaa

SEQ ID NO: 531873 - DNA, 15 bp, Homo sapiens
ttagctgaaaaaaaa

SEQ ID NO: 531874 - DNA, 15 bp, Homo sapiens
tagctgaaaaaaaag

SEQ ID NO: 531875 - DNA, 15 bp, Homo sapiens
agctgaaaaaaaagt

SEQ ID NO: 531876 - DNA, 15 bp, Homo sapiens
gctgaaaaaaaagtt

SEQ ID NO: 531877 - DNA, 15 bp, Homo sapiens
ctgaaaaaaaagttt

SEQ ID NO: 531878 - DNA, 15 bp, Homo sapiens
tgaaaaaaaagtttc

SEQ ID NO: 531879 - DNA, 15 bp, Homo sapiens
gaaaaaaaagtttca

SEQ ID NO: 531880 - DNA, 15 bp, Homo sapiens
aaaaaaaagtttcat

SEQ ID NO: 531881 - DNA, 15 bp, Homo sapiens
aaaaaaagtttcatc

SEQ ID NO: 531882 - DNA, 15 bp, Homo sapiens
aaaaaagtttcatcc

SEQ ID NO: 531883 - DNA, 15 bp, Homo sapiens
aaaaagtttcatccg

SEQ ID NO: 531884 - DNA, 15 bp, Homo sapiens
aaaagtttcatccgg

SEQ ID NO: 531885 - DNA, 15 bp, Homo sapiens
aaagtttcatccggt

SEQ ID NO: 531886 - DNA, 15 bp, Homo sapiens
aagtttcatccggtt

SEQ ID NO: 531887 - DNA, 15 bp, Homo sapiens
agtttcatccggtta

SEQ ID NO: 531888 - DNA, 15 bp, Homo sapiens
gtttcatccggttaa

SEQ ID NO: 531889 - DNA, 15 bp, Homo sapiens
tttcatccggttaac

SEQ ID NO: 531890 - DNA, 15 bp, Homo sapiens
ttcatccggttaact

SEQ ID NO: 531891 - DNA, 15 bp, Homo sapiens
tcatccggttaactg

SEQ ID NO: 531892 - DNA, 15 bp, Homo sapiens
catccggttaactgt

SEQ ID NO: 531893 - DNA, 15 bp, Homo sapiens
atccggttaactgtc

SEQ ID NO: 531894 - DNA, 15 bp, Homo sapiens
tccggttaactgtct

SEQ ID NO: 531895 - DNA, 15 bp, Homo sapiens
ccggttaactgtctc

SEQ ID NO: 531896 - DNA, 15 bp, Homo sapiens
cggttaactgtctct

SEQ ID NO: 531897 - DNA, 15 bp, Homo sapiens
ggttaactgtctctt

SEQ ID NO: 531898 - DNA, 15 bp, Homo sapiens
gttaactgtctcttt

SEQ ID NO: 531899 - DNA, 15 bp, Homo sapiens
ttaactgtctctttc

SEQ ID NO: 531900 - DNA, 15 bp, Homo sapiens
taactgtctctttcg

SEQ ID NO: 531901 - DNA, 15 bp, Homo sapiens
aactgtctctttcgc

SEQ ID NO: 531902 - DNA, 15 bp, Homo sapiens
actgtctctttcgct

SEQ ID NO: 531903 - DNA, 15 bp, Homo sapiens
ctgtctctttcgctc

SEQ ID NO: 531904 - DNA, 15 bp, Homo sapiens
tgtctctttcgctcc

SEQ ID NO: 531905 - DNA, 15 bp, Homo sapiens
gtctctttcgctccg

SEQ ID NO: 531906 - DNA, 15 bp, Homo sapiens
tctctttcgctccgc

SEQ ID NO: 531907 - DNA, 15 bp, Homo sapiens
ctctttcgctccgct

SEQ ID NO: 531908 - DNA, 15 bp, Homo sapiens
tctttcgctccgcta

SEQ ID NO: 531909 - DNA, 15 bp, Homo sapiens
ctttcgctccgctac

SEQ ID NO: 531910 - DNA, 15 bp, Homo sapiens
tttcgctccgctaca

SEQ ID NO: 531911 - DNA, 15 bp, Homo sapiens
ttcgctccgctacaa

SEQ ID NO: 531912 - DNA, 15 bp, Homo sapiens
tcgctccgctacaac

SEQ ID NO: 531913 - DNA, 15 bp, Homo sapiens
cgctccgctacaaca

SEQ ID NO: 531914 - DNA, 15 bp, Homo sapiens
gctccgctacaacaa

SEQ ID NO: 531915 - DNA, 15 bp, Homo sapiens
ctccgctacaacaac

SEQ ID NO: 531916 - DNA, 15 bp, Homo sapiens
tccgctacaacaaca

SEQ ID NO: 531917 - DNA, 15 bp, Homo sapiens
ccgctacaacaacaa

SEQ ID NO: 531918 - DNA, 15 bp, Homo sapiens
cgctacaacaacaaa

SEQ ID NO: 531919 - DNA, 15 bp, Homo sapiens
gctacaacaacaaac

SEQ ID NO: 531920 - DNA, 15 bp, Homo sapiens
ctacaacaacaaacg

SEQ ID NO: 531921 - DNA, 15 bp, Homo sapiens
tacaacaacaaacgt

SEQ ID NO: 531922 - DNA, 15 bp, Homo sapiens
acaacaacaaacgtg

SEQ ID NO: 531923 - DNA, 15 bp, Homo sapiens
caacaacaaacgtgc

SEQ ID NO: 531924 - DNA, 15 bp, Homo sapiens
aacaacaaacgtgca

SEQ ID NO: 531925 - DNA, 15 bp, Homo sapiens
acaacaaacgtgcac

SEQ ID NO: 531926 - DNA, 15 bp, Homo sapiens
caacaaacgtgcaca

SEQ ID NO: 531927 - DNA, 15 bp, Homo sapiens
aacaaacgtgcacag

SEQ ID NO: 531928 - DNA, 15 bp, Homo sapiens
acaaacgtgcacagg

SEQ ID NO: 531929 - DNA, 15 bp, Homo sapiens
caaacgtgcacaggg

SEQ ID NO: 531930 - DNA, 15 bp, Homo sapiens
aaacgtgcacagggg

SEQ ID NO: 531931 - DNA, 15 bp, Homo sapiens
aacgtgcacagggga

SEQ ID NO: 531932 - DNA, 15 bp, Homo sapiens
acgtgcacaggggag

SEQ ID NO: 531933 - DNA, 15 bp, Homo sapiens
cgtgcacaggggagt

SEQ ID NO: 531934 - DNA, 15 bp, Homo sapiens
gtgcacaggggagtg

SEQ ID NO: 531935 - DNA, 15 bp, Homo sapiens
tgcacaggggagtga

SEQ ID NO: 531936 - DNA, 15 bp, Homo sapiens
gcacaggggagtgag

SEQ ID NO: 531937 - DNA, 15 bp, Homo sapiens
cacaggggagtgagg

SEQ ID NO: 531938 - DNA, 15 bp, Homo sapiens
acaggggagtgaggg

SEQ ID NO: 531939 - DNA, 15 bp, Homo sapiens
caggggagtgagggc

SEQ ID NO: 531940 - DNA, 15 bp, Homo sapiens
aggggagtgagggca

SEQ ID NO: 531941 - DNA, 15 bp, Homo sapiens
ggggagtgagggcag

SEQ ID NO: 531942 - DNA, 15 bp, Homo sapiens
gggagtgagggcagg

SEQ ID NO: 531943 - DNA, 15 bp, Homo sapiens
ggagtgagggcaggg

SEQ ID NO: 531944 - DNA, 15 bp, Homo sapiens
gagtgagggcagggc

SEQ ID NO: 531945 - DNA, 15 bp, Homo sapiens
agtgagggcagggcg

SEQ ID NO: 531946 - DNA, 15 bp, Homo sapiens
gtgagggcagggcgc

SEQ ID NO: 531947 - DNA, 15 bp, Homo sapiens
tgagggcagggcgct

SEQ ID NO: 531948 - DNA, 15 bp, Homo sapiens
gagggcagggcgctc

SEQ ID NO: 531949 - DNA, 15 bp, Homo sapiens
agggcagggcgctcg

SEQ ID NO: 531950 - DNA, 15 bp, Homo sapiens
gggcagggcgctcgc

SEQ ID NO: 531951 - DNA, 15 bp, Homo sapiens
ggcagggcgctcgca

SEQ ID NO: 531952 - DNA, 15 bp, Homo sapiens
gcagggcgctcgcag

SEQ ID NO: 531953 - DNA, 15 bp, Homo sapiens
cagggcgctcgcagg

SEQ ID NO: 531954 - DNA, 15 bp, Homo sapiens
agggcgctcgcaggg

SEQ ID NO: 531955 - DNA, 15 bp, Homo sapiens
gggcgctcgcagggg

SEQ ID NO: 531956 - DNA, 15 bp, Homo sapiens
ggcgctcgcaggggg

SEQ ID NO: 531957 - DNA, 15 bp, Homo sapiens
gcgctcgcagggggc

SEQ ID NO: 531958 - DNA, 15 bp, Homo sapiens
cgctcgcagggggca

SEQ ID NO: 531959 - DNA, 15 bp, Homo sapiens
gctcgcagggggcac

SEQ ID NO: 531960 - DNA, 15 bp, Homo sapiens
ctcgcagggggcacg

SEQ ID NO: 531961 - DNA, 15 bp, Homo sapiens
tcgcagggggcacgc

SEQ ID NO: 531962 - DNA, 15 bp, Homo sapiens
cgcagggggcacgca

SEQ ID NO: 531963 - DNA, 15 bp, Homo sapiens
gcagggggcacgcag

SEQ ID NO: 531964 - DNA, 15 bp, Homo sapiens
cagggggcacgcagg

SEQ ID NO: 531965 - DNA, 15 bp, Homo sapiens
agggggcacgcaggg

SEQ ID NO: 531966 - DNA, 15 bp, Homo sapiens
gggggcacgcaggga

SEQ ID NO: 531967 - DNA, 15 bp, Homo sapiens
ggggcacgcagggag

SEQ ID NO: 531968 - DNA, 15 bp, Homo sapiens
gggcacgcagggagg

SEQ ID NO: 531969 - DNA, 15 bp, Homo sapiens
ggcacgcagggaggg

SEQ ID NO: 531970 - DNA, 15 bp, Homo sapiens
gcacgcagggagggc

SEQ ID NO: 531971 - DNA, 15 bp, Homo sapiens
cacgcagggagggcc

SEQ ID NO: 531972 - DNA, 15 bp, Homo sapiens
acgcagggagggccc

SEQ ID NO: 531973 - DNA, 15 bp, Homo sapiens
cgcagggagggccca

SEQ ID NO: 531974 - DNA, 15 bp, Homo sapiens
gcagggagggcccag

SEQ ID NO: 531975 - DNA, 15 bp, Homo sapiens
cagggagggcccagg

SEQ ID NO: 531976 - DNA, 15 bp, Homo sapiens
agggagggcccaggg

SEQ ID NO: 531977 - DNA, 15 bp, Homo sapiens
gggagggcccagggc

SEQ ID NO: 531978 - DNA, 15 bp, Homo sapiens
ggagggcccagggcg

SEQ ID NO: 531979 - DNA, 15 bp, Homo sapiens
gagggcccagggcgc

SEQ ID NO: 531980 - DNA, 15 bp, Homo sapiens
agggcccagggcgcc

SEQ ID NO: 531981 - DNA, 15 bp, Homo sapiens
gggcccagggcgcca

SEQ ID NO: 531982 - DNA, 15 bp, Homo sapiens
ggcccagggcgccag

SEQ ID NO: 531983 - DNA, 15 bp, Homo sapiens
gcccagggcgccagg

SEQ ID NO: 531984 - DNA, 15 bp, Homo sapiens
cccagggcgccaggg

SEQ ID NO: 531985 - DNA, 15 bp, Homo sapiens
ccagggcgccaggga

SEQ ID NO: 531986 - DNA, 15 bp, Homo sapiens
cagggcgccagggag

SEQ ID NO: 531987 - DNA, 15 bp, Homo sapiens
agggcgccagggagg

SEQ ID NO: 531988 - DNA, 15 bp, Homo sapiens
gggcgccagggaggc

SEQ ID NO: 531989 - DNA, 15 bp, Homo sapiens
ggcgccagggaggcc

SEQ ID NO: 531990 - DNA, 15 bp, Homo sapiens
gcgccagggaggccg

SEQ ID NO: 531991 - DNA, 15 bp, Homo sapiens
cgccagggaggccgc

SEQ ID NO: 531992 - DNA, 15 bp, Homo sapiens
gccagggaggccgcg

SEQ ID NO: 531993 - DNA, 15 bp, Homo sapiens
ccagggaggccgcgc

SEQ ID NO: 531994 - DNA, 15 bp, Homo sapiens
cagggaggccgcgcc

SEQ ID NO: 531995 - DNA, 15 bp, Homo sapiens
agggaggccgcgccg

SEQ ID NO: 531996 - DNA, 15 bp, Homo sapiens
gggaggccgcgccgg

SEQ ID NO: 531997 - DNA, 15 bp, Homo sapiens
ggaggccgcgccggg

SEQ ID NO: 531998 - DNA, 15 bp, Homo sapiens
gaggccgcgccgggc

SEQ ID NO: 531999 - DNA, 15 bp, Homo sapiens
aggccgcgccgggct

SEQ ID NO: 532000 - DNA, 15 bp, Homo sapiens
ggccgcgccgggcta

SEQ ID NO: 532001 - DNA, 15 bp, Homo sapiens
gccgcgccgggctaa

SEQ ID NO: 532002 - DNA, 15 bp, Homo sapiens
ccgcgccgggctaat

SEQ ID NO: 532003 - DNA, 15 bp, Homo sapiens
cgcgccgggctaatc

SEQ ID NO: 532004 - DNA, 15 bp, Homo sapiens
gcgccgggctaatcc

SEQ ID NO: 532005 - DNA, 15 bp, Homo sapiens
cgccgggctaatccg

SEQ ID NO: 532006 - DNA, 15 bp, Homo sapiens
gccgggctaatccga

SEQ ID NO: 532007 - DNA, 15 bp, Homo sapiens
ccgggctaatccgaa

SEQ ID NO: 532008 - DNA, 15 bp, Homo sapiens
cgggctaatccgaag

SEQ ID NO: 532009 - DNA, 15 bp, Homo sapiens
gggctaatccgaagg

SEQ ID NO: 532010 - DNA, 15 bp, Homo sapiens
ggctaatccgaaggg

SEQ ID NO: 532011 - DNA, 15 bp, Homo sapiens
gctaatccgaagggg

SEQ ID NO: 532012 - DNA, 15 bp, Homo sapiens
ctaatccgaaggggc

SEQ ID NO: 532013 - DNA, 15 bp, Homo sapiens
taatccgaaggggct

SEQ ID NO: 532014 - DNA, 15 bp, Homo sapiens
aatccgaaggggctg

SEQ ID NO: 532015 - DNA, 15 bp, Homo sapiens
atccgaaggggctgc

SEQ ID NO: 532016 - DNA, 15 bp, Homo sapiens
tccgaaggggctgcg

SEQ ID NO: 532017 - DNA, 15 bp, Homo sapiens
ccgaaggggctgcga

SEQ ID NO: 532018 - DNA, 15 bp, Homo sapiens
cgaaggggctgcgag

SEQ ID NO: 532019 - DNA, 15 bp, Homo sapiens
gaaggggctgcgagg

SEQ ID NO: 532020 - DNA, 15 bp, Homo sapiens
aaggggctgcgaggt

SEQ ID NO: 532021 - DNA, 15 bp, Homo sapiens
aggggctgcgaggtc

SEQ ID NO: 532022 - DNA, 15 bp, Homo sapiens
ggggctgcgaggtca

SEQ ID NO: 532023 - DNA, 15 bp, Homo sapiens
gggctgcgaggtcag

SEQ ID NO: 532024 - DNA, 15 bp, Homo sapiens
ggctgcgaggtcagg

SEQ ID NO: 532025 - DNA, 15 bp, Homo sapiens
gctgcgaggtcaggc

SEQ ID NO: 532026 - DNA, 15 bp, Homo sapiens
ctgcgaggtcaggct

SEQ ID NO: 532027 - DNA, 15 bp, Homo sapiens
tgcgaggtcaggctg

SEQ ID NO: 532028 - DNA, 15 bp, Homo sapiens
gcgaggtcaggctgt

SEQ ID NO: 532029 - DNA, 15 bp, Homo sapiens
cgaggtcaggctgta

SEQ ID NO: 532030 - DNA, 15 bp, Homo sapiens
gaggtcaggctgtaa

SEQ ID NO: 532031 - DNA, 15 bp, Homo sapiens
aggtcaggctgtaac

SEQ ID NO: 532032 - DNA, 15 bp, Homo sapiens
ggtcaggctgtaacc

SEQ ID NO: 532033 - DNA, 15 bp, Homo sapiens
gtcaggctgtaaccg

SEQ ID NO: 532034 - DNA, 15 bp, Homo sapiens
tcaggctgtaaccgg

SEQ ID NO: 532035 - DNA, 15 bp, Homo sapiens
caggctgtaaccggg

SEQ ID NO: 532036 - DNA, 15 bp, Homo sapiens
aggctgtaaccgggt

SEQ ID NO: 532037 - DNA, 15 bp, Homo sapiens
ggctgtaaccgggtc

SEQ ID NO: 532038 - DNA, 15 bp, Homo sapiens
gctgtaaccgggtca

SEQ ID NO: 532039 - DNA, 15 bp, Homo sapiens
ctgtaaccgggtcaa

SEQ ID NO: 532040 - DNA, 15 bp, Homo sapiens
tgtaaccgggtcaat

SEQ ID NO: 532041 - DNA, 15 bp, Homo sapiens
gtaaccgggtcaatg

SEQ ID NO: 532042 - DNA, 15 bp, Homo sapiens
taaccgggtcaatgt

SEQ ID NO: 532043 - DNA, 15 bp, Homo sapiens
aaccgggtcaatgtg

SEQ ID NO: 532044 - DNA, 15 bp, Homo sapiens
accgggtcaatgtgt

SEQ ID NO: 532045 - DNA, 15 bp, Homo sapiens
ccgggtcaatgtgtg

SEQ ID NO: 532046 - DNA, 15 bp, Homo sapiens
cgggtcaatgtgtgg

SEQ ID NO: 532047 - DNA, 15 bp, Homo sapiens
gggtcaatgtgtgga

SEQ ID NO: 532048 - DNA, 15 bp, Homo sapiens
ggtcaatgtgtggaa

SEQ ID NO: 532049 - DNA, 15 bp, Homo sapiens
gtcaatgtgtggaat

SEQ ID NO: 532050 - DNA, 15 bp, Homo sapiens
tcaatgtgtggaata

SEQ ID NO: 532051 - DNA, 15 bp, Homo sapiens
caatgtgtggaatat

SEQ ID NO: 532052 - DNA, 15 bp, Homo sapiens
aatgtgtggaatatt

SEQ ID NO: 532053 - DNA, 15 bp, Homo sapiens
atgtgtggaatattg

SEQ ID NO: 532054 - DNA, 15 bp, Homo sapiens
tgtgtggaatattgg

SEQ ID NO: 532055 - DNA, 15 bp, Homo sapiens
gtgtggaatattggg

SEQ ID NO: 532056 - DNA, 15 bp, Homo sapiens
tgtggaatattgggg

SEQ ID NO: 532057 - DNA, 15 bp, Homo sapiens
gtggaatattggggg

SEQ ID NO: 532058 - DNA, 15 bp, Homo sapiens
tggaatattgggggg

SEQ ID NO: 532059 - DNA, 15 bp, Homo sapiens
ggaatattggggggc

SEQ ID NO: 532060 - DNA, 15 bp, Homo sapiens
gaatattggggggct

SEQ ID NO: 532061 - DNA, 15 bp, Homo sapiens
aatattggggggctc

SEQ ID NO: 532062 - DNA, 15 bp, Homo sapiens
atattggggggctcg

SEQ ID NO: 532063 - DNA, 15 bp, Homo sapiens
tattggggggctcgg

SEQ ID NO: 532064 - DNA, 15 bp, Homo sapiens
attggggggctcggc

SEQ ID NO: 532065 - DNA, 15 bp, Homo sapiens
ttggggggctcggct

SEQ ID NO: 532066 - DNA, 15 bp, Homo sapiens
tggggggctcggctg

SEQ ID NO: 532067 - DNA, 15 bp, Homo sapiens
ggggggctcggctgc

SEQ ID NO: 532068 - DNA, 15 bp, Homo sapiens
gggggctcggctgca

SEQ ID NO: 532069 - DNA, 15 bp, Homo sapiens
ggggctcggctgcag

SEQ ID NO: 532070 - DNA, 15 bp, Homo sapiens
gggctcggctgcaga

SEQ ID NO: 532071 - DNA, 15 bp, Homo sapiens
ggctcggctgcagac

SEQ ID NO: 532072 - DNA, 15 bp, Homo sapiens
gctcggctgcagact

SEQ ID NO: 532073 - DNA, 15 bp, Homo sapiens
ctcggctgcagactt

SEQ ID NO: 532074 - DNA, 15 bp, Homo sapiens
tcggctgcagacttg

SEQ ID NO: 532075 - DNA, 15 bp, Homo sapiens
cggctgcagacttgg

SEQ ID NO: 532076 - DNA, 15 bp, Homo sapiens
ggctgcagacttggc

SEQ ID NO: 532077 - DNA, 15 bp, Homo sapiens
gctgcagacttggcc

SEQ ID NO: 532078 - DNA, 15 bp, Homo sapiens
ctgcagacttggcca

SEQ ID NO: 532079 - DNA, 15 bp, Homo sapiens
tgcagacttggccaa

SEQ ID NO: 532080 - DNA, 15 bp, Homo sapiens
gcagacttggccaaa

SEQ ID NO: 532081 - DNA, 15 bp, Homo sapiens
cagacttggccaaat

SEQ ID NO: 532082 - DNA, 15 bp, Homo sapiens
agacttggccaaatg

SEQ ID NO: 532083 - DNA, 15 bp, Homo sapiens
gacttggccaaatgg

SEQ ID NO: 532084 - DNA, 15 bp, Homo sapiens
acttggccaaatgga

SEQ ID NO: 532085 - DNA, 15 bp, Homo sapiens
cttggccaaatggac

SEQ ID NO: 532086 - DNA, 15 bp, Homo sapiens
ttggccaaatggacg

SEQ ID NO: 532087 - DNA, 15 bp, Homo sapiens
tggccaaatggacgg

SEQ ID NO: 532088 - DNA, 15 bp, Homo sapiens
ggccaaatggacggg

SEQ ID NO: 532089 - DNA, 15 bp, Homo sapiens
gccaaatggacggga

SEQ ID NO: 532090 - DNA, 15 bp, Homo sapiens
ccaaatggacgggac

SEQ ID NO: 532091 - DNA, 15 bp, Homo sapiens
caaatggacgggact

SEQ ID NO: 532092 - DNA, 15 bp, Homo sapiens
aaatggacgggacta

SEQ ID NO: 532093 - DNA, 15 bp, Homo sapiens
aatggacgggactat

SEQ ID NO: 532094 - DNA, 15 bp, Homo sapiens
atggacgggactatt

SEQ ID NO: 532095 - DNA, 15 bp, Homo sapiens
tggacgggactatta

SEQ ID NO: 532096 - DNA, 15 bp, Homo sapiens
ggacgggactattaa

SEQ ID NO: 532097 - DNA, 15 bp, Homo sapiens
gacgggactattaag

SEQ ID NO: 532098 - DNA, 15 bp, Homo sapiens
acgggactattaagg

SEQ ID NO: 532099 - DNA, 15 bp, Homo sapiens
cgggactattaaggt

SEQ ID NO: 532100 - DNA, 15 bp, Homo sapiens
gggactattaaggta

SEQ ID NO: 532101 - DNA, 15 bp, Homo sapiens
ggactattaaggtaa

SEQ ID NO: 532102 - DNA, 15 bp, Homo sapiens
gactattaaggtaag

SEQ ID NO: 532103 - DNA, 15 bp, Homo sapiens
actattaaggtaagc

SEQ ID NO: 532104 - DNA, 15 bp, Homo sapiens
ctattaaggtaagcg

SEQ ID NO: 532105 - DNA, 15 bp, Homo sapiens
tattaaggtaagcgg

SEQ ID NO: 532106 - DNA, 15 bp, Homo sapiens
attaaggtaagcggc

SEQ ID NO: 532107 - DNA, 15 bp, Homo sapiens
ttaaggtaagcggcg

SEQ ID NO: 532108 - DNA, 15 bp, Homo sapiens
taaggtaagcggcgg

SEQ ID NO: 532109 - DNA, 15 bp, Homo sapiens
aaggtaagcggcggg

SEQ ID NO: 532110 - DNA, 15 bp, Homo sapiens
aggtaagcggcgggg

SEQ ID NO: 532111 - DNA, 15 bp, Homo sapiens
ggtaagcggcggggc

SEQ ID NO: 532112 - DNA, 15 bp, Homo sapiens
gtaagcggcggggca

SEQ ID NO: 532113 - DNA, 15 bp, Homo sapiens
taagcggcggggcaa

SEQ ID NO: 532114 - DNA, 15 bp, Homo sapiens
aagcggcggggcaac

SEQ ID NO: 532115 - DNA, 15 bp, Homo sapiens
agcggcggggcaacg

SEQ ID NO: 532116 - DNA, 15 bp, Homo sapiens
gcggcggggcaacgg

SEQ ID NO: 532117 - DNA, 15 bp, Homo sapiens
cggcggggcaacgga

SEQ ID NO: 532118 - DNA, 15 bp, Homo sapiens
ggcggggcaacggac

SEQ ID NO: 532119 - DNA, 15 bp, Homo sapiens
gcggggcaacggacg

SEQ ID NO: 532120 - DNA, 15 bp, Homo sapiens
cggggcaacggacgc

SEQ ID NO: 532121 - DNA, 15 bp, Homo sapiens
ggggcaacggacgcg

SEQ ID NO: 532122 - DNA, 15 bp, Homo sapiens
gggcaacggacgcgg

SEQ ID NO: 532123 - DNA, 15 bp, Homo sapiens
ggcaacggacgcggg

SEQ ID NO: 532124 - DNA, 15 bp, Homo sapiens
gcaacggacgcgggc

SEQ ID NO: 532125 - DNA, 15 bp, Homo sapiens
caacggacgcgggcg

SEQ ID NO: 532126 - DNA, 15 bp, Homo sapiens
aacggacgcgggcgg

SEQ ID NO: 532127 - DNA, 15 bp, Homo sapiens
acggacgcgggcggc

SEQ ID NO: 532128 - DNA, 15 bp, Homo sapiens
cggacgcgggcggcg

SEQ ID NO: 532129 - DNA, 15 bp, Homo sapiens
ggacgcgggcggcgg

SEQ ID NO: 532130 - DNA, 15 bp, Homo sapiens
gacgcgggcggcggg

SEQ ID NO: 532131 - DNA, 15 bp, Homo sapiens
acgcgggcggcgggg

SEQ ID NO: 532132 - DNA, 15 bp, Homo sapiens
cgcgggcggcgggga

SEQ ID NO: 532133 - DNA, 15 bp, Homo sapiens
gcgggcggcggggac

SEQ ID NO: 532134 - DNA, 15 bp, Homo sapiens
cgggcggcggggacc

SEQ ID NO: 532135 - DNA, 15 bp, Homo sapiens
gggcggcggggaccg

SEQ ID NO: 532136 - DNA, 15 bp, Homo sapiens
ggcggcggggaccgg

SEQ ID NO: 532137 - DNA, 15 bp, Homo sapiens
gcggcggggaccggc

SEQ ID NO: 532138 - DNA, 15 bp, Homo sapiens
cggcggggaccggcc

SEQ ID NO: 532139 - DNA, 15 bp, Homo sapiens
ggcggggaccggccg

SEQ ID NO: 532140 - DNA, 15 bp, Homo sapiens
gcggggaccggccgg

SEQ ID NO: 532141 - DNA, 15 bp, Homo sapiens
cggggaccggccggg

SEQ ID NO: 532142 - DNA, 15 bp, Homo sapiens
ggggaccggccgggg

SEQ ID NO: 532143 - DNA, 15 bp, Homo sapiens
gggaccggccgggga

SEQ ID NO: 532144 - DNA, 15 bp, Homo sapiens
ggaccggccggggag

SEQ ID NO: 532145 - DNA, 15 bp, Homo sapiens
gaccggccggggagg

SEQ ID NO: 532146 - DNA, 15 bp, Homo sapiens
accggccggggaggc

SEQ ID NO: 532147 - DNA, 15 bp, Homo sapiens
ccggccggggaggcg

SEQ ID NO: 532148 - DNA, 15 bp, Homo sapiens
cggccggggaggcga

SEQ ID NO: 532149 - DNA, 15 bp, Homo sapiens
ggccggggaggcgaa

SEQ ID NO: 532150 - DNA, 15 bp, Homo sapiens
gccggggaggcgaag

SEQ ID NO: 532151 - DNA, 15 bp, Homo sapiens
ccggggaggcgaagc

SEQ ID NO: 532152 - DNA, 15 bp, Homo sapiens
cggggaggcgaagcg

SEQ ID NO: 532153 - DNA, 15 bp, Homo sapiens
ggggaggcgaagcgg

SEQ ID NO: 532154 - DNA, 15 bp, Homo sapiens
gggaggcgaagcggc

SEQ ID NO: 532155 - DNA, 15 bp, Homo sapiens
ggaggcgaagcggcg

SEQ ID NO: 532156 - DNA, 15 bp, Homo sapiens
gaggcgaagcggcgg

SEQ ID NO: 532157 - DNA, 15 bp, Homo sapiens
aggcgaagcggcggg

SEQ ID NO: 532158 - DNA, 15 bp, Homo sapiens
ggcgaagcggcgggc

SEQ ID NO: 532159 - DNA, 15 bp, Homo sapiens
gcgaagcggcgggcg

SEQ ID NO: 532160 - DNA, 15 bp, Homo sapiens
cgaagcggcgggcgg

SEQ ID NO: 532161 - DNA, 15 bp, Homo sapiens
gaagcggcgggcggg

SEQ ID NO: 532162 - DNA, 15 bp, Homo sapiens
aagcggcgggcgggt

SEQ ID NO: 532163 - DNA, 15 bp, Homo sapiens
agcggcgggcgggta

SEQ ID NO: 532164 - DNA, 15 bp, Homo sapiens
gcggcgggcgggtag

SEQ ID NO: 532165 - DNA, 15 bp, Homo sapiens
cggcgggcgggtagg

SEQ ID NO: 532166 - DNA, 15 bp, Homo sapiens
ggcgggcgggtaggt

SEQ ID NO: 532167 - DNA, 15 bp, Homo sapiens
gcgggcgggtaggtg

SEQ ID NO: 532168 - DNA, 15 bp, Homo sapiens
cgggcgggtaggtgc

SEQ ID NO: 532169 - DNA, 15 bp, Homo sapiens
gggcgggtaggtgcg

SEQ ID NO: 532170 - DNA, 15 bp, Homo sapiens
ggcgggtaggtgcgg

SEQ ID NO: 532171 - DNA, 15 bp, Homo sapiens
gcgggtaggtgcggg

SEQ ID NO: 532172 - DNA, 15 bp, Homo sapiens
cgggtaggtgcgggg

SEQ ID NO: 532173 - DNA, 15 bp, Homo sapiens
gggtaggtgcggggc

SEQ ID NO: 532174 - DNA, 15 bp, Homo sapiens
ggtaggtgcggggcc

SEQ ID NO: 532175 - DNA, 15 bp, Homo sapiens
gtaggtgcggggccc

SEQ ID NO: 532176 - DNA, 15 bp, Homo sapiens
taggtgcggggcccg

SEQ ID NO: 532177 - DNA, 15 bp, Homo sapiens
aggtgcggggcccgc

SEQ ID NO: 532178 - DNA, 15 bp, Homo sapiens
ggtgcggggcccgcg

SEQ ID NO: 532179 - DNA, 15 bp, Homo sapiens
gtgcggggcccgcgt

SEQ ID NO: 532180 - DNA, 15 bp, Homo sapiens
tgcggggcccgcgtc

SEQ ID NO: 532181 - DNA, 15 bp, Homo sapiens
gcggggcccgcgtcc

SEQ ID NO: 532182 - DNA, 15 bp, Homo sapiens
cggggcccgcgtccc

SEQ ID NO: 532183 - DNA, 15 bp, Homo sapiens
ggggcccgcgtcccg

SEQ ID NO: 532184 - DNA, 15 bp, Homo sapiens
gggcccgcgtcccgg

SEQ ID NO: 532185 - DNA, 15 bp, Homo sapiens
ggcccgcgtcccgga

SEQ ID NO: 532186 - DNA, 15 bp, Homo sapiens
gcccgcgtcccggaa

SEQ ID NO: 532187 - DNA, 15 bp, Homo sapiens
cccgcgtcccggaag

SEQ ID NO: 532188 - DNA, 15 bp, Homo sapiens
ccgcgtcccggaaga

SEQ ID NO: 532189 - DNA, 15 bp, Homo sapiens
cgcgtcccggaagac

SEQ ID NO: 532190 - DNA, 15 bp, Homo sapiens
gcgtcccggaagacg

SEQ ID NO: 532191 - DNA, 15 bp, Homo sapiens
cgtcccggaagacgt

SEQ ID NO: 532192 - DNA, 15 bp, Homo sapiens
gtcccggaagacgtg

SEQ ID NO: 532193 - DNA, 15 bp, Homo sapiens
tcccggaagacgtgg

SEQ ID NO: 532194 - DNA, 15 bp, Homo sapiens
cccggaagacgtggc

SEQ ID NO: 532195 - DNA, 15 bp, Homo sapiens
ccggaagacgtggcc

SEQ ID NO: 532196 - DNA, 15 bp, Homo sapiens
cggaagacgtggcct

SEQ ID NO: 532197 - DNA, 15 bp, Homo sapiens
ggaagacgtggcctc

SEQ ID NO: 532198 - DNA, 15 bp, Homo sapiens
gaagacgtggcctct

SEQ ID NO: 532199 - DNA, 15 bp, Homo sapiens
aagacgtggcctctc

SEQ ID NO: 532200 - DNA, 15 bp, Homo sapiens
agacgtggcctctct

SEQ ID NO: 532201 - DNA, 15 bp, Homo sapiens
gacgtggcctctctc

SEQ ID NO: 532202 - DNA, 15 bp, Homo sapiens
acgtggcctctctcc

SEQ ID NO: 532203 - DNA, 15 bp, Homo sapiens
cgtggcctctctccc

SEQ ID NO: 532204 - DNA, 15 bp, Homo sapiens
gtggcctctctccct

SEQ ID NO: 532205 - DNA, 15 bp, Homo sapiens
tggcctctctccctt

SEQ ID NO: 532206 - DNA, 15 bp, Homo sapiens
ggcctctctcccttc

SEQ ID NO: 532207 - DNA, 15 bp, Homo sapiens
gcctctctcccttcc

SEQ ID NO: 532208 - DNA, 15 bp, Homo sapiens
cctctctcccttccc

SEQ ID NO: 532209 - DNA, 15 bp, Homo sapiens
ctctctcccttccct

SEQ ID NO: 532210 - DNA, 15 bp, Homo sapiens
tctctcccttccctc

SEQ ID NO: 532211 - DNA, 15 bp, Homo sapiens
ctctcccttccctcc

SEQ ID NO: 532212 - DNA, 15 bp, Homo sapiens
tctcccttccctccg

SEQ ID NO: 532213 - DNA, 15 bp, Homo sapiens
ctcccttccctccgc

SEQ ID NO: 532214 - DNA, 15 bp, Homo sapiens
tcccttccctccgcg

SEQ ID NO: 532215 - DNA, 15 bp, Homo sapiens
cccttccctccgcgc

SEQ ID NO: 532216 - DNA, 15 bp, Homo sapiens
ccttccctccgcgcc

SEQ ID NO: 532217 - DNA, 15 bp, Homo sapiens
cttccctccgcgccc

SEQ ID NO: 532218 - DNA, 15 bp, Homo sapiens
ttccctccgcgcccc

SEQ ID NO: 532219 - DNA, 15 bp, Homo sapiens
tccctccgcgccccg

SEQ ID NO: 532220 - DNA, 15 bp, Homo sapiens
ccctccgcgccccgg

SEQ ID NO: 532221 - DNA, 15 bp, Homo sapiens
cctccgcgccccggc

SEQ ID NO: 532222 - DNA, 15 bp, Homo sapiens
ctccgcgccccggct

SEQ ID NO: 532223 - DNA, 15 bp, Homo sapiens
tccgcgccccggctt

SEQ ID NO: 532224 - DNA, 15 bp, Homo sapiens
ccgcgccccggcttc

SEQ ID NO: 532225 - DNA, 15 bp, Homo sapiens
cgcgccccggcttcg

SEQ ID NO: 532226 - DNA, 15 bp, Homo sapiens
gcgccccggcttcgc

SEQ ID NO: 532227 - DNA, 15 bp, Homo sapiens
cgccccggcttcgcg

SEQ ID NO: 532228 - DNA, 15 bp, Homo sapiens
gccccggcttcgcgc

SEQ ID NO: 532229 - DNA, 15 bp, Homo sapiens
ccccggcttcgcgcc

SEQ ID NO: 532230 - DNA, 15 bp, Homo sapiens
cccggcttcgcgccg

SEQ ID NO: 532231 - DNA, 15 bp, Homo sapiens
ccggcttcgcgccgg

SEQ ID NO: 532232 - DNA, 15 bp, Homo sapiens
cggcttcgcgccggc

SEQ ID NO: 532233 - DNA, 15 bp, Homo sapiens
ggcttcgcgccggct

SEQ ID NO: 532234 - DNA, 15 bp, Homo sapiens
gcttcgcgccggctc

SEQ ID NO: 532235 - DNA, 15 bp, Homo sapiens
cttcgcgccggctcc

SEQ ID NO: 532236 - DNA, 15 bp, Homo sapiens
ttcgcgccggctcct

SEQ ID NO: 532237 - DNA, 15 bp, Homo sapiens
tcgcgccggctcctc

SEQ ID NO: 532238 - DNA, 15 bp, Homo sapiens
cgcgccggctcctcc

SEQ ID NO: 532239 - DNA, 15 bp, Homo sapiens
gcgccggctcctccg

SEQ ID NO: 532240 - DNA, 15 bp, Homo sapiens
cgccggctcctccgg

SEQ ID NO: 532241 - DNA, 15 bp, Homo sapiens
gccggctcctccggc

SEQ ID NO: 532242 - DNA, 15 bp, Homo sapiens
ccggctcctccggcg

SEQ ID NO: 532243 - DNA, 15 bp, Homo sapiens
cggctcctccggcgc

SEQ ID NO: 532244 - DNA, 15 bp, Homo sapiens
ggctcctccggcgct

SEQ ID NO: 532245 - DNA, 15 bp, Homo sapiens
gctcctccggcgctc

SEQ ID NO: 532246 - DNA, 15 bp, Homo sapiens
ctcctccggcgctcg

SEQ ID NO: 532247 - DNA, 15 bp, Homo sapiens
tcctccggcgctcgg

SEQ ID NO: 532248 - DNA, 15 bp, Homo sapiens
cctccggcgctcggg

SEQ ID NO: 532249 - DNA, 15 bp, Homo sapiens
ctccggcgctcgggt

SEQ ID NO: 532250 - DNA, 15 bp, Homo sapiens
tccggcgctcgggtg

SEQ ID NO: 532251 - DNA, 15 bp, Homo sapiens
ccggcgctcgggtgg

SEQ ID NO: 532252 - DNA, 15 bp, Homo sapiens
cggcgctcgggtggc

SEQ ID NO: 532253 - DNA, 15 bp, Homo sapiens
ggcgctcgggtggcg

SEQ ID NO: 532254 - DNA, 15 bp, Homo sapiens
gcgctcgggtggcga

SEQ ID NO: 532255 - DNA, 15 bp, Homo sapiens
cgctcgggtggcgag

SEQ ID NO: 532256 - DNA, 15 bp, Homo sapiens
gctcgggtggcgagt

SEQ ID NO: 532257 - DNA, 15 bp, Homo sapiens
ctcgggtggcgagtc

SEQ ID NO: 532258 - DNA, 15 bp, Homo sapiens
tcgggtggcgagtcc

SEQ ID NO: 532259 - DNA, 15 bp, Homo sapiens
cgggtggcgagtcct

SEQ ID NO: 532260 - DNA, 15 bp, Homo sapiens
gggtggcgagtccta

SEQ ID NO: 532261 - DNA, 15 bp, Homo sapiens
ggtggcgagtcctac

SEQ ID NO: 532262 - DNA, 15 bp, Homo sapiens
gtggcgagtcctact

SEQ ID NO: 532263 - DNA, 15 bp, Homo sapiens
tggcgagtcctactc

SEQ ID NO: 532264 - DNA, 15 bp, Homo sapiens
ggcgagtcctactcg

SEQ ID NO: 532265 - DNA, 15 bp, Homo sapiens
gcgagtcctactcgc

SEQ ID NO: 532266 - DNA, 15 bp, Homo sapiens
cgagtcctactcgcg

SEQ ID NO: 532267 - DNA, 15 bp, Homo sapiens
gagtcctactcgcgg

SEQ ID NO: 532268 - DNA, 15 bp, Homo sapiens
agtcctactcgcggg

SEQ ID NO: 532269 - DNA, 15 bp, Homo sapiens
gtcctactcgcgggc

SEQ ID NO: 532270 - DNA, 15 bp, Homo sapiens
tcctactcgcgggcc

SEQ ID NO: 532271 - DNA, 15 bp, Homo sapiens
cctactcgcgggcca

SEQ ID NO: 532272 - DNA, 15 bp, Homo sapiens
ctactcgcgggccag

SEQ ID NO: 532273 - DNA, 15 bp, Homo sapiens
tactcgcgggccagc

SEQ ID NO: 532274 - DNA, 15 bp, Homo sapiens
actcgcgggccagcc

SEQ ID NO: 532275 - DNA, 15 bp, Homo sapiens
ctcgcgggccagccg

SEQ ID NO: 532276 - DNA, 15 bp, Homo sapiens
tcgcgggccagccgg

SEQ ID NO: 532277 - DNA, 15 bp, Homo sapiens
cgcgggccagccggc

SEQ ID NO: 532278 - DNA, 15 bp, Homo sapiens
gcgggccagccggcc

SEQ ID NO: 532279 - DNA, 15 bp, Homo sapiens
cgggccagccggcca

SEQ ID NO: 532280 - DNA, 15 bp, Homo sapiens
gggccagccggccag

SEQ ID NO: 532281 - DNA, 15 bp, Homo sapiens
ggccagccggccagg

SEQ ID NO: 532282 - DNA, 15 bp, Homo sapiens
gccagccggccaggc

SEQ ID NO: 532283 - DNA, 15 bp, Homo sapiens
ccagccggccaggcg

SEQ ID NO: 532284 - DNA, 15 bp, Homo sapiens
cagccggccaggcgc

SEQ ID NO: 532285 - DNA, 15 bp, Homo sapiens
agccggccaggcgcc

SEQ ID NO: 532286 - DNA, 15 bp, Homo sapiens
gccggccaggcgccc

SEQ ID NO: 532287 - DNA, 15 bp, Homo sapiens
ccggccaggcgcccg

SEQ ID NO: 532288 - DNA, 15 bp, Homo sapiens
cggccaggcgcccgc

SEQ ID NO: 532289 - DNA, 15 bp, Homo sapiens
ggccaggcgcccgca

SEQ ID NO: 532290 - DNA, 15 bp, Homo sapiens
gccaggcgcccgcat

SEQ ID NO: 532291 - DNA, 15 bp, Homo sapiens
ccaggcgcccgcatt

SEQ ID NO: 532292 - DNA, 15 bp, Homo sapiens
caggcgcccgcattg

SEQ ID NO: 532293 - DNA, 15 bp, Homo sapiens
aggcgcccgcattga

SEQ ID NO: 532294 - DNA, 15 bp, Homo sapiens
ggcgcccgcattgag

SEQ ID NO: 532295 - DNA, 15 bp, Homo sapiens
gcgcccgcattgagg

SEQ ID NO: 532296 - DNA, 15 bp, Homo sapiens
cgcccgcattgaggg

SEQ ID NO: 532297 - DNA, 15 bp, Homo sapiens
gcccgcattgagggc

SEQ ID NO: 532298 - DNA, 15 bp, Homo sapiens
cccgcattgagggcg

SEQ ID NO: 532299 - DNA, 15 bp, Homo sapiens
ccgcattgagggcga

SEQ ID NO: 532300 - DNA, 15 bp, Homo sapiens
cgcattgagggcgac

SEQ ID NO: 532301 - DNA, 15 bp, Homo sapiens
gcattgagggcgacc

SEQ ID NO: 532302 - DNA, 15 bp, Homo sapiens
cattgagggcgaccc

SEQ ID NO: 532303 - DNA, 15 bp, Homo sapiens
attgagggcgaccct

SEQ ID NO: 532304 - DNA, 15 bp, Homo sapiens
ttgagggcgaccctc

SEQ ID NO: 532305 - DNA, 15 bp, Homo sapiens
tgagggcgaccctcc

SEQ ID NO: 532306 - DNA, 15 bp, Homo sapiens
gagggcgaccctccc

SEQ ID NO: 532307 - DNA, 15 bp, Homo sapiens
agggcgaccctcccc

SEQ ID NO: 532308 - DNA, 15 bp, Homo sapiens
gggcgaccctccccc

SEQ ID NO: 532309 - DNA, 15 bp, Homo sapiens
ggcgaccctcccccg

SEQ ID NO: 532310 - DNA, 15 bp, Homo sapiens
gcgaccctcccccga

SEQ ID NO: 532311 - DNA, 15 bp, Homo sapiens
cgaccctcccccgaa

SEQ ID NO: 532312 - DNA, 15 bp, Homo sapiens
gaccctcccccgaaa

SEQ ID NO: 532313 - DNA, 15 bp, Homo sapiens
accctcccccgaaat

SEQ ID NO: 532314 - DNA, 15 bp, Homo sapiens
ccctcccccgaaatc

SEQ ID NO: 532315 - DNA, 15 bp, Homo sapiens
cctcccccgaaatcc

SEQ ID NO: 532316 - DNA, 15 bp, Homo sapiens
ctcccccgaaatccc

SEQ ID NO: 532317 - DNA, 15 bp, Homo sapiens
tcccccgaaatccca

SEQ ID NO: 532318 - DNA, 15 bp, Homo sapiens
cccccgaaatcccag

SEQ ID NO: 532319 - DNA, 15 bp, Homo sapiens
ccccgaaatcccagc

SEQ ID NO: 532320 - DNA, 15 bp, Homo sapiens
cccgaaatcccagcc

SEQ ID NO: 532321 - DNA, 15 bp, Homo sapiens
ccgaaatcccagccc

SEQ ID NO: 532322 - DNA, 15 bp, Homo sapiens
cgaaatcccagcccc

SEQ ID NO: 532323 - DNA, 15 bp, Homo sapiens
gaaatcccagccccc

SEQ ID NO: 532324 - DNA, 15 bp, Homo sapiens
aaatcccagccccca

SEQ ID NO: 532325 - DNA, 15 bp, Homo sapiens
aatcccagcccccaa

SEQ ID NO: 532326 - DNA, 15 bp, Homo sapiens
atcccagcccccaaa

SEQ ID NO: 532327 - DNA, 15 bp, Homo sapiens
tcccagcccccaaag

SEQ ID NO: 532328 - DNA, 15 bp, Homo sapiens
cccagcccccaaagt

SEQ ID NO: 532329 - DNA, 15 bp, Homo sapiens
ccagcccccaaagtg

SEQ ID NO: 532330 - DNA, 15 bp, Homo sapiens
cagcccccaaagtgg

SEQ ID NO: 532331 - DNA, 15 bp, Homo sapiens
agcccccaaagtgga

SEQ ID NO: 532332 - DNA, 15 bp, Homo sapiens
atgctgacttaggta

SEQ ID NO: 532333 - DNA, 15 bp, Homo sapiens
tgctgacttaggtaa

SEQ ID NO: 532334 - DNA, 15 bp, Homo sapiens
gctgacttaggtaaa

SEQ ID NO: 532335 - DNA, 15 bp, Homo sapiens
ctgacttaggtaaaa

SEQ ID NO: 532336 - DNA, 15 bp, Homo sapiens
tgacttaggtaaaag

SEQ ID NO: 532337 - DNA, 15 bp, Homo sapiens
gacttaggtaaaaga

SEQ ID NO: 532338 - DNA, 15 bp, Homo sapiens
acttaggtaaaagac

SEQ ID NO: 532339 - DNA, 15 bp, Homo sapiens
cttaggtaaaagaca

SEQ ID NO: 532340 - DNA, 15 bp, Homo sapiens
ttaggtaaaagacac

SEQ ID NO: 532341 - DNA, 15 bp, Homo sapiens
taggtaaaagacacc

SEQ ID NO: 532342 - DNA, 15 bp, Homo sapiens
aggtaaaagacacca

SEQ ID NO: 532343 - DNA, 15 bp, Homo sapiens
ggtaaaagacaccaa

SEQ ID NO: 532344 - DNA, 15 bp, Homo sapiens
gtaaaagacaccaac

SEQ ID NO: 532345 - DNA, 15 bp, Homo sapiens
taaaagacaccaacc

SEQ ID NO: 532346 - DNA, 15 bp, Homo sapiens
aaaagacaccaaccg

SEQ ID NO: 532347 - DNA, 15 bp, Homo sapiens
aaagacaccaaccga

SEQ ID NO: 532348 - DNA, 15 bp, Homo sapiens
aagacaccaaccgaa

SEQ ID NO: 532349 - DNA, 15 bp, Homo sapiens
agacaccaaccgaag

SEQ ID NO: 532350 - DNA, 15 bp, Homo sapiens
gacaccaaccgaagg

SEQ ID NO: 532351 - DNA, 15 bp, Homo sapiens
acaccaaccgaagga

SEQ ID NO: 532352 - DNA, 15 bp, Homo sapiens
caccaaccgaaggaa

SEQ ID NO: 532353 - DNA, 15 bp, Homo sapiens
accaaccgaaggaac

SEQ ID NO: 532354 - DNA, 15 bp, Homo sapiens
ccaaccgaaggaact

SEQ ID NO: 532355 - DNA, 15 bp, Homo sapiens
caaccgaaggaactt

SEQ ID NO: 532356 - DNA, 15 bp, Homo sapiens
aaccgaaggaacttg

SEQ ID NO: 532357 - DNA, 15 bp, Homo sapiens
accgaaggaacttgc

SEQ ID NO: 532358 - DNA, 15 bp, Homo sapiens
ccgaaggaacttgca

SEQ ID NO: 532359 - DNA, 15 bp, Homo sapiens
cgaaggaacttgcaa

SEQ ID NO: 532360 - DNA, 15 bp, Homo sapiens
gaaggaacttgcaaa

SEQ ID NO: 532361 - DNA, 15 bp, Homo sapiens
aaggaacttgcaaat

SEQ ID NO: 532362 - DNA, 15 bp, Homo sapiens
aggaacttgcaaatc

SEQ ID NO: 532363 - DNA, 15 bp, Homo sapiens
ggaacttgcaaatct

SEQ ID NO: 532364 - DNA, 15 bp, Homo sapiens
gaacttgcaaatctg

SEQ ID NO: 532365 - DNA, 15 bp, Homo sapiens
aacttgcaaatctgg

SEQ ID NO: 532366 - DNA, 15 bp, Homo sapiens
acttgcaaatctgga

SEQ ID NO: 532367 - DNA, 15 bp, Homo sapiens
cttgcaaatctggag

SEQ ID NO: 532368 - DNA, 15 bp, Homo sapiens
ttgcaaatctggaga

SEQ ID NO: 532369 - DNA, 15 bp, Homo sapiens
tgcaaatctggagat

SEQ ID NO: 532370 - DNA, 15 bp, Homo sapiens
gcaaatctggagatg

SEQ ID NO: 532371 - DNA, 15 bp, Homo sapiens
caaatctggagatga

SEQ ID NO: 532372 - DNA, 15 bp, Homo sapiens
aaatctggagatgag

SEQ ID NO: 532373 - DNA, 15 bp, Homo sapiens
aatctggagatgaga

SEQ ID NO: 532374 - DNA, 15 bp, Homo sapiens
atctggagatgagat

SEQ ID NO: 532375 - DNA, 15 bp, Homo sapiens
tctggagatgagata

SEQ ID NO: 532376 - DNA, 15 bp, Homo sapiens
ctggagatgagataa

SEQ ID NO: 532377 - DNA, 15 bp, Homo sapiens
tggagatgagataac

SEQ ID NO: 532378 - DNA, 15 bp, Homo sapiens
ggagatgagataact

SEQ ID NO: 532379 - DNA, 15 bp, Homo sapiens
gagatgagataactg

SEQ ID NO: 532380 - DNA, 15 bp, Homo sapiens
agatgagataactga

SEQ ID NO: 532381 - DNA, 15 bp, Homo sapiens
gatgagataactgac

SEQ ID NO: 532382 - DNA, 15 bp, Homo sapiens
atgagataactgact

SEQ ID NO: 532383 - DNA, 15 bp, Homo sapiens
tgagataactgactg

SEQ ID NO: 532384 - DNA, 15 bp, Homo sapiens
gagataactgactgt

SEQ ID NO: 532385 - DNA, 15 bp, Homo sapiens
agataactgactgtg

SEQ ID NO: 532386 - DNA, 15 bp, Homo sapiens
gataactgactgtga

SEQ ID NO: 532387 - DNA, 15 bp, Homo sapiens
ataactgactgtgat

SEQ ID NO: 532388 - DNA, 15 bp, Homo sapiens
taactgactgtgatg

SEQ ID NO: 532389 - DNA, 15 bp, Homo sapiens
aactgactgtgatgg

SEQ ID NO: 532390 - DNA, 15 bp, Homo sapiens
actgactgtgatggg

SEQ ID NO: 532391 - DNA, 15 bp, Homo sapiens
ctgactgtgatgggt

SEQ ID NO: 532392 - DNA, 15 bp, Homo sapiens
tgactgtgatgggtt

SEQ ID NO: 532393 - DNA, 15 bp, Homo sapiens
gactgtgatgggtta

SEQ ID NO: 532394 - DNA, 15 bp, Homo sapiens
actgtgatgggttaa

SEQ ID NO: 532395 - DNA, 15 bp, Homo sapiens
ctgtgatgggttaaa

SEQ ID NO: 532396 - DNA, 15 bp, Homo sapiens
tgtgatgggttaaag

SEQ ID NO: 532397 - DNA, 15 bp, Homo sapiens
gtgatgggttaaagg

SEQ ID NO: 532398 - DNA, 15 bp, Homo sapiens
tgatgggttaaaggg

SEQ ID NO: 532399 - DNA, 15 bp, Homo sapiens
gatgggttaaaggga

SEQ ID NO: 532400 - DNA, 15 bp, Homo sapiens
atgggttaaagggag

SEQ ID NO: 532401 - DNA, 15 bp, Homo sapiens
tgggttaaagggagc

SEQ ID NO: 532402 - DNA, 15 bp, Homo sapiens
gggttaaagggagct

SEQ ID NO: 532403 - DNA, 15 bp, Homo sapiens
ggttaaagggagcta

SEQ ID NO: 532404 - DNA, 15 bp, Homo sapiens
gttaaagggagctat

SEQ ID NO: 532405 - DNA, 15 bp, Homo sapiens
ttaaagggagctata

SEQ ID NO: 532406 - DNA, 15 bp, Homo sapiens
taaagggagctataa

SEQ ID NO: 532407 - DNA, 15 bp, Homo sapiens
aaagggagctataag

SEQ ID NO: 532408 - DNA, 15 bp, Homo sapiens
aagggagctataaga

SEQ ID NO: 532409 - DNA, 15 bp, Homo sapiens
agggagctataagag

SEQ ID NO: 532410 - DNA, 15 bp, Homo sapiens
gggagctataagagc

SEQ ID NO: 532411 - DNA, 15 bp, Homo sapiens
ggagctataagagcc

SEQ ID NO: 532412 - DNA, 15 bp, Homo sapiens
gagctataagagcct

SEQ ID NO: 532413 - DNA, 15 bp, Homo sapiens
agctataagagccta

SEQ ID NO: 532414 - DNA, 15 bp, Homo sapiens
gctataagagcctat

SEQ ID NO: 532415 - DNA, 15 bp, Homo sapiens
ctataagagcctata

SEQ ID NO: 532416 - DNA, 15 bp, Homo sapiens
tataagagcctataa

SEQ ID NO: 532417 - DNA, 15 bp, Homo sapiens
ataagagcctataag

SEQ ID NO: 532418 - DNA, 15 bp, Homo sapiens
taagagcctataaga

SEQ ID NO: 532419 - DNA, 15 bp, Homo sapiens
aagagcctataagag

SEQ ID NO: 532420 - DNA, 15 bp, Homo sapiens
agagcctataagagc

SEQ ID NO: 532421 - DNA, 15 bp, Homo sapiens
gagcctataagagcc

SEQ ID NO: 532422 - DNA, 15 bp, Homo sapiens
agcctataagagcct

SEQ ID NO: 532423 - DNA, 15 bp, Homo sapiens
gcctataagagcctg

SEQ ID NO: 532424 - DNA, 15 bp, Homo sapiens
cctataagagcctgg

SEQ ID NO: 532425 - DNA, 15 bp, Homo sapiens
ctataagagcctggg

SEQ ID NO: 532426 - DNA, 15 bp, Homo sapiens
tataagagcctgggt

SEQ ID NO: 532427 - DNA, 15 bp, Homo sapiens
ataagagcctgggtt

SEQ ID NO: 532428 - DNA, 15 bp, Homo sapiens
taagagcctgggttc

SEQ ID NO: 532429 - DNA, 15 bp, Homo sapiens
aagagcctgggttcc

SEQ ID NO: 532430 - DNA, 15 bp, Homo sapiens
agagcctgggttcct

SEQ ID NO: 532431 - DNA, 15 bp, Homo sapiens
gagcctgggttcctc

SEQ ID NO: 532432 - DNA, 15 bp, Homo sapiens
agcctgggttcctca

SEQ ID NO: 532433 - DNA, 15 bp, Homo sapiens
gcctgggttcctcaa

SEQ ID NO: 532434 - DNA, 15 bp, Homo sapiens
cctgggttcctcaaa

SEQ ID NO: 532435 - DNA, 15 bp, Homo sapiens
ctgggttcctcaaac

SEQ ID NO: 532436 - DNA, 15 bp, Homo sapiens
tgggttcctcaaacc

SEQ ID NO: 532437 - DNA, 15 bp, Homo sapiens
gggttcctcaaaccc

SEQ ID NO: 532438 - DNA, 15 bp, Homo sapiens
ggttcctcaaaccca

SEQ ID NO: 532439 - DNA, 15 bp, Homo sapiens
gttcctcaaacccaa

SEQ ID NO: 532440 - DNA, 15 bp, Homo sapiens
ttcctcaaacccaaa

SEQ ID NO: 532441 - DNA, 15 bp, Homo sapiens
tcctcaaacccaaag

SEQ ID NO: 532442 - DNA, 15 bp, Homo sapiens
cctcaaacccaaagt

SEQ ID NO: 532443 - DNA, 15 bp, Homo sapiens
ctcaaacccaaagtg

SEQ ID NO: 532444 - DNA, 15 bp, Homo sapiens
tcaaacccaaagtga

SEQ ID NO: 532445 - DNA, 15 bp, Homo sapiens
caaacccaaagtgag

SEQ ID NO: 532446 - DNA, 15 bp, Homo sapiens
aaacccaaagtgagt

SEQ ID NO: 532447 - DNA, 15 bp, Homo sapiens
aacccaaagtgagta

SEQ ID NO: 532448 - DNA, 15 bp, Homo sapiens
acccaaagtgagtag

SEQ ID NO: 532449 - DNA, 15 bp, Homo sapiens
cccaaagtgagtagg

SEQ ID NO: 532450 - DNA, 15 bp, Homo sapiens
ccaaagtgagtaggt

SEQ ID NO: 532451 - DNA, 15 bp, Homo sapiens
caaagtgagtaggtg

SEQ ID NO: 532452 - DNA, 15 bp, Homo sapiens
aaagtgagtaggtga

SEQ ID NO: 532453 - DNA, 15 bp, Homo sapiens
aagtgagtaggtgag

SEQ ID NO: 532454 - DNA, 15 bp, Homo sapiens
agtgagtaggtgaga

SEQ ID NO: 532455 - DNA, 15 bp, Homo sapiens
gtgagtaggtgagaa

SEQ ID NO: 532456 - DNA, 15 bp, Homo sapiens
tgagtaggtgagaag

SEQ ID NO: 532457 - DNA, 15 bp, Homo sapiens
gagtaggtgagaagt

SEQ ID NO: 532458 - DNA, 15 bp, Homo sapiens
agtaggtgagaagta

SEQ ID NO: 532459 - DNA, 15 bp, Homo sapiens
gtaggtgagaagtag

SEQ ID NO: 532460 - DNA, 15 bp, Homo sapiens
taggtgagaagtagg

SEQ ID NO: 532461 - DNA, 15 bp, Homo sapiens
aggtgagaagtaggt

SEQ ID NO: 532462 - DNA, 15 bp, Homo sapiens
ggtgagaagtaggtg

SEQ ID NO: 532463 - DNA, 15 bp, Homo sapiens
gtgagaagtaggtga

SEQ ID NO: 532464 - DNA, 15 bp, Homo sapiens
tgagaagtaggtgag

SEQ ID NO: 532465 - DNA, 15 bp, Homo sapiens
gagaagtaggtgaga

SEQ ID NO: 532466 - DNA, 15 bp, Homo sapiens
agaagtaggtgagag

SEQ ID NO: 532467 - DNA, 15 bp, Homo sapiens
gaagtaggtgagagg

SEQ ID NO: 532468 - DNA, 15 bp, Homo sapiens
aagtaggtgagaggg

SEQ ID NO: 532469 - DNA, 15 bp, Homo sapiens
agtaggtgagagggg

SEQ ID NO: 532470 - DNA, 15 bp, Homo sapiens
gtaggtgagagggga

SEQ ID NO: 532471 - DNA, 15 bp, Homo sapiens
taggtgagaggggat

SEQ ID NO: 532472 - DNA, 15 bp, Homo sapiens
aggtgagaggggatt

SEQ ID NO: 532473 - DNA, 15 bp, Homo sapiens
ggtgagaggggattc

SEQ ID NO: 532474 - DNA, 15 bp, Homo sapiens
gtgagaggggattcc

SEQ ID NO: 532475 - DNA, 15 bp, Homo sapiens
tgagaggggattcct

SEQ ID NO: 532476 - DNA, 15 bp, Homo sapiens
gagaggggattcctg

SEQ ID NO: 532477 - DNA, 15 bp, Homo sapiens
agaggggattcctgc

SEQ ID NO: 532478 - DNA, 15 bp, Homo sapiens
gaggggattcctgca

SEQ ID NO: 532479 - DNA, 15 bp, Homo sapiens
aggggattcctgcaa

SEQ ID NO: 532480 - DNA, 15 bp, Homo sapiens
ggggattcctgcaaa

SEQ ID NO: 532481 - DNA, 15 bp, Homo sapiens
gggattcctgcaaag

SEQ ID NO: 532482 - DNA, 15 bp, Homo sapiens
ggattcctgcaaaga

SEQ ID NO: 532483 - DNA, 15 bp, Homo sapiens
gattcctgcaaagac

SEQ ID NO: 532484 - DNA, 15 bp, Homo sapiens
attcctgcaaagacc

SEQ ID NO: 532485 - DNA, 15 bp, Homo sapiens
ttcctgcaaagaccc

SEQ ID NO: 532486 - DNA, 15 bp, Homo sapiens
tcctgcaaagacccg

SEQ ID NO: 532487 - DNA, 15 bp, Homo sapiens
cctgcaaagacccga

SEQ ID NO: 532488 - DNA, 15 bp, Homo sapiens
ctgcaaagacccgag

SEQ ID NO: 532489 - DNA, 15 bp, Homo sapiens
tgcaaagacccgaga

SEQ ID NO: 532490 - DNA, 15 bp, Homo sapiens
gcaaagacccgagag

SEQ ID NO: 532491 - DNA, 15 bp, Homo sapiens
caaagacccgagagt

SEQ ID NO: 532492 - DNA, 15 bp, Homo sapiens
aaagacccgagagtg

SEQ ID NO: 532493 - DNA, 15 bp, Homo sapiens
aagacccgagagtgg

SEQ ID NO: 532494 - DNA, 15 bp, Homo sapiens
agacccgagagtggg

SEQ ID NO: 532495 - DNA, 15 bp, Homo sapiens
gacccgagagtgggg

SEQ ID NO: 532496 - DNA, 15 bp, Homo sapiens
acccgagagtggggg

SEQ ID NO: 532497 - DNA, 15 bp, Homo sapiens
cccgagagtgggggt

SEQ ID NO: 532498 - DNA, 15 bp, Homo sapiens
ccgagagtgggggtc

SEQ ID NO: 532499 - DNA, 15 bp, Homo sapiens
cgagagtgggggtca

SEQ ID NO: 532500 - DNA, 15 bp, Homo sapiens
gagagtgggggtcat

SEQ ID NO: 532501 - DNA, 15 bp, Homo sapiens
agagtgggggtcatt

SEQ ID NO: 532502 - DNA, 15 bp, Homo sapiens
gagtgggggtcattg

SEQ ID NO: 532503 - DNA, 15 bp, Homo sapiens
agtgggggtcattgg

SEQ ID NO: 532504 - DNA, 15 bp, Homo sapiens
gtgggggtcattggg

SEQ ID NO: 532505 - DNA, 15 bp, Homo sapiens
tgggggtcattgggc

SEQ ID NO: 532506 - DNA, 15 bp, Homo sapiens
gggggtcattgggcc

SEQ ID NO: 532507 - DNA, 15 bp, Homo sapiens
ggggtcattgggcca

SEQ ID NO: 532508 - DNA, 15 bp, Homo sapiens
gggtcattgggccat

SEQ ID NO: 532509 - DNA, 15 bp, Homo sapiens
ggtcattgggccatt

SEQ ID NO: 532510 - DNA, 15 bp, Homo sapiens
gtcattgggccattt

SEQ ID NO: 532511 - DNA, 15 bp, Homo sapiens
tcattgggccatttt

SEQ ID NO: 532512 - DNA, 15 bp, Homo sapiens
cattgggccatttta

SEQ ID NO: 532513 - DNA, 15 bp, Homo sapiens
attgggccattttat

SEQ ID NO: 532514 - DNA, 15 bp, Homo sapiens
ttgggccattttatg

SEQ ID NO: 532515 - DNA, 15 bp, Homo sapiens
tgggccattttatgc

SEQ ID NO: 532516 - DNA, 15 bp, Homo sapiens
gggccattttatgcc

SEQ ID NO: 532517 - DNA, 15 bp, Homo sapiens
ggccattttatgcct

SEQ ID NO: 532518 - DNA, 15 bp, Homo sapiens
gccattttatgcctg

SEQ ID NO: 532519 - DNA, 15 bp, Homo sapiens
ccattttatgcctgt

SEQ ID NO: 532520 - DNA, 15 bp, Homo sapiens
cattttatgcctgtt

SEQ ID NO: 532521 - DNA, 15 bp, Homo sapiens
attttatgcctgttt

SEQ ID NO: 532522 - DNA, 15 bp, Homo sapiens
ttttatgcctgtttc

SEQ ID NO: 532523 - DNA, 15 bp, Homo sapiens
tttatgcctgtttct

SEQ ID NO: 532524 - DNA, 15 bp, Homo sapiens
ttatgcctgtttctc

SEQ ID NO: 532525 - DNA, 15 bp, Homo sapiens
tatgcctgtttctct

SEQ ID NO: 532526 - DNA, 15 bp, Homo sapiens
atgcctgtttctctg

SEQ ID NO: 532527 - DNA, 15 bp, Homo sapiens
tgcctgtttctctgc

SEQ ID NO: 532528 - DNA, 15 bp, Homo sapiens
gcctgtttctctgct

SEQ ID NO: 532529 - DNA, 15 bp, Homo sapiens
cctgtttctctgctt

SEQ ID NO: 532530 - DNA, 15 bp, Homo sapiens
ctgtttctctgcttc

SEQ ID NO: 532531 - DNA, 15 bp, Homo sapiens
tgtttctctgcttcc

SEQ ID NO: 532532 - DNA, 15 bp, Homo sapiens
gtttctctgcttcct

SEQ ID NO: 532533 - DNA, 15 bp, Homo sapiens
tttctctgcttcctg

SEQ ID NO: 532534 - DNA, 15 bp, Homo sapiens
ttctctgcttcctgt

SEQ ID NO: 532535 - DNA, 15 bp, Homo sapiens
tctctgcttcctgtt

SEQ ID NO: 532536 - DNA, 15 bp, Homo sapiens
ctctgcttcctgttg

SEQ ID NO: 532537 - DNA, 15 bp, Homo sapiens
tctgcttcctgttga

SEQ ID NO: 532538 - DNA, 15 bp, Homo sapiens
ctgcttcctgttgat

SEQ ID NO: 532539 - DNA, 15 bp, Homo sapiens
tgcttcctgttgatg

SEQ ID NO: 532540 - DNA, 15 bp, Homo sapiens
gcttcctgttgatgt

SEQ ID NO: 532541 - DNA, 15 bp, Homo sapiens
cttcctgttgatgtg

SEQ ID NO: 532542 - DNA, 15 bp, Homo sapiens
ttcctgttgatgtgt

SEQ ID NO: 532543 - DNA, 15 bp, Homo sapiens
tcctgttgatgtgtt

SEQ ID NO: 532544 - DNA, 15 bp, Homo sapiens
cctgttgatgtgttc

SEQ ID NO: 532545 - DNA, 15 bp, Homo sapiens
ctgttgatgtgttca

SEQ ID NO: 532546 - DNA, 15 bp, Homo sapiens
tgttgatgtgttcat

SEQ ID NO: 532547 - DNA, 15 bp, Homo sapiens
gttgatgtgttcatg

SEQ ID NO: 532548 - DNA, 15 bp, Homo sapiens
ttgatgtgttcatgc

SEQ ID NO: 532549 - DNA, 15 bp, Homo sapiens
tgatgtgttcatgca

SEQ ID NO: 532550 - DNA, 15 bp, Homo sapiens
gatgtgttcatgcaa

SEQ ID NO: 532551 - DNA, 15 bp, Homo sapiens
atgtgttcatgcaag

SEQ ID NO: 532552 - DNA, 15 bp, Homo sapiens
tgtgttcatgcaagt

SEQ ID NO: 532553 - DNA, 15 bp, Homo sapiens
gtgttcatgcaagtg

SEQ ID NO: 532554 - DNA, 15 bp, Homo sapiens
tgttcatgcaagtgt

SEQ ID NO: 532555 - DNA, 15 bp, Homo sapiens
gttcatgcaagtgtc

SEQ ID NO: 532556 - DNA, 15 bp, Homo sapiens
ttcatgcaagtgtct

SEQ ID NO: 532557 - DNA, 15 bp, Homo sapiens
tcatgcaagtgtctc

SEQ ID NO: 532558 - DNA, 15 bp, Homo sapiens
catgcaagtgtctct

SEQ ID NO: 532559 - DNA, 15 bp, Homo sapiens
atgcaagtgtctctg

SEQ ID NO: 532560 - DNA, 15 bp, Homo sapiens
tgcaagtgtctctgt

SEQ ID NO: 532561 - DNA, 15 bp, Homo sapiens
gcaagtgtctctgta

SEQ ID NO: 532562 - DNA, 15 bp, Homo sapiens
caagtgtctctgtat

SEQ ID NO: 532563 - DNA, 15 bp, Homo sapiens
aagtgtctctgtatt

SEQ ID NO: 532564 - DNA, 15 bp, Homo sapiens
agtgtctctgtattt

SEQ ID NO: 532565 - DNA, 15 bp, Homo sapiens
gtgtctctgtatttc

SEQ ID NO: 532566 - DNA, 15 bp, Homo sapiens
tgtctctgtatttct

SEQ ID NO: 532567 - DNA, 15 bp, Homo sapiens
gtctctgtatttctg

SEQ ID NO: 532568 - DNA, 15 bp, Homo sapiens
tctctgtatttctgg

SEQ ID NO: 532569 - DNA, 15 bp, Homo sapiens
ctctgtatttctggg

SEQ ID NO: 532570 - DNA, 15 bp, Homo sapiens
tctgtatttctgggt

SEQ ID NO: 532571 - DNA, 15 bp, Homo sapiens
ctgtatttctgggtt

SEQ ID NO: 532572 - DNA, 15 bp, Homo sapiens
tgtatttctgggttt

SEQ ID NO: 532573 - DNA, 15 bp, Homo sapiens
gtatttctgggttta

SEQ ID NO: 532574 - DNA, 15 bp, Homo sapiens
tatttctgggtttag

SEQ ID NO: 532575 - DNA, 15 bp, Homo sapiens
atttctgggtttagt

SEQ ID NO: 532576 - DNA, 15 bp, Homo sapiens
tttctgggtttagta

SEQ ID NO: 532577 - DNA, 15 bp, Homo sapiens
ttctgggtttagtaa

SEQ ID NO: 532578 - DNA, 15 bp, Homo sapiens
tctgggtttagtaat

SEQ ID NO: 532579 - DNA, 15 bp, Homo sapiens
ctgggtttagtaatg

SEQ ID NO: 532580 - DNA, 15 bp, Homo sapiens
tgggtttagtaatga

SEQ ID NO: 532581 - DNA, 15 bp, Homo sapiens
gggtttagtaatgag

SEQ ID NO: 532582 - DNA, 15 bp, Homo sapiens
ggtttagtaatgaga

SEQ ID NO: 532583 - DNA, 15 bp, Homo sapiens
gtttagtaatgagat

SEQ ID NO: 532584 - DNA, 15 bp, Homo sapiens
tttagtaatgagatg

SEQ ID NO: 532585 - DNA, 15 bp, Homo sapiens
ttagtaatgagatgc

SEQ ID NO: 532586 - DNA, 15 bp, Homo sapiens
tagtaatgagatgct

SEQ ID NO: 532587 - DNA, 15 bp, Homo sapiens
agtaatgagatgctc

SEQ ID NO: 532588 - DNA, 15 bp, Homo sapiens
gtaatgagatgctcc

SEQ ID NO: 532589 - DNA, 15 bp, Homo sapiens
taatgagatgctccc

SEQ ID NO: 532590 - DNA, 15 bp, Homo sapiens
aatgagatgctcccc

SEQ ID NO: 532591 - DNA, 15 bp, Homo sapiens
atgagatgctcccct

SEQ ID NO: 532592 - DNA, 15 bp, Homo sapiens
tgagatgctcccctc

SEQ ID NO: 532593 - DNA, 15 bp, Homo sapiens
gagatgctcccctct

SEQ ID NO: 532594 - DNA, 15 bp, Homo sapiens
agatgctcccctcta

SEQ ID NO: 532595 - DNA, 15 bp, Homo sapiens
gatgctcccctctag

SEQ ID NO: 532596 - DNA, 15 bp, Homo sapiens
atgctcccctctaga

SEQ ID NO: 532597 - DNA, 15 bp, Homo sapiens
tgctcccctctagaa

SEQ ID NO: 532598 - DNA, 15 bp, Homo sapiens
gctcccctctagaaa

SEQ ID NO: 532599 - DNA, 15 bp, Homo sapiens
ctcccctctagaaaa

SEQ ID NO: 532600 - DNA, 15 bp, Homo sapiens
tcccctctagaaaac

SEQ ID NO: 532601 - DNA, 15 bp, Homo sapiens
cccctctagaaaact

SEQ ID NO: 532602 - DNA, 15 bp, Homo sapiens
ccctctagaaaactc

SEQ ID NO: 532603 - DNA, 15 bp, Homo sapiens
cctctagaaaactcc

SEQ ID NO: 532604 - DNA, 15 bp, Homo sapiens
ctctagaaaactccc

SEQ ID NO: 532605 - DNA, 15 bp, Homo sapiens
tctagaaaactccct

SEQ ID NO: 532606 - DNA, 15 bp, Homo sapiens
ctagaaaactccctc

SEQ ID NO: 532607 - DNA, 15 bp, Homo sapiens
tagaaaactccctcg

SEQ ID NO: 532608 - DNA, 15 bp, Homo sapiens
agaaaactccctcgc

SEQ ID NO: 532609 - DNA, 15 bp, Homo sapiens
gaaaactccctcgcc

SEQ ID NO: 532610 - DNA, 15 bp, Homo sapiens
aaaactccctcgccc

SEQ ID NO: 532611 - DNA, 15 bp, Homo sapiens
aaactccctcgcccc

SEQ ID NO: 532612 - DNA, 15 bp, Homo sapiens
aactccctcgcccca

SEQ ID NO: 532613 - DNA, 15 bp, Homo sapiens
actccctcgccccaa

SEQ ID NO: 532614 - DNA, 15 bp, Homo sapiens
ctccctcgccccaat

SEQ ID NO: 532615 - DNA, 15 bp, Homo sapiens
tccctcgccccaatc

SEQ ID NO: 532616 - DNA, 15 bp, Homo sapiens
ccctcgccccaatca

SEQ ID NO: 532617 - DNA, 15 bp, Homo sapiens
cctcgccccaatcag

SEQ ID NO: 532618 - DNA, 15 bp, Homo sapiens
ctcgccccaatcagg

SEQ ID NO: 532619 - DNA, 15 bp, Homo sapiens
tcgccccaatcagga

SEQ ID NO: 532620 - DNA, 15 bp, Homo sapiens
cgccccaatcaggac

SEQ ID NO: 532621 - DNA, 15 bp, Homo sapiens
gccccaatcaggaca

SEQ ID NO: 532622 - DNA, 15 bp, Homo sapiens
ccccaatcaggacag

SEQ ID NO: 532623 - DNA, 15 bp, Homo sapiens
cccaatcaggacagt

SEQ ID NO: 532624 - DNA, 15 bp, Homo sapiens
ccaatcaggacagtt

SEQ ID NO: 532625 - DNA, 15 bp, Homo sapiens
caatcaggacagtta

SEQ ID NO: 532626 - DNA, 15 bp, Homo sapiens
aatcaggacagttac

SEQ ID NO: 532627 - DNA, 15 bp, Homo sapiens
atcaggacagttacc

SEQ ID NO: 532628 - DNA, 15 bp, Homo sapiens
tcaggacagttacca

SEQ ID NO: 532629 - DNA, 15 bp, Homo sapiens
caggacagttaccac

SEQ ID NO: 532630 - DNA, 15 bp, Homo sapiens
aggacagttaccact

SEQ ID NO: 532631 - DNA, 15 bp, Homo sapiens
ggacagttaccactt

SEQ ID NO: 532632 - DNA, 15 bp, Homo sapiens
gacagttaccactta

SEQ ID NO: 532633 - DNA, 15 bp, Homo sapiens
acagttaccacttac

SEQ ID NO: 532634 - DNA, 15 bp, Homo sapiens
cagttaccacttact

SEQ ID NO: 532635 - DNA, 15 bp, Homo sapiens
agttaccacttactc

SEQ ID NO: 532636 - DNA, 15 bp, Homo sapiens
gttaccacttactct

SEQ ID NO: 532637 - DNA, 15 bp, Homo sapiens
ttaccacttactctg

SEQ ID NO: 532638 - DNA, 15 bp, Homo sapiens
taccacttactctga

SEQ ID NO: 532639 - DNA, 15 bp, Homo sapiens
accacttactctgaa

SEQ ID NO: 532640 - DNA, 15 bp, Homo sapiens
ccacttactctgaag

SEQ ID NO: 532641 - DNA, 15 bp, Homo sapiens
cacttactctgaagg

SEQ ID NO: 532642 - DNA, 15 bp, Homo sapiens
acttactctgaaggc

SEQ ID NO: 532643 - DNA, 15 bp, Homo sapiens
cttactctgaaggcc

SEQ ID NO: 532644 - DNA, 15 bp, Homo sapiens
ttactctgaaggcct

SEQ ID NO: 532645 - DNA, 15 bp, Homo sapiens
tactctgaaggcctc

SEQ ID NO: 532646 - DNA, 15 bp, Homo sapiens
actctgaaggcctct

SEQ ID NO: 532647 - DNA, 15 bp, Homo sapiens
ctctgaaggcctctt

SEQ ID NO: 532648 - DNA, 15 bp, Homo sapiens
tctgaaggcctcttc

SEQ ID NO: 532649 - DNA, 15 bp, Homo sapiens
ctgaaggcctcttct

SEQ ID NO: 532650 - DNA, 15 bp, Homo sapiens
tgaaggcctcttctg

SEQ ID NO: 532651 - DNA, 15 bp, Homo sapiens
gaaggcctcttctga

SEQ ID NO: 532652 - DNA, 15 bp, Homo sapiens
aaggcctcttctgat

SEQ ID NO: 532653 - DNA, 15 bp, Homo sapiens
aggcctcttctgatc

SEQ ID NO: 532654 - DNA, 15 bp, Homo sapiens
ggcctcttctgatcc

SEQ ID NO: 532655 - DNA, 15 bp, Homo sapiens
gcctcttctgatcca

SEQ ID NO: 532656 - DNA, 15 bp, Homo sapiens
cctcttctgatccag

SEQ ID NO: 532657 - DNA, 15 bp, Homo sapiens
ctcttctgatccaga

SEQ ID NO: 532658 - DNA, 15 bp, Homo sapiens
tcttctgatccagaa

SEQ ID NO: 532659 - DNA, 15 bp, Homo sapiens
cttctgatccagaag

SEQ ID NO: 532660 - DNA, 15 bp, Homo sapiens
ttctgatccagaagg

SEQ ID NO: 532661 - DNA, 15 bp, Homo sapiens
tctgatccagaaggg

SEQ ID NO: 532662 - DNA, 15 bp, Homo sapiens
ctgatccagaagggt

SEQ ID NO: 532663 - DNA, 15 bp, Homo sapiens
tgatccagaagggtg

SEQ ID NO: 532664 - DNA, 15 bp, Homo sapiens
gatccagaagggtgg

SEQ ID NO: 532665 - DNA, 15 bp, Homo sapiens
atccagaagggtggt

SEQ ID NO: 532666 - DNA, 15 bp, Homo sapiens
tccagaagggtggta

SEQ ID NO: 532667 - DNA, 15 bp, Homo sapiens
ccagaagggtggtaa

SEQ ID NO: 532668 - DNA, 15 bp, Homo sapiens
cagaagggtggtaag

SEQ ID NO: 532669 - DNA, 15 bp, Homo sapiens
agaagggtggtaaga

SEQ ID NO: 532670 - DNA, 15 bp, Homo sapiens
gaagggtggtaagat

SEQ ID NO: 532671 - DNA, 15 bp, Homo sapiens
aagggtggtaagatg

SEQ ID NO: 532672 - DNA, 15 bp, Homo sapiens
agggtggtaagatgg

SEQ ID NO: 532673 - DNA, 15 bp, Homo sapiens
gggtggtaagatggc

SEQ ID NO: 532674 - DNA, 15 bp, Homo sapiens
ggtggtaagatggcc

SEQ ID NO: 532675 - DNA, 15 bp, Homo sapiens
gtggtaagatggcct

SEQ ID NO: 532676 - DNA, 15 bp, Homo sapiens
tggtaagatggcctc

SEQ ID NO: 532677 - DNA, 15 bp, Homo sapiens
ggtaagatggcctca

SEQ ID NO: 532678 - DNA, 15 bp, Homo sapiens
gtaagatggcctcag

SEQ ID NO: 532679 - DNA, 15 bp, Homo sapiens
taagatggcctcagg

SEQ ID NO: 532680 - DNA, 15 bp, Homo sapiens
aagatggcctcaggg

SEQ ID NO: 532681 - DNA, 15 bp, Homo sapiens
agatggcctcagggt

SEQ ID NO: 532682 - DNA, 15 bp, Homo sapiens
gatggcctcagggtc

SEQ ID NO: 532683 - DNA, 15 bp, Homo sapiens
atggcctcagggtct

SEQ ID NO: 532684 - DNA, 15 bp, Homo sapiens
tggcctcagggtctt

SEQ ID NO: 532685 - DNA, 15 bp, Homo sapiens
ggcctcagggtcttg

SEQ ID NO: 532686 - DNA, 15 bp, Homo sapiens
gcctcagggtcttga

SEQ ID NO: 532687 - DNA, 15 bp, Homo sapiens
cctcagggtcttgat

SEQ ID NO: 532688 - DNA, 15 bp, Homo sapiens
ctcagggtcttgatg

SEQ ID NO: 532689 - DNA, 15 bp, Homo sapiens
tcagggtcttgatgt

SEQ ID NO: 532690 - DNA, 15 bp, Homo sapiens
cagggtcttgatgtg

SEQ ID NO: 532691 - DNA, 15 bp, Homo sapiens
agggtcttgatgtgg

SEQ ID NO: 532692 - DNA, 15 bp, Homo sapiens
gggtcttgatgtgga

SEQ ID NO: 532693 - DNA, 15 bp, Homo sapiens
ggtcttgatgtggac

SEQ ID NO: 532694 - DNA, 15 bp, Homo sapiens
gtcttgatgtggaca

SEQ ID NO: 532695 - DNA, 15 bp, Homo sapiens
tcttgatgtggacac

SEQ ID NO: 532696 - DNA, 15 bp, Homo sapiens
cttgatgtggacacc

SEQ ID NO: 532697 - DNA, 15 bp, Homo sapiens
ttgatgtggacaccc

SEQ ID NO: 532698 - DNA, 15 bp, Homo sapiens
tgatgtggacaccct

SEQ ID NO: 532699 - DNA, 15 bp, Homo sapiens
gatgtggacacccta

SEQ ID NO: 532700 - DNA, 15 bp, Homo sapiens
atgtggacaccctaa

SEQ ID NO: 532701 - DNA, 15 bp, Homo sapiens
tgtggacaccctaag

SEQ ID NO: 532702 - DNA, 15 bp, Homo sapiens
gtggacaccctaagg

SEQ ID NO: 532703 - DNA, 15 bp, Homo sapiens
tggacaccctaagga

SEQ ID NO: 532704 - DNA, 15 bp, Homo sapiens
ggacaccctaaggaa

SEQ ID NO: 532705 - DNA, 15 bp, Homo sapiens
gacaccctaaggaaa

SEQ ID NO: 532706 - DNA, 15 bp, Homo sapiens
acaccctaaggaaaa

SEQ ID NO: 532707 - DNA, 15 bp, Homo sapiens
caccctaaggaaaag

SEQ ID NO: 532708 - DNA, 15 bp, Homo sapiens
accctaaggaaaagt

SEQ ID NO: 532709 - DNA, 15 bp, Homo sapiens
ccctaaggaaaagtg

SEQ ID NO: 532710 - DNA, 15 bp, Homo sapiens
cctaaggaaaagtga

SEQ ID NO: 532711 - DNA, 15 bp, Homo sapiens
ctaaggaaaagtgaa

SEQ ID NO: 532712 - DNA, 15 bp, Homo sapiens
taaggaaaagtgaag

SEQ ID NO: 532713 - DNA, 15 bp, Homo sapiens
aaggaaaagtgaaga

SEQ ID NO: 532714 - DNA, 15 bp, Homo sapiens
aggaaaagtgaagaa

SEQ ID NO: 532715 - DNA, 15 bp, Homo sapiens
ggaaaagtgaagaaa

SEQ ID NO: 532716 - DNA, 15 bp, Homo sapiens
gaaaagtgaagaaat

SEQ ID NO: 532717 - DNA, 15 bp, Homo sapiens
aaaagtgaagaaata

SEQ ID NO: 532718 - DNA, 15 bp, Homo sapiens
aaagtgaagaaatat

SEQ ID NO: 532719 - DNA, 15 bp, Homo sapiens
aagtgaagaaatatc

SEQ ID NO: 532720 - DNA, 15 bp, Homo sapiens
agtgaagaaatatct

SEQ ID NO: 532721 - DNA, 15 bp, Homo sapiens
gtgaagaaatatctc

SEQ ID NO: 532722 - DNA, 15 bp, Homo sapiens
tgaagaaatatctcc

SEQ ID NO: 532723 - DNA, 15 bp, Homo sapiens
gaagaaatatctcca

SEQ ID NO: 532724 - DNA, 15 bp, Homo sapiens
aagaaatatctccac

SEQ ID NO: 532725 - DNA, 15 bp, Homo sapiens
agaaatatctccaca

SEQ ID NO: 532726 - DNA, 15 bp, Homo sapiens
gaaatatctccacac

SEQ ID NO: 532727 - DNA, 15 bp, Homo sapiens
aaatatctccacact

SEQ ID NO: 532728 - DNA, 15 bp, Homo sapiens
aatatctccacactg

SEQ ID NO: 532729 - DNA, 15 bp, Homo sapiens
atatctccacactgc

SEQ ID NO: 532730 - DNA, 15 bp, Homo sapiens
tatctccacactgct

SEQ ID NO: 532731 - DNA, 15 bp, Homo sapiens
atctccacactgctt

SEQ ID NO: 532732 - DNA, 15 bp, Homo sapiens
tctccacactgctta

SEQ ID NO: 532733 - DNA, 15 bp, Homo sapiens
ctccacactgcttaa

SEQ ID NO: 532734 - DNA, 15 bp, Homo sapiens
tccacactgcttaaa

SEQ ID NO: 532735 - DNA, 15 bp, Homo sapiens
ccacactgcttaaac

SEQ ID NO: 532736 - DNA, 15 bp, Homo sapiens
cacactgcttaaact

SEQ ID NO: 532737 - DNA, 15 bp, Homo sapiens
acactgcttaaactc

SEQ ID NO: 532738 - DNA, 15 bp, Homo sapiens
cactgcttaaactct

SEQ ID NO: 532739 - DNA, 15 bp, Homo sapiens
actgcttaaactcta

SEQ ID NO: 532740 - DNA, 15 bp, Homo sapiens
ctgcttaaactctac

SEQ ID NO: 532741 - DNA, 15 bp, Homo sapiens
tgcttaaactctacg

SEQ ID NO: 532742 - DNA, 15 bp, Homo sapiens
gcttaaactctacgc

SEQ ID NO: 532743 - DNA, 15 bp, Homo sapiens
cttaaactctacgca

SEQ ID NO: 532744 - DNA, 15 bp, Homo sapiens
ttaaactctacgcac

SEQ ID NO: 532745 - DNA, 15 bp, Homo sapiens
taaactctacgcaca

SEQ ID NO: 532746 - DNA, 15 bp, Homo sapiens
aaactctacgcacag

SEQ ID NO: 532747 - DNA, 15 bp, Homo sapiens
aactctacgcacagg

SEQ ID NO: 532748 - DNA, 15 bp, Homo sapiens
actctacgcacaggc

SEQ ID NO: 532749 - DNA, 15 bp, Homo sapiens
ctctacgcacaggcc

SEQ ID NO: 532750 - DNA, 15 bp, Homo sapiens
tctacgcacaggccc

SEQ ID NO: 532751 - DNA, 15 bp, Homo sapiens
ctacgcacaggccct

SEQ ID NO: 532752 - DNA, 15 bp, Homo sapiens
tacgcacaggccctg

SEQ ID NO: 532753 - DNA, 15 bp, Homo sapiens
acgcacaggccctga

SEQ ID NO: 532754 - DNA, 15 bp, Homo sapiens
cgcacaggccctgag

SEQ ID NO: 532755 - DNA, 15 bp, Homo sapiens
gcacaggccctgagc

SEQ ID NO: 532756 - DNA, 15 bp, Homo sapiens
cacaggccctgagca

SEQ ID NO: 532757 - DNA, 15 bp, Homo sapiens
acaggccctgagcaa

SEQ ID NO: 532758 - DNA, 15 bp, Homo sapiens
caggccctgagcaaa

SEQ ID NO: 532759 - DNA, 15 bp, Homo sapiens
aggccctgagcaaaa

SEQ ID NO: 532760 - DNA, 15 bp, Homo sapiens
ggccctgagcaaaag

SEQ ID NO: 532761 - DNA, 15 bp, Homo sapiens
gccctgagcaaaagg

SEQ ID NO: 532762 - DNA, 15 bp, Homo sapiens
ccctgagcaaaagga

SEQ ID NO: 532763 - DNA, 15 bp, Homo sapiens
cctgagcaaaaggag

SEQ ID NO: 532764 - DNA, 15 bp, Homo sapiens
ctgagcaaaaggagg

SEQ ID NO: 532765 - DNA, 15 bp, Homo sapiens
tgagcaaaaggagga

SEQ ID NO: 532766 - DNA, 15 bp, Homo sapiens
gagcaaaaggaggaa

SEQ ID NO: 532767 - DNA, 15 bp, Homo sapiens
agcaaaaggaggaag

SEQ ID NO: 532768 - DNA, 15 bp, Homo sapiens
gcaaaaggaggaagc

SEQ ID NO: 532769 - DNA, 15 bp, Homo sapiens
caaaaggaggaagct

SEQ ID NO: 532770 - DNA, 15 bp, Homo sapiens
aaaaggaggaagctg

SEQ ID NO: 532771 - DNA, 15 bp, Homo sapiens
aaaggaggaagctgt

SEQ ID NO: 532772 - DNA, 15 bp, Homo sapiens
aaggaggaagctgtg

SEQ ID NO: 532773 - DNA, 15 bp, Homo sapiens
aggaggaagctgtgg

SEQ ID NO: 532774 - DNA, 15 bp, Homo sapiens
ggaggaagctgtggt

SEQ ID NO: 532775 - DNA, 15 bp, Homo sapiens
gaggaagctgtggtc

SEQ ID NO: 532776 - DNA, 15 bp, Homo sapiens
aggaagctgtggtct

SEQ ID NO: 532777 - DNA, 15 bp, Homo sapiens
ggaagctgtggtctg

SEQ ID NO: 532778 - DNA, 15 bp, Homo sapiens
gaagctgtggtctgt

SEQ ID NO: 532779 - DNA, 15 bp, Homo sapiens
aagctgtggtctgtg

SEQ ID NO: 532780 - DNA, 15 bp, Homo sapiens
agctgtggtctgtgt

SEQ ID NO: 532781 - DNA, 15 bp, Homo sapiens
gctgtggtctgtgta

SEQ ID NO: 532782 - DNA, 15 bp, Homo sapiens
ctgtggtctgtgtac

SEQ ID NO: 532783 - DNA, 15 bp, Homo sapiens
tgtggtctgtgtacc

SEQ ID NO: 532784 - DNA, 15 bp, Homo sapiens
gtggtctgtgtaccc

SEQ ID NO: 532785 - DNA, 15 bp, Homo sapiens
tggtctgtgtaccca

SEQ ID NO: 532786 - DNA, 15 bp, Homo sapiens
ggtctgtgtacccag

SEQ ID NO: 532787 - DNA, 15 bp, Homo sapiens
gtctgtgtacccagg

SEQ ID NO: 532788 - DNA, 15 bp, Homo sapiens
tctgtgtacccagga

SEQ ID NO: 532789 - DNA, 15 bp, Homo sapiens
ctgtgtacccaggat

SEQ ID NO: 532790 - DNA, 15 bp, Homo sapiens
tgtgtacccaggatg

SEQ ID NO: 532791 - DNA, 15 bp, Homo sapiens
gtgtacccaggatgt

SEQ ID NO: 532792 - DNA, 15 bp, Homo sapiens
tgtacccaggatgtg

SEQ ID NO: 532793 - DNA, 15 bp, Homo sapiens
gtacccaggatgtgc

SEQ ID NO: 532794 - DNA, 15 bp, Homo sapiens
tacccaggatgtgct

SEQ ID NO: 532795 - DNA, 15 bp, Homo sapiens
acccaggatgtgcta

SEQ ID NO: 532796 - DNA, 15 bp, Homo sapiens
cccaggatgtgctaa

SEQ ID NO: 532797 - DNA, 15 bp, Homo sapiens
ccaggatgtgctaac

SEQ ID NO: 532798 - DNA, 15 bp, Homo sapiens
caggatgtgctaacc

SEQ ID NO: 532799 - DNA, 15 bp, Homo sapiens
aggatgtgctaacct

SEQ ID NO: 532800 - DNA, 15 bp, Homo sapiens
ggatgtgctaacctc

SEQ ID NO: 532801 - DNA, 15 bp, Homo sapiens
gatgtgctaacctct

SEQ ID NO: 532802 - DNA, 15 bp, Homo sapiens
atgtgctaacctctt

SEQ ID NO: 532803 - DNA, 15 bp, Homo sapiens
tgtgctaacctcttt

SEQ ID NO: 532804 - DNA, 15 bp, Homo sapiens
gtgctaacctcttta

SEQ ID NO: 532805 - DNA, 15 bp, Homo sapiens
tgctaacctctttag

SEQ ID NO: 532806 - DNA, 15 bp, Homo sapiens
gctaacctctttaga

SEQ ID NO: 532807 - DNA, 15 bp, Homo sapiens
ctaacctctttagat

SEQ ID NO: 532808 - DNA, 15 bp, Homo sapiens
taacctctttagata

SEQ ID NO: 532809 - DNA, 15 bp, Homo sapiens
aacctctttagatac

SEQ ID NO: 532810 - DNA, 15 bp, Homo sapiens
acctctttagataca

SEQ ID NO: 532811 - DNA, 15 bp, Homo sapiens
cctctttagatacac

SEQ ID NO: 532812 - DNA, 15 bp, Homo sapiens
ctctttagatacaca

SEQ ID NO: 532813 - DNA, 15 bp, Homo sapiens
tctttagatacacac

SEQ ID NO: 532814 - DNA, 15 bp, Homo sapiens
ctttagatacacaca

SEQ ID NO: 532815 - DNA, 15 bp, Homo sapiens
tttagatacacacag

SEQ ID NO: 532816 - DNA, 15 bp, Homo sapiens
ttagatacacacagg

SEQ ID NO: 532817 - DNA, 15 bp, Homo sapiens
tagatacacacaggg

SEQ ID NO: 532818 - DNA, 15 bp, Homo sapiens
agatacacacaggga

SEQ ID NO: 532819 - DNA, 15 bp, Homo sapiens
gatacacacagggat

SEQ ID NO: 532820 - DNA, 15 bp, Homo sapiens
atacacacagggatt

SEQ ID NO: 532821 - DNA, 15 bp, Homo sapiens
tacacacagggattg

SEQ ID NO: 532822 - DNA, 15 bp, Homo sapiens
acacacagggattgg

SEQ ID NO: 532823 - DNA, 15 bp, Homo sapiens
cacacagggattggc

SEQ ID NO: 532824 - DNA, 15 bp, Homo sapiens
acacagggattggca

SEQ ID NO: 532825 - DNA, 15 bp, Homo sapiens
cacagggattggcat

SEQ ID NO: 532826 - DNA, 15 bp, Homo sapiens
acagggattggcatg

SEQ ID NO: 532827 - DNA, 15 bp, Homo sapiens
cagggattggcatgg

SEQ ID NO: 532828 - DNA, 15 bp, Homo sapiens
agggattggcatggc

SEQ ID NO: 532829 - DNA, 15 bp, Homo sapiens
gggattggcatggca

SEQ ID NO: 532830 - DNA, 15 bp, Homo sapiens
ggattggcatggcag

SEQ ID NO: 532831 - DNA, 15 bp, Homo sapiens
gattggcatggcagg

SEQ ID NO: 532832 - DNA, 15 bp, Homo sapiens
attggcatggcaggc

SEQ ID NO: 532833 - DNA, 15 bp, Homo sapiens
ttggcatggcaggcc

SEQ ID NO: 532834 - DNA, 15 bp, Homo sapiens
tggcatggcaggcct

SEQ ID NO: 532835 - DNA, 15 bp, Homo sapiens
ggcatggcaggcctc

SEQ ID NO: 532836 - DNA, 15 bp, Homo sapiens
gcatggcaggcctcg

SEQ ID NO: 532837 - DNA, 15 bp, Homo sapiens
catggcaggcctcga

SEQ ID NO: 532838 - DNA, 15 bp, Homo sapiens
atggcaggcctcgag

SEQ ID NO: 532839 - DNA, 15 bp, Homo sapiens
tggcaggcctcgaga

SEQ ID NO: 532840 - DNA, 15 bp, Homo sapiens
ggcaggcctcgagaa

SEQ ID NO: 532841 - DNA, 15 bp, Homo sapiens
gcaggcctcgagaac

SEQ ID NO: 532842 - DNA, 15 bp, Homo sapiens
caggcctcgagaaca

SEQ ID NO: 532843 - DNA, 15 bp, Homo sapiens
aggcctcgagaacag

SEQ ID NO: 532844 - DNA, 15 bp, Homo sapiens
ggcctcgagaacagg

SEQ ID NO: 532845 - DNA, 15 bp, Homo sapiens
gcctcgagaacaggc

SEQ ID NO: 532846 - DNA, 15 bp, Homo sapiens
cctcgagaacaggct

SEQ ID NO: 532847 - DNA, 15 bp, Homo sapiens
ctcgagaacaggctt

SEQ ID NO: 532848 - DNA, 15 bp, Homo sapiens
tcgagaacaggctta

SEQ ID NO: 532849 - DNA, 15 bp, Homo sapiens
cgagaacaggcttag

SEQ ID NO: 532850 - DNA, 15 bp, Homo sapiens
gagaacaggcttaga

SEQ ID NO: 532851 - DNA, 15 bp, Homo sapiens
agaacaggcttagag

SEQ ID NO: 532852 - DNA, 15 bp, Homo sapiens
gaacaggcttagagc

SEQ ID NO: 532853 - DNA, 15 bp, Homo sapiens
aacaggcttagagca

SEQ ID NO: 532854 - DNA, 15 bp, Homo sapiens
acaggcttagagcag

SEQ ID NO: 532855 - DNA, 15 bp, Homo sapiens
caggcttagagcagg

SEQ ID NO: 532856 - DNA, 15 bp, Homo sapiens
aggcttagagcagga

SEQ ID NO: 532857 - DNA, 15 bp, Homo sapiens
ggcttagagcaggaa

SEQ ID NO: 532858 - DNA, 15 bp, Homo sapiens
gcttagagcaggaac

SEQ ID NO: 532859 - DNA, 15 bp, Homo sapiens
cttagagcaggaacc

SEQ ID NO: 532860 - DNA, 15 bp, Homo sapiens
ttagagcaggaacct

SEQ ID NO: 532861 - DNA, 15 bp, Homo sapiens
tagagcaggaacctg

SEQ ID NO: 532862 - DNA, 15 bp, Homo sapiens
agagcaggaacctga

SEQ ID NO: 532863 - DNA, 15 bp, Homo sapiens
gagcaggaacctgac

SEQ ID NO: 532864 - DNA, 15 bp, Homo sapiens
agcaggaacctgaca

SEQ ID NO: 532865 - DNA, 15 bp, Homo sapiens
gcaggaacctgacac

SEQ ID NO: 532866 - DNA, 15 bp, Homo sapiens
caggaacctgacact

SEQ ID NO: 532867 - DNA, 15 bp, Homo sapiens
aggaacctgacactt

SEQ ID NO: 532868 - DNA, 15 bp, Homo sapiens
ggaacctgacacttc

SEQ ID NO: 532869 - DNA, 15 bp, Homo sapiens
gaacctgacacttca

SEQ ID NO: 532870 - DNA, 15 bp, Homo sapiens
aacctgacacttcag

SEQ ID NO: 532871 - DNA, 15 bp, Homo sapiens
acctgacacttcagg

SEQ ID NO: 532872 - DNA, 15 bp, Homo sapiens
cctgacacttcaggc

SEQ ID NO: 532873 - DNA, 15 bp, Homo sapiens
ctgacacttcaggcc

SEQ ID NO: 532874 - DNA, 15 bp, Homo sapiens
tgacacttcaggcca

SEQ ID NO: 532875 - DNA, 15 bp, Homo sapiens
gacacttcaggccaa

SEQ ID NO: 532876 - DNA, 15 bp, Homo sapiens
acacttcaggccaag

SEQ ID NO: 532877 - DNA, 15 bp, Homo sapiens
cacttcaggccaagg

SEQ ID NO: 532878 - DNA, 15 bp, Homo sapiens
acttcaggccaagga

SEQ ID NO: 532879 - DNA, 15 bp, Homo sapiens
cttcaggccaaggat

SEQ ID NO: 532880 - DNA, 15 bp, Homo sapiens
ttcaggccaaggatg

SEQ ID NO: 532881 - DNA, 15 bp, Homo sapiens
tcaggccaaggatgg

SEQ ID NO: 532882 - DNA, 15 bp, Homo sapiens
caggccaaggatggg

SEQ ID NO: 532883 - DNA, 15 bp, Homo sapiens
aggccaaggatggga

SEQ ID NO: 532884 - DNA, 15 bp, Homo sapiens
ggccaaggatgggag

SEQ ID NO: 532885 - DNA, 15 bp, Homo sapiens
gccaaggatgggagt

SEQ ID NO: 532886 - DNA, 15 bp, Homo sapiens
ccaaggatgggagtg

SEQ ID NO: 532887 - DNA, 15 bp, Homo sapiens
caaggatgggagtga

SEQ ID NO: 532888 - DNA, 15 bp, Homo sapiens
aaggatgggagtgaa

SEQ ID NO: 532889 - DNA, 15 bp, Homo sapiens
aggatgggagtgaaa

SEQ ID NO: 532890 - DNA, 15 bp, Homo sapiens
ggatgggagtgaaag

SEQ ID NO: 532891 - DNA, 15 bp, Homo sapiens
gatgggagtgaaagt

SEQ ID NO: 532892 - DNA, 15 bp, Homo sapiens
atgggagtgaaagtc

SEQ ID NO: 532893 - DNA, 15 bp, Homo sapiens
tgggagtgaaagtcc

SEQ ID NO: 532894 - DNA, 15 bp, Homo sapiens
gggagtgaaagtcct

SEQ ID NO: 532895 - DNA, 15 bp, Homo sapiens
ggagtgaaagtcctt

SEQ ID NO: 532896 - DNA, 15 bp, Homo sapiens
gagtgaaagtccttc

SEQ ID NO: 532897 - DNA, 15 bp, Homo sapiens
agtgaaagtccttcc

SEQ ID NO: 532898 - DNA, 15 bp, Homo sapiens
gtgaaagtccttcct

SEQ ID NO: 532899 - DNA, 15 bp, Homo sapiens
tgaaagtccttcctt

SEQ ID NO: 532900 - DNA, 15 bp, Homo sapiens
gaaagtccttccttt

SEQ ID NO: 532901 - DNA, 15 bp, Homo sapiens
aaagtccttcctttt

SEQ ID NO: 532902 - DNA, 15 bp, Homo sapiens
aagtccttccttttt

SEQ ID NO: 532903 - DNA, 15 bp, Homo sapiens
agtccttcctttttt

SEQ ID NO: 532904 - DNA, 15 bp, Homo sapiens
gtccttccttttttt

SEQ ID NO: 532905 - DNA, 15 bp, Homo sapiens
tccttcctttttttg

SEQ ID NO: 532906 - DNA, 15 bp, Homo sapiens
ccttcctttttttgt

SEQ ID NO: 532907 - DNA, 15 bp, Homo sapiens
cttcctttttttgtg

SEQ ID NO: 532908 - DNA, 15 bp, Homo sapiens
ttcctttttttgtgg

SEQ ID NO: 532909 - DNA, 15 bp, Homo sapiens
tcctttttttgtggg

SEQ ID NO: 532910 - DNA, 15 bp, Homo sapiens
cctttttttgtgggt

SEQ ID NO: 532911 - DNA, 15 bp, Homo sapiens
ctttttttgtgggtg

SEQ ID NO: 532912 - DNA, 15 bp, Homo sapiens
tttttttgtgggtgg

SEQ ID NO: 532913 - DNA, 15 bp, Homo sapiens
ttttttgtgggtggt

SEQ ID NO: 532914 - DNA, 15 bp, Homo sapiens
tttttgtgggtggta

SEQ ID NO: 532915 - DNA, 15 bp, Homo sapiens
ttttgtgggtggtag

SEQ ID NO: 532916 - DNA, 15 bp, Homo sapiens
tttgtgggtggtagg

SEQ ID NO: 532917 - DNA, 15 bp, Homo sapiens
ttgtgggtggtagga

SEQ ID NO: 532918 - DNA, 15 bp, Homo sapiens
tgtgggtggtaggag

SEQ ID NO: 532919 - DNA, 15 bp, Homo sapiens
gtgggtggtaggagc

SEQ ID NO: 532920 - DNA, 15 bp, Homo sapiens
tgggtggtaggagcc

SEQ ID NO: 532921 - DNA, 15 bp, Homo sapiens
gggtggtaggagcca

SEQ ID NO: 532922 - DNA, 15 bp, Homo sapiens
ggtggtaggagccat

SEQ ID NO: 532923 - DNA, 15 bp, Homo sapiens
gtggtaggagccatg

SEQ ID NO: 532924 - DNA, 15 bp, Homo sapiens
tggtaggagccatga

SEQ ID NO: 532925 - DNA, 15 bp, Homo sapiens
ggtaggagccatgag

SEQ ID NO: 532926 - DNA, 15 bp, Homo sapiens
gtaggagccatgagc

SEQ ID NO: 532927 - DNA, 15 bp, Homo sapiens
taggagccatgagct

SEQ ID NO: 532928 - DNA, 15 bp, Homo sapiens
aggagccatgagctc

SEQ ID NO: 532929 - DNA, 15 bp, Homo sapiens
ggagccatgagctcc

SEQ ID NO: 532930 - DNA, 15 bp, Homo sapiens
gagccatgagctcct

SEQ ID NO: 532931 - DNA, 15 bp, Homo sapiens
agccatgagctcctc

SEQ ID NO: 532932 - DNA, 15 bp, Homo sapiens
gccatgagctcctcc

SEQ ID NO: 532933 - DNA, 15 bp, Homo sapiens
ccatgagctcctcca

SEQ ID NO: 532934 - DNA, 15 bp, Homo sapiens
catgagctcctccaa

SEQ ID NO: 532935 - DNA, 15 bp, Homo sapiens
atgagctcctccaaa

SEQ ID NO: 532936 - DNA, 15 bp, Homo sapiens
tgagctcctccaaac

SEQ ID NO: 532937 - DNA, 15 bp, Homo sapiens
gagctcctccaaacc

SEQ ID NO: 532938 - DNA, 15 bp, Homo sapiens
agctcctccaaaccc

SEQ ID NO: 532939 - DNA, 15 bp, Homo sapiens
gctcctccaaaccct

SEQ ID NO: 532940 - DNA, 15 bp, Homo sapiens
ctcctccaaaccctc

SEQ ID NO: 532941 - DNA, 15 bp, Homo sapiens
tcctccaaaccctcc

SEQ ID NO: 532942 - DNA, 15 bp, Homo sapiens
cctccaaaccctccc

SEQ ID NO: 532943 - DNA, 15 bp, Homo sapiens
ctccaaaccctccct

SEQ ID NO: 532944 - DNA, 15 bp, Homo sapiens
tccaaaccctccctg

SEQ ID NO: 532945 - DNA, 15 bp, Homo sapiens
ccaaaccctccctgt

SEQ ID NO: 532946 - DNA, 15 bp, Homo sapiens
caaaccctccctgtg

SEQ ID NO: 532947 - DNA, 15 bp, Homo sapiens
aaaccctccctgtga

SEQ ID NO: 532948 - DNA, 15 bp, Homo sapiens
aaccctccctgtgag

SEQ ID NO: 532949 - DNA, 15 bp, Homo sapiens
accctccctgtgagc

SEQ ID NO: 532950 - DNA, 15 bp, Homo sapiens
ccctccctgtgagca

SEQ ID NO: 532951 - DNA, 15 bp, Homo sapiens
cctccctgtgagcaa

SEQ ID NO: 532952 - DNA, 15 bp, Homo sapiens
ctccctgtgagcaac

SEQ ID NO: 532953 - DNA, 15 bp, Homo sapiens
tccctgtgagcaacc

SEQ ID NO: 532954 - DNA, 15 bp, Homo sapiens
ccctgtgagcaacct

SEQ ID NO: 532955 - DNA, 15 bp, Homo sapiens
cctgtgagcaacctg

SEQ ID NO: 532956 - DNA, 15 bp, Homo sapiens
ctgtgagcaacctgt

SEQ ID NO: 532957 - DNA, 15 bp, Homo sapiens
tgtgagcaacctgtc

SEQ ID NO: 532958 - DNA, 15 bp, Homo sapiens
gtgagcaacctgtca

SEQ ID NO: 532959 - DNA, 15 bp, Homo sapiens
tgagcaacctgtcat

SEQ ID NO: 532960 - DNA, 15 bp, Homo sapiens
gagcaacctgtcatt

SEQ ID NO: 532961 - DNA, 15 bp, Homo sapiens
agcaacctgtcattc

SEQ ID NO: 532962 - DNA, 15 bp, Homo sapiens
gcaacctgtcattca

SEQ ID NO: 532963 - DNA, 15 bp, Homo sapiens
caacctgtcattcac

SEQ ID NO: 532964 - DNA, 15 bp, Homo sapiens
aacctgtcattcacc

SEQ ID NO: 532965 - DNA, 15 bp, Homo sapiens
acctgtcattcacct

SEQ ID NO: 532966 - DNA, 15 bp, Homo sapiens
cctgtcattcaccta

SEQ ID NO: 532967 - DNA, 15 bp, Homo sapiens
ctgtcattcacctaa

SEQ ID NO: 532968 - DNA, 15 bp, Homo sapiens
tgtcattcacctaag

SEQ ID NO: 532969 - DNA, 15 bp, Homo sapiens
gtcattcacctaagt

SEQ ID NO: 532970 - DNA, 15 bp, Homo sapiens
tcattcacctaagtt

SEQ ID NO: 532971 - DNA, 15 bp, Homo sapiens
cattcacctaagtta

SEQ ID NO: 532972 - DNA, 15 bp, Homo sapiens
attcacctaagttac

SEQ ID NO: 532973 - DNA, 15 bp, Homo sapiens
ttcacctaagttacc

SEQ ID NO: 532974 - DNA, 15 bp, Homo sapiens
tcacctaagttacct

SEQ ID NO: 532975 - DNA, 15 bp, Homo sapiens
cacctaagttacctg

SEQ ID NO: 532976 - DNA, 15 bp, Homo sapiens
acctaagttacctgg

SEQ ID NO: 532977 - DNA, 15 bp, Homo sapiens
cctaagttacctggc

SEQ ID NO: 532978 - DNA, 15 bp, Homo sapiens
ctaagttacctggct

SEQ ID NO: 532979 - DNA, 15 bp, Homo sapiens
taagttacctggcta

SEQ ID NO: 532980 - DNA, 15 bp, Homo sapiens
aagttacctggctag

SEQ ID NO: 532981 - DNA, 15 bp, Homo sapiens
agttacctggctagg

SEQ ID NO: 532982 - DNA, 15 bp, Homo sapiens
gttacctggctaggc

SEQ ID NO: 532983 - DNA, 15 bp, Homo sapiens
ttacctggctaggct

SEQ ID NO: 532984 - DNA, 15 bp, Homo sapiens
tacctggctaggctg

SEQ ID NO: 532985 - DNA, 15 bp, Homo sapiens
acctggctaggctga

SEQ ID NO: 532986 - DNA, 15 bp, Homo sapiens
cctggctaggctgag

SEQ ID NO: 532987 - DNA, 15 bp, Homo sapiens
ctggctaggctgagt

SEQ ID NO: 532988 - DNA, 15 bp, Homo sapiens
tggctaggctgagtc

SEQ ID NO: 532989 - DNA, 15 bp, Homo sapiens
ggctaggctgagtcc

SEQ ID NO: 532990 - DNA, 15 bp, Homo sapiens
gctaggctgagtccc

SEQ ID NO: 532991 - DNA, 15 bp, Homo sapiens
ctaggctgagtcccc

SEQ ID NO: 532992 - DNA, 15 bp, Homo sapiens
taggctgagtcccca

SEQ ID NO: 532993 - DNA, 15 bp, Homo sapiens
aggctgagtccccac

SEQ ID NO: 532994 - DNA, 15 bp, Homo sapiens
ggctgagtccccaca

SEQ ID NO: 532995 - DNA, 15 bp, Homo sapiens
gctgagtccccacag

SEQ ID NO: 532996 - DNA, 15 bp, Homo sapiens
ctgagtccccacaga

SEQ ID NO: 532997 - DNA, 15 bp, Homo sapiens
tgagtccccacagag

SEQ ID NO: 532998 - DNA, 15 bp, Homo sapiens
gagtccccacagagc

SEQ ID NO: 532999 - DNA, 15 bp, Homo sapiens
agtccccacagagct

SEQ ID NO: 533000 - DNA, 15 bp, Homo sapiens
gtccccacagagcta

SEQ ID NO: 533001 - DNA, 15 bp, Homo sapiens
tccccacagagctac

SEQ ID NO: 533002 - DNA, 15 bp, Homo sapiens
ccccacagagctacc

SEQ ID NO: 533003 - DNA, 15 bp, Homo sapiens
cccacagagctacct

SEQ ID NO: 533004 - DNA, 15 bp, Homo sapiens
ccacagagctacctt

SEQ ID NO: 533005 - DNA, 15 bp, Homo sapiens
cacagagctaccttc

SEQ ID NO: 533006 - DNA, 15 bp, Homo sapiens
acagagctaccttca

SEQ ID NO: 533007 - DNA, 15 bp, Homo sapiens
cagagctaccttcag

SEQ ID NO: 533008 - DNA, 15 bp, Homo sapiens
agagctaccttcagt

SEQ ID NO: 533009 - DNA, 15 bp, Homo sapiens
gagctaccttcagtc

SEQ ID NO: 533010 - DNA, 15 bp, Homo sapiens
agctaccttcagtct

SEQ ID NO: 533011 - DNA, 15 bp, Homo sapiens
gctaccttcagtctc

SEQ ID NO: 533012 - DNA, 15 bp, Homo sapiens
ctaccttcagtctcc

SEQ ID NO: 533013 - DNA, 15 bp, Homo sapiens
taccttcagtctcca

SEQ ID NO: 533014 - DNA, 15 bp, Homo sapiens
accttcagtctccaa

SEQ ID NO: 533015 - DNA, 15 bp, Homo sapiens
ccttcagtctccaag

SEQ ID NO: 533016 - DNA, 15 bp, Homo sapiens
cttcagtctccaagc

SEQ ID NO: 533017 - DNA, 15 bp, Homo sapiens
ttcagtctccaagca

SEQ ID NO: 533018 - DNA, 15 bp, Homo sapiens
tcagtctccaagcat

SEQ ID NO: 533019 - DNA, 15 bp, Homo sapiens
cagtctccaagcatt

SEQ ID NO: 533020 - DNA, 15 bp, Homo sapiens
agtctccaagcattc

SEQ ID NO: 533021 - DNA, 15 bp, Homo sapiens
gtctccaagcattct

SEQ ID NO: 533022 - DNA, 15 bp, Homo sapiens
tctccaagcattctg

SEQ ID NO: 533023 - DNA, 15 bp, Homo sapiens
ctccaagcattctgc

SEQ ID NO: 533024 - DNA, 15 bp, Homo sapiens
tccaagcattctgca

SEQ ID NO: 533025 - DNA, 15 bp, Homo sapiens
ccaagcattctgcaa

SEQ ID NO: 533026 - DNA, 15 bp, Homo sapiens
caagcattctgcaag

SEQ ID NO: 533027 - DNA, 15 bp, Homo sapiens
aagcattctgcaaga

SEQ ID NO: 533028 - DNA, 15 bp, Homo sapiens
agcattctgcaagat

SEQ ID NO: 533029 - DNA, 15 bp, Homo sapiens
gcattctgcaagatt

SEQ ID NO: 533030 - DNA, 15 bp, Homo sapiens
cattctgcaagattg

SEQ ID NO: 533031 - DNA, 15 bp, Homo sapiens
attctgcaagattga

SEQ ID NO: 533032 - DNA, 15 bp, Homo sapiens
ttctgcaagattgag

SEQ ID NO: 533033 - DNA, 15 bp, Homo sapiens
tctgcaagattgagc

SEQ ID NO: 533034 - DNA, 15 bp, Homo sapiens
ctgcaagattgagcc

SEQ ID NO: 533035 - DNA, 15 bp, Homo sapiens
tgcaagattgagcct

SEQ ID NO: 533036 - DNA, 15 bp, Homo sapiens
gcaagattgagcctt

SEQ ID NO: 533037 - DNA, 15 bp, Homo sapiens
caagattgagccttt

SEQ ID NO: 533038 - DNA, 15 bp, Homo sapiens
aagattgagccttta

SEQ ID NO: 533039 - DNA, 15 bp, Homo sapiens
agattgagcctttag

SEQ ID NO: 533040 - DNA, 15 bp, Homo sapiens
gattgagcctttagt

SEQ ID NO: 533041 - DNA, 15 bp, Homo sapiens
attgagcctttagtg

SEQ ID NO: 533042 - DNA, 15 bp, Homo sapiens
ttgagcctttagtgt

SEQ ID NO: 533043 - DNA, 15 bp, Homo sapiens
tgagcctttagtgtg

SEQ ID NO: 533044 - DNA, 15 bp, Homo sapiens
gagcctttagtgtgt

SEQ ID NO: 533045 - DNA, 15 bp, Homo sapiens
agcctttagtgtgtg

SEQ ID NO: 533046 - DNA, 15 bp, Homo sapiens
gcctttagtgtgtgt

SEQ ID NO: 533047 - DNA, 15 bp, Homo sapiens
cctttagtgtgtgtg

SEQ ID NO: 533048 - DNA, 15 bp, Homo sapiens
ctttagtgtgtgtgt

SEQ ID NO: 533049 - DNA, 15 bp, Homo sapiens
tttagtgtgtgtgtt

SEQ ID NO: 533050 - DNA, 15 bp, Homo sapiens
ttagtgtgtgtgttg

SEQ ID NO: 533051 - DNA, 15 bp, Homo sapiens
tagtgtgtgtgttgg

SEQ ID NO: 533052 - DNA, 15 bp, Homo sapiens
agtgtgtgtgttggt

SEQ ID NO: 533053 - DNA, 15 bp, Homo sapiens
gtgtgtgtgttggtg

SEQ ID NO: 533054 - DNA, 15 bp, Homo sapiens
tgtgtgtgttggtgt

SEQ ID NO: 533055 - DNA, 15 bp, Homo sapiens
gtgtgtgttggtgtt

SEQ ID NO: 533056 - DNA, 15 bp, Homo sapiens
tgtgtgttggtgttt

SEQ ID NO: 533057 - DNA, 15 bp, Homo sapiens
gtgtgttggtgttta

SEQ ID NO: 533058 - DNA, 15 bp, Homo sapiens
tgtgttggtgtttaa

SEQ ID NO: 533059 - DNA, 15 bp, Homo sapiens
gtgttggtgtttaag

SEQ ID NO: 533060 - DNA, 15 bp, Homo sapiens
tgttggtgtttaagt

SEQ ID NO: 533061 - DNA, 15 bp, Homo sapiens
gttggtgtttaagtt

SEQ ID NO: 533062 - DNA, 15 bp, Homo sapiens
ttggtgtttaagttg

SEQ ID NO: 533063 - DNA, 15 bp, Homo sapiens
tggtgtttaagttgt

SEQ ID NO: 533064 - DNA, 15 bp, Homo sapiens
ggtgtttaagttgtg

SEQ ID NO: 533065 - DNA, 15 bp, Homo sapiens
gtgtttaagttgtgt

SEQ ID NO: 533066 - DNA, 15 bp, Homo sapiens
tgtttaagttgtgtg

SEQ ID NO: 533067 - DNA, 15 bp, Homo sapiens
gtttaagttgtgtga

SEQ ID NO: 533068 - DNA, 15 bp, Homo sapiens
tttaagttgtgtgaa

SEQ ID NO: 533069 - DNA, 15 bp, Homo sapiens
ttaagttgtgtgaaa

SEQ ID NO: 533070 - DNA, 15 bp, Homo sapiens
taagttgtgtgaaag

SEQ ID NO: 533071 - DNA, 15 bp, Homo sapiens
aagttgtgtgaaagc

SEQ ID NO: 533072 - DNA, 15 bp, Homo sapiens
agttgtgtgaaagcc

SEQ ID NO: 533073 - DNA, 15 bp, Homo sapiens
gttgtgtgaaagcca

SEQ ID NO: 533074 - DNA, 15 bp, Homo sapiens
ttgtgtgaaagccac

SEQ ID NO: 533075 - DNA, 15 bp, Homo sapiens
tgtgtgaaagccaca

SEQ ID NO: 533076 - DNA, 15 bp, Homo sapiens
gtgtgaaagccacag

SEQ ID NO: 533077 - DNA, 15 bp, Homo sapiens
tgtgaaagccacagt

SEQ ID NO: 533078 - DNA, 15 bp, Homo sapiens
gtgaaagccacagtt

SEQ ID NO: 533079 - DNA, 15 bp, Homo sapiens
tgaaagccacagttt

SEQ ID NO: 533080 - DNA, 15 bp, Homo sapiens
gaaagccacagtttt

SEQ ID NO: 533081 - DNA, 15 bp, Homo sapiens
aaagccacagttttc

SEQ ID NO: 533082 - DNA, 15 bp, Homo sapiens
aagccacagttttct

SEQ ID NO: 533083 - DNA, 15 bp, Homo sapiens
agccacagttttctg

SEQ ID NO: 533084 - DNA, 15 bp, Homo sapiens
gccacagttttctgt

SEQ ID NO: 533085 - DNA, 15 bp, Homo sapiens
ccacagttttctgtt

SEQ ID NO: 533086 - DNA, 15 bp, Homo sapiens
cacagttttctgttc

SEQ ID NO: 533087 - DNA, 15 bp, Homo sapiens
acagttttctgttcg

SEQ ID NO: 533088 - DNA, 15 bp, Homo sapiens
cagttttctgttcgc

SEQ ID NO: 533089 - DNA, 15 bp, Homo sapiens
agttttctgttcgca

SEQ ID NO: 533090 - DNA, 15 bp, Homo sapiens
gttttctgttcgcat

SEQ ID NO: 533091 - DNA, 15 bp, Homo sapiens
ttttctgttcgcatg

SEQ ID NO: 533092 - DNA, 15 bp, Homo sapiens
tttctgttcgcatgt

SEQ ID NO: 533093 - DNA, 15 bp, Homo sapiens
ttctgttcgcatgtg

SEQ ID NO: 533094 - DNA, 15 bp, Homo sapiens
tctgttcgcatgtga

SEQ ID NO: 533095 - DNA, 15 bp, Homo sapiens
ctgttcgcatgtgac

SEQ ID NO: 533096 - DNA, 15 bp, Homo sapiens
tgttcgcatgtgacc

SEQ ID NO: 533097 - DNA, 15 bp, Homo sapiens
gttcgcatgtgacct

SEQ ID NO: 533098 - DNA, 15 bp, Homo sapiens
ttcgcatgtgacctc

SEQ ID NO: 533099 - DNA, 15 bp, Homo sapiens
tcgcatgtgacctct

SEQ ID NO: 533100 - DNA, 15 bp, Homo sapiens
cgcatgtgacctctg

SEQ ID NO: 533101 - DNA, 15 bp, Homo sapiens
gcatgtgacctctgg

SEQ ID NO: 533102 - DNA, 15 bp, Homo sapiens
catgtgacctctgga

SEQ ID NO: 533103 - DNA, 15 bp, Homo sapiens
atgtgacctctggat

SEQ ID NO: 533104 - DNA, 15 bp, Homo sapiens
tgtgacctctggatc

SEQ ID NO: 533105 - DNA, 15 bp, Homo sapiens
gtgacctctggatct

SEQ ID NO: 533106 - DNA, 15 bp, Homo sapiens
tgacctctggatctt

SEQ ID NO: 533107 - DNA, 15 bp, Homo sapiens
gacctctggatcttg

SEQ ID NO: 533108 - DNA, 15 bp, Homo sapiens
acctctggatcttgg

SEQ ID NO: 533109 - DNA, 15 bp, Homo sapiens
cctctggatcttggg

SEQ ID NO: 533110 - DNA, 15 bp, Homo sapiens
ctctggatcttgggg

SEQ ID NO: 533111 - DNA, 15 bp, Homo sapiens
tctggatcttggggt

SEQ ID NO: 533112 - DNA, 15 bp, Homo sapiens
ctggatcttggggtt

SEQ ID NO: 533113 - DNA, 15 bp, Homo sapiens
tggatcttggggttt

SEQ ID NO: 533114 - DNA, 15 bp, Homo sapiens
ggatcttggggtttc

SEQ ID NO: 533115 - DNA, 15 bp, Homo sapiens
gatcttggggtttcc

SEQ ID NO: 533116 - DNA, 15 bp, Homo sapiens
atcttggggtttcca

SEQ ID NO: 533117 - DNA, 15 bp, Homo sapiens
tcttggggtttccag

SEQ ID NO: 533118 - DNA, 15 bp, Homo sapiens
cttggggtttccaga

SEQ ID NO: 533119 - DNA, 15 bp, Homo sapiens
ttggggtttccagat

SEQ ID NO: 533120 - DNA, 15 bp, Homo sapiens
tggggtttccagatc

SEQ ID NO: 533121 - DNA, 15 bp, Homo sapiens
ggggtttccagatcc

SEQ ID NO: 533122 - DNA, 15 bp, Homo sapiens
gggtttccagatcct

SEQ ID NO: 533123 - DNA, 15 bp, Homo sapiens
ggtttccagatcctg

SEQ ID NO: 533124 - DNA, 15 bp, Homo sapiens
gtttccagatcctgt

SEQ ID NO: 533125 - DNA, 15 bp, Homo sapiens
tttccagatcctgtt

SEQ ID NO: 533126 - DNA, 15 bp, Homo sapiens
ttccagatcctgttc

SEQ ID NO: 533127 - DNA, 15 bp, Homo sapiens
tccagatcctgttcc

SEQ ID NO: 533128 - DNA, 15 bp, Homo sapiens
ccagatcctgttccc

SEQ ID NO: 533129 - DNA, 15 bp, Homo sapiens
cagatcctgttccca

SEQ ID NO: 533130 - DNA, 15 bp, Homo sapiens
agatcctgttcccac

SEQ ID NO: 533131 - DNA, 15 bp, Homo sapiens
gatcctgttcccaca

SEQ ID NO: 533132 - DNA, 15 bp, Homo sapiens
atcctgttcccacaa

SEQ ID NO: 533133 - DNA, 15 bp, Homo sapiens
tcctgttcccacaat

SEQ ID NO: 533134 - DNA, 15 bp, Homo sapiens
cctgttcccacaata

SEQ ID NO: 533135 - DNA, 15 bp, Homo sapiens
ctgttcccacaatag

SEQ ID NO: 533136 - DNA, 15 bp, Homo sapiens
tgttcccacaatagt

SEQ ID NO: 533137 - DNA, 15 bp, Homo sapiens
gttcccacaatagtt

SEQ ID NO: 533138 - DNA, 15 bp, Homo sapiens
ttcccacaatagttc

SEQ ID NO: 533139 - DNA, 15 bp, Homo sapiens
tcccacaatagttca

SEQ ID NO: 533140 - DNA, 15 bp, Homo sapiens
cccacaatagttcaa

SEQ ID NO: 533141 - DNA, 15 bp, Homo sapiens
ccacaatagttcaaa

SEQ ID NO: 533142 - DNA, 15 bp, Homo sapiens
cacaatagttcaaat

SEQ ID NO: 533143 - DNA, 15 bp, Homo sapiens
acaatagttcaaata

SEQ ID NO: 533144 - DNA, 15 bp, Homo sapiens
caatagttcaaatac

SEQ ID NO: 533145 - DNA, 15 bp, Homo sapiens
aatagttcaaatact

SEQ ID NO: 533146 - DNA, 15 bp, Homo sapiens
atagttcaaatactg

SEQ ID NO: 533147 - DNA, 15 bp, Homo sapiens
tagttcaaatactgt

SEQ ID NO: 533148 - DNA, 15 bp, Homo sapiens
agttcaaatactgtg

SEQ ID NO: 533149 - DNA, 15 bp, Homo sapiens
gttcaaatactgtgc

SEQ ID NO: 533150 - DNA, 15 bp, Homo sapiens
ttcaaatactgtgct

SEQ ID NO: 533151 - DNA, 15 bp, Homo sapiens
tcaaatactgtgctt

SEQ ID NO: 533152 - DNA, 15 bp, Homo sapiens
caaatactgtgcttg

SEQ ID NO: 533153 - DNA, 15 bp, Homo sapiens
aaatactgtgcttgg

SEQ ID NO: 533154 - DNA, 15 bp, Homo sapiens
aatactgtgcttgga

SEQ ID NO: 533155 - DNA, 15 bp, Homo sapiens
atactgtgcttggag

SEQ ID NO: 533156 - DNA, 15 bp, Homo sapiens
tactgtgcttggaga

SEQ ID NO: 533157 - DNA, 15 bp, Homo sapiens
actgtgcttggagag

SEQ ID NO: 533158 - DNA, 15 bp, Homo sapiens
ctgtgcttggagagg

SEQ ID NO: 533159 - DNA, 15 bp, Homo sapiens
tgtgcttggagagga

SEQ ID NO: 533160 - DNA, 15 bp, Homo sapiens
gtgcttggagaggac

SEQ ID NO: 533161 - DNA, 15 bp, Homo sapiens
tgcttggagaggaca

SEQ ID NO: 533162 - DNA, 15 bp, Homo sapiens
gcttggagaggacag

SEQ ID NO: 533163 - DNA, 15 bp, Homo sapiens
cttggagaggacagt

SEQ ID NO: 533164 - DNA, 15 bp, Homo sapiens
ttggagaggacagtg

SEQ ID NO: 533165 - DNA, 15 bp, Homo sapiens
tggagaggacagtgg

SEQ ID NO: 533166 - DNA, 15 bp, Homo sapiens
ggagaggacagtgga

SEQ ID NO: 533167 - DNA, 15 bp, Homo sapiens
gagaggacagtggac

SEQ ID NO: 533168 - DNA, 15 bp, Homo sapiens
agaggacagtggacc

SEQ ID NO: 533169 - DNA, 15 bp, Homo sapiens
gaggacagtggacca

SEQ ID NO: 533170 - DNA, 15 bp, Homo sapiens
aggacagtggaccag

SEQ ID NO: 533171 - DNA, 15 bp, Homo sapiens
ggacagtggaccagg

SEQ ID NO: 533172 - DNA, 15 bp, Homo sapiens
gacagtggaccagga

SEQ ID NO: 533173 - DNA, 15 bp, Homo sapiens
acagtggaccaggag

SEQ ID NO: 533174 - DNA, 15 bp, Homo sapiens
cagtggaccaggaga

SEQ ID NO: 533175 - DNA, 15 bp, Homo sapiens
agtggaccaggagag

SEQ ID NO: 533176 - DNA, 15 bp, Homo sapiens
gtggaccaggagaga

SEQ ID NO: 533177 - DNA, 15 bp, Homo sapiens
tggaccaggagagag

SEQ ID NO: 533178 - DNA, 15 bp, Homo sapiens
ggaccaggagagagg

SEQ ID NO: 533179 - DNA, 15 bp, Homo sapiens
gaccaggagagaggc

SEQ ID NO: 533180 - DNA, 15 bp, Homo sapiens
accaggagagaggcc

SEQ ID NO: 533181 - DNA, 15 bp, Homo sapiens
ccaggagagaggcca

SEQ ID NO: 533182 - DNA, 15 bp, Homo sapiens
caggagagaggccag

SEQ ID NO: 533183 - DNA, 15 bp, Homo sapiens
aggagagaggccagc

SEQ ID NO: 533184 - DNA, 15 bp, Homo sapiens
ggagagaggccagca

SEQ ID NO: 533185 - DNA, 15 bp, Homo sapiens
gagagaggccagcat

SEQ ID NO: 533186 - DNA, 15 bp, Homo sapiens
agagaggccagcatt

SEQ ID NO: 533187 - DNA, 15 bp, Homo sapiens
gagaggccagcattc

SEQ ID NO: 533188 - DNA, 15 bp, Homo sapiens
agaggccagcattct

SEQ ID NO: 533189 - DNA, 15 bp, Homo sapiens
gaggccagcattctt

SEQ ID NO: 533190 - DNA, 15 bp, Homo sapiens
aggccagcattcttc

SEQ ID NO: 533191 - DNA, 15 bp, Homo sapiens
ggccagcattcttct

SEQ ID NO: 533192 - DNA, 15 bp, Homo sapiens
gccagcattcttctg

SEQ ID NO: 533193 - DNA, 15 bp, Homo sapiens
ccagcattcttctgc

SEQ ID NO: 533194 - DNA, 15 bp, Homo sapiens
cagcattcttctgct

SEQ ID NO: 533195 - DNA, 15 bp, Homo sapiens
agcattcttctgctc

SEQ ID NO: 533196 - DNA, 15 bp, Homo sapiens
gcattcttctgctct

SEQ ID NO: 533197 - DNA, 15 bp, Homo sapiens
cattcttctgctctc

SEQ ID NO: 533198 - DNA, 15 bp, Homo sapiens
attcttctgctctct

SEQ ID NO: 533199 - DNA, 15 bp, Homo sapiens
ttcttctgctctctt

SEQ ID NO: 533200 - DNA, 15 bp, Homo sapiens
tcttctgctctcttg

SEQ ID NO: 533201 - DNA, 15 bp, Homo sapiens
cttctgctctcttgg

SEQ ID NO: 533202 - DNA, 15 bp, Homo sapiens
ttctgctctcttggt

SEQ ID NO: 533203 - DNA, 15 bp, Homo sapiens
tctgctctcttggtg

SEQ ID NO: 533204 - DNA, 15 bp, Homo sapiens
ctgctctcttggtga

SEQ ID NO: 533205 - DNA, 15 bp, Homo sapiens
tgctctcttggtgag

SEQ ID NO: 533206 - DNA, 15 bp, Homo sapiens
gctctcttggtgaga

SEQ ID NO: 533207 - DNA, 15 bp, Homo sapiens
ctctcttggtgagaa

SEQ ID NO: 533208 - DNA, 15 bp, Homo sapiens
tctcttggtgagaat

SEQ ID NO: 533209 - DNA, 15 bp, Homo sapiens
ctcttggtgagaatg

SEQ ID NO: 533210 - DNA, 15 bp, Homo sapiens
tcttggtgagaatga

SEQ ID NO: 533211 - DNA, 15 bp, Homo sapiens
cttggtgagaatgaa

SEQ ID NO: 533212 - DNA, 15 bp, Homo sapiens
ttggtgagaatgaac

SEQ ID NO: 533213 - DNA, 15 bp, Homo sapiens
tggtgagaatgaacc

SEQ ID NO: 533214 - DNA, 15 bp, Homo sapiens
ggtgagaatgaaccg

SEQ ID NO: 533215 - DNA, 15 bp, Homo sapiens
gtgagaatgaaccgt

SEQ ID NO: 533216 - DNA, 15 bp, Homo sapiens
tgagaatgaaccgtc

SEQ ID NO: 533217 - DNA, 15 bp, Homo sapiens
gagaatgaaccgtcc

SEQ ID NO: 533218 - DNA, 15 bp, Homo sapiens
agaatgaaccgtcca

SEQ ID NO: 533219 - DNA, 15 bp, Homo sapiens
gaatgaaccgtccat

SEQ ID NO: 533220 - DNA, 15 bp, Homo sapiens
aatgaaccgtccatt

SEQ ID NO: 533221 - DNA, 15 bp, Homo sapiens
atgaaccgtccatta

SEQ ID NO: 533222 - DNA, 15 bp, Homo sapiens
tgaaccgtccattaa

SEQ ID NO: 533223 - DNA, 15 bp, Homo sapiens
gaaccgtccattaag

SEQ ID NO: 533224 - DNA, 15 bp, Homo sapiens
aaccgtccattaagc

SEQ ID NO: 533225 - DNA, 15 bp, Homo sapiens
accgtccattaagcc

SEQ ID NO: 533226 - DNA, 15 bp, Homo sapiens
ccgtccattaagcct

SEQ ID NO: 533227 - DNA, 15 bp, Homo sapiens
cgtccattaagcctg

SEQ ID NO: 533228 - DNA, 15 bp, Homo sapiens
gtccattaagcctgt

SEQ ID NO: 533229 - DNA, 15 bp, Homo sapiens
tccattaagcctgtt

SEQ ID NO: 533230 - DNA, 15 bp, Homo sapiens
ccattaagcctgttt

SEQ ID NO: 533231 - DNA, 15 bp, Homo sapiens
cattaagcctgtttg

SEQ ID NO: 533232 - DNA, 15 bp, Homo sapiens
attaagcctgtttga

SEQ ID NO: 533233 - DNA, 15 bp, Homo sapiens
ttaagcctgtttgag

SEQ ID NO: 533234 - DNA, 15 bp, Homo sapiens
taagcctgtttgaga

SEQ ID NO: 533235 - DNA, 15 bp, Homo sapiens
aagcctgtttgagat

SEQ ID NO: 533236 - DNA, 15 bp, Homo sapiens
agcctgtttgagatt

SEQ ID NO: 533237 - DNA, 15 bp, Homo sapiens
gcctgtttgagattc

SEQ ID NO: 533238 - DNA, 15 bp, Homo sapiens
cctgtttgagattca

SEQ ID NO: 533239 - DNA, 15 bp, Homo sapiens
ctgtttgagattcat

SEQ ID NO: 533240 - DNA, 15 bp, Homo sapiens
tgtttgagattcata

SEQ ID NO: 533241 - DNA, 15 bp, Homo sapiens
gtttgagattcatag

SEQ ID NO: 533242 - DNA, 15 bp, Homo sapiens
tttgagattcatagt

SEQ ID NO: 533243 - DNA, 15 bp, Homo sapiens
ttgagattcatagtc

SEQ ID NO: 533244 - DNA, 15 bp, Homo sapiens
tgagattcatagtca

SEQ ID NO: 533245 - DNA, 15 bp, Homo sapiens
gagattcatagtcat

SEQ ID NO: 533246 - DNA, 15 bp, Homo sapiens
agattcatagtcatc

SEQ ID NO: 533247 - DNA, 15 bp, Homo sapiens
gattcatagtcatca

SEQ ID NO: 533248 - DNA, 15 bp, Homo sapiens
attcatagtcatcac

SEQ ID NO: 533249 - DNA, 15 bp, Homo sapiens
ttcatagtcatcaca

SEQ ID NO: 533250 - DNA, 15 bp, Homo sapiens
tcatagtcatcacaa

SEQ ID NO: 533251 - DNA, 15 bp, Homo sapiens
catagtcatcacaaa

SEQ ID NO: 533252 - DNA, 15 bp, Homo sapiens
atagtcatcacaaaa

SEQ ID NO: 533253 - DNA, 15 bp, Homo sapiens
tagtcatcacaaaaa

SEQ ID NO: 533254 - DNA, 15 bp, Homo sapiens
agtcatcacaaaaat

SEQ ID NO: 533255 - DNA, 15 bp, Homo sapiens
gtcatcacaaaaatg

SEQ ID NO: 533256 - DNA, 15 bp, Homo sapiens
tcatcacaaaaatga

SEQ ID NO: 533257 - DNA, 15 bp, Homo sapiens
catcacaaaaatgaa

SEQ ID NO: 533258 - DNA, 15 bp, Homo sapiens
atcacaaaaatgaaa

SEQ ID NO: 533259 - DNA, 15 bp, Homo sapiens
tcacaaaaatgaaac

SEQ ID NO: 533260 - DNA, 15 bp, Homo sapiens
cacaaaaatgaaaca

SEQ ID NO: 533261 - DNA, 15 bp, Homo sapiens
acaaaaatgaaacag

SEQ ID NO: 533262 - DNA, 15 bp, Homo sapiens
caaaaatgaaacagt

SEQ ID NO: 533263 - DNA, 15 bp, Homo sapiens
aaaaatgaaacagtg

SEQ ID NO: 533264 - DNA, 15 bp, Homo sapiens
aaaatgaaacagtgg

SEQ ID NO: 533265 - DNA, 15 bp, Homo sapiens
aaatgaaacagtgga

SEQ ID NO: 533266 - DNA, 15 bp, Homo sapiens
aatgaaacagtggaa

SEQ ID NO: 533267 - DNA, 15 bp, Homo sapiens
atgaaacagtggaac

SEQ ID NO: 533268 - DNA, 15 bp, Homo sapiens
tgaaacagtggaact

SEQ ID NO: 533269 - DNA, 15 bp, Homo sapiens
gaaacagtggaacta

SEQ ID NO: 533270 - DNA, 15 bp, Homo sapiens
aaacagtggaactag

SEQ ID NO: 533271 - DNA, 15 bp, Homo sapiens
aacagtggaactagg

SEQ ID NO: 533272 - DNA, 15 bp, Homo sapiens
acagtggaactaggt

SEQ ID NO: 533273 - DNA, 15 bp, Homo sapiens
cagtggaactaggtt

SEQ ID NO: 533274 - DNA, 15 bp, Homo sapiens
agtggaactaggtta

SEQ ID NO: 533275 - DNA, 15 bp, Homo sapiens
gtggaactaggttac

SEQ ID NO: 533276 - DNA, 15 bp, Homo sapiens
tggaactaggttacc

SEQ ID NO: 533277 - DNA, 15 bp, Homo sapiens
ggaactaggttacct

SEQ ID NO: 533278 - DNA, 15 bp, Homo sapiens
gaactaggttacctc

SEQ ID NO: 533279 - DNA, 15 bp, Homo sapiens
aactaggttacctct

SEQ ID NO: 533280 - DNA, 15 bp, Homo sapiens
actaggttacctcta

SEQ ID NO: 533281 - DNA, 15 bp, Homo sapiens
ctaggttacctctac

SEQ ID NO: 533282 - DNA, 15 bp, Homo sapiens
taggttacctctaca

SEQ ID NO: 533283 - DNA, 15 bp, Homo sapiens
aggttacctctacag

SEQ ID NO: 533284 - DNA, 15 bp, Homo sapiens
ggttacctctacagt

SEQ ID NO: 533285 - DNA, 15 bp, Homo sapiens
gttacctctacagta

SEQ ID NO: 533286 - DNA, 15 bp, Homo sapiens
ttacctctacagtag

SEQ ID NO: 533287 - DNA, 15 bp, Homo sapiens
tacctctacagtagt

SEQ ID NO: 533288 - DNA, 15 bp, Homo sapiens
acctctacagtagta

SEQ ID NO: 533289 - DNA, 15 bp, Homo sapiens
cctctacagtagtat

SEQ ID NO: 533290 - DNA, 15 bp, Homo sapiens
ctctacagtagtatc

SEQ ID NO: 533291 - DNA, 15 bp, Homo sapiens
tctacagtagtatct

SEQ ID NO: 533292 - DNA, 15 bp, Homo sapiens
ctacagtagtatcta

SEQ ID NO: 533293 - DNA, 15 bp, Homo sapiens
tacagtagtatctaa

SEQ ID NO: 533294 - DNA, 15 bp, Homo sapiens
acagtagtatctaac

SEQ ID NO: 533295 - DNA, 15 bp, Homo sapiens
cagtagtatctaacc

SEQ ID NO: 533296 - DNA, 15 bp, Homo sapiens
agtagtatctaacca

SEQ ID NO: 533297 - DNA, 15 bp, Homo sapiens
gtagtatctaaccaa

SEQ ID NO: 533298 - DNA, 15 bp, Homo sapiens
tagtatctaaccaat

SEQ ID NO: 533299 - DNA, 15 bp, Homo sapiens
agtatctaaccaatc

SEQ ID NO: 533300 - DNA, 15 bp, Homo sapiens
gtatctaaccaatct

SEQ ID NO: 533301 - DNA, 15 bp, Homo sapiens
tatctaaccaatctt

SEQ ID NO: 533302 - DNA, 15 bp, Homo sapiens
atctaaccaatcttc

SEQ ID NO: 533303 - DNA, 15 bp, Homo sapiens
tctaaccaatcttct

SEQ ID NO: 533304 - DNA, 15 bp, Homo sapiens
ctaaccaatcttctc

SEQ ID NO: 533305 - DNA, 15 bp, Homo sapiens
taaccaatcttctca

SEQ ID NO: 533306 - DNA, 15 bp, Homo sapiens
aaccaatcttctcag

SEQ ID NO: 533307 - DNA, 15 bp, Homo sapiens
accaatcttctcagt

SEQ ID NO: 533308 - DNA, 15 bp, Homo sapiens
ccaatcttctcagtg

SEQ ID NO: 533309 - DNA, 15 bp, Homo sapiens
caatcttctcagtgc

SEQ ID NO: 533310 - DNA, 15 bp, Homo sapiens
aatcttctcagtgcc

SEQ ID NO: 533311 - DNA, 15 bp, Homo sapiens
atcttctcagtgcct

SEQ ID NO: 533312 - DNA, 15 bp, Homo sapiens
tcttctcagtgccta

SEQ ID NO: 533313 - DNA, 15 bp, Homo sapiens
cttctcagtgcctaa

SEQ ID NO: 533314 - DNA, 15 bp, Homo sapiens
ttctcagtgcctaaa

SEQ ID NO: 533315 - DNA, 15 bp, Homo sapiens
tctcagtgcctaaaa

SEQ ID NO: 533316 - DNA, 15 bp, Homo sapiens
ctcagtgcctaaaat

SEQ ID NO: 533317 - DNA, 15 bp, Homo sapiens
tcagtgcctaaaatg

SEQ ID NO: 533318 - DNA, 15 bp, Homo sapiens
cagtgcctaaaatgt

SEQ ID NO: 533319 - DNA, 15 bp, Homo sapiens
agtgcctaaaatgtg

SEQ ID NO: 533320 - DNA, 15 bp, Homo sapiens
gtgcctaaaatgtgc

SEQ ID NO: 533321 - DNA, 15 bp, Homo sapiens
tgcctaaaatgtgct

SEQ ID NO: 533322 - DNA, 15 bp, Homo sapiens
gcctaaaatgtgctc

SEQ ID NO: 533323 - DNA, 15 bp, Homo sapiens
cctaaaatgtgctca

SEQ ID NO: 533324 - DNA, 15 bp, Homo sapiens
ctaaaatgtgctcat

SEQ ID NO: 533325 - DNA, 15 bp, Homo sapiens
taaaatgtgctcata

SEQ ID NO: 533326 - DNA, 15 bp, Homo sapiens
aaaatgtgctcatat

SEQ ID NO: 533327 - DNA, 15 bp, Homo sapiens
aaatgtgctcatatg

SEQ ID NO: 533328 - DNA, 15 bp, Homo sapiens
aatgtgctcatatgt

SEQ ID NO: 533329 - DNA, 15 bp, Homo sapiens
atgtgctcatatgtg

SEQ ID NO: 533330 - DNA, 15 bp, Homo sapiens
tgtgctcatatgtgt

SEQ ID NO: 533331 - DNA, 15 bp, Homo sapiens
gtgctcatatgtgtt

SEQ ID NO: 533332 - DNA, 15 bp, Homo sapiens
tgctcatatgtgttt

SEQ ID NO: 533333 - DNA, 15 bp, Homo sapiens
gctcatatgtgttta

SEQ ID NO: 533334 - DNA, 15 bp, Homo sapiens
ctcatatgtgtttac

SEQ ID NO: 533335 - DNA, 15 bp, Homo sapiens
tcatatgtgtttaca

SEQ ID NO: 533336 - DNA, 15 bp, Homo sapiens
catatgtgtttacaa

SEQ ID NO: 533337 - DNA, 15 bp, Homo sapiens
atatgtgtttacaag

SEQ ID NO: 533338 - DNA, 15 bp, Homo sapiens
tatgtgtttacaaga

SEQ ID NO: 533339 - DNA, 15 bp, Homo sapiens
atgtgtttacaagaa

SEQ ID NO: 533340 - DNA, 15 bp, Homo sapiens
tgtgtttacaagaac

SEQ ID NO: 533341 - DNA, 15 bp, Homo sapiens
gtgtttacaagaaca

SEQ ID NO: 533342 - DNA, 15 bp, Homo sapiens
tgtttacaagaacac

SEQ ID NO: 533343 - DNA, 15 bp, Homo sapiens
gtttacaagaacact

SEQ ID NO: 533344 - DNA, 15 bp, Homo sapiens
tttacaagaacactt

SEQ ID NO: 533345 - DNA, 15 bp, Homo sapiens
ttacaagaacacttg

SEQ ID NO: 533346 - DNA, 15 bp, Homo sapiens
tacaagaacacttgc

SEQ ID NO: 533347 - DNA, 15 bp, Homo sapiens
acaagaacacttgcc

SEQ ID NO: 533348 - DNA, 15 bp, Homo sapiens
caagaacacttgcct

SEQ ID NO: 533349 - DNA, 15 bp, Homo sapiens
aagaacacttgcctg

SEQ ID NO: 533350 - DNA, 15 bp, Homo sapiens
agaacacttgcctgt

SEQ ID NO: 533351 - DNA, 15 bp, Homo sapiens
gaacacttgcctgta

SEQ ID NO: 533352 - DNA, 15 bp, Homo sapiens
aacacttgcctgtat

SEQ ID NO: 533353 - DNA, 15 bp, Homo sapiens
acacttgcctgtatg

SEQ ID NO: 533354 - DNA, 15 bp, Homo sapiens
cacttgcctgtatgt

SEQ ID NO: 533355 - DNA, 15 bp, Homo sapiens
acttgcctgtatgtg

SEQ ID NO: 533356 - DNA, 15 bp, Homo sapiens
cttgcctgtatgtgc

SEQ ID NO: 533357 - DNA, 15 bp, Homo sapiens
ttgcctgtatgtgca

SEQ ID NO: 533358 - DNA, 15 bp, Homo sapiens
tgcctgtatgtgcac

SEQ ID NO: 533359 - DNA, 15 bp, Homo sapiens
gcctgtatgtgcact

SEQ ID NO: 533360 - DNA, 15 bp, Homo sapiens
cctgtatgtgcacta

SEQ ID NO: 533361 - DNA, 15 bp, Homo sapiens
ctgtatgtgcactaa

SEQ ID NO: 533362 - DNA, 15 bp, Homo sapiens
tgtatgtgcactaaa

SEQ ID NO: 533363 - DNA, 15 bp, Homo sapiens
gtatgtgcactaaat

SEQ ID NO: 533364 - DNA, 15 bp, Homo sapiens
tatgtgcactaaatc

SEQ ID NO: 533365 - DNA, 15 bp, Homo sapiens
atgtgcactaaatcc

SEQ ID NO: 533366 - DNA, 15 bp, Homo sapiens
tgtgcactaaatcca

SEQ ID NO: 533367 - DNA, 15 bp, Homo sapiens
gtgcactaaatccag

SEQ ID NO: 533368 - DNA, 15 bp, Homo sapiens
tgcactaaatccagc

SEQ ID NO: 533369 - DNA, 15 bp, Homo sapiens
gcactaaatccagcc

SEQ ID NO: 533370 - DNA, 15 bp, Homo sapiens
cactaaatccagccc

SEQ ID NO: 533371 - DNA, 15 bp, Homo sapiens
actaaatccagccct

SEQ ID NO: 533372 - DNA, 15 bp, Homo sapiens
ctaaatccagcccta

SEQ ID NO: 533373 - DNA, 15 bp, Homo sapiens
taaatccagccctac

SEQ ID NO: 533374 - DNA, 15 bp, Homo sapiens
aaatccagccctaca

SEQ ID NO: 533375 - DNA, 15 bp, Homo sapiens
aatccagccctacac

SEQ ID NO: 533376 - DNA, 15 bp, Homo sapiens
atccagccctacact

SEQ ID NO: 533377 - DNA, 15 bp, Homo sapiens
tccagccctacactg

SEQ ID NO: 533378 - DNA, 15 bp, Homo sapiens
ccagccctacactga

SEQ ID NO: 533379 - DNA, 15 bp, Homo sapiens
cagccctacactgat

SEQ ID NO: 533380 - DNA, 15 bp, Homo sapiens
agccctacactgatc

SEQ ID NO: 533381 - DNA, 15 bp, Homo sapiens
gccctacactgatcg

SEQ ID NO: 533382 - DNA, 15 bp, Homo sapiens
ccctacactgatcga

SEQ ID NO: 533383 - DNA, 15 bp, Homo sapiens
cctacactgatcgag

SEQ ID NO: 533384 - DNA, 15 bp, Homo sapiens
ctacactgatcgagg

SEQ ID NO: 533385 - DNA, 15 bp, Homo sapiens
tacactgatcgaggt

SEQ ID NO: 533386 - DNA, 15 bp, Homo sapiens
acactgatcgaggtt

SEQ ID NO: 533387 - DNA, 15 bp, Homo sapiens
cactgatcgaggttg

SEQ ID NO: 533388 - DNA, 15 bp, Homo sapiens
actgatcgaggttga

SEQ ID NO: 533389 - DNA, 15 bp, Homo sapiens
ctgatcgaggttgac

SEQ ID NO: 533390 - DNA, 15 bp, Homo sapiens
tgatcgaggttgacg

SEQ ID NO: 533391 - DNA, 15 bp, Homo sapiens
gatcgaggttgacga

SEQ ID NO: 533392 - DNA, 15 bp, Homo sapiens
atcgaggttgacgac

SEQ ID NO: 533393 - DNA, 15 bp, Homo sapiens
tcgaggttgacgaca

SEQ ID NO: 533394 - DNA, 15 bp, Homo sapiens
cgaggttgacgacac

SEQ ID NO: 533395 - DNA, 15 bp, Homo sapiens
gaggttgacgacact

SEQ ID NO: 533396 - DNA, 15 bp, Homo sapiens
aggttgacgacactc

SEQ ID NO: 533397 - DNA, 15 bp, Homo sapiens
ggttgacgacactct

SEQ ID NO: 533398 - DNA, 15 bp, Homo sapiens
gttgacgacactcta

SEQ ID NO: 533399 - DNA, 15 bp, Homo sapiens
ttgacgacactctag

SEQ ID NO: 533400 - DNA, 15 bp, Homo sapiens
tgacgacactctaga

SEQ ID NO: 533401 - DNA, 15 bp, Homo sapiens
gacgacactctagag

SEQ ID NO: 533402 - DNA, 15 bp, Homo sapiens
acgacactctagaga

SEQ ID NO: 533403 - DNA, 15 bp, Homo sapiens
cgacactctagagag

SEQ ID NO: 533404 - DNA, 15 bp, Homo sapiens
gacactctagagaga

SEQ ID NO: 533405 - DNA, 15 bp, Homo sapiens
acactctagagagaa

SEQ ID NO: 533406 - DNA, 15 bp, Homo sapiens
cactctagagagaat

SEQ ID NO: 533407 - DNA, 15 bp, Homo sapiens
actctagagagaatc

SEQ ID NO: 533408 - DNA, 15 bp, Homo sapiens
ctctagagagaatct

SEQ ID NO: 533409 - DNA, 15 bp, Homo sapiens
tctagagagaatcta

SEQ ID NO: 533410 - DNA, 15 bp, Homo sapiens
ctagagagaatctaa

SEQ ID NO: 533411 - DNA, 15 bp, Homo sapiens
tagagagaatctaat

SEQ ID NO: 533412 - DNA, 15 bp, Homo sapiens
agagagaatctaatt

SEQ ID NO: 533413 - DNA, 15 bp, Homo sapiens
gagagaatctaattt

SEQ ID NO: 533414 - DNA, 15 bp, Homo sapiens
agagaatctaatttg

SEQ ID NO: 533415 - DNA, 15 bp, Homo sapiens
gagaatctaatttgt

SEQ ID NO: 533416 - DNA, 15 bp, Homo sapiens
agaatctaatttgtg

SEQ ID NO: 533417 - DNA, 15 bp, Homo sapiens
gaatctaatttgtgt

SEQ ID NO: 533418 - DNA, 15 bp, Homo sapiens
aatctaatttgtgta

SEQ ID NO: 533419 - DNA, 15 bp, Homo sapiens
atctaatttgtgtac

SEQ ID NO: 533420 - DNA, 15 bp, Homo sapiens
tctaatttgtgtaca

SEQ ID NO: 533421 - DNA, 15 bp, Homo sapiens
ctaatttgtgtacac

SEQ ID NO: 533422 - DNA, 15 bp, Homo sapiens
taatttgtgtacaca

SEQ ID NO: 533423 - DNA, 15 bp, Homo sapiens
aatttgtgtacacaa

SEQ ID NO: 533424 - DNA, 15 bp, Homo sapiens
atttgtgtacacaaa

SEQ ID NO: 533425 - DNA, 15 bp, Homo sapiens
tttgtgtacacaaat

SEQ ID NO: 533426 - DNA, 15 bp, Homo sapiens
ttgtgtacacaaatc

SEQ ID NO: 533427 - DNA, 15 bp, Homo sapiens
tgtgtacacaaatcc

SEQ ID NO: 533428 - DNA, 15 bp, Homo sapiens
gtgtacacaaatcca

SEQ ID NO: 533429 - DNA, 15 bp, Homo sapiens
tgtacacaaatccag

SEQ ID NO: 533430 - DNA, 15 bp, Homo sapiens
gtacacaaatccagg

SEQ ID NO: 533431 - DNA, 15 bp, Homo sapiens
tacacaaatccaggg

SEQ ID NO: 533432 - DNA, 15 bp, Homo sapiens
acacaaatccagggt

SEQ ID NO: 533433 - DNA, 15 bp, Homo sapiens
cacaaatccagggtg

SEQ ID NO: 533434 - DNA, 15 bp, Homo sapiens
acaaatccagggtgt

SEQ ID NO: 533435 - DNA, 15 bp, Homo sapiens
caaatccagggtgtc

SEQ ID NO: 533436 - DNA, 15 bp, Homo sapiens
aaatccagggtgtcc

SEQ ID NO: 533437 - DNA, 15 bp, Homo sapiens
aatccagggtgtcca

SEQ ID NO: 533438 - DNA, 15 bp, Homo sapiens
atccagggtgtccat

SEQ ID NO: 533439 - DNA, 15 bp, Homo sapiens
tccagggtgtccatt

SEQ ID NO: 533440 - DNA, 15 bp, Homo sapiens
ccagggtgtccattt

SEQ ID NO: 533441 - DNA, 15 bp, Homo sapiens
cagggtgtccatttc

SEQ ID NO: 533442 - DNA, 15 bp, Homo sapiens
agggtgtccatttcc

SEQ ID NO: 533443 - DNA, 15 bp, Homo sapiens
gggtgtccatttcca

SEQ ID NO: 533444 - DNA, 15 bp, Homo sapiens
ggtgtccatttccag

SEQ ID NO: 533445 - DNA, 15 bp, Homo sapiens
gtgtccatttccagt

SEQ ID NO: 533446 - DNA, 15 bp, Homo sapiens
tgtccatttccagtt

SEQ ID NO: 533447 - DNA, 15 bp, Homo sapiens
gtccatttccagttt

SEQ ID NO: 533448 - DNA, 15 bp, Homo sapiens
tccatttccagtttg

SEQ ID NO: 533449 - DNA, 15 bp, Homo sapiens
ccatttccagtttga

SEQ ID NO: 533450 - DNA, 15 bp, Homo sapiens
catttccagtttgaa

SEQ ID NO: 533451 - DNA, 15 bp, Homo sapiens
atttccagtttgaac

SEQ ID NO: 533452 - DNA, 15 bp, Homo sapiens
tttccagtttgaact

SEQ ID NO: 533453 - DNA, 15 bp, Homo sapiens
ttccagtttgaactg

SEQ ID NO: 533454 - DNA, 15 bp, Homo sapiens
tccagtttgaactgc

SEQ ID NO: 533455 - DNA, 15 bp, Homo sapiens
ccagtttgaactgcc

SEQ ID NO: 533456 - DNA, 15 bp, Homo sapiens
cagtttgaactgcct

SEQ ID NO: 533457 - DNA, 15 bp, Homo sapiens
agtttgaactgcctg

SEQ ID NO: 533458 - DNA, 15 bp, Homo sapiens
gtttgaactgcctgg

SEQ ID NO: 533459 - DNA, 15 bp, Homo sapiens
tttgaactgcctgga

SEQ ID NO: 533460 - DNA, 15 bp, Homo sapiens
ttgaactgcctggaa

SEQ ID NO: 533461 - DNA, 15 bp, Homo sapiens
tgaactgcctggaaa

SEQ ID NO: 533462 - DNA, 15 bp, Homo sapiens
gaactgcctggaaaa

SEQ ID NO: 533463 - DNA, 15 bp, Homo sapiens
aactgcctggaaaaa

SEQ ID NO: 533464 - DNA, 15 bp, Homo sapiens
actgcctggaaaaat

SEQ ID NO: 533465 - DNA, 15 bp, Homo sapiens
ctgcctggaaaaatc

SEQ ID NO: 533466 - DNA, 15 bp, Homo sapiens
tgcctggaaaaatca

SEQ ID NO: 533467 - DNA, 15 bp, Homo sapiens
gcctggaaaaatcag

SEQ ID NO: 533468 - DNA, 15 bp, Homo sapiens
cctggaaaaatcagg

SEQ ID NO: 533469 - DNA, 15 bp, Homo sapiens
ctggaaaaatcaggt

SEQ ID NO: 533470 - DNA, 15 bp, Homo sapiens
tggaaaaatcaggtt

SEQ ID NO: 533471 - DNA, 15 bp, Homo sapiens
ggaaaaatcaggttt

SEQ ID NO: 533472 - DNA, 15 bp, Homo sapiens
gaaaaatcaggtttg

SEQ ID NO: 533473 - DNA, 15 bp, Homo sapiens
aaaaatcaggtttga

SEQ ID NO: 533474 - DNA, 15 bp, Homo sapiens
aaaatcaggtttgag

SEQ ID NO: 533475 - DNA, 15 bp, Homo sapiens
aaatcaggtttgagt

SEQ ID NO: 533476 - DNA, 15 bp, Homo sapiens
aatcaggtttgagtg

SEQ ID NO: 533477 - DNA, 15 bp, Homo sapiens
atcaggtttgagtga

SEQ ID NO: 533478 - DNA, 15 bp, Homo sapiens
tcaggtttgagtgat

SEQ ID NO: 533479 - DNA, 15 bp, Homo sapiens
caggtttgagtgatt

SEQ ID NO: 533480 - DNA, 15 bp, Homo sapiens
aggtttgagtgattc

SEQ ID NO: 533481 - DNA, 15 bp, Homo sapiens
ggtttgagtgattct

SEQ ID NO: 533482 - DNA, 15 bp, Homo sapiens
gtttgagtgattcta

SEQ ID NO: 533483 - DNA, 15 bp, Homo sapiens
tttgagtgattctag

SEQ ID NO: 533484 - DNA, 15 bp, Homo sapiens
ttgagtgattctagg

SEQ ID NO: 533485 - DNA, 15 bp, Homo sapiens
tgagtgattctagga

SEQ ID NO: 533486 - DNA, 15 bp, Homo sapiens
gagtgattctaggat

SEQ ID NO: 533487 - DNA, 15 bp, Homo sapiens
agtgattctaggatg

SEQ ID NO: 533488 - DNA, 15 bp, Homo sapiens
gtgattctaggatgt

SEQ ID NO: 533489 - DNA, 15 bp, Homo sapiens
tgattctaggatgtg

SEQ ID NO: 533490 - DNA, 15 bp, Homo sapiens
gattctaggatgtga

SEQ ID NO: 533491 - DNA, 15 bp, Homo sapiens
attctaggatgtgat

SEQ ID NO: 533492 - DNA, 15 bp, Homo sapiens
ttctaggatgtgatt

SEQ ID NO: 533493 - DNA, 15 bp, Homo sapiens
tctaggatgtgattt

SEQ ID NO: 533494 - DNA, 15 bp, Homo sapiens
ctaggatgtgatttt

SEQ ID NO: 533495 - DNA, 15 bp, Homo sapiens
taggatgtgatttta

SEQ ID NO: 533496 - DNA, 15 bp, Homo sapiens
aggatgtgattttat

SEQ ID NO: 533497 - DNA, 15 bp, Homo sapiens
ggatgtgattttatg

SEQ ID NO: 533498 - DNA, 15 bp, Homo sapiens
gatgtgattttatgc

SEQ ID NO: 533499 - DNA, 15 bp, Homo sapiens
atgtgattttatgca

SEQ ID NO: 533500 - DNA, 15 bp, Homo sapiens
tgtgattttatgcac

SEQ ID NO: 533501 - DNA, 15 bp, Homo sapiens
gtgattttatgcacc

SEQ ID NO: 533502 - DNA, 15 bp, Homo sapiens
tgattttatgcacct

SEQ ID NO: 533503 - DNA, 15 bp, Homo sapiens
gattttatgcacctg

SEQ ID NO: 533504 - DNA, 15 bp, Homo sapiens
attttatgcacctgc

SEQ ID NO: 533505 - DNA, 15 bp, Homo sapiens
ttttatgcacctgca

SEQ ID NO: 533506 - DNA, 15 bp, Homo sapiens
tttatgcacctgcat

SEQ ID NO: 533507 - DNA, 15 bp, Homo sapiens
ttatgcacctgcata

SEQ ID NO: 533508 - DNA, 15 bp, Homo sapiens
tatgcacctgcatag

SEQ ID NO: 533509 - DNA, 15 bp, Homo sapiens
atgcacctgcatagt

SEQ ID NO: 533510 - DNA, 15 bp, Homo sapiens
tgcacctgcatagtt

SEQ ID NO: 533511 - DNA, 15 bp, Homo sapiens
gcacctgcatagttc

SEQ ID NO: 533512 - DNA, 15 bp, Homo sapiens
cacctgcatagttct

SEQ ID NO: 533513 - DNA, 15 bp, Homo sapiens
acctgcatagttctt

SEQ ID NO: 533514 - DNA, 15 bp, Homo sapiens
cctgcatagttcttc

SEQ ID NO: 533515 - DNA, 15 bp, Homo sapiens
ctgcatagttcttcc

SEQ ID NO: 533516 - DNA, 15 bp, Homo sapiens
tgcatagttcttcct

SEQ ID NO: 533517 - DNA, 15 bp, Homo sapiens
gcatagttcttcctc

SEQ ID NO: 533518 - DNA, 15 bp, Homo sapiens
catagttcttcctca

SEQ ID NO: 533519 - DNA, 15 bp, Homo sapiens
atagttcttcctcaa

SEQ ID NO: 533520 - DNA, 15 bp, Homo sapiens
tagttcttcctcaaa

SEQ ID NO: 533521 - DNA, 15 bp, Homo sapiens
agttcttcctcaaat

SEQ ID NO: 533522 - DNA, 15 bp, Homo sapiens
gttcttcctcaaata

SEQ ID NO: 533523 - DNA, 15 bp, Homo sapiens
ttcttcctcaaatat

SEQ ID NO: 533524 - DNA, 15 bp, Homo sapiens
tcttcctcaaatata

SEQ ID NO: 533525 - DNA, 15 bp, Homo sapiens
cttcctcaaatataa

SEQ ID NO: 533526 - DNA, 15 bp, Homo sapiens
ttcctcaaatataag

SEQ ID NO: 533527 - DNA, 15 bp, Homo sapiens
tcctcaaatataagt

SEQ ID NO: 533528 - DNA, 15 bp, Homo sapiens
cctcaaatataagtc

SEQ ID NO: 533529 - DNA, 15 bp, Homo sapiens
ctcaaatataagtca

SEQ ID NO: 533530 - DNA, 15 bp, Homo sapiens
tcaaatataagtcat

SEQ ID NO: 533531 - DNA, 15 bp, Homo sapiens
caaatataagtcatg

SEQ ID NO: 533532 - DNA, 15 bp, Homo sapiens
aaatataagtcatgt

SEQ ID NO: 533533 - DNA, 15 bp, Homo sapiens
aatataagtcatgtc

SEQ ID NO: 533534 - DNA, 15 bp, Homo sapiens
atataagtcatgtct

SEQ ID NO: 533535 - DNA, 15 bp, Homo sapiens
tataagtcatgtcta

SEQ ID NO: 533536 - DNA, 15 bp, Homo sapiens
ataagtcatgtctat

SEQ ID NO: 533537 - DNA, 15 bp, Homo sapiens
taagtcatgtctata

SEQ ID NO: 533538 - DNA, 15 bp, Homo sapiens
aagtcatgtctatat

SEQ ID NO: 533539 - DNA, 15 bp, Homo sapiens
agtcatgtctatatt

SEQ ID NO: 533540 - DNA, 15 bp, Homo sapiens
gtcatgtctatattt

SEQ ID NO: 533541 - DNA, 15 bp, Homo sapiens
tcatgtctatatttc

SEQ ID NO: 533542 - DNA, 15 bp, Homo sapiens
catgtctatatttca

SEQ ID NO: 533543 - DNA, 15 bp, Homo sapiens
atgtctatatttcaa

SEQ ID NO: 533544 - DNA, 15 bp, Homo sapiens
tgtctatatttcaaa

SEQ ID NO: 533545 - DNA, 15 bp, Homo sapiens
gtctatatttcaaaa

SEQ ID NO: 533546 - DNA, 15 bp, Homo sapiens
tctatatttcaaaat

SEQ ID NO: 533547 - DNA, 15 bp, Homo sapiens
ctatatttcaaaata

SEQ ID NO: 533548 - DNA, 15 bp, Homo sapiens
tatatttcaaaatac

SEQ ID NO: 533549 - DNA, 15 bp, Homo sapiens
atatttcaaaatacc

SEQ ID NO: 533550 - DNA, 15 bp, Homo sapiens
tatttcaaaatacct

SEQ ID NO: 533551 - DNA, 15 bp, Homo sapiens
atttcaaaatacctg

SEQ ID NO: 533552 - DNA, 15 bp, Homo sapiens
tttcaaaatacctgt

SEQ ID NO: 533553 - DNA, 15 bp, Homo sapiens
ttcaaaatacctgtg

SEQ ID NO: 533554 - DNA, 15 bp, Homo sapiens
tcaaaatacctgtgg

SEQ ID NO: 533555 - DNA, 15 bp, Homo sapiens
caaaatacctgtggg

SEQ ID NO: 533556 - DNA, 15 bp, Homo sapiens
aaaatacctgtgggt

SEQ ID NO: 533557 - DNA, 15 bp, Homo sapiens
aaatacctgtgggtc

SEQ ID NO: 533558 - DNA, 15 bp, Homo sapiens
aatacctgtgggtct

SEQ ID NO: 533559 - DNA, 15 bp, Homo sapiens
atacctgtgggtctt

SEQ ID NO: 533560 - DNA, 15 bp, Homo sapiens
tacctgtgggtcttg

SEQ ID NO: 533561 - DNA, 15 bp, Homo sapiens
acctgtgggtcttgg

SEQ ID NO: 533562 - DNA, 15 bp, Homo sapiens
cctgtgggtcttggc

SEQ ID NO: 533563 - DNA, 15 bp, Homo sapiens
ctgtgggtcttggca

SEQ ID NO: 533564 - DNA, 15 bp, Homo sapiens
tgtgggtcttggcac

SEQ ID NO: 533565 - DNA, 15 bp, Homo sapiens
gtgggtcttggcact

SEQ ID NO: 533566 - DNA, 15 bp, Homo sapiens
tgggtcttggcactt

SEQ ID NO: 533567 - DNA, 15 bp, Homo sapiens
gggtcttggcactta

SEQ ID NO: 533568 - DNA, 15 bp, Homo sapiens
ggtcttggcacttag

SEQ ID NO: 533569 - DNA, 15 bp, Homo sapiens
gtcttggcacttagg

SEQ ID NO: 533570 - DNA, 15 bp, Homo sapiens
tcttggcacttaggt

SEQ ID NO: 533571 - DNA, 15 bp, Homo sapiens
cttggcacttaggtg

SEQ ID NO: 533572 - DNA, 15 bp, Homo sapiens
ttggcacttaggtgg

SEQ ID NO: 533573 - DNA, 15 bp, Homo sapiens
tggcacttaggtggt

SEQ ID NO: 533574 - DNA, 15 bp, Homo sapiens
ggcacttaggtggta

SEQ ID NO: 533575 - DNA, 15 bp, Homo sapiens
gcacttaggtggtat

SEQ ID NO: 533576 - DNA, 15 bp, Homo sapiens
cacttaggtggtatt

SEQ ID NO: 533577 - DNA, 15 bp, Homo sapiens
acttaggtggtattt

SEQ ID NO: 533578 - DNA, 15 bp, Homo sapiens
cttaggtggtatttg

SEQ ID NO: 533579 - DNA, 15 bp, Homo sapiens
ttaggtggtatttgg

SEQ ID NO: 533580 - DNA, 15 bp, Homo sapiens
taggtggtatttggt

SEQ ID NO: 533581 - DNA, 15 bp, Homo sapiens
aggtggtatttggtg

SEQ ID NO: 533582 - DNA, 15 bp, Homo sapiens
ggtggtatttggtgc

SEQ ID NO: 533583 - DNA, 15 bp, Homo sapiens
gtggtatttggtgca

SEQ ID NO: 533584 - DNA, 15 bp, Homo sapiens
tggtatttggtgcag

SEQ ID NO: 533585 - DNA, 15 bp, Homo sapiens
ggtatttggtgcagg

SEQ ID NO: 533586 - DNA, 15 bp, Homo sapiens
gtatttggtgcagga

SEQ ID NO: 533587 - DNA, 15 bp, Homo sapiens
tatttggtgcaggaa

SEQ ID NO: 533588 - DNA, 15 bp, Homo sapiens
atttggtgcaggaag

SEQ ID NO: 533589 - DNA, 15 bp, Homo sapiens
tttggtgcaggaagc

SEQ ID NO: 533590 - DNA, 15 bp, Homo sapiens
ttggtgcaggaagcc

SEQ ID NO: 533591 - DNA, 15 bp, Homo sapiens
tggtgcaggaagcca

SEQ ID NO: 533592 - DNA, 15 bp, Homo sapiens
ggtgcaggaagccag

SEQ ID NO: 533593 - DNA, 15 bp, Homo sapiens
gtgcaggaagccagg

SEQ ID NO: 533594 - DNA, 15 bp, Homo sapiens
tgcaggaagccaggg

SEQ ID NO: 533595 - DNA, 15 bp, Homo sapiens
gcaggaagccaggga

SEQ ID NO: 533596 - DNA, 15 bp, Homo sapiens
caggaagccagggaa

SEQ ID NO: 533597 - DNA, 15 bp, Homo sapiens
aggaagccagggaag

SEQ ID NO: 533598 - DNA, 15 bp, Homo sapiens
ggaagccagggaagt

SEQ ID NO: 533599 - DNA, 15 bp, Homo sapiens
gaagccagggaagtc

SEQ ID NO: 533600 - DNA, 15 bp, Homo sapiens
aagccagggaagtct

SEQ ID NO: 533601 - DNA, 15 bp, Homo sapiens
agccagggaagtctg

SEQ ID NO: 533602 - DNA, 15 bp, Homo sapiens
gccagggaagtctgg

SEQ ID NO: 533603 - DNA, 15 bp, Homo sapiens
ccagggaagtctgga

SEQ ID NO: 533604 - DNA, 15 bp, Homo sapiens
cagggaagtctggat

SEQ ID NO: 533605 - DNA, 15 bp, Homo sapiens
agggaagtctggatt

SEQ ID NO: 533606 - DNA, 15 bp, Homo sapiens
gggaagtctggattt

SEQ ID NO: 533607 - DNA, 15 bp, Homo sapiens
ggaagtctggatttc

SEQ ID NO: 533608 - DNA, 15 bp, Homo sapiens
gaagtctggatttct

SEQ ID NO: 533609 - DNA, 15 bp, Homo sapiens
aagtctggatttctt

SEQ ID NO: 533610 - DNA, 15 bp, Homo sapiens
agtctggatttcttc

SEQ ID NO: 533611 - DNA, 15 bp, Homo sapiens
gtctggatttcttca

SEQ ID NO: 533612 - DNA, 15 bp, Homo sapiens
tctggatttcttcac

SEQ ID NO: 533613 - DNA, 15 bp, Homo sapiens
ctggatttcttcaca

SEQ ID NO: 533614 - DNA, 15 bp, Homo sapiens
tggatttcttcacag

SEQ ID NO: 533615 - DNA, 15 bp, Homo sapiens
ggatttcttcacaga

SEQ ID NO: 533616 - DNA, 15 bp, Homo sapiens
gatttcttcacagaa

SEQ ID NO: 533617 - DNA, 15 bp, Homo sapiens
atttcttcacagaag

SEQ ID NO: 533618 - DNA, 15 bp, Homo sapiens
tttcttcacagaagc

SEQ ID NO: 533619 - DNA, 15 bp, Homo sapiens
ttcttcacagaagcc

SEQ ID NO: 533620 - DNA, 15 bp, Homo sapiens
tcttcacagaagccc

SEQ ID NO: 533621 - DNA, 15 bp, Homo sapiens
cttcacagaagccct

SEQ ID NO: 533622 - DNA, 15 bp, Homo sapiens
ttcacagaagccctt

SEQ ID NO: 533623 - DNA, 15 bp, Homo sapiens
tcacagaagcccttt

SEQ ID NO: 533624 - DNA, 15 bp, Homo sapiens
cacagaagcccttta

SEQ ID NO: 533625 - DNA, 15 bp, Homo sapiens
acagaagccctttat

SEQ ID NO: 533626 - DNA, 15 bp, Homo sapiens
cagaagccctttatt

SEQ ID NO: 533627 - DNA, 15 bp, Homo sapiens
agaagccctttattt

SEQ ID NO: 533628 - DNA, 15 bp, Homo sapiens
gaagccctttatttt

SEQ ID NO: 533629 - DNA, 15 bp, Homo sapiens
aagccctttattttg

SEQ ID NO: 533630 - DNA, 15 bp, Homo sapiens
agccctttattttgt

SEQ ID NO: 533631 - DNA, 15 bp, Homo sapiens
gccctttattttgtg

SEQ ID NO: 533632 - DNA, 15 bp, Homo sapiens
ccctttattttgtgc

SEQ ID NO: 533633 - DNA, 15 bp, Homo sapiens
cctttattttgtgca

SEQ ID NO: 533634 - DNA, 15 bp, Homo sapiens
ctttattttgtgcat

SEQ ID NO: 533635 - DNA, 15 bp, Homo sapiens
tttattttgtgcata

SEQ ID NO: 533636 - DNA, 15 bp, Homo sapiens
ttattttgtgcataa

SEQ ID NO: 533637 - DNA, 15 bp, Homo sapiens
tattttgtgcataat

SEQ ID NO: 533638 - DNA, 15 bp, Homo sapiens
attttgtgcataatt

SEQ ID NO: 533639 - DNA, 15 bp, Homo sapiens
ttttgtgcataattt

SEQ ID NO: 533640 - DNA, 15 bp, Homo sapiens
tttgtgcataatttg

SEQ ID NO: 533641 - DNA, 15 bp, Homo sapiens
ttgtgcataatttgc

SEQ ID NO: 533642 - DNA, 15 bp, Homo sapiens
tgtgcataatttgca

SEQ ID NO: 533643 - DNA, 15 bp, Homo sapiens
gtgcataatttgcac

SEQ ID NO: 533644 - DNA, 15 bp, Homo sapiens
tgcataatttgcaca

SEQ ID NO: 533645 - DNA, 15 bp, Homo sapiens
gcataatttgcacaa

SEQ ID NO: 533646 - DNA, 15 bp, Homo sapiens
cataatttgcacaac

SEQ ID NO: 533647 - DNA, 15 bp, Homo sapiens
ataatttgcacaact

SEQ ID NO: 533648 - DNA, 15 bp, Homo sapiens
taatttgcacaactc

SEQ ID NO: 533649 - DNA, 15 bp, Homo sapiens
aatttgcacaactct

SEQ ID NO: 533650 - DNA, 15 bp, Homo sapiens
atttgcacaactcta

SEQ ID NO: 533651 - DNA, 15 bp, Homo sapiens
tttgcacaactctat

SEQ ID NO: 533652 - DNA, 15 bp, Homo sapiens
ttgcacaactctatg

SEQ ID NO: 533653 - DNA, 15 bp, Homo sapiens
tgcacaactctatgt

SEQ ID NO: 533654 - DNA, 15 bp, Homo sapiens
gcacaactctatgtg

SEQ ID NO: 533655 - DNA, 15 bp, Homo sapiens
cacaactctatgtga

SEQ ID NO: 533656 - DNA, 15 bp, Homo sapiens
acaactctatgtgat

SEQ ID NO: 533657 - DNA, 15 bp, Homo sapiens
caactctatgtgatt

SEQ ID NO: 533658 - DNA, 15 bp, Homo sapiens
aactctatgtgatta

SEQ ID NO: 533659 - DNA, 15 bp, Homo sapiens
actctatgtgattac

SEQ ID NO: 533660 - DNA, 15 bp, Homo sapiens
ctctatgtgattaca

SEQ ID NO: 533661 - DNA, 15 bp, Homo sapiens
tctatgtgattacaa

SEQ ID NO: 533662 - DNA, 15 bp, Homo sapiens
ctatgtgattacaaa

SEQ ID NO: 533663 - DNA, 15 bp, Homo sapiens
tatgtgattacaaaa

SEQ ID NO: 533664 - DNA, 15 bp, Homo sapiens
atgtgattacaaaat

SEQ ID NO: 533665 - DNA, 15 bp, Homo sapiens
tgtgattacaaaatc

SEQ ID NO: 533666 - DNA, 15 bp, Homo sapiens
gtgattacaaaatcc

SEQ ID NO: 533667 - DNA, 15 bp, Homo sapiens
tgattacaaaatccc

SEQ ID NO: 533668 - DNA, 15 bp, Homo sapiens
gattacaaaatccca

SEQ ID NO: 533669 - DNA, 15 bp, Homo sapiens
attacaaaatcccaa

SEQ ID NO: 533670 - DNA, 15 bp, Homo sapiens
ttacaaaatcccaat

SEQ ID NO: 533671 - DNA, 15 bp, Homo sapiens
tacaaaatcccaatc

SEQ ID NO: 533672 - DNA, 15 bp, Homo sapiens
acaaaatcccaatct

SEQ ID NO: 533673 - DNA, 15 bp, Homo sapiens
caaaatcccaatctt

SEQ ID NO: 533674 - DNA, 15 bp, Homo sapiens
aaaatcccaatcttg

SEQ ID NO: 533675 - DNA, 15 bp, Homo sapiens
aaatcccaatcttgt

SEQ ID NO: 533676 - DNA, 15 bp, Homo sapiens
aatcccaatcttgtt

SEQ ID NO: 533677 - DNA, 15 bp, Homo sapiens
atcccaatcttgttg

SEQ ID NO: 533678 - DNA, 15 bp, Homo sapiens
tcccaatcttgttgc

SEQ ID NO: 533679 - DNA, 15 bp, Homo sapiens
cccaatcttgttgcc

SEQ ID NO: 533680 - DNA, 15 bp, Homo sapiens
ccaatcttgttgccc

SEQ ID NO: 533681 - DNA, 15 bp, Homo sapiens
caatcttgttgccct

SEQ ID NO: 533682 - DNA, 15 bp, Homo sapiens
aatcttgttgccctc

SEQ ID NO: 533683 - DNA, 15 bp, Homo sapiens
atcttgttgccctcc

SEQ ID NO: 533684 - DNA, 15 bp, Homo sapiens
tcttgttgccctcct

SEQ ID NO: 533685 - DNA, 15 bp, Homo sapiens
cttgttgccctcctt

SEQ ID NO: 533686 - DNA, 15 bp, Homo sapiens
ttgttgccctcctta

SEQ ID NO: 533687 - DNA, 15 bp, Homo sapiens
tgttgccctccttat

SEQ ID NO: 533688 - DNA, 15 bp, Homo sapiens
gttgccctccttata

SEQ ID NO: 533689 - DNA, 15 bp, Homo sapiens
ttgccctccttataa

SEQ ID NO: 533690 - DNA, 15 bp, Homo sapiens
tgccctccttataag

SEQ ID NO: 533691 - DNA, 15 bp, Homo sapiens
gccctccttataagt

SEQ ID NO: 533692 - DNA, 15 bp, Homo sapiens
ccctccttataagtc

SEQ ID NO: 533693 - DNA, 15 bp, Homo sapiens
cctccttataagtcc

SEQ ID NO: 533694 - DNA, 15 bp, Homo sapiens
ctccttataagtccc

SEQ ID NO: 533695 - DNA, 15 bp, Homo sapiens
tccttataagtccct

SEQ ID NO: 533696 - DNA, 15 bp, Homo sapiens
ccttataagtccctc

SEQ ID NO: 533697 - DNA, 15 bp, Homo sapiens
cttataagtccctcc

SEQ ID NO: 533698 - DNA, 15 bp, Homo sapiens
ttataagtccctcca

SEQ ID NO: 533699 - DNA, 15 bp, Homo sapiens
tataagtccctccat

SEQ ID NO: 533700 - DNA, 15 bp, Homo sapiens
ataagtccctccata

SEQ ID NO: 533701 - DNA, 15 bp, Homo sapiens
taagtccctccatat

SEQ ID NO: 533702 - DNA, 15 bp, Homo sapiens
aagtccctccatatt

SEQ ID NO: 533703 - DNA, 15 bp, Homo sapiens
agtccctccatatta

SEQ ID NO: 533704 - DNA, 15 bp, Homo sapiens
gtccctccatattat

SEQ ID NO: 533705 - DNA, 15 bp, Homo sapiens
tccctccatattata

SEQ ID NO: 533706 - DNA, 15 bp, Homo sapiens
ccctccatattatat

SEQ ID NO: 533707 - DNA, 15 bp, Homo sapiens
cctccatattatatt

SEQ ID NO: 533708 - DNA, 15 bp, Homo sapiens
ctccatattatattc

SEQ ID NO: 533709 - DNA, 15 bp, Homo sapiens
tccatattatattct

SEQ ID NO: 533710 - DNA, 15 bp, Homo sapiens
ccatattatattctc

SEQ ID NO: 533711 - DNA, 15 bp, Homo sapiens
catattatattctct

SEQ ID NO: 533712 - DNA, 15 bp, Homo sapiens
atattatattctctt

SEQ ID NO: 533713 - DNA, 15 bp, Homo sapiens
tattatattctcttc

SEQ ID NO: 533714 - DNA, 15 bp, Homo sapiens
attatattctcttct

SEQ ID NO: 533715 - DNA, 15 bp, Homo sapiens
ttatattctcttctc

SEQ ID NO: 533716 - DNA, 15 bp, Homo sapiens
tatattctcttctct

SEQ ID NO: 533717 - DNA, 15 bp, Homo sapiens
atattctcttctctt

SEQ ID NO: 533718 - DNA, 15 bp, Homo sapiens
tattctcttctcttt

SEQ ID NO: 533719 - DNA, 15 bp, Homo sapiens
attctcttctctttt

SEQ ID NO: 533720 - DNA, 15 bp, Homo sapiens
ttctcttctcttttc

SEQ ID NO: 533721 - DNA, 15 bp, Homo sapiens
tctcttctcttttcc

SEQ ID NO: 533722 - DNA, 15 bp, Homo sapiens
ctcttctcttttcca

SEQ ID NO: 533723 - DNA, 15 bp, Homo sapiens
tcttctcttttccaa

SEQ ID NO: 533724 - DNA, 15 bp, Homo sapiens
cttctcttttccaag

SEQ ID NO: 533725 - DNA, 15 bp, Homo sapiens
ttctcttttccaaga

SEQ ID NO: 533726 - DNA, 15 bp, Homo sapiens
tctcttttccaagaa

SEQ ID NO: 533727 - DNA, 15 bp, Homo sapiens
ctcttttccaagaac

SEQ ID NO: 533728 - DNA, 15 bp, Homo sapiens
tcttttccaagaacg

SEQ ID NO: 533729 - DNA, 15 bp, Homo sapiens
cttttccaagaacgg

SEQ ID NO: 533730 - DNA, 15 bp, Homo sapiens
ttttccaagaacggc

SEQ ID NO: 533731 - DNA, 15 bp, Homo sapiens
tttccaagaacggct

SEQ ID NO: 533732 - DNA, 15 bp, Homo sapiens
ttccaagaacggctc

SEQ ID NO: 533733 - DNA, 15 bp, Homo sapiens
tccaagaacggctcc

SEQ ID NO: 533734 - DNA, 15 bp, Homo sapiens
ccaagaacggctcct

SEQ ID NO: 533735 - DNA, 15 bp, Homo sapiens
caagaacggctcctg

SEQ ID NO: 533736 - DNA, 15 bp, Homo sapiens
aagaacggctcctgg

SEQ ID NO: 533737 - DNA, 15 bp, Homo sapiens
agaacggctcctgga

SEQ ID NO: 533738 - DNA, 15 bp, Homo sapiens
gaacggctcctggaa

SEQ ID NO: 533739 - DNA, 15 bp, Homo sapiens
aacggctcctggaaa

SEQ ID NO: 533740 - DNA, 15 bp, Homo sapiens
acggctcctggaaag

SEQ ID NO: 533741 - DNA, 15 bp, Homo sapiens
cggctcctggaaagg

SEQ ID NO: 533742 - DNA, 15 bp, Homo sapiens
ggctcctggaaaggc

SEQ ID NO: 533743 - DNA, 15 bp, Homo sapiens
gctcctggaaaggct

SEQ ID NO: 533744 - DNA, 15 bp, Homo sapiens
ctcctggaaaggctc

SEQ ID NO: 533745 - DNA, 15 bp, Homo sapiens
tcctggaaaggctct

SEQ ID NO: 533746 - DNA, 15 bp, Homo sapiens
cctggaaaggctctg

SEQ ID NO: 533747 - DNA, 15 bp, Homo sapiens
ctggaaaggctctga

SEQ ID NO: 533748 - DNA, 15 bp, Homo sapiens
tggaaaggctctgac

SEQ ID NO: 533749 - DNA, 15 bp, Homo sapiens
ggaaaggctctgacc

SEQ ID NO: 533750 - DNA, 15 bp, Homo sapiens
gaaaggctctgaccg

SEQ ID NO: 533751 - DNA, 15 bp, Homo sapiens
aaaggctctgaccgt

SEQ ID NO: 533752 - DNA, 15 bp, Homo sapiens
aaggctctgaccgtc

SEQ ID NO: 533753 - DNA, 15 bp, Homo sapiens
aggctctgaccgtca

SEQ ID NO: 533754 - DNA, 15 bp, Homo sapiens
ggctctgaccgtcac

SEQ ID NO: 533755 - DNA, 15 bp, Homo sapiens
gctctgaccgtcaca

SEQ ID NO: 533756 - DNA, 15 bp, Homo sapiens
ctctgaccgtcacat

SEQ ID NO: 533757 - DNA, 15 bp, Homo sapiens
tctgaccgtcacatt

SEQ ID NO: 533758 - DNA, 15 bp, Homo sapiens
ctgaccgtcacattg

SEQ ID NO: 533759 - DNA, 15 bp, Homo sapiens
tgaccgtcacattgg

SEQ ID NO: 533760 - DNA, 15 bp, Homo sapiens
gaccgtcacattggg

SEQ ID NO: 533761 - DNA, 15 bp, Homo sapiens
accgtcacattggga

SEQ ID NO: 533762 - DNA, 15 bp, Homo sapiens
ccgtcacattgggag

SEQ ID NO: 533763 - DNA, 15 bp, Homo sapiens
cgtcacattgggaga

SEQ ID NO: 533764 - DNA, 15 bp, Homo sapiens
gtcacattgggagaa

SEQ ID NO: 533765 - DNA, 15 bp, Homo sapiens
tcacattgggagaag

SEQ ID NO: 533766 - DNA, 15 bp, Homo sapiens
cacattgggagaagc

SEQ ID NO: 533767 - DNA, 15 bp, Homo sapiens
acattgggagaagca

SEQ ID NO: 533768 - DNA, 15 bp, Homo sapiens
cattgggagaagcaa

SEQ ID NO: 533769 - DNA, 15 bp, Homo sapiens
attgggagaagcaat

SEQ ID NO: 533770 - DNA, 15 bp, Homo sapiens
ttgggagaagcaata

SEQ ID NO: 533771 - DNA, 15 bp, Homo sapiens
tgggagaagcaatat

SEQ ID NO: 533772 - DNA, 15 bp, Homo sapiens
gggagaagcaatatt

SEQ ID NO: 533773 - DNA, 15 bp, Homo sapiens
ggagaagcaatattt

SEQ ID NO: 533774 - DNA, 15 bp, Homo sapiens
gagaagcaatatttg

SEQ ID NO: 533775 - DNA, 15 bp, Homo sapiens
agaagcaatatttgc

SEQ ID NO: 533776 - DNA, 15 bp, Homo sapiens
gaagcaatatttgct

SEQ ID NO: 533777 - DNA, 15 bp, Homo sapiens
aagcaatatttgctg

SEQ ID NO: 533778 - DNA, 15 bp, Homo sapiens
agcaatatttgctgg

SEQ ID NO: 533779 - DNA, 15 bp, Homo sapiens
gcaatatttgctgga

SEQ ID NO: 533780 - DNA, 15 bp, Homo sapiens
caatatttgctggag

SEQ ID NO: 533781 - DNA, 15 bp, Homo sapiens
aatatttgctggagc

SEQ ID NO: 533782 - DNA, 15 bp, Homo sapiens
atatttgctggagcc

SEQ ID NO: 533783 - DNA, 15 bp, Homo sapiens
tatttgctggagcca

SEQ ID NO: 533784 - DNA, 15 bp, Homo sapiens
atttgctggagccac

SEQ ID NO: 533785 - DNA, 15 bp, Homo sapiens
tttgctggagccacg

SEQ ID NO: 533786 - DNA, 15 bp, Homo sapiens
ttgctggagccacgc

SEQ ID NO: 533787 - DNA, 15 bp, Homo sapiens
tgctggagccacgct

SEQ ID NO: 533788 - DNA, 15 bp, Homo sapiens
gctggagccacgcta

SEQ ID NO: 533789 - DNA, 15 bp, Homo sapiens
ctggagccacgctac

SEQ ID NO: 533790 - DNA, 15 bp, Homo sapiens
tggagccacgctact

SEQ ID NO: 533791 - DNA, 15 bp, Homo sapiens
ggagccacgctactc

SEQ ID NO: 533792 - DNA, 15 bp, Homo sapiens
gagccacgctactct

SEQ ID NO: 533793 - DNA, 15 bp, Homo sapiens
agccacgctactctt

SEQ ID NO: 533794 - DNA, 15 bp, Homo sapiens
gccacgctactcttt

SEQ ID NO: 533795 - DNA, 15 bp, Homo sapiens
ccacgctactctttt

SEQ ID NO: 533796 - DNA, 15 bp, Homo sapiens
cacgctactcttttg

SEQ ID NO: 533797 - DNA, 15 bp, Homo sapiens
acgctactcttttgt

SEQ ID NO: 533798 - DNA, 15 bp, Homo sapiens
cgctactcttttgtc

SEQ ID NO: 533799 - DNA, 15 bp, Homo sapiens
gctactcttttgtca

SEQ ID NO: 533800 - DNA, 15 bp, Homo sapiens
ctactcttttgtcac

SEQ ID NO: 533801 - DNA, 15 bp, Homo sapiens
tactcttttgtcaca

SEQ ID NO: 533802 - DNA, 15 bp, Homo sapiens
actcttttgtcacag

SEQ ID NO: 533803 - DNA, 15 bp, Homo sapiens
ctcttttgtcacaga

SEQ ID NO: 533804 - DNA, 15 bp, Homo sapiens
tcttttgtcacagac

SEQ ID NO: 533805 - DNA, 15 bp, Homo sapiens
cttttgtcacagaca

SEQ ID NO: 533806 - DNA, 15 bp, Homo sapiens
ttttgtcacagacag

SEQ ID NO: 533807 - DNA, 15 bp, Homo sapiens
tttgtcacagacagg

SEQ ID NO: 533808 - DNA, 15 bp, Homo sapiens
ttgtcacagacaggt

SEQ ID NO: 533809 - DNA, 15 bp, Homo sapiens
tgtcacagacaggtt

SEQ ID NO: 533810 - DNA, 15 bp, Homo sapiens
gtcacagacaggtta

SEQ ID NO: 533811 - DNA, 15 bp, Homo sapiens
tcacagacaggttaa

SEQ ID NO: 533812 - DNA, 15 bp, Homo sapiens
cacagacaggttaac

SEQ ID NO: 533813 - DNA, 15 bp, Homo sapiens
acagacaggttaact

SEQ ID NO: 533814 - DNA, 15 bp, Homo sapiens
cagacaggttaactt

SEQ ID NO: 533815 - DNA, 15 bp, Homo sapiens
agacaggttaacttg

SEQ ID NO: 533816 - DNA, 15 bp, Homo sapiens
gacaggttaacttgc

SEQ ID NO: 533817 - DNA, 15 bp, Homo sapiens
acaggttaacttgca

SEQ ID NO: 533818 - DNA, 15 bp, Homo sapiens
caggttaacttgcag

SEQ ID NO: 533819 - DNA, 15 bp, Homo sapiens
aggttaacttgcagt

SEQ ID NO: 533820 - DNA, 15 bp, Homo sapiens
ggttaacttgcagta

SEQ ID NO: 533821 - DNA, 15 bp, Homo sapiens
gttaacttgcagtat

SEQ ID NO: 533822 - DNA, 15 bp, Homo sapiens
ttaacttgcagtatt

SEQ ID NO: 533823 - DNA, 15 bp, Homo sapiens
taacttgcagtatta

SEQ ID NO: 533824 - DNA, 15 bp, Homo sapiens
aacttgcagtattaa

SEQ ID NO: 533825 - DNA, 15 bp, Homo sapiens
acttgcagtattaaa

SEQ ID NO: 533826 - DNA, 15 bp, Homo sapiens
cttgcagtattaaac

SEQ ID NO: 533827 - DNA, 15 bp, Homo sapiens
ttgcagtattaaaca

SEQ ID NO: 533828 - DNA, 15 bp, Homo sapiens
tgcagtattaaacaa

SEQ ID NO: 533829 - DNA, 15 bp, Homo sapiens
gcagtattaaacaac

SEQ ID NO: 533830 - DNA, 15 bp, Homo sapiens
cagtattaaacaaca

SEQ ID NO: 533831 - DNA, 15 bp, Homo sapiens
agtattaaacaacac

SEQ ID NO: 533832 - DNA, 15 bp, Homo sapiens
gtattaaacaacacc

SEQ ID NO: 533833 - DNA, 15 bp, Homo sapiens
tattaaacaacaccc

SEQ ID NO: 533834 - DNA, 15 bp, Homo sapiens
attaaacaacacccg

SEQ ID NO: 533835 - DNA, 15 bp, Homo sapiens
ttaaacaacacccga

SEQ ID NO: 533836 - DNA, 15 bp, Homo sapiens
taaacaacacccgac

SEQ ID NO: 533837 - DNA, 15 bp, Homo sapiens
aaacaacacccgacc

SEQ ID NO: 533838 - DNA, 15 bp, Homo sapiens
aacaacacccgaccc

SEQ ID NO: 533839 - DNA, 15 bp, Homo sapiens
acaacacccgaccca

SEQ ID NO: 533840 - DNA, 15 bp, Homo sapiens
caacacccgacccac

SEQ ID NO: 533841 - DNA, 15 bp, Homo sapiens
aacacccgacccacg

SEQ ID NO: 533842 - DNA, 15 bp, Homo sapiens
acacccgacccacgc

SEQ ID NO: 533843 - DNA, 15 bp, Homo sapiens
cacccgacccacgcc

SEQ ID NO: 533844 - DNA, 15 bp, Homo sapiens
acccgacccacgccc

SEQ ID NO: 533845 - DNA, 15 bp, Homo sapiens
cccgacccacgcccc

SEQ ID NO: 533846 - DNA, 15 bp, Homo sapiens
ccgacccacgcccct

SEQ ID NO: 533847 - DNA, 15 bp, Homo sapiens
cgacccacgcccctg

SEQ ID NO: 533848 - DNA, 15 bp, Homo sapiens
gacccacgcccctgc

SEQ ID NO: 533849 - DNA, 15 bp, Homo sapiens
acccacgcccctgct

SEQ ID NO: 533850 - DNA, 15 bp, Homo sapiens
cccacgcccctgctt

SEQ ID NO: 533851 - DNA, 15 bp, Homo sapiens
ccacgcccctgcttc

SEQ ID NO: 533852 - DNA, 15 bp, Homo sapiens
cacgcccctgcttcc

SEQ ID NO: 533853 - DNA, 15 bp, Homo sapiens
acgcccctgcttccc

SEQ ID NO: 533854 - DNA, 15 bp, Homo sapiens
cgcccctgcttccca

SEQ ID NO: 533855 - DNA, 15 bp, Homo sapiens
gcccctgcttcccac

SEQ ID NO: 533856 - DNA, 15 bp, Homo sapiens
cccctgcttcccaca

SEQ ID NO: 533857 - DNA, 15 bp, Homo sapiens
ccctgcttcccacac

SEQ ID NO: 533858 - DNA, 15 bp, Homo sapiens
cctgcttcccacact

SEQ ID NO: 533859 - DNA, 15 bp, Homo sapiens
ctgcttcccacactg

SEQ ID NO: 533860 - DNA, 15 bp, Homo sapiens
tgcttcccacactga

SEQ ID NO: 533861 - DNA, 15 bp, Homo sapiens
gcttcccacactgat

SEQ ID NO: 533862 - DNA, 15 bp, Homo sapiens
cttcccacactgata

SEQ ID NO: 533863 - DNA, 15 bp, Homo sapiens
ttcccacactgatat

SEQ ID NO: 533864 - DNA, 15 bp, Homo sapiens
tcccacactgatatt

SEQ ID NO: 533865 - DNA, 15 bp, Homo sapiens
cccacactgatatta

SEQ ID NO: 533866 - DNA, 15 bp, Homo sapiens
ccacactgatattat

SEQ ID NO: 533867 - DNA, 15 bp, Homo sapiens
cacactgatattatc

SEQ ID NO: 533868 - DNA, 15 bp, Homo sapiens
acactgatattatca

SEQ ID NO: 533869 - DNA, 15 bp, Homo sapiens
cactgatattatcag

SEQ ID NO: 533870 - DNA, 15 bp, Homo sapiens
actgatattatcagt

SEQ ID NO: 533871 - DNA, 15 bp, Homo sapiens
ctgatattatcagtg

SEQ ID NO: 533872 - DNA, 15 bp, Homo sapiens
tgatattatcagtgt

SEQ ID NO: 533873 - DNA, 15 bp, Homo sapiens
gatattatcagtgtt

SEQ ID NO: 533874 - DNA, 15 bp, Homo sapiens
atattatcagtgtta

SEQ ID NO: 533875 - DNA, 15 bp, Homo sapiens
tattatcagtgttaa

SEQ ID NO: 533876 - DNA, 15 bp, Homo sapiens
attatcagtgttaaa

SEQ ID NO: 533877 - DNA, 15 bp, Homo sapiens
ttatcagtgttaaaa

SEQ ID NO: 533878 - DNA, 15 bp, Homo sapiens
tatcagtgttaaaaa

SEQ ID NO: 533879 - DNA, 15 bp, Homo sapiens
atcagtgttaaaaag

SEQ ID NO: 533880 - DNA, 15 bp, Homo sapiens
tcagtgttaaaaagc

SEQ ID NO: 533881 - DNA, 15 bp, Homo sapiens
cagtgttaaaaagca

SEQ ID NO: 533882 - DNA, 15 bp, Homo sapiens
agtgttaaaaagcac

SEQ ID NO: 533883 - DNA, 15 bp, Homo sapiens
gtgttaaaaagcaca

SEQ ID NO: 533884 - DNA, 15 bp, Homo sapiens
tgttaaaaagcacat

SEQ ID NO: 533885 - DNA, 15 bp, Homo sapiens
gttaaaaagcacatg

SEQ ID NO: 533886 - DNA, 15 bp, Homo sapiens
ttaaaaagcacatga

SEQ ID NO: 533887 - DNA, 15 bp, Homo sapiens
taaaaagcacatgat

SEQ ID NO: 533888 - DNA, 15 bp, Homo sapiens
aaaaagcacatgata

SEQ ID NO: 533889 - DNA, 15 bp, Homo sapiens
aaaagcacatgatac

SEQ ID NO: 533890 - DNA, 15 bp, Homo sapiens
aaagcacatgatact

SEQ ID NO: 533891 - DNA, 15 bp, Homo sapiens
aagcacatgatactg

SEQ ID NO: 533892 - DNA, 15 bp, Homo sapiens
agcacatgatactgt

SEQ ID NO: 533893 - DNA, 15 bp, Homo sapiens
gcacatgatactgtt

SEQ ID NO: 533894 - DNA, 15 bp, Homo sapiens
cacatgatactgttt

SEQ ID NO: 533895 - DNA, 15 bp, Homo sapiens
acatgatactgtttg

SEQ ID NO: 533896 - DNA, 15 bp, Homo sapiens
catgatactgtttgc

SEQ ID NO: 533897 - DNA, 15 bp, Homo sapiens
atgatactgtttgct

SEQ ID NO: 533898 - DNA, 15 bp, Homo sapiens
tgatactgtttgctg

SEQ ID NO: 533899 - DNA, 15 bp, Homo sapiens
gatactgtttgctgc

SEQ ID NO: 533900 - DNA, 15 bp, Homo sapiens
atactgtttgctgct

SEQ ID NO: 533901 - DNA, 15 bp, Homo sapiens
tactgtttgctgctt

SEQ ID NO: 533902 - DNA, 15 bp, Homo sapiens
actgtttgctgcttt

SEQ ID NO: 533903 - DNA, 15 bp, Homo sapiens
ctgtttgctgcttta

SEQ ID NO: 533904 - DNA, 15 bp, Homo sapiens
tgtttgctgctttaa

SEQ ID NO: 533905 - DNA, 15 bp, Homo sapiens
gtttgctgctttaag

SEQ ID NO: 533906 - DNA, 15 bp, Homo sapiens
tttgctgctttaaga

SEQ ID NO: 533907 - DNA, 15 bp, Homo sapiens
ttgctgctttaagaa

SEQ ID NO: 533908 - DNA, 15 bp, Homo sapiens
tgctgctttaagaaa

SEQ ID NO: 533909 - DNA, 15 bp, Homo sapiens
gctgctttaagaaat

SEQ ID NO: 533910 - DNA, 15 bp, Homo sapiens
ctgctttaagaaatg

SEQ ID NO: 533911 - DNA, 15 bp, Homo sapiens
tgctttaagaaatga

SEQ ID NO: 533912 - DNA, 15 bp, Homo sapiens
gctttaagaaatgac

SEQ ID NO: 533913 - DNA, 15 bp, Homo sapiens
ctttaagaaatgacc

SEQ ID NO: 533914 - DNA, 15 bp, Homo sapiens
tttaagaaatgacct

SEQ ID NO: 533915 - DNA, 15 bp, Homo sapiens
ttaagaaatgacctg

SEQ ID NO: 533916 - DNA, 15 bp, Homo sapiens
taagaaatgacctgg

SEQ ID NO: 533917 - DNA, 15 bp, Homo sapiens
aagaaatgacctggt

SEQ ID NO: 533918 - DNA, 15 bp, Homo sapiens
agaaatgacctggtt

SEQ ID NO: 533919 - DNA, 15 bp, Homo sapiens
gaaatgacctggttt

SEQ ID NO: 533920 - DNA, 15 bp, Homo sapiens
aaatgacctggtttc

SEQ ID NO: 533921 - DNA, 15 bp, Homo sapiens
aatgacctggtttca

SEQ ID NO: 533922 - DNA, 15 bp, Homo sapiens
atgacctggtttcaa

SEQ ID NO: 533923 - DNA, 15 bp, Homo sapiens
tgacctggtttcaaa

SEQ ID NO: 533924 - DNA, 15 bp, Homo sapiens
gacctggtttcaaaa

SEQ ID NO: 533925 - DNA, 15 bp, Homo sapiens
acctggtttcaaaaa

SEQ ID NO: 533926 - DNA, 15 bp, Homo sapiens
cctggtttcaaaaac

SEQ ID NO: 533927 - DNA, 15 bp, Homo sapiens
ctggtttcaaaaact

SEQ ID NO: 533928 - DNA, 15 bp, Homo sapiens
tggtttcaaaaactg

SEQ ID NO: 533929 - DNA, 15 bp, Homo sapiens
ggtttcaaaaactgc

SEQ ID NO: 533930 - DNA, 15 bp, Homo sapiens
gtttcaaaaactgca

SEQ ID NO: 533931 - DNA, 15 bp, Homo sapiens
tttcaaaaactgcat

SEQ ID NO: 533932 - DNA, 15 bp, Homo sapiens
ttcaaaaactgcatc

SEQ ID NO: 533933 - DNA, 15 bp, Homo sapiens
tcaaaaactgcatct

SEQ ID NO: 533934 - DNA, 15 bp, Homo sapiens
caaaaactgcatctt

SEQ ID NO: 533935 - DNA, 15 bp, Homo sapiens
aaaaactgcatctta

SEQ ID NO: 533936 - DNA, 15 bp, Homo sapiens
aaaactgcatcttaa

SEQ ID NO: 533937 - DNA, 15 bp, Homo sapiens
aaactgcatcttaat

SEQ ID NO: 533938 - DNA, 15 bp, Homo sapiens
aactgcatcttaatt

SEQ ID NO: 533939 - DNA, 15 bp, Homo sapiens
actgcatcttaattt

SEQ ID NO: 533940 - DNA, 15 bp, Homo sapiens
ctgcatcttaatttt

SEQ ID NO: 533941 - DNA, 15 bp, Homo sapiens
tgcatcttaatttta

SEQ ID NO: 533942 - DNA, 15 bp, Homo sapiens
gcatcttaattttag

SEQ ID NO: 533943 - DNA, 15 bp, Homo sapiens
catcttaattttagg

SEQ ID NO: 533944 - DNA, 15 bp, Homo sapiens
atcttaattttaggc

SEQ ID NO: 533945 - DNA, 15 bp, Homo sapiens
tcttaattttaggct

SEQ ID NO: 533946 - DNA, 15 bp, Homo sapiens
cttaattttaggctg

SEQ ID NO: 533947 - DNA, 15 bp, Homo sapiens
ttaattttaggctgg

SEQ ID NO: 533948 - DNA, 15 bp, Homo sapiens
taattttaggctggc

SEQ ID NO: 533949 - DNA, 15 bp, Homo sapiens
aattttaggctggct

SEQ ID NO: 533950 - DNA, 15 bp, Homo sapiens
attttaggctggctt

SEQ ID NO: 533951 - DNA, 15 bp, Homo sapiens
ttttaggctggcttc

SEQ ID NO: 533952 - DNA, 15 bp, Homo sapiens
tttaggctggcttca

SEQ ID NO: 533953 - DNA, 15 bp, Homo sapiens
ttaggctggcttcag

SEQ ID NO: 533954 - DNA, 15 bp, Homo sapiens
taggctggcttcagt

SEQ ID NO: 533955 - DNA, 15 bp, Homo sapiens
aggctggcttcagtt

SEQ ID NO: 533956 - DNA, 15 bp, Homo sapiens
ggctggcttcagttg

SEQ ID NO: 533957 - DNA, 15 bp, Homo sapiens
gctggcttcagttga

SEQ ID NO: 533958 - DNA, 15 bp, Homo sapiens
ctggcttcagttgaa

SEQ ID NO: 533959 - DNA, 15 bp, Homo sapiens
tggcttcagttgaat

SEQ ID NO: 533960 - DNA, 15 bp, Homo sapiens
ggcttcagttgaatc

SEQ ID NO: 533961 - DNA, 15 bp, Homo sapiens
gcttcagttgaatcc

SEQ ID NO: 533962 - DNA, 15 bp, Homo sapiens
cttcagttgaatcca

SEQ ID NO: 533963 - DNA, 15 bp, Homo sapiens
ttcagttgaatccag

SEQ ID NO: 533964 - DNA, 15 bp, Homo sapiens
tcagttgaatccagt

SEQ ID NO: 533965 - DNA, 15 bp, Homo sapiens
cagttgaatccagtt

SEQ ID NO: 533966 - DNA, 15 bp, Homo sapiens
agttgaatccagtta

SEQ ID NO: 533967 - DNA, 15 bp, Homo sapiens
gttgaatccagttaa

SEQ ID NO: 533968 - DNA, 15 bp, Homo sapiens
ttgaatccagttaat

SEQ ID NO: 533969 - DNA, 15 bp, Homo sapiens
tgaatccagttaatt

SEQ ID NO: 533970 - DNA, 15 bp, Homo sapiens
gaatccagttaattt

SEQ ID NO: 533971 - DNA, 15 bp, Homo sapiens
aatccagttaatttt

SEQ ID NO: 533972 - DNA, 15 bp, Homo sapiens
atccagttaatttta

SEQ ID NO: 533973 - DNA, 15 bp, Homo sapiens
tccagttaattttat

SEQ ID NO: 533974 - DNA, 15 bp, Homo sapiens
ccagttaattttatc

SEQ ID NO: 533975 - DNA, 15 bp, Homo sapiens
cagttaattttatct

SEQ ID NO: 533976 - DNA, 15 bp, Homo sapiens
agttaattttatcta

SEQ ID NO: 533977 - DNA, 15 bp, Homo sapiens
gttaattttatctat

SEQ ID NO: 533978 - DNA, 15 bp, Homo sapiens
ttaattttatctatg

SEQ ID NO: 533979 - DNA, 15 bp, Homo sapiens
taattttatctatga

SEQ ID NO: 533980 - DNA, 15 bp, Homo sapiens
aattttatctatgaa

SEQ ID NO: 533981 - DNA, 15 bp, Homo sapiens
attttatctatgaat

SEQ ID NO: 533982 - DNA, 15 bp, Homo sapiens
ttttatctatgaatg

SEQ ID NO: 533983 - DNA, 15 bp, Homo sapiens
tttatctatgaatgc

SEQ ID NO: 533984 - DNA, 15 bp, Homo sapiens
ttatctatgaatgcc

SEQ ID NO: 533985 - DNA, 15 bp, Homo sapiens
tatctatgaatgcct

SEQ ID NO: 533986 - DNA, 15 bp, Homo sapiens
atctatgaatgcctg

SEQ ID NO: 533987 - DNA, 15 bp, Homo sapiens
tctatgaatgcctga

SEQ ID NO: 533988 - DNA, 15 bp, Homo sapiens
ctatgaatgcctgac

SEQ ID NO: 533989 - DNA, 15 bp, Homo sapiens
tatgaatgcctgact

SEQ ID NO: 533990 - DNA, 15 bp, Homo sapiens
atgaatgcctgactc

SEQ ID NO: 533991 - DNA, 15 bp, Homo sapiens
tgaatgcctgactca

SEQ ID NO: 533992 - DNA, 15 bp, Homo sapiens
gaatgcctgactcag

SEQ ID NO: 533993 - DNA, 15 bp, Homo sapiens
aatgcctgactcagt

SEQ ID NO: 533994 - DNA, 15 bp, Homo sapiens
atgcctgactcagtg

SEQ ID NO: 533995 - DNA, 15 bp, Homo sapiens
tgcctgactcagtgc

SEQ ID NO: 533996 - DNA, 15 bp, Homo sapiens
gcctgactcagtgca

SEQ ID NO: 533997 - DNA, 15 bp, Homo sapiens
cctgactcagtgcac

SEQ ID NO: 533998 - DNA, 15 bp, Homo sapiens
ctgactcagtgcacg

SEQ ID NO: 533999 - DNA, 15 bp, Homo sapiens
tgactcagtgcacgt

SEQ ID NO: 534000 - DNA, 15 bp, Homo sapiens
gactcagtgcacgtg

SEQ ID NO: 534001 - DNA, 15 bp, Homo sapiens
actcagtgcacgtgg

SEQ ID NO: 534002 - DNA, 15 bp, Homo sapiens
ctcagtgcacgtggt

SEQ ID NO: 534003 - DNA, 15 bp, Homo sapiens
tcagtgcacgtggtg

SEQ ID NO: 534004 - DNA, 15 bp, Homo sapiens
cagtgcacgtggtgt

SEQ ID NO: 534005 - DNA, 15 bp, Homo sapiens
agtgcacgtggtgtc

SEQ ID NO: 534006 - DNA, 15 bp, Homo sapiens
gtgcacgtggtgtca

SEQ ID NO: 534007 - DNA, 15 bp, Homo sapiens
tgcacgtggtgtcat

SEQ ID NO: 534008 - DNA, 15 bp, Homo sapiens
gcacgtggtgtcatt

SEQ ID NO: 534009 - DNA, 15 bp, Homo sapiens
cacgtggtgtcatta

SEQ ID NO: 534010 - DNA, 15 bp, Homo sapiens
acgtggtgtcattac

SEQ ID NO: 534011 - DNA, 15 bp, Homo sapiens
cgtggtgtcattaca

SEQ ID NO: 534012 - DNA, 15 bp, Homo sapiens
gtggtgtcattacag

SEQ ID NO: 534013 - DNA, 15 bp, Homo sapiens
tggtgtcattacaga

SEQ ID NO: 534014 - DNA, 15 bp, Homo sapiens
ggtgtcattacagat

SEQ ID NO: 534015 - DNA, 15 bp, Homo sapiens
gtgtcattacagatg

SEQ ID NO: 534016 - DNA, 15 bp, Homo sapiens
tgtcattacagatgg

SEQ ID NO: 534017 - DNA, 15 bp, Homo sapiens
gtcattacagatggg

SEQ ID NO: 534018 - DNA, 15 bp, Homo sapiens
tcattacagatgggg

SEQ ID NO: 534019 - DNA, 15 bp, Homo sapiens
cattacagatgggga

SEQ ID NO: 534020 - DNA, 15 bp, Homo sapiens
attacagatggggag

SEQ ID NO: 534021 - DNA, 15 bp, Homo sapiens
ttacagatggggaga

SEQ ID NO: 534022 - DNA, 15 bp, Homo sapiens
tacagatggggagac

SEQ ID NO: 534023 - DNA, 15 bp, Homo sapiens
acagatggggagaca

SEQ ID NO: 534024 - DNA, 15 bp, Homo sapiens
cagatggggagacag

SEQ ID NO: 534025 - DNA, 15 bp, Homo sapiens
agatggggagacaga

SEQ ID NO: 534026 - DNA, 15 bp, Homo sapiens
gatggggagacagag

SEQ ID NO: 534027 - DNA, 15 bp, Homo sapiens
atggggagacagaga

SEQ ID NO: 534028 - DNA, 15 bp, Homo sapiens
tggggagacagagaa

SEQ ID NO: 534029 - DNA, 15 bp, Homo sapiens
ggggagacagagaag

SEQ ID NO: 534030 - DNA, 15 bp, Homo sapiens
gggagacagagaaga

SEQ ID NO: 534031 - DNA, 15 bp, Homo sapiens
ggagacagagaagac

SEQ ID NO: 534032 - DNA, 15 bp, Homo sapiens
gagacagagaagaca

SEQ ID NO: 534033 - DNA, 15 bp, Homo sapiens
agacagagaagacag

SEQ ID NO: 534034 - DNA, 15 bp, Homo sapiens
gacagagaagacaga

SEQ ID NO: 534035 - DNA, 15 bp, Homo sapiens
acagagaagacagac

SEQ ID NO: 534036 - DNA, 15 bp, Homo sapiens
cagagaagacagaca

SEQ ID NO: 534037 - DNA, 15 bp, Homo sapiens
agagaagacagacat

SEQ ID NO: 534038 - DNA, 15 bp, Homo sapiens
gagaagacagacatg

SEQ ID NO: 534039 - DNA, 15 bp, Homo sapiens
agaagacagacatgg

SEQ ID NO: 534040 - DNA, 15 bp, Homo sapiens
gaagacagacatggt

SEQ ID NO: 534041 - DNA, 15 bp, Homo sapiens
aagacagacatggtg

SEQ ID NO: 534042 - DNA, 15 bp, Homo sapiens
agacagacatggtga

SEQ ID NO: 534043 - DNA, 15 bp, Homo sapiens
gacagacatggtgaa

SEQ ID NO: 534044 - DNA, 15 bp, Homo sapiens
acagacatggtgaat

SEQ ID NO: 534045 - DNA, 15 bp, Homo sapiens
cagacatggtgaatg

SEQ ID NO: 534046 - DNA, 15 bp, Homo sapiens
agacatggtgaatga

SEQ ID NO: 534047 - DNA, 15 bp, Homo sapiens
gacatggtgaatgaa

SEQ ID NO: 534048 - DNA, 15 bp, Homo sapiens
acatggtgaatgaag

SEQ ID NO: 534049 - DNA, 15 bp, Homo sapiens
catggtgaatgaagg

SEQ ID NO: 534050 - DNA, 15 bp, Homo sapiens
atggtgaatgaaggt

SEQ ID NO: 534051 - DNA, 15 bp, Homo sapiens
tggtgaatgaaggtg

SEQ ID NO: 534052 - DNA, 15 bp, Homo sapiens
ggtgaatgaaggtgg

SEQ ID NO: 534053 - DNA, 15 bp, Homo sapiens
gtgaatgaaggtggg

SEQ ID NO: 534054 - DNA, 15 bp, Homo sapiens
tgaatgaaggtggga

SEQ ID NO: 534055 - DNA, 15 bp, Homo sapiens
gaatgaaggtgggaa

SEQ ID NO: 534056 - DNA, 15 bp, Homo sapiens
aatgaaggtgggaaa

SEQ ID NO: 534057 - DNA, 15 bp, Homo sapiens
atgaaggtgggaaat

SEQ ID NO: 534058 - DNA, 15 bp, Homo sapiens
tgaaggtgggaaata

SEQ ID NO: 534059 - DNA, 15 bp, Homo sapiens
gaaggtgggaaatag

SEQ ID NO: 534060 - DNA, 15 bp, Homo sapiens
aaggtgggaaataga

SEQ ID NO: 534061 - DNA, 15 bp, Homo sapiens
aggtgggaaatagag

SEQ ID NO: 534062 - DNA, 15 bp, Homo sapiens
ggtgggaaatagaga

SEQ ID NO: 534063 - DNA, 15 bp, Homo sapiens
gtgggaaatagagaa

SEQ ID NO: 534064 - DNA, 15 bp, Homo sapiens
tgggaaatagagaat

SEQ ID NO: 534065 - DNA, 15 bp, Homo sapiens
gggaaatagagaatg

SEQ ID NO: 534066 - DNA, 15 bp, Homo sapiens
ggaaatagagaatga

SEQ ID NO: 534067 - DNA, 15 bp, Homo sapiens
gaaatagagaatgaa

SEQ ID NO: 534068 - DNA, 15 bp, Homo sapiens
aaatagagaatgaac

SEQ ID NO: 534069 - DNA, 15 bp, Homo sapiens
aatagagaatgaaca

SEQ ID NO: 534070 - DNA, 15 bp, Homo sapiens
atagagaatgaacag

SEQ ID NO: 534071 - DNA, 15 bp, Homo sapiens
tagagaatgaacagt

SEQ ID NO: 534072 - DNA, 15 bp, Homo sapiens
agagaatgaacagtg

SEQ ID NO: 534073 - DNA, 15 bp, Homo sapiens
gagaatgaacagtgg

SEQ ID NO: 534074 - DNA, 15 bp, Homo sapiens
agaatgaacagtgga

SEQ ID NO: 534075 - DNA, 15 bp, Homo sapiens
gaatgaacagtggat

SEQ ID NO: 534076 - DNA, 15 bp, Homo sapiens
aatgaacagtggatt

SEQ ID NO: 534077 - DNA, 15 bp, Homo sapiens
atgaacagtggattt

SEQ ID NO: 534078 - DNA, 15 bp, Homo sapiens
tgaacagtggatttg

SEQ ID NO: 534079 - DNA, 15 bp, Homo sapiens
gaacagtggatttgg

SEQ ID NO: 534080 - DNA, 15 bp, Homo sapiens
aacagtggatttgga

SEQ ID NO: 534081 - DNA, 15 bp, Homo sapiens
acagtggatttggag

SEQ ID NO: 534082 - DNA, 15 bp, Homo sapiens
cagtggatttggagt

SEQ ID NO: 534083 - DNA, 15 bp, Homo sapiens
agtggatttggagtc

SEQ ID NO: 534084 - DNA, 15 bp, Homo sapiens
gtggatttggagtca

SEQ ID NO: 534085 - DNA, 15 bp, Homo sapiens
tggatttggagtcag

SEQ ID NO: 534086 - DNA, 15 bp, Homo sapiens
ggatttggagtcaga

SEQ ID NO: 534087 - DNA, 15 bp, Homo sapiens
gatttggagtcagaa

SEQ ID NO: 534088 - DNA, 15 bp, Homo sapiens
atttggagtcagaaa

SEQ ID NO: 534089 - DNA, 15 bp, Homo sapiens
tttggagtcagaaag

SEQ ID NO: 534090 - DNA, 15 bp, Homo sapiens
ttggagtcagaaagc

SEQ ID NO: 534091 - DNA, 15 bp, Homo sapiens
tggagtcagaaagcc

SEQ ID NO: 534092 - DNA, 15 bp, Homo sapiens
ggagtcagaaagccc

SEQ ID NO: 534093 - DNA, 15 bp, Homo sapiens
gagtcagaaagcccg

SEQ ID NO: 534094 - DNA, 15 bp, Homo sapiens
agtcagaaagcccgg

SEQ ID NO: 534095 - DNA, 15 bp, Homo sapiens
gtcagaaagcccggg

SEQ ID NO: 534096 - DNA, 15 bp, Homo sapiens
tcagaaagcccgggt

SEQ ID NO: 534097 - DNA, 15 bp, Homo sapiens
cagaaagcccgggtt

SEQ ID NO: 534098 - DNA, 15 bp, Homo sapiens
agaaagcccgggttc

SEQ ID NO: 534099 - DNA, 15 bp, Homo sapiens
gaaagcccgggttca

SEQ ID NO: 534100 - DNA, 15 bp, Homo sapiens
aaagcccgggttcat

SEQ ID NO: 534101 - DNA, 15 bp, Homo sapiens
aagcccgggttcatt

SEQ ID NO: 534102 - DNA, 15 bp, Homo sapiens
agcccgggttcattc

SEQ ID NO: 534103 - DNA, 15 bp, Homo sapiens
gcccgggttcattct

SEQ ID NO: 534104 - DNA, 15 bp, Homo sapiens
cccgggttcattctc

SEQ ID NO: 534105 - DNA, 15 bp, Homo sapiens
ccgggttcattctca

SEQ ID NO: 534106 - DNA, 15 bp, Homo sapiens
cgggttcattctcag

SEQ ID NO: 534107 - DNA, 15 bp, Homo sapiens
gggttcattctcagc

SEQ ID NO: 534108 - DNA, 15 bp, Homo sapiens
ggttcattctcagct

SEQ ID NO: 534109 - DNA, 15 bp, Homo sapiens
ttcattctcagctct

SEQ ID NO: 534110 - DNA, 15 bp, Homo sapiens
tcattctcagctctg

SEQ ID NO: 534111 - DNA, 15 bp, Homo sapiens
cattctcagctctgc

SEQ ID NO: 534112 - DNA, 15 bp, Homo sapiens
attctcagctctgct

SEQ ID NO: 534113 - DNA, 15 bp, Homo sapiens
ttctcagctctgcta

SEQ ID NO: 534114 - DNA, 15 bp, Homo sapiens
tctcagctctgctac

SEQ ID NO: 534115 - DNA, 15 bp, Homo sapiens
ctcagctctgctacc

SEQ ID NO: 534116 - DNA, 15 bp, Homo sapiens
tcagctctgctacct

SEQ ID NO: 534117 - DNA, 15 bp, Homo sapiens
cagctctgctaccta

SEQ ID NO: 534118 - DNA, 15 bp, Homo sapiens
agctctgctacctag

SEQ ID NO: 534119 - DNA, 15 bp, Homo sapiens
gctctgctacctagt

SEQ ID NO: 534120 - DNA, 15 bp, Homo sapiens
ctctgctacctagta

SEQ ID NO: 534121 - DNA, 15 bp, Homo sapiens
tctgctacctagtag

SEQ ID NO: 534122 - DNA, 15 bp, Homo sapiens
ctgctacctagtagc

SEQ ID NO: 534123 - DNA, 15 bp, Homo sapiens
tgctacctagtagct

SEQ ID NO: 534124 - DNA, 15 bp, Homo sapiens
gctacctagtagctg

SEQ ID NO: 534125 - DNA, 15 bp, Homo sapiens
ctacctagtagctgt

SEQ ID NO: 534126 - DNA, 15 bp, Homo sapiens
tacctagtagctgtg

SEQ ID NO: 534127 - DNA, 15 bp, Homo sapiens
acctagtagctgtgt

SEQ ID NO: 534128 - DNA, 15 bp, Homo sapiens
cctagtagctgtgtg

SEQ ID NO: 534129 - DNA, 15 bp, Homo sapiens
ctagtagctgtgtgc

SEQ ID NO: 534130 - DNA, 15 bp, Homo sapiens
tagtagctgtgtgcc

SEQ ID NO: 534131 - DNA, 15 bp, Homo sapiens
agtagctgtgtgcct

SEQ ID NO: 534132 - DNA, 15 bp, Homo sapiens
gtagctgtgtgcctt

SEQ ID NO: 534133 - DNA, 15 bp, Homo sapiens
tagctgtgtgcctta

SEQ ID NO: 534134 - DNA, 15 bp, Homo sapiens
agctgtgtgccttat

SEQ ID NO: 534135 - DNA, 15 bp, Homo sapiens
gctgtgtgccttata

SEQ ID NO: 534136 - DNA, 15 bp, Homo sapiens
ctgtgtgccttatag

SEQ ID NO: 534137 - DNA, 15 bp, Homo sapiens
tgtgtgccttatagc

SEQ ID NO: 534138 - DNA, 15 bp, Homo sapiens
gtgtgccttatagca

SEQ ID NO: 534139 - DNA, 15 bp, Homo sapiens
tgtgccttatagcaa

SEQ ID NO: 534140 - DNA, 15 bp, Homo sapiens
gtgccttatagcaag

SEQ ID NO: 534141 - DNA, 15 bp, Homo sapiens
tgccttatagcaagg

SEQ ID NO: 534142 - DNA, 15 bp, Homo sapiens
gccttatagcaaggc

SEQ ID NO: 534143 - DNA, 15 bp, Homo sapiens
ccttatagcaaggca

SEQ ID NO: 534144 - DNA, 15 bp, Homo sapiens
cttatagcaaggcac

SEQ ID NO: 534145 - DNA, 15 bp, Homo sapiens
ttatagcaaggcact

SEQ ID NO: 534146 - DNA, 15 bp, Homo sapiens
tatagcaaggcactt

SEQ ID NO: 534147 - DNA, 15 bp, Homo sapiens
atagcaaggcacttc

SEQ ID NO: 534148 - DNA, 15 bp, Homo sapiens
tagcaaggcacttct

SEQ ID NO: 534149 - DNA, 15 bp, Homo sapiens
agcaaggcacttctt

SEQ ID NO: 534150 - DNA, 15 bp, Homo sapiens
gcaaggcacttcttg

SEQ ID NO: 534151 - DNA, 15 bp, Homo sapiens
caaggcacttcttgt

SEQ ID NO: 534152 - DNA, 15 bp, Homo sapiens
aaggcacttcttgta

SEQ ID NO: 534153 - DNA, 15 bp, Homo sapiens
aggcacttcttgtat

SEQ ID NO: 534154 - DNA, 15 bp, Homo sapiens
ggcacttcttgtatc

SEQ ID NO: 534155 - DNA, 15 bp, Homo sapiens
gcacttcttgtatct

SEQ ID NO: 534156 - DNA, 15 bp, Homo sapiens
cacttcttgtatctg

SEQ ID NO: 534157 - DNA, 15 bp, Homo sapiens
acttcttgtatctgt

SEQ ID NO: 534158 - DNA, 15 bp, Homo sapiens
cttcttgtatctgtt

SEQ ID NO: 534159 - DNA, 15 bp, Homo sapiens
ttcttgtatctgttt

SEQ ID NO: 534160 - DNA, 15 bp, Homo sapiens
tcttgtatctgtttc

SEQ ID NO: 534161 - DNA, 15 bp, Homo sapiens
cttgtatctgtttcc

SEQ ID NO: 534162 - DNA, 15 bp, Homo sapiens
ttgtatctgtttcct

SEQ ID NO: 534163 - DNA, 15 bp, Homo sapiens
tgtatctgtttcctt

SEQ ID NO: 534164 - DNA, 15 bp, Homo sapiens
gtatctgtttcctta

SEQ ID NO: 534165 - DNA, 15 bp, Homo sapiens
tatctgtttccttat

SEQ ID NO: 534166 - DNA, 15 bp, Homo sapiens
atctgtttccttatc

SEQ ID NO: 534167 - DNA, 15 bp, Homo sapiens
tctgtttccttatct

SEQ ID NO: 534168 - DNA, 15 bp, Homo sapiens
ctgtttccttatcta

SEQ ID NO: 534169 - DNA, 15 bp, Homo sapiens
tgtttccttatctag

SEQ ID NO: 534170 - DNA, 15 bp, Homo sapiens
gtttccttatctaga

SEQ ID NO: 534171 - DNA, 15 bp, Homo sapiens
tttccttatctagaa

SEQ ID NO: 534172 - DNA, 15 bp, Homo sapiens
ttccttatctagaaa

SEQ ID NO: 534173 - DNA, 15 bp, Homo sapiens
tccttatctagaaaa

SEQ ID NO: 534174 - DNA, 15 bp, Homo sapiens
ccttatctagaaaat

SEQ ID NO: 534175 - DNA, 15 bp, Homo sapiens
cttatctagaaaatg

SEQ ID NO: 534176 - DNA, 15 bp, Homo sapiens
ttatctagaaaatgg

SEQ ID NO: 534177 - DNA, 15 bp, Homo sapiens
tatctagaaaatggg

SEQ ID NO: 534178 - DNA, 15 bp, Homo sapiens
atctagaaaatgggg

SEQ ID NO: 534179 - DNA, 15 bp, Homo sapiens
tctagaaaatggggc

SEQ ID NO: 534180 - DNA, 15 bp, Homo sapiens
ctagaaaatggggcc

SEQ ID NO: 534181 - DNA, 15 bp, Homo sapiens
tagaaaatggggcca

SEQ ID NO: 534182 - DNA, 15 bp, Homo sapiens
agaaaatggggccaa

SEQ ID NO: 534183 - DNA, 15 bp, Homo sapiens
gaaaatggggccaaa

SEQ ID NO: 534184 - DNA, 15 bp, Homo sapiens
aaaatggggccaaag

SEQ ID NO: 534185 - DNA, 15 bp, Homo sapiens
aaatggggccaaagc

SEQ ID NO: 534186 - DNA, 15 bp, Homo sapiens
aatggggccaaagca

SEQ ID NO: 534187 - DNA, 15 bp, Homo sapiens
atggggccaaagcac

SEQ ID NO: 534188 - DNA, 15 bp, Homo sapiens
tggggccaaagcacc

SEQ ID NO: 534189 - DNA, 15 bp, Homo sapiens
ggggccaaagcacct

SEQ ID NO: 534190 - DNA, 15 bp, Homo sapiens
gggccaaagcacctc

SEQ ID NO: 534191 - DNA, 15 bp, Homo sapiens
ggccaaagcacctcc

SEQ ID NO: 534192 - DNA, 15 bp, Homo sapiens
gccaaagcacctcct

SEQ ID NO: 534193 - DNA, 15 bp, Homo sapiens
ccaaagcacctcctt

SEQ ID NO: 534194 - DNA, 15 bp, Homo sapiens
caaagcacctccttg

SEQ ID NO: 534195 - DNA, 15 bp, Homo sapiens
aaagcacctccttgc

SEQ ID NO: 534196 - DNA, 15 bp, Homo sapiens
aagcacctccttgcc

SEQ ID NO: 534197 - DNA, 15 bp, Homo sapiens
agcacctccttgcca

SEQ ID NO: 534198 - DNA, 15 bp, Homo sapiens
gcacctccttgccac

SEQ ID NO: 534199 - DNA, 15 bp, Homo sapiens
cacctccttgccaca

SEQ ID NO: 534200 - DNA, 15 bp, Homo sapiens
acctccttgccacaa

SEQ ID NO: 534201 - DNA, 15 bp, Homo sapiens
cctccttgccacaag

SEQ ID NO: 534202 - DNA, 15 bp, Homo sapiens
ctccttgccacaagc

SEQ ID NO: 534203 - DNA, 15 bp, Homo sapiens
tccttgccacaagcc

SEQ ID NO: 534204 - DNA, 15 bp, Homo sapiens
ccttgccacaagcca

SEQ ID NO: 534205 - DNA, 15 bp, Homo sapiens
cttgccacaagccat

SEQ ID NO: 534206 - DNA, 15 bp, Homo sapiens
ttgccacaagccata

SEQ ID NO: 534207 - DNA, 15 bp, Homo sapiens
tgccacaagccatag

SEQ ID NO: 534208 - DNA, 15 bp, Homo sapiens
gccacaagccatagg

SEQ ID NO: 534209 - DNA, 15 bp, Homo sapiens
ccacaagccatagga

SEQ ID NO: 534210 - DNA, 15 bp, Homo sapiens
cacaagccataggaa

SEQ ID NO: 534211 - DNA, 15 bp, Homo sapiens
acaagccataggaag

SEQ ID NO: 534212 - DNA, 15 bp, Homo sapiens
caagccataggaaga

SEQ ID NO: 534213 - DNA, 15 bp, Homo sapiens
aagccataggaagaa

SEQ ID NO: 534214 - DNA, 15 bp, Homo sapiens
agccataggaagaat

SEQ ID NO: 534215 - DNA, 15 bp, Homo sapiens
gccataggaagaatt

SEQ ID NO: 534216 - DNA, 15 bp, Homo sapiens
ccataggaagaattt

SEQ ID NO: 534217 - DNA, 15 bp, Homo sapiens
cataggaagaatttt

SEQ ID NO: 534218 - DNA, 15 bp, Homo sapiens
ataggaagaattttt

SEQ ID NO: 534219 - DNA, 15 bp, Homo sapiens
taggaagaattttta

SEQ ID NO: 534220 - DNA, 15 bp, Homo sapiens
aggaagaatttttaa

SEQ ID NO: 534221 - DNA, 15 bp, Homo sapiens
ggaagaatttttaaa

SEQ ID NO: 534222 - DNA, 15 bp, Homo sapiens
gaagaatttttaaag

SEQ ID NO: 534223 - DNA, 15 bp, Homo sapiens
aagaatttttaaagt

SEQ ID NO: 534224 - DNA, 15 bp, Homo sapiens
agaatttttaaagtc

SEQ ID NO: 534225 - DNA, 15 bp, Homo sapiens
gaatttttaaagtct

SEQ ID NO: 534226 - DNA, 15 bp, Homo sapiens
aatttttaaagtctg

SEQ ID NO: 534227 - DNA, 15 bp, Homo sapiens
atttttaaagtctgc

SEQ ID NO: 534228 - DNA, 15 bp, Homo sapiens
tttttaaagtctgct

SEQ ID NO: 534229 - DNA, 15 bp, Homo sapiens
ttttaaagtctgcta

SEQ ID NO: 534230 - DNA, 15 bp, Homo sapiens
tttaaagtctgctac

SEQ ID NO: 534231 - DNA, 15 bp, Homo sapiens
ttaaagtctgctacc

SEQ ID NO: 534232 - DNA, 15 bp, Homo sapiens
taaagtctgctacct

SEQ ID NO: 534233 - DNA, 15 bp, Homo sapiens
aaagtctgctacctt

SEQ ID NO: 534234 - DNA, 15 bp, Homo sapiens
aagtctgctacctta

SEQ ID NO: 534235 - DNA, 15 bp, Homo sapiens
agtctgctaccttag

SEQ ID NO: 534236 - DNA, 15 bp, Homo sapiens
gtctgctaccttagc

SEQ ID NO: 534237 - DNA, 15 bp, Homo sapiens
tctgctaccttagct

SEQ ID NO: 534238 - DNA, 15 bp, Homo sapiens
ctgctaccttagctg

SEQ ID NO: 534239 - DNA, 15 bp, Homo sapiens
tgctaccttagctgg

SEQ ID NO: 534240 - DNA, 15 bp, Homo sapiens
gctaccttagctgga

SEQ ID NO: 534241 - DNA, 15 bp, Homo sapiens
ctaccttagctggat

SEQ ID NO: 534242 - DNA, 15 bp, Homo sapiens
taccttagctggata

SEQ ID NO: 534243 - DNA, 15 bp, Homo sapiens
accttagctggatac

SEQ ID NO: 534244 - DNA, 15 bp, Homo sapiens
ccttagctggataca

SEQ ID NO: 534245 - DNA, 15 bp, Homo sapiens
cttagctggatacac

SEQ ID NO: 534246 - DNA, 15 bp, Homo sapiens
ttagctggatacaca

SEQ ID NO: 534247 - DNA, 15 bp, Homo sapiens
tagctggatacacat

SEQ ID NO: 534248 - DNA, 15 bp, Homo sapiens
agctggatacacatt

SEQ ID NO: 534249 - DNA, 15 bp, Homo sapiens
gctggatacacatta

SEQ ID NO: 534250 - DNA, 15 bp, Homo sapiens
ctggatacacattaa

SEQ ID NO: 534251 - DNA, 15 bp, Homo sapiens
tggatacacattaaa

SEQ ID NO: 534252 - DNA, 15 bp, Homo sapiens
ggatacacattaaat

SEQ ID NO: 534253 - DNA, 15 bp, Homo sapiens
gatacacattaaatt

SEQ ID NO: 534254 - DNA, 15 bp, Homo sapiens
atacacattaaatta

SEQ ID NO: 534255 - DNA, 15 bp, Homo sapiens
tacacattaaattaa

SEQ ID NO: 534256 - DNA, 15 bp, Homo sapiens
acacattaaattaac

SEQ ID NO: 534257 - DNA, 15 bp, Homo sapiens
cacattaaattaact

SEQ ID NO: 534258 - DNA, 15 bp, Homo sapiens
acattaaattaactt

SEQ ID NO: 534259 - DNA, 15 bp, Homo sapiens
cattaaattaacttc

SEQ ID NO: 534260 - DNA, 15 bp, Homo sapiens
attaaattaacttca

SEQ ID NO: 534261 - DNA, 15 bp, Homo sapiens
ttaaattaacttcat

SEQ ID NO: 534262 - DNA, 15 bp, Homo sapiens
taaattaacttcatg

SEQ ID NO: 534263 - DNA, 15 bp, Homo sapiens
aaattaacttcatgt

SEQ ID NO: 534264 - DNA, 15 bp, Homo sapiens
aattaacttcatgtg

SEQ ID NO: 534265 - DNA, 15 bp, Homo sapiens
attaacttcatgtgc

SEQ ID NO: 534266 - DNA, 15 bp, Homo sapiens
ttaacttcatgtgcc

SEQ ID NO: 534267 - DNA, 15 bp, Homo sapiens
taacttcatgtgcct

SEQ ID NO: 534268 - DNA, 15 bp, Homo sapiens
aacttcatgtgcctt

SEQ ID NO: 534269 - DNA, 15 bp, Homo sapiens
acttcatgtgcctta

SEQ ID NO: 534270 - DNA, 15 bp, Homo sapiens
cttcatgtgccttat

SEQ ID NO: 534271 - DNA, 15 bp, Homo sapiens
ttcatgtgccttata

SEQ ID NO: 534272 - DNA, 15 bp, Homo sapiens
tcatgtgccttatag

SEQ ID NO: 534273 - DNA, 15 bp, Homo sapiens
catgtgccttatagc

SEQ ID NO: 534274 - DNA, 15 bp, Homo sapiens
atgtgccttatagca

SEQ ID NO: 534275 - DNA, 15 bp, Homo sapiens
ttatagcaaggcacc

SEQ ID NO: 534276 - DNA, 15 bp, Homo sapiens
tatagcaaggcacct

SEQ ID NO: 534277 - DNA, 15 bp, Homo sapiens
atagcaaggcacctc

SEQ ID NO: 534278 - DNA, 15 bp, Homo sapiens
tagcaaggcacctct

SEQ ID NO: 534279 - DNA, 15 bp, Homo sapiens
agcaaggcacctctt

SEQ ID NO: 534280 - DNA, 15 bp, Homo sapiens
gcaaggcacctcttg

SEQ ID NO: 534281 - DNA, 15 bp, Homo sapiens
caaggcacctcttga

SEQ ID NO: 534282 - DNA, 15 bp, Homo sapiens
aaggcacctcttgaa

SEQ ID NO: 534283 - DNA, 15 bp, Homo sapiens
aggcacctcttgaat

SEQ ID NO: 534284 - DNA, 15 bp, Homo sapiens
ggcacctcttgaatc

SEQ ID NO: 534285 - DNA, 15 bp, Homo sapiens
gcacctcttgaatct

SEQ ID NO: 534286 - DNA, 15 bp, Homo sapiens
cacctcttgaatctg

SEQ ID NO: 534287 - DNA, 15 bp, Homo sapiens
acctcttgaatctgt

SEQ ID NO: 534288 - DNA, 15 bp, Homo sapiens
cctcttgaatctgtt

SEQ ID NO: 534289 - DNA, 15 bp, Homo sapiens
ctcttgaatctgttt

SEQ ID NO: 534290 - DNA, 15 bp, Homo sapiens
tcttgaatctgtttc

SEQ ID NO: 534291 - DNA, 15 bp, Homo sapiens
cttgaatctgtttcc

SEQ ID NO: 534292 - DNA, 15 bp, Homo sapiens
ttgaatctgtttcct

SEQ ID NO: 534293 - DNA, 15 bp, Homo sapiens
tgaatctgtttcctt

SEQ ID NO: 534294 - DNA, 15 bp, Homo sapiens
gaatctgtttcctta

SEQ ID NO: 534295 - DNA, 15 bp, Homo sapiens
aatctgtttccttat

SEQ ID NO: 534296 - DNA, 15 bp, Homo sapiens
ctccttgccacaagt

SEQ ID NO: 534297 - DNA, 15 bp, Homo sapiens
tccttgccacaagtc

SEQ ID NO: 534298 - DNA, 15 bp, Homo sapiens
ccttgccacaagtca

SEQ ID NO: 534299 - DNA, 15 bp, Homo sapiens
cttgccacaagtcac

SEQ ID NO: 534300 - DNA, 15 bp, Homo sapiens
ttgccacaagtcaca

SEQ ID NO: 534301 - DNA, 15 bp, Homo sapiens
tgccacaagtcacag

SEQ ID NO: 534302 - DNA, 15 bp, Homo sapiens
gccacaagtcacagg

SEQ ID NO: 534303 - DNA, 15 bp, Homo sapiens
ccacaagtcacagga

SEQ ID NO: 534304 - DNA, 15 bp, Homo sapiens
cacaagtcacaggaa

SEQ ID NO: 534305 - DNA, 15 bp, Homo sapiens
acaagtcacaggaat

SEQ ID NO: 534306 - DNA, 15 bp, Homo sapiens
caagtcacaggaata

SEQ ID NO: 534307 - DNA, 15 bp, Homo sapiens
aagtcacaggaataa

SEQ ID NO: 534308 - DNA, 15 bp, Homo sapiens
agtcacaggaataat

SEQ ID NO: 534309 - DNA, 15 bp, Homo sapiens
gtcacaggaataatg

SEQ ID NO: 534310 - DNA, 15 bp, Homo sapiens
tcacaggaataatgt

SEQ ID NO: 534311 - DNA, 15 bp, Homo sapiens
cacaggaataatgtt

SEQ ID NO: 534312 - DNA, 15 bp, Homo sapiens
acaggaataatgttt

SEQ ID NO: 534313 - DNA, 15 bp, Homo sapiens
caggaataatgtttt

SEQ ID NO: 534314 - DNA, 15 bp, Homo sapiens
aggaataatgtttta

SEQ ID NO: 534315 - DNA, 15 bp, Homo sapiens
ggaataatgttttaa

SEQ ID NO: 534316 - DNA, 15 bp, Homo sapiens
gaataatgttttaaa

SEQ ID NO: 534317 - DNA, 15 bp, Homo sapiens
aataatgttttaaag

SEQ ID NO: 534318 - DNA, 15 bp, Homo sapiens
ataatgttttaaagc

SEQ ID NO: 534319 - DNA, 15 bp, Homo sapiens
taatgttttaaagcc

SEQ ID NO: 534320 - DNA, 15 bp, Homo sapiens
aatgttttaaagcct

SEQ ID NO: 534321 - DNA, 15 bp, Homo sapiens
atgttttaaagcctg

SEQ ID NO: 534322 - DNA, 15 bp, Homo sapiens
tgttttaaagcctgc

SEQ ID NO: 534323 - DNA, 15 bp, Homo sapiens
gttttaaagcctgcc

SEQ ID NO: 534324 - DNA, 15 bp, Homo sapiens
ttttaaagcctgcca

SEQ ID NO: 534325 - DNA, 15 bp, Homo sapiens
tttaaagcctgccac

SEQ ID NO: 534326 - DNA, 15 bp, Homo sapiens
ttaaagcctgccacc

SEQ ID NO: 534327 - DNA, 15 bp, Homo sapiens
taaagcctgccacct

SEQ ID NO: 534328 - DNA, 15 bp, Homo sapiens
aaagcctgccacctt

SEQ ID NO: 534329 - DNA, 15 bp, Homo sapiens
aagcctgccacctta

SEQ ID NO: 534330 - DNA, 15 bp, Homo sapiens
agcctgccaccttag

SEQ ID NO: 534331 - DNA, 15 bp, Homo sapiens
gcctgccaccttagc

SEQ ID NO: 534332 - DNA, 15 bp, Homo sapiens
cctgccaccttagct

SEQ ID NO: 534333 - DNA, 15 bp, Homo sapiens
ctgccaccttagctg

SEQ ID NO: 534334 - DNA, 15 bp, Homo sapiens
tgccaccttagctgg

SEQ ID NO: 534335 - DNA, 15 bp, Homo sapiens
gccaccttagctgga

SEQ ID NO: 534336 - DNA, 15 bp, Homo sapiens
ccaccttagctggat

SEQ ID NO: 534337 - DNA, 15 bp, Homo sapiens
caccttagctggata

SEQ ID NO: 534338 - DNA, 15 bp, Homo sapiens
tggatacacattaat

SEQ ID NO: 534339 - DNA, 15 bp, Homo sapiens
ggatacacattaatt

SEQ ID NO: 534340 - DNA, 15 bp, Homo sapiens
gatacacattaattg

SEQ ID NO: 534341 - DNA, 15 bp, Homo sapiens
atacacattaattga

SEQ ID NO: 534342 - DNA, 15 bp, Homo sapiens
tacacattaattgaa

SEQ ID NO: 534343 - DNA, 15 bp, Homo sapiens
acacattaattgaac

SEQ ID NO: 534344 - DNA, 15 bp, Homo sapiens
cacattaattgaact

SEQ ID NO: 534345 - DNA, 15 bp, Homo sapiens
acattaattgaactt

SEQ ID NO: 534346 - DNA, 15 bp, Homo sapiens
cattaattgaacttt

SEQ ID NO: 534347 - DNA, 15 bp, Homo sapiens
attaattgaactttg

SEQ ID NO: 534348 - DNA, 15 bp, Homo sapiens
ttaattgaactttgc

SEQ ID NO: 534349 - DNA, 15 bp, Homo sapiens
taattgaactttgct

SEQ ID NO: 534350 - DNA, 15 bp, Homo sapiens
aattgaactttgctt

SEQ ID NO: 534351 - DNA, 15 bp, Homo sapiens
attgaactttgcttt

SEQ ID NO: 534352 - DNA, 15 bp, Homo sapiens
ttgaactttgctttt

SEQ ID NO: 534353 - DNA, 15 bp, Homo sapiens
tgaactttgcttttg

SEQ ID NO: 534354 - DNA, 15 bp, Homo sapiens
gaactttgcttttgg

SEQ ID NO: 534355 - DNA, 15 bp, Homo sapiens
aactttgcttttggg

SEQ ID NO: 534356 - DNA, 15 bp, Homo sapiens
actttgcttttggga

SEQ ID NO: 534357 - DNA, 15 bp, Homo sapiens
ctttgcttttgggaa

SEQ ID NO: 534358 - DNA, 15 bp, Homo sapiens
tttgcttttgggaat

SEQ ID NO: 534359 - DNA, 15 bp, Homo sapiens
ttgcttttgggaatg

SEQ ID NO: 534360 - DNA, 15 bp, Homo sapiens
tgcttttgggaatgg

SEQ ID NO: 534361 - DNA, 15 bp, Homo sapiens
gcttttgggaatggg

SEQ ID NO: 534362 - DNA, 15 bp, Homo sapiens
cttttgggaatgggc

SEQ ID NO: 534363 - DNA, 15 bp, Homo sapiens
ttttgggaatgggca

SEQ ID NO: 534364 - DNA, 15 bp, Homo sapiens
tttgggaatgggcat

SEQ ID NO: 534365 - DNA, 15 bp, Homo sapiens
ttgggaatgggcata

SEQ ID NO: 534366 - DNA, 15 bp, Homo sapiens
tgggaatgggcatac

SEQ ID NO: 534367 - DNA, 15 bp, Homo sapiens
gggaatgggcatacc

SEQ ID NO: 534368 - DNA, 15 bp, Homo sapiens
ggaatgggcatacca

SEQ ID NO: 534369 - DNA, 15 bp, Homo sapiens
gaatgggcataccag

SEQ ID NO: 534370 - DNA, 15 bp, Homo sapiens
aatgggcataccagg

SEQ ID NO: 534371 - DNA, 15 bp, Homo sapiens
atgggcataccagga

SEQ ID NO: 534372 - DNA, 15 bp, Homo sapiens
tgggcataccaggac

SEQ ID NO: 534373 - DNA, 15 bp, Homo sapiens
gggcataccaggaca

SEQ ID NO: 534374 - DNA, 15 bp, Homo sapiens
ggcataccaggacag

SEQ ID NO: 534375 - DNA, 15 bp, Homo sapiens
gcataccaggacaga

SEQ ID NO: 534376 - DNA, 15 bp, Homo sapiens
cataccaggacagat

SEQ ID NO: 534377 - DNA, 15 bp, Homo sapiens
ataccaggacagatt

SEQ ID NO: 534378 - DNA, 15 bp, Homo sapiens
taccaggacagattg

SEQ ID NO: 534379 - DNA, 15 bp, Homo sapiens
accaggacagattgg

SEQ ID NO: 534380 - DNA, 15 bp, Homo sapiens
ccaggacagattggt

SEQ ID NO: 534381 - DNA, 15 bp, Homo sapiens
caggacagattggtc

SEQ ID NO: 534382 - DNA, 15 bp, Homo sapiens
aggacagattggtca

SEQ ID NO: 534383 - DNA, 15 bp, Homo sapiens
ggacagattggtcag

SEQ ID NO: 534384 - DNA, 15 bp, Homo sapiens
gacagattggtcaga

SEQ ID NO: 534385 - DNA, 15 bp, Homo sapiens
acagattggtcagaa

SEQ ID NO: 534386 - DNA, 15 bp, Homo sapiens
cagattggtcagaaa

SEQ ID NO: 534387 - DNA, 15 bp, Homo sapiens
agattggtcagaaaa

SEQ ID NO: 534388 - DNA, 15 bp, Homo sapiens
gattggtcagaaaat

SEQ ID NO: 534389 - DNA, 15 bp, Homo sapiens
attggtcagaaaatt

SEQ ID NO: 534390 - DNA, 15 bp, Homo sapiens
ttggtcagaaaatta

SEQ ID NO: 534391 - DNA, 15 bp, Homo sapiens
tggtcagaaaattag

SEQ ID NO: 534392 - DNA, 15 bp, Homo sapiens
ggtcagaaaattaga

SEQ ID NO: 534393 - DNA, 15 bp, Homo sapiens
gtcagaaaattagaa

SEQ ID NO: 534394 - DNA, 15 bp, Homo sapiens
tcagaaaattagaac

SEQ ID NO: 534395 - DNA, 15 bp, Homo sapiens
cagaaaattagaaca

SEQ ID NO: 534396 - DNA, 15 bp, Homo sapiens
agaaaattagaacac

SEQ ID NO: 534397 - DNA, 15 bp, Homo sapiens
gaaaattagaacaca

SEQ ID NO: 534398 - DNA, 15 bp, Homo sapiens
aaaattagaacacag

SEQ ID NO: 534399 - DNA, 15 bp, Homo sapiens
aaattagaacacagg

SEQ ID NO: 534400 - DNA, 15 bp, Homo sapiens
aattagaacacaggt

SEQ ID NO: 534401 - DNA, 15 bp, Homo sapiens
attagaacacaggtc

SEQ ID NO: 534402 - DNA, 15 bp, Homo sapiens
ttagaacacaggtcc

SEQ ID NO: 534403 - DNA, 15 bp, Homo sapiens
tagaacacaggtcca

SEQ ID NO: 534404 - DNA, 15 bp, Homo sapiens
agaacacaggtccaa

SEQ ID NO: 534405 - DNA, 15 bp, Homo sapiens
gaacacaggtccaaa

SEQ ID NO: 534406 - DNA, 15 bp, Homo sapiens
aacacaggtccaaat

SEQ ID NO: 534407 - DNA, 15 bp, Homo sapiens
acacaggtccaaatt

SEQ ID NO: 534408 - DNA, 15 bp, Homo sapiens
cacaggtccaaattt

SEQ ID NO: 534409 - DNA, 15 bp, Homo sapiens
acaggtccaaattta

SEQ ID NO: 534410 - DNA, 15 bp, Homo sapiens
caggtccaaatttac

SEQ ID NO: 534411 - DNA, 15 bp, Homo sapiens
aggtccaaatttacc

SEQ ID NO: 534412 - DNA, 15 bp, Homo sapiens
ggtccaaatttacca

SEQ ID NO: 534413 - DNA, 15 bp, Homo sapiens
gtccaaatttaccat

SEQ ID NO: 534414 - DNA, 15 bp, Homo sapiens
tccaaatttaccatc

SEQ ID NO: 534415 - DNA, 15 bp, Homo sapiens
ccaaatttaccatca

SEQ ID NO: 534416 - DNA, 15 bp, Homo sapiens
caaatttaccatcat

SEQ ID NO: 534417 - DNA, 15 bp, Homo sapiens
aaatttaccatcatg

SEQ ID NO: 534418 - DNA, 15 bp, Homo sapiens
aatttaccatcatgc

SEQ ID NO: 534419 - DNA, 15 bp, Homo sapiens
atttaccatcatgca

SEQ ID NO: 534420 - DNA, 15 bp, Homo sapiens
tttaccatcatgcat

SEQ ID NO: 534421 - DNA, 15 bp, Homo sapiens
ttaccatcatgcata

SEQ ID NO: 534422 - DNA, 15 bp, Homo sapiens
taccatcatgcatat

SEQ ID NO: 534423 - DNA, 15 bp, Homo sapiens
accatcatgcatatt

SEQ ID NO: 534424 - DNA, 15 bp, Homo sapiens
ccatcatgcatattt

SEQ ID NO: 534425 - DNA, 15 bp, Homo sapiens
catcatgcatatttc

SEQ ID NO: 534426 - DNA, 15 bp, Homo sapiens
atcatgcatatttca

SEQ ID NO: 534427 - DNA, 15 bp, Homo sapiens
tcatgcatatttcat

SEQ ID NO: 534428 - DNA, 15 bp, Homo sapiens
catgcatatttcatt

SEQ ID NO: 534429 - DNA, 15 bp, Homo sapiens
atgcatatttcatta

SEQ ID NO: 534430 - DNA, 15 bp, Homo sapiens
tgcatatttcattaa

SEQ ID NO: 534431 - DNA, 15 bp, Homo sapiens
gcatatttcattaat

SEQ ID NO: 534432 - DNA, 15 bp, Homo sapiens
catatttcattaatt

SEQ ID NO: 534433 - DNA, 15 bp, Homo sapiens
atatttcattaattc

SEQ ID NO: 534434 - DNA, 15 bp, Homo sapiens
tatttcattaattca

SEQ ID NO: 534435 - DNA, 15 bp, Homo sapiens
atttcattaattcaa

SEQ ID NO: 534436 - DNA, 15 bp, Homo sapiens
tttcattaattcaac

SEQ ID NO: 534437 - DNA, 15 bp, Homo sapiens
ttcattaattcaaca

SEQ ID NO: 534438 - DNA, 15 bp, Homo sapiens
tcattaattcaacaa

SEQ ID NO: 534439 - DNA, 15 bp, Homo sapiens
cattaattcaacaaa

SEQ ID NO: 534440 - DNA, 15 bp, Homo sapiens
attaattcaacaaat

SEQ ID NO: 534441 - DNA, 15 bp, Homo sapiens
ttaattcaacaaatg

SEQ ID NO: 534442 - DNA, 15 bp, Homo sapiens
taattcaacaaatgt

SEQ ID NO: 534443 - DNA, 15 bp, Homo sapiens
aattcaacaaatgtt

SEQ ID NO: 534444 - DNA, 15 bp, Homo sapiens
attcaacaaatgttt

SEQ ID NO: 534445 - DNA, 15 bp, Homo sapiens
ttcaacaaatgttta

SEQ ID NO: 534446 - DNA, 15 bp, Homo sapiens
tcaacaaatgtttat

SEQ ID NO: 534447 - DNA, 15 bp, Homo sapiens
caacaaatgtttatg

SEQ ID NO: 534448 - DNA, 15 bp, Homo sapiens
aacaaatgtttatga

SEQ ID NO: 534449 - DNA, 15 bp, Homo sapiens
acaaatgtttatgat

SEQ ID NO: 534450 - DNA, 15 bp, Homo sapiens
caaatgtttatgatg

SEQ ID NO: 534451 - DNA, 15 bp, Homo sapiens
aaatgtttatgatgc

SEQ ID NO: 534452 - DNA, 15 bp, Homo sapiens
aatgtttatgatgca

SEQ ID NO: 534453 - DNA, 15 bp, Homo sapiens
atgtttatgatgcat

SEQ ID NO: 534454 - DNA, 15 bp, Homo sapiens
tgtttatgatgcatc

SEQ ID NO: 534455 - DNA, 15 bp, Homo sapiens
gtttatgatgcatct

SEQ ID NO: 534456 - DNA, 15 bp, Homo sapiens
tttatgatgcatcta

SEQ ID NO: 534457 - DNA, 15 bp, Homo sapiens
ttatgatgcatctat

SEQ ID NO: 534458 - DNA, 15 bp, Homo sapiens
tatgatgcatctatt

SEQ ID NO: 534459 - DNA, 15 bp, Homo sapiens
atgatgcatctatta

SEQ ID NO: 534460 - DNA, 15 bp, Homo sapiens
tgatgcatctattat

SEQ ID NO: 534461 - DNA, 15 bp, Homo sapiens
gatgcatctattatg

SEQ ID NO: 534462 - DNA, 15 bp, Homo sapiens
atgcatctattatgt

SEQ ID NO: 534463 - DNA, 15 bp, Homo sapiens
tgcatctattatgtt

SEQ ID NO: 534464 - DNA, 15 bp, Homo sapiens
gcatctattatgttg

SEQ ID NO: 534465 - DNA, 15 bp, Homo sapiens
catctattatgttgc

SEQ ID NO: 534466 - DNA, 15 bp, Homo sapiens
atctattatgttgca

SEQ ID NO: 534467 - DNA, 15 bp, Homo sapiens
tctattatgttgcaa

SEQ ID NO: 534468 - DNA, 15 bp, Homo sapiens
ctattatgttgcaag

SEQ ID NO: 534469 - DNA, 15 bp, Homo sapiens
tattatgttgcaagg

SEQ ID NO: 534470 - DNA, 15 bp, Homo sapiens
attatgttgcaaggc

SEQ ID NO: 534471 - DNA, 15 bp, Homo sapiens
ttatgttgcaaggct

SEQ ID NO: 534472 - DNA, 15 bp, Homo sapiens
tatgttgcaaggctc

SEQ ID NO: 534473 - DNA, 15 bp, Homo sapiens
atgttgcaaggctct

SEQ ID NO: 534474 - DNA, 15 bp, Homo sapiens
tgttgcaaggctctg

SEQ ID NO: 534475 - DNA, 15 bp, Homo sapiens
gttgcaaggctctgc

SEQ ID NO: 534476 - DNA, 15 bp, Homo sapiens
ttgcaaggctctgca

SEQ ID NO: 534477 - DNA, 15 bp, Homo sapiens
tgcaaggctctgcac

SEQ ID NO: 534478 - DNA, 15 bp, Homo sapiens
gcaaggctctgcact

SEQ ID NO: 534479 - DNA, 15 bp, Homo sapiens
caaggctctgcactg

SEQ ID NO: 534480 - DNA, 15 bp, Homo sapiens
aaggctctgcactgt

SEQ ID NO: 534481 - DNA, 15 bp, Homo sapiens
aggctctgcactgtg

SEQ ID NO: 534482 - DNA, 15 bp, Homo sapiens
ggctctgcactgtgt

SEQ ID NO: 534483 - DNA, 15 bp, Homo sapiens
gctctgcactgtgta

SEQ ID NO: 534484 - DNA, 15 bp, Homo sapiens
ctctgcactgtgtat

SEQ ID NO: 534485 - DNA, 15 bp, Homo sapiens
tctgcactgtgtatt

SEQ ID NO: 534486 - DNA, 15 bp, Homo sapiens
ctgcactgtgtattg

SEQ ID NO: 534487 - DNA, 15 bp, Homo sapiens
tgcactgtgtattga

SEQ ID NO: 534488 - DNA, 15 bp, Homo sapiens
gcactgtgtattgag

SEQ ID NO: 534489 - DNA, 15 bp, Homo sapiens
cactgtgtattgagg

SEQ ID NO: 534490 - DNA, 15 bp, Homo sapiens
actgtgtattgagga

SEQ ID NO: 534491 - DNA, 15 bp, Homo sapiens
ctgtgtattgaggat

SEQ ID NO: 534492 - DNA, 15 bp, Homo sapiens
tgtgtattgaggata

SEQ ID NO: 534493 - DNA, 15 bp, Homo sapiens
gtgtattgaggataa

SEQ ID NO: 534494 - DNA, 15 bp, Homo sapiens
tgtattgaggataaa

SEQ ID NO: 534495 - DNA, 15 bp, Homo sapiens
gtattgaggataaaa

SEQ ID NO: 534496 - DNA, 15 bp, Homo sapiens
tattgaggataaaac

SEQ ID NO: 534497 - DNA, 15 bp, Homo sapiens
attgaggataaaaca

SEQ ID NO: 534498 - DNA, 15 bp, Homo sapiens
ttgaggataaaacag

SEQ ID NO: 534499 - DNA, 15 bp, Homo sapiens
tgaggataaaacagg

SEQ ID NO: 534500 - DNA, 15 bp, Homo sapiens
gaggataaaacaggg

SEQ ID NO: 534501 - DNA, 15 bp, Homo sapiens
aggataaaacagggg

SEQ ID NO: 534502 - DNA, 15 bp, Homo sapiens
ggataaaacaggggt

SEQ ID NO: 534503 - DNA, 15 bp, Homo sapiens
gataaaacaggggtc

SEQ ID NO: 534504 - DNA, 15 bp, Homo sapiens
ataaaacaggggtca

SEQ ID NO: 534505 - DNA, 15 bp, Homo sapiens
taaaacaggggtcaa

SEQ ID NO: 534506 - DNA, 15 bp, Homo sapiens
aaaacaggggtcaaa

SEQ ID NO: 534507 - DNA, 15 bp, Homo sapiens
aaacaggggtcaaaa

SEQ ID NO: 534508 - DNA, 15 bp, Homo sapiens
aacaggggtcaaaac

SEQ ID NO: 534509 - DNA, 15 bp, Homo sapiens
acaggggtcaaaacc

SEQ ID NO: 534510 - DNA, 15 bp, Homo sapiens
caggggtcaaaaccc

SEQ ID NO: 534511 - DNA, 15 bp, Homo sapiens
aggggtcaaaaccct

SEQ ID NO: 534512 - DNA, 15 bp, Homo sapiens
ggggtcaaaaccctc

SEQ ID NO: 534513 - DNA, 15 bp, Homo sapiens
gggtcaaaaccctcc

SEQ ID NO: 534514 - DNA, 15 bp, Homo sapiens
ggtcaaaaccctcca

SEQ ID NO: 534515 - DNA, 15 bp, Homo sapiens
gtcaaaaccctccag

SEQ ID NO: 534516 - DNA, 15 bp, Homo sapiens
tcaaaaccctccagg

SEQ ID NO: 534517 - DNA, 15 bp, Homo sapiens
caaaaccctccagga

SEQ ID NO: 534518 - DNA, 15 bp, Homo sapiens
aaaaccctccaggaa

SEQ ID NO: 534519 - DNA, 15 bp, Homo sapiens
aaaccctccaggaat

SEQ ID NO: 534520 - DNA, 15 bp, Homo sapiens
aaccctccaggaatg

SEQ ID NO: 534521 - DNA, 15 bp, Homo sapiens
accctccaggaatgt

SEQ ID NO: 534522 - DNA, 15 bp, Homo sapiens
ccctccaggaatgta

SEQ ID NO: 534523 - DNA, 15 bp, Homo sapiens
cctccaggaatgtag

SEQ ID NO: 534524 - DNA, 15 bp, Homo sapiens
ctccaggaatgtaga

SEQ ID NO: 534525 - DNA, 15 bp, Homo sapiens
tccaggaatgtagac

SEQ ID NO: 534526 - DNA, 15 bp, Homo sapiens
ccaggaatgtagacg

SEQ ID NO: 534527 - DNA, 15 bp, Homo sapiens
caggaatgtagacgc

SEQ ID NO: 534528 - DNA, 15 bp, Homo sapiens
aggaatgtagacgct

SEQ ID NO: 534529 - DNA, 15 bp, Homo sapiens
ggaatgtagacgcta

SEQ ID NO: 534530 - DNA, 15 bp, Homo sapiens
gaatgtagacgctag

SEQ ID NO: 534531 - DNA, 15 bp, Homo sapiens
aatgtagacgctagt

SEQ ID NO: 534532 - DNA, 15 bp, Homo sapiens
atgtagacgctagtg

SEQ ID NO: 534533 - DNA, 15 bp, Homo sapiens
tgtagacgctagtgg

SEQ ID NO: 534534 - DNA, 15 bp, Homo sapiens
gtagacgctagtgga

SEQ ID NO: 534535 - DNA, 15 bp, Homo sapiens
tagacgctagtggag

SEQ ID NO: 534536 - DNA, 15 bp, Homo sapiens
agacgctagtggagg

SEQ ID NO: 534537 - DNA, 15 bp, Homo sapiens
gacgctagtggaggg

SEQ ID NO: 534538 - DNA, 15 bp, Homo sapiens
acgctagtggaggga

SEQ ID NO: 534539 - DNA, 15 bp, Homo sapiens
cgctagtggagggag

SEQ ID NO: 534540 - DNA, 15 bp, Homo sapiens
gctagtggagggagc

SEQ ID NO: 534541 - DNA, 15 bp, Homo sapiens
ctagtggagggagct

SEQ ID NO: 534542 - DNA, 15 bp, Homo sapiens
tagtggagggagctg

SEQ ID NO: 534543 - DNA, 15 bp, Homo sapiens
agtggagggagctga

SEQ ID NO: 534544 - DNA, 15 bp, Homo sapiens
gtggagggagctgac

SEQ ID NO: 534545 - DNA, 15 bp, Homo sapiens
tggagggagctgaca

SEQ ID NO: 534546 - DNA, 15 bp, Homo sapiens
ggagggagctgacac

SEQ ID NO: 534547 - DNA, 15 bp, Homo sapiens
gagggagctgacaca

SEQ ID NO: 534548 - DNA, 15 bp, Homo sapiens
agggagctgacacat

SEQ ID NO: 534549 - DNA, 15 bp, Homo sapiens
gggagctgacacata

SEQ ID NO: 534550 - DNA, 15 bp, Homo sapiens
ggagctgacacatac

SEQ ID NO: 534551 - DNA, 15 bp, Homo sapiens
gagctgacacataca

SEQ ID NO: 534552 - DNA, 15 bp, Homo sapiens
agctgacacatacag

SEQ ID NO: 534553 - DNA, 15 bp, Homo sapiens
gctgacacatacaga

SEQ ID NO: 534554 - DNA, 15 bp, Homo sapiens
ctgacacatacagag

SEQ ID NO: 534555 - DNA, 15 bp, Homo sapiens
tgacacatacagaga

SEQ ID NO: 534556 - DNA, 15 bp, Homo sapiens
gacacatacagagaa

SEQ ID NO: 534557 - DNA, 15 bp, Homo sapiens
acacatacagagaac

SEQ ID NO: 534558 - DNA, 15 bp, Homo sapiens
cacatacagagaaca

SEQ ID NO: 534559 - DNA, 15 bp, Homo sapiens
acatacagagaacaa

SEQ ID NO: 534560 - DNA, 15 bp, Homo sapiens
catacagagaacaat

SEQ ID NO: 534561 - DNA, 15 bp, Homo sapiens
atacagagaacaatc

SEQ ID NO: 534562 - DNA, 15 bp, Homo sapiens
tacagagaacaatct

SEQ ID NO: 534563 - DNA, 15 bp, Homo sapiens
acagagaacaatctc

SEQ ID NO: 534564 - DNA, 15 bp, Homo sapiens
cagagaacaatctca

SEQ ID NO: 534565 - DNA, 15 bp, Homo sapiens
agagaacaatctcag

SEQ ID NO: 534566 - DNA, 15 bp, Homo sapiens
gagaacaatctcagt

SEQ ID NO: 534567 - DNA, 15 bp, Homo sapiens
agaacaatctcagtt

SEQ ID NO: 534568 - DNA, 15 bp, Homo sapiens
gaacaatctcagttg

SEQ ID NO: 534569 - DNA, 15 bp, Homo sapiens
aacaatctcagttga

SEQ ID NO: 534570 - DNA, 15 bp, Homo sapiens
acaatctcagttgag

SEQ ID NO: 534571 - DNA, 15 bp, Homo sapiens
caatctcagttgagt

SEQ ID NO: 534572 - DNA, 15 bp, Homo sapiens
aatctcagttgagtg

SEQ ID NO: 534573 - DNA, 15 bp, Homo sapiens
atctcagttgagtgg

SEQ ID NO: 534574 - DNA, 15 bp, Homo sapiens
tctcagttgagtggt

SEQ ID NO: 534575 - DNA, 15 bp, Homo sapiens
ctcagttgagtggtg

SEQ ID NO: 534576 - DNA, 15 bp, Homo sapiens
tcagttgagtggtga

SEQ ID NO: 534577 - DNA, 15 bp, Homo sapiens
cagttgagtggtgat

SEQ ID NO: 534578 - DNA, 15 bp, Homo sapiens
agttgagtggtgata

SEQ ID NO: 534579 - DNA, 15 bp, Homo sapiens
gttgagtggtgatat

SEQ ID NO: 534580 - DNA, 15 bp, Homo sapiens
ttgagtggtgatata

SEQ ID NO: 534581 - DNA, 15 bp, Homo sapiens
tgagtggtgatatat

SEQ ID NO: 534582 - DNA, 15 bp, Homo sapiens
gagtggtgatatatc

SEQ ID NO: 534583 - DNA, 15 bp, Homo sapiens
agtggtgatatatct

SEQ ID NO: 534584 - DNA, 15 bp, Homo sapiens
gtggtgatatatctt

SEQ ID NO: 534585 - DNA, 15 bp, Homo sapiens
tggtgatatatcttc

SEQ ID NO: 534586 - DNA, 15 bp, Homo sapiens
ggtgatatatcttct

SEQ ID NO: 534587 - DNA, 15 bp, Homo sapiens
gtgatatatcttctg

SEQ ID NO: 534588 - DNA, 15 bp, Homo sapiens
tgatatatcttctga

SEQ ID NO: 534589 - DNA, 15 bp, Homo sapiens
gatatatcttctgaa

SEQ ID NO: 534590 - DNA, 15 bp, Homo sapiens
atatatcttctgaag

SEQ ID NO: 534591 - DNA, 15 bp, Homo sapiens
tatatcttctgaaga

SEQ ID NO: 534592 - DNA, 15 bp, Homo sapiens
atatcttctgaagaa

SEQ ID NO: 534593 - DNA, 15 bp, Homo sapiens
tatcttctgaagaac

SEQ ID NO: 534594 - DNA, 15 bp, Homo sapiens
atcttctgaagaaca

SEQ ID NO: 534595 - DNA, 15 bp, Homo sapiens
tcttctgaagaacaa

SEQ ID NO: 534596 - DNA, 15 bp, Homo sapiens
cttctgaagaacaat

SEQ ID NO: 534597 - DNA, 15 bp, Homo sapiens
ttctgaagaacaata

SEQ ID NO: 534598 - DNA, 15 bp, Homo sapiens
tctgaagaacaataa

SEQ ID NO: 534599 - DNA, 15 bp, Homo sapiens
ctgaagaacaataac

SEQ ID NO: 534600 - DNA, 15 bp, Homo sapiens
tgaagaacaataacg

SEQ ID NO: 534601 - DNA, 15 bp, Homo sapiens
gaagaacaataacgc

SEQ ID NO: 534602 - DNA, 15 bp, Homo sapiens
aagaacaataacgca

SEQ ID NO: 534603 - DNA, 15 bp, Homo sapiens
agaacaataacgcag

SEQ ID NO: 534604 - DNA, 15 bp, Homo sapiens
gaacaataacgcagg

SEQ ID NO: 534605 - DNA, 15 bp, Homo sapiens
aacaataacgcaggt

SEQ ID NO: 534606 - DNA, 15 bp, Homo sapiens
acaataacgcaggtt

SEQ ID NO: 534607 - DNA, 15 bp, Homo sapiens
caataacgcaggtta

SEQ ID NO: 534608 - DNA, 15 bp, Homo sapiens
aataacgcaggttag

SEQ ID NO: 534609 - DNA, 15 bp, Homo sapiens
ataacgcaggttagg

SEQ ID NO: 534610 - DNA, 15 bp, Homo sapiens
taacgcaggttaggg

SEQ ID NO: 534611 - DNA, 15 bp, Homo sapiens
aacgcaggttaggga

SEQ ID NO: 534612 - DNA, 15 bp, Homo sapiens
acgcaggttagggaa

SEQ ID NO: 534613 - DNA, 15 bp, Homo sapiens
cgcaggttagggaat

SEQ ID NO: 534614 - DNA, 15 bp, Homo sapiens
gcaggttagggaatg

SEQ ID NO: 534615 - DNA, 15 bp, Homo sapiens
caggttagggaatgg

SEQ ID NO: 534616 - DNA, 15 bp, Homo sapiens
aggttagggaatgga

SEQ ID NO: 534617 - DNA, 15 bp, Homo sapiens
ggttagggaatggaa

SEQ ID NO: 534618 - DNA, 15 bp, Homo sapiens
gttagggaatggaaa

SEQ ID NO: 534619 - DNA, 15 bp, Homo sapiens
ttagggaatggaaag

SEQ ID NO: 534620 - DNA, 15 bp, Homo sapiens
tagggaatggaaagt

SEQ ID NO: 534621 - DNA, 15 bp, Homo sapiens
agggaatggaaagta

SEQ ID NO: 534622 - DNA, 15 bp, Homo sapiens
gggaatggaaagtaa

SEQ ID NO: 534623 - DNA, 15 bp, Homo sapiens
ggaatggaaagtaat

SEQ ID NO: 534624 - DNA, 15 bp, Homo sapiens
gaatggaaagtaatg

SEQ ID NO: 534625 - DNA, 15 bp, Homo sapiens
aatggaaagtaatga

SEQ ID NO: 534626 - DNA, 15 bp, Homo sapiens
atggaaagtaatgac

SEQ ID NO: 534627 - DNA, 15 bp, Homo sapiens
tggaaagtaatgacg

SEQ ID NO: 534628 - DNA, 15 bp, Homo sapiens
ggaaagtaatgacgc

SEQ ID NO: 534629 - DNA, 15 bp, Homo sapiens
gaaagtaatgacgct

SEQ ID NO: 534630 - DNA, 15 bp, Homo sapiens
aaagtaatgacgcta

SEQ ID NO: 534631 - DNA, 15 bp, Homo sapiens
aagtaatgacgctat

SEQ ID NO: 534632 - DNA, 15 bp, Homo sapiens
agtaatgacgctata

SEQ ID NO: 534633 - DNA, 15 bp, Homo sapiens
gtaatgacgctatat

SEQ ID NO: 534634 - DNA, 15 bp, Homo sapiens
taatgacgctatata

SEQ ID NO: 534635 - DNA, 15 bp, Homo sapiens
aatgacgctatatag

SEQ ID NO: 534636 - DNA, 15 bp, Homo sapiens
atgacgctatatagc

SEQ ID NO: 534637 - DNA, 15 bp, Homo sapiens
tgacgctatatagcc

SEQ ID NO: 534638 - DNA, 15 bp, Homo sapiens
gacgctatatagcca

SEQ ID NO: 534639 - DNA, 15 bp, Homo sapiens
acgctatatagccag

SEQ ID NO: 534640 - DNA, 15 bp, Homo sapiens
cgctatatagccagg

SEQ ID NO: 534641 - DNA, 15 bp, Homo sapiens
gctatatagccagga

SEQ ID NO: 534642 - DNA, 15 bp, Homo sapiens
ctatatagccaggat

SEQ ID NO: 534643 - DNA, 15 bp, Homo sapiens
tatatagccaggatg

SEQ ID NO: 534644 - DNA, 15 bp, Homo sapiens
atatagccaggatgg

SEQ ID NO: 534645 - DNA, 15 bp, Homo sapiens
tatagccaggatggt

SEQ ID NO: 534646 - DNA, 15 bp, Homo sapiens
atagccaggatggtg

SEQ ID NO: 534647 - DNA, 15 bp, Homo sapiens
tagccaggatggtga

SEQ ID NO: 534648 - DNA, 15 bp, Homo sapiens
agccaggatggtgag

SEQ ID NO: 534649 - DNA, 15 bp, Homo sapiens
gccaggatggtgagg

SEQ ID NO: 534650 - DNA, 15 bp, Homo sapiens
ccaggatggtgagga

SEQ ID NO: 534651 - DNA, 15 bp, Homo sapiens
caggatggtgaggag

SEQ ID NO: 534652 - DNA, 15 bp, Homo sapiens
aggatggtgaggaga

SEQ ID NO: 534653 - DNA, 15 bp, Homo sapiens
ggatggtgaggagaa

SEQ ID NO: 534654 - DNA, 15 bp, Homo sapiens
gatggtgaggagaag

SEQ ID NO: 534655 - DNA, 15 bp, Homo sapiens
atggtgaggagaagc

SEQ ID NO: 534656 - DNA, 15 bp, Homo sapiens
tggtgaggagaagcg

SEQ ID NO: 534657 - DNA, 15 bp, Homo sapiens
ggtgaggagaagcgt

SEQ ID NO: 534658 - DNA, 15 bp, Homo sapiens
gtgaggagaagcgtg

SEQ ID NO: 534659 - DNA, 15 bp, Homo sapiens
tgaggagaagcgtgt

SEQ ID NO: 534660 - DNA, 15 bp, Homo sapiens
gaggagaagcgtgtc

SEQ ID NO: 534661 - DNA, 15 bp, Homo sapiens
aggagaagcgtgtct

SEQ ID NO: 534662 - DNA, 15 bp, Homo sapiens
ggagaagcgtgtcta

SEQ ID NO: 534663 - DNA, 15 bp, Homo sapiens
gagaagcgtgtctaa

SEQ ID NO: 534664 - DNA, 15 bp, Homo sapiens
agaagcgtgtctaac

SEQ ID NO: 534665 - DNA, 15 bp, Homo sapiens
gaagcgtgtctaaca

SEQ ID NO: 534666 - DNA, 15 bp, Homo sapiens
aagcgtgtctaacaa

SEQ ID NO: 534667 - DNA, 15 bp, Homo sapiens
agcgtgtctaacaaa

SEQ ID NO: 534668 - DNA, 15 bp, Homo sapiens
gcgtgtctaacaaag

SEQ ID NO: 534669 - DNA, 15 bp, Homo sapiens
cgtgtctaacaaagt

SEQ ID NO: 534670 - DNA, 15 bp, Homo sapiens
gtgtctaacaaagtc

SEQ ID NO: 534671 - DNA, 15 bp, Homo sapiens
tgtctaacaaagtca

SEQ ID NO: 534672 - DNA, 15 bp, Homo sapiens
gtctaacaaagtcac

SEQ ID NO: 534673 - DNA, 15 bp, Homo sapiens
tctaacaaagtcaca

SEQ ID NO: 534674 - DNA, 15 bp, Homo sapiens
ctaacaaagtcacag

SEQ ID NO: 534675 - DNA, 15 bp, Homo sapiens
taacaaagtcacagt

SEQ ID NO: 534676 - DNA, 15 bp, Homo sapiens
aacaaagtcacagtc

SEQ ID NO: 534677 - DNA, 15 bp, Homo sapiens
acaaagtcacagtcg

SEQ ID NO: 534678 - DNA, 15 bp, Homo sapiens
caaagtcacagtcgg

SEQ ID NO: 534679 - DNA, 15 bp, Homo sapiens
aaagtcacagtcggg

SEQ ID NO: 534680 - DNA, 15 bp, Homo sapiens
aagtcacagtcgggc

SEQ ID NO: 534681 - DNA, 15 bp, Homo sapiens
agtcacagtcgggca

SEQ ID NO: 534682 - DNA, 15 bp, Homo sapiens
gtcacagtcgggcag

SEQ ID NO: 534683 - DNA, 15 bp, Homo sapiens
tcacagtcgggcaga

SEQ ID NO: 534684 - DNA, 15 bp, Homo sapiens
cacagtcgggcagag

SEQ ID NO: 534685 - DNA, 15 bp, Homo sapiens
acagtcgggcagagg

SEQ ID NO: 534686 - DNA, 15 bp, Homo sapiens
cagtcgggcagaggc

SEQ ID NO: 534687 - DNA, 15 bp, Homo sapiens
agtcgggcagaggca

SEQ ID NO: 534688 - DNA, 15 bp, Homo sapiens
gtcgggcagaggcac

SEQ ID NO: 534689 - DNA, 15 bp, Homo sapiens
tcgggcagaggcact

SEQ ID NO: 534690 - DNA, 15 bp, Homo sapiens
cgggcagaggcactc

SEQ ID NO: 534691 - DNA, 15 bp, Homo sapiens
gggcagaggcactct

SEQ ID NO: 534692 - DNA, 15 bp, Homo sapiens
ggcagaggcactctc

SEQ ID NO: 534693 - DNA, 15 bp, Homo sapiens
gcagaggcactctct

SEQ ID NO: 534694 - DNA, 15 bp, Homo sapiens
cagaggcactctctc

SEQ ID NO: 534695 - DNA, 15 bp, Homo sapiens
agaggcactctctcg

SEQ ID NO: 534696 - DNA, 15 bp, Homo sapiens
gaggcactctctcgt

SEQ ID NO: 534697 - DNA, 15 bp, Homo sapiens
aggcactctctcgtc

SEQ ID NO: 534698 - DNA, 15 bp, Homo sapiens
ggcactctctcgtca

SEQ ID NO: 534699 - DNA, 15 bp, Homo sapiens
gcactctctcgtcat

SEQ ID NO: 534700 - DNA, 15 bp, Homo sapiens
cactctctcgtcatt

SEQ ID NO: 534701 - DNA, 15 bp, Homo sapiens
actctctcgtcatta

SEQ ID NO: 534702 - DNA, 15 bp, Homo sapiens
ctctctcgtcattaa

SEQ ID NO: 534703 - DNA, 15 bp, Homo sapiens
tctctcgtcattaac

SEQ ID NO: 534704 - DNA, 15 bp, Homo sapiens
ctctcgtcattaact

SEQ ID NO: 534705 - DNA, 15 bp, Homo sapiens
tctcgtcattaactc

SEQ ID NO: 534706 - DNA, 15 bp, Homo sapiens
ctcgtcattaactcc

SEQ ID NO: 534707 - DNA, 15 bp, Homo sapiens
tcgtcattaactcca

SEQ ID NO: 534708 - DNA, 15 bp, Homo sapiens
cgtcattaactccag

SEQ ID NO: 534709 - DNA, 15 bp, Homo sapiens
gtcattaactccaga

SEQ ID NO: 534710 - DNA, 15 bp, Homo sapiens
tcattaactccagaa

SEQ ID NO: 534711 - DNA, 15 bp, Homo sapiens
cattaactccagaag

SEQ ID NO: 534712 - DNA, 15 bp, Homo sapiens
attaactccagaaga

SEQ ID NO: 534713 - DNA, 15 bp, Homo sapiens
ttaactccagaagag

SEQ ID NO: 534714 - DNA, 15 bp, Homo sapiens
taactccagaagagt

SEQ ID NO: 534715 - DNA, 15 bp, Homo sapiens
aactccagaagagta

SEQ ID NO: 534716 - DNA, 15 bp, Homo sapiens
actccagaagagtac

SEQ ID NO: 534717 - DNA, 15 bp, Homo sapiens
ctccagaagagtaca

SEQ ID NO: 534718 - DNA, 15 bp, Homo sapiens
tccagaagagtacag

SEQ ID NO: 534719 - DNA, 15 bp, Homo sapiens
ccagaagagtacagc

SEQ ID NO: 534720 - DNA, 15 bp, Homo sapiens
cagaagagtacagca

SEQ ID NO: 534721 - DNA, 15 bp, Homo sapiens
agaagagtacagcac

SEQ ID NO: 534722 - DNA, 15 bp, Homo sapiens
gaagagtacagcacc

SEQ ID NO: 534723 - DNA, 15 bp, Homo sapiens
aagagtacagcacca

SEQ ID NO: 534724 - DNA, 15 bp, Homo sapiens
agagtacagcaccaa

SEQ ID NO: 534725 - DNA, 15 bp, Homo sapiens
gagtacagcaccaac

SEQ ID NO: 534726 - DNA, 15 bp, Homo sapiens
agtacagcaccaacc

SEQ ID NO: 534727 - DNA, 15 bp, Homo sapiens
gtacagcaccaacca

SEQ ID NO: 534728 - DNA, 15 bp, Homo sapiens
tacagcaccaaccac

SEQ ID NO: 534729 - DNA, 15 bp, Homo sapiens
acagcaccaaccaca

SEQ ID NO: 534730 - DNA, 15 bp, Homo sapiens
cagcaccaaccacac

SEQ ID NO: 534731 - DNA, 15 bp, Homo sapiens
agcaccaaccacaca

SEQ ID NO: 534732 - DNA, 15 bp, Homo sapiens
gcaccaaccacacag

SEQ ID NO: 534733 - DNA, 15 bp, Homo sapiens
caccaaccacacagc

SEQ ID NO: 534734 - DNA, 15 bp, Homo sapiens
accaaccacacagcc

SEQ ID NO: 534735 - DNA, 15 bp, Homo sapiens
ccaaccacacagcca

SEQ ID NO: 534736 - DNA, 15 bp, Homo sapiens
caaccacacagccag

SEQ ID NO: 534737 - DNA, 15 bp, Homo sapiens
aaccacacagccagt

SEQ ID NO: 534738 - DNA, 15 bp, Homo sapiens
accacacagccagtc

SEQ ID NO: 534739 - DNA, 15 bp, Homo sapiens
ccacacagccagtca

SEQ ID NO: 534740 - DNA, 15 bp, Homo sapiens
cacacagccagtcaa

SEQ ID NO: 534741 - DNA, 15 bp, Homo sapiens
acacagccagtcaac

SEQ ID NO: 534742 - DNA, 15 bp, Homo sapiens
cacagccagtcaaca

SEQ ID NO: 534743 - DNA, 15 bp, Homo sapiens
acagccagtcaacaa

SEQ ID NO: 534744 - DNA, 15 bp, Homo sapiens
cagccagtcaacaat

SEQ ID NO: 534745 - DNA, 15 bp, Homo sapiens
agccagtcaacaatg

SEQ ID NO: 534746 - DNA, 15 bp, Homo sapiens
gccagtcaacaatgg

SEQ ID NO: 534747 - DNA, 15 bp, Homo sapiens
ccagtcaacaatgga

SEQ ID NO: 534748 - DNA, 15 bp, Homo sapiens
cagtcaacaatggac

SEQ ID NO: 534749 - DNA, 15 bp, Homo sapiens
agtcaacaatggaca

SEQ ID NO: 534750 - DNA, 15 bp, Homo sapiens
gtcaacaatggacaa

SEQ ID NO: 534751 - DNA, 15 bp, Homo sapiens
tcaacaatggacaag

SEQ ID NO: 534752 - DNA, 15 bp, Homo sapiens
caacaatggacaagc

SEQ ID NO: 534753 - DNA, 15 bp, Homo sapiens
aacaatggacaagca

SEQ ID NO: 534754 - DNA, 15 bp, Homo sapiens
acaatggacaagcac

SEQ ID NO: 534755 - DNA, 15 bp, Homo sapiens
caatggacaagcaca

SEQ ID NO: 534756 - DNA, 15 bp, Homo sapiens
aatggacaagcacag

SEQ ID NO: 534757 - DNA, 15 bp, Homo sapiens
atggacaagcacagc

SEQ ID NO: 534758 - DNA, 15 bp, Homo sapiens
tggacaagcacagcc

SEQ ID NO: 534759 - DNA, 15 bp, Homo sapiens
ggacaagcacagccc

SEQ ID NO: 534760 - DNA, 15 bp, Homo sapiens
gacaagcacagcccg

SEQ ID NO: 534761 - DNA, 15 bp, Homo sapiens
acaagcacagcccga

SEQ ID NO: 534762 - DNA, 15 bp, Homo sapiens
caagcacagcccgaa

SEQ ID NO: 534763 - DNA, 15 bp, Homo sapiens
aagcacagcccgaaa

SEQ ID NO: 534764 - DNA, 15 bp, Homo sapiens
agcacagcccgaaag

SEQ ID NO: 534765 - DNA, 15 bp, Homo sapiens
gcacagcccgaaaga

SEQ ID NO: 534766 - DNA, 15 bp, Homo sapiens
cacagcccgaaagaa

SEQ ID NO: 534767 - DNA, 15 bp, Homo sapiens
acagcccgaaagaag

SEQ ID NO: 534768 - DNA, 15 bp, Homo sapiens
cagcccgaaagaagg

SEQ ID NO: 534769 - DNA, 15 bp, Homo sapiens
agcccgaaagaaggg

SEQ ID NO: 534770 - DNA, 15 bp, Homo sapiens
gcccgaaagaagggc

SEQ ID NO: 534771 - DNA, 15 bp, Homo sapiens
cccgaaagaagggcc

SEQ ID NO: 534772 - DNA, 15 bp, Homo sapiens
ccgaaagaagggcca

SEQ ID NO: 534773 - DNA, 15 bp, Homo sapiens
cgaaagaagggccag

SEQ ID NO: 534774 - DNA, 15 bp, Homo sapiens
gaaagaagggccagg

SEQ ID NO: 534775 - DNA, 15 bp, Homo sapiens
aaagaagggccaggg

SEQ ID NO: 534776 - DNA, 15 bp, Homo sapiens
aagaagggccagggt

SEQ ID NO: 534777 - DNA, 15 bp, Homo sapiens
agaagggccagggtt

SEQ ID NO: 534778 - DNA, 15 bp, Homo sapiens
gaagggccagggtta

SEQ ID NO: 534779 - DNA, 15 bp, Homo sapiens
aagggccagggttat

SEQ ID NO: 534780 - DNA, 15 bp, Homo sapiens
agggccagggttatg

SEQ ID NO: 534781 - DNA, 15 bp, Homo sapiens
gggccagggttatgg

SEQ ID NO: 534782 - DNA, 15 bp, Homo sapiens
ggccagggttatggc

SEQ ID NO: 534783 - DNA, 15 bp, Homo sapiens
gccagggttatggct

SEQ ID NO: 534784 - DNA, 15 bp, Homo sapiens
ccagggttatggctg

SEQ ID NO: 534785 - DNA, 15 bp, Homo sapiens
cagggttatggctgg

SEQ ID NO: 534786 - DNA, 15 bp, Homo sapiens
agggttatggctggc

SEQ ID NO: 534787 - DNA, 15 bp, Homo sapiens
gggttatggctggct

SEQ ID NO: 534788 - DNA, 15 bp, Homo sapiens
ggttatggctggctc

SEQ ID NO: 534789 - DNA, 15 bp, Homo sapiens
gttatggctggctct

SEQ ID NO: 534790 - DNA, 15 bp, Homo sapiens
ttatggctggctctg

SEQ ID NO: 534791 - DNA, 15 bp, Homo sapiens
tatggctggctctgc

SEQ ID NO: 534792 - DNA, 15 bp, Homo sapiens
atggctggctctgca

SEQ ID NO: 534793 - DNA, 15 bp, Homo sapiens
tggctggctctgcaa

SEQ ID NO: 534794 - DNA, 15 bp, Homo sapiens
ggctggctctgcaag

SEQ ID NO: 534795 - DNA, 15 bp, Homo sapiens
gctggctctgcaagg

SEQ ID NO: 534796 - DNA, 15 bp, Homo sapiens
ctggctctgcaaggc

SEQ ID NO: 534797 - DNA, 15 bp, Homo sapiens
tggctctgcaaggct

SEQ ID NO: 534798 - DNA, 15 bp, Homo sapiens
ggctctgcaaggctc

SEQ ID NO: 534799 - DNA, 15 bp, Homo sapiens
gctctgcaaggctct

SEQ ID NO: 534800 - DNA, 15 bp, Homo sapiens
ctctgcaaggctctg

SEQ ID NO: 534801 - DNA, 15 bp, Homo sapiens
tctgcaaggctctgg

SEQ ID NO: 534802 - DNA, 15 bp, Homo sapiens
ctgcaaggctctgga

SEQ ID NO: 534803 - DNA, 15 bp, Homo sapiens
tgcaaggctctggag

SEQ ID NO: 534804 - DNA, 15 bp, Homo sapiens
gcaaggctctggagg

SEQ ID NO: 534805 - DNA, 15 bp, Homo sapiens
caaggctctggaggg

SEQ ID NO: 534806 - DNA, 15 bp, Homo sapiens
aaggctctggagggc

SEQ ID NO: 534807 - DNA, 15 bp, Homo sapiens
aggctctggagggca

SEQ ID NO: 534808 - DNA, 15 bp, Homo sapiens
ggctctggagggcag

SEQ ID NO: 534809 - DNA, 15 bp, Homo sapiens
gctctggagggcagg

SEQ ID NO: 534810 - DNA, 15 bp, Homo sapiens
ctctggagggcaggt

SEQ ID NO: 534811 - DNA, 15 bp, Homo sapiens
tctggagggcaggtt

SEQ ID NO: 534812 - DNA, 15 bp, Homo sapiens
ctggagggcaggttg

SEQ ID NO: 534813 - DNA, 15 bp, Homo sapiens
tggagggcaggttgt

SEQ ID NO: 534814 - DNA, 15 bp, Homo sapiens
ggagggcaggttgtc

SEQ ID NO: 534815 - DNA, 15 bp, Homo sapiens
gagggcaggttgtca

SEQ ID NO: 534816 - DNA, 15 bp, Homo sapiens
agggcaggttgtcac

SEQ ID NO: 534817 - DNA, 15 bp, Homo sapiens
gggcaggttgtcact

SEQ ID NO: 534818 - DNA, 15 bp, Homo sapiens
ggcaggttgtcactg

SEQ ID NO: 534819 - DNA, 15 bp, Homo sapiens
gcaggttgtcactgg

SEQ ID NO: 534820 - DNA, 15 bp, Homo sapiens
caggttgtcactggc

SEQ ID NO: 534821 - DNA, 15 bp, Homo sapiens
aggttgtcactggca

SEQ ID NO: 534822 - DNA, 15 bp, Homo sapiens
ggttgtcactggcag

SEQ ID NO: 534823 - DNA, 15 bp, Homo sapiens
gttgtcactggcagg

SEQ ID NO: 534824 - DNA, 15 bp, Homo sapiens
ttgtcactggcaggg

SEQ ID NO: 534825 - DNA, 15 bp, Homo sapiens
tgtcactggcagggc

SEQ ID NO: 534826 - DNA, 15 bp, Homo sapiens
gtcactggcagggca

SEQ ID NO: 534827 - DNA, 15 bp, Homo sapiens
tcactggcagggcag

SEQ ID NO: 534828 - DNA, 15 bp, Homo sapiens
cactggcagggcagg

SEQ ID NO: 534829 - DNA, 15 bp, Homo sapiens
actggcagggcaggg

SEQ ID NO: 534830 - DNA, 15 bp, Homo sapiens
ctggcagggcaggga

SEQ ID NO: 534831 - DNA, 15 bp, Homo sapiens
tggcagggcagggaa

SEQ ID NO: 534832 - DNA, 15 bp, Homo sapiens
ggcagggcagggaaa

SEQ ID NO: 534833 - DNA, 15 bp, Homo sapiens
gcagggcagggaaac

SEQ ID NO: 534834 - DNA, 15 bp, Homo sapiens
cagggcagggaaaca

SEQ ID NO: 534835 - DNA, 15 bp, Homo sapiens
agggcagggaaacat

SEQ ID NO: 534836 - DNA, 15 bp, Homo sapiens
gggcagggaaacatc

SEQ ID NO: 534837 - DNA, 15 bp, Homo sapiens
ggcagggaaacatct

SEQ ID NO: 534838 - DNA, 15 bp, Homo sapiens
gcagggaaacatctg

SEQ ID NO: 534839 - DNA, 15 bp, Homo sapiens
cagggaaacatctgg

SEQ ID NO: 534840 - DNA, 15 bp, Homo sapiens
agggaaacatctgga

SEQ ID NO: 534841 - DNA, 15 bp, Homo sapiens
gggaaacatctggac

SEQ ID NO: 534842 - DNA, 15 bp, Homo sapiens
ggaaacatctggaca

SEQ ID NO: 534843 - DNA, 15 bp, Homo sapiens
gaaacatctggacaa

SEQ ID NO: 534844 - DNA, 15 bp, Homo sapiens
aaacatctggacaag

SEQ ID NO: 534845 - DNA, 15 bp, Homo sapiens
aacatctggacaagg

SEQ ID NO: 534846 - DNA, 15 bp, Homo sapiens
acatctggacaaggt

SEQ ID NO: 534847 - DNA, 15 bp, Homo sapiens
catctggacaaggtt

SEQ ID NO: 534848 - DNA, 15 bp, Homo sapiens
atctggacaaggttt

SEQ ID NO: 534849 - DNA, 15 bp, Homo sapiens
tctggacaaggtttg

SEQ ID NO: 534850 - DNA, 15 bp, Homo sapiens
ctggacaaggtttgg

SEQ ID NO: 534851 - DNA, 15 bp, Homo sapiens
tggacaaggtttgga

SEQ ID NO: 534852 - DNA, 15 bp, Homo sapiens
ggacaaggtttggaa

SEQ ID NO: 534853 - DNA, 15 bp, Homo sapiens
gacaaggtttggaag

SEQ ID NO: 534854 - DNA, 15 bp, Homo sapiens
acaaggtttggaaga

SEQ ID NO: 534855 - DNA, 15 bp, Homo sapiens
caaggtttggaagaa

SEQ ID NO: 534856 - DNA, 15 bp, Homo sapiens
aaggtttggaagaag

SEQ ID NO: 534857 - DNA, 15 bp, Homo sapiens
aggtttggaagaagc

SEQ ID NO: 534858 - DNA, 15 bp, Homo sapiens
ggtttggaagaagca

SEQ ID NO: 534859 - DNA, 15 bp, Homo sapiens
gtttggaagaagcag

SEQ ID NO: 534860 - DNA, 15 bp, Homo sapiens
tttggaagaagcagc

SEQ ID NO: 534861 - DNA, 15 bp, Homo sapiens
ttggaagaagcagca

SEQ ID NO: 534862 - DNA, 15 bp, Homo sapiens
tggaagaagcagcag

SEQ ID NO: 534863 - DNA, 15 bp, Homo sapiens
ggaagaagcagcaga

SEQ ID NO: 534864 - DNA, 15 bp, Homo sapiens
gaagaagcagcagag

SEQ ID NO: 534865 - DNA, 15 bp, Homo sapiens
aagaagcagcagagt

SEQ ID NO: 534866 - DNA, 15 bp, Homo sapiens
agaagcagcagagtg

SEQ ID NO: 534867 - DNA, 15 bp, Homo sapiens
gaagcagcagagtga

SEQ ID NO: 534868 - DNA, 15 bp, Homo sapiens
aagcagcagagtgag

SEQ ID NO: 534869 - DNA, 15 bp, Homo sapiens
agcagcagagtgagg

SEQ ID NO: 534870 - DNA, 15 bp, Homo sapiens
gcagcagagtgagga

SEQ ID NO: 534871 - DNA, 15 bp, Homo sapiens
cagcagagtgaggaa

SEQ ID NO: 534872 - DNA, 15 bp, Homo sapiens
agcagagtgaggaat

SEQ ID NO: 534873 - DNA, 15 bp, Homo sapiens
gcagagtgaggaata

SEQ ID NO: 534874 - DNA, 15 bp, Homo sapiens
cagagtgaggaatac

SEQ ID NO: 534875 - DNA, 15 bp, Homo sapiens
agagtgaggaatact

SEQ ID NO: 534876 - DNA, 15 bp, Homo sapiens
gagtgaggaatactt

SEQ ID NO: 534877 - DNA, 15 bp, Homo sapiens
agtgaggaatacttg

SEQ ID NO: 534878 - DNA, 15 bp, Homo sapiens
gtgaggaatacttgg

SEQ ID NO: 534879 - DNA, 15 bp, Homo sapiens
tgaggaatacttggg

SEQ ID NO: 534880 - DNA, 15 bp, Homo sapiens
gaggaatacttggga

SEQ ID NO: 534881 - DNA, 15 bp, Homo sapiens
aggaatacttgggaa

SEQ ID NO: 534882 - DNA, 15 bp, Homo sapiens
ggaatacttgggaac

SEQ ID NO: 534883 - DNA, 15 bp, Homo sapiens
gaatacttgggaaca

SEQ ID NO: 534884 - DNA, 15 bp, Homo sapiens
aatacttgggaacag

SEQ ID NO: 534885 - DNA, 15 bp, Homo sapiens
atacttgggaacaga

SEQ ID NO: 534886 - DNA, 15 bp, Homo sapiens
tacttgggaacagag

SEQ ID NO: 534887 - DNA, 15 bp, Homo sapiens
acttgggaacagagg

SEQ ID NO: 534888 - DNA, 15 bp, Homo sapiens
cttgggaacagaggc

SEQ ID NO: 534889 - DNA, 15 bp, Homo sapiens
ttgggaacagaggct

SEQ ID NO: 534890 - DNA, 15 bp, Homo sapiens
tgggaacagaggctt

SEQ ID NO: 534891 - DNA, 15 bp, Homo sapiens
gggaacagaggcttg

SEQ ID NO: 534892 - DNA, 15 bp, Homo sapiens
ggaacagaggcttga

SEQ ID NO: 534893 - DNA, 15 bp, Homo sapiens
gaacagaggcttgac

SEQ ID NO: 534894 - DNA, 15 bp, Homo sapiens
aacagaggcttgact

SEQ ID NO: 534895 - DNA, 15 bp, Homo sapiens
acagaggcttgactt

SEQ ID NO: 534896 - DNA, 15 bp, Homo sapiens
cagaggcttgacttc

SEQ ID NO: 534897 - DNA, 15 bp, Homo sapiens
agaggcttgacttct

SEQ ID NO: 534898 - DNA, 15 bp, Homo sapiens
gaggcttgacttctg

SEQ ID NO: 534899 - DNA, 15 bp, Homo sapiens
aggcttgacttctgt

SEQ ID NO: 534900 - DNA, 15 bp, Homo sapiens
ggcttgacttctgtc

SEQ ID NO: 534901 - DNA, 15 bp, Homo sapiens
gcttgacttctgtcc

SEQ ID NO: 534902 - DNA, 15 bp, Homo sapiens
cttgacttctgtcct

SEQ ID NO: 534903 - DNA, 15 bp, Homo sapiens
ttgacttctgtcctc

SEQ ID NO: 534904 - DNA, 15 bp, Homo sapiens
tgacttctgtcctca

SEQ ID NO: 534905 - DNA, 15 bp, Homo sapiens
gtggaaagactgaat

SEQ ID NO: 534906 - DNA, 15 bp, Homo sapiens
tggaaagactgaatt

SEQ ID NO: 534907 - DNA, 15 bp, Homo sapiens
ggaaagactgaattg

SEQ ID NO: 534908 - DNA, 15 bp, Homo sapiens
gaaagactgaattga

SEQ ID NO: 534909 - DNA, 15 bp, Homo sapiens
aaagactgaattgaa

SEQ ID NO: 534910 - DNA, 15 bp, Homo sapiens
aagactgaattgaac

SEQ ID NO: 534911 - DNA, 15 bp, Homo sapiens
agactgaattgaact

SEQ ID NO: 534912 - DNA, 15 bp, Homo sapiens
gactgaattgaacta

SEQ ID NO: 534913 - DNA, 15 bp, Homo sapiens
actgaattgaactag

SEQ ID NO: 534914 - DNA, 15 bp, Homo sapiens
ctgaattgaactaga

SEQ ID NO: 534915 - DNA, 15 bp, Homo sapiens
tgaattgaactagac

SEQ ID NO: 534916 - DNA, 15 bp, Homo sapiens
gaattgaactagact

SEQ ID NO: 534917 - DNA, 15 bp, Homo sapiens
aattgaactagacta

SEQ ID NO: 534918 - DNA, 15 bp, Homo sapiens
attgaactagactac

SEQ ID NO: 534919 - DNA, 15 bp, Homo sapiens
ttgaactagactaca

SEQ ID NO: 534920 - DNA, 15 bp, Homo sapiens
tgaactagactacag

SEQ ID NO: 534921 - DNA, 15 bp, Homo sapiens
gaactagactacaga

SEQ ID NO: 534922 - DNA, 15 bp, Homo sapiens
aactagactacagag

SEQ ID NO: 534923 - DNA, 15 bp, Homo sapiens
actagactacagagg

SEQ ID NO: 534924 - DNA, 15 bp, Homo sapiens
ctagactacagagga

SEQ ID NO: 534925 - DNA, 15 bp, Homo sapiens
tagactacagaggac

SEQ ID NO: 534926 - DNA, 15 bp, Homo sapiens
agactacagaggacc

SEQ ID NO: 534927 - DNA, 15 bp, Homo sapiens
gactacagaggacct

SEQ ID NO: 534928 - DNA, 15 bp, Homo sapiens
actacagaggacctt

SEQ ID NO: 534929 - DNA, 15 bp, Homo sapiens
ctacagaggacctta

SEQ ID NO: 534930 - DNA, 15 bp, Homo sapiens
tacagaggaccttac

SEQ ID NO: 534931 - DNA, 15 bp, Homo sapiens
acagaggaccttaca

SEQ ID NO: 534932 - DNA, 15 bp, Homo sapiens
cagaggaccttacat

SEQ ID NO: 534933 - DNA, 15 bp, Homo sapiens
agaggaccttacata

SEQ ID NO: 534934 - DNA, 15 bp, Homo sapiens
gaggaccttacatac

SEQ ID NO: 534935 - DNA, 15 bp, Homo sapiens
aggaccttacatact

SEQ ID NO: 534936 - DNA, 15 bp, Homo sapiens
ggaccttacatacta

SEQ ID NO: 534937 - DNA, 15 bp, Homo sapiens
gaccttacatactat

SEQ ID NO: 534938 - DNA, 15 bp, Homo sapiens
accttacatactata

SEQ ID NO: 534939 - DNA, 15 bp, Homo sapiens
ccttacatactataa

SEQ ID NO: 534940 - DNA, 15 bp, Homo sapiens
cttacatactataac

SEQ ID NO: 534941 - DNA, 15 bp, Homo sapiens
ttacatactataaca

SEQ ID NO: 534942 - DNA, 15 bp, Homo sapiens
tacatactataacaa

SEQ ID NO: 534943 - DNA, 15 bp, Homo sapiens
acatactataacaaa

SEQ ID NO: 534944 - DNA, 15 bp, Homo sapiens
catactataacaaag

SEQ ID NO: 534945 - DNA, 15 bp, Homo sapiens
atactataacaaaga

SEQ ID NO: 534946 - DNA, 15 bp, Homo sapiens
tactataacaaagaa

SEQ ID NO: 534947 - DNA, 15 bp, Homo sapiens
actataacaaagaat

SEQ ID NO: 534948 - DNA, 15 bp, Homo sapiens
ctataacaaagaatt

SEQ ID NO: 534949 - DNA, 15 bp, Homo sapiens
tataacaaagaattt

SEQ ID NO: 534950 - DNA, 15 bp, Homo sapiens
ataacaaagaatttg

SEQ ID NO: 534951 - DNA, 15 bp, Homo sapiens
taacaaagaatttgg

SEQ ID NO: 534952 - DNA, 15 bp, Homo sapiens
aacaaagaatttggg

SEQ ID NO: 534953 - DNA, 15 bp, Homo sapiens
acaaagaatttgggg

SEQ ID NO: 534954 - DNA, 15 bp, Homo sapiens
caaagaatttggggg

SEQ ID NO: 534955 - DNA, 15 bp, Homo sapiens
aaagaatttgggggt

SEQ ID NO: 534956 - DNA, 15 bp, Homo sapiens
aagaatttgggggtg

SEQ ID NO: 534957 - DNA, 15 bp, Homo sapiens
agaatttgggggtga

SEQ ID NO: 534958 - DNA, 15 bp, Homo sapiens
gaatttgggggtgag

SEQ ID NO: 534959 - DNA, 15 bp, Homo sapiens
aatttgggggtgagt

SEQ ID NO: 534960 - DNA, 15 bp, Homo sapiens
atttgggggtgagta

SEQ ID NO: 534961 - DNA, 15 bp, Homo sapiens
tttgggggtgagtat

SEQ ID NO: 534962 - DNA, 15 bp, Homo sapiens
ttgggggtgagtatg

SEQ ID NO: 534963 - DNA, 15 bp, Homo sapiens
tgggggtgagtatgg

SEQ ID NO: 534964 - DNA, 15 bp, Homo sapiens
gggggtgagtatggt

SEQ ID NO: 534965 - DNA, 15 bp, Homo sapiens
ggggtgagtatggtg

SEQ ID NO: 534966 - DNA, 15 bp, Homo sapiens
gggtgagtatggtgg

SEQ ID NO: 534967 - DNA, 15 bp, Homo sapiens
ggtgagtatggtggc

SEQ ID NO: 534968 - DNA, 15 bp, Homo sapiens
gtgagtatggtggct

SEQ ID NO: 534969 - DNA, 15 bp, Homo sapiens
tgagtatggtggctc

SEQ ID NO: 534970 - DNA, 15 bp, Homo sapiens
gagtatggtggctca

SEQ ID NO: 534971 - DNA, 15 bp, Homo sapiens
agtatggtggctcat

SEQ ID NO: 534972 - DNA, 15 bp, Homo sapiens
gtatggtggctcatg

SEQ ID NO: 534973 - DNA, 15 bp, Homo sapiens
tatggtggctcatgc

SEQ ID NO: 534974 - DNA, 15 bp, Homo sapiens
atggtggctcatgcc

SEQ ID NO: 534975 - DNA, 15 bp, Homo sapiens
tggtggctcatgcct

SEQ ID NO: 534976 - DNA, 15 bp, Homo sapiens
ggtggctcatgcctg

SEQ ID NO: 534977 - DNA, 15 bp, Homo sapiens
gtggctcatgcctgt

SEQ ID NO: 534978 - DNA, 15 bp, Homo sapiens
tggctcatgcctgta

SEQ ID NO: 534979 - DNA, 15 bp, Homo sapiens
ggctcatgcctgtaa

SEQ ID NO: 534980 - DNA, 15 bp, Homo sapiens
gctcatgcctgtaat

SEQ ID NO: 534981 - DNA, 15 bp, Homo sapiens
ctcatgcctgtaatc

SEQ ID NO: 534982 - DNA, 15 bp, Homo sapiens
tcatgcctgtaatcc

SEQ ID NO: 534983 - DNA, 15 bp, Homo sapiens
catgcctgtaatccc

SEQ ID NO: 534984 - DNA, 15 bp, Homo sapiens
atgcctgtaatccca

SEQ ID NO: 534985 - DNA, 15 bp, Homo sapiens
tgcctgtaatcccag

SEQ ID NO: 534986 - DNA, 15 bp, Homo sapiens
gcctgtaatcccagt

SEQ ID NO: 534987 - DNA, 15 bp, Homo sapiens
cctgtaatcccagtt

SEQ ID NO: 534988 - DNA, 15 bp, Homo sapiens
ctgtaatcccagttc

SEQ ID NO: 534989 - DNA, 15 bp, Homo sapiens
tgtaatcccagttct

SEQ ID NO: 534990 - DNA, 15 bp, Homo sapiens
gtaatcccagttctt

SEQ ID NO: 534991 - DNA, 15 bp, Homo sapiens
taatcccagttcttt

SEQ ID NO: 534992 - DNA, 15 bp, Homo sapiens
aatcccagttctttg

SEQ ID NO: 534993 - DNA, 15 bp, Homo sapiens
atcccagttctttgg

SEQ ID NO: 534994 - DNA, 15 bp, Homo sapiens
tcccagttctttggg

SEQ ID NO: 534995 - DNA, 15 bp, Homo sapiens
cccagttctttggga

SEQ ID NO: 534996 - DNA, 15 bp, Homo sapiens
ccagttctttgggag

SEQ ID NO: 534997 - DNA, 15 bp, Homo sapiens
cagttctttgggaga

SEQ ID NO: 534998 - DNA, 15 bp, Homo sapiens
agttctttgggagac

SEQ ID NO: 534999 - DNA, 15 bp, Homo sapiens
gttctttgggagacg

SEQ ID NO: 535000 - DNA, 15 bp, Homo sapiens
ttctttgggagacgg

SEQ ID NO: 535001 - DNA, 15 bp, Homo sapiens
tctttgggagacgga

SEQ ID NO: 535002 - DNA, 15 bp, Homo sapiens
ctttgggagacggaa

SEQ ID NO: 535003 - DNA, 15 bp, Homo sapiens
tttgggagacggaaa

SEQ ID NO: 535004 - DNA, 15 bp, Homo sapiens
ttgggagacggaaat

SEQ ID NO: 535005 - DNA, 15 bp, Homo sapiens
tgggagacggaaatg

SEQ ID NO: 535006 - DNA, 15 bp, Homo sapiens
gggagacggaaatgg

SEQ ID NO: 535007 - DNA, 15 bp, Homo sapiens
ggagacggaaatggg

SEQ ID NO: 535008 - DNA, 15 bp, Homo sapiens
gagacggaaatgggt

SEQ ID NO: 535009 - DNA, 15 bp, Homo sapiens
agacggaaatgggtg

SEQ ID NO: 535010 - DNA, 15 bp, Homo sapiens
gacggaaatgggtgg

SEQ ID NO: 535011 - DNA, 15 bp, Homo sapiens
acggaaatgggtgga

SEQ ID NO: 535012 - DNA, 15 bp, Homo sapiens
cggaaatgggtggat

SEQ ID NO: 535013 - DNA, 15 bp, Homo sapiens
ggaaatgggtggatc

SEQ ID NO: 535014 - DNA, 15 bp, Homo sapiens
gaaatgggtggatca

SEQ ID NO: 535015 - DNA, 15 bp, Homo sapiens
aaatgggtggatcac

SEQ ID NO: 535016 - DNA, 15 bp, Homo sapiens
aatgggtggatcact

SEQ ID NO: 535017 - DNA, 15 bp, Homo sapiens
atgggtggatcactt

SEQ ID NO: 535018 - DNA, 15 bp, Homo sapiens
tgggtggatcacttg

SEQ ID NO: 535019 - DNA, 15 bp, Homo sapiens
gggtggatcacttga

SEQ ID NO: 535020 - DNA, 15 bp, Homo sapiens
ggtggatcacttgag

SEQ ID NO: 535021 - DNA, 15 bp, Homo sapiens
gtggatcacttgagc

SEQ ID NO: 535022 - DNA, 15 bp, Homo sapiens
tggatcacttgagcc

SEQ ID NO: 535023 - DNA, 15 bp, Homo sapiens
ggatcacttgagccc

SEQ ID NO: 535024 - DNA, 15 bp, Homo sapiens
gatcacttgagccca

SEQ ID NO: 535025 - DNA, 15 bp, Homo sapiens
atcacttgagcccag

SEQ ID NO: 535026 - DNA, 15 bp, Homo sapiens
tcacttgagcccagg

SEQ ID NO: 535027 - DNA, 15 bp, Homo sapiens
cacttgagcccagga

SEQ ID NO: 535028 - DNA, 15 bp, Homo sapiens
acttgagcccaggaa

SEQ ID NO: 535029 - DNA, 15 bp, Homo sapiens
cttgagcccaggaat

SEQ ID NO: 535030 - DNA, 15 bp, Homo sapiens
ttgagcccaggaatt

SEQ ID NO: 535031 - DNA, 15 bp, Homo sapiens
tgagcccaggaattc

SEQ ID NO: 535032 - DNA, 15 bp, Homo sapiens
gagcccaggaattca

SEQ ID NO: 535033 - DNA, 15 bp, Homo sapiens
agcccaggaattcaa

SEQ ID NO: 535034 - DNA, 15 bp, Homo sapiens
gcccaggaattcaag

SEQ ID NO: 535035 - DNA, 15 bp, Homo sapiens
cccaggaattcaaga

SEQ ID NO: 535036 - DNA, 15 bp, Homo sapiens
ccaggaattcaagac

SEQ ID NO: 535037 - DNA, 15 bp, Homo sapiens
caggaattcaagacc

SEQ ID NO: 535038 - DNA, 15 bp, Homo sapiens
aggaattcaagacca

SEQ ID NO: 535039 - DNA, 15 bp, Homo sapiens
ggaattcaagaccag

SEQ ID NO: 535040 - DNA, 15 bp, Homo sapiens
gaattcaagaccaga

SEQ ID NO: 535041 - DNA, 15 bp, Homo sapiens
aattcaagaccagac

SEQ ID NO: 535042 - DNA, 15 bp, Homo sapiens
attcaagaccagact

SEQ ID NO: 535043 - DNA, 15 bp, Homo sapiens
ttcaagaccagactg

SEQ ID NO: 535044 - DNA, 15 bp, Homo sapiens
tcaagaccagactgg

SEQ ID NO: 535045 - DNA, 15 bp, Homo sapiens
caagaccagactggg

SEQ ID NO: 535046 - DNA, 15 bp, Homo sapiens
aagaccagactgggc

SEQ ID NO: 535047 - DNA, 15 bp, Homo sapiens
agaccagactgggca

SEQ ID NO: 535048 - DNA, 15 bp, Homo sapiens
gaccagactgggcaa

SEQ ID NO: 535049 - DNA, 15 bp, Homo sapiens
accagactgggcaac

SEQ ID NO: 535050 - DNA, 15 bp, Homo sapiens
ccagactgggcaaca

SEQ ID NO: 535051 - DNA, 15 bp, Homo sapiens
cagactgggcaacat

SEQ ID NO: 535052 - DNA, 15 bp, Homo sapiens
agactgggcaacatg

SEQ ID NO: 535053 - DNA, 15 bp, Homo sapiens
gactgggcaacatgg

SEQ ID NO: 535054 - DNA, 15 bp, Homo sapiens
actgggcaacatgga

SEQ ID NO: 535055 - DNA, 15 bp, Homo sapiens
ctgggcaacatggag

SEQ ID NO: 535056 - DNA, 15 bp, Homo sapiens
tgggcaacatggaga

SEQ ID NO: 535057 - DNA, 15 bp, Homo sapiens
gggcaacatggagaa

SEQ ID NO: 535058 - DNA, 15 bp, Homo sapiens
ggcaacatggagaaa

SEQ ID NO: 535059 - DNA, 15 bp, Homo sapiens
gcaacatggagaaac

SEQ ID NO: 535060 - DNA, 15 bp, Homo sapiens
caacatggagaaacc

SEQ ID NO: 535061 - DNA, 15 bp, Homo sapiens
aacatggagaaacct

SEQ ID NO: 535062 - DNA, 15 bp, Homo sapiens
acatggagaaaccta

SEQ ID NO: 535063 - DNA, 15 bp, Homo sapiens
catggagaaacctag

SEQ ID NO: 535064 - DNA, 15 bp, Homo sapiens
atggagaaacctagt

SEQ ID NO: 535065 - DNA, 15 bp, Homo sapiens
tggagaaacctagtc

SEQ ID NO: 535066 - DNA, 15 bp, Homo sapiens
ggagaaacctagtct

SEQ ID NO: 535067 - DNA, 15 bp, Homo sapiens
gagaaacctagtctc

SEQ ID NO: 535068 - DNA, 15 bp, Homo sapiens
agaaacctagtctct

SEQ ID NO: 535069 - DNA, 15 bp, Homo sapiens
gaaacctagtctcta

SEQ ID NO: 535070 - DNA, 15 bp, Homo sapiens
aaacctagtctctac

SEQ ID NO: 535071 - DNA, 15 bp, Homo sapiens
aacctagtctctaca

SEQ ID NO: 535072 - DNA, 15 bp, Homo sapiens
acctagtctctacaa

SEQ ID NO: 535073 - DNA, 15 bp, Homo sapiens
cctagtctctacaaa

SEQ ID NO: 535074 - DNA, 15 bp, Homo sapiens
ctagtctctacaaaa

SEQ ID NO: 535075 - DNA, 15 bp, Homo sapiens
tagtctctacaaaaa

SEQ ID NO: 535076 - DNA, 15 bp, Homo sapiens
agtctctacaaaaac

SEQ ID NO: 535077 - DNA, 15 bp, Homo sapiens
gtctctacaaaaact

SEQ ID NO: 535078 - DNA, 15 bp, Homo sapiens
tctctacaaaaacta

SEQ ID NO: 535079 - DNA, 15 bp, Homo sapiens
ctctacaaaaactac

SEQ ID NO: 535080 - DNA, 15 bp, Homo sapiens
tctacaaaaactaca

SEQ ID NO: 535081 - DNA, 15 bp, Homo sapiens
ctacaaaaactacaa

SEQ ID NO: 535082 - DNA, 15 bp, Homo sapiens
tacaaaaactacaaa

SEQ ID NO: 535083 - DNA, 15 bp, Homo sapiens
acaaaaactacaaaa

SEQ ID NO: 535084 - DNA, 15 bp, Homo sapiens
caaaaactacaaaaa

SEQ ID NO: 535085 - DNA, 15 bp, Homo sapiens
aaaaactacaaaaat

SEQ ID NO: 535086 - DNA, 15 bp, Homo sapiens
aaaactacaaaaatt

SEQ ID NO: 535087 - DNA, 15 bp, Homo sapiens
aaactacaaaaatta

SEQ ID NO: 535088 - DNA, 15 bp, Homo sapiens
aactacaaaaattag

SEQ ID NO: 535089 - DNA, 15 bp, Homo sapiens
actacaaaaattagc

SEQ ID NO: 535090 - DNA, 15 bp, Homo sapiens
ctacaaaaattagcc

SEQ ID NO: 535091 - DNA, 15 bp, Homo sapiens
tacaaaaattagccg

SEQ ID NO: 535092 - DNA, 15 bp, Homo sapiens
acaaaaattagccgg

SEQ ID NO: 535093 - DNA, 15 bp, Homo sapiens
caaaaattagccggg

SEQ ID NO: 535094 - DNA, 15 bp, Homo sapiens
aaaaattagccgggc

SEQ ID NO: 535095 - DNA, 15 bp, Homo sapiens
aaaattagccgggca

SEQ ID NO: 535096 - DNA, 15 bp, Homo sapiens
aaattagccgggcat

SEQ ID NO: 535097 - DNA, 15 bp, Homo sapiens
aattagccgggcatg

SEQ ID NO: 535098 - DNA, 15 bp, Homo sapiens
attagccgggcatgg

SEQ ID NO: 535099 - DNA, 15 bp, Homo sapiens
ttagccgggcatggt

SEQ ID NO: 535100 - DNA, 15 bp, Homo sapiens
tagccgggcatggtg

SEQ ID NO: 535101 - DNA, 15 bp, Homo sapiens
agccgggcatggtgg

SEQ ID NO: 535102 - DNA, 15 bp, Homo sapiens
gccgggcatggtggc

SEQ ID NO: 535103 - DNA, 15 bp, Homo sapiens
ccgggcatggtggca

SEQ ID NO: 535104 - DNA, 15 bp, Homo sapiens
cgggcatggtggcac

SEQ ID NO: 535105 - DNA, 15 bp, Homo sapiens
gggcatggtggcact

SEQ ID NO: 535106 - DNA, 15 bp, Homo sapiens
ggcatggtggcactc

SEQ ID NO: 535107 - DNA, 15 bp, Homo sapiens
gcatggtggcactca

SEQ ID NO: 535108 - DNA, 15 bp, Homo sapiens
catggtggcactcac

SEQ ID NO: 535109 - DNA, 15 bp, Homo sapiens
atggtggcactcacc

SEQ ID NO: 535110 - DNA, 15 bp, Homo sapiens
tggtggcactcacct

SEQ ID NO: 535111 - DNA, 15 bp, Homo sapiens
ggtggcactcacctg

SEQ ID NO: 535112 - DNA, 15 bp, Homo sapiens
gtggcactcacctgt

SEQ ID NO: 535113 - DNA, 15 bp, Homo sapiens
tggcactcacctgta

SEQ ID NO: 535114 - DNA, 15 bp, Homo sapiens
ggcactcacctgtag

SEQ ID NO: 535115 - DNA, 15 bp, Homo sapiens
gcactcacctgtagt

SEQ ID NO: 535116 - DNA, 15 bp, Homo sapiens
cactcacctgtagtc

SEQ ID NO: 535117 - DNA, 15 bp, Homo sapiens
actcacctgtagtcc

SEQ ID NO: 535118 - DNA, 15 bp, Homo sapiens
ctcacctgtagtccc

SEQ ID NO: 535119 - DNA, 15 bp, Homo sapiens
tcacctgtagtccca

SEQ ID NO: 535120 - DNA, 15 bp, Homo sapiens
cacctgtagtcccag

SEQ ID NO: 535121 - DNA, 15 bp, Homo sapiens
acctgtagtcccagc

SEQ ID NO: 535122 - DNA, 15 bp, Homo sapiens
cctgtagtcccagct

SEQ ID NO: 535123 - DNA, 15 bp, Homo sapiens
ctgtagtcccagctg

SEQ ID NO: 535124 - DNA, 15 bp, Homo sapiens
tgtagtcccagctgc

SEQ ID NO: 535125 - DNA, 15 bp, Homo sapiens
gtagtcccagctgct

SEQ ID NO: 535126 - DNA, 15 bp, Homo sapiens
tagtcccagctgctc

SEQ ID NO: 535127 - DNA, 15 bp, Homo sapiens
agtcccagctgctca

SEQ ID NO: 535128 - DNA, 15 bp, Homo sapiens
gtcccagctgctcag

SEQ ID NO: 535129 - DNA, 15 bp, Homo sapiens
tcccagctgctcagg

SEQ ID NO: 535130 - DNA, 15 bp, Homo sapiens
cccagctgctcaggg

SEQ ID NO: 535131 - DNA, 15 bp, Homo sapiens
ccagctgctcaggga

SEQ ID NO: 535132 - DNA, 15 bp, Homo sapiens
cagctgctcagggag

SEQ ID NO: 535133 - DNA, 15 bp, Homo sapiens
agctgctcagggagc

SEQ ID NO: 535134 - DNA, 15 bp, Homo sapiens
gctgctcagggagct

SEQ ID NO: 535135 - DNA, 15 bp, Homo sapiens
ctgctcagggagctg

SEQ ID NO: 535136 - DNA, 15 bp, Homo sapiens
tgctcagggagctga

SEQ ID NO: 535137 - DNA, 15 bp, Homo sapiens
gctcagggagctgag

SEQ ID NO: 535138 - DNA, 15 bp, Homo sapiens
ctcagggagctgagg

SEQ ID NO: 535139 - DNA, 15 bp, Homo sapiens
tcagggagctgaggt

SEQ ID NO: 535140 - DNA, 15 bp, Homo sapiens
cagggagctgaggtg

SEQ ID NO: 535141 - DNA, 15 bp, Homo sapiens
agggagctgaggtgg

SEQ ID NO: 535142 - DNA, 15 bp, Homo sapiens
gggagctgaggtggg

SEQ ID NO: 535143 - DNA, 15 bp, Homo sapiens
ggagctgaggtggga

SEQ ID NO: 535144 - DNA, 15 bp, Homo sapiens
gagctgaggtgggag

SEQ ID NO: 535145 - DNA, 15 bp, Homo sapiens
agctgaggtgggagg

SEQ ID NO: 535146 - DNA, 15 bp, Homo sapiens
gctgaggtgggagga

SEQ ID NO: 535147 - DNA, 15 bp, Homo sapiens
ctgaggtgggaggat

SEQ ID NO: 535148 - DNA, 15 bp, Homo sapiens
tgaggtgggaggatc

SEQ ID NO: 535149 - DNA, 15 bp, Homo sapiens
gaggtgggaggatca

SEQ ID NO: 535150 - DNA, 15 bp, Homo sapiens
aggtgggaggatcac

SEQ ID NO: 535151 - DNA, 15 bp, Homo sapiens
ggtgggaggatcacc

SEQ ID NO: 535152 - DNA, 15 bp, Homo sapiens
gtgggaggatcacct

SEQ ID NO: 535153 - DNA, 15 bp, Homo sapiens
tgggaggatcacctg

SEQ ID NO: 535154 - DNA, 15 bp, Homo sapiens
gggaggatcacctga

SEQ ID NO: 535155 - DNA, 15 bp, Homo sapiens
ggaggatcacctgag

SEQ ID NO: 535156 - DNA, 15 bp, Homo sapiens
gaggatcacctgagc

SEQ ID NO: 535157 - DNA, 15 bp, Homo sapiens
aggatcacctgagcc

SEQ ID NO: 535158 - DNA, 15 bp, Homo sapiens
ggatcacctgagcca

SEQ ID NO: 535159 - DNA, 15 bp, Homo sapiens
gatcacctgagccaa

SEQ ID NO: 535160 - DNA, 15 bp, Homo sapiens
atcacctgagccaag

SEQ ID NO: 535161 - DNA, 15 bp, Homo sapiens
tcacctgagccaagg

SEQ ID NO: 535162 - DNA, 15 bp, Homo sapiens
cacctgagccaaggg

SEQ ID NO: 535163 - DNA, 15 bp, Homo sapiens
acctgagccaaggga

SEQ ID NO: 535164 - DNA, 15 bp, Homo sapiens
cctgagccaagggag

SEQ ID NO: 535165 - DNA, 15 bp, Homo sapiens
ctgagccaagggagg

SEQ ID NO: 535166 - DNA, 15 bp, Homo sapiens
tgagccaagggaggt

SEQ ID NO: 535167 - DNA, 15 bp, Homo sapiens
gagccaagggaggtc

SEQ ID NO: 535168 - DNA, 15 bp, Homo sapiens
agccaagggaggtca

SEQ ID NO: 535169 - DNA, 15 bp, Homo sapiens
gccaagggaggtcaa

SEQ ID NO: 535170 - DNA, 15 bp, Homo sapiens
ccaagggaggtcaag

SEQ ID NO: 535171 - DNA, 15 bp, Homo sapiens
caagggaggtcaagg

SEQ ID NO: 535172 - DNA, 15 bp, Homo sapiens
aagggaggtcaaggc

SEQ ID NO: 535173 - DNA, 15 bp, Homo sapiens
agggaggtcaaggct

SEQ ID NO: 535174 - DNA, 15 bp, Homo sapiens
gggaggtcaaggcta

SEQ ID NO: 535175 - DNA, 15 bp, Homo sapiens
ggaggtcaaggctac

SEQ ID NO: 535176 - DNA, 15 bp, Homo sapiens
gaggtcaaggctaca

SEQ ID NO: 535177 - DNA, 15 bp, Homo sapiens
aggtcaaggctacaa

SEQ ID NO: 535178 - DNA, 15 bp, Homo sapiens
ggtcaaggctacaat

SEQ ID NO: 535179 - DNA, 15 bp, Homo sapiens
gtcaaggctacaatc

SEQ ID NO: 535180 - DNA, 15 bp, Homo sapiens
tcaaggctacaatca

SEQ ID NO: 535181 - DNA, 15 bp, Homo sapiens
caaggctacaatcag

SEQ ID NO: 535182 - DNA, 15 bp, Homo sapiens
aaggctacaatcagc

SEQ ID NO: 535183 - DNA, 15 bp, Homo sapiens
aggctacaatcagcc

SEQ ID NO: 535184 - DNA, 15 bp, Homo sapiens
ggctacaatcagcca

SEQ ID NO: 535185 - DNA, 15 bp, Homo sapiens
gctacaatcagccat

SEQ ID NO: 535186 - DNA, 15 bp, Homo sapiens
ctacaatcagccatg

SEQ ID NO: 535187 - DNA, 15 bp, Homo sapiens
tacaatcagccatga

SEQ ID NO: 535188 - DNA, 15 bp, Homo sapiens
acaatcagccatgag

SEQ ID NO: 535189 - DNA, 15 bp, Homo sapiens
caatcagccatgagc

SEQ ID NO: 535190 - DNA, 15 bp, Homo sapiens
aatcagccatgagcg

SEQ ID NO: 535191 - DNA, 15 bp, Homo sapiens
atcagccatgagcgc

SEQ ID NO: 535192 - DNA, 15 bp, Homo sapiens
tcagccatgagcgcc

SEQ ID NO: 535193 - DNA, 15 bp, Homo sapiens
cagccatgagcgcca

SEQ ID NO: 535194 - DNA, 15 bp, Homo sapiens
agccatgagcgccac

SEQ ID NO: 535195 - DNA, 15 bp, Homo sapiens
gccatgagcgccact

SEQ ID NO: 535196 - DNA, 15 bp, Homo sapiens
ccatgagcgccactg

SEQ ID NO: 535197 - DNA, 15 bp, Homo sapiens
catgagcgccactgt

SEQ ID NO: 535198 - DNA, 15 bp, Homo sapiens
atgagcgccactgta

SEQ ID NO: 535199 - DNA, 15 bp, Homo sapiens
tgagcgccactgtat

SEQ ID NO: 535200 - DNA, 15 bp, Homo sapiens
gagcgccactgtatt

SEQ ID NO: 535201 - DNA, 15 bp, Homo sapiens
agcgccactgtattc

SEQ ID NO: 535202 - DNA, 15 bp, Homo sapiens
gcgccactgtattcc

SEQ ID NO: 535203 - DNA, 15 bp, Homo sapiens
cgccactgtattcca

SEQ ID NO: 535204 - DNA, 15 bp, Homo sapiens
gccactgtattccac

SEQ ID NO: 535205 - DNA, 15 bp, Homo sapiens
ccactgtattccacc

SEQ ID NO: 535206 - DNA, 15 bp, Homo sapiens
cactgtattccaccc

SEQ ID NO: 535207 - DNA, 15 bp, Homo sapiens
actgtattccaccct

SEQ ID NO: 535208 - DNA, 15 bp, Homo sapiens
ctgtattccacccta

SEQ ID NO: 535209 - DNA, 15 bp, Homo sapiens
tgtattccaccctag

SEQ ID NO: 535210 - DNA, 15 bp, Homo sapiens
gtattccaccctaga

SEQ ID NO: 535211 - DNA, 15 bp, Homo sapiens
tattccaccctagat

SEQ ID NO: 535212 - DNA, 15 bp, Homo sapiens
attccaccctagatg

SEQ ID NO: 535213 - DNA, 15 bp, Homo sapiens
ttccaccctagatga

SEQ ID NO: 535214 - DNA, 15 bp, Homo sapiens
tccaccctagatgac

SEQ ID NO: 535215 - DNA, 15 bp, Homo sapiens
ccaccctagatgaca

SEQ ID NO: 535216 - DNA, 15 bp, Homo sapiens
caccctagatgacaa

SEQ ID NO: 535217 - DNA, 15 bp, Homo sapiens
accctagatgacaaa

SEQ ID NO: 535218 - DNA, 15 bp, Homo sapiens
ccctagatgacaaag

SEQ ID NO: 535219 - DNA, 15 bp, Homo sapiens
cctagatgacaaagt

SEQ ID NO: 535220 - DNA, 15 bp, Homo sapiens
ctagatgacaaagtg

SEQ ID NO: 535221 - DNA, 15 bp, Homo sapiens
tagatgacaaagtga

SEQ ID NO: 535222 - DNA, 15 bp, Homo sapiens
agatgacaaagtgaa

SEQ ID NO: 535223 - DNA, 15 bp, Homo sapiens
gatgacaaagtgaat

SEQ ID NO: 535224 - DNA, 15 bp, Homo sapiens
atgacaaagtgaata

SEQ ID NO: 535225 - DNA, 15 bp, Homo sapiens
tgacaaagtgaatac

SEQ ID NO: 535226 - DNA, 15 bp, Homo sapiens
gacaaagtgaatacc

SEQ ID NO: 535227 - DNA, 15 bp, Homo sapiens
acaaagtgaatacct

SEQ ID NO: 535228 - DNA, 15 bp, Homo sapiens
caaagtgaatacctg

SEQ ID NO: 535229 - DNA, 15 bp, Homo sapiens
aaagtgaatacctgc

SEQ ID NO: 535230 - DNA, 15 bp, Homo sapiens
aagtgaatacctgcc

SEQ ID NO: 535231 - DNA, 15 bp, Homo sapiens
agtgaatacctgcct

SEQ ID NO: 535232 - DNA, 15 bp, Homo sapiens
gtgaatacctgcctc

SEQ ID NO: 535233 - DNA, 15 bp, Homo sapiens
tgaatacctgcctca

SEQ ID NO: 535234 - DNA, 15 bp, Homo sapiens
gaatacctgcctcaa

SEQ ID NO: 535235 - DNA, 15 bp, Homo sapiens
aatacctgcctcaaa

SEQ ID NO: 535236 - DNA, 15 bp, Homo sapiens
atacctgcctcaaaa

SEQ ID NO: 535237 - DNA, 15 bp, Homo sapiens
tacctgcctcaaaat

SEQ ID NO: 535238 - DNA, 15 bp, Homo sapiens
acctgcctcaaaata

SEQ ID NO: 535239 - DNA, 15 bp, Homo sapiens
cctgcctcaaaataa

SEQ ID NO: 535240 - DNA, 15 bp, Homo sapiens
ctgcctcaaaataat

SEQ ID NO: 535241 - DNA, 15 bp, Homo sapiens
tgcctcaaaataata

SEQ ID NO: 535242 - DNA, 15 bp, Homo sapiens
gcctcaaaataataa

SEQ ID NO: 535243 - DNA, 15 bp, Homo sapiens
cctcaaaataataat

SEQ ID NO: 535244 - DNA, 15 bp, Homo sapiens
ctcaaaataataata

SEQ ID NO: 535245 - DNA, 15 bp, Homo sapiens
tcaaaataataataa

SEQ ID NO: 535246 - DNA, 15 bp, Homo sapiens
caaaataataataac

SEQ ID NO: 535247 - DNA, 15 bp, Homo sapiens
aaaataataataact

SEQ ID NO: 535248 - DNA, 15 bp, Homo sapiens
aaataataataactt

SEQ ID NO: 535249 - DNA, 15 bp, Homo sapiens
aataataataacttg

SEQ ID NO: 535250 - DNA, 15 bp, Homo sapiens
ataataataacttgg

SEQ ID NO: 535251 - DNA, 15 bp, Homo sapiens
taataataacttggg

SEQ ID NO: 535252 - DNA, 15 bp, Homo sapiens
aataataacttgggt

SEQ ID NO: 535253 - DNA, 15 bp, Homo sapiens
ataataacttgggtc

SEQ ID NO: 535254 - DNA, 15 bp, Homo sapiens
taataacttgggtct

SEQ ID NO: 535255 - DNA, 15 bp, Homo sapiens
aataacttgggtctt

SEQ ID NO: 535256 - DNA, 15 bp, Homo sapiens
ataacttgggtcttg

SEQ ID NO: 535257 - DNA, 15 bp, Homo sapiens
taacttgggtcttgt

SEQ ID NO: 535258 - DNA, 15 bp, Homo sapiens
aacttgggtcttgta

SEQ ID NO: 535259 - DNA, 15 bp, Homo sapiens
acttgggtcttgtaa

SEQ ID NO: 535260 - DNA, 15 bp, Homo sapiens
cttgggtcttgtaac

SEQ ID NO: 535261 - DNA, 15 bp, Homo sapiens
ttgggtcttgtaaca

SEQ ID NO: 535262 - DNA, 15 bp, Homo sapiens
tgggtcttgtaacat

SEQ ID NO: 535263 - DNA, 15 bp, Homo sapiens
gggtcttgtaacatg

SEQ ID NO: 535264 - DNA, 15 bp, Homo sapiens
ggtcttgtaacatgt

SEQ ID NO: 535265 - DNA, 15 bp, Homo sapiens
gtcttgtaacatgta

SEQ ID NO: 535266 - DNA, 15 bp, Homo sapiens
tcttgtaacatgtat

SEQ ID NO: 535267 - DNA, 15 bp, Homo sapiens
cttgtaacatgtata

SEQ ID NO: 535268 - DNA, 15 bp, Homo sapiens
ttgtaacatgtatag

SEQ ID NO: 535269 - DNA, 15 bp, Homo sapiens
tgtaacatgtataga

SEQ ID NO: 535270 - DNA, 15 bp, Homo sapiens
gtaacatgtatagaa

SEQ ID NO: 535271 - DNA, 15 bp, Homo sapiens
taacatgtatagaaa

SEQ ID NO: 535272 - DNA, 15 bp, Homo sapiens
aacatgtatagaaag

SEQ ID NO: 535273 - DNA, 15 bp, Homo sapiens
acatgtatagaaagg

SEQ ID NO: 535274 - DNA, 15 bp, Homo sapiens
catgtatagaaagga

SEQ ID NO: 535275 - DNA, 15 bp, Homo sapiens
atgtatagaaaggag

SEQ ID NO: 535276 - DNA, 15 bp, Homo sapiens
tgtatagaaaggagg

SEQ ID NO: 535277 - DNA, 15 bp, Homo sapiens
gtatagaaaggagga

SEQ ID NO: 535278 - DNA, 15 bp, Homo sapiens
tatagaaaggaggaa

SEQ ID NO: 535279 - DNA, 15 bp, Homo sapiens
atagaaaggaggaat

SEQ ID NO: 535280 - DNA, 15 bp, Homo sapiens
tagaaaggaggaatg

SEQ ID NO: 535281 - DNA, 15 bp, Homo sapiens
agaaaggaggaatga

SEQ ID NO: 535282 - DNA, 15 bp, Homo sapiens
gaaaggaggaatgaa

SEQ ID NO: 535283 - DNA, 15 bp, Homo sapiens
aaaggaggaatgaaa

SEQ ID NO: 535284 - DNA, 15 bp, Homo sapiens
aaggaggaatgaaaa

SEQ ID NO: 535285 - DNA, 15 bp, Homo sapiens
aggaggaatgaaaac

SEQ ID NO: 535286 - DNA, 15 bp, Homo sapiens
ggaggaatgaaaact

SEQ ID NO: 535287 - DNA, 15 bp, Homo sapiens
gaggaatgaaaactt

SEQ ID NO: 535288 - DNA, 15 bp, Homo sapiens
aggaatgaaaacttg

SEQ ID NO: 535289 - DNA, 15 bp, Homo sapiens
ggaatgaaaacttgt

SEQ ID NO: 535290 - DNA, 15 bp, Homo sapiens
gaatgaaaacttgtg

SEQ ID NO: 535291 - DNA, 15 bp, Homo sapiens
aatgaaaacttgtga

SEQ ID NO: 535292 - DNA, 15 bp, Homo sapiens
atgaaaacttgtgac

SEQ ID NO: 535293 - DNA, 15 bp, Homo sapiens
tgaaaacttgtgact

SEQ ID NO: 535294 - DNA, 15 bp, Homo sapiens
gaaaacttgtgacta

SEQ ID NO: 535295 - DNA, 15 bp, Homo sapiens
aaaacttgtgactag

SEQ ID NO: 535296 - DNA, 15 bp, Homo sapiens
aaacttgtgactaga

SEQ ID NO: 535297 - DNA, 15 bp, Homo sapiens
aacttgtgactagag

SEQ ID NO: 535298 - DNA, 15 bp, Homo sapiens
acttgtgactagagg

SEQ ID NO: 535299 - DNA, 15 bp, Homo sapiens
cttgtgactagaggg

SEQ ID NO: 535300 - DNA, 15 bp, Homo sapiens
ttgtgactagaggga

SEQ ID NO: 535301 - DNA, 15 bp, Homo sapiens
tgtgactagagggat

SEQ ID NO: 535302 - DNA, 15 bp, Homo sapiens
gtgactagagggatg

SEQ ID NO: 535303 - DNA, 15 bp, Homo sapiens
tgactagagggatga

SEQ ID NO: 535304 - DNA, 15 bp, Homo sapiens
gactagagggatgat

SEQ ID NO: 535305 - DNA, 15 bp, Homo sapiens
actagagggatgatc

SEQ ID NO: 535306 - DNA, 15 bp, Homo sapiens
ctagagggatgatct

SEQ ID NO: 535307 - DNA, 15 bp, Homo sapiens
tagagggatgatcta

SEQ ID NO: 535308 - DNA, 15 bp, Homo sapiens
agagggatgatctac

SEQ ID NO: 535309 - DNA, 15 bp, Homo sapiens
gagggatgatctaca

SEQ ID NO: 535310 - DNA, 15 bp, Homo sapiens
agggatgatctacat

SEQ ID NO: 535311 - DNA, 15 bp, Homo sapiens
gggatgatctacata

SEQ ID NO: 535312 - DNA, 15 bp, Homo sapiens
ggatgatctacatag

SEQ ID NO: 535313 - DNA, 15 bp, Homo sapiens
gatgatctacatagc

SEQ ID NO: 535314 - DNA, 15 bp, Homo sapiens
atgatctacatagct

SEQ ID NO: 535315 - DNA, 15 bp, Homo sapiens
tgatctacatagctg

SEQ ID NO: 535316 - DNA, 15 bp, Homo sapiens
gatctacatagctgt

SEQ ID NO: 535317 - DNA, 15 bp, Homo sapiens
atctacatagctgta

SEQ ID NO: 535318 - DNA, 15 bp, Homo sapiens
tctacatagctgtac

SEQ ID NO: 535319 - DNA, 15 bp, Homo sapiens
ctacatagctgtaca

SEQ ID NO: 535320 - DNA, 15 bp, Homo sapiens
tacatagctgtacaa

SEQ ID NO: 535321 - DNA, 15 bp, Homo sapiens
acatagctgtacaag

SEQ ID NO: 535322 - DNA, 15 bp, Homo sapiens
catagctgtacaagt

SEQ ID NO: 535323 - DNA, 15 bp, Homo sapiens
atagctgtacaagtc

SEQ ID NO: 535324 - DNA, 15 bp, Homo sapiens
tagctgtacaagtct

SEQ ID NO: 535325 - DNA, 15 bp, Homo sapiens
agctgtacaagtctc

SEQ ID NO: 535326 - DNA, 15 bp, Homo sapiens
gctgtacaagtctct

SEQ ID NO: 535327 - DNA, 15 bp, Homo sapiens
ctgtacaagtctctt

SEQ ID NO: 535328 - DNA, 15 bp, Homo sapiens
tgtacaagtctctta

SEQ ID NO: 535329 - DNA, 15 bp, Homo sapiens
gtacaagtctcttag

SEQ ID NO: 535330 - DNA, 15 bp, Homo sapiens
tacaagtctcttaga

SEQ ID NO: 535331 - DNA, 15 bp, Homo sapiens
acaagtctcttagaa

SEQ ID NO: 535332 - DNA, 15 bp, Homo sapiens
caagtctcttagaaa

SEQ ID NO: 535333 - DNA, 15 bp, Homo sapiens
aagtctcttagaaac

SEQ ID NO: 535334 - DNA, 15 bp, Homo sapiens
agtctcttagaaaca

SEQ ID NO: 535335 - DNA, 15 bp, Homo sapiens
gtctcttagaaacaa

SEQ ID NO: 535336 - DNA, 15 bp, Homo sapiens
tctcttagaaacaaa

SEQ ID NO: 535337 - DNA, 15 bp, Homo sapiens
ctcttagaaacaaat

SEQ ID NO: 535338 - DNA, 15 bp, Homo sapiens
tcttagaaacaaatc

SEQ ID NO: 535339 - DNA, 15 bp, Homo sapiens
cttagaaacaaatcc

SEQ ID NO: 535340 - DNA, 15 bp, Homo sapiens
ttagaaacaaatcct

SEQ ID NO: 535341 - DNA, 15 bp, Homo sapiens
tagaaacaaatcctt

SEQ ID NO: 535342 - DNA, 15 bp, Homo sapiens
agaaacaaatccttc

SEQ ID NO: 535343 - DNA, 15 bp, Homo sapiens
gaaacaaatccttcg

SEQ ID NO: 535344 - DNA, 15 bp, Homo sapiens
aaacaaatccttcgt

SEQ ID NO: 535345 - DNA, 15 bp, Homo sapiens
aacaaatccttcgta

SEQ ID NO: 535346 - DNA, 15 bp, Homo sapiens
acaaatccttcgtac

SEQ ID NO: 535347 - DNA, 15 bp, Homo sapiens
caaatccttcgtact

SEQ ID NO: 535348 - DNA, 15 bp, Homo sapiens
aaatccttcgtactc

SEQ ID NO: 535349 - DNA, 15 bp, Homo sapiens
aatccttcgtactct

SEQ ID NO: 535350 - DNA, 15 bp, Homo sapiens
atccttcgtactctc

SEQ ID NO: 535351 - DNA, 15 bp, Homo sapiens
tccttcgtactctct

SEQ ID NO: 535352 - DNA, 15 bp, Homo sapiens
ccttcgtactctctt

SEQ ID NO: 535353 - DNA, 15 bp, Homo sapiens
cttcgtactctcttc

SEQ ID NO: 535354 - DNA, 15 bp, Homo sapiens
ttcgtactctcttct

SEQ ID NO: 535355 - DNA, 15 bp, Homo sapiens
tcgtactctcttctc

SEQ ID NO: 535356 - DNA, 15 bp, Homo sapiens
cgtactctcttctcc

SEQ ID NO: 535357 - DNA, 15 bp, Homo sapiens
gtactctcttctcct

SEQ ID NO: 535358 - DNA, 15 bp, Homo sapiens
tactctcttctcctt

SEQ ID NO: 535359 - DNA, 15 bp, Homo sapiens
actctcttctcctta

SEQ ID NO: 535360 - DNA, 15 bp, Homo sapiens
ctctcttctccttag

SEQ ID NO: 535361 - DNA, 15 bp, Homo sapiens
tctcttctccttagg

SEQ ID NO: 535362 - DNA, 15 bp, Homo sapiens
ctcttctccttagga

SEQ ID NO: 535363 - DNA, 15 bp, Homo sapiens
tcttctccttaggaa

SEQ ID NO: 535364 - DNA, 15 bp, Homo sapiens
cttctccttaggaaa

SEQ ID NO: 535365 - DNA, 15 bp, Homo sapiens
ttctccttaggaaat

SEQ ID NO: 535366 - DNA, 15 bp, Homo sapiens
tctccttaggaaatg

SEQ ID NO: 535367 - DNA, 15 bp, Homo sapiens
ctccttaggaaatga

SEQ ID NO: 535368 - DNA, 15 bp, Homo sapiens
tccttaggaaatgaa

SEQ ID NO: 535369 - DNA, 15 bp, Homo sapiens
ccttaggaaatgaag

SEQ ID NO: 535370 - DNA, 15 bp, Homo sapiens
cttaggaaatgaaga

SEQ ID NO: 535371 - DNA, 15 bp, Homo sapiens
ttaggaaatgaagat

SEQ ID NO: 535372 - DNA, 15 bp, Homo sapiens
taggaaatgaagatg

SEQ ID NO: 535373 - DNA, 15 bp, Homo sapiens
aggaaatgaagatgg

SEQ ID NO: 535374 - DNA, 15 bp, Homo sapiens
ggaaatgaagatgga

SEQ ID NO: 535375 - DNA, 15 bp, Homo sapiens
gaaatgaagatggaa

SEQ ID NO: 535376 - DNA, 15 bp, Homo sapiens
aaatgaagatggaag

SEQ ID NO: 535377 - DNA, 15 bp, Homo sapiens
aatgaagatggaagt

SEQ ID NO: 535378 - DNA, 15 bp, Homo sapiens
atgaagatggaagtg

SEQ ID NO: 535379 - DNA, 15 bp, Homo sapiens
tgaagatggaagtgg

SEQ ID NO: 535380 - DNA, 15 bp, Homo sapiens
gaagatggaagtggc

SEQ ID NO: 535381 - DNA, 15 bp, Homo sapiens
aagatggaagtggct

SEQ ID NO: 535382 - DNA, 15 bp, Homo sapiens
agatggaagtggctc

SEQ ID NO: 535383 - DNA, 15 bp, Homo sapiens
gatggaagtggctcc

SEQ ID NO: 535384 - DNA, 15 bp, Homo sapiens
atggaagtggctcca

SEQ ID NO: 535385 - DNA, 15 bp, Homo sapiens
tggaagtggctccat

SEQ ID NO: 535386 - DNA, 15 bp, Homo sapiens
ggaagtggctccatc

SEQ ID NO: 535387 - DNA, 15 bp, Homo sapiens
gaagtggctccatca

SEQ ID NO: 535388 - DNA, 15 bp, Homo sapiens
aagtggctccatcac

SEQ ID NO: 535389 - DNA, 15 bp, Homo sapiens
agtggctccatcact

SEQ ID NO: 535390 - DNA, 15 bp, Homo sapiens
gtggctccatcactt

SEQ ID NO: 535391 - DNA, 15 bp, Homo sapiens
tggctccatcactta

SEQ ID NO: 535392 - DNA, 15 bp, Homo sapiens
ggctccatcacttat

SEQ ID NO: 535393 - DNA, 15 bp, Homo sapiens
gctccatcacttatc

SEQ ID NO: 535394 - DNA, 15 bp, Homo sapiens
ctccatcacttatca

SEQ ID NO: 535395 - DNA, 15 bp, Homo sapiens
tccatcacttatcag

SEQ ID NO: 535396 - DNA, 15 bp, Homo sapiens
ccatcacttatcaga

SEQ ID NO: 535397 - DNA, 15 bp, Homo sapiens
catcacttatcagag

SEQ ID NO: 535398 - DNA, 15 bp, Homo sapiens
atcacttatcagagg

SEQ ID NO: 535399 - DNA, 15 bp, Homo sapiens
tcacttatcagaggc

SEQ ID NO: 535400 - DNA, 15 bp, Homo sapiens
cacttatcagaggcc

SEQ ID NO: 535401 - DNA, 15 bp, Homo sapiens
acttatcagaggcca

SEQ ID NO: 535402 - DNA, 15 bp, Homo sapiens
cttatcagaggccac

SEQ ID NO: 535403 - DNA, 15 bp, Homo sapiens
ttatcagaggccaca

SEQ ID NO: 535404 - DNA, 15 bp, Homo sapiens
tatcagaggccacac

SEQ ID NO: 535405 - DNA, 15 bp, Homo sapiens
atcagaggccacaca

SEQ ID NO: 535406 - DNA, 15 bp, Homo sapiens
tcagaggccacacaa

SEQ ID NO: 535407 - DNA, 15 bp, Homo sapiens
cagaggccacacaag

SEQ ID NO: 535408 - DNA, 15 bp, Homo sapiens
agaggccacacaaga

SEQ ID NO: 535409 - DNA, 15 bp, Homo sapiens
gaggccacacaagaa

SEQ ID NO: 535410 - DNA, 15 bp, Homo sapiens
aggccacacaagaaa

SEQ ID NO: 535411 - DNA, 15 bp, Homo sapiens
ggccacacaagaaat

SEQ ID NO: 535412 - DNA, 15 bp, Homo sapiens
gccacacaagaaatg

SEQ ID NO: 535413 - DNA, 15 bp, Homo sapiens
ccacacaagaaatga

SEQ ID NO: 535414 - DNA, 15 bp, Homo sapiens
cacacaagaaatgag

SEQ ID NO: 535415 - DNA, 15 bp, Homo sapiens
acacaagaaatgagc

SEQ ID NO: 535416 - DNA, 15 bp, Homo sapiens
cacaagaaatgagca

SEQ ID NO: 535417 - DNA, 15 bp, Homo sapiens
acaagaaatgagcag

SEQ ID NO: 535418 - DNA, 15 bp, Homo sapiens
caagaaatgagcagc

SEQ ID NO: 535419 - DNA, 15 bp, Homo sapiens
aagaaatgagcagca

SEQ ID NO: 535420 - DNA, 15 bp, Homo sapiens
agaaatgagcagcag

SEQ ID NO: 535421 - DNA, 15 bp, Homo sapiens
gaaatgagcagcagt

SEQ ID NO: 535422 - DNA, 15 bp, Homo sapiens
aaatgagcagcagtc

SEQ ID NO: 535423 - DNA, 15 bp, Homo sapiens
aatgagcagcagtca

SEQ ID NO: 535424 - DNA, 15 bp, Homo sapiens
atgagcagcagtcag

SEQ ID NO: 535425 - DNA, 15 bp, Homo sapiens
tgagcagcagtcagg

SEQ ID NO: 535426 - DNA, 15 bp, Homo sapiens
gagcagcagtcagga

SEQ ID NO: 535427 - DNA, 15 bp, Homo sapiens
agcagcagtcaggat

SEQ ID NO: 535428 - DNA, 15 bp, Homo sapiens
gcagcagtcaggatt

SEQ ID NO: 535429 - DNA, 15 bp, Homo sapiens
cagcagtcaggatta

SEQ ID NO: 535430 - DNA, 15 bp, Homo sapiens
agcagtcaggattag

SEQ ID NO: 535431 - DNA, 15 bp, Homo sapiens
gcagtcaggattaga

SEQ ID NO: 535432 - DNA, 15 bp, Homo sapiens
cagtcaggattagac

SEQ ID NO: 535433 - DNA, 15 bp, Homo sapiens
agtcaggattagaca

SEQ ID NO: 535434 - DNA, 15 bp, Homo sapiens
gtcaggattagacaa

SEQ ID NO: 535435 - DNA, 15 bp, Homo sapiens
tcaggattagacaac

SEQ ID NO: 535436 - DNA, 15 bp, Homo sapiens
caggattagacaacc

SEQ ID NO: 535437 - DNA, 15 bp, Homo sapiens
aggattagacaacca

SEQ ID NO: 535438 - DNA, 15 bp, Homo sapiens
ggattagacaaccag

SEQ ID NO: 535439 - DNA, 15 bp, Homo sapiens
gattagacaaccaga

SEQ ID NO: 535440 - DNA, 15 bp, Homo sapiens
attagacaaccagag

SEQ ID NO: 535441 - DNA, 15 bp, Homo sapiens
ttagacaaccagaga

SEQ ID NO: 535442 - DNA, 15 bp, Homo sapiens
tagacaaccagagat

SEQ ID NO: 535443 - DNA, 15 bp, Homo sapiens
agacaaccagagata

SEQ ID NO: 535444 - DNA, 15 bp, Homo sapiens
gacaaccagagatag

SEQ ID NO: 535445 - DNA, 15 bp, Homo sapiens
acaaccagagataga

SEQ ID NO: 535446 - DNA, 15 bp, Homo sapiens
caaccagagatagat

SEQ ID NO: 535447 - DNA, 15 bp, Homo sapiens
aaccagagatagatt

SEQ ID NO: 535448 - DNA, 15 bp, Homo sapiens
accagagatagattc

SEQ ID NO: 535449 - DNA, 15 bp, Homo sapiens
ccagagatagattca

SEQ ID NO: 535450 - DNA, 15 bp, Homo sapiens
cagagatagattcag

SEQ ID NO: 535451 - DNA, 15 bp, Homo sapiens
agagatagattcagg

SEQ ID NO: 535452 - DNA, 15 bp, Homo sapiens
gagatagattcaggc

SEQ ID NO: 535453 - DNA, 15 bp, Homo sapiens
agatagattcaggca

SEQ ID NO: 535454 - DNA, 15 bp, Homo sapiens
gatagattcaggcaa

SEQ ID NO: 535455 - DNA, 15 bp, Homo sapiens
atagattcaggcaac

SEQ ID NO: 535456 - DNA, 15 bp, Homo sapiens
tagattcaggcaacc

SEQ ID NO: 535457 - DNA, 15 bp, Homo sapiens
agattcaggcaacca

SEQ ID NO: 535458 - DNA, 15 bp, Homo sapiens
gattcaggcaaccag

SEQ ID NO: 535459 - DNA, 15 bp, Homo sapiens
attcaggcaaccagc

SEQ ID NO: 535460 - DNA, 15 bp, Homo sapiens
ttcaggcaaccagca

SEQ ID NO: 535461 - DNA, 15 bp, Homo sapiens
tcaggcaaccagcag

SEQ ID NO: 535462 - DNA, 15 bp, Homo sapiens
caggcaaccagcagt

SEQ ID NO: 535463 - DNA, 15 bp, Homo sapiens
aggcaaccagcagtg

SEQ ID NO: 535464 - DNA, 15 bp, Homo sapiens
ggcaaccagcagtgc

SEQ ID NO: 535465 - DNA, 15 bp, Homo sapiens
gcaaccagcagtgct

SEQ ID NO: 535466 - DNA, 15 bp, Homo sapiens
caaccagcagtgctg

SEQ ID NO: 535467 - DNA, 15 bp, Homo sapiens
aaccagcagtgctgt

SEQ ID NO: 535468 - DNA, 15 bp, Homo sapiens
accagcagtgctgtc

SEQ ID NO: 535469 - DNA, 15 bp, Homo sapiens
ccagcagtgctgtct

SEQ ID NO: 535470 - DNA, 15 bp, Homo sapiens
cagcagtgctgtctt

SEQ ID NO: 535471 - DNA, 15 bp, Homo sapiens
agcagtgctgtcttc

SEQ ID NO: 535472 - DNA, 15 bp, Homo sapiens
gcagtgctgtcttct

SEQ ID NO: 535473 - DNA, 15 bp, Homo sapiens
cagtgctgtcttctg

SEQ ID NO: 535474 - DNA, 15 bp, Homo sapiens
agtgctgtcttctgt

SEQ ID NO: 535475 - DNA, 15 bp, Homo sapiens
gtgctgtcttctgtc

SEQ ID NO: 535476 - DNA, 15 bp, Homo sapiens
tgctgtcttctgtct

SEQ ID NO: 535477 - DNA, 15 bp, Homo sapiens
gctgtcttctgtctt

SEQ ID NO: 535478 - DNA, 15 bp, Homo sapiens
ctgtcttctgtcttc

SEQ ID NO: 535479 - DNA, 15 bp, Homo sapiens
tgtcttctgtcttca

SEQ ID NO: 535480 - DNA, 15 bp, Homo sapiens
gtcttctgtcttcaa

SEQ ID NO: 535481 - DNA, 15 bp, Homo sapiens
tcttctgtcttcaaa

SEQ ID NO: 535482 - DNA, 15 bp, Homo sapiens
cttctgtcttcaaag

SEQ ID NO: 535483 - DNA, 15 bp, Homo sapiens
ttctgtcttcaaaga

SEQ ID NO: 535484 - DNA, 15 bp, Homo sapiens
tctgtcttcaaagac

SEQ ID NO: 535485 - DNA, 15 bp, Homo sapiens
ctgtcttcaaagaca

SEQ ID NO: 535486 - DNA, 15 bp, Homo sapiens
tgtcttcaaagacac

SEQ ID NO: 535487 - DNA, 15 bp, Homo sapiens
gtcttcaaagacacc

SEQ ID NO: 535488 - DNA, 15 bp, Homo sapiens
tcttcaaagacacct

SEQ ID NO: 535489 - DNA, 15 bp, Homo sapiens
cttcaaagacacctg

SEQ ID NO: 535490 - DNA, 15 bp, Homo sapiens
ttcaaagacacctgt

SEQ ID NO: 535491 - DNA, 15 bp, Homo sapiens
tcaaagacacctgtt

SEQ ID NO: 535492 - DNA, 15 bp, Homo sapiens
caaagacacctgttg

SEQ ID NO: 535493 - DNA, 15 bp, Homo sapiens
aaagacacctgttga

SEQ ID NO: 535494 - DNA, 15 bp, Homo sapiens
aagacacctgttgat

SEQ ID NO: 535495 - DNA, 15 bp, Homo sapiens
agacacctgttgatt

SEQ ID NO: 535496 - DNA, 15 bp, Homo sapiens
gacacctgttgatta

SEQ ID NO: 535497 - DNA, 15 bp, Homo sapiens
acacctgttgattaa

SEQ ID NO: 535498 - DNA, 15 bp, Homo sapiens
cacctgttgattaaa

SEQ ID NO: 535499 - DNA, 15 bp, Homo sapiens
acctgttgattaaat

SEQ ID NO: 535500 - DNA, 15 bp, Homo sapiens
cctgttgattaaata

SEQ ID NO: 535501 - DNA, 15 bp, Homo sapiens
ctgttgattaaatat

SEQ ID NO: 535502 - DNA, 15 bp, Homo sapiens
tgttgattaaatatg

SEQ ID NO: 535503 - DNA, 15 bp, Homo sapiens
gttgattaaatatgg

SEQ ID NO: 535504 - DNA, 15 bp, Homo sapiens
ttgattaaatatggc

SEQ ID NO: 535505 - DNA, 15 bp, Homo sapiens
tgattaaatatggca

SEQ ID NO: 535506 - DNA, 15 bp, Homo sapiens
gattaaatatggcat

SEQ ID NO: 535507 - DNA, 15 bp, Homo sapiens
attaaatatggcatt

SEQ ID NO: 535508 - DNA, 15 bp, Homo sapiens
ttaaatatggcatta

SEQ ID NO: 535509 - DNA, 15 bp, Homo sapiens
taaatatggcattag

SEQ ID NO: 535510 - DNA, 15 bp, Homo sapiens
aaatatggcattagg

SEQ ID NO: 535511 - DNA, 15 bp, Homo sapiens
aatatggcattaggg

SEQ ID NO: 535512 - DNA, 15 bp, Homo sapiens
atatggcattagggg

SEQ ID NO: 535513 - DNA, 15 bp, Homo sapiens
tatggcattagggga

SEQ ID NO: 535514 - DNA, 15 bp, Homo sapiens
atggcattaggggag

SEQ ID NO: 535515 - DNA, 15 bp, Homo sapiens
tggcattaggggagg

SEQ ID NO: 535516 - DNA, 15 bp, Homo sapiens
ggcattaggggaggg

SEQ ID NO: 535517 - DNA, 15 bp, Homo sapiens
gcattaggggaggga

SEQ ID NO: 535518 - DNA, 15 bp, Homo sapiens
cattaggggagggag

SEQ ID NO: 535519 - DNA, 15 bp, Homo sapiens
attaggggagggagg

SEQ ID NO: 535520 - DNA, 15 bp, Homo sapiens
ttaggggagggagga

SEQ ID NO: 535521 - DNA, 15 bp, Homo sapiens
taggggagggaggag

SEQ ID NO: 535522 - DNA, 15 bp, Homo sapiens
aggggagggaggaga

SEQ ID NO: 535523 - DNA, 15 bp, Homo sapiens
ggggagggaggagaa

SEQ ID NO: 535524 - DNA, 15 bp, Homo sapiens
gggagggaggagaaa

SEQ ID NO: 535525 - DNA, 15 bp, Homo sapiens
ggagggaggagaaac

SEQ ID NO: 535526 - DNA, 15 bp, Homo sapiens
gagggaggagaaact

SEQ ID NO: 535527 - DNA, 15 bp, Homo sapiens
agggaggagaaactc

SEQ ID NO: 535528 - DNA, 15 bp, Homo sapiens
gggaggagaaactct

SEQ ID NO: 535529 - DNA, 15 bp, Homo sapiens
ggaggagaaactcta

SEQ ID NO: 535530 - DNA, 15 bp, Homo sapiens
gaggagaaactctat

SEQ ID NO: 535531 - DNA, 15 bp, Homo sapiens
aggagaaactctatt

SEQ ID NO: 535532 - DNA, 15 bp, Homo sapiens
ggagaaactctattt

SEQ ID NO: 535533 - DNA, 15 bp, Homo sapiens
gagaaactctatttc

SEQ ID NO: 535534 - DNA, 15 bp, Homo sapiens
agaaactctatttca

SEQ ID NO: 535535 - DNA, 15 bp, Homo sapiens
gaaactctatttcac

SEQ ID NO: 535536 - DNA, 15 bp, Homo sapiens
aaactctatttcacc

SEQ ID NO: 535537 - DNA, 15 bp, Homo sapiens
aactctatttcacca

SEQ ID NO: 535538 - DNA, 15 bp, Homo sapiens
actctatttcaccag

SEQ ID NO: 535539 - DNA, 15 bp, Homo sapiens
ctctatttcaccaga

SEQ ID NO: 535540 - DNA, 15 bp, Homo sapiens
tctatttcaccagat

SEQ ID NO: 535541 - DNA, 15 bp, Homo sapiens
ctatttcaccagatg

SEQ ID NO: 535542 - DNA, 15 bp, Homo sapiens
tatttcaccagatga

SEQ ID NO: 535543 - DNA, 15 bp, Homo sapiens
atttcaccagatgac

SEQ ID NO: 535544 - DNA, 15 bp, Homo sapiens
tttcaccagatgaca

SEQ ID NO: 535545 - DNA, 15 bp, Homo sapiens
ttcaccagatgacat

SEQ ID NO: 535546 - DNA, 15 bp, Homo sapiens
tcaccagatgacata

SEQ ID NO: 535547 - DNA, 15 bp, Homo sapiens
caccagatgacataa

SEQ ID NO: 535548 - DNA, 15 bp, Homo sapiens
accagatgacataaa

SEQ ID NO: 535549 - DNA, 15 bp, Homo sapiens
ccagatgacataaaa

SEQ ID NO: 535550 - DNA, 15 bp, Homo sapiens
cagatgacataaaac

SEQ ID NO: 535551 - DNA, 15 bp, Homo sapiens
agatgacataaaact

SEQ ID NO: 535552 - DNA, 15 bp, Homo sapiens
gatgacataaaactg

SEQ ID NO: 535553 - DNA, 15 bp, Homo sapiens
atgacataaaactgt

SEQ ID NO: 535554 - DNA, 15 bp, Homo sapiens
tgacataaaactgtg

SEQ ID NO: 535555 - DNA, 15 bp, Homo sapiens
gacataaaactgtga

SEQ ID NO: 535556 - DNA, 15 bp, Homo sapiens
acataaaactgtgat

SEQ ID NO: 535557 - DNA, 15 bp, Homo sapiens
cataaaactgtgatt

SEQ ID NO: 535558 - DNA, 15 bp, Homo sapiens
ataaaactgtgatta

SEQ ID NO: 535559 - DNA, 15 bp, Homo sapiens
taaaactgtgattat

SEQ ID NO: 535560 - DNA, 15 bp, Homo sapiens
aaaactgtgattatc

SEQ ID NO: 535561 - DNA, 15 bp, Homo sapiens
aaactgtgattatcc

SEQ ID NO: 535562 - DNA, 15 bp, Homo sapiens
aactgtgattatcct

SEQ ID NO: 535563 - DNA, 15 bp, Homo sapiens
actgtgattatcctt

SEQ ID NO: 535564 - DNA, 15 bp, Homo sapiens
ctgtgattatccttc

SEQ ID NO: 535565 - DNA, 15 bp, Homo sapiens
tgtgattatccttct

SEQ ID NO: 535566 - DNA, 15 bp, Homo sapiens
gtgattatccttctc

SEQ ID NO: 535567 - DNA, 15 bp, Homo sapiens
tgattatccttctca

SEQ ID NO: 535568 - DNA, 15 bp, Homo sapiens
gattatccttctcat

SEQ ID NO: 535569 - DNA, 15 bp, Homo sapiens
attatccttctcatc

SEQ ID NO: 535570 - DNA, 15 bp, Homo sapiens
ttatccttctcatcc

SEQ ID NO: 535571 - DNA, 15 bp, Homo sapiens
tatccttctcatccc

SEQ ID NO: 535572 - DNA, 15 bp, Homo sapiens
atccttctcatccct

SEQ ID NO: 535573 - DNA, 15 bp, Homo sapiens
tccttctcatccctt

SEQ ID NO: 535574 - DNA, 15 bp, Homo sapiens
ccttctcatcccttc

SEQ ID NO: 535575 - DNA, 15 bp, Homo sapiens
cttctcatcccttcc

SEQ ID NO: 535576 - DNA, 15 bp, Homo sapiens
ttctcatcccttcct

SEQ ID NO: 535577 - DNA, 15 bp, Homo sapiens
tctcatcccttcctt

SEQ ID NO: 535578 - DNA, 15 bp, Homo sapiens
ctcatcccttccttc

SEQ ID NO: 535579 - DNA, 15 bp, Homo sapiens
tcatcccttccttcc

SEQ ID NO: 535580 - DNA, 15 bp, Homo sapiens
catcccttccttccc

SEQ ID NO: 535581 - DNA, 15 bp, Homo sapiens
atcccttccttccca

SEQ ID NO: 535582 - DNA, 15 bp, Homo sapiens
tcccttccttcccag

SEQ ID NO: 535583 - DNA, 15 bp, Homo sapiens
cccttccttcccagg

SEQ ID NO: 535584 - DNA, 15 bp, Homo sapiens
ccttccttcccaggg

SEQ ID NO: 535585 - DNA, 15 bp, Homo sapiens
cttccttcccagggg

SEQ ID NO: 535586 - DNA, 15 bp, Homo sapiens
ttccttcccagggga

SEQ ID NO: 535587 - DNA, 15 bp, Homo sapiens
tccttcccaggggat

SEQ ID NO: 535588 - DNA, 15 bp, Homo sapiens
ccttcccaggggatt

SEQ ID NO: 535589 - DNA, 15 bp, Homo sapiens
cttcccaggggattt

SEQ ID NO: 535590 - DNA, 15 bp, Homo sapiens
ttcccaggggatttc

SEQ ID NO: 535591 - DNA, 15 bp, Homo sapiens
tcccaggggatttca

SEQ ID NO: 535592 - DNA, 15 bp, Homo sapiens
cccaggggatttcac

SEQ ID NO: 535593 - DNA, 15 bp, Homo sapiens
ccaggggatttcacc

SEQ ID NO: 535594 - DNA, 15 bp, Homo sapiens
caggggatttcacca

SEQ ID NO: 535595 - DNA, 15 bp, Homo sapiens
aggggatttcaccat

SEQ ID NO: 535596 - DNA, 15 bp, Homo sapiens
ggggatttcaccatg

SEQ ID NO: 535597 - DNA, 15 bp, Homo sapiens
gggatttcaccatga

SEQ ID NO: 535598 - DNA, 15 bp, Homo sapiens
ggatttcaccatgag

SEQ ID NO: 535599 - DNA, 15 bp, Homo sapiens
gatttcaccatgagc

SEQ ID NO: 535600 - DNA, 15 bp, Homo sapiens
atttcaccatgagca

SEQ ID NO: 535601 - DNA, 15 bp, Homo sapiens
tttcaccatgagcaa

SEQ ID NO: 535602 - DNA, 15 bp, Homo sapiens
ttcaccatgagcaat

SEQ ID NO: 535603 - DNA, 15 bp, Homo sapiens
tcaccatgagcaatc

SEQ ID NO: 535604 - DNA, 15 bp, Homo sapiens
caccatgagcaatct

SEQ ID NO: 535605 - DNA, 15 bp, Homo sapiens
accatgagcaatctt

SEQ ID NO: 535606 - DNA, 15 bp, Homo sapiens
ccatgagcaatcttt

SEQ ID NO: 535607 - DNA, 15 bp, Homo sapiens
catgagcaatctttt

SEQ ID NO: 535608 - DNA, 15 bp, Homo sapiens
atgagcaatcttttc

SEQ ID NO: 535609 - DNA, 15 bp, Homo sapiens
tgagcaatcttttca

SEQ ID NO: 535610 - DNA, 15 bp, Homo sapiens
gagcaatcttttcaa

SEQ ID NO: 535611 - DNA, 15 bp, Homo sapiens
agcaatcttttcaat

SEQ ID NO: 535612 - DNA, 15 bp, Homo sapiens
gcaatcttttcaatt

SEQ ID NO: 535613 - DNA, 15 bp, Homo sapiens
caatcttttcaattg

SEQ ID NO: 535614 - DNA, 15 bp, Homo sapiens
aatcttttcaattgg

SEQ ID NO: 535615 - DNA, 15 bp, Homo sapiens
atcttttcaattggg

SEQ ID NO: 535616 - DNA, 15 bp, Homo sapiens
tcttttcaattgggc

SEQ ID NO: 535617 - DNA, 15 bp, Homo sapiens
cttttcaattgggcc

SEQ ID NO: 535618 - DNA, 15 bp, Homo sapiens
ttttcaattgggcct

SEQ ID NO: 535619 - DNA, 15 bp, Homo sapiens
tttcaattgggcctt

SEQ ID NO: 535620 - DNA, 15 bp, Homo sapiens
ttcaattgggccttc

SEQ ID NO: 535621 - DNA, 15 bp, Homo sapiens
tcaattgggccttct

SEQ ID NO: 535622 - DNA, 15 bp, Homo sapiens
caattgggccttcta

SEQ ID NO: 535623 - DNA, 15 bp, Homo sapiens
aattgggccttctat

SEQ ID NO: 535624 - DNA, 15 bp, Homo sapiens
attgggccttctatc

SEQ ID NO: 535625 - DNA, 15 bp, Homo sapiens
ttgggccttctatcc

SEQ ID NO: 535626 - DNA, 15 bp, Homo sapiens
tgggccttctatcct

SEQ ID NO: 535627 - DNA, 15 bp, Homo sapiens
gggccttctatcctg

SEQ ID NO: 535628 - DNA, 15 bp, Homo sapiens
ggccttctatcctgg

SEQ ID NO: 535629 - DNA, 15 bp, Homo sapiens
gccttctatcctggg

SEQ ID NO: 535630 - DNA, 15 bp, Homo sapiens
ccttctatcctgggc

SEQ ID NO: 535631 - DNA, 15 bp, Homo sapiens
cttctatcctgggct

SEQ ID NO: 535632 - DNA, 15 bp, Homo sapiens
ttctatcctgggcta

SEQ ID NO: 535633 - DNA, 15 bp, Homo sapiens
tctatcctgggctac

SEQ ID NO: 535634 - DNA, 15 bp, Homo sapiens
ctatcctgggctaca

SEQ ID NO: 535635 - DNA, 15 bp, Homo sapiens
tatcctgggctacaa

SEQ ID NO: 535636 - DNA, 15 bp, Homo sapiens
atcctgggctacaat

SEQ ID NO: 535637 - DNA, 15 bp, Homo sapiens
tcctgggctacaatt

SEQ ID NO: 535638 - DNA, 15 bp, Homo sapiens
cctgggctacaattt

SEQ ID NO: 535639 - DNA, 15 bp, Homo sapiens
ctgggctacaatttt

SEQ ID NO: 535640 - DNA, 15 bp, Homo sapiens
tgggctacaatttta

SEQ ID NO: 535641 - DNA, 15 bp, Homo sapiens
gggctacaattttag

SEQ ID NO: 535642 - DNA, 15 bp, Homo sapiens
ggctacaattttagt

SEQ ID NO: 535643 - DNA, 15 bp, Homo sapiens
gctacaattttagtt

SEQ ID NO: 535644 - DNA, 15 bp, Homo sapiens
ctacaattttagttc

SEQ ID NO: 535645 - DNA, 15 bp, Homo sapiens
tacaattttagttcc

SEQ ID NO: 535646 - DNA, 15 bp, Homo sapiens
acaattttagttcct

SEQ ID NO: 535647 - DNA, 15 bp, Homo sapiens
caattttagttcctt

SEQ ID NO: 535648 - DNA, 15 bp, Homo sapiens
aattttagttccttt

SEQ ID NO: 535649 - DNA, 15 bp, Homo sapiens
attttagttcctttt

SEQ ID NO: 535650 - DNA, 15 bp, Homo sapiens
ttttagttccttttg

SEQ ID NO: 535651 - DNA, 15 bp, Homo sapiens
tttagttccttttga

SEQ ID NO: 535652 - DNA, 15 bp, Homo sapiens
ttagttccttttgag

SEQ ID NO: 535653 - DNA, 15 bp, Homo sapiens
tagttccttttgaga

SEQ ID NO: 535654 - DNA, 15 bp, Homo sapiens
agttccttttgagaa

SEQ ID NO: 535655 - DNA, 15 bp, Homo sapiens
gttccttttgagaat

SEQ ID NO: 535656 - DNA, 15 bp, Homo sapiens
ttccttttgagaatg

SEQ ID NO: 535657 - DNA, 15 bp, Homo sapiens
tccttttgagaatga

SEQ ID NO: 535658 - DNA, 15 bp, Homo sapiens
ccttttgagaatgag

SEQ ID NO: 535659 - DNA, 15 bp, Homo sapiens
cttttgagaatgagt

SEQ ID NO: 535660 - DNA, 15 bp, Homo sapiens
ttttgagaatgagtc

SEQ ID NO: 535661 - DNA, 15 bp, Homo sapiens
tttgagaatgagtca

SEQ ID NO: 535662 - DNA, 15 bp, Homo sapiens
ttgagaatgagtcag

SEQ ID NO: 535663 - DNA, 15 bp, Homo sapiens
tgagaatgagtcagc

SEQ ID NO: 535664 - DNA, 15 bp, Homo sapiens
gagaatgagtcagca

SEQ ID NO: 535665 - DNA, 15 bp, Homo sapiens
agaatgagtcagcag

SEQ ID NO: 535666 - DNA, 15 bp, Homo sapiens
gaatgagtcagcaga

SEQ ID NO: 535667 - DNA, 15 bp, Homo sapiens
aatgagtcagcagat

SEQ ID NO: 535668 - DNA, 15 bp, Homo sapiens
atgagtcagcagata

SEQ ID NO: 535669 - DNA, 15 bp, Homo sapiens
tgagtcagcagatag

SEQ ID NO: 535670 - DNA, 15 bp, Homo sapiens
gagtcagcagatagt

SEQ ID NO: 535671 - DNA, 15 bp, Homo sapiens
agtcagcagatagtg

SEQ ID NO: 535672 - DNA, 15 bp, Homo sapiens
gtcagcagatagtgc

SEQ ID NO: 535673 - DNA, 15 bp, Homo sapiens
tcagcagatagtgct

SEQ ID NO: 535674 - DNA, 15 bp, Homo sapiens
cagcagatagtgctt

SEQ ID NO: 535675 - DNA, 15 bp, Homo sapiens
agcagatagtgcttg

SEQ ID NO: 535676 - DNA, 15 bp, Homo sapiens
gcagatagtgcttga

SEQ ID NO: 535677 - DNA, 15 bp, Homo sapiens
cagatagtgcttgag

SEQ ID NO: 535678 - DNA, 15 bp, Homo sapiens
agatagtgcttgaga

SEQ ID NO: 535679 - DNA, 15 bp, Homo sapiens
gatagtgcttgagag

SEQ ID NO: 535680 - DNA, 15 bp, Homo sapiens
atagtgcttgagagg

SEQ ID NO: 535681 - DNA, 15 bp, Homo sapiens
tagtgcttgagagga

SEQ ID NO: 535682 - DNA, 15 bp, Homo sapiens
agtgcttgagaggag

SEQ ID NO: 535683 - DNA, 15 bp, Homo sapiens
gtgcttgagaggaga

SEQ ID NO: 535684 - DNA, 15 bp, Homo sapiens
tgcttgagaggagaa

SEQ ID NO: 535685 - DNA, 15 bp, Homo sapiens
gcttgagaggagaaa

SEQ ID NO: 535686 - DNA, 15 bp, Homo sapiens
cttgagaggagaaaa

SEQ ID NO: 535687 - DNA, 15 bp, Homo sapiens
ttgagaggagaaaaa

SEQ ID NO: 535688 - DNA, 15 bp, Homo sapiens
tgagaggagaaaaaa

SEQ ID NO: 535689 - DNA, 15 bp, Homo sapiens
gagaggagaaaaaag

SEQ ID NO: 535690 - DNA, 15 bp, Homo sapiens
agaggagaaaaaaga

SEQ ID NO: 535691 - DNA, 15 bp, Homo sapiens
gaggagaaaaaagaa

SEQ ID NO: 535692 - DNA, 15 bp, Homo sapiens
aggagaaaaaagaaa

SEQ ID NO: 535693 - DNA, 15 bp, Homo sapiens
ggagaaaaaagaaaa

SEQ ID NO: 535694 - DNA, 15 bp, Homo sapiens
gagaaaaaagaaaaa

SEQ ID NO: 535695 - DNA, 15 bp, Homo sapiens
agaaaaaagaaaaaa

SEQ ID NO: 535696 - DNA, 15 bp, Homo sapiens
gaaaaaagaaaaaaa

SEQ ID NO: 535697 - DNA, 15 bp, Homo sapiens
aaaaaagaaaaaaaa

SEQ ID NO: 535698 - DNA, 15 bp, Homo sapiens
aaaaagaaaaaaaaa

SEQ ID NO: 535699 - DNA, 15 bp, Homo sapiens
aaaagaaaaaaaaaa

SEQ ID NO: 535700 - DNA, 15 bp, Homo sapiens
aaagaaaaaaaaaag

SEQ ID NO: 535701 - DNA, 15 bp, Homo sapiens
aagaaaaaaaaaagt

SEQ ID NO: 535702 - DNA, 15 bp, Homo sapiens
agaaaaaaaaaagtc

SEQ ID NO: 535703 - DNA, 15 bp, Homo sapiens
gaaaaaaaaaagtct

SEQ ID NO: 535704 - DNA, 15 bp, Homo sapiens
aaaaaaaaaagtctc

SEQ ID NO: 535705 - DNA, 15 bp, Homo sapiens
aaaaaaaaagtctct

SEQ ID NO: 535706 - DNA, 15 bp, Homo sapiens
aaaaaaaagtctctc

SEQ ID NO: 535707 - DNA, 15 bp, Homo sapiens
aaaaaaagtctctct

SEQ ID NO: 535708 - DNA, 15 bp, Homo sapiens
aaaaaagtctctcta

SEQ ID NO: 535709 - DNA, 15 bp, Homo sapiens
aaaaagtctctctaa

SEQ ID NO: 535710 - DNA, 15 bp, Homo sapiens
aaaagtctctctaaa

SEQ ID NO: 535711 - DNA, 15 bp, Homo sapiens
aaagtctctctaaaa

SEQ ID NO: 535712 - DNA, 15 bp, Homo sapiens
aagtctctctaaaac

SEQ ID NO: 535713 - DNA, 15 bp, Homo sapiens
agtctctctaaaact

SEQ ID NO: 535714 - DNA, 15 bp, Homo sapiens
gtctctctaaaactc

SEQ ID NO: 535715 - DNA, 15 bp, Homo sapiens
tctctctaaaactca

SEQ ID NO: 535716 - DNA, 15 bp, Homo sapiens
ctctctaaaactcaa

SEQ ID NO: 535717 - DNA, 15 bp, Homo sapiens
tctctaaaactcaaa

SEQ ID NO: 535718 - DNA, 15 bp, Homo sapiens
ctctaaaactcaaat

SEQ ID NO: 535719 - DNA, 15 bp, Homo sapiens
tctaaaactcaaatc

SEQ ID NO: 535720 - DNA, 15 bp, Homo sapiens
ctaaaactcaaatca

SEQ ID NO: 535721 - DNA, 15 bp, Homo sapiens
taaaactcaaatcaa

SEQ ID NO: 535722 - DNA, 15 bp, Homo sapiens
aaaactcaaatcaaa

SEQ ID NO: 535723 - DNA, 15 bp, Homo sapiens
aaactcaaatcaaat

SEQ ID NO: 535724 - DNA, 15 bp, Homo sapiens
aactcaaatcaaatt

SEQ ID NO: 535725 - DNA, 15 bp, Homo sapiens
actcaaatcaaattt

SEQ ID NO: 535726 - DNA, 15 bp, Homo sapiens
ctcaaatcaaatttc

SEQ ID NO: 535727 - DNA, 15 bp, Homo sapiens
tcaaatcaaatttct

SEQ ID NO: 535728 - DNA, 15 bp, Homo sapiens
caaatcaaatttctg

SEQ ID NO: 535729 - DNA, 15 bp, Homo sapiens
aaatcaaatttctgt

SEQ ID NO: 535730 - DNA, 15 bp, Homo sapiens
aatcaaatttctgtg

SEQ ID NO: 535731 - DNA, 15 bp, Homo sapiens
atcaaatttctgtgg

SEQ ID NO: 535732 - DNA, 15 bp, Homo sapiens
tcaaatttctgtggg

SEQ ID NO: 535733 - DNA, 15 bp, Homo sapiens
caaatttctgtgggc

SEQ ID NO: 535734 - DNA, 15 bp, Homo sapiens
aaatttctgtgggcc

SEQ ID NO: 535735 - DNA, 15 bp, Homo sapiens
aatttctgtgggcct

SEQ ID NO: 535736 - DNA, 15 bp, Homo sapiens
atttctgtgggcctt

SEQ ID NO: 535737 - DNA, 15 bp, Homo sapiens
tttctgtgggccttc

SEQ ID NO: 535738 - DNA, 15 bp, Homo sapiens
ttctgtgggccttca

SEQ ID NO: 535739 - DNA, 15 bp, Homo sapiens
tctgtgggccttcag

SEQ ID NO: 535740 - DNA, 15 bp, Homo sapiens
ctgtgggccttcaga

SEQ ID NO: 535741 - DNA, 15 bp, Homo sapiens
tgtgggccttcagac

SEQ ID NO: 535742 - DNA, 15 bp, Homo sapiens
gtgggccttcagaca

SEQ ID NO: 535743 - DNA, 15 bp, Homo sapiens
tgggccttcagacaa

SEQ ID NO: 535744 - DNA, 15 bp, Homo sapiens
gggccttcagacaag

SEQ ID NO: 535745 - DNA, 15 bp, Homo sapiens
ggccttcagacaagt

SEQ ID NO: 535746 - DNA, 15 bp, Homo sapiens
gccttcagacaagtc

SEQ ID NO: 535747 - DNA, 15 bp, Homo sapiens
ccttcagacaagtct

SEQ ID NO: 535748 - DNA, 15 bp, Homo sapiens
cttcagacaagtctg

SEQ ID NO: 535749 - DNA, 15 bp, Homo sapiens
ttcagacaagtctga

SEQ ID NO: 535750 - DNA, 15 bp, Homo sapiens
tcagacaagtctgac

SEQ ID NO: 535751 - DNA, 15 bp, Homo sapiens
cagacaagtctgaca

SEQ ID NO: 535752 - DNA, 15 bp, Homo sapiens
agacaagtctgacat

SEQ ID NO: 535753 - DNA, 15 bp, Homo sapiens
gacaagtctgacatt

SEQ ID NO: 535754 - DNA, 15 bp, Homo sapiens
acaagtctgacattc

SEQ ID NO: 535755 - DNA, 15 bp, Homo sapiens
caagtctgacattct

SEQ ID NO: 535756 - DNA, 15 bp, Homo sapiens
aagtctgacattctt

SEQ ID NO: 535757 - DNA, 15 bp, Homo sapiens
agtctgacattcttc

SEQ ID NO: 535758 - DNA, 15 bp, Homo sapiens
gtctgacattcttcc

SEQ ID NO: 535759 - DNA, 15 bp, Homo sapiens
tctgacattcttcca

SEQ ID NO: 535760 - DNA, 15 bp, Homo sapiens
ctgacattcttccat

SEQ ID NO: 535761 - DNA, 15 bp, Homo sapiens
tgacattcttccatg

SEQ ID NO: 535762 - DNA, 15 bp, Homo sapiens
gacattcttccatga

SEQ ID NO: 535763 - DNA, 15 bp, Homo sapiens
acattcttccatgag

SEQ ID NO: 535764 - DNA, 15 bp, Homo sapiens
cattcttccatgagt

SEQ ID NO: 535765 - DNA, 15 bp, Homo sapiens
attcttccatgagtt

SEQ ID NO: 535766 - DNA, 15 bp, Homo sapiens
ttcttccatgagttg

SEQ ID NO: 535767 - DNA, 15 bp, Homo sapiens
tcttccatgagttgg

SEQ ID NO: 535768 - DNA, 15 bp, Homo sapiens
cttccatgagttggc

SEQ ID NO: 535769 - DNA, 15 bp, Homo sapiens
ttccatgagttggct

SEQ ID NO: 535770 - DNA, 15 bp, Homo sapiens
tccatgagttggctg

SEQ ID NO: 535771 - DNA, 15 bp, Homo sapiens
ccatgagttggctgg

SEQ ID NO: 535772 - DNA, 15 bp, Homo sapiens
catgagttggctggg

SEQ ID NO: 535773 - DNA, 15 bp, Homo sapiens
atgagttggctgggc

SEQ ID NO: 535774 - DNA, 15 bp, Homo sapiens
tgagttggctgggcc

SEQ ID NO: 535775 - DNA, 15 bp, Homo sapiens
gagttggctgggccg

SEQ ID NO: 535776 - DNA, 15 bp, Homo sapiens
agttggctgggccgc

SEQ ID NO: 535777 - DNA, 15 bp, Homo sapiens
gttggctgggccgct

SEQ ID NO: 535778 - DNA, 15 bp, Homo sapiens
ttggctgggccgctg

SEQ ID NO: 535779 - DNA, 15 bp, Homo sapiens
tggctgggccgctgg

SEQ ID NO: 535780 - DNA, 15 bp, Homo sapiens
ggctgggccgctggt

SEQ ID NO: 535781 - DNA, 15 bp, Homo sapiens
gctgggccgctggtc

SEQ ID NO: 535782 - DNA, 15 bp, Homo sapiens
ctgggccgctggtct

SEQ ID NO: 535783 - DNA, 15 bp, Homo sapiens
tgggccgctggtctc

SEQ ID NO: 535784 - DNA, 15 bp, Homo sapiens
gggccgctggtctca

SEQ ID NO: 535785 - DNA, 15 bp, Homo sapiens
ggccgctggtctcag

SEQ ID NO: 535786 - DNA, 15 bp, Homo sapiens
gccgctggtctcagt

SEQ ID NO: 535787 - DNA, 15 bp, Homo sapiens
ccgctggtctcagtt

SEQ ID NO: 535788 - DNA, 15 bp, Homo sapiens
cgctggtctcagtta

SEQ ID NO: 535789 - DNA, 15 bp, Homo sapiens
gctggtctcagttag

SEQ ID NO: 535790 - DNA, 15 bp, Homo sapiens
ctggtctcagttagg

SEQ ID NO: 535791 - DNA, 15 bp, Homo sapiens
tggtctcagttagga

SEQ ID NO: 535792 - DNA, 15 bp, Homo sapiens
ggtctcagttaggaa

SEQ ID NO: 535793 - DNA, 15 bp, Homo sapiens
gtctcagttaggaat

SEQ ID NO: 535794 - DNA, 15 bp, Homo sapiens
tctcagttaggaata

SEQ ID NO: 535795 - DNA, 15 bp, Homo sapiens
ctcagttaggaatac

SEQ ID NO: 535796 - DNA, 15 bp, Homo sapiens
tcagttaggaatact

SEQ ID NO: 535797 - DNA, 15 bp, Homo sapiens
cagttaggaatactg

SEQ ID NO: 535798 - DNA, 15 bp, Homo sapiens
agttaggaatactga

SEQ ID NO: 535799 - DNA, 15 bp, Homo sapiens
gttaggaatactgac

SEQ ID NO: 535800 - DNA, 15 bp, Homo sapiens
ttaggaatactgaca

SEQ ID NO: 535801 - DNA, 15 bp, Homo sapiens
taggaatactgacac

SEQ ID NO: 535802 - DNA, 15 bp, Homo sapiens
aggaatactgacact

SEQ ID NO: 535803 - DNA, 15 bp, Homo sapiens
ggaatactgacactt

SEQ ID NO: 535804 - DNA, 15 bp, Homo sapiens
gaatactgacacttc

SEQ ID NO: 535805 - DNA, 15 bp, Homo sapiens
aatactgacacttca

SEQ ID NO: 535806 - DNA, 15 bp, Homo sapiens
atactgacacttcac

SEQ ID NO: 535807 - DNA, 15 bp, Homo sapiens
tactgacacttcacc

SEQ ID NO: 535808 - DNA, 15 bp, Homo sapiens
actgacacttcaccc

SEQ ID NO: 535809 - DNA, 15 bp, Homo sapiens
ctgacacttcacccc

SEQ ID NO: 535810 - DNA, 15 bp, Homo sapiens
tgacacttcacccca

SEQ ID NO: 535811 - DNA, 15 bp, Homo sapiens
gacacttcaccccag

SEQ ID NO: 535812 - DNA, 15 bp, Homo sapiens
acacttcaccccagc

SEQ ID NO: 535813 - DNA, 15 bp, Homo sapiens
cacttcaccccagca

SEQ ID NO: 535814 - DNA, 15 bp, Homo sapiens
acttcaccccagcaa

SEQ ID NO: 535815 - DNA, 15 bp, Homo sapiens
cttcaccccagcaaa

SEQ ID NO: 535816 - DNA, 15 bp, Homo sapiens
ttcaccccagcaaac

SEQ ID NO: 535817 - DNA, 15 bp, Homo sapiens
tcaccccagcaaacc

SEQ ID NO: 535818 - DNA, 15 bp, Homo sapiens
caccccagcaaacca

SEQ ID NO: 535819 - DNA, 15 bp, Homo sapiens
accccagcaaaccaa

SEQ ID NO: 535820 - DNA, 15 bp, Homo sapiens
ccccagcaaaccaaa

SEQ ID NO: 535821 - DNA, 15 bp, Homo sapiens
cccagcaaaccaaaa

SEQ ID NO: 535822 - DNA, 15 bp, Homo sapiens
ccagcaaaccaaaaa

SEQ ID NO: 535823 - DNA, 15 bp, Homo sapiens
cagcaaaccaaaaac

SEQ ID NO: 535824 - DNA, 15 bp, Homo sapiens
agcaaaccaaaaacg

SEQ ID NO: 535825 - DNA, 15 bp, Homo sapiens
gcaaaccaaaaacgc

SEQ ID NO: 535826 - DNA, 15 bp, Homo sapiens
caaaccaaaaacgca

SEQ ID NO: 535827 - DNA, 15 bp, Homo sapiens
aaaccaaaaacgcag

SEQ ID NO: 535828 - DNA, 15 bp, Homo sapiens
aaccaaaaacgcaga

SEQ ID NO: 535829 - DNA, 15 bp, Homo sapiens
accaaaaacgcagag

SEQ ID NO: 535830 - DNA, 15 bp, Homo sapiens
ccaaaaacgcagaga

SEQ ID NO: 535831 - DNA, 15 bp, Homo sapiens
caaaaacgcagagac

SEQ ID NO: 535832 - DNA, 15 bp, Homo sapiens
aaaaacgcagagact

SEQ ID NO: 535833 - DNA, 15 bp, Homo sapiens
aaaacgcagagactc

SEQ ID NO: 535834 - DNA, 15 bp, Homo sapiens
aaacgcagagactca

SEQ ID NO: 535835 - DNA, 15 bp, Homo sapiens
aacgcagagactcat

SEQ ID NO: 535836 - DNA, 15 bp, Homo sapiens
acgcagagactcatc

SEQ ID NO: 535837 - DNA, 15 bp, Homo sapiens
cgcagagactcatca

SEQ ID NO: 535838 - DNA, 15 bp, Homo sapiens
gcagagactcatcac

SEQ ID NO: 535839 - DNA, 15 bp, Homo sapiens
cagagactcatcacc

SEQ ID NO: 535840 - DNA, 15 bp, Homo sapiens
agagactcatcaccg

SEQ ID NO: 535841 - DNA, 15 bp, Homo sapiens
gagactcatcaccgt

SEQ ID NO: 535842 - DNA, 15 bp, Homo sapiens
agactcatcaccgtc

SEQ ID NO: 535843 - DNA, 15 bp, Homo sapiens
gactcatcaccgtca

SEQ ID NO: 535844 - DNA, 15 bp, Homo sapiens
actcatcaccgtcat

SEQ ID NO: 535845 - DNA, 15 bp, Homo sapiens
ctcatcaccgtcatt

SEQ ID NO: 535846 - DNA, 15 bp, Homo sapiens
tcatcaccgtcattc

SEQ ID NO: 535847 - DNA, 15 bp, Homo sapiens
catcaccgtcattcc

SEQ ID NO: 535848 - DNA, 15 bp, Homo sapiens
atcaccgtcattcca

SEQ ID NO: 535849 - DNA, 15 bp, Homo sapiens
tcaccgtcattccaa

SEQ ID NO: 535850 - DNA, 15 bp, Homo sapiens
caccgtcattccaag

SEQ ID NO: 535851 - DNA, 15 bp, Homo sapiens
accgtcattccaagt

SEQ ID NO: 535852 - DNA, 15 bp, Homo sapiens
ccgtcattccaagta

SEQ ID NO: 535853 - DNA, 15 bp, Homo sapiens
cgtcattccaagtag

SEQ ID NO: 535854 - DNA, 15 bp, Homo sapiens
gtcattccaagtagg

SEQ ID NO: 535855 - DNA, 15 bp, Homo sapiens
tcattccaagtagga

SEQ ID NO: 535856 - DNA, 15 bp, Homo sapiens
cattccaagtaggat

SEQ ID NO: 535857 - DNA, 15 bp, Homo sapiens
attccaagtaggatc

SEQ ID NO: 535858 - DNA, 15 bp, Homo sapiens
ttccaagtaggatca

SEQ ID NO: 535859 - DNA, 15 bp, Homo sapiens
tccaagtaggatcag

SEQ ID NO: 535860 - DNA, 15 bp, Homo sapiens
ccaagtaggatcaga

SEQ ID NO: 535861 - DNA, 15 bp, Homo sapiens
caagtaggatcagag

SEQ ID NO: 535862 - DNA, 15 bp, Homo sapiens
aagtaggatcagaga

SEQ ID NO: 535863 - DNA, 15 bp, Homo sapiens
agtaggatcagagat

SEQ ID NO: 535864 - DNA, 15 bp, Homo sapiens
gtaggatcagagatg

SEQ ID NO: 535865 - DNA, 15 bp, Homo sapiens
taggatcagagatgg

SEQ ID NO: 535866 - DNA, 15 bp, Homo sapiens
aggatcagagatgga

SEQ ID NO: 535867 - DNA, 15 bp, Homo sapiens
ggatcagagatggag

SEQ ID NO: 535868 - DNA, 15 bp, Homo sapiens
gatcagagatggagt

SEQ ID NO: 535869 - DNA, 15 bp, Homo sapiens
atcagagatggagtg

SEQ ID NO: 535870 - DNA, 15 bp, Homo sapiens
tcagagatggagtgt

SEQ ID NO: 535871 - DNA, 15 bp, Homo sapiens
cagagatggagtgtt

SEQ ID NO: 535872 - DNA, 15 bp, Homo sapiens
agagatggagtgttc

SEQ ID NO: 535873 - DNA, 15 bp, Homo sapiens
gagatggagtgttca

SEQ ID NO: 535874 - DNA, 15 bp, Homo sapiens
agatggagtgttcag

SEQ ID NO: 535875 - DNA, 15 bp, Homo sapiens
gatggagtgttcaga

SEQ ID NO: 535876 - DNA, 15 bp, Homo sapiens
atggagtgttcagac

SEQ ID NO: 535877 - DNA, 15 bp, Homo sapiens
tggagtgttcagacg

SEQ ID NO: 535878 - DNA, 15 bp, Homo sapiens
ggagtgttcagacgc

SEQ ID NO: 535879 - DNA, 15 bp, Homo sapiens
gagtgttcagacgca

SEQ ID NO: 535880 - DNA, 15 bp, Homo sapiens
agtgttcagacgcat

SEQ ID NO: 535881 - DNA, 15 bp, Homo sapiens
gtgttcagacgcatt

SEQ ID NO: 535882 - DNA, 15 bp, Homo sapiens
tgttcagacgcattt

SEQ ID NO: 535883 - DNA, 15 bp, Homo sapiens
gttcagacgcatttt

SEQ ID NO: 535884 - DNA, 15 bp, Homo sapiens
ttcagacgcattttc

SEQ ID NO: 535885 - DNA, 15 bp, Homo sapiens
tcagacgcattttca

SEQ ID NO: 535886 - DNA, 15 bp, Homo sapiens
cagacgcattttcag

SEQ ID NO: 535887 - DNA, 15 bp, Homo sapiens
agacgcattttcaga

SEQ ID NO: 535888 - DNA, 15 bp, Homo sapiens
gacgcattttcagat

SEQ ID NO: 535889 - DNA, 15 bp, Homo sapiens
acgcattttcagata

SEQ ID NO: 535890 - DNA, 15 bp, Homo sapiens
cgcattttcagataa

SEQ ID NO: 535891 - DNA, 15 bp, Homo sapiens
gcattttcagataat

SEQ ID NO: 535892 - DNA, 15 bp, Homo sapiens
cattttcagataatt

SEQ ID NO: 535893 - DNA, 15 bp, Homo sapiens
attttcagataattc

SEQ ID NO: 535894 - DNA, 15 bp, Homo sapiens
ttttcagataattca

SEQ ID NO: 535895 - DNA, 15 bp, Homo sapiens
tttcagataattcag

SEQ ID NO: 535896 - DNA, 15 bp, Homo sapiens
ttcagataattcaga

SEQ ID NO: 535897 - DNA, 15 bp, Homo sapiens
tcagataattcagat

SEQ ID NO: 535898 - DNA, 15 bp, Homo sapiens
cagataattcagatc

SEQ ID NO: 535899 - DNA, 15 bp, Homo sapiens
agataattcagatca

SEQ ID NO: 535900 - DNA, 15 bp, Homo sapiens
gataattcagatcaa

SEQ ID NO: 535901 - DNA, 15 bp, Homo sapiens
ataattcagatcaac

SEQ ID NO: 535902 - DNA, 15 bp, Homo sapiens
taattcagatcaact

SEQ ID NO: 535903 - DNA, 15 bp, Homo sapiens
aattcagatcaactt

SEQ ID NO: 535904 - DNA, 15 bp, Homo sapiens
attcagatcaacttt

SEQ ID NO: 535905 - DNA, 15 bp, Homo sapiens
ttcagatcaacttta

SEQ ID NO: 535906 - DNA, 15 bp, Homo sapiens
tcagatcaactttac

SEQ ID NO: 535907 - DNA, 15 bp, Homo sapiens
cagatcaactttaca

SEQ ID NO: 535908 - DNA, 15 bp, Homo sapiens
agatcaactttacag

SEQ ID NO: 535909 - DNA, 15 bp, Homo sapiens
gatcaactttacagt

SEQ ID NO: 535910 - DNA, 15 bp, Homo sapiens
atcaactttacagta

SEQ ID NO: 535911 - DNA, 15 bp, Homo sapiens
tcaactttacagtac

SEQ ID NO: 535912 - DNA, 15 bp, Homo sapiens
caactttacagtacc

SEQ ID NO: 535913 - DNA, 15 bp, Homo sapiens
aactttacagtacct

SEQ ID NO: 535914 - DNA, 15 bp, Homo sapiens
actttacagtacctt

SEQ ID NO: 535915 - DNA, 15 bp, Homo sapiens
ctttacagtaccttc

SEQ ID NO: 535916 - DNA, 15 bp, Homo sapiens
tttacagtaccttca

SEQ ID NO: 535917 - DNA, 15 bp, Homo sapiens
ttacagtaccttcaa

SEQ ID NO: 535918 - DNA, 15 bp, Homo sapiens
tacagtaccttcaaa

SEQ ID NO: 535919 - DNA, 15 bp, Homo sapiens
acagtaccttcaaaa

SEQ ID NO: 535920 - DNA, 15 bp, Homo sapiens
cagtaccttcaaaat

SEQ ID NO: 535921 - DNA, 15 bp, Homo sapiens
agtaccttcaaaatt

SEQ ID NO: 535922 - DNA, 15 bp, Homo sapiens
gtaccttcaaaattg

SEQ ID NO: 535923 - DNA, 15 bp, Homo sapiens
taccttcaaaattgc

SEQ ID NO: 535924 - DNA, 15 bp, Homo sapiens
accttcaaaattgct

SEQ ID NO: 535925 - DNA, 15 bp, Homo sapiens
ccttcaaaattgctc

SEQ ID NO: 535926 - DNA, 15 bp, Homo sapiens
cttcaaaattgctca

SEQ ID NO: 535927 - DNA, 15 bp, Homo sapiens
ttcaaaattgctcat

SEQ ID NO: 535928 - DNA, 15 bp, Homo sapiens
tcaaaattgctcatc

SEQ ID NO: 535929 - DNA, 15 bp, Homo sapiens
caaaattgctcatcc

SEQ ID NO: 535930 - DNA, 15 bp, Homo sapiens
aaaattgctcatccc

SEQ ID NO: 535931 - DNA, 15 bp, Homo sapiens
aaattgctcatccct

SEQ ID NO: 535932 - DNA, 15 bp, Homo sapiens
aattgctcatcccta

SEQ ID NO: 535933 - DNA, 15 bp, Homo sapiens
attgctcatccctac

SEQ ID NO: 535934 - DNA, 15 bp, Homo sapiens
ttgctcatccctaca

SEQ ID NO: 535935 - DNA, 15 bp, Homo sapiens
tgctcatccctacaa

SEQ ID NO: 535936 - DNA, 15 bp, Homo sapiens
gctcatccctacaaa

SEQ ID NO: 535937 - DNA, 15 bp, Homo sapiens
ctcatccctacaaaa

SEQ ID NO: 535938 - DNA, 15 bp, Homo sapiens
tcatccctacaaaaa

SEQ ID NO: 535939 - DNA, 15 bp, Homo sapiens
catccctacaaaaat

SEQ ID NO: 535940 - DNA, 15 bp, Homo sapiens
atccctacaaaaatg

SEQ ID NO: 535941 - DNA, 15 bp, Homo sapiens
tccctacaaaaatga

SEQ ID NO: 535942 - DNA, 15 bp, Homo sapiens
ccctacaaaaatgaa

SEQ ID NO: 535943 - DNA, 15 bp, Homo sapiens
cctacaaaaatgaag

SEQ ID NO: 535944 - DNA, 15 bp, Homo sapiens
ctacaaaaatgaagc

SEQ ID NO: 535945 - DNA, 15 bp, Homo sapiens
tacaaaaatgaagca

SEQ ID NO: 535946 - DNA, 15 bp, Homo sapiens
acaaaaatgaagcaa

SEQ ID NO: 535947 - DNA, 15 bp, Homo sapiens
caaaaatgaagcaaa

SEQ ID NO: 535948 - DNA, 15 bp, Homo sapiens
aaaaatgaagcaaac

SEQ ID NO: 535949 - DNA, 15 bp, Homo sapiens
aaaatgaagcaaaca

SEQ ID NO: 535950 - DNA, 15 bp, Homo sapiens
aaatgaagcaaacac

SEQ ID NO: 535951 - DNA, 15 bp, Homo sapiens
aatgaagcaaacact

SEQ ID NO: 535952 - DNA, 15 bp, Homo sapiens
atgaagcaaacacta

SEQ ID NO: 535953 - DNA, 15 bp, Homo sapiens
tgaagcaaacactaa

SEQ ID NO: 535954 - DNA, 15 bp, Homo sapiens
gaagcaaacactaat

SEQ ID NO: 535955 - DNA, 15 bp, Homo sapiens
aagcaaacactaatg

SEQ ID NO: 535956 - DNA, 15 bp, Homo sapiens
agcaaacactaatgt

SEQ ID NO: 535957 - DNA, 15 bp, Homo sapiens
gcaaacactaatgta

SEQ ID NO: 535958 - DNA, 15 bp, Homo sapiens
caaacactaatgtat

SEQ ID NO: 535959 - DNA, 15 bp, Homo sapiens
aaacactaatgtatt

SEQ ID NO: 535960 - DNA, 15 bp, Homo sapiens
aacactaatgtattt

SEQ ID NO: 535961 - DNA, 15 bp, Homo sapiens
acactaatgtattta

SEQ ID NO: 535962 - DNA, 15 bp, Homo sapiens
cactaatgtatttaa

SEQ ID NO: 535963 - DNA, 15 bp, Homo sapiens
actaatgtatttaag

SEQ ID NO: 535964 - DNA, 15 bp, Homo sapiens
ctaatgtatttaaga

SEQ ID NO: 535965 - DNA, 15 bp, Homo sapiens
taatgtatttaagag

SEQ ID NO: 535966 - DNA, 15 bp, Homo sapiens
aatgtatttaagaga

SEQ ID NO: 535967 - DNA, 15 bp, Homo sapiens
atgtatttaagagat

SEQ ID NO: 535968 - DNA, 15 bp, Homo sapiens
tgtatttaagagatt

SEQ ID NO: 535969 - DNA, 15 bp, Homo sapiens
gtatttaagagattt

SEQ ID NO: 535970 - DNA, 15 bp, Homo sapiens
tatttaagagatttg

SEQ ID NO: 535971 - DNA, 15 bp, Homo sapiens
atttaagagatttgc

SEQ ID NO: 535972 - DNA, 15 bp, Homo sapiens
tttaagagatttgcc

SEQ ID NO: 535973 - DNA, 15 bp, Homo sapiens
ttaagagatttgcca

SEQ ID NO: 535974 - DNA, 15 bp, Homo sapiens
taagagatttgccat

SEQ ID NO: 535975 - DNA, 15 bp, Homo sapiens
aagagatttgccatc

SEQ ID NO: 535976 - DNA, 15 bp, Homo sapiens
agagatttgccatct

SEQ ID NO: 535977 - DNA, 15 bp, Homo sapiens
gagatttgccatctt

SEQ ID NO: 535978 - DNA, 15 bp, Homo sapiens
agatttgccatcttt

SEQ ID NO: 535979 - DNA, 15 bp, Homo sapiens
gatttgccatctttg

SEQ ID NO: 535980 - DNA, 15 bp, Homo sapiens
atttgccatctttgg

SEQ ID NO: 535981 - DNA, 15 bp, Homo sapiens
tttgccatctttggg

SEQ ID NO: 535982 - DNA, 15 bp, Homo sapiens
ttgccatctttggga

SEQ ID NO: 535983 - DNA, 15 bp, Homo sapiens
tgccatctttgggaa

SEQ ID NO: 535984 - DNA, 15 bp, Homo sapiens
gccatctttgggaaa

SEQ ID NO: 535985 - DNA, 15 bp, Homo sapiens
ccatctttgggaaac

SEQ ID NO: 535986 - DNA, 15 bp, Homo sapiens
catctttgggaaaca

SEQ ID NO: 535987 - DNA, 15 bp, Homo sapiens
atctttgggaaacaa

SEQ ID NO: 535988 - DNA, 15 bp, Homo sapiens
tctttgggaaacaat

SEQ ID NO: 535989 - DNA, 15 bp, Homo sapiens
ctttgggaaacaatg

SEQ ID NO: 535990 - DNA, 15 bp, Homo sapiens
tttgggaaacaatgt

SEQ ID NO: 535991 - DNA, 15 bp, Homo sapiens
ttgggaaacaatgtg

SEQ ID NO: 535992 - DNA, 15 bp, Homo sapiens
tgggaaacaatgtgt

SEQ ID NO: 535993 - DNA, 15 bp, Homo sapiens
gggaaacaatgtgtc

SEQ ID NO: 535994 - DNA, 15 bp, Homo sapiens
ggaaacaatgtgtct

SEQ ID NO: 535995 - DNA, 15 bp, Homo sapiens
gaaacaatgtgtctg

SEQ ID NO: 535996 - DNA, 15 bp, Homo sapiens
aaacaatgtgtctgc

SEQ ID NO: 535997 - DNA, 15 bp, Homo sapiens
aacaatgtgtctgcc

SEQ ID NO: 535998 - DNA, 15 bp, Homo sapiens
acaatgtgtctgcca

SEQ ID NO: 535999 - DNA, 15 bp, Homo sapiens
caatgtgtctgccat

SEQ ID NO: 536000 - DNA, 15 bp, Homo sapiens
aatgtgtctgccatt

SEQ ID NO: 536001 - DNA, 15 bp, Homo sapiens
atgtgtctgccattt

SEQ ID NO: 536002 - DNA, 15 bp, Homo sapiens
tgtgtctgccattta

SEQ ID NO: 536003 - DNA, 15 bp, Homo sapiens
gtgtctgccatttag

SEQ ID NO: 536004 - DNA, 15 bp, Homo sapiens
tgtctgccatttagt

SEQ ID NO: 536005 - DNA, 15 bp, Homo sapiens
gtctgccatttagtt

SEQ ID NO: 536006 - DNA, 15 bp, Homo sapiens
tctgccatttagttt

SEQ ID NO: 536007 - DNA, 15 bp, Homo sapiens
ctgccatttagttta

SEQ ID NO: 536008 - DNA, 15 bp, Homo sapiens
tgccatttagtttaa

SEQ ID NO: 536009 - DNA, 15 bp, Homo sapiens
gccatttagtttaag

SEQ ID NO: 536010 - DNA, 15 bp, Homo sapiens
ccatttagtttaaga

SEQ ID NO: 536011 - DNA, 15 bp, Homo sapiens
catttagtttaagat

SEQ ID NO: 536012 - DNA, 15 bp, Homo sapiens
atttagtttaagatc

SEQ ID NO: 536013 - DNA, 15 bp, Homo sapiens
tttagtttaagatca

SEQ ID NO: 536014 - DNA, 15 bp, Homo sapiens
ttagtttaagatcaa

SEQ ID NO: 536015 - DNA, 15 bp, Homo sapiens
tagtttaagatcaaa

SEQ ID NO: 536016 - DNA, 15 bp, Homo sapiens
agtttaagatcaaaa

SEQ ID NO: 536017 - DNA, 15 bp, Homo sapiens
gtttaagatcaaaat

SEQ ID NO: 536018 - DNA, 15 bp, Homo sapiens
tttaagatcaaaatc

SEQ ID NO: 536019 - DNA, 15 bp, Homo sapiens
ttaagatcaaaatct

SEQ ID NO: 536020 - DNA, 15 bp, Homo sapiens
taagatcaaaatctc

SEQ ID NO: 536021 - DNA, 15 bp, Homo sapiens
aagatcaaaatctca

SEQ ID NO: 536022 - DNA, 15 bp, Homo sapiens
agatcaaaatctcag

SEQ ID NO: 536023 - DNA, 15 bp, Homo sapiens
gatcaaaatctcaga

SEQ ID NO: 536024 - DNA, 15 bp, Homo sapiens
atcaaaatctcagag

SEQ ID NO: 536025 - DNA, 15 bp, Homo sapiens
tcaaaatctcagagt

SEQ ID NO: 536026 - DNA, 15 bp, Homo sapiens
caaaatctcagagta

SEQ ID NO: 536027 - DNA, 15 bp, Homo sapiens
aaaatctcagagtat

SEQ ID NO: 536028 - DNA, 15 bp, Homo sapiens
aaatctcagagtatg

SEQ ID NO: 536029 - DNA, 15 bp, Homo sapiens
aatctcagagtatga

SEQ ID NO: 536030 - DNA, 15 bp, Homo sapiens
atctcagagtatgag

SEQ ID NO: 536031 - DNA, 15 bp, Homo sapiens
tctcagagtatgaga

SEQ ID NO: 536032 - DNA, 15 bp, Homo sapiens
ctcagagtatgagaa

SEQ ID NO: 536033 - DNA, 15 bp, Homo sapiens
tcagagtatgagaat

SEQ ID NO: 536034 - DNA, 15 bp, Homo sapiens
cagagtatgagaatt

SEQ ID NO: 536035 - DNA, 15 bp, Homo sapiens
agagtatgagaattt

SEQ ID NO: 536036 - DNA, 15 bp, Homo sapiens
gagtatgagaatttt

SEQ ID NO: 536037 - DNA, 15 bp, Homo sapiens
agtatgagaattttt

SEQ ID NO: 536038 - DNA, 15 bp, Homo sapiens
gtatgagaatttttc

SEQ ID NO: 536039 - DNA, 15 bp, Homo sapiens
tatgagaatttttca

SEQ ID NO: 536040 - DNA, 15 bp, Homo sapiens
atgagaatttttcaa

SEQ ID NO: 536041 - DNA, 15 bp, Homo sapiens
tgagaatttttcaaa

SEQ ID NO: 536042 - DNA, 15 bp, Homo sapiens
gagaatttttcaaat

SEQ ID NO: 536043 - DNA, 15 bp, Homo sapiens
agaatttttcaaatc

SEQ ID NO: 536044 - DNA, 15 bp, Homo sapiens
gaatttttcaaatca

SEQ ID NO: 536045 - DNA, 15 bp, Homo sapiens
aatttttcaaatcac

SEQ ID NO: 536046 - DNA, 15 bp, Homo sapiens
atttttcaaatcacc

SEQ ID NO: 536047 - DNA, 15 bp, Homo sapiens
tttttcaaatcacct

SEQ ID NO: 536048 - DNA, 15 bp, Homo sapiens
ttttcaaatcacctc

SEQ ID NO: 536049 - DNA, 15 bp, Homo sapiens
tttcaaatcacctca

SEQ ID NO: 536050 - DNA, 15 bp, Homo sapiens
ttcaaatcacctcaa

SEQ ID NO: 536051 - DNA, 15 bp, Homo sapiens
tcaaatcacctcaaa

SEQ ID NO: 536052 - DNA, 15 bp, Homo sapiens
caaatcacctcaaag

SEQ ID NO: 536053 - DNA, 15 bp, Homo sapiens
aaatcacctcaaagg

SEQ ID NO: 536054 - DNA, 15 bp, Homo sapiens
aatcacctcaaaggg

SEQ ID NO: 536055 - DNA, 15 bp, Homo sapiens
atcacctcaaaggga

SEQ ID NO: 536056 - DNA, 15 bp, Homo sapiens
tcacctcaaagggaa

SEQ ID NO: 536057 - DNA, 15 bp, Homo sapiens
cacctcaaagggaag

SEQ ID NO: 536058 - DNA, 15 bp, Homo sapiens
acctcaaagggaagg

SEQ ID NO: 536059 - DNA, 15 bp, Homo sapiens
cctcaaagggaaggc

SEQ ID NO: 536060 - DNA, 15 bp, Homo sapiens
ctcaaagggaaggca

SEQ ID NO: 536061 - DNA, 15 bp, Homo sapiens
tcaaagggaaggcag

SEQ ID NO: 536062 - DNA, 15 bp, Homo sapiens
caaagggaaggcaga

SEQ ID NO: 536063 - DNA, 15 bp, Homo sapiens
aaagggaaggcagac

SEQ ID NO: 536064 - DNA, 15 bp, Homo sapiens
aagggaaggcagact

SEQ ID NO: 536065 - DNA, 15 bp, Homo sapiens
agggaaggcagactt

SEQ ID NO: 536066 - DNA, 15 bp, Homo sapiens
gggaaggcagacttg

SEQ ID NO: 536067 - DNA, 15 bp, Homo sapiens
ggaaggcagacttga

SEQ ID NO: 536068 - DNA, 15 bp, Homo sapiens
gaaggcagacttgaa

SEQ ID NO: 536069 - DNA, 15 bp, Homo sapiens
aaggcagacttgaac

SEQ ID NO: 536070 - DNA, 15 bp, Homo sapiens
aggcagacttgaaca

SEQ ID NO: 536071 - DNA, 15 bp, Homo sapiens
ggcagacttgaacac

SEQ ID NO: 536072 - DNA, 15 bp, Homo sapiens
gcagacttgaacact

SEQ ID NO: 536073 - DNA, 15 bp, Homo sapiens
cagacttgaacactg

SEQ ID NO: 536074 - DNA, 15 bp, Homo sapiens
agacttgaacactga

SEQ ID NO: 536075 - DNA, 15 bp, Homo sapiens
gacttgaacactgaa

SEQ ID NO: 536076 - DNA, 15 bp, Homo sapiens
acttgaacactgaaa

SEQ ID NO: 536077 - DNA, 15 bp, Homo sapiens
cttgaacactgaaat

SEQ ID NO: 536078 - DNA, 15 bp, Homo sapiens
ttgaacactgaaatg

SEQ ID NO: 536079 - DNA, 15 bp, Homo sapiens
tgaacactgaaatgc

SEQ ID NO: 536080 - DNA, 15 bp, Homo sapiens
gaacactgaaatgct

SEQ ID NO: 536081 - DNA, 15 bp, Homo sapiens
aacactgaaatgctt

SEQ ID NO: 536082 - DNA, 15 bp, Homo sapiens
acactgaaatgcttt

SEQ ID NO: 536083 - DNA, 15 bp, Homo sapiens
cactgaaatgctttc

SEQ ID NO: 536084 - DNA, 15 bp, Homo sapiens
actgaaatgctttcc

SEQ ID NO: 536085 - DNA, 15 bp, Homo sapiens
ctgaaatgctttccc

SEQ ID NO: 536086 - DNA, 15 bp, Homo sapiens
tgaaatgctttccca

SEQ ID NO: 536087 - DNA, 15 bp, Homo sapiens
gaaatgctttcccaa

SEQ ID NO: 536088 - DNA, 15 bp, Homo sapiens
aaatgctttcccaag

SEQ ID NO: 536089 - DNA, 15 bp, Homo sapiens
aatgctttcccaaga

SEQ ID NO: 536090 - DNA, 15 bp, Homo sapiens
atgctttcccaagag

SEQ ID NO: 536091 - DNA, 15 bp, Homo sapiens
tgctttcccaagagc

SEQ ID NO: 536092 - DNA, 15 bp, Homo sapiens
gctttcccaagagca

SEQ ID NO: 536093 - DNA, 15 bp, Homo sapiens
ctttcccaagagcaa

SEQ ID NO: 536094 - DNA, 15 bp, Homo sapiens
tttcccaagagcaag

SEQ ID NO: 536095 - DNA, 15 bp, Homo sapiens
ttcccaagagcaagc

SEQ ID NO: 536096 - DNA, 15 bp, Homo sapiens
tcccaagagcaagcc

SEQ ID NO: 536097 - DNA, 15 bp, Homo sapiens
cccaagagcaagccc

SEQ ID NO: 536098 - DNA, 15 bp, Homo sapiens
ccaagagcaagcccc

SEQ ID NO: 536099 - DNA, 15 bp, Homo sapiens
caagagcaagcccca

SEQ ID NO: 536100 - DNA, 15 bp, Homo sapiens
aagagcaagccccat

SEQ ID NO: 536101 - DNA, 15 bp, Homo sapiens
agagcaagccccatt

SEQ ID NO: 536102 - DNA, 15 bp, Homo sapiens
gagcaagccccattt

SEQ ID NO: 536103 - DNA, 15 bp, Homo sapiens
agcaagccccattta

SEQ ID NO: 536104 - DNA, 15 bp, Homo sapiens
gcaagccccatttac

SEQ ID NO: 536105 - DNA, 15 bp, Homo sapiens
caagccccatttacc

SEQ ID NO: 536106 - DNA, 15 bp, Homo sapiens
aagccccatttaccc

SEQ ID NO: 536107 - DNA, 15 bp, Homo sapiens
agccccatttaccca

SEQ ID NO: 536108 - DNA, 15 bp, Homo sapiens
gccccatttacccag

SEQ ID NO: 536109 - DNA, 15 bp, Homo sapiens
ccccatttacccagc

SEQ ID NO: 536110 - DNA, 15 bp, Homo sapiens
cccatttacccagcc

SEQ ID NO: 536111 - DNA, 15 bp, Homo sapiens
ccatttacccagcca

SEQ ID NO: 536112 - DNA, 15 bp, Homo sapiens
catttacccagccag

SEQ ID NO: 536113 - DNA, 15 bp, Homo sapiens
atttacccagccagt

SEQ ID NO: 536114 - DNA, 15 bp, Homo sapiens
tttacccagccagtg

SEQ ID NO: 536115 - DNA, 15 bp, Homo sapiens
ttacccagccagtgc

SEQ ID NO: 536116 - DNA, 15 bp, Homo sapiens
tacccagccagtgct

SEQ ID NO: 536117 - DNA, 15 bp, Homo sapiens
acccagccagtgcta

SEQ ID NO: 536118 - DNA, 15 bp, Homo sapiens
cccagccagtgctat

SEQ ID NO: 536119 - DNA, 15 bp, Homo sapiens
ccagccagtgctatg

SEQ ID NO: 536120 - DNA, 15 bp, Homo sapiens
cagccagtgctatgt

SEQ ID NO: 536121 - DNA, 15 bp, Homo sapiens
agccagtgctatgtg

SEQ ID NO: 536122 - DNA, 15 bp, Homo sapiens
gccagtgctatgtgt

SEQ ID NO: 536123 - DNA, 15 bp, Homo sapiens
ccagtgctatgtgtc

SEQ ID NO: 536124 - DNA, 15 bp, Homo sapiens
cagtgctatgtgtcc

SEQ ID NO: 536125 - DNA, 15 bp, Homo sapiens
agtgctatgtgtcca

SEQ ID NO: 536126 - DNA, 15 bp, Homo sapiens
gtgctatgtgtccaa

SEQ ID NO: 536127 - DNA, 15 bp, Homo sapiens
tgctatgtgtccaag

SEQ ID NO: 536128 - DNA, 15 bp, Homo sapiens
gctatgtgtccaagg

SEQ ID NO: 536129 - DNA, 15 bp, Homo sapiens
ctatgtgtccaaggc

SEQ ID NO: 536130 - DNA, 15 bp, Homo sapiens
tatgtgtccaaggca

SEQ ID NO: 536131 - DNA, 15 bp, Homo sapiens
atgtgtccaaggcaa

SEQ ID NO: 536132 - DNA, 15 bp, Homo sapiens
tgtgtccaaggcaat

SEQ ID NO: 536133 - DNA, 15 bp, Homo sapiens
gtgtccaaggcaatg

SEQ ID NO: 536134 - DNA, 15 bp, Homo sapiens
tgtccaaggcaatga

SEQ ID NO: 536135 - DNA, 15 bp, Homo sapiens
gtccaaggcaatgaa

SEQ ID NO: 536136 - DNA, 15 bp, Homo sapiens
tccaaggcaatgaaa

SEQ ID NO: 536137 - DNA, 15 bp, Homo sapiens
ccaaggcaatgaaag

SEQ ID NO: 536138 - DNA, 15 bp, Homo sapiens
caaggcaatgaaaga

SEQ ID NO: 536139 - DNA, 15 bp, Homo sapiens
aaggcaatgaaagat

SEQ ID NO: 536140 - DNA, 15 bp, Homo sapiens
aggcaatgaaagatc

SEQ ID NO: 536141 - DNA, 15 bp, Homo sapiens
ggcaatgaaagatct

SEQ ID NO: 536142 - DNA, 15 bp, Homo sapiens
gcaatgaaagatctt

SEQ ID NO: 536143 - DNA, 15 bp, Homo sapiens
caatgaaagatctta

SEQ ID NO: 536144 - DNA, 15 bp, Homo sapiens
aatgaaagatcttat

SEQ ID NO: 536145 - DNA, 15 bp, Homo sapiens
atgaaagatcttatg

SEQ ID NO: 536146 - DNA, 15 bp, Homo sapiens
tgaaagatcttatgt

SEQ ID NO: 536147 - DNA, 15 bp, Homo sapiens
gaaagatcttatgtc

SEQ ID NO: 536148 - DNA, 15 bp, Homo sapiens
aaagatcttatgtca

SEQ ID NO: 536149 - DNA, 15 bp, Homo sapiens
aagatcttatgtcac

SEQ ID NO: 536150 - DNA, 15 bp, Homo sapiens
agatcttatgtcaca

SEQ ID NO: 536151 - DNA, 15 bp, Homo sapiens
gatcttatgtcacat

SEQ ID NO: 536152 - DNA, 15 bp, Homo sapiens
atcttatgtcacatc

SEQ ID NO: 536153 - DNA, 15 bp, Homo sapiens
tcttatgtcacatct

SEQ ID NO: 536154 - DNA, 15 bp, Homo sapiens
cttatgtcacatctc

SEQ ID NO: 536155 - DNA, 15 bp, Homo sapiens
ttatgtcacatctca

SEQ ID NO: 536156 - DNA, 15 bp, Homo sapiens
tatgtcacatctcag

SEQ ID NO: 536157 - DNA, 15 bp, Homo sapiens
atgtcacatctcagt

SEQ ID NO: 536158 - DNA, 15 bp, Homo sapiens
tgtcacatctcagtg

SEQ ID NO: 536159 - DNA, 15 bp, Homo sapiens
gtcacatctcagtgc

SEQ ID NO: 536160 - DNA, 15 bp, Homo sapiens
tcacatctcagtgca

SEQ ID NO: 536161 - DNA, 15 bp, Homo sapiens
cacatctcagtgcac

SEQ ID NO: 536162 - DNA, 15 bp, Homo sapiens
acatctcagtgcaca

SEQ ID NO: 536163 - DNA, 15 bp, Homo sapiens
catctcagtgcacac

SEQ ID NO: 536164 - DNA, 15 bp, Homo sapiens
atctcagtgcacaca

SEQ ID NO: 536165 - DNA, 15 bp, Homo sapiens
tctcagtgcacacat

SEQ ID NO: 536166 - DNA, 15 bp, Homo sapiens
ctcagtgcacacatg

SEQ ID NO: 536167 - DNA, 15 bp, Homo sapiens
tcagtgcacacatgc

SEQ ID NO: 536168 - DNA, 15 bp, Homo sapiens
cagtgcacacatgca

SEQ ID NO: 536169 - DNA, 15 bp, Homo sapiens
agtgcacacatgcaa

SEQ ID NO: 536170 - DNA, 15 bp, Homo sapiens
gtgcacacatgcaag

SEQ ID NO: 536171 - DNA, 15 bp, Homo sapiens
tgcacacatgcaaga

SEQ ID NO: 536172 - DNA, 15 bp, Homo sapiens
gcacacatgcaagag

SEQ ID NO: 536173 - DNA, 15 bp, Homo sapiens
cacacatgcaagagg

SEQ ID NO: 536174 - DNA, 15 bp, Homo sapiens
acacatgcaagaggc

SEQ ID NO: 536175 - DNA, 15 bp, Homo sapiens
cacatgcaagaggct

SEQ ID NO: 536176 - DNA, 15 bp, Homo sapiens
acatgcaagaggctg

SEQ ID NO: 536177 - DNA, 15 bp, Homo sapiens
catgcaagaggctgg

SEQ ID NO: 536178 - DNA, 15 bp, Homo sapiens
atgcaagaggctgga

SEQ ID NO: 536179 - DNA, 15 bp, Homo sapiens
tgcaagaggctggaa

SEQ ID NO: 536180 - DNA, 15 bp, Homo sapiens
gcaagaggctggaat

SEQ ID NO: 536181 - DNA, 15 bp, Homo sapiens
caagaggctggaatt

SEQ ID NO: 536182 - DNA, 15 bp, Homo sapiens
aagaggctggaatta

SEQ ID NO: 536183 - DNA, 15 bp, Homo sapiens
agaggctggaattac

SEQ ID NO: 536184 - DNA, 15 bp, Homo sapiens
gaggctggaattaca

SEQ ID NO: 536185 - DNA, 15 bp, Homo sapiens
aggctggaattacag

SEQ ID NO: 536186 - DNA, 15 bp, Homo sapiens
ggctggaattacagg

SEQ ID NO: 536187 - DNA, 15 bp, Homo sapiens
gctggaattacaggt

SEQ ID NO: 536188 - DNA, 15 bp, Homo sapiens
ctggaattacaggtg

SEQ ID NO: 536189 - DNA, 15 bp, Homo sapiens
tggaattacaggtgc

SEQ ID NO: 536190 - DNA, 15 bp, Homo sapiens
ggaattacaggtgcc

SEQ ID NO: 536191 - DNA, 15 bp, Homo sapiens
gaattacaggtgcca

SEQ ID NO: 536192 - DNA, 15 bp, Homo sapiens
aattacaggtgccat

SEQ ID NO: 536193 - DNA, 15 bp, Homo sapiens
attacaggtgccatg

SEQ ID NO: 536194 - DNA, 15 bp, Homo sapiens
ttacaggtgccatgg

SEQ ID NO: 536195 - DNA, 15 bp, Homo sapiens
tacaggtgccatggg

SEQ ID NO: 536196 - DNA, 15 bp, Homo sapiens
acaggtgccatggga

SEQ ID NO: 536197 - DNA, 15 bp, Homo sapiens
caggtgccatgggag

SEQ ID NO: 536198 - DNA, 15 bp, Homo sapiens
aggtgccatgggagc

SEQ ID NO: 536199 - DNA, 15 bp, Homo sapiens
ggtgccatgggagct

SEQ ID NO: 536200 - DNA, 15 bp, Homo sapiens
gtgccatgggagctt

SEQ ID NO: 536201 - DNA, 15 bp, Homo sapiens
tgccatgggagcttt

SEQ ID NO: 536202 - DNA, 15 bp, Homo sapiens
gccatgggagcttta

SEQ ID NO: 536203 - DNA, 15 bp, Homo sapiens
ccatgggagctttaa

SEQ ID NO: 536204 - DNA, 15 bp, Homo sapiens
catgggagctttaac

SEQ ID NO: 536205 - DNA, 15 bp, Homo sapiens
atgggagctttaacc

SEQ ID NO: 536206 - DNA, 15 bp, Homo sapiens
tgggagctttaacct

SEQ ID NO: 536207 - DNA, 15 bp, Homo sapiens
gggagctttaacctc

SEQ ID NO: 536208 - DNA, 15 bp, Homo sapiens
ggagctttaacctcg

SEQ ID NO: 536209 - DNA, 15 bp, Homo sapiens
gagctttaacctcga

SEQ ID NO: 536210 - DNA, 15 bp, Homo sapiens
agctttaacctcgaa

SEQ ID NO: 536211 - DNA, 15 bp, Homo sapiens
gctttaacctcgaat

SEQ ID NO: 536212 - DNA, 15 bp, Homo sapiens
ctttaacctcgaatt

SEQ ID NO: 536213 - DNA, 15 bp, Homo sapiens
tttaacctcgaattt

SEQ ID NO: 536214 - DNA, 15 bp, Homo sapiens
ttaacctcgaatttc

SEQ ID NO: 536215 - DNA, 15 bp, Homo sapiens
taacctcgaatttct

SEQ ID NO: 536216 - DNA, 15 bp, Homo sapiens
aacctcgaatttcta

SEQ ID NO: 536217 - DNA, 15 bp, Homo sapiens
acctcgaatttctag

SEQ ID NO: 536218 - DNA, 15 bp, Homo sapiens
cctcgaatttctaga

SEQ ID NO: 536219 - DNA, 15 bp, Homo sapiens
ctcgaatttctagac

SEQ ID NO: 536220 - DNA, 15 bp, Homo sapiens
tcgaatttctagaca

SEQ ID NO: 536221 - DNA, 15 bp, Homo sapiens
cgaatttctagacat

SEQ ID NO: 536222 - DNA, 15 bp, Homo sapiens
gaatttctagacatt

SEQ ID NO: 536223 - DNA, 15 bp, Homo sapiens
aatttctagacattg

SEQ ID NO: 536224 - DNA, 15 bp, Homo sapiens
atttctagacattgt

SEQ ID NO: 536225 - DNA, 15 bp, Homo sapiens
tttctagacattgtg

SEQ ID NO: 536226 - DNA, 15 bp, Homo sapiens
ttctagacattgtgt

SEQ ID NO: 536227 - DNA, 15 bp, Homo sapiens
tctagacattgtgtg

SEQ ID NO: 536228 - DNA, 15 bp, Homo sapiens
ctagacattgtgtgg

SEQ ID NO: 536229 - DNA, 15 bp, Homo sapiens
tagacattgtgtggg

SEQ ID NO: 536230 - DNA, 15 bp, Homo sapiens
agacattgtgtgggt

SEQ ID NO: 536231 - DNA, 15 bp, Homo sapiens
gacattgtgtgggtt

SEQ ID NO: 536232 - DNA, 15 bp, Homo sapiens
acattgtgtgggttt

SEQ ID NO: 536233 - DNA, 15 bp, Homo sapiens
cattgtgtgggtttc

SEQ ID NO: 536234 - DNA, 15 bp, Homo sapiens
attgtgtgggtttca

SEQ ID NO: 536235 - DNA, 15 bp, Homo sapiens
ttgtgtgggtttcac

SEQ ID NO: 536236 - DNA, 15 bp, Homo sapiens
tgtgtgggtttcaca

SEQ ID NO: 536237 - DNA, 15 bp, Homo sapiens
gtgtgggtttcacat

SEQ ID NO: 536238 - DNA, 15 bp, Homo sapiens
tgtgggtttcacatg

SEQ ID NO: 536239 - DNA, 15 bp, Homo sapiens
gtgggtttcacatgt

SEQ ID NO: 536240 - DNA, 15 bp, Homo sapiens
tgggtttcacatgtc

SEQ ID NO: 536241 - DNA, 15 bp, Homo sapiens
gggtttcacatgtct

SEQ ID NO: 536242 - DNA, 15 bp, Homo sapiens
ggtttcacatgtcta

SEQ ID NO: 536243 - DNA, 15 bp, Homo sapiens
gtttcacatgtctac

SEQ ID NO: 536244 - DNA, 15 bp, Homo sapiens
tttcacatgtctact

SEQ ID NO: 536245 - DNA, 15 bp, Homo sapiens
ttcacatgtctactg

SEQ ID NO: 536246 - DNA, 15 bp, Homo sapiens
tcacatgtctactgg

SEQ ID NO: 536247 - DNA, 15 bp, Homo sapiens
cacatgtctactgga

SEQ ID NO: 536248 - DNA, 15 bp, Homo sapiens
acatgtctactggaa

SEQ ID NO: 536249 - DNA, 15 bp, Homo sapiens
catgtctactggaat

SEQ ID NO: 536250 - DNA, 15 bp, Homo sapiens
atgtctactggaatc

SEQ ID NO: 536251 - DNA, 15 bp, Homo sapiens
tgtctactggaatct

SEQ ID NO: 536252 - DNA, 15 bp, Homo sapiens
gtctactggaatcta

SEQ ID NO: 536253 - DNA, 15 bp, Homo sapiens
tctactggaatctaa

SEQ ID NO: 536254 - DNA, 15 bp, Homo sapiens
ctactggaatctaac

SEQ ID NO: 536255 - DNA, 15 bp, Homo sapiens
tactggaatctaaca

SEQ ID NO: 536256 - DNA, 15 bp, Homo sapiens
actggaatctaacac

SEQ ID NO: 536257 - DNA, 15 bp, Homo sapiens
ctggaatctaacact

SEQ ID NO: 536258 - DNA, 15 bp, Homo sapiens
tggaatctaacactc

SEQ ID NO: 536259 - DNA, 15 bp, Homo sapiens
ggaatctaacactcc

SEQ ID NO: 536260 - DNA, 15 bp, Homo sapiens
gaatctaacactcca

SEQ ID NO: 536261 - DNA, 15 bp, Homo sapiens
aatctaacactccag

SEQ ID NO: 536262 - DNA, 15 bp, Homo sapiens
atctaacactccagt

SEQ ID NO: 536263 - DNA, 15 bp, Homo sapiens
tctaacactccagta

SEQ ID NO: 536264 - DNA, 15 bp, Homo sapiens
ctaacactccagtag

SEQ ID NO: 536265 - DNA, 15 bp, Homo sapiens
taacactccagtagc

SEQ ID NO: 536266 - DNA, 15 bp, Homo sapiens
aacactccagtagca

SEQ ID NO: 536267 - DNA, 15 bp, Homo sapiens
acactccagtagcag

SEQ ID NO: 536268 - DNA, 15 bp, Homo sapiens
cactccagtagcaga

SEQ ID NO: 536269 - DNA, 15 bp, Homo sapiens
actccagtagcagaa

SEQ ID NO: 536270 - DNA, 15 bp, Homo sapiens
ctccagtagcagaat

SEQ ID NO: 536271 - DNA, 15 bp, Homo sapiens
tccagtagcagaatt

SEQ ID NO: 536272 - DNA, 15 bp, Homo sapiens
ccagtagcagaattg

SEQ ID NO: 536273 - DNA, 15 bp, Homo sapiens
cagtagcagaattgt

SEQ ID NO: 536274 - DNA, 15 bp, Homo sapiens
agtagcagaattgtt

SEQ ID NO: 536275 - DNA, 15 bp, Homo sapiens
gtagcagaattgtta

SEQ ID NO: 536276 - DNA, 15 bp, Homo sapiens
tagcagaattgttag

SEQ ID NO: 536277 - DNA, 15 bp, Homo sapiens
agcagaattgttagg

SEQ ID NO: 536278 - DNA, 15 bp, Homo sapiens
gcagaattgttaggt

SEQ ID NO: 536279 - DNA, 15 bp, Homo sapiens
cagaattgttaggtc

SEQ ID NO: 536280 - DNA, 15 bp, Homo sapiens
agaattgttaggtct

SEQ ID NO: 536281 - DNA, 15 bp, Homo sapiens
gaattgttaggtctg

SEQ ID NO: 536282 - DNA, 15 bp, Homo sapiens
aattgttaggtctga

SEQ ID NO: 536283 - DNA, 15 bp, Homo sapiens
attgttaggtctgaa

SEQ ID NO: 536284 - DNA, 15 bp, Homo sapiens
ttgttaggtctgaat

SEQ ID NO: 536285 - DNA, 15 bp, Homo sapiens
tgttaggtctgaata

SEQ ID NO: 536286 - DNA, 15 bp, Homo sapiens
gttaggtctgaatat

SEQ ID NO: 536287 - DNA, 15 bp, Homo sapiens
ttaggtctgaatata

SEQ ID NO: 536288 - DNA, 15 bp, Homo sapiens
taggtctgaatatat

SEQ ID NO: 536289 - DNA, 15 bp, Homo sapiens
aggtctgaatatatg

SEQ ID NO: 536290 - DNA, 15 bp, Homo sapiens
ggtctgaatatatgg

SEQ ID NO: 536291 - DNA, 15 bp, Homo sapiens
gtctgaatatatggg

SEQ ID NO: 536292 - DNA, 15 bp, Homo sapiens
tctgaatatatgggt

SEQ ID NO: 536293 - DNA, 15 bp, Homo sapiens
ctgaatatatgggta

SEQ ID NO: 536294 - DNA, 15 bp, Homo sapiens
tgaatatatgggtat

SEQ ID NO: 536295 - DNA, 15 bp, Homo sapiens
gaatatatgggtatt

SEQ ID NO: 536296 - DNA, 15 bp, Homo sapiens
aatatatgggtattc

SEQ ID NO: 536297 - DNA, 15 bp, Homo sapiens
atatatgggtattca

SEQ ID NO: 536298 - DNA, 15 bp, Homo sapiens
tatatgggtattcat

SEQ ID NO: 536299 - DNA, 15 bp, Homo sapiens
atatgggtattcatt

SEQ ID NO: 536300 - DNA, 15 bp, Homo sapiens
tatgggtattcattg

SEQ ID NO: 536301 - DNA, 15 bp, Homo sapiens
atgggtattcattga

SEQ ID NO: 536302 - DNA, 15 bp, Homo sapiens
tgggtattcattgat

SEQ ID NO: 536303 - DNA, 15 bp, Homo sapiens
gggtattcattgatg

SEQ ID NO: 536304 - DNA, 15 bp, Homo sapiens
ggtattcattgatgt

SEQ ID NO: 536305 - DNA, 15 bp, Homo sapiens
gtattcattgatgtt

SEQ ID NO: 536306 - DNA, 15 bp, Homo sapiens
tattcattgatgtta

SEQ ID NO: 536307 - DNA, 15 bp, Homo sapiens
attcattgatgttat

SEQ ID NO: 536308 - DNA, 15 bp, Homo sapiens
ttcattgatgttatg

SEQ ID NO: 536309 - DNA, 15 bp, Homo sapiens
tcattgatgttatgg

SEQ ID NO: 536310 - DNA, 15 bp, Homo sapiens
cattgatgttatggg

SEQ ID NO: 536311 - DNA, 15 bp, Homo sapiens
attgatgttatggga

SEQ ID NO: 536312 - DNA, 15 bp, Homo sapiens
ttgatgttatgggaa

SEQ ID NO: 536313 - DNA, 15 bp, Homo sapiens
tgatgttatgggaaa

SEQ ID NO: 536314 - DNA, 15 bp, Homo sapiens
gatgttatgggaaag

SEQ ID NO: 536315 - DNA, 15 bp, Homo sapiens
atgttatgggaaagg

SEQ ID NO: 536316 - DNA, 15 bp, Homo sapiens
tgttatgggaaagga

SEQ ID NO: 536317 - DNA, 15 bp, Homo sapiens
gttatgggaaaggaa

SEQ ID NO: 536318 - DNA, 15 bp, Homo sapiens
ttatgggaaaggaat

SEQ ID NO: 536319 - DNA, 15 bp, Homo sapiens
tatgggaaaggaatc

SEQ ID NO: 536320 - DNA, 15 bp, Homo sapiens
atgggaaaggaatcg

SEQ ID NO: 536321 - DNA, 15 bp, Homo sapiens
tgggaaaggaatcgg

SEQ ID NO: 536322 - DNA, 15 bp, Homo sapiens
gggaaaggaatcgga

SEQ ID NO: 536323 - DNA, 15 bp, Homo sapiens
ggaaaggaatcggag

SEQ ID NO: 536324 - DNA, 15 bp, Homo sapiens
gaaaggaatcggaga

SEQ ID NO: 536325 - DNA, 15 bp, Homo sapiens
aaaggaatcggagag

SEQ ID NO: 536326 - DNA, 15 bp, Homo sapiens
aaggaatcggagagt

SEQ ID NO: 536327 - DNA, 15 bp, Homo sapiens
aggaatcggagagtg

SEQ ID NO: 536328 - DNA, 15 bp, Homo sapiens
ggaatcggagagtga

SEQ ID NO: 536329 - DNA, 15 bp, Homo sapiens
gaatcggagagtgag

SEQ ID NO: 536330 - DNA, 15 bp, Homo sapiens
aatcggagagtgagc

SEQ ID NO: 536331 - DNA, 15 bp, Homo sapiens
atcggagagtgagca

SEQ ID NO: 536332 - DNA, 15 bp, Homo sapiens
tcggagagtgagcaa

SEQ ID NO: 536333 - DNA, 15 bp, Homo sapiens
cggagagtgagcaat

SEQ ID NO: 536334 - DNA, 15 bp, Homo sapiens
ggagagtgagcaatt

SEQ ID NO: 536335 - DNA, 15 bp, Homo sapiens
gagagtgagcaattc

SEQ ID NO: 536336 - DNA, 15 bp, Homo sapiens
agagtgagcaattct

SEQ ID NO: 536337 - DNA, 15 bp, Homo sapiens
gagtgagcaattctg

SEQ ID NO: 536338 - DNA, 15 bp, Homo sapiens
agtgagcaattctgc

SEQ ID NO: 536339 - DNA, 15 bp, Homo sapiens
gtgagcaattctgca

SEQ ID NO: 536340 - DNA, 15 bp, Homo sapiens
tgagcaattctgcag

SEQ ID NO: 536341 - DNA, 15 bp, Homo sapiens
gagcaattctgcagt

SEQ ID NO: 536342 - DNA, 15 bp, Homo sapiens
agcaattctgcagta

SEQ ID NO: 536343 - DNA, 15 bp, Homo sapiens
gcaattctgcagtac

SEQ ID NO: 536344 - DNA, 15 bp, Homo sapiens
caattctgcagtacc

SEQ ID NO: 536345 - DNA, 15 bp, Homo sapiens
aattctgcagtacca

SEQ ID NO: 536346 - DNA, 15 bp, Homo sapiens
attctgcagtaccat

SEQ ID NO: 536347 - DNA, 15 bp, Homo sapiens
ttctgcagtaccatt

SEQ ID NO: 536348 - DNA, 15 bp, Homo sapiens
tctgcagtaccattc

SEQ ID NO: 536349 - DNA, 15 bp, Homo sapiens
ctgcagtaccattca

SEQ ID NO: 536350 - DNA, 15 bp, Homo sapiens
tgcagtaccattcat

SEQ ID NO: 536351 - DNA, 15 bp, Homo sapiens
gcagtaccattcatg

SEQ ID NO: 536352 - DNA, 15 bp, Homo sapiens
cagtaccattcatgt

SEQ ID NO: 536353 - DNA, 15 bp, Homo sapiens
agtaccattcatgta

SEQ ID NO: 536354 - DNA, 15 bp, Homo sapiens
gtaccattcatgtag

SEQ ID NO: 536355 - DNA, 15 bp, Homo sapiens
taccattcatgtagc

SEQ ID NO: 536356 - DNA, 15 bp, Homo sapiens
accattcatgtagca

SEQ ID NO: 536357 - DNA, 15 bp, Homo sapiens
ccattcatgtagcaa

SEQ ID NO: 536358 - DNA, 15 bp, Homo sapiens
cattcatgtagcaaa

SEQ ID NO: 536359 - DNA, 15 bp, Homo sapiens
attcatgtagcaaaa

SEQ ID NO: 536360 - DNA, 15 bp, Homo sapiens
ttcatgtagcaaaag

SEQ ID NO: 536361 - DNA, 15 bp, Homo sapiens
tcatgtagcaaaagt

SEQ ID NO: 536362 - DNA, 15 bp, Homo sapiens
catgtagcaaaagtg

SEQ ID NO: 536363 - DNA, 15 bp, Homo sapiens
atgtagcaaaagtgt

SEQ ID NO: 536364 - DNA, 15 bp, Homo sapiens
tgtagcaaaagtgtg

SEQ ID NO: 536365 - DNA, 15 bp, Homo sapiens
gtagcaaaagtgtga

SEQ ID NO: 536366 - DNA, 15 bp, Homo sapiens
tagcaaaagtgtgaa

SEQ ID NO: 536367 - DNA, 15 bp, Homo sapiens
agcaaaagtgtgaaa

SEQ ID NO: 536368 - DNA, 15 bp, Homo sapiens
gcaaaagtgtgaaaa

SEQ ID NO: 536369 - DNA, 15 bp, Homo sapiens
caaaagtgtgaaaac

SEQ ID NO: 536370 - DNA, 15 bp, Homo sapiens
aaaagtgtgaaaaca

SEQ ID NO: 536371 - DNA, 15 bp, Homo sapiens
aaagtgtgaaaacaa

SEQ ID NO: 536372 - DNA, 15 bp, Homo sapiens
aagtgtgaaaacaaa

SEQ ID NO: 536373 - DNA, 15 bp, Homo sapiens
agtgtgaaaacaaac

SEQ ID NO: 536374 - DNA, 15 bp, Homo sapiens
gtgtgaaaacaaaca

SEQ ID NO: 536375 - DNA, 15 bp, Homo sapiens
tgtgaaaacaaacag

SEQ ID NO: 536376 - DNA, 15 bp, Homo sapiens
gtgaaaacaaacagg

SEQ ID NO: 536377 - DNA, 15 bp, Homo sapiens
tgaaaacaaacaggt

SEQ ID NO: 536378 - DNA, 15 bp, Homo sapiens
gaaaacaaacaggtt

SEQ ID NO: 536379 - DNA, 15 bp, Homo sapiens
aaaacaaacaggtta

SEQ ID NO: 536380 - DNA, 15 bp, Homo sapiens
aaacaaacaggttaa

SEQ ID NO: 536381 - DNA, 15 bp, Homo sapiens
aacaaacaggttaat

SEQ ID NO: 536382 - DNA, 15 bp, Homo sapiens
acaaacaggttaata

SEQ ID NO: 536383 - DNA, 15 bp, Homo sapiens
caaacaggttaatat

SEQ ID NO: 536384 - DNA, 15 bp, Homo sapiens
aaacaggttaatatt

SEQ ID NO: 536385 - DNA, 15 bp, Homo sapiens
aacaggttaatatta

SEQ ID NO: 536386 - DNA, 15 bp, Homo sapiens
acaggttaatattag

SEQ ID NO: 536387 - DNA, 15 bp, Homo sapiens
caggttaatattaga

SEQ ID NO: 536388 - DNA, 15 bp, Homo sapiens
aggttaatattagaa

SEQ ID NO: 536389 - DNA, 15 bp, Homo sapiens
ggttaatattagaaa

SEQ ID NO: 536390 - DNA, 15 bp, Homo sapiens
gttaatattagaaaa

SEQ ID NO: 536391 - DNA, 15 bp, Homo sapiens
ttaatattagaaaat

SEQ ID NO: 536392 - DNA, 15 bp, Homo sapiens
taatattagaaaatt

SEQ ID NO: 536393 - DNA, 15 bp, Homo sapiens
aatattagaaaatta

SEQ ID NO: 536394 - DNA, 15 bp, Homo sapiens
atattagaaaattac

SEQ ID NO: 536395 - DNA, 15 bp, Homo sapiens
tattagaaaattact

SEQ ID NO: 536396 - DNA, 15 bp, Homo sapiens
attagaaaattactc

SEQ ID NO: 536397 - DNA, 15 bp, Homo sapiens
ttagaaaattactct

SEQ ID NO: 536398 - DNA, 15 bp, Homo sapiens
tagaaaattactctg

SEQ ID NO: 536399 - DNA, 15 bp, Homo sapiens
agaaaattactctgc

SEQ ID NO: 536400 - DNA, 15 bp, Homo sapiens
gaaaattactctgct

SEQ ID NO: 536401 - DNA, 15 bp, Homo sapiens
aaaattactctgctc

SEQ ID NO: 536402 - DNA, 15 bp, Homo sapiens
aaattactctgctca

SEQ ID NO: 536403 - DNA, 15 bp, Homo sapiens
aattactctgctcat

SEQ ID NO: 536404 - DNA, 15 bp, Homo sapiens
attactctgctcatg

SEQ ID NO: 536405 - DNA, 15 bp, Homo sapiens
ttactctgctcatga

SEQ ID NO: 536406 - DNA, 15 bp, Homo sapiens
tactctgctcatgag

SEQ ID NO: 536407 - DNA, 15 bp, Homo sapiens
actctgctcatgagt

SEQ ID NO: 536408 - DNA, 15 bp, Homo sapiens
ctctgctcatgagtt

SEQ ID NO: 536409 - DNA, 15 bp, Homo sapiens
tctgctcatgagttg

SEQ ID NO: 536410 - DNA, 15 bp, Homo sapiens
ctgctcatgagttgt

SEQ ID NO: 536411 - DNA, 15 bp, Homo sapiens
tgctcatgagttgtt

SEQ ID NO: 536412 - DNA, 15 bp, Homo sapiens
gctcatgagttgttt

SEQ ID NO: 536413 - DNA, 15 bp, Homo sapiens
ctcatgagttgtttt

SEQ ID NO: 536414 - DNA, 15 bp, Homo sapiens
tcatgagttgtttta

SEQ ID NO: 536415 - DNA, 15 bp, Homo sapiens
catgagttgttttaa

SEQ ID NO: 536416 - DNA, 15 bp, Homo sapiens
atgagttgttttaag

SEQ ID NO: 536417 - DNA, 15 bp, Homo sapiens
tgagttgttttaagt

SEQ ID NO: 536418 - DNA, 15 bp, Homo sapiens
gagttgttttaagtt

SEQ ID NO: 536419 - DNA, 15 bp, Homo sapiens
agttgttttaagtta

SEQ ID NO: 536420 - DNA, 15 bp, Homo sapiens
gttgttttaagttac

SEQ ID NO: 536421 - DNA, 15 bp, Homo sapiens
ttgttttaagttact

SEQ ID NO: 536422 - DNA, 15 bp, Homo sapiens
tgttttaagttactg

SEQ ID NO: 536423 - DNA, 15 bp, Homo sapiens
gttttaagttactgc

SEQ ID NO: 536424 - DNA, 15 bp, Homo sapiens
ttttaagttactgct

SEQ ID NO: 536425 - DNA, 15 bp, Homo sapiens
tttaagttactgctg

SEQ ID NO: 536426 - DNA, 15 bp, Homo sapiens
ttaagttactgctgt

SEQ ID NO: 536427 - DNA, 15 bp, Homo sapiens
taagttactgctgtt

SEQ ID NO: 536428 - DNA, 15 bp, Homo sapiens
aagttactgctgtta

SEQ ID NO: 536429 - DNA, 15 bp, Homo sapiens
agttactgctgttac

SEQ ID NO: 536430 - DNA, 15 bp, Homo sapiens
gttactgctgttaca

SEQ ID NO: 536431 - DNA, 15 bp, Homo sapiens
ttactgctgttacag

SEQ ID NO: 536432 - DNA, 15 bp, Homo sapiens
tactgctgttacagt

SEQ ID NO: 536433 - DNA, 15 bp, Homo sapiens
actgctgttacagtc

SEQ ID NO: 536434 - DNA, 15 bp, Homo sapiens
ctgctgttacagtct

SEQ ID NO: 536435 - DNA, 15 bp, Homo sapiens
tgctgttacagtcta

SEQ ID NO: 536436 - DNA, 15 bp, Homo sapiens
gctgttacagtctat

SEQ ID NO: 536437 - DNA, 15 bp, Homo sapiens
ctgttacagtctatg

SEQ ID NO: 536438 - DNA, 15 bp, Homo sapiens
tgttacagtctatgg

SEQ ID NO: 536439 - DNA, 15 bp, Homo sapiens
gttacagtctatgga

SEQ ID NO: 536440 - DNA, 15 bp, Homo sapiens
ttacagtctatggaa

SEQ ID NO: 536441 - DNA, 15 bp, Homo sapiens
tacagtctatggaaa

SEQ ID NO: 536442 - DNA, 15 bp, Homo sapiens
acagtctatggaaaa

SEQ ID NO: 536443 - DNA, 15 bp, Homo sapiens
cagtctatggaaaag

SEQ ID NO: 536444 - DNA, 15 bp, Homo sapiens
agtctatggaaaagc

SEQ ID NO: 536445 - DNA, 15 bp, Homo sapiens
gtctatggaaaagcg

SEQ ID NO: 536446 - DNA, 15 bp, Homo sapiens
tctatggaaaagcgt

SEQ ID NO: 536447 - DNA, 15 bp, Homo sapiens
ctatggaaaagcgta

SEQ ID NO: 536448 - DNA, 15 bp, Homo sapiens
tatggaaaagcgtat

SEQ ID NO: 536449 - DNA, 15 bp, Homo sapiens
atggaaaagcgtatg

SEQ ID NO: 536450 - DNA, 15 bp, Homo sapiens
tggaaaagcgtatgt

SEQ ID NO: 536451 - DNA, 15 bp, Homo sapiens
ggaaaagcgtatgtt

SEQ ID NO: 536452 - DNA, 15 bp, Homo sapiens
gaaaagcgtatgttt

SEQ ID NO: 536453 - DNA, 15 bp, Homo sapiens
aaaagcgtatgtttc

SEQ ID NO: 536454 - DNA, 15 bp, Homo sapiens
aaagcgtatgtttca

SEQ ID NO: 536455 - DNA, 15 bp, Homo sapiens
aagcgtatgtttcaa

SEQ ID NO: 536456 - DNA, 15 bp, Homo sapiens
agcgtatgtttcaat

SEQ ID NO: 536457 - DNA, 15 bp, Homo sapiens
gcgtatgtttcaatt

SEQ ID NO: 536458 - DNA, 15 bp, Homo sapiens
cgtatgtttcaattg

SEQ ID NO: 536459 - DNA, 15 bp, Homo sapiens
gtatgtttcaattga

SEQ ID NO: 536460 - DNA, 15 bp, Homo sapiens
tatgtttcaattgaa

SEQ ID NO: 536461 - DNA, 15 bp, Homo sapiens
atgtttcaattgaaa

SEQ ID NO: 536462 - DNA, 15 bp, Homo sapiens
tgtttcaattgaaat

SEQ ID NO: 536463 - DNA, 15 bp, Homo sapiens
gtttcaattgaaatt

SEQ ID NO: 536464 - DNA, 15 bp, Homo sapiens
tttcaattgaaattc

SEQ ID NO: 536465 - DNA, 15 bp, Homo sapiens
ttcaattgaaattct

SEQ ID NO: 536466 - DNA, 15 bp, Homo sapiens
tcaattgaaattctc

SEQ ID NO: 536467 - DNA, 15 bp, Homo sapiens
caattgaaattctca

SEQ ID NO: 536468 - DNA, 15 bp, Homo sapiens
aattgaaattctcat

SEQ ID NO: 536469 - DNA, 15 bp, Homo sapiens
attgaaattctcatg

SEQ ID NO: 536470 - DNA, 15 bp, Homo sapiens
ttgaaattctcatgt

SEQ ID NO: 536471 - DNA, 15 bp, Homo sapiens
tgaaattctcatgtc

SEQ ID NO: 536472 - DNA, 15 bp, Homo sapiens
gaaattctcatgtct

SEQ ID NO: 536473 - DNA, 15 bp, Homo sapiens
aaattctcatgtcta

SEQ ID NO: 536474 - DNA, 15 bp, Homo sapiens
aattctcatgtctac

SEQ ID NO: 536475 - DNA, 15 bp, Homo sapiens
attctcatgtctaca

SEQ ID NO: 536476 - DNA, 15 bp, Homo sapiens
ttctcatgtctacag

SEQ ID NO: 536477 - DNA, 15 bp, Homo sapiens
tctcatgtctacaga

SEQ ID NO: 536478 - DNA, 15 bp, Homo sapiens
ctcatgtctacagag

SEQ ID NO: 536479 - DNA, 15 bp, Homo sapiens
tcatgtctacagagt

SEQ ID NO: 536480 - DNA, 15 bp, Homo sapiens
catgtctacagagtc

SEQ ID NO: 536481 - DNA, 15 bp, Homo sapiens
atgtctacagagtca

SEQ ID NO: 536482 - DNA, 15 bp, Homo sapiens
tgtctacagagtcat

SEQ ID NO: 536483 - DNA, 15 bp, Homo sapiens
gtctacagagtcatt

SEQ ID NO: 536484 - DNA, 15 bp, Homo sapiens
tctacagagtcattt

SEQ ID NO: 536485 - DNA, 15 bp, Homo sapiens
ctacagagtcatttt

SEQ ID NO: 536486 - DNA, 15 bp, Homo sapiens
tacagagtcattttg

SEQ ID NO: 536487 - DNA, 15 bp, Homo sapiens
acagagtcattttgt

SEQ ID NO: 536488 - DNA, 15 bp, Homo sapiens
cagagtcattttgtc

SEQ ID NO: 536489 - DNA, 15 bp, Homo sapiens
agagtcattttgtct

SEQ ID NO: 536490 - DNA, 15 bp, Homo sapiens
gagtcattttgtctt

SEQ ID NO: 536491 - DNA, 15 bp, Homo sapiens
agtcattttgtcttt

SEQ ID NO: 536492 - DNA, 15 bp, Homo sapiens
gtcattttgtcttta

SEQ ID NO: 536493 - DNA, 15 bp, Homo sapiens
tcattttgtctttag

SEQ ID NO: 536494 - DNA, 15 bp, Homo sapiens
cattttgtctttaga

SEQ ID NO: 536495 - DNA, 15 bp, Homo sapiens
attttgtctttagac

SEQ ID NO: 536496 - DNA, 15 bp, Homo sapiens
ttttgtctttagaca

SEQ ID NO: 536497 - DNA, 15 bp, Homo sapiens
tttgtctttagacat

SEQ ID NO: 536498 - DNA, 15 bp, Homo sapiens
ttgtctttagacatt

SEQ ID NO: 536499 - DNA, 15 bp, Homo sapiens
tgtctttagacattt

SEQ ID NO: 536500 - DNA, 15 bp, Homo sapiens
gtctttagacattta

SEQ ID NO: 536501 - DNA, 15 bp, Homo sapiens
tctttagacatttat

SEQ ID NO: 536502 - DNA, 15 bp, Homo sapiens
ctttagacatttatg

SEQ ID NO: 536503 - DNA, 15 bp, Homo sapiens
tttagacatttatga

SEQ ID NO: 536504 - DNA, 15 bp, Homo sapiens
ttagacatttatgac

SEQ ID NO: 536505 - DNA, 15 bp, Homo sapiens
tagacatttatgact

SEQ ID NO: 536506 - DNA, 15 bp, Homo sapiens
agacatttatgactg

SEQ ID NO: 536507 - DNA, 15 bp, Homo sapiens
gacatttatgactga

SEQ ID NO: 536508 - DNA, 15 bp, Homo sapiens
acatttatgactgaa

SEQ ID NO: 536509 - DNA, 15 bp, Homo sapiens
catttatgactgaat

SEQ ID NO: 536510 - DNA, 15 bp, Homo sapiens
atttatgactgaatt

SEQ ID NO: 536511 - DNA, 15 bp, Homo sapiens
tttatgactgaattc

SEQ ID NO: 536512 - DNA, 15 bp, Homo sapiens
ttatgactgaattca

SEQ ID NO: 536513 - DNA, 15 bp, Homo sapiens
tatgactgaattcat

SEQ ID NO: 536514 - DNA, 15 bp, Homo sapiens
atgactgaattcata

SEQ ID NO: 536515 - DNA, 15 bp, Homo sapiens
tgactgaattcatac

SEQ ID NO: 536516 - DNA, 15 bp, Homo sapiens
gactgaattcatact

SEQ ID NO: 536517 - DNA, 15 bp, Homo sapiens
actgaattcatactc

SEQ ID NO: 536518 - DNA, 15 bp, Homo sapiens
ctgaattcatactca

SEQ ID NO: 536519 - DNA, 15 bp, Homo sapiens
tgaattcatactcat

SEQ ID NO: 536520 - DNA, 15 bp, Homo sapiens
gaattcatactcatt

SEQ ID NO: 536521 - DNA, 15 bp, Homo sapiens
aattcatactcattc

SEQ ID NO: 536522 - DNA, 15 bp, Homo sapiens
attcatactcattca

SEQ ID NO: 536523 - DNA, 15 bp, Homo sapiens
ttcatactcattcat

SEQ ID NO: 536524 - DNA, 15 bp, Homo sapiens
tcatactcattcatg

SEQ ID NO: 536525 - DNA, 15 bp, Homo sapiens
catactcattcatgt

SEQ ID NO: 536526 - DNA, 15 bp, Homo sapiens
atactcattcatgta

SEQ ID NO: 536527 - DNA, 15 bp, Homo sapiens
tactcattcatgtat

SEQ ID NO: 536528 - DNA, 15 bp, Homo sapiens
actcattcatgtatt

SEQ ID NO: 536529 - DNA, 15 bp, Homo sapiens
ctcattcatgtattc

SEQ ID NO: 536530 - DNA, 15 bp, Homo sapiens
tcattcatgtattca

SEQ ID NO: 536531 - DNA, 15 bp, Homo sapiens
cattcatgtattcaa

SEQ ID NO: 536532 - DNA, 15 bp, Homo sapiens
attcatgtattcaat

SEQ ID NO: 536533 - DNA, 15 bp, Homo sapiens
ttcatgtattcaata

SEQ ID NO: 536534 - DNA, 15 bp, Homo sapiens
tcatgtattcaatac

SEQ ID NO: 536535 - DNA, 15 bp, Homo sapiens
catgtattcaatact

SEQ ID NO: 536536 - DNA, 15 bp, Homo sapiens
atgtattcaatactc

SEQ ID NO: 536537 - DNA, 15 bp, Homo sapiens
tgtattcaatactca

SEQ ID NO: 536538 - DNA, 15 bp, Homo sapiens
gtattcaatactcat

SEQ ID NO: 536539 - DNA, 15 bp, Homo sapiens
tattcaatactcatt

SEQ ID NO: 536540 - DNA, 15 bp, Homo sapiens
attcaatactcattc

SEQ ID NO: 536541 - DNA, 15 bp, Homo sapiens
ttcaatactcattca

SEQ ID NO: 536542 - DNA, 15 bp, Homo sapiens
tcaatactcattcat

SEQ ID NO: 536543 - DNA, 15 bp, Homo sapiens
caatactcattcatg

SEQ ID NO: 536544 - DNA, 15 bp, Homo sapiens
aatactcattcatgt

SEQ ID NO: 536545 - DNA, 15 bp, Homo sapiens
cattcatgtattcat

SEQ ID NO: 536546 - DNA, 15 bp, Homo sapiens
attcatgtattcatt

SEQ ID NO: 536547 - DNA, 15 bp, Homo sapiens
ttcatgtattcattc

SEQ ID NO: 536548 - DNA, 15 bp, Homo sapiens
tcatgtattcattca

SEQ ID NO: 536549 - DNA, 15 bp, Homo sapiens
catgtattcattcac

SEQ ID NO: 536550 - DNA, 15 bp, Homo sapiens
atgtattcattcacc

SEQ ID NO: 536551 - DNA, 15 bp, Homo sapiens
tgtattcattcaccc

SEQ ID NO: 536552 - DNA, 15 bp, Homo sapiens
gtattcattcaccca

SEQ ID NO: 536553 - DNA, 15 bp, Homo sapiens
tattcattcacccaa

SEQ ID NO: 536554 - DNA, 15 bp, Homo sapiens
attcattcacccaaa

SEQ ID NO: 536555 - DNA, 15 bp, Homo sapiens
ttcattcacccaaat

SEQ ID NO: 536556 - DNA, 15 bp, Homo sapiens
tcattcacccaaatg

SEQ ID NO: 536557 - DNA, 15 bp, Homo sapiens
cattcacccaaatgt

SEQ ID NO: 536558 - DNA, 15 bp, Homo sapiens
attcacccaaatgtt

SEQ ID NO: 536559 - DNA, 15 bp, Homo sapiens
ttcacccaaatgttg

SEQ ID NO: 536560 - DNA, 15 bp, Homo sapiens
tcacccaaatgttga

SEQ ID NO: 536561 - DNA, 15 bp, Homo sapiens
cacccaaatgttgaa

SEQ ID NO: 536562 - DNA, 15 bp, Homo sapiens
acccaaatgttgaat

SEQ ID NO: 536563 - DNA, 15 bp, Homo sapiens
cccaaatgttgaata

SEQ ID NO: 536564 - DNA, 15 bp, Homo sapiens
ccaaatgttgaataa

SEQ ID NO: 536565 - DNA, 15 bp, Homo sapiens
caaatgttgaataat

SEQ ID NO: 536566 - DNA, 15 bp, Homo sapiens
aaatgttgaataata

SEQ ID NO: 536567 - DNA, 15 bp, Homo sapiens
aatgttgaataatat

SEQ ID NO: 536568 - DNA, 15 bp, Homo sapiens
atgttgaataatatt

SEQ ID NO: 536569 - DNA, 15 bp, Homo sapiens
tgttgaataatatta

SEQ ID NO: 536570 - DNA, 15 bp, Homo sapiens
gttgaataatattac

SEQ ID NO: 536571 - DNA, 15 bp, Homo sapiens
ttgaataatattacc

SEQ ID NO: 536572 - DNA, 15 bp, Homo sapiens
tgaataatattacca

SEQ ID NO: 536573 - DNA, 15 bp, Homo sapiens
gaataatattaccag

SEQ ID NO: 536574 - DNA, 15 bp, Homo sapiens
aataatattaccagg

SEQ ID NO: 536575 - DNA, 15 bp, Homo sapiens
ataatattaccaggc

SEQ ID NO: 536576 - DNA, 15 bp, Homo sapiens
taatattaccaggca

SEQ ID NO: 536577 - DNA, 15 bp, Homo sapiens
aatattaccaggcac

SEQ ID NO: 536578 - DNA, 15 bp, Homo sapiens
atattaccaggcacc

SEQ ID NO: 536579 - DNA, 15 bp, Homo sapiens
tattaccaggcacca

SEQ ID NO: 536580 - DNA, 15 bp, Homo sapiens
attaccaggcaccaa

SEQ ID NO: 536581 - DNA, 15 bp, Homo sapiens
ttaccaggcaccaat

SEQ ID NO: 536582 - DNA, 15 bp, Homo sapiens
taccaggcaccaatc

SEQ ID NO: 536583 - DNA, 15 bp, Homo sapiens
accaggcaccaatct

SEQ ID NO: 536584 - DNA, 15 bp, Homo sapiens
ccaggcaccaatctc

SEQ ID NO: 536585 - DNA, 15 bp, Homo sapiens
caggcaccaatctca

SEQ ID NO: 536586 - DNA, 15 bp, Homo sapiens
aggcaccaatctcaa

SEQ ID NO: 536587 - DNA, 15 bp, Homo sapiens
ggcaccaatctcaat

SEQ ID NO: 536588 - DNA, 15 bp, Homo sapiens
gcaccaatctcaata

SEQ ID NO: 536589 - DNA, 15 bp, Homo sapiens
caccaatctcaatag

SEQ ID NO: 536590 - DNA, 15 bp, Homo sapiens
accaatctcaataga

SEQ ID NO: 536591 - DNA, 15 bp, Homo sapiens
ccaatctcaatagag

SEQ ID NO: 536592 - DNA, 15 bp, Homo sapiens
caatctcaatagagc

SEQ ID NO: 536593 - DNA, 15 bp, Homo sapiens
aatctcaatagagca

SEQ ID NO: 536594 - DNA, 15 bp, Homo sapiens
atctcaatagagcat

SEQ ID NO: 536595 - DNA, 15 bp, Homo sapiens
tctcaatagagcatt

SEQ ID NO: 536596 - DNA, 15 bp, Homo sapiens
ctcaatagagcattc

SEQ ID NO: 536597 - DNA, 15 bp, Homo sapiens
tcaatagagcattca

SEQ ID NO: 536598 - DNA, 15 bp, Homo sapiens
caatagagcattcat

SEQ ID NO: 536599 - DNA, 15 bp, Homo sapiens
aatagagcattcatg

SEQ ID NO: 536600 - DNA, 15 bp, Homo sapiens
atagagcattcatgt

SEQ ID NO: 536601 - DNA, 15 bp, Homo sapiens
tagagcattcatgta

SEQ ID NO: 536602 - DNA, 15 bp, Homo sapiens
agagcattcatgtaa

SEQ ID NO: 536603 - DNA, 15 bp, Homo sapiens
gagcattcatgtaaa

SEQ ID NO: 536604 - DNA, 15 bp, Homo sapiens
agcattcatgtaaat

SEQ ID NO: 536605 - DNA, 15 bp, Homo sapiens
gcattcatgtaaatg

SEQ ID NO: 536606 - DNA, 15 bp, Homo sapiens
cattcatgtaaatga

SEQ ID NO: 536607 - DNA, 15 bp, Homo sapiens
attcatgtaaatgaa

SEQ ID NO: 536608 - DNA, 15 bp, Homo sapiens
ttcatgtaaatgaac

SEQ ID NO: 536609 - DNA, 15 bp, Homo sapiens
tcatgtaaatgaaca

SEQ ID NO: 536610 - DNA, 15 bp, Homo sapiens
catgtaaatgaacaa

SEQ ID NO: 536611 - DNA, 15 bp, Homo sapiens
atgtaaatgaacaag

SEQ ID NO: 536612 - DNA, 15 bp, Homo sapiens
tgtaaatgaacaaga

SEQ ID NO: 536613 - DNA, 15 bp, Homo sapiens
gtaaatgaacaagaa

SEQ ID NO: 536614 - DNA, 15 bp, Homo sapiens
taaatgaacaagaat

SEQ ID NO: 536615 - DNA, 15 bp, Homo sapiens
aaatgaacaagaata

SEQ ID NO: 536616 - DNA, 15 bp, Homo sapiens
aatgaacaagaataa

SEQ ID NO: 536617 - DNA, 15 bp, Homo sapiens
atgaacaagaataag

SEQ ID NO: 536618 - DNA, 15 bp, Homo sapiens
tgaacaagaataagg

SEQ ID NO: 536619 - DNA, 15 bp, Homo sapiens
gaacaagaataaggt

SEQ ID NO: 536620 - DNA, 15 bp, Homo sapiens
aacaagaataaggtt

SEQ ID NO: 536621 - DNA, 15 bp, Homo sapiens
acaagaataaggttt

SEQ ID NO: 536622 - DNA, 15 bp, Homo sapiens
caagaataaggtttc

SEQ ID NO: 536623 - DNA, 15 bp, Homo sapiens
aagaataaggtttct

SEQ ID NO: 536624 - DNA, 15 bp, Homo sapiens
agaataaggtttcta

SEQ ID NO: 536625 - DNA, 15 bp, Homo sapiens
gaataaggtttctat

SEQ ID NO: 536626 - DNA, 15 bp, Homo sapiens
aataaggtttctatg

SEQ ID NO: 536627 - DNA, 15 bp, Homo sapiens
ataaggtttctatgc

SEQ ID NO: 536628 - DNA, 15 bp, Homo sapiens
taaggtttctatgct

SEQ ID NO: 536629 - DNA, 15 bp, Homo sapiens
aaggtttctatgcta

SEQ ID NO: 536630 - DNA, 15 bp, Homo sapiens
aggtttctatgctat

SEQ ID NO: 536631 - DNA, 15 bp, Homo sapiens
ggtttctatgctatt

SEQ ID NO: 536632 - DNA, 15 bp, Homo sapiens
gtttctatgctattt

SEQ ID NO: 536633 - DNA, 15 bp, Homo sapiens
tttctatgctatttc

SEQ ID NO: 536634 - DNA, 15 bp, Homo sapiens
ttctatgctatttct

SEQ ID NO: 536635 - DNA, 15 bp, Homo sapiens
tctatgctatttctt

SEQ ID NO: 536636 - DNA, 15 bp, Homo sapiens
ctatgctatttcttc

SEQ ID NO: 536637 - DNA, 15 bp, Homo sapiens
tatgctatttcttcc

SEQ ID NO: 536638 - DNA, 15 bp, Homo sapiens
atgctatttcttcca

SEQ ID NO: 536639 - DNA, 15 bp, Homo sapiens
tgctatttcttccag

SEQ ID NO: 536640 - DNA, 15 bp, Homo sapiens
gctatttcttccagg

SEQ ID NO: 536641 - DNA, 15 bp, Homo sapiens
ctatttcttccaggc

SEQ ID NO: 536642 - DNA, 15 bp, Homo sapiens
tatttcttccaggct

SEQ ID NO: 536643 - DNA, 15 bp, Homo sapiens
atttcttccaggctt

SEQ ID NO: 536644 - DNA, 15 bp, Homo sapiens
tttcttccaggcttt

SEQ ID NO: 536645 - DNA, 15 bp, Homo sapiens
ttcttccaggctttg

SEQ ID NO: 536646 - DNA, 15 bp, Homo sapiens
tcttccaggctttga

SEQ ID NO: 536647 - DNA, 15 bp, Homo sapiens
cttccaggctttgag

SEQ ID NO: 536648 - DNA, 15 bp, Homo sapiens
ttccaggctttgaga

SEQ ID NO: 536649 - DNA, 15 bp, Homo sapiens
tccaggctttgagag

SEQ ID NO: 536650 - DNA, 15 bp, Homo sapiens
ccaggctttgagaga

SEQ ID NO: 536651 - DNA, 15 bp, Homo sapiens
caggctttgagagag

SEQ ID NO: 536652 - DNA, 15 bp, Homo sapiens
aggctttgagagagt

SEQ ID NO: 536653 - DNA, 15 bp, Homo sapiens
ggctttgagagagta

SEQ ID NO: 536654 - DNA, 15 bp, Homo sapiens
gctttgagagagtag

SEQ ID NO: 536655 - DNA, 15 bp, Homo sapiens
ctttgagagagtaga

SEQ ID NO: 536656 - DNA, 15 bp, Homo sapiens
tttgagagagtagac

SEQ ID NO: 536657 - DNA, 15 bp, Homo sapiens
ttgagagagtagaca

SEQ ID NO: 536658 - DNA, 15 bp, Homo sapiens
tgagagagtagacat

SEQ ID NO: 536659 - DNA, 15 bp, Homo sapiens
gagagagtagacatt

SEQ ID NO: 536660 - DNA, 15 bp, Homo sapiens
agagagtagacattt

SEQ ID NO: 536661 - DNA, 15 bp, Homo sapiens
gagagtagacatttc

SEQ ID NO: 536662 - DNA, 15 bp, Homo sapiens
agagtagacatttct

SEQ ID NO: 536663 - DNA, 15 bp, Homo sapiens
gagtagacatttctc

SEQ ID NO: 536664 - DNA, 15 bp, Homo sapiens
agtagacatttctct

SEQ ID NO: 536665 - DNA, 15 bp, Homo sapiens
gtagacatttctctt

SEQ ID NO: 536666 - DNA, 15 bp, Homo sapiens
tagacatttctcttc

SEQ ID NO: 536667 - DNA, 15 bp, Homo sapiens
agacatttctcttct

SEQ ID NO: 536668 - DNA, 15 bp, Homo sapiens
gacatttctcttctt

SEQ ID NO: 536669 - DNA, 15 bp, Homo sapiens
acatttctcttcttt

SEQ ID NO: 536670 - DNA, 15 bp, Homo sapiens
catttctcttctttc

SEQ ID NO: 536671 - DNA, 15 bp, Homo sapiens
atttctcttctttct

SEQ ID NO: 536672 - DNA, 15 bp, Homo sapiens
tttctcttctttctg

SEQ ID NO: 536673 - DNA, 15 bp, Homo sapiens
ttctcttctttctga

SEQ ID NO: 536674 - DNA, 15 bp, Homo sapiens
tctcttctttctgat

SEQ ID NO: 536675 - DNA, 15 bp, Homo sapiens
ctcttctttctgatt

SEQ ID NO: 536676 - DNA, 15 bp, Homo sapiens
tcttctttctgattt

SEQ ID NO: 536677 - DNA, 15 bp, Homo sapiens
cttctttctgatttt

SEQ ID NO: 536678 - DNA, 15 bp, Homo sapiens
ttctttctgattttt

SEQ ID NO: 536679 - DNA, 15 bp, Homo sapiens
tctttctgattttta

SEQ ID NO: 536680 - DNA, 15 bp, Homo sapiens
ctttctgatttttag

SEQ ID NO: 536681 - DNA, 15 bp, Homo sapiens
tttctgatttttagc

SEQ ID NO: 536682 - DNA, 15 bp, Homo sapiens
ttctgatttttagct

SEQ ID NO: 536683 - DNA, 15 bp, Homo sapiens
tctgatttttagctc

SEQ ID NO: 536684 - DNA, 15 bp, Homo sapiens
ctgatttttagctct

SEQ ID NO: 536685 - DNA, 15 bp, Homo sapiens
tgatttttagctctg

SEQ ID NO: 536686 - DNA, 15 bp, Homo sapiens
gatttttagctctga

SEQ ID NO: 536687 - DNA, 15 bp, Homo sapiens
atttttagctctgag

SEQ ID NO: 536688 - DNA, 15 bp, Homo sapiens
tttttagctctgagt

SEQ ID NO: 536689 - DNA, 15 bp, Homo sapiens
ttttagctctgagta

SEQ ID NO: 536690 - DNA, 15 bp, Homo sapiens
tttagctctgagtat

SEQ ID NO: 536691 - DNA, 15 bp, Homo sapiens
ttagctctgagtatt

SEQ ID NO: 536692 - DNA, 15 bp, Homo sapiens
tagctctgagtattg

SEQ ID NO: 536693 - DNA, 15 bp, Homo sapiens
agctctgagtattgg

SEQ ID NO: 536694 - DNA, 15 bp, Homo sapiens
gctctgagtattgga

SEQ ID NO: 536695 - DNA, 15 bp, Homo sapiens
ctctgagtattggaa

SEQ ID NO: 536696 - DNA, 15 bp, Homo sapiens
tctgagtattggaaa

SEQ ID NO: 536697 - DNA, 15 bp, Homo sapiens
ctgagtattggaaat

SEQ ID NO: 536698 - DNA, 15 bp, Homo sapiens
tgagtattggaaatt

SEQ ID NO: 536699 - DNA, 15 bp, Homo sapiens
gagtattggaaattc

SEQ ID NO: 536700 - DNA, 15 bp, Homo sapiens
agtattggaaattcc

SEQ ID NO: 536701 - DNA, 15 bp, Homo sapiens
gtattggaaattcca

SEQ ID NO: 536702 - DNA, 15 bp, Homo sapiens
tattggaaattccaa

SEQ ID NO: 536703 - DNA, 15 bp, Homo sapiens
attggaaattccaaa

SEQ ID NO: 536704 - DNA, 15 bp, Homo sapiens
ttggaaattccaaaa

SEQ ID NO: 536705 - DNA, 15 bp, Homo sapiens
tggaaattccaaaag

SEQ ID NO: 536706 - DNA, 15 bp, Homo sapiens
ggaaattccaaaaga

SEQ ID NO: 536707 - DNA, 15 bp, Homo sapiens
gaaattccaaaagaa

SEQ ID NO: 536708 - DNA, 15 bp, Homo sapiens
aaattccaaaagaag

SEQ ID NO: 536709 - DNA, 15 bp, Homo sapiens
aattccaaaagaagc

SEQ ID NO: 536710 - DNA, 15 bp, Homo sapiens
attccaaaagaagca

SEQ ID NO: 536711 - DNA, 15 bp, Homo sapiens
ttccaaaagaagcaa

SEQ ID NO: 536712 - DNA, 15 bp, Homo sapiens
tccaaaagaagcaat

SEQ ID NO: 536713 - DNA, 15 bp, Homo sapiens
ccaaaagaagcaata

SEQ ID NO: 536714 - DNA, 15 bp, Homo sapiens
caaaagaagcaatac

SEQ ID NO: 536715 - DNA, 15 bp, Homo sapiens
aaaagaagcaatact

SEQ ID NO: 536716 - DNA, 15 bp, Homo sapiens
aaagaagcaatactc

SEQ ID NO: 536717 - DNA, 15 bp, Homo sapiens
aagaagcaatactca

SEQ ID NO: 536718 - DNA, 15 bp, Homo sapiens
agaagcaatactcat

SEQ ID NO: 536719 - DNA, 15 bp, Homo sapiens
gaagcaatactcatt

SEQ ID NO: 536720 - DNA, 15 bp, Homo sapiens
aagcaatactcattg

SEQ ID NO: 536721 - DNA, 15 bp, Homo sapiens
agcaatactcattgg

SEQ ID NO: 536722 - DNA, 15 bp, Homo sapiens
gcaatactcattgga

SEQ ID NO: 536723 - DNA, 15 bp, Homo sapiens
caatactcattggag

SEQ ID NO: 536724 - DNA, 15 bp, Homo sapiens
aatactcattggaga

SEQ ID NO: 536725 - DNA, 15 bp, Homo sapiens
atactcattggagaa

SEQ ID NO: 536726 - DNA, 15 bp, Homo sapiens
tactcattggagaaa

SEQ ID NO: 536727 - DNA, 15 bp, Homo sapiens
actcattggagaaat

SEQ ID NO: 536728 - DNA, 15 bp, Homo sapiens
ctcattggagaaatc

SEQ ID NO: 536729 - DNA, 15 bp, Homo sapiens
tcattggagaaatct

SEQ ID NO: 536730 - DNA, 15 bp, Homo sapiens
cattggagaaatctt

SEQ ID NO: 536731 - DNA, 15 bp, Homo sapiens
attggagaaatcttt

SEQ ID NO: 536732 - DNA, 15 bp, Homo sapiens
ttggagaaatcttta

SEQ ID NO: 536733 - DNA, 15 bp, Homo sapiens
tggagaaatctttat

SEQ ID NO: 536734 - DNA, 15 bp, Homo sapiens
ggagaaatctttatt

SEQ ID NO: 536735 - DNA, 15 bp, Homo sapiens
gagaaatctttattt

SEQ ID NO: 536736 - DNA, 15 bp, Homo sapiens
agaaatctttatttg

SEQ ID NO: 536737 - DNA, 15 bp, Homo sapiens
gaaatctttatttgt

SEQ ID NO: 536738 - DNA, 15 bp, Homo sapiens
aaatctttatttgtg

SEQ ID NO: 536739 - DNA, 15 bp, Homo sapiens
aatctttatttgtgg

SEQ ID NO: 536740 - DNA, 15 bp, Homo sapiens
atctttatttgtggc

SEQ ID NO: 536741 - DNA, 15 bp, Homo sapiens
tctttatttgtggct

SEQ ID NO: 536742 - DNA, 15 bp, Homo sapiens
ctttatttgtggctt

SEQ ID NO: 536743 - DNA, 15 bp, Homo sapiens
tttatttgtggctta

SEQ ID NO: 536744 - DNA, 15 bp, Homo sapiens
ttatttgtggcttat

SEQ ID NO: 536745 - DNA, 15 bp, Homo sapiens
tatttgtggcttata

SEQ ID NO: 536746 - DNA, 15 bp, Homo sapiens
atttgtggcttataa

SEQ ID NO: 536747 - DNA, 15 bp, Homo sapiens
tttgtggcttataat

SEQ ID NO: 536748 - DNA, 15 bp, Homo sapiens
ttgtggcttataatc

SEQ ID NO: 536749 - DNA, 15 bp, Homo sapiens
tgtggcttataatca

SEQ ID NO: 536750 - DNA, 15 bp, Homo sapiens
gtggcttataatcat

SEQ ID NO: 536751 - DNA, 15 bp, Homo sapiens
tggcttataatcata

SEQ ID NO: 536752 - DNA, 15 bp, Homo sapiens
ggcttataatcataa

SEQ ID NO: 536753 - DNA, 15 bp, Homo sapiens
gcttataatcataag

SEQ ID NO: 536754 - DNA, 15 bp, Homo sapiens
cttataatcataagg

SEQ ID NO: 536755 - DNA, 15 bp, Homo sapiens
ttataatcataagga

SEQ ID NO: 536756 - DNA, 15 bp, Homo sapiens
tataatcataaggat

SEQ ID NO: 536757 - DNA, 15 bp, Homo sapiens
ataatcataaggatg

SEQ ID NO: 536758 - DNA, 15 bp, Homo sapiens
taatcataaggatgg

SEQ ID NO: 536759 - DNA, 15 bp, Homo sapiens
aatcataaggatggt

SEQ ID NO: 536760 - DNA, 15 bp, Homo sapiens
atcataaggatggtt

SEQ ID NO: 536761 - DNA, 15 bp, Homo sapiens
tcataaggatggtta

SEQ ID NO: 536762 - DNA, 15 bp, Homo sapiens
cataaggatggttag

SEQ ID NO: 536763 - DNA, 15 bp, Homo sapiens
ataaggatggttaga

SEQ ID NO: 536764 - DNA, 15 bp, Homo sapiens
taaggatggttagac

SEQ ID NO: 536765 - DNA, 15 bp, Homo sapiens
aaggatggttagaca

SEQ ID NO: 536766 - DNA, 15 bp, Homo sapiens
aggatggttagacac

SEQ ID NO: 536767 - DNA, 15 bp, Homo sapiens
ggatggttagacaca

SEQ ID NO: 536768 - DNA, 15 bp, Homo sapiens
gatggttagacacat

SEQ ID NO: 536769 - DNA, 15 bp, Homo sapiens
atggttagacacatt

SEQ ID NO: 536770 - DNA, 15 bp, Homo sapiens
tggttagacacattt

SEQ ID NO: 536771 - DNA, 15 bp, Homo sapiens
ggttagacacatttt

SEQ ID NO: 536772 - DNA, 15 bp, Homo sapiens
gttagacacattttc

SEQ ID NO: 536773 - DNA, 15 bp, Homo sapiens
ttagacacattttct

SEQ ID NO: 536774 - DNA, 15 bp, Homo sapiens
tagacacattttctt

SEQ ID NO: 536775 - DNA, 15 bp, Homo sapiens
agacacattttctta

SEQ ID NO: 536776 - DNA, 15 bp, Homo sapiens
gacacattttcttaa

SEQ ID NO: 536777 - DNA, 15 bp, Homo sapiens
acacattttcttaaa

SEQ ID NO: 536778 - DNA, 15 bp, Homo sapiens
cacattttcttaaag

SEQ ID NO: 536779 - DNA, 15 bp, Homo sapiens
acattttcttaaagg

SEQ ID NO: 536780 - DNA, 15 bp, Homo sapiens
cattttcttaaaggt

SEQ ID NO: 536781 - DNA, 15 bp, Homo sapiens
attttcttaaaggta

SEQ ID NO: 536782 - DNA, 15 bp, Homo sapiens
ttttcttaaaggtaa

SEQ ID NO: 536783 - DNA, 15 bp, Homo sapiens
tttcttaaaggtaac

SEQ ID NO: 536784 - DNA, 15 bp, Homo sapiens
ttcttaaaggtaaca

SEQ ID NO: 536785 - DNA, 15 bp, Homo sapiens
tcttaaaggtaacaa

SEQ ID NO: 536786 - DNA, 15 bp, Homo sapiens
cttaaaggtaacaac

SEQ ID NO: 536787 - DNA, 15 bp, Homo sapiens
ttaaaggtaacaacc

SEQ ID NO: 536788 - DNA, 15 bp, Homo sapiens
taaaggtaacaacca

SEQ ID NO: 536789 - DNA, 15 bp, Homo sapiens
aaaggtaacaaccag

SEQ ID NO: 536790 - DNA, 15 bp, Homo sapiens
aaggtaacaaccagt

SEQ ID NO: 536791 - DNA, 15 bp, Homo sapiens
aggtaacaaccagtt

SEQ ID NO: 536792 - DNA, 15 bp, Homo sapiens
ggtaacaaccagttt

SEQ ID NO: 536793 - DNA, 15 bp, Homo sapiens
gtaacaaccagttta

SEQ ID NO: 536794 - DNA, 15 bp, Homo sapiens
taacaaccagtttat

SEQ ID NO: 536795 - DNA, 15 bp, Homo sapiens
aacaaccagtttata

SEQ ID NO: 536796 - DNA, 15 bp, Homo sapiens
acaaccagtttatat

SEQ ID NO: 536797 - DNA, 15 bp, Homo sapiens
caaccagtttatatt

SEQ ID NO: 536798 - DNA, 15 bp, Homo sapiens
aaccagtttatattc

SEQ ID NO: 536799 - DNA, 15 bp, Homo sapiens
accagtttatattct

SEQ ID NO: 536800 - DNA, 15 bp, Homo sapiens
ccagtttatattctc

SEQ ID NO: 536801 - DNA, 15 bp, Homo sapiens
cagtttatattctcc

SEQ ID NO: 536802 - DNA, 15 bp, Homo sapiens
agtttatattctcca

SEQ ID NO: 536803 - DNA, 15 bp, Homo sapiens
gtttatattctccat

SEQ ID NO: 536804 - DNA, 15 bp, Homo sapiens
tttatattctccatt

SEQ ID NO: 536805 - DNA, 15 bp, Homo sapiens
ttatattctccattg

SEQ ID NO: 536806 - DNA, 15 bp, Homo sapiens
tatattctccattgc

SEQ ID NO: 536807 - DNA, 15 bp, Homo sapiens
atattctccattgcc

SEQ ID NO: 536808 - DNA, 15 bp, Homo sapiens
tattctccattgccc

SEQ ID NO: 536809 - DNA, 15 bp, Homo sapiens
attctccattgcccc

SEQ ID NO: 536810 - DNA, 15 bp, Homo sapiens
ttctccattgcccct

SEQ ID NO: 536811 - DNA, 15 bp, Homo sapiens
tctccattgcccctt

SEQ ID NO: 536812 - DNA, 15 bp, Homo sapiens
ctccattgccccttc

SEQ ID NO: 536813 - DNA, 15 bp, Homo sapiens
tccattgccccttca

SEQ ID NO: 536814 - DNA, 15 bp, Homo sapiens
ccattgccccttcac

SEQ ID NO: 536815 - DNA, 15 bp, Homo sapiens
cattgccccttcacc

SEQ ID NO: 536816 - DNA, 15 bp, Homo sapiens
attgccccttcaccc

SEQ ID NO: 536817 - DNA, 15 bp, Homo sapiens
ttgccccttcaccct

SEQ ID NO: 536818 - DNA, 15 bp, Homo sapiens
tgccccttcaccctt

SEQ ID NO: 536819 - DNA, 15 bp, Homo sapiens
gccccttcacccttg

SEQ ID NO: 536820 - DNA, 15 bp, Homo sapiens
ccccttcacccttgg

SEQ ID NO: 536821 - DNA, 15 bp, Homo sapiens
cccttcacccttggt

SEQ ID NO: 536822 - DNA, 15 bp, Homo sapiens
ccttcacccttggtg

SEQ ID NO: 536823 - DNA, 15 bp, Homo sapiens
cttcacccttggtga

SEQ ID NO: 536824 - DNA, 15 bp, Homo sapiens
ttcacccttggtgat

SEQ ID NO: 536825 - DNA, 15 bp, Homo sapiens
tcacccttggtgata

SEQ ID NO: 536826 - DNA, 15 bp, Homo sapiens
cacccttggtgatat

SEQ ID NO: 536827 - DNA, 15 bp, Homo sapiens
acccttggtgatata

SEQ ID NO: 536828 - DNA, 15 bp, Homo sapiens
cccttggtgatataa

SEQ ID NO: 536829 - DNA, 15 bp, Homo sapiens
ccttggtgatataat

SEQ ID NO: 536830 - DNA, 15 bp, Homo sapiens
cttggtgatataatt

SEQ ID NO: 536831 - DNA, 15 bp, Homo sapiens
ttggtgatataattt

SEQ ID NO: 536832 - DNA, 15 bp, Homo sapiens
tggtgatataattta

SEQ ID NO: 536833 - DNA, 15 bp, Homo sapiens
ggtgatataatttac

SEQ ID NO: 536834 - DNA, 15 bp, Homo sapiens
gtgatataatttact

SEQ ID NO: 536835 - DNA, 15 bp, Homo sapiens
tgatataatttactg

SEQ ID NO: 536836 - DNA, 15 bp, Homo sapiens
gatataatttactgt

SEQ ID NO: 536837 - DNA, 15 bp, Homo sapiens
atataatttactgta

SEQ ID NO: 536838 - DNA, 15 bp, Homo sapiens
tataatttactgtaa

SEQ ID NO: 536839 - DNA, 15 bp, Homo sapiens
ataatttactgtaag

SEQ ID NO: 536840 - DNA, 15 bp, Homo sapiens
taatttactgtaagg

SEQ ID NO: 536841 - DNA, 15 bp, Homo sapiens
aatttactgtaagga

SEQ ID NO: 536842 - DNA, 15 bp, Homo sapiens
atttactgtaaggat

SEQ ID NO: 536843 - DNA, 15 bp, Homo sapiens
tttactgtaaggata

SEQ ID NO: 536844 - DNA, 15 bp, Homo sapiens
ttactgtaaggatat

SEQ ID NO: 536845 - DNA, 15 bp, Homo sapiens
tactgtaaggatatt

SEQ ID NO: 536846 - DNA, 15 bp, Homo sapiens
actgtaaggatattt

SEQ ID NO: 536847 - DNA, 15 bp, Homo sapiens
ctgtaaggatatttt

SEQ ID NO: 536848 - DNA, 15 bp, Homo sapiens
tgtaaggatattttt

SEQ ID NO: 536849 - DNA, 15 bp, Homo sapiens
gtaaggatatttttg

SEQ ID NO: 536850 - DNA, 15 bp, Homo sapiens
taaggatatttttgg

SEQ ID NO: 536851 - DNA, 15 bp, Homo sapiens
aaggatatttttgga

SEQ ID NO: 536852 - DNA, 15 bp, Homo sapiens
aggatatttttggaa

SEQ ID NO: 536853 - DNA, 15 bp, Homo sapiens
ggatatttttggaag

SEQ ID NO: 536854 - DNA, 15 bp, Homo sapiens
gatatttttggaagg

SEQ ID NO: 536855 - DNA, 15 bp, Homo sapiens
atatttttggaaggc

SEQ ID NO: 536856 - DNA, 15 bp, Homo sapiens
tatttttggaaggct

SEQ ID NO: 536857 - DNA, 15 bp, Homo sapiens
atttttggaaggcta

SEQ ID NO: 536858 - DNA, 15 bp, Homo sapiens
tttttggaaggctag

SEQ ID NO: 536859 - DNA, 15 bp, Homo sapiens
ttttggaaggctagg

SEQ ID NO: 536860 - DNA, 15 bp, Homo sapiens
tttggaaggctaggt

SEQ ID NO: 536861 - DNA, 15 bp, Homo sapiens
ttggaaggctaggtc

SEQ ID NO: 536862 - DNA, 15 bp, Homo sapiens
tggaaggctaggtct

SEQ ID NO: 536863 - DNA, 15 bp, Homo sapiens
ggaaggctaggtctt

SEQ ID NO: 536864 - DNA, 15 bp, Homo sapiens
gaaggctaggtcttc

SEQ ID NO: 536865 - DNA, 15 bp, Homo sapiens
aaggctaggtcttca

SEQ ID NO: 536866 - DNA, 15 bp, Homo sapiens
aggctaggtcttcag

SEQ ID NO: 536867 - DNA, 15 bp, Homo sapiens
ggctaggtcttcagc

SEQ ID NO: 536868 - DNA, 15 bp, Homo sapiens
gctaggtcttcagcc

SEQ ID NO: 536869 - DNA, 15 bp, Homo sapiens
ctaggtcttcagcca

SEQ ID NO: 536870 - DNA, 15 bp, Homo sapiens
taggtcttcagccaa

SEQ ID NO: 536871 - DNA, 15 bp, Homo sapiens
aggtcttcagccaag

SEQ ID NO: 536872 - DNA, 15 bp, Homo sapiens
ggtcttcagccaagg

SEQ ID NO: 536873 - DNA, 15 bp, Homo sapiens
gtcttcagccaagga

SEQ ID NO: 536874 - DNA, 15 bp, Homo sapiens
tcttcagccaaggat

SEQ ID NO: 536875 - DNA, 15 bp, Homo sapiens
cttcagccaaggata

SEQ ID NO: 536876 - DNA, 15 bp, Homo sapiens
ttcagccaaggatat

SEQ ID NO: 536877 - DNA, 15 bp, Homo sapiens
tcagccaaggatatt

SEQ ID NO: 536878 - DNA, 15 bp, Homo sapiens
cagccaaggatattt

SEQ ID NO: 536879 - DNA, 15 bp, Homo sapiens
agccaaggatatttc

SEQ ID NO: 536880 - DNA, 15 bp, Homo sapiens
gccaaggatatttct

SEQ ID NO: 536881 - DNA, 15 bp, Homo sapiens
ccaaggatatttctt

SEQ ID NO: 536882 - DNA, 15 bp, Homo sapiens
caaggatatttcttc

SEQ ID NO: 536883 - DNA, 15 bp, Homo sapiens
aaggatatttcttct

SEQ ID NO: 536884 - DNA, 15 bp, Homo sapiens
aggatatttcttctt

SEQ ID NO: 536885 - DNA, 15 bp, Homo sapiens
ggatatttcttcttc

SEQ ID NO: 536886 - DNA, 15 bp, Homo sapiens
gatatttcttcttct

SEQ ID NO: 536887 - DNA, 15 bp, Homo sapiens
atatttcttcttctg

SEQ ID NO: 536888 - DNA, 15 bp, Homo sapiens
tatttcttcttctga

SEQ ID NO: 536889 - DNA, 15 bp, Homo sapiens
atttcttcttctgat

SEQ ID NO: 536890 - DNA, 15 bp, Homo sapiens
tttcttcttctgatt

SEQ ID NO: 536891 - DNA, 15 bp, Homo sapiens
ttcttcttctgattc

SEQ ID NO: 536892 - DNA, 15 bp, Homo sapiens
tcttcttctgattct

SEQ ID NO: 536893 - DNA, 15 bp, Homo sapiens
cttcttctgattctc

SEQ ID NO: 536894 - DNA, 15 bp, Homo sapiens
ttcttctgattctcc

SEQ ID NO: 536895 - DNA, 15 bp, Homo sapiens
tcttctgattctccc

SEQ ID NO: 536896 - DNA, 15 bp, Homo sapiens
cttctgattctccct

SEQ ID NO: 536897 - DNA, 15 bp, Homo sapiens
ttctgattctccctt

SEQ ID NO: 536898 - DNA, 15 bp, Homo sapiens
tctgattctcccttt

SEQ ID NO: 536899 - DNA, 15 bp, Homo sapiens
ctgattctccctttc

SEQ ID NO: 536900 - DNA, 15 bp, Homo sapiens
tgattctccctttct

SEQ ID NO: 536901 - DNA, 15 bp, Homo sapiens
gattctccctttctc

SEQ ID NO: 536902 - DNA, 15 bp, Homo sapiens
attctccctttctca

SEQ ID NO: 536903 - DNA, 15 bp, Homo sapiens
ttctccctttctcag

SEQ ID NO: 536904 - DNA, 15 bp, Homo sapiens
tctccctttctcagc

SEQ ID NO: 536905 - DNA, 15 bp, Homo sapiens
ctccctttctcagct

SEQ ID NO: 536906 - DNA, 15 bp, Homo sapiens
tccctttctcagctt

SEQ ID NO: 536907 - DNA, 15 bp, Homo sapiens
ccctttctcagcttt

SEQ ID NO: 536908 - DNA, 15 bp, Homo sapiens
cctttctcagcttta

SEQ ID NO: 536909 - DNA, 15 bp, Homo sapiens
ctttctcagctttag

SEQ ID NO: 536910 - DNA, 15 bp, Homo sapiens
tttctcagctttagt

SEQ ID NO: 536911 - DNA, 15 bp, Homo sapiens
ttctcagctttagtt

SEQ ID NO: 536912 - DNA, 15 bp, Homo sapiens
tctcagctttagttc

SEQ ID NO: 536913 - DNA, 15 bp, Homo sapiens
ctcagctttagttcc

SEQ ID NO: 536914 - DNA, 15 bp, Homo sapiens
tcagctttagttcct

SEQ ID NO: 536915 - DNA, 15 bp, Homo sapiens
cagctttagttcctc

SEQ ID NO: 536916 - DNA, 15 bp, Homo sapiens
agctttagttcctct

SEQ ID NO: 536917 - DNA, 15 bp, Homo sapiens
gctttagttcctcta

SEQ ID NO: 536918 - DNA, 15 bp, Homo sapiens
ctttagttcctctat

SEQ ID NO: 536919 - DNA, 15 bp, Homo sapiens
tttagttcctctatt

SEQ ID NO: 536920 - DNA, 15 bp, Homo sapiens
ttagttcctctattt

SEQ ID NO: 536921 - DNA, 15 bp, Homo sapiens
tagttcctctattta

SEQ ID NO: 536922 - DNA, 15 bp, Homo sapiens
agttcctctatttat

SEQ ID NO: 536923 - DNA, 15 bp, Homo sapiens
gttcctctatttata

SEQ ID NO: 536924 - DNA, 15 bp, Homo sapiens
ttcctctatttatat

SEQ ID NO: 536925 - DNA, 15 bp, Homo sapiens
tcctctatttatata

SEQ ID NO: 536926 - DNA, 15 bp, Homo sapiens
cctctatttatatat

SEQ ID NO: 536927 - DNA, 15 bp, Homo sapiens
ctctatttatatatt

SEQ ID NO: 536928 - DNA, 15 bp, Homo sapiens
tctatttatatatta

SEQ ID NO: 536929 - DNA, 15 bp, Homo sapiens
ctatttatatattaa

SEQ ID NO: 536930 - DNA, 15 bp, Homo sapiens
tatttatatattaac

SEQ ID NO: 536931 - DNA, 15 bp, Homo sapiens
atttatatattaaca

SEQ ID NO: 536932 - DNA, 15 bp, Homo sapiens
tttatatattaacat

SEQ ID NO: 536933 - DNA, 15 bp, Homo sapiens
ttatatattaacatg

SEQ ID NO: 536934 - DNA, 15 bp, Homo sapiens
tatatattaacatgg

SEQ ID NO: 536935 - DNA, 15 bp, Homo sapiens
atatattaacatggg

SEQ ID NO: 536936 - DNA, 15 bp, Homo sapiens
tatattaacatgggg

SEQ ID NO: 536937 - DNA, 15 bp, Homo sapiens
atattaacatggggc

SEQ ID NO: 536938 - DNA, 15 bp, Homo sapiens
tattaacatggggcc

SEQ ID NO: 536939 - DNA, 15 bp, Homo sapiens
attaacatggggcca

SEQ ID NO: 536940 - DNA, 15 bp, Homo sapiens
ttaacatggggccag

SEQ ID NO: 536941 - DNA, 15 bp, Homo sapiens
taacatggggccagg

SEQ ID NO: 536942 - DNA, 15 bp, Homo sapiens
aacatggggccaggc

SEQ ID NO: 536943 - DNA, 15 bp, Homo sapiens
acatggggccaggca

SEQ ID NO: 536944 - DNA, 15 bp, Homo sapiens
catggggccaggcac

SEQ ID NO: 536945 - DNA, 15 bp, Homo sapiens
atggggccaggcacg

SEQ ID NO: 536946 - DNA, 15 bp, Homo sapiens
tggggccaggcacgg

SEQ ID NO: 536947 - DNA, 15 bp, Homo sapiens
ggggccaggcacggt

SEQ ID NO: 536948 - DNA, 15 bp, Homo sapiens
gggccaggcacggtg

SEQ ID NO: 536949 - DNA, 15 bp, Homo sapiens
ggccaggcacggtgg

SEQ ID NO: 536950 - DNA, 15 bp, Homo sapiens
gccaggcacggtggc

SEQ ID NO: 536951 - DNA, 15 bp, Homo sapiens
ccaggcacggtggct

SEQ ID NO: 536952 - DNA, 15 bp, Homo sapiens
caggcacggtggctc

SEQ ID NO: 536953 - DNA, 15 bp, Homo sapiens
aggcacggtggctca

SEQ ID NO: 536954 - DNA, 15 bp, Homo sapiens
ggcacggtggctcac

SEQ ID NO: 536955 - DNA, 15 bp, Homo sapiens
gcacggtggctcaca

SEQ ID NO: 536956 - DNA, 15 bp, Homo sapiens
cacggtggctcacac

SEQ ID NO: 536957 - DNA, 15 bp, Homo sapiens
acggtggctcacacc

SEQ ID NO: 536958 - DNA, 15 bp, Homo sapiens
cggtggctcacacct

SEQ ID NO: 536959 - DNA, 15 bp, Homo sapiens
ggtggctcacacctg

SEQ ID NO: 536960 - DNA, 15 bp, Homo sapiens
gtggctcacacctgt

SEQ ID NO: 536961 - DNA, 15 bp, Homo sapiens
tggctcacacctgta

SEQ ID NO: 536962 - DNA, 15 bp, Homo sapiens
ggctcacacctgtaa

SEQ ID NO: 536963 - DNA, 15 bp, Homo sapiens
gctcacacctgtaat

SEQ ID NO: 536964 - DNA, 15 bp, Homo sapiens
ctcacacctgtaatc

SEQ ID NO: 536965 - DNA, 15 bp, Homo sapiens
tcacacctgtaatcc

SEQ ID NO: 536966 - DNA, 15 bp, Homo sapiens
cacacctgtaatccc

SEQ ID NO: 536967 - DNA, 15 bp, Homo sapiens
acacctgtaatccca

SEQ ID NO: 536968 - DNA, 15 bp, Homo sapiens
cacctgtaatcccag

SEQ ID NO: 536969 - DNA, 15 bp, Homo sapiens
acctgtaatcccagc

SEQ ID NO: 536970 - DNA, 15 bp, Homo sapiens
cctgtaatcccagca

SEQ ID NO: 536971 - DNA, 15 bp, Homo sapiens
ctgtaatcccagcat

SEQ ID NO: 536972 - DNA, 15 bp, Homo sapiens
tgtaatcccagcatt

SEQ ID NO: 536973 - DNA, 15 bp, Homo sapiens
gtaatcccagcattt

SEQ ID NO: 536974 - DNA, 15 bp, Homo sapiens
taatcccagcatttt

SEQ ID NO: 536975 - DNA, 15 bp, Homo sapiens
aatcccagcattttg

SEQ ID NO: 536976 - DNA, 15 bp, Homo sapiens
atcccagcattttgg

SEQ ID NO: 536977 - DNA, 15 bp, Homo sapiens
tcccagcattttggg

SEQ ID NO: 536978 - DNA, 15 bp, Homo sapiens
cccagcattttggga

SEQ ID NO: 536979 - DNA, 15 bp, Homo sapiens
ccagcattttgggag

SEQ ID NO: 536980 - DNA, 15 bp, Homo sapiens
cagcattttgggagg

SEQ ID NO: 536981 - DNA, 15 bp, Homo sapiens
agcattttgggaggc

SEQ ID NO: 536982 - DNA, 15 bp, Homo sapiens
gcattttgggaggcc

SEQ ID NO: 536983 - DNA, 15 bp, Homo sapiens
cattttgggaggcca

SEQ ID NO: 536984 - DNA, 15 bp, Homo sapiens
attttgggaggccaa

SEQ ID NO: 536985 - DNA, 15 bp, Homo sapiens
ttttgggaggccaag

SEQ ID NO: 536986 - DNA, 15 bp, Homo sapiens
tttgggaggccaagg

SEQ ID NO: 536987 - DNA, 15 bp, Homo sapiens
ttgggaggccaaggc

SEQ ID NO: 536988 - DNA, 15 bp, Homo sapiens
tgggaggccaaggcg

SEQ ID NO: 536989 - DNA, 15 bp, Homo sapiens
gggaggccaaggcgg

SEQ ID NO: 536990 - DNA, 15 bp, Homo sapiens
ggaggccaaggcggg

SEQ ID NO: 536991 - DNA, 15 bp, Homo sapiens
gaggccaaggcgggt

SEQ ID NO: 536992 - DNA, 15 bp, Homo sapiens
aggccaaggcgggtg

SEQ ID NO: 536993 - DNA, 15 bp, Homo sapiens
ggccaaggcgggtgg

SEQ ID NO: 536994 - DNA, 15 bp, Homo sapiens
gccaaggcgggtgga

SEQ ID NO: 536995 - DNA, 15 bp, Homo sapiens
ccaaggcgggtggat

SEQ ID NO: 536996 - DNA, 15 bp, Homo sapiens
caaggcgggtggatc

SEQ ID NO: 536997 - DNA, 15 bp, Homo sapiens
aaggcgggtggatca

SEQ ID NO: 536998 - DNA, 15 bp, Homo sapiens
aggcgggtggatcac

SEQ ID NO: 536999 - DNA, 15 bp, Homo sapiens
ggcgggtggatcacc

SEQ ID NO: 537000 - DNA, 15 bp, Homo sapiens
gcgggtggatcacct

SEQ ID NO: 537001 - DNA, 15 bp, Homo sapiens
cgggtggatcacctg

SEQ ID NO: 537002 - DNA, 15 bp, Homo sapiens
gggtggatcacctga

SEQ ID NO: 537003 - DNA, 15 bp, Homo sapiens
ggtggatcacctgag

SEQ ID NO: 537004 - DNA, 15 bp, Homo sapiens
gtggatcacctgagg

SEQ ID NO: 537005 - DNA, 15 bp, Homo sapiens
tggatcacctgaggt

SEQ ID NO: 537006 - DNA, 15 bp, Homo sapiens
ggatcacctgaggtc

SEQ ID NO: 537007 - DNA, 15 bp, Homo sapiens
gatcacctgaggtca

SEQ ID NO: 537008 - DNA, 15 bp, Homo sapiens
atcacctgaggtcag

SEQ ID NO: 537009 - DNA, 15 bp, Homo sapiens
tcacctgaggtcagg

SEQ ID NO: 537010 - DNA, 15 bp, Homo sapiens
cacctgaggtcagga

SEQ ID NO: 537011 - DNA, 15 bp, Homo sapiens
acctgaggtcaggag

SEQ ID NO: 537012 - DNA, 15 bp, Homo sapiens
cctgaggtcaggagt

SEQ ID NO: 537013 - DNA, 15 bp, Homo sapiens
ctgaggtcaggagtt

SEQ ID NO: 537014 - DNA, 15 bp, Homo sapiens
tgaggtcaggagttc

SEQ ID NO: 537015 - DNA, 15 bp, Homo sapiens
gaggtcaggagttca

SEQ ID NO: 537016 - DNA, 15 bp, Homo sapiens
aggtcaggagttcaa

SEQ ID NO: 537017 - DNA, 15 bp, Homo sapiens
ggtcaggagttcaag

SEQ ID NO: 537018 - DNA, 15 bp, Homo sapiens
gtcaggagttcaaga

SEQ ID NO: 537019 - DNA, 15 bp, Homo sapiens
tcaggagttcaagac

SEQ ID NO: 537020 - DNA, 15 bp, Homo sapiens
caggagttcaagacc

SEQ ID NO: 537021 - DNA, 15 bp, Homo sapiens
aggagttcaagacca

SEQ ID NO: 537022 - DNA, 15 bp, Homo sapiens
ggagttcaagaccag

SEQ ID NO: 537023 - DNA, 15 bp, Homo sapiens
gagttcaagaccagc

SEQ ID NO: 537024 - DNA, 15 bp, Homo sapiens
agttcaagaccagcc

SEQ ID NO: 537025 - DNA, 15 bp, Homo sapiens
gttcaagaccagcct

SEQ ID NO: 537026 - DNA, 15 bp, Homo sapiens
ttcaagaccagcctg

SEQ ID NO: 537027 - DNA, 15 bp, Homo sapiens
tcaagaccagcctgg

SEQ ID NO: 537028 - DNA, 15 bp, Homo sapiens
caagaccagcctggc

SEQ ID NO: 537029 - DNA, 15 bp, Homo sapiens
aagaccagcctggcc

SEQ ID NO: 537030 - DNA, 15 bp, Homo sapiens
agaccagcctggcca

SEQ ID NO: 537031 - DNA, 15 bp, Homo sapiens
gaccagcctggccaa

SEQ ID NO: 537032 - DNA, 15 bp, Homo sapiens
accagcctggccaat

SEQ ID NO: 537033 - DNA, 15 bp, Homo sapiens
ccagcctggccaata

SEQ ID NO: 537034 - DNA, 15 bp, Homo sapiens
cagcctggccaatat

SEQ ID NO: 537035 - DNA, 15 bp, Homo sapiens
agcctggccaatatg

SEQ ID NO: 537036 - DNA, 15 bp, Homo sapiens
gcctggccaatatgg

SEQ ID NO: 537037 - DNA, 15 bp, Homo sapiens
cctggccaatatggt

SEQ ID NO: 537038 - DNA, 15 bp, Homo sapiens
ctggccaatatggtg

SEQ ID NO: 537039 - DNA, 15 bp, Homo sapiens
tggccaatatggtga

SEQ ID NO: 537040 - DNA, 15 bp, Homo sapiens
ggccaatatggtgaa

SEQ ID NO: 537041 - DNA, 15 bp, Homo sapiens
gccaatatggtgaaa

SEQ ID NO: 537042 - DNA, 15 bp, Homo sapiens
ccaatatggtgaaac

SEQ ID NO: 537043 - DNA, 15 bp, Homo sapiens
caatatggtgaaacc

SEQ ID NO: 537044 - DNA, 15 bp, Homo sapiens
aatatggtgaaaccc

SEQ ID NO: 537045 - DNA, 15 bp, Homo sapiens
atatggtgaaaccct

SEQ ID NO: 537046 - DNA, 15 bp, Homo sapiens
tatggtgaaaccctg

SEQ ID NO: 537047 - DNA, 15 bp, Homo sapiens
atggtgaaaccctgt

SEQ ID NO: 537048 - DNA, 15 bp, Homo sapiens
tggtgaaaccctgtc

SEQ ID NO: 537049 - DNA, 15 bp, Homo sapiens
ggtgaaaccctgtct

SEQ ID NO: 537050 - DNA, 15 bp, Homo sapiens
gtgaaaccctgtctt

SEQ ID NO: 537051 - DNA, 15 bp, Homo sapiens
tgaaaccctgtcttt

SEQ ID NO: 537052 - DNA, 15 bp, Homo sapiens
gaaaccctgtcttta

SEQ ID NO: 537053 - DNA, 15 bp, Homo sapiens
aaaccctgtctttac

SEQ ID NO: 537054 - DNA, 15 bp, Homo sapiens
aaccctgtctttact

SEQ ID NO: 537055 - DNA, 15 bp, Homo sapiens
accctgtctttacta

SEQ ID NO: 537056 - DNA, 15 bp, Homo sapiens
ccctgtctttactaa

SEQ ID NO: 537057 - DNA, 15 bp, Homo sapiens
cctgtctttactaaa

SEQ ID NO: 537058 - DNA, 15 bp, Homo sapiens
ctgtctttactaaaa

SEQ ID NO: 537059 - DNA, 15 bp, Homo sapiens
tgtctttactaaaag

SEQ ID NO: 537060 - DNA, 15 bp, Homo sapiens
gtctttactaaaagt

SEQ ID NO: 537061 - DNA, 15 bp, Homo sapiens
tctttactaaaagta

SEQ ID NO: 537062 - DNA, 15 bp, Homo sapiens
ctttactaaaagtac

SEQ ID NO: 537063 - DNA, 15 bp, Homo sapiens
tttactaaaagtaca

SEQ ID NO: 537064 - DNA, 15 bp, Homo sapiens
ttactaaaagtacaa

SEQ ID NO: 537065 - DNA, 15 bp, Homo sapiens
tactaaaagtacaaa

SEQ ID NO: 537066 - DNA, 15 bp, Homo sapiens
actaaaagtacaaaa

SEQ ID NO: 537067 - DNA, 15 bp, Homo sapiens
ctaaaagtacaaaaa

SEQ ID NO: 537068 - DNA, 15 bp, Homo sapiens
taaaagtacaaaaat

SEQ ID NO: 537069 - DNA, 15 bp, Homo sapiens
aaaagtacaaaaatt

SEQ ID NO: 537070 - DNA, 15 bp, Homo sapiens
aaagtacaaaaatta

SEQ ID NO: 537071 - DNA, 15 bp, Homo sapiens
aagtacaaaaattag

SEQ ID NO: 537072 - DNA, 15 bp, Homo sapiens
agtacaaaaattagc

SEQ ID NO: 537073 - DNA, 15 bp, Homo sapiens
gtacaaaaattagct

SEQ ID NO: 537074 - DNA, 15 bp, Homo sapiens
tacaaaaattagctg

SEQ ID NO: 537075 - DNA, 15 bp, Homo sapiens
acaaaaattagctgg

SEQ ID NO: 537076 - DNA, 15 bp, Homo sapiens
caaaaattagctggt

SEQ ID NO: 537077 - DNA, 15 bp, Homo sapiens
aaaaattagctggtc

SEQ ID NO: 537078 - DNA, 15 bp, Homo sapiens
aaaattagctggtca

SEQ ID NO: 537079 - DNA, 15 bp, Homo sapiens
aaattagctggtcat

SEQ ID NO: 537080 - DNA, 15 bp, Homo sapiens
aattagctggtcatg

SEQ ID NO: 537081 - DNA, 15 bp, Homo sapiens
attagctggtcatgc

SEQ ID NO: 537082 - DNA, 15 bp, Homo sapiens
ttagctggtcatgct

SEQ ID NO: 537083 - DNA, 15 bp, Homo sapiens
tagctggtcatgctg

SEQ ID NO: 537084 - DNA, 15 bp, Homo sapiens
agctggtcatgctgg

SEQ ID NO: 537085 - DNA, 15 bp, Homo sapiens
gctggtcatgctggc

SEQ ID NO: 537086 - DNA, 15 bp, Homo sapiens
ctggtcatgctggcg

SEQ ID NO: 537087 - DNA, 15 bp, Homo sapiens
tggtcatgctggcgc

SEQ ID NO: 537088 - DNA, 15 bp, Homo sapiens
ggtcatgctggcgca

SEQ ID NO: 537089 - DNA, 15 bp, Homo sapiens
gtcatgctggcgcat

SEQ ID NO: 537090 - DNA, 15 bp, Homo sapiens
tcatgctggcgcatg

SEQ ID NO: 537091 - DNA, 15 bp, Homo sapiens
catgctggcgcatgc

SEQ ID NO: 537092 - DNA, 15 bp, Homo sapiens
atgctggcgcatgct

SEQ ID NO: 537093 - DNA, 15 bp, Homo sapiens
tgctggcgcatgctt

SEQ ID NO: 537094 - DNA, 15 bp, Homo sapiens
gctggcgcatgcttg

SEQ ID NO: 537095 - DNA, 15 bp, Homo sapiens
ctggcgcatgcttgt

SEQ ID NO: 537096 - DNA, 15 bp, Homo sapiens
tggcgcatgcttgta

SEQ ID NO: 537097 - DNA, 15 bp, Homo sapiens
ggcgcatgcttgtag

SEQ ID NO: 537098 - DNA, 15 bp, Homo sapiens
gcgcatgcttgtagt

SEQ ID NO: 537099 - DNA, 15 bp, Homo sapiens
cgcatgcttgtagtc

SEQ ID NO: 537100 - DNA, 15 bp, Homo sapiens
gcatgcttgtagtcc

SEQ ID NO: 537101 - DNA, 15 bp, Homo sapiens
catgcttgtagtccc

SEQ ID NO: 537102 - DNA, 15 bp, Homo sapiens
atgcttgtagtccca

SEQ ID NO: 537103 - DNA, 15 bp, Homo sapiens
tgcttgtagtcccag

SEQ ID NO: 537104 - DNA, 15 bp, Homo sapiens
gcttgtagtcccagc

SEQ ID NO: 537105 - DNA, 15 bp, Homo sapiens
cttgtagtcccagct

SEQ ID NO: 537106 - DNA, 15 bp, Homo sapiens
ttgtagtcccagcta

SEQ ID NO: 537107 - DNA, 15 bp, Homo sapiens
tgtagtcccagctac

SEQ ID NO: 537108 - DNA, 15 bp, Homo sapiens
gtagtcccagctact

SEQ ID NO: 537109 - DNA, 15 bp, Homo sapiens
tagtcccagctactt

SEQ ID NO: 537110 - DNA, 15 bp, Homo sapiens
agtcccagctacttg

SEQ ID NO: 537111 - DNA, 15 bp, Homo sapiens
gtcccagctacttgg

SEQ ID NO: 537112 - DNA, 15 bp, Homo sapiens
tcccagctacttggg

SEQ ID NO: 537113 - DNA, 15 bp, Homo sapiens
cccagctacttggga

SEQ ID NO: 537114 - DNA, 15 bp, Homo sapiens
ccagctacttgggag

SEQ ID NO: 537115 - DNA, 15 bp, Homo sapiens
cagctacttgggagg

SEQ ID NO: 537116 - DNA, 15 bp, Homo sapiens
agctacttgggaggc

SEQ ID NO: 537117 - DNA, 15 bp, Homo sapiens
gctacttgggaggct

SEQ ID NO: 537118 - DNA, 15 bp, Homo sapiens
ctacttgggaggctg

SEQ ID NO: 537119 - DNA, 15 bp, Homo sapiens
tacttgggaggctga

SEQ ID NO: 537120 - DNA, 15 bp, Homo sapiens
acttgggaggctgag

SEQ ID NO: 537121 - DNA, 15 bp, Homo sapiens
cttgggaggctgagg

SEQ ID NO: 537122 - DNA, 15 bp, Homo sapiens
ttgggaggctgaggc

SEQ ID NO: 537123 - DNA, 15 bp, Homo sapiens
tgggaggctgaggca

SEQ ID NO: 537124 - DNA, 15 bp, Homo sapiens
gggaggctgaggcag

SEQ ID NO: 537125 - DNA, 15 bp, Homo sapiens
ggaggctgaggcaga

SEQ ID NO: 537126 - DNA, 15 bp, Homo sapiens
gaggctgaggcagaa

SEQ ID NO: 537127 - DNA, 15 bp, Homo sapiens
aggctgaggcagaag

SEQ ID NO: 537128 - DNA, 15 bp, Homo sapiens
ggctgaggcagaaga

SEQ ID NO: 537129 - DNA, 15 bp, Homo sapiens
gctgaggcagaagaa

SEQ ID NO: 537130 - DNA, 15 bp, Homo sapiens
ctgaggcagaagaat

SEQ ID NO: 537131 - DNA, 15 bp, Homo sapiens
tgaggcagaagaatt

SEQ ID NO: 537132 - DNA, 15 bp, Homo sapiens
gaggcagaagaattg

SEQ ID NO: 537133 - DNA, 15 bp, Homo sapiens
aggcagaagaattgc

SEQ ID NO: 537134 - DNA, 15 bp, Homo sapiens
ggcagaagaattgct

SEQ ID NO: 537135 - DNA, 15 bp, Homo sapiens
gcagaagaattgctt

SEQ ID NO: 537136 - DNA, 15 bp, Homo sapiens
cagaagaattgcttg

SEQ ID NO: 537137 - DNA, 15 bp, Homo sapiens
agaagaattgcttga

SEQ ID NO: 537138 - DNA, 15 bp, Homo sapiens
gaagaattgcttgaa

SEQ ID NO: 537139 - DNA, 15 bp, Homo sapiens
aagaattgcttgaac

SEQ ID NO: 537140 - DNA, 15 bp, Homo sapiens
agaattgcttgaaca

SEQ ID NO: 537141 - DNA, 15 bp, Homo sapiens
gaattgcttgaacat

SEQ ID NO: 537142 - DNA, 15 bp, Homo sapiens
aattgcttgaacata

SEQ ID NO: 537143 - DNA, 15 bp, Homo sapiens
attgcttgaacatag

SEQ ID NO: 537144 - DNA, 15 bp, Homo sapiens
ttgcttgaacatagg

SEQ ID NO: 537145 - DNA, 15 bp, Homo sapiens
tgcttgaacatagga

SEQ ID NO: 537146 - DNA, 15 bp, Homo sapiens
gcttgaacataggag

SEQ ID NO: 537147 - DNA, 15 bp, Homo sapiens
cttgaacataggagg

SEQ ID NO: 537148 - DNA, 15 bp, Homo sapiens
ttgaacataggaggt

SEQ ID NO: 537149 - DNA, 15 bp, Homo sapiens
tgaacataggaggtg

SEQ ID NO: 537150 - DNA, 15 bp, Homo sapiens
gaacataggaggtgg

SEQ ID NO: 537151 - DNA, 15 bp, Homo sapiens
aacataggaggtgga

SEQ ID NO: 537152 - DNA, 15 bp, Homo sapiens
acataggaggtggag

SEQ ID NO: 537153 - DNA, 15 bp, Homo sapiens
cataggaggtggagg

SEQ ID NO: 537154 - DNA, 15 bp, Homo sapiens
ataggaggtggaggt

SEQ ID NO: 537155 - DNA, 15 bp, Homo sapiens
taggaggtggaggtt

SEQ ID NO: 537156 - DNA, 15 bp, Homo sapiens
aggaggtggaggttg

SEQ ID NO: 537157 - DNA, 15 bp, Homo sapiens
ggaggtggaggttgc

SEQ ID NO: 537158 - DNA, 15 bp, Homo sapiens
gaggtggaggttgca

SEQ ID NO: 537159 - DNA, 15 bp, Homo sapiens
aggtggaggttgcag

SEQ ID NO: 537160 - DNA, 15 bp, Homo sapiens
ggtggaggttgcagt

SEQ ID NO: 537161 - DNA, 15 bp, Homo sapiens
gtggaggttgcagtg

SEQ ID NO: 537162 - DNA, 15 bp, Homo sapiens
tggaggttgcagtga

SEQ ID NO: 537163 - DNA, 15 bp, Homo sapiens
ggaggttgcagtgag

SEQ ID NO: 537164 - DNA, 15 bp, Homo sapiens
gaggttgcagtgagc

SEQ ID NO: 537165 - DNA, 15 bp, Homo sapiens
aggttgcagtgagcc

SEQ ID NO: 537166 - DNA, 15 bp, Homo sapiens
ggttgcagtgagcca

SEQ ID NO: 537167 - DNA, 15 bp, Homo sapiens
gttgcagtgagccaa

SEQ ID NO: 537168 - DNA, 15 bp, Homo sapiens
ttgcagtgagccaag

SEQ ID NO: 537169 - DNA, 15 bp, Homo sapiens
tgcagtgagccaaga

SEQ ID NO: 537170 - DNA, 15 bp, Homo sapiens
gcagtgagccaagat

SEQ ID NO: 537171 - DNA, 15 bp, Homo sapiens
cagtgagccaagatc

SEQ ID NO: 537172 - DNA, 15 bp, Homo sapiens
agtgagccaagatcg

SEQ ID NO: 537173 - DNA, 15 bp, Homo sapiens
gtgagccaagatcgt

SEQ ID NO: 537174 - DNA, 15 bp, Homo sapiens
tgagccaagatcgtg

SEQ ID NO: 537175 - DNA, 15 bp, Homo sapiens
gagccaagatcgtgc

SEQ ID NO: 537176 - DNA, 15 bp, Homo sapiens
agccaagatcgtgcc

SEQ ID NO: 537177 - DNA, 15 bp, Homo sapiens
gccaagatcgtgcct

SEQ ID NO: 537178 - DNA, 15 bp, Homo sapiens
ccaagatcgtgcctc

SEQ ID NO: 537179 - DNA, 15 bp, Homo sapiens
caagatcgtgcctct

SEQ ID NO: 537180 - DNA, 15 bp, Homo sapiens
aagatcgtgcctctg

SEQ ID NO: 537181 - DNA, 15 bp, Homo sapiens
agatcgtgcctctgc

SEQ ID NO: 537182 - DNA, 15 bp, Homo sapiens
gatcgtgcctctgca
